United States Patent Application Publication US 2019/0348154 A1 - sequence listing, part 72

SEQ ID NO: 271910 - DNA, 2139 bp, Klebsiella pneumoniae
atgaccgggtttaacgtgctggcggagtcaattaataatctgtcagcggaaaaccggaaaaattcctccgggctatccggcctggtctcctccgtccagatttgcactgaaatgctgaacacgctggcgtccaaggtcataacccctgacggcgcgtcacagtatggatatgcggcattttcagttcccggcacggtcagcgcatccaatgggtcgtttggcaccgatacacgctaccgcaggactgggatgatcccagttcgcaagggggacgttgttcgcctcacggtgtacaccacatcggcaaccgcaggtcacgcagctgcgctgtacgatgcatccggagcatatgtgggtccgctggggatcatgtgcgcgtcatatgcggggtatcaggcacggcattaccagtgcgaaatttcgcaggacggctttgttgtcgcgaacacgctggaccagagcgcatcttcttctgctgatgtgactggtgcggccctgacgattgaccaccgcttccgtggccgggcagcggatgcggttattaaactgacgaaggcggatttaatcccggtccgtctggacaacggcaacattaacgccagctcaatcacacaggacgggatcgttaactattccaccgggctgtattcctgcaccggcggcaggctcctgttcagtggtctgcctgtagcctcatcgccggggcagagcagcagcctgtataatgttgtgttctttgatgctgacaaaaaactgatcgcatatcgtccggttttctccagttcgggctatgtgattattcctgaaaacgccgcgtactgggcgcagcagataatcaccgacagaacgccgaactggtctgctgtatcgattgtttattacaactatgtttacaaggacgagctacataagttgctgtcgtcagagcgcgagcgcctcggactggaatacccgaatgagtattggctgcaggatttcagcggcgatacagatattgagtggatccagaatgcaatggactgggtgcatgatgccggaggtggctggttaatactgtcatctgactatgtcaaaaagcagttcatcatctccgaagccgtaattcaccgcagtaatgtctgggttgttctcgacaatgttgagattaaattgcaggacggcgtgcatgacaatctgtttcgtgctgcaggggttattgtcaatcctgacgacccgtttggtctgtgcctggacctggaaattacggacaacgtccgtctgattggcacaggctacccgaaactaagcggcgctgacgtggcgtactatgctgatattccagcaggggcgggtccacgctactggattggcgacgaatatggctggcgcggtacggggctgatttattacggtacgcagaattttgaaatcggcggattcaaactccagaacgtaaaaaactggggaacggatttcgggtatggttctaaaaatggttatatccatgatattgacctgtggcagccgaacaaaaacggcgacggaattcatttcaccaacggcgccagctatatgcgggtacgccaaattttcggctatgcgcgcgatgactgtttagcgatggtcaacagcgatgattctctgaaatacagcactgccaatatcccgactgagggttcaattcgtcagtggatatatccaacctgtccattctggtacgggtgggctgggaatgaggctgtgggaaccagtaacgatattcacgacattacagccacgaatatcgggttaacaggtaatgagcaggtcagcaccattctgaccacgcagtttaaaatatataacgtaaccattagtggcattagtagcgttaactatatgacaccaacacgcgggtgggacgaagtaaacgcaatactgaaatcatatgccgggtttggtgatgcttcccgctataaggcaggtaatgtcagcaacatcagtattaataacatcattgagtgtgcatcaaaaaattacagtatcgatataaccctggagggccggaatatccgcgtcaatcgttatatgaaactggatacccgtgcgaaaacaaaaggtgcgctgaacatcagcagttcagcagccccgtacgtcacaacctctaatattgtggaataa

SEQ ID NO: 271911 - DNA, 660 bp, Klebsiella pneumoniae
ttgccaggctactttgtactcgtcccagaacatgttagaacgcgcaaaaaccgcatcgggatttgttactttctcatcgcgccagaacgtcagcacatcgccgatattgttgccgtcaacgcgggccacattggcgatcgtcgctatgcgctcacccagcggctgcttctcatccgagaaggtgtaatcgaaatacccaagcgcctcaaccgtcaaagagtcggcaatggcataaagagctgcgacgtcaatactggccacgtcctgcttacccacaaccacccactcatgcaggatagcgtcagcaaacgaacgactcggccgcagtgtgtaatcaaccgcgccggtagtccggtcgtagctgatggtatgccgctgcgccagcatgttgtacttctgctcgcggttgctgttgctgtcattcgagcccttgatcgtgatgcgggcaatcgtgtcctccggatacacgacgttttcgcgcacgttcaccgcgtggatcgccatcagtgtcacgacgttagcgtcattgctgttgtcgaggcgctcgatggtgaccgcatagcgccccgccccggcagccgggacaaacttgtgcgttgtgcggaaataccgggtcgtcacctggaagtcgttatcgaagaaataatcgtgctgctctga

SEQ ID NO: 271912 - DNA, 282 bp, Klebsiella pneumoniae
atgactccaggccgtggctgggatgaagttaatgcgattctgaaatcgtatgccgggtttggggatgcttcccgctataaggcaggtaatgtcagcaatatcagcattaataacatcattgagtgtgcgtcgaaaaattacagtatcgatataacgctggaggggaggaatatccgcgtcaatcgttatatgaaactggacacccgcgcgaaaacaaaaggtgcgctgaacatcagcagttcagccgccccgtatgtaacgacctctaatattgtggaataa

SEQ ID NO: 271913 - DNA, 768 bp, Klebsiella pneumoniae
atgaacacatccgtcgtgtctctgatcgagcgtgaaatttcgagtgttgacaatttactctattttgaatcttccagcgacacgacagggatggcgtcaattacggtaactttcaaacccggtaccgacatcaaactcgcccagatggatctgcaaaaccaaattaaaattgtggaatctcgcctgccgcagtcggtaagacagaatgggataaatgttgaggcagctaattccggttttttaatgatggtggggttaaaatcgccaagcggagcctatcaggaagctgacttaagcgattattttgcaaggaatgttactgatgaactccgtcgcgtacctggtgtaggtaaagtccagctttttggcggagaaaaggcactccgcatatggctggacccgatgaaattacacagctatgggctctctgttacggatgtattaagcgccatcagtcaacaaaacgtgattgtttcaccgggcagaaccggagatgaacccgcgacgagcagtcaagaggtgacctatccaataacggtaaaagggcagctctcttcggttgaagaatttcgcaatatcacgattaaatcacaggtctcagccgcccgggtgacactggcagacgttgcccgcgtggaatccgggttgcaaagttacgcatttggcatccgtgaaaatggcgtgcctgcaacggctgccgccattcagttgtctcctggcgcaaatgcgattagtactgcgtcgggggtaatgactccaacttattga

SEQ ID NO: 271914 - DNA, 351 bp, Klebsiella pneumoniae; identical to SEQ ID NO: 231803

SEQ ID NO: 271915 - DNA, 633 bp, Klebsiella pneumoniae
atgaaagaacgcggaattatttttaacgccgagatggtgctggccattctcgacggcaggaagacgcagacacggcgcccggtaaagtttccgatattggatagaaatattgggtgcgagctggctggcaatgaactggcaggggagctgtcggcagggaactatctgaacagcgcatttggcaagccaggcgaccgcatctgggtgcgcgagacgtgggcgcgctacaacatcgaccagaacagccacgacatagcgtaccgcgccacaactccagaagactggccagaagaaggctgctggcgtcccagcattcacatgcctcgctgggccagccgtattcttctggaaataaccaacgtgcgcgttgagcgtctgaacgctattagcccggaagatgcagagtcagaggggctggagcgtaccaactttacaggtttcggcgacgagcctggattacctagctatccagagccggatgtttatttcgacccgctgaagaaacagtggaaggaatatccgcctgaagcattcgcggggctatgggaatccatctacggcgaaggaagttggcaggccaatccctgggtttgggttatcgagttcaagcgcgttgaaggcggtgcggcatga

SEQ ID NO: 271916 - DNA, 735 bp, Klebsiella pneumoniae
atgggttcacgcattactgttccgggttattttggtgacaaaggtctgggtttcgatccgcttattcgccgggggctgggatatctgaatttttttggagaggctgataaaaccggtcgaaacctggccccaggtggcgcagcggcaacggttcttggctctcctgttgttcaagttaatggggtggaatttactccagcggggacgttgctggacaccggaatattacagcctctcgattttacttttttcaccattttcaactgtccgaccctttcacagattctgttgctcagcaattttaacggcccgaggcagtcaggctcaggcacaacgcagggcgtagtgctcagaacgcagccaggctcgacgaatatgacgttaaattttgctgttaacactataaatgggggcgtatcgacgcagcgcacagtcgcgctcggcgggttgctgacaaacacaaactatttgctgtgcgcgcgctttaaatcaggtcagaaaatggatttcaaaatcctgaacaaggcgctgtcagcggagaaaacgacggatatgggcgacccggccgatttgggggcaaaactgcgtatcggcggcagttaccagtctgacctgacgaacgccgggattcaccgaatgtcttcgttacacaatgtcgcgttgaccgatgatgagattacaaaagcaggttctcagtggactgcgtgggccagtgccgtcggcgttgtgctgtag

SEQ ID NO: 271917 - DNA, 942 bp, Klebsiella pneumoniae
atgaatatttcaacgacctcaattatcgcccctggcgtcgagtttgctaattatatcgggaaagggaattttctgggggcataccctgatgccctggccgcctacagcctgcgtaaaattggtacacgctatgttggccccctggtccgtattcgccgcagctcagacaaccttgaacaggatttttatgagcactacggttcagtgaatattgatgaaatcaaagcgtttgcaggcgctggcggttccgcatttgtttcagtctggtacgatcagagcggaaacggaaaccatgcatttcagcccgtggcagacaatcagcccgtcgttattcgaacgggaacggtaatcctgttcaacagcaaaaacgcgttgatgtttgacggggtaaacgactgtttacagatccctgaaatcgtcgcccggcagttcaacgatggcatcactgatttctcggtattctctgccgttatcccccgccaggtcgcgcagtcgttcactgtgttgtcgctcgccgctcgtgatagcgagacagcgaactataacgatatgattctgtttcagatgaatgcggcatattcaggtggtgacagaaaatcggtcggggcgctgttgagaaaggcgacggcgacatcattcaccgatataacggcaatcggcaacggctctcctgctaacaacgcgccagttttttgtggcgtaacacgggaagggggattgctgacgctcaatgatgcggcgacaaccgcgacaaaggcggccatgacgaccgaagcgcttaatctttcactggccaccatcggggccactcgccgcggtgttaacggcaacgtagaggcagcaaatgcaaactcaaaaattgccgagttgatcatctataaaaaatcgtatcagccgcaaatcgccgaaattatctcaagcatgactaattattacgtttga

SEQ ID NO: 271918 - DNA, 1821 bp, Klebsiella pneumoniae
atggcctatgttccacccgtagggcagaccactgaccccgatatttttatggaaaacgtgaagcgggccgatcagttgattagtgggcctgccggtaccgtgcctgaccgcggcggggagccgctggatacctggcgccagatgatggcgaaaaatgatgaagtgcggcagaacctgatcccgctgagcaaacagtatatgacgctggcggcggcacaggctgatatagcgaatatccctcccggttcaactacgtatgtacgcagccccgatgatactgctctggcgatcgaatatatgaatgtcgacggcactctggtacctaccgggcgggagatgatttcaaggggttatgtggattcaggatttgacgcggtgaacgacagattcacctcttctgacactgcggaggacgctattaatttcaaagacaagtctggccgacgcgcagctgcgttgctagaggatggcacggtgcaggctaatacgctggatgcggaaaatctattaaccagcgtcagcgatgatggctggttagtaaagatatctgaggattcaaaaggcaatgtggctgccggggtcgacgctcagggcaacacccgcatttccagattaattgctggtgagattgtgcttgaaaacccggttcaggctgtaaatgtgctggcaaaatttaccgtcagtcccaatcagtttgatggcgccactcaacattacagaatccaggccgctctggacttcctcgatcgtagaggtggtgagggcgtactggaattgggggtggacacaatatcaaatccctcaacatcgacgtgggttagaggctccgcactactaatgcatgataatttgacgttatctttaaactcagcgacgttaaaattagctgacggagttttcgataatattattcgcaataaagggatcgtttttgacccggacaaccctaacggagttgctcttgaattaaacgaaaacagaaacgttaaaattattggtagtggtaaagatgaatgctttatagaggggccggacgtgccttataccgcgccacatccgattaatgggggtgaacctgttgaatgggttggagatttcttcggctggcgaacaattggaatattactggctaactgtaaaaattatgaaatgtcaggatttacaatgcgcaaaacaacgtgctggggaatctcacaagagcgcggttgtgagggcatgcatcttcacgatatcggttttgataccaccgttaaaaatggcgatggtattgatttcagaatggggtgcagaaacggtctggtagaaaacatcagcggaaatacatcagatgataccgttgccatgacggcattactgaactggcagaccaactacccgtctggtaattatatctggccattacaggttagtggcgatgcatcacatcctctcggtgatgatattgaaaatataactgtgcagaatattaaatcatcatcactggcaaatcaggtcaggctgctgattaccaacggcgctaaaatgaacaatattaccgtttctgatattgaggacagcggcgttgtggcggtcacgcaggttattgttcagaccggggcttatggtgcgccttcgcagctgggtgatatgacaaatattacagtgaatggaatagtttccaattactcaaatctttcacttaatattgacatcccgattaaagattcgcaatttaactttatcaggcagaaaaaagcaggcggtcaggtgtataaactaaacaccgaccatccgggttatcaggtggttaacactacagtcacgaacgctaaggcggaataa

SEQ ID NO: 271919 - DNA, 711 bp, Klebsiella pneumoniae
atgtcagcactatatgaacgctcccaaaaaacgttagtcatgatttcttcggtgccgatcactgcggatgaactgaacacggcgccctggcttaaccttagttgcaccattaagcaggccagcttcaccgccggccagaaaaacgacatcgacgtgacagcgctgtgttctgatgaaacggaaaacatcaacggactaccggccccttcagaaatgtcgttatcgggtaacttctaccgcaacccggggcaggatgccctgcgtgctgcttatgataacgacggggtctatggcttcaaggttattttcccatctggaaacgggtttctcatgcgcgctgaagtgcgccagcatacctgggatgctcagcaaaacagcgtcgtggccgcgacgttctcacttcgtctgaaaggtaagccgagtaacattgatgcctccggggtcctggcgttcagcagcgatctaccggtcacagaaacagtgactgcaggtagtccgcttacgctaagtgtcgttgctgcaggtggtactgctccttatagctacgtctggaaaaaaggtagcgcaactgtcagcggccaaacgagcgccaccttcaataaagctagagctgtagcgggcgatgctggggtttattcctgtgttgtgactgactccgccacgccgccgaacgttatcacctcatctgactgcactgtcgctgtcaattaa

SEQ ID NO: 271920 - DNA, 273 bp, Klebsiella pneumoniae
atgtcgaaaatgaaatttattgaaaacgttggctcttccagtactaccgcccacctcggcacaaaaaaacttggtcacgacgtcaacgctgctgcatatgaatgtgatggcaaaatcgttatcaagctcgaaagcaacggcgtcccggttaaaggtgtcagtcacatcgaaatgaccagagaacaatatgacgaattttgtcttccgcaggcgcgtaaactgtttgttcgtggcattgagttattcggtgcaagcaccatttttggagagtaa

SEQ ID NO: 271921 - DNA, 210 bp, Klebsiella pneumoniae
atgaaaaacacagtactggttgatgcccagaacaagctcggtttctccaaagctgaaatggcccgcgcgctctctgttcattacaacacctacgataagtgggaacgcggagagcaaaagcctcaggcagccgtttacacagccgtggacatgcttctgttcatgcacgctaaaggcattcttaccgagtggatgagcagagctgaatga

SEQ ID NO: 271922 - DNA, 864 bp, Klebsiella pneumoniae
atgtcaaaaatcactatgtcggaatggctcgtacggtacgagtccattgttaacgaccgcctcaaaagcggtgctatcgcagctaaaacacacggcgattacaggcgcttgatccatttttgccggagcgtctggacggataccctgcttcaggacatcagcatccatgagattacggcagttattcatcggaaagcggcgacgtctccgtttgcggcgcgccggttgcggataaatatgtccgacctttacgtggaagctcagcgttttggtgtgctgccgttgggtcataatccagcgctgattgtccggcaccctgccaccagcgttaaaactgagcggctaacattcccggaatggctgcgcatttttagactagcgacataccggacgccagagtatttccagatcgctatgctgctcgcccttatcactggtcaaagacgtgctgatattgtggcgatgcatactgccgatatccgggatggttatctgcatatcacgcaaaataaaaccggagagcgtatcgcgctcccgctacagctgcgactggatatcgcgggatgctcattaagcgaggtgatttcaatatgcccatcagcgggtccattggtgcaatctcgcggcaagtccgttgggtcgtggtcaatcacccgatggtttcagatttgccgcgatgaagcgggcatcggtgctcgcgaagggaaatcgccaccgacatttcgggagatacgttccctgtctgagcgattgtatcgcccgcagggaatcgacacacgaacgttgctgggccacaaatatcagcgcatgactgacggctataacgatatccgggacagggagtatcggaagttagcactttaa

SEQ ID NO: 271923 - DNA, 159 bp, Klebsiella pneumoniae
atgatcatgttgcgcaggctgtgtttctgggcgctgtttgctgttctgctgctcgtgacctggcgcttggccggcatgctgatggacatggtgctgttggcggttatcgtttccgcgctggtggtgtgccggcgctggccatttaaaagaaaacactaa

SEQ ID NO: 271924 - DNA, 453 bp, Klebsiella pneumoniae
atgaaagcggtattcgagtatatcgagaaaaatcctggaaaaatgatgcgagacatcgtttctgccttccctgatagcaaacccatgtctgtgaagagcgcagttcatcgcctgtattacgaggggaaattggcgagcgtccaaatgcagagtggcttcctgtatcgcgtggcaggtaacccagaagcagatgaccagattcaatctgacgatgtttctgaggcaactcgccggttggaacaggtagcaaggaatctggagcgccaacgttatttccggcgtgcagcgactgtctggcagcaactgtgcgattcaaattgcagcgttaaaactagagaacgctatatgcggatgaaaaatcagtgtgtacgcaatgcgaaaagccggaccaatactagcggaatttccatgctggccggtaattactgcggaggtgacctgtgctccgattaa

SEQ ID NO: 271925 - DNA, 195 bp, Klebsiella pneumoniae; identical to SEQ ID NO: 111815

SEQ ID NO: 271926 - DNA, 498 bp, Klebsiella pneumoniae
ttgagtgataaaaaagcccgcagcagcgggcttttttattgcttgccattcagcacatttgttaacaatggagtatatttcatgcctgatattgcttctataaatgctggtctgtctgcagtaaagcttgcctttggtatggccaaagatcttaaagatgcgtctgctgctttcaatgatgctgaagtgcgtttaaaaattagtgatttatataatgcgcttagtgaagcgagaatcagtctcgcggaagcacaagtagaaatagtagagcttcaaactgaggtccgcagattagaaggaaagcttaaggaagctgatgaattagtcttccgtgatggtttttattatcgtgcagttcctgttgatggtaaatctaacgggcctttttgtcctaagtgctacgaggatcagaaaaaaatatcatccgtcagcgcggctactgggattcactcccactttgggaaaaaacactgtcatggctgtggaagccacttctga

SEQ ID NO: 271927 - DNA, 1032 bp, Klebsiella pneumoniae; identical to SEQ ID NO: 265256

SEQ ID NO: 271928 - DNA, 165 bp, Klebsiella pneumoniae
atgcgcggttgttttgtcgggtggcgcttcgcttacccgacctacgattcgtgcgacctgccgttaatttattcaccagccttgctgaaactgccggggctggcggcctcaaaatcgctgagacgttcccggaaggccggggcagcccgcatggatgcgggctga

SEQ ID NO: 271929 - DNA, 933 bp, Klebsiella pneumoniae
atgtcattgaagccaaaaaatttatataaataccttacatttaatgaaaatacattaaaactattgtgtacgttacaagtatattattctgatcctgccttttttaatgacccattggattgccaacctatagtacgtaatgatttaactttgcacgaactcaaagagattttcatacagataatgctaaagaaatctgaaaaacagttctcgcagagtttgaaaaacttaaggttttcaggtgaaaaaacaaatgagagagcgtttaaactcgcagagagtgaggttaaagggattattaactctttagaatatcaatctactgatccaatgattaaaaatcagaatggttatcttgagttaaattacgtatcggctattcagaaagaaatagtaaattcctttaaaaccggagtgttgtgcctgagttcaaaatttgacagccctttaatgtggtcacattacgcttcccaacatcgtggaatatgcattgagtatgatatgacggatgtcaaagatgataaggtccataaagtggtttacggaggttcaagattaatagttacaagtgaaataaatgaatggttatataacccttcaaattctagcagattaaagcaggtatgcttgttaacaaagtctgaagaatggcgctatgagtcagagtggaggatttttagtcgagttggattaggcgattcaatacctccagtaaaatcgataatatttggtttgaaatgtgatgatgtaaccatttatacagttatgaaagcgatgatgaccgaaggccgagatttgaaattttggaaaattgtaaaccgcggtgataagttttccctcaaaagagaaaggatttaccctgacgactattatgcaactttgccttgtatactttcgtcaagtcaaatagattctatgcttgatgatgaataa

SEQ ID NO: 271930 - DNA, 318 bp, Klebsiella pneumoniae
atgggttttccttctccagctactgattatgtagagacacgcctttcggcagattctttgtgcggtaccgggccgaacacccggctcatcgaaacagactcgggttatgcggttattgacgtgtcggtgaaaccccgccagcagagcaccgtcctgattgcttacgacggcctgaccgattttgcaaaaatcatggggcgtgcgttcattaccagggacggagaggcgatcgagggtgatgctctggatgatgtgcatgttctcggagtggtgaccttcaccattatcgatgttaggcaggatgagaaccctgtttga

SEQ ID NO: 271931 - DNA, 240 bp, Klebsiella pneumoniae
atgccacgtcgttacgaaatcgaaatggcctgccgggcggcaatagtcatcgagccaaatggcagacgcactatcactactaggcattttgtgcaggaactagaaaaggtgaattggcactggtccgccaagcaagccaaccagtggatagagcactatgttacgacattcctggatgtctcgacgcaagaaggcgacgatcgtacatttcagttattcaacccgaatggaggcctgtga

SEQ ID NO: 271932 - DNA, 1914 bp, Klebsiella pneumoniae
gtgacaatagaaatcagcggtcaacaaaaatataaggatttccttttagagcagcccgtagtatttaatgaaaaaatcatcttattaacaggaaaaaatggctcaggaaaaacacgttttctagaaagcattaaaaacaaatgctccgttacatacatagacacaaaccaagttaacctaacagacataatttttatcccggatattggtgttaatttaaaatcaaaggatcagtacaatgatgcaaatcatagaaaatatattgaaacctgtcttaaactatttgatcaatacaaaactcacatagatagcccggaaggtgtccaagagccagaggcattgaggaggtctacttctgatattgattatgaatcattatgtcagatatgtggccttatttcccacaagacaggaaaaagaatttcagatcttactcacgatgatataattctcaatttcgaacttccgattaaaaatgcacttggaataccaaatgtttccgaaattgtcaatacatatataaaaagacgtaacacaaaccattacaatatgtggttgaatacagatcagaaaaaatccactccatattggagtaatgatcagttcattaaaaaatacggagccgaaccctggattataattaatgaaatactttctgaagtttttgaggggaaatttgagttctctcccccagatgaaaactcacatagctacagctatcaagctaaacttgttcaaagaagcaatggcatttcagtagaagttgaaaacttgtcttctggtgagaaaatactactttggcttgcgctaacgctcttcaacactcaatataatttctccagaattgttaacactccaaaaatagttttaatcgatgagccagacgcatttttacaccctaaaatggttttaaaaatgcataacatcctagattcttttgtgaaatattttaatgcaactgtaattattacaactcactccccaacatctgtagcactagcaccaaatgaaagtatttatctggttgataataacgtagtacaaaaaattgaaaaagatagcgctatcaccgaactgttagatggagtaactcaaatatcactgaacccgaacaatcgtcgtcaagtttttgtggaaagtcaatacgatgcagatgtttatcagatattgttttcaaaactgatgcatcgttcagaaaagattgatcctaaaatatcactaacttttattagttccggcgcaaaaaccccaacacaacagctgatcgacaaagcaatgcaggtttttaaaattcaagatgcagatttattaaatgagtttgtggtgtctgttaacggtgtcggtgattgctctaaagtaattgggcaggtagaagcgttagttgagaatgataatgataccgtcagaggtatcatagattgggatttaaagaataatgctacagaatatgttaaagtctttgccgaaaactatgcatactcaattgaaaatgtaacactagatcctatttgcattcttcttttattacatatcgataaaccagaatctatgaccatggaaaaaatatgtggggaagacgtaaactggactaaatggatttgcgacgaaaaattattgcaagcatcacttgatctttttataaagcacgttttagaaagaccaaataaaaaagacagagtcttagattatgtttccggaattaaattaaattcagactcggagtatttagaaaaaaacggacatcaattggaagcattagtcaaatcaaaatataaggggctggaaagtttctgcagaaagaaaaaggaaggtgagctaaaatctgccatagtaaacaaatcaatgataacatatactgattgcaagtttattccaagtatatatattgaggttttttcccaagtacagaaatag

SEQ ID NO: 271933 - DNA, 1434 bp, Klebsiella pneumoniae
atggcgactatcgtacaaagtaatatgaagtttaaaggtgatgtgaaattaccttcagttaatgcccctctaccggatggcgctaatttattcgctgatttctccaccggtcggtatgtcataaaacatgccagcggtaacgtcatccgttctgcagccctgacagatattctgtcattctcatgtgccagcgtaagaagctacgttggctcatccggccttatcgaatacctccaggcaaatgaacctgccatagaatatcatccgttatctctggaatgtcttggattaaggactgaatattcgagcacgaaccgcctggcatggtcgcaggatttttcacagtctgccacctggtcatccggagggctgacgttaacaccgggtgacagtacggcacctgacgggaataccacggcaacccgacttgccgagaccgcaaacgggacatcgacagtaagaacgttactggctgcgacgaccagcgatgcggtggtaggatcgccttatactttcagtattttcgcgaaggcaaatacggcgggggttattcagcttgcggcacagggggccctggcagcaaccgcattcgctaactttgaccttaaaaacggcaagattggcaaagtttctccgggttccgcaaccgtcggcatgctccaggtcacaatggagccttatcgtaatggctggtaccgcctgtcaataaccattacaccggcttcggcggcatcgcctttatttactgtcgccctggtaaatgatgattccagcgcgacagcggttccgtcataccttccctccacgcctaaatcactctgggtgtggggggcgcaggctgagcgccgggatggttattcatcttatattccgactgcaggaacagaagtgatgcgcgcgagtgaggtgtgcacaacgccgtcaaccacggcctttatcacgtctgccgctgctacggtgctggtttcagtggttcatccccatagcctgcagtcgttaagtgggaaatataactctctggcctgtgctgtcgttctggacaacagcgcctcaggtgcacatatccgtttcgcataccggccgccagcgtcgggaaccgccgtggggacgcctcagggggctgcagtgggtgtaattccggattcctcaggcacagcgcaaaaccttgagattccgggtatggcggcggttcgcgatagtgagcagtcctgcatctttaattttgatggtactgcgttaacgacccggctttttgatggctataactggtattcccgttcggtgactgcttttccgccggcgctttcacgtttgtgcattggtcgctcaaacatggatgcgaacaactatttcaacggacatatcaggaaagtaatttactggcctgctgcgctgggtgatgaagaaatggaggagattatttcttatcagtaa

SEQ ID NO: 271934 - DNA, 489 bp, Klebsiella pneumoniae
atgaccgctgaagccatcctggcgctggtgaaaaagctatggctcccggcgctggtcgtcatcctgattgctgcactggcaatatctgccagtcactacaaaggcaaagcagagagcgagaccaaaagggctaatgacgcagagagcagccttaaactcgcgaaagagaccatcaccgacatgacaacccgacagcgcgacgttgctgcgctggatgacaaatacacgaaggagttagccgatgcaaaagctgaaaatgatgctctgcagcgcaagcttgataatggtggtcgggtgctcgtcaaaggcaagtgtccagtgtcagccgcaacccaaacctccggcaccgccagcatgggcgatgatgccgccgtcgagctctctgcagttgctggacgaaacgttctcggtatccggtccggaatcatcagcgaccaagcatccctgagagcgctgcaggactacatccgaacgcagtgtcttaaatag

SEQ ID NO: 271935 - DNA, 324 bp, Klebsiella pneumoniae
atgaaaatgccctacaaacaagatttcatcgctgcgctacttgcgtccagagagcagggcataggtgctatgctggcgttcatcatggcgtaccttcgtgggcgctataacggcggcaagttctggaaggtgattgtcgacgcgctgatgtgcgcgatgatcgcctggttcatacgagaccttctcaattttatcggctggagttctgacctggcctatatcggcagcgtgtttattggctacctcggaacggacactattggttcgttgtttaaaaaactagcggccaaaaaggcgggagttgatgatgcaaaccagtcctga

SEQ ID NO: 271936 - DNA, 255 bp, Klebsiella pneumoniae
atggataacccatatcttataaagataagagctaagcatggtatcgttgtaagtggaaacttccttgatgctgacatcccactagtttacgttgaggggactgatgacgttacagtcaagcgtaacgtaaccttttcatcacataccccatatacctttgttgattgtcaggaagtttttgcaaaattaaatcgacattttgaatgttcagaattagcggaattaattagagagactattcatgtcaaaaaataa

SEQ ID NO: 271937 - DNA, 252 bp, Klebsiella pneumoniae
atgtcaaaaaataaccctatgtttaaaatcaacaatgcaaaaaaaattgaacttgaagataatgaaacaacttcggataaaatccttgatgctaaggatgtggataacttcatagctaagagaaataaagcaggctcgacacccaacctccctcatcaatcaaaaaaattgaaaccaattttaagttggtttgtaaccatactcgccatggttatagccggatggattctttacacaatgggatggtcgtaa

SEQ ID NO: 271938 - DNA, 408 bp, Klebsiella pneumoniae
gtggtcagtaacagttttcagcaaacgacacctaaacggcgagccgcctggctggcgctgttggcgatcctgctgatcgtggtggcccccctgatctccgtctccctgcaaaaagaccctatgagcgccatgcccggcatgcaccacgccatgatgatgcacagcacagacggcgctacgcctaccggacacgaactgccgctggaccatgccgaagcctgtggctattgcgtgctgttagcccatgtcccagggctgatgttcgcgctggcgctgttcgtcgccatgctcctgcggcgcattcgcctgccggcttctcgcccgttattaaaacactggcgctactctccctggctctaccccgaaacccgcgccccgccgcgactgtctgctttttccctttcataa

SEQ ID NO: 271939 - DNA, 762 bp, Klebsiella pneumoniae
atgcacactcgctctactgcaatcctgataattgtgaccttacttcctggttgtgtgagtgcacccgcgtcagtacaaggtatcaaccactctgacccttttgaagggtttaaccgtgtaatttttaactttaactttaatgttgtagatccttacattctgcgcccgattgctgttggatggaacgattatgttccacaacctgtccgtaatggattatccaattttacaagtaatattgaagagcctgctgtgatgctaaacgcattcctcaggggagagccttataaaggaatgattcattttactcgtttctttttgaataccattcttggtttgggcgggctgatcgatgttgctggtagggcaaatccacaattacaacggactgaaccaagaaggttcggtagcacgttagcttattatggtttctcttatggaccatacatgcagttgccgctgtacggaagttttacattacgtcaggaaggtggcgacatggttgacaatttgtatcctgtcctttactggctgacgtggcctatgatgataggtaaactggccataaatacaattgaaacacgcgcacaattacttgaaagtgatggtatgctacgtcagtctactgatccttatatcatagtgcgtgagtcatatttccaatataacaattttattaataatggaggtgttcttccagcagatattaaggcaaaaactgaaccgatgattgaaaacatcaaagaaattgatgctgaatga

SEQ ID NO: 271940 - DNA, 1584 bp, Klebsiella pneumoniae
atgagaaatttcattgtaaaagacatgccaaactatgcccgaagggggtttataaaaacttctatggccacagctgttattttaaaggctggagtattaacgaaaagttatgccgcagagggaatagagcttcctgcaccggaatatctcattttcagtaatgctgttgatgatattaagaatgttatcttacaaatatcgcatgatgtctggaataatccagagctttccctacacgaagaggtttcgagcaagatccataaagatgctttagaaaaggaaggttttacaataataagttcaggaacgtcaggtatccctacagcatttatagctgaatggagccaaggaagcggaggcccaaaagttggttatatgccagaatatgatgccttgccaggtttaaagaacgcagcagaacccagacaagatgaagacagcacctcaagaaatctgccagggcatggctgtggacataacatgctaggcgccgcatgtactggcgcggcaattgctctaaaaaatataatgaaagaaaaaaatatcgctggaacaatacgtgtttatggttgtgctgcggaagaaactgagggggctaaagtttacatggctcgggatggtttgtttgacgatctggatgcctgccttgcatggcatcctgcgccaatgactggtactggcttattgaaaacttccgcagtcaatatgttcagaattaaatttcatgggaagacagctcatgcaggtgtggctccatgggaaggccgtagcgctttaaaaggtgctgagctttttggtgttggtgtgcaatttatgcgggaacaattgtcacccacgaccagacttcattatgtatataccaattcaggagaaactccgaacgtaataccagactatgcagaaatatttttaatggtacgtggtaaagatagaaaagaagtggaggacgtatcaaaatggattattgatactgccaaaggcgcagctttacaatcccaaacaaaagaagaggtcgaacatttcttcggacttcatgatttaatgccaaacgactctctcgcaaaacggattttacaacatatatctacggttcctataatgtggacccaagatgaacagacttttgctaaaaaatgccagaaagcaatggctatccctgaagctggattgatggagtcacctattccgttcttaccagaaataacaactggtggagcaacagatgttggggatgttagttataattgccctgtgggtttatttggctggataacaattcctgctgggattggcttgcatacatggcctgttacagcttgtgctggtatgtcaattggagataagggaaccttaaacgcagcgaaagtgatgactggtactggctttgatattatgacaaatcaggattttagaaagcaggttaaagacgattttttaagaagaaaaggtaattataagtataaatcaccactcccagaaggcaagcttagacccgattcggtaccagctcatcttcttttacgagatggaacaggagagtttacggatgagttttatctgagaccatcctcagttggaatgtag

SEQ ID NO: 271941 - DNA, 576 bp, Klebsiella pneumoniae
atgaagcgcctgactcttataatatggattgcctctactttttttacctgtccagttcaggctggtgatcatacttttggagaacaacatatcagtcagtggtggacttctctgacagaagatatcactcaaacatggcaggaacccgaacgttacgatctgtatctaccctttctgagctggcatgcccgttttatgtatgataaagagaaaactgataaatacaacgaaatgccctgggggggaggtctgggggtgtcacgctttaacaaagatggcaactggagcgctctttttgccatggtattcaaggactcgcataacgaatggcagcctgcagtgggctacggatgggagaaaggttggtatctggataccgcaaaggatttccgtttcgggcttggtgcggcggcggggatcacggcccgcgaggattttgctaactacgttcccttgccttttatattccctttattttctgcaggttataagcgtgtcactatacagttcacttacataccgggaacttacaataatggcaacgtgttgtttgcatggctacgtttcggcttctga

SEQ ID NO: 271942 - DNA, 210 bp, Klebsiella pneumoniae
atgaaggatgaaatcagtgcgcgatctatgaaggaacactacagaggcatcaatgacggtcctctgagactcgttagatgtagaaacaattcactctgctcgtccgccattatgtcgacccggtatgatgccgttcctatcatgctcgcgactgtctgttgcgttttacacacctatcaggcaatcatcatgcctaatttgagcttataa

SEQ ID NO: 271943 - DNA, 555 bp, Klebsiella pneumoniae
gtggcctatttgcgcccggttatcgcgtggaacagcgggcgcttctccactgccatcgccatggaaagcaacgtggtaaataacgcctatggctatcacgatgcgaaaggacgctgggtcgaccagtccagccgtaccggctatggctatacgatgacgtggaatgggcaaaaaaccgatccgcaggacggcgtggtgaccaaccttaacgtcgcttatatggatgccgaagatgagactgactttaccgcgggcgttaactccctgtggcacggttttgagctgggctacatttacgcgcataacaaaatcgacagctttaacaccgctgattttatcgctaactgcgacgataattgctggatcgccgatccgggcaactatgatatccacacaatccatgcgtcgtacctgtttccgaacgtaatgaatatgaagaacttcaacatctatcttggggcctacgcatcatggattgaatccaacccaaacaacggcgacggccaggaagactcccgctatggcggccggctgcgcttcaagtatttcttctga

SEQ ID NO: 271944 - DNA, 453 bp, Klebsiella pneumoniae
atgaacatcgaaacagtaaacgagctcattcggtcgctggagagcgcaggcgagctgtcaatcagagagcagaagttcctgaagctgccgaaagagtttacgcagctggctgcggagaatgtggcgctgaaggccgcttttcacccttctgacatcccgagtgaatggacggatgtatttggcgacaccgcggtaattgagcatgatgcggcgggagataatcaggggcattcaatctcatggtcctgggttgacaatcaggaagaggttatcaaatcagtcctgcttgctgtcgataaaggcatcgaaacccccgccaccgatcgcatcgtagccgctcagcgctcagcattcgttgatgaagctgtctcgaagattactgaatcaggagcgcttaccctcggtgattgcattgtggctttgtgccagctgcgtgagggagcatcagaatga

SEQ ID NO: 271945 - DNA, 267 bp, Klebsiella pneumoniae
atgtcgcttataaagaccactacatttaaggggttgactgttgagaatgcagttttcactgtcgagcagatcaccatacaaggcaaccagttggatttttttgtttcgatgaaagcagataaatcctcacttcctctggacggtgaaacgcacggatgtgcttataatcaaaacagtttgtcgccaaccgaacaggcttatgcctatctaaaatcactacctttttacgagggtgccgaggacgatagcgcaatgtcagaaaattga

SEQ ID NO: 271946 - DNA, 1206 bp, Klebsiella pneumoniae
ttgagaagtaaatttaaatatgatgatattgccattgggctatatctatttgcacttgcaataataacgctagtgccttttggtcgtggtagtatatctgggctagagccagcgattccatttattatcatttcatttgctgtttttgcaatgacaagaaaaacaatagataaaaagaaattatctgttttatttatgttctttttgtgggcgtcatggatcgtggcaggtatagcgtatagctatctaacctacgataaactggcagatcatgagtcatcatttcttcgatatgtcagacttcttgaaatgtactttccagcgcttttagttttcgcatttattaataagctttctgaagagcaaaggaaaaccgtctatcgttttttcattttccttttctttgtcgttaccatagaggcggcttggggttggttcatgcaaatggacatccttgttgcgaagcaaaggtttagctatcctggaatgggttacatttacagggcaggtggtgtcgctaatgattccagtgcgtatggtagtcttgcattgattcttggcgtggcatcgcttattggtcttcgccataccagcaaaagcaaaatactttacattttgatactgcttggccttgtgtttaacatctatatttcacttacgcgaactttggtttttgcgctggctgtatatgtattctttgatttaataagaacaagaagccttagcgtattcaagatgctgtttttcgcagctatcggcgctggtgttatcacttacggaattagtaatgattatatcattgccttgctggataggattaccggatctggacagattgatatcacgtctggccgacttgctacctgggcctcagttcctgatattcttggggaaaatccaatatttggcgttggttatcgcatggctactgataagtacggcatcgtgcctgataacgtgttcatatcatcattgctggaaacaggcattattggtttagctttgtacgtggggatgcttgtgtctctgtgctactgcgtttacaagaacaattcagaaagtcttccgcttctccttgcgtttatagcatcagggatgtttgttgatatatctacgttctggattagtattcctgcactaatcttctttgttgcagttaacagtcagcgcgatgacgatgatggtcgccatcgcgctatagaatga

SEQ ID NO: 271947 - DNA, 1341 bp, Klebsiella pneumoniae
atggtaatagtagataccatcaccatgtcaaccatgaactattttgaattcatctggtcaattgaacattgcaaaccgaaattaagaaaagagatgaacagaagagaagcggttttagtaaccggaaaatctatattatctatatacttaagctctttgatatggccgataaaatccttcgcatcgcagtctggcattcttaacgttgctgactttggagcaacaggagacggaataacagacgattcttatgcttttcaaaaggcatttattaaggcaagtgaatcaggtggtgcgaaagtttactttccgaaacccaaaaaagaatatttgcttaagttcccggtatttatctttaacaataccgaagcatatggcgacggtaaagatacgcgaattgttttcgagaatccggtgttcagtaagggccgcggagggttcgttataggttcaagcctggaggcaaacagagatctggcgctaacaaggttcagtaaccgttcattgtccacgacgatcaaccagaacttcaagaatccagtccaacggcactacatacgtgatacgccagagttggcccaggcgaaaggaagtagcctacacgatatctatctggaggcgagattcactgctggctcagaaagcaactggggcgggtacggcattaatttcgtaaacgccattgactgtcatgctagcaacatatgggggaaagggtggacgcagcttattggaatgggctctgacactccgccagaaacaccatcaaaccataattgcagcgcaaagaatttgtatgttcttgagcctgatatggtcaggacatattactcaatagggttcatggctaactcaagtaattgtactattcagaatgcaaaacaacttaaggccatgactgctggaagtaagaacggcagtggtgttgcgttgaacttttgcgaggattgtattgttgcagatatagatataccagacctgggaagaactcaaacatcagagggggttcttataaataattcgtctggttgtttgattcagaacataaacatcggcaatgcgaaaaaagccgtgtcaacattctttaaattcaaagacactcaaaaggaatttaaacctaatatgattaagaatgtattgggttcaaattgcgacattgtattgtctgtatactccaaatttaacatcataagaaacatcaagggtgataattctggacgagttatagccttgatgaatactaatgcagcgagaaatgttataagtgctcctgaggcggatatctccaccccagggaaagcaccgattactacattaatgaagcttaataaaatcgagtaa

SEQ ID NO: 271948 - DNA, 957 bp, Klebsiella pneumoniae
atgtatcgaaattatttgttgtctttcataatgttggctttcagcaatgtttctctagcagaccttccagacaattttaataagtatattctccgtgcagtcgaagatctccatcaacattatccgagcatggggtacaacataagtaaggcttatactcacaacattccctatgggaatgaggaagtaaaagctagtagcccaccgttgactatgtgtgtagccgctacagcggaagtcattattaccgccctcaatatctatgtagccgaaacgggtgataaaagcgtttatacttatttcccggcctctagctggaatcgaatgcggccaaaagatattcgttcgcatatctgggttgatcctaaactcgactcctatggaacagcagatgctctggtaacctttggtgtcggaaagcgagtgaaatttagtgaacttgagccgggatcttttgttaatttcaatcgattgaatagaacgggccattctgttatttttctaggcttcatcgattccaaaggaaacatattgcctcaatattccgatgaagttatggggtttaaatatttttcttcacagggtaccggcactaccggagatgcaggatttgcataccggtatgcatttttctcaaaaaaccccaattctccttattgccctaatcttcccgcagagaaacgtcgtgattgcaagattatttggtcgactggtcagaaattgcttaataccggttatatgcttatgcccgggaaatgggatgccaaaatacgtgataaaaatttgaaagatgttgttgatggattatatgtgcagactcgttcccgagggccttcagctttgcctggcattatttattcattatctgaaacggattttttgaaggcgatcgatgccaaagatacaatggaactgaatcctgtctttcttaatggaaacataacaacggacgattag

SEQ ID NO: 271949 - DNA, 1377 bp, Klebsiella pneumoniae
gtgacgaacaaattatcttgttttaaagcctatgatattcgtgggaaacttggctcagaattaaatgaagacattgcttaccgtatcgggcgagcatttggcgagtatttaaagcccaaggaagtggtcctggggggggatgtccgacttaccagtgaaagtttaaaacttgcactggcacaggggttgcaggatgctagtgttgatgtcatcgacattggtcttgctgggactgaggagatatatttcgctaccagtcatttagaagttgacggtggtattgaagttactgcgagccataatcctcttgattataatgggatgaaactggtcagggagtcttcgaaaccaattagcggtgatacaggccttcgacatatccaaatacttgcggaagaaaattcttttaaaccagtattatctgattgccgtgggatttataagaagatatcgattcaagaggcgtatatagataaaatactatcttatatagatttttcgaatttttcaagaccgctcaaattggtattcaattctgggaatggcgcagctggccatgtaattgacgcgatcgaagaaagattcaaaaataataatttgcctattgatgttatcaaaatacatcaccatcccgatggtaatttccctaatggcattccgaatcctctattacctgaatgtaggcaggatacaattgatgcagtaattgcacatcaagccgatatgggtatagcttttgacggggatttcgataggtgtttcttgtttgacgaaaaaggcaactttatcgaaggatactatattgttggcttattagctcaagcgtttttggaaaaaaaaccaggttcaaaaataattcatgatcctcgtcttagttggaatactattgatttagtttcacaatctggtggtgttcccgttatgtcgaaaactggccatgcgtttatcaaagaacgcatgcgtctcgaagatgctatttatggtggtgaaatgagtgctcaccattattttcgtgatttcttctactgtgacagtggaatgattccttggttattagttgcagaattgctgtgtaacaaaaacaaaagtttaagccaactagtcagtgatagaatgatagcgtatccagcatcaggagaaattaatagttcaattgaaaatcctgcaatggctattgagagagtgctagaacattataagcttgatgctatgaatatagataatactgatggcattagcatcgagtatcctgattggcgtttcaatcttcgtagttcaaatactgaaccagtcgtacgtttgaatgtcgaatcaagaggggacagggatttgatggttcaaaagaccaatgaaattctaactatattaagagcttaa

SEQ ID NO: 271950 - DNA, 1143 bp, Klebsiella pneumoniae
atgtcagatgatattaatatcggtattgtagctgattggttagttacatatgcgggttctgaaaaggttattaaagaatttattgacgtattcccttcatcagaattatattcagttgttgattttttgtcagattcaaatagggaactattttcagggaaaaaggcaaaaaccacttttatacaaaaaatgcctttcgcaaaatccaaataccaaaaatatttacctttgatgccattggcaatcgaacaactcgatatgtcaggtcatgatgtaattttatctagtagccatgctgttgcaaaaggcatcttgactgggcctgatcaattgcatataagttacgttcattcgccaattcgttatgcttgggatttacagcatcaatatcttagagagtctggtctgtctgaaggtttgaagggatttattgcaaagtatttactgcataaaattagaatttgggattatcgtacagcgaatggtgttgatcattttattgcaaattcaaaatttatttcaagacgcattcataaggtatacggacgctcctctgatgtcatatatccacctgtagatgtaaataacttcacccttaatgaaaacaaggacaactattactttacagcttcgagattagtaccctataagagaatcgatctcattgttgatgcattcaatgaaatgcctgaaaagaaactggttgtagtaggtgatggctcagagatggataagataaagtccaaagccaaaggaaatattgaaattcttggttaccaaccgaacaatataatgcaaaagcatatgcaaaatgctaaggcctttgttttcgcagctgaagaagactttgggattacacctgttgaggcccaggcatgtggtacaccagtcattgcttttggaaaaggtggggtgctagaaacgattattcctgaaggtaatcagaatcctacgggagttttttttgataagcaggaaccagggtcaattatagaaagtgtaaataaatttgaaagcatgcaagacctttttgaaccaactgagtgtaggcgtaatgctgaaaaattttctgaagaaagattcaggactgaaattaatacatatattcgagataaatggactaaatttaatgaaaccaagtag

SEQ ID NO: 271951 - DNA, 1089 bp, Klebsiella pneumoniae
atgccatcactttcaaagcataaaacgtatccttatttatctttgcttctagctgtatgcaatatttctaatgctagtgcatttgaatttggtatcggtacccatatagcaaactataaagaaagttctgatttttatatcaataaagttaaatcatatggttttaactcagttcgtgatgaattgtattggaatgatcttgagaagcaagatggcgtttttagcattccagaaaaccgaactaaaaccgatcactacttccaaaaattacagtcaaataatgttagtgctttactcgttttggattatggtaataatctgcataccaaaggcggatttcctgctaacgatcagcagatagagaagtttgcttcttatgctgcttgggtagctaatcgttataaaggaaaagttcgctactatgaagtttggaatgagtggtatcttggtactggtattagttcttggtttttaaaaaaagcaaagcctgatgatacaacctactttaaattaataaaagctacttcggaagcgattaaacgtattgaccctgatgcaaaagtaatcgctggaagctttaatcctttgaaaactcaagaagttgcatggtttgatcatattattgacctgggagtactgcaatatattgatggcatttcagtgcatgcgtactcatatggtaataaaaataccgagttgagaacacctgaaggcaatttagctgctcttgatcgctatgataaacacattaaaagtaagactggtaaggatattgacctctatattactgaagttggttatcccactaacaaaaaaagcggtggggttgaccctattgttgctgcccaatatatgatcaaatatactcttcttgctaaggaaagagattacattaagggcgtatggtggtatacccttatgaatagtgctgataatagctccaatcgtgaatctaacttcggtattcttatgcataatgaatctgaaaaagcttcggctaaatgtcttaaacttaatgagttacctattgctgcagctctgaccaataaattcagtaaatcctctcctattagctgtgatgggcaataa

SEQ ID NO: 271952 - DNA, 1005 bp, Klebsiella pneumoniae
atgaaatatttagtgactggtgccggcggatttatcggatttcatgttagtcaacgtcttttaaaagatggccatcatgtagtagggattgataatcttaacgattattacgatgtaagtctcaagcaagcacgtttgaatctcttacaatcttctttgttcacttttcataaaatggatcttgccgatcgtcctcaaatggaacagctttttgtttctgagaaatttgaccgcgttattcaccttgctgctcaggcaggcgtccgttattctcttgaaaatcctcatgcttatgcagactcaaacctcatgggcttcctgaacattctagaaggttgtcgccataataaggttcagcacctgatctatgcgtcctcaagttctgtttatggattgaaccgtaaaatgccgttctcgaccgatgattcagttgatcatcctgtatcactctatgcggcaacaaagaaagccaatgaactgatggctcatacctacgcacatctctacgggattccaactactggtcttcgtttctttactgtttatgggccatggggccgtccagatatggcgttatttaaatttactaaggccatgttggaaggaggcagtattgatgtttacaatcatggcaagatgaaacgcgacttcacttatattgatgatattgttgaggctattattcgtttgcagaatgtcgttccacagcctgatcctgactggactgtcgagagcggctctcctgcgaccagttctgcaccatatcgcgtttataatattggtaatagttcaccagttgaattaatggactacattacagcactggaagatgctttaggtatcgaagctaagaaaaacatgatgccgatgcaacctggcgatgttatggaaacaagtgctgatactgccgatttatataatacgattgactttaaaccagagacttctgtgcgtaaaggcgttgaaaactttgtgtgctggtataagaaatattatcaatattga

SEQ ID NO: 271953 - DNA, 705 bp, Klebsiella pneumoniae; identical to SEQ ID NO: 8686

SEQ ID NO: 271954 - DNA, 213 bp, Klebsiella pneumoniae
atgaccaccgatgatgttgaaaagtactttggtaacgctgaaaaggtagccgagttctttggcataaccagcgaagcagtttatcagtggaggaataggcccggtcgcttaatccccaaggggagggcggcggaggcagcgtaccgcacaggaggcaaactgatttttcatcctgaacattacaaaaagtctaacggttcagtcagcaagtag

SEQ ID NO: 271955 - DNA, 1038 bp, Klebsiella pneumoniae
atgaaaaaaatacttttttttatcagcttgttttttatcaacttaccagctattgcgacatgctcttatagttctggttcagaagcgaatgttaaccttaccgtttcttcgaaaatactatcagacaatacattacccgctggctctatattagcagtcagaacggttggtggtaatgttagcagtatgagaacgttttctaattgcggaacaagcgatctttatggcgttattgcatcacctgcagcggtggaggcgccaggagtaagtggtattcaaggtggaaaagtttatgagaccggaattcctgggattggttaccaaatatctgatgctatatcaggcactaattatcgtcccaatcctgcaacgatgggaacagtatctgcatggaatcttgttgcgtatccggtatcacaaataactgtttggctcataaaaacaaaagacaatattgatacgagtataaaaaactcatttaaaataaatgtctcatatatggctggctccgcacagcaaatccaggccaattcgtcaagcgctcgtttgttaaaagttaacgttacacttggaccatttacctatcgcgacacttcttgtaatgttactcctcgtaatggcagtgttgtgactttatccaatattgaagcaagccagctaaaatcattggctcaaggtgctataaccggtaagcaaaaagacattactttagatattacatgcccacaaacatcgttaggaactaaatatatatattggtttaacccgataactgaaaactcatcatcaattgatggagtattagttaataacatacctcaagcagctggaggggccaaagatgtcggtttcatcatcaaaaaaggttcatccgcgataaaattctatgactacaaaagctactcaatatcaagcgtgactaaaaaccaatcaataactcttactgccgattattataagttgtctgaaaacattaccccaggagcagttcaggggctgtctcttatacacatctccgagcccacgagaccgtactag

SEQ ID NO: 271956 - DNA, 855 bp, Klebsiella pneumoniae
atgatacttaaaggattaaatactgccccaattaaacaaggcgatcatcttttcctgatggcatttaaaattagtggcactgaaaataatggttgtttattttacatgcaactcacaacattagtggatctactaattattctacgtagccgaataacaaaggttgcacaacgtcttgttgagtgtggcaataaatatgaaaagaaaatcaaatctgacattgatattcttaataataatatacctgaaatatattattccgaagtttcacaacctaattcaatgcagcttgttacctctattgcaccaaaattcaaagacgaggcgatttctctaatcattgccatgcaaaatgaaaagattatcactatagaaattaatgatacacaagtggagttttttattcttgccattcagaaagccattgaaacaataaatgataaagaaaccctaaacatacttggttctttacttgattttttacttctctattcagtagatttaacgaatcttgattttttaaactataaagaaataaatcacgaactctggaaacataatttatattcagagtatctggctgttctttactgctttgaaactgaaagaggaaaagtaattctctcgggagctattattaaagcaaatgcccaatatgactcgcaagaggtacagcatataattcataaagtggcggcattgacgccaatgttaaaaaaaatccaggaaaaatataccttatataaatctttttgccagaaaattacttccgattcgggtcagattttaacaaaagaagcttgtcttactcagctacactctttttgtcttaaaacacaagctcaactcaattag

SEQ ID NO: 271957 - DNA, 957 bp, Klebsiella pneumoniae
atgaagaataaactctatcgcaaggaagcgattgaatataagagaaattattggaaaggaaaagctttgttactagcgggaatcccatcctggctgatagtatccctatcttttgcattcttaatctgtttgatattaactttgactttctgtaaatacacccagcgaattgatgttcgaggagaagttataacactgcctcattcaataaatgttttcgctccacaacaaggttttgtaataaaaaaatatgttgctgttggcgatattgttaaaaagggaacagctctttatgagttggatgtatcaagatctactataagcggaaatgttaatgaaacaatgactgcagctattactgaaaaaatatctaacgcagaagaaataattaataagatcaagaagaataggactgaaacattagaagcactgaacatacaaattaagcagtatgaattaacactgcaagaaacttataaaatgctaaagaatgctggagatgggttgaaaaaaatgaaggaaaacctatcgagctacgataaatacttaaaggaaggcttaataactaaagatcaatataactatcaacattcattatattttcaacaacaaagtacataccaatcacttgttagccaaaaaatgcaaatcgaatcacaattaactcagttatatagtgataaagttattaaaggggcagattttgacaatcaaatttcaaatcaaaaaaaccaaataaatgattataaaaatcaaagagtagagtctaccgcgaatggcaatattgttgtgaaagcgacagctgaaggcaaaatagaatcggtttcagtgactgccggacagatggtggataaaggtagcagtttagcacagataaaaccgactgggaatgtggaatattatcttattctatggttgccaaacaacagcattccggtgatgctaccaacttgctga

SEQ ID NO: 271958 - DNA, 561 bp, Klebsiella pneumoniae
atgcccctcctcggtatgggcggcgaaacggagaaaggtaccgcgctgccgatcctcccgtggtggaacgcggtggccatcaacgacgtgccggcgcagagcgatttctacagcaccgccaacggccgcctgcttaacgatctgctgcgcagcgcccgggatgccgacaaggtggctctgttgctgaaggtctggcgccagcgtctcagctatcgtctggtgcgcagcgccgaagagagcaaaatcgccctctccagcgccgccagcgtccaaacttcgctgccgtttatccaggacgagctggccaccaccatcgcccagcagggtctggaagccgcgctggatcaaccgctgacccgcattatggaacaggtgcagctcgcgctcgacagcagccagactaccccggacgtgatttatcttaccggcggcagcgcccgctcgccgctgatcaaaaaggcgctggccgcccagctgccgggtattccgctggccggtggcgatgattttggctcggtgaccgccgggctggcccgctgggcgcaggtggttttccgctaa

SEQ ID NO: 271959 - DNA, 366 bp, Klebsiella pneumoniae
atgagtaacttaattactacctatcgccgccgaattttaaaagcagccttgttacgccaccagcgaaagactgggagtagcttacttgtcattaagcttaacaagggtgggattagtactatcgaattaactgagattcttcttgatggattgttgcggaaattcgagcgactggctctcggtgaatacggaaatgtggaaggcgtgaaagctcttaagggaatctacagcaactctgttgatgttaatggcagcggcgaattcctcacagaaagcgggaaagagttaatcgacgagcttatttctgaactggtggagttcgtcaaaaagcagaaaccagttactgcggagtccggcaatgaataa

SEQ ID NO: 271960 - DNA, 498 bp, Klebsiella pneumoniae
gtgacttttatcatatactcattgcttttttttgttatggtcttcggtaattattatgtttgtaagcgaataggggtaacagaaaatccatataaatatagaacgatggacggtttaagagggatttgtgcgactctggttatcttccatcattttttctggagaggagggagtagtgatgatttcttttggtcaacggattatcttagcgctaacgtaaaagcaatcgcaatgctcattggacatctgcctgtcgcattgttctttatgatttcaggttttttattttattttgttgctgcatccaaaaagcctttaatccctttttttaaagggaggctgttaaggatttaccctccggttgttttttcgttattaattgcaatgctcgggctggttattgttaatagtgataatacggtttgttctttaggagtgtttaagtatattcctacaccactaggtttttttttctggcggagatgtctgtgggtttaa

SEQ ID NO: 271961 - DNA, 939 bp, Klebsiella pneumoniae
atgaaagaaattgaaaatcaaggaaaggagaatgctaaaggtattaaagaactgagagaacagatttctaatatcgatgaaacaatcgaatctataaacttgagactccaaagtttaggtataaatggttttagtgtaaaaaaacatgaagaaaacaaggatatgtacatcatttcccgttcagacaaagacaaaaataatgatgtatacaaatctcttagtgagggagagaaaacgttaatcacattcctctatttcttggaatgttgcaaaggaaaaacggataaagacgacgaagacaatagagataatttaataatcatcgacgatccaatatctagcctttcacaaaattacgtttatgatatagcatcaattattcatcatgaactaatcaaaaatgagactacaaaaaaaatattaatacttacacacaatctatattttttccatgagttaataaaactgtctcctaaaagtaaagacgacagaaattttaaacgcgactatcgcctttttagaatcacaaaaaatgaatttagcaccatcaccgaaatacaaaaaaatagtatacaaaatgaataccaatccctttggcaaatattaaaagatgctaaagaagaaaaggtcaataaaattatcataccaaatataatgagaaacattttagagtactattttggctttgttcatagaacagattctttacaaaatgaattaactaaactcgcaaaagatgagaacaatagcgatttcagggcgttttatcgatacataaatcgaggttctcattctgactctgtgaatatcacagatatgggtgacattgacccagacaagtacctaaaacagttaaaaaatatattctcagcaacaggagatgaaaaacattatgctaaaatgatggatgagatcgatgaggaaatcgctaccgcttag

SEQ ID NO: 271962 - DNA, 984 bp, Klebsiella pneumoniae
atgacagccttagcaaaaaaagcagggctttctttgagaatgatcgttgattatgagaaagattattgcctatatgagccatctgagcaaactatagcttcatttgtagatgttttaaaatatcctgccgattttttcttcggtgaagatattgaatcaattgatccttctacagtatcttttcgttctctgaagaaaatgacatctgcacaggaaggtgcagcaattggtgcaggtcaactcggattgattgttagtgactattttgaacagtattttaaattaccagaactcaacctaattgatttaagaggcgaaacacctgaatcagctgcacgagcacttcgtgattactggaaacttggcagtaaaagcatttctaacatggttcatttgttagaaatgaatgggattaaagtattttcattatcagaaaatacagcggatgttgatgcttattcgttttggaaagcaggaaaggcatatgtatttctgaacaaccaaaaaactgctgaacgaagtagatttgatgcagctcatgaactggggcatttggttctgcataaacatggaacacctcaaggcaaggatattgaaattgaggctaatgaatttgcttcagcgtttttaatgccaaaagagaatattctagctgcaaaaatgcgcaatccatctttagatgccgtgcttcaacttcgtcataactggaaagtatctacctttgctcttatttaccgtatgaggcaagcgggagcattaactacttggcaatataataatcttgtaagagaagcttctgcacgtgggtttagattgagagaggatcaagtaatggagcgagaaagatctatgatcattgactcattactcgacgccctagctgatgatggtataaccttaccggtgatttctcgccagctaaatatccctgtaggggagctttctaatctgttgttcagatttggtttgattcaaagtatctga

SEQ ID NO: 271963 - DNA, 669 bp, Klebsiella pneumoniae; identical to SEQ ID NO: 146289

SEQ ID NO: 271964 - DNA, 201 bp, Klebsiella pneumoniae; identical to SEQ ID NO: 146290

SEQ ID NO: 271965 - DNA, 504 bp, Klebsiella pneumoniae; identical to SEQ ID NO: 146291

SEQ ID NO: 271966 - DNA, 171 bp, Klebsiella pneumoniae
ttgaaatactggaacgaggatcaggtgttgcgtgccctgattgacggcaccgttaaacgccacgttatttacgcatctatgcacagcgcacgcagcagggggtatcaggaacgttatgaaatgttcgctgccgccctcgccgcttacgacaaatacaggagtgaacaatag

SEQ ID NO: 271967 - DNA, 141 bp, Klebsiella pneumoniae
atgagcattaccacaagtaattttcgcatcttcttcattaccaagaccaatgtgtttactttttgtttctacaacaaagtaaatatgttcttcaccattgtcttcaataaccaaagcccagtcaggattgtaagttcctag

SEQ ID NO: 271968 - DNA, 408 bp, Klebsiella pneumoniae
atgaccaaagaagagttgattgcccgcctgaaagagctgggcatcatgctgaaccgtgatgtcagcctgaccggatcaaaagaagagctggcgctgcgtattgctgagctggaagaggagcttgacgatggcggagacagcaatgagccaggcactgagaatacggcccccggcggggagggcaacgatagcaaagcacagaataacgtattaactccggcgccccaggaaaaaaaatccggttctggggacctggtagcagtgaaaactcgtgcgacgttacacctcgaagcactgcacgctgtaaagaatgaacaagtgagccttgttttgccgggtactaccgttcgtgtcagcgccggggatgcggaagagttgattgcacgggggctggctgtcgaaccatag

SEQ ID NO: 271969 - DNA, 429 bp, Klebsiella pneumoniae
atgttcagtcgtgatgatttaaccatttcaatgtactacgcatcatccactgatgctgaatcgggtaacaagctggcaacaatgactatcgaagtccgcgatgtatctccggttgccgagctggctcagatgacgcagcttcagtgcgtgactgatagcgcgaaaaagaaaacatactctgtcggtaagcagagcatctctaatggctccgacccgctactgattgcaattgaagagtactggcggatcaataccgaagcactggtcaaagacctgctaaccgaggtgatggaatttgttgctggccgcgtcggtcaggaaaatacctgggttggacagtatggcctcaaggtttttgaaaatgcagcgctggctgaacgtctgccggagagtgtgttgcaggctgacggtggtgcatccgcaggctga

SEQ ID NO: 271970 - DNA, 288 bp, Klebsiella pneumoniae
atggaaagaatcatcaacgacctaaaccgccaaattctcgaactcaagcgagaaaatcagatgaccaaaaccgccgtaaatttcctgctatacagcatcgttgagattcttgatcaacaaagtggtgatgagaagtttagtgaggctctaaaggtcaaaattaataacgaactaagtaaaatcactatggggagtacgtcaatccataagcatgccattaatgagatgatgcaaccaccagttagaaatatgtttagtcactcacgacctgaaccattcttgaaataa

SEQ ID NO: 271971 - DNA, 228 bp, Klebsiella pneumoniae
atgaaacgatacaatatggtagtcaaatcatttcatattgaaagcgagtcggttgttgttagcttaactgtacatgattcttttgcaccattgataacactgataaatttgaatattgatattcagcggaatgaaagcaccagtctaaatgaatatgaatctatagcgctgaataaagccgcctcgattattcagtgtattgctgaagaaataacggcgacggcttag

SEQ ID NO: 271972 - DNA, 531 bp, Klebsiella pneumoniae
atgaatatctcgctggtggaaaaatactggaagccactggcggtgatattgttggtggctggcgggtttatcaccggaaatgtctggagcgataagggctggcaaaaaaaatgggctgatcgcgacagtgcggaatcttcgcaggtagcaaacgcgcaaaccgctgcccggatgatcgaacaggggcgtctgatcgcccgcgatgaggctgtaaaagatgctcaaacccaaaccgctgcagcgcgcgctgctgccgctaatctctctggcactgttagccagctgcgccagcaggcaaaaacccttaccacccgcctggacgccgcaagccacaccgcaagtcttgccgctaccgtcagaagcaaaacaaccggcgccaccgccggagtgctcgccgacatgcttggagaccttgcagaagaagctcgacggtatgctgcaatcgctgatgaacgctacactgcgggaatgacctgtgagcggatttatcagtcggtgaaaaaaactatccccaccaaggactctcgataa

SEQ ID NO: 271973 - DNA, 417 bp, Klebsiella pneumoniae
atgacaaaccaactttctcgcggtatccgcaacaacaatcccggcaatatccgctggggcgatgaatggcagggtctggtacccaaagcgcagcgcaccgataaatcattctgccagttcaccacgcctgagtatggcatccgggcgatgattatcatcctgcgcaactatcagcgtaagcatggcctgaacacagtgagcggtatcatcaaacgctgggcgccgccaaacgagaacaacacgcaggcctatatcaacagcgtggctcaggcgacaggcgttaccccctaccagcgcattgataccagcgacagtcgtttcatgatgaagctgttacaggccatcattaggcacgagaacggcagccagccatacggctttgatacgtttgttcgtgcagtcgaactggcggggtaa

SEQ ID NO: 271974 - DNA, 339 bp, Klebsiella pneumoniae
atgaaaatgcagaacaacattcacacatgggccgacgcatgggaattgttgcgcatgtggtggaatggtgatgtaccgctgggcggtgtattgctgtccatcgtcatggcggcattgcgagttgcctatacgggcggtggatggcgtcgtgttgtactggagtccccgttatgcggtgccatgaccctgacagtagcctccagtctggattacttcggcctgccgacgacattatcggtggctgtcggtggggcaattggctttattggcgttgaccagatccgcgccgcgggtatccgtattctacgctcccgtacaggtggcggcactaaggactaa

SEQ ID NO: 271975 - DNA, 603 bp, Klebsiella pneumoniae
atgacaccacgtcaacgccggatccatcgtgcaggattagaaaccgtctcgaaggcaacgcgaaaaagctggctgggtcgttttaccccactcagtggaattcagtctgcctggattaaatctcttctcaccgtatggggggagggggtgcgtggtggtatggcgccacgaaaaccaaccgaacattcctgctggcggggattaaagggaggacggtggtcagataaagtactggagcgctttacggccgccatcgagcaggctcgccgagaagggtttagcgggccacaggctttaaatcgtgctcgttctattttatggccccagcccactaccagcctgatagataccgccatacatgatgacgacgtagagtttatagagaagtgtgtactggaagcgtttgaaacaggcgatccggtctataccgttggcgtcagctattataccacgcggaaaaatatcactgatattacgcgcgaattacagttggtggcaccttggttaacggacggagaagcgagaaagcgtgttcgctggtgccttgagatattcagggcaaaagcgttcctttcagtaaagcgagaaattcataaggattag

SEQ ID NO: 271976 - DNA, 1062 bp, Klebsiella pneumoniae
atgcgggcgctgctgaatgtggatatggcccggcatctggggatcgtgctgctaaagcctggcagcgaactcatcaaactattcggcaaagggcgcgtgctggtggaaatgccgccggcgcatatggattctgtacccagtggacgtctgcccgatgctcgccagccgctgcgtgaggattcagaactcattccgtttttcctgaacgagcgcgttattaatgctgctggcggaataaatgctcttgaactttggcttgaacgtactgttcaacattgccagtggccacactcaatttatcaccatcatgaactggtgacattcaggcatgaaccaggtgccataagggcatgctggcattgcgataacgaacttcgtaatcagaccgcacaaaccctcgacaagctggtggcgttaaacgtcgccgactggattatcaacacagtactgatttatctgggctacaacagcgaaaggatgctttcactggctgaattgtgctggtgggctgtctgtaaagggataggaagtgaaatatcagaggagatggcgcggcgttctctgcggatgaaaagggaggagttcaaatctgtctaccgggaaagcgagctggttcctacagttcaggccaccagcattctgactgagcgactaaacagtgtagacgtaccagcaccggattttcctgcagctacaccagcagcggtgcaatcggcgccagtaaaacccgttgtaggcgtcattgtagactctgaagctccagcaacatttttcgcccgtcctaaacgcatccgctgggtatcctctgactttcttacctgggtgaagacccaaccctgcatgtgctgcgggcagcccgccgatgatgcacaccatctgattggctggggtcagggcggcgtcggtacaaaggctcacgatatttttacgatcccactttgcagaaaacatcaccgacagttgcatgaagatccggtggtattcgaacgtgaacacggcacccagcctgtgctgataattaaattgctggaccgggcttatgcgctcggtgttctggcgtaa

SEQ ID NO: 271977 - DNA, 204 bp, Klebsiella pneumoniae
atgaagaaaagctggtttgtacattccggcctgactgagtatcaggcgcgggagctggtagagcgttacaggaaaagtaactatctggttgagaaaaatctttctgctgactttctgacatgggaggtcaacgtaaaactgcctgaggcacccagcgcgccgaaggttgataaaacattccaacaaaaaatgtggagggactga

SEQ ID NO: 271978 - DNA, 234 bp, Klebsiella pneumoniae
atggatgacttaccagataccggatttgcattggttcgttgtgcagacagggcggtgattgcctattttgagagctttcctgagtgcagtcgggcgctgatgtatcgtaagggggatatggtttcattcatgcctctccagccggatgagattgttggcacactttcactatttacgcagatgctgaaaaaggcgggttaccgcgtttgcgagtcatctggtatattacgttag

SEQ ID NO: 271979 - DNA, 1086 bp, Klebsiella pneumoniae
atggcgaacgacaaaaagaaagtattgaatgagagacccgtaactcaggaagagaaagcaaaggcattacagtcagccatggggcagattgaaaagcagtttggtaaaggctctattatgcgccttggtgaaaataccaatctgatcgttgagactatgcccagtggatctcttggacttgatattgcgttaggtggtggcctcccggtaggtcgaataatcgagatttacggccctgaatcatccggtaaaacaacagtagctctggctgcaattgcttcggcccaaaaagaagggcgtcagtgtgcttttatagatgctgagcatgcgctggatccccgctatgccaaactactgggtgtagatctcgataatcttttaatggctcagccggacactggcgaacaggctcttgatataacagatgctttggtccgctctggtgctgtaggagtgatcgtggtggattctgtggcagcgcttgttcctaaatctgagctagagggggaaattggtgatgctcacatgggtttgcaggcccgaatgatgggacaggccatgcgtaaacttgccggagaaatcagtaaaaccaaaacagtagtgatctttattaaccagttaagaatgaaaatcgggaccatgtttggtaatcccgaaaccacgactggcggcaacgcattaaaattctatgcgtcagttcgactcgacgtcaggtcaaaaaatatcactgaaggtgatcaggtagtcggaaaagacaccacagtaaaaattgttaagaataaagtcgcgcctccattcaaaagagcaaactaccggttattgtttggtcaggggatatcccgcgctgatgaaatactggatcttggtgttcatctcaagattatccagaaagtaggatcgtggtatgactacggtggagagaaaataggtaatgggcgggctaatgccgccaaatggattgaaagcagccctgagattgccttagaaattgaaaagcgcatcaaggaactggctctgatggatggcgctcttccttcagatgttacccctcctgaagaagtgcccgaagtagtcgaaaacgattaa

SEQ ID NO: 271980 - DNA, 618 bp, Klebsiella pneumoniae
atgagagataaatactctccagctcaagagttgtttattaggcaccatataaaaagtagcactgctcgcgagttaacagaaatgttcaacgctcattttggcacgaataaaagcgttggtgcgatccgtatatggtgcaagtctcacggactgggaaatcaattcttactggagccacgctacactgatgaacagctgacgttcatttatgctaataagcagttaacgaatgtggaacttaccgaaagatttaataagcgattcagtaccaataaaaagcccgataacattaaagatgtgaagatagctcgcggatggactcgccaacccacaggccgtaagcgcgctctgccacagtatattacggtgaataaagagaaaattcgccttgatgtatatgtatacgaatgtgttcatggaaaattaccagatggttattctgtaatccatctggataacgatttaaaaaataacaatatcaataatctgcgcgcggctcctaaagaaatacatcgcctgttctctggagccggttactcgaaaatgccgcaggtactcgctcccgcgctatatgcgcagacgatactccgccatgcaattaaaagattgtcgatgtaa

SEQ ID NO: 271981 - DNA, 231 bp, Klebsiella pneumoniae
atgaaaaatagcattcaggatttaatgaatcaccagtttgccatgctggaaacaatcacagatcccaacatcaaaggcgaagtacttcaggaagaattatcaaggtcaaaagcggtggtggagatcgtcggggtgatggtcagcacgtatcgggtcgcgctcgatgctcagaaggcggtgtatgaggggacagccggaagcgtaccaaaagttatggggcttgaaaaatga

SEQ ID NO: 271982 - DNA, 591 bp, Klebsiella pneumoniae
atgatcgagcgtggaatgatttttaactcgaagatggtctgcgcgctgcttgatggccggaagacgcagacacggcgcccggtaaagtttccgttattcgataaaaaccttgggtgtgagctggctggcaatgaacttgccggagagctggcggcgggaaactatttgaatagcgtatttggtaagccgggtcaccgtatttgggtgcgtgaaacgttcaatggtttttgggtcacagatgaagaaattgaggaaattcaggagggcatttctagagcagcagacctttgcgactacaaggccgattacccggaaaacagccagccagcggagggttggacaccatcaatccatatgccgcgctgggccagccgcataactctggaaattaccggcgtccgcgttgagcggttacggagcatgactcaagaagatgcgcgagctgaaggagtcattgcggcatctggtccgatggaggcgggtttggctttccgcgaattgtgggattcaatctacggtcccgacagctggcaggccaatccgtgggtatgggttattgaatttaagcgcattgaaggcggagcagcatga

SEQ ID NO: 271983 - DNA, 267 bp, Klebsiella pneumoniae
atggctaataaatcacgtgaacagcagcaggcgagtgttcagaagattatcgatctgacccgacagaaagggcgcctgacggtgaaagaagcctgtgccgaactgcacatgtgtcgggatgccgttggtaggcactttcactcagccgccagaaccgggaaggtcattcgctacgggcgtcttggattgttccgagaccagcgggcgaccattgattttgaccttcaaagattcagctaccggaagaatgcaggagaagccaaatga

SEQ ID NO: 271984 - DNA, 471 bp, Klebsiella pneumoniae
atgacccgggaatcaacgctttttaatattcgatattcgtttcacatcgaaacaatgcaggcgacgctttacagccggctggacaggcttatgtcatttgtccagataatgctcgggtctgcaattttcgcggcttacggcagcctgccgttatttggcgccgtagtggcttgtatttcagcaatcagctttgtatggcagcctggtaaagcggcaatgctctgtgaggtccaggcaaaaaagatgaaggaattgataaacaaaccgtccaatttttctgccgaggaacttcacgcggcgtacctgagagccgaagaaggggataatccaacccttggtttgcttagggatgctgcacacaaacgagctttgattgcacttggccgatcgcaggagtcgatggcgatacagctaactctttttgagaaaatcgctgcattgtttgctggcgatttgcccaaggatgaatga

SEQ ID NO: 271985 - DNA, 123 bp, Klebsiella pneumoniae
atggacgatttcaaacgtaagcccgcaagacagcaagcagtacgccttaactggattactgcaaggatccgccagctctgctatttcctcgcccaaaaaggcgacccagaggtaaatgcatga

SEQ ID NO: 271986 - DNA, 249 bp, Klebsiella pneumoniae
atgcatgaattaacgctgtcacctcaggaaattgcggaaattacaggttatcaacgctatacccaccagcagcgacaactgcggtgtcatggcataccgttcaccactgatgggcggaaccgccctatcgtattgcgtagaaatatttatccgggaataactgaattacctaaggttgatgattatgttgaacttgagccaaattacgacgcaatcaatgggcagaccaagaaaaaatccaaaagataa

SEQ ID NO: 271987 - DNA, 678 bp, Klebsiella pneumoniae
atggataaacgaggcgagcgcagcataaaccaggctaaccaggagttaggtggaatgtctcgtatatttggctggggctttgagcgtggctatgtgaagggaaacccatgcaagggagtaagaaagtttacgttgaaacctcgcgaggtctatgtcaccgacgaagagtatcaggctatctatgatgcggctgcgccggcgctgaaagtagggatggaaatagcatatctatgcgctgctcgcctttctgatgttttgtcactgaagtgggagcaaatgtgggaagacggcattttcatccagcaaggcaaaaccgggaaaaaacaaattaaagcctggaccgaaagattgctacatgcgcgttcactcgcaaaatctctggggggctcggtttatgtcgtatgtagcagtaaaggagaaaaatattcgaagagtggttttagtgatttgtgggaaaaagctcgcgcagctgcatcagagaacttaggcaggaagataaaaggaacgtttcacgacctgaaagctaaggggatttccgattacgaaggatccagccgggacaaacagcttttctcaggtcataaaaccgaaagccaggtactggtttatgatcgtaaactgaccatttcgccaacattagatcttccgattctgggagattcggaggatgatgattga

SEQ ID NO: 271988 - DNA, 1236 bp, Klebsiella pneumoniae
gtgaaaaatcaattactaatgattgcgttattaccagccctaatgatatcaggttatgcttgttctgatacaatcgatactaatattcttgggagaataaatggggttgcggatataaaaaaaatgtatcttgatgggctttatatatccagaaacactttcggtatgagggctaatgccgcggctgctgcaataacagcaaactctttatcaccattcaattttccgatacttggtcttaacgcttcggtgggattggctaggtatcttgatagggactccgttgggctttatgcaagtaatgaatcaacaaaatttaatgactgggagttgataaaaaatgggcattatacaccaacatctttccaatcttcggagatagatataaaaaaaataaaagcagggatgattatagaaacgacccatcaagttaaatggggcgcaatggtcgttagagtgtatcctgggaaaataataacatcaggatgggtaaatctatctacgggaagaatggggacgccaccggataatgctggtatacaaataaaccctattactaaaatatgggcgacaaattttaatatttttctttcaaaagatggaagggcatcaaaggctgtcgttcaggaaaatggagttattaataataaagagcagaatccatcatctatttatggcatagataatgttatcctccctcagtctatgtatggtggaacaatatcttatctgtcacgctctgcaacttcaggaaacggacagcaatgggcgtttggatttatggcgaaagggtcaaagaaatctaactttgttagtgctgatggcggcggaaaagaaggtactgaagtcgggttttctgaaatctcatcagcaaaaaatggtattatgttttatggtaggaatcaggatagttctattacatggacatctaacgggagggttactgcaaaaatatccccggatggaagctatgagaaaatcgtttataaaacaaagttgattaccacatcgtataatattacggatgattactcgaaatatatagtaaacgcaaaagatgatgtgaaaataaacctaccagcagtaaaaaatgaaaccgaagggttgactatccagataataaacttctcaaataataaaataaatattgaatcatctactgatgttattatatcagggcagttagggaaaaacataactgccagtatagtaaatggtaagtggatggtttattaa

SEQ ID NO: 271989 - DNA, 300 bp, Klebsiella pneumoniae
atgaatatcgaagaatttgtgaatgaagaaaaccatatgtgtaatctgggccatgaacttttctttaaaattttcgaacctgaatcgatttataatttacccaataacgactttaataaagaaataatatattggctcagtcagtacctcgtcggaaatttgatacaacctttagacgcgatctcagagcttaatgcttccaaacagatatatgtttacgagacttggttctcgctaattaaatgccctgatgaaatgaaacttttggccaagcggataattgaatatttattgggttaa

SEQ ID NO: 271990 - DNA, 198 bp, Klebsiella pneumoniae; identical to SEQ ID NO: 94790

SEQ ID NO: 271991 - DNA, 1005 bp, Klebsiella pneumoniae
atgctcaccactttattctgtacacccgccagtgtactggcagaacgatggctgagattattgtccgatcttggcaggtcaccggcaacaattcatgcttaccgtcgcgcactcagtcacttctttaacttctgctgccatcgggaaataacacctgagcaagccagttttgaagatatcgcagcatacattcggcctcagttacccggcatgcctgaacccgcggccagcgcaacgcttcagcttcgcctctctgccatccgtctgtggtttgactatctgatttatatgggggtgattaaccggaaccctttaccccgcgcaggtacacccgacatgccttcttcggggcgcgggatggttcagcgaataacgcgtctgccaaaaattccggatgacagccagtggtaccacctcctgaattatgtctcggaagggtcactgcgcgatcgcctgatgctcgcgctggcctatcacggtgcgctcaggcgcactgaagtgacaacagtggccattgaagatatcgatcctgcccacaggcttatacggatacgggccgaaaacaccaaaggcaagcgcgaacgggtggtctgctacggtccggcgattacgccagtactggcagcacaccttagggacctgagacaaacgggtattactggtggagcactattccgatcggtttcagacagaaattatggttcaccgctctcatattggagctggagtaaaacagttcgtgagtggtcagataagaccgagatgccttatcttactacgcatacttttcgtcacctgcggctgacacacttggcccgggcgggatggaagcttcatgagatagccacctatgctggtcatcgcgacctgcgcactacgcagatatatatccatctttccggtaccgatcttgcggcaagaatggcgacgactgttgcggagactgatcggaaaatcgcagccatcatgttcgacctggagaaagatgatgacaggcaagcgtga

SEQ ID NO: 271992 - DNA, 2127 bp, Klebsiella pneumoniae
atgacaggcaagcgtgaaaaagaattcgtatacgtccctttttgccgtgctgattatgacctgcacgtcggcttcagttctaaacagacagaagcgctcagtacgagccataaacgctcccgtaactatggccgatcaggttctctctcttccctgatcacgccactgctggatatcgcccgtaacagtggcaccggcgataaacttacacgcattgtcattatggcgatgctgactgaaatgcataatgcgggacaaccctgctggaactggcagaaagaccggtggatttccctgtttgataagtatcgatccggtaaaccacttataatggcatttgcatacaatcttggccccttttcgtcgccgcttcagatcccacacgaaggcacactgtcgctttacgccagtgccatttacggcagcgccatgttccgttatcagctgagtcgcctgtcggaggcactgatatcactcggctatgcacctcggcacttgcgacatgccatttcctctcccctaggcctgctgatgctgctcaatgatgatccccggcttgaaaacatgaccactgaactgctctggcaggctcagcaataccacgatgagcaggtatcaagacatatcgggaaaatttcccatggacttgcagctcttggcattattgcaaacccggtacggatgcgtaactacactgaatggtatgagaagccggtcgaaaatatcagcccggaatgggtcgcatggtgcagacgctggcgtgagacatccgtgcttcgtcccaaaacccgtgaaaatcagtacagcttcattcttcgctgcggcctgtggctggcaaaggaacatcctgatgtgaaggttccgacggactggtctattgagacatgtgccagttttatcgccgctgtgggacgaatgaaggtggatgaactgtcactgggcactgagcgtgggctgcgcaagtccagacgatctggggagcccatgatgccccactcacgggcacattttatatattcactgcgacgctttatgagtgattttgaactctggggatggggccgcctgaagttcagtccagcacgtcaccttttcactccggacaccccactttttcgccgtggcgtcaatccgagagtgatagatgatcctgtctggctcaaactcatctgggccagtctgaacctgcgccatgaggatctgctcagcgatattcattatcctctgtctatgcttcaggcgatggcagttatctggacccatgccggtctgcggcagaatgagatcctgcgcctgaccgcggaatgcatcacgcctcaatcggaagacattatcagggaagatggcagtgtcgttccggccggaacactgtgttatctgaatgtccctgcgggaaagacatcgaaagcgtttgtcaaaccagtctctgtcgttgtaaaaaaatacgtggatatctggctgaatgcacgccctgtggagcaggcaaaactaaatgatgtccgcacgggtgaaaaagtccgctatctctttcagtatcgcggcaaaccggcaggcagtgatgtgattaaccggacggtgatccccgtcctctgtgccagagctggcctgccggttgaagacagtggaggtaccataaccagccaccgcggacgggcttcggctctgacagcgcttgccagcgtgccacatggcatgtctctatatgaactgatgcaatggtcaggccattcaacccctgcatcaaccctgcattatatccggatacgtccaacccagttggctgcgtcattcgtgaaggctgatcgagtcgcccatatgataagtgtactcgtcgatcatgacccggaagcggtctcgctcactggtccggcaacctattatgatcttggtgagtccttctgtatgaatccattctggagcagttgtccgcaccgaatggcctgtattggttgtgattttaacctgctgaaagatagcgctcgcgggttgatactggagagtaaagtatctatcaggcgttatctcgaagaagtcccgctcacgcctgatgagaaagccatagtagagcaggatattgaaaaagtagaacaggctcttgcaagattaaccgctaaacccagaggataa

SEQ ID NO: 271993 - DNA, 1203 bp, Klebsiella pneumoniae
atgcaaatcaatgcattagaaaaaatcaacactaacccccccccttacaatacacaccaaaggacgagctggatcgcaaaaacggaacacacgatgttcatgttgtctatctttttgtatccgatagtatccatgagtcatgttttataccttattccgctaatgattttgcttggtctttcaataacaaatcgccacaaacgtttatacacatctgattacgcagctatggctgctggagttgcagcattcataataccgtttgcggtggaattttcctcccagacgccaagccaagagttaacatcgaagttaatagtcaatgctatcggaataatgataattgcagggaatgaaagattttcgctatcgtataaatcattaaataacctaagagtgtcctgtattatatggatacttatcgcccttgttgtctatgtaaaaagtggtgtcacaagtttatccgcagtttggatgcaattaaatgcatcatctgaaatgaatagctcaagtctatacggaattgccgaaccacttagagatatattcttaacaaaaaacatatccgcaatgtttgttgtttctgttttttcattatatctttacatttcaataaatttaaaaaaaaatgtaacaataattgagttcgcgatatttttcatagctgttcttgtattcctatcaagacaggcaattatggggatgattatcatatatggcctgtatagatttattgttgctgggcatttaaacaaagttattatagttacagtactgatcacttgcgcgactatattttttacggcatttttcaacctaaataatagtaacgatggtgcaagtcagcgactgctcttatggagttatttcttatcacattaccagaatttctttctacttggcttgggtgtatcagatcttaatgcgaccttaatatcaaactacggaatagataactttcatatgttttttatgaatcaaataggagcatatggattcatccactttattttcttttcagcatttttaattcttatatacataaggaaaggaagccaaaaaggcagaatattattagctactggatacttgctaaatgtttgtttccaaacatacggctatgaatatggtaacttgtttttgttcatggctatgtttgcatcaataaataccaacaaaacaagaacaataaaattcaagtaa

SEQ ID NO: 271994 - DNA, 183 bp, Klebsiella pneumoniae
atgagtgtatatagtaagagctatgaggtaatagggtcttttttaaatggctatgttacaaatgaaaatggattaacttttcaatcgaccgttgttattgatgattatagttccgaagaagatgcaatatctgatgcttacaaaaaggctgagggtatcgctaacaactttacctttcaatag

SEQ ID NO: 271995 - DNA, 1785 bp, Klebsiella pneumoniae
atgaccacatataaaaccggtaacccgctgggttcggcagctgtgaaggatttatttgataacgctgagaacctggatcattttgaaaacgatcgcagtaatgagacgtgggaaaaccggtttggggtgccgggtaaaacccggtatgggatggagcaggaacatgatcggcagatttctagccaggaagctcgtttccagcagttcctcttgtcatccggctacgtgttcctgggtgattaccaggatggcccgttccagttcagcgcccgcaatcagtacatccggtacaacaatcagtattaccggctgaacgctgccacgaacgtcggattcaccacgactggtacgacagcggccagttttgcaaacgacgtcagccatttcgttttgatagatggggatacgctgcgacaggagttggcatcaggtaccggcactgatttaataggttttcaaaaagtaaagcttaccgatgaattgaagaaaatttccggcttaaaatccctcggctatgcgccggttttcccaatggggttcgactctgcttcatacggaatgttgtatcagtttaaaggtgccgatgttacccatttattccggggcagcattcatgctggtaaaaaactgtttgggatacgtaataacgcctgtgtaacgtctttccgtgctggggaaggttctgaagaccagggaatgtggaatagtcaggtgactggagtaagcaataatctcaggttagctcagtatggttcgactgataaagtcggtgcctatggcgacatagcgggcaccatacagaaagcatatcaggcgccccttccagcagttagcttcactgacaatggcttttataccgccaatacggacgttctaaataatgcaaaagtaggcatgataatgtacaccgacgagtcgcctcgtaagtggaatattattgccagcatcgataagtctaccggactcattacgggatgggacaactgggcggactcatcagcctatggtactcctgctacaggctctaatgtcactgtagatcctgaaggaaaattatggacactgaattataatttaatttttccaagcggaggcagggcaaatcagggtgttattgcagagcttggattgctaaaccagaatggaaattcaagtaatgttaatgggattgacctggttaacctacctcaatctacaagcgacggggacaccgcgttgttgataagaggtggtggatactcaggctctaaaggatggctgactggtgcctctattcgaggatataaaaactacggattgtggtttgcatacaccccagaatacgtggctgcaagcgacatacgatttgccacagcatcaaatattggaatccagtttactggtggtcatgctacgtattcaatgacatttgcactgggcggcagcgggacatttaaggatgttttgcagacgatgttagatcctaagggattcacggtcaggagtggaagacttgctgcagtaataactggtacagccaccctttctgctaacataaaatgttatcgattaaacatttcaagtgcagccacaataacgctacctaataccgacggtctgtccgctggacactgtcaggagctattgatgtacagaaacacagctattacaattcaatcattcaatggtacaacgttggtgtcaataggggctggaggttcatatgcatcgcagtcatggacaccaacggctggtaagcgctacaccctcgattgggatggcagtgcctggaaaatatgggagtaa

SEQ ID NO: 271996 - DNA, 444 bp, Klebsiella pneumoniae; identical to SEQ ID NO: 94646

SEQ ID NO: 271997 - DNA, 618 bp, Klebsiella pneumoniae; identical to SEQ ID NO: 94645

SEQ ID NO: 271998 - DNA, 606 bp, Klebsiella pneumoniae; identical to SEQ ID NO: 94644

SEQ ID NO: 271999 - DNA, 531 bp, Klebsiella pneumoniae; identical to SEQ ID NO: 120992

SEQ ID NO: 272000 - DNA, 624 bp, Klebsiella pneumoniae
atgagtgtagctaattgcataaagatcaaggggttaggatctgaatcgactgggtatctttttaaggcaagttcctgcgatgcaagttttgtgatctcatcgaagcatggtctttgccatcagaagacaagttgtgagccattcaaagcaaagacagcaggatgttgtaggcaatgcccagtccaactcagcttagatactatttcattagaaaactctaaaatgagcctcaatgccataaagatctttagtttccctgatagagacttggctatcactcttgtcgagggatattctagtcatcctttacgcatcggtagtgaagctaatattagtacaacacattattacctcaatgcttataaacaagatgatacggaaccagggcgtattatgctcaactttcctaataaatcaactgatgggcttatatattataatatagaatcgaactcaacacctgatttggtcgaaaagtctagtgggtataaaggtgtttctggtgcattagtcttagaatatcctgcgtcagatttcccaatagcacatgctgttgtaatagaaaatggtaaaaataatgatcttgttgctgaatctctaactgcttttgattctttcacataa

SEQ ID NO: 272001 - DNA, 411 bp, Klebsiella pneumoniae
atggatattgaaatcaactactgcaataacatcgataaagcttgcattacactatcagaaaataagcttaacattaagttcgccccaaatggcacgggtaaaagcaccatatcccgtgccattatgcacagtgttacccaggatacagacggtcttaacagtctgctaccttttaagtttcgagctgcgaatcctgctgattttcagcccagtgtaatgggtacagagcatattcaggatgtaatgtgctttgatgaaaagtacgtatctcagttcacatttcaacctgatgaactggtcagtaacagctttgacatttttatcaaaacagaagcctacaaccaaaccgaacgagagatcgactcgatggtaatggctatccgacaggaattcagcggctttgttgaataa

SEQ ID NO: 272002 - DNA, 186 bp, Klebsiella pneumoniae
atgttcgccctggccgacgtcaactccttctacgccagttgcgagaaggttttcaggccggatttgcgcggcaaacctgtcgtcgttctcagtaacaacgatggctgcgttattgcccggagtgctgaagccaaacggctgggtataaagatgggaaccccctggttccagctcaaagaggcgtag

SEQ ID NO: 272003 - DNA, 198 bp, Klebsiella pneumoniae; identical to SEQ ID NO: 94790

SEQ ID NO: 272004 - DNA, 621 bp, Klebsiella pneumoniae; identical to SEQ ID NO: 239118

SEQ ID NO: 272005 - DNA, 405 bp, Klebsiella pneumoniae
  misc_feature (378)..(378): n is a, c, g, or t
gtgaaagcgtactatatacttggacataacgttgcatggcttaacggtatatgcctgattctttttgttattggtgtggtcggtgcgctggcaatggttgccatccctgaaaaattcaatcttcgagttaacagaggcgatacattcatatactgtgcgcttatagcggtggttgggttttccgggatgttcgttatctccattcactcattttcgatggatgaacttgaagcaggtagacactggaaagatgactgccggacacttgaggtaaacatgccgacaggcgcttttaccagccctgttaataaactggactgtgatggcatcatcattaatgtgcctggtgggcagtattattcctatatccatcagtgngaattatataaagctaactcaaaatga

SEQ ID NO: 272006 - DNA, 405 bp, Klebsiella pneumoniae; identical to SEQ ID NO: 152580

SEQ ID NO: 272007 - DNA, 357 bp, Klebsiella pneumoniae; identical to SEQ ID NO: 215846

SEQ ID NO: 272008 - DNA, 225 bp, Klebsiella pneumoniae
atggaacacgtgaaaggaaaaatccagcagggggcagggaacgcctattttgcagggatgcagtggcgcggtattacacttggacacgccgatgctgcagcgcttaatctgtttgatatcgatatcagcaaagctcaggcactcgaagcacgcacctggttgcttcagaacaaagcagaattcatcgctctgatcctaggcattgaagttgtaaaggtcgggtag

SEQ ID NO: 272009 - DNA, 216 bp, Klebsiella pneumoniae; identical to SEQ ID NO: 219510

SEQ ID NO: 272010 - DNA, 303 bp, Klebsiella pneumoniae; identical to SEQ ID NO: 239334

SEQ ID NO: 272011 - DNA, 201 bp, Klebsiella pneumoniae
atggtgccgataataggagtcgaacctacgaccttcgattccaatgacgtatttcataagtcattgattctacgaaccgaatgcgctcacagtacaatttatacgtacaaaaacacattacaaacgcccgttaactttagcggggtaaaagatgaaattcaagcatggtcgttacagaccaaaccaatatctcatttgtga

SEQ ID NO: 272012 - DNA, 2673 bp, Klebsiella pneumoniae
atggctgttaatcagacgaaaatttttgaatatctcgagcaactgattgaaaaaaatgataaaaatgaatttatatacggctttttaactgcttttgagttccctaaatctaccctgagtcagattcggcaaggtactgcgcgtaatgttgcgaaagagccaggacacgttgcattaaaaaataaactctactaccaaccagtagcggataatgatgatcttgaatctgcttttgaccaacgtattgccgatgcagcggttgcaaaaaataagatccgctttgttctaataacaaattttgttcgttttttagcctgggacacactgacacaggaacgcctcgatattgagtttgaagagttgccacgtaactacggttttttcttaccgctggtagggttggaaaaggctattctcaatagtgaaaacccggccgatgtgaaagccgctgagaagatgggaaagctgtttgatcttatcaaggagcgtaatgatttaagcaaagcagaagatattcacgcgcttaatgttttcctcactcgtttgttgttttgcttttttgccgaagacacgggcatctttgaaaaaggtcagtttacttccgcagttaagagctacaccgccgaagatggcagtgatttagatcagtttctgacagacctgtttgccgtgatgaacagcaaaccgaatagcaaattacgcctgtcagttccgattcatttagccgcattcccttatgttaatggtggtttattcgccagtgatgagcctgttccagagttggggttgaagggcagacgtatcttacttgaatgcagtgcaatggactggagtgagattaaccctgacattttcggcagcatgttccaagctgtgattgatgtggagcagcgtagccgcttaggacagcattacacttcatacagcaatatcatgaaggttatacaaccattatttctggagccattgcgttcagagctggaaaaacaacgcacaaacacgaatggtctcaaacggttgcttctccgtctggggaaaatgaaagtttttgatcctgcgtgtggttcagggaacttcttgattgtcgcctataaagaactgcgtcttttggagatggatgttattcaagcacttttagaaagtgatccgcaatcgatctttatgagtagtatccatcttgatcagttctatggtattgaaattgatgattttgcctgtgagatagcacgtctatctctctggcttgcggagcatcagttaaataaacaatgggaagaacacattggttcagcaccaccagcattaccattgcgttcatcaggtaaaatttggagcggtaacagtctgcaaaaagactggcaggaagtatgtccaaaaaaggttgatgatgaagtttatgtgattggtaatcctccctttttagggacggttggtcgttcggagctacagcgttctgatatgcagaaagtgtttagcaacttcaaaacaataggtggtttggattttgttgcatgttggttctggaagggtgcgcaatatatccaaaatagccacgctgaactagctttagtggccactaattctctttgtcaaggggagcaagttgcaactctatggccaccgattttcgcgctagggttacatattcatattgcgtatcagacatttacttgggcgaacaatgcacgtgataaggccgcagtgcacgtagttgttattggtttatcaggaaaaagtaaaacgcgccaactttaccaattagtggatgctaattggcacagtaaactggtcggtaatataagcccttatctggttgaaggaagcaatatcgttgtggagccgaaatccaaaccaataataaaagatgttcctcaattattatttggaaataaacctactgacggtggtcatttgctgatgaatagtcacgaacgagataagcttcttgaagtggagccacaagctgcccgttggataaagaaggttctgggagctgatgaatttctaaatgcgaaagagcgttggtgcttatggctagcagacataacggatgctgagcttagagctatgccgcacgttttcaaccgggttcaaaaggtggctgaagcccgacggaaaagccctgataaaggagctcaaaaaatggctgagcgtcctcatcaattcagggatttaaacaatcctgatgattatatattgattccaagtgtttcatcggagagaagaacatatatacctataggtttttatgatgcaaatgtgatttcaactaatgcaaactacattattcctaatggtacattgtacgaattttccatcctcacctctttaatacacaacgactggatgcggttagtcgccgggcgtctaaaaagtgactaccgctactcagcgaaagtggtttacaactcgttcccatggcctgatgtaactgatgcgcagcgtaaatctcttatcgatctagccaaatcggtgttactaatacgtgagaattatccagaaagcactctggctgagttatatgatccgcttaaaatgccagctgatcttttagaagcccatcaggcactggataagttcgttgatcgtctctatcgtgacaaaccattcaaggacgccactgagcgtttaagctgcttgctacagcgttatgaatcattgactaaagtataa

SEQ ID NO: 272013 - DNA, 909 bp, Klebsiella pneumoniae
atgattaaaattgatcgttcagccgagccggtaccgacctcactaaccatggcgggtaatgttgttgataatgaacgtagtgccgcgcaaagctattacacagctgtaccagctcctagtaaaacttataaatttaagcgatataaagaagatgatatcgtcgaagctttagaacgcctttttcatgggaaatgtgcctattgtgagagtaaatacattggcacccagaaaatggatgttgagcattaccgccccaaaggaaaagtaaatgaaagtcagacacacccaggctactggtggctagcccttgattgggataatttattgccctcgtgcacagactgcaatcgacgtcgcggacagaagatcgctgttttagaggcagatggaactattgtttttaccgatacgatggaaaatgctggtaaggaatgtgcctttcctgtttccggcccctaccgggcgtggaatagccaagataacctcgcccttgaagtccctctattgattaacccctgccaacatgatcctgatgaccatcttagttggcatatcagtaatacgaaggcgccgatcctattggcaaaattattgggggcacagccggatcagaagggtgtaagtagcattgaaatcatggggttaaatagatttggactggtgaatgagcgggcagcagtgttacaacagattgaagttcaagtaaaaaatatttaccagctgatagacattacagcgattatgccagcctgtgaagcgagggatcgctgcctaattaagattgggcaggatatcgatgagttgcatgcctgctataaacctaaccggcagtatgcctcaatggtgaaatcctacatcgaaccgcatatgaaaacgctaaagcgatatcttgttgggttgttgccatga

SEQ ID NO: 272014 - DNA, 2154 bp, Klebsiella pneumoniae
atgagaaagattaaaagactcaacgccgacatcccagacgatttaaaaccggctcgtattgttcaagaagaaagcgagttgagaaaatattttctccagtcacctaaattgcgtagtcacagccgtcctcccattaataaagaaattttttattctgaaagcgtttggtctgcattgcagaaaaccttccaaagccgctgtgcttggtgtgaaacccatgttgcgtcacatgatggagaaattgtccattttcgccctctcagtaacgcaaaagggctaaaggaagaggaaagtctggattcttacggttggttggcatatgtgtgggacaatctttttttgtcgtgctcagggtgtaatcgtgtgcgtcgtaattacttccctgttgggtccgcacgagctccagttctttcaacgtggagaggtgcaaacattctagaaacggtattgttgattaacccctgtctggatgaccccattcggcacctgtcgctcagtcgtgatgggacactggtggccttaacagataaggggcagcacaccctcatgctttttgatctcaaccgaactgacctgatttttttccgaaaaaaacaaatcaatcatgtacattccttcttctccggaagggacggttctgtcgatgaattccaaaaattttatttaagtgatgattgccctcagggtatagtaaatttgatcatagctatgtttatgaaggagcatgttggggggagaccatgccgttccacaaacaaagtcgaatcttttatcaacgacagcgtgaaacttgggtactttgcatttgataacaatgcggataccttaggagagatatttgaggaaattgagcagctgagttacagggatgttgaatatgacaaatttgccagcatcttagattatgaaagtcaggcctctcgtcatctgaaaaaaatcgatattcatcattttaaaggccttggtcacttcaccctgaatctgaaacacagtgagtcaaaatctcttgccccttgtatgatgctactaggagaaaatgcgacaggcaaaagttcaattcttcaatctattgcactagcaatgatgaccgcagctcagcgtaaaaaactgaacctgctctatgacgactttattgcccgggacaatggtgagtggactgtagatcatattcaacctgctgagattagtcttacatttaatgatggtacgagtagcatgtttcgtatcgatgaaaatttcaatgccatcggggaaggtgtcagcaacattgtttttctggcatatggggcaagacgctttgtgaaaccacttaagcaaggaggcctaagaaatagtattataagcaatacgttattcaatccagttgctctgttgtcaaatccaaccggatggttacaagaatgtgatgatgacgtgtttctgtcagttgctagggcaatgaaggagatccttgctctaaaacaggatgatatcattttccgcaatgaccaaagacatatcatggtccgtgcgcacaagcgtaacacaccgcttgaaaatatgagtgatggctacaaggctttgttttatgtggctatcgacattatgcgtcatatgcttaagcgttgggacagcctggaatatgcttccggaattgtcataattgatgaaattgaaacacatctgcatccacggtggaaaatgcaggtggtgagcgctttccggcgagcaatgccaggaatccagttcatatttacgacccacgaccctctatgtttgcgaggaatgtttgatggtgaagtgcatgtgttaaaacgtgatgaaatgcactcaatcaccgaggaagacgatctgccagggtttcagggattgagaacggaacaacttctaacatctgagtattttggtcttcttacacctaatgatccggatcttgaacggaggctagaagatattgccggacaagagggagaccatcaggcggaatatattcgtcaggtagaacaggaactcagtgaaatgactgtgcttggcacgactctgagccagcgtgtagtccatgaggcattagcgcgatatttgatttccgtaacgcgaaagcagcctgaagccaaagatattaaagaggatgccatcagagctatccttaacgtcctggttcaaaaaggttattga

SEQ ID NO: 272015 - DNA, 669 bp, Klebsiella pneumoniae
atgagtaaagatgacgtacaaaaggacattagcggactgatcgtaaatgcttttcagcgagaattctggcttaacatccaagaagaactccataccgcctacgtggctgcaaatgcacttacaatgggaagcatcgcaaaactaggtgagccagaacaatctcgctttcgccctcaagctaggcattacgtactgaatgcagcttttcgaagagctgcagaaaactcgggtattgtttgttgtgacgtggacacgacacctaaaggtgagagttacatcataatgaactctgcaggagtgaagattagtcgaatcgggctgaactattatgaaaagtgcattcgaggtgcaaaacatcgttctttattagcagaattaaacgagagttttgaaggatatacgccagatttatttagcgaacgtgatcaatcagaaggtggagttggtactctaggaatgttggtcttaaatatcaacccacctcacgatcattcgcaagataatatgctggacctaaggattgtcgttccctttaccaatatgaaggggtatcactttaaccgttcagtaagcgagctgcttgagctttaccatactgaacaagctgtagtcataccagacaaggttattccacagctgaagaaacgcctgaaagaacaggaaggctaa

SEQ ID NO: 272016 - DNA, 1149 bp, Klebsiella pneumoniae
atgagagtgggaataacgggatttcagccggaaaggttaactcagcttcgtgaagctcgaggattatctaaaattaatttgggtcgtttggttgaccgttccccctctacgattacgaaatgggagaatggcagtcattctcctgatgcagaagtcattgcgatcttgggacaggttctgaactgtcctgtcacatggtttatcaaaccaacggtgaaaaaagagaacaatccagtttttttcagaactatggcaaacacagcgaaagatttgtgcaatgcttctgagcgttacatggggtggttgcaggaggtttctgcaactttacaggaataccttgattatcctgaagtagatgttcctcatttagaggttacagattaccgtgcaattgatgatgaaatgatcgaagtgatggctgcaaaatgccgtcagcggtggggattaggtatagcccctattaccgatttgcttttgattattgaaaatgccggagttgtatgttctcgttttgaacagggaagcgcaatgatggatggatattctcaatggaatgagtcagagagtcgtccttacattattcttgccagtgacaaagataattattacagaagtcgttttgacgctgcacatgagcttggacacgtcgtattgcacagatatgtcgaaaggcttgattctgtcaattttaaaccaattgaggagcaagcacataaatttgcagcatgtttgatgttaccagaggaagcattttcggtagaattacctccatccatgattcatagagctaaatcattggaaatcatttctccgctagaataccagcgcctatataaaagcgtttctgcacgaggctggagaaaaggcgaaccacttgatgatcttcgcaaaccagagtcagtgagattgctgcctcgatgtatcaatttgttgtttgaaacaaacacattctctaaatcaaccttacttgaaactttaagcatgtcccgtgttgatgccgaagatattctttctcttccacgcggatatttagcagataaaccattacttgatattaattcaaaaattaaactcaagaatagtctgacacctgcagtaagagaggatgagaaatcaaatgttgtcaatttgttcactcgcaaatcttaa

SEQ ID NO: 272017 - DNA, 762 bp, Klebsiella pneumoniae
  misc_feature (601)..(610): n is a, c, g, or t
atgttgcagccatttgatattcatggcttactagcaggtgaaaataacgagaatactcttgaatcatctgtatcattctcagttcctcccgtcgaggttgataggtcggagttggtcacctctctggacgatatctttgctgatgacgatgatggattgctctcatttgctgagcccgatattttcacgttaaaacatgttccggttgaaaagaaaacacagccggacgaaattgccaaacgacagccgtgccctgatttttatcgcttttccccactgtttgagacagtccaaaatggtctgaaaacgggggcgttttcatttgttcgcttccgccatgagttaaaaattcatgaaggtgatttttttattctcaatggggttatgggctatgtagataaagttggtgagcgattggaggaatatggaccttggaatgcccgtttgcatttggtgtttgaaaacggaactgagatgaatatgcttttcctctcgcttacgcatggtctggtacgagatacagactgtctcttatacacatctgacgctgccgacgactccttacgtgtagatctcggtggtcgccgtatcattaaaaaannnnnnnnnngacaaacttatcatccccgcgaatggtttcatgcgcctttagcgactgtgctctcagtgatcaagtacattcttgacggtacaatttcgcaatatcgaatggacaacacgacagggaagattgtggcgaagaaagatactggtcattcgtga

SEQ ID NO: 272018 - DNA, 2745 bp, Klebsiella pneumoniae; identical to SEQ ID NO: 248269

SEQ ID NO: 272019 - DNA, 246 bp, Klebsiella pneumoniae
atgaccgagctctggatgtgggaaatgcagccgggggaaaagtttgcttcaccgggccacacggaaggaacgcttgaactgttttatgttcagtcgggcacgctcacattgggggtaaaggaccatttgtatcgggtaaaaaccggctgttcggcaacggccagaacggacgttcctcatttctacgaaaaccagggggagagcccgctggtatttatcatgacagtacatgagaaaacatcctga

SEQ ID NO: 272020 - DNA, 360 bp, Klebsiella pneumoniae
atgaccaaaaaagtcaatttaatgaccgatgcaaatgctatcgtcaacacggtgaatgaagccgtatctcagcgaattaaacagtatcgtaagcaaaagaaaatctccctcgatgaactctcccgtcgagccggcgtcagcaagggagcgctggttgagatagagggatgccgggccaatcccagcatgccctgttatgccgcctggctaccgcgatgggggtttcggtggctgattttgtggatgtcagttccaaaccgactgtgcatctcattgctgaagatgagatcccagaattgtgggaaggtgaaaaaggcgggagagcaagactgctcgcagggtcgggtgggcctgatatga

SEQ ID NO: 272021 - DNA, 183 bp, Klebsiella pneumoniae
gtgatctttggccagctgacgatgagcctgctgatcgacaactttggctggctgggcaacagcacgatggcgttctcgccggcgcgactggcggcggtgatatgtctggccctcgcgctgtacttaatctatacctcagggaagtcggctacctcccacgaggcggcccgcgcagaacagtga

SEQ ID NO: 272022 - DNA, 165 bp, Klebsiella pneumoniae
atggatatctgttttctggagtggaccagtaatcaacacaataacatcgtgatccattttgaaattgtcgcttttgaagtcctgccaagcactggcgataacttcagcaaaaaccgaatctggggattcactcagtgttatctcatgtttaatttgagcaaataa

SEQ ID NO: 272023 - DNA, 306 bp, Klebsiella pneumoniae
atgaccaataacgaacgtaaagaccttcatctgtggtttggcctgtcatatgcggcctttcttgttatgccgcgagtggcaatgatgcaaatgccaaaagagtggcaagagaagatggcagagctgcttaaccaatatgacgagacaatagatacggctgcatttggcgtgaaggggtgcagagttcaggcgttaaacggtgagggaaaattgataaaaatgccggaagaactgctgaactatcgtcacccacaacccgaaacgaaagcggcattattactcaaggtggctgaaaatgaccaataa

SEQ ID NO: 272024 - DNA, 126 bp, Klebsiella pneumoniae
atgcgcttccatgttatgtgcctgtcttttatccacatcaggctcagtgcatcctggttattccccaacaacaaggattcagttaatctggatatccccaacaacaaaaaagagtatttacagtga

SEQ ID NO: 272025 - DNA, 495 bp, Klebsiella pneumoniae
gtgatagctgaattatctgcggctatggccgctatcaaagagactgcgggtcttgttaaagttattaatgacgcaaaaactgatgcagaagttaaagctgcaactattgatcttcaggggaagctaatcactcttcaggctgagtgtttttctcttggcgatgctattcgccttcgtgacgaagaggtaatgcatctcaaagcaaaaattgcagagttcgaagattttcaaactcaaattgaaggttacgaacttaataagcttgcttctggttctttggtttattctaaaaaaaaggttgtggctggctccgagataattgtgcatctttgcccaaattgtttttccaaaaaagtaatatctatacttcaacctgcagactgttcgtggtatgaagcctatgcccatgcgatgtgcccatcctgtaaaaccgatctaaaaatggatgcaaacccagatgcccaaagcggaaacggaggggcatttggcgtttaa

SEQ ID NO: 272026 - DNA, 279 bp, Klebsiella pneumoniae
atgaccttgcgtttaataagggagttaaaacatattaccacgaacaggcactatctctcccatacccttgcaaatattaacgcttgtactgccaacccccggccaaaaaaacctaaattcttcttgccatgcatccatatcagatttcaaaaaatgatgcctatgatgtgtatcagtgtaactgcatggccccatttggctttcaacaccaatttggtcatccaaaagttttttcagtttattaacgtcaaatatttttacacaagtttttttctttaa

SEQ ID NO: 272027 - DNA, 222 bp, Klebsiella pneumoniae
gtgatttataccttggtggggttaacagtcagcatctggccgggcaactgcgcggcatgcccacatacaagcttcctgcattttggagcgcgcgatagccatgcagcgcaaagcgtctgctctctcagtttcggcctgactaccacgctcgacaacttcagccgttgctacctctcgctcagtatcgagcagactgcaaaaatgccggctgacaccttttag

SEQ ID NO: 272028 - DNA, 123 bp, Klebsiella pneumoniae
atggatagcttaacaattatgtccaatgatatcaacttgcccccccctattagcttgctagtacaggttaaacatttaatgaaacttattgctgtgatgcaggaatatttttcagcagtatga

SEQ ID NO: 272029 - DNA, 300 bp, Klebsiella pneumoniae
atgcaggcgcacggcgcggagctggccgccgcccttacccctgagctgatgaattattccggggaacactccgccgttcagcgctgcgcaatgcagcactcactcgactgtctgcgcgatgccctgctggcctggctggccgccggtgaaaaaattaattatttagcgcaggataatgacgttttaacggccatcggatttatgcctgacgcggcttcgcgcgatgatagccgtgaaaaattcacgcccgcacagaacctgaattacacccgccgccgtgcagaactggccgtgcagtag

SEQ ID NO: 272030 - DNA, 162 bp, Klebsiella pneumoniae
atgctgaatgcctgcttcagcgctaataaatacctgtcagcgcatgaagatgcctttatcgcttacgccggtacggaatggactcaggctgtcaatgcggttcccgtcgccctcattcgcgctttcctgctgcgcattcatgccctcgaaatgaaaggttaa

SEQ ID NO: 272031 - DNA, 1365 bp, Klebsiella pneumoniae
atggctaagtataaggcgtatccggagtataaggattctggggttgagtggctgggggagattcctacatcatggcaaatgtggaagttatcacatgcttatgaagttattggttcaggaacaacaccgacctcaaacaatgaatcttattttcaaggagatataccatgggttactactggtgaacttcgagaaaaaattatttatgatactgataagaaggttaaggaatccaccttacaaattttttctgctttaaaaatccatccagcaggttctgtagtaattgctatgtatggagcgacaatcggacggttaggtattcttggtgtcgatgcaacaactaatcaagcatgttgcgtaatgacgaaatctaaaattattaaaaatcaatatctttattattggttgcaggcatatagaactgacattattcgtctttcttctggtggcggtcagcccaatataaatcaagaaaaagtttcatctttaaaagtctctgcccctgtactaaatgaccaaacgttgatcgttgcttttttagatcacgaaaccgcaaagatcgataatctgatcgagaaacaacagcaactgattgaactgctgaaagaaaaacgtcaggcagtgattagccatgccgtcaccaaagggctaaaccctgatgtgccgatgaaagattctggtgttgagtggttaggggaggtgccagagcactgggaagtatcaaaatttgggtatatctcgttagttgttagaggtggctcaccaagaccagcaggtgacccaactttatttaatggtgattattccccgtgggtgactgttgctgagataacaaaagataatgaaatatatttagatagtaccgatacgttccttactaaaaaaggaagtgagcaatgtagagtgtttaaagcagggacattattgctatcaaatagtggtgctacacttggtgtacctaaaatccttagcattgatgcaaatgcgaacgatggggttgttgggtttgaattgttaaacattgatcatgaatatgcttatttctatctttcaacattgacaacaaatttaagagaaagcataaaacaaggttcaggccaaccaaacttgaatacagatatcgttaaatcgatagcaattccgattccaccagagaacgaaatacaacgaatagtttcctttataaaagaaacaatcaaattgtactcatcaatagaatctggtgctatggagcaagttaaacttctccaggaacgccgcaccgctctgatctccgccgccgtcaccgggaaaattgacgtccgcgactgggttgcccctgatacgcaggatattgaggcatcacaggaggccaccgcatga

SEQ ID NO: 272032 - DNA, 693 bp, Klebsiella pneumoniae
atgtgcggacgatttgctcaatcacaaacccgtgaagaatatctggcatacctagcggatgaagctgagcgcgacatcgcatacgaccctgagccgattgggcgttataacgtggcgccggggactaaagttttgctcctgagcgaacgtgacgagcagttgcacctcgacccggttcactggggttacgcaccagggtggtgggataagccaccgctcattaacgctcgagtagaaacagcggcgacaagcagaatgttcaagcctctatggcaacacgggagagcaatttgttttgcagacggctggtttgaatggaaaaaggaaggcgacaagaaacagccttacttcattcaccgtaaagacggcaagcccatcttcatggcgactattggtagcgtccctttcgagcgcggagatgaagcagagggatttttgattgtcaccgctgcggccgatcaagggctggtcgatattcatgaccgctggccgctggtactgacgcctgaagccacccgtgaatggatgaggcaggatgtaggaagtaaggaagccaccgagattgccgctgacggagcagtgccagcggaccacgttacatggcatcctgtttccaacgccattggcaacgtgaagaatcagggaccagaattaactatgtcactttattattcatcatatcatgaaatctag

SEQ ID NO: 272033 - DNA, 318 bp, Klebsiella pneumoniae; identical to SEQ ID NO: 134631

SEQ ID NO: 272034 - DNA, 564 bp, Klebsiella pneumoniae
atggattactttcagaccggtgggctattaataaatatattaacaatgttagttgccgttggctcatcatgtattagttaccttgtttacaaagagagcacctacccagacgtcattgtttaccttgaacaaaataatgaagttaaaactgttttaaatattgtaattaagaatataggtaaaagtgctgcaaaaaatgtaaccttcagttttaatgaaaatatcttcaagtattcactgtctaatggcgagtgtggtgcgttaacggatggtgcattggtttcaggcataccattccttgcaccaggttcatgcaggatattgaggcttggaaatttcgctgactctaagaagattttaggtgaccaaaaaattagagtaactacaagtttccgtaaggctaatagcaagaaccctttcgcaagaaatattactaatgaaagctatattgaattattatcactggctagggtggatgcctcagataatagtaatgagaaaaagattgctgaaaatctagccaagattgagaaagctttgcttaagataaaaacacaacactaa

SEQ ID NO: 272035 - DNA, 552 bp, Klebsiella pneumoniae
atggacgctcaggactatgggaaacaggtcaacttcgcggacggccgggagtgtggggaacaggtcaacttcgcggacggcccggactatgggaaacaggtcaacttcgcggatggccgggactgcgggaaacaggtcaactttgcagacgaccgggactgtgggaaacaggtcaactccgcggacggcccggactatgggaaacaggtcaactttgcagacgaccgggactgtgggaaacaggtcaactccggggacggcccggactatgggaaacaggtcaactccgcggacggcgcgtactgtgggaaacaggtcaactttgcagacgtccgggactgtgggaaacaggtcaactacgcggacagccgggattgcgtgaaacaggtcaagttaggcaagcactatgggaaatacagcaagtttagtatcccccccatatgtcagcaacaaactaaggggggaggaaataagaaatacaggttattgttttttatcaagaaaattaaacagcaagcgaccatcttcttcagtggtatatgttacctttaa

SEQ ID NO: 272036 - DNA, 2004 bp, Klebsiella pneumoniae
atgtatctgctgtcgacccagctgaagtgcctgctgccaccggagacgcaaataatcccatattccccgtggttaaattcacctgatgaaagcccggtaacttccctgttgctgacgatcgctgcccgtctcgaaagatttgatgtgccagcaggaaatcagagctccagcatctccacactgacagaaaacatactgaactacgcacagcagacctcccgaagactggtccctctgacccgattcgctggtcattttttccccggaatggaacttgttgcagatggcatggatgcgctttcaaataccgatctcagccggcgggaaaagacgacagcagaacttcgtagagatattgaaaatagaatggccaaactcggggtcagttttatcgtcctgattgacgatctggacaggcttgaaccagcacaggcgattgagatcctgaggatggtacgatcggttgctgattttgcccgcttacgctatgtgatgtgctatgaccgcgaagtgctggctcatgctgtcgaaacggccctggaagtgcaaaacggtgcgctttacctgcaaaaaattattccgctctcgttcagccttccgcggccggaaaacttcgctttacgcagggagtttcaccggggagccctggtcatatgggaggaagtatatgggcctctaactgataatgattccctacaaatcctttcacactatatagatgtctatggtgagaggctttgcacgccccgtgaagtcaatcagatactgaatgctatccgttttcgatatccggggctacgtgattatgtgtattttcccgacctgtgcctggttcagctgatttcggttgttaaccctgactttgccggctgggtagagcgttacctcactgtatggtctgtggttgaaaataaggatggcatttcgcatgaagaagaagaaaaagccttgatcgctgaacttactgaatctctcattaaatttggcccgtcccgggcaggttcgttgtgggagttacaggactggttgctgagtatttccgggtctgattctgaccatcttcgattatttgaaacgatttccctccaggaaactgaacgctgtcgccagaaacgcaggctgtccagcagtgagtactggagctattatttttcattttcttcacctcagaatgtcatgtctgatgcggatatcagcgccatcatacaactggctgcgagcgattattcctctctgaaaaaacgtctgctggacagtgtcaccagtaacggtgtgtcatcccggacatggtttgaacacattctcacacgcctttcgcctaccataactgagggggcagcagccagtgcgaagcgcaatttgcttaaattcttcttcagcgacagcgatctggttctgccgtggtacaggaaaagggatttattctttagccaagaaaaaatcggtatcgatggccttgtcagtcaactggctctgcagatgatcagcaagcaccgctcccaggcaattcagtatattgatcgttgtttccggcataccagagcattcgtctgggcaacagtatttttgcgaaacttactgaataacgccgatcagaaagattcagttttcacccgagatgaaatatctcgtttctgtaccacgctcagtgagagactgcaggaaagaaagattcagaatcaaattcctgaagtaccctatctggcatcctttctctatgcgtggcgtgatataactaacgaaaaaactgttacacagtggttatcgggcgttgagctgtccgacagtaattttcttaaaatgttgcttaacctgcgtatgcctgtccgtagtagtaacctgggcgattatctgcgacttgacttggataggctcagtattgtctttggggtcacaggtcttaaagaaaggtttaaagatattaaggacaggcatgatgtcagcctgacagtgatgattgacgagattgaagaggctgtgcgtcttaataaaaatactgtctag

SEQ ID NO: 272037 - DNA, 213 bp, Klebsiella pneumoniae
atgacttcagtacacacgggttacgactggcttttcaaagaacagtctgaaaaaatgtctggcgatatttatattgttctggaacatctgcctccggagcttaaacaagtcgcactccatattaaacagtatctgtattccatcaaaagtcccttgagttacgcgacattcccactgatgctgcctctgtttttattatgttttttcgtatag

SEQ ID NO: 272038 - DNA, 774 bp, Klebsiella pneumoniae
atgaacagtgagcagatatcaataatttccaacctggttgagagcgctcttaaccaggctgaatatcattggcgtaatggtggctataaattaatagcagagagtagaaccggtaccgaagccttaaataagagtgctatggatactgcggtaagtcaaatcccaggacatgaaattgttaaagaaggtgagacaattgtagacgattttatagcgattgttgccgatatgcgaaactctacaaatcacatgttaaatgccagtagttcgatcgagcttgatggaattcaacgtgtattttatgaaacttcagcccttttgcctgctcttgagaaaacaatcaatatatataaaggtggtgttaccgaatatttaggtgatggtgttcttggtttttttaaaaaggatacagaaaatcctgagcagtatatttacgatgcccacaatgctgctaaggattgtttaaacaaatctttggaaattgttaactctgccctgtcatatcgatacaacttacctcctttgaaaattggtattggattggcacttagcaaggcgttagtaagcctctctggaatcgagggttctagacatgctaaagcttatggcgaatgtgtgtttagagcaacaaagctttcaggtggcaacaacgttattcttatcgataacaatttaagagtagcatggccctcttcaaaaggcggcaaactttcatttgtattgagtgatataggtaagggtggcgttcagggctatagaatcaatggtggatga

SEQ ID NO: 272039 - DNA, 570 bp, Klebsiella pneumoniae
atgaatgaaaaaaaaatagagtttctttatcaatctattaatgatacacaagccacaattcgtgcaacagatgtcaaaatcggtttcctttttgtagttatttttcttcctttgacttcagttgaaggtctttctaaggctgtggctaaactttgggattccccatatcacctagggtttgtttcagtaataacagcactcttatggctatgctcagtctatgttttgtttaaaagcttgtcgcctatcactgacatacaaaaacatatgatcggcataattccagctgataccttttatatggggggtatgcctatcatagggaaaaaggattttttcaatattaatgatgttagagcaagtcaggatgttcaaacgtatttatcagctttacctcaggatgaacaaaaattactggaagcattagctagtgaaaaaatgaaagtatctctaattcgtaatgttaaaaacctccgggttaatgtatgcactaatttaactttgggatggcttactttagggatgtttttatcaactttttactacttcagctttggaattcaagcatga

SEQ ID NO: 272040 - DNA, 1326 bp, Klebsiella pneumoniae
atggcaaagcgtcgacaagccaaaaacacactttcggttgaacagttaacagcacgcaagttggatgaacagcgtaacagactaacttatgaggtgatggccaatctcaatattaagaaaagtcagcacctgggcagttctatctggaagcacatccgtaactacgtggatcgcggcaaaaacgttgctgaaatcacgaacaccatggagcgcgatccgaaagttagtcagtcccgtacgcaagaggccaggagacttgcagccaaagaacgtcaccaggaaagcatggccaatgcgaaagagtttgaggccgctcgtcttcagcgcctgacgtcgaagcaaccattgcagaacccttcaccgcgtcagctcaaaagcaaaaccaggcatttacagcaacgtccgacaactaaagtagatccatgggcggttgcgcgtgatgctacgcagtctttagctccccaaaagaaactgacctttggggcggtattgcccctgaccccgtcagcgaagccggaaatcgtcagctatagcggcagtgtaaagccgttgaatggtgttaacacaccagcggtgaatatcccaacgtacgatctgcctctcgctaaaccgaaggttgtcagccacaagctggaaggcattgaaaaggccatgaagatgatccctgtctctggccgccgagagtttgccatgttcgttcataaacatcaggcaagtggccaaacggccaaagaactggccgtgcagttcctggcttcatctgccacctccccggcggcgaatgatttcgctgtagtaccggaaattatcaacgaaacgatagctgttgagctgaccgaacctgaagttgttgaagttaccgcgccggaagtggctgagattttagcaccgatatccgtacatttacgcgatggtcacgagctgaaaggcggctccgccgagcgactggtgcgccagcgtgacacagcagtacaagctgagttcagagcaatggttcgccggaactttggtgatcggtgtgcggtgtccgggaaacacctgggtggcgtgctggaggctgcacacattgaaggggcggatatgggatgctacagcgtcggtaatggcatcctgctgtcaccaactctgcacaaactgtttgatcgccacctgatgggcgttaaccctgaaaccctgaccgttcacttcagaagtgatattgagtttccagaatatgaaggccgcgtgatctctcccctggtttataacctggacaaagcacgcctggcggctcgctgggacgagtaccttcagagggggcaaagtgaacgccgttctgataaatag

SEQ ID NO: 272041 - DNA, 189 bp, Klebsiella pneumoniae
atgacgaccctggaagctctggcatcgagagtggatgtctactccatcgacgaggcgtttctggatctgaccggaatcgaccgggtggtaagcttcgagccttttggtcggcaggcgatttggctcaaggtggaatcaccggacggttacgtacctgtcacatatacgttcgattatgtgacagtgtga

SEQ ID NO: 272042 - DNA, 336 bp, Klebsiella pneumoniae
atgatccgcattgatgagatctggctggccaccgaaccgctggacatgcgggcgggaccggataaagctctggcacgagtcgttcaggtcttcggttcggccagaccccattgcgcctacctgtttgccaacaagcgaggcaaccggatgaaggtgctgatccatgatggcctcggcatctggctgtgtgcccgtcgtctaaaccggggcaagttccactggggcgaatcctggcgaggcaaacagttatgtctgaccgaagaacagttatccgccctcgttcagggcctgccatggcaacgtattggggccgatggcgtcatctcaatcctgtaa

SEQ ID NO: 272043 - DNA, 378 bp, Klebsiella pneumoniae
atgaacgaattaagcgtaaccaaaccctgccaacgccgtcgccggttttcccgggaattcaaagccgggattgtcgcccagtgccgagatccgggcgcatccgtctcccggatcgctctgtgtaatggcctcaacgccaacatggtccgacgctggatcaaggaggcgcgacgagtgcctaaagcaccagcgacaacgccggagttcgtgccggtcaatctgccagcagcaacttcagcacggagccaccactcggtctcggacaagcgtagcaccatccgcatcgagattccccgcgccagtggcgcggttgtcgtggagtggcctgcggagcaggcccaccagtgtgccgccttgttgcgggatctgttgggatga

SEQ ID NO: 272044 - DNA, 327 bp, Klebsiella pneumoniae; identical to SEQ ID NO: 111898

SEQ ID NO: 272045 - DNA, 1506 bp, Klebsiella pneumoniae; identical to SEQ ID NO: 230262

SEQ ID NO: 272046 - DNA, 1266 bp, Klebsiella pneumoniae
atgtttgctctttgcgatgtgaactcattttacgcatcgtgcgagaccgtatttcgtcctgacctgaaagggcgtccggtggtcgtactgtcaaacaacgacggctgtgtgatcgcccgttcaccagaggcgaagcccttcgtcaaaatgggtgagccgtacttcaaacaaaaggacatgtttcgccggcacggtattatcgcgtttagcagcaactatgagctttatgccgatatgtccaaccgagtgatgacaacgctggaggaactctctccacgctgcgaaatttacagtattgatgaggcattttgcgacctgacaggagttcggaattgtcgcgatcttaccgactttggcagggaaattcgcgagacggttctgcgcaggacgcacctcacggtcggtgtcggcatagcccagactaaaaccctggcaaagctggccaatcacgcggcgaaacagtggcagcggcagaccggaggagtggtggatctgtctaatctggaaagacagaggaagttgatggctttgcttccggtggatgaggtctggggagtcgggcgccgcatcagtaaaaaactggaggcaatgggcattaaaacagtgcttcaactggctgataccgatatccgttttatccggaagcattttaatgtggttctggagcgaactgtgcgggagctgcgaggcgaaacatgcctcgggctggaggagttcgcaccggtaaagcaggagattgtctgtagtcgcagctttgggcagcggatttccacctacgaagagatgcgccaggcgatatgcttatacgcatcccgtgcagcggagaaactacgtggcgagcatcaatattgtcggttcatctcagcgttcgtcaaaaccagcccctttgcgcttaacgagccatactacggaaacagcgcatcagtaaagctgctaactccaacccaggactgcagggacataatcaccgcggcgacgaaatgcctcgatgtaatctggcgagacggacatcgctaccaaaaagcaggggtgatgcttggggatttctatagtcagggcgtagcgcaactcaacctgtttgatgacaacgcaccacgaaagaacagtgaaaagctcatggaagtactcgatcatctcaatgcgaaagacggaaggggaactctgtattttgcagggcaggggatccaaactgcctggcagatgaagcgggaaatgctttcgcctcgctatactacgaggttctgtgatctgctcaaagtcaggtga

SEQ ID NO: 272047 - DNA, 348 bp, Klebsiella pneumoniae
ttgaacttacacctgaccgaatcctcagcccatccgggaatgctggctacagcggaatcagagcgcgaatactggctgagccggcagaaagcagcggttaaagccccctcagaaatcgacgttcacacgttccatgacgcgctgggcctgatgtatccgctcaactggtcaacaagtgagaacggcgagtgggaaacgttcatgctgcaggagatggtctgcggtgacgtgacagagatatatgcccgctacggagccagatatttccggctgcgggatgtgtgcaacctgagccatgcgcagatcacaacgcgcattaaggaggaatttaacctgttccggaaatga

SEQ ID NO: 272048 - DNA, 552 bp, Klebsiella pneumoniae
atggctggcagcatcacccttcttcattttttcggcatccgaggcggctccggtcagcccggcctccttcagcgccgccacaatctgggccttgctgagcaacccgaggaagttatccgctgtcggctgccaccagtcgcgcagatggaacccgagcgccgcctccacgccatcgaggtcactgcggcgggtatggccacattcacgggtctggacgccatcgacggaacaggcggtacagaaggccatcagcgacatcagggtctgtccgtcgagggtaaagaaggtggtgaaatctttctgccagccctccggcagcagggcttccagacgggctttctcctgcatcagataccgccatgcctgaccgtcctctccggtcggggcttcactggtcaggccgctgtgatgcacctcaaggcgcaggacaaacgggtgccgggtggtggtgcagtagtcaaacacgcaactgcacagccgccaggccatcagggccacggctttctgtggctgcttaaccagttcggcctgaaccgccagtgtcctttctga

SEQ ID NO: 272049 - DNA, 1158 bp, Klebsiella pneumoniae
atgagcaagatatttaaatcgctgataacagtatcaggtcgggaaaagattgctgctgccatcgtcagcgggaataaagttattttctctgaaatgtccgtaggtgatggtggtggtagtgcgacaattcctgatgaaaatcagatttcattggttaacgagcgcttccggacgcaactgaacagtctgaagttgtccgataccgtgaatatcataatcgcggaaatgataatcccgccagaggtgggcggatttaccatccgggaagcggcgctgtttgatgatgctggcgtgtgcatggcggtggctaacgtcccggaaacctataaacccgcactggctgaaggttcggggcgatttaccatcctccgtatctggctggctgtcagcagtaccgaagctgttgagttggtcgttgaccctggtatcgtgctggcaactgttgaggatgtgattaacgctggtaatgagataaaagattataccgatgagcagttgagcgagcatgctggctcgcgaaatcaccctgatgccacgctgaaggataaggggtttacccagctcagtaacgccactaccagtagcgatcaggataaagccgcaacgccgctcgcggtaaagctggcagttgaagctgccatcacggcagcctgggagctggataatcccatcggcaccgtgaagttttacgcgcagaatgtgaacccaaacgagcgctacccgtggacagaatgggtgtacaccggcgaaaacaaaactatccgtgtggcaaaagaggacggttcgaacgtcggcgccaccggcggcagcgatacggtcacccttcagcgggcgaatcttcccgccgtgcagattgatgtcagcggggaaaccagcgagcagcccgagcaagcgctgaccacaaaacccgccggcagacacaaacacggcggcgtacccagccgggaaaatccgtgggagattggcggcgatatcagccagcaatttaacccggcaaacctgggcgatactgacgagaccccggatcatgagcatgatattgatattcctccgcatcaccatgacgtcacaggcaaaaccgccaacctcggcgaaggtaaatcgttcagcgtggtggaagcccacaccctgctgatgtgctgggcgcgggtagcgtga

SEQ ID NO: 272050 - DNA, 195 bp, Klebsiella pneumoniae
atgctcaacgtaaaagaaaataaatgcattaaagttaaaggcatggtactcaccggaaccccagagcgccctgtgtattctggtggaactgtaactaattacaaccctgaaacctgtggtatggaagtgaaagaaaaatatcacgagccttcatggagtaacatttcaaaacctgtatttgattccggtaagtaa

SEQ ID NO: 272051 - DNA, 2220 bp, Klebsiella pneumoniae
atgaccagactgccagaatcctcactgtgggaagaagagattgagctgatttccagacgcgagcgcgtttctggggggctggatggtgtggcaaaccggccactaaaaagcctggccaaccgcactcgctttctgaaagagaaggcagacgagtcaagtgaaattattgctgaaaaagtcagcgcagcgaagacctttgcggaaggcgcgacgctggattcacctcgcgaagagatcttgtatggcgcctaccgccttgtgtggacgggggaatatccaaagaccgtgccggcagcgtcatcgcctgaatctacgggtgggatcggtgcgggccggtgggcatacacatctgatgcggcaattcgccgggaaatgggatcggataaaccgggcatgggcgcaggccgatcgaaactggagcagcccgggaacgtacagaacgcactgagggaattttatgccgacgcgtttcctggaatagacccgaccggacagacgagctcaacccagggcattcttgacgccatcgcccaaatcaacagccaggtcgacagtacctttaacggtgatatcaccacctatccccgactggtattccgtggtggcgtgtttctcgcagcgggtttgttggtaaagtccaatattgtaattgagggcaatgacggtacgttatttgttccggaggccgggactgatgcctctcacgtctggatcaccaaaggcaccggggccaccacgcccagcggcggttcaaagcggttattccggcctgtttttcgcaacatcaaaataggttacggcttccagaataaatttgatgatgttgttattgcagagaacgttggcggcattaagctggagcacggctcttatgcaattatggaaaacgtggaaatgcggtatctggacggagaggggttaactggcgaatcggtgtgggactccactatttataaccttcgtatcatgcactgcggtaatacgcgagacccaaataatattaaatatgggttgaattttggccccggtagtgatgccactgatggctgtaacgcaaacaggttttatggcctgcatattgaaacctgcccggcgatgatgaaatttggtaagcgttcacggcataactttattatcggtgggaaactggaagggattcgtaataacgacccgttggcttacggcccatccgtttttgagggagtagacggccttcagtttattggcgtggagttgtcatggagcaatatcggtcatcgtatgtttagggcggttggtacgacggtcatgaacgatacgagcgatgatgacacatcagattatgagaatgaccactgccgtgggattgagtttattgggtgtcatacaatagatagccagaacctctcaggggattattttgaatactcatctaagcgggggcgtcttaatattactggtggttatatgcaccatgtacgctacctgttgacgggttctgatataaaccttcggggtgtgacgctcactcagtgcggaccaactctgggaaacattgtcgataacgtactggtggaaggcctgaccgttgagaatcaccgtgtgcttccgtctggcacattcaatgtgttttccgtgtcgggtaaaaacaacattatcaggaattcccatttttccacaccatacggaagtaacagcaatggctgtgcctggattgcgcagagctctgtagctgaccttcgggtagagaacgtcacttttggcgggaaaatgcagtggggtatcaaaggtgcgccttctgcattccagtacaaaaaattcaaaaatctggtcctggccgacggcgccgattatggcgaaatcgtacagggcggattcagcgttgatggccttccgacccgcctgattaataacagtggtggcgcagtaactctgatgcaggaagttgcagctaacacgacagccgtatttcgaggctgcattcatggctccgcctcgctgacgatcagggtagaaaacagtgcaggggcctatgtgggagcagcaacagcgctaacggatttctcaattagcacaccgcaaataaccgggaatctgagcaataacttttctgcaggcggctcaggaatcccgggtgatggccggttttatatatcttcgtcaggtaacgatttgtcattcacgaaccggacaaccggtacggtgaaggtttatctgatcagtattaacgcaaaaatgtag

SEQ ID NO: 272052 - DNA, 234 bp, Klebsiella pneumoniae
atgaaacagggctatatcatccactttaaagcgcgcagcgcagaagggacaagactttatgagggaaaccgttccgtagttatggtttgcggcagagatgggtttgttgatccgcataagctacttcacaaatgcacctcaaggatccttgccgaatatgaagggtggcgaggccctgacgggagccacgaacccgttaataaagtcatcatcgtaagcgtaatgaaattgtga

SEQ ID NO: 272053 - DNA, 957 bp, Klebsiella pneumoniae
gtgattaagtcacctatcaagtgggcgggcggtaaaacccgcgtgatgccgcaactgctgaagcacctgccgaaagctgactgcctgattgagccattcgttggcagcggtaccgtattcatgaatacggaataccgccgttatgtactttgcgacagcaatcgcgcactgattaacttctttcgcgtattgacctctgacaccgggagactgatcgacactgcacgcgtaatgtttctgggaggcaataacgaagagcagtattacaagcgccgagcgctatttaactccatgcattggagcgatacaggcaaagctgattccgctttgctatacgccactttgtttctgtatctgaaccgccattgctttaacgggatatatcgcgtcaataagattggtgaacataacgtcccgttcgggaaatatgccgcaccttactttccggctgatgaaatgcgccgctttgccgaaaaggccaacgacacaaaagccgttttcattgatggcgattttcgtcataccattccttacgttttgcagctggcatatgacgcggttatttactgcgaccccccctacattccggccagcaagacagccaacttcactgcctacggcaagccatttaccctggacgatcaccgcaacctggttgcaaccctgctcgatgctcatcgccagcacggcacccgcgcggtgatatccaacagcgataccccggaaacccgcgagatctattccgctttcaatctccatgccttcagcgttcgccgttctatcagcgccaaaagccgcgacatggccggtgaagtgatcggcgtgattcctgattcagtcgactgctacacgcgtagttgcgctagctgcgaagacgtcgaggaatgcttagcgccgacagagatttggatcgggtttgatatggccgccggcttcgataacggggagccattctga

SEQ ID NO: 272054 - DNA, 546 bp, Klebsiella pneumoniae
atgaataacatgatgcttgacgttagggcattgggcagcgacgacgactcacagctgttcgctgttgggtgtaccttctttgaaccgtcaaccgggcagcttgggcctcagttctaccgcgcgattgacctaaacacggtcaaaaatatcgatcctgcagtggtgatcgagctgctgaaaagggacgccgatcagcgtgtagagatcattagcgcgactcacactgaattagccgccgtggccgaatttctcggattcgtggaaaaaaacgcatcgaaacatgcggagctccagtgctggacaagatcggagggagcggtaaggcagctcatttccgccgtgaagaggcataacctggttgtgtcccgtatcgctctcagggtctgtagtttgcctacgctggttatgctggcgggcgccactggttacgttccgcacccgcgccgctcaacggccacttacatgctgactgacgccgtatatcaggccgagcaggtttgcgagatctggcagcgcctgacctccccgcaccttgaatcgctgtga

SEQ ID NO: 272055 - DNA, 264 bp, Klebsiella pneumoniae; identical to SEQ ID NO: 189442

SEQ ID NO: 272056 - DNA, 357 bp, Klebsiella pneumoniae
atgcaaagttatatcggggctcgcttacgtgaggagagagagcgcttgggtttaagtcagcagtctatgggggagattggcggggttaaaaagctaacccaacttaactatgagaagggtgagcgagcaccagacacgacttaccttaccgctctggctggagttggggtagatattgtttacgtcctaacgggccagagaatgcctgcgcctggtggtatcgccccacaaaatgaagaagaaaaaaaacttttagagaattaccgcgctatggaccaggcggcgcgcttaaacatacaggcggttggtgatgcgttcgcgcaatcaaagccacgatcaaaaattagcggtgattag

SEQ ID NO: 272057 - DNA, 735 bp, Klebsiella pneumoniae
atggaaaatattctctttattgtatcttcggttgcggcgctggctttttgggttgggttggttaagccctcactggtcgggatgccgaacagaaaaaaatcctctcttgtctatcttcttgtgtgccttattactggtggtatggctggatatctttaccccgaacagcgctcccctgaagagatcgcgctagaccgtcaaaaggcagcgcaggcggaaattgaagcgaaaaaatttaaataccccaccactaccgtcgccgagtatcaatctaaaaacaaaaaagagcgtgagggtataatttctaactttatgcaatcagaagcctttcccgagtcagaggcgtccaggttctacaattgcttgagtgaattatcggcgactagaaaagatggcgtgcgtattagcacagcccttggctggtgtgcagatgattataaaaaagatccaaagttgctcgataagcgcacaaacttcgacaccttttacgctcagtttagtggctgggatggtgcttatcgtcctcttgaaaaggtcattaaagaaagtatgaatgatgaagactcatacaagcatgtcaggacctcttacagaattcttatggatggggcccctcacgccattatttcgacaacctttagcggcacaaatgtttatgccgcgcgcgtcaagcaaacaatatctgcggacgtggatattaaaaccggtcaaataataaccattattgatcaatag

SEQ ID NO: 272058 - DNA, 1068 bp, Klebsiella pneumoniae; identical to SEQ ID NO: 244989

SEQ ID NO: 272059 - DNA, 2169 bp, Klebsiella pneumoniae
atgccatcagtgacgaataaaacatcatcaaaagaaacagatgaaatcgacttagggcgacttattggtgagtttatagatcatcgtaaattaattatttcagttacttccctttttacattaatagcattgatatacgctttattttcaactccgatctatcaagccgatgcattaattcaagttgaacaaaaacaagccaatgcgatattaagtaatttaagtcagatgctacctgatagccaacctcagtctgcaccggaaattgcactaatacagtctaggatgataattgggaaaactgttgatgatcttaatttgcaggcacaggtaaaacaaaaatacttcccagtatttggaagaggattttcacgcttaataggtaacaaaccagggcatcttacaatatcgagattatatattccagaaaacgggcgtgatgaaccggagatttctctaagtgtaatagactccaatagatttagtgtcaagcttgataacactactgttgctggatatgttgggcagctaattaatgagaaaggtatttcactaaaaattgatgaaatagatgctgagcctggtactgaattctctataacttatctatctcgcctaaaagcaattacggatcttcaagagagaattagtgtagtagatcaaggtaaagatactgggatgttagtattatcattaaatggtgataatccagatttaatagaaagaattatcaatagtattagtgaaaattatttagcacaaaatatcgcacggcaagcagctcaggatgcaaaaagcctagattttttgaataaacaactaccacaagttaggaatgatcttgatctttcagaggataaattaaatcaatatagaagaaagaatgattccgttgatttatcattagaagctaaagctgtacttgatcagattgttaatgttgataatcaattaaatgaattaacattccgagaatctgagatatcacaactctatacgaaagagcatccaacttataaagcattaatggaaaaaaggaagactttacaggatgaaaaaacaaaattaaataaacgcgtaagtgcaatgccggaaactcagcaagaaatattgcgtttaagtcgtgatgttgaatctggtcgagcagtttacatgcaattgcttaaccggcaacaagaattgaatattgcaaaatctagtgcaataggtaatgtccgcataattgataacgctgttactcaaccaaagccagtaaaaccaaaaaaaatattaattgttcttattggcatagtatttggtgctatattttctgcagggcttgtattagtaagagtatttctccgcagaggattagagacgccagaacaacttgaagaaattggtatcaatgtgtatgcaagtatacctgttgccgaaagtgttgcgaaaagtaatgcaaaagataaaggatggttaaaaaattcaaaagatgaattttcatcatttttggctgtagaaaatccagcagatctagcaattgaagctatcagaggactgcgaacaagcttacatttcgcaatgatggagtcacgtaataatgtgctaatgatttctggagcaagtccaaatgcaggaaaaacttttgtgagttcaaatctggctgcagtaattgcccagacaggaaaaaaagtattgtttatcgatacagatatgcgtaaaggatatacgcataaacttttcaaacaaaagaatattaatggcctatcagatattctatctggaaaaatagatttaaataatgcagtaagaacaatcaacgaggctggttttgattatattccaagaggcatggtaccgcctaatcctgctgaacttcttatgcatagaagatttggggaattattagaattggcaagtggaaaatatgatttgatcgtattagatactcccccgatacttgctgtaactgatgccgcgatcataggcaactatgcaggaactacattattagttgctagatttgagttgaatacagcaaaggaaattgaagttagtgtaagacgttttgaacaagctggtgttacagttaaaggtagtatattgaatggtgtggttaaaaaagctagtagctactatggttatggatataatcattacggatactcgtattcagataaaaatgataaataa

SEQ ID NO: 272060 - DNA, 1050 bp, Klebsiella pneumoniae
atggatagaagaacgttcatctcaacagcgctgatcagtgcgccatttctgaaagtatatactgctaatggggcatctgatgactcctctaatttcttactcaatgacatagatttttccggtgaaaaggatagtactgatgccctacaaaaagttttagaccgggcggcagggcatgcgaaaattgtacctaatgggattcagaaggtattaattcaattgagtggtgttataaaaatatctaaaaccttatacattgacgcgtccaaaattaatatattaggtccagtaactctagttttcactcaaaaaagcagggggcgaaattatgcaatagttcttagacctgatggtcaaggtaatgtttcttacactaacggagttggttcgttatttgactcgataaactttgtctccgaaaataaaattaacttaatttacgcttcaaataatgcaactccgggaagtaacccttcatgcctaattaacatatctcaatgccggtttactggttttaatcgcatctttagtaatggtgtaggtggttggggatggaattgggaccgctgcggtttcgataattgtgattatcttctttatttgattaaagagaaagactcatatgaacgtttttccttttcttcttgcatatggcaaaatggtggtactgcattttatatcgataaccccttaggtcaaatatattggcagggagggagttttgattattttaaagaaatcgctcatatcaaaaatggtcatgtaactattaatgggcatgttgagtttgcagaacgagattcgcctattgtaactattcataacgatatttcttcattcttttttaatggtggatgtatttttattggtaaaaataaaggtcagtattatctatttgagcagtacaatcataatcaggtgacattaaataacgttacgttactaacagacggtgtcaataacgattttacagctttgtctaataagcgagtatctgttagtaacatgaatttcacctctgattttgctaaaaatatattagctaattag

SEQ ID NO: 272061 - DNA, 1242 bp, Klebsiella pneumoniae
atgaaagctaatgttggacgggaaactatatatttatacttagtgcaaatctcaaatataatactccccctcgtgctagttccttatttggcacatgtgttgggcgttgagttttttggaaaactaagttatgcccaggcaataagctatattgctattttttttgtggattttggatttaatttttctgctgcaagaaatatcggaatagatactaataacaacaaaaatattagccgaatttattcaaatgtacaggttatcaaatcgctaatttttactgcggtggttttattaggcattgcttttgttttgttatcaaatcaaagcataattgataaaaagttaacaattttaggtgttttatcagcctcctcgtcaatattaatgcctgcatggttatttcaaggtttgggacgaaattcaaatgtagcttttctcaattttgcatctagattattatcattgttattaattgttttatttgttaagaatcaagaagatcttataattgccgccatttgccagttattttcaccagtactagctggtgttggtatgcaaatgataatgttaaaaaataaagttgtcgattttaccttttctcatatatcttttgaagacattaaaatactttctcgggatagttttcataacttttcagcttcatttttgactcttggctttacttattttaatccaattatcattaaggtgttcttaggtgatagtgttttaggtgtctacagttttgctgataagttagctaatgtgttgcgacagttatatatacctcttgtccaagccaattttagccgagtatgctctttattccatgagcaaaaatattcgactttaaaaaatatgttcattaaaattgcttatgtttttttaggcattagcctttttgcctatatttctaattattttttaggggaggttgtaattaatttatttttctctgagggtgaaggtgtatcgacattgttgcgtgttatgatattcactcagttcattattgctatctcaatgatattagttaatttaatagtgattccggcggggcaaagttattatcttaaaaaagtgtatctgtttgctgtcattttctatttttcaatcatataccctatgattaagtggggtggggtttatggtgtagcaatatcgatttcattagttgaattgttgattgtgtgtctattttttaaattcataaagaaaaagaaaatattaatttaa

SEQ ID NO: 272062 - DNA, 918 bp, Klebsiella pneumoniae
atggctattgatgtttctattgcattggcgacttataatggatctcgctatattaatgaattgttgaattctataaaattacaaacatacaataatttcattattcatgtatgcgatgatggttcgtctgataatacacttgaacttttacatcagcatcctctatacaatgagggaaggttgattgtacatgatgttacaggcggacaaggtgctctcaagaactttaaacgctcattgtcgtactgcgatacggactatatatgtttgtgtgaccaagatgattattggatgcctgataaattagaaactttattaagcattatgaaagataaagaaaatgaaatcggagaacctgttcttgttttttctgatttagaagtggttgattcaacattgaattgcattcacaaatcttttttccggatatctaacaaaagtaatcaatgtagtaatcctgaggattttttaattagtaaccacatacccggttgtgtaatgatgttcaatcgttctctaaaaaatctgtttgatccaattcctgatgatgtgcgcatgcatgactggtggattgctttaattgctgcatattatggaaatatattttatgccaataaaccattaattaaatatagacagcatggtgggaatgtcgttggtgcgtcaggtatgtttaagcaagaaggtattacacttgcaatgattagaaatatccctgaattattaaggagaaacaaagttataacgagtagatttgtagagcgttttaataatttggcaaatccaacagtgaaaaatgaaaaatttcttagtctagtcctaggaaagatcacatacaaagaaagattgtctttacttaaaaaagtgaaatcaggggagtcgaagtatttaacttatttggtatggtggtttatttaa

SEQ ID NO: 272063 - DNA, 837 bp, Klebsiella pneumoniae
atgaagagaatgaaaatttcagtactggtagttctatataataaaatcatatcagattcagccacattacgtacaatgttattatgcaatgatttatgcaatgtagatctcaccgttgtcaataatggaccaaaatcgatcccacaagtgcaagaatttttgtcatctaatgagagtttattccttgggataagatacattgaacatttagaaaataagcctttaagtaaagtatataatgactttattgattgtaatagtagagctgattattatgttataattgatgatgattctaagttggagagtactttctttagaaaaatagttttaaacacctttgatatttgcgttccaaggatattaagcgttgatgatggccaatattattacccgacggtgaaaggcgttccaattacgagtgaaggctatattgatattgatgacctaatgtctatatcatcaggacttactattaaacgcgatgtagtgacactgttgaaaaataaatatggaagtgtttttgatgaaaattttgcattatatggcgtagatacatcattttttctaagattaaaagaactagattgtagattaaatgtcatctgttcttccacgataatgcattctttatcaagagcaaataattctaaaccatcgttatttagagaaagagaaaggctttatgatgctgcaattatagcaaggcgttacccaaatcgcattagaatatattattttgttaaacgcttgctaaaaaatatcattctatttaatcgcgagaatttattttctttaataacttgttttattaaaggtaagcatccacgctgctag

SEQ ID NO: 272064 - DNA, 591 bp, Klebsiella pneumoniae
atgaataatggtgttgatgaatctagagttaaatttttaggcagccataaaagagatgtaactcgttttacatttgctggtattgctaacttaatgtactggcatggctatgatcgattaataaacgcgatcgcagaatccgagtatagagatattattagtttttatatagttggtgatacggaacctgaatactccagactcaaaaaacttgttcatgataaaggtgttgaaaatcaagttcattttttaggaagaatggaagatgatgaaataaacaagttgttagaagaagttaatgtttgtgttgatgcgctaggtaggcatcgaagtggtaataataacaacagctcaattaaatccaaagaatatgcagcaatgggcataccatttataaaaagtcatgttgatgatgcattcgataatgaattttttatttatcaagttaatgcagatgaaagtaatgttaatatatctgaaataattctttggtacaaaaaattacctacagattttgcacgtaaagagcgtaattttgctatagataatttttcttggacaaagattttgaaaaatgctctcaatagctga

SEQ ID NO: 272065 - DNA, 366 bp, Klebsiella pneumoniae; identical to SEQ ID NO: 264975

SEQ ID NO: 272066 - DNA, 642 bp, Klebsiella pneumoniae
atgcattttatcgaaaatataattcaagcatttgatgatccaaatgttgcatgcgcttatggaaggcaacttccacatgagggagctaattcattagcaaaacacgctcgttcatttaattactcttcacatggttatgtttgtggaaaagaaaatattccagagatgggaattaagactgtttttatgtcgaattcattttctgcttatagattgtcaattttccaagagttaggcggatttccttcaaatacaatcctctgtgaagatatgtattatgcagctaaagcagttttagcaggctataaaattgcttatgtgccaagtgcaatagtgtatcattcacacaactacacaccaattgaagagtttaaacgttattttgatattggcgtctttcatacagatgagcaatggattcgagaaaaatttgggaatgcaggtggggaaggtaagaagttcattatatcagaattaagatatttgatcgataaaaataaatggatgattgtgccgctggcaatgattaataattttatgaagttcatgggatatgaattaggtaaaaggtatagacatattccaaaatctttggttcggctttgcagtatgcataagcggttttggaatataacctcatga

SEQ ID NO: 272067 - DNA, 447 bp, Klebsiella pneumoniae; identical to SEQ ID NO: 10873

SEQ ID NO: 272068 - DNA, 366 bp, Klebsiella pneumoniae
atgattgctccaatatttgcagtttgcgcagccagccaggctgtcagggatttgttaggttctactcccgtgcggctttatccgttcggtatgcaggacgacaatatcgtttatccctacgcagtctggcaaaacgtaggtggcttccctgaaaattatctaaaccagcggccagatgcagatcactattctctgcaggttgatgtctatggtgatactgacaccgatgtgatcgccgttgcccgcgctttgcgtgacgcaatagagggcaaggcctatatcacccgatggggtgaacaaagccgcgaccctgaaacaatgcgataccgctattccttcgatgttgactggataacgaccagataa

SEQ ID NO: 272069 - DNA, 594 bp, Klebsiella pneumoniae; identical to SEQ ID NO: 217396

SEQ ID NO: 272070 - DNA, 783 bp, Klebsiella pneumoniae; identical to SEQ ID NO: 199856

SEQ ID NO: 272071 - DNA, 609 bp, Klebsiella pneumoniae; identical to SEQ ID NO: 199849

SEQ ID NO: 272072 - DNA, 309 bp, Klebsiella pneumoniae; identical to SEQ ID NO: 180595

SEQ ID NO: 272073 - DNA, 222 bp, Klebsiella pneumoniae; identical to SEQ ID NO: 206988

SEQ ID NO: 272074 - DNA, 492 bp, Klebsiella pneumoniae
atgaattatggactggtgagcaagcaagacgcgcgcctgtatgccgaagccgtttgcgatgtgatcgggcatggcaaggcgaatgcagctgttttgctgtgtgtcgaaacggccgcagccgagacattgctcggtgattacaaagacccgacgccgcccagcgccggaaccggattaacccaggttgatctcggtaccttcgaatggctccgcgataagtacaaaaacagccgttatgccccggtactgctgaatcagtttggcatcgacctgagccgaacagtttatgcggaactgaggacctcgccgctgatggcgatgctgttttgccgcctgcgctatctggcggtttcagagtcgattccggcgactcgcgaggcccgcgcagcgtactggaaaaaatattacaacacctcggcaggcaaaggcacgccgaaggattacatcgataaatgccagcgcgctggcgttgatgcgctattcacgcagtga

SEQ ID NO: 272075 - DNA, 285 bp, Klebsiella pneumoniae; identical to SEQ ID NO: 245992

SEQ ID NO: 272076 - DNA, 432 bp, Klebsiella pneumoniae; identical to SEQ ID NO: 269934

SEQ ID NO: 272077 - DNA, 1260 bp, Klebsiella pneumoniae; identical to SEQ ID NO: 200116

SEQ ID NO: 272078 - DNA, 396 bp, Klebsiella pneumoniae; identical to SEQ ID NO: 180578

SEQ ID NO: 272079 - DNA, 339 bp, Klebsiella pneumoniae; identical to SEQ ID NO: 207005

SEQ ID NO: 272080 - DNA, 366 bp, Klebsiella pneumoniae; identical to SEQ ID NO: 180572

SEQ ID NO: 272081 - DNA, 3381 bp, Klebsiella pneumoniae
atggcagacgtcgcatctttagcggtcgggctgcacctgaacgcagccagttttaaatcccagctgctgggagcgtatggcgatgcggagaaccagtcacgacggttcaaccgtaatgctcaggcggacgcgaaaaagacggaggacgcctataaaaaggtcggtctgtcgatatccgggatggccagccggctggcggggctggcaggagccggcctttccatcggtacgatcgtcaccacgtccagacaatatggacaggcgttatcagatctgcaggccatcaccggtgcgactgctgctgaaatgaaagcgctggatctggctgcgcaggaaatggggcgcacgacagagtacagcgccagccaggccgccgaagcgttaaagctgatggcgtcggctaaaccggagcttttaaaaacgtccgatggactgcagaaggctacgaacagcgcgcttatcctggcgcaggccgccggcacaacgctgcccgatgcgaccagaacgctggcgctctccttaaaccagtacggggcgagcgcgcaggaagcggatcgttatatcaacgtgctggccgccggcgcgaagtacgggtcgtcggagattgtggatacggcggctgccattaaaaatggtggcgtcgcagccgcacaggccggcgttggttttgagcagctgaatgccgcgattcaggtgctggcagagcgtgaaattaaaggcggtgaagccggcacggcgctgcgtaacgtcatcctgaatctggaaaagggcacggacaagagcctcaagccgtccgtggttggtctcagccaggcgctgactaacctatctggtaaaaatctgtctacggctcaggcagtcaagctgtttggggtggagaacctgaatgcggcgtctatcctggtccagaaccgttcaaagcttgatgagctgaccgcttccctgaccggtaccaaaacagcgcatgagcaggcatccatcagggttaacaacctgaacggcgaccttatggggttgaccagtgcatttgaggggatgatcactaaggtcggaaaaagcagcgatggcgcgttgcgtggcggtattaatggggcgacagaggccattaacggactggctgataatttcagtgtcgtttcagatatcgcgctgtacacgttgatcccgattttatcctcaaaactaacatctgcactgtcggcatcaaccgctggtttacgtgaaaatgtaagcctctggaatcagaaccggatcgctataaagtcaaaggctcagtctgatgccgagaatgcccggcgaacactggaatcaacagccgccactttaaaacgaaatgatgcagaatttggttactaccgtcagatggagcggacagccaaactgcatgggctgaacgtcagttaccagagcgaatttatccggcttatccgacaggaaaccgagcaaacgaacctggccagccaggcgaagctgaagctggcatcagcaaaccgccagctcgctatctctactcgtgcaatgtccattgccgcgggcctggggcggggggcgctttctctccttggggggcctctgggggttgcaactctggctgccacggccatttacgagtttaaccagagcaacaaggtggcaaggcaatcggcgctggatctgaaggacgcagttgtacagacaacagcagaactgctgcgaatgtctcaggccaaaatcgccgtcaaagttgacgattatcaggagcaactggagggaattaacaaagagcgggagaaggtcaaaaatgagttaacccgttacagtgacacgcgcctcaacctggcaaaaagcagagaagatggagccctcagttttctgtttccatcggcgaacagccttcagaaagaaaaaaatcagttgctcggtcagctggaagacctgaattcggcagcggaaaggactcagcaaaaccttattaatgcccggattgccgcgacgggtaaaaccttcgccatcgatacatttttaccacctgagcagccgggtaatactggcccaactggagatgataataacaataatccgtggaccggtgatggtggggaggggaaaaagaacaaggaaaaggttgaccagttcaagcaactgaggcagcaaattgaagaggcgcatgcgtccagtctgggtcgtatcaatcttcaggaggtggaaagtaatcgccagttgcaggatgcggcgaaaaagtacggtgccagtgatgctgacctgcagagggtactgttactgaatgcggagaactaccagaagcagagactggatctggcggcgcagtattcgccggtgaaggaaaccctcctgaaagagcaggaaggcagccgggaactggagtcgatttttaaggctcgcctgctgacggaacaagagtaccagactgcccgaatcactctggccagggatacagccaaagagctgctgcaggcgcaggctgacgaaatagctgctcctaaactggatatcgccggtgaagtcgatcccctcgtctccctgcgcaatcagctggcgcaacgtcagtcgttgctgcaggcgtattacaccggtaatgccatcagcaaggatcagtacgaaatgctgatgcagaaggcgacgaaagagtcggcagatgcgcagtatcagacttcgctggagttgtaccggtcacagggggagatgcagagcctggccgtcgggttatttgaaacggcccatgagcgctcaagcaacttcctgacgagcatgctgacgcggacgagaagctttaaggagaacatggctgacctgttttcctcgctcacacagtcaatcataaaaaacctcgttgatatggccgcacaggcgctggtcaccagttctgtcatgcaaaccatcatgggtgtggtgggagctggagtgagtattgcaggtggtgtttctggagcggctgatgtcggcgcaggaactgcgattcagaatgcgggtaataactttaactttcaaataccgggttatgccaaaggcggtgtcttcgattctccttcattaagtgcctacagcaaccaggtctacgactctccgcagttcttcgctttcgcaaaaggggccggcgtatttggcgaggccgggccggaggccatcatgccgctgacgcgtgccggtgatggttcgctgggtgtacgcgcggtgggtggtggtcagaacgccggcgcgtcggaagggccaaaagtctatatcacgattgaaggcggaaacacctcaacgcaggcgccgtctggttttgagcagtttggccagcagattggctcgtttgtggagaaaaaatacagggagctgatggcgcaggatatgcgccctggcgggatggtctggaatgcagttaaagggcaacgttga

SEQ ID NO: 272082 - DNA, 351 bp, Klebsiella pneumoniae; identical to SEQ ID NO: 180567

SEQ ID NO: 272083 - DNA, 612 bp, Klebsiella pneumoniae
atgattacagttcaggagtcaatggttaatattgagctgagcggtgaattaggaaagcgatttggtaaaaaacataagcgcctagtagccactacaaatgaagctattcaggcgctttgctgtacgatcagtggctttgaaatgttcatgaataaagcgaaagaacgaggattgacttttgcgatattcaagaacgggaaaaatatagggctaaatgatttttcttatcctgttaatgatgaaactataaaaatagtccctgttgttattggtagtaaaaaagcaggggtattgcagactatccttggcgcagtaatcatagctgctgccgttatgcttggacctgccggcgccggtgctttagccgcaggcactgcgtggaatgtcgggttggctggcggcgccatgatgctcggcggcgtcgttcagatgctttccccacagccagcaggcctggcacgaaaagaatccgctgacaataaagcgtcctacgcctttgggggcgtgacgaatactgcctctcagggatacccggtccctttgctttatggcaaacgccgaattggcggcgccattatatctgccggtatttacgtagaagaccagcaataa

SEQ ID NO: 272084 - DNA, 405 bp, Klebsiella pneumoniae
atggggcagatcaatacgatggctccgctcataaccggaggtggttttacccgtgacagcagtttccagcaccgtctgccaggcgccgccgtcggtctgcaggtcaatcgcatacttgacggtattgcccaccacgtcgccgtcatcttcctgtttcatcagggacggccatttcaggcggacacgaacggcagaaagctgggtattagtaaaggtatgggtccaggctgtcttgctggaaacttccgttcctacactgatttcattttcagtaccgggaataccctgaatataagtctgagcctgcgtgccggggcgaaattcccaggacacgccactgaagttttgcgaaccatcagcattttcaagcggggtgccatcaagataaatatctttcccggttaa

SEQ ID NO: 272085 - DNA, 378 bp, Klebsiella pneumoniae; identical to SEQ ID NO: 180564

SEQ ID NO: 272086 - DNA, 468 bp, Klebsiella pneumoniae
atgctgaagataaacacactccgcgccgccatagagaaagcaaacacctggtgccgggcgaacccggaagcctggacggtgtttgttgaagagggtggcattgaaaccaccggtgaaacaccgtctttcatgtatcgctattctctggtgctgttcgtcatgaactacgccgggagcattgacgacttcacgctgccgctgatggcctggctctggtttaatcagcccgatctgctgcttaaccccgataaaaaccagcagataaaattcaccacgctgattaatagcgatgacaccgccgatctgatgtttgagctgccggtacatcagcgggtactggtgcaactggatgaaaacggcgtgccgtgcgccgagcatttgccggagcctcgaccgcgcgtgctggcaccccacgccgcaggctgggggctagtatttgaaggtatgcttcaggaggccggaacgtga

SEQ ID NO: 272087 - DNA, 333 bp, Klebsiella pneumoniae
atgaatcttctgataacggttccattatccagccgaaaaatgaaattcataaaatcaaaagacattccggattttgatgaggctattgcaaggataagtgatttgaatatcattcctctttcattttatgttcttggttttagctatatggacatatcaaattatatttctgtgcctgagaagattgtaaaaaaaaggatcgatcgtgcgaaagagaaagtattggaggtttatccgtcttttagagcatttgtaacggattgctacaggagcaggaaaatatatttttttattgagaatgtttatgaatatgttatgttaataaattgttaa

SEQ ID NO: 272088 - DNA, 123 bp, Klebsiella pneumoniae
atgagttccaaccctagaatgcaaatagccgtaaaattttttcgtgtggaaaatcaaattttcaaattcgaattgagtttatcagtcttttggatgatgatttttattttttttggcaaatga

SEQ ID NO: 272089 - DNA, 141 bp, Klebsiella pneumoniae; identical to SEQ ID NO: 225643

SEQ ID NO: 272090 - DNA, 357 bp, Klebsiella pneumoniae
atgaaaacaacattgcaaaaagtaaaagacggaatcgcggccatgttgctgggcaaaactccagaagaattagcggatgaacagcgccagacggctgtaaaaaatgccgtcgatgactacctgacccgcaatcctgattggcagccattaacgaagccagcgccgaaaactgcgcaagtgaccaattccaaacagcaagcagcccggatcaaaaagagtctgggtgctggggcaggtgtctttacacctcatgttatggatgaggaagcgctccgccgtgcgcgtgaagcagcacgagcattccaagcggctgacccagaccgctacggtgacatcatccatcagttacaaaaataa

SEQ ID NO: 272091 - DNA, 246 bp, Klebsiella pneumoniae; identical to SEQ ID NO: 197727

SEQ ID NO: 272092 - DNA, 462 bp, Klebsiella pneumoniae; identical to SEQ ID NO: 245077

SEQ ID NO: 272093 - DNA, 1482 bp, Klebsiella pneumoniae
atgagtatgtacgaagttggcaccgtagcgggtgccgcaaatcaggcgaaagtgactggtacgacgacgaaatggtccaatgccgcgctgggggtccagcaaggttctattctggttgtttacaggagcggcaatgccgatctgtatgcgatcaagtctgtcgatagcgacacacagttaacgctgtccagaaatatcactgtcgctttctctggcgcgtcgtatggcattattacgtcagagacagccagcacgtcagcttttgccaatcagctcgccagcgccttttctctgtggcggagcgttgttgaaggatggtcgaccgcgctgacgtcgacaggcaacattacaatgactgaccctattaccggaacgtcagttactgttcctgctattaaggggatggcaaaaatcgccggcggtaataatttcagcggcacgcaaagcctggatagtgacgactccggttttattctcggaaaaaatggcgacataggtcttatcaagaaaagcggaacctatgggaaggttatggtgggaaagtcgtctcgattctcagtcgttcgaagcgataaagaccggatatcggcaactgatgagcagactgaaatttttggcgttgaagctaacggtgacgtcaaagtcgcgaattcactttatgctaaaggtgttctacaaagtgattatcaggttaaagcgcaaagtatcgagctttcatcttccacgccttacatcgattttcaccacaataactcgacggatgattatacacacaggattattactgaggatggtgcccttgcagttatgcccggtctgcgtgtcagaggtgggctgggcatatatggtgctagcacaagttacggaggaccctattcggatgggatgattgcaaagttagaaaacgacccacccaatgtgcctgtcggaagcattcttccttctccgcgtttcatcgctcgtttcaacacccgcggttcagactcaaacgtgaacggcgctcaggcttcaatgtggtttgaagagcatgtgggtacgacgcatagacttgtgcttatgtgcgctggatttggtgccaacgtacaatactggcaattcgatgccggcgggaatatcaacagcagtacaaggggtggtgtgcagtttctggggacgtctgacgctcggctgaagcacgatatcacgcctactgatgggcggcagtcagtagaccgcataaaggcgctggagttggtcacgttcgtctataacgatgacgagcagaacaggacacggcgggggattatcgctcagcaggcacagaaagtggacccgcagtacgttaagcaggtgaacacgtcatacatgaggaacggtgagcaggtaaacgacgatcgcctgcaattggataataacgtgatcatgatggacacactggcggcggtaaaagtactgcttgagcgagtagacgaactagaggagcgattatcggcacatggataa

SEQ ID NO: 272094 - DNA, 396 bp, Klebsiella pneumoniae
atggcaaatattagcgatcagctcgcggctgatattcacaacgcgtttaacaaatactacacagacctggcgaaccaggatcagatcttctttggcgtcggtgatgtgacaatcacgaagcaggacggcaccaccgccactgtgcgctcatggaacaaggtgatcggcattgagcttatgtacgaaacaggtgggtggaacctcctgctgacggcacaaggggagatgaacgtcgacaatatgtcgtttgttgttccagctggcagtggggatgcagttcttcgttatggttgttatcttgaccgtaacgggcaaatggtattaaccatcctttcacgattcgacgctttttcggcgcggaataacaatgtaattcgtggatcgtccacaccgtaa

SEQ ID NO: 272095 - DNA, 5847 bp, Klebsiella pneumoniae
atgcgaaatgtgacagcggcgcaaaaggttcaggatactgcggatgccacggcggcggcggttgactccctgaccaccaccgtgactcaacagggtaatctgctgacctcgaccggcaaccggacaacccagctggaaaacgggctggcaaccaccaatgccgcagtggccaaaaaggctgatgcgacagcggtgcagaatttgaccaataccgtcacacagctgggcaatgacctgacggctgcgaacagcgccatcacgaagctgaccggaaatctggcgaataccgataaagcgctggcgcagaaagccgatgcgactgcgctggccacgctcgacacgaaagtgacgcagcagggcaaaacgctggagagccagagcaattcgctgacgaacctgtcgaacagcctctcgcaggtcgcggcagatatcgatgccagcgggcagataccgggtaacctggtcgtgaatccctcgtttgaacgcgggctggatggttacaccgggcggtcaaccgcgaccagtgtggtggaggtttccgttcctcatagcgggacgcgggcgctgaaggttgatccggggaatgtgactccggggcaatacatcccgtttgttcaggggcgaacctatgaaatcggggtatgggttaaggatctcggagcgaccactgataacggagcaggtaacaacaagctgcggatcggcaactccgctggtcagccggtgtttgagcgaccgtacaatagcgggacgatcggttccgactggacgctgatttccggtcgctggaaggccacggagacagccaagctcccggttacgctgagtaacggtttgacagccgggagtcgttgctttgatgatttctatgtcatcgatgtgacagatagtgtcaaaatcgacgccaacgcctccgcattgtcttctctccagaatactgtaacccagcagggtaaagatattgcgtcgcagtccaccagcattacggatctgaaaaacaatctggacacgaccaacgcgaacgtcgcgaagaaggcggacgccgcagctctccagacactgcaaaatacggttacccagcagggcaaagacattgcttcagcctcaagcagcattacaagcctgcagaacaacctgagcaccaccaatgccaacgttgcaaagaaagctgatgcgacggcgctgaacgctctccagaacaccgtgacgcagcagggtagctccatttcgtctcagggtaacagtatcacccagcttaaaaacgacgttgatagcttgtatattggcgcgagcaaccttcttcgtaactccgataagagcggcgccccggctctgtgtctgtctccgacttccggcttcaccagttatgagctgaaagcgattacgggtctggttggtaaaaatatcgctgttaaaactcagtacacgatgactctttggtttaaagagtacgcggatggcttcggaacaactaagccgttcacttctgcagtcatcggtcgttccgctgtcgggactgactcatggtctctgcgatactattcgcagaacggcatcgttacgcgtgatggtgacctgtacaaatgggttggaacaattacagctgaatctggttcgacgcttttcgtaggcgttgccggattgcgattcctgtttgaagataagtcccagaagaccggttgtcagatctaccaggtgaaactggaagaagggaataagggcacctcgtggtcgccggcttccgaggatctgtctgacgcgatttctggcaatagtcaggcgctgagtagtcttgatagccgtgtgactaaagccgaaggctcaatcacgtctcaaggcaacagcatcacccagcttcagaatgagctgaccgcgacgaatactaacgttagcaagaaggcggatgcctctgcactggcctcgctgcagaacacagtgactcagcagggcaaggatataacgtcggtgtccagcgatatttctttactgaagaatagtctggcgacaactgatgcaaacgttgctaaaaaagcggactcttctacgctgtcttcgttacagagtacggtgacgcagcagggcaaagatttgagcagcgttggtaatcgcacaacgaacctggaaaacaatctcaagaccacagacgcgaacgtctcgaagaaggcagacgcatctgcggtggattccctccagaatactgtaacccagcagggtaaagatattgcgtcgcagtccaccagcattacggatctgaaaaacaatctggacacgaccaacgcgaacgtcgcgaagaaggcggacgccgcagctctccagacactgcaaaatacggttacccagcagggcaaagatattgcttcagcctcaagcagcattacaagcctgcagaacaacctgaacacgacaaacagtaatgtcagtaaaaaggctgactcaactgcgctgaacgctctccagaacaccgtgacttctcagggcgacgctctgacgagccagggtaatcgcgtaacgtcgttagaaaatactttaacggtgggcgacaacattgttccaaactccgcaatgttgaataacgctcagggttggggtggtcatgcaacaactgttgacggttatccggctgtgatcgatacagcagcatgggcgccaacttcacctaagttttccgtaacacctggcgacattctagactttagtcttctttgtctggctggtgccgcaatcaacggtctggcatggggtattcgcttcgatggcccgagcctgacgaacaactcggtctacgtggaggcgttaaattatgcagctggcgagaagaaagccgtaactggaaccatcactgtcccggctggcgcgacaactggctatctccaaccttatagcagaaacgccattacgctcacgatctataacattaaggtgacccgcagaaatgccggtactatcgcgaacgccaaggcgatcgctgatctcactaacgaagtgactcagcagggcaaggatataacgtcggcgtccagcgatatttctttactgaagaatagtctggcgacaactgatgcaaacgttgctaaaaaagcggactcttctgcgctgtcttcgttacagagtacggtgaatcagcagggcacttccataagctctatcggtaatcgcaccacatcgctggaaaacgggctgtcgacagctcagaacaacattgccaggaaggctgatgcttctgcattgcaggatctccggaacacggtgacatctcaggggggcgatttaactgcggcgaacagtagcattaccagcctgcaggcctcgatgaaccgtcgcactgtgtttactgtcactgcacggggacctggcaacagcgtaactcctggggtttttgatgaaagcggcaagaacctgtttagccctggtcgcagctgggcgctggtcacttttgcaaaacaaagcgacggatcagcggtgattgcgacctccaaaacatacgatgtctttggcagcgcgaataatggcgacacgatgtcggctgatatcgaggcactggccagtgggacttacgtttgtgtcctgacattcgatgagccatctggcaaccgaggtaagatattgtctgctctggaatctcttggtggtacatccgaagtcgtcaactccctgccgtatcgtggtgcctatattctccttggccgcaaaggcatgaggccgggcgatggtctggaactgcgtgcgccaaccggtggtgacgccactgcccacatttcgacctcagtcgagtttgtgaacggggtaatgatgggactgggcgccgccggcggtgtgatgatgaaggctgatgcgaacgcgtcggcaattaccacgctccagaacacagtgaaggcccaggggggtaatattgactccctgagttcctcggtaacggcgctggagaacagcctcaggtcgacaaacgatacggtgagtaaaaaggccgacacgtccgcggtgagttcactgaccggtcgcgtaagccaggtggaaaacaccatcaccagccagtcgcagagcatcacgtcgctgaccagcaccatcaataccatccgcactcagggagctaatccgtgggttgacggtacgttcgaaagctacggagatggtcatgtgctgggcgggggcggcaccgccgttgtggtggagtcgcagaaattcaccggcaataagagcctgcaggtgagccggggagcgaacaataacggcaacagcgataaacagcttgggagctggcagtcagtccgtgaggatgcgaagttccggtttgagttctgggctatgatgccggcggatcaggcgccctcctccgggtggacaacgctggtcggtatccagtcgcagaatgctgccgggcaaaatgcgtggcaggcggcggtcactgtcagcgaagcctctctgggcgcgcgcgataagtgggtgaaattcacgggtatcgccagtaacaacggggcaggcagaacacgcgcggtggtctggatctccactcgtggcgccaccggcaacggtacccctggctattcactgtatatcgacgatctggtcatcacggatgttaccgatgcgaaagcggcacaggatgcctctgacgcgacggcgagcgccgtgagcggcctgacggcgcgcgtaacggatgccgaagggaaaatcactgcccaggcgcagcagcagacagcactggcctcgaaagtggataacgccaactcccgcgtcgataacatggcgaagacgctgagcgacagccagagcacacaggccagcctgaatacctcgcttcagtcgcagattgacgcgcaggcggccgccaacatcaaaaaccagacgacgctggacaacacgattaaatcggtggccagtatcaccagtacccagcagacgcatgcaacggcactggaggcgctggcaacgcagcagacgaccctgacatccagtgtcggggatctcagcgcttccgttcagaacaccgccaaaaccgtggcggatgtgaatggtacggtgagttcgctgtggtcgatgaaggttgagacggttaacgggaagaatgttggcgcggggattacgctgggcagcaatggtgaaacaagcgatatgatcctctacgctgaccgcttctcgctgtttaaccgtaataatgcgacggctgttccggtgatggttgccgaaggcaatgagctgtatatcgatacggcacgtatcaaaaacagttccctgacctcaaccaaaatcgcggacggttccatcacgaacgcgaagatcggccacgagatccgctcgaatgactttgttgacgggtcacgcggctggcgtatcgctaaggatggctcttcgcagttcaacaacgttatcgttcgcggtcgtgtcgaggctaatagcggctcattccatggcaccatcgacgcgaccgacgggatctttcgtggctcagtcgaggctaacagcttcgttggtgatattgcggcaatgagcaccttcccttccaaggttgggtcggcctggaaatctcgcatcatgcaccatgactcaagtgcgaagggcggcaaaagctatgctatctgtggcctcatccgctgggatgcgggcgacaagaacggctcggttgtcgtggaatgttatgtgaatggcgttcggttatcgtctcagtcgtataacggccgagacaccggggaatcaacccgcgtgcgcttgactgccgtcggcgttgcaactggcatcggcacgagagacaccttggttgagattgtcgtgagtggaaccggcaccagtacgctggaggctggttactgcgtcatgtctcgcggctcaggctcatgggaagcagtagcataa

SEQ ID NO: 272096 - DNA, 1101 bp, Klebsiella pneumoniae
atggcatattctactaatatgaagatgtcatttcctattctttttgaatggtatatacttgtatgtattggtgtgcttatttgcagatctttgattagatatagcgcgcagtttgtaagaactattggatacaatacacgtaatgtagcaattgctggttctttacctgtcgggcaaatgcttgcacaaagtttcattgatgaaccatggctagggtttaatgtatatggtatttatgatgataactacacaatggataaaaataataagtatgttggggatttgcagtgtttaattcgggatgcaaaagatggtaaattagatcgtatatatattgctatgagtatggatgaaaatgacaaaattaagaatttagttaagtcattaacaaatacgacatgttctgtaatgctgatacctgacacattaacacttaatattttacattcaagaacagaagaggtaaatggatttcccattgttccattatttgatacaccattaaatggtatcaatatggttattaaaagggtggaagatatcattttatcattacttatccttattctgatctcccctattctgatcttaatttcctgtgtgattaaatgtacaagtaaaggacctgtactctttaagcaaattagatatgggatggatggtaaaccaataaaagtttggaagttccgctctatgaccgtaatggaaaatggcaccgtcataaagcaagcaacaaaagatgatattcggattactcccgttggtaaatttttaaggcgaacatcattagatgaattaccacaattttttaatgttttatttggtggaatgtcaattgttgggccaagaccgcatgcagtcgcacataatgaattatatcgagatctaattgagggttatatgcttcgacacaaagttaaacccggaatcacaggctgggctcaaataaatggctggagaggagaaacagataccattgaaaaaatggaaaagagaatagaatatgatttagaatatataagagaatggagtatatggtttgatttaaaaatagttttcttgacaatatttaagggttttattcataaaactgcttattag

SEQ ID NO: 272097 - DNA, 297 bp, Klebsiella pneumoniae; identical to SEQ ID NO: 102391

SEQ ID NO: 272098 - DNA, 483 bp, Klebsiella pneumoniae
atgttcaccgggaaatggatgtcgatgatgatcttgatatggtgtttacttggcgtgaagcccgccgcgtgtcaaaatcactcacggtgcagtacgacaaagtgctttatctcattgaagacagcgaattcagtcgtcgggcaattggtaaatatattgatgtttggcattaccctgacggacataaagagctccgacttaatggcatatcacttccctactccacctatgacaaactgtcagaaatcgatcagggtgccattgtggacaataaacgtcttggccgtgcgctggaaatggcgcaactggtgcaggccgaacgggataataaccggtcacaatcagtgccatccggtgacggcccttcacgcaggcgcaaagcccccacgacgaagaaatcacagcgttcactcgatgaggacgatatgggctttgttaatggaatggtcgcctcccatctcttgtgccacagtgggacgataa

SEQ ID NO: 272099 - DNA, 249 bp, Klebsiella pneumoniae
atgcgcccgttcaacacgaccttttgctgcgctggtttctgcacagatggtctgaatgttcagttcgtgcatcgcacggccaaactgtgtatcgccgtcgccgccggttgcatttttattgttgatcctgaatacactggctttgtcgctgtacagtgcaagcggtttaccatgtttttcgatataaccacgggtcgcttcaaaataggtgaaagtagactcagatttcacgaaacgaagctgcattaa

SEQ ID NO: 272100 - DNA, 528 bp, Klebsiella pneumoniae
atgatcacagccgtcgatttgtatgagttcaccggcacaggcacgacggtaacgaggctgctgaatttttggcgcacgttgcttacgtgggacccacagactggcctgagtcatcagcttacgcacagtttctttagaaagatgtacgccatgaatctcagacagcttttcacaggccagcgtcgggccgaaatcgttatagcgttctcgaataatactcagcgcgtatgcggccagtccctgaggcagctgattgttgctggatttaccacgacggcggctggtcatgccaagcggaccatcttcacgataacgcgcaagcaggcggcggcactgacggtcggagataccaagccgctgagctgccatttttgttgtcagacgccggtcgatgacgtcctgaatgatcttgagtcggttaacttcatccaaagtgaaaaactccgctgcgagagccgtcatggtaatccttacttgattatacacgccggacatcttaacttagcccagagcggacattactattga

SEQ ID NO: 272101 - DNA, 255 bp, Klebsiella pneumoniae
atgtgtatccaccttaacttaatgatttttaccaaaatcattaggggattcatcagcgccgagcggggctcccggatcatctccgttaacggcgccgccgcgcactgcgccagcgtcggcgatattttgatcatcgccagcttcgttaccatgtcggacgaagaggcgcgcagctggcagcctaacatcgcctacttcgaaggcgacaacgaaatgaagcgccaggcgaaagctattccggtacaggtcgcctga

SEQ ID NO: 272102 - DNA, 129 bp, Klebsiella pneumoniae
atgcgtttcgccagtcgcttcggcataggttattctctcctgcagttcatcgaaatgctgcagattatcgggttgccagccatccagtgtttctaccgaaaattcggagaagtcgtaagcgtaaactga

SEQ ID NO: 272103 - DNA, 1275 bp, Klebsiella pneumoniae; identical to SEQ ID NO: 243662

SEQ ID NO: 272104 - DNA, 702 bp, Klebsiella pneumoniae
atgtttggccatctgttacgatactttagtttctgtaaaaaagatttattagtatttcatcctgaatctgattactcagataatttacataaagccttctcttttacaaaaaggctaggatttaatgaagaatggaatggggtcacaaaaaacaaagaatatgattatcaggatgtattcagtcatgtctgtctgcagtctggtgtgacagacttttccgcttcagcaggacaatgcttaaagtggagtcattattttcagccatattttgagaatatccttgaatgtcgggtatgggttaccgttggacaactctggaaacaggaacgatttatttacaatccgtcagttgcggattttcagcgctggtctgaaaaagggattcagcctgaagattttagacatcactcggggtttaactttcatgcgtggttgacgacggaaaatggtgtgattgtggatgtttcctttatgagtacgttatcgcggcgattacctgaacacctgagtgaagtcagtggaagtgtgattattggcacgccagagacggttcttcctgagtataaatatgttcccatgattgtcggtcagaggattgttgagaaaatagaaaaacgctctttcattggttttctggcgcacgacgatattgatttatatacagtacctgcaatcttggttccggtatggaaagaatgttaa

SEQ ID NO: 272105 - DNA, 3606 bp, Klebsiella pneumoniae
atgaataccaataacattaaaaaatatgccccacaggcccgtaacgatttccgtgatgcggtgattcagaagctaacgacgcttgggatcgctgcagataaaaaaggcaatttgcagattgccgaggccgaaaccattggcgagaccgtgcgttacggtcagtttgattatccgttatcgacccttccccgccgccaacggctggtaaaacgcgcccgtgagcagggttttgaggtgctggttgagcactgcgcctacacctggtttaaccgcttatgtgcaattcgctatatggagctgcacggttatcttgatcacggcttccgtatgttgtcccacccggagacgccggccgcgtttgaggtgctggatcatgtgccggaagtggcagaagctctgctgccggaaagtaaggcgcagctggttgagatgaagctttcaggtaatcaggatgaagctctgtaccgtgaactgctgctggggcagtgccacgccctgcaccacgcgatgccgttcctgtttgaagcggtagatgacgaagcggaactgctgctaccggataacctgacccgtactgactccattctgcgtgggttggttgatgatattccggaagaagactgggagcaggtagaggttatcggctggctgtatcagttctatatttcggaaaagaaagatgccgtgattggcaaagtggtgaagagcgaagatattcctgccgccacccagctgtttacgccaaactggattgtgcagtatctggtgcagaactccgttggccgccagtggttgcagacctacccggactcgccgctgaaagacaaaatggagtactacatcgagcctgcggaacaaacgccggaagtgcaggcgcagctggcggcgattaccccagccagcattgaacccgaaagcattaaagtgctcgacccggcctgcggttccggtcatattttgattgaaacctataatgtgctgaaaaatatctacgaagagcgtggttatcgcgggcgtgatattccacaactgattctggaaaataatatttttggtctcgatatcgacgaccgggcagcacagctttccggctttgcattattaatgatggcacgtcaggatgaccgcagaatatttagccgcgatgtacgtctgaatattgtctctttgcaggaaagcctgcatctggatatcgccaaactctggcagcaactgaatttccaccagcaggtacaaaccggcagtatgggggatatgtttgctgaaaataacgcgttaacccaaactgacagcgcagaatatcagctgctgatgcgcacgctgaaacgctttgtgaatgcaaaaacgctgggctcactgattcaggtgccgcaggaagaagaagcggaactgaaggtattcctggacgcgttgtatcgcctggaacaggaaggcgatttccagcagaagacggcggcaaaagcgtttattccgtttattcagcaggcgtggattttagcgcagcgatatgatgcggtagtggcgaatccgccgtatatggggggtaattatatggagacagaacttaagaatttcgtctcttcttactaccctcaaggaaaggcggatctttattcttcatttatggtcagattacttttacaattaaaagataatcgcactttaagcctaatgaccccctttacttggatgaatttatcatcatttgaagagctccgaaaaattatacttacaaatttcagcattcagtcattagtacagcctgaatatcattcattttttgagtcagcttatgtcccaatttgtgcttttagcatttcaaataccccattaagctggaatgcaaaattttttgatttatcagatttttatggagaaaaaaatcaagctccaaattttcagtatgcaattaaaaatgacaataaatgtcattggaaatataacagaatcaccacggactttctatgtactcccggatatatcattgcttactctctgcctgattctgcgttatcttgcttcaaaacatccaaaaaacttcatgatgtttgcaatctaaaacaaggattaattactggtgataatgaaagatacctaagattctggcatgaaatcagctataactctttcagtctcaatgaaaaaagaaaaaaaacaaaatggttcccatatcaaaaaggtggtgcataccgtaaatggtatggtaataatgattatgttgttgactgggagaatgatggttattccattaaaaacttttataatgacaaaggtaaattacgctcacgccctcaaaacatacaattttattgtaaagagggtttaacatggacaagtttaactatttcgtcactatcgatgagatatgtaccaaatggatatatttttgatgcaaaaggacctatgtgttttccgaaatcctctttggatatctggaatattcttggctatgcgaatagcaaagtaatagatatatttctcaaacaattagcgcccaccatggattattctcaagggcctgttggaaatgtcccattcaaatttaacgatggtgatttgaacgagataataaaagaactcgtaaacattcacaaacgtgactgggatgaaaatgaaacatcttttgagtttaagagagatatgttggttcatttttcaagagatattaacactattaagggtagttttacactaaggcaaggggaaaataaaaaagcgattaacagaacaaaatttttagaagaaatgaataactctttctttataaattgctttaatctaactgatattttatctccagaaattgaactaaacaaaatcacgttaacgcatgcaactattgaaattgatattcaaaaaataatttcatatgcaataggctgccaaatgggacgttactcccttgatcgcgaaggtctggtatacgctcatgaaggcaataatggcttcgccgatcttgtcgccgaaggtgcttataaaagcttcccggctgatagtgacggcattctgccgctaatggatgaagagtggtttgacgatgacgtcacctctcgcgtcaaggagtttatccgcaccgtttggggcgaagaatatttgcgcgaaaacctcgattttatagccgaagttctcaagcccaaaaaaggcgaatctgcgctggagaccattcgtcgctatctttccacccagttctggaaagatcatctgaaaatgtataaaaagcgtccaatctactggctattcagctccggtaaagagaaagcgtttgagtgcttggtgtatctgcatcgctataacgatgccacgctgtcgagaatgcgtaccgaatatgtggtgccgctgctggcgcgttatcaggccaatattgatcgcctgaacgatcaacttgatgaggcttctggcggtgaatccacacgtctgaaacgcgaacgcgacagcctgatcaaaaaattcagcgaactgcgcagctatgacgatcgcctgcgtcactatgctgatatgagaatcagtattgatctcgacgatggcgttaaggttaactacggcaagtttggcgatctgctggcagatgtcaaagccatcaccggcaatgccccagaggtgatctaa

SEQ ID NO: 272106 - DNA, 150 bp, Klebsiella pneumoniae
atggaagttaagaccaaagaagactggctatatcagtttcgtcgttgttcatcccgggagacactggaaaaagtgattgcccacacgcgttataaacgccttcccgcttcagtctggttaccagagcttcaggcgttatatgcgctgtaa

SEQ ID NO: 272107 - DNA, 375 bp, Klebsiella pneumoniae
gtggctcgtccaaagagtgaagataaaaagcaagcgttactggaagctgccaccgtggctttcgcccagtccggcatagccgcctcgacgtcggccatcgcccgcagcgccggtgtggccgagggaacgctgtttcgctatttcgccaccaaggatgagttgctcaacgagctgtacctcgcgattaagctgcgcctggtgcgcacaatgatcgccgggctggatccggacgagaagcgcccgaaagagaacgcgcgcaatatctggaacagctatatcgactggggcgtgcgcaacccgatggagcacaaagcgatccgccggatggcgctcagcgctgatgaatcccctaatgattttggtaaaaatcattaa

SEQ ID NO: 272108 - DNA, 3876 bp, Klebsiella pneumoniae
atgaataaagtttattcccttcgctacagcgctgtggcccggggctttattgctgtatctgagtttgcgaggaaatgtgttcataagtctgtcagaggcctgagttttccggttttattactgtcccccgtacttttctctacaggaggccttgcgggaacagtcaataatgaacttggctatcagtcatttcgtgattttgctgagaataaaggtatgttccgcccgggagcaacgaatatcgccatttataataagcagggagagcttgtcggcacgctggaaaaagcggctatgccggatttcagttccgtaaattcaggaagcggtgtggcgacactaattaacccgcagtatatcgccagcgtgaaacataacggaggatatacaaacgtcagctttggttatggtgaaagccgttacaatatcgtggaccggaataatgcgccgtcactggattttcatgctcccagactggataaactggtgacagaggttgccccggctgcggtgacggcgcaaggggcagtggctggcgcatatctggataaggaacgttatcctgttttttatcgtcttggctccggaacccagtatattaaggacagtaacggacagctgacacaaatgggaggagcatattcctggctgactggcgggactgtcggtagtctgtcatcctatcagaatggagaaatgattagcaccagttcaggtctggtttttgattacaaacttaatggtgcaatgcccatttatggcgaggccggtgacagtggttcgcctttatttgcttttgatactgttcagaatacatgggttcttgttggtgttctctctgcggggaatggagcggggggcaggggaaataactgggctgttattccactggattttatcagacaaaaatttaatgaggacaatgatgccccggtcacattcagaacatcggaaggtggtgcgctggagtggggctttaacagcagcaccggagctggcacgctgacacagggaaccaccacatatgccatgcacgggcagcagggaaatgacctgaatgccggtaaaaatctgatatttctgggacagaatggacagattgacctgaaagacaatgttgcacagggggcaggttctctgacattccataatgattatacggttgcaacttcaaacaacagtacctggaccggtgccggtattattgtggataaaggcgtgttcgtaaactggcaggttaacggtgttaaaggcgataacctgcataagattggtgaaggtacgctgacgatacagggcacgggtatcaatgagggtggtctgaaggccggggacggaaccgttgttctgaaacagcaggcagacagtaacgggcaggtgcaggccttcagtagtgtgaatattgccagcggacgaccgacagtagtgctgactgatgaccggcaggtaaatccggataacatctcctggggatacaggggaggtattctggatgttaacggtaatgatattggctttcacgaaataaaggcggcagattatggtgctcaaatccacaatggcagtaacaaaaatgcaataatctctctggttatgcatgatgccattaagtggaccgggaaagatacaccaagaattttaggtcgggtttatgagtatttcaatgatgaaacgcagaagactgaattctttatattaaaaaccagcagtattgcgtggtctccttcgcctggagaaaaaatttttccggatatgttcagaggtgctgattattttaatactcttgaggatgcggacaaagaggccagaaaaaatacacaatatattttccatggtaaattaaccggtaatatcagttttaacccgaagagtgccggtacgtttgttatggatggttctgctgatatgtccggaaccttcacccgggaaaacgggcgtctgacactgcagggtcatccggttatccatgcatacaatacacagtctgtggctgacaaacttgctgccagtggagaccattcggttttgaatcagcccacgtcattcagtcaggaggactgggagaatcgcagttttacctttgacagactgtcactgaagaacaccgattttggccttggccgtaatgccatgctgaacaccacgcttgaagcaacagattcgactgtcacactgggcgacagccgggtctttattgacaaaaacgacggtaacggtacggcttttacgctggaagaaggcacatcagaagcggtgaaggatgcagaccgtagcgtgtttaatggcagtgctgttctgtacgggaagacgacgctggatatcatgaacgcaacctttaatggtgatatcagcggtcatgccggctcgcatgtggagttgtcgcgccggagtcactggaatatgacgaaaagctccacgctggattcgttcagaagcaaaggcgggacgctctcctttgtgacagacaactggtcgccgaaaacgctgacggtaaacacactgcatgccagcagtatgaatatcgccatgggggtcagcaccgccgacaacacgggcgaccggattgatatcctgaataaggcaacggggggacataacacactggacctgtcctccctgtttgatcagactgtcacactgaaaaatgacctgactctggcatctgcaccggtcggaacttctcacgggtacttctcctttgccagtctgaacagggggtttactgtttatacccctgacacacaggtgcaggagaaagacggcagagtttactggcaactgaaaagtcatgccggaacaacagaatctcaggtatcaacggatgtcagtgatgatgtgacagatacaacctctccggttgcaccggatacagggagtacaggaagcactgaggctgatgttattgtgtctgaaggaaataacagcaacggtgtgtcgccttcccctgattctccggcagagaatgcgggcacgatggtgaatggcagtacgctgtttaagggcgcggataacacatctcttctgaagaaagcgcgtgccatgtttgccgcccgtgagttcattctcagcgacagtgctgaccgctggacacaggtggtggacaacagtgatgcagacggcggtgcatgggccatgacagggtacagccatgggggatatgacgacttcagcctcaatcagagtggactgaatgtgggattccgccagtctgctgccggtaatgcctggtgggggatgggggtagagttttaccgggggcacagcagcacagatgactaccgggatgatttcagcctgtggggagtgcatgttctggcgggcaaatcctttgccggtggtctgtttgtggatggtatgaccggataccgggagctgtctgaagattacactattcagggagagctgagtgacctgtccggcagggcaaaaagccctatcctgacagcgggtatccgtagcgggtggaagatgcatgcagccccccttgatatgtcgataacaccgactgtttcactgaacggtgcgcgggtggacggaaatcgtctgcagggccgggagcggagcgtggagctttatgatggcgatgccctgtggctgaaagccgggtttgaggcagaaaaagtatccggaaatatgacgctgaaggcaggtatctggcggaatatcactctgaaggatatgcccggaatgaccctgcgtgatgactggaaagcccgtcactatgatgcagagaaggctgaccgctataccgtttcgtttggtatcaacggaaagctgacagagaaactgtcagtgcaggcgaaagtaaacagcagttttgatggttactttaagacggatgcggaaggaatactgggtatcaggtattccttctga

SEQ ID NO: 272109 - DNA, 1560 bp, Klebsiella pneumoniae
atgataacaaaaagagaaagacgtttcctgagaacagtagaatggcttggcaatgcacttcctcatcccgtcatcctgttcataatattaacaatttccttaattgtagtttcgatgattggacaatattttaatattagcgccccagacccaagaccacctggagctaaaggccggaatgatgatggtattatttatattgtaagtttactggatgcagatggagttcgtaaaattctttcgaatctggttactaattttacgggatttgcaccactgggcactgttctggtttctcttcttggtgttggtattgcagaacggtccgggttaatttcagcaacccttcgtcttattgtgacaaaagcccctgcaaaagtaacaactatagctgttgtttttgccggtatcatgtccaacatggcttcagaacttggctatgtcgttttaataccactttcggcaatactttttcattctctgggaagacatcccttggccgggcttgctgctgcttttgcgggagtctcgggtggctattcagcaaatttagtattaggtacaatcgatccgctcttgtcaggaatcacccagcaagcagcgcaaattgtatcatctgattatattgtaggggctgaatccaactggtattttatgtttgtcagtacattttttataacactcatggggtacctgataacagaaaaaatagttgaaccacagttagggaaatacaagggtggagggttcaatcaggatgaacagtcaattcgtaattcatctgatgttacagcagttgagaaaaaagcgttaatgctgtcctttttatctgtacttctactatctgttattgttgccattctggttattcctgaagatggaatcttacgtaatcaacaaacaggattaatcagcaattctccatttcttaaatcaatagtggctttcattttcatattcttttcattagctggtgtagtatatggatatacagcgggaacaataaaaaatagcaaagatattgttgatgccatgactcattcaatgagtacattaggactttatctggtcattatattttttgcctctcagtttgtagctttgtttagctggacaaatattggtcaggttattgcggttaaaggcgggagttttctgaatagtcttgatttgccagattccgtaatatttattggatttatattgatttgtgctgtcattaatttaatgattgggtccgcatctgctcaatgggcagtaacagcaccaatttttgttcctatgttaatgatggcaggatatgcccctgaagtaatacaggctgcttatagaattggagattcagtaacaaacattattactccaatgatgagttattttgggcttgttatggctattgtacttaaatacaaaaaggatgccggtgttgggactttgatatcaatgatgcttccatactccatagttttcctcgtcgggtggtctgtattctttgttatatgggtctttgtactgaacttacccgttggccccggggcatcgacctattatctcccataa

SEQ ID NO: 272110 - DNA, 1113 bp, Klebsiella pneumoniae
atgaacgcccactctgaacgccttgaactacgtggttcgcagcgcctgctgctggaactgatccgtctccacgccccggtgacgcgggctgaactggcacggctgtcgggactgacggcgggggcgatcacccaacagtgccgagagctgatgttctccggcctggtggtggaaggggagcgcaataccgggcagcgcggccagccgtcgctgccgttgcgccttaaccccggcggcggttgtgctatcgggttgtcgttcagtcccggttttatcgatatgacggtggtcgatctcagtggtcgccagctgctgtcgctttgcgaagcacatcaggagaatcagccactggaggcctctctcgcgcagatcaaaaccttggtggagaaaatgctgaaaaagcgccagctccagcacgcacgtattctcggcattggctatgcagtgcccggatttctgaaagcggatggtcgcaagcgccacagcgtaccgtggctggagagctggcgtgaggtagatctccagcaggcgtttgccgacaacctgccgtggccgacgtgggtggaaaataatgccaacgcctcggcggtaggtgaactgtacagcggcaaatggaatgcgtacagcgatctaacctttatcgaccttggctacggtatcggcgcgggtattatctccgggaataaaatgctacgcggcgggttctgcaatgccggtgaagtcgggatggcgtttccatccggtacaccgcgcccgtcgtataaggatttgcttgccacactggagcgtggaggattcagtgaaactaagctaccggagctaatagccgggcagcacccactgctggaaagctggtttgaacgctgtcgtggccaggtggagcagacgctcttcagctgtgtgcagtgggtagacccgcaaatcatcgtactcggtggcgcgatgccgaaaccgattatcagtcgtctggtgcaggaactgaatcaactgatggaagcctgcctcgatcccaaccgccccagagtgaagttagctgcctcttcgatgggagcacagagtgcgtcatgcggcgcggcgatgctcccgttgtataaggtgattaataatggataa

SEQ ID NO: 272111 - DNA, 831 bp, Klebsiella pneumoniae
atggcgtttaactttcaccgggcggcagaggggatcgtgctggccaacagccaccgaggttattccagctgcgcgccggagaacacattcccggcctttgaagccgcccgcctggcgggaacccactgtattgaaatcgatatccacctgacggcggataaccaactggtggtcacgcacgatcaccgtatcgaccgggtatccaccggacacggatttgtggagcagatgacgtacccgcagctgctggcgtgcgactttggcgtgaaataccatccgtcgtttgccggaacgcgcatccccttgctggcggacgtgctgcgctgggcggtggaaaacagcatggggctgattgttgaggtcaaacagcgcaaccgccatgacgagtttgtggcggcgctggtcgcactgctgcatgagcatctggatgccctcggccatatccagttgctgggcttcaaccatgtgctgatcaaccgggtgaaggcgcaaatcccgcaactggcgttacaggtggtgacgctggagcgctacaataaccagcttgcggctgtacagcagtccaatgccggatgcgtctgctttgagttcgagttcgcccatatcgacgacctgcgggcctacaaaaatgccggactgggcgtgcggatgtatctgcatgaaatgaaaaacggcatgacgccgctggagcagtacgactataaattcggctgtgacagtcgtccggtgattatcggctggatgcaggcggggctgattgatatgctcagccacgatgatattccgtatttgcagggactgattgaagaagcaggcctgcgctggaactag

SEQ ID NO: 272112 - DNA, 1077 bp, Klebsiella pneumoniae
atgaaaaaaacagtgatgattctggcgggcggcctgctgtgcagctcgctggcaacggcggcggatagccccgacctgattgcccaagcgaaaaaagagggcagcgtgacctttaacgtctggtacttacagccgcagtggcgcagctttgtgaaggattttgagcagcagtacggcgttaaggtgcgcatcccggaagggaatatcgacggaaacgtgaacaagttgctggcagaagcggggaaaaaaaggggtaaaatagatgttatcgccttgtctgttgcgcaactgccagtggcaatgggagcgaaagcgctggcgaaggtggacgatttgccgggctatggcgacgccattcaccagattcagaacgttgacacccagggttatgccgtggcgttctggggcaaccagaccggatttgcttacgacccgcagcagatgggtgaccgggcgctgccacaaacgctggagcagttgcagagctttatcgacgccaacccgaaaaagttcggctataacgacccgaacaacggcggcgcgggggaagcctttatccagcgcatcgtcactactcagggcgacacgtttaacagcgaagcggagaacgttgacccggcagtggtgaaaaactggcagaaaggctggcagtggtttgctgctaataaggacaaaattacccgcacggcctccggtgctgatagtctgacacgcctgaatgacggcgagctgatgctgacaccatcctgggaagaccatcttgtcggactacaaaaaaccggggctatcaattcgcggctgaaattttacgtaccggagtttggcatgcctggcggcggtaacatcgctgccattgccgccaacagcccacatccggcggcatcacgcttattcctcaactggctgattcagcctgaaacgcaacatgcactgagtaaagtcttcggctccacgccgatgaacaaacagctccgtccggatctgaatgagatcccggagcccacggtgaagttttatggcaaagcgtacagtacacagctcaaaaaagatttcgttcgtgaggtcatgatgcagtaa

SEQ ID NO: 272113 - DNA, 525 bp, Klebsiella pneumoniae
atgaaacgtaaacttattgcctttgtgattctggctacatcatcctgtggatatgcagccaccaaagatgtaacaatgaatcttgttgatagtgacggaaaagagcgaaatattggtaaaataaccatccagaagacaccctacgggctgctgttcacccctgatcttcactccttacccgccggcattcatggttttcatgtacatgaaaacgcaagttgtgctcctgccctgaaagatggaaaaactgtcgctgctttatctgcaggtggtcactttgacccggaaaaaacagggaagcatctcggtccatggtctcctgatggccacctgggtgatctccctgcgctttatgtcactcatgacggaaaagcaacctacccggtgcttgcgccaagactatctgaattaaaggagctcgatggccgttcgctaatgctccacgcaggaggtgataatcatgatgaccatcctgaacctctaggtggcggtggtgcaagaattgcctgtggtatcatcccataa

SEQ ID NO: 272114 - DNA, 225 bp, Klebsiella pneumoniae; identical to SEQ ID NO: 38761

SEQ ID NO: 272115 - DNA, 141 bp, Klebsiella pneumoniae
atgaagcatctgaacctgagaagtgctcagcccggaaaatatcagtacaaaaatgcccgccaggagcataccagcctgccgagtctgcttgagtgtcggttttctgtgctggaggccgagcaggtatggattcttaaataa

SEQ ID NO: 272116 - DNA, 930 bp, Klebsiella pneumoniae
atgaattcaatatttacggaagaaaacttactggcatttactatggctgcccgctatagaagtttcagcaaggcggcgaaggaactgggcttaaccacatcggcaattagttacactatcaagcgtatggaaatggggcttgacgtggtgctttttacccgaactacccgtagcattgagctgaccgagcccgggcactaccttttttgcaaagcaactgacctgctcaacgattaccactccatcatacgtagagttgatgccatcgctcagggaattaaatcccgggtgcgcatttgtattaatcaactgttgtatacccctcagcatacagctcggcttctgcaagtgctcagggaacactttccaacctgccagatagctattactacagaggtgtataatggcgtctgggattcactcattaataaccaggctgatatcgccattggcgcgcccgatacgttactggacggtggtggaattgattacattgaaatcggcatgattcgttggttgttcgcgatttctccggctcatccgctggcgtttattcctgagcccatttctgagagtcagttacgtctgtacccgaacatcatggtggaagacactgcaaacactataaacaaaaaagtcggctggctgttacacgggcaagagtcgattctggttcccgactttaatactaagcttcagtgccagatcctgggggagggaatcggttttctgccagactatatggtgcgtgaagcgatggaaaagtcattgctggtgacacggcagatccacaacccacgtcaggattcacgaatgctgttggcaaccaggcattcggcaagcggtcaagtcactcagtggataaaaagagaatttagcttacaaggaatactgacggggatttatcaggatttgatgcatcgagcgtga

SEQ ID NO: 272117 - DNA, 606 bp, Klebsiella pneumoniae; identical to SEQ ID NO: 18123

SEQ ID NO: 272118 - DNA, 849 bp, Klebsiella pneumoniae
atgggccaggttgaacaggttttttcccatgcggtaaatctgttaatacctgaacagcagcgactgctgacgttactgagtgaggattgtgataacgcacctaacagttgtcgtttagcactgacacattatgaagacctttttcaccccggtgaacaggtcaattttagcgggtctggaataactgttggaaatgataaatggatagaaataaccggttgtcagatgtggcgaataccacggtggacatctgattcagcaagccttgccaaagtcggctggcagcactgggaagagtttatccgccaacaactaagaagcaacgacacattatttctgtaccagggtgacaatccattttatcaggaaatttctcgccaattactcaaccgccgaaaaaatttgctgaaggcgttgtgtacaggagaaaacatcactgcggcagtcaaccagttaattggtcttggaatagggctgacgccatcatcggatgattatttagtaggtttaagcactattttatttattcaaggacatccactaaggaagtatagatacgatttcttagcagcattacaacttgcaggaaataacataacgcttctcagcaaaataacgttagaggaagcatttaatcagcgttatcgggaaagagtcggacggctactgaaccaatttattactgagccacaacccatttctacgcaatatgttactgacataaaaaatataggctcaagttctggatgcgacatgctgtatggcatggcggatgcctgcgccctgagccacaggtccggaggtaattatgtcaatcaggatagttgtaaaaaaaaacacgtattttga

SEQ ID NO: 272119 - DNA, 1548 bp, Klebsiella pneumoniae
atgtcaatcaggatagttgtaaaaaaaaacacgtattttgattctgtttcactaatgtctatctccacgcgcgcaaataagcttgatggagttgagcaggcatttgttgctatggcgacagagatgaataagggggtgctgaagaatctcggtctgctgacccctgagctggaagaggcgaaaagtggcgatctgatgattgtcattaaaggtaccagcgaggaggcgaacgagcggacgctaatagcgattgatgagctgtttgcgcataaagaacagggaggccagcacgaagcacgctatgccacgattgccagtgcgaagaagcatgctccagagagtaatctggcggtgatctctgtcaatggcctgtttgctgctcgtgaagctcgtcaggcactacaaaataacctcaatgttatgctgttttctgacaacgtctctcttgaggacgagctggaactcaagcatctggcacatgaaaaagggttgttgatgatggggcctgattgtggaaccgccatcattaacggcgcagcgttgtgttttggcaatgcagtgcgtcgcggcaacatcggaatcattggtgcctccggtacgggtagccaggagctgagcgtacgcattcacgaatttggcggcgggatttcccagctgattgggacaggtggacgcgatatgagtgaaaaaattggcggcctgatgatgcttgacgcgattagcatgctggaggccgatccacaaactgagatcattacgcttatatccaaacctcctgcaccagcggtagcccgtaaggtgctggaacgtgcgcgcacctgtcacaagcctgtggtggtgtgtttcctcggacgtgagtccacccctgcggatgaagaaggcctacagtttgcccgcggtactaaagaggctgccttgaaagcggtactgttgactggtgtgaaaaaagagagtctggatttgcatccgctcaactggcagctgattgaagaggttcgctcccgtctgactccacaacaaaagtatatccgtggcctgttctgtggtggcacgttatgcgatgaagcgatgtttactgccatggaaaaactctcggatgtgtatagcaatattcacccgaatccggcgttccgccttacagatctcaaccgtagcgtggcgcataccttcctcgatttcggcgatgattattttaccaacggcaaaccacatccgatgatcgatcccaccaatcgcattacccggctcttgcaggaagcacaggatcctgaagttggcgtgatcgtgatggacttcattcttggatttggatcacatgaagatccggttggagtgatgctggatacaattgttgaagccaaagaaattgctgccgcagacggtcgcccgcttgagatcctcggctatgtgctgggaaccgaccttgatacaccgtcgctgaaaaaacagtgtcagatgttgaccgatgccggggttatttgggcaagcagtagcaccaacaccggattactggcacgtgaatttatatttaaaggggaggaaggctga

SEQ ID NO: 272120 - DNA, 1551 bp, Klebsiella pneumoniae
atgaacagcataaaactagaatggaaacgtggtgactgggcggcttactttggactgatgaccaacaatctgactaacctgctgacaatgatgggtctgctaatttttgtcgtcggaatccctactgaaattgtctatggacgcattgcgcctgcctttggtcttgcagtgctggcggccagtgtctgctactcctggtttggtctacagatggtgaagaaaaccggtcgtagcgatgtaacggcgctgccgtctggaccgagcgcaccctcaatctttaccgtgacattcctggtgctgatgccggtttatcagcaaaccaaagatgccaactttgctattcagataggattggtgtggtgctttgtcgaagcgttgatcctggtcggtggctccttcctgggtgagactatccgcaagatgatcccgcgtacagtgctgctttcttgtctgtccggactggggttattactgctggcaatgaacccgatgctgcaagcgttcgaagcgccgacagtttctttcatcgtcctgttattgatcttcattaactggttcggtaagaagccgatttttccccatattcctaccggtttgctgttgctgattgctggtacgtccctagcgtggatatccggtttacaaagcccggaagacattaaagcgtcgatgtcttccttcggcttcaacccgccggaaattcatgtaaggagcttcctgcaaggtttgccgcacgctctgccatatctggcttctgcagttcctttgggcctggctaactacatttttgacctcgagaacattgaaagtgcgcacgcggctggtgatgaatacaacacccgtaaggtcatgatggcgaacggctttgcctccatgctcggttgcatgctgggtaatccgttcccggtaaccgtatatgttgggcatgcaggctggaaagctatgggcgctagtatctgctataccctcgcatcaggcatcactatgtttctggtgccattgtttgggttgggcgcgtttatgctcgccattattcccatgactgctatagtgccaattctggtttttatcggtgtggtaaccgccaatcaggtggtgcgagaaactcctaaagtcgaggttcccgtcattttcatctgtctgttcccatgggtcgccaactgggcattgaccatcgttaacagcgtgatgggcgcagccggaacatccgctgagaaacttggtagcgacctgttgcacagcaaaggcgtctattacgatggactgatgcatctgggaagcggtgcaccgctggccagcatgctgtggggatgcattgctatctttgccattatgaataagccgctgcgcggggcgatagctgcatcctttggagcactgttatcgctgtttggcgtgattcactccccagcggttggctttgcggaaggcagctcgattgtgtttgttgtggcctacctgatgatgcttgctatgtttgccctcaagcatgttattgatagccgtgaaacagtggctgcgtctgagcaggaagagactaaaacgacctga

SEQ ID NO: 272121 - DNA, 306 bp, Klebsiella pneumoniae
atgaagaaatttatggcaattgcagcggtggtggttgtgtcattttcagcccagtccagtttgtgtggtcagagtggctgcaaagttacttttgttgatgtcgatggtaccgaaagaccgatcctgctgcttgatgctgcggagactccgtcgaagagtgctatgagccgggtgtttgatgatgtaaacactaccggtaagacaattcagaccgagctgaaatcctcagtatccgggcatacagataaatcgtcgccggtacaaatgaaccgggtgttaagcccgattaaaatctacagcgcataa

SEQ ID NO: 272122 - DNA, 342 bp, Klebsiella pneumoniae
atgggattaatcagaacgttggtctatgtgggtatcatcggcggcatatttgcctattcacaaacaaaagacagtctagataatcttccacttccggatgtggaattgccttcatcgctgaacagcaatgacattatgaagtcctcagtgttagcggagtccattgccgaattgaaaaaccatggcgtaatggaaggtgtagtcgggatgatgggtgaacaacatgatatccgtggttcagtcaacgaagtcgtcatgatggccggtaataacgatatccagaagcttattcaggatacagtggatgaacttgacagcagtagccggaaaaacagtcagtaa

SEQ ID NO: 272123 - DNA, 945 bp, Klebsiella pneumoniae
atggaaaagaagcaaaatcctaatcaacgtatgctgattaatattggcctggccctttgtggctttgtagctggctcagttgtctgggggcctgccagtgacctgtttaaatcgtatcaatcggctgaagaacctgataacgaacgcaggatcgagcaatttaatcggctaatcagagagtctcaggcgaatcagtcagccggtttagttctgacagaacaggaaaaagagctgattggaaagacggcggcgcaatatttgatcgaccaccctgaaaacctggtggaagctggtaagcgtcttgaagccaaccgagatggagaaaaaacctcagacgttgtgaatacaaaagacgtattgcttgaaacaaaattcacgccaaactacggcccagataacgcagatgtagctgttattgaatttttcgattacatgtgtcatttctgtcagcagtccagtcccgtgcttgaaaaggcgattgcagaaaataaaaatgttcggactttctttaaagacttcactatttttgctgaccgcacacctatctccgggatgggggcaaaaattggtctctacatctttaataactacgggcaggaaaaatactacgagttccacaataaacttatgagtgaagcgagcagggcaatgaaggcaagagtggattatacgcctgctaatctggctgagttagtcaaaggtttgggatataaagaaatactggatcagcaaggcaacttcttgcttactgtcgaaattcgtgatcaactacaaaatattgttgatgcaaatatgatgctggcggataagctcaattatagcggcacgccagtatttattgttatgaacatcaagaacccgcaaaataaaaccaccacaatcatgcccggcgcgcctgatttttatcgtttgcaacaggcaattgataaagcaaaaggcaactaa

SEQ ID NO: 272124 - DNA, 1524 bp, Klebsiella pneumoniae
atgaacgacaaaatcaatcaggacactatcaacaaagccctgtgggccgcgtgcgataccttccgtggcaccatcagtgccgatacctataaagattttatccttaccatgctgttccttaagtacatttcggatgtctggcaggatcactatgacgaatataaaaagcagtatggtgacgcgccggagctgattgaagcgatgatggctaacgaacgcttcgtgctgccgaaaaatgctagtttttatgcactgtatgagcgccgtcacgagccgggcaacggtgagcgtatcgaccaggcgttacacgccattgaagaagccaacggcaccaaactgaaagatgccgggaaaagcgtgttccaggatatctcgtttaataccgaccgtctgggtgaagaaaaacagaagaatactattctgcggcagttgctggaagacttcgccggtgaagatcttaacctgaagccaagccgtgtcggtatgctggacattatcggtaatgcctatgaatatctgatcaaaaattttgctgccagcggtggacagaaagctggggaattctacaccccaccagaagtttcagacctgattgctgaactgcttgatccgcaacccggtgacaccatctgtgacccagcctgtggttctggctcattattaataaagtgcgggcgtaaaatcgtctccgggcataacagccgtaactatgcgctattcggtcaggaagcgattggctccacctggtcgctggcgaaaatgaacatgttcctgcacggcgaagacaaccacaaaatcgagtggggtgataccattcgtaacccgaaactactcgataaaaatggcgatctgatgctgtttgatatcgtgaccgccaacccgccgtttagcctggataagtggggccatgatgaggccgagcacgacaagtttggtcgcttccgtcgcggcgtgccaccgaaaaccaaaggggattacgcctttattctgcatatgattgaaaccctgaaaccgggaactggccgtatgggcgtagttgtgccacacggtgtgcttttccgtggctccagcgaaggtaaaattcgccagaaactgatcgacgaaaatctgctggatgccgtcattggcttgccggaaaaactgttctacggtacaggtattcctgctgcgattctgattttcaaaaaacagaaagtggatgacaaggtactgtttatcgatgccagccgtgaatataaggcgggcaaaaaccagaaccagctcagcgcagaaaatatccagaagatcgttaacacctatcgtgaaggcgataacgtcgagaaatacgcctatctcgccagcctgaaagagattcaggacaacgactataaccttaatattccacgctatgtcgatacctttgaggaagaagacgaaattgatttgctggcggtacgtgctgagcgtgagcaactgaaggtggaactggcgaagctggaagttgagatggcaggttatctgaaggagttgggttatggtgcctaa

SEQ ID NO: 272125 - DNA, 1275 bp, Klebsiella pneumoniae
atggtgcctaagggatggacgcttggaaccttaaaagatttggcagatacgattatggggtatgccttcagaagtgaagattttgttccaacaggtattcctttacttaggatgggcaatctataccagaatacattagatttaaaccgtaaccctgtgtatttacctgattcctttaaagttgactataaaagattcttggtgtcgccaggtgatttggtcatgtctatgacgggtaccatggggaaacgtgattatggttttacagttgaaattccttcaaacactcaatgctcattgctaaatcagcgggtactaaagatagttcctaaaaataatgcgagctctggttatattttgaacctactccggagtgagttgattctatctgtattgtattcatttccaggtggaacgaagcaagctaacttatcggctaagcagctacaagagttaccagtacttattccccccgagttagaacaaaagaaaatcgcccaaatcctgtcaacctgggataaggcgatttcggtgacggaaaagcttctcgtcaacagccagaagcagaaaaaagcccttatgcagcaattgcttaccggtaagaaacgcttgctggatgagaatggggtgagctttagtggggagtgggaacagtttccattaaaggttatggccgaggtgattgtaagccctgttgataaaaaaactgaggccaatgaaattcctgtagaactctgcaattatacagatgtttattacaataactatattaccaataacattaatttcatgaaggctactgctactaagaatgaaattgaaaaatatacacttaaaaaaggtgatgtaattataaccaaagattctgaaacgccaggcgatatcgctatccctgctttggtttcagaagatttaaatggtgtagtttgcggttaccacctcgcaataattcgcccgaaaaataaaattgttgttggttcattcttgaattatcttttttctatgcagaaaactcgctactacttcttcaccttagcaacgggcgcaacaagatttggcttatcagttggtggcataaattatgctcacttcagtattccaaaaatagaagaacagcaaaaaatcgctgccgttctgtccgcagccgacgccgaaatctccgtgctggagaaaaaactcgcttgcctgaaagatgagaaaaaagccctgatgcagcagttactgaccgggaaacgccgtgtcaaaacagaagttgaagaaaccgttagcgcataa

SEQ ID NO: 272126 - DNA, 3285 bp, Klebsiella pneumoniae
atgaatcagtcgtacacaccaaaattccaggaagaatacagcgccaaaatcccggcgctgacgttactgaccagcctcggctggacgtttttatccccgaaacagattatggattaccggggctataaacaggatgaggtggtgctacgcccgattctgcgtgaagtgttgtcgaagcgttcctttatggcgggcggtaaaacctgccgcttatcggaaaaagcgttggataacctgctatcgcaggtctgttccccggcgctgaacgaagggctgctgaaagccaatgaacggatgtataatcatctgctctacggtatcgccgtcacggagtttgtcgacggcaagaaagtgaaccccaccattgcgctgattgactgggaacacccgcaaaataaccagttccactttgccgaggagttctcggtgctgcgctcaggtggtgttgaaacccgcagaccggatatcgtctgttttgtgaatggtatcccgctggcggttatcgaggcgaaaagcccggtcggccacggtaaaaaggggccaaccattgacgaggggatatcacagagtatccgcaatcagctcaacgatgaaatcccacaactgtttgcctacagccagttgctgctgtctattaacgggcatgacggacgctatggcacttgtcatacgccgatgaaattctgggcagcatggcgtgaagaagatattaccgatgcgcagatgtacgccatccgcaatcatccgctatctactgagcaaattgatgcgttgtttgcccatcgcccgcctgccgatcgcaactggtatcagcagttaattgctgccggtgaactggccctcagcgggcaggacaaactgctgatcagtctgttgtcgccagagcgtctgttggagatgacccgcttctttaccctgttcgacaaaaagaacggcaaaattgtcgcccgctatcagcaggtattcggtattaaaagactgctggaacgcatcagtacccgcagaccagacggcggcagggaaggtggtgtcatctggcataccacgggttccggcaaatcttacaccatggtgtttctcagtaaggcgctgattctacatgacagcctgaagcagtgccgtatcgtggtggtgacagatcgcatagatcttgaggaacagctcagcggtacctttgcgtccggcggagaattggccgggaaaaaagacaaagctaatgcaatggcgacgtccgggcagatgctggcgaaacagatcggctccggcaaagaacgtattatcttcaccctgatacagaaatttaactcagcgacaaaactgcctgaatgcgttaataccagccccgatattatcgtcctgattgatgaagggcaccgcagtcagggtggcgaaaaccatgtgcggatgaaactggcgctgccgaatgccgcctttgtggcattcaccggcacgccgctgctgaaaaaagataaaaccaccaataaatttggcccgatcgtccatgcttataccatgcaacgggcggtggaagatcaggccgttacaccgcttctctatgaagaacgtattccggatcttgaggtgaatgaccgcgcgattgacgcctggtttgaccgcattaccgatggtctgagcgatgcgcaaaaggctgacctcaagcgtaagtatgcccgtaaaggtgaggtttacagcgcagatgaccgtattcgcctgattgcgctggatatcgccacacacttctcgaaaaatattgatgagggtctgaaaggacaacttgcctgcgacagcaaaatctctgccattaaatataaaaagtatcttgatgaagccggtttgtttgaatcagcggtggtgataagccccccggatacccgggaagggaataccgaggtggatgaaagtaagctgccggaagtaacgaaatggtggaaggataatgtcggtacgcaggatgaatccgcatacacccgcgatatcatcagtcgtttcgataccgatgataagcttaaattgctgattgtcgtcgataaactgctcaccgggtttgatgaaccgaagaataccgtgctgtatatcgacaaaccgcttaaatcccataatcttattcaggctattgcccgggtaaaccgactgcatccactgaaaaagtttggcctgctgattgattatcgcggcattctggctgaactggacacgacgatcggtaaatatcaggatctcgcctcccgaactcagggaggatacgacatcaaggatattgacgggttgtacagcgccatgagttctgaatataaacgtctgccgcatctgtataaccagttgtgggccatatttgccggtgttaaaaacaaaaatgatactgagcagttacgtgcagtactggtgcctaaaatggaagaacgtgacggagagatgctggatattcatcagaaaactcgcgatgacttctttgaagcgttaaccgcttttgctggatgcctgaaagtagcgctgcagtccgccaccttcttcaccgacaagagctttacggaacaagaccgaaatctctataaagaaaccgtaaaacagatgtccagcctgcgccagtgggcgatgcaggtcagtggtgagcaggtcaattatgacgactacgctgaacaggtgaaaaaactgctggataagcatgttactggtgtcgcggttcgtgaaccggatggcgtatatgaagtgggcaagatgggtaaaactgaaaagccggaagagtgggataacaacaaaacccgcaatgagaccgacatcattaaaacccgcgtcacgaagatgattgaacatgaactgtgcgacgatccctatgctcaggaggcattctcaaaactcctgcgtatggttattgaagagactgaaaaactgttcgaccatccgctgaagcaatatctccttttccgcgagtttgaggcgcaggtggaagcccgcaaactcagcgacatcccggatgcgctggccgtaaacaaacatgcgcaagcatactacggagtatttaaaaaagagctacctgaggttttcgcggtaaacgatgatcaggttcagcataaatggacgaagctggctttcgaagtggacactattattgtcaaagcggttgcggaaaattccctcaatcctcaggatattgagaaagccgttaagacaagcctgttgccgcggctgtttactgcctgtcgagagatcggtgctggaatgaaccaggtaaaccgtatcgttgaaaccatcatccagatcctgcgcgttggtttgatgaaatcatga

SEQ ID NO: 272127 - DNA, 756 bp, Klebsiella pneumoniae
atgagtgagaaaaagtcactatctatgaatgctgtacgttttgtttatggtgatgaaaccatcgtggttcagtgtgtcccacggaaggttgttaaaggcaggatacttatcaaggttcatccggactgccgggtagtcgcatctgtaccacccggaacgccggagcaggaagtgctgtctgcgctgaaaaaacgagggcgctggatataccagcaactgcgcgatttcagagaacaacagacgcatatcgtcccgcgccagtacgtgagtggcgaaagccattactatcttggtaagcaataccagttgaaagtcactgaagacgctactgttccgcagcgagtaaaaatgctgcggggacgtctggaagtcacagtcagacaaaaatctgcggaacgcgtgaaggcgttgcttactgagtggtatcgggaacgtgccagagatgtttttcaacgcagactggatttattggtaccgcaaaccttatgggtaagtgagcgtccgccgatccgtttgcgagccatgcaaacacaatggggaaattgctctgcaaaaggttgcctgacacttaacccatggctggtaaaagcgacctcagaatgcatcgactatgtattgctgcacgagttatgtcacgtcgctgagcacaatcacagcgaggaattttatcggctaatggggcaggttatgcccggatgggaaaaggtaaaaaaacgcctggacgggatggccgggatgctgttggctgatctgtag

SEQ ID NO: 272128 - DNA, 648 bp, Klebsiella pneumoniae; identical to SEQ ID NO: 156655

SEQ ID NO: 272129 - DNA, 216 bp, Klebsiella pneumoniae
atggcaaagtccgtatcaggcagcaagaagccccgtaagcaatacatatctgaatttcgtgaagaagaccttaagctggccgctcgcatcggcgtggccgctgcagcccgtgaactcagcctttacgagtctcagctctatgtctggcgtctgcgacgatatcaaataagcccgcgtcagcagttccggctcatatgcgatgctgctgttcgttag

SEQ ID NO: 272130 - DNA, 372 bp, Klebsiella pneumoniae; identical to SEQ ID NO: 234816

SEQ ID NO: 272131 - DNA, 1452 bp, Klebsiella pneumoniae
atgtatgtccccttacacgtctacagggaatctgacagcaccagtttcacggatttcagacagtttatacagtcgctctttagcgtatggcacacccttactgaatggaaagcaggaaacggcggtaccctatccgtcagccaggagcagacacaccaggatctgatccgcagtttcatcagtctgtgggaaggctggagtatgggggacgtcatcggtaaacctgacgccggggattatgccagccgccttttattccatctgcactacaccgtaagactaattattcctccggtagtggccgacaatgtgtcgtctgcaagacatgcgcatgatgtgctgtgtctatggaatgagaaaagtcgcttctcccggtactgggaggaagaatttcgatggcacagcttcttcctcaatcctgattatattaatctggaaccttcgggcccgcaatggaccacgatgctcaggggcggtacgtataatgaaaaggcagcatcagccatcattttcagtaatgccttatgcgatatgcggctgttgatatcagggtatatcgttgccaacctagagccccaggggaatattgatctcgctgacctggttaaccgtctgggattgtcgtcattatttgaagaaagggatgacaatgacgccgccacgcccgctttcaaaacggccacggatattatcgatataatcctgagaatcgaacattaccggccgcagaaccatgacaactggtatggtgccctgtcagagaccattgaagccctgacctcgtttaatgagagaccgttaatatccggcagagtctattcagggataaaggatgatctggattctctttatggtgcgtttgcgcttctggccatccggctcgccagaacgtcagagcctgtaaccgaacgcgtttcggaggcactggccgggggcctgttttcttattttcgtaaagagcagatcattcatacactcgaaagactcaaacgagacccgtttgtcccttatcaggggtatatgctgtcggccgccgaatatgccggacaggttccctttttcaatggcatattggaccggtatattgaggcgtttagccgcagcaggacagctgatatcctggcagcagaagtggatacggaacgactgagaaagaccgatattcgtctgacggcagagttgccaggggcgttgtcagaagaccctctccttgcacgcttcaacttcactgcggacccggatttccggcatgactggcaaatgaggtgctattcggcaggagtgcccagagaatatgtggcccgccatctgaacacgaatttctacggcgattttcctgccacggcagacctgaagggaagcatgcttcaccggctgcattttatgctgggtaaattaccctccacccttaatacaccggtaccttgccgtcacgtaccgcaggccagataa

SEQ ID NO: 272132 - DNA, 1125 bp, Klebsiella pneumoniae
atgtttggaaagctccttaacagcgtgacctggcaggtcagagctgacctccgccgcaaactcaaagccaaccgggatcataaaaatctcagctggaatctggcggaaaggctgcaggtttattgctccacgcattacattcgggccatgctgatactctggggagtggcagccggcgcggtggcggtggctcactatgcccgccctgtctttgatccgtttgcccgtcaacattttaaaggtattaccgccttgcccgggtggatgtccagcctgctgggaagccaggtgaccctcatcggtattgtgttcccgctggttgtcggtctgatcagtgttctttttcagaaaaaatcatcccggattcatatccagtctgcctatcagctgaattccgggtatatgtttgcaggattaagcgccctttccctggcgggctttattctgatggcggggatagcgtcgtcactcggggataactatctcaatactgcgatagcggttaccgcctttatctggatgctgttcaatatctttctgtccatctggttctttgtcaccagtctcaatgtcctagatgatgacaaacgggaccgtctgatgaaaaaatactatcaatcacagatggtgagccagtatatacagcaatccatgataagatcctggttgcagtatccgggtcattatattggcaaccagtatctgaaaacgataaaaatactgccctacgcagacgccatgaacgacgggatgaacacgcttacctgccccgttaagaaaaatgaaatcgtaaaggatatttacctgaggccactacttttccttctgagacgattacggcccgtttcggatcaggaggctgagattgtgattctaccttcgtccggcagagaaaacggcaacttaacccttttgtcggcaaaaggagtcattacctcccagctgtggaactggctgtacagacgttgtattccgacgggcatacctcggcaaaagaaagattataatgacatcccctatgatttttttggtgaggcctatgatgccctgaatgataaaaacattggcatttttaaaggacgcctcaggcctgagctattctttaagccagtcgtttcattttga

SEQ ID NO: 272133 - DNA, 732 bp, Klebsiella pneumoniae; identical to SEQ ID NO: 156654

SEQ ID NO: 272134 - DNA, 222 bp, Klebsiella pneumoniae
atgaacccgataattacggcacatcaggaaatcgttatcgaaaactcggttcgctatatcgagttactgaaatcagaagcgacaaaaattctggatgaatactgggagaactggaaagcacgaaatcagttgatatcccagaccatgtatgcaaacgggggaaattcatgcccggtcgattcgcaccggtgtttaaaaaggtcggctcatcgcaaaagctga

SEQ ID NO: 272135 - DNA, 1056 bp, Klebsiella pneumoniae
atgctgacaggatggaagaaactccctgagctggcgtttttatcagatgcctacaccgacaaccttcagcagaaactgaaagacctgcacggggcatgggaacggtgctttgataaaaagctggcagcgaaagcgcccgtgttcaaacataaaagccacggcaatgactctgttcgtttcgtcaattttgacaaatactgccagcttcagcacagacgcgttaagttaccctcggggctgggctgggtgacattccggcagtcccgcgccgttgtgggtaaaatcaaaaacgcaacggtcagccagcacgctggcggctggtatatctcatttcaggtagaaatggtggtcgaacagcccacgcacccgtcaacgtctgctgtcggcctggatgccggtatctgcaagctggtaacgctgtcagacggcacggtgtttgaacctgtcaacagttttaaacagaaccaaagcagactggcaaggttacagcgccagcttgcccgtaaagtgaaattcagcgcaaactggaagaagcagaaagcaaaaatttcccgcttacacgcgcatatcaccaatatccgccgcgattaccttcataaagtcacgacaacaatcagcaaaaaccacgcgatgatcgttattgaagatttgaaggtttccaacatggcgaaatcggcagcgggtacggcagacgagccggggcgcaacgttacggcaaaatcaggtcttaaccgggcgatactggatcagggctggtacgaaatgcgccgccagctcgaatataagcagcgatggcgcggcggtgaggtgctggcagtaaatccggcctacaccagccagaaatgcgcctgctgtggtcatacctcgaaggaaaaccgtcaatcgcaggccacatttgtctgcgtggcgtgtggatacgaagcgaatgctgatgtaaacggcgcttgtaatattttagcggcaggacatgccgtacttgcctgtggagggacggtgcagtcagtccgcccgatgaagcaggaacctggcactgagcgatcagtcgtcacccactaa

SEQ ID NO: 272136 - DNA, 792 bp, Klebsiella pneumoniae
gtgtgtgtctggtctgcagttaagaaatttaatgttaaactagtccatacatctcgtgattattatctatttcatccaaacagtactctatttaagaacggtaagaacatgaactctaagtgttttgaagttcttttttggtcgtttatcaagaaaaaattaagtaagcgtgtagatgtatatataggtattagccatttcatatctcatttgcatttagaaaatggatttttcaaaagtgcaaaatctgcagtaatctataatgccgtagacaaagtcgtatgtactccgcgatcaaaccaccaaattagggttggatttttaggtcgattaacatatgaaaaagggtttgatgaatattgttctttagctgaaagatataaatcagatgttgattatgattttattgctgcgggtcgttttgtaaataatggctctgtcgaaacactttccaacatggctaattcggctggagtgactgttaaaggttatatggaattacaacaattcttggattctgttgatttagttgttttacctattaaatggaatgagcctttcggtaggacgattgttgaatgtgcattagctaataagattgtaataacaacatccacaggcgctttacctgagctatctgagcttatggataacattataatttcagataatttatatgacggatttaagaaaggcatatcgcgcattaaagaaccagtagatactacaagtcatgctgatatgttcaaatctaaaattattgcggagcaatatctttcctattataaataa

SEQ ID NO: 272137 - DNA, 747 bp, Klebsiella pneumoniae
ttgtataatttcaataaccaaggagcggcaaaagctagacaacaagggcttgaatatgcgaggggagaatatgtttttttccttgatgcagatgatgctattagtcctaatttcatcgaaacaatcctcgagcttatagttaacaaacctgacatgatttactttagttctgatattataacttcgacgcccccctttaagaaaattgcgcctaagcttacatttactaataatatggtatatcatgatcgtgataaatttttaaacgatatgtttaatgctgggaattggacatcagctgtttgggcatatgtatttcggcgtcaattagcaatatgctctcaggcttgttttacacaacgcaacgcacatgaggatcatttatttacattaaggcttgttggtggagcaagtacaattcgtgttatcaaagatgttttgtattatcaaaaaagaacaattggttcgttgactaactcagcaaaagatctgaagtatatttcagaaaggtttagatctttcgaagaagcaatccttgatatgcgtaataaatttaatagtcgttctgttgagttgtataaaatttggtctttacactcctttttatttctttgcttcgaaaatgttcgcgtcattgctgtgtggtttattacccctaaagcgtatcataagatgtggaaatataagtcagatttattaaaaatagttttttcttttgttaaaaataaaataaagagatttttatga

SEQ ID NO: 272138 - DNA, 360 bp, Klebsiella pneumoniae; identical to SEQ ID NO: 272020

SEQ ID NO: 272139 - DNA, 333 bp, Klebsiella pneumoniae
atgaacaaaataaactatcaaatcaaatacattgaatatttgttaagaaaatgcagaacaattttgactaatgacatttcatttcatgcagacaggttaagagaaatatctggcacatatccggatttactcaaccctgtaacgcttaatgagaaaatttgccatcgcattttatttatccacaacccattttatacattgcttgctgataaacttctggtcaggcagtatgttgagaaacggactaatttaattaagcttattcctttagtaggtgtttataatagagttgatgatattgatttcgacaaacttccctcaaatttgttttga

SEQ ID NO: 272140 - DNA, 3390 bp, Klebsiella pneumoniae
atgaattttgataatttaatattagatccacgtttgtatgacatatttggagcggacaagcaagcctgcgctctccagatttggcttatggagttcaagagcgctgaggaaacacaggttaaatggctttatggccgtgcgcttccagcagattttattagtagccaatggagaggtaatgttaagggtaaaatgacaaaattgtcagaacaagattccgttcgcgttctcccattcactgtttatatttcagctagttctctgaaactctttgccgagagcttaattaaaggttcaacgctccacgatgccagcatcgctgcaaacatcaatgccgatgagaaaattattaaaatttttaatttcgtcacttttaaaccagacacatgcgttcggcccgtgatgcatttaccgacacgtgattatttcaaatccgtgacaaaaagactcagtcccagttcatatgccagctacgacagtggggccatctcctcagtaagtaaaccatctctttttgagagtttcgacagtaagaatgctgctcgtgtagcaagaattgtctgcgatttaattgatgccgataccggtatggcatttgctgaatatgacgcatggcgttttggtgattttgaattcctttgtgcaccagcgctcagccgtaaagaagcctctcgagtttcttttaaaactaaaggtgagtttacttcactgacactttttgaatcacttacacactttccagctaagcttcttgtaattattaaatccttcagtggcggttgcctgcaatcgacgcatgtaacgaccatagacaaaaacgaaacctaccctataacgaagcgatttgatgtggactcatttaaaaagcaaaccgctaccgcctgtactcttgaaatcttggcacaacgagatgataccgacgaagcatttatgtgtgttttaaatggatatacatttaatcgcagcatgaatatgaatttaaatgtatatcaatcaatcagaaccggagataaaactgactggctggcaaaacaggtccccaaaggagaacgacacagacttgaaagtgcatgggaggtaagtcgttcaaccatacgttcacggcacgtttatggtaattatcgggacgaccaatgggttgatcttaattatactgttgcaaggtccctgactcgtttgctcccgaaaaaatcagaatctcaattctttcctaaactttccgacagcagaggcatgagccgtctagaactggtggcgtggctccgcaagacttttgatgcatatcccacagcacaaattgcctggtttgatccgtacatggaggatgtgggtatagaattactcaatcgtatggggacggaaaccggggactatttaatttttacttccgaaaagccacaaagttctaccaatttgcagaaaatcaataccacaatacaggtcgatgttagtaaaccaattaatgaaacctcccaacaaattacagactgtaaagccgcgcaagatcgtattcaaaatctaattcaaaaatgccaggaatgggggaattcttctttcggtaacgtgcatctgcgtgttgttgcactgcctgcagaaaaaatacatgatcgtatgattcttgttcgttctcctcaaggtctccctgtagtgggttaccatgtctcaaactctattcaactggcaaatgaaaataatccattgctggtaacatctattcctagagatatactgccagatgttttcagttatatggatgacctgattgaatcatcactacatacgacagaaaaatcaaaaatcgggaaagtgattttcgattcacgggatcatgatattaatcccggaacaactaatttcaggtatttaacaccatttgattttaagcacagtggtgatgttttttcttggtggttaaatatccctgagatgaagggattgtacggagataagcttagagagacagctggaaaactggacttgcacaaagatgataaactcaataagcagagatttggcgacattccttcacacttctgggaaacgggatttgatctagaaccattcaactgtatttgggatgcttttggtaagattctggcaaatttacctgcaggtgaattgtaccgaatgggtaatagaccgttactgtcatccgtagaggacaaacttgttcaatatcttgacgctaataggcaagtacatcttgatcacaggaagcactcaaggtcactcatagactatgaccgataccttgataaagatcttcacttttggctcaaagatggcggtccaccggagcgaatttttagctattcccccggaagttacctgtacggagattattacgcaattacactaatgtggatgaaagcaccagttaggtttgtcaggtggctgtctgaacaaatcaacgcatggccgcatggcaatgttgagtgggctaaatcgcaggttcgcctttatgaccttatcacgactgccctccgccatatctgtgttgatccatatcacggaaatagtcaggaatctgtaaacgcacttatatcaagtggcacccctattttacaatggattgggctacattttctgagcgaccaaatcaaaaataatgatgatgcaatacaacagtttgagcaattagattttttcagcacaaaggaaaagctctacatcctttgttggctgattaatgaggcgaattatcttcaatcagatagtcgagaagtgctcattaaacatttgggaacattaattcagcaaccattagcggatcacgaatttcgggaactgctcgagcctgttcgcggtcattctggaaggttgcatcatatgacagcgtggattttagaggcaatgcttgttccaatgcttgaacaaggagtagttaatccaagccagatagccttccagtggctggaagacctaattgtacaatggaaaccggaaagcagtgataagcacatatttttcaacatgaaacgtgaaggtgctttcactgatgagttggtgattcttttcagttgcttaagcgaaatagatcagttgagaattgttaataacatcaagatagtagctgataagatggctcgtaatatcagaaaacctattgcagctcaggtggactggagaatttatagttactcacattttataaatttgtggatttttgcattgaccagtcggttgcaactcttctcaaaagagcccaaggttgaaaatgttataatatcaatacaggacgaatgcaattccctaattgaccgcctatcacaaaattatcgcgacgttctgtctaatgatgaattgataaagtactcaatgggcgatcctgagcaactccgcaatcatcttcttttgggtgtagttagaaatatcataaacaagaggtag

SEQ ID NO: 272141 - DNA, 714 bp, Klebsiella pneumoniae
atggaagccatagaacattttaccgatgatcggcacaaagcttggtgtattcattgcggttcaaccattgttagccgtcataccaacagagatcacgttcctacaaaagggttattagacagacctctgccgccccatgtaccacaagtcgaagtatgcaaagaatgtaattctggcttctcattggatgaagagtacttcgttacttttctgagttgtgtacaggcaggaagcacagacccttcagcgcagagaaacccaaaaatcgggagggcacttaaacgtaacccatccttggctgctcgactaatgacagctaagaagattacagtggatgaatatggcagacagcagattctttggctaccggagctagaacgcatacatcgggttattttgaagaatgtcagaggccatgctttctacgagtacggagagccaatgttgaacaatccagtctctataagtgccgttccgctgatatctatgaatcaaaaccaacgtaacgactttgaagaagctggcggaccctttgctggctggcctgaagttggtagtagaatgatgattcgtgttatgacaggtcgagacttagatgatggctgggttaatgttcaagatgacatctatcgatacgtggtatttcaacaaggcatcatgaccgtccgctcagtcatacataactatttagcaactgaggtggtttgggaataa

SEQ ID NO: 272142 - DNA, 1086 bp, Klebsiella pneumoniae
atgaacagtatttttgaaagagataatgggaatatccgagtactctcgttattctctggctgtggaggaatggattttggggttacctctgcgggtggggatatagtttttgcgaatgatgtcgttgataatgcctgtaaaacattagggaactattttcccgacagcgatattaggcattgtgatatctctcagatccagtctttccctaatgttgatatcgttgttggtggttatccctgccagtcattttcaatggcgggtaatagacaaccaaaaaatgatgacagaacaaatctttataaacagtttctgcgggtgttagaaactgttaggcctaagtattttgttgctgaaaatgtatctggcttaaagcacttgggtgccggtagtttccttgaacaacagcttacagcatacaaagctgccgggtatcaggttagctatcatatggtaaatgcaagagactacggcgtaccgcaatcacgcaagcgtctgtttattattggtgtcagaaatgatctaagacagttctttgaatttccagctgagacacatgggaaagcaaccaaaaataaacctcatttaaaaccctatgtttcccatggtgatgctattcgggatttaccactatggcctgacggtgagttttatgaacgaccgcatgaccccaacgggcatttctcatggtatttcatgtctcgaaaccgcaaagctcaatgggatagtccagcttacactgttgtagcaaactggcgtcatgtgacattgcatcctgccagccctgtgatgaaattaacatggtcaaacttggaggatggttggaaacagcggtgggatttttcagatgattatgagcacttagcaattgatacatctcgtcccaaattggagcaagctaggcggttatcttggagggaatgtgcgcggatacagactttcccgcacgattttgagcctgtaggggatgttgaagcaaaatttactcaaattggtaatgctgtacctccgttactggctgaggtgctttttcgccatttgttttcgggtgccggtttgaaaaaaatgataactaatggtaattag

SEQ ID NO: 272143 - DNA, 2763 bp, Klebsiella pneumoniae
atggaagattcgatcccggttactttagaagagtggaatgctgcactcgtgaagatcgtttttcttgatccttcccatataggttctactttgagtcgaatcgatacaacggggcgcatttttgagcagcttgcaggttcccgtagcaaagaagactctaggcagagttttttggcttcgtttggaaaaaaagcttctaacattcaggaggctctcagggatgaatcacggttggatattttagcgcaaataaaaggttaccccacttattttgcaattttatatttaaccttacttgctgccagtgctaatgatgaaacacatgaagaaggcgattttcgggttcgattttccttattacttggttttgataaaagtaaaagatttgtttttagtgaactacccaatttatgggagagattagaaaggtggagttgtaggaaacaaaactgtgcccgcttagttttaccaaatccttcaaaatatgaaaggttaattggatattctaagagaattgcttttccttgctataaagatgaggttcttttacgcaacatacttgcgagtaataatctggatagccactcaacgtttgaagtagtcaataaaactgtacataaatgcatatcaagttttggagagatatttaaacaagaatttattgagttcagaacttcgctttcaaaggctgctatgcagctggcttatgattctcctttttggggggctgttcgagacataactatacgaactgaaaaagaacagcttaatcaaaatggtaaattctgcctacatctagagcttagtgattcagaacattctgagatttatttgcttatggatgataaggctgtcactggatcaggaattcatcaatatttttcattgcctaatgaaattgaaaattataagtatgtatattatgagaaagatgtaagtactacattaagaaaccttgctttattagcaggaaaacagggccatggtttctgtaaatctcgagtgggaatagctctgcaaactggttgtctaccactcttccgggatgaattcggccatatcagttcagatggtgagtattatgacaattcttcgctctgcttaatacttcatcaagaatatgcttccgctatttgtaaggcattaaaaaatcataatgaattagcgcagttgagggaaattaattctaagcaatgggttatgctgttttttgataaaataagcaggaagttactgaatgaagttgcgagttttctaccagaaaaagtccgtcggtttttaatacaaggatggcgacctgcgcgacctcatatgtcagctggcgcacgatttggacaggcaatattactaaaccctgctagcacacctgttattcatatggatggaatgataaaagggtgctacgttattattgataaaaatggaaaggaactaactcgcgggtcattatctcagagttctaatggactattcattcagcctgaagaacttacggaaatatccaatcaagcgttttgtcgttatgaacttacgatagaaaattcagatactctcgtaaattttgatgtccacgtgttagaccatgcaccttacgccgcctaccgtaagattttagaccaacatgattggttggccgatggcccgttgggcacattaacaccattagggggcgcggcaacaattcctcaactaaaacaggaaaagctgatacctctgagtggtgatcaggtgctatggcggcatgaagagaatttacctgcaaaatgtggacatactgatttacataacatttgcccagcctttgactggatagccgaagctctggcattgcggtttcagcgccgcagtacattacctttcagcgagttaagacagcatcttgagccggtatcattggtaacaggtatacccgcgtggcaactacagcgtgcgctctttgcagccggatggatttgcttaatacaacgacgacatgcgccgtatccactaatttgtctggccgagagaacgatttccattgatgtcactgaacaaggtgctattgctaggattatgggtatgttcacaagaagtgaacgtcaccttttgcaaaacaatcttgaagctggagagcgaataaggcgttcgttagttgaaggtgattgccgttcaattggctacattgaaatgtgtttatcaaacaaggagcgcatctgcgcttttgttgaacagtttgggctgcgtttgattaatcaggatgattttccaggaaacccattaagcggagtagtactgcctttatctcaaatgcagtatgttccaactttgccgtcagatctcaacatatcgctgtggaaggctgaaatctgtcaatggtcagaagaggtgcgactacccttaagggataaaagattgttaatacgttatcaagaaaagcagcgttttcgctacattattcggcaggatgcgggatactggcaaactgacagcttttcttgggcgataatggctcatatgatatgttcaggagaaactctgggtataaaaataggcgatagtgattggtactggtctagaaaaatcatagtgttacctccttccattatacagtggtggatacatgttgctaaaggaagtttttcgataacagacaatggtggctttttgtttgctgggggaaaagtaccgctttggagcaacgtgaaggaactttcatcggaccagaaggcattggttcgacgcaatagagcattagcattacgcaagatgagtaaaactttttaa

SEQ ID NO: 272144 - DNA, 2781 bp, Klebsiella pneumoniae
atgactaagaaaaacagcaaaatcgcctgccgattagaccagatgtattcttttggtattgaaccgcacgaattaagcaaatgtctgaaacagtgcaaacaaaaactcattataaatggtgctaaagcggacaatttaccaaaaggattggataagaccttatattttctgcgtacattgcctcctaaagccagatttgttgtatctgactggcttggggaacatttgacatttcctaaactaaatgatccacaaaccgttcttgaggagctttttgacgcagaaagcagcgctaaagacattgatttttgtaaaccgttgtggcgctcgattctggggttctatatttcttctgagtgccctgaaattataacgaagttcctcgatgatgaagaaattaatttcccactacgggaatctgcaaataaccaaataattaatatcactgatgaagacattgagcaatgtgcggttattagccaggctaatggaaatcctctaccagagcgcattattccactatttattgggggattgattgaagcattcaaggggacgcgtgcaacagagaatcaatggcgggtcaagttatcagaaagttctttaccacaagcgcgaaaatttggtgagttgatagaccagtttgaagcaagtcataactttaaaaaaacggtaaatggcatcagcgtaataaaagcctatcctgttgtgcctaaagatatcattgatacgatggatgaagtcatgttcattggtaaggtctcaacgctaactacgtcaggtgccttttttgtcataccaattagtttaataattgatggtgagctacgcgatctttcagaggtacatgcaaaagatcttttccctcataacggtgagaccatcggtttttcaaatcattttagtaaaagtattattcggggagagatggcaatatggaaagctaaatatcagccgtccgaaaagcccgtccaatatgtcattactgactacctgtcgcgagtatatccgattattaagataccccatgcatccagtgaacctgatgaaatcagggattggttagtaacaggttatcagccgcaaaaagatactccagtcatttttcagctaagtgatggtatatccctgaggttgccgggagatttacccgaccctaaaaaatatgactttgatatgccactggaaagttaccgtcagctctctcagacactgcttagttctcatgctctaaccgttgtcacagaacttcctctcgtgagtgaaaagtatgactgtgctgaacccagtacctggatcaaacgtttgcttaaacgaacatcttcggcaaagaattttcctgaatttagtaaagggcagctacaaaacctaacccactttattgctgagcatgaatctgataatgaggtatcctatcttcgcgcagtctctagtctggaacagatcacggatacgagattttttcttaatgatatgactcagcaattactggctttacctgaggtagaggcgaaaataaatagtgaaaagcaggagatattggctcgttacgaaaatgaattgattcaggttaaacaatcgataacggtattatcagagagaaaaacacagcttgaaagtgaaatggccgatcagaataaaaggctgaagaaagaaactgagcgtattaataaaacactgcgccagcaagaaaatgaacttgaacaacgtatcaaaaagacgttcgaaaccgcttcaaaagccggaatggagactctagctcaaacagcgctactgcgagcgatagttaaaaatgaagttgttcaggaacaacctagccaacaaataatgaaattagaatctacaggcgaaataatttctgattttccattaattgaaacgaatgtcttgatacgaaagcatcaattattattggctattgagaaacaagcgctggcaacgggattaagtgaatctttattatccagcctgattgccactgtgaatattacacctgttgtcggattgatagggaaacagacaaaacagactatcgcatcgttagcgaacttgttagcgggtggcatttggggagaagtatcggtacacagcgatcattttagcttcagtgatttaatgaactctcccgcgcttatccgttcatctgacaatacacttactatggcgcttggtgattttatgacccaacaacaagaggctggaatagtgagtattattgaattgcgtggttttaatcgtactccaccagaaacattgctcccggaactcctcgaatgtttattcaaaactcctcttcttgccgcatgcagttggatagaccggcataagactttacgtcatttgcctattcggcatccgatactttttttactgacattcactaccgggaaaagtacgtttccgttacaggctcctcttgcctaccaattacccttatttctggcggaaaacatatggtccgatgagtcgctgtccgagccggatgcagatattgctccttcgcgtataactccagaactatggcatagaatgtatgaggataactaccaaccagaacatcaggattggaaagaatggaaagcgcttaaagcggcactactccctttactgcctgatgaaaaagctcaagtcattgctcgtctcgcctacagtattggtcgtggtacagaacacgaaattacgtctgcggttgattcacttgccccggaattagtaccttatattcaggaaatgactatcggcgaatcggcaagcgtgcttaagaatcttttccagttataa

SEQ ID NO: 272145 - DNA, 5961 bp, Klebsiella pneumoniae
atgaataatccactggaaacatttgaatcaataagggatttttatataacctacctcgaaacggccttccgtattggttcgtctgacatacaatccgagcgacgagcgttactggaacaacagggaacattatgtgcagatctttttattgaaccgatgccaaggtatcagaatcatggcctcactataagcgacttacgcaatgattcttacggacagacatggttgccggggtttaatgtacagcaaagaacggcgttcatcgacctatgcttgggtggacttctgcctcgcgataaaaacgaccagactaaaggacgttttaaactttatactcaccagctagaaatgctgaaaagaggtgtacagtctggaaagccaggtatcgtcacctccgggaccggttcaggtaaaacagaatcattcttgctaccggttttggctcagatttcgaaagaagcggttggttggccggaaagtcctgcacttaaacgctggcagccatggtggcatgatccctcgggcaaatctcccacatttatgcgtgatcatgaagcgaccgaacgcccgaaagcagtgcgtgcgttggtactttatccaatgaacgctttggtagaagatcaattggtgcgtatgcgacgggcattggactctagggaagctcacgatgttatggataagtgtttcgggggaaaccggatcttctttggccgttacaccagtgcaaccaaagttactggctggcttgaacatccccgacgtagtaaagaagctaaagagcgaaaacgcgttgcaaaaaaaattactgagctacgtgagtatatgcatttagcagaaggaacccatcaggaggctgtacggcaggaacgattgggcaaggataaagaattatcatttaattttccgagaaccgctggcggggaggttctcagccgttgggaaatgcaaaaaacaccgcctgatattctgatcaccaacaccagcatgctttcaacgatgctggttcgtgaagtagatgaccctatctttgagcaaactcggaactggattgaacatgatcctaatgcctatttctatctcattcttgatgaacttcatttgcagcgaggaaccgccggtactgaagttagctatttgcttaagcacttgattaaccgtttagggcttgataaggaaaaacaccgtcacaaattacgcattctggcttcaagtgcctctttacctgttgaaggctttgagggtgaacaaagtatcgaatatttatggggaatgtttggtcaacgtggattatcagccggagcttgttccagtgactggcgagaatgtattgtcagcggtgatactcttcctccagagaatgtgtccccttttcagggtgacccacagtcattctatcactcagtagttcagttgcaggaagcaccacttacatctttacatcactggcagagtgttgccagcagtatgaatatggcattcgatgagctttcggcagaaaaactggcgcagcgtgtgatcttacaggcagctaatttgcttgaaagtggatgctatacggacgagctattcccaaaagccacgtcaattaaaatgcttagctcacggctgtttggctgccgacctcatagtgaagaggcgctccgggcattaatctggctacggtcggttgagggggactggcaacaatggttttctcatcctttccctgatgatattgccgtgccgcgtttccgcgcccatgcttttttacgtgctctggaaggattatatgcagcgccattaccagcccccagttctgcatctccgcaggaaatcaatcaccgttattttggtgatcttaccgtggagtctggattacgttatggcaaagataaagcatcgcggcgcgtagagttactgtattgtgaatgttgtggcagcctctttctaggaggaaaaccttcggtctttcctggcccagaaagccgaattgaacttttacccaatgacccagatacagaacaattaccggaacacgcaaaatcggtcatggttgaacgtcgatctgctgaagaatacgcgctatttatgcccgtcgtcgaacgtttctggccgaaaggaacagaggagctaaacagcgacaatgacaatactttcggcacttgggttaaggccacttacgagccatctactgccaccattcaataccctgtatcgctattaaaacccttaccagaaaggcatatcgcgggctggttctattatgtcaaacccggagaatttgccacccaagaaagaggccagtcatccagccagtcgccgggaacggcgttacctttccagtgtccagcatgtggtacatcctatgtatacggcaaaggaaaattatccccaatccgaagctttcgcgtaggtttttcaaaaacgacacaactactagccagctcattaatggcagaactgcagcgatccggtaatcgtgagcaattggtaacgttttcggatagtcgccaagatgcagctaacgctgcgctcgatctggaatcgggccaccatgatgatgtccgacgagaaattgtagtacattctctacagttaattgctgccgataagccctcccatagccaactaaaagtgcgcttagccgaaatagaggaccggaacaaaacgctggttaatctctctgtgaggtcagatgaggaagaggatgagttagatcggcttgcagatgaacgaaagagaatcagaggattattatcaaaaccagaagcagacagcatacccctacgtgatatcctcgaacccgaatctccagatgcaaatcaacggctcggcttgctattaagggctcaagtggatgcaggaattcatccctccgatcgtactgggataacacctgtgcccgatcctgagaaacatgatgaaggaacactgacttttgcatggcagcaactatttgaaaagaattctgagggagaatggtgttggagggccctcccagcctatgaagaaaatctgctggtggcgcggcaggaaatttcacgcgatctgaaacgtctagtaggagaaagtgtatttagtaaaacctacttcgctcttgaagagtcaggttggggttatccctgcctcccagttatgggaaacgacacaagggaacatctggcgacctatgacgctatgtttcgtgtgctggcggatgcgtaccgggttacgccttcacaatacacgaaaaaggaaacacgttggggttcagcgagtgatgtgagtcgtaggagtcgcctgtatcgatttgcgcaggcaatatgtcagcgctcaggaggtgagcccctacctttgattgataaattcctccagcgtctggagctggctggtcatcagggcggcattattgatattggtaaagttcattttcggctcgcggaacctgaggatcgtgtctggcggtgctccaattgcgggcgtatacacatgcatacgggtgcgggaatttgtactcgttgccatgagctcttgccagatacagagtgcagcgatgcaaagacgctacaaatgcaacattatctcggtaaacgcctctcgcattctgctggtattcaccgcatgcgctcagaggagctgaccgggatgaccgaaaatccggcagcaaggctacgtcggttcaaaggcattctgattgccgatgatgacgatattttgccggaagggatgaaagattttgctcctgactctggtctcgatagagcggcccgcgtggtagatgtgctttctgtaaccaccactatggaggtaggggtagatattggcgatttacgcgcagtttttcaggctaacatgccgccacagcgtttcaattatcaacaacgtgtcggacgtgccggacgacgagggcaggcgttttcattcgtcttaaccgcgtgtcgtagcaaaagccacgacctgttttacttccgttacccggaaaaaattactggtgatcttccaccaccaccattcctgaccacaaagttggaaatgatctgtcagagactggtacgaaaaatctggttggtagctgcattcaaatggctaagatggcaaacggaaaaagcaaatcatccttggccggttgacgaccatgtgcacaaccctgataaccacggtgagtttttcccagttcactggttaaaagaaaaccaagcggactggctgccaaaaattcggcaggctattgaagcaacaataatggatcgtgatggatttgcccgtgcttgtacaccacaagaccatcatttttttcaaaagatcattcaaccactgacaccagagcatctggctcaggatattaacgatgttttgaacgacagtgcaatggaggcaaagggactggcagaagcgctggctgaacacggtaaattcccgatgtatggcatgcccactcgatcacgccttttactgacaagacctgttagcacgggcgaaaaggaaatcgaatttgccagcatggatcgagatctggatattgcgatacaggagttcgctcccggaaaaattctggttcaggataaacgacgctactttacagcaggttatagtggaatgctcaggcagagcagaaaatatccgcaatcattttattcgaatgcctgcgatccgggtgaaaccagaacaatgaccgcttgtccggtgtgtaaggtatgggcccctgcaaactttctgaccactgaatgtactatttgcggtgccatcatggatgaggctgagcgctatcaatgctatgttcctcacggatttattacctcactggaacctaaatctgccaaagaggatttcgatcaaaccttgacgatggctagccgtgtatcaattgcagaagcctacactttttctgcaataccagaacccaccgttaatgtggctatacagcttcagtcacaaatatgtttgcaccgcctgaatcggggagtttacaccgacaaaaaatggcgcggtttcagcgcaacacagggtagtctattagtccctttcagaaaaaaaggagtctatcaaccgctttgggcaaataatatctggatggatagccaaatcattgaagccgattcgtcagttaaaaaacgctttacaagtcaggggggaaatcgaaacgcattttatcttgccgcgcctaaagtgactgatttacttgcattaatggttgcccaaactccaccggggctccggttattgtattccacgttaaccccagcgttcagggcagcggcgctctctgcctgttttatcattgttaactatgcatcaaaagaattactggatattgatcctgaagaaatcgaaattctggaacctcgtattcaggtgctgaaggacggtaagtctgtaccggttctgcaaatggccgatcgtttagtcaacggttcaggattatgtgaacggttacagcagaaaggggcatccggctctctcattattcttgaagtaatgagggatattctaaacaacagaacagcttatccgctggcggagtttttgcagccagaacaccgtgaacgctgttttcagggatgttatcactgtctgcacagatacggaaaccaaccgtatcatggactactagactggcggctgggacttgatgttattcaacttctattggaccaaacctataatgcagggctgaacggtgattttacctccccgagcgtatcggactggccggaaaatgccaaacgattagctgaagaggcagcttcactatataccgatagtgaagtaaaaatagtgggtaatatacctttgattggtatcggtgcagggcgttgggcagccgttcttcatccattctgggattacgatgcagtccttgcggcgaacccggaacttgaggcattttcatatgaggttgatttagaatctactaatacgtttgcattgtctcgccgcatgggtaccgaaatggcgaaattacgaactcaggcgtttttcactccgggagtgatgatgcgatga

SEQ ID NO: 272146 - DNA, 1140 bp, Klebsiella pneumoniae
atgaatgaaatgactctaatacgtactcgtcctgtgcttccttcacttctggggagcttcactgtttgccctgcgagatacctgctggagagtgaagcacattcttatgtacgtttaccgctgcatcctttagtgattcttgggcgggtagtgcataaactggtcgagtcaggaaaacataggggggttacttccgggagttataccgtcggacaactggaaaatgattttgcggtcggactgacaactagtaagcgtgcggggctggtcactaagtggctatacgaccatcacggtgttgccgggttagtttctcgtcaaatgcttattacccagatccgttatgtcagatcgcttatatcacccggccttgttagaggaatgtctggatatgaaaagacgttgcctgttggccgggaggttatgctgagcagcagctattttgatatgcacgggcgggccgacctcatttatcaggagcgaatcgatcgactaaacgttgttgatttcaaaaccggaaaggtgacggatgaacaaaaccagccgacagaggctggtttattacagcttgcagcttatggtctaatggtaaaagaactggcaccggatatggagattgggctggcgctgaagggtatgagtgatagctgggaagggacgctagataaaaaactgatagaacgggtcaccgggattatcggtaaccttaatcagtgtttgccacgcaatattgctctttcagtgcgtgagttggcttgtacaggcatacattgtacccactgttcctatcgttgctcatgcccaatgtggattgacatgctacatacgcagactcaaccatttcattctattcatcaatctggcggaattgatatctttggtcaggttattgaagtagaaagtgacaatcaattatttacgttgaaaatgctgctgcctgataactcgatcgcgaaggtatttcgtgtcccacgcagcgccattattgagcctgcgagcacaactggaaaaaaaataattctgtatggattaaattttttcaatgagatgcctgtcggtcagttaccaagaaatttctatgttattaatgtacaagatacccggaagtcggcatttcagttttactgcgaagtaaaatga

SEQ ID NO: 272147 - DNA, 279 bp, Klebsiella pneumoniae
atgctccatgcgctgtttagccactatcgcagcggcagcatgagcagcggtctgcgcatgcacgacttgtgcgctattgcgtggctggcccgcccggaactattcactctccagccgtgctttgtggcggtggagacgcaggggacctggaccgccggcaccacggtggtggatatcgaaggacgactgggccagccggcgaacgcccaggtggcgctggacatagacgtcgaagggtttcagcgctgggcggcggaggtgattgccctggcgccgtga

SEQ ID NO: 272148 - DNA, 915 bp, Klebsiella pneumoniae
atggcaatttttcaatctcaactaccgacgaccggcaatcgcacgctgatcccgttcactcgccttgacccgcaaacattgtttgacgcgcacaaatcacgcgtactcgcggacggtggggagattcttaacgaaagctcgctgatgcaggagatcacagatatcgtcgctgccggactgtggcagtacgcggtcagcctggcgtctccagagtgggggattaagcgcgatgcccagggctatgtcacaaaaatgtacggtctggccgggacgccggactatctggagtttatcgttgccggacagtatgcccgtcgctgtatgctggacatgaccacaaccccgccgtctatccgggtgcaagtaaatttaggagcggcttacctgcgcactgagacgcctgtacgtcagcagaaaatcgccggccgtccgtatatcgtagccgcaattttggccgacaaagagtcagccgataaccgcggtgtagtcatggcgctgtctccagtatctggcaataccaacccgattgtttatgagtggtgcatccgaaattcagcaggtcgggcagaatcgtcatcgtactacctggcgggtaaatatccggatacaggcacagataacgttaaagcgctatcgaacggatatgtttcaatggggccgtcggcgttcttcgttgaaccagcagttggccgagggaaaaattacagtaatggcctgctggtcagtacgagtgatgtaaccgcatcgggagaaatcccggacatgaccggggttgatgtgcatatctatatcggctcccgctatacctcgaactacaacgctaccgcccaggatactgacgggatggtggggcgaattcgctgctttgggtacgcgacggaagagcaggcgaaggcgatttcaaagcgcacataa

SEQ ID NO: 272149 - DNA, 477 bp, Klebsiella pneumoniae
atggcatactcagcagcagctgtagctaatgccttcatagaaaaaggcattaaaggagaaatttctgatcttagcccgatgaaagttcagaagttactattttacactcaatcatggtacctgcgcttccatcgcggcaccccactgattgatgatgattttaagagatggaagtttgggccggtgattccgtctatttatcatgagcttaagccgtatggatatttccctgtaactcgcaagatatcaagcctggtacaaattccaggaaatggtataaaaatagttactccagaaattaaccctaacgacttagaggcacgactactcattgacaagattgctgaaaactatggtaaatattctggtaccgagctttctgagctgagtcatgcaccaggggctgcatggtcattagggccagatgatggaagcacgatcactcttgagcagatgatgaacaatatccacccttaa

SEQ ID NO: 272150 - DNA, 1059 bp, Klebsiella pneumoniae
atgagagcgctgctaactcctgaagtggtgccacgcttaggcgtggtactgtttaagccaggtaaagaactgatgaggcttttccgcaacgggagagtgctaatcgagtctgagccaaaaagtatggcggggctggaggctggtgccgttcctgacgcgcgccagccactggctgaggataaggaactggagggattttttaccagtgaaaaggtaattaatgcggcaggcggcctgcctgcccttgaatactggctggaacgcaataaacgcgaatgtcagtttcgccattctgattatcaccacaatgaactggtgaccatgcgtcatcctccgggagcgattcaactctgttggtattgcgacacgcgcctgcgggaacaaacaacgaaaaccctcagcgatctggctcgccgtaatgttgtcgactggatcattgatacagcgattttggatctgcaattgggcctcgaaagagagttatccctcgcagagctgtgctggtgggcagtatatgctggcgtcgccgatgagataaccgagacgatggcccagcgcggtcttcgcttaccagaagataaattccagtccgtatataaagaaagcgacatccggccttcagtcgctgccaccaacattttgcgggaaaagttacctacagatgcaccaaagaaaaacggccacagccaaaacgccctggcgctgccagagcagccgaaggttctgtcgctggctgtcgatcctgagtcgcctgaatcattcatgcttaaacctaagcgccgccgttgggttaaccagacatacaccgattgggtaaagcgtcagccatgcgaatgctgtcgtcgccccgcagatgatccgcatcatgtcatcgggcatggcatgggcggtaccgcaaccaaagcccacgatctcttcgtgtttcctctgtgcagagagtgtcacgacgagctacatgccgacgtaaatgcgtttgaagagaaaaacggctcacagcttcagctgttgttccgtttccttgatagagccatagcgatcggcgtgattgtaaaagcataa

SEQ ID NO: 272151 - DNA, 435 bp, Klebsiella pneumoniae
gtgtttagagtcgagttgctcgatgtcagcgccagtgctggcacgggccatatacaaggtagtgatgtcgtcgatgtcatcaggtccattgagtacaacaacgaaagggccgccgcattatttggtgggagaacaccagatacggtcaaagtgattaacgttcgtggtgacagcatggctgataccattgaaccaggtgatttgattttcgtagatatttcggtcaatgagtttgatggtgatgggatttatgtctttggttttgatgataaaatttacgtaaaaagattacagatgatcccagataagattcttgtcatttccgataaccctaaatatcgggagtggtcagtggataagtccaatgaagacagattttacgttttcggcaaggtaatgatcagtcagtctcagtcagttaaacggcacggataa

SEQ ID NO: 272152 - DNA, 660 bp, Klebsiella pneumoniae
gtgacgttgtcactttctctggcgctgccgtggctgctgcaggatcgtatcaccgccatggcggtcactggcctgatgatggccctgtgggtgctgatcttcgccctgctggaggttcacgaacgggccactcatcgccacggcttctggcgcggcctgcgcacgctgacccgcagccagtggggtatggtgctcggtcacgtcggcgtggcggtgaccgttatcggcatcaccttcagccagaactacagcgtggagcgcgatgtacggatgcgtcccggcgacagcatcgatatcgaccgctatcactttgtgtttaacggcgtgcgcaatatcgtcggccccaactggaccggcggcgaaggcattatcgccgtgacccgcaacggccgcccggaagcgacgctgtatgccgagaaacgcttttacaccgccagccggatgatgatgaccgaggcggcgatcagcggcgggctgacccgcgatctgtacgccgcgctaggggaagagctgagcgacggcagctgggcggtgcgtctgtactataaaccgttcgttcgctggatctggtacggcggggtgctgatggccctcggcggtctgtgctgcatgctcgatccgcgctaccggatgcgtaagaagctgcaggaggcctcatga

SEQ ID NO: 272153 - DNA, 141 bp, Klebsiella pneumoniae; identical to SEQ ID NO: 260212

SEQ ID NO: 272154 - DNA, 300 bp, Klebsiella pneumoniae
atgattattacaacagcgctggctaatgaaattgtcgcccgggcaatggcgataattcatcataacgtgaatgtgattgaccatcatggacagatcattgcctcaggtgaacggcatcgtatcggcgaacagcatgaagtcgcccgggaggtaatacgcaccgggaaacgcatttgtattaacaacgccgcggaagccgcgcgttttcacaacgtacatcctggtattaatcatcccattatctatgacgatcgcgtggtgatggtggtaggcatcagcggcgataagccgctatgctga

SEQ ID NO: 272155 - DNA, 138 bp, Klebsiella pneumoniae; identical to SEQ ID NO: 240515

SEQ ID NO: 272156 - DNA, 675 bp, Klebsiella pneumoniae; identical to SEQ ID NO: 199808

SEQ ID NO: 272157 - DNA, 252 bp, Klebsiella pneumoniae
atgaaaacccgcgcacgctatatcaacatcattaacagccatctggcggccagcgatgccggacgctggcactacgctatgtatgtcatgccggatgacaaaaccaaaacatcgttaatccggctgtttgactccatcaaaacggtaatgagggacaacgttccggtgccgttcgacgagaaaaaccgcgaaatgtttcttttccgcaccattgatgaactggagcaagcagccgccagcggcggccagtga

SEQ ID NO: 272158 - DNA, 534 bp, Klebsiella pneumoniae
atgcttattcataacgttacagaaaggaaagaagccgcaaacagaaaaatgcttgcattgctgacattccttaaagaagaaacatactccgactttaaaacgctgaaaaaagttgttgggttcaagggtaaaagtcaccgcccaacgtatgcgctactgaataaagcggttgcattggggtttctgataaaacatgaatacccggtaatagccggaaaaaaatcactatggggtatcaccatgcaaggtctggcgatggtggttaaacctgatgataaagtattccccggttattttgagccggggaaactcaaatactggacgctggaacaccgactcctgaatcatcgggtcagaattgcactggaagagaaaggcgggcaaggctggcttaatggtgatcggggggagtttattgcgcgttatccaggagttcgccatcgtcctgacgggattatcacgttagatagcggcgcaatcatcgccgtcgaaacggagcgctcaatggtaagcgttaaccggacgccgtattga

SEQ ID NO: 272159 - DNA, 276 bp, Klebsiella pneumoniae; identical to SEQ ID NO: 222901

SEQ ID NO: 272160 - DNA, 570 bp, Klebsiella pneumoniae
gtgtttgcgggaaaaaaatcggcccagatccgcgaaattttaatcagcgagtcagcttgggaagaaatgacctgcttattcgcaccttccctaactattttattttcggctctttcgttacgaatagtagtgacctatttaaatcttgtgcttgataaggcaacaagggttgctgacaattcggcaattgttgagctgggcgcgcaagtctgccttgccggtgtttgtgcggcaatactggtttacatctcagccaagctggccgcagcgctggccggtgcgagcgcaacggtttccatgcagggacttgctgctatgggtattggtgcggctgcttttggtgccgggaagctggccgggggcgcaacgaagcagacaacacgatctattcgggacaatattcagggctggaaagatgccagtgcaggcaaatcacccacacccggaggcggtgcaggttacaacgcatcgaaagcgcgtaaatatgctatcgagcaaatgattgcccgcaatgaagcccgcagactggcacagtcgcgggaatcagcagtgaaaaaattcaacagttaa

SEQ ID NO: 272161 - DNA, 672 bp, Klebsiella pneumoniae
atgaatatatttgacgataatgattacgaaaaagcctgtaaatggtatgagcacatcagatctaatgttaatagttttaatattgaaatagaaaagctaagtgaacagatagcattagatttattgaataataaaaatattgtctattttcacactgattaccagtctttaataaatcgctttgaaacagacttttatcaatttattgatacattctttatagaaaagcaatatctgccattcttatgtatgatcgttgaagaacatgccgatcagatatatgactcaacctgtttttcatcacaggtattaagcgataagggatttagcgatccgcaagatactctgacctttggttatgaagtgtatgaggctattggtatcctgaatgtcgatattgaagaagtaaaagaacagacaatatataaataccataaaatgaattttgcttatcatgactggcgcttgaagtatggtgaacaagagctgatgaacgcatgtgctgcttttgatagacgtgtggctgagctgtttaaagactatggctttgataaaacctgtattcctgtattgatggcaattattattaatgaaatagatcacatttacggattttcagattatggttttatcgagtccttaataacagccatagagaacgagatggggtaa

SEQ ID NO: 272162 - DNA, 306 bp, Klebsiella pneumoniae
atggatacagaaaataaaaaacagaaaacaaccaaatcattacaacaaaaaattgccagtgctcaattacgtcttaatcggctaaagcataaatcaaagactgaagccaaacagattgaaacacgtcagaagatcattcttggagccgaagtagcaaaagtgcttgataccagtgtattcgatgtagacaaagagttggttatggggattctgtctgatattcctaagctcagtgctgaagaagtaattaaatataagaagatagggcggttattcttagctgctcttaaaggcaggcagtattag

SEQ ID NO: 272163 - DNA, 318 bp, Klebsiella pneumoniae; identical to SEQ ID NO: 193933

SEQ ID NO: 272164 - DNA, 1494 bp, Klebsiella pneumoniae; identical to SEQ ID NO: 193934

SEQ ID NO: 272165 - DNA, 495 bp, Klebsiella pneumoniae
atgaccccggttgcccgttgcgccacctccaggtctgaatccccgatctgcggcagagacagtgtttctgcccgcagtggcagggcagggcatcacatttctcgtccgggagctggcccccttttctgtgccacagatgataaaaaggacgattcttatgtgaagcaatcaactgtttttgcgaccgttttttgccttcgagctgcacgattttttcctgcagcccgcgataacagtcttccagacggcgtaccccggatgccagtggctccacctggagcgttgaatacctgccccgcggcaactgtagttcgtctgcccgcagcggcattgagctggtttccccggccgggaaccggaaacccattgcgtgccacagcctgtccctccggatcttgttttcttctttttcttcatcaacctgggaaatttcaatcggcaaaacccgggtttctggcggaaggcatctggcccagagcacaaactgctgcgtga

SEQ ID NO: 272166 - DNA, 543 bp, Klebsiella pneumoniae; identical to SEQ ID NO: 121672

SEQ ID NO: 272167 - DNA, 543 bp, Klebsiella pneumoniae; identical to SEQ ID NO: 189849

SEQ ID NO: 272168 - DNA, 261 bp, Klebsiella pneumoniae; identical to SEQ ID NO: 101356

SEQ ID NO: 272169 - DNA, 321 bp, Klebsiella pneumoniae
atgcgtatgtctctgatgtttgcagccgtgacgcttttaaccggtattaacctgttttttattccgtttcagcctgttccggctctgtggggggctatcctggccgttgcttttgttctgattaatgtcgtggcagaaaaactgcgcctctggagtggcatggcgtggattatcgttgccggcatcatcataacgctgatgctgcaggggaaagagccgggtgacgaatttcgtgccctgatcaccgttttcgctttcctggcttctgcctggtactgcgttgttcagtacagaaaagagaagggcgaatctcagtcctga

SEQ ID NO: 272170 - DNA, 288 bp, Klebsiella pneumoniae
atggaaaaacaggcggaacagactgcccgggaagtggccggggaggcgcgtaaagccggtgagccggcggaccgggtgaaagaggttatcggggatgtcatccgcggactggagcgtgaccggccgggcccggagaaaacgacgctaccggatgatcctcagttccggcgccaggaggcggcgattcagcaggtggcctcagaaagtctgcagcgtgagcgtctgcaggctgtggagcgggacatggtgcgcgacctgaaccgcgagaaaaccctcgggggtgactga

SEQ ID NO: 272171 - DNA, 288 bp, Klebsiella pneumoniae; identical to SEQ ID NO: 241843

SEQ ID NO: 272172 - DNA, 432 bp, Klebsiella pneumoniae
atgaaactacaacttttcagcaccgggaaagaactcccgccacaggcccatccgttgtttgcagacctggccagctgcggttttcccagccctgcagctgactacgtcgagtctgacctggatctccatgattactgcatacggcatccgagcgcgacttactaccttcgcgccagcggtgacagtatgtccgacggcagcctttacaatggcgatctgctggttgtggactgtgccgagaagccccggcatggcgatattgttgtggccagcgtgcagggggagtttacggtcaaacggttgctgctgacgccacgactgacgctgcagcccatgaacgccgcctggtcgccgatttatcccgacccggacgatctggatatctttggcgtcgtcacgcacatcatccaccgcccgagggagatgtactga

SEQ ID NO: 272173 - DNA, 1545 bp, Klebsiella pneumoniae; identical to SEQ ID NO: 137629

SEQ ID NO: 272174 - DNA, 207 bp, Klebsiella pneumoniae; identical to SEQ ID NO: 223153

SEQ ID NO: 272175 - DNA, 294 bp, Klebsiella pneumoniae; identical to SEQ ID NO: 102210

SEQ ID NO: 272176 - DNA, 948 bp, Klebsiella pneumoniae
atgaataatgtacattttgagaaagtaattgaaatgcctcaggttgatagcattattgagaaagaaaagagtttaggtgttaggttttttgcagaggaaaggtggttatcatatagaaaaaatcatttggatgaagattgttctatatcagcagatgagcttgattctgttgttatacctctttttatttccatgcatgagtatggagttaacgggtgtgagactttaaattttgttaaagatgctttgtgtaatgctagtaaaaatgggaaaaatttaaattctgcctttgattttattaagtacttcgctatcgagcagttgagtgtggatattgacaatatactcaacaatataatatctcgcgttaatgatggaataataggtcgttcgttagttgttcccggggaagtgattgctgaaataaaaatggctgctttgagtggtgaatgtcctgctttattcgaggagagggaagttagagcaatttatagttgcatgaggtttaatgagaatccaacttatgatcacgatatgatttctttgataaaggatttcgtgattaatagaaacatatcagtaccgtataataatatattgattgatgtttttcagagtgacatgaaagttccttttaataatcaggaagtgaaggagaaagaacgccccttattaaaaaaaggaccaagaaaccccgagctgcattcatatattattaagatcgttgacgcaacgttgcttaaaaatccaaatgcaacgacttatgcattgactgagaagctcggagggcatttagaggaatatcgccataaccatcccgaaaagaaaaactggcggatatcagaaaaccagttaaggagatggatcaaagaacatcgggagttaacgggtcaggactcgcaaggaaagcatgatggcaacttgaggcttgaaggtataacttattga

SEQ ID NO: 272177 - DNA, 528 bp, Klebsiella pneumoniae
atggtactgtcgtacagtgtaatcactgaggcggcggctggttcgtgtgtgggcagtatgcccacaatgaggacaggtaaacataaattctccccacggggagttagactcagcaccattatcgctaattgctcaggggggggcaactcctcccaccacatcaccatttctggttgtgtggtactgacctgcagcaccatcatttctggctgtatcggccaacccgcaacaccttcgcgttatatcccgaaccagacacagcctgcgccattctggcgggctttttcctgcgcgttcaccccatgctctgcgaaagctcgtgttcgtccagcagcttttggtgaggtatgtcgatccctgccctgcccccaaagcgcgcgcttgctcccccgcctcgcctgcgcgctaaacatgcgtctttttgtgcactttgtgcgaaccatccaggccccgccagcactggcgctgcgtggcaaaaacgacgtgtctaaaattgtgcaaatttgtgcacttttttgcatgctctga

SEQ ID NO: 272178 - DNA, 258 bp, Klebsiella pneumoniae
gtggacgacggggcgataagcgacgacggcctggcgttcggcacctatctccatggcctgttcgacagcgatgcctttacccgggcgctgctcaacggcctgcgccagcgcaaagggctggcgccgctggacagcgccctggagtatgcccgctataaaacccggcagtttgatcggctggccgaggccatgcgcgaacatatcgccatcgataaaatttacgccatcatgcgccaacatcaggagcccctatgctga

SEQ ID NO: 272179 - DNA, 261 bp, Klebsiella pneumoniae
atgatgatgctcatggcggttaacgccgcggatcagcagcggtttaccgttgagacgcagcaggccatcggcaatctcgatgcggcgaaaaccgatgtcccacgcttcggcctccagcagttcgtcgccgcgccacagggtgaccacggcgcgataacagttcggggtttccgcgctccagtgcgccggcgtcgccaccgccagggagaaattgacccgttccgcgtagtggccgcgctcatccaccgtcggggtacctaa

SEQ ID NO: 272180 - DNA, 711 bp, Klebsiella pneumoniae
atgcggcgtgcgatcgggaaacaccagaccgttcatacagaactggcgatcgttaggcttatcaccaaagtcgccgccataggcccagccgacgctgccgtcggcaaaggttttgcggatcgcctggtcggcccagtcccagataaacccgccctgcagccgcggatactcgcgaaaggcctgccagtaatcggcgaagttgccgaggctgttgcccatcgcgtgggcgtactcgcaaaggatcagcggcctctgctcaccgggcaggctgatccattttttgatcccccatttgggtaccgccgggatcggctggtcgcgttcgacgcgggcgtacatcggacagataatatcggtggcggtggtatccgcgccgccgccctcgtactgcaccggacggctcggatcgttgcgtttcagccagtggtacagcgcttcgtggttgccgccgccgccggactcgttgcccagcgaccagatgataatgcacggatggttgcggttgctctgtaccatccgggtgacgcgggcgctgaaggctggcagccacgccggatcgtcggacagccgattcatcggcaccatcccgtgggtttcaatattggcttcatcgaccacgtacagaccgtagcggttgcagagttcataccagcgcggcgcgttgggatagtgcgagcagcgcacggcgttaaagttgttctgcttcattaa

SEQ ID NO: 272181 - DNA, 573 bp, Klebsiella pneumoniae; identical to SEQ ID NO: 235419

SEQ ID NO: 272182 - DNA, 954 bp, Klebsiella pneumoniae; identical to SEQ ID NO: 245001

SEQ ID NO: 272183 - DNA, 378 bp, Klebsiella pneumoniae
atgaatgatatccaaaaagtacaatacgaccaaatcattgattctgtgaactttgctctgcgatcgctgtctgaactatttgaagtacatggaatgcatgggatgtatgaccttacaaaccctaacctcgatcaactgaaagctgttttccatcaaatgaaagagggcatttcaaaagttgctgagaattttgaaacaatggtagcaaccgcaagagatatggatgctgcgaatgccagtatcaacgtaatgaatatcaaacaagggctcaactacgctgaatcgttgttgcttgccatagagaaattagactatgataagtgcgtggaagcgcacgacaacattaaagatcacaacgtgccaccaactcagtggtag

SEQ ID NO: 272184 - DNA, 306 bp, Klebsiella pneumoniae
atgatttattcgagaattgaaacacgctacatcacgagcggtaccaatacgcgcctcgtaagatatgatgccatttatgttgatgatgacaccattgtagttaaagtttttgatgatcagcagcgcggaatttcaccaccaaactcaattattgaggttgcaacgttaaattttacgaaagaagagtataagtccgagcagggaattggcggacttcagaggtctgtgcagtccagaatgcccccatcttttgaagaccacgtttgggaaaagtgccaagagcatcgaaactcactgactgactga

SEQ ID NO: 272185 - DNA, 579 bp, Klebsiella pneumoniae
atgtgcaagctaagtgtttcaggcacgacgtgcgccccaccagcgcggcgaaaaggtgtgacgcccgggaagagtccgggacacaacgatgagggcattgacgagcaaggcacagagtctggttcgattccagacgccaggatagttctatatctggtgatgggcagggaaaaggtccgttcgattcggacaccggcagtgctctcttcgttgtggcgtgtacaagcgtactgcagcgccggtcgaggcaaagacccggaaatcgactgggcaacagcagctggttgccaataccaaaacagagcggcgggaagtaagcagattagcgacctggtgtcacaaccacatcacgtagccagcgtggtaacccgtagtacctgtaacgaaagctgtgtgaagttttggcggtgccagtttccctttgtatctggtaccgccctttttacacaagacacaagagcatcaccgggcgacgggctcataacccaatccacccgggcggccgtcaaccgcagatgctcttctgtgttgtgtatggagaaaccgtcggcggtggcagccgccctaacaaagaggtag

SEQ ID NO: 272186 - DNA, 1227 bp, Klebsiella pneumoniae
gtgtcgatttttttatcttgtatggctccctttattatatcaatagttttaactttgtcgcttacggtacttgtttatcttgtttatgcgaggcaacctgttgaggtcgaactcgatgtttctgaaggggctaatattgcttatgctggatccacaaacaatgaagattcttttggattcttaaatgacaaactaaccagtactccaacctatatggatattatgcgaaaaggagaatatacatataatgataaaaaaggattgagtgcagcgaatgtatttattatatcaggttgtattcctacgcctaaacttattggcaatcctccggttgataaaaataaaaccatactaaatactaagtctatagtattgaaacaagattttccaatggtgggttatattcagggtgattcagtaaatgtagtaccacatggagcctctcagttgacgctgactaagggagataaagaatacatgttggcatcacgtataaccgagtcaaaaattgaatttcaaacaaataacgctaaaacggtttccgcctttacttttatgccaattaaaaaggatgattatattaatgagtatagttacgatgtcattgtgaatgacaagaaatatacaataatgaattcaattgagccaatgtcaaggctagatgaaaataaacatatgaaatgtgaatttcaacaattatctgctgataatcatacctatgaggtaaaggggaagtatttgactggcattctaatttctattatccctgatgatataattatctttaagaaatccccagtcataacaatgagtgctaacttggctttctataaaaaaacatatccaaatatcgaaaaaatatatgatgatatcagtaatggtaagctgatttctttgagaggggaaggacttagtcaaattattataaacgggaaaaaacaagaaattagacccgaatcggaagttattatttcaagtggaaaactcgttggacttgttaataaaaacaaaaaaataaaaatttatggcactgctgatttagtgttcgtagatgataaaatgctaaacataaggaagataacatatcttaaatctaaattggaaatatttggctcatcagtatttgattttataaagtacttatttagtgctgggtttatagttttagtttgtcgtttcatatattcctactttagcaatgaatcaaatgagaatttatttgtttaa

SEQ ID NO: 272187 - DNA, 729 bp, Klebsiella pneumoniae; identical to SEQ ID NO: 230174

SEQ ID NO: 272188 - DNA, 600 bp, Klebsiella pneumoniae
atgactagcagcctgttaccgccggggtcgtctgcgctggagcgcaggctggcgcaagcctgttcaggtatcagcgacttaaacgtgccgctgcgtgacctgtggaacccgtggaaatgcccggcaaagtttctgccgtatctggcctgggctttctccgttgaccgctgggaggaaaactggacagaaaccgctaagcggcaggcggtcagcgatgctttctggatccatcagcgcaaaggaacggtggcggcagttaagcgggtgattgaggggctgggttactcaatgactcttgaggagtggtgggaggtggccgaccccgccgggacgtttcgtcttgagatcgatctgaatgaaatcggcatcacggagccgatgatttacgagcttgagcggattattggtgattcaaagccggtaagccgacatatatcacaactgactcttttagttaacagtactggtgtggaaaagcttggtgcggtcatgtttgacggtgagataacaacggtttatccaccggattacaaaccagatgacagtatttattacgatggcgcaggccatttcgatggcaacaattattacaccggataa

SEQ ID NO: 272189 - DNA, 429 bp, Klebsiella pneumoniae
atgacgcgcgcgctggcggtgatcctggctctggtgctggcgttgatgggctggcagtcatggcggctcaacaatgccggtcacaccatcgcgacgcaggctgaggcgcttaaaaataacaagcaggagctggcgaagaaaaacagccagcttatcagcctgtccattcttacagaaaccaacagccgggcgcagacgcaactttatgctgcagcggaggagagttccgcgctgttgcgaagccgtcagcgccggattgaggagctaaaacgtgaaaacgaggatttgcgccgctgggctggtactcctttgcctcctgacattatcaggatgcgcgagcgtccggccctcgcaggaggtgctgcttaccgtgaatggttgtcccagagtgacgcagtgccgcctggaaaagtcggcggcacgcactaa

SEQ ID NO: 272190 - DNA, 447 bp, Klebsiella pneumoniae
atgacagaaagtagcattaccgaacggggcgcgccggaactggccgatacccgtcgtcgtatttgggcaattgttggcgcttcctcggggaatctggttgaatggtttgatttttacgtttactcattctgctcgctctatttcgcgcacatcttctttccatccggaaataccaccacccaactgctgcaaacggcaggcgtatttgccgccggatttctgatgcgtcctatcggtggatggctgtttggtcggatcgctgaccgccggggacgtaaaacgtccatgcttatctcggtctgcatgatgtgctttggctcactggtgattgcctgtctgccgggttatgcggtgatcggcacctgggccccggcgcttctgctgctggcgcgtctgttccaggggtgtctgttggcggagaatacggcaccagtgcgacctatatga

SEQ ID NO: 272191 - DNA, 1095 bp, Klebsiella pneumoniae
atggttcaatacaactcattcacgattgattatatctctggaataattaattgtcttgatatagagttagataatgatgggaatgccattatttttcctgatgatgtgtctgttaagaagttgagtgccttgaaagaacatttcagttctatatgggagagggcgaatagtgctatagatatatgtgttcaaaagcatgatgctaagattcaatctggaatgttcgggttggttaatgattttaaaagggcaatgcagattggttttttaatatcggatcgtgtcgtattaattgattacttatatgaaagaatattaaatagaaaagatttggcgaaagttaatattcctcatttatgcactgttgttactgagctggctagcttactacctcttgctcagactggtcgtgtcgttattataccctctccttttcagtggcatgaagaatcgaagagaatgatggtcgaatgcattaaaaatgatgtagagattaatgtaagtattatgtcatttattaacttgtggtcgattactaaaaaatgcaacttacacccttatacgattgctgaatctaaagataactatgatgaattgatgtcagtcaacattacatctagtaaaatactaacaaaaacctcattagattatgcatacaaaggtctgttaggcgctcttctaacagaagatatgctggcgaaggagggttttgtgactattgataatatttccctgtctaatttccaaaatattgttcaatctgaaaaaaaattccattatgagtttcttaatagaattaatgctggaggggaaattaatcttaatgaaatggctattgatctagaaaaagctatttctgatgaaataaaaaacacagataagaataaattaaaaaattttctccctcaagggatagctgcctcatccattggtagttatggattggcttatttttgttctgcatcattaactctgactgcaatggcctcgatactgggcatttcttctacgattctaggattgttaaataaggataatgaaagtaatgatcctgttgttaaggttttttgtgagttgagaaaacatggtttttaa

SEQ ID NO: 272192 - DNA, 219 bp, Klebsiella pneumoniae; identical to SEQ ID NO: 246685

SEQ ID NO: 272193 - DNA, 1518 bp, Klebsiella pneumoniae
ttgaattactataaagtaaacaatactattaccatagccgatatatcttgcggatgtggagggttcctttttactgcttgtaatatcttaaaagaaaaatccaaaaaaacatataattctatattcaaagatcacatttatggcattgatattcagagctattctgttaatcgaactaaacttctgctcacattgcttgcattaagcaaaggtgaagatgaggtagaatttacattcaatattcacattggtgattctttatcattcaaatggaatacagtcacccccctttttaaaggcttcgatgtcattttaggaaatcccccttatgtatgttctcgaaatttatctcctgagacaaaaggattattagaaaattggtctgtatgttcttcaggtcatcctgatttgtatattccttttttccagattggtattgaaaacttatcaaccaatggtattctcagttatataacaatgaatagtttttttaagagtctaaacggcagagccttaaggaggtatttccatgacaataatatactccttaaaattcttgattttggttctgagcaaatatttagttctaaaaatacttatacatgcttatgttttataaataaggttgattctggtcatattgaatactctcatatagatagctcattattagattcaaaaacaataaattttgagaaaattgattatgctgctttaaatcatcaaaaaggttggaatctacaaaataatgatttaatgcaaagcatcgaatctactggcaggccatttggcgaagtatttagaacacggcatggtatagccactttaaaaaacaatatttatatattcaagcctgttcatcaggatagtaaatattattacatcgaacaaaatggaatgacatttaagattgaaaaagatatttgtagagatataattaactcaaataaattaagtagcaattactctcttgatgaacttgtggaaaaaataattttcccttatacaaatgagataaaccccaaaataatcgcggaaagaacatttagaaaattatacccatttacgtacaaataccttttggctaataaatttaatttaagtacaagggacaaaggtaataaaacatatccatcttggtatgcttatggacgcacacaatctttacaaccgattaaaaataaactcttcctgccaaaaattacaaattcatctccatatagcattatatcttcagatgaaaatttaatgttttataatgggatagctatagtagggcattcatacaaggagttattgttcattcaaaaaataatcggctcgcgattgttttggtattatatatcgaaaacaagcaaaccatattcttctaactatttttcacttaatggaaattatattaataatttcggtatttatccattttctgaatcagagattgactatattatatctgaaaatgatcaaggcaagcttaatgattttatcgagaggaaatatggtattgatataccataa

SEQ ID NO: 272194 - DNA, 270 bp, Klebsiella pneumoniae; identical to SEQ ID NO: 235366

SEQ ID NO: 272195 - DNA, 642 bp, Klebsiella pneumoniae
atggctgaaaacaattttaagccgtttgccgttggtgcaggtgcaaacgtgtctactcaagatgactgggaaggtctggctgcattgtctaccgggtttactgcggggatagcccgctctgagcagatcaacaaagcgctgcgacagggtaccgtaatggctagcgtacttgcgcagtatatcgtcgacacaacaaacagtgacgcgcttgatgatggtgatatctcgggacttgttcagaaactgaaaagctccataaattcagtaattccggacattccagtcaccagcgtaaacggtaaaacaggtgccgtgacgttaggtgctggcgatgtaggggcatacccaaacaccggaggggaggtttcaggaagcctgaatactaccggacaaattacagaagctggacagcgggtttacagtcccaacaacccacctccggtaaataacacaggggcggtaattggtgtcagattatcaggcagaacaacccttcctgacaccggcggtcatatcgatctgcctgctggttgcgtctatacgggtatgtctggcgctaactatgacccttcaatctgggctgcatactccgcagtacaggtaaacattaacggaacgtgggcaacggtagcgacggtataa

SEQ ID NO: 272196 - DNA, 183 bp, Klebsiella pneumoniae
atgtcattcatcaggtatctacaagaacatagaaaaaagaactatttatttcttattgtgagtgtttttgtgaacttaatagcaatgaatcaaaaggtttatgcatttaatttattgtttacctttatatatgtattttggtatatcatcctcagggcagatatggactctaaggatgagtga

SEQ ID NO: 272197 - DNA, 549 bp, Klebsiella pneumoniae
atgattatcaaatccgctcatttttcttgggcgggtttgttgaaccaacctacagggattaacatgccaataaaagagttcttaattatgaaatcaaaagcctttattaacttcatgcgcactgaactaaaaaacacatttacaacacctccttgcgaaaataaattaagaaaggttatttttattttttctttattaaatgccttaaatatcataggttattacatcctcacatatagtatgcaaatcctgttcttgttgcctattatttggggagggttattagcacacggaacttacaagcgctatggagatttgcttagatctggttctgattgtgctctttttctggtggctactattacatcagcatatctcgtcattaacacagcaagtgatgatgtcgatttttttgaaaagcatatgataaatggattaggttttttgattacatatgtttttgctgtagctgcatccgttcgtttttatatcagtgcaatagatttatataatagctctatttcttttaaaaaattaaaagaaaaatga

SEQ ID NO: 272198 - DNA, 357 bp, Klebsiella pneumoniae
atgactatcacactacaggcagtaaacgagctcatcgcctccctggagaacgcaggcgagctgtcgatcaaagagacaaaggttatggcgctggcgaaagcgtttaagcagctggttgcggagaatgtggagctgaagcagtcagagcgagagctcgacaatacgtgcgctgaagaattcggtcaggactgggttagcgaattgaccgaaacccccgccaccgatcgcatcgtagccgaagccgaggcgcgcggaattgagaagttcgcgaaaaagcttgagtcacgtggcaggcatcaggactacgttgcaattgccaacgcattcgccaatcagctgcgcgagggggccaaatga

SEQ ID NO: 272199 - DNA, 666 bp, Klebsiella pneumoniae
atgtatagaatattatttattgatgaagaaactgatgcaatagatgagtttaaggattatgctgatgaaacaacaacatctaaacaaattcaaattctcgatgagtttcctctgccaagtttggatgaaatgattgaagccattataaagataaatcctgatgcagtgattacagattttatgttaaatgaaaagaaaacttcaatcaaatatggtgttgagtataatggcattgagttggttaaaaaattcacttcgattagagatgattttccatgctttgtcatgacatctttcgatgacgatgcagttaaagaaagcgatgatgtaaatatagtatacataaaagacattttgcactctgaaaaaaatagtaatgtaaaagcaagctttcttgaaaaagtagtcagtcaaataactcattatcgtgcgagaattgatcattctgaaaaagaattaaaacagctcattgaacttcgaaaattggggaaggcgacaatagtcgatgaaaatagaattattgaattagatcattttttagaacaatcagttgataggcaaagctctgttcccaaagaattcaaggaactatctaatacacagcgattacaagaaatcctatcaaaagttgacaatttactttctaaaattgagaaaaatgactaa

SEQ ID NO: 272200 - DNA, 1362 bp, Klebsiella pneumoniae
  misc_feature (1139)..(1148): n is a, c, g, or t
atgacaagattacatcaccgtgcgcggtccaaagcaaatgcatcattgatatctatagctcaacgggtatgcgatatcacgattattttccttgggttgtatgtttcatttttattgaataatagagattttagctataatcaatttgttgttgttctcttagttctagctgtgttccaaatgttcggagggattactgatttttatcgctcatggcgtggtgtaaaattcacaacagaacttaacttgattttaaaaaactggacgcttagtctattattaataactgcttgcgtaacctattcgaaagaattatggttaccattttctatattcttagaatggtatatctttgtttgtgttggagtagtattatgccgtctgatgattagagtctgcgcaaaaacagttagatcttttggttataatacacgtaatatcgcaatagcgggggcaatgccggttggtctaagtcttgcgcgtagttttattgatgagccttggttagggtttgtagtagttggtatttataatcccactaaaatcgattctgatgatattgaatataaaggtgatttccaaaaattaattgatgatgccaaaagcggcaagatagatcgtatatatattgccatgaaaatgagtgatgaaaaggaaatgaaagagttaatcaggtcgttaactgatactacctgctcagtaatacttatccctgatatcttcaccttcaatatattacagtctagaactgaagatgttaatggggtgccagtcgttcctttatttgatacaccgttaaatggtattaacatggtgttcaaaaggttagaagatataatcttggctgcgataataattttactcatttcacctatacttttagtaatagcagcggtagtaaaagctacctcaccaggcccagtcatatttaagcaaacaagatatggcatggatggaaaacctatcaaggtatggaaattcaggacaatgaaagttatggaaaacgatgatacagtaaagcaagcaacaaaaaatgatgtcagggttacacgtgttggtagttttttaagaaaaacatcgctcgatgagttaccgcaattttttaatgtcctctttggtggcatgtcaattgttggacnnnnnnnnnncattgaaggatacatgctgcgccataaagttaaacccggcattactggttgggctcaaattaatgggtggagaggagaaacagacacattagataaaatgcagaaacgtgtcgaattcgatttagagtatatcagggaatggaatatatggttagacttaaaaatcatatttcttacaatatttaagggttttgttaataaatcagcatactga

SEQ ID NO: 272201 - DNA, 642 bp, Klebsiella pneumoniae
atgacaagttctcgtgctattgtcatctttattgcgttatattttgtcggtggtgttttgagaacgggtaaaatttctgttctgaaatgtattattatgttcgtattgtctatatggcttacagcttttgcattatttgctcgctatcagccagtacaaggttttcaaaatatcatatatttcttcacgtggtttgatctggataatattcagctatctattaattatttattttctttctcagtaggggtgctatcctatgctcaaacagaaggtggtacggttagcctggctcagttaatttcctacattaacccactacctagcgggatgattaattttaaagaacatgagaatttaatcggtgctgcaccatatagtgcggtatcattgctttatttgtttgcacctatttcaggcataatatatttttcactcagtggttttttatgggggaaaatatatagtggctcattaaaaagctttattttttcaaagctatttatttgtttgagtttgatatttgcattcatgagtcttcaatatacgcttcgcgcatcgacaaggatattatactatgctatttttatatatttcttatatattttagtgaaaagactggcctttgcttttaggaaataa

SEQ ID NO: 272202 - DNA, 501 bp, Klebsiella pneumoniae; identical to SEQ ID NO: 85998

SEQ ID NO: 272203 - DNA, 1044 bp, Klebsiella pneumoniae; identical to SEQ ID NO: 203653

SEQ ID NO: 272204 - DNA, 1734 bp, Klebsiella pneumoniae; identical to SEQ ID NO: 203654

SEQ ID NO: 272205 - DNA, 492 bp, Klebsiella pneumoniae; identical to SEQ ID NO: 203655

SEQ ID NO: 272206 - DNA, 1068 bp, Klebsiella pneumoniae; identical to SEQ ID NO: 203656

SEQ ID NO: 272207 - DNA, 1077 bp, Klebsiella pneumoniae; identical to SEQ ID NO: 248683

SEQ ID NO: 272208 - DNA, 171 bp, Klebsiella pneumoniae
atgattgccttctttgatggtgagctgattaatgaccagaaattcattattagtgggatcgttaaagtccatcaggcaggccaactctccttgtgtattaccatccttgctgacttcaatattgattccttctgtcaacaggcgatgaaaggccagattgtttgccattag

SEQ ID NO: 272209 - DNA, 387 bp, Klebsiella pneumoniae
atgaacagattcatgatttctgtgttttttatttcttctttacttatttctggctgttcaacatcaggcaaccagcatctaaaaaaagaaacatcacaaagtctgctgtcgaaaatcatcaaaaataaaacaacgaaatcagaaatcattaccgcattcggtcagcccgaaaccaaaactacacttgatagtggcaatgaagaatggacttactcgatggacaacaatcagtttgatgccaccacattcattcccgtgattggactgctgacagggggttcacagacgcaggccaaaacgctggaaatcgaatttaaaggcgaaacggtcagcaattggacgttctctgaaaacaacagcaagatgaaaaccggtcttattcaataa

SEQ ID NO: 272210 - DNA, 195 bp, Klebsiella pneumoniae
atggccgagcaatacaagccacgaatgcagacgacgctggcggggtatctgacgagctgtattgtgcagtttgctcctgagttgaatgacacccactgtttcctgttgtctttccagacgaattttttcttcaagctgaaggattttctccagaatcgtttcccggtttgcagcctgttcttcaggctcgcatga

SEQ ID NO: 272211 - DNA, 501 bp, Klebsiella pneumoniae
atgagtaatcaacaactttcagccaaccaaatcgcctacctgagccgcgctatgtcagacggtaagggcctcatcgaaatcggtgagttggctcggggtcttggaaaacagaaaggtaacgtcatccgtaaactggaagggatgttccctgaggattggcttttcaaattgaaaacttcgacaatatcaacgacttacctcaatggcaagcaggtagagcgcgaagtcacaacttacatgctcgactacaagaccgctggcgctctcgctatgtcatatgacggcatgttaggcattgaggtcttaaccatccttgaggactccctgagcaccatccaagcgatgaccatcgaagccgcaaaagataactccgctggcgtccttaaggccgctgctggcttccgtgagcggtaccgtgagcgcttggagttccgtccgggtgcctccgagaatgaggaccgcagcgtcgcccttaagcgtcttggacgtaagggtctgtaa

SEQ ID NO: 272212 - DNA, 645 bp, Klebsiella pneumoniae
gtggaactatataagtacttttctaaagaagaatacaaaaatgattatttatctggaaagatacgattaggaacattgattcaatatcgaggaatagaaaatgcacaacaaggagatagagaagaaggcactagcacttaccgacctgaacacctagaaataaatgatgaaaatattgaagattttaaagcagccaatccttttctaaccgatatgattagcattactggaaagggtgccaagttggtaattaaaggtggtagcacaataaaaaacactatacacgatgcatatttagtttgcgccacaacagttagagacgatgatttttttacaaatgattttggtggccactgtataaaaattatcgacgcagtagcattttcaaatgctgtaatgtatgcactcgctgataactataaattgaatgtgcatagcgcccacgcggaaatagagtatacaaaaactgagtcaactgatcttatgcaaccgcaagaccctgtattcagcaaaccagaatcttactcttcacaaaaagaatatagatttttatgggagtttgaaaagcccggtgaaacattgccaatcattacagtggacatcggagaaaagttagcaagcagaatatttgttgatgtaaaataa

SEQ ID NO: 272213 - DNA, 669 bp, Klebsiella pneumoniae
atgaatttattaaaatactatcaacaatatcgcgacaagtggtgggctttaccgctcgttctgcctgcgctgttattaccggtcgccagatgggcgaatacctacaccatgctcaatggtcatatggtatttttgtattatcttcccctggcgctggtgctcagcctgatgatgttttttggttgggcggcgatccctggcattattattggcctgctgttaactctggcccacggcatgatgcttgagcaatccatcggtgtactgttccatttccttatcccctgcgtgctctgctggggcggctaccgcatttttgtcccccagcgtcagcaggtctcacacggcaacgtccgactgatgccgcatcgtctgttctggcaaatgctgctcccctcggtcatttttctgattttgtcacagattgccgaatatcttggactccatccgcgcacaacggaaatgaccggcgttacgccatttagtttacgttcattaatcacctttcaggcgctaatggtagggtgcctgaccggcatgccgctgtgttattttgtgttacgggtcattcgtaatccttttcatttacgcggctttatttctcaggttcgcttacaaattgatccaaaaataaaaaaattgaaattatttgctgggcgacggtattaa

SEQ ID NO: 272214 - DNA, 522 bp, Klebsiella pneumoniae
atgaacaatattgatgaaataatttcgctttatcataattatggtttcgattacaggcaagatttttcggatgaaaacaatttagtacttacaattactcaaggtgtttttgataatgcgatcatagtttcaactgagccctcaaatagtgacgatatcaaagaagaactgtcttctttaggttatcacgtgaaccttgagcattttacatcattaaataatattgaaaaaaatctatttaaaggttttttttctgttaaaaggactaaggcaaattttgaacgagattataatttacatatatcaaatataactaaatcctttcctacagctaatatcgcttatgaatatattcagtctccttaccataaggatggggaatatttcgaaaatgaagtggatatcttaagtgatattagatctgacataaatacaaatgggccaaaacttattcttattgaggctcctgcgggatttgggaaaacgtgcacggcgtacgaaatagggagaatcctttcttag

SEQ ID NO: 272215 - DNA, 222 bp, Klebsiella pneumoniae
atgcaggtgtactgtcattggttaatgctgttgttactgcaactgttggggcaactgcatctactacacctgtgccaggtaatgacgggttacccgctgggtcagtcgctgtcgctgttactgtttgaccatcagtcaggtcacctgggtttggtactgtccacttaccatccgggcctgcaactacagttgctgttgtaccatccgggaagctcacggtaa

SEQ ID NO: 272216 - DNA, 1824 bp, Klebsiella pneumoniae; identical to SEQ ID NO: 193982

SEQ ID NO: 272217 - DNA, 180 bp, Klebsiella pneumoniae
atggaagacgaaacagaactgaccgaaccgccattcgaaacatggtttaggaacttggtttctttggcaagagataaagggcattcaattgaattagtagcatataaagggatgtgggttgatgcattttctgaaggttacacgccagaggcggcgctaacgaaaagatttaacaattga

SEQ ID NO: 272218 - DNA, 1233 bp, Klebsiella pneumoniae
gtgggacaaaaacacgcccgttgggccattgttggggccgggttaaccgggctggccgccgcccgccagatggcgctcaactttcctgacgatgaaattgtgctgattgaagcacaggaagtgggctatggcccttccgggcgcaatgcgggctttgctattgacgtaccgcacgatatcggggcgaaggactatattggcgatgtcaaaaccgcaaagcttatcctgcagctcaatacgctggggcagaactatctgcgcgctatcgtgcaggaacacggtattgagtgtcagatgtccgagtccggaaaataccaggcggccgtgggcgagcagggagtggcgattctggaggcctaccgtagcgggctggagaaaattggccgggaaacgcagatgataacaggggaggatctacccgaccatatcggcacccgctactacaaacaggcgctctatattcccggcacgatccttcttcagccttcggcgctggtgaaagggctggcgaacagtcagccatcgaacgtgacgctctacgagtatacgccgatcaccgccatcaattacggcgataaagtgacgctggtacatgacaaaggcagcatcacggcggataagctgattctggcgaacaacgcgtttgcgtcacactttggcttcctgcgcggacgcctgctgccgaccttcctttacggcagcctgacccgtccgctgaccgccgatgagcaggccaggctgggcggcaagccggtctggggcgtgattcccgctcatccgtttggcagtaccgtacgtcggacggtggacaaccgtatcctggtgcgtaacagttttagcttccatcccgatggccgcccgcgcgagcaccatctgaataacttcatcgctaaccaccgcaaatcatttgaacgccgctttccgatgcttaaccaggttgatttcgaatattcctggagcggagcaatttgcctgtcggaaaaccatgagggcttcttcggccagctggcacccaacgtctatggcgcactgtgctgtaacgggttggggattactcgcgggacggccaccggcaaactgctggcggatatgattgccggcgagcgcaacgagttaatccatttcctgaagtcatcaccaggaccgaataaaacgccgccggagccgctgctgtcgattggcgtaaactcggtgctgaaatgggggcaatatcgagcaggtctggaggtttag

SEQ ID NO: 272219 - DNA, 435 bp, Klebsiella pneumoniae
atgtatattccacgccccacaaagttgctcttcaccgtcgatgacggctggaatttgttccttaataagttcggcgattgcgtgaccccgtggacccgtctctacgtcgagcgcatgctcgcctgcggcaccgccagtatgagagtccgccgctactgctgttcatcagcagactgcacccacagccgcttcttctgccagagctacaagtcaaaggcctgcagcgcctgcggttttaaagccaccgagcagtgggtctcgcagcagagccacatcctccccgactgctactggcagcatatcactttcaccatgccccaccttttgtggccctttttcaacaacaactggccgttactgaatgcactcttctgcaccgccacccgggccatgctacggtgggcgcccaaacagtgtgtggaggtagcatcttag

SEQ ID NO: 272220 - DNA, 921 bp, Klebsiella pneumoniae
atgtccctgctacatcagattcaagagtctgtggttcaagatggatcaagcttgggtccaatactgctcaaactccgactcttggcagcaagattaggaagtaacgatttagaagaatgggtcaaacatgagtcggaaggctatcctcaggatgctgtgcttcccgattacagaatagtaggagtaacttataaaggcacgttttctggcccttttggctctggtataaaaaatgcgcctatcccaccaatattaataaaaacgtttgcaaatgatagctggaataactactccgtcagagaaagcattgctgctgttgacgaacttgttaaagttagtacaaaaggtggttctttggggattaatgcgtcaaatttaatccttcttctacaagggaagatatataaaggttatgcttgtaatgatatctctggagatatttcagtagtatcactatcagaaatttcacaagccgttcgtaatagagttcttgaattaacaattgaatttgaaaaatcaattccctcagcagcacacatcacttttggtactcaaggcatggataaagataatgcatcaaaagcccaacaaataacacaacaaataatctatggaaacgttggtaatgccatctctggtggcagcgaatcaactattaacgtaaatatacaatcacacaataaagaatcggtagcaaactacctgaaagattcaggtatttctgaagaagatgctcgtgatttttcactgattgtagcgtctgaaacaccatcaagttctgaagaaccttttggggaaggtgcaaaaaattggattgcatcaaatataagaaaagctgccgatgggacttggaaagtcgggatggcagttgcaaccaaagttctgacggaggctgcactgaaatactatggtttgcagtaa

SEQ ID NO: 272221 - DNA, 510 bp, Klebsiella pneumoniae
atgacgtccccgataacctctttcacccggtccaccggctcgccggctttacgcgcctccccggccacttcccgggcagtctgttccgcctgtttttccatttcgcggcgctgctgttcttctgccgcccgctgcgccagaacctctggcgggaggataatgtcagccccggcctgcggtaccggagccaccggcgccggttcagcccatacccgcccaccggtcatggccccggggttccaggggcggtcatcaccggccagccgcaccaccacccccgtatcgggattgtcgcgggccattctgacgccctcccccatattcccggccagcaggctttctccgttgcggctgttctgcagcgccacgaaccgggcgtcttcattgcccataattcgtccctctccgccgatagcctccagccgtccgtcccgatcggtcagcgggctgagccagataccggcggctttcccgttcttatcgaatgccggcagcgccacatgcggctga

SEQ ID NO: 272222 - DNA, 441 bp, Klebsiella pneumoniae
atgggaatttacgttacccgtgatgacctgctggctgcggacgggtcgctggtctggactatggccatcgacaaggcgactaaccaactcgacgagacgaagatagccacggccatcgaagatgccgacgcggagatcaactcgtttctgtcgaagcgctatcagttgccgctgaacatcaccaccgttccgcgcccgctgcaccgggtagctgtatccatcgccatttactggctgtccgagcgtgacaatcagatcaccgacctgattcagaagcgctacgacagtgccgtccagaccctgaaggagatggcgaacggcacccgtgaccttggtctgccgaccgacacgccagccccggagaccgataacggcaggatgattgttgtctccgataacaaacgcctgttcacccgcaacaacctcaaaggggtgctgtga

SEQ ID NO: 272223 - DNA, 543 bp, Klebsiella pneumoniae; identical to SEQ ID NO: 248567

SEQ ID NO: 272224 - DNA, 876 bp, Klebsiella pneumoniae
atgatccctgcgggtacattcactggccgggatggccgttcgtggattaacgacaatcccgctgcggtcattgccgcctcattccgttatccaaaattaccgattgatatcgaacacgctaccgaactgcttggcccgaaaggcgaagaagcaccggcctatgcctggattgattccatgcgcattaatgctgacggtagcctggatgcgcacgttgagtggacgcctgatggtgaagcatgtgtcaggggtaagaagtacctctattacagcccggccttccgttatctctcaacaggtcaggtgacgctgctgtccagcgctggcctgaccaacaaacccaacctgtatttacccgccctaaactcggagaacaccatgactgtacctgtgcagattgccacggtgctggggctggctgcgactgcgtcgattgatgacgccgtgtcagctatccagaccatcaagaacagcgagcagaccgcgctgaaccgtgctcaaaacccggacctgtcgaagtttattccgcaggagacgtatcagctggcgctaaatcgcgctcagatagcggaagaacgcctgaagacgctggatgagaaagcggcgacagctctggttgacgatgccgtaaccgccgggaaagtcgcgcccgctaaccgcgatatgtatctggctctgtgccgctctgaagatggtcgccagaagtttgaatcgttcgtaaaaaccgcgcagccgctggtcaatctggacccgtcaaaaggcaaagagaacaacggtcagcagaccacgctgaccgaaaccgaactggcgatgtgtcgcagcatggggcttaccccggaagagtttctcgccgctaaaccgaaacaggagcaataa

SEQ ID NO: 272225 - DNA, 498 bp, Klebsiella pneumoniae
atgcgcatggccatcgagaaactttccgacagttcgctgcagcaggagctgctggagagtatcggtgctgtcgtggaatcgcagacccgccgccgcatcagtgacgagaaaacctcaccggctggcgagcgctgggaggagtggtccgagggttaccgcaagacccgcagcggaaatcagagcctcctgcagggcaatggcgatctgctcgacagcatccagtacatcgtcgaacgtggccgcgttcgtgtgggttcgccgctcagctacagcggcgttcaccaggacggctttgcaggcagcgtcccggtcagcgctcacaagcgccttattcatcaggcgtttggccgggcgctgaaacatccggtctggcagaccgtaggctcccataaccgccagatgaatattccgcagcgcgagtacctcgggctgtccggttcaaacagtgatgagctgatgcacgtcatcggcgacttctggaaagaggtattaccgtga

SEQ ID NO: 272226 - DNA, 411 bp, Klebsiella pneumoniae; identical to SEQ ID NO: 110847

SEQ ID NO: 272227 - DNA, 264 bp, Klebsiella pneumoniae
ttgcagggggccacgcgcctgatgacccttaacagccgcatgacgtttatgaatgtcctgctggatggccgttcgctgtccgtgaatctgatgcagggcaccacgcagctgaacgggtgccgctttatcagttgtggggtgtatcgctgggcgacagcatttggcaagagtaattatgttggcacgctttatgtcaaagacactaacgtcagtgagaacgttaccggctttcttaaggaaggtgcgaataagtccgagatgtga

SEQ ID NO: 272228 - DNA, 252 bp, Klebsiella pneumoniae
atgtccgccgtgaacgttattcagctcctgctggccaaaacctacgtcaaacgagaggagctggagctgatgcgtacccgactgcagggcattgaaaataccatcgcgggtctacccagccagaaagaccttcaccagttgcaactggagatgagcaacctgcggggcgatttgcgcgaactgggcccggcgattcgccaggtgaaacacgtcagcgatctgcttctggaaaacgagctgaaggaaaaataa

SEQ ID NO: 272229 - DNA, 252 bp, Klebsiella pneumoniae
atgtccgccgtgaacgttattcagctcctgctggccaaaacctacgtcaaacgcgaggagctggagctgatgcgtacccgactgcagggcattgagaataccatcgcggggctaccgagccagaaagaccttcaccagctgcagctggagatgagcaacctgcggggcgatttgcgtgaactaggcccggcgattcgccaggtaaaacacgtcagcgatctgcttctggaaaacgagctgaaggaaaaataa

SEQ ID NO: 272230 - DNA, 288 bp, Klebsiella pneumoniae; identical to SEQ ID NO: 222981

SEQ ID NO: 272231 - DNA, 195 bp, Klebsiella pneumoniae
atgtccatacgtctgcaggcaggtctgcagaatcgactcgttggcactgtcgccgcattcgacaagggatcgcagaataaccaggcgctggtcctggtcgagaatgtcacgcatagtcacctcttatttttccttcagctcgttttccagaagcagatcgctgacgtgttttacctggcgaatcgccgggcctag

SEQ ID NO: 272232 - DNA, 498 bp, Klebsiella pneumoniae
atgcgcatggccatcgagaaactttccgacagttcgctgcagcaggagctgctggagagtatcggtgctgtcgtggaatcgcagacccgccgccgcatcagtgacgagaaaacctcaccggctggtgagcgctgggaggaatggtccgagggctaccgtaagacacgcagcggaaatcagagcctcctgcagggcaatggcgatctgctcgacagcatccagtacatcgtcgagcgtggccgtgttcgtgtgggttcgccgctcagttacagcggcgttcaccaggacggttttgcaggtagcgtcccggtcagcgcccacaaacgtctcattcatcaggcgtttggccgggcgctgaaacatccggtctggcagaccgtaggctcccataaccgccagatgaatattccgcagcgcgagtacctcgggctgtccggttcaaacagtgatgagctgatgcacgtcatcggcgacttctggaaagaggtattaccgtga

SEQ ID NO: 272233 - DNA, 159 bp, Klebsiella pneumoniae
gtgtttgtcagcgacgatcccgatggcgataacgaggcgaacgcgctggagggtgatgtggtcgtggaaagcttcatcagccatgaaaccgcagagcgcctgaaagctgagccgcatctggtggtgacggtcctgcagacggtagcggagaacgactga

SEQ ID NO: 272234 - DNA, 189 bp, Klebsiella pneumoniae; identical to SEQ ID NO: 252378

SEQ ID NO: 272235 - DNA, 195 bp, Klebsiella pneumoniae
atggccataagtctgcaggcacgtctgcagaatcgactcgttggcgctgtcaccgcattcgacaagggatcgcagaataaccaggcgctggtcctggtcgagaatgtcacgcatagtcacctcttatttttccttcagctcgttttccagaagcagatcgctgacgtgttttacctggcgaatcgccgggcctag

SEQ ID NO: 272236 - DNA, 252 bp, Klebsiella pneumoniae
atgtccgccgtgaacgttattcagctcctgctggccaaaacctacgtcaaacgagaggagctggagctgatgcgtacccgactgcagggcattgagaataccatcgcggggctaccgagccagaaagaccttcaccagctgcagctggagatgagcaacctgcggggcgatttgcgtgaactaggcccggcgattcgccaggtaaaacacgtcagcgatctgcttctggaaaacgagctgaaggaaaaataa

SEQ ID NO: 272237 - DNA, 237 bp, Klebsiella pneumoniae
atgaccaaaagcaccggccactgcaccagcctgctggcccagcgacatgatcatcacgtaagcaatgctgctgtagagcgaaagtcgagccatcagcggacgggtctggcggacatattcgtccgtggcgttgtcgccgttgcggatggtttcctgctgttcgtggtgtgtagcctgctgatctgccatctgcgccttgtcccgctccagctggaactgctgcagctgtacctttaa

SEQ ID NO: 272238 - DNA, 210 bp, Klebsiella pneumoniae; identical to SEQ ID NO: 246547

SEQ ID NO: 272239 - DNA, 201 bp, Klebsiella pneumoniae
atgtgggtgctggccgtgggcgtgtttttccacctgatagcccggcttgtcagaaaacagcctgaaatggccgtgcaggccgctgaaattctgggattaggaatggtggtgttcgggggataccgcattcttaacgccctcattgctgaagccgaaaaagaggagaaagcctgtgaaaagcagcctgaagaacatcgctaa

SEQ ID NO: 272240 - DNA, 390 bp, Klebsiella pneumoniae
atgacagatgcagtaatgacagttgagacagtatcggacgctttgtttagctgttcatatctgtgggcgcatggccggaactacaaccgtacggatctggaaaaggcaatccatcagcacaaagacccgacaacgcgctatggcaagctggcggtacgcttaaaacaaattgctgaaatgccatatgaggttctgtgtgatgccggctatatcgatactgatcgtaaacagatgataatcgcccgtcgttctgtgctggtagatgaaatcggcgaagaggaaatgaatctctggctggccgacacccagctcatacagcgcgtattcccggatgccaccattgataaaacgctcaaagctaccacttacacgcggttcagagggctataa

SEQ ID NO: 272241 - DNA, 705 bp, Klebsiella pneumoniae
ttggctagtaatgttagtgatcctgcaaatataataaatttatttgtagctcttggaacctgtgctgctgtcctagttgcattaatcgcaaaaaaacaggcgtccgtagaatcgacattttcattgttactctcacaacacaatcaatctttagaacatctaaaatcatctaaagattatcatgataatattaacaaagttattgatgcacattcttttttaatagaaaacaatgcttttccagattccaaacagttcattgaccaacaaaatgaagtcatgcatgaaatggatgatttttatgggagctattttaggattctataccatgtcattaaatatatagacaataatgctggatactatccttttgacactagtggaaaaaagaaattcacaagtcttgtacgagctcatatggatagtgagattacatatttactagctattaattgtgctcatgccaaaaatggcgaccagtattatccttataaattattaattgaacgctactcactactagagcatctaatcttcaacaagaattttttacacaaatataatcatccaaatttacaatctcactcacaaaagcaactaagaataatggattgtaataataaacatactccattgggtgagattgcgagaaggtatcataatactgcctttggtagtaatcctgatcgagttaatttcctataa

SEQ ID NO: 272242 - DNA, 1110 bp, Klebsiella pneumoniae
atgcaatggcctgttcctgatataccggagaaaaacccacttccttgtcctgaatacaaaacatggggtgtgattcttttcattatgctggcggttggaggaactctggtattatttgtcggcagagtcaccagttacgggcaggtgattctgtatggtgtgctaccggcattttttatctggttgtgtttcttcggtgttatctggcatcgctatgaaaagtctgttaatgacacactattgtggaataaagaatctgagcggacgagatcacactggcaacgctggtgcaggcagcaatgggttgttgtgggtaatattgtgctgacaccggaaaaagacggaattgctgcccttctgggagattatgcggatatacccgcttatccgcgcaaggcccggtctttgcatactgttcttgctggattgaataaccggctggaatatattgatgcccaggcagagaaacagtgtccaggatatcgccattttttatatgcgataaaaattcttcttcctggcgtgagtcagcagttatcggttagtcaggctgtttataaacaatgggatttatacccggagtatattaattcagttgatgatattcaggttgattcagaacagaagggacttattcttctgctttgtattcaggactggtttactgataacaacaaaaagcacagcgaatttatttctggacagattattacattagtttcgttttcctcaatacataagctgccagttatggccgggataggaagggtcttatccgctgattcgttaaccagcgcactggatatattgtctgaatataacaggctaaacaacacagacttacatcatatctggttgacaggagttgataatgatgaacgggcgaaaatcgttcaatatgccggagagcagcaatggcagttaccggcaaaactgccgtgtcatttgctggatcataccttcggacctggcggaccattgtcatttcccgtttctgtcgcactgatggttgatgcagctgttcataccggtgaaatgcagttgcttatttcacagcagcgaaaaaataagtactcactttgcctgatcaccagggagttatttttatga

SEQ ID NO: 272243 - DNA, 261 bp, Klebsiella pneumoniae
atgccagcattagtctgtctgggagatgccactactcatggcggtaaagtcatttcagcatcttccactatgtttattaatggtattcaagttgcactggttggtgactttgtatcctgcccgaaacatggttccggtcgtattattgaaggtgattccacggcatcagaggagggcgtatttgttgttgtggataattgcctctgtgaatgtggttgccgtgttatcagttcttataccgaaaacagtattgagtcataa

SEQ ID NO: 272244 - DNA, 393 bp, Klebsiella pneumoniae
atgaccgtgaagtatctgaacaaatacggaattgaaattaatttcagcatggataacggcccttacagggaaactcctttactaaaaaaagatcatcgggtaatggaaagttcctatggtaccacgctgtataaaggtagcagaaaagtgaatggtctcgatgtcgttgaatggctggtcagagagaaccagatatcagagggtattcccattataagttatgcctttacgctgagaattaatgagggcagggttgggggaatgatgccgctgaccgtgaatatgagatacacatcacgggataatagctcgggtgagatattaagtgagcctgaactggttgcagtctggcagcatataacagaaacattggagtaccataaatcctggtga

SEQ ID NO: 272245 - DNA, 969 bp, Klebsiella pneumoniae
atggtcagtacacttttacaacagccagaaacccggtattttggttactattctgttgccttgcccgcagagtttactccaatgccagagatgttaatgttcatacagggttcagatatgacgaaaattgagagtaaacagcaatattatccaccttttgaacaatttttaaaacgttataaaaatgagctagataatactttgccagtgcgtcctgatgatgcaccttttttgaaacaaatccatttgttgccatcagggatgaaaggggaaatttttgagcgaatggaacatcagggagttccggatgtggcaagaatactggatgcttaccgatgggatgatggcgttacatttaaaataagtatgaaggccagagacggacgtgcaaaaaaatatgatgaagacagaaaaaaatcaaaatatagttttaactatgatattccagaaaaaaaatctcttttactcagtatattatcaagtctgcacccccggaaagataatcagcgcccgcaggggaacaatctggctataaaatatggtgaggtgaaagagtcactgcttggggaatatgaaatgacggtgaagtatataaacagatatggaattaaagtttatttcaatacggataacagcacttacattggaactcctttgctaaaaaaagatcatcgagtaatggaaaattcctatggtaccacgctgtataaaggtagcagaaaagtgaatggtctcgatgtcgttgaatggctggtcagagagaaccagatatcagagtgtattcccattataagttatgcctttacgctgagaattaatgagggcagggttgggggaatgatgccgctgaccgtgaatatgagatacacatcacgggacaatagctcgggtgagatattaagtgagcctgaactggttgcagtctggcagcatataacagaaacactggagtaccataaatcctggtga

SEQ ID NO: 272246 - DNA, 1773 bp, Klebsiella pneumoniae
atgaccacaataagtacggatctcagcgcaaagaataaaataggttcagtgacaattaatgactatcgcattatccctgtagtttttattccgggagttatggggagcaacctgaaagacggtgatgataatgttatctggcgatatgacgatggtttgtcattaataggctggtcattacccggttccggaccagaagagagaaagaaactgctccatcctgacagagttcaggttgataaccgtggagtgattatatcgtcacagcaacaggaacagcaaagtcagataatgcttgacaatcctgttaataaatacgattcagaatcaatagaccgtctgggcgctgcgcttaaaaaggcccaggaaaacgatccggaaacaaagctttttggcacacgtgctgcccgtggttggggggaagttgccgcaggcagctatggttcgtttcttgatttactccagctagctttatttcgggataagccttgtaaagatagtcctcttaatgcgatttataaaaaattaattactgaggcgctgggtgttgagttttgtagtagtgggaatagtgactctctggatgaacaggctcttgaagtcatgaagcaatatcagtttcctgtccatgcaatggggtataactggctcggttctaatataaaatcagcggaccatctgaagtcccgtattaatgagattgttcagggttataaaagcagaggcatgaaatgccataaagtcattctggtcacccactcgatggggggactggtggcaagatattattcagagtgtctggacctggacgatggtaagggtaatcaaaatatctacggagttgtacacggtgtgatgccctcaactggcgcagcgcctgcttacacacgtatgaaacgcgggactgaaaatcctgaatcgagtactgagggatatattatttcgcagatactcggacgaaacgcagcagaaatgacggcaatttgttcccagtctgccggaccactggagctgctgccatccgtggactatggtactgactggcttaaaataaccgatcgtcatggcgtaaccacgtcgctgccagggaatgatccttatacggatctttatctgaaaagggatgcctggtggaagttgatcgatgaaaacttgttgaatcctaacaatgtttcattaaatcaagcacaaattgaaattgattggggggtatttgatgagctaataaatagcttcgttaaaccatttcatgaaaatatatctgggaaatatcattccaatacttattctttttatgggaaagtagatgatgatgttattcctccggcatatctgacacaagaaactgctcgctggaaaggaagtattgccattggtgatgccgctgttttaaagaaaaaatatattctcaatgacggacgcctggattatcgggagataaaggagaaaaggacggtagcagataccctttccgaaaaagagcagagctggaaggtttcttctcatggctctgggtatatgaaaagttataattcagaatatgtctatataggtcaatgttttaccctgcaggattccagtgaaaatggtgatggcactgtgccgttacgggctgggaaaattcccgatcgctttgtaaaggaaaggttgaatgtcaatgtatctcatgaagcggcctaccgtaatgaaaccagtctggcatttacattgcgttcaattattaaaatagctcagcaggtaaatgatgatgaagaaatggcatatacggaataa

SEQ ID NO: 272247 - DNA, 303 bp, Klebsiella pneumoniae
atgcaggtctgcggtggttcgcaatccttcaatgcagtgagccagatgcgtattctgggccgctggatgcggatgtttacgatccccaaccagccctccgtagccaagacatggcaagagttcgacgaaaacggacgaatgaaaccttcgtcatggtatgaccgcatcgtcgatgtagccgaggagctgtttaaaatcacgctgctgcttaagggacaaaccggttatcttgcggatcgctacagcgagcgaaaagagagccatcaggagctttcatcccgagtcaatcaggacaaaatataa

SEQ ID NO: 272248 - DNA, 441 bp, Klebsiella pneumoniae
atgcacgttttacaccatcatgccgccgcggacgcggcgggaaccatcgacccgcgcggtcgcgccatcgccctcagcgtggtcttcgccgccggggccttgctgtttatcatggcccccgttatcggggcgagcggcacgctgggtctgctggcgctcctgatcgcggccttcggcgccggatggggattcgcgcgcgcgcagccctggctctatcgggcgcccctgacggcgacgcgctgggccttcctggtgtcggcggccggctggctgctggcgctggtggcctggtatggcggccaggcctggccggcgctgctgacctggcacaccgccggggcaggacgcggcggcgtgaactttgccttagccgtgctgctggactgggcgctgctcggcgcgctgattgtgcggatccgccagcaggagagtgcggcgtag

SEQ ID NO: 272249 - DNA, 1455 bp, Klebsiella pneumoniae
atgaacgttgtttctaatgctaaatggaatgctttttcacaattttttaagattggtatccaagttgctaatcttgtttatcttgccaaaattatacctccttctgagtatggtataatggcaatggccgttgttgttacaaatttaggtgttttacttagagatctgggaacttccgctgccattattcaacggcgaaatttaactgaaggtgtaaaaaatactgttttttggcttaacgtcattttaggttgctctctcgctattttaatagttttatcgtcgcccctgatagcagcaatttataatcaacatgagttgatttatgtcttaatgctattaagtattagttttcctctttcaagtagtgcagctacccatctagctttactcgaaagggaatccaagttcaagacaatatcaaaaattgagatcacatcttcgttggtttctgtgctggttgccatcatcatggccaatttaggttatggtgtttatagccttgtaatgcaagctattgtattaagcttaatgtcggccttacaattttggattgtttctagttggcgaccttcatttaaattgtttattaataaacatgatttaaaggaaatttttggttttagtgccaatctttctttatttaatttaattaattatttctcacgtaatgctgatggttttattattggcaagtttatgtctgccactatacttggtagttataatcttgcttatagaataatgcttttcccattacaaagtctaacatttgtcgcatctcgttctttataccccgtattaagccattaccaagatgacatatctaaggtaagaaatacatatctaaattgtgtttttgttattcttatgataacggcacctttgatgagcgggcttgctatatatagtaaaccttttgtatttttgatttttgggccgcaatggcatattacttctgatgtgcttcagtggttagcgcctactgcaataattcaatctattcttagtacgactggttctgtcttcatggctaaagggcggactgacactttaatgcgtttaggtatcataggtacatttttgcaagtgagtgcttttttaatcggtgtgaacttttctattacaacattcgcattttgctatttaatagccaatattttaaatttctttccagtaatggtttgtcttttaaaacttatctcagtagatttttattttttctttaaaaaaatattttccataataatatcaacatttataatgatttctgtattgaagactatcgatctattagtatttccaattgatgatattaaaaatcttttcacacttgttgttttttctttagtaggtgttgttgtgtatttttttgcgatatttactttgtctactcagtttcgaaagaatatcatccttttttattgcaacaaaattggtaataaaacaatataa

SEQ ID NO: 272250 - DNA, 2019 bp, Klebsiella pneumoniae
atgaattctcctctgttcgcgtcagataacaaattccttactgtcgcctcctatgatgagttatcgaatacttcgggtgaattttatggacaggtaatatatttaacatcctattatacgaacgttcctggtggcggtggtttttattcatggaaggagggggttgaaagcgatgatctaggccatgtttgtgttccaaaacttggtaatggatattgggaatctttggatgataaagttgatttacactcatacggcatattagctgtcaatattgatgcagctgacaagacccatgatatgtctaatagactacaaaatgcattcaatcgtgctaaatctaaaaattattcagttcatactagtttggctgcagaaaaccattatagcaaacatggtttttttattactaaaggcataaatatttcaggagttaaatcaatctatggatgtttaagtttgtttctcttgtcctcggagtttaaaggtctttctaccccaggcataccttccactaaatgggcattaattaatattaatgctaaatttgatagctctgggatgatttatgggtcagctcaaggtaaccaaataatatcaagcatagttattcgagatttgactcctagatctacttcactaagtggccaattacatgttttttctggagtaaatgtctttggttctctgtgttctgtcgggtttgatggatatggtgtatgtttagattcatgctacgattcctttatttctgatataagagctatctcctgtggtaatagtgactattttgcaattagttgcggtaattatccaagcgctcatacctcaaggcccgatggatttaatagtgtaacaattgccggggttatggctcatgactgctatgatagaagtattcatattactggagcaggtaaaaataggattgagcgtattcacgaggagcaaacaattgttacttcaacaacaccttggaaaaaaagtgcaactgtgattactaataattggggttacagtaacacaattattggaggcgacttttccagctttggtactgtttctatttaccctcgtaataattgttctaagcatcacgtttgtacaattgttagtaatagagtagctattgatacactcgatacgagtggcaacgtatcaattcatagttcctacactgagtatccaagagctctagcgattaattcattgtctgtaaaatataatttatggatatcagaatatgttattgcatcattatcaacagttgagataactgaggggaattttgattccaatgcattaagagtaacttcaggctctatttttatgtatggagataaatgccatttttatgccaaaaatggtacttttgactacctttctgtaaacggcgatgttcattttgatgaatgcaatattgtcgggtgcaatgtaaagggcacagttttactttctaataataattatattgggaatgtaacctgcgataaaattgctattaaaggaagccgaaactatattcaacgtggtgtttttaagaatgatgttttgatcgcaggtatagatgagaatcatttttctgattgtaaatttcttgggaatattgtgttatgtaatggtgtctccttatccaaatgttttgttaatggccttttaacactaaaatcgataaaaggaaacagcagttcaataatgcttaaagagcttcatgtaaaaggtgatttaatagtggattccacaaatcctattaagctcgcttcttctgtggttgatgggaatatcataattaatgatgttaaacttaacttgattcttgatgatttaatgtgtggtgatatatttaatagtgccgctgatggatcttgggtatattctaaagttattgtttccggtagttcaaaccatgcaaataccatagctaacactaatattccccgtggccgagtatcaacaactgatccctatacaggtaatacttatacttatactggtgatggatgggttaaggttttttaa

SEQ ID NO: 272251 - DNA, 168 bp, Klebsiella pneumoniae
atgctgactgatatcaggcataaacttctgaaagccggagtgaaaaacgacaaaattgcagaccgtgatggtcagtctgttttggtaacgctcgcggcttcggcggcattcctgacgattaccgaatcaatagtcggcgtgaaacgctggccaccgggcggtatataa

SEQ ID NO: 272252 - DNA, 327 bp, Klebsiella pneumoniae
atgaaaagcaatgccggatttaagcacgtaggtttacttattagaaaaaaagacatgagttttgaagagtttgttaattactgggataatgttcatactgccatcgcactccagttacccggtttaagaggatatgtgctcaatcccatagaccgggaaaagtatccggactctcctattgacggcttctcagagctttggttcgattcaatagaggatgcaattagtgcatttaattcacctgtgggtaaaactgcttatgatgacgttaagaattttattgataaagcagcaattacctatgtgatggaaattaagaaaaagtaa

SEQ ID NO: 272253 - DNA, 912 bp, Klebsiella pneumoniae
gtgcgtaaaattgatcaccttggcggcattaccgcatttgtctcaaccgcaaagctgggaagctttacagcggcggcagaacaactgggactcacaaaatcggcaatcggcaaaagcgtgagtcgcctggaagatcgtctaggactaaagctttttcaacgctccacaaggcgattaagccttacacctgatggtgaacgttttcttgaaagttgccagagtgcgatagaaatactggagcaggcagaatcagaactctcctcgcatatctgcgaaccctcgggtcgtttaagggtcgaccttccggccgcatttggtcgtcaaagaatattaccgatactgttaaaaattaaccaggactatccagagcttgttctatctgtcacttttagcgaacgctttgttgatctcatagaagaaggtatcgatcttgttattcgtatcggtgaactagcggatagcagtgctttggttgcgcgaaggctgacaacccaaaagttagtgatatgcggcgcccctgattatcttgatagccataaatcgccgctcacgcccgaagacctggcagaacataaatgtattatgggttttcgacgtaatcagcccatatcatggatcttaaaagataaagacgggttgataacgagatgtattcctcccgcaacccatgaatttgcggatggtgatgcgttgcttgcagcgacgctggccggatgtggcctttcgcaacttcccctatggttagtgaggccgtggctggaaaatgggcaattacaagaagtattggccgactatgctggcggagaaatgcccatcagcgcattgtggcccaggagtcggcagttgctgccgaagattcgctatgttgtagacacgctcgtctcggcagcggaagaagggcgactggattag

SEQ ID NO: 272254 - DNA, 1116 bp, Klebsiella pneumoniae
atgaatgaactgttttccccctttaaattaggcgatgtaactcttaataaccgtattgtaatggcccctatgacacgctcaagagccaggaaaggtgacacagccgatgagctaacggctaaatattatgctcaacgagcttctgctggactgattatcactgagggagcgcagatatcagttcagggacagggatacctgttcacgcctggaatttacaaccagagccagattgaaggctggaaaaagacgactcaagcggtccatgaacgtggtggaaaaatattcattcagttatggcatgttggtcgcatttcaagcacaagtttacagccaaatggtcaagcaccggtcagctccgtcgcggtgaaagctgaagggtcacattgttttgcatatgatgtaaatggtcagcctgggtctgtcgatgtctccacccctaaggcgctgactacagctgaaattgaggggattgtgcaagactatgtcgttgcagccagaaatgcgattaccgctgggtttgacggtattgagatccacgcggctaacggttacctgctagaacaattcattaatggcggcctgaatacacgcaacgacgaatttggcggcaaggataccgagaaccgcttaaagttcgtcctgatggttactgacgccattgctaacgccattggggccagtaaaacgggcatccgcctggcgcctttcggccgtttgtttgatatgcacgcttttgacggcgaagaagagacttggttacttctggcgaagaaacttggtcaacgttccctcgcttacgtgcatctcagtgaccaaaagacactcgggcaacaggcaatcccggaagggtttattgaaaaattcagagcggcgtaccccggtacgttgattattgctggtggctttgataaagcgaaagctgaagaatacctggccactaataaatctgacctgattgcctttggccgcccctatattgcgaaccctgatttagttgagcgaatggctaataactggccgttaaatgaggtcaagccgacaggtacctatggcggcggcgaggaaggttatactgactacccttcctggcctgaaaccgaaaccacatcctaa

SEQ ID NO: 272255 - DNA, 837 bp, Klebsiella pneumoniae
atgaaagtacaaaaaataattaacaataaccaaataatttgtacggatcgtaacggtgatgagtgtattgcgattggcaaaggtttggggtttcagtctaagcctggagaaacagttgcaccggagaagattgagaaaatatttaaattggacgatacgggtgtgagctcaaaatttcagaacctggttaaaaaaataccctatgagcacatacaggtcactgatgaaataatccagtattttaagttgtcactggggaagaaattaagtgataacatttatatctcactgacggatcacctgaactttgccattgaaaggacaaaaaagggaatagtctttacaaatccgctgacatgggaaacaaagcgattttataatcatgaatatgcattaggtctgtatgcaataaaacatatcaagaaccgcattggtattgaactgcctcaggaggaggccggttttatcgcattacatatagtgaatgcattaacaactgggatttttgatgaaactattgcgatgactcgtctcattcaaggggtgttaaatattgtaaaatataattttaaccttgagtttgatgaagaaggtcttgactattatcgctttctgacgcacctgagatttttcagccaaaggttactaaaaaaacaaagttatacaaatggtgaccaggagtttataaatactatccgtagccagtacccaagggagtatgcttgtgcggataaggttaaaaaatatgtttttgtagaatataagtacaacatgacagaagaggaaacattgtatttggtcgtacatataaatcggctacttaattcaaacagataa

SEQ ID NO: 272256 - DNA, 1896 bp, Klebsiella pneumoniae
atgcctaccatatatatggagtatgaaatgaattacaaatcaaatgctgaagctcttcttgaagagctcggcggggatagtaatgtcaaagggcttgtgcattgtatgactcgcttgcgtttcaacctggaagatgattctattgttgatgataataaagtcagaaatatcgctggcgtatccggtgttgtccgacaggggaatcagtatcaggttattattgggaagaatgttgttaagttctatgatgaagtaaaaaagctcgttaatgttgatggcctgacaaatacggacaatgcacaagcgaagaaaaagagtgttcacgaacgtatcattgatgttattgccggaagcatgatgccagtgatccctgccttgatcggcgctgggatggtaaaaattctgtatctcatacttggtttttttgtgtcgacagactcaacttcaatgaagttgttaggtgccatcggtgatgccgcattctactttatgccgatcctcatctcatatgcagcagctaagcgatttaatacgaatgcaccattagtagctgtcgtcacggcagtacttttgcatcctgatttcgtagcgttgatgggggatgactcgcaaaaattacttttcctgggagtgcctgttatctccgcgcactatggttcgacggtcattcccgctattttgaatgcctgggttatttcatatatcgagaagttcgtcgatcgtattacccctaatatcacaaaaggatttctgaaccctgcgctgattatccttatctccgcgccgatcgcattcttattactcgggccattaggagcaatttttggtaaatatctcgtttatgtcatctcatcaatccccgacagcttccatattattgtgatggtagtgcttagtgcaatcatgccatttattgtcatgacaggcatgcactgggcatttcttacgattaccataccagccctggccactccgggcggggagatgctgattatcccggcgatgttagttattaatatggcgcaaggtgcagcttgtatcggtgtaggtatcaaaacaaaaaataatgcacttaagcagaagtcgttggcggcagggtttaccgctatatttgctggtctgaccgaaccctgtatgtatggcgtgaacttaccactgaaaaaacctatgcttgcggcgtgtatcgcttcgggtattactggcgggattgttggcgcatttaaattatctgctcatggttttggtatcgcttctctagttgctatgccgatatttatcgatcattcgaataacttaaatcttatattagcttgtgtcgctgctgttattgttattgtcctgactattcttttaaccctcttcttagggtttgaagacccggttgatgagaacgcaaaagaactgaaaaaggatgttctccaggataaaaaagttgtcgcggttgagatgaaaaatattacttcgcccgttgaaggtgaaatcattgcgttaggtgatgtatccgatgccacttttgctaatcaaattttagggaaaggaattggtatccatccaacggtaggcaaggttatcagtccattcgatggcgacgtcctctctatatttaccacaaatcatgccattggcctaaagtcacttgatggtatcgagcttcttattcatgtcgggctggatacagtgcagcttgatggcaatggtttcaaagcatttattaaaaatggcgacaaggttaaaaaaggcgatttacttattgagtttgatattgattatattaagtctgaagggtatgacccgacgacaattgttatcgtaacaaataccgaagaatatcaagatgtcagtgcatcgatggattctaaggctgtatttaattcgaacattctggctatagcttga

SEQ ID NO: 272257 - DNA, 1407 bp, Klebsiella pneumoniae
atgagttttccgaatgattttctctggggaggagccgttgcggctaatcagtgtgaaggtgcttttgacgttgatggaaaaggtcttagtatccaggatgttctgcccaaaggcattatggctccagtcactgagctgcccacctgcgataacctgaaactaaagggtattgatttctatcatcggtataaagatgacatcaaaatgtttgccgagatgggatttaaggtctttcggacatcaattgcctggagtcgaatttttccaaacggagatgattccatcccaaatgaaaaagggttgaagttttatgatgacctttttgacgaatgtcataagtacggtatcgaaccactggtgacaatttctcactatgaaacaccgttaaatttatcaaaaaaatataatggctgggcaaatcgtaggatggtggaattctatacgaattttgccacaacgatatttgaacgttataaacacaaggttaaatactggctaacatttaatgaaattaactcagtgttacatcagccgctgatgagcggaggtatttttacgcctaaagaacagctcagtaagcaagacctgtttcaggcggtgcatcatgaatttattgccagtgcattagcgattagtaaaggccgtgaaatcatgccagatgctaaatttggttgtatgatcttaagcatgccgatttacccattgacaccaaatccagatgatgttttggttgcgatgcaagcggagcatatgaatgatttctttggcgatgttcatgttcgcgggtactaccctggatatatgaaaagatatttcaaagaaaataatatcaggattcattctgaagatggcgatgagaaaattcttcaaaataccgttgattttgtttcattcagctactatgtgagcgtgtgtgaaacggctgataaatcgatcaaacctgctattggcaatcttattggtggtgtaccaaacccatacctcgaatctagtgagtggggatggcagatcgatccgaaaggtctacggattacattgaacaagtactatgaccgctatcaaaagccactgtttatcgtagaaaacggacttggagcccaggatgtcttagtgacagatatcaatggtaacttcacggtcgaagatgattaccggattaaatacctcaatgaacatctggttcaggtcgaggaggccattgcagatggcgttcctgtcatgggatttactacctggggctgtattgatctcgtgagcgcgtcaactgccgaaatgaaaaaacgctatgggctgatttatgtggaccgcaataacgatggttcagggaccatggcccgatataagaaaaaatcatttttctggtataaagacgttattaattctaatggcaaatcattgatgcgttaa

SEQ ID NO: 272258 - DNA, 399 bp, Klebsiella pneumoniae
atgcatataggtataaatatgaaactgggtattttaggcacaggaatgatcgtcaaggatgtgatgtcatttattaacgatcttgagctggaatctgtttctattctgggtactgaagcgacaaaagacgaaacggaaaaactggctcacttatgtcaaaatgggaaggcattttttagctatgatgagctattaaatagcgacgtagatactatttatgtggctttaccgaatcatctgcattacacatttgcagtaaaagcactggaaagtggtaagcatgtgatcatagaaaaacccattgtaattgatgttgctgagctattgcatctgaaggagctggccgagtctaaaggcctggttgttcttgaagccatgaatattcactatctaatttaa

SEQ ID NO: 272259 - DNA, 540 bp, Klebsiella pneumoniae
atgaattatagccagttatcatcgcgttatagtgacttcaaaaataatattatccatccagcctttgacgccagaaagggcggcggtgctttgatggatattaatatctataatatccactttgttgttggcctttttggaatgcctgaaggtgtcatttatcaggcgaatatatcccagggtgtcgataccagtggaatgttgctcatggactatggttctttcaaggctgtatgcgtcggtgcgaaagactgccatgcgcctgtgtcttcaacgattcagggggaaatggggtgcattactctcaataaaccaacaaatcagatggttggatatgagctaaaacctaatgccatacccgctaaacatattgagcatgttgaaaagcatcgtttgcttcctgaatttagaaaattcattgaaattatatcaatgagagatttttctctggcatcaaaaatgctggaaaccagtatcaatgtcctgaacgttattgagaaggctcgtcaccaacagaatatcggggttaaaaatgtctga

SEQ ID NO: 272260 - DNA, 1029 bp, Klebsiella pneumoniae
atgtctgacaaaatgattattggttatatcggtaacggtaaaagtgcaaaccgttatcatttgccatttgtgctagaacggaaagattcgatcactgttaaaaccatttattctgtgaatcttgaaagagatcagtggccacaaattgatggtattcaatatacacaggaacttgctgacctgttgaaagatgacgagatcgatgcagtgattattactactccatcgcagtttcactatgaaatggcgaagaaggccattcttgcgggcaaacactgtgttgtggaaaagccctttactgaaacacttgagcaggctaaagagcttctggagcttgcttcgcagatgggggtggtcgttcagtcataccagaatagacgttttgatagcgattttctgaccgttcagaaagtgattgatagcggtgtcctcggagaccttctggaaattgagatgcactatgattatttcaggcctcaggtacctgaatctattaaccattttgataaagtaaatggttatttattcggacatggttgtcatacgcttgaccagattatttctgtcttcggtacgccagattctgtacattatgatgtgaaacagatccttggtcatggacggatgaatgattattttgaccttgatttatattatgggaaattaaaagtttcggttaaatccagctattttagaattaaagaaagaccaagttttgtagtatatggtaaaaaagggatgtttgtaaaagagaaaaaagacaaacaagaggagcatctgaagttaggctatatgcctcataatcctgattttggcattgatctccccgcagattatggcgtattgacttatatagatgatgcgggtgattttaatgaacagagagttatttccgttaatggagattatggtcgttattatgacgcgcttttcgccacccttaaaaatggaaaggagcgccttgtcactcctgaacaaatattaaaacaaatttccttattagaaaatggagtgaaagaactctattaa

SEQ ID NO: 272261 - DNA, 1068 bp, Klebsiella pneumoniae
atgttcgatggtaacgttggttctcagtatagcgcaggctggtttgatagcaattcagagaatctgatgcagttctctgatatttaccttacgacaaagggatttttaccgtttgcgaaggatgcagatttctgggttggtaaacataaattacctaaacttgaaatccagatgttggacttcaagtatcatcaatcagatgccgccgccggggttggtattgaaaactggcgtcttggccctggctatttaaatatggccttaacgcgtgaggacttagacgcccacagcgttaacccggatgatgaccagacgcaacagattaacacgaataccattgacattcgttacaataaaacgccagtctggtctgatgcgacggttgacgtatggggacggtattccactccgaataaaactgaccttaataagaaaaatgaagataacggtacttattatagcgttaaagaggcctggcatgttggtggtacattaactcaaaactggaaaagaggtggttttactaattttagtttccagactgcgaacaactcgattgccagcggattctcattagtttctgactccggtgctctttatggctataacgggcagtattatggtgagcatactaatggtaaagcctacagattcctttcagaaggcgaaaattatattggttcaagatacattgtcgcgcatgcatttgtttatagttttggtaatgatgtctatgattattatactggtccccatactgattttaactccacccgaattgtggtaaggcctgcttacatctgggatatctataatcagagtggcgtagagctcggctggtttactcaaactaataaaactggtggtgtcgattataaagagtcgggcctgaaaacaacactgttccatacctttaaagtcaatacgagtatgttgacttcaagaccagaaattcgtttttatgcgacatatctgaaaagttttgataatgaaattactcagtttgaatttaatgattacaagaaagaccagtttaccattggtactcaagctgaagtgtggtggtaa

SEQ ID NO: 272262 - DNA, 819 bp, Klebsiella pneumoniae
gtgtgcaacggtttcgccccgggaagtcctttatgttatctgcgccttcagcgtagtttgcgctcccggttggtcctctgcgttatgtctcttacggcgcagggagcgcacaggcggcggcccgtcgccgccgccccctgttcccccgggctccggccagccccggcagtttcagtcgcgcaagtgggtaaatcaaggacaggtcgcacgaaccctccaggccgggtaaggcgcagccgccacccggcacaaaatcggctccgtgcccgcggtccttgcccggcggcgctgcgcttgcgcgggcatactggcagtcagacccggacaggtaggccgggtaaggcgcagccgccacccggcaataaaatcggcgcacgtgcccgctgtccttgcccggcggcgctgcgcttgcgcgggcctactggcagtcagacccggacaggtaggccgggtaaggcgcagccgccacccggcaataaaatcggcgcacgtgcccgctgtccttgcccggcggcgctgcgcttgcgcgggcctactggcagtcagacccggacaggtaggccgggtaaggcgcagccgccacccggcaataaaatcggcgcacgtgcccgctgtccttgcccggcggcgctgcgcttgcgcgggcctactggcagtcagacccggacaggtaggccgggtaaggcgcagccgccacccggcaataaaatcggcgcacgtgctccatgcctctgcggaggcattttttacgtccgtctggcaaacctgacaaataacctggcaagagcaaacaaacgccccggcgccgcgggctggtag

SEQ ID NO: 272263 - DNA, 144 bp, Klebsiella pneumoniae
atgctattgcagaatttcacgtctgctgtgtgccaaaagcagacgttgcttaaacagtatgaattgatctccggggagcaggtcacagtatgtaaggttatgtgcttgctgcaaaaagtcccgctcatgctggctcttagctga

SEQ ID NO: 272264 - DNA, 1770 bp, Klebsiella pneumoniae
atgagttccgcagttacgccgcagctagttcagcgagtttttgaactgtacttggaaaataaattggtcgttaatcgtcgataccaaagaaagttggtttggactattgaagagaaggaaaaatttatcgactcgcttgccagtgggtatccgataccactgatactaacgtctaaacaagaaggaagtggtgcagatgttggtgtattagagattttagatgggttgcaacgacttaatgctattacatctttcattgaatgtgacttttctttaaatggaaagtattttgatttggaaaccacatctctaacaaaaaaacaaaaagacagtggggagttattgcaaaaaacaccaatattagataataaaacttgctctgcaatacttaactatcaaataccatttctgacaacacatttaaacacgccagcctttatagatgaaaccttcaggagaataaacactggaggaagaaggttgtccatgcaggatgtaaggcaggctggatcactaggaatagttcctgaaacaataaatagaatatctaactacgttagaaaggattcatctagaaccgatgtggtaacactgagaaacatgaaaaacatcagcattggtgatgacaggctaaattacggaataaacataaacgacatattctgggtaaaaagcgacattataagaaaagaagatataagagaatcaagagatgaggagttgataactcatttattgagttatgtatcagtaccaagagaatgccatacgacatcagactatttaaataaagtttacgatgcttcaacgagagagcatcagaacttagctagcacactggaaaaatacaaagaagactttatcattaagtcttttaactatatattcgatgaattgaataaagtattcaaggatgacaggggaaatttttcagaaaccatatattctgatagaaaacaaaaatcatcaagatgcttccaagttatattcctatctatgtatgagcttatcatcaacgatggaatggctgtatctaactataaggatctacatacctctctgaaaggcatctatgacaaacactataagtccatcatgggtaacgggcgaaagtggcataatgatgaaaggacggctttaattgaagcaactaaggggatcatctcaaagcactttatcaaatcaaaagacaacactttcgagccaggtaactggataagaaacatagaaaatatcattaatgaatctaaaaccgaacagcagtcttacgatttcaaaatgggattaatgaccctatcaaacaccaagcgagaatttaacttttcacttgttgataaaatattaaaaacattaacggcaatgacaaatagtataagtggagaatgcactgttattgttggagttgcagaaagtgaatctgacgccaaagatcatgaaatgaaattcaaacgcagctatataaaatataacaataagtttatagttggtatcgatagcgaagctgattttcttcatggcggaatagaacaatatttaaagcaactaaaagattacatcggaaaaaccaagttgatatccgatgatttcaaaaaaagagtattaaacagactttcaaatttcacctacaaggaaaaggaaatacttattttcagggctgagagaggcatttcaccagaagcatatgacaataagtattatgagaggcacttatctcataatgcagaggtaacgccaggtgcagcaatgaatgacctatttagaagattttga

SEQ ID NO: 272265 - DNA, 2361 bp, Klebsiella pneumoniae
atgaaaatcagttatcccctcagggacaccagcggtaaagaatttcgctcactggaagatgttatgcggcttatcgacggagaagcgcacgggacctggctgctgggggcgaacggattgtggcatggcgggatccatatcagcgacatctctaatcccttttccgccctagatccggatgcagtcaatgccggcgaccccgttcccctccagtttatggcagacggtactattgtggcgtaccggttaaacaacgagtacctgacagccccgtattgtggacagccgctgcgttacagcagcagctttgtgctggtgaagtcgcagtgccagcccgatccgcaaaaggaaaaaagctggctggcgttttacagcctgtatatgcatctggccccggtgtctgattatccttcatctccctgctataaagtcagggacgggcacagcggcatactgttacgtcaatataaagccgggcaaaacgggttgccggagggggagccggataacggtgaagccggaacatatcctgccccggcgaaaacgaaaaaaagcctgaaggcaggcgatcgttttgtctcctcccggacggggcgtttttatgtcacgaagaacggaaacgcaaccctgacaacctttggcctggttcgtttactgaaagaaaatgttccgggaaaagaacagtactgggtgacgctggatccggagctgatggagccggacggcgaaatgcagggattattgccggaatggatgcagaaggcaaaacaaaaaggggggttcgactctgtggagctaacgggcgaaacagaagaatggaaggtcagcgccggaacgcccgtcggatttatgggatgtatggaatcgccgggtgagggaaataatctcctggataaagagtggtttgtgcatctggaagtgctgagtacagatccaaacatgccaggatttttagccaaccctgaaaaagtgaaaggtgataaacggtccgttttggcagcaaagggaagcgccctgtttacccggcaggatgttacgggacagcccgtctttacagcgacatcagcgcgactgagcgcacagtgccggctcctccgtgagtcagcaatgcctgtcgcggatgaagcacaaaaatgttggtataaggtcagcggaagcggctggctgccgcaaagtgatgttgaagaagtaagtcagtatgatctgttaaaactcgggtttcaggcgctggaggaagacggtaatagtgacgtgatgaacagcccgtatgagagctgggtaccggaggcgtttggggcgataagccgttcagcagagcaggaggtctcctggcagtacggacaggtgccacaattttatcgtgatctgatggcggagatggacagcaaccgcgacgggaaagtgacgacagaggagatcagacaggcgctggcagttcgtgatccgctggtgaaagatgtggtcaaccgtctggtggtaaaacatcacagcgagtggtgcggtggccgttcgacggggcgctgggaagggttttataaggatctggactcgctggaagtgaaatactgtgagaaatggcaggcggacctggagtggatgagcaaggtgccgccgtttgataaggatgaagcggtgtggcattttcatccggtggtgtttttagattctctggcagagaaattagatctaattaatgttgatgcttttatttctcaatatgaaaacgaacatgtttcctttgctccgggtacgccgattctatcccaaggttcaaaaaacaacttgcgtaaaattttggaaagcataaatgaattttatcctaaccatatggagtataagccaaatttatatggtatttcttatatgctagctacagcgagacatgagacatattacttcccaacaggtgagtattttagtgaacagccagaggtaggtggggtgagttattttgataaatacgatccaattcttgcagtgacacaagtattaaagaatagagcaatagctaacggcaatatgcagcagggcgatgggtataaatatcgaggtagaggttgtgtacatcttacatggaaaaacaattatcagaaagcgaaagataaatttggtgtggattttgtgaatcaaccagaacttgcggctgattttaagcatgctgtgccaattatgatttggggtatggaggaaggtatatttactggggaaaaactttccacatatatgaataataatggaatggattatgagagtgcgcggcaagttattaatggcagtgatcaaaaggttctaatagcttcctatgctaaaaaattgcaatctattttagaaagcacgtcctctattcccaatggatattga

SEQ ID NO: 272266 - DNA, 882 bp, Klebsiella pneumoniae
atgcttagttttgcggatggctcggtaacttatgggtatgatcaatcaaataatttaatttatgcaaaaaaagacggtagggaaaatgtattaaaatttaatgaggattatacaggtaatccatcctacttatttgattttttttcaggttcccctgccattgtagttgatagtagatctcttcatgattctaccgtttatgccacattgaaatatgatggtaataaatttttgattgattgtttatatttgaatgtaaaaaataaaaagaatggaatcttggttaaagagggggagtgtaacttagatatgtcgccagtggaaggttatgctgattttatagagaaaaaagtaagcaaaacaaaatatgacatggattcaatagatacaaacttaatcttaaatggcaaaaaaagttatctacctattgttatttataatagcaaagatgaattggtatatcaattttatggtgataagcaagcattactggatgacaattattctgttatttatttaagtgaaaatggtaggtgcaaggtttttgtgaattctccatggattatatataacaagaatgactcagggcgggtagaaattatgagtgaagaaatttcagatggcaagattgaactaatcaaatcagtcccaaatatagaagattccaataaatgctctgtatatcctgcgataagtgtcataaaagctaaatcctatttttatgattcttcgttcgaaataaaaaaatcttaccttgttaaaggagataaagttaatttgctatctataagtgcagatggcaaatggtgtaatgcaagatatattaatattaaaaatatagctagtgataacatcatgttgtgtgcggatctcagtatttag

SEQ ID NO: 272267 - DNA, 1833 bp, Klebsiella pneumoniae
atgccttctgtaaaaaataagcatgaactaaaagaatctgatgaactggatattgctcgcttatttggggagctgattgatcaccgtaaactcattatttcactaacagcattaagtacattattagcacttgtatatgcattatttgctacacccatatatcaagcagatgcaacattgcaggtagaacagaagcaggcaaatagcattcttaacagtttaagccaaatgcttccagatagccaacctcagtcagctccggaaatagccttattacagtcaagaatgatcttaggtaaaacagttgacgatctaaatttgcaaacaaaaatacagcaaagttattttcctatatttggtaaaggatgggccagattaacaggggaaaagaatgggcaaataataattcctagattgtacattaaagatgccggtgatgaaattatcaattttgacatcaccgttacagataataagaattataaagttaagggtgaacaaggcgaaattaatggaacagtaggtgatttaatcgagaagggaaattttgcaattagcgttagtagcattgatgcaattccaggaaccaaatttaaagtttcatatattcctcggttacgggcaattacagatattcaaaagaatctgtcaatcacggatcaagggaaggatacagggatcttattattatcactaaccggtgatgaccctgagttgacgaaaaatatacttgacagcataagtaataattatttggcccaaaatatcgcaaggcaagcagcacaagatgaaaaaagcttggattttttaaataagcagttgccaaaagttcgcggagatcttgacttagctgaagataaattaaatgattatagacgcttaaatgattccgtagatttatctctagaggctaaatctgttttggatcaaatagtaaacgttgataatcagttaaatgaattaacatttagagaatcagagatttctcaactttatacaaaagagcaccctacttataaggcattgttagaaaaaagaaaaacattacaagaggagaaaagtaaattaaataaacgggtgtcgagtatgcctgaaacacagcaagagattttaaggttaagccgagacgttgagtctggtcgcgctgtatatatgcaattgcttaatcgtcagcaagagttaagtattgcaaaatcgagtgcaataggtaacgtccggatcatagatgaggcagtaacaaaccctaaaccagttaaacctaaaaaggttcttattgttcttgtggggattgtaattggtgctgtattatcgattgggattattcttctccgtatatcactgagacgaggagtggattcgcctgaattgcttgaaatgatcggtacatctgtgtacgcaagtattccggtctctgaagcaatgactaagtataataatttaaaaaataagtcacataaggatgatagaaatatattactagctattgataatcctgcagatctggcgatagagtcaatccgagggttaaggactagtttacatttcgcaatgatggaagcacgaaataatatcttaatgatatctggtgcaagcccaaatgccggtaaaacttttgtcagttcaaacttagcagctatcgttgctcaaactgggaaacgagttttattcattgatacggatatgagaaaaggttatacacataaacttttcaaagcatctaatgcaaatggtctatccgaatttttagcaggcaaaagcgaaatttcaaaatgcgttcaaacatttgagtctgcgaattttgactttataacaagaggagttgtaccagcataa

SEQ ID NO: 272268 - DNA, 225 bp, Klebsiella pneumoniae
atgatgcaaacctgttttcgttattgtacccatatgtctgccgggtggcggctttcgccttactcggcctacgaaaagttgaaatatcaaacagttacgcaaatatctgtaggcacgcgtaagcgcagcgccgccgggcaattcctgaagattgcacctggccagcacgatgaagccctcttttcagagggcttttatcgcacaatagcgaagattaacgcttaa

SEQ ID NO: 272269 - DNA, 210 bp, Klebsiella pneumoniae
atgtgggaccctgaaaaagatacaggcattgaggaggcggtaactcaagccaatagcctgaacgaactgttggatttgatgcatctttgctttagaaaaatgaattcgtgtcaaaccgaggcattaatcggtcttgcgctgaatatgtcgtctgacattttcacctggattagcgaagaggaaaagcggcgtgaaaataaatctgattga

SEQ ID NO: 272270 - DNA, 420 bp, Klebsiella pneumoniae
atgaagactccattcccaattgaaatacttgagactatcgcagcgggtattgcagaaaacaccgtgcttcttgaactgatttataaaaacagcaatgaagatcacgaaactgattgtgcaatagcttgcttaattcgctcaatgaaaaagacactagacacaactaacgaatatatcaaatcattaagcgacgcacctgcccccccccaacgggaacatggtgaaagcgatattactgatgacatttttcacgcgaccatcacagccagaaagctcgaagagcttgcgcatgtttataacgaggtttacttcacagatggcgataatggtaaacccgccatgtatatggcctctgcaattttcgactatgcgattaaggtttgcagtgaactgaaaaacatcgaagcaaaactgaattaa

SEQ ID NO: 272271 - DNA, 306 bp, Klebsiella pneumoniae
atgagcggagaagtaacgattagctacttcgggaagtgtggcggggagttgttaattgtctccccggtgacgtttgctgcttcgagtcagttattgctgggacttgaggaaagcgaaattgaatcgggccttgctatcggggacgtacccaaagatccgacaaaattcgatgaattcctctttgctgtctgcatacgcgcgattaacgacaattccctggtgctggagcacctgaatagttatttcggcgtttcttttccagacctcaaaggtcactggcagcgcgtgtgcgtcggcaaaaactga

SEQ ID NO: 272272 - DNA, 306 bp, Klebsiella pneumoniae
atgaaaatgcacgatcagcaagggaacatttttacgcaattttttgcgtgggtggcggccttcgctgcggcatttggttttaccacgcaggatctcatttacatgctctttggtgctgctgggctgattctctcgttggcctcgtacatcaacggccgtgtagatgccaggcgtaagcgcaaagaagatgagaagcgcacaaaaatggtcaatgactatctggagggtgttagcgataaacctcacgatgagcgcccggctgccgcgatggtggtagtgaaggcgctgcaaaaggcaggtgaatga

SEQ ID NO: 272273 - DNA, 213 bp, Klebsiella pneumoniae
atgaagataaagcttgagcattctgttgcgcatttcgccaaagacctgagaccgacgcatggcccccagaaatggccgtggtggcgctgggtttccttcgggctagtgccgatcgcagtttgcagcccctcatatgggctgcgtctgtggatgtacacccgctggggcgctggctacgtgggaatctatttcgacaggcggataaaacaatga

SEQ ID NO: 272274 - DNA, 684 bp, Klebsiella pneumoniae
atgaaagaacgtggaatgatattcaacggggagatggtgcgggccattctcgacggccggaagacgcagacccggcgcccagtgaaattccctgtacatgataaaaaccttgggtgcgagctgtctggcaatgaactgtccggggaactgtcggcagggaactatctgaacagcgcatttggcaagccaggcgaccgcatctgggtgcgtgaggcttatcgtttcccggcatcgttagacgatgttagcccaactggtgttggtgaaatggctgtggcaacaggatacagaaaaccatgggcgccgaccttctacgagtttacaggcactttcagtgatggatggaaaggattcgacacccctccaaaagtttctgacgccggaaagcttcgcccatccatccacatgccgcgctgggccagccgcattctactggaaatcaccgacgtgcgggttgagcggctgaacgctatcagcgaagaggatgcgcgagcagaaggcattattgacggtggctgtcttaattgcggggaacctgagccatgcggatgcgccaatccagagcctgacgctaccgatgcttttgcctacctgtggcaatcaatctacgggcaggaaagctggaatgctaacccctgggtttgggttattgagtttgaacgcgttgaaggcggtgcagcatga

SEQ ID NO: 272275 - DNA, 621 bp, Klebsiella pneumoniae
atggaaaataaagccgagttttaccttcaagccatgaaggatttagaaagagctgataatgagatcaaagagcttttcatccaaatgcaaggtaaggattttggttatgactttctcttagcaattggtattgccaggagaagctgcgctttaacgtctgggtttaaatccatgttggaagccaaaaattctctatgtgcgcttgctctcgtaaggatgcaacttgataattctctaaggctttatgcgggtttcttctcaaaagacaggatgaagttttcaaaagatgtcttgaacggaaaaattatcagcaaaatgaaagctgatgacaatcaacctatgactgacaattatctggctcgccgggtaagcacaaaaaacccatgggtcatcaatgtgtacaaaaagaccagcgggtacatccacttttctgaggagcatatcaaagaggccttgcgtcataatggtgggtcaaattatgaaatagttattggccctaatgacttcgataggaatgaagaacacttcttagagcctcttcagtgttttacccatatcacaatgatgattaaagttcagttagaagattggcttgggctcttagatagaaacaagtactaa

SEQ ID NO: 272276 - DNA, 1314 bp, Klebsiella pneumoniae
atgagaatatcaaaaacattagaatcattatttacatttctaaaggaaaaagagcagaaaggtcagctattcaataaagaggctatactcacagccaccggttggaaagctgctacatttagaacttattgggttaaagggcaattatctgatttcattagcgcaattgatgaagatacatttgaggcatcaaactgtcaaaacatctcagttatagagttttcgaaactattatctcaaagtaagcatagaagagggttaggtcataattgccagtcgaaactagcaaaagcattattaacaaaatctagagataatatgatgcttgctcttgaattatataatagaccttcaattgagaatagaatggatgcatttgtgatgtgtttttgcacttcatgggaacaattattaaaagcttttttgattgaaaaaaatggtgaagagtcaattttcaaaaaagaaaacaagcgaggattcagagagaccatttcactaagggactgcttagaaaaaacattcccattgaattcaaagataagggataatatagaacaaataacaatcttcagagatcaggctgtacaccttttaatgccagaaatacaaggaatagcctcaagaatattccaatctggtgttcttaattattcatcatattttgaaaaattcacagaagtttcttttcttaataacaatagcacaggaatgatatccttggtaggtgagtttagaacacctccaatatctgtactgaaatctatttatggagaaatagctactgatatattagacttagcaacaactcttcagcaagaagttgatgataaaaatgatatagagtatgcaattcccttaaatgtaaaacttgtttttgcaacatcagatgatgacgggaatacgataaccttagctaaagctgatgagggaatcgagggacttaagaaggctctaattatagaaaaaccagtagataggtcaagaacacatccgtatttgcaaaaggatgccattgagcatataaatgaaaaaatccacgagctttatagtatagaaaaaatagaaaaacatttagtattcaaagataataaaacaggtaagaaagcgataaataaaaattgctttgatgctgttatttgtaaaaacggatggaaaaaatcaaataataaatatcatcacaaaaataacaatccagaataccactattattcaccagcattagtagatgaatttgtcaagaaagctatggcaaatgaagattatctaatgaatacaaaaaaatggtataatgccagaagacgtaagcaaaagtaa

SEQ ID NO: 272277 - DNA, 150 bp, Klebsiella pneumoniae
atggccgttaaatcactgaaaaaaggatatctggcgctggcggcttccatgctgctggtggcgcaggcgcaggcgacggagctgctgaacagctcctatgatgtctcccgcgagctgtttgccgcccttaacccgccttgccgcccttaa

SEQ ID NO: 272278 - DNA, 213 bp, Klebsiella pneumoniae
atgcctaacggccagatagcacagggaaagcatacagtggcaccgtatgcctatctgttatcagctccgaccatcgtagagtttggcgatttccgttgcagctttctctatacccggataaaccgtgctttcgttgatgccgaagcggctgagctgctgcatcaggcgttccttgtttctaatcaccagttttctgacgttcagcgtacttag

SEQ ID NO: 272279 - DNA, 459 bp, Klebsiella pneumoniae
atgggcatatttctcatcgagatagtggtgccgactaagctggttttaccagcgagacagtccttcatgcccccctggggcgactctaaaggtgcgatttccgcatttttaaccaacaacagggtgactaacgattaccctgttcgcctgaaagattccctcttacatccgggatattaccgcatgtacgggcccggaaatttaatacgctcgatcgcctctataacatgcagctccaaccacaacacacgtctgccaatcagtgcaatccaaatccgtatcaaacagtataaatttaacaagcattttttgggatgccctaagcaagcatttcaacgtcagactatcgccagcgcaatccttcagccggcggtagctcttaaatttccaaagcattccaaaatttatgaccaccagcgccccacgtccaaggagatgatggatgaagaaaacaattag

SEQ ID NO: 272280 - DNA, 1800 bp, Klebsiella pneumoniae
atgtcgacttttgatagcactaaacttccccttaaagaccttctcaaagagatcatagaggggaaaattcagttaccagattttcaacgaggttgggtgtgggatgatgaacatgtccgtagcctactcgtcagtcttggtcgctcattccctgtaggtgcagtgatgcttctggaaacaggaggtgaagtccgttttcaggtcagaccggtggaaaatgttccctcttttgatttgccatccccagaaaaactaatcttagatgggcagcaacggttaacaacattaactcaggtgctaaaacttcagggcccagtgaaaacaacgaccgataagggaaaacccatcgatcgctattactatatccatatccctacagctcttacgggagcggacaggctggatgaagctattattgcgactgatggtaatcgtcaaatacgcagtgattttggtcgaaaagtcgatcttgatctttctacccgagaactcgaatgccaacaactttatttcccatgttcggaaatcctcgaagcaatgacatggttacaagatctttataaccataatgctgcagctgtaccacatttctttgaattcaaaacacaagtgttggatgcttataacgactatcaaattccattaattattctgaaaaaagataccaccaaagaagctgtatgcctcgtattcgaaaaagtaaatactggtggcgtaccgctatccgtatttgagcttgttactgcaagctatgcagctgatggatacaatcttcgtgatgattggtttggaagtgatgacagatgtgttacctcgcgtaaacagcgtatttccgaagaaccgatcttaaatggtattgaaagcacagattttctacaagctatcaccatgctgcacacgttggaaaaacgtaaagccgatatagttgcaggaaaaacaggtaaacaagtatccccagtcagtgcaaaacgagcttctgttctcgaacttcccttagaagcttacaaaaattgggctgacgatgtagaaaatggattcaagtgcgcagctaagtttcttcgccaggaatgttttagctctcaacgtgagttaccctaccgaacccagattgcccccctagcagctgtgatgaccctactttgcagcgaggacgaagaacgttggagagaaccacaaattcatcagaaactggccagatggttctggtgcggtgtattgggcgagctttacggtggcgcggtagaaacacgcatagccaacgacgttgaagaactactcggctggattgagaaaaatggggaaattccaagaacaattaatgatgccaatttccagattgatcgtcttgggtcactatcatccagacttagtgctgcttataagggtataaacgttctagtattacgcgatggtgcccaggatcttttctggaaatcgaaaatccgtagccttgaggccgacgaagttccagtcgatatccatcatattttcccgaaagattggtgcgagaagaacggaataccaagacgtaagtatgattctatcattaacaaaacaccgatttcatttaaagcaaacagaatgattggcggttcagccccatcggtttatctagcgtcgttgcaatctcatccccaagtacaactagctgacgccgcgatgaatgatctcttgagaagtcataacatcccagtagactcattacgcactgacaattttgaagcattctacgagcagagacaaaaagaattacttggactgatagagagggcaatgggtaaggctttgaacctaagctga

SEQ ID NO: 272281 - DNA, 2679 bp, Klebsiella pneumoniae
atggctgttaatcaggcgaaaatttttgaacatctcgaacaactggttgaaaaccctgagcaagacgaatttatctacggctttttaactgcttttgagttccctaaatctaccctgagtcagattcggcaaggtgggacgcgtaatgttgcgaaagagccaggacacgttgcattaaaaaataaactttactaccagccagtggcggatactgatgatttcgaatctgcttttgagcaacgtattgccgattctgctgtagcaaaaaataagatccgctttgttctagtaacaaattttgttcgctttttagcattggacacactgacacaggaacgtctcgatattgagtttgaagagttaccacgtaactacggttttttcttaccgctggtagggttggaaaaggctattctcaatagtgaaaacccggccgatgtaaaagccgctgagaagatgggaaagctgtttgatcttatcaaggagcgtaatgatttaagcaaagcagaagatattcacgctcttaatgttttcctcactcgtttgttgttttgcttttttgccgaagacacaggaatctttgaaaaaggtcagtttacttcctcagttaagagctacaccgccgaagatggcagtgatttagatcagtttctgacagacctttttgccgtgatgaacagcaaaccgaatagtaaattacgcctgtcacttccgattcatttaaccgcattcccttatgttaatggtggcttatttgacagtgatgagcctgttccagagttggggttgaagggtagacgtatcttacttgaatgcagtgcaatggactggagcgagattaaccctgacattttcggcagtatgttccaggccgtgattgatgtggagcagcgtagccgtttaggacagcattacacttcatacagcaatatcatgaaggttatacaaccattatttcttgaaccattgcgttcagagcttgaaaaacaacgcacaaatacgaatggtctcaaacggttgcttctccgtctggggaaaatgaaagtttttgatcctgcgtgtggttcagggaacttcttgattgtcgcctataaagaactacgtcttttggaaatggacgtgattcaagctcttttgcaatgcgatccacaatccatttttatgagcggtatccatctcgaccagttttacggcattgagattgatgattttgcctgcgaaatagcccgcctttccctgtggcttgcagagcatcagttaaataaacagtgggaagaacatattggttcagcaccaccagcgttgccgttgcgttcatccggtaaaatttggagtggcaacagcctgcaaacagactggcaaacggtgtgtccaaagggcgctgatgatgaagtttatataattggtaatccaccttttttaggaacatctggacgttctgatgaacagcgtgctgatatgcaggctgtatttagcggtttcaaatcattgggtggtttggattttgttgcctgttggttttggaaaggggcgcaatatatccagaatagtcgtgctgagttggcactggtggctacaaactccctatgtcagggggagcaagtagcaacattatggccttctatatttgagctggggctgagtattcacttcgcttaccccacctttagatgggaaaacaatgctcgtgataaggctgcggtgcatgtggtcattattgggctatcaggggtgagtaagattcgccaactttatcaacaggttgacgggaagtggcacagtaagcaagttagtaatatcagtccttatctggttgaaggtagcaatgttgctgtcgaggcgagaatcaaaccaattgtgaatggcgttcctcctttattatttggtaataaacctactgatggtggacacttgcttatgactggtactgaacgtgatgctttactcaagcaagagccacaggctgctccttggattaaaaaagtgctgggtgcagatgaattcttgaatgggcaagaacgttggtgtttgtggttagtagatataaacatcactgagcttcagttgatgcagcatgtttacacgcgggttcaaaaagtggctgaaatgcgcaggaaaagcgcaaagataagcacacaaaaaaaatcaaacactccccatctttttgatgaaaaccgtcagccaacatccggcgattacatcttgatccctagcgtctcatcggagcggcgaacctatgtgcctatcggtttttatgatgccagtgtaatttcaactaacctgaattacattcttcccaacggctctttatacgagtttgcaatattagcttcgataatgcacaacgattggatgcgattagttgcggggcgtcttgaaagtcgctaccgctattccgctaaagtggtctacaactcctttccttggcctgatgtgacggatgtacaacgtaagaaccttattagcttggccaaaacagtgttactgatgcgtgagaattacccagaaaaaacgcttgcagagttgtatgacccgttaaagatgcccatagatcttctggaagcccatcaggccttagataaggcagttgatcgtctttatcgtgataaaccattcaaggactcaagcgagcgcttaagttgcctgttagagcgctatgagttactgactaaagtataa

SEQ ID NO: 272282 - DNA, 675 bp, Klebsiella pneumoniae
atgaatgtatttaacagcaatgattatgaaagggcctgcatatggtatgaacgcatcaaatattgcgttgaaaaatttaacataaaaatagaaattctaagagagaaattagcagtggatttactgaacaatcaaagtgtcaactattttcataccgattaccaatcgataatagataactttgaaacagaagtttatcacattattgaaacatatgaagtagaacaacgatacctgccattcttatgtatgatagtcgaggagtatgttgatttaatatatgactcaaccagctttgttttacgtgtgttaggtcacaatggttttcatgagcctcataatattccaacctttggctatgagatatatgaagctattggtatattaaatttaggcatagaagatgtaaaagagcagacaatatataaatatcataagatggattttgcatatcacgattggtgctctaagtatggcgaacaagagttgattaaattatgtactagttttgaaggccgagtcgcagggctatttaaagaatattgtttcgagacaaactgcattcctgtattgatggctatcattattaatgaaactgaccagatttatggattttcagattacggatttattgattctttaatcatagctatagagaacaagatggatgaataa

SEQ ID NO: 272283 - DNA, 315 bp, Klebsiella pneumoniae
atgaataatatgagtgaagaagataaaaaccataaagtaagtaaatcattacagcaaaaaattgccagtgctcaactacgtcttaatcgattgcaacataaatcaaaggttgaagccaaacagattgaaacacgtcagaagatcattcttggtgctgaagttgcaaaagcagttgatagtaatgtgtttgatgtggacaaagagttggttcttggttttcttttgcacattcgcgatcttaatgatgaagaggtgattaaatatagaaagaaaggacgtgcatttcttctcgaaatgaagggcaggcagatttaa

SEQ ID NO: 272284 - DNA, 735 bp, Klebsiella pneumoniae
atgaaggagctcattaaggcacttacagatacaacctgttcagttatactcataccagatgtttttacctttaatattttacaatccagaaccgaggaagtaaatggcattcccgttgttccaatatttgaaacgcctttaaatggcattaatatggtattgaaaagattggaagatataattctttcactggttattttaacattaatatcacctattttgcttattatatctctttgtgtgaagttaacctcacatgggcccgttattttcaagcaaactcgttatggaatggatgggaaaccaataaaagtttggaaatttaggactatggttgttatggaaaatgataatgttactcaggctactaaaaatgatgtacgtgttacgaaagtgggtagattcttgaggagaacatcattagatgagttaccacaattttttaatgtattatttggtggaatgtctatagttggtccacgtccacatgcggtaattcataacgagcaatacagaagtctaatagaggggtatatgttacgacacaaagtaaaaccaggcatcactggatgggctcaaatcaatggttggcgaggtgaaactgataccctcgaaaaaatggaaaaacgagtggaatatgatttggaatatatacgagagtggagtatttggcttgatattagaattatattcctaacaatatttaaagggtttatcggaaaaacggcatattaa

SEQ ID NO: 272285 - DNA, 222 bp, Klebsiella pneumoniae
atggacaaacaaaccaaagaaaaaattagtaatcgcatgtcccaggtaggcattggcgaaaaactcggtgtgtcttctcaggctgtaggtaagtggctgagaaaagggaacattccaccaaggcgcgttattcctctttgccagatccttgactgggaagtaactcctcatgaggtagaccccatgtcatacccaaacccgactgatggcctgcctaaatag

SEQ ID NO: 272286 - DNA, 1266 bp, Klebsiella pneumoniae
atgctaatcgaattcaacgttgagaattatctttcaattaaacataaacaaactttatcccttattgctagcaaaagtaatgagttaagtgagaacgtgtttaaaactgaaggcacaatgaacctcaatgttcttaagtctgcagtaatctatggtgcaaacgcagctggtaaatctaatttactcttggctgtaagagcaatgagggagttagttcttcaatccgcttctaatttacaggtcggcgaaaagattgaagtttatccttttaaactagactcagagtcaatcactaaaccgagtgaatttgaagtggtttttattgctgaaggcatccgatatcaattcggattctcggcaaccgaggatcagattattgatgaatggctatatgcatatccaaagggaagacctcaaaaatggtattatagatcgtgggatgttgaacgccaagattatgattgggatattggttcttcgctcatgggagaaaaacaagtttggcaacgatcgacccgaaataatgctttgtttctatccacagccgttcagctgaatagtgagcaactcaagccagtatttaattggttcaagaaaacccttagactttctagtatctctggatgggggagtacgtattccgctaaacgatgtgctgatgagaataaaagtgatattttaaacttcttaaaagcagcagacattggaattgatgatgttttagttaagaaggaaaaatttaatcctgaggatttaccatccgatatgcctgaggatattaaaaaaatcgtcatttctaatatgaaagataaagacgtctttgatattactacagtgcattataacgaaagaggtgaagcagttaacttttctttagaggaggagtcccacgggactcaaaagcttttctctttggctgggccatggttagattctttagaaaacggttatgtgcttctgattgatgaacttcatgatacccttcaccctaaattagttgagttcttggttgaactctttaacagtccaattaccaacaaaaagggcgctcagttaattttctctacccatgaaacttctattcttaatcaaagcgtttttagacgcgatcaggtttggttctgtgaaaaaaatgagtcaggcgaaacgcatctctatccattgactgattttagccccagaaaaggtagagaaaatctcgaatcagcatatcttgatggtagatatggtgctttgccatttattaaaaaatggacgggggtatga

SEQ ID NO: 272287 - DNA, 708 bp, Klebsiella pneumoniae
atgggaagtgatgatttattcaaaagaaaacgtggcccgaaaaacgtcagagacttggcaagaaaaagccccaaaaaatctccccttgcgaaaattttaattgtgtgcgaggggaaaaaaactgagccaacatactttgaagatttagtcagtcactttgaattattaacagcaagtgtgatagatgtaactggagaatgtggctcaagccctatgtgtgtagttaggtacgcaaaggagcagcagaaaataatggtaggccgcggggctccttacgatcaaatttatgttgttattgataaggatgctcactctgactacttagctgctcttgatgcggtaagaagagttaagcctgaatcattatttgttcctgttaactctgtgccttgttttgagtattggttgcttttacactatacctattctactagggcatataaaaacttaccgggcaatagttcaggggaccagatagttgctgatctaagaaaatatattaaagattatgagaagggggcgaaaggtatttttcaaaaaactttgaatgcgctaaaatctaaagatttgaatgaagttatagttaaagctcgccgaagtttagaagcagcgagcgctagtgatactgataatcctactacaaaagtccatgagttggttgataggctaattaaattaaaagaacaaattaattataatcgcaaataa

SEQ ID NO: 272288 - DNA, 192 bp, Klebsiella pneumoniae
atgaaggctaagtttgaagatggtacaagggtccggttgaaatctggcggaccgattatgactgtcgatagttatgatgaaaatacccaaaaatatctctgcgaatggtttaaagatggcaagttgtacaaggaatcatttcgagaaacctcactggaagagtttgtccctggtgaatttggcatatactaa

SEQ ID NO: 272289 - DNA, 579 bp, Klebsiella pneumoniae
atggataaactcctgcccgctggcccggctgcggaggatcatgccgctctgagactgaacggcctcaatatcatcaccaatcatcagcgccggaaactggctggccccgtcatccagttgctggaaaacgaccttaccggtgccgtccatcgccagcccggaaacacccggcagtttgtcgataggcgatgcgttaatcgcggcaattctggcaaccgacgcctgaatcgccttaatggattccggccctgccagctctgccactttgagcgcctggccgttattgttctgccagataagcagcgactgaccatcgcccggcgtcttaaagtattcccccggcgatgtagccagcaaccccgctgcggtatcagcaaagaccgctgcggcgtcataggccaccagctgcagggacatcagttcccggtacagaaacagcgtccggttagccagctgtcgcgcctgaatattgaccgcaccatcacgccccccggcgacacgctccagacgctcaatcagcttgatagtttcttcccatgcgggcgtttcgttgatgttgaccatgttattttccgctga

SEQ ID NO: 272290 - DNA, 1074 bp, Klebsiella pneumoniae
atggcaaaatacagcgcagtagtgaccaccgccggacgggaaaaaatggccgctgccgccattaccggccagccggtgggctttgcctttatgggcgtgggggacgggggcggcgtggtgccatcgcctgacccggcacaggtcagcctggtgaatgagcgctatcgtgccgcactgaacagagtggttattgctgaccagtcagccaacatcatccgtgcggaaatgattatgccgccgcaggtcggcggattctggctgcgggaggctggattatttgatgaggatggggtgtgcctggcggtggcgagcctggccccgtcctacaagccccttctggccgaaggttcgggacggttgcaggcgctgaatatctggattgccgtcagtagcaccgcagatatcgagctaaaagccgatccgtcagtcattctcgctacggttgatgaagtgaataaggcaaagaatgaggcgaaggattacgctgatcaggtagtcggtgaacttgataccagcattcagcaggctatcgctgacgctatcactgcggcgcgtcgggacttttgggaagaagaaaacccgccgggaacggtgcgcttctttgctcaaaatatcgatccgaacgagaaatggccgtggtcgaaatggacttacactggcgagaataaaacaatccgcgttggtaaggccgatggctcaaatgtgggcgccactggtggtagcgacaccgttaccattcagcaagccaatctccctgctgtacagattaatgtaagcggatcaaccaatgaacatcagggaggcgatcaggagacgaccgaaaatggcgcgcacaatcaccagggtggagatggggcaccgggggcagcatggcaaagtgcgacccacggaacagacaaccagaaaagcacaacctttaacaacacaagtgacgcaccagcgcataagcatgttttaactattccgcctcatagtcacacagttactgggaaaacggataatcttggtaacggtcaggcaattaacgtcgttgaggcgcacaccttgctgatgtgctgggcgcgggttgcatag

SEQ ID NO: 272291 - DNA, 579 bp, Klebsiella pneumoniae
atggataaactcctgcccgctggcccggctgcggaggatcatgccgctctgagactgaacggcctcaatatcatcaccaatcatcagcgccggaaactggctggccccgtcatccagttgctggaaaacgaccttaccggtgccgtccatcgccagcccggaaacacccggcagtttgtcgataggcgatgcgttaatcgcggcaattctggcaaccgacgcctgaatcgccttaatggattccggccctgccagctctgccactttgagcgcctggccgttattgttctgccagataagcagcgactgaccatcgcccggcgtcttaaagtattcccccggcgatgtagccagcaaccccgctgcggtatcagcaaagaccgctgcggcgtcataggccaccagttgcagggacatcagttcccggtacagaaacagcgtccggttagccagctgtcgcgcctgaatattgaccgcaccatcacgccccccggcgacacgctccagacgctcaatcagcttgatagtttcttcccatgcgggcgtttcgttgatgttgaccatgttattttccgctga

SEQ ID NO: 272292 - DNA, 621 bp, Klebsiella pneumoniae
atggcgcaaaacatttcgtggtatggcatgatagcacccgaagagagtcaattcagggtggtaaatgtgaaaccagtaacgctatacgatgtcgcagagtatgccggtgtctcttatcagaccgtttcccgcgtggtgaaccaggccagccacgtctctgcgaaaacgcgggaaaaggtggaagcggcgatggcgcagctgaactacattcccaaccgcgtggcacaacaactggcggggaaacagtcgttgctgattggcgttgccacctccagtctggccctgcacgcgccgtcgcaaattgtcgcggcgattaaatctcgcgccgatcaactgggtgccagcgtggtggtgtcgatggtagaacgaagcagcgtcgaagcctgtaaagcggcggtacataaccttctcgcgcaacgcgtcagtggtctgatcattaactatccgctggatgaccaggatgccattgctgtggaagctgcctgcgctaatgttccggccctatttcttgatgtctctgaccagactcccatcaacagtattattttttccatgaagacggtacgcgactgggcgtggagcatctggtcgcattgggtcaccagcaaatcgcgctgttag

SEQ ID NO: 272293 - DNA, 867 bp, Klebsiella pneumoniae
atgaaaccgagtgaatctttcaaaatacagcaattagtatcaaaaatagaaaataaaacctttgattatcattgtattgattcaattctcataaagctgagagagttttctgggaaaaaccgtgtttttcatgaggtatctaattttattgcgcacaataaagaacgaaatgaaggtaagtttagcgactttactaacgcaaactttcttaagttgatgttttttatgaagtataattacaataaagagaagatcgatattgtaaaaggtgttcctttttgggtatctgatttggtttttttactcatttctgaaatgagcgaggctgagtgccagaaaaaattcaggaagagtaaagcaggcataaaagagcggatcaggcaaaagttttcagttaaagatcaagtcttctcagctaagcctaatgcaaagagagttgattttgataacttaggcaccattctttcatcatttgtcattcattcggggaatgttttccatcctaatgatttttttgatgaatttatctcttgcctgagagagaatggaatcatgttttcagaggatgtcgtaagggaatcaaaggatgagattcttatgtgtgtacttcttctccttcatcgaactcatttcaaatttaaatctttatcctctgcatctatctcaatctctgaagagaatggcaatttatccctatccgctactcttaaattagagccagtaaatgtaattatagtcgtacttttaaccgatctttctgtagcggcatggtgttctacagctgtttctgatgctcttagtcggactaaagagcttcccgagaatgtaactctagatgaaaacttcaagctatcatttttctcgtga

SEQ ID NO: 272294 - DNA, 852 bp, Klebsiella pneumoniae
atgccaaaagaagtcccggaagaaggcggtgctacagtgcatcatttcttctttttatcgcataatgctgcggggggcttttattcagtaattggggcaatggccttagggatatatctgcatagtaagaataagttatatttattttatgctattatgtttatctttttcttgtatatgaccaattcgagaggaagcattctggccataatggctgcctttggatattccttaataaaattcaaaaaaccgtttcttgtatttacaatatttttactcattcagttttttatagttcaagaaacatatccaacatgggtatcaatgggtaagattatgtctgaaaatgcaaattatactgtatccagtgccgcccaaggtatagacttccagagggtagggacattcattgatcggttatattatttgtggccaagggcttttgataattttattcattcaccattactaggactaggttttggtagttatgatgatttatattatcgatattcagatgtaataccgcatttattagcaattaaagaaggagctatggtaagacattctgaagcccatgcacataattcaacatttacaatccttgcagaattaggtgttgtagggtacctcctttttattttattgtttaatgaaattaataaaaaaataattgctataaaaaaagttgaacctggtatatttatggccttaagcttagcattttggacatgcatattttcatcggcgactgagcatcgtataacaaccccttcacaaatgatacccttttttatattatttgggatatgctatctgaaatttttcggaagaaggaatgtaaatgattaa

SEQ ID NO: 272295 - DNA, 579 bp, Klebsiella pneumoniae
atggataaattcctgcccgctggcacgactgcggataaccatgccgctctgagactgaacggcttcaatatcatcgccaatcatcagcgccgggaactggctggcgccgtcatccagctgctgaaaaacgactttgccggtgccgtccatcgccaccccggaaacgcccggcagcttgtcgatggacgatgcgttaatggcggcaagtctggcaacggattcctgaatcgccttaatggattccggccctgccagctctgccactttgagcgcctggccgttattgttctgccagataagcagcgactgaccatcgcccggcgtcttaaagtattcccccggcgatgtagccagcaaccccgctgcggtatcagcaaagaccgctgcggcgtcataggccaccagctgcagggacatcagttcccggtacagaaacagcgtccggttagccagctgtcgcgcctgaatattgaccgcaccatcacgccccccggcgacacgctccagacgctcaatcagcttgatagtttcttcccatgcgggcgtttcgttgatgttgaccatgttattttccgctga

SEQ ID NO: 272296 - DNA, 726 bp, Klebsiella pneumoniae
gtgctcaatgatacaaaaagcgggggtttaaaccccgccctctgccagaagagaagccaacttatttgtctcgctggttactctgcttctttggtcttctttcgctgctctgctttcagcttgcgaccgcaggcatccagcacccatgcagagaagttagctccggggttatcgtgtttttcacgttctacactggcgtcaatttcttcaactaattcatatggaaatctgattcctttgtacgcagatttgttgtttctgtgccctgtagccattggcgatgattcctgttggtgttttaacactagagaaaataaatcatctctacagatttgtgaagtgtttaaatacttttggcttgacgtatttaaacacctaggtgtaaggtatttaaacaccttatccacagctaaagcacaggtaaggcacaaaacggcgaagcccagaggtgcgctaacaccttccgggcttctgaccaccagcgatagaacaagtatcgaggtagctatgccaaatcgtaccacaccctttacggggcgggcatctatcagcccgactttattcacctggcgatttctggcgctcaatcgccacgacaaaaaggccaaaccctgccgtctgtccgtcgatgctgcaactgaacgcgaagcccggagtatcctttctccgcatttcatcctctctctggccgctcgcctgccggttcaggaggtgcaaaatgcatag

SEQ ID NO: 272297 - DNA, 720 bp, Klebsiella pneumoniae
atgttctctcataacctcgcaaaaacagttgtattggttgacccgaatgatgtcgagtcttaccttcggcctatgaatcttagccaaagtgacttagggcgtattcttgagaggggtctttccggtcgctactcgacgacacagaaccaccccaaaacctcacgcggacagtatttttatggtgaaggtgtaagcgctgccagagacattcttgctcccaaaggctacaagcgcctatcacttcgaaatgttgagttgactgtgagtgataaagttgccctgtatctttgccgcggttgtgatcagactggccttatccacggttttccagagtctcgcatgaagaaaggggattttacttgtgagcttatggggttaatccataataacaccccgggtcagggcgaacttatcctggacgataaccagcttaagctcgatttagatctgccggaaagcgatgctatccccctgctaccaaataaaatcggattggacttatggtttttactctacgatttttatgaactggatggggacgaacgcgtgggtatccgtgctgagctttcacgcccgatttcatacaatagcaagaatgtagttaacgatttctcgactcgtttaattcttgatgttcatcaacctgatccgattgttaagaacggtgatgtaccgcagtttacaccggatatcgatctcgacattttaaaaacaggctaa

SEQ ID NO: 272298 - DNA, 1113 bp, Klebsiella pneumoniae
atgtttaattcagagcgtttacgtatagcaagagaacggagaggcctgacacaaagagcgttagctgaagccactgatttgaccagcaagactatttcgaactacgaaaaagcgggtatctttgaggctatagccagcgacacaatggagcgaatttcggctgtccttggctatcctattgagtttttccgtgatagggatgtccctaccctgtcaccagaggctgtgagtttccgcgcaatgacaaagttaacggcacagaaaagagactcagctctcggagccggtaaacttgcgcaggagttatcagcctggattgatgagcaatttaaactcccgaaacctaatgtgcccgattgtagcttcgatggatattctgagcctgaacgcgctgcccgggcggtcagggagtgctggggagtcggcgaattatccatttccaacctgatccatcttcttgaggcaaatggtgttcgcgtgttctcccttgctgaaaactgtgttgaagttgatgccttttcgttctggatggacaataaaccttttgtgcttttgaacacaatgaaaacaccagagcgcagtcgattcgatgcagcccatgaactgggacacttggttctccataaacattcaactaacaacggccgccaagcagaacaggatgcagaccgttttgcatcggcatttttaatgcctgaacgcagtgttttggcgtcagtgccaaggatgccgtcgctcgatctgctcatctcactaaaaaagaactggaaggtttcattagccgctctggttcgccgtacgttcgatgttggtttatctaccgaatggcattatcgccagttatcaatagagcttgcccgtcgagggtatcgtacgggtgaacctcaagggatggaagagcgcgagaagtcactcgtgctggataaagttttctcagccctgcgcaccaaaggagttaaaagaggagaaattctcgaacaactgaagtttcccgccgacgaagcgagtgcccttacctttaataacagtttctttatggaagcgatcaatgggggcaaactgactgctttggaatcggagagatgctcatctcatttacgcttggttaagtag

SEQ ID NO: 272299 - DNA, 1032 bp, Klebsiella pneumoniae; identical to SEQ ID NO: 271303

SEQ ID NO: 272300 - DNA, 1557 bp, Klebsiella pneumoniae
atgagaattaaaaagcctcaccttcgtccgatagtcataaccttgtccgttggtgggattttgttaacttctatttttctgattgccgttattatggtttttcagcgcgaaaatatagaaaaagatttgcttgatgctaattcatcgtacgctatgaaaatgtcagatgtaatgagtggttatattgaaatggctcaaggtgaattagcatatggagcaaaaaaaataaaatcaactaatgatattgactcacttaaagatgaggcggataggttaagattgcagtctggtatgtttaattcagtttttgttgttagtaatgatgctgttgttctggcgacttcgccagaatctcttgatttagttggtacccgcttgaattcaagtgccagcaaattggcgattgaggaaaagaaaccattcatatcttcaccgttcaaatcagttactgggaatttgattattttgttgtcacatcctatttatgataagaatggcaattacatagggtatgtcggtgggtctatatatctaaaaaaacatagtttatttagcgatgttttgagcaggcattttttcaagagcgacactgaaattagcattgttagtgatgatggaactgtgatctttaataacgataacagtgctgttggtcggcccatggttatgtctgatgatttgaaatcaaagttaacggagtctgatagaggtgagggggaattttttttttcggggaatagatatcttctgggttatgctcatatgaaaaatactgcttggaatgtgttggtttatagccatgctgacagcgcgactactattcttattacttatgctaaaagtgtacttgttctgctaattgtaataattattacattttcacttctttcatatttcattgcctcccgtatttcacttcctttagaaaagcttgctatatctaccaatgctaaagatataggggcttcgttagtttatattaaagctatcaatgcttggtatgccgaagctgatcgacttaaaaaggcactttttacgcatgttaaggtaatgatggaaagggttgattctttaaatgaggtggcgcttaaagatccccttaccggcgtgaacaatagattggggttttcaactaaaatacagaatgacaagtatggggcaggagcttcagttattgctattgatgttgatttttttaaaaaaataaatgatagtttcgggcatggggtcggagatgaggtgcttgtttctttggctcagattattaagtcttgttgccgtagtgaagatattatttgtcggtttggtggagaagagtttgttgtttttctgccgaatacatctgtggtaacagcggagtgtgttgcggagcgtattaggagtgttattgaacgtactgttttccctaataacttgcgtgtcaccgtatctgctggtgtggcaacacaagatgatcctcttggtgggatcgattttttgctgaaaaatgctgacgatgctctttatcaagctaagagagaggggcgtaataaagtgattgtatatagcgctatttga

SEQ ID NO: 272301 - DNA, 324 bp, Klebsiella pneumoniae; identical to SEQ ID NO: 160292

SEQ ID NO: 272302 - DNA, 516 bp, Klebsiella pneumoniae
atgctctatgtcgtcgaatgcgcctacaccgatccccaaagcgaagcggcgtggaataccttttacaatcaggaaaaactaccggcgctggtctctgtgcccggtttctacgcctcccagcgcttccgcgctctcagcgagggctgcccctgctacctggcgctgcacgatatccacgatgctaccgtcatcgacagcgacgcctaccgccgcaacggcggcggccattttgcccgctggcaatcggcgatcgccgactggcatcgccacctctatctaacgaataatacgctgcgggaggttgccccggatgaagtgctgctgctgggcgataccgcggaggacttgcccgtcgctgcgccgatactcctgcagccaggcggcctggcgaccgaacaatgccggtatgccgccatcctcccacgagacaacctgcatcacctggccacgactgccgccgtctttatctatcagcccatcaccgcccggttacgcaacccggcgcagcgcgcgtga

SEQ ID NO: 272303 - DNA, 540 bp, Klebsiella pneumoniae
atgacggtctcaaccgaagtcgaccataacgactacacagggaacggcgttaccacatctttcccgtacacgttccgcatcttcaagaagtcagatctcaccgtccaggtcgctgaccttaacgaaaatattacggtgctgactctggataccgattactccgttaccggggctggtacttattctggtgggaatgtagtgctgatatcaccgctggccaacggatggcaaatctctatctcacgtgatctgccagttacccaggagactgacctccgtaaccaggggaagttcttcgcagaggtccatgaggatgcgttcgacaagctgaccatgcttatccagcagtgctttagctttctccgcctggcactgcgcaagccgtcgttcatcgcgaactattacgacgcactcaacaaccgcattcgtaacctgcgtgacccgtcacaggcgcaggatgcggccacgaagaattatgttgatgggcagatcgttgacaacactaatgcggctttgttgaataaatcgaacttttgctga

SEQ ID NO: 272304 - DNA, 198 bp, Klebsiella pneumoniae
atggataagtgccaaggcattttcggcaagatatttggtcatgcattccgggtggcgataacaaaaggcgctccggctatgaatctcatgtcggcagaagcagatatttcgtcaattatgcaaatgatggaagcatctagaccagaaacttatcacggaatttactgtaagcgctgcgggaaggttatcgatggctaa

SEQ ID NO: 272305 - DNA, 348 bp, Klebsiella pneumoniae
atgagcaagtatcgcaaaggcgcagtgtacctgcggaagatgaagtccagcgacaagtctaacgactttcgtaccagcatgcgcatggcgctattcagtgacaaaaaagtctggaaacgccctgaagaaattaatccagttgttcttgttcagcacggtgtgaagggtgttgtgagcgtgttcatgaatatggatgacgccaccggatgccttattagtggagcatttgaaaagcgggcgcgtaattcacggcacaatcggcgccggggaatgcgttacaccaaaggcgatctgaaaaaggcttttcgtaaatgggcattcaagcacaaacaggagcgtgccgcatga

SEQ ID NO: 272306 - DNA, 240 bp, Klebsiella pneumoniae
atgtctctagcgttgcagatcttctcaaccattcttggctttgtcggaactctgataatgttcctttatggatacaacctaataccctatgaaggaatgaccttcggtggagagcatacggcggagaataataaaaaaatcagacgcaaaaacagcagaattaaaaccatgcagaaagttggaatgggcttgctaacaataagtttcgcactgcagggattgtccttgattgttaagtga

SEQ ID NO: 272307 - DNA, 507 bp, Klebsiella pneumoniae
atgacaactaatatcaccgaactggcgcagagcctgaaacgtcgagcttcttcagcaaatgagtttggcgaaggcctatttttcataaaagccgacgacgtcctcgcgctggtagaggcgctggagaaggcgcagcagcggattactcagatggagtcccgcaccgtcaccgactggatagaacatgacgggaaatggcgaccggaatcgctgggtctggatgaacttgtatacctgaaaaccagaaaacaggagctgaaaataccgtacccggcgggaaaggttaaagggtggatgaataccggcggagacatggatgttatggcgtacaagctggcgtcgccacaagccagcaccgtcaccgtgaagctgccagatgaagtcgacgtgctgcttaatcatcttgaggatgtgttgccgtttgaagtatttcagctcatcgatgctcacaagtggaatgcggtttctcgtttatctgccgctggcatcaaggtggaggctgagtga

SEQ ID NO: 272308 - DNA, 252 bp, Klebsiella pneumoniae
atggtaatcatggtgtcgaattacatgatgaaaccgggcggcttgatattgtatccgtggagattgtggcgggaacgaaaattaaaatcgtgtcgaaaacagacatcggaaacggggcgtttgtggcatttgcctggacgccggagaaccgaggagaaatcacaaacaaccgatatcaacaatggtttttcgggcgagaaacaggggtacgaacaaccattcatgattctgaccctgaaaaaactgatttaa

SEQ ID NO: 272309 - DNA, 294 bp, Klebsiella pneumoniae
atgagaaacggcttcaacgggctggctgcaaaagtgcagacggcgctgaaagacgaactgatgtccggccatgtcttcatcttccggggccgcagcggcagtcaggttaaacttctgtggtccaccggcgacgggctgtgcctgctgaccaaacggctggagcgcgggcgcttcgcctggccgtcagctcgcgatggcaaagtgttcctcacaccggcacagctggcgatgctccttgaaggtatcgactggcggcagcctaaaagactgcttacgtcactgactatgttgtag

SEQ ID NO: 272310 - DNA, 1098 bp, Klebsiella pneumoniae
atgctgccgacctttgtcagccaggtgatccccaggcagcagaaagaggcggataacctggctctgcgcacgttgtattacgcagtgttgaaagcgcaaaaaagcgatccagaattgtctctgaataaggtcgccgagcagtttccgttaaccggccatattaccgacttcacgctcacttacgccgacgatacgctgatcacgaccagtaaaccgtccccggatatcagcgatgatgagtggcaggcgtttctgcgctcctcgattagcgcggattcagaaaacggcaaagtcagctttacccttatcgacctcgacggcgacggcaaacgcgacctgatcatcgacagctacgtgggcggcaccgggctcttcagctacaccggggtgctcaagcgaggtgatgatgattttgccgccgtcaacggcagcgacagtgataatggtgatgatttcgatgccggggtgcccggcgccctcttttccattaatggccgcggggctaaccagtggaaccactgggtcaaaatcaacggccaggtgtatgccctgtggtacaacggccagtttggcgaagataacctctacctgctacgcccgttcagcaccaccagccagacgcccgcggtgacggttcgctatcgctatacgctgaacagcatccgctccccggagaaagatcagccgctgacccccagcctgagcgacggcgataaagcggacctgctgcgctcgctggaggtaatgcagggcagcctgctgaaagacagacccgccagcgacaacgacgcgccgatctgccccatcccgccgggcacctcctctgacgaggcggataactactacagcggcgtcgccgttaactatatctatgagacggtggcctatattccggtctggctgaacgggaagtgttatatcggcaccattttcagccatcatggcgcctatcgccacggcgtggatgcggaaattaccctgagctcgccgcgtgaggacgaggaggtcattggcgattatctcatctccggactacgccacgttatcgccattaccagcggctggaaaacccgcgagggcgataacggcatgcagtga

SEQ ID NO: 272311 - DNA, 684 bp, Klebsiella pneumoniae
atgaatttatttgaacgtttgctgcatcgccgtctttgcaatgagcaacctgctgatggtggcactgcaccggcaccgtctgagccacccgcacctgctgctgacccggcaaaaccagaaggcgataagccacagcatggcgctgaaggtgacaagcctcaggacgataagcccgctgatggtgataagccagcagacaagcctgatgacaaagagcagaagccagaaggcgcgccggagaaatacgaattcaagccagctgaaggccaggagcttgatactgcagcgctggagcaattcgagcctatcgcgcgtgagttgaacctgactaatgaacaggctcagaagatggtcgacctgtacggcacgaagatcatgccaatggtgcagaagcagcaggcagaagcatggcaggcgcaaactgaagagtgggcagcaaccgtcaaagccgataaagagatcggtggcgacaagttgacggccaacctcggtgttgctcagcgagccctggataccttcggtacgccggagttgaaggaatatctgaacggcacagggctgggtaatcacccggagctggtgaaagcgttcatcaaagtaggtaaggccatgtcggaagacggcatggtgacaggtaaagaaagcggtcagcgtagtgcggccgaagtgctttatggcaaataa

SEQ ID NO: 272312 - DNA, 258 bp, Klebsiella pneumoniae
atgcatcacctgttctgcgtcattgccgttcaactggccatcctcaagtccatcaacaagcagatcaagaacgcgtcggaacgcttcgacaactggcgcgctgccgacaacggcaagcttgtggctgatgaccctgagttcatcaatgagcgcaaaatcatgacgttcacgctccacgatttcagcaaccttttcgatgacgcgcatatatgtgtcatgcttttgttgaaaaagaagaacttgcccttcttttcttaa

SEQ ID NO: 272313 - DNA, 372 bp, Klebsiella pneumoniae; identical to SEQ ID NO: 234816

SEQ ID NO: 272314 - DNA, 435 bp, Klebsiella pneumoniae
atgagctttgctgaattcaataacatccgtactttacgcaaagaagcgcgtgaaattggctatgatgtgtttcttgagatcgctgaaaaggttttagccgtatcttctgaaatcgaagatatgaagaaagaggatgaagccaaacgagctaagaagctggcactgatggaacagttcagagagatgttagctgctgagggcattgaaggtatcagcatttccgagatcgctgatggtgtagccgctcctgctgccaagaaggggaaaggcgctaaaggtgataagcgtggcgctgttgagcgcaagtatgcttataaagatgaaaacggtaaggaagttttgtggtctggtcgtggtcgtctgccgaagcctgtagaagaagctatgaagaaaggcgctaaaaaagaagacttcttgatcaagaaagaagattaa

SEQ ID NO: 272315 - DNA, 267 bp, Klebsiella pneumoniae; identical to SEQ ID NO: 269355

SEQ ID NO: 272316 - DNA, 267 bp, Klebsiella pneumoniae; identical to SEQ ID NO: 269355

SEQ ID NO: 272317 - DNA, 267 bp, Klebsiella pneumoniae; identical to SEQ ID NO: 269355

SEQ ID NO: 272318 - DNA, 267 bp, Klebsiella pneumoniae; identical to SEQ ID NO: 269355

SEQ ID NO: 272319 - DNA, 969 bp, Klebsiella pneumoniae
atgacgatcacaaaactggatgacagaaaataccgggtggatgttcgcccgcagggacggaacggtaagcgccaccgcaaaaccttcaccactaaagatgaggcggtgaggtatgagaaatttatgcttgccacgggacacaacaagggctggcttgaaaaacccgtggacagacgcccccttactgaactgattgaactgtggtggaagcatcacggagcgacgctgccgtccgggcgcagtatgtacctcaagctaaagaaaataaacgaacagatgggatacccccgtgccagcgatgttggcagacgatccttcgctgattatcaggctatgcgccttggggatggtataaagccagagacagtgaataaggcccggtggctactgaacggggtatttaccgtgctaatccgtaccgggaattatcatggagaaaacccgatgaaaggggtgaagccggtcagggtgccaaaccgtgagatgggctttctttcccgtgatgatgtggcgcggctgcttgctgtactggatggagatgatttacgggcggtcaggctttgcctggctacaggagggcggtggggagaggtacggaacctgacacgtacatcagtcattccgcataaggtgacgtacaccattacgaaaaataaccgcagcaggactatcccgatatcagaggcgctctggcaggagatcacgcaggggagtgacatccggttgtttcctgctgcgagttacgagagggtgagggagactattgacaggcttttcccgtggttgccggaggggcaggcgctccacgttctgcggcataccttcgccagtcacttcatgatggggggcgggaatatcctgaccctgcaacgaattatggggcattcgaatattacgcagacgatgatctatgcgcacttctctcctgaccacctgatggatgctgtgaaactgaatccactggtatag

SEQ ID NO: 272320 - DNA, 276 bp, Klebsiella pneumoniae
ttgtcaaacagtctggaacaaaaactcaaaaaggcacgccttgctgaaggtatgacccaaaaagcgctttcagaggctacaggtataccgctcggcaccatcaagaactatgaggcgggacataatgcggttggcctgcaggtgttgctgacgctgaccatgcatccgacattccgaaaatattcgctctggttgctgacgggagataccgccccacaggctggtcagtgcgccccggaggaaaagcgtccgcgttccaggacaaaggcgggttaa

SEQ ID NO: 272321 - DNA, 264 bp, Klebsiella pneumoniae
atggcaaatccgcgacaaaagggagtcagtatgcatttacccgactgcccgatagtgttttatctgccgcaaccctccctgccgttatcagtatatgccgctcaaaccgggcagacggagcgggcagttcagcaacaggctaacagccagaaaattgtattaatgaaagaacaacccggtaaagagcggcgcgtaaatatggtttatgaatttctttctgcatatgaagaagcaaaatccgcactggaacacaaaacccgctga

SEQ ID NO: 272322 - DNA, 867 bp, Klebsiella pneumoniae
atgaataccccgtttacatcaggggcggcttttattacgcctccaccactgaaagacaaccacctgagcattatatccacttatcgcatcattccatttgatgataacaaaagcgatgccgctgccatttatcgaatcgtggaaatatactatttaaacggattaaaaacgttatcagacaaccttcttgaatttacaggcatggtattacctgacccggaaatcacagcaggggaaattaaccaacttctttcccgatgtgaaaaactctgtggccacgagcagagcgatttgtcattccgtcagcgggaagcttccgctgcagaataccgcatgaatcaggcaaaaggcggcgcgaaatcactggccgaggcacgggaacgcaccgttaaccggggcgtggaagaacaacgacagtaccagcaggcgctttccctgctcgaggcgcaaaagcagcgagccgggtggtttatgtgtttgcctggcatgttgcgttctgtagcagagagtctgatgccggatgttaatatggccctgataaataagtctccccggacactcagaatcccagaatgttttacgcgtgaaaatatcatttcaggcaatctgctttttaaagcgggtgccgacgcgttcgctgccgtccgtgagctggaaaaatccgcaaaattcatcatcgacaaatgcagcctgcccaaagaccgctatgaactgaataataacggcatgttcagggcggatgcatatcgtcaatattaccgacctgaaaaccggattctacaggcggtaatagcccccgaagaatatgtccgctacatgacggaattacagcaatacaattttgcaaaatcccgcgtatttaaataa

SEQ ID NO: 272323 - DNA, 999 bp, Klebsiella pneumoniae
atgaacagcatgagtgcaatcagaccacaggcagcagaccgctatcaccggaagatgttcaaggaagaaatacagccgggcatggcgtcccgcccgttgtcacagtcggaggcgattatcctgcgagccagtatcaccgaatcggcgtggatggccggggaaatcacgctccttaataccagcacgcagagcggccaggccattaacctgggtagcagcaccctgcatacagggcgcgcagctgacggccgtttccgccgtcgcatggccgtgaacggcaccgcattctggctgagtgaaaccgactctcatgccagcctctcctatgacgaaatgtccgctattgccaccatgggcaaccaggactatttcgatgaaaccgtcgaagcgtttttcgctcaggcgtggacgctcgatatgctgcgcgtgggcttcaatggtaccgaaatcgctgataccacagacccggatgcgcaccccaaaggcgaggatgtgaatatcggctggcacgccattgcaaaagagcatgacggcggcaaacaggttatcaccacgcagctggcgctgggtgaagccggtgactggaagaacctcgatgcgctggccaatcacctgatcacccagcgcatcgcggagccgttccgggaagacccgcgccttgtggtactcgtgggggccgagctggccgcgcatcaacgcctgaagctgttcaacgcagcagaccgacccgccgatgtgaatgccgcacagatggccgtcagttccgtggccgggcgcttcgcctttgtgccgccattcatgccgggtaaacgcctcgccgtcaccaccctgcaaaacctgcacatctacacccacgaactgagccgttttgttaaggccggctttgatgaggatcgcaaggaatatgcgctcagttacctgcgtaacgaaggctacgcgctgggcaatgcagagctgtatgcggcggtggatgaaggcgcgatgatgctgactgactga

SEQ ID NO: 272324 - DNA, 735 bp, Klebsiella pneumoniae
atgtcagcacaacccggcataatcaatccccacatttcggatataaaccccttgcgtctgccagtctgcacggggtatatttcccccgttgcccctcaatgggcaaccgggcgtggaaacccgtgtaactcatcggcgacaacagacgcgccatgcgtctttttttatgtcgcaattaacgccaccgagcgccattttatggcgtggtgtgtagcaatatgtacgggtttgaatcgctctttcctgtacctaatgccacatcctgccaccagttcaatggtagctcaggcggggcacccgaaagggtggccggtattcgatgaggccggtatttccacccccgtctgggctatcgccattcatgagcgtggaaactccggcgatagcaaaatatgctactcatcggaggttgccttatggctacgaccctcacccaagcttatccgcaatacacctggctgtttctggccgttcgccgtgctgacatgcacagcagaccgcaccgtcagcaaatcactgcccctgattaccacactgcgcgccgtcttatctcacgggattacattgccgcttttgccggacgcattccctgccgttcgcctggcgaagccatgccatgccctgtgggtagccgttattccggtaacggaaattcccccacgtatactttcgcgccctgaaaaagggttccgttcttttttaatactgattttctgcgaaagagggaatttatga

SEQ ID NO: 272325 - DNA, 315 bp, Klebsiella pneumoniae
atgacgaacaaacataccaagccgggcaagcgcatattaaaactggctgacacacatcgcgctgaaataatggcggacagtgtggcgaactcgttaccggataatattatgatgtcagagcaagagcgaaaactgaaacgcgcccggaatgtttcctattatatgcacctgcatatcagaacgcttccggcaacccttgagccgttgatgtggatccccgatattttcagttatatcagcgacgaccttgatgatgtgatggatgaaatccggaatacagggcaagcgggaaaaaaaggtgaagatgatgaatag

SEQ ID NO: 272326 - DNA, 2694 bp, Klebsiella pneumoniae
atggataacgtaaaaaataatagcaccgtagcggaattaatcaagcaggcaaatggagaatgggaaggcattcttttccggctcaatattagtgtgcctgaaaatggaaaacatggcgcatgcccgcattgcggtggtaaggatcgctttcgttttgataataaaaatgggcgtggaacatggttctgtaataactgcggccacggtgacgggcttgacctggtgaaaaaggtgctgtccgtagatacaaaagctgctctggccagcatccgcggagtgcatgcctttgatacccggtcatcgtcgaaaaaccccatgcccgccagaaaagaagctgtcggaagcgatggccatccccacgaatggtgggcgaagctgttcagtgccacggagcagggagagagcgtttatctggctgcaaaaggtctgacgggatatgtctcatcgctgacacgccgcgctgtcaaagccggaggtatggactttccgccgggttccctgatgctggcgttaacggatacggaagggagaataacgggcgcacaaattataggcctggagaaacagaaaagcctgtatgccggttcaaagatggccgggcattttgtggcaacgacacgggcggataaagcccctgaaaaaatcattatcaccgagggctatgcaaccgccctgagcgcctccctgctggctgagggatggtgtgttgccgcactatccaaaaacaacatgaagaacgtcgccctctctatgcgtaaggcatggccggaggcacaaatcatcctggcgggtgataatgactttcaggacggtaaacccaatgaaggccgggaatatgcaatcaaagcggcgatggctgttaaaggatgggtaacggttcctcctggtcgcttccgggctgactgggatgattatcgccgtgaatttggcgtccagcgggcgcgggatgcatttgcagaggagatgatgaatccggcagatacagaaacccgcctgccccacggattcagactgacgaaggattatctctggtttgatcgtccggcttctgaggggggcgataacggacaggtcaggcaggtaaaaatttgcagtcctctgcgtgtcagtgccatcacctgcgatgcggacggcggtaagttcgggcgactgctggagtgggaagactctaacggcacgcggcatgaatgggcgatgcctatgacggttctcgccggaagcggccaggagctacgtgaggtgctgctggataacggcctgcattttatcagcgttaacggttcggcccggggttgtctgatggaatacatctcgacatgccgtccggtaagaaaggtgacctgcgttgataaaacaggctggcatggtggcgcttatgtgcttcaggatgacgtaataggcgatgacgctgacggcgtgatcctccagtccgccttttcatcaagaaatgacttccgggtcagtggcaacacgcaggaatggatacagcacatcggagcctactgcgcaggaaattcccgcctggtattttgcgtcagtctggctcttgccgcaccgcttctcagcctgctgggagttggtgggggcgggtatcatctcaagggagaatccacggacggtaaaacaaccacgatgaaagtcgccgcgtccgtctgcggtggggctgatttctggaagacatggcgtgcaaccggtaacgcgctggaagggatagccctgcgccggaacgacgctgcactgatgctggatgaaatcagcgaagtggacgggaaagaagccagccgcatcgcctacatgctgggtaacggtcagggcaaagcaagagccagagtggacggcagtccgcgtgatcctgccacatggtcactgctgtatctttccaccggggaggtatccatcatcgagcatgctgcagaagcgggagaaaagcgcaccggggcgggggtcggtgtcaggatggtgcaaatccccagcgacacgggaaaacatggcgcatttgaaaacctgcacggctttgatggtggtaaagaatttgcggaatatctggagcagtcaagccgtcagtatcacggtgcaccgtttcgcgactggctccgctggattgcgggtaacctgtccggcctcaatgcacgggcaaaggccatgaagaaagaatatgagcgtaccctgttacctgccgattccggtaatcaggttggccgtatcgttgaccgtttcgcattgctggccgtggccggggaactggctacggaagccggaataacaggctggaagcccggcgaagcatacaacgcagcgcgaaactgccttgatgcgtggttaaaggatcgcggtcatgcggccaatcaggaagaagttgacgcactggataaagtgcgacgtttcatcacggccaatcagtacacccgctttgctgactggcacgacgaaaagaatcgacctgcgaatatggttggcttcagacgggtggacaggggcagcaacggcggggagccggacaccacgttttatattctgccgagtggatggaaagagatttgcggtacgtccgacacggccaaaaccgcccggctctgccatgatgccggatggctcgataccgaggctgaaagcggcaggctacagaaaaccgtgaggctaccggagagtggagccaaaaaggtctacgtattcaggagtgaagttatcggttga

SEQ ID NO: 272327 - DNA, 357 bp, Klebsiella pneumoniae
atggacaataatgtatttcagatggacagaagccggagaggcggaagcaatagtggtaacgggggcagtggtatgagtggggatttagaaaaaagagtagaaaagctggaagccagcataggcgacattaaacaggatttagcagtacttaagactcgctctgaaaatttcagcacgaaatccgatttgatggagctttccaataccctcaaaactgaacagcaggctctgagaatagagcttcatcagtcgatagcttccatccaaaaagaaatctcaaatcagacaaaatgggtggctggtacgataatcgctgtcgcagcattaagcctcacggtagcgaaagtgctgttctga

SEQ ID NO: 272328 - DNA, 951 bp, Klebsiella pneumoniae; identical to SEQ ID NO: 148940

SEQ ID NO: 272329 - DNA, 264 bp, Klebsiella pneumoniae; identical to SEQ ID NO: 92202

SEQ ID NO: 272330 - DNA, 375 bp, Klebsiella pneumoniae
atgagtgacaaagacattgaatctgaaattcaggctaaaggcttaaccgcgccgcgcgttacgccttcccgcatcgaaagtattattgccagcgagcattactttacagccgcgcagggtgaccaccagtcgaaagaagatgatctgctcatcaacccggagccgtatgttgaagcgacaccaaatgcattgcacctcctaaccttctgcgttctggtgctgcgcaacggattcaccgtcactggcgaaagcgcctgcgccagcccggaaaacttcgaccctgaaatcgggcgcaagatttcccgcgagaatgcggtaaataaaatctggatgctggaaggttatctgttgaagcagaaacttagcgaacaataa

SEQ ID NO: 272331 - DNA, 966 bp, Klebsiella pneumoniae
atggcagacattgtgacgtttgaaaaaattctcgatgactatttttttaataaagttcttcgtcgtgcaacagaatggagttaccgaaaggtggtgagaactttccttgaattttacggagaagatattcttccggaaaatgtgacgcgaatggatgttctgaaatggagacggtatgttctgaatgaacagatgtccagtaagcggacatggaataacaaggttgcccacatgcgggcagtatttaatcatgccatcacgaataaacttatttcagccagagagaatccttttaaccaggtgattgttaaacccgatattaaacgaaaaaaaacactatccggggagcagatgaagaaaattgatttaatcatggaaaggaaaattgagctggagcagatgggcgttcacgatccgcggccaaatgcccttgaacccgcctggttctggatgacggtcattgagacactgaagttcaccggtatgcgccagaatcagctgctgcatatacgactttgtgatgtggacctgaaactgggcatcattgaattacaggctgaaggttctaaaaaccaccgggagcatcgcgtgccgatcacagcgcggctgagaccgcgtcttgagcaactgtatcttatgtctgtacagaagggatccaaaaaaggggagcagttattcaacatcaaccggtttacacccaaaaagaaaagaattatccgggctaaaaacatggatcacttaccgatgagggccttcttcagaagactgtccagggagtgtcagtgtgatatcagcccgcaccggttcaggcatacgatagccacagacctgatgaaacgcccggagagaagcctgaatgatgtccagatgctgctcggtcattccagcgtagcggtgactctggaatatgtggaagcaaacatggataacctgaggcgaaatcttgaagccgcatatgcagcttag

SEQ ID NO: 272332 - DNA, 1578 bp, Klebsiella pneumoniae; identical to SEQ ID NO: 150808

SEQ ID NO: 272333 - DNA, 561 bp, Klebsiella pneumoniae
atgcagcaagcctgtgttttttcttttttcctgctatggctgggtttgtctggcgtgatgggtctggagatcaccggcggcgttccctgctccggtttttatctggtctgggtgctgctgtccggcctccccttcctgctgcgcccgctcgcatgggcagagcgtcgtttcaggccgaagatgacgctgataagccagcacggaaagcgggcatgggttcacctggccccctggcagcccaccaccgacctgacgccgtcgcgtgtctgtctgttctggcagaacgtgaacgcctcaacctgtcaggcactggaaacacaccgcaccgttatcatctcatcgcacctgctgaccggtatacgtgcccgcaggctactggcccacaccacggaatatggactcacggtccgcagccgtatttatcagattccttttactccctggaaaagagcactgatgcagctcgaaatccttttccggcagtggcgctggcgcacggacttccgcagggactggcccgtgctggtcctccggcgaaaatctttaaacacggaaaaataa

SEQ ID NO: 272334 - DNA, 990 bp, Klebsiella pneumoniae
atgaagcatctgaatatgacatccctgctggcaaggatcgcccttgaacgggacgacgaattgctgcagctgaccgccgcaatgtccgacggaaagaaaacatccggtaacccgatggccatccgtttcaaacctgctgtgggggattttatcatcctcatgtcaggtcgtctgggtatctcggctgcggctctcgtgaatattatgattgaaggcgtcatgcgtgaaaccctcacaccgcatcaggccgccgttacccgcatccctgaacgtttctggctgttgatggacgaatacaatctgtcatctccggaggtggcccatctgcttgcggactggaacatgagcctgggtgtgctggaaaaccgggaaagaacgctcggttacatgaccccgcccctgctggaaaaattgtctgaatggttttatgtcagtaccgggtggctctcgggcaaaatcgtccctccggtccggattaccgtatttcctgactggctcgatgcatcccggttattaacgtgcagaattcaggaaatcaatccggaagattttatcgcccggccggatctcttttttattcgaaaaaaagagcaggatgatattttcctgtttattcgccggtacacaaccattaacgacacaaggttccgtgttgtggaatgtgctggccgttgttcagtatccggtgagtcagggaaacaatttactttattcctggccctgtgcggattgctgtttaaagccgaagtcctctcccttgtcgatacctttattgattcagggaacattctggattcaatgatatccggggaagtacttccgccggcagcattaagggaaatacaaaaacccttccacgatactcacggaaaatatacccaaaggatctggagcactgaagaaagggagcctttccttaatccggataattttataaatgatgaatggagaaagatagcggaagacattatttcaacccgttccatctga

SEQ ID NO: 272335 - DNA, 1218 bp, Klebsiella pneumoniae
atgatgaaagcttcagtttcaatgattacacgctgcatttctgttgccctgctggtttctgcggtgccgtcagtctatgcagccacaggctggatggaagcacggggggacgcaatggggggcaccggcgtggcatcagcacactacggtaccgcggcgctgtccaacccggcgctgttgacgcattttggaccaaccgattatttcagcctggtgctgccgtctgtcggcgcgcaagtctctgatcccgataacacggtggacaaagcggatgatgtgaaagacctgtgggaccgttttgatgcagccgccgacagccagtccggtgtcagcgaaagcgcagcggcacttaaaaataaactgcaggatctgaaagatactcatgccaatggtcaggtcggtgcctctgtagtggcaaccgtgccaaatcagaccctgccttttgcggtagtcgtgaagtcctgggggacagtgtctgttgagggtaaagtcagtgaccatgacctggattatctcgataaggtggctgatggcgacatccctccatccgctgtagacaagaattccctgacctcgaaagcttatggccgtgcagccgttatcaccgatgtcggggtagcaatggcacatgagtttgaaactgccggtcagagatggtccctgggcatcaccccgaaatatcagcgtattgacctgtttaactacaatgtctccgttcgcgatttcgataagagcgatatccattccggcgattaccgcaacacaaaaacgggttttaacgctgacctgggactggcaacggatctgactgacaactggactctgggtctggcagtcctgaacgtcattccccgttccgttgagaccaaaccggtaaatggctcgaccgggacattcaaagttaagccgcaggctacggccggagctgcatggcacagcggttttatcacaacggcgctcgatgtcgacctgactgaagccagccgtttcgataccgacaaaaagcgtcagtttgcaagcgctggcgtcgagctgaatgcgtggagctggatacaggttcgtgcaggttaccgccagaacatcatttcgaacgatggctccgccttcacggccgggctcggtttctcgccttttgatgtggtccatctggacatcacgggcattgccggcaccgatcgtacctacggtgcagtcgcccagatgcagttcaccttctga

SEQ ID NO: 272336 - DNA, 537 bp, Klebsiella pneumoniae; identical to SEQ ID NO: 150804

SEQ ID NO: 272337 - DNA, 654 bp, Klebsiella pneumoniae
atggttcagttacagacacaactcaatgccatccacgaacggattgcagaagcgcagaatattgtggcacgccgggagcgctccgttaaacgtgcggaacgcaatcttgaaattgcagaggataaccttgctcagctgcaaaatgaacgtgacgaactgctgattgcgtcatggggagatataccgaactggcaggttatttttgacctcgttaatccctcaccggcaatgtatgaatacaaagaaaaatgggtcagggaaaaaggccttcacgcgggcgggatgtataattgccatactaatcagggcgccttctctgttggttttaccacaacatcagaacacgaactgtatcaaaatatccgcatggttgaattcgttatgcaatatttgcggaccgaccacaataacgaaaaaacaatgattgtctataacgtcccgactgacaattgttgccacaacttcgtttttaatacaggaacgggaaaatacggaattaccactgacagctatatgagtcgcagcaacattactgaattctcaacagcagaagaagcactgcgctatctgcaaagcatttccgataccgatatcgtccctgagccggaaagtcttcccggtgcagtaatatatcctgacggagatgaagaatga

SEQ ID NO: 272338 - DNA, 480 bp, Klebsiella pneumoniae; identical to SEQ ID NO: 150802

SEQ ID NO: 272339 - DNA, 741 bp, Klebsiella pneumoniae
atgaataacgacatgttgacactggcggcgaagaaatacctttcaacattcgcagatcaccgaaacaatcccacaaattatgaagcgctgactgcatgggataatgccaccagtgagtttatggcattagtgaataacgacgaattaaacatcatcgcatcgctgcttgcagggcgcgaagctgacaaaaccgataattctcaactgcgccaacgcatcgccgatctagaagcccgcccggttgcgccgttcgacttcaaagagaccactgacgcagactactgccgggagtgggcatggcgtgcaatcaagaaagacctccctactgaacactggaaaaccggggagaacgggacattctatgcattttacctgatgggatggcatgcacgtttacagtacaacgaacaacgtcgctctgagtattctcaaatcgcagacaccattctgaaaactcgcacggtgagcattaatacggagccgtggcgatcattcgtttctgacgatgatattacagcgctgaaccgctttgctgagtgctgtgatgacccggaatcaggtggccatgaccttgagaaagaacaggtgaaacggcttgaaaaaatcgggttattacgacgttcggggcgcatcagcttcaccacggatttcggcgatttcgtactgtctgccgctggcatcaatctcaatctggaaatgggggaacaggtatgcccagggttaaaaatcgtgaaggcatga

SEQ ID NO: 272340 - DNA, 540 bp, Klebsiella pneumoniae
atgcccagggttaaaaatcgtgaaggcatgatgattgaactgcctgatttgccgaagcacctgcctaaagcggaagttccggacggtcgtttctccaggccaaagaacaaaatcacaaaagcgcagcgggcagagctgcgcatgaagttcggcgggcgctgtgcgtattgtggctgctttctccctgaaaaaggctggcatgcagatcacgttgaacctgtgcgccgcgattttgaatatgtgctggcaccagttggaagcggagtaacgcatgttgccagaaacactggtaaagtcttgcatccagatctgcacacaatagaaaacctgtttcccgcctgcgcaccgtgcaacctgttcaagggggcatttagcgttgaaggaatgagaaaagaaatcagccagcaggtagagcgcgcccgaacatatagcgtcaatttccgcaccgcagagcgctttggcctggtagagatcgtcgataagccggtggtgttctggtttgaacactatcaacagcaggaggcgaaaatacaggtatga

SEQ ID NO: 272341 - DNA, 168 bp, Klebsiella pneumoniae
atgaagtattaccaccaccttatttataccttcaggctgaccagacttctgctgagaagagaaatcccgctgcgaatatttatttttgctttacagacaaaaccaggagccgtcgccggtaagcatggttcttatattgtagacccgttctacgatgacctgggttaa

SEQ ID NO: 272342 - DNA, 129 bp, Klebsiella pneumoniae
atgtgggatacgaaaccattcaccgacaattacgttgacttttttcgtcttggttttcttggcagctatattatcccattaatcctcgtttttttatccggaatcttcgataacttttcagatatgtga

SEQ ID NO: 272343 - DNA, 687 bp, Klebsiella pneumoniae; identical to SEQ ID NO: 150822

SEQ ID NO: 272344 - DNA, 951 bp, Klebsiella pneumoniae
atgttctcatggtgccaaaaccgtctggagatcaccggtaaatcagtctgtctcgatgtgatgcagccctggattgccggcacggaaaaaccgctttaccggcatgccatccggcaggcgataaagctgttcctcgccggctgtgccggcatactgaagcccgtcagggcggtggattacgcaccgtatcctatgctgaccgcatccggtacaggcgcgcagacctcacccaaccaggccttccagcattttatcgagctgctggagcagaatgcgtggcttgacagcaagacgctctcccgtatggagaaaatctggctgcagtccggcatcgatgcactgaaatgggaagccattccctttgcagcgcggcagataatggcgcagctgatggctgtgcactatgccgactggttcggcgttgccggtgccggtggtcagtttgatccgcaggagcgctgggagtcgctgagcatcatgccggagacgacctgcccctgtgacatgctgatggtgatgccgtcacgtctggcctccgagctcaacggcgaaggtggtcttttcaccgggctctgtataacgtccgaactctatatgcagctctttggcatggagtttccggcgggccatcaggccagctggagcagggatgacgtggggtcactgacgctgagctttgcatctccctggtatccgccgtcaggtgaggttatggggataatgtcgcagatgtttgactgtgaaatccggcactactggatttcaccggatgccggcacgtcagggttcaactgctttgatcggggggaccacgttgacagtggtccgtaccaggcagaagcgctgcggcagtcagcatccggcgacggtgcacgcatgtatctggtgacacccgaaacggctgcggttcctgcaaccaccgcagcgcactacggcagcatccgcgcataa

SEQ ID NO: 272345 - DNA, 984 bp, Klebsiella pneumoniae; identical to SEQ ID NO: 150824

SEQ ID NO: 272346 - DNA, 612 bp, Klebsiella pneumoniae
atgatccgctttacttctgatgaactacgtccgctgtttacacagaatctgggtatgcagcgcccgctgatacttgaaaagaaactgggcatttatcttcgtgtaccggatgacagacgtccgggggagtggctgaaagcctgggctgcaggctgcaatccgttaaaagatgcagactggttcacacttgtcgacacgctcatacccgaacatgagttttcttttcagacatttatggcacagagcatgtttgatgccgtgctgaacgaccatcacgacctgctcatgaagcctgttatcagtaagctgaataacgcgctgacacttcacaaggaaacgagaccacccatgaaggtatatgtgccggtgggcgaatatcgctaccggatacagtggctttatgagcagtccttacgccacttccatgcctgtgtgggtgatgctgaacgtctcagctggcgttcgcaggcattgcatgtgctggatcaggtgatacgcctggactcgaaacgggcgaaacccgccgaccgggagaggtttgaccgggcggtcgagagcgtacgtgaccgtatccgttcggtgatgtccgacggctccttacgttattactga

SEQ ID NO: 272347 - DNA, 438 bp, Klebsiella pneumoniae; identical to SEQ ID NO: 150826

SEQ ID NO: 272348 - DNA, 306 bp, Klebsiella pneumoniae; identical to SEQ ID NO: 150827

SEQ ID NO: 272349 - DNA, 363 bp, Klebsiella pneumoniae; identical to SEQ ID NO: 150828

SEQ ID NO: 272350 - DNA, 390 bp, Klebsiella pneumoniae; identical to SEQ ID NO: 150829

SEQ ID NO: 272351 - DNA, 444 bp, Klebsiella pneumoniae; identical to SEQ ID NO: 150830

SEQ ID NO: 272352 - DNA, 885 bp, Klebsiella pneumoniae; identical to SEQ ID NO: 150831

SEQ ID NO: 272353 - DNA, 855 bp, Klebsiella pneumoniae
atgattacgtggcaatcgctattgcccttttcatcgggagtagcagccatttgctggtccgccattttctcagcagaacatcgaaaaaaaaaggttattaaacgtggatgccaggaaaaccctggcaatttattgatacgtactattaacaacaacgggttctgggtcatgggaaaaataattttgctccgacatggcgaaagtgaatggaatcagcaaaatcgttttacaggatggacagacgttacgctgaccaggagaggagaagaagaagcccgacatgcagccaggctcataaaacaggctggtatacagatagattcagcctgtacatctgttctcaaccgggcaatacattcactttggttgataatggagacactgaacctgttatggctgccagtgagtaaaacctggcggttgaatgaacgtcattatggcgccctgcaagggatgaggaaagatgaagcggcacaacaaatgggcgaggaactggtgtatcactggcgaaaaagttaccgaggtattccgcctttgcttgcggcagccccacaacttctccatcgcgaagcccgctatcaccatattgctctgtcagatctcccaaaaggtgaaagtcttgagatggcactacgaagagttataccttactggcagcatgtcatcgctccccgcgtcgtcagcggagaaacattattactgatcggccatgccaatatgcttcgggctctgacaatgtaccttgagcagacagacgaaaataatgtaatggatctgcatatccctacgggtgtcccagtcctttatgaaatgagcgaagacaaaaccatcagtggtcgctatatactggagtaa

SEQ ID NO: 272354 - DNA, 1509 bp, Klebsiella pneumoniae; identical to SEQ ID NO: 150886

SEQ ID NO: 272355 - DNA, 1539 bp, Klebsiella pneumoniae
atggaatttataagcatattgtatgccacactcgacggaaaccgtcagcatacactcagaaaaaatgaacctgcatgttttgctgatttaaaccttgataaagttatcacttcgataactcatggtcgggaagtgtataatattaaaccatttttttattcaccattagaatatcttgacgatatctactatcggcagggcataattcaggatgttggaaatgaaaatctctatagtgctataaaggaattctcatctgacatgcagaaaattagagagatttcaggggaaaaggagtaccggtactatcattatcagcaaagacgctgggaacttgagtgtatactactttattgtcagtcggttacaaaacttcgggagcatttaagctcgttgttacttgggtcgtccggtatgacaaattttagaaattatctttccgggtacattgatagtgagaattttaaaagtttatccgcaatggcaaaccggataaaagataatcttgagggaattcgctataatctcagaattaaaggtgacacaatcaatgtggaacaccatgcagatgaaataaactatagcgataagattattaatgttttctcaaaattcaaacaacgtgatgtaacggttaaacttgattttaagagtcatgacactgtcatgactaatgttgaagccagaattctggagtgcgttgccagactttttccgtctgttttttctgagctcgatacatttattgaaaccagaagcgattatcagagtcatacactgaacatttttgaacgtgaaatccagttttatctggccagcatcgaatatttccgcaactttcagaacgccggattatcattttgtattcctgagataaatgttaataataaaaatataacagtcaccaacggatttgatctggctcttgcttattcacttctgaagaaaaaagagaatgtagtatgtaatgattttcagttgcgggaatgtgaacgcattttagttgtttctggccctaatcagggagggaaaaccacatttgccagaatgatcggacagttgcactatctggctttgctggggctatacgttcccgcagaggatgcgaatttgtttctggtcgataatatttttactcattttgaaaaaagcgaaaatattcataatcttaggggtaaattgtatgacgaccttgtacggatcaaatctatacttgatgtggctacatcaaaaagccttattatcatgaatgagatttttacctcaacaacttcacacgacgcgttataccttggaacccaaattattaaaaaaatagtgatgctggatgcactttgtgtatgtgtgacttttatcgatgaactcaccagactggatcgggctatcgtcagtatgatgagtacggtggaaaatgatgaaagggcttcacgaacctacaggattgccagaaaaccttcggatggcgtggcgtggtcagcgacattggttcagaagtatggtctgacatatgaaaaaataaaaggggaggtgaatggatga

SEQ ID NO: 272356 - DNA, 420 bp, Klebsiella pneumoniae
atgattacaaaaattctgattgcctatgatggttcggagtctgcaaaagaggctatggatttcgcctttgaacttgctcatcattttaacagcgaattgtatgttatggctgtttgtcacttaactgagtttggcggtgaggttgagatgctggattttgtgagtcggacacaatcctacttctatcagaggatgagaaatctgaggaaacagtatccggaaatgaaaaaaaaacttcgattacatattgccacagggcatccggcagaacagattctgcattatgccgatggtcatggtatcgatcatattgtggtcggtcacagaggaaaaaaacagttttctcagtggttgttgggttcagttgctcgacaggtggtggaccatgccccttgcccggtaacagttacccgtaaatga

SEQ ID NO: 272357 - DNA, 375 bp, Klebsiella pneumoniae
ttgggtcagttgtcagcaattatgattggcggggctgtggggtgtgtcattcgctggttttttggggttaagctcaacagtttctttccttcacttccgcccggaacgctggtggttaacctgctgggggcttttatcatcggtgccgcaatggcctattttatgcgcaaccctcagttggatcctgcctggaaactgctgatcgttaccggtctgtgtggtgggcttaccaccttttcaacattctctgtagaggtcttcacattattgcaggtgggaaattacttgtgggccctcacttccgtactggtgcacgtggtagggtcgctgctcatgaccgcggcgggtttttacctgataacattacttgcataa

SEQ ID NO: 272358 - DNA, 426 bp, Klebsiella pneumoniae
atgaaaatctacacacatgcacttgttcttgttcaggggaaagaggatggcgttacccttctcgcactggcggcaacgctatcccgcctgctgcaaatgaaaatcactcttgctcatatctgcaatgactatcgggagatgaactacgtatcggacggcctgatggacgatgccgtatcaaaagatgttgttcaggtgaaggcgctgttcagtgaactgacgtcctctgtggccgaacacgttgacgcacgtgaactggtcaccatgcggcgttttgaagatgtacagaaatgcatcaccgacaccggtgtggacctggtgattgcaggtcaccgtaatcgttttatgggggcgctgacatcccgttctgctgaatacattaaccatcttaacgtcgacgttctgattaaacacattccaaactga

SEQ ID NO: 272359 - DNA, 909 bp, Klebsiella pneumoniae
ttgattaacgtttttggtcaccttaaccctgacagcgacgctatctgcaccgcagccgtgacggcgggctggctcagccggtgtgaccgtcctgcccgtgcctggcggtccggtgaagcgaaccctgagacacgctatatttttgaagctgccgggctcactctgccgcccctgctcgatattccactgaaaggtgagcaggtatggctggtcgattttaccgaaccggctcaggggccagctgaccttcttcagagcaacatcatcggaattatcgaccatcaccggctgggaggcctggtcacgcagttgccgccggaggtctggattaaaccggcaggcagcagcgcgacagtactctggctgctgatggatgcagaaatgcgccgcacgatgcccccgactcacgcaaccctgcttcttggcgcgctgctcagcgacaccattaatctgtgctcacccaccacgacggaagacgatatccgtacagccactgaactctgcgtcctgtcggggataaaacgcagggcatttgctcatgggctcatgaccgccaaaaccgacatcagcggacagtcagcagagcagcttctgaataaagacctgaaggccttttcgctcgctggcacggatgtgcgtatcgcacaactggaggtcaactcacctgaacaggtcgctcccctactggatgaactgcaaaatgcgatggcgcagatggcggtgacaaccggagccggacttatcgtgctgatggtgactgatatccaggaatgcttttcaacactgtatttcgccgggccggagagtggcaacataacatcatgctccgtaccgggcatggtcagccggaagaaacagcttctgccctggctggagcacttcctcagtcaaagccggagacagccatga

SEQ ID NO: 272360 - DNA, 138 bp, Klebsiella pneumoniae
atgatgtttttaaaggtgatggcgttccacctttcccaaccgccccgtccggggctgatgacgcctgatatgactcttgattttcaggaggtatgtcaggtcgtcgataaatccttccggcctgtgtacttcccttaa

SEQ ID NO: 272361 - DNA, 1158 bp, Klebsiella pneumoniae
atgagcgcaaataaaaaaaagcttaacggagttgtcagagggtttatcagctcgccggcggcgggcggtattatactgatcctcgcgtctgtagcagccatcgtggtggccaactctcccctgcttgagggatatgaatcactgctgaaatacaaaactgtcgggctttccacggagcactgggtcaacgacgggctgatggccatcttttttctctttgtcggtctcgagattaagcgggagcttctcgttggtcaactggcaacatggagccagcgcgccctaccgggttttgcggcgctgggaggcgttgccgtgccggcactgatttatgccgggtttaatgccagcaatgcagaaacgcttcgcggatgggccatcccggctgcgacggacattgcgttcgcgctcggtgtgctgactttgctgggaaggagggttccggcgtcgctgaagatttttctctctgccctggccatccttgatgacatgggagccgtagcgattattgcaattttttataccagtcatatttcacccatgatgctgggcggcgctatggtaaccgcactgatgatgttcatgatgaacagagctggcctgaagcgactgcttccctacctcgttgcaggctgcctgatgtggttttttatgctgcagtcgggggttcatgctacggtggctggtattctggtggccctcttcatcccgctgaaaacagacagcacttccggttcaccgctggagcgacttgaacatggtcttgagccgtgggtggttttccttattctgccggtgtttggtttcgcgaatgcaggcgtatcgctcacaggcctgaccgcagaggatcttctgtcacccgtgccagttggtgtggccacgggactcttcctgggtaagcaggtgggcgtttttggcctttcgctgctcgctgtcggtctggggctggcccaaaaaccgaaaaacagctcgtggctgcagatatacggcgtctctgttctgtgtggaattggttttaccatgagccttttcattggcaaccttgcatttgcggaaagccagttactcatagatgaagtgaaagtcggcgtactggtgggatcagttctgtctgcgttgactggggcgcttatcatgttgctcccgcgtcagcgttga

SEQ ID NO: 272362 - DNA, 171 bp, Klebsiella pneumoniae; identical to SEQ ID NO: 150819

SEQ ID NO: 272363 - DNA, 204 bp, Klebsiella pneumoniae
atgcagaaagcccttatgactgatgaacttctggcgcttgcccggcttagcatcatggcatttaagaagcccttaaaatatatggatgacactgacgctgaagtcatcgctcgttttaaaaaaacgtttactcctgagcttattgagcagatgtgcctccggatcctagggcttgaagcggagcgtcagagtttgaacgaataa

SEQ ID NO: 272364 - DNA, 543 bp, Klebsiella pneumoniae; identical to SEQ ID NO: 150815

SEQ ID NO: 272365 - DNA, 183 bp, Klebsiella pneumoniae; identical to SEQ ID NO: 150814

SEQ ID NO: 272366 - DNA, 369 bp, Klebsiella pneumoniae
atgaaatcggccagagaaactgctgttgaactggcagcgctcctgactctctgtcagacgcttcagtctgaaaaaaacggggtggggcgccacgcgccgagcgtgtttgccagcgaccatgaaacgttttcggagcgaattgtagaggcgtgtatgtatacgaaaatgctcaattatctgctccccatgcacagccagttggtcgcggtgggagatgaaatggaacgacagagtaaaatccgggtaaacgctagtgaaagttatgcacgagtcgccttggatcatctgctggcgcagtatctgcccggtcagtcccggataaatgactgtgtggcagctttgccggcattttctgtcccactgatgtaa

SEQ ID NO: 272367 - DNA, 2667 bp, Klebsiella pneumoniae
atgaaaggctctgaatggaataaatgggacctgcacattcacagtccgatgacttggcttgccaatgtatacgccgataactgtgatatagagacctacgtcagaaagctgggagagcaacaactgtccctgataggcctgaccaactatttttatttccaggaaaatgaactggagattatccggagtgaaattggccggcagggtcttaatattacagtgcttggcaacgtcgagtttcgtctcgatcaacagaataaagacgaagcgtttatcaatgtgcacgttttgttctccgacaagctcagtacctcaaaaataaacgagatactttccagacttcctctgaagctgaccgatgatagtgggaaaaaagtatacgcttgtgaaagcagcgtacgtgatagcgggcataacgtggataccatcgtggttaacctcagtgatctgctcgaacatctttcgtcagcgctgagaccttttatcgattatatcgtagccgtctgcccgaatggttacggcggctaccgtccgggtgcaaccgggcgttcagcagcgattgctactgaaattgatcgtcagggacatattatttttggggaccccaacgatagagattacttcttaacgacaacgcgctatccgggagcctcgcttaaaccagtttttcactgctcggacgctcatcgggcagaacacattggccgcgcttacacatgggttaaggcgaagccaacatttgagggtctccgtcaggcattgctggaaccagaagctcgcctgcagttgggcgcggactggctggcgcaaaggcccccaaaagtacatttcagccatattgctgttgaaggcacaattttcgacgggcaagcaatccggtttaaaaaacagagtattcctctgaatcaagacatggtggccataatcggcgggaggggtacaggtaagagccttcttcttgacgcgctgcgctcccgctttgccggcgccacagcgtacggcattgaagaacgtgaggtcaacgttgaacatctgtcaatagagctggataagacaaacggtgaaaagacgctttttgatactcgcactgacagctatgactatctgcacgtttcgcagggggaaatcaaaaccctatgccagcaacccggccttatcagcgatgagatcaaaaaaatgcttcggctggccgactgcgaggttgcggacgaacagcgtagagggctgggtgaaaacctgaacgccttccaaacgttccgcgaatactatgtggcccaggatgagcgccagtactatatcaatacgcccgagtatcaggacgaagttatcaaggtcgcccaggataagataaacacactcactagtgaaaagaacaaagcactgattgaacgatttcgggcaaacagtctacgagccaccgcactgacgcgaggcatcaatgcaggaaatgcttttctgcgggaggctacagccgcagaaacatcactgaatagccgcctgaccgagatgaatacggtttccgccggcgtggttcccgtgccaccgctagatctgtcagagctgatggctagagtcaaagcctatatggaagcgctacagactcaactgatggagaccggagaggacaatctgcgaataactgctgaattccgggagcagggtattgaacaggacatcactggcgtgctcgacaaaattcaaggctatcagcgggaaattcagcaagcgcagctcagacatggagaaattcagcagcgtattacacagtacaacaatgacgtccggcagaggggaaacttggtggagacttatgtccgtcagcttctggagcagaaaacggctatcgactcctgctttgccgcactagcggaaaaaccacatcttaagcctgaccagcaggaactgataaaagagatcctgaccgatatacgtatttacggacagcctcactttgacaccgctaggttctataatggaatacttgagcgacttaaccgcggacggttccggactgcaggcgagcagtctggcacagaaaagctaactcaggttctcggcgtaaggagcattgatgattttgtggcacttgtccggggtgatgccatcatcgagcttcccgaggaacccggaaataagattacgcttgaggcctttctttggaggtccgagtatttcaacaatcagggaccctacgccctgcagcgcttcctctgcagccccgaacacatcagcagctatctgacggtgagggccgagtttgaatacaaaggaaaaacggttgagaagctgtcggctggacagcgcggaacgttctacgtttgcctgaagttggcgaccgatgcgtttggttctccatttgttttcgatcagccagaggacgaccttgataatgactttatcatgcgccagcttgttccgcttttccgcaaaatcaaactttaccggcaagtcatcatcgtgacacataatgccaatctggtggtgaactgtgacgccgaacaggtaattgtggccagcaatgaagatgaagtgatcagctaccgcagcggcgcacttgagcacggcgaccacgggcagaaaaacagcatgcgtaaggccatctgcgacgtattagaaggtgggcgtcaggcctttgaagcccgcgaacagaagtacggaatgctgtga

SEQ ID NO: 272368 - DNA, 444 bp, Klebsiella pneumoniae
atgaccgtaattccgccttttgacggcgtcattcgccaacaccagcaagatgaacacatcgcatgggcaatgcttccctgcgcctgcccgcagaaccatgccgccaatctgctgccgctggatgacggcagcctgatgtgcgtctggtttggcggctcccaggagggaaaagccgatatttctatctggggatcgcggttagcccccggcagtgaccgctggagtgaggcggtcaagctatctgatgacccagaccgctcagaacaaaacccggtgctgtttcaggcgcccgataacgtgctgtggctgttgtggacagcgcaatttgccggaaaccagataccgccattgtgcgctaccgcctctcccacgatggcggacgaagctggggggccatcgatacgctgctggatcagccgggtacctttattcgccagccaataa

SEQ ID NO: 272369 - DNA, 531 bp, Klebsiella pneumoniae
atgagtcataataaaaaggaatatgctaaatttttccgtcgccccattttttcatccctagcaaaaggtaaggatgtttcggatttatttggggattttgattcttactgctatgaaacactgttttcaaacaatgataataatgaatatgagatttcactaagggatttatttacatcattatatgattctttgcgtctgaattatagaaatgaatatgtttataagacagcacttgtcaataaaataatattcggtaagcacagcccaaaaacaagttcgtcgtccatagaattaccaattaaaaactctatagtggatgttgcggtgtttaatggtacgtctacagcttacgagattaagacagagtatgattcaccaaaaaggttgattactcaagcccctgattatttggatgtttttgataaggtgtatatagttacacatccagagtatgcaagtaaatattgtgctttaaatctccctagagtgggagttatggttttgaatctgtctcttatacacatctga

SEQ ID NO: 272370 - DNA, 240 bp, Klebsiella pneumoniae
atgaaccatttacctatcactaaacatggttgcaccttgtctgaagcgggcgaaagccgtcttttacgagttgctcaggccagcgattttcttgccgaaattctttcaatgcctgtaatgagcggaacgaaaacgatttcagctgaaggcgccgcagcgctaatggcatgtattgcagaacagctggaaggtgtagtgaaggaaaccagcaccatgaaaggagaaagcgatgcacgctaa

SEQ ID NO: 272371 - DNA, 573 bp, Klebsiella pneumoniae
atgttcaacacacaagattcggttataaaattcttgcaccatgctaaatgctcgggctatattcgcagcgttgccgcaaaatcggcaatcgggcgtaggaacccgtgttatctgaaggcgacaccacacgcgccgagcgtgtttttttgtgtcgtagctttgactcacccttattttatggtgtggtggttaaccgtatctattcgttatttacgccacatcatccaaattatggtagtccaggcggggcagctttcgggctggccggtatccttcagagccggtattcctacccccgtctgggctaccacccatgagcgtaggaactccggtggtagcgttacccgctatctgaaggagattgccaccatggctacgatccctgctttgcctcaccctcaatttacctttgtatttctcgctgttcgccgttctgactatgccgcgcgtccattcgctgtgcgtactgttgcaacctgcgagcgtgctgcacgtctgaaactcgttgccgattttgtactgagcttcgccgcacgtattccgatgaacaatttcggggaggtgaacgcatga

SEQ ID NO: 272372 - DNA, 246 bp, Klebsiella pneumoniae; identical to SEQ ID NO: 148973

SEQ ID NO: 272373 - DNA, 1209 bp, Klebsiella pneumoniae
atgtctgacagcagtgtgatatctttcctgatttttcaggggaataggatggcggtcaggaatcggataaaaaaaatgccactggcaaaagcactggataaatatttcagtgcggtctctgtccacaaacgtggtcatcttcaggagttttaccgcatcaacgttatcaagcgttcaacgctgtcactgaaatgcatggatgagattacctccgtggatatcgctgattaccgtgatatgaggctgaatacggtgagcgaccgtacaggtcgtactgtgagtcccaatacggtcaggcttgaactggccttactttcggcgctgtataatcttgcgcgtatcgaatggggaacctgctcacacaatcccgtcgaacacgtccgtaaacctgcggggtcccccgggcgtacgcgccggctgacctccaccgaagagcgccggattgcgcgcgccctccgccagaaaaatccacagcttctcgccatttttcatctggcgctggaaacagccatgcgtcagggagaaattctgtccctgcgctgggaatatgtggatcttcatctgggtattgctcacctgccgctcacgaaaaatggcaccgcccgtgatgtgcctttgtcatggaaagcacgacaggttctgaaagagtttgcggggccggtgacggggccggtttttgattacacctcaaatggttttaaaagcgcatggcgggttcttctggctgagctggagatacatgatctccattttcacgatctgcgtcatgaagcggtcagccgcttgttcgagctcgggacgctgaatgtcatggaggtggcggcgatctcaggccataagagtatgaatatgctgaaacggtatacacaccttcgggcctctcagctggtcagcaaactggatgcccgacgccgtcaggcacagaagctggcaacgttatttgttccctatccggcagagatttcagaatccggcggcctgttccgggtgcagttcagtgacctggagcacacggctattaccgcagtaaatcgtgatgaagccctggcaaatgcagcttcacatcttctgcgaattcaggctctggcagcgcgagccggtaaaaggcttcctccaccgggtgaaattggcgtccgggaagctcaccgcgtactgattaatcccttccataaagggggagaggcagcaggcactgataacggaacttaa

SEQ ID NO: 272374 - DNA, 858 bp, Klebsiella pneumoniae
atgtcactcagtcatgcctcgcccgatgaactgctccctgaagctcctgagcatcaggtcagtgcgccggaggtgcagtccgctgctgcggttaagccacgtatccggcttccgttcagcccccgaaaaattcttcagactggcagcatcattttgctgactgtcagtctgacgggttccctgatcgcgctggttgtcatggggcgtcaggtttcagacctgacaatacgtgttaacacactcgatgcggcatttcgcagcggccagataggccagctcacctcaaatatttcagcgatggaagcgcgcctgaagacgctcgaacagcaggcggccacgcttgcctcacttcctgctgctgtgcagtcggccgatgagcagcagagcgccctgagaacatccgtcagccagcttcaggaggccggcaacgacaacacccgggcggtgactcagttgcagtcacgcgtgggctctcttgaacacgatgtacagcagtcccgggccgagcttgatgagattaaccgtaaggcggaactcacgcagaaaacgccggcgcctgaaaagccccggaccagcactggtgcagtgcccccccgggtgggcgccgctgtaaaaaagactgaccggtcagccaggcgtacggtgacgccggcagcaccgtttgtgctgaccggcattgaacgccgtggtggtcagaccttcgccgtcgtcattccccgcggtgtctcgcagatatcggccatgcgcctgctctcaccgggggatgccatgctgggctggacgctgcgctcaacggagggcagcggtgctgctgtctttctggtaaacggccgcgaacaccggattcaggttgaataa

SEQ ID NO: 272375 - DNA, 714 bp, Klebsiella pneumoniae
atgaaaaaaacactgatggcctcactgtttctggtgccgctcatgacctccgctgccacggtcaggacatcctccgcgcagagcagcatatccacatcgcaggagtcctccaccggcgtgctgagtgcgcagcagcaggcgcagcagtggggactgtctgacagcgactggagccgttatcagaccctgatgaagggggatcgcggcattatgtcaccgggccttgacccgctgacggcgctgggtgtggaaaccgataacagtgctgaacgccgtcgcctggctgaactctgggtgaggcacgaataccagcgaagcgaaaaggagctggcctttcagcgcgaaatcaatgctgcctggctgcgactgtatccggagacgctggccgtcaacatgggcagcaatgcggcgggtatcgcgcacgacacacaggggcgtctcgccctgtttgtgaaagagaactgctcgcgttgcgatgcgcgtctggcggccgtgctcgccgacgaccgtcccgtcgatatttatctggtcggcggaaacagcgatgaggccatccgtacctgggccatccgtcacaatatcccggtggaaaaagtccgcagccgccagataacgctcaaccacgacggtggcctgtggctgcgctacgggcagggccagatgccggtgattctgcagcagggggaaaacggatggcagctcgccgcattctga

SEQ ID NO: 272376 - DNA, 591 bp, Klebsiella pneumoniae
atgctgggtgccgggattctgtttgcaacagcggcgtccggcgccacagacctgcaggttattcctgatgcgtaccggcagatagccgccgctgagcgggtgccggcggagtcactgtattcgctggcaatggccgaaagcacccgcaaaactgcctggggtgcgaagccgtggccctggaccattaacgtggcaggcaggggttaccattacagcacgcgtgaagaggcctttacggcgctgctcgggtttatgcagcgctggccgctgaaaaatattgatgtcggtgtggcccaggtgaacctgggctggaacgggcattttttcccgacgtaccgtgatgcgtttgatccgtacaccaatcttcgcgcagcggcccgtatcctgcgggcctgctatgacgcccgccccggcagctggcttcgtgcggcgggctgctaccaccatccgtcaggcggcgcgcacgcggcaacctatatggccattgtgcgacgcaagctcagtcagatagccatgaccggtacactggcggccgtcggtcagcccgggttactggcccgaaattctctttcctggattgaaccgcaatga

SEQ ID NO: 272377 - DNA, 531 bp, Klebsiella pneumoniae
atgaaaaatatgcttcgttatacccttgttttcacgcttttttcagggctgctgaccagtgcctttagtgcctctgccacgctgaccgtggtgggcgacctcggcggtgaatccacaggaccgctgtttgacgccatcaatgccggtccgggtcagtctgcaacggagtcgcccgttctcccgccaccgccggcatcgctttccctgtccgacatgctgccggtcagcacgcctgaaatgtcaccaggcgctgtcgccgcccggccgctgaatcttcccggcatgccgccggtgtttgtactgggtgatgatgcgtcttcccgtcagtggctcacgcagcacgccaccacgctcagccgcatgcaggcaaccggcatggttatcagtgtcagggatgagcagggattaaacgcactgcgtcagttggcgccgggggtggcaatggtgcctgtcagcggcggtgacctggcccggcgcctggcactgacgcattatcctgccctcatcaccgcaacggggatatcacagtga

SEQ ID NO: 272378 - DNA, 645 bp, Klebsiella pneumoniae
atgccggcctcccttattgctgagttgctgaacccgcaccggggactgtctgtcctggcaatgacgggggcggtagtgctggcgttcctggtattaaaaccgcgcacggtcagtcagcgccgccatcgtcgctatcagaaacaggccgcacgggcgctgcttcgcctgccacagctgcgcgatgaggctgcccgcataacctggctgcgaaaaatgaacccgtatgtgttcgaggagatgctgctgacggcactttcccggcagggcctgcgcatacaacgtaacccccgttacagtggtgataacggcgcagacggtcaggtctggatcaacggtcgtcgctggctgattcaggccaaacggtacagcaccaccatcagtgccgcgcacgtttcggcattcgggttgctgacggagcgcgaggggtgtccggggctgttcgttcacaccggccggaccggcgaggtcagccgggaagcctttcgccgctatgacggcatcatccttatcagcgggcagcgcctgctctggctgctgtccggtgaccggcgctggatggacacactgaccagaccgccacaccgctccctcaccccacaaagtcaacgtaaagaaccggcaccatcccccgtcatccgcgattaa

SEQ ID NO: 272379 - DNA, 375 bp, Klebsiella pneumoniae
atgcccagaatgctgtattccctgacagaccgtatcgtcgacctggttacctctcaggcggcaaaaacggccccgatggtcattttcgttctcgtgcagtgtgtgctcagaatatttattctgcgtcccctcattatcttctgctgcatggtgcttgcggtgctgaccgccgtgcctgttgcggtttttatcagtccgtcgttcaccccggatgtgctggctcagggcctcttacgggtgattcacctgctccccggggcgtataccccgctgttcgttgccggtgcactgtctgaactggtttacctgatccgccgttttacggttctgcctgatttctggccggataatgcggctcagcgaaaagggagataa

SEQ ID NO: 272380 - DNA, 777 bp, Klebsiella pneumoniae
atgagtgattttctggcgagaacggatgctaacccgccacactgggcgggggaggttatcggcaaatgggatgaccataagttgcgcctgtacggtggttttctccgccggcattactggaccgatcagggcagtattaatgtgttctgcataaaaggcaccgaccatcctgactatcaggggttgacctggcatgagtttctgcaccggggtaaacgcatggaccggaacataccgatgctggagcgtaatccgggttactacctggagactgaccgtaaaaaaccttccatgtattacaacagctatgacggtattgactggtatatcggtgctgacggcaatcaccgcagcggtctggcacggtttctgtttcatgagcgggaaatggcgtatctgcatggcgtgcatctgaaccattatgagttcgatgaacccctgctggccgtgtatctggcccttcgtgaggaactgagccagcatgcggcacagggctttcacatggacctgaatgtcaaccgcgttcatcgcgcccgggaggataccgcaggctggaaaaccgatatctattccacgtcgctgtatttcagtgtggggtcatggtgcagggaacacgctgacaacctggacatcagcgcactggctgcaccgcgtgatttttcgtgtccggatgagggatggcaattgcttgtgtctctgatggcatggcgggataagcgtactgcaacaaaacgtcccggatttttcagccggctgacctgcagggggcgtacatga

SEQ ID NO: 272381 - DNA, 2118 bp, Klebsiella pneumoniae
atgagcgatcgctatgtgatggaatccctgctgcgcccggctgtggaactgtattccgcaacggttgcggccagtgcaacctgtatctgcctgaccgctccgtgggcggtggcactcgcaccttctgtcagctgggtgacggccgccggtttcggcgttctggccctgaagcgcacccgcgagggcatgaaaatcctgcgctaccggcagaatatccgccgtcttccccgttatgtactgaccagcgaacagataccggtcagccggcgccatctgtttctggggaaaggttttcagtggtctgtgcgtcatacccagcggctgattgaggcgcgtcgaccggagtgcgaaatctatgtgcagccctccgtgctgaaccgcatggcgcgtgagatggaaaagaagatggagtacagcctcccctggctgtgccggctgacccgcacggattcggcgcttaacccttttcgccctttacccccggtcggcggcagcccggtgtatcacggtgtcgagcctgatgagactacggtgacctacgatctcggcgaacgtgtcgggcatatgctcgttatcggcacgacccgcgtgggcaagacccgactggcggagttgcttatcacccaggatatccgccgcacaaacgccgccggtgaacacgaggtggtcattgtgtttgatcccaagggggacgcggacctgctccggcggatgtacgcagagtcgcaccgcgcgggacgtcaggataacttctgggtgttccatcttggctggcccgatatcagcgcccggtataacgccgtcggacggttcagccgtatctctgaggtggcctcccgcgtggccggtcagctctcgggggaaggtaactccgcggccttccgtgaatttgcctggcggttcgtcaatatcatcacccgcgcgctggtcgccctcggacaacgcccggactacggcctcattctgcggtatgtcaccaatattggtgagctgtatgagacttacgtggataacctgctgagcgaaaaggcgccgcagctgatgaatacaacggaagccatgatgcagagcgggatcagcgataaggacctgccgcgtcatctccagggacggcctaacggcgtgaaaatctgggtgtcagagcaggtgctcggcagcccggaggggaaaaaactctgggacccggtgctggacggcctgcgcagcgcggtgcagtacgatcgcacctacttcgataaaattgtggcatccctgttgccactactggagaaactcactaccggcaaaacggccgcgcttctcgccccagactacaccgacctggacgatccgcgtccgattctcgactggcacaatatcatcaagtcccgaggcgtggtgtatgtgggtctcgatgcactttctgacccggtggtggccgccgccgttggaaacagcatgttcgcagacctcgtgtctgagggaggccacatctataagttcggtctcggtgatgaggaagaggggaaatccgcaaaggtggccatcaaccttcactgcgatgagtttaacgagctgatgggggatgaatttatcccgcttattaacaaaggcggtggtgccggttttcaggtgacggcttacacccagacgctttctgacatcgaggcccgcatcggcagtacggccaaagcgaaccaggtggtgggtaacttcaacactctggtgatgctgcgcgtgcgcgagaaaaacaccgccatgctgctcaccgatcagctcccggaagtggatgtctaccagaaaacactgacatcgggtgtcaccgacgtctcgcgtcccggggaaggcacggattttaacagcaacgttaacgaccaggtgagtctggtaaaagtgccgatgataagacctgctgacatcatcaatctgccgaaaggccaggcctttgcactgctggaagggggaaggctgtggaaaatccgtatgccgttgccggcggataacaacgacccacatatgccggccagcctgaagcatctggctgacagcatggagaaaaactaccacaccggtgaaacctggtggactggtggtgacataacgtatgcaggagggccggatgccacagcaggacagtga

SEQ ID NO: 272382 - DNA, 762 bp, Klebsiella pneumoniae
atgccacagcaggacagtgagaacgggcagcgcagcgcgacgccccgacagcgacagtccggtccgattggcctgctgctctgggatttcccgatgggccttatcggtgtgttgctcggttcactcctggtcagcctgcttatcgagtatgtctgtattgcgctgttgtggccggaagaaggcgcggcccacagctatcaggtgatggtggcagaaagccactggctctcggaagggtatacgcgcagtctgctgatggccgccccggttgagacagtcagccggtgggtgcacgttgcctggcagtggctgtttgtggatagcgggttcagtggctggctgcagtcatttaaatccctgagcgaaaaaggtagcgggcttattccggcgctgaacggaatcggagccacgcttgtgagctggctgggtgtgtaccttcaggccacggtctgggtcacgctgatattcttcatccgggtaatgatcctgttcctcagcctgccgctgttcgcgctggttgtcatcacgggcgtggtggacgggctggtcagacgtgacctgcgtcgctacggcgcggggtatgaatcgagctttgtgtatcaccatgccaaacgctttatcaaacccgccctgtatggcccctgcatgctctatctggcctggccaactgcggtgtggccgaatctgctgttgctgccatcagccttgctggtcggtggtgtgctcgccgtggtgaccggctcgttcaaaaaatacctctag

SEQ ID NO: 272383 - DNA, 318 bp, Klebsiella pneumoniae; identical to SEQ ID NO: 150764

SEQ ID NO: 272384 - DNA, 246 bp, Klebsiella pneumoniae; identical to SEQ ID NO: 150763

SEQ ID NO: 272385 - DNA, 366 bp, Klebsiella pneumoniae; identical to SEQ ID NO: 150762

SEQ ID NO: 272386 - DNA, 375 bp, Klebsiella pneumoniae; identical to SEQ ID NO: 150761

SEQ ID NO: 272387 - DNA, 645 bp, Klebsiella pneumoniae; identical to SEQ ID NO: 150760

SEQ ID NO: 272388 - DNA, 909 bp, Klebsiella pneumoniae; identical to SEQ ID NO: 150759

SEQ ID NO: 272389 - DNA, 1524 bp, Klebsiella pneumoniae
atgaaggcaccctcctcaaatcttctcgtgaaagtcgccgttccggtggtactggccagcgcggtggtggtgggcgtgaaatcctgctcagggggggggaatcagacggctgcaccacataccgccagcaatgttgcgctgaaggacctgtcgccggaagatctcaaagcgctgggtattgaaggtgacacgccgcaggacacactgcgcacggtggtgggaaatttccgcaaagtgcaggaccgtctcgatacgctcgcggacgataacaaaaagctcagcgacgaaaataaagccctgaaaaccaccaacagcaatgtggacacgcagattaatcaggcagtaagcaatgcccgtgccgaggaggcgcagaaacgccagcagctcagtgcagaggtcaccgatctcagtacccaggtcaaacagctgatggatcagttgcgcaatggcggtgccggcacggaatccggaaaaaacagcggctccggcagtgatattccgatcgggctgggctatgacagtgggctgaacagcggcgccgccggcgtatcgtcttccgctgatggacttcattgggtggagccaaaagacggtgtccccgttgatgccagcggccggccggtgaccgacagcaacaagaataacgccacaggcttctcgtttgccacgtcgtttgctgataccgctgatgccggtaaacaggccgtcggcaacaccacagcagcggtacagacgcagcttacggatgcacagaaggccaccgacccggtgtacacgctgccggagaattccaccctcgttggcagtcgcgcgatgaccgcactcctggggcgcatccccgtggatggtaaagtgaccgacccctatccctttaaggtgatgattggcaaagacaacctgacggcaaacggcatcgagttgcctgacgtgcagggggccattgtttccggcacggcgacgggcgactggacgctgtcatgcgtgcggggctccattaccagcatcacttttgtcttcagcgacggcacggtcaggacgctgccttcgcctgacggacaggggcagaacggaaacagcagtaatcagaacagtcagggcggtaatagcagcagtattggctggttgtccgatgataacggtattccctgcatctccgggacgcgcaagagcaatgcttcgacctatctgccgaccatcgccgcacttgcggccgccagtgcggcgggtgatgccgtggcggaaaaccagagtaccggccagaccaacgcttacggtggcgtgacctcaacgctcaccggtaatgccggtcaggccgtactgggtaaagcgctctccggcggcatgcgtgagaccgttgactgggtgaaggcccgctatggccagacgtttgatgccatctacgtgccgccgggtcagacagtggctttgcatatcacgcgccagctggccatcgattacgaggaaaaaggccgcagggttaaatacgatttcagcctggccggcagcggcacgggcatggactga

SEQ ID NO: 272390 - DNA, 450 bp, Klebsiella pneumoniae; identical to SEQ ID NO: 150757

SEQ ID NO: 272391 - DNA, 2799 bp, Klebsiella pneumoniae
atggccttttcacttttccgtcgcagggctgaagcgcaggaagcacaccagtacggtgacgggccgttttctgttaacggccatgaacccctgacgcgcgagggacgtctgacccgcagcgaggaagcgaagctgtatgagacggctccgtccatcatcgatcacattccctggggggaatatctccctgaacatcagtgcatcctgcttgatgacggcgtgtcggtcggggcagtttacgaaatcatcccggtgggcaccgaggggcgtccggattcccgcctggaggaaattcgcgacgtggtcgaaaacgccctgcaggacagtcttccggagctggatacacatcagtgggtggtgcagttctactgtcaggacgagtctgacctgatggtgtatatggataagatcagggggtatgttaagccccgggcgcagggcaccgacttcaccgacgcctggctgagggaacaggcccgtcatctgcagaatgtggccactgaaaaaggcctgtttgtcgatgaggccgtcaccggtgcgccgtggcgcggtcagatacgtcgtacgcgtatggtcatctaccgctgggtggagtcaccgtatcgtgacccgatggcccccgaggtgctgctgaagcaggtctgcgatcgcctgacggccgccatgagcggtgccggtattcagtgccagcgccagaacggcgagcagatccacagctggctgctgcgctggttcaaccctgaaccaacgtgggtggataaggccacactgtatcgctgtgccagacatactgacgacgctcctggcgaactgccgttgctgaatgatttcagtgaaagcctgtggttcacccgcccccgcagtgatgcggagaaaggcgtatggtggtttgatgacgtggcgcacagggcggtgccggtggctcgtctgcgcagcgcacccaccacggggcacctgaccggcgaggtccgccgtggcgataatatcaacgccattatggacctgctgccggaaggtacggtgcttgtcatgacgctggttatccatccgcaggacaagctggaggaaaactttgcccggctgagtcgtgactcgatgggggagaacgtggattcgctgcgtgcccgggaggatgcggccaccgcccgcacttacctgggtaataagcataaactgtatcgcgcggccattaccctgctgattaaagcccgcgacctgccttcactggacagtcgctatctcgacctcagcagtaagctactgaactgcgggctggagccggtaaacccggagcatgatatcgggccgctcagcacctacatgcgtgcattacccatgtgctttaatccggagcaggaccggcacaactggtatacccgtctgatgttcgtgcagcattttgcctgcctggcgccggtgtacgggcgtgataccggcaccggcaacccgggctttaccttttttaaccggggcggtggtccgctgtccgtcgatcccctcaacaaaaatgaccgtacgcagaacgcccacctcctgctgtttgggccgaccggtgcaggtaaatcggctaccgcacttgataagctggcacaaatgatagccatttaccgttcacgtatctttttactggaggcgggtaacagcttcgggctggccggagactactttgagtccctgggactcaccgttcatcgtgtcagcatcaagcccggtaaggccatctcgctggcgccgttcggtgattcgcatctgctgatgcaggaaaaaccggatgaactcattatcagtgaagacgccctgccggatattgatgacgatgaggacaaggatgaaaaacgtgatgtgctgggtgagatggagattgcagcacgcctgatgattaccggcggcgagccagcggaggagcagagaatgacgcgcgccgatcgcgggatgatccgggaagccatcatgatcgctgcgcggagtacgtttgaggccggacggcagatgttgcctgaagatctgatgtttgcgctgcagggcatcgcccgggatgccgggatgggtgaggacgggcgcgaaaggcgtacggccgcgcgccgggcccgtgctgaggaaatgtcggaagcgctacggatgtttaccgaaggctttgaaggtgagctgtttaaccgtccgggtacgccgtggccggaggctgatgtgaccatcgttgaccttggtacgctggcgcgcgaaggctatgaggcgcagatggccgttgcggtgatttccctgctcaacaccatcaacaatattgctgagcgcgagcagtacagtgaccgggatattatcgtgtcgatcgatgaggcgcatatcgtgaccgcaaatcccctgatggggccttatgccaccaagattgtgaaaatgtggcgtaagctgggtgcctggctctggctgttcacgcagaacctggccgactttccggatacggccaaaaagatgctcaatatggcggagtggtggatttgtctggtgatgccccctgatgaagtggagcagatagcgcgttttaaaacgctgaacagtgaacagaaggcgatgctgttgtctgccaccaaacttcctaaaaaatatacggaaggcgttattttgtcacgtaaggtgcaggccctgttccgtgccgtgcccccgagcctctaccttgctctgggtatgacagaaaaagaagagaaagctgaaagacgcctcattatgaatgaattacagtgcagtgaacttgaggctgcgtttcatgttgcgcgccggcttgatgaaaatcgcggactgagtatctga

SEQ ID NO: 272392 - DNA, 405 bp, Klebsiella pneumoniae; identical to SEQ ID NO: 150755

SEQ ID NO: 272393 - DNA, 234 bp, Klebsiella pneumoniae; identical to SEQ ID NO: 150754

SEQ ID NO: 272394 - DNA, 2427 bp, Klebsiella pneumoniae
atgcgctatccctttgaactcgatccacagattatccatcacattatttacagccaggccggttccatcggcaaggccgtgatagaactcatcatgaacagcgtcgatgccggcgccggcgcggtgattatcgatattacccaggaaggcttctcctgccgggatgatggccggggttttgcgtcatacgatgatgttaagcgctactttggccggttcggcaccccgcaccaggagggcgatgccacttacggccgtttccggctcgggcgggggcagattatggcacatgcccggacgctgtggcgttcgcagcgatggcagatgtccgttgatacgcgtgaaatggggtatcactatgatctggaagaactgactcagccgattcagggatgcatcatcagcggtgaatggtatgagccgctcaccagccaggagcgtatgtcctgcctccaggaaatccgcgacctggtacgctatacgcccgtcacggtacatctcaacggcaccatcattacccggaatccggcgctggaaaagtgggatatggaggacgatgaggcctggtatcgcctgcgcgaagacggtgccgtatccatttacaatcagggcgtcctggcacgacatgacccggctcatatctggggcgtgggtggccttgtcgtcagtaaaaagccgctcgcgctgaacgtctcacgcaccgaaatcctgcgcaagacctgccctgtgtgggcatcgattgcggcccggtttggccggcttgctgccactttttctgacaatcagggtaagcaccgtaaaacggaagcccggcgggagaaaacggcgcgatcgctgctgtcaggcgagggagacatgcagagtcttttcaatggtgaggaggtcatcaccctgctgcccggaaagcagcatgttacgctggagcacttcatccgcaaatgctgccattacccctctgcggtggataaaaactgtttcactctcatccgttatgccggtgatgtgccccggggagaactcattgcccgtgcggggatcgcacccgtggtgcatccggtcacgctttcccgctttggctgttatgagccggaagagtttatggagtgcctgagccgtgtccgggaaaacctcatggcgtacagggaacccctgccccgggagcagcgatggggttccggctggctgtcagaactggcgctcgttgattttgagacgctcagcacaaactttatcgacagcacgcagatggtcagtgagaaacaactggataaggagacacggcgggcgtggacggcgctgcgatggtgtctggcccggtatgctgccgtctgttcggggggggaggcgggttatcagtcacgttcttacggcggcaaatgcttccagatcctgctgggtgagtccacgtcgtccgatgcctggacggacggtgaaacctatattgcctacaacattgatatcgtgcgccggctgaagcctgatgcgctgcgtaccgccagcctgttgttcagcctgacggaacatgaggtggcgcatgagggtgacagtctggactgtggccatgatgaggccttttaccagcggtttcatgacatcagtaccctgtgcgcccccgacaggcagcgttatatgcacgtctggctgatgaaatacaccaccagtctggaagcggagagcaagcgtgccaaaggcacagcatggcgggaacgttacctgaccgagcgagccagtaccggccgggagaaaaaggggcttcccggtgtcatcagccatgaaggcattgaggacgctgtgaacgcaccggctgagccggaagatgtagcccggctcagctttctcaacctgcagttgaacggtgcgggcacggtagcaccggcggagaccgactggaatagtgtggtggccgcgggtattgagcagacccgggtaaatcaggacatacgtggccaacaaaagaaactactggaggaatggtacgcttcagataaagatgagaccgatatcctgacggatgagcaacaggcagatgaagccgaagagcagatgtggctggagtcccgtaaattgcattacctgtccattttacccggggcgactgaggaaaatctgcatgacagggctgtggcatttcttgcttatatgaccgattcagaagaggaggaactggccgcctgggccatgcgggcctgggaaaacagtgaccagtggtatgccagaaataccctgtcgtgcagtgaggctgatttcctgtatgagcaggattttgatcagccacttggggaaaatgtcccggcagactggcttccgtttatgcaggagggcgaaacccgatggagcattgagcgtaacgcggcagcggccgggtttatccgggaaatggattatctggagtggcgtcgcgacagcgccatcgatgacattccctga

SEQ ID NO: 272395 - DNA, 408 bp, Klebsiella pneumoniae; identical to SEQ ID NO: 150752

SEQ ID NO: 272396 - DNA, 972 bp, Klebsiella pneumoniae
gtgaaaatgtctttctcccgcccgcgccggctggcgctggccacgttaatggtctgcacgggcacgatggctagcgtcaataccgccagcctgctctccagtgccaccagtccggactgtatcagctggcgcatcagcggcatctgttactggctgttctgcacgccgttcggctgctcggtgaaaacctccgtgaaggtcacgcattttattcctgaagccgtggtttcggcctacctcagcccgggtgccaatccgtggaccgaaatgtcggctgtcagcagcctggccgacagcaccgaaagcacgctgctcggtagtgctgcaggtgtggccaccggcggtggccgtcaggagatgaaagccccgggtgagcgcaagcagaacctgcacttttactatggcgatgcgtatggacatccggccaccagacttattggcgggatggtcccgggttattcgtgcgacagtgccgccacgccctttatgccgtacttcacaagtgctctcgatgcactggcctggcgcaccggcgtgccggaatcactctacccggaggcgcttatccccggacagcgtgaaatcggcagtaccatcggcggcaatatgtggggcaacgtctacccccgcagcggctttgtgacccagaccgacagctacaaatcggcggccatggtggtgcagcgcgtggctgacatcattacccgccagggacaactgcatgtttacagcccgctcaccggccagcgttcgccggggtactggccacccgaccccgtgcaggaaaacaccggtacgaaaaatcacaagtggcagcgtctttccccacagctgtcgcagagctgcgcggtgttcccggacaccggtggacatgaggctcaggacggcaactacgcctgggcactgtggcaaccgtacagttgttgcaagcgacgcgggcagacttttctttacagcaccgatttctcatga

SEQ ID NO: 272397 - DNA, 1425 bp, Klebsiella pneumoniae
atgaaacaacagtatccgcagcggctgcgccgccccctggcgacactggcacttttcgccgctctttccctgcctgcactggccgtgaatacatcgctttcgtccgatggcgcctcggtcagcggtgccatcaatgacggtcttttttactccattggtggcggttcagtgatttccccgccgccgagccgcagcaatatgtcgcgactcgggctgaacggcggctggagcagtgacctcatgtgcggcaacttcgacctgaaaaccactgtaggcaaccagcttaacggtatcaccagtgggtttaaggacctgatgggtaacgtgattcagggggcgaccggggcggtcatgagcatgccggcgatggccattcagcgcgccaacccgggtctgtatgaaatgctcaccaacggggtgcttcaggcggggctcagttacgacaaagccctgctgaactgccagaatatgtcgaaaaaactcgccgattacactgtgggcagcaagtggcagcaggctgctgtatctgaggagtacaaggatatcgtggcgtccagcggcggggatgcggtctccagcgaccagcaattgcagaaggccaccggtgaagaaggtgtcacctgggtcggcggccagaagcgcggtggtaaggggcagcaggccatccagcccacccgggacctggcgaaagccggttataacatgatgaacagcctgccggtgaccagcaacagcagcgtgggctccgccagctgcaatggcacggcctgtcagcgatggccatcgtccgatgatgcagccgccgcggtggtgaaagtgctgggtgaccgctccatccgtacctgccgtgagaccagtgaatgcaccagtggtggcacggacaatcagcccgggagtactgttgccggcaccggtttctcgccggtgctggaggatgcaacgaaaaccaacctggaacaactggataagctggtcggcggccagatccagcccaccgcggaaaatctgggggcgctcaaaaccggcagtctggtggtgacacgcggcgtcattcagtcgctgcgcgatgaccccgataaagccgctctggtgcagcgtctggcgggtgagctggcgatggccgacaccgtcgagaccgcgctcaccatgcgccgcatgctgaccaccggtgagtctgaaccgaatgccgccgagcagccagaggcgattgccgagggtgaccgccgcatcgatgccctggaccgggaactgaatgccctgcgtaacgagatggagctgcgtaaggccatcagtaacaacagcctgctcaccacgctggaacgtcagggtgcccgtaaccaggataaccagctgcagcagaaagccggcaaccaggaccagggcttcagccagatgaaccagacgcaatcctcaggagcaaagtga

SEQ ID NO: 272398 - DNA, 339 bp, Klebsiella pneumoniae; identical to SEQ ID NO: 150749

SEQ ID NO: 272399 - DNA, 1434 bp, Klebsiella pneumoniae
atgactgcgaacagttttctggagtattttctcatcctgttcggctgggtgatgaacaacgccatgtggaccatcctcggcagcacggggctgttcgccctgccgctggtctttaaggtgatgggtgtgtggctgaaggtccgggaggaaggggcagacgaaggcaacaaagggttgctggcactgccccgtatcgagcatgcgctttacgtgtcgtttgtggtgatgttgttctgctgcattccgctgctgccggtggatatcagtaccattaaattcgacagttcccgggcaaaacagtgcggtgtcagtgttcccacgccgcagaactccggttacagcggactggtgaacgactttgacggccgcacggctgaggtgcccatctggtggtatctgctgcacatgatttcgaaaggcaccacgcaggcgatgattgcgtccatcccgtgcggtacggagctgcgccagatgcggtttgacgtgcagaacacgaagctgcgtgacccggtattgctgcaggaggtgcaggattttgcgaaccagtgttactcgcgggcgtactttcgtctcaagaacagcaacagccagctcagcgatgctaccattaactcggtgggctggattggcagcgactattttctgaatacgtccggctattacgattattacaccgccaccacaccgaggggccagtggccttatgacagcacgcgcgacagcggttatccggataccgggcagggaggctatcccacctgtaaaacgtggtggtcagatggctcgtccgggctgcgcaagcgggtactggccagctttggtgacaacacgcgtaaggagatgcagcgatcattcccggggacgcagtgggaagaggtcgccctgcgctggctggtcagtccgcgtaatgccggcctctccggagacggaacgacgtatgccgtgggaagttctgataacgtgaccggcgtggtcggtaatatgacacgactgacgtccactatcgggctgggcctcaagcaggcggaagcgctgccgggatttgatgcgctgaaacaggcgcttccgatgattcaggcgctgctgcagatgatgattattacggtaataccggtcctgatgatgttcagtgcctatgagcccaaaacggtggtgacgatatcatttgcgctgtttgcgttgcagttcatcacgttctggtgggaactggccgggtggctcgatgaccgtctgatcaccatcctctacgataatatggcccagcagggactggccagttctgtaccttttgcgaattttatcagctcaaccaacgacggctggatcatgaatctggtgctgggaatgatgtatgtggttttcccggtgttctggattggcagtaagcgtcgtctcagcaccgtctggcagatcctgaaattcctgagaggataa

SEQ ID NO: 272400 - DNA, 1335 bp, Klebsiella pneumoniae
atggtgataccagtgaacgtaacaaaaacaaccgatcgtggctgggctattttcagcacaggtgcggctttagtgatcctgctgctggtcagcgtatggggatattcgcttatcagcgactggatgcagagacggacctggatgaacacctccgcgcaggtgtcccgcttcacgcaggccgtaaagagttataccgggcgttattacgatacgctgctcgccagtgccaccaccaccgcgccggtcattgtgacccccgctatgctgaaaaataccggttttctggagcagggcttcagtgagaccacccttgacggtcaggcttattccgctgcggtgatacgcaatgccaccaacaccgaccagctgcaggcgatgatttacacgcagaacggatctgcgctgccgtttctcgcgctgcgtcagatatcaatggatatctctgccggcatggggggctacatctggacgtccggtatcgccaccggtgcaatggggagctggactgttcctctcgcacagtttggtgtcagcagcacgcaggggcatattgccgccctgctgactgcggatgaactgggggtggcacgcggtgaaagtgaccggctttaccgtttttcggtcaccggtaagcccgatctcaacaccatgcataccagcatcgatatgggcggcaacaacctcaacaataccggaaccgtcaatgccgtaacggggacgttcagcggcaacgtgaccgccggtggcaatatgacggcaaacggcacggtaacgggacagaacgtcgctgcagggacaaatgtcaccgccggcaataccattacagccagtaacgatatccgttcgaataatggctggttcattactcgggacgggaaaggctggctggatgaaacacatggcggtggtttttatatgtccgataatgactgggtacgggttgttaataacaagaatatttacaccgccggtcaggttcgcggtggtagcgtacgggcagatggtcgtctgtccaccggtgaggttctgcagctcgatggggtgaacacagcgggtgcaacttgttcaccaaacgggcttgtaagccgtgatgcgtctggcgcaatactttcctgtcaatccggtgtgtggcgaaaaagcacagttgcactacagcgaaccacatggacagtatcaggaacgggtgagaattatggcgatgtgtgtcaggcatatattcagtcatccggaatgattaatgatgggtgggtagcttctggttctgatgcgtgtacggaggatggtgaatactgcacttacgataacgtccgttgttacgccgtccgtttgcagtga

SEQ ID NO: 272401 - DNA, 657 bp, Klebsiella pneumoniae
gtgacgctgctgacgctgagtatgccgtggccaacgcttggcatcctttttccccttagtctcggtttgtttaatgttatggcaatcctcgtccgtattaacctggtgatatcggggcaccggaacgggggcagttctcctgtgcgtccggcgatagtctggctgtatgccgctgctgtcagtgtcatgctgctggcgcctgcaccggcgatgctccgccttctgtcctttttcctcagcctgtttcttttcagaatgacgctgaccgatgcgctgacgggactgctcccccgcgaaatgacggtgagctgcctgactgcggggcttgctgccgcacttctgcacccggggtttacggaacatctcctttctgcggtcatcgcgatgttgatattcggcggctggcgatatggctcaacgaagattcaggggcgcgagtgtctggggcttggcgatgtgtggctggccggtgccattgccgcatggctcggtggagccagcgggctttatgccctgctgaccggtgtgatgttctttgtcctgtggcagttaacggtgcgtcgcatccgcgagggcgggccgatgggcccctggctgtgtgccggtgcgatgtcagtgacactgcttaaactttatcagccacttattacatggtga

SEQ ID NO: 272402 - DNA, 480 bp, Klebsiella pneumoniae
atgctgcgcctgacagttctcctgctgtttatcctgctcagcccccgcgcgggggcattctgctttgacgcagccggggcaaagtaccacatcgatccgctgctgattcaggccattgccaccggcgaaagcagtctgcgcccggggattacgaatgttaaccgcgataaaaagaccgggcgtgcgctcagtactgattacgggctgatgcaggtcaactcctcacacctcccggcgctgatggctcagggggttatccgcagcccgcaggatctgctgacccgtccctgtctcaatgtgcagattggcacctggattctggcgaaacattttcaggtatgcggtatcagctggaactgtctgggttcttacaacgccgggtttcgtcaggatcgccatgaaacgcgcgaatcctacgccaaccggatttatgccatttaccggcgccttttactgaaagagcggggggtaagactgtga

SEQ ID NO: 272403 - DNA, 597 bp, Klebsiella pneumoniae
atgtcatctcagacatcacattatcaccagcgccagccagaccggggctgggatatccttgagcacggcagcattgccctgtttacggttatcgtcatctgcattgtcggggcgcttgtctggagtctctctggcaaaaagtctgttgcggtggaaacctcaaatatccagaccgttgtgaccaatgcccagcagctcaagcagacccagggcgggtataactttaccagcggcaccaccatgaccggtacgctgattcagcagggaggcgcgccaaaagctggctggacgattcaggggacggccagttccggcacggggacgatgtggaacagctacggtggccaggttgtcatggcaccggtggcatcaaacggattcaataatggtttctccgtcaccacgcagaaagtgccgcaggccgactgtatctccattgccacccagctcggctccggtggcgcgttcagtgccatcagcatcaacagcaccgactacagcgacggtctggtcagcgccgaggatgccggcaaagcctgtaccgctgacaccggtatgacgggtaataacaccctggtcttcacgcacaacggctga

SEQ ID NO: 272404 - DNA, 1116 bp, Klebsiella pneumoniae
atgtcggttaagacccgtttttcgcctgagcgtgatatgtcgctggcggaaaagcttcggtatcgcctggtcagggcaacgtttaccggacagtatcgccagccgttttacgaaaccctgcgctttctgctggaaaaccgcaaagcactggaagaggcgctgaccatgattggtgaggtgcataccgactttggccggcgctggcacccctattatgaactggtgcaggactgccttgagggtgtgaaagacaaccgtgagggccgctccctgaaggatgtgctggctgcctgggcaccttatgaagaggcggcgcttatcagcgccggtatggaaacaggcaatattcccggtgcgctgatgcaggctgacaagctgattgtcgcccgccggcgcatccttggtcaggtggtttttgcctcggtctttccgtcagcgctggccctgctgagcgcggggctgctgctggccaacaacatggcactggtgcccaccctgagcaaaatgtctgaccctgcacgctggacaggtgcactcgggctgatgaacggggtggcacagtggaccgacaggtggggtgtgaccgcagcaggtgccacagtcgggggcgtcattctggcgttctggtcactgccgcgctggcgaggccggctgcgtcgtgttgccgattttctgatgccctggtcggtttaccaggatctacagggggcggttttcctgatgaatatcggggccctgctgggggccggcgtgcaggagcttaaggcgctgcagatcctcaacgagttcgctccgccctggctgcaggagcgtatcgaagcggcaatggagtgtatgagcgagggggactcgctgggcatggcgctgcgccagagcggttacgacttccccagccgcgaggcggtgaactacctctcgctgctggataagggtaacagcgccgggtcactcatcactaactatgccgaccgctggctcgaacaggcgctgacacgcgttgcccgtaaagcgaatgtcaccaaactcttttctctcgttctgattatgagtttcttcttactcatcctgctgatggtgatgcagattcaggacatgaacaccttcaacatacattaa

SEQ ID NO: 272405 - DNA, 1575 bp, Klebsiella pneumoniae
atgacgcccgataaagacattatggattttgtgtttgccgaacagcatccgtccggcggcgtgacgctgcttatcgacggtaaccggcgaaaagaaccggccatacagcgctgggtgatggatgtcacccgcgagtatccgacggcaaagaccgagtttgtgacgctgagcgagctgaaccgccggcgcgaagtggcagagcgtcaggggctggccctgtcccggagcgtcagtgaaagtgatctgaacagtcgcgatatcagcgtatcgcaggataaggtcatcagttatatgaaactgggaaacgagttcagtgcgtctgatatccatattgaaatcagcgccgaccgtaagctcagcatcgtccagttgcgcattcacggcgagctggaagtggtggatgaagtgaaagatgtggaggggatgacactggcctccacctcctatctttccatgtgcgacgtgcgcgagcagtcattttttgccggccgcgagcagtcagggcgcatcgatgcgaagtttgcccgccgtgccggtctgtatggcgcccgctatgaacaccgtcccacgcccgacgggcttattgtggtcatgcgactcattcctgatgacggcgatagcattcccgggctgccgcagctgggttttctgccggagcagataaagcttattatgcagatccttcgactgccggaaggcatggtgctgctgaccgggcctaccggttccggcaaaagcgccacgctgcgtgtgttcagcgatatatggctgaaactgaccggggggaaaaagcgcctgctgacgctggaaaacccgccggagggacgtattcccggcgccatccagacccccgtcatgccggctgacaactcgccggaagccatcagccgcgcctggagtaacgccaatgcctccgcgctgcgtctcgatccggatgccatcctgaacggcgaaatgcgtgacctgtattccctcatcgccgccatttacgccagtgaaaccggccacgcgctgttctccaccctgcacacccagagcgccatcggcgccctgcgccgtatggagcacttcggcgttgaccgccaccttctggcggatgcgtcactggtcaccggcctgataggccagcgtctggtgccgctgttgtgtgaaaaatgccggattccctggcaggtgaaagcgtctgaactcgacggcgaaacccgcgcgcgcctggaaaaatactgcaccgtggagggggtgtgcgacaccggcaagctcttcttccgtaatcacgagggctgttctcactgccagaaaacggtgccgctgaccggtcgcatcgtcagtcgcggcgtaaccggtcgcacggccattgccgaggtggtccgcacagatgcccgactgatgcagatctggttgtctcacggcccggccgttgcccgtcagtactgggtaaaccaggggggcatcacccgacgtatgcatctgctgcgttatctcgcgcaggggcgcgttgatccgctggaaggcgatcttatctgtccgctggacgaagacgacatcatgcagtgtgaggtgccatatgtcggttaa

SEQ ID NO: 272406 - DNA, 498 bp, Klebsiella pneumoniae
atgcgcagaattaatcccgcccggacggggctgctgctgtccgttctgctcagcgggcccgcgctgtcagccaccaccgccgatgcgctgccaccgaacgtcaccctcggggaactggaagccgcacaggccaggaacctgattctggagcagaaagtccagaccgcccgtctggaacagcagctgcgcgaaagccagtccgggcagagcaccgaccgtaattatctggcgacatccctgcaaccgtcagccccgctcatgacgcaacccgtcccgtcacaaacggccgcgacgtctggcacggagaagcgtgccggcagtgtgcgcctgcaggagatttacggtcgcggcacacagctgcgcgcccgcattgtgctgccggacgggggcgtcaccgaggtggcgaaaggtgaccagatccccggcactgctaaacgggtcacggaggtcacgtccacgctcgtgcgcctcagtgacaattctgaactttccttctga

SEQ ID NO: 272407 - DNA, 1281 bp, Klebsiella pneumoniae
atgtcatcacagaaaaaaacagcacgccgcaccggtattcgtctcacgcaccaccggcgcgactggatggccggtcttcactgggcgccgcagcacagcgcactcagggttcgtctgcggggcagggcctcgccggacacccactgcgtgacggccggcagaggcagcgcttccatggcgggcgttgtctccccgggacgcgtgcgtcaccgcctttatgcccttgccgtggcttttcagctgtccgaaggcggtaatgcctggggtatttaccgtctgagccgcgatgaagacctgtgggtgttctttgccgccagtggggggcagctttccgtgatggccgacgtgaccggcacgcgggcattcattgagtcagccgcacagaattttctgcgctttaacgatgccgatgcgccgggcctgcgctgtgcggccacggctgaggatggccgcgatgccaccacgctcacggacaggctgagtggtgcacagctcaggcgctgccgcctgcgaaaacgcctggcaccgatgtcgctcatcctgccggctgtcgtgctcaccctggcgacggctgctggcgtttactggcacgataccgtgcagcagcaggcagaccgggataaggcgatggaggcttctcgctcccgtgtggcgccgaaaaacgataaacctgccctcccggcccgtgcaccgcacccgtgggcctcacagcctccggtgtcagtgctgctcagcaactgctggctgacgcgggagccggtctttgcctcggtggccggctggcgttttaccgacggtgagtgtgtgccggaaggactgcggctgcgctttgtcgccacccccggctcaacagtggcagacttctcccgccgcgcccgtgaactgctggggcatgcggccgtttttaacctgcaggaaggcgggaaaaatggtgatgttttcattccattccgtaaatacctcgcaggcgagtacaccgatgaagcgctgccgggtgccgaggcgcaactgatgcggtttatctctcacctgcagcgccgcaacctggacgtgaaattcacggaggtgaagccgcctgccgtcgcgccgggtcaggaaaaaaacacgcccgtccaggactggcgggaattcaccttctccgtcagctcgcgtctgcagcctgagcgcctgctgcaggattttgatgccgccgggcttcgcctgaccagcgtgtccatcaccatgagcccgcaggggcagttcggatacaccatgaaggggagcatttatgcgcagaattaa

SEQ ID NO: 272408 - DNA, 1674 bp, Klebsiella pneumoniae
atgccgcgtttacctttctgcctgacagcgctggccgccgcgctggcgctgtcatcatgttcgctgaatgaaatcagcaaaatggacaaggaggcctcggggcaggccgataccgctcagcgcgtactgcagagtcgccagaccctgactcagcccaccgttgtctggtccgataaaccctgggtgaacctgcagccggtcacgccggtcatctccacgccggatgagaagaacctgcccgcctgccagattacgattaaccggccggaggggatttcactgccggaactggggcagcgtatcaccgcgctctgcggcatccgcgtttccatcacgccggatgcctttgccgcactgagcagcatttccaccggcagcgtggtgacgtcgcagatgaacggtcagttgccggcaccggatgataatggccgcgtacctttgtcacagatgggcaccacgtctgcgcagcccgtctccgttcagtcatctccttcgcttatccggggccttaaatatcagggcgatatccgcgggctgctggatatggcagcgagtggtctgggactgtcatggcgcagcgacagcagcggcgtgtatttctaccagcaggatacgcgtacctttcagctcgtcatcctcaatacgaaggtgaacagcagtgcctccatcaactccggctccggtaaccagctcggcagcggtggcggtacatccggggggaccaccggcgacatcagctcgaaccagaagaccgactatggcatgaacagcgacctgtacgatgacatcaaaaaaacggttgagcagatggtgacgccaaaatccggccgcttctggctgtcgtctgccaccggtacgctcagcgtaacggatacacccgatgttctgaatcgtatcggtcgctatatcgaataccagaacaaagttctgagccgtcaggtccagcttaatatccagattgtcagcgtcaaccagacgcgtaacgagcagatgggactggactggggactggtctataaatcgctgcagaacgtgggtgccagcctgaccggttcaatggcgaacgcctcctcatccgccgccagcgccggtatctccattcttgatacggccagcggcaatgctgctaaattctccggctccagcctgctcattcatgccctgtctgagcagggcaacgtcagcatggcgctgaaccagaccgacccgaccgccaacctgacgccggtggcctatcagctctccaaatccacagggatgctgaccagctccagttcgacggccaccgccaacgtgggggtgacgtcaacgatgaccacgacaaacgtcaccaccggtctgttcatgaccatgctgcccttcattcaggaaaacggtgatgtgcagctgcagtttgccttcagttataccagcccgccggatatcaaaagctttgtcagccgggacggtaatacccgcaatgataccgcagacacctctaccgaagggctcgcccgtaaggtcaacctgcgctcgggccagacgctggtcctgaccggttctgaacagcagaacatctcggcggataagcagggcacctttacgccgggcaactttatcctgggcggcggtcagaccggctcgcggggccgtaccacgctcgtcatcatgatcacccctgttctgctgaggtaa

SEQ ID NO: 272409 - DNA, 444 bp, Klebsiella pneumoniae
atgggctatgcgctgcccgtctttgttttctgtctggtcattgcgctgatggccggtgatgcgcagcgtcactccgctgaacacgtccggctgtcgctgcagcagaccctgcctgaccagcttgccaccgacatgctgcgcactgcggatgcggtgaacaactggcgccatggccggacggtcgctgatggcacggtgacacctgcacaggccggcatcgtccccgcgcctgacagccgtattcagaccgtgattcaggggggacgcctctgggtctgggtgcccgccactgatggcgtgtatgcggcgctgcgtacacagtccgtgacctcggaactggcgctgaccgtcagcgacgggcggctgcggatggcggacggcaccgatatgaacctgcccctgccgtccggcgtgacggatggcagcattgtttacctcaactaa

SEQ ID NO: 272410 - DNA, 1287 bp, Klebsiella pneumoniae
atggcagtaccttccagacgtgtggcaacgggcgctgccctcctcgcctgttcagttatacaggcgggctgcagcagcgccgtttctgatcccgcgccctttgcaaacggccgctatcagcagcccacccgcttcgatgatatttaccgcaaccgggcccccgacgtggttcgctatgaccgttatacgctggtcagcacgcgcccggacgatgcacagcgcgatccactcaatcagattgtcgatatcaccatgccggcgcaactggtcaaaacggtcggtgagggctttcgctatctgctgctggagtcaggatattcactgtgctcagccacaacctccgcatttttagaacttcttagccgtccactgccggccgttcagcgtgatatcggtccggtccggctcagtgaagccctgcagattgtggccggcccggcctggcgactgaaggtggatgatgttaaccgtgaaatttgctttgaactgcgggaccagtatcgcagcttcgccgcaccgttgccggctccggtctcactggtgtcacagcatgcacccgtcagtctccccccggtcatacagccagcccggactggcggggccgccggcactgtcaatgctgtgccgcgtaatccctttaccggtgatacgagtatcaacagcaccccgggcaccgtgcaaaaaccggtacttacggcgcagaaccagtccgtcccgtcaccggtactgacagtggcgaagacacctgcagcacagaagtctgctgcgctgtcgccagccgggcgcccgccggtgccaccacctgcagttgcaccgaaagcagcctcatctcagaaaacccctgttacagccgttcatccggttaccgtacagccagctacagtgaacgctgcccggcagactgtgcccgtccggcccgtcacctcactgccgccggctccccccgtctccggtcaggccgcttcttcatatataccgggagcgccggtcactcctccgccagttggccagacgtggcgcgccgaaccgggttccacactgaaagagaccctgacgggctgggcatcaagggcgacgtgcagcaatggcggaaactgggtggtcatctggccggtatcactggattaccgcattgatgcgcctctggtgtttcacggcaacttcgaatccgtcctggtacaggtctttgacctctaccgcaaagcggaaaaaccgctgtttgccgaggctaaccgcattcagtgcctgatttcggtgagcgataccccgacgggcggagggcactga

SEQ ID NO: 272411 - DNA, 483 bp, Klebsiella pneumoniae
atggaaataaatgtcactgcgcctgctttactgacagaggagcatgttcttcatccgttcgattgcgggaatgcggtacttgatgactggcttcgccggcgtgcgttgaagaatcagcatcttaatgcttcccgtacattcgtcatctgtcctgaaggtactgcgcgtgtagtgggttattattccctcgcgacgggctcagtaagtcatgtcgacttgagtcgtagtctgcgacagaatatgcccgatcccgtaccggttgttttgctgggccgccttgcagtcgatgtatccactcagggcaataacttcgggaaatggttgctgaatgatgctgtgatgcgcgtatcgaatctggcggatcaggtcggcatcaaggctatcatggtgcatgcaattgatgagcgggctaaagcgttctatgaatactttggttttgtgcagtcaccggttgcggctaacacgcttttctacaaaatatga

SEQ ID NO: 272412 - DNA, 285 bp, Klebsiella pneumoniae; identical to SEQ ID NO: 150786

SEQ ID NO: 272413 - DNA, 501 bp, Klebsiella pneumoniae
atgtccgcacgcggcgtcaacaaagtcatcctggtcggtcatctcggtcaggaccctgaagttcgtttcatgcctgacagtacggccgtgaccacgctttctgtggccacgtcggaaacctggcgtgataaacagaccggtgaaaaccgtgaaaataccgaatggcatcgtgtcgtgctgtttggcaagctggccgaagtggccggtgaatacctgagaaagggttcacaggtgtatatcgaaggtcagttgcgcacccgcaagtggaccgataccaatggtatcgaacgctggacgacagaagtccgtgtgggcgttaacggaacgatgcagatgctgggcggtggccgtaataacagcaccaacaccagtggaaataatgcgcagtcaggtcagcagggcggctggggccagcctcagcaaccgcagcagacaccgtcagcgccacaaaatccgcaaaatgaacctccgatggattttgacgatgatataccgttctga

SEQ ID NO: 272414 - DNA, 492 bp, Klebsiella pneumoniae
atgactgcaactaccactacccctgcttcaaccggctctgcttctgcctcccagaaaaaagagtttttcaacctcaacgtcaatggtatcgggtatctcagctcgatacgccgtgtacagggtggtaatggtgaattcacctgcgccgttatcaatgccctcaccggtccgacagacaatgcgtcttatacccgtttcgatgtcaccatcgcgggtgcggagaccaccaaactcatcaaccgctgtcagaaagccgttgatgaagaagaaaaagtgctgattggctttgtgctgagcgggctgaaagccgatgtgtttaccctgcagacgggtgatcacgccggtgaaagtcgcccttccctgaaagcccgcctgattaaggtggagtttatcaagaaaggtcaggacgtcgtttatcaggcacccaatgcttcccagacgccggaatccggttcatcggctcagaaagagtacgatccgaattcgttctaa

SEQ ID NO: 272415 - DNA, 2013 bp, Klebsiella pneumoniae
atgcggctatatatctgtgaaaaaccctcgcaggggcgcgatctggccggggttctcggtgccacccggcgcggtgacggctttctgaccggcaacggagtcaccgtcacctgggcagtggggcacctgctggaaaccgcaccgcccgaggcgtacggtcagcaatacggtaaaccgtggtcactttcggcactgccgatcctgcctgccccctggcaggttgtggtcaaaaaagagacgcaggatcagttcaaagtcatcgagcggctgctgcgacaggttgacgatgtggttattgccactgatgcagatcgggagggggaggtcattgcgcgtgagctactggaatactgccgctgggaaggtccggtgcagcggctctggctgtctgcgctggatgaactcagtatccgcgcggcgcttcaggacctgcgtcccggtcaggccacgctcgggatgtatcacgccggactggggcgtgcccgggccgactggctgataggtatgaacctctcccgtctttataccctgcgcgcagcggagtccggttttgatggcgtggtctccgtggggcgtgttcagacgccaacgctggcgctggttgtccgacgggaccgggaaatcgcagcatttgtgccgaaaccgttctggcaggttaaagcgcttatttccgccggtgacctcacctttccggcgcagtgggtgccggcgaaggtgtataccgacgaggaaaagcgctgtgttcaccagaacatcgcgcagcaggtggcacagctctgccggcagacaggtcacgccgtggtgaccgaatgtgacactaagcgtgaaaaagccgccgcgccactggcgttttccctcgggtccctgcagcaggcctgtggcaggctgtgggatatgtccccgcagcaggtgcttgatactgcccagagcctgtatgaaaagcacaaggccacgacctacccccgtaccgactgcggttacctgccggaatcgatgcgggaggagatttacggtgtgcttgatgccatcggccgtaccgacccggaatgtgcgccggtgctggctcgcctcgacagaacatttgtctcgcgcatctggaacgacaaaaaaattacggcacaccacggcattatccccacccgcaatgcgtttcagctgtccgcgctgacggagaccgagcgtaacgtctatatgctcatccgccgtaactatctggcccagttcctccccctgcatgagtccgatttcacacggctgcagttcgacactggcgggcagctgttccgtgccaccgggcgaacggaggtgataaagggctggaaggttctgtttgagaacgctggtgataatgaagttgatgacggcgatgaagcagacattgccctgccgccgctggcgcagaatgaccgctgcgcggtgacgggggctgaggtggtgcaactgatgacccgtccgccggcgcactatacctttgccacgctgattggcgccatgatgaacgcggcagcatttgtcaccgacgtcgcgctgcgcaaggtgctgaaagacaacgcgggactgggcaccgaagccacccgcgccggtattgttgagcaactgctgaaccgtcactttatcgtgcgtaaaggcagtaaaatcatggcgaccgaactgggtgccgatgtgattgatgccctgccgccgcaactgaccgaaccgggcatgacggcgctgtgggaacaggcgctggatgaggtcgccgccgggcgtatgtcactcgacgacttcctgcagcggcagactggctggacgcgtaacctggtcagtcagggcacacagcagcaggtgcgtatccgggttccgcccacgcccgcctgcccgctctgcgggggaaaaacccgtctgcgcaggggagagaaaggggaattctggagctgccagcgctggccggaatgcaaaggtgtcatcaacatcgggggcaccagaaagaaacgaccgcgcagggctaagtctcctgaatcaaagaagaattaa

SEQ ID NO: 272416 - DNA, 723 bp, Klebsiella pneumoniae
atggcagataaacaggtaacaaagacaggctcgcttcagtcagaaatgacaattgcgctccataccaattatgcaattggtttgtggctgggtcgcaaacgggagaaacaggaagacaatactcctgttaaacacggcatcatcgggatgcctcagttcttcgtgcgtgcaacactgattaaccaggactccctgaataataatccgtgggcagatgaagccatgtatcgtctggaggaaaagctgagatctgcaactgagacgatgaccgggcttattaagcaactggatgaagagatgagtatgcttccagcaggtattacgctgacagaagttacttcggtcgaaccactcgatattcatgtgtttacgcgtactcctctgggataccggtgtgtgtttctgctggtcgggtttgaccagtttgccaagaaggttcttcaggcgtcacattacgggctgattacccgtaatggccgggataattatctcagtgaaggtgggagacttttgcgtcagatttacgggacggttctttcttaccgcagggtggatgcgacacgcctggacgcagcagagaataatgaagtctggcagaaggcctgtcaggaggcgggtgagcccgatcgtgccgtgctgctcggagaaaaacgttcagcattttcccctcccgttaatgaagcgagcgtgaacctgctgcgcctgcgttatcagacagtctga

SEQ ID NO: 272417 - DNA, 1239 bp, Klebsiella pneumoniae
atgaccattcccgccgacagcatcgtggcgcacacgctcgccagaatgcagcagaatcttgagcggcgcaccgataccggcgatgtcagccaggagcgcagcgggctgctgttcatgggcaacgtgcacgatgcgttcccgcgcaggctgtttctggatacacgcctttcaccgctggataaaaccgcctgggtaatgataaggctttatgcccagcagaatgagggcgccatcttcccgacctacgatgagctgcaggttcagcttgcctccgcgcattcagagaaggcatcgagggatacggtcagccgcgtcctgctgatgctgcgcctgaccggctggctcagcctgtgtaagcgggtacgcgatgaccgcgggcgtgtgcggggcaacatttacgcgcagcatgacgagccgctgggttaccgtgacgccgaaaccttcgatccgggctggcttaagctggttgaagagagttgccttagccgtaataaagctgtccgcatgaccgcgctggccgtggtgaatgacatacttcaggaccccggaatgcgtcaccgtcacagtcgcctggcccttatcgaaagtcgcctgagcgcgccgtccacacccaggcagatggtcagtcatcgccgggcagtgaaccggagtccggaatccggactcagtcaaaaaagcaccaaaaacatcccggaatcactgagtccggaaaacggactcagtaccccgtcagtggataaaacacagagtccggaatcaggactcagtctgaaatcaacgagttacaccggagtccggaatccggactgtaacgtacgttctttcacacagagtgtgaataaaaaaacgtacgtaccgggcggggaacattttctgcctgacgattttgtgaacggactgaacagcgatgaccggcagatgctgaccacacagatggcctcactgcctgaggcggtggcaaagacgctggctgacatgctgcgtgagcaactgcggcttggcaggctgaataacccggtgggctggctgttcacgatgctgcggcgtgcccgcagcggtgagctgaacctgccggaagcagcagcacctgcccctgccggctccggcagcaacaatccaccgacaaccggtacgcgtgctgtaccggcggcgatcatccccgtgcagcctgccagacggccttcccgcgatgaggtcagggcgatgatcgagagcatacgacagaatgttggcagataa

SEQ ID NO: 272418 - DNA, 231 bp, Klebsiella pneumoniae
atggaaatgggtgatttctccccccggcagcaggtgtcaccggcagtacgccgccgcgcgcagcagctgttccgcgctgcctgcggtggacagaaggtgttccgccggctgaccatgaacggctacctcaagatagacgtggggccgttctggcgcattctcagtaaggatggcggccggcagtggtggctgatggaccatgagacctacaaccgtgaaatacggcggtaa

SEQ ID NO: 272419 - DNA, 600 bp, Klebsiella pneumoniae
gtgagccagcataatctttctcaggccaccacggccattctgtcctcactgctgatggacgtcaaaaacggcaatatccgccgctgtgagtcactgggtatgtcggtcgaggaaatccgtgcgctgagtcatctgagccttgatgaactgcattacctcagccagtcacatgtttccgttctcgatgtcaccctgaaccatgaaaacttctggctgatgctgaatcaggcccgcaatgagcagaagcgcttcatgatgattgaccgcgcactggagctcggcggttcgatggagctgattgaccggtattttggtctgtctccttcggaggtgagcgcccgccgccgtctgatgggcattgaatcccggcagggccgaacccaggccctgacagagccacaggacgccgcgctctgggccgagtggaaagcggcagggttgtcatcaccggactcccatcaggcgctggaggcgatgatgctggcggccgagcaactgggtctttcactgacggccgtatggagccgggtctgccagtggtgtcgggaggcgaatgccgcaggccgccgggctgaaatacctgtgcgtaaggaggcgtga

SEQ ID NO: 272420 - DNA, 744 bp, Klebsiella pneumoniae; identical to SEQ ID NO: 150779

SEQ ID NO: 272421 - DNA, 258 bp, Klebsiella pneumoniae; identical to SEQ ID NO: 150778

SEQ ID NO: 272422 - DNA, 1707 bp, Klebsiella pneumoniae
atgagcaacgtccgtaatcttaatcttggcgcggccatgctgcagcgcggcaaaaccccggctcagggtgatgcggttcccgccgcagtccccctgccagtcagcgagatggcaatggtcctcactcttgaccaactgcgccctaatccggacaacccccgcaagagccgtaacccacatttcgatgaaatcaaggcttccatcagggcctgtgggttggtccaggtaccgaaagtgacacgcgatccggacggcgaagacgtttacattttcagcgacgggggtaacacccggtatcagatcctctgcgaactgtggcaggagactggtgatgagcgtttctatcgcgttcacactatttttaaaccctggccaggacggttgaaatgtctggtcgggcacttggcagaaaacgaagtcagaggagacctgagttacatagataaagcgtttggtgtacacagtgccagagccattcaggaagagctgatgggacgtccagtgactctgcgagaactatccgatcttttaaaccttgaaggctatcctattgactattcaaccatcagtaggatggaggataccataaaatatctctggccctgcatcccgaacttgctcaacagtggtctggcacgtctgcaggtgctgtcactgctgcgcattcgttcccaggcaggaaaggtctggtcgcagttcgcacatgagtcctccccgcagtgttcgttcgatcaggtctttgaggcgagttgccaggggtttgacgatcctgacagttatgcatatgagacattccgtgatgagtttatcggtcagctggttaaggcgctgccacatcccagcctgaactatgaccgctggatgattgaactggacccccgcgagcagaaacgccgtgagcagtttggtgagccgcctccgctgcccgtactgacgccaccacaggaaaaagcggcaggtcgtgaacccccggagccgcaggtgactgtcctgcctccggatactgcatctgaaacgccggtcacgggactgcgcagcggcacgctgaccacacccggacgccctgagccggcaccggaactgcccgcagatgctgaattgcctgtgaacgcactgatgaccgccggcagtgaaccacgtcgtgaagtacagaatgatctgtttggcggacggccggtcatttctggcgaaacggctgaccctgacagcatttctctccctgatttcagcccggacacactgatgtcagcatttggcgaggagaatgcgtccccggctgcgtccgtcagttcggtcgcctttgccgcaaccggacttgagcccgtcagtgatatctggcacatcccggccctccaggatgatattgagcacctgcaggatatggcttaccggcttgtcttcgagattgctgaggcgatgggctgcgcggacaatgtgcgggaggataaaaaccctcagtcagcaggctttgccgtctccgaaaccggcagcgaatttgtcctcttcctggcgggcctgtccggctcgctccccaacaggcagttcaatatgtttatgttctgcctgaatttcttcggttctcagtcaccggctgacatggccgtattcgacgatatcacggtcgtgaaaacaatgcgccttatccgcgttatccgccgtctgcgtgagctgcagcgactcgctgcgaaaggaggggaaaatgtctga

SEQ ID NO: 272423 - DNA, 1293 bp, Klebsiella pneumoniae
atgctggataacgaccgctgggatgaagtggcactccgtctgagtgctgatgattttttccagaaagtccataaagttatctatcaggaaatgacccgtctggttgcggcaggaaagccgcttgacctgattacgctctcggagagtatcgaaagtcgcggtaaagatgcccttgaacaactaggtggttttgcctacctggctgagctcagtaaaaacaccccgagtgcggcaaatatcgttgcgtactgtgacattgtggccagaaccagccgggcaaggcaactggcctccattggcgctgaaatcaccgaatcagtcaggacacctggcaccgatattgacagggtgatggagaccgccgagcagaaaattacccgtctggcagagcgcgctgaaccagagcagggcgtcacgctgcttgaagggatggaaaggctgctgccagaactggagcggcgatgcaatgtgcctgacggtattaccggtacgccaacaggttttgaagaacttgatgccatgaccagtggtctccaggcgggtgacctggtacttattgcggctcgtccctcgatggggaaaacagcgcttctcattagcctgctactgaactcattgatgaaaaaatccggctcaaaggggcagctttacagtatggagcaacccaccgaacagatcctgatgcgtatgctcgcgtcgcttggcagtattgacctcacgcatcttaaaagcgggctgatggatgatgaggactgggctcgtgcaacagacgcgtcggcattgctgatgggtgatctcaacgacagtctcatcattgatgataccggctcactgacgccggcgatgctgcgtatccgcgcccggcgcaatgcccgccgctacggtcacccgtcgattatcgggctcgattacctgcaactgatgcggtgcccggatcaggaaaaccgcacgcaggaaattgcggaaatatccaggtcactaaaagcgctggccaaagagatgatgtgtccggtggtggcactgtcacagctgaaccgccagcttgaaagccgcgcggataagcgccccaacaacggtgatttacgtgattccggtgccctggagcaggacgctgacgtcatcgtctttatttatcgcgatgaggtctatcacgaaaacaccgaggataaagggattgctgaaatcattatcagtaaacagcgccagggacccacggggacgatccgcctgcagtatgaaggtcgttttacccgtttttctgacgtcgcgggccgaccggggaggagcgcatga

SEQ ID NO: 272424 - DNA, 885 bp, Klebsiella pneumoniae; identical to SEQ ID NO: 150775

SEQ ID NO: 272425 - DNA, 567 bp, Klebsiella pneumoniae; identical to SEQ ID NO: 247093

SEQ ID NO: 272426 - DNA, 894 bp, Klebsiella pneumoniae
atgagtgcagcagcaaaaactaaaaattacgacgtggttcctaccagcgtccgccggatgacgaagttacataccccggcaggggatattaaattcacgcctctgatgaaactgatctactcgtacatatggacattccaggggaatgagaacaggggcaatgatgatccgattcataccaatactaacgtcatcgcctgggaaatgggaatatccgaaagggcgctgatcgacgcgctcaatgcgctggatgctgcgagagtggtgataaagggaaccgtcaaggttcgcggtaacgtcaactccagcaattacgtagcgatcccgcccgcttccgttgttacattgggtgtcactccgccctcaccaggcaaacggaaggtgatcaaaaagggcaaaaaaaccgatgaaaaggccgcagaggctgcaacgcaggcagaacaggcaccatcaactgctacaccgtccattgatgcgcccgcaggcaagcctgctgatcagagtcctgacttgcccgctggcactgccccggttgttgctgaacagcgctatagcgtggaatctgacaataacggcagcgatgatcgcactactggtaatcatgaggtgaagccgcaggagccggagatttttgatgattacggggttgttactgaggcatttattaacagcctgacaggagacggtgctcctcgccgtaacgatgacggcacattaaaaagctatgcgtacacttaccgtttggctcgtgcatacgatgcacatcgttgtggaaaaccagatgctgaaataatggattgtcttgatacctggatgaagcaggcccaaccttggcatattccgcagcacttgctaccaaagcagacagcagacagcagagccgtaacaccttaa

SEQ ID NO: 272427 - DNA, 393 bp, Klebsiella pneumoniae
atgaaaacatcattgcaaaaagtcagagacggcattgccgccgtgcttctggggaaaactccagagcaactggcggacgaacaacgccgggacgcagtaaaaaacgccgttggtcgcttccttgagtccaatccggattgggaaccaacaacagctccaatagtcgcgccagttgccaacaccaaacaaaaggccaaacgtatcatgaaggctctcggcgctggggcaggtgtctttactcctcatgttgtggacgaagcggcgttagctcgtgctcgcgccaaatgccgggagatagtcgccgccgatccggctgcgtactcctacgtgatcccgtcagagccactgcctgaccaggataaaccgggcggggcgggtataatacagggctaa

SEQ ID NO: 272428 - DNA, 210 bp, Klebsiella pneumoniae
atgaggttaaatctattaggtgtcggcaacgcgccgctgctgtcggttaaggtgaagacgctggacgatgctggcctgttaaacatctcagcgctcgccagggctttaggggcaaagaggtcaacgttcttaagcaaggttgccagcgtaggccttgaggccgcgatactgcactacgcgacacagcaaaaattgaaacatgtaaactaa

SEQ ID NO: 272429 - DNA, 321 bp, Klebsiella pneumoniae
atggccgtaccttacaatgtgaaaaattttcatatcgcggaaactaccgattctgacgatatcaagcgcgtccatttagacgctcatttcaccaactctaacggacaagatatctctaaggattattggcttgttcatgatacccgtgagcctaccaacgcaggtattatcaatgctataagcgcaggctttaactatgcaatttctaacaatgccaaggttaaagtatccgtagattcagaccggacttacctgtggttttatcttccttccgagcaaggagaagacctccgtcagttcagcggcagagagaataaataa

SEQ ID NO: 272430 - DNA, 288 bp, Klebsiella pneumoniae
ttgccagcccagggggcccgtttccccgccgactccattagtcttaattcccataaatggcgcagtttccgtcacaccaccacagggacgaatatcattgataaaatcaaagatagttttcttataaatagcggcagagtcaaactgatacacttgcgaccgggccaacgcgacaatgtctccgccataggcgaaacgttcgcgggcacaatccccgaagaccgaatgaatgttattcagtttggttcttttagcaacctcaaagagcttatttatgtaaggatctga

SEQ ID NO: 272431 - DNA, 192 bp, Klebsiella pneumoniae; identical to SEQ ID NO: 234415

SEQ ID NO: 272432 - DNA, 192 bp, Klebsiella pneumoniae; identical to SEQ ID NO: 226507

SEQ ID NO: 272433 - DNA, 192 bp, Klebsiella pneumoniae; identical to SEQ ID NO: 226507

SEQ ID NO: 272434 - DNA, 378 bp, Klebsiella pneumoniae; identical to SEQ ID NO: 234431

SEQ ID NO: 272435 - DNA, 1278 bp, Klebsiella pneumoniae; identical to SEQ ID NO: 203622

SEQ ID NO: 272436 - DNA, 510 bp, Klebsiella pneumoniae
atgaaacgtagtagtgataaagatatagcttttttattgtttatattcgctattttggccttgattactatttcatcctatataattacctttcatcaccatactatatctgaatcaccgtctgattggggggtatttggtgattatattggtggagtattaaaccctctaatatcttttgtgacattgtgctttttaataaaaacctatttttcacagagggctgaactgaggaacaatgaagagcagaacgtaaagcaattaagaatacaagtattgcaaagtaaaataagtgcatcgtatgaacttttagcagtatatagacatgaacttgatagattaatagaaaatagaaaatcacaaagaacaggaaccgccaattattttataagcattgaaggcgaacgttacttagacacacaagtatatttagatagagtaataagaaaattaaggggtgaacttgaaaatattagaaggtataaatcagagatagatcaaataatataa

SEQ ID NO: 272437 - DNA, 1761 bp, Klebsiella pneumoniae
atgtcgagagatgatattaatagtgacacaagagccgttgggttagcaaggttagcaaacagcttagaagaaacgtatggttcatttataaatatggataatacgaattccaaaggtgaggcaagacgtgaagtcctcgttacaagatgtattgctgcacatgctgttcgcatgtttggagatgaaatagatccagaaattgcagcaaaagcggtatgtgatggtagtgatgacggcggaatagatgcggtatacgttaatcaaagttctaaaaagctaattcttgttcaatctaaatatattaaagatgggaatggatcagtaaatataaaagattttgggcggtttaaagatgcatgtgcaaaagtaatagccaacgatctaaatacgttcaacgcaaggtttcttgaacataaagaatccattactaccgcaataactagcagtagttataagtgtatttgtgtattgatttattcaggtactaaagaactaagccaggaagttaaggaggaaattgatttttgggagaaaagccaaaataaagcgctccttttcagggacctggagtctagagatgaatatacgatctttttcgaaacgccgaatgtttcagatatttctacaagtctgagttctcaatctaccggctcaattgacattaataatgttatattagagtcctatggggaaatttctgaaccatacggagcaatctatggaacaatttctgcacgagtagtttatgattggtggaggaaatataaatatgcacttttcgagaaaaatataagaagtgtgttaggtgattcttcttctgtgaatgctggtatcgtctctactatcgagaaaaatcctgagaatttctggtactacaataatggaataacagcaacatatgaagaagtggaagaaagcatatctaatgcgggaagttcaagaaagatagggatttttggatttaaaaaacttaatataatcaatggggctcaaactgtaagctctatcggttctgtattcgaaaacatcacagacgagaataaagacaaagttagagtgatgattcgattcattaatgctaaagatccaaattttctgggcgaagtcacaaagtacaataatactcaaaatagggttacaggtagagattttacgactcaaagagcagagcagcaaaaaatacaaaaagagatcagttttgtaggtggttatacatataaattactacgtcaagaagatgaaggaattacagaatccaatactattgatatagatgatgctttaaatgctttagtctgtatctctaagaaatctcaacttatagcggttttgaaatccaatagaggccggttttttgattctgtagagtcatctttgtacgatcaagttttcaatcccaaaaatccaccatcgggtatatatgttataaatgctgtaaatctttatcgagtttgttttgagatattaaaagatactatatctaaatcgactactatacaggaagaagattatgggaaaataccatcactgttaacacatggcaattacgtttttataagtatattaatggacaaggtaaaaccaacggcctcaaccaatggaataaatacgtatgacatgaataaaattaatctagatactgttaagttagctaaagatattttcgacttcattcagattaattatcctaatagctatttagcaaggtttttccaaaatagggaaaaggtagatcaaataattacgtatttcactgtgtga

SEQ ID NO: 272438 - DNA, 1458 bp, Klebsiella pneumoniae
atgatcgatacaaaaagtaatgatagcgaaatgaagtggaaatatatgaaattcaaaaatttatttgagtcatgtaccccaggatttaacgtcatcatcaagtcattaatgacgctcataagacacggtggtgatcctaagtcattagatacaagggatgaatctcttgaaaactttacattcctgttaagcggatggaaacgagcgcaaaaaataattgcagaagaattgattcgaaggatctctcatattgaacatttagagaaggaaaaaaaactagctcattcagacaaaaactatgaaaagaaaaaaaagcatatacaggacattcaaataaacaagttagaaataagaatattgcgaagatgcatcgattctattgtgtggacaatcttaagcaatgagcattcatctctcaggcgccttcctataaatggcactccggacaatttatcggaatttaatataaacaactcaatgagggtggctgatgaaataaattccaaccctatggcaattgctataatcaccgatattacaacatttatacacaccggtgatttactagcttttaatcctgatcaaggcatttcactgattgaaattaaaagcgggaaaaagaatatagagttttctaaggctgcaatattttcggtgaaaagcgaatgccctcaatttgacgaggaatacactaaagactttgataaaaaagacctaaatcattatcaacgaactaagcgtcaacttgtaagggcaaggaatgtagcagaaaccattaatacaggcaaagggtttgataactaccatcaatcaccagtcataatacaggatagaaactttaggccacatttttacactgataaaatcattaagttatggcatgaaatttacaacggtaaatcttgggccattactgatatcaatgaatgtttattcattggcgcatacaaaaatgccaacatgggattttgcgggtttaatggttggatggaggtttcagatatttcaggaactatttacaatattcttgatagcttttcagattacttatcacgtcctttctttagtctaaatctaccggacaaattactcctcgatattattaatagtgaatttattatcgttctgtgctttgatcacaagctgttttttcaaagagcccaaaaaaagcaccccgggctttatagcatattggattttccatcaaaaatggctgatacgaagaacatgctttcaattaatggaaaaggtattgcagtcaaagttgatggcatggataatttcatcgctaacggttatgaaaccagagctatttttgaccagcatgaaccagacagtctgatcgactggtcatacagaatgagtgacctaaaaaaggcaagtgataaaaataaacgaatattaaaaaaacaaagcaaaaaaaagataaaaagagcaagaaaaagaagccaaaaataa

SEQ ID NO: 272439 - DNA, 2502 bp, Klebsiella pneumoniae
atgattagccttatagagtatttatgtgaaagaatcaaaagcagttatgagtttaataattactataatagtctattaaaacagttagcttattcatttttcgagaagaataagcatgattttgtttttacggcacagcacgagaggcttctacatttcagtcaatttttttctaattccagtaatgaacataatagagctatcgccttaaaagtaatttcagcaataaatgaattgctccctaataataactatacaaaggctataactaaatccattcttacaaactttggattattttcagcggtaacttcgtttacagatccctctgtttctctctcaacttcatctgcactattaggtgatattcgtagggctattcaggctataccgaattcagaatattcatttactaatagacaatacgatatctataatgagatactaattaatgatttttttagtttttcagggccaacatcactgggtaaatcatttgttattaaaaattgtgccattgatttacttgataggtataatattattgtttttatcctacctacaaaagctttacttgaggaatatttagttgattttcgtgctatgttaaataagcgaggaattgataatgttaatatcactaaatccgtatcaggtgtgaaaccaggtgaaaagaatttaatgatatttactcaagagagatataataattttctttatgaattggattatagcgatattaatgttgatgttcttttcatcgatgaagcacacaagttagctgataaaagtagtaaaagatcaatgactttatataaagtgatttctacctcgttagggaaatatccgagcctgaaactcattttttctagtcctgttatttctaaccctgatatgttttttaaatattttaatgttaatggtaaaagtttaagtatagcggaaagtccagttgctcaaagcttattctttgctaatatctgtagtaaagaatataaatattttgatacagtgacaaaagctgttattgattttaatatatctggtgatttcgaatcggatttcgatttgatttttaaaattggttctcaacatgattcaaatcttgtctatgtttcaagtaaatctcagtgtgtaaataaggcaatagagttttctaattttctgatttcaaagggtacagcaattgataaagatgaagagttaattgccgaatcgaaattgatttctgagtttatccataaagatttttcgttacctcatctattaaaatatggtattgcatatcatcacggaaacttgccagcattcattcggaaaagaatagaatttctttatgcaaataaaaaaatcaaatatatattttgtacttccactcttttggaaggcgtaaatcttccaactaagaatgtttttatttatcctttcggtaaagcaaatagcaacaatggtttttctctggatttttggaaccttgctggaagagctggtcgttataagaacgagttgacagggaatatcatttgtatagggaacgaagaaagctcttgggatgaatttgaaagttctgttgctaataaagataaaatagaaattgataacgaaatttcaccacttctaaaatcccatcgaaaaatacttaattatcttaacgaaagtgtaaagtctcctgatcccaaagtggttgaaatttcaaccatgattttatctgaggttttaacatatataaatgaaggtaaagttggtggattactggaggcgttcgattcaaaaattagacaaaaaattatttcagcaggaagatctcatttagctaagaaaaatcttcttaacattgatgtttctactttttcagaaaatcatcgttttgactctgacattcaatcttcagcgtataaattagcttctaacagcaataacattttaacaacttttcagaaagaagatgtctttaaatatttacagaaaataaatgatgtctataagatagtcaaaccagtagggattcttccttttagtatcatgacctattcttggttaagaggtgaacccattaatgtaattataagcaacggtattaggtacagcaaaaaagtctgtgaacctacaccttatcgttgggttgattttgatggtagcaatccatatcatgtgaatttaaaaatattagagataattaattcaattgagaccgatataacttttaaattggaaagtgctttggctcattattatcagttatgtaaatctctacatggcgaagatgcatcaggtataaatttatctaaatttgttgattatggaacaattaatgctaaggaaatgtctttgcaagaatacggtttttcaagggctgccgcatctgagttattaaaaaaataccgagttttcgttgagtttgatagcaatgacgggttgaaaagaattaacgtcaaggggcttttaaattctgttggcagtggaggattacttaaaaaagaaattgaatggcttaatatttga

SEQ ID NO: 272440 - DNA, 987 bp, Klebsiella pneumoniae
atggtagtggttaatgtgcttaatgctggtcatggtgattgtattcttttggattttacgcatacattaatacttattgattccggacctaaaacattcttggtaagaaggaatgttatagagaagcttaaagagttattgcatgatagaacaattgatattgcaattgttactcataatgacgatgaccatattggcggttatagatatgtaatatcttcaggcattaaaattgaaaagttcatttttaatagtctcagtttttgcggtgaaatttttactgatcatgaacaacatatttcctataatcaagatgttaatttagacacccttataaaggataagggggtttccatagagacattagtatttggtaatgaaccaatcattatcaatgatatcaaacttattcctttaacaccgaagattgatgtactccatcatatgcataatgattatatcagaaagaatcaaccacaaatatcttctgatggaaacgtggagcctaccttattagagtgtattgaagaaattactaatggtaacgataaattcatacccgatagatcaattactaacagaaccagcttatctcttatcatcgagtataatagttttagaggattgtttttaggtgatgcatgggcttgtgatatcattgaaagtttcagatcaaaccaaattgaaccaggtttttgtgttacaaaagtatcacatcatggaagtgaaaaaaacacaaatagcgaattgataaacttaataggtaaaacagaatatatattttgtgctgataaaagcaagcataatcacccgaacaataaaactatcgctcggatattatcccagtttcaacatgcaacatttcattttagcagtgataatgacaaagtcagaagtattttcagtgagaacaatgtgttaggatgtcaagtgttatgcacttattcttctaatggagttaatgtacgatactatgagtgtagctaa

SEQ ID NO: 272441 - DNA, 513 bp, Klebsiella pneumoniae
atggatgaagagcatggtcagaaatgccgcttcatcgataggcatggagatgtccacctttttctcgataatgcgcaggcaatccagagccacgttaaattcacggttatgttttatcctgatgtcattcagtcgaggatgagtgatcaattggtcaaacttcagccggttcagggttttctcaagatggatactgagggcatactggaaattgatgtcaaaggttttctccagtcgtttctggctgagctgtatgatctcatcagtgagttcagaaattgtaccggtaacgtaatcctgaatggttttgatatcgtccttactcttgatcagactgagtttggtcgcatacaggctctgcaggtaggagctttccggcccggcaccaaagagtgtactgagctccattttctgcaatgttgtccctttctgctgctcatccagaaagaacatattttcgttttcaatatccccactgggatgaaaaacggtgaatttggttttgccccctaa

SEQ ID NO: 272442 - DNA, 828 bp, Klebsiella pneumoniae
atgaatgaaggtcttacagactcagttaaacaagcgctggagcaaaggctcaaaaatcctttgtggggatttattcttctggcgtggatgtggttcaattggcctaacttagcgatgttgttcatgagtgatgcgcctgtaaagttcagaatcgattatatcctttcgcaggagtatttctatctgcattacatgattgcccccatcctttctggcagtattttggctataatctcgccatatgcacagtggctcctttctcaggcgcataagtgggctgatgatagatatagtgccaacacattcaaaatcaaagagagagattttcaagaagcaatagacctgtcaactttaaaagtaaaagctgatagagctgaagatttagcaaaagcaaaaagtgatgctgacatacaagagcaaattgagcgagggaggcgcgaagaattaaaaactgaagaactagaatcaattaaaaatgcactgtccgacgaattagaaaatttgaaggcttcagtttctttacaacaagctgaaattgatagcctttcgaaagacaaagcaaggatccaggatttaattgttgagtcattatttattatggaaaatattttcagtatttcagattctagttcaatccagaagattaaaaaggaggtagagaaactttactctgctagtgaaatagaaatatcttctatattgaatgctatcaatgcgaaaagagaacttacacttcaacaaaaaatgatattttttgataagctggacgaaaaagtaaaaaaagataggttaaaggcagggttagcaagttctttagacaatgaatga

SEQ ID NO: 272443 - DNA, 192 bp, Klebsiella pneumoniae
atggaaaatacaattaacgaaccaattacctattacgactctaacggctgtctgattatcggggctaaccttatcgggaagattcatcctcagctaatggaaaagctaatcagacgttcgggggatggctcaaaacgtagcctgcaagcccgaatcacatcttacctcgaagaggttttagccaatgtgtaa

SEQ ID NO: 272444 - DNA, 258 bp, Klebsiella pneumoniae
atgagtattctaatgaaagggctgtccaagcgtggcagctataatcaccttactgactcaatggaattcaaatacttcaatgttcaaaatgaaatcagtgaatcaacttataagctacttgtttcaggtaataaacctaaatcatcagttaagccagctaaagcggtcaccccgtataaagtgaagcctaagccaacaattgaacagcaaagagatgcagctttgaaggctgctattaagcaaatgacagggggttga

SEQ ID NO: 272445 - DNA, 294 bp, Klebsiella pneumoniae
gtgtggggcactttcagcaacgcctacctgccgctgctgaaaccgagcttgctggcggcgctgattttttgtctggtgcgaagccttgaggaattcagcatctcatacgtactgggcgcaccggattttatcaccgtcccgaccattctttactctttccttggctactccttcgtccgcccggatgcggcagtggtgtcgatgattctggtgatccccaacgtcatcctgatggctatcatcgagaagttgctgaaagggaattatctgtcgcagtcaacggggaaagcctga

SEQ ID NO: 272446 - DNA, 330 bp, Klebsiella pneumoniae
atgattacaaaattcaaattatctccatgctgtttagctcttataagtatcggtgtgttaaccatatcttccgagctatatgcaagagaattttttaacccagcatttcttaccgatctaaacggttcagacgtgagtccggacctttcggcttttgaggtagcaaattctcaggcccctgggaaatatcgggttgacatcatcatcaatggtaccgttgtcgataccaaagacgtcgatttttttctacggcagaacaaaaagcaagctatcttaacgaggcgggagaagagcttaaactatacccatgcttatcaacagaggaattaa

SEQ ID NO: 272447 - DNA, 216 bp, Klebsiella pneumoniae; identical to SEQ ID NO: 219510

SEQ ID NO: 272448 - DNA, 765 bp, Klebsiella pneumoniae
atgacaccagttaaagagtttggcgaatgcgtcattactgccggagacagggattatttcttccgcccgtcactgctggccatgtcgcgaattggcgagcctgatcacatcgttagagtgtttcatacactcttcaccgttaacgatgcactggtggaaatggtccgctcagcagcagaaatacacagcgaaataccggagcatcaaaggctattttacgcgcaatacttcggaagttatgagttgcctgaatgggcgatcaaggcggcgtcttcgccgggattcatacggggagcattgctctcagctatcaacgtcctgcaatcatgctgtgatgatgacgtttctgagttggttggctggttctctccagcaaggtctggtcataggacgtttatttggcgaccaggggcaatgcctgtacagaccatgatactgatagcccaaagcctgatgatgcacggcatcatcggcaaggcgaaaattagaaagctccagcggcacgaatccagcgatacaacatctgaattccgggcatcagattacatcatcgcagcgcggaaccacttcggtatcagcaaggaagaggccggacaactcactatgaccgagtttcagttaatgctcatcgctaaataccctgagcagaaagggtacacccgcgaagagtacgatcacgctgctgatgactactttacgcgccgaaagcgcagacaggcgatgatggagcaggagcattccaggacaacccgcacgaagaattaa

SEQ ID NO: 272449 - DNA, 273 bp, Klebsiella pneumoniae
atgcttgaagccaaacaaatagctgagttattgaatctgctgttcactactgacccgaacgctgccgctaagttggttaatcatcgcgttgagtgtagcgacgcgttcctcgagagcgatattccgtttgtctgctcacgtaatagcgaaggcgtcatcactatgggtgttgtcggtttcgtcaacgcgttggcaaagcctggtactggttacgccgctgccgtttatgaaggcaatcagctcactggcttcaccatcgtgggtgctgattaa

SEQ ID NO: 272450 - DNA, 2688 bp, Klebsiella pneumoniae
atggatgaaaaattaataacttggttagatgtcgaaagacaactaaaaaaagttagtaagaataaaacaaattatcctgatttcatacaggccgttttttgttataactctagcatggagattgagtactcaggtgagttactgtctattttagaatggctaggatctatttttggtagaaagctttcagttgttggccaaccttatatcagactagatttaaataaagaacaatatcccatcgaatttatacaaagtgcaaacacaaaaaaaaatcaaaaactagtatatcctctctggaaggaacatgtatacaaccctggagtaaacgtaaacactcccgaaaagtggtctgatggccctcatgttacttcatttcactctttcaaaggtggtgttggacggacaacatcattgatgacatacgcaactgctgtgctcaattcaaaagagcgagcaaaggttcttttaattgatgcggacctagaagctccaggtataagtttttggttagatgatgaaaataaacccactgtctcattcataaattatgtggaagcaattcattattcccctagtgcgcaaagcgaagtgataaattacttcgcaaatgaacttagaaaatcatccattaacattgatggaccgagtaaagagatttttgtattaccctcatctcttgatctcacatcggtgatggacatgccagtaactcctgagcatctatctaaaaacttagataacccatgggtattaagtgaataccttatgaaattaggtaaggttttagaggtggatgtcgttttaatcgatttaagagcagggctaagtgaacttgcgagccctattatatttgatcctagaattgaacactacttcgttactacagttgctcctcaatcagtcaaaggtatgtgtgaagttttatctcgtttgaacagttcaaactctacattcaacttttctacatacagcaaggaaaaaccatcagtaattgttagtctgttaactaatcaacttcggaaattaccagcatataccttagccactgaaatgttgaactctgcatatccaacagatgactctgacattttagctcaaggaattgaatggcttgaagttgactttaatcagtcattgatgagcctatcctccattagaagtgcatatgaggccttaccacactcgacactctatgattctgcaaaagattgggcgaaatcattatcttcttctgcatttgatttaaataatgctaatggtcatacatcagggaataaaaatatttctgacgcgcaaaaattacgtgatacatgtagtaagtttcaatttgccgaaaatattgacgcaaatgacatgcttgtaaccgatccgctccgaaattttgcaaaatattataccgacactctacctaatgctgtatctattggagctaaaggtgcgggaaaaacattcacatatattcaaatttgtctttctggaaactggggaaacttccataaaaaaattaacacaggaattacctccaccgttgatgctgtagtatttccattacttgcgtcaacaaatcttgatgcagcaagtgaaaaagttcgttcaatcaggaaacagtcattaattaagcttgggctaaaatctgagaccacccttgactcagcatcaaaaaaagtcaaagctgcattagatacagctgataccaattgggatgaattctggattgattttttattgtcagagctagggggggaatgcaattctcttcaagagcttaatgaacaattaactagtaaaaaccagtcattactcttgcttgtagatggtatagaggatttattcgattcccctgatgcagaagagatccaacgaggtgcaataaaggcattgttacaattgccgaatgccctttcagaaatccctgatagaaaaatagggttaatttgctttatccgggctgattatgtacaaactgtcataaaacagaatttttcacaatttgtatctagatatcaaccttttagattagagtggacacctgaatcattccttcgtttagcctattgggttgcagggaaatcagctataattaacgcaaaccctaacgaagccgataaattaaacagtgataatttactaactgctctagaaaaactgtggggtaaaaaactaggtcgagataattcaaaagaagcgaatagcgcaagatgggtttttgctgcaatctgcgacttaaacggtaaattacaagcaagagatatagttagattcctgaagttttcagctgaggctatgttacaaacacaaagctcaactataaagcctgaagtttgggtagaccgcattcttgcacctgaagcaatccgtaaatctttacctgcttgtagccaagaaaaagtttcagaaacagcaagcgaaataaaatcattaaatgattggcttgcaatcctcaaaacaataccaaaagaagtgaaaaaagtgccattcaacccattagaagttggattatcactggagcttttaaactctttgaaggagttaggaattatttatgaagatacagaccaaaactctgaagacaggtattttttaccagagatatatagatgggggcttaactttacctcctctggaggcggaaggcctcgggttcaagctttactaaaacgaaacttaggcggaattccgttctaa

SEQ ID NO: 272451 - DNA, 267 bp, Klebsiella pneumoniae
  misc_feature (208)..(217): n is a, c, g, or t
atggtaagtgcagaagtcaccacatttccgcagcccgcaaggctgcatcccgccgagaacaaagccaatgttgccgtgcggcttgatggcgtactgaaacgctttggcgacgccatcgcgttacataaaatttcccttaccattgaggaaggagagtttattacgctgctcggcccgtccggctgcggcaagacgacgctgctgaatnnnnnnnnnngtttattacgctgctcggcccgtccggctgcggcaagacgacgctgctga

SEQ ID NO: 272452 - DNA, 1179 bp, Klebsiella pneumoniae; identical to SEQ ID NO: 246452

SEQ ID NO: 272453 - DNA, 243 bp, Klebsiella pneumoniae
atgttcaccttgataattaataatcttcagatcgccattagccttagggttcatccaaaaaatattttcattaaaaggtggaatgacttggctaacattacccgactgattcaatactacttgaacccctttaaaatgattaaaaaaaggtctacatatagagttagccgaaattattgtatcattaaccatcttaacatgattaccatcaccaagtgtactcattatgtctgtattgaataa

SEQ ID NO: 272454 - DNA, 195 bp, Klebsiella pneumoniae
atgaatacaaaaaatcaactgccgtccgacattgattacattgtcctttttgacaacaacaccgatacgggcgaagcctgttttgagcggtgcgagccccctttccgacacaggagtattcatggacgaacctcccgtttcagcacatcatcaaaacgggttttccactctggaaacagctctgaaacaagatga

SEQ ID NO: 272455 - DNA, 1650 bp, Klebsiella pneumoniae; identical to SEQ ID NO: 27126

SEQ ID NO: 272456 - DNA, 621 bp, Klebsiella pneumoniae; identical to SEQ ID NO: 27127

SEQ ID NO: 272457 - DNA, 591 bp, Klebsiella pneumoniae; identical to SEQ ID NO: 27128

SEQ ID NO: 272458 - DNA, 282 bp, Klebsiella pneumoniae; identical to SEQ ID NO: 27129

SEQ ID NO: 272459 - DNA, 1266 bp, Klebsiella pneumoniae; identical to SEQ ID NO: 27130

SEQ ID NO: 272460 - DNA, 714 bp, Klebsiella pneumoniae; identical to SEQ ID NO: 27131

SEQ ID NO: 272461 - DNA, 528 bp, Klebsiella pneumoniae; identical to SEQ ID NO: 27132

SEQ ID NO: 272462 - DNA, 663 bp, Klebsiella pneumoniae; identical to SEQ ID NO: 84803

SEQ ID NO: 272463 - DNA, 720 bp, Klebsiella pneumoniae; identical to SEQ ID NO: 27133

SEQ ID NO: 272464 - DNA, 198 bp, Klebsiella pneumoniae; identical to SEQ ID NO: 27134

SEQ ID NO: 272465 - DNA, 759 bp, Klebsiella pneumoniae; identical to SEQ ID NO: 27135

SEQ ID NO: 272466 - DNA, 549 bp, Klebsiella pneumoniae; identical to SEQ ID NO: 27136

SEQ ID NO: 272467 - DNA, 606 bp, Klebsiella pneumoniae; identical to SEQ ID NO: 27137

SEQ ID NO: 272468 - DNA, 327 bp, Klebsiella pneumoniae; identical to SEQ ID NO: 27138

SEQ ID NO: 272469 - DNA, 240 bp, Klebsiella pneumoniae
atgaatccgtcacagcaggcggcgtttgaggccgctgccggcccggggatgtccccctctgtgctgaatctgttgtgtatcggagccttactggccgtgctgtttttatgggcggcctggggactggttgatgtgtaccggggctgggcaaatgacagtgtccgtgccgccaaactggggcagtttgctgtccgggcggtgatattactggtggtctgcatctggatgtttgccagctga

SEQ ID NO: 272470 - DNA, 369 bp, Klebsiella pneumoniae
atgaagatgaacacgttttgggtacgtggtgcccgccgtatgggggcgtcagtgatgatgttatggacgttattcagtctgatgccggcgtatgccgcgctgccacaggtggagcccccctcttccggcggtggtggcgggctgatggatacgattaaagggtatctcaatgacggcattgtgattggcgggctggttgtggcggcggtggcttttatagtggtggccattgcggcagtttccaccttcaatgaagtccgggacgaaaaagccggctggggtaaattcggcgcgattgttgtggtcggtgtggtcctgattgtggcggtcgtctggctggccggaaaatctgccaccattattttttaa

SEQ ID NO: 272471 - DNA, 906 bp, Klebsiella pneumoniae; identical to SEQ ID NO: 27140

SEQ ID NO: 272472 - DNA, 486 bp, Klebsiella pneumoniae
gtgacatattttgcgaagccgggatcgccggccgtgatgccggtgacgtttccgctggtgtttgtgttcagtgccggaaaggccgattgcaccggaagtcatttttgcctgacggtggccggtcatcaggtgtttgatgatgagcaacagcagctgattgccggcatgtcaccggcgatgatacagctggcgtggcaggttgccgccggtggggcggccggggcggtgctgtctgtcggccgtcaccgggtggcgctgtgtgacaacgacattaccgtttaccggtttgccccggggaataaggcgtacccgcaggaccgtgactgggatcgtctgctgtacacggtgtttaaaggagagacgccggataaagccggctggcaatgcgtgcctttttcattatcggaactgaactgtcacggtgagtttgcccggctgaactgtcggggggcggttctgaagggagcgggagggatcatactatga

SEQ ID NO: 272473 - DNA, 423 bp, Klebsiella pneumoniae; identical to SEQ ID NO: 27142

SEQ ID NO: 272474 - DNA, 1650 bp, Klebsiella pneumoniae
atgaaaactgcggaatacaaattagcgggtttagtcgtggttgtcagcctttctttattctctggaatgggggttgccggggatggtaatgaacgaaatacccatcaccggtttgacccttcaaaaaatattaactgcggtagtaatggatattatgaaacgggttcatggcgatgtgtgaatgaggggttgaattatttaaacaacaaaacaaaagccttttcggctgaaaagctcactgaaattaaagaagaagcgattaagtctgggttagatgcggcgaataaagctatacaagacgcgaatgattttaccggtaaaaaagtatcagagagcaatgcacggactgacagcttaatcagcaaagagcagaaagcacggacagacgcattgaatacagagaaaactgttcgcgaacaggcggatattaacaccctcaaaaatgcaaaccaatataccgacttaaaaatccaggaaaataacgagttactttcagcggatattgagcaagccagaagtgactttgatgacaatcttaaaacaacaaaagcagcgttagaaaacaacatttctgatgttaatcggtcattaacaaacagtgttaatcgggcgaaaaaatatttatccgataatctggataaaacccgtcatgacctgagtgccagtattattgccagtcagaatgacagtcatcttcgcactgacagattgatcagcagagagcagaaagcacgtattgacgcattaaatgcagaaaaactggctcgggaacaaggtgatgccaataccctgacatcagctaatcaatacactgataaaaaagtatcagagagcaatacacggactgacagcttaatcagcaaagagcagaaagcacggacagacgtattgaatgcagagaaacctgttcgcgaacaggcggatattaacaccctcaaaaatgcaaaccaatataccgacttaaaaatccaggaaaataacgagttactttcagcggatattgagcaagccagaagtgactttgatgacaatcttaaaacaacaaaagcagcgttagaaaacaacatttctgatgttaatcggtcattaacaaacagtgttaatcgggcgaaaaaatatttatccgataatctggataaaacccgtcatgacctgagtgccagtattattgccagtcagaatgacagtcatcttcgcactgacagattgatcagcagagagcagaaagcacgtattgacgcattaaatgcagaaaaaactgcccgtgaacagggggatgttaccacgctcaataatgcaaacaaatacaccgatcatcgtattcgctcattaggtttaaatgtttctgatgcgttaaatgattttcaacaaaaaacagatcagaaatttgctcatctcgataacaaaattggccgtgtggaaaaacgggccaatgccgggattgccggggtgaccgcgatttccaccattccgtatgtgaacagtgagcgtttttcgttcgggatggcgatggggcattaccgcgatgcacaggcgattgccaccgggatgcagtataagccaacggccagtacgaatgtccgcctgaatgcgtcatggaataccggtggcgataccagtattggtgccgggtttgcggtgggctggtag

SEQ ID NO: 272475 - DNA, 255 bp, Klebsiella pneumoniae; identical to SEQ ID NO: 28990

SEQ ID NO: 272476 - DNA, 126 bp, Klebsiella pneumoniae
atgttgttattgagggcgtgggaaaacggctatccgatatggatagctgctaatcatatgaatttaatcgttaatatccttgatgatgctgagaacatcatccttgaggaggtcgagttcttttaa

SEQ ID NO: 272477 - DNA, 1050 bp, Klebsiella pneumoniae; identical to SEQ ID NO: 27112

SEQ ID NO: 272478 - DNA, 1689 bp, Klebsiella pneumoniae; identical to SEQ ID NO: 27111

SEQ ID NO: 272479 - DNA, 204 bp, Klebsiella pneumoniae; identical to SEQ ID NO: 27110

SEQ ID NO: 272480 - DNA, 261 bp, Klebsiella pneumoniae; identical to SEQ ID NO: 27108

SEQ ID NO: 272481 - DNA, 357 bp, Klebsiella pneumoniae; identical to SEQ ID NO: 27107

SEQ ID NO: 272482 - DNA, 363 bp, Klebsiella pneumoniae; identical to SEQ ID NO: 27106

SEQ ID NO: 272483 - DNA, 489 bp, Klebsiella pneumoniae; identical to SEQ ID NO: 84816

SEQ ID NO: 272484 - DNA, 279 bp, Klebsiella pneumoniae; identical to SEQ ID NO: 84815

SEQ ID NO: 272485 - DNA, 396 bp, Klebsiella pneumoniae; identical to SEQ ID NO: 84814

SEQ ID NO: 272486 - DNA, 882 bp, Klebsiella pneumoniae; identical to SEQ ID NO: 27211

SEQ ID NO: 272487 - DNA, 474 bp, Klebsiella pneumoniae; identical to SEQ ID NO: 27210

SEQ ID NO: 272488 - DNA, 561 bp, Klebsiella pneumoniae; identical to SEQ ID NO: 27196

SEQ ID NO: 272489 - DNA, 381 bp, Klebsiella pneumoniae; identical to SEQ ID NO: 27197

SEQ ID NO: 272490 - DNA, 10323 bp, Klebsiella pneumoniae
atgaacagccttttttaccggattgtctttaataaagcccgcggcatgctgatggttgtggctgacattgcccggcgcggacggggaggaaatacacgtcgcggacgttgtgctccggcagggattatcgcctccctgtccccggtttgttttgccatctggctggctgccggtttgtgctcgtttcctgcttattccgctattgtcgctgaccgtaatgcgccgggaaaccagcaggcgacggtgatttccacggcaaacgggttgccgcaggtgaatattcagacgcccggtccggaaggggtttcacgtaatcagtatacacagtttgatgtggacagccggggagccattttaaataacagtcacagtaatacacagacccgtctggccggcaatattaccggtaatccctggctggcaaagggtgaggccaggatcattctcaatgaagttaacagccgtgatcccagccggctgaatggttttattgaggttgccgggcgtcgtgcggaagtggtgatcgctaatccgtccggtattacctgcaatggctgtggttttatcaatgcggaaagaacgaccctggccgccgggaaagcgctgatggacggcggcagactgaaaggtttcgatgttgacaaaggacggctcagtattgaagggcgcggactgctggcggaggacagtgactacactgcgctgattgcccgggcggtgaatgtgaacgcccggatgcaggtcggcggtgaactgcggatcaccaccggtcataacgaaaccgatccccggggtaatatcacccggattaagcccggtgaggatgccgggaagccggcgtttgcgctggatgtgtcggcgctgggcggaatgtatgccggtaaaattattatggaaggcaccgaaaaaggcgtgggcgtacgcaatgccggagagctgggggcgatggccggcacattgtcactccgtgctgacggtcaactggtgaacagcggtgtactggccgggcagggggatctgagcgtcgccgcgaaaggtgacctgcgtaataccggcagcctgacggccggaggagacgttgaactgactgcaccgggaacactgaataatgaggggattatccggggcggacaggatgtcaggctgacagcagcgggtattcacagttcggaaaaaagtacgcttctggccggtgctccggcagccacaactgacggaagaaaaggcgatttagttctgacatcgggcggggaactgaaagcccggggacagaataaagctgccggtaagatcgttgcctccggaaccggcgtggatgtcagtggcagccggacagaggcaaaagccgtcacactgacagcgacggaacgtgggatcagcactgccggtgcggaattacgcgggcaggatattgtcagtctgcgggcagcaactggcatcgataataccgccggccgggtctccggagggagactgactatacattccccggaaatcacgaataccggcggccttctgaaccaggagggcacacaggatctgctgctcagccagcataccctccgtaacaacgggggaagtatcaccagtgccggacgaattcatctgaaagcggatgtactggacaaccgctctggtacgcttgcggctgcgggacgggatttgagtatcgaaaccggcgatctggataaccgtcagggcaaggtgcagctttccggtgcaggtgtgttatcccttcagacaaatgtacttcagggacagcagggcgcgttgctgtcatccggtgctctccggctgaaagccgggctggcggatttatccggtggctatacgcaggccggaaaaatcaccgcagaagccgggatactgacgaatgacgatgccgtgttgtctgcccgcggacaggaagggatgcaactgacggtatccggaacgctgagtaaccggaacggccgggcggaaagtgccggggacattacgctgagcagtgcgaaactggataattctgccgggacactgcttgccgctgataaagggagtttatccctgaccacaccgggagaggtgctgaatgataaagggcgtctgattgccgggcggcatatcctgctggatacggcagcgctgaccagccgggaagggctgatttcagccaccggcggcaacatgacactgaacagccgtcaggcagttattaatgaacaggggcgaatggaggcccttaacaggctgacactgaatgcagccggattacataatcataacggtaccatcaccggacaggatgtcaccgtcggcaccggtgcggcaaaacttcacaacaccaggggaaatattgcggcccgggatacgctggcgctcagttcaggagaaacggataacacagggggactgattcaggccggggaaagcctggttattgacacaaataaccggcagctgagtaaccgtgagggcgggcagatactggccggtgcactgacgttatcggcagggaacacggataatcaggcgggggttattgcctcatccggtaatgcacagttgcagaccgctgatctgaacagtgacagcggaaaaatactcagtcagggcgatttgacactgaatactgcggtgctccgcaatcagcacgggctgttgcaggcagacggggctttaacgctggatacccatggaaacgggttaatcagtacagacagcggtgaacagggcggtattattgccggcggggatctttcactcagaacaggccgcctggaggcggcgcagggtgtgatacagggtcgcaatatcacgctggacacgcagggacaggcgctggatcaccgtggcgggtatctggcggcccgggagagtgtcagactggataccggcgaaacggataacagcggtggtcttttacgggccggcacatcgctgatactggacactcatgaccggaaactggttaatcagcaaagcggagagctgggcgggattgttgccggtgatcgtctgacgcttgaagtgaatggtctggataaccatgacggtgtcattgtcagcggcggtgacggcgtgatgaccaccggtctgctggataatacgcagggacagcttgtcagcgcatccggctcgctgtcactgacgacaggagaagtcaataaccggcaggggctgatccaggccgggaaacagctgttactggatacccggggacagacgctggttaaccgtgacagcggggagctcggggggatccgggcgcagggggatctgtcccttctcagcggcagactggataatcaccaggggattgtgagtgccggcggacaggccgggctgaaaaccgtaatgtcagataacactgccgggttgatcactgccctgcgggggctggcaattaccggcgggcagctggacaataccgccggcagtattctctccggcgccggactgacgattgacacacaggggaaccgcctgattaaccgtgatacggtttcccgtggcggtatctctgctgccggtgaggtgatcattacgactggggagacggataaccggagcggacgtatcgtgtctgacgggaatgccgtgttgcataccggcaacctgaaaaacagcctcggcctgatagcggggaatggcgggctgtcagtgaacagcggtgagaccgataacaccgggggacgccttcagtctgccggcgatcttctgattaacaccggtacggctgtcttggtcaataccggcggaaggatagccggtgaccatcatactgctgtcacgacctctcagcttactaaccgggagggaacggttcaggccggagaaagactgactctgtcagtgggtcaggcgctggataacggaaaaggggcattgttatccggcggccggctggcattgtcggctgaccgtctggataaccggcaggggcaggtgattgctgacggtgacagtcagctgaatgtacagacggtactgaataatgaaagcgggcttgtgcactcagccggcccgcttgagattgtggcttctgaaatcaataacaggcataccggacagagcggtaaggggctggaggcagggaaactcacgcttgccgccgatattctggataacgcggaaggggcagcgcgcagtgtcagccatctgaccgcacgggtaacccgggtactggataatctgcggggtctgctttcctcacagaaaacgctctctgttcagggacaggcgctgacggtgaacaaccgtgaagggatgctgatagccgatgacagtgcggatatttctgcgcgggcagtgagtggtgacggacagattttgtcccgggatcgcctgacggttcatgtggccgacgatttccgtaataccggctcggttaaagcgaacggtgatctgacgctcctgaccgaccgccggctgattaatgacggggtgattgccggacagcaggggctggagatccgtgcggataatctggtcaatactgttcagggggatatcacggcgaaagaaacgcatctgaacgtggccggcacactggagaatcgcgggctgattgacggtgaactgacacacctgacgaccggtgtgctgaacaacaccggcagcgggcggatttttggtgatcatctcgctgtcgaagccggcgttctgaataatgaccgggatggtgacaaagccccggtaatcgcatcccgtgatcgtctggatattgcggccggaacggttaataaccgtgggcatgcacttatcaccagcctcggtaatatggtttttggccgtcatctggataatgattatcgtgcaaccggccggggcgatgtcctgaataatgacggtgcatttattgaggccggcagcgatgcatttatcggcatgcagacggtgaataataccaaccggaaactggaaacacatacggtcctggtggagaaaagtcagcatcatgaaggcgttcttaacggcagtaccacccgttatgactgggcagatgttgatctcagcaggaagaataaatatggcgtccatacagcaagaatgccggatggcagcgaaaatgatcgtttttatgaatataactatacccggaccgtcacggagacacagatagcgtccactgatccggggaaaatactggcggggggaaatatccggtttgataccgcccgtctgtttaatcatgacagccagattgttgccggcggtagcctggacgggcatatcggtaccctggataaccgggcgacgcagggtgagcgggtgaccacggatgaaggatggcagacacggtggtggccgaagaaaaagaaaagaccggttggcggaaccaaaacatcacagggaagagagaccgatgattaccgtccggccccggtaacggaaaccattgatctgaaaagcctgacctggcagggacatgctgtggtaccggacaaaacctggcgcgggagtgaacggcaggtgtctgcggtgaatgaaagtgcagagggcgcaggaagtcattccgtggccggagcggacagccgggtgaatatcagtaccggtcaggctggtatggtctcaacggatattcccggcgtggtgcatgatcgtccgttactgttacctcccggacatacgttcagcctgacgctgaaaccggaaaccgggagcgggcagcagatcactccggtgatccgcacggtcagtcctgatgtccgtttaccggataacagcctgtttaccctgcatcccggcacggacagccactacctggtggaaacggatccccgttttgtgaataaaaaacagtggttgtccagtgactatatgcagaatgcctttacggcctcccacgataatgtgcataaacgtcttggtgacgggtattatgagcagagactggttcgtgatcagttgatccagctgaccggggggcgttataccgctaatcagagtaatgatgaagctcagtaccgtatgttgatgaataacggtattgccttcggtaaacagtatcagttgatccccggtgtggcgctgacgccggagcagatggcgctgctgacgtcagatattgtctggctggttgatatcccggtcacgctgagtgacggcagcatacaacaggtccgtgttccccaggtctatgcgaagctcagggaaggagatttaggtggtgacggtgccctgctcggcggacagaatgtcctgctgagtgcagaacaggatattaccggcagcggcaatatcgtgggtcgggatgtgacacaactgagtgcacggacgctgatcaacagcggcagcatcagtggtaaccgggtcagtctgctggccggtgaagatatcctgaataccggcgggcagatactgggcggcaaagccgtgtcactgctggccggcagaaatattaccagcgaaaccaccacccgcagtgacggtgtgaaccgctgggttgatcgccgggccggtatttattcagagggggcagatggtcatctgacactgcgtgcgctgaacaatatcaccctgaccggcagcgatatccggaatgccggagagaacgggaagacgtcactgacagcaggtcatgacctgcgtctggatacggtcagtacagtccgttctcaggaaagtgactggggtaaagataactggcgccgggagcatatacagacggaaagtggcagtcgtattcatacggccggagatttggtgttgtctgccgggcgggatatttcggccactgccgctgatgttaccaccgatgccgcgctgactgcacaggccggacgggatttacggctgaacgccggtaacagcgtgacggatctggcggagcacagtaaagaaagcagtcgcgggctgttatcggggcattcatctgagcgtcatgatgaggtccacacgcgccaggccgtcagtactgaactgtccggagagacagttcatcttcagtccgggcgggatatcagtgtgtcaggcagcaatgtggtcagcagcagaaatctggcattgcaggccggacgggggctggatattaccaccgcaacggaatcacgggatgagactcaccggcgtgaagagaagaaatccggcctgatgagcagtggcggtattggttttaccgtgggtaaacagtctctgaagcaaagcacggacagcgacagccggctgaataaaggcagtacgctgggcagtacggacggaaacgttgtgatgacggccggcggggatataaaggtacacggcagtgatgttgtggcgaaaaaggatatcagcctgaccggtcagtctgttgcggtaaccgcagcggaaaacacacgcacggaactgacaaaaaccgaacagaagcagagtggttttacgcttgccctgagcggtactgccggtgcagcactgaataccgcagtacagacggccggagatgcaaaagaaacggataacggccgcattaaagcccttcagtctattaaagccgggttatccggtgttcagggggctgaagccgcgcgtcttgctgagacacagggggatgcgggttctgccttcggaattaatctctcttatggcagccagtcttctgtatcagaaaccgaaacccgtcagtccacggcgcagggcagcagtatcagtgccgggcaaaacctgacagtgaatgccggcggtaaaacggcaggcagcggcaacattgatgtcaccgggagtgagttacaggccggtggtcacgccacactcaacgctcagaatgatatcacgctgacatccgcgcagaacacccggacggtggacggcaaaaacagcagtaaaggcggttccgttggtgtcggtgtgactttcgggtcaaatggtgcgggtttcaatgtgaatgccagtgtgaacagaggtaaaggatttgagaaaggcaacagtcagtatgccactgacagcacggtaaatgcaggcaaaaccctgaccctcagcagcggccatgacaccaccctgaaaggtgctcaggttcaggggaataaagtcattgcgaatgtcggcaataatctgacactgcaaagtgagcagaccactgataattatgactcaaaacaaacccgcttaagtgcgggtggtagcgtcggtttcggcaatggttctctgaacatttcggccagccgggataagatgcacagtgaataccgttcagtacaaaaccagacggggatttttgccggtaaagagggttttgacattacggtcgggaagcacacccaactggatggtacggttatcgcatcagaaggaaatgcggagaaaaaccgccttgacaccggtacactgggctttaagaatattgagaataaagcagaataccgggtggaacaccagggcggtagcctgagcaccggtggcggtgtggggggaaatctgatatccaatatgggcagtgcgctggccatggggggtaataaaaaggaaagcagccataacaccacgcatgcggcagtctctgacggtaaatggattatccgggatacagaacatcagacgcaggatgtggcgacgctgagccgtgatacggagaatgcccattcggcgctgaataaaatctttgataaagagaaagagcagaaccgggtaaaagagcagcaactgcttggtgagattggtgttcaggtcagagatatcgtgcggactgaggcgacaatccgagccacggaaaaggcgaaggcagactttgatatccgcaactataaacaagatgatatcgataaagcgaaagcggagctgattgctgaaggtaagagtgtgggtgacagggatatcactgcgctgctatttaacaaagaggttgagaaaaacttagcggaatcgggctttggcaccggcggtaagtatacccgtgccatgcaggcggcaacggcagcggttcagggcgtgatgggcggagacctgaaggcggcgctggcggatggtgcagcaccgtttatcgcaaatgaaataaaaaaacagatcccggatgaagaagccgatgccaacctgaaacgcaccattgctcatggtatagcgaatgcagcccttgcgctggctaaaggtgagaatgttgcggcgcaggcaaccggggcgatgacaggggaagccatcggtatactggccgaatatatctacaacaaacagccgggtgaactgacagaacgggaaaaagagaatgtcagtgcctgggcaacactggcgtcaggtcttgccggtggtctggcaggcggagatacacagagtgtggcgaatgcagcccgggcagggaaaacaacagttgagaataacttattatcaccagagaaagacgatcgccggtttaaagcgctcgaagcccaaaaggccggacaaaacctgctgaaggcttcacaggatattttttatctcacaaatgaagataaatataatgataagttaattgccggttataaagcaggaaaactggatgatgcaggtaaagcagagctggcccgttttcttaatgagtacggaacacaattacagctttacagaggaatgagtgaagcagaagcgtctcaggttattgattcaatattaaagtatgattcaatcggcccggttttaacaaaagaatataacgaagcataccgatatcttaattcggccggagttcatttgtctcaggccgtgataggaaccgatgcactgttagccggacccggcagaatcagccagttaatgcgtttatcattagctgccggtggttcttaccagacaggaaaggggatagcccaggtatctgatggtaaaattgctgaaggtggtacaaatatcgcgctgggttcagccgctatattcggcggatatgttggcaataaagttgttggtaagccaagtggtggaattatttcgcctgaatctaaagtaattcaagaaagtagctgggttttagacaaaaaaacacacacatcgattcctaaagtggaagctgagttaatagataaagagtcaggtaaaatatttaaagatacaaatcaaggaaatcggcctgactattttcttggtgataaaagcagaccaactttaattaatgataggatagaggctaaaatagaaaaaaatcctagtaaagatttaccaaatggaaatatggcttctgctcatgctgaagttggtactattcaacaggcgttcgaggatggtatcactgttggtcgagatatgaatatgagggttacaaaagagcctgtatgtggatactgccgtggagacattgccgctatggctgacaaagcaggtttaaaatctcttactgtttatgaggagagcacaggaaaaacattatattggaatcctggaatgaaatcactcaaggagaaaaaataa

SEQ ID NO: 272491 - DNA, 1746 bp, Klebsiella pneumoniae
atgctatcttttttatccccgttacagcggttgtgctttttcccgtttctctctctggtggtgagcgcggtatctttctctttatctgccaaagaaacaacttccccgttattccggtccggtgaacatccttttattcatcaggaacaacagcaacagtcacgcgaagcatcgctgatgccgaaagcgccggatatacgcttatccccgccgtcctctgtatcctcccggcttatttttccggcagagtcaccgtgttttcagatcacacaggttgtaactgacgggggcggggcgcttcctcactggatcccggtacagcgtattgtcgatcaggcaaaagggcagtgcctggggcgtgacggaattaatcttctgatgagtgcattacagaaccgtctgattggacacgggtatatcacgacccgtgtgctggcaccgtctcaggatcttaaaaccggtacgcttcgtctgctgattgtgccgggaacggtcagggatatttatctgaatacaggcagtgatgactatatccggctgtacagtgcgttcccggcccgtaagggggaattactggatttacgggacattgaacaggggctggaaaaccttcagcgccttcccacggtcagtgcacggatggtcctgaagcccggtgacaggcccggacagagtgatattgtgattgaacgctcgcagtcccgttactggcgtaccggtgcctgggtggatgattccggcacggaaagcacggggcgatatcagggcggagtaatgctggcgctggataatccgttgtccttcagcgatttgttttatgtcaccgcaagccgggatctgggatttggcgggcgtcataaaagtacccacagttattccgcacattattcggttcctctgggatactggctggccggcataaacctcaacgattaccgttattatcagaccgtggccggaaaatataccgacattcattacagtggtaaaagccgttccctgaatctgcaactgagccgtgtgttacatcgtggtgccagttcccgtacgacggccagttatgacgttcttctgcgtgagacccgtaattatattgatgatacggaaattaccgcccagaaacgccggaccagtgcatggcgtatcgggttatcccaccgccattatatcggggcagccaccctggatgccagggtgagctatcagcggggtacccgctggtttggtgccctgccggccccggaagaagcctgggatgattatggcggcgttaccgccttatcaaaaattctgagctggaatgcctcactgaccgcaccgttttctctgggggaacagtctttcagctggaataccacctggcgcaggcaaatgagcgccacccctctgaccccgcaggacgaattttccatcggcaaccgctggagcgtgcgtggttttgacggtgaacgtacgctcagtgcctcaaatggctggctggtacagaacacgctctcctggcagacacctctgcctttgcaggagctctatctcggggccgattacggggaggtcagcggtaacagtaccactcagagtgatttaaccggacaacatctggtggggtcagtgctggggatccgtggcgcattcgggaataccggcgtgagttatgacgcttctgtggggatccccctctcaaaaccggccggatttaaaacagaccctgtggtcaccacgttcagtgtgaactggaactggcagtga

SEQ ID NO: 272492 - DNA, 444 bp, Klebsiella pneumoniae
atgaatgacgtacttgatgaaattgacagggcgatcctctcctgcctgactcaggatgccagagtttcgctcaaggtcctgagcgcgcgagtggggctgacctcgccgagcaccgccgagcgggtgaagcgcctggaggagcggggtgtcattcagggctatggggcgcgggtaaatctcgccgcgctgggctatagcctgcaggcgctggtgcgggtccggccgctgcctgggctgctgcagaaggtggataaatatatccaggcgatgccggaatgtattgaaagtgacaaggtgaccggggaagattgttttgtaatgcgtctcgtggtgcgcgatattgcccagctggataccctgctggacggtctggcggagtatgcgcagtgtaacacctcggtggtgaaaagctcgccggtaaaaaggcggttgccaccgctgtga

SEQ ID NO: 272493 - DNA, 897 bp, Klebsiella pneumoniae
atgcaacttacccgcggcgtctggcagatgagcctggcaatgataatctccggctcgatcggcgcgttcgtgctgctctctggtttgccggtgactgatgtggtgttctggcgctgcctgattggcgcgctaaccctgctggtgtttatcgtgttaagccgccagcccttcagccggctaacgcgtttcactctcgctctggcggtgattggcggcgcggcgctggtcgtcaactggctgctgctgtttgccgcctattcgcggatctcaatcggtatggccaccgtggtctataacacccagccgtttatgctggtactgatggggatggtgctgggggaacgggtcagcgccgtgaaatggggatggttactgctggcctttggcggcgtagtgatcctgctgtcgagcgagctgacgcctgcacacgaagaggggcttaccaccggcgtgttgctggcgctgggcgcggcattcttctatgccctgaccgccatcatcgcgcgcaaactgcatccgctccccgcgcagcatatcgccttcattcaggttctcgtcggcgtcgtgatgctgctgccgctggtgcatgccccagaattgacggccagcttcccctggcgctatctgctgatcctcggcatcgtccataccgggatcatgtatcagcttttatatagcgcgatacagaaactgccgacgcccgttaccggttcgctctcctttatttatccgctggtggcgatggtggtcgactatctggtcttccaccatgcgttatccgcggtgcaattgctcggtgggatgcttattctgtttgccgccgcagggaataatctcggctggggcgaaaaaaaaccccgccgcggcggggtcagtgagcagtcgcgggccagttag

SEQ ID NO: 272494 - DNA, 678 bp, Klebsiella pneumoniae
atgcacttcctgaatatgttcttctttgacatttatccgtacattgcgggttcggtgttcctgattggcagctggttgcgctatgactatggccagtacacctggcgcgccgcctccagccagatgctggaccgtaaggggatgaacctggcgtcgaacctgttccatatcggcatcctgggtattttcgccggccacttcctcggcatgctgaccccgcactggatgtatgagtccttcctgccgatcgatgtcaagcagaagatggcgatgatcgccggcggcgcctgcggcgtgatgaccctggtgggcgggttactgctgctcaagcgtcgtctgctgagcccgcgcgttcgcgccaccaccaccggagcggatattctgatcctctcgttgctgatggtgcagtgtgcgctcggcctgctgacgatcccgttctccgctcagcatatggacggcagtgaaatgatgaaactggtcggctgggcgcagtcggtggtgacgttccacggcggcgcgtcacagcatctggatggcgtggcgtttattttccgcgttcacctggtgctgggcatgaccctgttcctgctgttcccgttctcccgtctggttcatatctggagcgcgccggtcgaatacctgacgcgcaaataccagattgtccgcgcccgtcgctaa

SEQ ID NO: 272495 - DNA, 711 bp, Klebsiella pneumoniae
atgattgaactcgtgattgtatcgcgtctgctcgaatatcctgacgctgccttatggcagcatcagcaggagatgttcgaggcgctcgcgtcatcagagaaactcagcaaagaggatgcccacgcgctgggcgttttcctgcgcgatttagtggctcaggatccgctggacgcccaggcggcctatagcgaactgtttgaccgcggccgggccacctcgctgctgctgtttgaacatgtccacggcgaatcccgcgatcgcgggcaggcgatggtggatctcatggcgcagtacgagcgccacggcctgctgctggatagccatgagctgccggatcatctgccgctatatctggagtatctggcgcagctgccggaagaggaagcgcttggcggcctgcgggacgtcgcgccgatcctcggtctgctcagcgcgcgcctgcagcagcgcgaaagtcgctatgcggtgctgttcgagctattgctgaagctggccaatacgcaggtcgacagccagaaggtggcggagaagattgccgacgaagcgcgcgacgatacgccgcaggcgctggacgccgtctgggaagaagaacaggtcaaattctttgccgaccagggctgcggcgagtcggaaatttccgctcaccagcgtcgttttgccggagccgtggccccgcaatatctgaatatctctaacggaggacagcaataa

SEQ ID NO: 272496 - DNA, 1536 bp, Klebsiella pneumoniae
atgaaaattcgttcacaagtcggcatggtgctgaatctcgataagtgcatcggctgccacacctgctcggtgacctgtaaaaacgtctggaccagccgggaagggatggaatacgcctggttcaacaacgtggaaagtaagccgggcgtcggtttcccgaacgactgggaaaaccaggaaaaatggaagggcggctggatccgcaaaatcaacggtaaactgcagccgcgcatgggcaatcgcgcgatgctgttgggtaaaatcttcgccaacccgcatctgccgggcatcgatgattactacgagccgtttgattatgactaccagaatctgcataacgcgccggagagcaaacatcagccgatcgcccgtccgcgctcgctgatcaccggccagcggatggacaagatcaccagcggtccgaactgggaagaaatcctcggcggcgagtttgaaaaacgcgccaaagatcagaacttcgacaacatgcagaaggcgatgtacggccagttcgaaaacaccttcatgatgtatctgccgcgcctgtgcgagcactgcctgaacccggcctgcgttgcgacctgcccgagcggcgccatctataagcgtgaagaagacggcatcgtactgatcgaccaggacaagtgccgcggctggcggatgtgtatcaccggctgtccgtacaagaagatctatttcaactggaagagcgggaaatccgagaaatgcatcttctgctacccgcgtattgaatccgggatgccgacggtgtgctccgaaacctgcgtgggccgtatccgttatctcggcgtcctgctatacgacgcggacgcgattgaaaacgccgccagcaccgagaacgagaaagatctgtatcagcgtcagctggacgtgttcctcgatcccaacgatccgaaagtgatcgagcaggcgctgaaagatggcgtaccgcagggggtcattgaagctgcgcagcagtcgccggtttacaaaatggcgatggactggaagctggccctgccgctgcacccggaatatcgcaccttgccaatggtctggtacgtgccgccgctgtcgccgattcagtccgccgccgatgcgggtgaactgggtagcaacgggatcctgccggacgtggaaagcctgcgtattccggtgcaatatctggcgaacctgctgaccgcgggcgatacccagccggtactgctggcgctgaaacgaatgctggcgatgcgccactataagcgtgcggaaaccgttgacggcgtcgttgatacccgcgcgctggaagaggtggggctgagcgaagcgcaggcccaggaaatgtatcgctatctggcgatcgccaactacgaagatcgtttcgtggtgccgagcagccatcgtgaacaggcgcgagaagcgttcccggagaaaaacggctgcggctttagctttggcgatggctgccacggctctgacagtcagttcaacctgttcaacagccgtcgcatcgacgccatcgacgtgaccagcaaaacggagccgcacgcatga

SEQ ID NO: 272497 - DNA, 3744 bp, Klebsiella pneumoniae
atgagtaaattcctggaccggtttcgctacttcaaacagaagggtgaaacctttgccgatgggcacggccagcttctaaacaccaaccgggactgggaggatggataccgtcaacgttggcagcatgacaaaattgtgcgttccactcacggtgtcaactgcaccggctcatgcagctggaagatttatgtcaaaaacggtctggtgacctgggaaacgcagcagactgactacccgcgcacccgcccggacctgccgaaccacgaaccacgcggttgcccgcgcggcgccagctactcctggtacctgtacagcgctaaccgcctgaaatacccgctgatgcgtaaacgcctgatgaagatgtggcgggaagcgaaagttcagcatagcgatccggttgaggcatgggcgtcgattatcgaagacgccgacaaagctaaaagcttcaaacaggcccgcggtcgcggcggttttgtacgttcctcctggcaggaagtgaatgagctgattgccgcctccaacgtttataccgtcaaaacctacggtccggaccgcgtggctggcttctcgccgatcccggcgatgtcgatggtctcctacgcgtccggcgcccgttatctgtcgctgatcggcggcacctgcctgagcttctacgactggtactgcgacctgccgccggcttcgccgatgacctggggcgagcagaccgatgtgccggaatccgccgactggtataactccagctatatcatcgcctggggctccaacgtgccgcagacccgcaccccggatgcgcacttctttaccgaagtccgctataaagggaccaaaaccgtagccatcactccggactacgccgaaatcgccaaactctgcgatctgtggctggcgccgaagcagggtaccgatgccgcgatggcgctggcgatgggccatgtgatgctgcgtgaattccacctcgataagccgagccagtatttcaccgactatgtgcgccgctataccgacatgccgatgctggtgatgctcgaggagcgcgacggttattatgccgccggccgtacgctgcgcgcatccgacctcgtggattcccttggtcaggagaacaatccggaatggaaaaccgtcgcctttgacgagaagggcgacatgaccgtaccgaacggctccctcggattccgctggggcgacaaaggcaaatggaacctcgaacagcgcgacggtaaaactggcgaagagattgagctacgtctgagcctgctgggcagccatgatgaagtggcgaacgtcggcttcccgtacttcggcggcgaaggttctgagcacttcaacaaagtcgatctggaaaacattctgctgcacaaactgccggctaaacgcctgcagctggccgacggctctaccgccctggtcaccaccgtgtatgacctgaccatggctaactacggcctggagcgcggtctgaacgatgacaactgcgccgccggctacgatgaagtgaaagcctacaccccggcgtgggcggagaagatcactggcgtctcccgcgcgcatatcatccgtaccgcccgtgaatttgccgataacgccgataaaactcacggtcgttcgatgattatcgtcggagcgggcctcaaccactggttccacctcgacatgaactaccgcggcctgatcaatatgctgatcttctgcggctgcgtcggtcagagcggcggcggttgggcgcactatgtgggccaggaaaaactgcgtccgcagaccggctggcagccgctggcgttcgcccttgactggcagcgtccggcacgtcacatgaatagtacctcgtacttctataaccactccagccagtggcgctatgaaacggtgaccgcgcaggaactgctgtcgccgatggcggataaatcccgttacagcggccacctgatcgactttaacgtgcgcgcagagcggatgggctggctgccgacggcgccgcagcttggcgtcaacccgctgcgtatcgctgacgaagcgaaaaaagccggcatgaccccggtggattacaccgtgaagtcgctgaaagagggctcgattcgctttgcggccgagcagccggaaaatggcaaaaaccacccgcgtaacctgtttatctggcgttccaacctgctgggctcctccggtaaaggccatgaatacatgctcaagtacctgctgggtaccgagaacggcattcagggcaaagacctgggcaagcagggcggcgtgaagccggaagaagtcgaatggcgggataacggcctcgacggcaaactggatctggtggtgaccctcgatttccgtctgtcgagcacctgtctctactccgacatcgtactgccgaccgccacctggtacgaaaaagacgacatgaatacctcggatatgcatccgtttattcacccgctgtcggccgccgttgatccagcctgggaatcgaagagcgactgggagatctataaaggtatcgcgaagaaattctctgaagtgtgcgtgggccacctcggtaaagaaaccgacgtggtgaccctgccgatccagcacgactccgccgcggaaatggcgcagccgctggatgtcaaagactggaaaaaaggcgaatgcgatctcatccccgggaaaaccgcgccgcatattattccggttgagcgtgattacccggcgacctacgagcgtttcacctcgatcggcccgctgctggaaaccatcggcaacggcgggaaaggcatcgcctggaacacccagagcgagatggatctgctgcgtaagctcaactacaccaaggcggaaggcccggcgaaaggccagccgaagctggaaacggccatcgacgccgcggaaatgatcctcaccctggccccggaaaccaacggtcaggtggcggtgaaagcgtggcaagcgctgagcgagatcaccggtcgcgagcatacgcacctcgcgctgaacaaagaagacgagaagatccgcttccgcgatattcaggcgcagccgcggaagattatctccagcccgacctggtctggcctagaagatgagcatgtctcctataacgccggttacaccaacgttcacgagctgatcccgtggcgcacgctgaccggacgtcagtcgctgtatcaggatcaccagtggatgcgcgacttcggcgaaagcctgctggtctatcggccgccgatcgacacccgttcggtgaaagcggtgatgggcgagaagtccaacggcaacccggaaaaggcgctgaacttcctgaccccgcaccagaaatggggtatccactcgacctacagcgataacctgctgatgctgaccctgtcgcgcggtgggccgattgtctggatgagcgaagcggatgcgaaagatctgggtatcgaagataacgactggatcgaagtcttcaacgccaacggcgccctgacggcgcgtgcggtggtgagtcagcgcgttccagccgggatgaccatgatgtatcacgcgcaggaacgtatcgtgaacctgccgggctctgaaatcaccggtcagcgcggggggatccataactccgtcacccgtattacgccgaaaccgacccacatgatcggcggctacggccacctggcctatggctttaactactacggcaccgtcggttccaaccgcgatgagtttgtggtggtacgtaagatgaagaacattaactggttagacggcgaaggcaacgaccaggtacaggagagcgtaaaatga

SEQ ID NO: 272498 - DNA, 1389 bp, Klebsiella pneumoniae
atgagtcaatcttccctcccggagaaggctaaccgctcggtcataaccgactggcggcctgaagatcctgaattctggcaacagcgcggccatcgtgtggcaagccgcaatttatggatctccgttccctgtctgttactggcgttttgcgtttggatgttgttcagcgcggttgccgttaacctcaacaaagtaggctttcagtttacaaccgatcagctgtttatgctgaccgcgctgccggcgctgtcaggcgccttattacgcgtgccttacgcctttatggtgccgctgttcggcggccgtcgctggacggcgttcagcaccgggatcatgattgtgccgtgcgtctggctgggcttcgcggtccaggatacctctacgccgtttagcatcttcgtgattatctctctgctgtgcggcttcgccggagccaactttgcctccagtatggccaacatcagcttcttcttcccgaaagcgaagcagggcggggcgctcggtgttaacggcggcctcggcaatatgggcgtcagcgtgatgcagctggtcgcgccgctggtggtctcgatctctatctttgccgtttttggcggtaacggtagcgagcaaccggacggctcgatgctgtatctggaaaacgccgcgtggatctgggtacctttcctgattattttcactctggcggcgtggttctttatgaacgacctgtcggcttcgaaagcgtcgctgagcgagcagttgccggtacttaagcgcctgcatctgtggattatggcgctgctctatctcgcgaccttcggctcctttatcggcttttccgccgggttcgcgatgctgtcaaaaactcagttcccggatgtgcagatcctgcattacgccttcttcggcccgttcattggcgcgctggcgcgttcgatgggcggggcgatctccgaccgcctcggtgggacccgcgtaacgctggtcaactttgtggtgatggctgtcttctgcgcgctgctgttcctgaccctgccgaccaacggccagggcggtaactttatcgccttcttcgcggtgtttatggtgctgttcctgaccgccgggctggggagcgcctccaccttccagatgatctccgtgatcttccgtaagctgactatggaccgcgtgaaggcccagggcggcagcgaagcgcaggcgatgcgcgaggcggcgaccgataccgcggcggcgctgggctttatctccgccattggcgctatcggcggcttctttattccgaaagcgttcggtatctcgctggatctgaccggctcgccggccggggcgatgaaagtgttcctcgtgttctatattgcctgcgtggtgatcacctgggcggtatacggtcgtaagcgtcagtaa

SEQ ID NO: 272499 - DNA, 1779 bp, Klebsiella pneumoniae
atgttaaaacgtctttttaccccgctgacgctggtcaatcaactggcgttaatcgtgctgctcgccacgattattggcgtcgccggcatggcgatctccgcgcgcctggtgaacggcgtgcagggcagcgcgcacgccattaacaaggccggttcattgcgtatgcaaagctaccggctgctggcggcgatcccgctgaatgaaaacgatcaaaaactggtggcggacatgaccgccaccgtcttcagcccggagctgcaaaattccgcccgccgcgacggccaggaaatccagcttaaagccctgcagcagtactggcagctggcgctggcccccgggatgcagcgcgcagtcaatcaggcggaagtggcccaggatgtcgccgactttgtcgatcgtatcgaccagttggtcaccgcattcgaccacaccaccgagcagcgtatcgaacgggtggtctggatccatcgcatcctcgccattggtatggcgctgctgctgatcttcactatcatctggctacgcgcccgcctgctgcggccgtggaaacagctgctgagcatggcgcgcgcggtgagccagcgtgatttcacccagcgggcgcacatcagcggccgcaacgaaatggcgaccctgggcatggcgctgaataacatgtcggaagagctggcggaaagctacgccgtgctcgagcggcgggtgcaggagaagactgccggactggagcagaagaacgagatcctcgctttcttatggcaggccaaccgccggctgcactccagcgccccgctctgcgaacgtatttcgccggtactgaatggcctgcaggggctgacgctgctgcgcgatatcgaggtacgggtttacgacctggaagacgaagataatcaccaggagtttacctgccactcggatgatgactgtgatgataaaggctgctacctctgtccacgcaatctgccgccgctgccggatggcggaacaacgctgaagtggcggctgtcggatgcgcatagtcagtacggcatcctgttggcgacgctgccggttggccgccatctcagccacgatcagcagcagctggtggataccctggtggaacagctgaccagcaccctggcgctggaccgccatcaggagaagcagcagcagctgatcgtcatggaagaacgggccactatcgcccgcgagctgcacgactccatcgcccagtcgctatcctgtatgaagatgcaggttagctgtctgcagatgcaaggcgacgccttgccgacggagagccgccagctgctggggcagatccgtaacgaactgaatacctcgtgggcccagctgcgggagctgttaaccaccttccgcctgcagttgaccgagccggggctgcgcccggcgctggaggccagctgtcaggagtacagcgcccacttcggctttacggtgcagcttgattaccagctcccgccgcgctttgtgccctcgcatcaggcgatccacctgctgcagatcgctcgcgaagcgttgagcaacgctctgaagcatgccagcgcgaccgaagtgaccgtgacagtgtcacaacgcgataatcaggttcgtctggtggtagcggataacggccgcggcgtaccggaccacgccgaacggagtaaccattacggtttaattattatgcgggatcgcgcccagagcttgcgcggtgactgtcaggtacgacgccgggaaaccggtggaaccgaagtgatcgtcacgtttatcccggaaaaaacgttttccatccaataa

SEQ ID NO: 272500 - DNA, 1383 bp, Klebsiella pneumoniae
atggctgtgtcgttccgtttgttgccaacgttgacctttctcctgctgttgccgggcgttcccgtctgggcgctgaccgccagcgacaccacccgccctgcgcaagcgcaagatccgctgcccgatatggggattgctccccaggttgatgacgacgcccggcactttgccgaagtggcgaagaagtttggcgaggccagcatgagcgacaatggtctgacggcgggtgaacaggcgcagctgtttgccatcagtaaaatcggcaatgaagtgagtcatcagctggagagttggctctcgccgtggggcaacgccaatgtcgacctgctggtcgataaagaggggaaattcaccggcagtaaagggagctggttcgtgccgttgcaggataacgaccgttatctgacgtggaaccagtactcggtgacccggcgcgagcacgatctggtgggcaacatcgggcttggccagcgttggcgggtcggcggttggctgctgggctataactcgttttacgataaagtgctgagcgaaagcctggcgcgcggcagcgttggcgccgaagcgtggggagaatatctccgcctgtcggcaaactattaccatccgctgggcgactggcagctacgcgataatcagactcaggagcagcggatggccgcagggtatgacgtcaccgcccaggcgcggctgccgttctaccagcacatcaacaccagcgtcagcgtcgaacagtatttcggcgatagcgtcgatctgtttcactccggcaccggctaccataatccggtggccgtctccgttgggctcaattacaccccggtcccgctggtcacggtgaccgctaagcataagcagggggaaaatggcgtcagccagaacaatgtgggcctgaagctaaactatcgctttggcgtaccccttaagcagcagcttgcggcagacgaggtggcgatcagcaactcgctgcgcgggagccgcttcgatagtccggagcgggataatctgccggtggtggagtatcgtcagcgcaaaaatctgacggtctatctggccacgccgccctgggatctgcagtccggggagacggtgcagttgaagctgcagatccatagtctgcatggcatcaaggcgctgcactggcagggagacacccaggccctcagcctgacgccgccggtagatgccagcagccccgatggctggagcatcattatgccggtgtggaacagtgaaccgggcgccgcgaaccgctggcgcctgtcggtggtggtggaggataaacaggggcagcgcgtctcctccaatgagatcgccctggcgctgaccgagccgctggtcaagtttaccacgccaggcgtctcctggacggactcgccttag

SEQ ID NO: 272501 - DNA, 2601 bp, Klebsiella pneumoniae
atgaagaccatccgaacgacctgcccctactgcggcgtaggctgcggggtgctggcgagcgtggacgacgcggggcaggtgagcgtgcgcggcgacgatcagcacccggcgaacctcggccgtctgtgcgtcaaaggggccgccttaggggagaccacgggcctggcggggcggctgctgacgccggaggtcgacggccagcaggtagcctggcctcaggcgctggcggaaaccgctgcgcgcctgagacagatcatcgaccagcacggaccgcaagcggtggccttttacgcctccggccagctgttaaccgaggattactatgccgccaataagctgatgaaagggtttatcggcgcggcgaacatcgataccaattcacggctgtgcatgtcgtcagcggtcactggctacaagcgggcctttggcgccgacgtggtgccctgcagctacgatgatgtggaaaacagcgatctggtggtgctggtcggctcgaacgccgcctgggcgcatccggtgctgttccagcggctggcgcaggcgaagcgggataatccccgattgcggatcgtggcgatcgacccccgacgcaccgctacctgcgagatcgccgaccgccatctcgcgctggccccgggaagcgacggcgggttgtttgcggggctgcttaacgccctggctgaggcaggagcctgcgtcgatggctttcgcgacggcccgcaggcgctggccgccgcccgcggctgggacgtggcgagggtggcggccttttgcggtctgcctgccgatgaggtggcgggattctatcgcgagttcatcgccgccccgcgggcgatcaccctctacaccatgggaatcaatcaatccgccagcggcagcgacaaatgtaacgccatcatcaacgtccatctggccagcgggaagtatggccgccgcggctgcggccccttttcgctgaccggtcaacccaacgccatgggcggccgcgaagtcggcgggctggcgacgatgctggcggcgcacatggattttgtgccagacgatctgcagcggctggcccgcttctgggggacggaacggctggcgcagacccccgggctgactgccgtggagctgtttgccgccattggccgcggcgaggtcaaagcggtctggatcatgggtaccaacccggtggtgtcgctccctgacagccacgcggtgagccaggcgctggccgcctgtccgctggtgatcgtctcggatgtcgccgcccagaccgataccggacgtttcgcccacatccgctttccggcgctggcctggggcgagaagaatggcacggtcaccaactcggagaggcggatctcccgtcagcgcagctttctgccgccgccgggggaggcgaaagcggactggtggatcatcgccagagtgggccaggcgctggggtatcgcgaggcgtttgcctggcagcatccgcatgacgtcttccgcgagcatgcggcgctgtccggtttcgaaaacgacggccagcgggcgtttgatatcggcgcgctggcggatctcagccgtgaggcgtgggacgccatgccgccggtgcgctggccggtcagccgcagcgaggtcgcctgggatatcacgcgcggctggcatggcgatggcaggctgcggatggtgccggtgacgcctcaaccgacccgggcgacaaccgatgccttttatccgctgatcctcaacagcgggcggatccgcgatcagtggcacaccatgacccgtaccggcgcagtgccgcggctgatgcagcatatcgcggagccaatggtggaggtggcgccgcaggatgccgttcgctatcagcttcccgctgacgggctggcgcggatctggtcgcggcatggggtgatggtggcgaaagtggcgatcagcgaagggcagcgccccggctcgctgtttgttccgatgcactggaacaaccagtttgcccgtcaggggcgggtgaataacctgctggccgccgtcacggacccgtattccggccagccggaaagtaaacaggcggcggtggcgattgccgcctggcaaccggcctggcacagcgagcttttttgccgcgaaccgctaccatttcctgcggcctggcactggcggcggcgggcggcgccaggcgtgctgcactactcgctggccggggaggcatctgcccgacagtggctcagcgcgtggtgcgcccggcgcggctggcagttacaggtggctgacggcggcgcggtgtggaacctgctggcctggcatcagggaaggctgatgctcggctggtggagcgatgcgcgcgagccggcggtggattgcgcatggataagcgctgcctttgccgcgccgccgtccgatgctgtccaacgacatgccttgcttagcggccgaccgggcgccgccgtcgcaccgcgggggcggatcgtctgcagctgctttggggtgggggaatggtcaattaacgaggccatcgccagcggctgcgccagcgtcggggcgctgggtgggaagctgaaatgcgggaccaactgcggctcttgcgtgccggagctcaacgcgctgctggcggcgcaacgaacccgggcgtaa

SEQ ID NO: 272502 - DNA, 4068 bp, Klebsiella pneumoniae
atgacgcggcgactggtggtgatcggtaacggcatggcggccacccggctggtgcagcggctggttgagcgcgaccccgcgcggtttgccattaccgtcgtcggcgacgagccgcacccggcctataaccgcattcagctctcgccgctgctggcaggtgaaaaaacggcggcgcagatcccgttgctgccggcggagtggtacacccggcacggggtgtgcctgcggtctggcgaggcggtcgatgaagtcgatattcagcaacggcggctgcgcatcgcggaaacctggctgccgtgggatgagctggtgttcgccaccggttcgcggccctttatcccgccgctgccgggcattgatcgtccgcaggttatgcccttccgcaccctggcggacgtggaacgtattctggcgatacccggcccggcggtggtgattggcggtggcgtgctgggggtggaagcggcggcggcgctgcgtcgtcacggcggagaggtcactcttctgcatcgcggcagcggattaatggcgccgctgaccgacgcttttgccgccgatgagctcaggcagcagcttgaagcgcgcggcattcgctgcgtgctggcgtgccgcatcgccgccatcgacgccgatggcgtgcggctggcggacgggcgcgtattccgcgccgccagagtggtgctggctaccggcgtgcagcccgacagccgtctggcggcgcagtccggcgtgctgtgccagcgggggatcgtggtcgaccgtcagatggcctcctcgctgccggggatcagcgccatcggcgaatgttgcgaaattgacggccagacctgggggctggtggctccctgcctgcgtcaggccgaggtgctggcggatcgcctgtgcggcgcccccggcgagggctttgtctggcaggacgccgggacccgcctgaaggtcaccggcattgaactctttagcgctggcgagcagcaggccggcgaacaggatgacatttataccagctgggaccccatcgaccgccactatcgccgcctgctgctgcgcgatggccgcctgcgcggcgtgctgctgatgggcgactgcaccgccgccgccgcgctcaccgcgcgcctggaaagcgatgagcctgccaccgtggactggctttttgacccctcttcaacgcagccgcaggctgcaggaataatgacgatgacgaaacctgtattagtgctggtgggacatggcatggtcggccaccattttctcgaacaatgcgtgagccgcaatctgcatcagcaatatcgaatcgtggtgtttggcgaagagcgttaccccgcctacgaccgggtacacctctccgagtattttgccggacgcagcgccgagtcgctgtcgctggcggccggggatttctttattgaacacggtattgaactccgcctcggcgaggcggtggcgaccatcgaccgcgacgcacggctggtacgggacgccgaggggcatgaaatccactgggataaactggtgctggcgaccggctcgtatccctttgttccgccaatccccggtaacgatctcgcggggtgctttgtctaccgcactcttgacgatctcgaccgtatcgccgcccatgccgccgcggcgaagagcggggtggttatcggcggcgggctgctcgggctggaggcggccaacgccctgaaacagctggggctggagacgcaggtggtggagtttgccccgaacctgatggccgtccagctggataacggcggggcggcgatgctccgggagaagattgtcgccctcggcgtgggggtgcataccagcaaagcgaccaccgccatcgtgcgcgaggctgacggcctgcggctgaactttgccgacggcggcgcgttgcggaccgacatggtggtcttctcggcggggatccgcccgcaggacgcgctggcccgcggctgcgcgctgcaggtgggcgaacgcgggggaattcacatcgacggccagtgccgcacctctgacccggacgtgctggcgataggcgaatgcgccctgtgggacaataaaatttacggtctggtggcgccgggctatcagatggcgcgcatcgccgcggccactctcgcaggagaggacgcctgctttagcggcgccgacatgagcaccaaactgaagctgctgggggtcgacgtggcctcgtttggcgatgcgcaggggcgcacgccgggctgtcagagctatcaatggaccgacggtccgcagcagatttacaaaaaaatcgtcgtcagtcaggacggcaaagccctgcttggcggcgtgctggtgggggatgccagcgactatgccacgctgctgcagatgatgctgaacggcatggcgctgccgccgcgtccggagagtctgatcctgcccgcgctggagggagccgcgccgaaggcgctcggcgtcgcggcgctgccggacagcgcgccgatctgctcctgccataacgtcagcaaaggcgatatctgccaggcggtgaacaatggggcgggggatatgtcggcgataaaaagttgcaccagagcggctaccggctgcggcggctgcagcgcgctggtgaaacaggtgatggagtatcagctggcggagcagggcgtcgaagtgaaaaaagacgtctgcgaacatttcccgtggtcgcgccaggagatctaccacctggtgcgggttaaccatatccataccttcgagcagttgattagccgctacggccaggggcacggctgcgatgtctgcaaaccgctggtggcctcggtgctggcctcctgctggaacgagtacctgctgaagccggcgcacctgccgctgcaggataccaacgaccgctatttcgccaatatccagaaggacgggagctattcggtggtgccgcggatggcggcaggggaagtgacgccggacggactgatcgccatcgggcagatcgccaaacgttaccagctctacagcaaagtgaccggcggccagcgcatcgacctgtttggcgcgcggctggaacatctgccggctatctggcgcgagctggccgacgccgggtttgaaaccggccacgcctacggcaagtcgctgcgcacggtgaaatcctgcgtcggctcaacctggtgtcgctacggcgtgcaagactccaccgggctcgcggtacggctcgagcatcgctataaagggctacgcgccccgcacaaaatcaagatggcggtctccggctgcacccgcgaatgcgctgaagcccaggggaaagatatcggggtgattgccaccgacaaaggctggaatctgtacgtctgcggcaacggcgggatgaaaccgcgtcacgccgacctgtttgccagcgatctcgacgaagcgacgctgatccgcagcatcgatcgtctgctgatgttctatatccgtaccgccgatcgcctgcagcgaaccagcacctggatggataacctggagggcggcgtcgcctatctgcggcaggtggtgctggaggatagtcttggcattggcgaggagctggagcaggagatggcccggatcgtcgacagctaccagtgcgagtggcagaccaccctcaacgatccgcagcgtctggcgctgttccgctccttcgttaatagcgaccagcccgacgaggctgtgcagcgccgcgatctgcgcggtcagccgcagccgctgctgactgagacgttgcccgaaggcgaactcccatcccgaccgtggcaggcggtatgcgatcttgacgccattccggcgcaggcggggatcggcgcccgcttaggggagcggcagattgccctgttccgcttcggcgagcgggtctacgccctcgacaaccgcgagccgggcagcacggccaacgtgctgtcgcgtgggctgttaggggacgtcggcggcgagccggtggtgatctccccgctgtacaaacagcggatacgcctgcgcgacggctggccgtgcgacggcgacgaacaggcggtacgcgcctggccggtgaaagtggaaaacggcaaagtgtgggtgggcaaccagcagctgctggcccgcgcggaggcctcctga

SEQ ID NO: 272503 - DNA, 789 bp, Klebsiella pneumoniae
atgaaaccattaattcaggtgcaggccgtcagccaacgcttcaacaccgccagcggcgagttcctggcgctgcagaatgtctccttcgatatcgtcgaaggggagaccattagcctgatcggccactcgggttgcggaaaatcgaccctgctgaacctgatcgccgggatcaccacccctaccgagggcggactactgtgtgataaccgggaaatcgccggtcccgggccggagcgggcggtggttttccagaaccactcgctgctgccgtggctgagctgtttcgacaatgtggcgctggcggtggatcaggtgttccgtcgcaccatgagcaagagtgagcgccgggagtggatcgaacacaacctggcgcgcgtacagatgggtcatgcgctgcacaaacgtcccggggagatctccggcggcatgaagcagcgggtgggtatcgcccgggcgctggcgatgaagccgaaagtgctgctgcttgatgagcccttcggcgccctggatgcgctgacccgcgcccacctccaggacacggtgatgcatatccagcaggagctcaataccaccatcgtcatgatcacccacgacgttgatgaagcggtgctgctctcggatcgggtgctgatgatgaccaacggtccggcggcgacggtcggcgagatcctcgcggtcgatctgccgcgtccgcgccaccgcgttcagctggcggacgacagccggtatcaccatctgcgccagcagatcctccatttcctgtatgaaaaacagccgaaagcggcgtaa

SEQ ID NO: 272504 - DNA, 885 bp, Klebsiella pneumoniae
atgaagcaggcacaacgtaagcaaccggtcgtcagcgtggacaacgcgcctggcgaagtgattatcctgccgccggtgcaggtccggcgcaccacgccgaccgtcacgcgctggctgcgtgagctcacccagcgcctgctgcccccgctgttggggctgggtgtgctgctgctggcctggcagctggcggcgatgcatagcaaaggctttcccacgccgctgagcacgctggactcggcgctgaccctgtttgccgatccgttctatcaggacgggcccaatgacatgggcatcggctggaacgtgctggcctccctgcagcgcgtggcggtgggcttcggcctggcggcgctggcgggcattccgctggggtttttgatcggccgttcgctgttcttcgcccgcatgtttaatccgctgattgctctgctgcgcccggtcagcccgctggcctggctgccgattggcctgctgctgttccagaaggcggagccggcttccagctggaccatttttatctgctccatctggccgatggtgatcaacaccgcggagggtgtgcggcggatcccgcaggactatctcaacgtcgcccgcgtcctccagctctcggagtggacggtgatgcgcaaaatcctctttccagcggtgctgccggcggtgcttaccggcgtgcgcctctccatcggcatcgcctggctggtgatcgtggcggcggaaatgcttaccggcgggctggggatcggcttctggatctggaacgagtggaacaacctcaatgtggaaaacatcatcatcgccatcgtcattatcggcgtcgtcggcctgctgctggagcagggcctgatgctgctcgctcgccgctttagctggcaggaaaaataa

SEQ ID NO: 272505 - DNA, 1257 bp, Klebsiella pneumoniae
atgggcgacaaattttcaatttcccggcggcgcttgctgcaggcaggggccgcgctgggcggcgcgatgctgctgccgggcgtgatgcaggccgcctgggccggcggctcggacaaaccggagcaaacccgcgtgcgggtcggatttattccgctgaccgattgcgcgccgctggccatcgccgcggcgaaggggtttgaccaaaaatatggcatcaccctggtggcgagtaaggaagccagctgggcggcggtgcgcgacaagctggtggccggcgagctcgacgcggcgcatattctctatggcctgctgtacggcctcgaactggggatcgccagcaagccgcaggcgatggccaatttgatgaccctcaaccgcaatgggcaggcgattaccctctccagcgagctgcaggagaaaggggtgaccgacctcggcgggctgaagcggctgatcgaccgcagcgcgccgggcagttacaccttcgcccatacctttcctaccggcacccatgccatgtggctttactactggctggcgagcgccggcatcgatcccttcaacgatgtgcgcaccgtcgtggtgccgccgccgcagatggtgatgaacatgcgcatcggcaatatgagcggcttttgcgtcggcgagccgtggaacgcccgcgctattaacgaccgtatcggcttcaccgcggccacttcccaggatatctggcccgagcatccggaaaaggtgctgggcacccgtcgcgactgggtggaacgcaacccgaacaccgcccgcgcgctggtggcggccctgatggaggcgcagcgctggatcgccgcctcgccggagaacacccgggagacggcccgcctgctcgccagacgcggctggctcaataccaaggagcaatacctcaccggccggatgcttggagagtatgacaacggccttggccgccgctggcaggatgcccatccgatgcgcttctgggccgggggcgaggtgagtttcccgtggctgtcggacgggatgtggttcctcacccagttccgccgctgggggttgctgaagcaggctccggattacctcgcggtggcgtcgcgcattaaccgcatcgatgtctggcaggctgccgcccaggcggtaggagggatcagcgcgccggcagccaggatgcgcagcagcacactaatggacgggacggtctggaacgggtccgacccggaaggctacgcccgccatttctctattcaacgtaagggggcatga

SEQ ID NO: 272506 - DNA, 1182 bp, Klebsiella pneumoniae
atgaataatacgactggtcatgcgcacgatgcgacggcctggctgcagctggcgcgtcgcctgcaaaaacaacagcttcagcagcttagccaactgggggaactggccagccagctcagcgcgctggtgcatatgctgcagtgtgagcgcggggcgtcgaatatctatctttgctcgggcggcttgctgtatacagcggagtgtcgggcgggaggggcgctggttgacgagcggctagccctgttttatgccagcctcgaacgggcgcgcgcggtagccggcagcgcgctgtgctggcgtatcgccagagcggttgacgagctggcgcagctcccggcgctacgcgcgcagatcggccgccggcaaattgccgctgaagccgcgacggagcagttcagccgcgtcatccgccatctgctgaacatcgccccgcagctcaatgacagcattgacgatccgccggtggctggtcggttggtcgccctgtacagctttatgcagggaaaagagctggtgggccaggagcgcgcgctgggagcattgggctttacccgcggcgagttcagcgacagcctgcgccagcagctggtggaccgtattgacggtcagcagccctgcttcgacagctttcaggcgctgggcagcccggcgaccgtccagttgttcagaacccagtgccacgccggtctggatattgaacagctgcggcggatcgcctgtacccgccagccggctgccgacggcggggaaacggcgctgcgctggtttggcctgcaaacccaacggcttgagcaactgcgcgaagtggaagagcaactgatcgacgatctgctggatgccaccgacgcgctgttagcagacgacgcgcctggctggcaggccggagaggaagacgatagcgtgacgccacggctcgataaacagctactgccgctggtgcgccagcaggcctatgagctgcagcagctctccagccagctggcctcgctgaaagacgtgctcgaagagcgcaagctgatcgaaaaagcgaaaagtctgctgatgacgcaccagggaatgcaggaggagcaggcctggcagacgctgcgcaagatggccatggacaaaaaccagcgtatggttgagatagcccgcgcgctgctgatggtgaaggcgatttggccgctaacaccaaaggagtag

SEQ ID NO: 272507 - DNA, 354 bp, Klebsiella pneumoniae; identical to SEQ ID NO: 138919

SEQ ID NO: 272508 - DNA, 243 bp, Klebsiella pneumoniae; identical to SEQ ID NO: 213996

SEQ ID NO: 272509 - DNA, 681 bp, Klebsiella pneumoniae; identical to SEQ ID NO: 213997

SEQ ID NO: 272510 - DNA, 231 bp, Klebsiella pneumoniae; identical to SEQ ID NO: 138916

SEQ ID NO: 272511 - DNA, 1101 bp, Klebsiella pneumoniae; identical to SEQ ID NO: 247400

SEQ ID NO: 272512 - DNA, 855 bp, Klebsiella pneumoniae; identical to SEQ ID NO: 214000

SEQ ID NO: 272513 - DNA, 813 bp, Klebsiella pneumoniae; identical to SEQ ID NO: 247402

SEQ ID NO: 272514 - DNA, 393 bp, Klebsiella pneumoniae; identical to SEQ ID NO: 225847

SEQ ID NO: 272515 - DNA, 849 bp, Klebsiella pneumoniae
atgacctttcaggcctggctgcagcaggcgatcgcccgcctggcggagagcgacagcccgagacgcgacgccgagatcttgctgggacacgttaccggccgggcgcgaacctggattttggccttcggtgaaacgacgctctctgctgacgaggcggcgaggctggaggcgctcttggtgcgacgccagcgcggggaacctattgctcatctggtcgggcagcgcgagttttggtcgctgccgctgttcgtctccccggcgacgctgatcccccgcccggataccgaatgtctggtagagcaggcgctggcgcgtctgccaaccgcgccgtgccgtattctcgacctcggcaccgggaccggcgccattgccctggcgctggccagcgaacgtccggactgtgaggtcaccgcggtggacgtgatgccggacgccgtggcgctggcgttgcgcaatgccgaacatctgggcatcgctaacgtgacgataagtcaaagcgactggtttagcgcgctggccgggcagcgcttcgccacgatcgtcagcaatcccccctatatcgacgccgccgacccgcatctcgccgaaggcgatgtgcgctttgagccgttgacggcgctggtcgcaggcgaccaggggctggccgatctggcgcatatcatccgcgagggacggcagtatctgcagcccggcggttggatgctgctggagcatggctggactcagggcgaggcggttcgcgcgctgttccgcgaagcgggctatctggacgtcgcgacctgtcgcgactatggcgacaatgagcgtctgaccctcggacgtttacccgacatggagaatgttggctga

SEQ ID NO: 272516 - DNA, 1083 bp, Klebsiella pneumoniae
atgaagtcttctattgttgccaaactggaagcgttgtacgagcgccatgaagaagtgcaggcgctgctcggcgatgccgcgacgattgccgatcaggataaattccgcgcgctgtcgcgggagtatgctcaactgagcgatgtggcgcgctgctataccgactggcgtcaggtgcaggaggatattgaaaccgcgcagatgatgctcgacgatccggaaatgcgcgaaatggcgcaggaagagctgcgtgacgccaaagaaaaaggcgaccagctggagcaacagctgcaggttctcctcctgccgaaagatcctgatgacgagcgtaacgccttcgtggaagtgcgcgccgggaccggcggcgacgaagcagcgctgtttgccggcgatctgttccgcatgtacacccgttacgcagaatcgcgccgctggcaggtagagatcctcagcgccaacgaaggtgagcacggcggctttaaagaggtgatcgccaagatcagcggcgacggcgtttacggtcggctgaaatttgaatccggcggccatcgcgtgcagcgtgtgccggccaccgaatcgcaggggcggatccacacctccgcctgtacggtggcggtgatgccggagctgccggaagccgaaatgccggacattaacccggcggatctgcgcatcgataccttccgttcctccggggcaggcggtcagcacgttaacaccaccgactcggctatccgcattacccacctgcccaccggcatcgtggtggagtgccaggacgagcgttctcagcataaaaacaaagccaaggcgctgtcggtgctgggcgcgcgcatccgcgccgccgaagtggccaaacgtcagcaggcggaagcctccacgcgccgcaacctgctgggcagcggcgaccgcagcgaccgcaatcgcacctataacttcccgcagggccgcgtgaccgaccaccgcatcaacctgacgctctaccgtctggatgaggcgatggagggcaaactcgacatgctgattgagccgattgtccaggaacatcaggccgatcagctggcggcgctgtccgagcaggaatga

SEQ ID NO: 272517 - DNA, 1257 bp, Klebsiella pneumoniae
atgacccttttagctcttggcatcaatcacaaaacagctccggtcgccctgcgagaacgcgtcacgttttcgccggaaacgctcgataaggcgctggagagcttgctggctcagccgatggtgcagggtggggtggtgctgtcgacctgcaaccgcacggaactctatctcagcgtcgaagagcaggataacctgcaggaagcgctgatccgctggctgtgcaactaccacggcctcaacgaagaagacctgcgaaaaagcctttactggcatcaggataatgacgccgtcagccatctgatgcgcgtcgccagcggcctcgattcgctggtgctgggcgagccgcagatcctcggccaggtgaaaaaagccttcgccgactccagccgcggccatcttaacgtcagcgagctggagcggatgttccagaaatccttttcagtggctaagcgcgtgcgtaccgaaaccgatatcggcgccagcgcggtctctgtggctttcgccgcctgtaccctggcgcggcaaatctttgaatcgctctccagcgtcaccgtgttactggtcggcgccggtgaaaccattgagctggtagcgcgccatcttcgcgaacatcatgtgcgcaaaatggtgatcgccaaccgcacccgtgaacgcgcccaggcgctggcggaggaagtgggcgccgaggtgatagccctcagcgatatcgacgaacggctgaaagaggccgacatcattatcagctccaccgccagcccgctgccgatcatcggcaaaggcatggtggagcgtgcgcttaaggcgcggcgtaaccagccgatgctgctggtggatatcgccgtcccgcgcgacgttgaaccagaggtcggcaaactggctaacgcctacctctacagcgtcgacgatttgcaaaacattattcagcataacctggcgcagcgtaaggctgccgcggtgcaggcggaatcgatcgtcgagcaggaaaccagcgaatttatggcctggctgcgtgcgcagagcgccagcgagaccattcgcgaataccgttctcagtctgagcaggtccgtgaggagctgacggcgaaagcgctggccgcgctggagcagggcggtgatgcccaggaaattatgcaggatctggcgcgcaagctcactaaccgcctgatccacgcgccaaccaaatctcttcagcaggccgcccgtgacggggacgacgaacgtctgcatattctgcgcaacagcctcgggctggaatag

SEQ ID NO: 272518 - DNA, 612 bp, Klebsiella pneumoniae; identical to SEQ ID NO: 267869

SEQ ID NO: 272519 - DNA, 948 bp, Klebsiella pneumoniae; identical to SEQ ID NO: 267867

SEQ ID NO: 272520 - DNA, 1653 bp, Klebsiella pneumoniae
atgcctttccgcgccctcatcgacgcttgttggaaagaaaagtacaccaccgcccgcttcacgcgtgacctgatcgccgggatcaccgtcgggatcattgcgattccgctggcgatggcgctggcgattggcagcggcgtgccgccgcagtacggcctctatacctcagcggtggcaggaattgtgatcgccttgaccggcgggtcacgctttagcgtttccggtccgaccgccgcctttgtggtgatcctctatccggtttcccagcagtttggtctggcgggactgctggtggcgacgctgatgtcggggatctttttaatcctcttcggcctggcgcgctttggccgcctgatcgaatacatcccgctgtcagtcaccctcggcttcacctcggggatcggtatcaccatcggcaccatgcagattaaagatttcctcggcctgcagatgccccatgtgccggagcattatctgcagaaagtggcggcgctggcgatggccctaccgaccattaacgttggcgatgccgccatcggcgtcgttactcttggcattctgatcctctggccgcggctgggtatccgcctgccgggccacctcccggcgctgctgggcggctgtgcggtcatgctggtggtcaacttgctcggcggcgatgtcgcgacgatcggctcgcagttccattatcagctggtggacggcactcagggcaatggcattccgcagctgctgccgcagctggtattgccctgggatatgccgggctcaaactttaccctgagctgggcctcgctgcaggctctgctgcctgccgccttctcaatggcgatgctcggcgccattgaatctctgctgtgcgcggtggtgcttgatggcatgaccggcaccaagcacaaagccaatagcgagctgattggccaggggctgggcaacattgtcgcgccgttcttcggcgggatcactgccaccgcggcgattgcccgctcggcggcgaacgtccgcgccggcgccacatcgccggttgccgccgtgatccacgccctgctggtgatcctggcgctgctgatcctcgccccactgctctcctggctgccgctgtcggcgatggccgccctgctgctgatggtggcatggaatatgagcgaggcgcataaagtcatcaatctgctgcgccacgcgccgaaggacgacatcgtggtgatgctaatgtgcatgtcgctaacggtgctgtttgacatggtgatcgctatcagcgtcgggatcgtgctggcttcgctgttgtttatgcgccgtatcgcacgcatgactcatctggcgccggtcaacgtcgaggtgccagacgatgtgctggtgctgcgggtaattgggccgctgttctttgccgccgccgaaggcctgttcaacgatctggagacccggatcgccggcaagcgcatcgtggtgctgaaatgggacgcggtgccggttctcgacgccggtggcctggatgccttccagcgctttgtgaacaagctgccggaaggctgtgaattgcgcgtatctaacctcgagtttcagccgctacgcacgctagcgcgcgccggcgtcaagccgctgcccggacgcctgagcttctaccccgatcgtcaggccgcgctggctgacctgtga

SEQ ID NO: 272521 - DNA, 1047 bp, Klebsiella pneumoniae
atgttaattcaggtgggagagctggcgaagcgtgccggactgacggtacgtacgctgcatcattatgaacagacggggctgttaacgccttcggccagaagcgaggcgggctatcggctctataacctgtccgcggttcagcgcctgcatatgataaaggcgctggcgcaggccgggctaacgctcgccacaatcaaggactatctcgatcggcaaacgctgtcgctgcccgagctgctgacgcagcagatagatatgctcaacgcccagctacgcgatgttggcaggctgcgcgaccgactattggtgctgcgcgaggcgctggcgagcggcaatgaacccgatctggagtcctggctacagacgctggagttaatgaaaatgtacgatcgttggtttagtcaacaggagttagccgcgctgccgtttgcggcacaggatgaacagcgggcgcaggcgtggcgcgagctaacggaggaggtgcagacgctgatggcgagcggctgcccgacggacagtccgcaggcgatgcgtctggcgacgcgctggatggagcgcctggagcaggatacggccgggcgtccggagtttctgacccgcctgaacgagatgcatgccgccgagccgcagatggttgaacagaccggcgtcacgccggcaatcatcgcctatatcaccgaggcctttgccgaaagcaaactggccatctgggcgcggtaccttgacgaagaagagatggcgttcacccgccagcactattttgaccggctacaggagtggcctgcgctggtggcgaagctgcatcaggcgtgccgggagggcgtagcgccggactcggcgtcgggtcaggcgctggcccgggcgtggcttgaactgtttcagtcctacgccggtacccggccgcagacgttgcagaagtttcgtcgggcaatggagcaggagccgcatttgatgaagggcacctggatgacgccggcggtgctgagctggctgcagcaggcgaccggatccttgatgcggcaggcgcagggacctgccgccgggtga

SEQ ID NO: 272522 - DNA, 276 bp, Klebsiella pneumoniae; identical to SEQ ID NO: 225856

SEQ ID NO: 272523 - DNA, 585 bp, Klebsiella pneumoniae
gtgaccattaaactgattgtcggcctggccaaccccggtgcggaatatgccgccacccggcacaacgctggcgcctggtatgtggatttactggcggatcgccatcgtgcgccgctgcgcgaagagagcaaattcttcggctacacctcgcgcatcaacctggcgggcgaggacgtccgcctgctggtccccactacctttatgaacctcagcggtaaagccgtggccgcgatggcgaccttttatcgcatcaacccggatgaaattctggtcgcccatgacgaactggatttaccgccgggcgtggcgaaatttaagcttggcggtggccatggcggccacaatggcctgaaggatatcatcagtaagctcggcaataacccgaactttcaccgtttacgcgtcggaatcggccatccgggcgacaaaaacaaggttgtcggctttgtgcttggcaaaccaccggccagcgagcagaaactgatcgatgacgctgtcgacgaagcggcgcgctgtaccgaaatctggttaaaggacgggctgaccaaagcgaccaaccgtttgcacgcctttaaggcgcaataa

SEQ ID NO: 272524 - DNA, 1092 bp, Klebsiella pneumoniae
atgggattcaaatgcggtatcgtcggtttgcccaacgtcggcaaatccaccctgttcaatgcgctcaccaaagcgggtattgaagcggccaacttccccttctgtaccattgagccgaacaccggtgtcgtaccgatgcccgatccgcgtctggacaagctggctgaaatcgtcaaaccgcagcgcatcctgccgaccaccatggagttcgtggatatcgcgggcctggtgaaaggcgcgtccaaaggtgaaggtcttggcaaccagtttctgaccaacatccgtgaaaccgaagccatcggccatgtggttcgctgttttgaaaacgataatattattcacgtcgcggggaaagtgaacccggcggaagatatcgacgttatcaacaccgaactggcgctgtctgaccttgatacctgcgaacgcgcgattcaccgcgtctccaaaaaagccaaaggcggcgataaagacgcgaaggttgagctggccgcgctggaaaaatgcctgccgcagctggaaaacgccggtatgctgcgcgcgctggatctgaccaaagaagagaaagaggccatccgctatctgagcttcctgaccctgaagccgaccatgtacatcgcgaacgtcaatgaagacggtttcgagaacaacccgtacctcgatcaggttcgcgccatcgccgagcaggaagggtctgtggtggtgccggtgtgcgccgccgttgaagcggacatcgccgagctggacgatgaagagcgtgacgagttcatggctgagctgggcctcgaagagccgggcctgaaccgcgtgatccgcgccggttacgctctgctgaacctgcagacctacttcaccgcgggcgtgaaagaagttcgcgcatggaccatcccggtgggagcgaccgcgccgcaggcagccggtaagatccacaccgacttcgaaaaaggctttatccgcgcgcagaccatcgcttatgaagacttcattgcctacaaaggcgaacagggcgcgaaagaagcgggtaaaatgcgtgctgaaggtaaagactacatcgtgaaagatggcgatgtgatgaacttcctgttcaacgtctaa

SEQ ID NO: 272525 - DNA, 330 bp, Klebsiella pneumoniae
atggcaacggcaagaagcggctatacgctgcaggtgataaaggcagggcagcaggggcatgttgaaatgagatgggggcatctcgcagacgttgatacgcgcgcggcggcggcggctatcatgcagcatatcgggcgttcttcgtcctcgcggggccagcaggagatcagcctgtcgctgaccaatgccgccagcggtatctcggtggagcttcatcacccggcctcaggggaaagcgctaccccggcttttattgaggctgagttaaagaaaattgtgcagatcgttgatggctacgaggcggcagaagatacccatattgtggagtag

SEQ ID NO: 272526 - DNA, 915 bp, Klebsiella pneumoniae
atgaagcactgtaaaatcatcctgttagtaggccttctggccagttccgcttcggcattagcagagaagatcggcgtctcaatggcctacttcgatcaaaactttctcactattatccgccagtccattgagaaagaagctcaagcccgccacgtcgacgtacagtttgaagacgcccgcggcgacaccggacgccaggccgatcaggtgcagagcttcattgcctccggcgtggacgcgatcatcgtcgacccggtggactccgccagcaccccgcagctgacgaagatggcgcagcaggccaaaatgccgctggtgtatgtgaaccggacgccgggggataaaacgttaccgcccggcgtggtgtttgtcggttcggacgagcgggagtctggcacattgcagatggaggcgctggcgaagctggcgaactacaaaggcaacgtcgccatcatgatcggcaatctcaccgacgccggcgcgctgcagcgcaccaaagatgtggagcaggtggtggccaagtatccggcaatgaaagtggtgcagaaacagccggccaactattcccgcagcgagggaatggatctgatgcagaactggacgggcaacggagaagcgattgatattgtggcggcgaacaacgatgagatggcgattggcgcggcgatggcgctggagaaaagccagaagaagctgctgatcggcgggatcgacgccaccccggacgggctgaaagccctggccagcgataagattcaggtgacggttttccaggacgccgtcggtcagggcaaaacggccttagcggtagcgctgaagctgattaaaggagaaaaggtcgagtctcatgtctggatcccgtttgagttagtgaccaaagaaaacatgcagacctatgtggaaaagagtcattaa

SEQ ID NO: 272527 - DNA, 1416 bp, Klebsiella pneumoniae
atgatgacaacacaccacgaccgtcactataaagccggtggcgacccgcgcacgctggctgattttatggccctgcgtgcagaaatgaacaagctcagccacccggcgcggccggatattaactggccgtatgccgagcagcttgcccgcgggctgttggagcatcacggcgcggacctgcagactgtcgcctggtataccctggcccgcgcccggctgggcggggtggcagggatcaatgaggggctgacgctgatggagtcgctgctggttcgtcaggggaaaaacctgtggccacaggcgctcccggcccggatagagatcttccgcaccctgagcaagcggctgcggcaggtgatccgtaccctgaatcttaccccagaggatgttgattcgcttgagcaggctgaacgttcgctgcaaagcttcgacgcagtgctccagcgccttgagatcgctcctgaaaaccagctgagcgacctgcgggcgctactgcacagcacggcaactcgcttcgagagcctcgaccctgcgccagcgcttcccaccgcgccgccggtggcggtgtctgacgcggaacttcccggcactctggtcagcgaagaggatgcggcgaaggttgagccagtgccagacctaaaacgtagaccaaaggctgagccgctggctccgccttcacctgcaaagcggcccgcgccggtggcggcgtctactccggcagccgcgccgcgctggaagccgtttatcgccgggatggttaccatgctggcggtaacgggtatcgccgtcggcggatggctggcgctgcgtcagtccgacttgccgcccatttcggtcacccaaaatgccggaccgataccgggcctgccggcgacaacgcccccggggccggttgatctgccacagacgcagcgccagcttggcgagcttgcccgcctggcgccggactgggcggtcagctacggcgaccagctggtccaccaggccctgatccgctggccggatcaggcgcaaccgctggcgcagcagtggcggcagcagctgagtgctggcgcattgcccgcggaaaaccttaccggctggtcggagggcatgcagcagctgcagcggctcgccgaccagctcaatgccctcgacgagcagaaggggaagtacctgacggtgagcgaactgaaaaccgcagtatttgccatcacgcagtcgtttaaccgcgctgttccgctggaggagcagctgcgccagctggccgcgcttcccgttgatcaaccctggccagccgcgcggggaagcctcgcggagctgcatctgcaacagctgatagtggagtatgccctgctgaagcgaaaacagccggcgtcgccgaccgctgcgctccccgcaaccggtgagccctcggtgagtgaggcggtgaaataa

SEQ ID NO: 272528 - DNA, 444 bp, Klebsiella pneumoniae
atgcctcgtccctccctgtatgacatcctgtacggcaatttcgccggcgggcttgacctgaatactgtcagcgaaacggatcaggtcatcctgtcggtgctcgataacatgcagcgcatcctcaactgtcgggccggaacgctggcgcatctgccggactacggcctgccggatatgaccgctgtcctccaggggatgccagcctcggcgcatcagctgatgagcacgttgtcggcggtgttgctgaaatacgaaccgcgtctgcagcggatcgcggtggtgatgctcgatcagcatgcgcccggcgaactgcgctatgccattgatgcggagctgaaggatattggcctggtgcgttacggcacggagtttatgcccgagggcagggtgttgatccgccacctcaaacgtcagcagtaccttgacgcccgctccgccctctaa

SEQ ID NO: 272529 - DNA, 537 bp, Klebsiella pneumoniae
atggcgattaccgcagttaaaccctccgccaggttgctggcattcctcatggttaccgtcttaaccggctgcggactgacgcagaccgtgaaagacggcgccgtttccgtgacccagtccattttttacccccaggtgaaaaccctgcatctggatcttcgcgcccgggaaggcgtgaataacaacgccaaaggcgcctccctggcgacggtggtgcgtatttatcagctgaaggaccggcaagcgttcgacaatactgactacccgtcgctgtttgccggcgatggccaggcgctgcaggcggaccgggtggcggaaaaaggtgttcgcctgcgtccgggcgaatcggtgaccgtcgatatgcccatggaaaccagcgcgcagtttgtggcggtggcggccatgtttatcgatccagacctgacgcaaaacagctggcggctggtactcacccgggacgaacttgatccggcgaggccgcgcattatcgaagccagccaaaatcaactgacgctgcacccgtttaaggagaagtga

SEQ ID NO: 272530 - DNA, 1047 bp, Klebsiella pneumoniae
atggcgcagctccggcctcagttgccgtacatgaatttttaccgcttctgccagttgctggagaagaaccatccgaaggcgccgatcatcggcagcggctggctattaggtgatgaacccatacgctttcgcccgcatccggggatgggctttccggctggcgaaatccgtggaatggacgatcctgaaccgccccgtccgccggcggttcgcgtgacttttatgggactctacggcgtggaatccccgctgccgacccactatagcgatgacattgcgcaacggcgggaaggcgtcgaggccaccgaggatttcctcgatatctttaaccatcggctgatcgcccagtattaccgtatatggcgcaaatattcctacccggcaacctttcgggcgggcggcacggacaacatctcgcagtatctgctcggcctggcggggctgggcataccgggatgtgccgccgttgccgcagcgccgctgtcgcgatttctggcgctgctgccggtgatgatgctgccggggagatccggggaaggcatggaggcgctggtggcgctcctggccccggggacccgggcgacggtgtaccaccacgatccctgccggatccccttgtcgcagccgttaacgatgagcgtccgtcagccggttagcctgcaacataggccagtgatgggaacccacgccacggatgtgaacggtcaggtgttgctgcagctggccacggaaaagcctgatgaggttcgcggctggctgcccggcggcgaactgttcagcgacctgatggcgcttctgcacgtctggctcggatctcatcttgacgtgcggctgcagctttgcgtcgcccgccatttactgccggatgcgcaactttgctgccagcaggagcatgccgtccagctcggccgtaccgctgtgctgcgtccgctggatgcgcagaaacaggctgacgacagagtcacgatttatctggggcgctatcagcgcgtccgggaaaatatccaccgcagggagagcgatgaagatggcgattaccgcagttaa

SEQ ID NO: 272531 - DNA, 3402 bp, Klebsiella pneumoniae
atgaatataccgggtaatggcctgggccggtttggcctggccgggcttacgttggccgggatggctgcaatatggtgggggatcacccgctatggcggcatgctgaatatcaatacgcggggcgagcaggtactggtgtttgtcctggtctgtctggcgttggtatttgttttttaccttcctgcaatgtcccgccgtgtgaaggagagtttatatcgccggcagtcgcagcaggccagcgtcttacccggcgaagaagggcgcgtggcgctgacacctccccatcctattacggtgggggaaattcgccagactctacgctatcagtatggacgcgcctggtcccgcaaagtccgtattctgctgataattggctcagtcagagacgtagaacaactgaccccaaagctcacgcaggaactctggcaggaagatcaaggtacattattgctgtggggtggagaccctggggcagcggtagataacgcctggttcacagcgctgcgtaaactgcgttatcgcccggctgatggtatggtgtggataacatcgggctttgacggcgttttgacaacgatgaacagaacgaagcccaggctcacgccagatgaaatggacagtgtgtctcactctctaaagctacgcttcgaagctcttggctggctatacgtctggtcgctgtatgaggggggcaacgaaaaaaatggacgtatcactcagcctgtaggctgcctgttacctgcaggttgtacgccgcaaatagttgccgaacagttcactgccctggcgtcgttactgatagagcagggcatccagcagatatgcgggcaaccacagcacaattttttactcgcgctggccgaccagttgacccgtaaaccggaaacggtggtggaaccgttatcgatactgcttaatccataccgaccattgccgctggccggggtggtatttagtgaggcgtcagtagaggctggtcgcagtgtccgtcatcactggggacgggataaccgctgggaaacgataccagactcagtgctgtggttgccagccggtctacgtccgcgcaaacagggagtcaactggatgcgtgggatgagcgtggccgccgccgccctgatgttactctgggccgcctcaatgacagtctcttttatcgccaaccgccacctggtggcgatcgcacaggagcaggtgcggcaggcctcagcggagaaacagtcgctgacgctccgcctgcatgcgctctccgcgttacagaaaacgctttctcaactggaataccgctcacagcacggcgcgccgtggtacttccgcgctggcctcagtcagaacgatgacctgctggcggcgctgttcccgcgctacggagagagggcgcagccgctgctgcgcgatgcggcggctgaacatcttcagcggcaattgaacgccttcgtacagctgccgccggacagcccgctgcgagagaagatgacgaagaccgcttacggacaactgaaacgatatctgatgtttacccgcccggaaaaaatggacgctacgtggttcgccaccacgctgatgcaggactggccgcagcgctcaggcatcgctgacgccgtctggcagggcagcggcccttcgctgctggcattttatgccgccagcctggcatcgcatccgcagtggcgtctgcctgtcgatgacggtctggtcagccaggtgcgcacacggttaattcgccaactgggccagcgcaacagtgagtccacgctttaccagaagatgctcgcgcaggtggcgaatcagtatgccgatatgcgcctggcggatatgactgccgacaccgatgcttcgcgtctgttcagctctgatgaggtggtgccgggcatgtttacccgtcaggcctgggagcaggccgtgcagccggccattgagaaagtggtcgcggaacgccgcgatgaaatggactgggtgttgagcgatacgaagcagactgccgcgcagtcgacgtcgccggaagctctgcgagccaggctggcggagcgttatttcgctgattttagcggcgcctggctggatttcctcaacagtctgcgctggcagcgcgcggcgaccctctccgatgctatcgaccagctgaccctgatggccgatgtgcgccagtcgccgctggtggcgctgatgaacaccctgagcgtgcaggggcgaaccggccagaccggggaagccatcgccgattcgctggtcaaatcggccaggcagctatttaaccgtgataactcgcccgtcatcgatcaacggtccggcgcgcgcggtcctctggatgccaccttcggacccgtgctggcgctgctggacaatcgcgacggcgggacgcccaccagccgtcttagcctgcagaccttcctgacccgcgtcacccaggtgcgtctgcgcctgcagcaggtcaccaacgccaccgacccgcaggcgatgacccgcctgcttgcgcagacggtattccagggcaaggccgtggatttaaccgaaacgcgcgactacggcagcctggtggcggcggggctgggccagcagtggagtggatttgggcaaacgctttttgttcgcccgatggaacaggcctggcagcaggtgctgaccccggcggcggaaagtctcaacgcccagtggcgcagcgcggtggtggaggactggaatagcgcctttggcggccgctacccctttaaaaataccagcagtgaagtctctctgccgctgttggcaaaatacctcgacagcgagaccgggcgcatcgcccgctttctgcagacccggctgaacggcgtgctgcataaagaggggagccgctggatggcggacagtatcaatgctcaggggctgacgtttaacccggcctttctgcaggcgatgaataccctgagccatctctccgacgtcgcgttcgccaacggcgaagcgggattgcattttgcgcttcgccccggcacggcggacggcgtgatgcagacggagctggtaatcgacagtcagaaacttgtctatatgaaccagatgccggtctggcggcggttcagctggcccgctgacaccgaagcgccgggcgccagtctgagctggatcagtacccgggcgggcacccgccagtatggcgatttcccgggcgcctgggggtggatccgtctgctggataaggcggtggtcagcgcttatcccggaacgagcagcagctggagcctgagctggaaagcgccggatggtctgttgctgaactacacgctgcgtaccgaggcgggggaaggaccgctggcgctgctggcgctgcgaaactttacgctaccggagacgatattcagcgtgcgcgcgtctgctgaacgtgttccgctgaccgacgatatacccggcgaagagggatactga

SEQ ID NO: 272532 - DNA, 267 bp, Klebsiella pneumoniae
atgtccaaaggttttgtattactcggccataaaaccacgcacggcggtgctgttatttccgcatcctccaccatgattgtaaatggaaagcccgtagcgctggtgggggataaagtcagctgcccgattccgggacatggcactaatgccattattgagggagcgccggaatggtcttccgatggtaaagccatcgtggtcgatggctgcaaatgtcagtgcggttgccaggtgatttccggcgcgccggaatgcgcgataggataa

SEQ ID NO: 272533 - DNA, 894 bp, Klebsiella pneumoniae; identical to SEQ ID NO: 216887

SEQ ID NO: 272534 - DNA, 441 bp, Klebsiella pneumoniae
atgactatcacattacaggcagtaaacgagctcatcgcctccctggagagcgcaggcgagatgtcgataagagatcagaagttcctgaagctggctaaagagtttcgcatttgcagtgcttcactggatgccgccatcaaaaccgggaatgtactggcagaccaaaatgctcagctggcggcggagaatgtggtgctgaaggaaagccgcaataatctggctgaattcatccatgaagagcttgattctgattacccgctgaatatgaatctggacacccccgccaccgatcgcatcgtagccgtgattaaggctgatggagtggagtcaggaattaaaaccatcatggtgatgctgaatcaccaggctccgggcgtcagtgatgcaataaacgtgttgcgaatctactgctctaagctgcgcgagggggccgacaaatga

SEQ ID NO: 272535 - DNA, 555 bp, Klebsiella pneumoniae
atgacacgctcaaacgcaatccagattatccatatcgccaaaaatcagctggcgcttgatgatgacacttaccgctccctgctgggggcggtagttcccggcaagtcgagctgtcgtgagatgaccatcatcgagctgcaggatgttattcaggcgctagaggctaaggggttcaaaagcaaacctcagcgccgctctaagcgccgcatgtctgccccgtcagatgtgagcctgaaaatccgcgcaatatggaaaacgatgtttaaagagggttttatccgggacggtagcgatattgcgctcgaccattttgtccagcgccagacccgtatccgtaatggcggcgctggcgtctccagcctggaatggttgcgcggtgatgccgaagcgaatttccttgagagcctgaagcaatggcacattcgggcgatgagagaggctatgttagcgcaccgcgtcccgctccctgaaaatccggtcaccggcgaagaaagccgagactatgacacaatctgcagcgcttacgctgacgcagccagaaggtggataaaatga

SEQ ID NO: 272536 - DNA, 2247 bp, Klebsiella pneumoniae
atgtaccatctcgacaacaccagcggcgttccggagatgccggagccgaaagatactcagtctatttcgccacgttggtttggtgaaagtcaggaacaaggcgggataagctggccgggtgcagactggttcaatattattcaggccgaacttcttaatattcttgctcgtgctgagttagagccgggcaagcatgaatttgaccaactggcgacagccattgaaaagctgtcttctgttcttgagactaaaatcaaccagcctgacggtttcagctttgtaggacgttgcccggatattgcaactctgcgaacgctggaacctcgtttccccggacaggctattattctggagcgtgctgtaactgatggtccggtgctcaatgaaataatcacccacaatccagcgccacaggaaaccgacgatgacgggtattcaaggtgggtgacgccatcaggtaatgtctgggaggcgcaaacagctcttggcttaaatatttttttggctggcgtttctgctaatacgcataaccttgctgaatgtctcaaccgggttgttaaagataaggtcagtcgggtcatttcaagaggatatgtggcgggaggtgtgggctctgcaatcaggatccctgcattaccgagatcggatggttctaccgtctatgttatgaatgaacaagttcgcatccccacctttcttgcgatttatgcctcggatggattgatactggactggagtaattttactacggccacggcgctggttgttgataatgagtttcctgggctgacaaatgcaatgatgttcctgaacaatggaccgggctggggggcagggtcaggtgcatcatcatctcacaactcaggggggatttttcttaatggtgcgcttatcaaagggccgggaagggacaatacgcaatatcccggcatccgctatggcaacgtcacccccggctttgcccactgtcgtaatggtaagatcattggcggacgggtttctgggtttaaatcagggttaaagcttggctatgtggatacctacatgccagagtttattgatattcatctggtcaaaaataagtatgcaatagagacggattacggtactgatgccaacggcaaaattatcttcactaactcaggggaaacgatcagggttattcgttgtatccttggggataattcctcgcatcctgtttatcgcaatgacagggggcatcatcttcgcctgattgattgcaatatcgattacaacaatggagatcttgtccattgttccccttacaatcttggcgagacagtcatttttggggggtggcttgaaggtaatgaggggcttttcctgaattgtccggtaagggctatttccgatggagaaaactccctctggattaccggtgcccccaaaatctacctaaaccgttcagttaatgaggctttttacggagttcgtgagcttgtttttggggataccgatcgcactgtcctgcatgtcgacgcatcaatttttgcgaaaggaccgtatgtcaatggaccatatggggcatttaaatcacctaacccagcaaacaaggctcttattgagtttgattttcctcgaagcatggcgacttatcgctttctgccatcgtacgatcatcgaattaatagtgttcttgcatttaatggaactgaaggtgtcgatgttaataccacaaaagaaaccggtgatttttttgttaccaagaccggtggggctcaggtcaggtttggaggagctggagataaagatgaacatgatgactacattccggttctgattacgaccacaagtcaaaccgacgttgttcagctgtattacagcaaacctatcaataccggagaacagcgaaaaaaacttagtgcaacatgctctgttaaagtaggtgatgctacgggttctgtgaatgttcgtgcttgtgcacgagtcgtgagcagagttgacaggaaagcaaatttaacaacgggtgttgtcagcgatacggaagttcatactgtcaatcttggtaccacacagaacataactacagcgttgactaaagagggtatcacggtcacaaagaatgattttatgggcacctaccctcttgaggttgatcttgttggtgggttattcgcctacatgggtctcctttacacgggttatgttggaacaataatggttaaacttccggcatggtggttcgctggttccaaaatgaccaatggctatcgcattgcgagttaa

SEQ ID NO: 272537 - DNA, 129 bp, Klebsiella pneumoniae
atggccttcctgatgataaataacaacgtcgctttcttcaccgccacggggacggctccctttatcctcgacggcgatggccaccatgccgccgcgacgaccaccgacggcgacgacaatggcctctga

SEQ ID NO: 272538 - DNA, 447 bp, Klebsiella pneumoniae
atggccttcctgatgataaataacaacgtcgccttcatcaccaccacgggggcgactccctttatcctcgacagcgatggccaccatgccgccgcgacggccaccgacagcaacaacaatcgcctcggagcctgcaggcgggacgctggaaaagccatagttctggaagcgctcgacgtcgtcattggtctcatcggccagcgactgcacctgcaagttctgccgcccgaggctgtccgtcacaatgcgcaccagcgcccggtccaccatcaggcgcaggcggcggccgatggcggcgatagaacgggaaaagttgacctccttcagtcccatgtcacccccacagaagtcttcgacttcgcctttttacccttacttttagctttctgttcgggcatatccagcgactctggcgggaccagtgtcagcacggtcagccgcccctga

SEQ ID NO: 272539 - DNA, 210 bp, Klebsiella pneumoniae
atgaagaaacatatcaagcccgcccgcgcggggctgcaggtgcgaaaagctgatggccagcgcctcagtcctgaaggggaaacgctcctcatgagtgcatggtggcatcgccgcgaagctgaaggtgatgttgttatcaccgatatccaggctgaatccgtaaccgaaccggcggaagtccgccagacccgaaccgcaaaggagaagtga

SEQ ID NO: 272540 - DNA, 1572 bp, Klebsiella pneumoniae
atgttaaaaaaacttaccggggccatccgcagcctgttgagtccctcaacgggtgagccggtcaccgtcagtgaatcggatatgaaacaagcagaggcccgggccgggagcgtcagcgtcaggcgaccctctccgggcatcagcgtggcgagtaccatatccccggccagactggccggggtgttacgtaatgtgacggaaggcaatgctactgattactttatccttgccgaagagatggaagagcgcgacctgcactattccagcgtattacgtacccgcaagctgaccgtcgctggtatccctccggcagtggaagccgcaagcgatgatgagcatgatgtgatgctggctgatgccgtacgcgatctgattgaacagccgcagatacctgagctgctgtttgacctgcttgacggactgggcaaaggcgtgggtgtctgcgaaatcctctgggacacccgtgatggctggaaaccccgcgactacgaatgggttgacccgcgtttcctcaaaactgaccgcgagacccttcgccagttccgcctgctgaccgatgagcaaccggttgatggtattccgctgacaccgggtaagtatgttatccattatccccgcctcaagtccggtctgcccctgcgtaacggtctggcccgtctggtggcggtgatgtatatgctgaagtccttcaccgtccgtgactggtgggcgtttgccgagaagtttggcattcccatcgtcgtcggtaagtacgggaccaatgcctccgatgagcagattaagatcctcattgacgccatcagttccatcgcttccgatgccgggtgtgctattccccagagtatgcagcttgagatgcaggagacggccagccgtaacggcggtggggctctctttaaagaaatggcggagtggtgcgacgcccagacaagtaaggccgtactggggcagaccatgactaccgatgacggcagttcgcggtctcaggccgacgtgcatgaccgggtgcgcatggatattgcccgctgggatgcccgtcagctggaaaacaccctcaatgagtttctggtccgcccgtttattcagttcaactacgggccgcaggaaaagtacccgcgtgtaaagctggccatcagcgagccggaggacctcaaggcctttgtcgatgcacttattcccctggttgatcgtggtctgcgggtgcaggaatctgaggtccgggacaagttcggtctggctgagccggagaacggcacggcaatactctcgccgtccaacagcttctccgccttcagcccggcaccggcgctgaaccgcgagcggctggcgctaaaccgtgctcaggacgatgagattgatgtgatggtcagcgaggcgctgaaggactgggagcagaccggcgatgcctttaccagtccggtactgcagctggcgaaggacgcggggagctttgaggagtttctggcacgtctgccggacctgcagaagacgctggagcctgccgagttcgtcgagcaactggcgatgttgagctttaaggcgcggacactgggagatgcgaaagatggctaa

SEQ ID NO: 272541 - DNA, 522 bp, Klebsiella pneumoniae
gtgccgttcctggtcgagctggccaatgtgccctacaagcagcaggagcaggcgctgttctttatctgcgatcggttgccccgccgcgacggtatcaagctcgatggccgggggaacggtaactatctggccgagcaggcggcggagaagtacggcgctgaggtggaagtagttatgccctccgtcgcccactaccgcgagaacatgccgcgctttaaagcggcgtttgaggatgatgagctggtattaccgaagcatgaggacgttatcagcgacctcggccagattgtcgttcagcgtggggtaccgggaattgatgaccgggagaacacaggcagcgatggccacaagcgtcacggcgacagcgcgtatgcgatcttcctcgcctttctcgccagtaaagaggactgccagcgctacgaactgcaccgacttaacactccccaacagcagcgcaacagcgacagtcatcgccagttgcgcattacccgtggccttaaaaatcagcgaggactgctctga

SEQ ID NO: 272542 - DNA, 141 bp, Klebsiella pneumoniae
atgtaccgggtaaaacagctgttcgggggttcactgacactgcgtgactacgatggtcaggttgcagaggctatggccctggtacgagcgctgaacaaaatgacgaaagcaggtatgcctgaaagcgtgcgtattgcctga

SEQ ID NO: 272543 - DNA, 261 bp, Klebsiella pneumoniae
gtgaaggatgcgctgggcttcaccattcaggtgaccgaaatcctgccacatcacgtgatgcgcgacatcatgtatccgatttattcgcacaaataccgttacctgctgcaggtgacggtcacggatatgccgatgatccgctttcgcagtatcagcaacgtcctgacaccgttaattagtttgcaggcgcagatactggaatgttttttacgtcgttaccggctggccgggcacgattatgattttctttacgaggtttaa

SEQ ID NO: 272544 - DNA, 207 bp, Klebsiella pneumoniae
atgattgtttcagcccccagcgattatcgcgaagccgctcgtcgccgtctgccccgtttcctttttgactatattgacggtggcgcggtggcggaaaataccatgaacgccaatgccgccgagctcgcctcggtcgcccttcgccagcgcgtgctgtgcggggcgggtgaaccgacgctggccaccaccatccttgatgccccatag

SEQ ID NO: 272545 - DNA, 156 bp, Klebsiella pneumoniae
atgaaaatggtggaatgtttgggaaataaaaaagtaccttcgagtgtaatgccattttttctttgctcgtgtgccattcccaaatcagaaatggatgacagtcaatataattttgtggcgggcatggcgggcggcattgacgttttttttaaataa

SEQ ID NO: 272546 - DNA, 669 bp, Klebsiella pneumoniae
atgacttggctcggcattccattcccatcaagcaattcaaattttttagattcaggtattttaacactacgtaaattaccaactatagttgtggattctgggtttggttgggatagcgtttttgcaagtactctaggtgctattattggcgcagctattcccgcagcaatctcatattacgcaatttcgaatagtgcaaaaaccatgaaaactgatcgcgatgagcatgctaaatatgcccgagagcaactcagagcacaacttgtctcatcaagcagacaaaattggatcaatgaactaagagataatgcagctagatatatatcagtggctaacaaattaaataatttacaaatacttataacaaatgaatttagaaagcacgatcaaaaagatgattattattatcgtcagattcgaatggatgccacaaatattaaaggtgatctaactttccttaaagcaaaaattgaaatgttactcaaccctcttgaaaatgagtctattgaagtgatcaccgcattaaatgattacactgaaatttccaatgactttaaacctggtgatgatcatgattttgataagataatggagattattaaaaacataaaagacaacattaaattaattagcaaggctgagtgggtaaaaacaaaagaattcaagtaa

SEQ ID NO: 272547 - DNA, 1140 bp, Klebsiella pneumoniae
atgaccaaggcagattttggtgtaactattgacgatactttaataactgattttcgcgatgtggttaatgaaggggagtttgcttacagctacttcataaacagaaatggtaaaaaccagttcagccctatctgttcgtgcatggattggataagcgtttctgttcgcaatctgatgaacttccctgagctgtcggaagatattgatgtcaaggccatgcaggtttactcccttatatcatctattgatattgctgtggaggcgttgcagcagcttcaccgcatcattgagagtgatcataagttagcgaggtggcctttcaagaaatcagcgaatgtctttaagaataaaacgccctatctttcacatgaggatgatgacgcatactttaagagtattcgtgctatctttggtgctcaccctacaaatcttaaaaatagtgatggtgaacgactgtttgcaagctggcctcattttcatgctttcaatgaaaatgatttcactataagcctttacaacaacacgccagggaaagatgatgttattttcggcattaagttcgatgaactaattacatatattgaagataggtataaatatctaacaagcctaaagggttctgtaatagcaatacgtataaaacattacagcaccctatccaaacagattataccgtctactgataacattcatgctgagttaaagttgcttctttcagaagttgcggtgcgaggtgataatgattattaccgaatggaagtggaagagttaataaagctgttcgaggggaatgttaaagaggcacatctcaaggatgaagttgacgtatttttaagtaaactacatccaattgcagtagagattagatataatcttcaggaaatgaaaattgaggatttagcaactaagcatggcgtgatgatttcaacgcttccgaaaaatgccctgcattacgttcttcagaaaatgtttgcttggctccactctgatagatatgacccaatgggtggcttttacttggacaagttaaatgaatattcaggcgggcgatacaatttttgttctgaggatgatgacagtacaacactattgaagctccggatgatgttgcattggtatcatcaacaaaaagaggcttag

SEQ ID NO: 272548 - DNA, 873 bp, Klebsiella pneumoniae
ttgaaaaataattatttaatatcatatgattggctaaatgcgctgaataatcttgagttactgtcacttcattccgaaatattaacgcagttgcgttttagaggtgtcattcgcaccaagaataatcctgttggcgactatgctgaatggctggtttctaaagcactgggtatgactcttctcagtaattcgtcggcgggcgctgatgctattgatgctgatggcctgaaagtgcagatcaaagctaggagagttacgccggataatccttcccggcagcttagtgccttgcgtaactatgaggcagccgattttgattatttaatcgcggttattttcgatgagacttacaacattcttgatgcttacaaaatcccacatgaagtaatacgagattatgcacggcatagtgaccacgttaacgcacatatcgtaaacctcaagggcgtgattcttactgatccccgagttagttccatcaaagaagacttgattgtcaggagttcggcttcagtcaatgaagcggctatgcaaacccttccacccgaacctatgaaagaggttttgaatcaaccagagaagataacgagtagtgttaccctggtcagcctccttaaggctattgggatggagtgcttcgtaaactactaccatcattttgccgattcaaatttaccaagcgcttatatcattgagcaaatgcacttacgtgagggttatacagagaaaagttgccggagccgtctcagtaaagcgcgaaaagtgatcagggatggtttaagtattgaggctttggcgttgatcgctgactctgagcgaatgcaagattctgtcagaaatgacgcgctaaaacttatcagcgttctggagtga

SEQ ID NO: 272549 - DNA, 753 bp, Klebsiella pneumoniae
atgtcaaaaacacggcttagtaagcccggtttttcagccaagtctgtgctgaccattatgttaatcgctgcgtcatctggatcttatgcagcagaaagcatcgatcaactggcgacgcgcatcggtatggatcacttccgggaagcaatcaaaaagggtgatcgcagcgccttcaaaacgctgccggcaaaaggctataaaaacggacttaccgggttgctcatcaaaactaacacctacattaaccccgaatacagctttgctgattgcgatacggacaccgttattatctcggtgcaagaacacaaaacactccctggttgccgcatatctctaaagctagcgactaaagatgctgacggtagctatcacgataatggcattcgcatcgaatacggtattgcgaccggctccaaaaagtttatcgccaacaattcaatgtgggctcaacatgtcatcaacggtgacaaagtgcttgaaggcgtcctccatccggacaaaacgagtcacaacaaagatcaaatgtgcacgggtatggcacaattcactgcaaacgtaaccgaaggccgaaacagtggaatgatgaaaggagaatattatcagcgacttgataatatgaacggtaagtcaggcgtcacacctcaaatgatcacactctataagagctttgttgactatgtgtatgatcatccaagacaagatgctaaggtttctgcggcatttatttacgctaactgcctgaataatttctaa

SEQ ID NO: 272550 - DNA, 1116 bp, Klebsiella pneumoniae
atgagcgttggcattgtcacatttcacaagcatacccagcttggtttttaccgttacggtcatgatgattactgtgagccacttgaaatggatgcccttctctcatctctccatgtgtggtttcaggatagagtgtcacttgaagacacgcttctttgggatgacgaaactcctggctactctcatcgtaaaaaggtttatctaaaatcaatcgaaaaagatgaggagactggcgagtatattcttgtcctttggagagcggtgggaagtggcgatggtgtttacggcattaaagctgatgcgcgacttgatgacaacactttatatgatgctaataatgcagcagatggagcgcgagtcatttggggtgaagcctcctattactggtttatcccatctaaaaacttgtttgcgtccatccgattctctaactcaatcgcagatactaacctgatgaatttatttttcagggattttgtctgtttacacgcagacataagagaaaaaagacgagaagttaaagagggaaaaacaggagcttacacaagtgtatccttccctgcgcagcaagctggcgaaactggaaatctgtggttccgcatttactcaaaacagtatacaaaactcaccacacgagcagatcttggtgctatcgcccgtgacataacgcattttgtaaagcgtgaggtaattgctgcaagagaagtcgaccaatccgactggacacgatttttcggaagacttccattcgtttctgctgaaattacaaaagatacccgtaaagtagagataaatattgaagcgaaacctacggcagaagaattgcagcaaattttcgagcaatatgccgaggattataatggcggtttagacggctggcgtaaccttgggtttagaaaagaaggtgttggtggtatttgttggttaaatagctttgttgtaaaaaatgttctgccaatagatgatacaactggtggcggcgtggacgatacaggccattatacggctcagcggctgtttactgctctacaattcaaacgcgatggtttgcttgcgccattcggcgttgccgtggcagaagccgctgccccccaagcagttcgggaattaccatga

SEQ ID NO: 272551 - DNA, 537 bp, Klebsiella pneumoniae
atgaagaattacacaactatagcctgtataggctggcatctacttttagctgtggcagtaacttatattagttactgctttaggctagatattacttttaaagatgttgaccccataatatcaatattgcaaaacacatcagcaatgatttttacaataatgggtatctggattgcttatgtttatccaaatgctgttttaaaaattgttcaaccctcaaaagtgacaacaattttctcagaagatgacctaaaaagagtaaaactgttagtcggggtggtaatttcctcagcattcattctgttattattattaacaggagttacgttaaaaacattcctgacaaaaactgatatttttgcacgatactggcaagtatttacaggtattggcttatggtgtttactgtctttgatttatgcgcaattgttttgtatttatgcggtaattgcatcaagtgtaaatttcattatcgacttaaaaaacttaaatacaaagaaacgattatcggaaaaacttgatggaaaacagaaataa

SEQ ID NO: 272552 - DNA, 1158 bp, Klebsiella pneumoniae
atggacagctacatggagccagatccggagaaaacttatataagccccagtttgccatcttttggtaacaaagatttgaaaatacgaattgcctcaaaagcgatagttagtaatgaaggatatgagttcgcaaaaattaaggatgaaattatactcaggcacaagctagatgcatcaacttatataacagcgaagttttttgaaagtagtaaggaaatatttgttctatctattcaaaagttttccacgcaaactggacagccttatggttctggtttttcttttataggtgatgagattggtaagtttattgaatttctagccaacattaattcaatgggctttaacggcaatggccccatgaaaattacggatgaggagcttaggaaaatcgttttaactaataaccaagcttcacaacttttaaatgggaatgagggggctatctctgaggcgcttaaaacacatgtgactaaaaaagatattatatcaatagcatatcgtaaaaaacaacttgatacatttaatcgacttcttaatgatgaagcattttttgaatatgctaagaaagaaaaaaactgttcaaatgaggctttgtggcaaaagttttttgaaaaaaatccttggatctttggatatggattaagttatatctacttatcaagtttgaacgataagaaaatagagcaagttgttcagggagcgcagattggccaacatggaaaacgagttgatggattgctgaaaacaagaggtgcaatttctaatctatgtttcgttgaaataaaaacaaatacaactggcttactagctaatactccatatcgctcaggttgttgggccccatctagtgaattaactggtgcggtggcacaaattcaagggacagtttcttatgctatggattcaataaaaagcaatttaaatttaacagattcttatggggatccaacaggagaggagctatttaattttaatccaaaatcatttttggttgtaggtaatctctctcagttttcatctgataatggtatcaatcatgataaacttcggtcgtttgaaaattttagaagcaatttgatccgtccagaagttatcacttttgatgagctgtatgaaagagctcggtttattgttgcatttagcgaaaatatatga

SEQ ID NO: 272553 - DNA, 609 bp, Klebsiella pneumoniae
atgagcagtaaccctccgatcaaattcagccacaaccatcacttgctgatggtgaaaggatttgaagccgggcttgatttgctggcgtttgagggcgatgacgccctgagtcagctgtttcgctaccgtatcgaattcaccagcgcagaccatgccatcagcaaagagatgatgctgatgaaggctgcctccctgacgctgcaggcgccgatggctcagggcttcggcattgatgttcagcaagccgtgcgggtgatccagggcgtggtgaaggggtttgaacggctcagtacctccggggatgaaacgcactacgcgctgacgctccagccgctgcttaaccgctcacaccagaacgccattttccaggaccagtccgttccgcaaattgtggaaaaaatcctccgcgagcgccacggcctgcgcggtcaggattttctattctcattgacaaaaacgtatccgcgccgtgagcaggtgatgcagtacggtgaggatgacctgtgctttatcacccggctgctgggtgaggtagggatctggtttcgctttaccgccggcacgcggcttcacatcgacgtcgctgagttctgcgacactgtaatataa

SEQ ID NO: 272554 - DNA, 717 bp, Klebsiella pneumoniae
gtgggcgcaaaaactcaaatactattggtaatcgcgctactggtcgggtacgcgcaggcggcagagcgcgttgatgcgtgccagcattccgctttctggctgtggtccggggtgaaggccagtgacgaactgcgaaatgcgcaaacggtctacctgcatcagggcgaggtgttcaagcaagcgggcgaggtggtatttcaacgcctcggcctaccggtgagccgcctgacatttccctcaatctggcttaccgttcgctttaccacacttgatgtgccgccgacgattgtgccgcgcattgtgcgcctgatgcaacgttggcagacggcgggcaatcaggtggttggcttgcaaattgattttgacgccggcacttatcagctcgccgattacgcccgctttttacgccaactgcgccaacagctgccgcccgaattcgcgctgggggtaactggcctgctggactgggccaaaaccggcgatattgccacgctcaatgcgctggcggttgatgaactggtggtacaaagctaccagggacggcgcacggtggcgaattatcaggattatctgcccgcgctcagccgattgcgtatcccgttcaagctcggactggtccaaaacggtaggcgcgacaaactggcggaaacccagttgcaacgctccccttactatcgcggtacggtggtctttatgctcaacccagcccggcattaa

SEQ ID NO: 272555 - DNA, 2169 bp, Klebsiella pneumoniae
atggtcaggaagacaacctttaatcttacactgtgcgctctgctggtggcggcccctcaggcgtttgcttcttctgatatcgaagattgctcctggagcgacacgctgtgtctgctaaaaggcgaccctgtattgacgccgggaaacgactcgcgcgacaacctgctgcgcctgctgagcgaagagaaatctttcgccctgcccgttcagaacattcccgccgatgtcagccgctcacgcgaggtttacttcgcttatcatcctgagtgggatagcgcgccgccgcctgccacaccgcctgcgcaaagcgaagacgaaacctttacccgacaaatggcggcgctgaatatcgatcccgcacaggtgatgccagccgattcggctgaacggctgggaacctccgacgatgaactggaaaaccgctttgtcagcaacacccttgccgccgtcagccagttcaacaccgccctgctggccgccccctctgtgacgccacagcagcgtcatgacctggcgctggcgcggttgaaactgttttatggcgccaatatcaccgcagtccttgatattctcaatagcttcccggcagatacggacgccgacttattcgcttattacctttccggcatcgcccacttctatggcggtaatttcaccgccgcgacccaggatttcaccttgttgctggaaagtaagcaaccctggctggccgagaccgcgcaatatatgctgatgcgcacggcgctcaacaagagtagccagaacagcgttgggcagtacggcgattttgatatcgcacgcatcaatcgtgaagatgccgccctggcgcaaaaagaggcgcaaacttacttgcagcgctggccaacaggggtgtatgccgattccgcgcgcaacatgttgcgccgcattaactggtatctgcaggcgtggccgcagttggctggtctctatgaacaggccttccagcaggcgagcgatgccggagaactgcgtcgtctggtgagtgaatatgataatgtcttcggcatgccgttctacgatcaacccgttcagacggcattccccgatgcgccgcaggttagttatgtcgagcttctacgcgccctgcgcctgaatgccgatagtaaaccggccttaacccaggcgcagctggacgccagcaaagcggcgtttgagaagagcggaaagctgccgctgtggcgcaatctacagctgcagctatggaacgtgacgggcaacgatgccgccatcctgcaggcggtcacgccggcgaaaacgctgccggcgcacgatattctcgctttcagcgaacaggtcctctacggcgaagcgctaatggagcaaaagcagtggccggcagcggtcgatttttggcggcaactgctccaactcagccaggaccgcgaacagcagcagtttatccaggcgaagcttgctgcaacgctggtctacagcggtaacgctgcggcaatctttgccgccgatagcccggtgaccaacctgcgctttcgctcccgcgtgctgaaaacccaggcctcgcctgaattgctacgccagcaggccgtcagtggccccaataatgaagagcgtaccatcgctctgcacacgctgctggtgcgggatctcaccgagaatcgctttggcgactggctgaaagacaaaacgctcgccagcgccattacccaaccggttatcagcgaggcctttaacgacgtcaacctgagtagcttcgactggaacggcaaggcgactgaagcaggttatgcctgtcggagccttgatgatacggtcgctgtactgagtaaaaacgccgatgatgcccatgcgcttaactgcctcggcgagttcttccgcaccacccaaacgcatgtcgatctgtggaaagatgccgccggcaacgatgtactggaggacgccatcgatcgccagcagcctctggggcaatacgatcgccagagctattaccagcagattatcacctcgccgaaagcggagccggaagacaaaagctatgcgctgtaccgggcgatcctctgttacgccccctccggtagcaacgagtgcggcggcgaagatgtcgataagctgcagcgcaaaggctggttcacacagttgaaaacgcaatatccgggaagccagtgggcgcaaaaactcaaatactattggtaa

SEQ ID NO: 272556 - DNA, 648 bp, Klebsiella pneumoniae
atgcaaatcgttcatcttccaattgtagatttaccggccgatagccctcatatcgctggcattcttaaagagttatcctgttcctcagttctgtcagtcccacgtactccaagaggacccgcgggcgcttgctactggaatgtcgatgctgaagtaaaatcaagcggcgggaaaattgtacttggttggcttattcaatggcttccaggtttatatgttcaagcgatgcatcatgcagtatgggagacccctgatggggagttggttgatataacccttgaccaaactgacgcgtataaaaatgaagttaaaagtggaacatcaacatttgttcctgatgacagaatttcgattgatcttaattggcctgtattaattgttaataaactccatataatcattagagatcatgatgttgtagagtctcttcatttctatagccttaactgtcaggcagcagcatctctgttccaataccttaaactcaaaggtggcagctcctggaccccattaggcgggttaaaaatgcccccgcctgatgaagaaactaaattattcctacaaaacaacaccaccttaactgaggttacactggagatgatgcacaaacaccgtgcaaacttgaaagcaaaattatttaacaactaa

SEQ ID NO: 272557 - DNA, 873 bp, Klebsiella pneumoniae
ttgtttctttctacttctgaacatgatcctgaagataggcacatccaagacttagtttatggtttgatgtgccttgaaaaggccgggatttcttcagctgatatattcatatatgtggatggacagaaccgccaaaacataatcaaccttttttctatagctacacaaaatcagtatgccatatcccgtactgatgattttttttccgatttgcaagctaacgtttacgaaaatcttgttatgtttgttactggccatggcagcgagagagggattgatgccgctgtaccaattacgccttatatgcttataaatgcattaaaggcagcacctaatctggataaggttgtcgtttatcttggtcaatgttacgcaggtgttttcaactatgttaatgccggacgtggaagaggtaatgaccgccattctcctgatattattctaattggtgcgacaaacttgcatgaaagcctaagctcgccaactcaagagcagtttccaaatggtaatcttctgtgggttgcaaacctgtttctcttgcatgtgtttcggtggatttcggaaccacacgatattgatggcgatgggcacaatactataatggactcgtacaaatatgctggcgtcggttccaataggcacaacaaacagtctaaaactaatagctttggagacatggttgatgcacatgttattcataaacaggctgcccataatgccagcataagaacgggtaatccgcagaccgatgctcagaatcaattaatatttatggctgctcggtctaagtactttagtttgttaagtgtaaattatgtgcaccaggagtgttggattttaaactcttacccggcacagcaactcgaaatttaa

SEQ ID NO: 272558 - DNA, 474 bp, Klebsiella pneumoniae
atggataagtttgaccgcaacatccaacgggagctactccagcacctctgcgacatttacccggattctgccgatagtagtttctcaaaggcgttttccgaaaaatttggaggtatgaatacctttactgccaacatactttatcttgctggtcacggactcattgaggtaaaactgagcaatgaaataggtagacgacttccctacgtaatagactctttcacgaaaatcacgagcaaaggtatagattttattcgcgacgacggcggtttgggcgccatcctaaacgtccagaccatcaagtttcatcgtgatgctgttgtcgtcctcgaagacctcatcgcgatttcaaacatgaacgatgagcagaaggaaaaggccaaatcaactctcagcaaaatgtcgacggaagcacttaaaacagtggtacaagccgcgacgacagcaggattatcagcactacttgggaagtga

SEQ ID NO: 272559 - DNA, 381 bp, Klebsiella pneumoniae
atgaagaaaattttagtcgcatcagcgattgctttaactctggcaggctgtgcttcctctggaaaccagcaactcagcaaagaaactgaaacaagcgtacagtcaaaattacaggaagggaaaaccaccaaggcagaggtcaagaacaccttcggatcgcctgataacgtgtcttataccgacggcggaaatgaaatctggaagtactccttcgctaaagtgaaagttaatggcacctcattcattccgttctacgggcttttccataacggaactaatggaactaagaaagagttgacgatcctgtttaaggatgatgttgtggcgaagtatacgatggctgaatcggccattaatacaaagacagggtgggccgattaa

SEQ ID NO: 272560 - DNA, 159 bp, Klebsiella pneumoniae
atggcgatttattacccagaccatgaagtaagttacaaatgcagatatcagtggggcaagagcataaagaaatggacgccaaacgctatctgtttcaggtgcagcaagtgggaccagggtcgtaagaaccgcaccaagaccccctgtggtgatacctga

SEQ ID NO: 272561 - DNA, 258 bp, Klebsiella pneumoniae
atgattcaacaacagttagtgcaaatcgtgttttggttgggggtgctcgtctgcctcccgaccttctatcgctttgtgtatgctggttcttcccttatatggcggaaactgttccctacaagagttgttgaaattcgtttgttggactcaaatcgtaatactgaaaatattgttacaattcatttagatagaaaagatggaaaaaaaatcgttgatctcattgaagaggcaacccttgaggataatgccaaaaaatga

SEQ ID NO: 272562 - DNA, 882 bp, Klebsiella pneumoniae
atggagaagactacttccttcaaggtattttacgatgccgatgacaaagaactggccgagcatgccattgatgctgaagttttaggaaagtcgattctttccatggcaaaccttataagcaaagcagatgatcttctaaatgaggggaataaatcggtaaaagttttggttactagcccggctgagaaaggctctttgggtatagcctacactgttgttcagctgttaccacaagctgttgatgtacttcagaccattggaattgttggtgcagttggagccgcagctcatgcatctgccttatcattgataaggcaactgggaagcaaaaaagttatttctataactagaagacagggtagtgacaaagctgttcttgaacttgaagatggtgagattgaatgcccagccgcagtagcaacattggttacggaacctgtgattcgcgatgcattaatttctgttgtgcaaactcctttagaaggaaaggactcccctgtcttcaaaattgttgacgataacgatcagatcgtattgaagctcgaagatgagcagacagaagagattaaacctctgccgcgaggtaccttgcttacaaaaactgttgaaactaaggaagttaacgtcaagtttactcaagtcaactttcataatgagaaagggtggcgcatggattacaacaatgaagagccctctgtgctacttacagattacgaatttttagctaaagtaaggcaggcagaaggtacaatcacaagtgaggatatgttttctgtcctcttagagacaacaaagacggtgtctgcgcgtggtaggtctgagaaatacgtaatcaaaaaagtactccgtcaccgggtagctcaagggaaaaaactcatttag

SEQ ID NO: 272563 - DNA, 282 bp, Klebsiella pneumoniae
atgtctaatgtttacgatgacgatgttcaagaagatgatgattttcaagaagatgatgattctcaagaagatgatgattttcaagaagatgacgattttcaagaagatgatgattttcaagaagatgacgattcccaagtagaagaagaagacgacgaagacgaagacgaagacgacggtccggatagcatcaatgagttgtatggctatgatgacccagaggacaacgaggaagctgcctttgatgatgtgatgaaggctacagaaagagacgatacatag

SEQ ID NO: 272564 - DNA, 1485 bp, Klebsiella pneumoniae
atgaaactggctgttttaatcggcgtaagcgaatacacctcacaaacaaatctttctgcttgtaagaatgatgttagtcttgttaaaacaatattggatttgagcggggaatacactaacatacttttcattgataatgatacaaatactcgacaggtgaaaaaaagattgtcagaattcattcaagaatatgcaggaaaagaaattgatgaactgtttttttactttagcggacatggtttttttaatggggatgattttcattatatcatgagtgattttgactctacgaagcttaagtcaacttcgttagagaatagcgaacttgacatcatgatgaaatccattaatccaaaattatccgtaaaaatagttgatgcatgtaattctggtgtctcatatataaaagatcctgtggcattaaataagcatattgatgattctaagttaggtttttccaaatgctattttatgttttcttctgaggatgctcaatcttcatttgcagatgcaaacctaagctttttcacaaaggctatcggagaagcagtagcttacagtgaagagaactcaattcgttataaggacataattgattttgtctctgataaattcagtcgtaatgaaaaccaatcacctgtgtttgtgaatcaagcatccttcactgagatttttattaaatctatctctaaggagagtaaaggttcaataagaaattcattgtcggttatttctggaggagttttagaaacaaagaaacagccattaaaggagcttgtgatggaagatgctagacgttatttttcagaagaaaaggcaatgctggtttataactcaattcctgaattggttacaaaaagtctcaagtttaaaggggatgcgaaggaattgtttgaattgtccgttgaagattataatagttacgatgacgttccaaaaatatctcttcttgctgattgggttgataagaataatgatgatcttttcgtaatggcaattagtgagagaaaagaaaggaaagtcaggaaacctaaaaatataacggccttttctcgtctaaatatgaatatttttggatttgatgaaagtgatgataataactttaaatgggtgactgaatattttgaacagccggtgacaattgaaacacttttagattgtaggtataaagttatatcagtaatggcaaaggcaaaatatcctaatatcaatagttctaagttatatgtattgcctcttttgtcaaaaactaaattagtaattctctcctgtgtggcatcttttaaatcattgggttgggattcggaatctttgactgattctaatgttaaatgggtccctcatcacatagagcttatagctcaagagaaattgcctgattatataaatagcttagctgataattttgagagtgaagtgttaaacccgttgttaaagagttttaatcttttacctgagtctaaaggaaatgaagatgttggttga

SEQ ID NO: 272565 - DNA, 267 bp, Klebsiella pneumoniae; identical to SEQ ID NO: 125559

SEQ ID NO: 272566 - DNA, 171 bp, Klebsiella pneumoniae
atgaaaaaaacattattggaatctaatcacgacagctggactacctttaacaatagcattgtctggaatatctttgttgaccaaactgcccgatccaataataacattattgcctacttttatatcaccaataatgcatgcattggcgtacactataacattatcacctaa

SEQ ID NO: 272567 - DNA, 132 bp, Klebsiella pneumoniae
atgaaaaaggaaatgaacgctctagattcagagggtatgattattattttttacctgctgccacttggggtaaaattagttcgggtggatttagttgcagatatcgaaactcaggttatgtttttgatgtag

SEQ ID NO: 272568 - DNA, 1281 bp, Klebsiella pneumoniae
atgtctgcctttataaatgaaggttttacctctaatcttgtggcgattcttaattcaataacatcttcggaatttttgaatattctgagttcaactttgaactttgaacttggtgatatagccaaaattcctattgttgaaaatcatctttccgatcaacaaattcatttaattgcaaagcaatgcataaacatttcaaagttggattgggactcctttgaaacatcttgggatttcagaaaaaatccactattagagggtatcttttttcacaaatcacttaagattgtctaccaaaggactcgaagtcattggtataaaaaaacgctagaaatgcaatgtcttgaagagaagaacaacagaatttttatcgatgattatggcttacagcatgagttgaccccagaggtcactcttagtgacattaccctcggctgtaatccctattatcggtatggtgtgaatataggggatgatgaacttgaatttcgtctccagtcagataccatttcagaagtagtttcctacataatcggttgtcaaatgggccgctattccctcgatcgcgaaggtctggtctacgcgaatgaaggtaataaaggcttttctgaccttgttgatgaaggtgcctacaaaaccttccctgccgatgaagatggcatactgccattaatggactccaactggttcgatgacgatgtcacagcccgcgtaaaagagttcgtgtgcacgttctggggtgaagaacatctgcaggagaacctcgactttatcgccgaaagtctctgtttgtacgcagtcaaaccaaaaaaaggcgaatcttcgttggataccatccgccgctatctttccacgcagttctggaaagatcatatgaaaatgtacaagaaacgcccgatttactggctgttcagctcgggtaaagagaaagcgtttgagtgcctggtgtatctgcaccgttataatgaaggcacattgtcgcgtatgcgtaccgaatacgtagttccgctgctggcgcgctaccagggcaatatcgatttggttaacgatcagattaagagtgctgaatcaggtgctgcaaccacacgcctgaagaaagagctggatgggttgaccaaaaaattcaacgagctgcgcaattttgacgatcgcttgcgtcactatgctgatagacgtatcactattgatctggacgacggcgttaaggttaactacggcaaatttggcgacctgttggcagatgtgaaggctattaccggtagcgcacctgaggagatttga

SEQ ID NO: 272569 - DNA, 816 bp, Klebsiella pneumoniae
atggcaaagattgataaattaattcaagacatcaaagaccgtgatcttgctgcctttcctaataaacgagtcctcgtactggaaggagtggatgacatagcagcatttcggcaactgttgaccaaacataatcctagttgggaacagcaatgggtattagttaaagctaataaaaaacagaatgtcctagatattctcgcattagaaaacacctggtatggccttatcgatcgcgatgaatggtctgaagataagataatgcagctagagcaagaacatcctcgccttatgtttctaccaaggttctgtattgagagctatctggtcaatccttctgaaatctgggaggcgttacagccaaaacatcaggctcgtattgaaggtggagagcccgctttcaccagcctgtttgtgcaggaagctcaacgttggcttaaccattccgctatctggtatgtcgtgaacccactttgggaacgccttcgaacagctgggtttaactcagcactgcttgatgttgataccgttcagcaagatgcagaggttgagcgaattttgcgctcttggggggccttaattaatccagaaaaccttgcccaagaaatacagcggcgcaaggcgcaggtcgagagactttctctaactgaacaattgtccatctgtattcatggcaaactcttctttgaaaagtttgttgatccactcctgacgagtttcttggggcagcgtggcagggaacagcgtcaaaaggatctatttaggacacttccggttcctaatgatttatccccgatttgggtgagaatgggattataa

SEQ ID NO: 272570 - DNA, 162 bp, Klebsiella pneumoniae; identical to SEQ ID NO: 234259

SEQ ID NO: 272571 - DNA, 477 bp, Klebsiella pneumoniae; identical to SEQ ID NO: 216071

SEQ ID NO: 272572 - DNA, 129 bp, Klebsiella pneumoniae
atgccagctattagcgaaataaaatcacagggaaataagaaatttcctttttcaaatacactgaaaaggaagagcagcaaggggatcaccgtccttgccgctttcctggaggaacacccgaaacaataa

SEQ ID NO: 272573 - DNA, 807 bp, Klebsiella pneumoniae
atgaacaagtcagttgcgcgcgggatcgctctcgccctgttgtcggccacctctttttatgccgccgccgacgctcatcttatccgcgtcggctttaaccccgggccgtataaagaacaatttgagaaaggcgtcgcgccctatttattgagtaaagggtataaaatcgaatataaggatttcagcgacggtattcaggtgaatgacgcggtagcccgcggcgatatcgaagcgaatattatgcagcatccggtatatctgaaagcaattaatgagcggctggggatcgataacgtgggcattgtgcaggttcccacgccgccgatggggctgtatggtgggaaactgaccaccctggggaccccggcggcgggcaccgtcgtgtcggtaccaaaccagccgtcaaatgaatatcgcgcggtactggtgctggagagccttggctgggtgaaaattaaaccagacagcgatccggccactttttcgcagcgtaacatcatagataatccttacaaaattgtcctaaaagagatggataatgcccagcaggttcgcgctctgccggacgtcgactatggcctgattcagggcaattttgccgtctccagcggtatgtccctgacctcggccttaaagctggaagcagctaccagccattttattaatgtcgtgaccgtcgccggtaaaaatcagaaggcgcagtttgccaaagatattatcgatggctaccactcggccgagttcaaaaaatatattctcagccatccgcagtatgatggttacctgctgcctgactatttaaaatga

SEQ ID NO: 272574 - DNA, 627 bp, Klebsiella pneumoniae
atgaacaatatttacccactcccgaaaaagccgggcaataccgatccattccgtgcagagcctacgcctgaaggggtgaggatcaccagctctggtagcaatggtcgtgaaacagttcaacttattggctacgaggacgcggtgaaccgtcttgacgctggcgattatgacgactccagcgcgggttttgacattcaccttgccgtagcagaaggcggaaactgcggatatttcgactatacagcgcagcacaacgtcactatgtggcgctggctgattgccgcggcgttcatcaccgagatgaagctgaaaaacggcacaaccgttattaccgagcctgacggcacatcctcgcaggtggcaatttattccaatggcaaagtgtcaattccggtttacctcttttctgagcgcctggcaatggcgaacaacattgagggggcacttatcgaacgttacggccctgaacagggtgctgaaaaagccattgtgttttatcagtccatgctggatgtggacgtcggggaactcacgcccaccgggcgcgagatactggcagggctacatgattgttttattgatgatatagaacaaaacggccttcccgaagcgccggtggcgcactaa

SEQ ID NO: 272575 - DNA, 3363 bp, Klebsiella pneumoniae
atggcacgtgcagcaaaaaccacaaggggagtgaccgccaagaagagcagctttcaccaggagttggttctaaaccgctgggtattgggtttctttgagggcggcgcgctggcggcactcaagatgcgcttgggcgatgaccgcttcgagggcatcgacgaggacggccagacgaaattcttccatgagctcgtccgcggcctgttcgatcctaacaaggtgcccgaggccgacctgcggcgatatgacttgaatattgtcgcccactggcaagccatcactgagcggcgcaataagctggagggccatgagctgcagatgaagtacttccagtacctctcgttgctgtttaccgagttgtatctggactggtatttcaaccatcgccaggacttgctcgatgggctgaatgaagaaatggctctctaccgcgccgaggtgggtgcggaaccgttccgcgattttgaggcggatgacctaaataagatcgccttctggaatgccaccggtagcggcaagaccttactgttgcatgtcaatattcaccagtatctgcactatttccaggctgggcgcagcggcagctatcccgacaagatcatcctgctgacacccaatgaaggcttgagccgtcagcacctagaggagctggagctatcaggcttcggcttctcgcagtttttcaacaaggctcagacgccgccgcgcggcaccattgaaattatcgacatcaacaagctgggcgatgaaatgggcgataaaaccgtcgccgtggatgcctttgaaggcaacaacctggtgctagtggacgaaggccatcgtggtacgggaacggcagcgggcgcgtggatgacgcggcgcgatgcgctggtgcgcggcggttttgcctttgagtactcggccaccttcgggcaggcggtagccaagggactgatagttgaaaaagcggaagaagaacagctcaagtccaaatggaagctgacttaccctgggcagcgcttcaaccttgcctcggcaaaagcagacacagcccttgccttgagctcagaggacaagcgtcgcgtgcggatcatcgccacccgcgagatttacgccaaatgcatcctctttgactactcgtacaagttcttctatgaggacggctacggcaaggaatcgctgatcctcaacatgaacggcgacgcctacgagcaggccgacaacgcgcgcaagtatttcaccgcctgcctgctagcctactaccagcagctttggctgtggggtatgcaccgcgacaagttggccgatttcaacatcgagaagccactgtgggtgttcgtgggtaacacagtgtccggcgaggagtcggacattctggaagtggtgagttttcttgccgatttcctaaataacaatgctcagatcaagacctggctggctgatcttattgcagacaaggcgcagattttggacgccaagggtaacaacattttcagcgggcgtttcacgcccttgatgggcttcggcggtcgcatcgatgatctgtacgccgacatcctgctgcgcgtgttcaatgcctcggcccgtcaacgtttgaagctggttaacatcaagagcagcaaaggtgagctggcgttgcgcgtgggcgatgcggagcccttcggcctgattaacattggcgatgatgcaaagttcttcggtttagcggagagcaccgataccttcgatagtgaacgcgacgacttcggcggcgcgctgttcggcacgctgaataacaaggacagccgcctcaacgtgctcatcggttcacgcaaattcactgaaggttggagcagttggcgcgtttctaccatgggtttactgaacatgggcaagggcgagggctcgcagattattcaattgttcgggcgtggcgtgcgcctcaaaggcaaagacttttcgctcaagcgcagcctgacgcacgagagaccaaaagggctgcatttagataagctggaaacactcaatattttcggtgttaaagccgattacatggctgcctttaaagactatctgcgcgaggaaggcattacgcccagcgacgaagtgctggagctggacttcccaacgcgggccaacttgcccaaaggtaaactcaagaccttggcgctaaaggacggctacaaagacaaccagaggcaaggctttaagcgcacgcacttcccttggctgtacgagattcccgccgagtttcaagggaagatcaaaccaccccatgtggcgcttgacctgtatccacgtgtggaagcgctgtccagtaagggcagtgtggctgtctctgcaacggaagctcgaaataaagccaagctgaatcagacgctgtttgccactttcaactgggatcgtatctatctggcgttgcaggagtacaagattcaacgtagctggagcaatcttcgactagaacgacagaggctgatcgaattctgctcagacgcccaggattggtacacgctgtttatcccggcagcggaactggtagtcacgaacttcgccgacatccggaggcaggaagacatcctgctacgcctactaaccgactataccgatcgtttttataattccttgaaaaaaggctacgaaggccaattctacgatattactcacatcgatgaagagcatgggtcgatgctcaatctgtatcagttcgagatcgaaaacagcgatgacggtctagagtatctggcaaagctggaagttcttaaaaagcttgtgactgagggtaggatcggtgaggctaaccagtggagtgctccccacatggtggctataagcttcgatcggcacttgtattacccgctgctggcattggaggacaaggatgctgtgccactgaagctgcggccgctggcgtttgacgcgccgagcgaatgggagtttgtccgcgatctggagacgttctacaactccagcgaaggcaaggaagcgattggtccacgcagtctgtatctgctacgcaatgcggatcgggaagagaagggattgggcttcgcattggcgggtaacttctatccggacttcctgctgtggttggttgacgacgccagcggcaagcagtggttgacctttgtcgatccgaagggactgcgcaatctcgacctgtcgcaccctaagctgggactatacaaggaagtgaaggcgctggaagcaacattggctgaacaagctaaggcgggcgaagcgccgctggtcttgaatgccttcgtgttgtcaccgacgaaattctcagacctgctcaatgtgggcgacccgataaggaaggctgagctggaaagtcgcaacgtgcttttcatggaagatggtgctagcacctacctgaaaaagcttttttcaactttaatttaa

SEQ ID NO: 272576 - DNA, 3087 bp, Klebsiella pneumoniae
atgactaataaacagaacaccaaatatcaggagctcgtcgtcaagttacgcgagatcttccagatcgatcgtccggaactcgacttcggcatctaccgcatcctcaacgctcgcgcgggcgagatcaatgactatctggagaaccggttggccgaaaaggtgcaggccgcactctcggcaggcagcgccgccagcgctcagcaagtgcaggtcgatctggacgaagcgatcaagcaggcacagaccctggctgccaatcccgatgacctgccgaaggtcaaggatttgcgcgctcggctgaaggaagctaccggaggcagcagcgaacacgaaaacgccgtcttctcccacctgctcacctttttctcccgctactacgagcaaggcgacttcatcagccagcgccgctacaagggcgacacctacgccatcccctacgcgggggaggaagtgatgctgcactgggcgaacaaagaccaatactacacaaagagcggcgagaacttcaataactacagtttcaagctggaagatggccgcgtcgtgcactttcgtctggtggctgctgacactgccaaggacaaccgcaaggacaacgacaaagagcgccgcttttctctggtggcggcgaaaaccgttacccgtgtggatgaacacggcgacgagtacgaagaagaactggtgccagtggaggaaacttcggacagtgacggcaatcaggagttgatcatccgcttcgagtacgccgcacaacccaaaggcactaagcaggatgcactggtcaccaaagctgtggaaaccgtgctgaatgatgccgccgtgaaggcccgttggctggcgctgggcaaccgcgcgcctaccgagaaaaacccgcagcgcacgctgctggaaaagcacctgaacgactacaccaccaagaacacggcggactacttcatccacaaggatctgggtggcttcctccgacgcgagctggacttctacatcaagaacgaagtcatgcatctggatgatgtgcagaacgcgggcgcgttcgcggacatcgaaaagaacctgcgaatgatccagtgcctgcgcagcattgcgctggagctgatcactttcttggcccagttggaagacttccagaaaaagctgtggctgaaaaagaagttcgttgtctccagtcactactgcatcacgctggatcgggtgccggaagcgctgtggcctgaagtggtagcgaacgcacagcaatgggcgcggtggaaacagctgggcgtttgggatggcgatacaccggggacgatggaggacttgaaggctgcgccatttcgtatgctggacaccgcgctgttcacagacgatttcaagcagcggcttctggctgatatcgatgatatcgatgctggtcttgggggtgtcattatcaacgccgataactttcaggcgcttgccctgttgagcaatcggatggcaggtgaggtcgatttcatttatatcgatcctccctacaacgcaaccacgagtgaaataacctacaagaatggctttaagcacggttcctggatcacacttatggaaaaccggctgtctcgggcaagagcgctaatgcggccagatgcgccaatttgtgttgcaatcgatgagaacgagagggagcatctgtcgctgctgatgaaagacctgttctcagacggggacataacccagattagcgtgatccacaatccgcgtggtattcaaggtaatggattctctgtaacaaatgaatcagctattttttttaggcctcaaggaaagttgttgggaaaacgcagtcttaatgactcgaagtccaaaccgttgatgaaaacaggcagcgaatcagagcggcacactgcaaaaaactgcttctatccaatttttgttaagaatggagtagtaatcgggttcggagacgttcctggtgatgatttccatccgcacagtgcgtgcattgaggctgaaaatgaagtgttggaggtgtggccaatctcatcgacagatggcttagagcgcaagtggcgttacgcaagacaatcggtcgactctattattgacaaccttgaggttaagacaggaagaaatgggctgccctccataaatctcgcaaaagacaaggagtcctacaggactgtttggggtgacgctgagttcaatgcggccgagtatggaagtaccttgctaaagaatattgtgcctagcaatggattttcctttcccaagtcactgtataccgttcgtcacgcgatcaccgcggcgaattgtcgatccaatggagtagtgatggatttttttgcagggtctggaactaccgcgcatgcggtaatttccttgaatagtgaagagaagttagatctttcgtatgtaatggttgagcaaggtgattactttgacacagtcttgaaacccagaattcaaaaaattatcttttccgctgattggtcggatggaaaagcgactagtccagaagctggtatctcccactgcttcaaagtcctcaaactcgaaagctacgaagataccctgaacaacctacaactgtgccgtacgtccgcgcagggcgatctactgaacaccctgccgcagcaggccaaggacgactacctgcttaactacatgctggacgttgaaagccgtggctcgctgctgtcggtggaagacttcaggaagcccttcgactacacactcaacgtggcagtggattcggcgggcgcgttcgagccgcgcaagatcgatcttgtcgaaaccttcaactacctgatcggcttgcgagtcaagcatatcgatgctcagccgcagcgcggctttgtcactgttaccggcacgctgcccagcggtgaaagctgcctcgtgctgtggcgcgattgcgatgttctggactacgaaggcattagcaagctctgcgacaagctggccatcaacccggcggacaacgagttcgacgtggtttacatcaacggcgaccacaatatccctaccgtgctgacgcagacggccgaggaaggcggtgccacccgcgttctcaagttgcgtcagatcgagccggagtttctgaggcgtatgttctcggtggaggacatctga

SEQ ID NO: 272577 - DNA, 1209 bp, Klebsiella pneumoniae
atgctgactgataccaagctgcgcaacctcaagccaaaggacaagctctacaaagtgaatgaccgtgacggcctctacgtggccatcacgccagcgggttcgatttcattccgctacaactactcgatccacggcaggcaggagacaatcaccttcggccgctacggtatcggagggatcacgctagcggaagcccgcgaacggctgggcgaagccaagaagatgatcgccgcagggaaatctccagccaaagagaaggcgcgggacaaagcccgcgttaaggacgctgaaaactttggtgcttggggcgaaaagtggctacgcggctatcaaatggctgacgttacccgcgatatgcgtcgagctaccttcgagcgcgagcttaagccgaagttcggtaaccagaagctgacagaaatcactcatgaggatttacgggcgctcactgatgcgattgtggagcgcggagcaccggcaacggccgtgctttgtcgcgaaattgtgatgcaggtcttccgttgggctatagaacgcggccagaaggttcagaacccggccgatttggtgcgcccgtcgactattgcaaagtttgagccgcgagatcgagcactgacgcccgatgaaatcggcttgatgtaccagtacatggagcgcattggcaccacaccttcgatccgcgcggccgccaagttgctgttgcttacgatggtacgcaaaagcgaactgaccaacgcaacgtggagcgaaatcaatttcaccgaagcgctctggacaatccccaaggagcggatgaagcgccgcaatccccatttggtgttcctttctaggcaggcgctcgacattttcatagctctgaaaatcttcgcgggcggctcggagtacgtgctgccgtcgcgctatgactcggacttgccgatgagcagcgccacgctcaatcaggtgctgacgttgacctatcgtctggctcagaaggaagggcaatcgcttggcaagttcggaccgcacgacttgcggcgtacagccagcacgctgctgcatgaggcaggctataacactgactggatcgagaagtgccttgcgcacgaacagaagggcgttcgagccgtctacaacaaggccgagtaccgcgatcagcgccgggcaatgctacaggattgggcggacatgattgacgaatggacgctcaggaagcgcaggacaacagagtga

SEQ ID NO: 272578 - DNA, 210 bp, Klebsiella pneumoniae
atgaagatttcactacttggcgttggtaacgtgcctctgctgtctgcacgtatcaaaacactggatgatgcagggttgctgaacgtttccgcgctcgccagagcattaggcgtgcatcgctcaacatttctgagcaaggtcgccagcgtcggcctcgaacccgctatacaccattacgcaatgcagcaaaaactgaaagatgctatctga

SEQ ID NO: 272579 - DNA, 321 bp, Klebsiella pneumoniae; identical to SEQ ID NO: 161841

SEQ ID NO: 272580 - DNA, 189 bp, Klebsiella pneumoniae
atgaaagggctggtgcatgatggactgggtatctggctgtgtgcccggcggctggaacaggggaaattccactgggctaaagttcaccagggtgaaagcgtagccctcagcccggaacagttacaggcactgatccagggtttgccctggcagcgcattggacgacagcaggtggtgacgatgctttaa

SEQ ID NO: 272581 - DNA, 174 bp, Klebsiella pneumoniae
atggcgtgggtttcagttcagcagcggctgccgcggacgtttacccgggtgtgggtgatcaccgataccggccagcaaaccacagcctacgttaacggttctgggcagtggatgattaactgccctcgcatacaggctactggcgcaatcgtgctgcgatggagggatgactga

SEQ ID NO: 272582 - DNA, 1281 bp, Klebsiella pneumoniae; identical to SEQ ID NO: 180734

SEQ ID NO: 272583 - DNA, 1953 bp, Klebsiella pneumoniae; identical to SEQ ID NO: 180735

SEQ ID NO: 272584 - DNA, 252 bp, Klebsiella pneumoniae; identical to SEQ ID NO: 225086

SEQ ID NO: 272585 - DNA, 426 bp, Klebsiella pneumoniae; identical to SEQ ID NO: 220104

SEQ ID NO: 272586 - DNA, 1509 bp, Klebsiella pneumoniae
atgtacggagaggagaagtcggactcgctcatagtagcggcgaagcaggcgaacaacccgaaaggagcggagtcagtggagcgaaggagcggggccaaggggaacgcggaacagccacacatgcgccggacacagagccgggaaagcatgtcacagaggctgtcacgcgtgcgggaagctgcgaagcagcggaagaaagaacggtttaccgcattgttccacctcctgacagcagaggcactggagaacgcattcctctccctgagcaggaaagcggctgccggagttgatggtgtcaggtggaaggactacgccgaaaacctgaaggtcaacatagcagatctgcaccggaggcttcatcagggtagttacagggctcagcccggcaggcggcactacatcccgaaagcggatggaaaacagcgcccgctcggcatcgcctcactggaggacaaaatcgtccagtatgcgctggttaagatcctgaatgcagtctacgaaaatgactttatggggttttcatacgggttcagacccgggcgaagccagcacaatgcgctggacgcactggccacagggctggttcggaccaatgtaaactgggtactggatgccgatatcagtcagttcttcgacaaggtaagccatgaatggctaatcaggttcatagaacacagaatcggcgaccagagggtaatcaggctcatacgaaagtggctcacagccgggacctcagaggaaggagaatggcgggcatcggaggaaggagaatggcgggcatcggaggaaggcaccccacagggtgcggttatctcgccgctgctggcaaacatctacctccactatgtcttcgatctgtgggcgcatcagtggcgacgccgccatgccacaggcaatgtggtcatggtcagatacgcagatgacatagtcatcgggttcgacaagcgaatcgacgctcaatgctttcgtatagccatgcagcgcagactgaaggagttcggactcacggtacatccgaagaaaacccgactgacggagttcggccgcttcgcagccgaaaaccgcgccagcaggggaaaaggtaaaccagaaacgttcaacttcctcgggttcacgcatatcagtgggaaagatcgtagtggcaggttcatgctgatacgaaagacacgccgggacaggatgacggcgacactgaaagcgatcaaggacggactacgaaagcgctggcattactcaatccccgaacagggaaaatggctcaggagagtggttcagggatacctgaactaccactcagtcccgggcaactatcccatgatgcggaagttcaggatatacgtaacagacctctggcgacgggcgctgaggcgcaggagccagcaggatgatacgacatggacgaaagcaaacagactggcagccgtatggctgccgaaggttcgggttctgcatccatggcctgtggagcggttcaccgccagacacccaaggcaggagcccggtgcgtga

SEQ ID NO: 272587 - DNA, 231 bp, Klebsiella pneumoniae; identical to SEQ ID NO: 180737

SEQ ID NO: 272588 - DNA, 426 bp, Klebsiella pneumoniae; identical to SEQ ID NO: 104046

SEQ ID NO: 272589 - DNA, 543 bp, Klebsiella pneumoniae; identical to SEQ ID NO: 231437

SEQ ID NO: 272590 - DNA, 249 bp, Klebsiella pneumoniae; identical to SEQ ID NO: 209381

SEQ ID NO: 272591 - DNA, 237 bp, Klebsiella pneumoniae
atggtcaggcaaaagtgtagcggtattaggcgcagctatttagaggtttttaaagagcaaagacaaacgagttcgttcgtccatgatttgataatagatagttgttgcctgacaggcaacatgttttatatgtttttttggaatataaaatactttgttatgcaaaaaaaaccacacctagatccacagatatggtttctttgcatttacggtaagggttttacatctttcgcctaa

SEQ ID NO: 272592 - DNA, 858 bp, Klebsiella pneumoniae
gtgcgagtcgctgtcggagtcggaatcactgtcagaatcggagtcgctgtccgaatccgagtccgagtcagagtcgctgtcggaatcggagtcgctgtccgaatccgagtcggagtcggagtcgctgtcggagtccgagtcgctgtcggaatcgctgtccgaatcggagtcagagtcgctgtcggagtccgagtcgctgtcagagtcagagtcgctgtcggagtccgagtcgctgtccgaatcggagtcactgtcagaatccgagtcgctgtccgagtcagagtcgctgtcggaatccgaatcgctgtcagaatccgaatcgctgtccgagtcagaatcgctgtcggaatcggagtcgctgtcagaatccgaatcgctgtcagagtcggagtcgctgtcggagtccgaatcgctgtcggaatcggaatcggagtcgctgtcagaatccgagtcactgtcagaatccgaatcgctgtcagaatccgagtcactgtcagagtccgaatcactgtcagaatccgaatcgctgtccgagtcagagtcgctgtcagagtcagaatcgctgtccgagtcggagtcgctgtcagaatccgaatcactgtcgctgtcggagtcagagtcgctgtcggagtccgaatcgctgtcggagtccgaatcgctgtcggagtcggaatcgctgtccgagtcagagtcgctgtcggaatccgagtcgctgtcagagtcagagtcggagtcgctgtcagcatccgagtcgctgtccgaatcggagtcactatcagagtccgaatcgctgtccgaatcggagtcgctgtcggagtcggagtcgctgtcagagtcggagtcgctgtcggagtctga

SEQ ID NO: 272593 - DNA, 225 bp, Klebsiella pneumoniae
atggctgtttcacatactactgctttagaacttttaggcaaggctgtttctttcgaatttgtacgtcacgtgcagcttacagagaaatcttcaatcgattttacggaaaaactttctggaatcgttactggtgtgtccgtatacatcgatgctagtccggaaattttaattgatgaagaattttatgttctttcagaaatcagaaattttgaagtagcaccgtaa

SEQ ID NO: 272594 - DNA, 1083 bp, Klebsiella pneumoniae
atgtcaaccatcatcattaaagacactctgcgtcagtcggtagaggcggcatctggtggtctccagacgattgtttatacaaagaaaggtcagccatgttttatgaacgtgctgactaaattcgacctttctaaaatcgacagttcgctatccggggcgcacccggcatttaaagtcgatgacaatgagctttcacagatcctcatcggcacgtaccagatgcgggttattgatggcgagatggtttcgcagccatactctgtaccgaccagaagtgtggtttctttgcagtatgcgattcaaactgccagggcatccggtcccggttttcatgcaataaccaacgcggagtgggcggcgttacagtgcctggcatggaaaaaccagcagtatccaaaaggggcgaactggcttggatacgacttcaatgacccgtcactttacggtgtccgcgttgacggccagccggttggcaccaacaatgggggcggaatcatttacacgggatctggccccgttgaatttcgtcacaatctggcatataacgggatttcagacctgaacggaaatgtaaacgaacgtgtaactggtctgcgttccgtctacggtgaaatacaggttctcgctaataataacgcggccagttctgcccatgatttgctggatacgtctgcagactggcgggctatcagtggcgaagacgggtcgttaattttacctgatggcaacggtacaacggccaacagcattaagttaacatcgggtagcgttgcgtctgccgcagactacacgctgacgttaaccagtgcgctgttccagacgacagcaatcctgaacagcacagggaaagcagttaccagtctggccctgaagaaattacaggtcctgggcctctatcctttcacgtccaccgccgatggcgactttctcattagtaacaaatctgtcataagttacgcaatgcgtggtggccacagtaataatggtattggtgccgggatcaacgctctgtccctgtcagccctcaacaccgacatgaaccaagacatttcatctcgcctggcgtattactcagtagtctaa

SEQ ID NO: 272595 - DNA, 507 bp, Klebsiella pneumoniae
atggtctccttaaaaagaaaaaggcggaagggtgggcagactaaggatgtttggtttgctacgattccttcatcattaactgatggggatagggatatggcaattgagatacctggcactgctgaggactattacaaagaaattgacctccctggcggtggcaaaagatatgccgccaacagagaaaggttgagggctattgtgtctttgattaatatggaaattaaatctgttatcgcaagtggcgggaatccacacacagcttcgctggatttgtcagaccaatttaataatttcatctcctctgcacccgcagaggctcaggttgagatgtctcaagtgtatgttgaggaaatgaatgcagcagcaagggctgtagacgatgaaacgaataaaataaataataaaatattagagaaagaacaggcggcaaattctattgggcagtgggttggcgcaggtatattattgatatttctacttataatctttggcgccctaaaataa

SEQ ID NO: 272596 - DNA, 159 bp, Klebsiella pneumoniae
atgaagcacgctcaggacgatatcagggttggcgctgtgcgccttccctttctgaaagaagtgaaaggctggattttgccgtggggtgaggtggtcaacaaccctttaaaggctcagcggctggctgaagagctggacacgaaaagaggtgcgcaatga

SEQ ID NO: 272597 - DNA, 666 bp, Klebsiella pneumoniae
atgaacaaagaattagtgattggcaaaaagtatgggcgcctcacgtatctgcgtgaaattcatgaagataaaaagcctcagcaaggtcatttcctctgcgattgtggaaataccaagatattgaggttaagcagggtaaaaactggcgacgttaaatcttgcgggtgcctccagagagaggctgcatccaaagccaacaaaaagcatggaatgactggaactcgcgagtaccgaagctgggattcaatgatgcaacgatgcaacaaccccaaaaatgatcggtatgcagattacggcggcagagggattcatgtgtgtcaggaatggcatgatttcactaacttttatgctgacatgggagatcgtccggatggagcgacccttgatcgtatagataatgaactgggttactccccgggaaactgtcgttgggcgacaccagctgagcaacaggctaaccgaaggaaatataaaggtggaaaatcaaaatatcccggggttacacgccgcccatcgggaaaatggaccgcagccataacgacggactggaaaccaaaatatctcggtgattttgctacagaggaagaggccgccgaggcttatcaaaaagcgaagcgcgagcgtgaaactgaactcgaagaattgcgaaaaataagaggttggtga

SEQ ID NO: 272598 - DNA, 300 bp, Klebsiella pneumoniae
atgcgcatatcgcatcgtcattttgatgtcggtatggccgagtacgcgttgcaagaccaaaatattgccaccattcatcataaagtggctggcgaaggtatggcgcaaaacgtgggtaagttgtcctgcgggaagttcaatgcctgttctttccagagcagaacgaaacgctccataacaatcgccaaacaaccgaccttttttatcatcaggcagagactcgtagagctctttgctgattggaacggtgcggttttttctgcctttcgtgttggtgtatgtgattttgtatttcactag

SEQ ID NO: 272599 - DNA, 627 bp, Klebsiella pneumoniae
atgagcaatatttacccactcccgaaaaagccgggggatgccgaatcattccgtgcagagcctacgcctgaagggctgagaataaccagctctggtggcgatggtcgtgaaacagttcagcttatcgcttatgacgaggccgtgaaccgtctggacgcgggagagtatgacgattccggcacgggttatgacattcaccttgccgtagcagagggcggaaactgcggatatttcgactttaccgcgcagcacaacgtcactatgtggcgctggctgattgctgcgacgttcgtttctgagatgaagcgcgagaacggcaccaccacggttactgaacctgacggcacatcatcgcaggtggcgatttactccaatggcaagatagccattccggtttatcccatcgcagaacgcctggctatggcgaacaacattgagggagcgcttatcgagcgttacggcactgaacagggtacggagaacgccattatgttttatcagtccatgctggatgtggacgccggggagctcacgaccgtcgggcgcgagatactggcagagctacatgatggttttattgatgacatagaacaaaacggccttcccgaagcgccggtggcgcactaa

SEQ ID NO: 272600 - DNA, 336 bp, Klebsiella pneumoniae
ttgaacgtcacctccgccgtacgccaggctgtcgaacggacatcctggtttaaaaaacgtcagcgttatcgtgtgctgtactggcgcgaaatcagccctctcgctgtgcccattctgctggaaaatgcctgtgtgctgctgatgggggtgttgagcaccttccttgtcagctggctgggaaaagaggccatggccggggtggggctggccgatagctttaacatggtcatcatgtccttctttgccgccatcgatttgggcaccacggtggtggtggcctttagcctcggcaagcgcgatcggcggcggccgcgcgccagtcgctggccattatga

SEQ ID NO: 272601 - DNA, 420 bp, Klebsiella pneumoniae
ttgaagaaagcaaaaatcgacttcggtgtggaaacagccgaaaccattttcaacgcgatcattcacggtgagaccacgcaaacggccctctacggatttatgaaccgtgtcggaaccaacaagcggaacacgacgaaagcgcttgagatgctcagggagcacaaattacgcctgaaacggaatgcccgtgccgccaggactatccgcagcaccttgaaaccatacagcgctgaactggcaaaagggcgtgacgtgatcgaaatcatccagcccgtgctcaccgcgtggcgactgttctacgcgaagcagggcattggcatgatgaatgatcaggtgttgctgttgaaaatggttgaggcggcgggcgagttggagaagctgacgggcgaactagtcccggatatggcaacgacggggtga

SEQ ID NO: 272602 - DNA, 219 bp, Klebsiella pneumoniae
atggcattgagcatcaaactacctgaacacgtttactccgggctgttagccgaggctaaacgcagaggaacaacggttcccgcgctaacgcgtgaggtgctggcggcggctgcgaacctgttcgacaacggcggcacaattcatcaattagtatcgaatcaactgactatacccgacacggggaaacatggagaaaacaacaatgagagcaaaaactga

SEQ ID NO: 272603 - DNA, 834 bp, Klebsiella pneumoniae
atgagagcaaaaactgattacgtaaaattggagtatcagatcctcgatctggttgagtataacgggttaaaaattactgggaatatgaagatcctgctctcccttatctacagctatgaaaagaagagccggacttattacgaatcaataaccacactgggtaagcgggtaggtttagaaccgcaggcggcccgtagtcttgtatctaaactctgcgatgctggaatgatttcctatgaagagcgcaaggggagttcccatattttccactcaaaaccgctcaaccaggaattgatgactctcatcggtgatgaaaagccgaagaagagtagcaaggcgacaaataaaaaatccgaggagaagcaggaaaatggtaatggtcatgaacaagccgaaacaccgcaggcaaaactggcagcaacggctgcgacaccatcaactgatgcgcccgcaggcacgcccgctggtcagagtcctgacctggcccctgagtcttccgaggttgttgctgaacagcgctatagcgtggcatgtaacgatgaccgtagcagcgatgatcacaccgctggtaatcatgcaatgagccaggaagcgcaggacgatgatccaacgtttacacccgagaaaccagcgccagaggaaaccgcaggccgggttatcgcttcgctcgatgatcttcgctgctggtcggaggttggcagcggcgagggtatggacgaatacggtgtaatgtggggtgttgagagcacagccctttacaacctgatcgacgaacaccgccaaatcagagaagcggaagcagaaaaaaattttaaatcgcagaggacacattga

SEQ ID NO: 272604 - DNA, 582 bp, Klebsiella pneumoniae
ttgattgataaatgtacggcactgaccgccacccagaacgaaccagaaaagattgacccagaagaacgagcaagtaacgatttacctgaaccagaattgcccgacccagagttgccggatttgactcgcctgtataaacgtcgatgccgggatgagaacgtgatcaaaaaggcaaaatctttactcgttcacggtatgaccgttagcaaagtagccttgctgctacgtcttcctctggagaaggtgcagcaactgcattccgaaggatggaacagtagatgcaggcgcgtgaccccgcacaatgcctggacatgtcagaaactggcgatccaatgcttcgggacaggctgtccgcttgttcaaatctgccggattacagatcgaccactattttctgttatcaaaatgctgaccgccgagggcgtgagcatgggcgcattgcgtcagtacatgccgccagagacagatccgctgatggttgaatatcgtaagacgctgtcacgtcatgaggcatcaccgaagcggagaccgatcaaaatcaacccggttcgccgcagcaggacagcaagcgccacagcctga

SEQ ID NO: 272605 - DNA, 420 bp, Klebsiella pneumoniae
atgcttcaccagcgcgcggacgataagcgccagccgctgctggccccacgacagactgtgaaacggcgcgtcggcggtgcgcttatcgatgccgagaatatccagccattgctgcaccagcttatgctgcttgtcggagaccgcctgataaatgccgatcgagtcaaaatagcccgacaggatgacgttgcggacgttggtgctgacccggtagtccagatgcaggctgctgctgacgtagccgatatgctttttaatatcccagatggtctcaccgctgccgcgccggcggccaaagagcgtgagatcgttgctgtagccctgcggatgatccccggtgaccaggctcagcagcgtagatttaccggcgccgttgggaccgacgatctgccagtgttcgcccggattcacggtccatga

SEQ ID NO: 272606 - DNA, 702 bp, Klebsiella pneumoniae
atgacgggccggtgggacatccggctccggcagggtgatgccgtccagtttttcactgtgcgccagctgggcgaccagcgcctgctgcagcagggaagacttctcgccggtctcgctaagggtgcagtcagccagcacgccggcgaattgcacaaactccgggatctcatcgaaacggttgagcaccagcaccagggtgatgccggcgctgtgcaggtcggccagcagggcagccagctgctggcgggagttgacgtcgagaccgtcgaaaggttcatcgaggatcagcagttgcggatcggtcatcagggcctgacacagcagggtcttacgcgtttccccggtcgacaggtatttaaaccggcggtccagcagggcgctgatgccaaactgttcggccaggcgcgcgcagcgggcaggatctttcacctcatcctggataatctccgcggtggtgcggccggtgtcttcttcgcctgggctgagcaggtcggtgttattgcgctgccactcgtcgctgaccagcttctgcaactgctcgaaggagaggcgggttacgcgggagaagtggctttcgcgctggccgctgagcagggtcaggtcgccggccagggcccgcgcgagggcggatttgccgctgccgttgctgccgacgaacgcccagctttcacccgccgccacgctcaggtggtctatttttaa

SEQ ID NO: 272607 - DNA, 279 bp, Klebsiella pneumoniae
ttgcgctatttttctgaaaaataccagggatctttcgatccccggcagggggcgtcaggccacagggccgagctgataagtgtaaccgtctccactggggacgaacgccaggcgatgggtaatacagtccggggcatcttccgcatggtgcgagacaaacagcagctgtgtggccccttcgccaatcaacacgtcgacaaagcggcgcaccagctggcggttgagggggtccagcccataagcgctaacttaagggttgtggtattacgcctgatatga

SEQ ID NO: 272608 - DNA, 318 bp, Klebsiella pneumoniae
atgagcctatataacgatttagttcgctgcgaatttggcaaaggtgccaccgttgacgagctgggcggcattcagaaccgcatggatggggctgtgagcgatttaatgatgggcgtcagtgccattggcaatctcatgttctggatggctgatagcgatgaatacccggaggaaagcgctaaagctgatatgtacagattaggcgcaatgctgggtacggttggcgaggtggcgcgggcgctgaatgatacagcgcaaaacgcagcgtttttgagattagacggcgagaaaaaaaacaaagggagcgcgggcaaatga

SEQ ID NO: 272609 - DNA, 1077 bp, Klebsiella pneumoniae; identical to SEQ ID NO: 239648

SEQ ID NO: 272610 - DNA, 258 bp, Klebsiella pneumoniae; identical to SEQ ID NO: 235644

SEQ ID NO: 272611 - DNA, 1470 bp, Klebsiella pneumoniae
atggtttcggaaactaaaaccacagaagcgcccacgctacgtcgtgaactgaaggcgcgccacttgaccatgatcgccatcggcggttccatcggtacgggtctttttgttgcctctggcgcaaccatttcgcaagcaggtcccggcggggcgctgctgtcttatattctgatcggtttgatggtctatttcctgatgaccagcctcggcgagctggcggcgtttatgccggtatccggttccttcgccacctacgggcagaattatgttgaagaaggcttcggcttcgcgctgggctggaactactggtacaactgggcggtgacgatcgccgttgacctcgtggcctcacagctggtgatgagctactggttccccgacactccgggctggatctggagcgccttgttcctcggcatcatgttcctgctgaactggatctcggtgcgcggctttggcgaggcggaatactggttctcgctgataaaggtagccaccgtcattatctttatcattgtcggcgtgatgatgattgtcggcatcttcaaaggggcgcagccagccggctggagcaactgggggatcgcggatgcgccgttcgccggcggtttctcggcgatgattggcgtggcgatgattgtcggcttctcgttccagggcaccgagcttatcggcatcgctgccggtgaatctgaaaatccggagaagaacattccgcgcgcggtgcgccaggtcttctggcgtatcctgctgttttacgtcttcgcgatcctgattatcagcctgatcattccgtataccgatccgagtctgctgcgcaacgatgtgaaggatatctccgtcagcccgttcaccctggtgttccagcatgctggtttgctgtcggcggcggcaatcatgaacgccgttatcctgactgccgtgctgtcggcgggtaactccgggatgtacgcctccacgcgtatgctgtacaccctggcctgcgacggtaaagcgccgcgtattttctcgaagctgtcgcgtggcggcgtgccgcgtaacgcgctgtacgcgaccaccgtgatcgcggcgctgtgcttcctgacttccatgtttggcaaccagacggtgtacctgtggctgctgaacacctccgggatgacgggctttatcgcctggctgggtattgcgatcagccactatcgtttccgtcgcggctacgtcctgcagggtaacgatattaataatctgccgtatcgttccgggttcttcccgctggggccgatcttcgccttcgtgctgtgcctgatcatcaccctcggacagaactacgaagcgttcctcaaggacaccattgactggggcggcgtggcggcgacctacattggtattccgctgttcctcgtcatctggtttggttacaagctggcgaaaggcacccgctttgttcgctacagcgaaatgaccttcccggaccgctttaagcgttaa

SEQ ID NO: 272612 - DNA, 285 bp, Klebsiella pneumoniae
atggccccatcgacgacatcctgttccccattcagcacggtgctgttctatcccggctttgaggtgcttccgccgctggtgttctaccgcacggataaaaccgatgccgggcagttcgccgatcagtgcgccgccctggccgagcggctggacacgctgtggcaaaccgagcccattccattccgccggcagaatcatggcgattatctgatcccgtcgctgacgctgcgcccggagctggcgccagggcaaagcggcctggcggtgcatctggcaacgaaataa

SEQ ID NO: 272613 - DNA, 588 bp, Klebsiella pneumoniae
atgggattatcaaagtcagttagtgatttactaagacaaaaagagagtttagataatgaacctgatgaagttcatagtgaaaatgaagttgaaatatcaggagaagaaaaggctttaacattagaaagtgatttggttcttttaggtatcgtctggaatgctattagacctcatgaaacttttgaaaagttaaaaactcgctattatgttaatgaaaacttggttgtagaaaaagggaataacagcttttggatttacggcaaagaagatttaatatcagaaagcattgtttcttttgttgattattttgctaaagatattagagattttaaatttgtcaggccagaatcaccctatgacagttttatttattactttttcaaagaagctattatgtgtaggctaaatgttttagtttcaaactctttccatgaaagagatttacaacaagtaataatcaaggatgttattagagaacttaaagacgacgcaagaaagatggataacataaataaaaaatatcatcttcaaatgatcgacaactggataagtcaaatactcgttaaaaacacacacttatctatgtga

SEQ ID NO: 272614 - DNA, 1929 bp, Klebsiella pneumoniae
atgagtggagcaaaaatattagcagtattagataaagacggaatgcgtgatgctcagggcattaatggcggtaaaacaagtccattagagccaaccatcaacggcgctacgtataaagatagtgaacttgatatagttattaaagctgaaaacggtttagagcttcttaaaaaaattgaagctacaattgaccgtgggataatgtcaaaacagtatttgaataccattcaaagacctctttcagaactaagcactaataaagatccaaaagctctttttggtgatattggaggcagggggaatgagtgggaacagctatttattgatttatcaggttttagagcagaagatcaggttttagcacatgacataatcactgacagtatggctaaccctaattttatttatgtaaaagatcaggggccgggaaaatcaaagcaatatatgcctgttattggtaaaaacagtgtttttgcttggggtgttcatagcgaccaaaaaactaaaactcactctcatatatttaggcatacgcataccattactgataaaaactatgaatacaacccaaatactggtgaagtaatcataaatcagttaaatcctgacgcaagaagaataacagcaagtctttcattaaaagataactttgtaagaacgcaggttcttaaaaatatcaatgacaatcttaaagccgctggtttacctcttttagataacatttacttatctaaaggtaaaatgctttctccagaagaaatcaaagcacaagaggttattgatacaaataataaagaatatcttgatgatttatacactacagcaagagaaaaagctaaagaagagtctattaaaaatcaagagcaaattccaaaagaagttattgaagatgctgttgttcagaatgaactaaatgaaatagatgctcttatcaagcaaaaacaaaaacttgctgctgaatacgccgctaaagctattaaagaaaacaatgagatacaaggctttgaaaaggctcgtgaagctgttatagctcttcatcaagaaaaacgtgttaatcaggaacttactacagagctgaccaacactaagcaatcacttgaagaagaagcgaagcttagaagccagtttgaagaaaaggccaaaaagacaagtgaagagttagcagaaaaaacagaagcgtttaatgctctttctgatgagtataaagctcttggtgagcagtatgatgagttagaacaaactcatacagctaccattgaaaaacatagagaagtcgttgaaagcctcaatcaacaactacttcaacaagatcttgaacacacaaatgaaattgagttgttggaaaccactcatgaaaacgctattaaaaagcttaatattgagcatgaaaacgagattgaaacgcttaaaactcaacaggcttctattgttagcggattaaatagcgaaattaccaatcttaaagatgccgttgtaagtatcacagaagaaagggatggtttcaaattcgataaagaacagcttgagattgaattagcaaaagctaaacaagctattattgatatagaacgtaagcacaaagaagagcttgaaaaacgtgatgaagagaaagcttcatttgaacaaaccataaaagatttgaaagaagagaagattgaagctgatgaagctattaaacttcttactgaaagtaatagtaaacttattgaagaagttaaccaacatattgactcttacaacaagcttaagagcgaaaatgttaagctgaaagctgattatgataaagagaaggaagaaaactctacattaaaatcagaaaatgaacagcttaaaattgataaacaagctttagaagaagcaataagaaaagatatagaaaaaaagaataaagctgataacagcaataaaaacaaaccaactaaaaaataa

SEQ ID NO: 272615 - DNA, 654 bp, Klebsiella pneumoniae; identical to SEQ ID NO: 251025

SEQ ID NO: 272616 - DNA, 600 bp, Klebsiella pneumoniae
atgaaagataaagaatttgaagataaggtaaaaaacactgctaaaaatattttaaagtcatacactaccattaatccaaaaaagattgcgaataatttatatgactcggcatctaatacggttaaagttcctatagaaacagctcgttccaatatagagctttttaatagatttaaagggaataatgataagaaactatcctatgaagagttgtatagtctaaagaacgctgatgaaaatttaagacaaaaaaattatacaaacttctctatagcttctttagtgatgtttgtttttatgcttggtgtagctataatgggtggttataaaatctataccggaattgatacagcagcaaaggttttatcatttatgtcatttggatcgggcgtattcttatcatttgctgtttattttagatgtgtagtaagagcctattgtttaaaatacgcaacagttgataacaagcttaatgctttaaaaggtattgataacattttaccaaatccattctatgatgttagagctacaacaaacagtgaagataaaccaatagttgctttccttgaaacaaaagaagagcaagaaagaaataaataa

SEQ ID NO: 272617 - DNA, 2211 bp, Klebsiella pneumoniae
atgattaaaaaaatattgcttataatggcaatgctattgtatgcgacaaatgcgagtgccgatactatggattggttaactccattatcaacagactggtttatgaacaactttgtagacaaataccttaatccagaagctataggcgctttctctggaataatggcgttgtttcttcattttcttttagttttaggtggagtattagcagcttatgttttgattagtggaactatggtcacggctcatgatggtgagatgttaggtaaaaaatggtcttctatgtggcttcccatcagaacagctttaggaacggctatgcttcttcctatgccaacaggcttttgtgccattcatatggtgatttactcattgataaaaactggaattggtttagcaggaacaatgatcccaatcgctattgcgttcataaccatcttttttgattactcaagtgtaagctctaatcttgaaataaggaaacttgctaaagatacacttttaggtgcgacgtgcgttaaaatctataacgaagaaacagcaagagagtttgctcaatcatctaagtatttcagaggtaatattcaatatttcagcgttcaaaacttcgagtcaaaaagcgatggaaaaagaataataggttataactttggtggtttaaaagacgactggagcactggtgataaatctcaaatgtgcggctttcttagattagatgtatcaagctctggtgaacaacaaaatgctcttgcttctggttctggatataaacctttagttgatgttgcttcgatacaaaatgcggttcaacaagctcaggctaaagcacttaataaaatggttttagatgcgattgcttactcagagactttagctaatcctgatcctaccaacacgaaagcagtaaatgataagattgaagaaatgtcattggaatataaaaaatcaatgaatgaagctggaaaattagcaatggctcaagctattaaaattgactctatcgcagatataacggaaaaaggctgggcattttttggtgcttactacatgaaaattgttcaggcgataaatggaactaacgcagcaatgaatagtattccagcttcttctggtcaagcttctgaacgtttaaattatcttgctgatagatttgaacctcgctttagcaaagtcaaaactttaataaatggcactgacaagcttaacgctgatactactaacatagcgggtgaagacagttcattatttacaagcttattaagaggagcaaactcaaacggtggttggttcatgggggatggtaaagtagatcaattgttatctattacacagcaagtaaacgtaggtaatcacgttcttaatggtgtagcggcaatggggataggcgcaagctctgtttcattgttagcgttgatacctaaactctcagatgtgttgatagcagcaggtactgtgatcgggccgttcttctcgttcttgatgatcgtaggcttgataaacggcatcatgcttgcttacgtcatccctatgataccttacatcatctggatggggattgtgctctcatacatggctacgtgtatagaagcctatgtagccagccctatgtgggttttagctcacttagcgccggatgctgatgacgttgtaggtaaacaaggacagggctatatgcttacactggtgttaacactaaagccggggttagcaatatttggtttccttgcttctttcgtgatgatgtgtgcgggggctgccctcataaacgcaacgttcttgatagctacaagttttgttgactcaggttggttgggtattacttactcaatagcaatgattgctgtttatatgtgtttaaacttaaacaatacgatgaacgctacaagagttatgtctactcttccagacactgttttagaatggataggcgctagaggaacttcattaagcggtaaagtaatgggcggttcagaagaagctcttagtaatgcgaaaagcaatactactaatactgttgaaagagcagggcaagctacagcaagttctatgtcaaacatggcaagaaaccgtgagaaaaaaagagatattgaacctaaaggcggcaatgaaggtaatattggtaaaggtagtaatcaagagccaactaacaacacgccaacagataaaggaaatcatggtcagtctataacagaccttaatctaaaggaataa

SEQ ID NO: 272618 - DNA, 552 bp, Klebsiella pneumoniae
atgggtaatacaaaagaatacgtaattcatccttttgttgcgggtgaatgttcgattgataattttgagtcagaagaaatagcggtaattgatataataacaagagaagagatagtgtattgtgatccgggctgttatttgattagtagatcgctattaaacacattaatagaaagtaatgttaattgtgtgaacatcattaaacatgaagatttaaaaataaagtttagtgttaaacacaacatggaacatcccaataaaacaatacctaaatggtatagactgataccattcaaaaaaggagaggaaagcaaagaaatatatttaaatgaaaacaatgatcttattgtgaatgaaagaatactcaacctattaaaaaagcatagagtaaaaaggctaaaaatagaagagtatgaagatgaacatgaagcaaagataataaaagaagaaaaggctaaaccagtattcataacagagcaaaataacacaatgaagcaaatcatcatttttattgtgataatgtctgctgtcgcttattggttctttaactaa

SEQ ID NO: 272619 - DNA, 504 bp, Klebsiella pneumoniae
atgagtgaaacaaactggttagaaattgaaagtaaaaatcatataaaagtgattaatgatacaaaaataaacaagcaagatgaaaagatagctatacgtgttgagcgtagtttattacgaaagataaaaaacataagcatgggtagcatttcatatgctgtttgctcgttagctgattatgctcttaatgatgtaataaagaataaaaaacatcttgttctcaagagagagaaaacaggcaatgtgtcttatcagttgagagattatgttgatagcgacaccaatcatatatctatcacttgtgagcgtagcgatataagcacagatcttacaagaacaacaatttgggcttacgaaaactttatacaacgaataaaggcaaatacaaactcatactatacgatagctgtcattggccttgtaaagtatggaattgatttgctggataccaaaaacaaaacattgatgattacaaaaaaggagaaacaatatgaaatcatgtga

SEQ ID NO: 272620 - DNA, 474 bp, Klebsiella pneumoniae
atgaaatcatgtgataccaataaaaaactactactggatcttttggcgttcatagcttttgacatgctggatgagaaatacaacaacaataagctaatcataacaaacagagctaaaaaatatttagataataactacagtggtagatttgattacataatgaatttaaagcatggagctatcgcctcaacattcatgaaagagggtgtagaaggtcatatcttcgcttacagtgataagaatgaagatattgaagatttatttgattatgttgtcagagataagttaaaggcttatatagataacacaaaatacaatcaggatgagttaactaaagagatagagattttagctaaagagtttcacaatggatatatgaagaactattcattcctaaaccaaatattattgtatgtatgcggttgctataaaataaaacctcgccttgaaaaacctatcatgattgctttataa

SEQ ID NO: 272621 - DNA, 381 bp, Klebsiella pneumoniae
atggaatacatgaacgtagtgagaagtgatttcgaagagttcgcaaaagagaacgtagaaggttatgaacatagtaaaacattaatgatgcctgaatatgtatcaaacaaggattatccacagattgatcgtgttccattcttttcatttgagggtagtaagttgttgtttacttataatcaactggaagaatacaggataaataaagctgtattaaaatatgctgttaacctttgctttaatagtgatatgagtaataagtatggagatatagaggctttgagtaatacgtattccgctgtttattactgtttactcgataacatgtataagacattaaagaaaaaagacattgagagtgttttatattggcttgattaa

SEQ ID NO: 272622 - DNA, 432 bp, Klebsiella pneumoniae
atgaaagacaacaaagaactaaaaatagcaactataacaactaatatgttagcaaagtacatttatgaaggaataattaaacttgatgatgagagtttagcaaagtatgaagatttagctgagtttcaatctcataaagttgatatagatgtttatgatgttttagaggatatagaagcatatctaaatgacgttatagatttattagaaacagatgttttttgtgaaaatatcctaactaactttaatggaaaaaatcatgaatatgaagcaatccattttgatacagaagaagagttaaaagaatttcttttagaagaagatctatttatcattaataactctttaatcattaactctgtttctgatgatttagatgcttgcacacaagttttagaaatgcttgaagctaataaaatccataacgattaa

SEQ ID NO: 272623 - DNA, 252 bp, Klebsiella pneumoniae
atgaatgaaaacagtataattgaagaactctttgggattgtagaaaacaataaaacacatagccatgatgatttaatcagtgtgattgatgaaaagattaaaaccatagctgaaataaccttagaagcaaaatccaaagataaaaagattgagcagcttaaagagagaatagagatcctatccttcttgttagctaaacgtgatttgaaaatcagtgctcttgaagatgaaatagaagagttaaaaatataa

SEQ ID NO: 272624 - DNA, 249 bp, Klebsiella pneumoniae
atgagtgagaaaacaatagaacgtcaagttatagaccagatcttagaacttaaaacaaaaaacgagaaagagttagttggtagattaaaaattttagaagatgaaaaggaatgtataataatgaagtatgaacacattataagtgaattaaaagataagcttgaatgtgctcgtaaagaaaatgaatggcttttgtctgatatttatcatattcaaagcatcattaaagagggtgaaaatgaaaagtaa

SEQ ID NO: 272625 - DNA, 531 bp, Klebsiella pneumoniae
atgaaatctgcattaatcagcccgctgctggcgggtctgctgctgttaaccggctgcacaccgcctgccgcccgggccggaggcggcggtggcggcaccattgacgccatcaaccacaccaaatgggcaattaaccacttcagtatcaatggccagtcgggtatcgattcaataggcccgtttcaggggggcggaggcggctgctgcttcagcgtgcccgcccgctggacgccgggtatgacggtgcgcgttgactgggaaaccgggcagggttcatctgcgggtttcccggggtttgctgacagggctaaatataaagcctggatagcagacattgatgcccaaaaacgccagcacagccaaaccgttccgctgcccgactataacggccaggatgtgtgcggcattacagtgcactttttaccctgcgatgacgtgaaggtgaccaccagctgttacacctacggcagtccgtcctacccgataaaagagcccgtcaggatgaaggagcccgccgtatgtccgaaataa

SEQ ID NO: 272626 - DNA, 804 bp, Klebsiella pneumoniae; identical to SEQ ID NO: 121364

SEQ ID NO: 272627 - DNA, 849 bp, Klebsiella pneumoniae
atgttaaatgacgaaaatatatataatgtagaaaaatacaagctgcaaattcaaaaatatgctttatgctgtgatgattttagagatggggtatacagagcccctaaagacaaagcccttctaaagaaatatatttgtttcaataataaatcttttattaacggtttggtttttgatgtagatcacaaatatggagcggtcgcatgggacttagttggtttaccaataccaaatacgatcatacaaaacataaaaaatggccatgctcatttactttatgctttaaaaaatccggtattaaaaacagacatggcaagagataagcctttaaaattggccgctattgttcagagtggatttacagaaaggttagatgcagacagagcttatgctgatgttttaatgaaaaaccctctcaacatgcatgaatggagaacgacatggacaaatacttcagcatatgatttacaatacctcttagattttattccagacaaaataagaatttcgagtaaaaagaaaagtgttatacatgggctgggccgcaacgttaacttgttcgaagatttaagaattattgcttataaagaagtattaagttttaaaaaaagtaaaaactatcgttgttttttttatgatatgctatcaaaagcgactttacttaataatcatagcaacccgcataatccattatctcatgaagagacaaaacaaatttgtagcagtatttgtaaatggacatggcgtaatttttcagttcagaaattttcgacaatacaatcaataagagcaaaaaaaacaagaaaaacgcaaaaaaaattagaaatagcattggagacattattatga

SEQ ID NO: 272628 - DNA, 729 bp, Klebsiella pneumoniae
atggtttatgctttgcctgaatggtctaagcggacttcgacattatctgaagatagcaagaaaatgagagatctgttgctcagagcatcagatcctcacaaactgttatttgtcgatttaccatttacattcacttcagagaatgataatgatctttcagcgaggatcgaatcttcaattaaagaattagttaattcttacaacaaccttttacaaaatattcgcagaaaaatgctaatagcattggacgctaatgataatgattttgctgagatcaagaacagatcaaacactgtttcgggaatttcgggcgatttccggtttgatgctttttcaacccgtctaaaagacttaaatgaaacaaacgaaagtattgaaagcattttaagcttggcagcgaataagccgccgagactatggtccgacaatgacattgatattgcattaatagaaatagcatcttgggctaaaaaattcaaaagaattgaagtgttgtcttcgattaagaatagaaaacctacaagagaagcttttgcttttattttcgatgatcgagaaaatggaacagtacaagctgaatatgatataaaatcatccgatataaaaatcgtagaagatatttcacaaaaaattctctgtgaaatacacgataaagattttagcaaaagtattttactggcagctcttgcaaaagttagtattgcaattgtaaatggtaaggatgattaa

SEQ ID NO: 272629 - DNA, 567 bp, Klebsiella pneumoniae
atgagtattattttaaacaaagtaaaagcatttacaaacacaaaagaaaacagaattgaaaaacttttattcagcaatgatattgatttagtgaaaagagtattaataactcatcctgatattaacttaaactttataaacgatgaaggtaaaacagctttgtttggtgctgactaccttaaagcagaagctttaataaatgctggcatcaatataaatgctaaagataaagacggcaatacagcgttgttcttctctgattatatgacttcaaatcttcttttaaacaaaggggctaatgtcaatcatagaaacaatgttggtatgacagcgattttcagagcagacagatcaaaagcaagtttgcttataaaggctggagcaagagttaacttcaaatcccacgtagacaacactacagctcttcaaatggcttacataagacgtgatgaggctgttatgaccgttctaatcgaagccggggcagacatacaccacaattggagaggctactcagctcacgctaaagcattcatgacaactattaacgaaagacaagcagcataa

SEQ ID NO: 272630 - DNA, 654 bp, Klebsiella pneumoniae; identical to SEQ ID NO: 251025

SEQ ID NO: 272631 - DNA, 1104 bp, Klebsiella pneumoniae; identical to SEQ ID NO: 251026

SEQ ID NO: 272632 - DNA, 387 bp, Klebsiella pneumoniae
atgaaaaataaagttgttaaaacaaaaaaagatgatgattcctataatgaactacttgaagtgcttataatgttaatactggcattggttttggtatcttttattgaaagcaccgaaaacaaaatgagcaccgaagaaattagtttatataacctacaaactgatgttatgaatatcatgctttatgatacaccaataccaataataaaatcattaacagaagatcaaaaatcaaagctaattattataaacaggaatatagataattgtatggaaagaaagcaacaattaggtgcttcaggattatcagaatgctataaaaaaaatgaattattatttaatgaacttaaggttggtttttcagatagattgatttttaataattaa

SEQ ID NO: 272633 - DNA, 273 bp, Klebsiella pneumoniae
atgaaaaaaattaaatacatagaaatcactgacgcagctattttaaaattcatttcattaaatagtttagacgcttcggtaaaaatagaagacgaaataagaaatgttgcggattggatgttaagcaatgaaatgtttaaaaaaactggaaataaaaagatcattggaaaaatagtagacgccgcttctgattatcataaaggttgctatttaatctataactttgaaaagtattataatatcgaatgttttttctgttttattcattattaa

SEQ ID NO: 272634 - DNA, 537 bp, Klebsiella pneumoniae
atggcgacggtgaaggtcgattatctggcgttcagctattacgccagccgcacattgaacagcgacgcgatcccgccgggaacggcggtcaacaactatatgctgtttggcaaccaggataacccgttcctgaaagcgacggaatggaactggcagattgatccgctgggcttccggacgatcatcactcgttactataacgattggcgcctgccggtgttcccgattgaaaacggcatcggggtgattgagtcctgggacggcgaacatcccattgccgatgattaccgcatcgcttaccatcgcgaccatatcaacgccatgaaagcggccatctttgaggatggggcgcaggtgatcggctatctcggctggggattaatcgatatcctgagctcacagggcgatatgcgtaagcgctacggcgtggtgtacgtcaatcgcgaaaaccatgacctcaaggacctgcggcgggtgccgaagaagagctatgcatggttgaagcaggtgttccgcagcaacggcgaagcgatgtaa

SEQ ID NO: 272635 - DNA, 138 bp, Klebsiella pneumoniae
atgacgggagctttattaccttggatgtttcgtcaaaaatacaacattatgaatatttttgaaaaggataagaatatcaaatcaaaagaagaaaatgaaattaaaaaaacgacaaaggagaatgattatgataaatag

SEQ ID NO: 272636 - DNA, 177 bp, Klebsiella pneumoniae
atgtgcaaccagagcgactacgccatttataatattcaggccagcctacgcctgaagcttctaaaatctcacccacagcagctttatctataccattttcacgaaaaggaagggcgatttttagatttttgtgctttgaagcatacccttcacgatattcttcgtccgctcttatag

SEQ ID NO: 272637 - DNA, 438 bp, Klebsiella pneumoniae
atgcttgatttagatattaaaagagagttgctgtttgctgaaacagccgaagaagtagatatattggtaaaggccggagctgatgtaaacggtcttatgggtagtgtttttcctttagctttagctgaaaacttagaagtagcaaaggcattagttgctaatggtgctgatgttaactttaccaataagaaaggtgaaacagctatcttctataacaaaaacatcgctgttatcaaatttttgatttcacaaggcgcaaatattaaccatttaaacaacgatggtgaaacagcattgtttaaaacatccgacattgaaagccacgacacaaaaataaaaccagcagataaagaagaataccaaagctttatgaataagcttaaagaaatgatcaggaacgcacttgaacaaaaaaagcagatgctacaagtagcgtaa

SEQ ID NO: 272638 - DNA, 312 bp, Klebsiella pneumoniae
atgaatacaaacactttaaatacagtttacaacgcaatgataaatactatgaatatggttgagtttgatttagatagcggatttattttgtgccagaatgaagattatgattatactgaaataggaagaacttattacagcagaaatgggaatccaacattctatttgatacatgataatgaaactcactttttaatcaaaaaaaataacacaatttacaagagagtcaaaaaagaaaatatttcagaggttattccagcattgttagagcttctaaaaaaagatggtcatcaaataacaatgaaacactaa

SEQ ID NO: 272639 - DNA, 564 bp, Klebsiella pneumoniae
atgcgttgtctgcggccctcaaccccggcacttactgatgtaagctcccggggatttcgggtcttgacgcctttttgcaacgcgaaatgctgggttaaatggggggcgcctttcacgctgcaaatgcgttgtctgcggccctcaaccccggcacttactgatgtaagctcccggggatttcgggtcttgacgcctttttgcaacgcgaaatgctgggttaaatggggggcgcctttcacgctgccgatgcgttgtctgcggccctcaaccccggcacttactgatgtaagctcccggggatttcgggtcttgacgcctttttgcaacgcgaaatgctgggttaaatgggggggcctttcacgctgcaaatgcgttgtctgcggccctcaactccggtcactgactgatgtaagctcccggggatgtcgggtcttgacgcctttcacgccccagatgtgttggccggataaatgctatccggccttctcttaccagccaccgccgccaccgccaccggaaccgccgcctgacgatccgccaccggaagagccggagccgctatag

SEQ ID NO: 272640 - DNA, 2157 bp, Klebsiella pneumoniae
atgacatccatttctaataaaaatgttacatctgagtcggatgaaattgacattggtcgattaatcggtgagttaattgatcatcgtaaattaattatatctattacagcattatttacattagctgcaattttatatgctgttctatcaacccctgtatatcaggcaaatgcattaattcaagtggaacaaaagcagggaaatgctattttaaatagtttatctcaagtattaccagatgcacagccgcaatcagcgccagaaatagcgctcttgcaatctaggatgatactaggaaaaactgttgatgacttgaatttacaaatacaagcacgtgagaaacacttaccgctaatagggcgtggattagcaagacttagtaaagataaggaaggtgaaatatctatttcatcattatatcttccacccgacggttcagatgttcctgaaattgaattggttgtaaaagataataatcactatacaataaatactggaagtgactcttttactggtactgttggtgaattatttgaaaaaaacaagataaagattaaagttgataagattgatgcagaacctggtacaacattcagagtaagatatcttactaaactgaaagcaattacagatttgcaagataggttttcagtttcagatcagggtaaagatacaggtatgttgaatttatctctgacaggggaagaccccgatttaatcgcaaaaattttggatgatattagtaataattatttagcacagaatatcgctagacaagcagcgcaggatgcgaaaagtcttgaattcctgaataagcaacttcctcaagtgcgtacagatcttgattcagcggaagggaagttaaatgaatatcgtaaacaaaaagattctgtagacctttctttagaagctaaatcggtcttagatcagattgtgaatgtagataatcaactaaacgaactaacttttagagaatcagagatctcacaattatatactaaagaacatccaacttataaggcactcatggagaaacagaagactcttcaagaggaaaaagggcgtttgaacaaaaaaatatcatcgatgcctgcaacacaacaggaagtattaagacttagcagagatgtggaatctggtcgcgcagtatatatgcaacttcttaacaggcagcaagaattaaatattgctaagtctagtgcaattgggaatgttcgcattattgatgaagcagtcactcagcccattcccgtaaagcccaagaaagtacttactgttctaataggatttatccttggtgcaataatatctatcggcgcagtacttattcagatattcttgcgtagaggcattgaatctcctgagcagcttgaagagttaggaataaatgtgtatgccacaattcctgtttctgagtatctctctaagaaacgagtgaaaggtattaaacagagtaagcttgatggtagtgaagttttcttaattctagaaaacccagcagatatagccatagaagccctgcgcggtttacgtacaagccttcatttcgccatgatggaagctagaaacaatgtgttaatgatttctggtgctagtccgaatgcaggtaagacatttattagtactaacctggctgctataattgcgcaaactggaaagtctgtattattcattgacactgatatgaggaaaggttatgtccacaaacttttcaatagtagcaatgaaaatggcttgtctgatgtactcgttggaaaaactagtccttcagacgcagttaggaaactgacagatgcaggtttcgattttatagcaaggggcatggtgccaccgaatccagcagagttgttaatgcaccacaggttcgattcattaataaaatgggcaagcgctaattatgatcttgtaataattgacacgccacctattttagcagtaacagatgctgcaataataggtaactatgcaggaactaccttacttgttgctcgttttgaagaaaacacagcaaaagaaatagaagtcagtatcaaaagatttgaaaatagcggcgtaactgtgaaaggttgcatacttaatggggcaatgaagaaagctagtaactattatggttatggttatagccattatggatatcagtacaacgaaaaatcgtaa

SEQ ID NO: 272641 - DNA, 813 bp, Klebsiella pneumoniae
atgactgttaaatcaacttttttcaatatcggggccactttcgacgcagatcatggctgtccgatcatcggtgctgacgcaaccattacggttgctacaaagtttttatatgactttatgaacgtaacaacgtggccatcacaggcgacaaacgtacctaacggaagctcatttatcaaccttgtgcaaaccggggatcctgccactgtatcattgcttggagcctcaacgcttacattcaatgggaaaggcatcaccgcacaaagtgtaagtaactctgtttatgctcgggtagatttgcctaatgaagcaaaattgctgcagacgtcccctggactgttatttactacctggattcgccataaaacctctgcgctaacttctgggttggctgcggttgctgggtattcgtaccagacaggggccggtaaccagtattctctgtcatacgattttgctgccaaaacttacaacctgcgagccaacgggataaaccatgcaattgacgcatccacatgggaagacggcgtgcttgttcagttggcggtagactggaactcagctgatggcgtgtctaacgcatatgttaacggaactttgcacgattcgattacgtctgccggcaccatcggaaacctgaagcagccgacttcggtcaatgcgggggcatacccggcaatgttccttctcggtggtttttccgggttgtggcttgggcagattgtacgtatctggctcgatgagtcggccaacacggatcacgcttctaaagtcagtgccgactacacgactaacgcatccgctttggcttag

SEQ ID NO: 272642 - DNA, 396 bp, Klebsiella pneumoniae
atggacgataacagcgataacgttgtcgctctcgttcaaccaaagcgagatgaggcaacgctgctcaatgtcaccgtaagcgagcgtaaggaatatgctcagcaacgctgtaaacatcgggctattgaggtctgtgaaactgatcgcgttattcgctgcacaagatgcggatgcgttattgacccgttcgatcacatcctacaggtggctactgacggtgagcatattgtcactgagattgagcaactccatcgccgccgtgatgagttgcgcgagtctgtagccaaccttgagcgcgaagagaaaaacgccaaagctcggttacgttcagccagaacatcgatcctgtttgctgaaaatgacctgaaaaatgctgagcagggagttaaacagtaa

SEQ ID NO: 272643 - DNA, 1338 bp, Klebsiella pneumoniae
atgagtaaccgcaagtattttggcaccgatggtattcgtggccgcgtcggcgatgcgccgatcactccggagtttgtgctcaagctgggctgggcggcgggcaaagtgttagcgcgtcacggttcacgtaaaattatcatcggcaaggatacccgtatttcgggctatatgctggaatcggcgctggaagctggactggcggcagcggggctctctgcgtcgttcaccgggcctatgccgacaccggccatcgcctacctgacgcgcgccttccgcgccgaggcggggattgttatctctgcttcacataaccctttctacgacaacggcattaaattcttctccattgagggcaccaaactgccggatgatgtcgaagaggcgattgaagccgaaatggagaaagagctcacctgcgtggattcggctgagctgggcaaagccagccgtatcgtcgatgcagcggggcgctacattgaattttgtaagggtacctttcccaacgaactgagcctgggaacgctgaaagtggtggtggattgcgcgcacggcgcgacctatcacatcgcccctaatgtcttccgcgagctgggagcccaggttatcgcgatgggctgcgagccagacggtctcaacatcaacgaagaggtcggcgccactgacgtgcgggcgctgcaggcgcgcgtgctggcggaaaaagccgatctgggtattgcctacgacggcgatggcgatcgggtgattatggttgaccacgaaggcaataaagtcgatggcgaccagatcctctatatcatagcccgggaaggattgcgtcaggggcagctgcgcggcggcgccgtcggcacgctgatgagtaatatggggctggagctggcgctcaagcagttaggcatcccgtttgcccgcgcgaaggtcggtgaccgctatgtactggagatgctccaggaaaaaggctggcgcatcggtgcggaaaactccggccatgtgatcctgctggataaaaccaccaccggcgatggcattgtcgccagcctgcaggtggtcgcggcgatggtccgcaaccacatgagcctgcatgacctgtgcagcgggatgaaaatgttccctcagctgctggtgaatgtccgctttaccgagggcagcggtaacccgctggagaatgagcacgtcaaagcggtgaccgcggaagtggaggcggcgttaggaaaacgcggccgtgtcctgctgcgtaaatcgggtacggagccgctaatccgcgtgatggtggaaggcgagcatgaagatcaggtgcacgagtttgcgcaccgcatcgctgaggcggtaaaaagcgtttag

SEQ ID NO: 272644 - DNA, 576 bp, Klebsiella pneumoniae
atggaaacatctagaaagagccattttattattaacaacaaaatcatctattatcctgaggataatagattaacatctgcgtatgacaaggagataagcataaacatcaacgcccctgccagtcgttgtctcctgctactaattgagcatcagaaaaaaatcttatctcgagatgattttctcgaagtggtctggaaccgtaatggaatgcatgttcttcacaatacattctatcagaacatatcactactcagaaaggccttgaaaaaggcaggattagaagaagacattattgtcacaataagaaaaaaaggggtgacattatctcctaaggtcaatattaaattgatacgatgctcatccccgccgccagcttttctttcactcaaaccactgagcactacttcagagttattacaagtaagcaatgacgatgctaaatatcatgagaggcttaacaaaggaatgatgaaattctacgctaacgtaaaacacatactgatcactgtgatcattgccatattttttcttttgcatgctgtatccatttatattttggtcaatttagaacaatga

SEQ ID NO: 272645 - DNA, 549 bp, Klebsiella pneumoniae
atgaaaaagttagtactcgctgcatcactcgtggctgtattcggaatgactggtatggcgcaagcggcctcaacgggaaccatttcctttgagggtgagctgacagcaacttcttgcgatgttaacgtggatggccagggcactgatgcaacaatcaaactgccgacagctggtatcaaccagctcaccacggcgggacaaacagctcatagaaccggattcaacatggcgctgaccaactgcgccggcacactgaaaacagtttctgctttctttgaagcaggaccgactgttgatctggtttctggccgtctgaaaaattcttccggcaccgctaccaatgtaagcctgcaacttcttgacgccagcagtccaacctatgctgctatcaaggccggtagtggcaaccaggctagcgacactacctacgtagcttatgatgcttcaggtaatgcaaacctgccttatgcagttcaatattacgcagaaggtgcaacaactgctggtaccgttaagagcagcgttgtttactctctgcagtataagtaa

SEQ ID NO: 272646 - DNA, 696 bp, Klebsiella pneumoniae
atgattactgctttagcgcttagaaacgtgaccctcggcgccacgctttgcttgttgagcttctcgtctttagcaagcgtagtcgtgacgggtactcgtattatttatccatctgatgcaaaagaaattagtgtaaagctcgacaacaaggggaaatttcccgtattaatccaaagttggatcgatgatggcaatgttgacgcaccaccagaaaaaattcaggtgccatttgtacttaccccaccaattaatcgcgttgaaccatccaaagggcagacgttacgtgtatcttatacaggtggtacacaacctactgacaaagaatctgtattctggcttaacgtactggaaattcctgcaaaacataaagatgttaatgaaagtcaaattcaagttgcttttcgttcacgttttaaaattttctttcgccctgtcgggttggagggaaacgccaatgaagccattaaatcgattcaatggagttctgtaggaaaaaatattaaagctgtgaatcctactccttatttcgtatccttagttgaacttaaggttaatgggaaaaaggttgagggagaaatgattgcgccaaaatcaagcctgaatataaatttattgggttcaacgggtagcaaaatttcaggcagttatgttaacgactacggtgcagttaatgattttgaggcaattttaaaataa

SEQ ID NO: 272647 - DNA, 2673 bp, Klebsiella pneumoniae
atgaaaaatttattactaaaccatatttatggaaaagccgcccctttggccattgccatagtttatggttgtgctgctgacgccattgcagaaacgaaaacaaatataccgcaggaaattgcgcaaaacgttgagtttgataatatttttctcaacctggaaaacaagagtactgttgacctgagtcgttttgctaatggtgcctcagcattgcctggcacctatcgcacacttgtttatgtcaacggcgatgctacgatgtctgcagatgtcgaaattcgctcaagacgtaataaaactacctatccctgtattggccgtaaccttattaaactcattccgtttaactatgaacaattacctaataattttttaagtgatttagatcatgatgacgcttgtctcgacctcgaaaaaaaattgccagaagctcatgtactctttgacagtaacgagcagcgtatggacatctcaattccgcagatgtatgtgcttagaaatgctcgaggaagtgtaaatcctgagctctgggatagtggtattcctgctttaatactgaactacaatgttaacgcctattctaatcgttcttacgggaacacttataatacggcatatgctggcatcaatgccggagtaaacattggcgcttggtacttacggcataatggttcgtatcgctggaataatgatggagaaaaagaatatacttcaattaatacttatttgcagcgtgatgttccctatctaaaaggccgtatgctgatgggggaatctaatacccaaggacaggttttcgatacgttgccgtttaaaggatttcagcttgcaagtgacgaacgcatgctgccagaatctcagagaggctatgcgccagatattcgtggtattgctcgtactaatgcgcgtattacagtgcgccaaagtaaccaagttatctacgaaactaccgttccgcctggcgagtttctcattaatgatctttatcctacaggttatggtggcgatcttgatgtcatcgttcatgaggcagatggtacagagcaaacgtttaaggttgcctatgcagcagtgcctcaacagcttcgccccggttcattgcgttattcgcttaccttagcaaattataataatgattcgcttagcaatcagcccgcactctatcagggaactctccaatatggtctgaccaacagcttgacgacttatggcggtcttcaggctagccagaattattacgctttacagggagggatggcatttggcacgccttttggttcgctggcgttggatgctacccaagcgcgcgctattcttaatactgcccatatgacaggtgatgaatatcgttcggctgagcgtatgagtggtcagagctacggcgtgacctacagtaaagacattagtgaaactcaaagtagtgtttctctcgcagcttaccgtttttcaacaagtggctatgtagactatcagaatgctatgtatattcgagacgcctggcaacgcggagaagcatacgacaccatatggcgccctaagaatcgatttattctgactgtaaatcaaggtctctttgaagggtgggggcagatttacaccaacgcttcagtgcaaaactattggaacaaaggcggctcagataaacagtttcagctcggctatagcaatatttacaaacaagttagctatggtcttaacgtcagccgcacatacagcgtgaatggagtagaggcgcaaaccagttatatgttaacagtaagtttacctcttggtcgcagctatgagcgtcatacacctagtctcaacgttaatctaactcacgatgatgggcgagatgctcagcaggttggcatttcgggtaatgcaggagaatatagccaattcggctataacattacggcggcaaatgccaatcaagggcaagggaccagtgcatcaacaaatgtgcagtatcgcagtcagatggcggcacttaatgccggctatagtactgggaagcattacaatagtgtgtcgggcggcctctcagggacaattattggccattcaggcggaataacattatcgccttatacatctgacaccttcgcgttagttgaggcaaaaggtgcgcagggtgctgcggtatctaattatcctggtgtgtttattgaccatttcggttatgcagctgtaccttatcttaatgcctatcagttcaatgatattaacattgatccaaaaaatacgaatgtcaatgttgagttagataatacgtcgcaaagggtagccccttattccggtgctgttgtaaaattgaaatatacaacccgtcagggttcaccgatactcattactgctcattatatggggaacggagtgccttttggtgctagcgtgatggatgtagatggaaataatgtaggttctgtaggccaaggtgggcttatatatgctcgagttaataaagagcagggaaggttgatagtgaaatgggggagtggtgctagcgagcagtgtgaggttggttatagattgatgcccacggtaaaagggcaaaaaaatacaatacagcgctttgacacagagtgctattcaaacgttaaggcgaagcaccagcaatcaatcttgctgacctctcaaattaatactgacaggttaccttgggtaactgagatttatcatgcagaatag

SEQ ID NO: 272648 - DNA, 1143 bp, Klebsiella pneumoniae
atgcaaaaaatagtaaatttattgctgctgtttcttacattcagcagtcaggtaatggcagctgctaactgcgtgtatcaagatggtcagggaccaataagtgtcactgcgacgattcccagcatcactattgctgcgggtgttgacgcgccgctaggtactgtgctttatcgcttcctgtacatgatgcctgaatataatcctataacatgtacagcagattcctcgcttacaccttataaaatatttaatacttatcgtgttacttcgccgatgcctcgctcctctcttagcggcatgatatctgtggcgggttatggcacgcctaccgatatatgggaaactggtgttcctggagttggggttgtattacaaagcgtcaatacatttctggcgtcaagaacgtggttacctgccacggttccttatagcgaactctacgcaggtacttcgtccaaacaaccagtcaactacaatacatttatctatttaataaaaacaggaaatatttctggtggaacaatttctggtgcccaacttccatcatatgcgctggatgtgaccattacaccatcaacaggaggcagtccttttaaaaatgcggctaaagttaattataccggctcggtaaatataacaacaatgtcttgtataacgcctgatgtgactgtgtcaatgggtacccacgacgtcaacagcaaatttaatggtgtcggcagtacaacggactggaaagatgcatctattcagctgaccaactgtcctagagcatttggtatgagacaagacatcaggtacatggctgaatcacaaacaacatcaatgggtgctttgacaaataactctgtttcagtgacgctggctcctgccaatggcgtaattgatgctgccaatggtatatttaatttaaatgctgaatcggatagcgcagaaggtattggtattcaaattgcgagtggtttacctgattcctccccgcaacctattaacttgggcagtccggttacaatgacatttagtgataccggaagcgcattggggacggtgaaactacccatgtctgccagatatattcaaacagcgtcagaggtaaagcctggtaaagccaatggcagactaatattcactgttttgtattactaa

SEQ ID NO: 272649 - DNA, 321 bp, Klebsiella pneumoniae
atgcacatttcaactgtaccggccacagtgccggtttcgtcacgtctgtctaccgtgcaggtctggcagcaactgctaacgtatctgctggagcaccattacggactgacgcttaacgacacgccattccatgacaacacggccattgaggagtatatcgacgcaggaataacgcttgccgatgcggtgaattttctagtggaacgttatgaactggtacgcatcgaccgcaaaggattttcatggcaggatcagacgctattcctcagcgctaccgatattctcagagcaaggcgagctacggggataatgagcacttaa

SEQ ID NO: 272650 - DNA, 324 bp, Klebsiella pneumoniae
atgtcgttatctgattctccccaatggggactgcaaagtgatattaccccccgctttggcgcaaggctggtacaggagggcaagcgtctgcattacctggctgacagggctgggttgacggggggctttaccccggagcaactgcagaaattggatcagactttcccgctgtttatagatcaactggaatcaatgctgcgttccggtgagctaaatccacagcagcaacatcaggtgatcattcatcttacgggtttaacctgcatagctgatactcgtggcagctgcggctacgtttacctcactgtttatccaaccgattaa

SEQ ID NO: 272651 - DNA, 471 bp, Klebsiella pneumoniae
atgtcagaaatagcattatctcccgcttttccagttaacgaacaacgcatcatccgccgagccctgcgtctgctggagaaatatcagcgccagtcgggagagtcatttacctcaaccagcttcactaaaacctggctgcagctgcagatgatgggtcttgagcgggaaatctttatcgtcctgtatctcgataaccagcatcgtttgctggagcgtgaaacgctgtttaccggcacgctcagccatacggaggtacatccccgcgaagtggtcaaagcggctctacgccataacgccgctgcagtcattctggcccacaaccatccatccggcaaaacggagcccagtcaggcagatcggcacatcacaaaacgggtagcgaatgcactggccttggtcgaagtgcgtgtgctggatcacctcgtggtaggggatgacgtgatgtcatttgcagagcgcggttggctgtag

SEQ ID NO: 272652 - DNA, 672 bp, Klebsiella pneumoniae
atgtattgtaatataacagatttggttcaggaaactattcagtataaatatatcaaatcccatgggcccctaaataaatatcagctaaaacggatagagcagacaattgataaagcactggatgaataccctagggtgctggcgataagagtggagcttcatatgcctttatgcaggccgctctgcgatatgctccttgcagatgattatgccagaacagatgccgctgcaatctcacggttcaatgcttcacttaatgcgaagataaagcactatgagctcaaacagaaaaaggcgggtaagcgggtacgtgaaacttcatctcgcattgtgtgggccagggagttctgtcctacgaataataaaaaacattatcacgttttgcttctacttaaccgggatgcttttaatagtcttggttcgtttgagggtaataaaggaacactgcttcgtattattcgtgaggcatggatgagtgcaattggtttaatttatccaaaggataaagagttggtaaagatacctgaaaatccatgctattacgtaaatgtaaaagaaggcaagctaagtgaggcttacagaaaactaatatttcgctcaagttatcttgcaaaagagaaaagtaaatgttttatagatggggaacgaaattttggttgtagtattaagtga

SEQ ID NO: 272653 - DNA, 1413 bp, Klebsiella pneumoniae
atgaatacgacccagagtaatacggatttctcgaaacttgtactcccaccccttttcgagaaggtaatagagactatacaagccataacgcatgcacccgcagagttgatcgccggaacacagttatcggtgatatcacttgcttgccaggctgcggtagagtttgagcacagtgatggaagaagaagccctgtatccctatacagcgttgtccttgctgaatcaggggagaggaaaacggctgtgctaaattattttctaaaaccggtattggagttccagaaaaaacagttgaagaactatgaggaagtaatgaatatttatgaggaagatttacaggcatggggcgcaattaaaaaggtcctggtgcgtcaaattagaaaaaaaatcgaattgggtgaggaaaatacatttgagcaggaacaattaagacagcattatatccttaaacccaaacagccaaagaggcccaaacttctctatagtgatgcgacacctgaggctatcatccagggactggttgaaagtataggcacttcaggtctagtttccgatgaaggcggtgtgatttttaatggacgggctatggggaatacgccgctttttaatcaactttgggatggtgggaatgtcgatgtggagcgtaaggggcatcatctatctattgatgatgtaaggcttatggctcttattatctctcagaaaaatgagtttgtgttgttcaggaaaaaacacggtgcacgtgctgagggaaatggtttttttgcccgttgtctttggtctgtcacatcattgactcagagtaaaaggactcatcaacctgacgttagagtagaaaccagtgttttggatgagttttacaaacgagttgaagatttactcgaacaaacgcttctcggaaccactcccagcgttctgcgcttttctgtggaagcggaacatcgctttgctcagtatcagaatgaaatcgagcaaaggatattaacagaaaaattaaaccatgatgcactgccgggtattttatcgaagcttcctgagaatgcggtaagattcgcaacgttaatccattatttttacgaatttgagggtgatgagatcaatgtaggaacactaaatcacatttttctaatcatggaatattactatcaacaggcagtaaatatattaacttccagcatgagttccgaagaagacgatgccaatagtctttataactggttgagaaatggtcggtttttcaattgcacgtgtgtcgtgaaatcagaaataagacgttatgcaccctaccaactccgcaacggagtccgttttaataaagcattaaagtatttggaagaaactgggcaggtatatttagaaagaaacaaaaatagtaatggagcgatcagccaaatggtatatatcaatagataa

SEQ ID NO: 272654 - DNA, 786 bp, Klebsiella pneumoniae
atgaaacaacttaccatacctgcattgcttacatcgttatttgcactacatcctgctaatgcagcagggacttatgatctccaatgcatgcttgataacggcgagcaaatgaccatcagccacgttgctaataccgtttatatcagttttgaaaagccttttggtgattctgaagaaggaggttcagttgttaagttggacataccttccggcgaggcgaaacagactttgactgctaaccataatgcagggaccacctcgtttacgctacgtggagaaagcaaagatatcgaaggtgcggttgcaataaattactcagaatatgatggtacaggcgatgcctattacacctcaatgaattcaacggggcaggaaaccagcaccgtatcatgcaagccgggtacagttaaggtatccaaaaatctgctccagcgaggtattaacggagtgggtagcccgcaggaaaatacacagacatcttctcagcaactacaagtacagcaatccgcgacgccaccatttaaagttcaattcggtagcgcagtcagtaatgaaggctggaataccaaatatggtgttattcagctcactatcactgacgacaacgtggtgctaaaatccattcgggcaaacagagggaactgtaaaatggagagcgtcggtaatagaactctgcccgctaaatataagttcggggatgtggctgttttcaaatatatgaagtacgaacggattatcgaagccagtattgtgactgataccggtagctggacctttaattcctag

SEQ ID NO: 272655 - DNA, 1011 bp, Klebsiella pneumoniae
atgagtgacccggtaaagaacgaaggccggatgattactgatgttcatggtgtcacccgaagggaaggaagcacattcgtcatggggggcagaatattatctgagagtgcttccctcgttcgggaagacaatagcgcatcatttatatctgacattagggatattcttgatattttcccgcagtcactgcgggaaaacttattgaataaaatcggcaaagctatcgattatgagcccatgattggcgtcatggggaagaccggtgcaggtaaatcgagcgtatgtaatgcgctgtttaaaggtgaggtttgtgccgtcagtgacgttgcagcatgtacccgtaaggttcaggagctacgtatacgcttaggtaggcgctcactaaagattattgacattcctggagtaggtgagaacgctttacgggataaagagtatgaagatttataccgtaacttgcttccctccttggatcttatcttgtgggtgataaaaggagacgatcgagccttttctgcggatgaacatttctacaacaatgtcttgctacctgccgggggtggtgagcgccttttattcgtcctcaaccaggttgataaaattgagccattccgtgagtgggatactcatctgcatcagccatctcctgcgcagctcatcaacatcgaaaagaaagaagcctatatcaatgaacgatttggctttacacactatccggtaatacctatctccgccgatgagggctacaacattcttcgtctggtagaaactatcatacgcgctttgcctgacagagctaaaagcagcacggcttcgcagttaaaggacgagtacaaaaccgaaaaagttgagacggaagcgaaagatagtttcggtaacgtgctctccgggatagtcgacgcggttattgattctgttcctctgccggggccagtaaaaaagcttgtccgtaagggcaaagacaaggttatcgagtgggctggtaatgcctgggactatttttttggataa

SEQ ID NO: 272656 - DNA, 684 bp, Klebsiella pneumoniae
atgaaaacaaaacatgaccgttatgatcggctagccgtcaggctatcggtcattattagccggttgcttaccggtgaatccctgacgctgaaaacacttgccgatgagacaggtgtatccgagcgtacattgcagcgggattttcagcagcgtctccttcatcttaacattgagcacagcggcgggcagtacccactggctcggcgacaggagcgtgagccagtacctaatacctttgcatttatccgcaatacagggatttcacgaataattcctgcacataaccggcgattgattcgtctgcttacaggggcgtctggtgtatccccatgcattataggacacagtgcgcagacaccggcgatcacacagtccgcatcgtttcttcaacttgctgaagccattcgcaataaccgtaccgttactcttctggtcaatggtctatgccacgaggctatagctcctcgtcgtctcattttccagggcggccactggtttctggttaccacccacgccaggaaattacaggttttcagggcggaagagattaacgccgtcacggtactcgagacatctttccgcagaaagcctgaacttgatgcgctgactgccagtgaggaatttatttcagcacttcctcattttcgattcatcagtgacgtcattcagaccatgcgggaatag

SEQ ID NO: 272657 - DNA, 882 bp, Klebsiella pneumoniae
atgaacgatttgagtgtgccattttttgatgatttctatctacagctttgtgccgcctgtgaggagaaacttcttgagcaggaatggaaacttgaaggcgaaaaaaaggatagcaaccaggaagttctgcgtacttacaggcaaagagcctatgataaaattgaagaatttaaaattattgagttttcaaaaatacaatctcaatattttgtagatgtgactaatagcgacaatatacgctactcacaagagtttgtaaatgttgatggaataatggttgagaaaccttttatttataagaaaacatatgcagaatctcgggttgaaattcgaggcaaaatggacgggcataaaatgacaggattagcaagactatatgatacacattatgaatatatatatctatctatggctttagaagatttttactgggcgcagttccaatattcattgggcaataaaaaagaaagttgtaagtttcttcttgatgcttattcttatatgaatatctatgtttcgcgagatgataaccgagaatcaccggattttcatcgattaaggagtgattttgataaagtatgcagaagagcgaactcaagcgctggagggaaaaataaacttgcagaacttgaatatattaaagatacagttgttaccttacttgtgagtattccttcacataacggctggaaaaataaacgtcaacttcttgagtatttaatgccctatatttgtaataatgataaaaaggttaatccagataaatggataaatgatacaggcgatagagaggaatctatccgccgcagacttaataaatggtctacaggtgatctaaaagtagagtttgataaagtcctaaaaaacaatactaacaattaa

SEQ ID NO: 272658 - DNA, 207 bp, Klebsiella pneumoniae
atggaagttacccggttttcggtgaatgcaaatctaggtctctcttcctcaagacaaattcagatacgctcggcgatacattattttgaacaagctcttctcaaaggtgaaatatcgagttcgataaaggccctctgtacgcatatattggggcaggttcatttattcaccaagtttctccccaaactcaaacagagcttgctttga

SEQ ID NO: 272659 - DNA, 3315 bp, Klebsiella pneumoniae
atgagtacagcacgtcactatgggaacggcattcgactatttatcggggaacggatagaacacgcctcggatcgcgatgtcttggtcaccgtttgcgatattctagaaaagggcactggatgggcctacatattcgccaacttcaacgttaacgggcgtcaggttgatgttgcagtcttttccgccacaactactctcgttattgaagctaagggatacacactgcccatcaagggaggtgtgaacggccgctggacgcaagtcggaccgtacggtagccgaaagctacgcaacgggtacactcaagcgttggatgccaaaaatgcattgcgtgattcaatggtcgagttattcggcactctttccgggtatcccaacgccttattagccattacgccagcgattccatctggctcctcattgccaccgagtgacttcaaggtgaaatctggcggactggatgcgatcaagattgctctcggttcaatatcaggagccttgctaagtgaagatcaatgccaagcactcgcagcccatttaagccttgaaggcgtatcgggaatagatgcagcaattgatgaaactgtgctcatatcggagcgaacagtgtcttgttatgaatccgctttcttggagtatcatgggccaactggtgcacgactgttacaagaccaatacctccttgatgacaaactgatttcggcatcaaatattctaaagaaggcgatgtcatcgcaatctgcgcttctgatcagggggccatcaggatgtggaaagtccttgctgagtgcacgtatcgccacagaatgtatgcaggctggtttactgcctatccacatccaaggcaaagacttcgagggcaagcttcagaaaataattgatgccgagcttatgttactcggcgcttccgtgcgcgatgtactgagagcaagtcgtctccttgtaaggcatattgtcctgtttattgatggctacaacgaatgcccagagcatttgcaaattgctttgacacgcagtattcaagcgttttcactacgctatggtgccggcgtcgttatcacctcacaaggtgcattggctagacaagagcttttgcccgtcgaagagattcaagtccgcccgccgcaacatgcactgaagtcacagatcgcaaaacttagccaagaagatgaaaacttcatgaactgccaggccctacttaagatagcactctctgggcttgaagcggaactcattgggcaggcggccacatctttgcctgccggggcaagtacgtttgttctattcgacacggtcgccaggatgcgcctaggcagtttcgcaactgcgggaattagggctctttccgggtttgcagaagaactaatctctcaaactgcgtttagtatgtccattcgagagttcgacagattttgcgatgcaacaagcgtgacagacacaactcggcacgcgatccttgactcacggcttgtgctacagcgcggtcacagacttagtttctctcatgaaatgtttttctatgccttcatagcggaatctgcgattcgtgtagcgcgcacagactctgagcgtgtgcaagcttttctacgatctccacgattcactggttctaagactcttattgtcggcgcgatggaagacgattcgacgctaagggatattttggagaagacaactgatcggggcatccttgagtcttgcgtgcggggagaatgtggagataccgcgagaagtattgtaaaagcaaagctcgatgtgataattgccgaaatgatcgcagagatttctgaactgcgcttcctactaaatggcgagggatggcatagctgttcaattgaaactggagttaatcggccaatcctctcgaaattcgaagtttttcttcccgctatcggctggcttttaatgcagggtgtctacttagagcaaatcatgacagcatgtcgcgtcatggacgagaaaattgccgaagccaatcgtgatctctatgaagaagcaatagccaaaaaggtgccacttcggcacgagacatttagccaagcctatgtgtttaatcgtaagatagcgctttcgcagcttgtgtccttcgtccatagtggcggccttagttttcgccatagcccagggggtaaatttagcgaagctttgaaaaaatcatggaaggaagcgagcacgcatagcgaattctacgtcattctcggaatcaccaagttcacgaagcaagtatcatgggcagcgccatgtgtgttgaatcttcttaaacatctgaaaagcttgccctaccacctccagctagacacgatagacttttgtgtccacttaaataatgtggatgattccgtcaaggcaaagatgatcttggcactagaagattccatagacaaattgggcatatttatgaactctttgattttggatgcgcttaagggtttaggtggactagatgccgaagaggaaaactacagagcggtggtcttaaaggagctcgaaagtgtgttctccgagtcaggaacgcagtccgagacgcgagcatggaatatcttctctcgacagttcgatcacccctatgacagcatttattgggaagagataaacaatctcgccagggatcagaaacaggaattcctcttcaagtcactcaaaggggcgagtaccgagtatgttttgtttgtcagtactctaattagtcagctcgcaaaattcggtgacccagcagtttccgaggctattgaaccatggcttacgttgccagccaaaaggtcggtcatgccgcaagatgctgtcgaagttttttttgcagcgcacgaagcgatggggattttgggccttccacttcctaccaatacgacatcacctgtcgatatcgatgaagctatgcaagcctgcggggagttaacttactgggcttgcaagctgaacaatagtgaactcgagtcctcgcctcagactcttaatgcgcggactaagttactgacttactccgctacggcaagtgccggagcactatggtcttcaacatcacgaatgttgtctacggatggtgcaagagttaacgttgcaacgcgctatccgaaaacagccctggctatctgccgcgatgcattgaccaaccatgagtcgcagaaaacgtaccacgaacacgggttaatgaatgatcgggcgagcatagcttccttttccattcaagtgattgggcaatttggtgatgccgatgacctgcaacgtttacgcagcctttgcgacgaagaggagctaggtcatgaagcactcaacgcgatccagaagattgaagaccgtattcgttatttgaagtag

SEQ ID NO: 272660 - DNA, 789 bp, Klebsiella pneumoniae
atggactcgttttccaggcgacagggttattcaagacctgacgcagaaatcagcatcagacacgaagctccagaatcgctgagagcggcgatcgtgcctatcgcctaccgatctggcttcgcccccagcggacttcatcataggttgtgcgacatcctttataaaactccagataagagcaactggtcagagtatccgaatattgatgacgaagtcagaatcctgatggacaagcttgaatggttcgaggtctacgatttcattgagcatttagctgaaaagtctctttacaagggcggtgacttttcgggagaagttaacagctattttagggtggccggcatcggttggcagcttctcgatcaaaagattcaaatgcgaggtactgaagccttcgagatagcagtgaaagaaggacaattactactctccctgcagcatcgcacgaccgcagcatatgagctacacgaggctctgcaggatctatcacgcaggcctcaacctgaaattagtggagcgatccagcatgcgatggctactctggaatgcgtggcgcgagacgttataggaagtaaggacacgcttggtcaattgatccagcgagatcccgggctttttcccaagcctgtagatcagatcgtagagaaggcatgggcctactcctccaacttcggcaggcatctcatggaaaaaaagccccctgagtttgaagaagcggaattgatggtcggggtgagtggagtgctatgtcgatatttagcgcgtcgtacaggtaattcaaccttatga

SEQ ID NO: 272661 - DNA, 855 bp, Klebsiella pneumoniae
atgccaataaccttcaatcaggccttaactgcagagtgcgagttttcagaatggacaatcagtaataaaagtcgagctaagctgattgaagtgattgcctatttatatttacggcaggaagaaaatgctcagagagtaattgatgctctagagccgcgacggcgggtttcgaaaggcagggtggctgagaatgtcgtgagaaaactgacggctccgcgtgctgaagacgtcgagctacttcagtcaggaaccgaagcacagaaggaggcagcgagtaagcggatcaacacatctattattcaccgggatggacttctatttcagcatatttcctggattgccgctcggctagaactttcggacggctatatgacgtcacctcacgttcgacaggcggataaaggctttgacggttttatcatcgagctagatgagagagtgtgtgagatcaaacgaattgtgctctgtgaggacaaggcttcgaaaacaccgcgcaatcttataacctctagcgtgtggcctgaaataagaacaattcggagcggcgatcgcgatgatgagatcctcgccgacctcgtaactttgcttaggagtgttccaagtatcgacgcagaagaggctgtggataaaattttctgggaaggcgctcgcgagttcagagttgctgtagcgactggtgaagatcagcgcagagctgggaattttttgcatatcatagccggtttcaaaactgcggctggtggtgaacttgaagctcgcacggctggtgttttggccttcgaagatgtgcgtacgggtttggatcttctcgccggagaggtggctgccaaagtcgaggagatcgccaatgtttga

SEQ ID NO: 272662 - DNA, 3291 bp, Klebsiella pneumoniae
atgtttgaccctagttcccgcgcgctcctgcgacaggcccctgatttgcccggcctcgctcctgaaactctagacgaactgttgacggctgcacacatagaactagcgactgtacggcttctgtctcgcgaaggcgaacctgaggccataagcgatgtactcgaccaggttcgacgccttgcttcgaccttcgaagcctatgttgcactcgatcttcgaccagagcaaacgcgcgccacggcttttgtcgccgcgagcgctcatcaaatattgagccgcgttcgcgagaccgcaatggatcgcccaaccgttgtttcaagtgatgcaataggatcgtcaatttcagcgacgcttttattcctgattgctggtcgggcagcagacgcagcggaagtcgctagtcagctccgggcgaagggtgaacgtcgggcagtacgacgttcactgatcctgagccttcgggaattggcaactggtaatctcacgacattgatagagcgtgatctcggcgaagacaccatcgcaacgcgtgatagccgagaagtagccactgaccttcttttaagggaatgtgcttatgtagttcaggggcttggacaggaggcgcgtggaagcgctgtgcccgacactgatattcgttcaagactcaagcgtgttctccacctgtcggaggcctcagaggtagagatcaacgcagcgttagaagggaaagttcatcaccagtttgccggtccgcatcatttggccactttgttgagccggcttgttgatggagtgcaggctgcgatgctgattcgcctgccagcaccatcaggtgcgcaaccgaagacatgggctgactggctcctgtctcagacacattcccgtccatttctgtggatcaatcatttaaaagctatcgggacagggtatctgaaccgtggcaggtctatggtgatgacgtcaccgactggttcgggcaaaactacgctatccgtactaaaaatcgcagcaactttatgttcgggtgagagcgttgtttatctagctcctactcacgcgctcgtcgatcaagtcgagaccgatctctccgcacaaatcggcgagttagaggtggtgagcgtcgtggaagacgttgcgctcgaagagcttggggaaaagctgccaccattctctgtcatgactcctgaacgttgccttgccctccttggtttcgcacctgagctttttgacaaggtcggtctccttgtcttcgatgagtttcacctcattagtgcagatgatcccgctacttcatcgaaaattagtacacgagccattgattcgatgttggcactcctgacgtttctccgccatcgtaagagagcagatctactactgctgtcagctatggtctctaacggcgcagaaatcgcacgttggttgcggtctgtaacgggaagggaggttgagtcgttcgacgatccttggaagccaacgcgacagcttcgttcttgcgtcatctatgaccgctctgacgtgcgtgaggccttacaagttgcatcaaaggcaaagaccaaagcagcaaggaatcgggttcccgcacaacctcttggactcttttccctgatttctggatggcatcctaaaaggccagagaagctagtaatacaggccctcacggatcaaaaaccgtcgcttcttaaaaatgtcaaaggaaaattgacatcaaacagaaatgaagtcgctgcgcgaatcgcggcagactatgcggccataggaaagcgggtgatcgtcttctgcaacgattccaaagcgtgcgggagcgttgcaggccagatcaatgaactactggcaccagccaccatcgctctggatgtggcgcaggaggaaatgcgtaaatcagttattagggatattggagcggccgaagctacatttgaccctatggggtgcagagctgcagttcatcatggtgacttgctaccattggaacgacggctgactgaaagcctttttcgggctcgtagggatactgatagcgtggagctgggacttgatgtggtcgccgcaacatccacaattgcgcagggacttaatctgccgtgtgatgttgtgattcttgctggaaccgatagaagtgcggttgatgatcccagcgggaaccctcgtgcggacttacgtcctcacgagatacttaatgcgctcgggagggctggtcgtgcggcgtatgccgcaaccggcttggcaatcgttgttcctgcaacacctatctgtgtggaaatggataacctctcccttccgtcggatggaattatgaagatcattttctcggaacaggatgcctgtgaagagatatatgatccgatagagttacttcttgaccggatcgaaatatccgctaattcggatcctaaagtgcagtcaattatccggcgtatgtctgctgtcaccacaacaggagagagcggcttcgacgatatcgtttgccgctcattaggtttttttcggcgtagggaaactaatgctttgcgagctgaccagtggctcgaacatcgtcgaatagctctcaaggctgctgaggaacaactggaagaccccctcgttctcgattggcaacgggaaattgctatccgtaatggtgttccaccaaagctgattgaaagattggttgcggcgtttgatacagccccagttgaaaagacggcgacagagcactggatcaactggctactggatatagttgctgaccatcccttagatttaacaattttcgtcagacaaacagctcttgagtccgtttttggtcgttcttacacgaatacaacaaaacctagggcttcttctaaaagaatattgagagcactcaaaacattggtttcaatgtggtgcacagggcgaacacttatcgaaatcgagcattggctcctggcgttcattcgaaagcacgagggagaggttaagcaacaagcaaaccaatccactacagcacatcgggcccgccgatttgctatacgcattgcgcctgatatcggctttctctgcggcgtgcttggacagatagccgcttacaaagccgctgaacaaggcgtgcctatgtctcctgtgattgaaatgcttccgcagatggtgagagccggtgactatgatcgtcatcatatggctttaaggcaaatgaccaaaattgcctcgcgagtgggaacctttgaaacgcatatctcacttcgtgactcattcaaagctggagcttccgcagaaatggatgttgttagagaggaggttcaagccgcaatcttgctccaagcatttacggatttggatgaagaagagtag

SEQ ID NO: 272663 - DNA, 147 bp, Klebsiella pneumoniae
atgatcccgcggctgcgccagcagcttaacgagcagcttaacgagcagcttaacgagcagctgatgagcgaccagctggctgtcgacctgctctcttcctatctgcgaatggatctcagcgcccagccgtgggaccagccgctatag

SEQ ID NO: 272664 - DNA, 1020 bp, Klebsiella pneumoniae
atgcctgttcaaagaaaatcatcgtttgagttgctacgcttactgtcaatattcggagttgttttattacacatatcatatgataattcaggtgatatgaacagtgctgactgggctaggcttttatttcgctggtgtgtgcctttttttttcatattgagtgggtattttttaactagtagcgatggttatcctgatcttaaaatatcaaaaatcaaaaatttgagtattattatttttttctctaatttactttatttaccattcattgtttatattaaacacttctcttttctttctgggcagttattctatacaggtacatggtttcatctttggttcctaaattcgctgttgctttcatatttctttgtccttgtttttgcagatgctaaatttcggtttttatatatttcttcatgctcaataattattttttgcttgttttattttgttgattttatgtccagtgttaatgctcgatcttattattcatatcttggagtgattagacagtttcaatctatcccctttgtgtggcttggttttttactatccaaaaatcatttctttttgattaacaagacattaagggctgctatttgttttatcatgctggggttttttttatgttttcttgaagtccttttatgcattgtatatgatttgcctcttaaaaatcgtacattattggtaggttttccgtttgtttgtatcgggttaataatagggggcgaggttatatcttttaaaaagggccttgataatttgatattgcatgttagtcaatatactctcgttgtatatattattcaccctctagtgatcccattagcttctaagttcttggcattattatctttacaagagttctatcgactgattgtgaatgcgtcatttacatttcttatttcatattttatcgctctcttgatgaaaaattatttcccttattgttataaccttttaaaaggaaagtttaacgacagcagtactcaatgctacaaagattctaactag

SEQ ID NO: 272665 - DNA, 1389 bp, Klebsiella pneumoniae
atgaatcagtcacgtagagagtttattgcgaaaacaacaacattacttttatttacaaaattcaatgtcaatattgctttagcatcagatcagacatacatggatagaatagagaaaataataaattctgcgacaaatattaatttaaacaaaggacaattaaaaattttatatggcaatatattgccaaatggtttagatcaaacttcagaattgcaaaaggaaattaacggaataaaaaataatactatttatataatgcatccaggagtatttaatataaaaagcattatcatacctagccttgagaatgtaatctttatatttaccggagtcacttttaagttattaaaaaacacatcaccattagatcacgaaatggttagatttacttcacttaagaatagcattgtttgtgatttaaaaactgatggtaatagagataatgcaatagacactaatctaaatgacccttcatggtatggccgatgcctaaattggagactaggagataacagtaaaaatgtatatttttcaaacactacaatgctcaatgcactatattgtggttcgcagtggggtaagaacatcaataatgtaatactcgacggtattaaatatgacaatatcggcgaacacgttttctatatatcagggaaaggcggtggaaataattccaacattactttcagaaatattgaaggaggttcgttaggaattaaccctagaaatagaatcaaaaaacatgagacttttttcttaaaatcagcacagagcattggaccaaatagtaactttacaatttacaatgctaatttcagtcctacgaaaaaagcttcgtatgcaggtgttcttatttgcacaggtgatttgatttatacaacaataaaaaaagttaaaattaatggcaacatagatgcagtaatctacccttataatgatagcagtttcgtaacaatggatgatattacactaacatcagataactcccatacgaggttaatatattcctatgttaaaaacgttaagataataaaatggaaagcatcaaaattaaatttcgaggggagtataacaaaacaaccctatatgcagcttttcacaagcatttcagatagtacattcagtatattacaattttcggaagttaaagccactacattccatggaatacataatacagaattgaacaacgttaaatttaccaacccaatcgaggcaaatgaattaaatacaataatcacttttcttaactgcaattatcaaccgacaaaacagatcagaaacttcaaaagcctcaatcaacaagacactaatgatttatttgaaaaaataaaaaataaaaatagaataataaaactcccaaacaatggctatcaattacattaa

SEQ ID NO: 272666 - DNA, 201 bp, Klebsiella pneumoniae
atgttacggcataaagtcaaacctggcattactggatgggcacagattaatggttggcgtggcgaaactgacactctagataaaatgaaaatgagagtagaatatgatttggcttacattagggagtggagtatatggctcgatatcaaaatcatatttctcactgtttttaaagggtttgtaaataaatcagcttattag

SEQ ID NO: 272667 - DNA, 462 bp, Klebsiella pneumoniae
atggctacaaccctcgaccagactcaccagttactcaccattcctttcagctccaccaccgatttcacggtgttagccgagtactgcgaaaactttgctgaagcgctgattgaatgcgatgacccggtgctgaaaatggcgctctgtggcaggatcaacacctgcctgacgttgttgcaacccacgctgcttgaacctgttcctccccatctcattgaaagtctaactgtgaatactcttcctgcccgttcctctggtttcgggcctgaatgcactgaggtttgccagtattgcctcgctctgacgcaaacactgtccgggcaggggttttcctctgaaacggagaaataccttagctggctattgtttgacctgatccaccacttcgctgcggaaatgaaagccccacgctggatacgcactgctgagggggtgaagtttatcgatgaggtagccgcatga

SEQ ID NO: 272668 - DNA, 438 bp, Klebsiella pneumoniae
atgatgggcttcgccagtgctgatacagcagaaaccggagaaatcacatcatctgttgagccgaacgatcccggagaggcattctggcaatggctggttacgggatgccgttccggtagcctcataccgaacaagggcgatgggcgaattcatctggtcgccggttacgtgtttctgcgtacgccagggatttttcaccagtttctgactgagacgaacgcgccaggggaagataaagccaggcttcagaaagcgtttgagcgactgggccaccatcggcaggataatggcacgatgtatacctgccagttgtaccagaatgaacaacgtgaagggcgctttcagaaattgagtggctacctggtgcctgccagtaagatttttacgagtgatgacaaccctggtgataatccgttactgattgttttaaaagagtag

SEQ ID NO: 272669 - DNA, 552 bp, Klebsiella pneumoniae
atgccagcattgcgccaaaactttgcaaccgttccggagactgttccggcgcaaaacgaaagcgataaggttccggaggtgcatccagcagaggaaaccagcgtttaccgttctccagctctacgtggagatggcaaagatattcaagcgaaggcagcattgccgcataaaccaccaccgcattccaggctgcgctttgcgcagcctggaatgcggtgcgccaactggcaacatgtagcttttcgacaaccgtgccgcatacgacaccgtttccagcatatagtcagccatccctccgggacgggcatatggcccactttccgtaagaggaaactgctgcatcagcgttacacaatgctccagtggtgcaaggtaatactggcgatacatgtctttcggcagagacgaataatcccagagcgattgcagccactgttggcggcgggttgtcataagcagttcagtcgctctcataggctggaaataaccggaaggcaaagagggtgttgtcaccttggcggtatgaggagcaactacaggcaaacgtgctaa

SEQ ID NO: 272670 - DNA, 1167 bp, Klebsiella pneumoniae
atgaagattaaatcattgctggaagacgagcgaattaacgcaaaaaatattcttgtagaaatgtctctagatgaatatcaaaaacttattaaaaacatcctaaataaaaatgaattccaaaggaaaagagttaaatcatcaaaaactgtttatgcacttttgaaagaagatttattgaaaaactgtattatcccccccattgtactagcgttaacatctaaactatcatttgatgaaaacgattcagatgaatttacatcgaagattaatgacaaaaaagatgatttagttattctggacggacttcaacgaacacatacaattctcgatttaatttccgagttaaaagagtctcaaaatgaagctgcattaaataaattacttgctcagcctattagagtggaaatatacaacggacttaataggttgggtatattatatagaatgttaacgttaaatacaggccaaacaccgatgtctttacgtcagcagattgaaatattatatttagattatgctgacaatgattttgataatataagacttataaaagagaaagatgaagctgtagcaaggcgagcaaatgaatataatttcaaagatgttgttgagggattcaattcatacataacccgagatgaattgccacttgatagaacagatttattagaaaatatatcaagcatggaaaaactctctaaagaaaataacaatacagagatttttgaagactatttacttgctctacacgcaacaatctcaaagttttatgatttattaggtgatgaaaatttatcagaagaaatgagtgagaaaatcattaatccatttggcaaaaacgctttgaaaatattcaaacgagctcaagtatactcgggttttggcgctgctattggaaaaatggtagattttaaggttattaatgatattaaaagaatacccgaactcgttgctggcattaatattgaaaacggaatagagtttatagaccaaataaacatatctctagatgaggtagcaaaagcaagcagaaaaataggtaacgcgcagcgaacttattttgtttatttcttcagggagttattaaatgaggaatcagactctttcttaaaccctgaaatttcagcagaaacagcgaagcaaaaatatatatctcaatatgtttaa

SEQ ID NO: 272671 - DNA, 1131 bp, Klebsiella pneumoniae
atgtgtcatttacgttcaattagtgaacataatgaagaaaacattcatttgattttggacaaaagagagtcaaatacaactattgatttcttcttcgaaatatatgatagagattattatcaaatcgatattcctcttgattttgatgagcactctatagcggaatatgatagagataattacgatatttttttcttactcaaaaaagatgtcaaggaaaatgatgttgttaagcttatttcttcggatacaaataaaagcattggatatttgctaccagtaatttcacttgaatcaaatgaccatgactatgcagcagataaatattttcttcggtatgcatacattggaattcaagaagccttgtgtagatgcaaagaaaattcccttgagacaaaacttgatcttaataaatatacttttaagcttacagatatctttgacgatgaacttgtaatttgtatcatttataagccgcattttaatataaccgatttttctaagatatcccctatcttatttaagcatggttacattcgatttgattcaaagacgtcaaaacaaattatttacaaaccatctactgatgatgaatttaataataaaatcactctatgccaaattaataactccatcatagaagcgccattaattgataagatattgcatgaacaatttcctattgaacgtaacattgcatttaaatttttcatattatatcaaatcatagaattattgatagaaagagtttatcagcatcaacaaaatataataatcagcaatctggttgctaatgtaggtaatttatccaaaagcaaagatattattggatcgtttcaagaaatatcctcggaaaaaagaagactaaaacttttattttcaaaatatattaataattttgaaaataaaacaacgctaacaacatcatgttacgctcttgtaagagatgccatagatcaaagtatagacgaaggcaaagatatggttgaatatttttaccctataagaaactttatcgttcacaattacagaaatttcccagagaataaacttagaattcttgatgatataatcaacgaatttatcaatgccttaccaagcattcttaaaaattacgatgagacgtcatag

SEQ ID NO: 272672 - DNA, 591 bp, Klebsiella pneumoniae; identical to SEQ ID NO: 268885

SEQ ID NO: 272673 - DNA, 192 bp, Klebsiella pneumoniae
atgtcaaaaaaaaatagaatcttcgtagctggtcataagggtatggtcgggtcagctcttgtacgaaagctgaatcaacaaaagaatgttgagattattactaaatctcgaaatgagctaaatttattagataaaaatgaagttgattcatttttcgcgtcagaaagtattgacgaggcgattcgtgattga

SEQ ID NO: 272674 - DNA, 156 bp, Klebsiella pneumoniae
atgttgctaaaagatttcaagagaaatcatatcttttcctttttgttggacaaggtggtggtcgtcaacgcctcgaagctatcgtgtctgaaaataaattatgcaatgtcttgttccgtccccttcaaccatatgatgatttacctgcgcttttaa

SEQ ID NO: 272675 - DNA, 537 bp, Klebsiella pneumoniae
atgcaagaacaaataaacccacaaatttcaaaaacaattgattttgccttttatggaaaaattgcgagatataaaggcttggttgatttattaaataattggcctcaacatttaaatctgcttattagaggatcttgtgatgatcctgagctaaaacaagaaatagcaaagataatagatgtacgagggttagagcgggtagtaagcctaaactatggctacattgaacatgaagatttaaatgcgatgatgtacagtacgaaataccttatactgccgcacgaagatcagagtatgatcgtgtccggtgccttctaccacggcatttcgtatggtgcaaatattattgcaaaagaaagctctttttcgaaatcaatggcgaaaaaatatcccttttgtactacatataataatgaaaatttacaagatgtactatcttctctaaaatatatagaaccacatgaagtaaaagaaataagcattaaagcctttggtgaagacgtatgcatgaaagagtggaagagtgtatttgcatga

SEQ ID NO: 272676 - DNA, 612 bp, Klebsiella pneumoniae
ttgcaaggtacgttagaacctactaatgaaccttatgctatcgctaagattgcaggcattaaactttgtgaatcgtttaatcgacaatatggtagagattatcgttctgtaatgcctacaaatttatatggtgaaaacgataattttcatcccaataattcgcatgttattcctgctttgataagaagaatacatgaggctaaattaaatagttctgcggaagttattgtatggggcagtggaaatcctatgagggagtttcttcatgttgatgatatggcttctgcttcaatttacgttatgaatcttgataaagataaatgggctggcattacaactccgatgctttcacatattaatgtaggaaccggagttgattgtacgatacgagatcttgcatttacaatagcaaaagtagttggttttgaaggtaagattatttttgatgccgacaagccagatggtactcctagaaaattattggatgtgagtagattatctgatttaggctggaaatattctatttcacttgaagacggcctaaaatctacctacaactggtttcttgaaaatcaaaaggattttagaggtcagaatgtctcttctaaatga

SEQ ID NO: 272677 - DNA, 1524 bp, Klebsiella pneumoniae
atgagtggtaaaaaagtcgcgaaaaatgctttcatgctttatatacgcatgagcataatgctgctagtaaatttgtatatgtcgagagttgtattaaatactttaggtgttacagattttggcatatataatgttactggtggtgttgtattgatgttttcttttatcagcaacactatggctagcgcatctcaaagatttttttcatatgagataggtaaaggtaatagtgaaaaactaaaaggactattttcagcaacgtttattatatatctgtccttcgcaatcatcatctttatactagcagagacaattggctattggtttgtcagtaatcatttaaatattcctgctgaacgatatgatgcagcgaaatttgtatatcatgcgtcaatcttcacatttatttttacgatcattagagtgccatttacatcttttattattgctaaggaaagaatgagcttttttgcctggagtagtatcattgaggcgttgcttaaactttgtttggcttttacaattgtatatatttcatttgataaactggaactttatgcattattaatgctatttgtttctgtggtaataactttttggtactatattttttgcaagttagcatttatagaaactaagttaatgcttgtgaaagaaaaaaaaatattctcagaattaactagctacgctggctggaattccttcacttcaattgcaaatataatggtagaccaaggaattaatataacattgaatatattttttggtcctgtggttaacactgcaagaagtatttcttatcagataaaggctcaagttaccacgtttgttggcaacgttcagatggccgcaaaccctcatataattaagttatatgctgagggtaaatataatgaaatggaaaatattgtactgctaagttcacgtgttacgtactattttatgtttgtggttgcacttccatttctgcttgagacagatattatattgaagtggtggttaattaatattcctcctcatacggtattattttgtcagttagtaattgtaaatattttgattgaaactatttctggcacagtaacttctgccatccaagcaacaggtaaaataagaaaatatcaaacgattgttggttgcatcctgctgacatctgtccctcttgcatacatgttattaagttttgggttatcacctgaaattacagttattcttacttgtatcctttcattaatttgtgtagcagtcagattattgatctaccgagaattattaaaaacaagaataactatttacttcaaaaaagtaatttttagttgtatgagtgtatctataattgcatcagttattccaatattagctaaacattatttgttagaagggcagggtgtagtctcgtttatatttatatccatgctttgtttaatttgtacgataacaacaattattataattggtataacaaacgaagagcgagcttttttatttaataaatttttaaaaattcttaaaaagaaaggttaa

SEQ ID NO: 272678 - DNA, 1158 bp, Klebsiella pneumoniae; identical to SEQ ID NO: 241510

SEQ ID NO: 272679 - DNA, 243 bp, Klebsiella pneumoniae
atggaatatttttgtaaaattaataacagtttttataactattggcgaaaaattatcttttgtcagtgcgtctcgcaagtgaaggatgacctttcttttgatacccagaagaccatctttcatggtgtagtgtatttatacattcttcaacttctccagaaccatttggacgagttgtcgttgaggggatgcttgccggtcgtgttgttatcgcgactgattctggtggtgtacctgaaataa

SEQ ID NO: 272680 - DNA, 558 bp, Klebsiella pneumoniae
gtgggcgacggagggcataactacttccacctcagcgccgtacttctccgccgcctgctcggccagatagttaccgttcccccggccatcgagcttgataccgtcgcggcggggcaaccgatcgcagataaagaacagcgcctgctcctgctgcttgtagggcacattggccagctcgaccaggaacggcacggtgcgtgtggtgtcatcgttgacggtcatcggcgcaaaaacggtcagatggcccgaccgcgcaaagtcttcgccgaggcagtggcgaaggttttgcggcagcgagttcagcacgggcagcacctcctgatccagccattcctgcatatccagcgcccggatgatttctggcatggcattgaacgcagccgtaccggtgaagcgcagaacgggaccggagccccgcgcagctcgctcacggatggagcgggccagataggtgccgccgccgttcttcggctcacagtagtattcttcgcgggcgtcttcttcggtggcggtatcgctcagcaggttcgccagccactccgcctcggcatccggtga

SEQ ID NO: 272681 - DNA, 303 bp, Klebsiella pneumoniae; identical to SEQ ID NO: 193638

SEQ ID NO: 272682 - DNA, 348 bp, Klebsiella pneumoniae
gtgaacggtttcttttcgtccgtcgcaggcgccacattgcgctggctcgatcttccgggagaggggcttccgctggtgtttatccacggcctcggctgcgcgtcctcttacgactacccccgcgtcgccagcgaccccgcgctcaacgggcggcgcaaaatacttatcgacctcccgggcttcggctacagcgataaaccgcacgactttagttacaacatacataagcaagcgcaagctgtggagcaggtcctcaccacctgcgcctgcagcgcttcgcgctgtatgggcatagcatgggtggaagcatcgccatcgaagcggcagggctgctggcggagcgggtga

SEQ ID NO: 272683 - DNA, 309 bp, Klebsiella pneumoniae
atggaccgtctgattcgtgaaatgtcgtatctctttactaagcagcggtttatggaactccaggagcgagcgcatgaaatcgcaatgagtaacagcgaacacctggaatgttttggattcattatcgacgccattgatgaatttctggaggggctaccggataaccttctttaccatgaaaagccccttatgcattacatggtgatgcgcagtctggccttgtgggatgacggtgaagaattaactaatgttcagtgggcgcaccctggctggttcggcacagccgaaaaaggagacaccatccaatga

SEQ ID NO: 272684 - DNA, 1872 bp, Klebsiella pneumoniae
atgggcccggctgaactatccgaaaaactgtgggacaacgccgaaagggtggcgaaatatctgctgcctcgcgggcatctggaagggaaagagtggtgcgcgggtaacaccaatggcgattctggcaagagcctgaaaattaacctgagcgggaaaaaggcgtggtcagattttgccagcggtgacagcggcgatctgctcgatttatgggtgctggtgcgcaactgccagctgcatgacgccatgcgggaggctaaagaattcttgggcctgaaagatgacgatcatcacttcgaggccaagaaaaaaacattctcccggccgacgaaaaagggcgtaaaaaaagcgaaccattgctacgactatctggcctcgcgtggaatcactcgcgagactgctgaccagttccgcgtttctgatgcggtggtctggtatcacgatgaaaaccgcgaagtggcggcggtggcgttcccgtacatccgcaacggcgaactgctgcaggtgaagcggatcggtatcgaacgtcctagcgggaaaaagctcattatggctgaggctgactgtgagccaagcctgtttggctggcaggctatggatgccaaagcccgcgctgtcgtgttgtgcgaaggggagatcgactgtatgacctactcgcaactgggcattagtgctctgtcggtgccgttcggcggagggaaaggagccaaacagcagtggatcgagtacgagtatcacaacctggaccgcttcgacgaaatctggctcagtctggacaatgacgaagttggacgcgaagctgcgaaagaaatcgcccggcgcctgggtgagcatcgttgtcgtctggttgagctgccgcataaagatatcaacgaatgtctgatggccgggatgagcgaggatgatgtctggcaatgcctgggtacggcgaaattcttcgaccctgacgaattatgctctgctggcgatcttctccaggaaaccattgacgcgtttgagcatcgcgatgttggcctgttcaccagcccatgggcgtcattaaacagcaattttaagttccgcgccggtgaattgaccctcgttaacggggtaaacggacacggaaaaactgaactggtggggcatattgccgtagacgccatgagccagggcgtacgcgtttgcattgcatcgcttgagctgaagcccggaaaaatgctggcccgcctgacccggcaaacaatctgcagaaaatccccagaacgtgcagaaatcgtcatgacgaatgagtggttctccgatcgtctgtgggtgttcaagctcaccggtaccgcgaagtccggacgcctgctggaaatttttgcctacgcccgccgccggtatgggattgacctgtttgtgatcgacaacctggcgaaatgcggactcgacgaggaagactacggcggccagaaagaattcatcgacaccctgtgcgacttcaaaaacgagcataactgccatgtactgcttgtcacccacgcccgcaaaaccaacgaagcggcgccaacggggaaaatggacgtcaaaggcactggcgcattaaccgacatgcccgacaacgtgatggccgtctggcgtaacatcccccgcgaactggcgcagcgcaaagctgagcgcatggggtatgaaagcctggacaaggacgaacaaaccgctattcagatgccagcgtcaatgatccgcctgctgaagcagcgagaaggggaagggtggataggtgacatcggggcaacctttgactcccggtcacaccagtttctggagggcgataaaggcccgtataactatctggctggcgagcaacaaagcgaactcgatattgagtgggaagccggcaatgcagcgaggtattaa

SEQ ID NO: 272685 - DNA, 438 bp, Klebsiella pneumoniae
gtgagcaatagcgacatctggatgccggccgattcagtcgaagaggcccaccagcgggccttaacgtgggtatgcgatgcgtacctgttctatctggttagcctgcaccgccgcccggtataccgtcaccagtacggcgatatttcgcttaaccagtcagcactacagggggttattgactcctacctcaaagataaggggtgggatgccgaacggcgctgggcgcattacatcaacattctggacctcattaaatatatgcatcgcagcaattcggaatttatcgactggggaacagtgccggcgcttacgcctcgggggatccgctggatgaacgcctgcctctctcgcctgggcgaaatggtgaacagctatggcgggtgggaaggatatgttgcagcagctgaggagggtcgaaacgatgaaaatcgactttaa

SEQ ID NO: 272686 - DNA, 429 bp, Klebsiella pneumoniae
atgaaatccgatcagcacaacactatcctcatcgtcggcgcctcgcgcggccttggccatgctatggcggcgacgttcctgcagcacggctgggaggtcatcggcaccgtgcgcgatttatcatcccacacgccgctccacgacctggccaagatgcatcccctgcggctacgcctggcgacgctcgacatccgcgatgaagcccagctggccgcgctgcaggcgacgcttcccccggcaagcctcgatatgctgtttgtcaacgccggtaccaccaatcgtgacccatcgcagaccattggcgacgtctccaccgaggagttttaccaggtaatgctcactaacgccctggcgccgatgcgggttatcgagcgcctgcagcaggcggttaaaccgcagggtctgctcggcgtgatgtcctccggctag

SEQ ID NO: 272687 - DNA, 213 bp, Klebsiella pneumoniae
atgttcatgcgcagcttcgccgctcgcccttcctcggcctcccatccgctggtggtgatggccccgggatggatccgcaccgagctcggcggggcagatgccccgctgaccatcgaagagacgatcccacgcctggtgaacgtcctgctcgacaaacggcaacgtccgggactggagtatctcgattaccagggccgtaccgtgccctggtga

SEQ ID NO: 272688 - DNA, 537 bp, Klebsiella pneumoniae
atgacgtaccaacaagctggacgcattgcggtcatcaaacgtattttgggatgggtcatctttattcccgccgtgctatcgacgctgatttctgtcctcaaatttatgtatgagcacagtgaaaagaaacccggcattgacgcggtaatgatggattttgcgcacgtcatgattgagatgatgcgctttaacacgccgttcctgaactttttctggtacaactcaccgctgccggattttcaccatagcctgaacatcggcttctggattatcttcattatggtgttcgtcggcatggcgctgcaggcctccggcgcgcggatggcgcggcaggcgagatttctccgcgaggggattgaggatcagctgatcctcgagcaggcgaaaggcgcggaagggttaactcgcgagcagctcgccgaacgcattgtggtgccgcgacatacgatcctggtgcagtatttcccgctgtacgtgctgccggtgatggtgattgttatcggctacttcttcttctcgctgctgggctttctctaa

SEQ ID NO: 272689 - DNA, 747 bp, Klebsiella pneumoniae
atgctacaacaatatgctctggataatcagcgggatatacttgcggcagataaaggggacacggaagcagccaaacgcgttcaggcccggcgagaagcggcgattatcgtggctgctgccagcggtggaggtatggcgctgaccgcaggtggcatgactctggttggtgcggcactcgagctggttctggcagcaagactggttatcgccggttgtaaaacaaatcctgcgctctgcctgaatcaggcgggtatttatgcggctgatattgtggcaccagaggccatcattggtacaggcgctgtaacgaccggcagtacattgattctgggtaaaaccgaagacagcttgaagaagctttcacagcagttggtgaaggcctacgatgaactgaatataacaaaaagactaaatattcagcctgttgccggttttattaaaggcgaaacggctgctggtgccggtttatcaacgcaaacggcaaattatgtacgtcatatccaggaagttaatactagccagttaattaaacttttcgataaatcacaaccagatggtaatattaatatttttggcaagtccatagcacaagtgttgggcgatggaggaagtaaaaggaaaggaacaacaaaagttttgcttcagaagcacttaatgagaaagatatctatacttatgcacaatcacttgctggagcacacctcttatcgaggtgagaaacgcaaaaggtgttgtatattacgctaa

SEQ ID NO: 272690 - DNA, 999 bp, Klebsiella pneumoniae
atgtcttcaccaaaaataattgaacggttcgttgcaacagacgttaacggtgctatctggttacgattgaaaagactcacaagctcacaaatttgtcaaaaaataatcagaaaaaaccatccttcattacaagaagttgagtatattaataaatcagttgggatgtcttcagcaatacgaagtgcaatcggatactgggaaacggaaaatggcgggctgaattcaaaaatcctctctaggtattatgctttattgcagataagcctagctgaacaaatttcatcaggagatcctaaagatgatttaaaagctgtgcaaaaacatactgaatcagggcatggactctttactaagactattgaaaatggaacatttccggataacattttaattggatgtcttaagagcggacatttttattcatatgccaaaaatattggtattgacatcaaaaaatattcatcagaacgacgcccaaggaatgatgaagagttagaggcatcagacacctacacattgactgatttgttgaggcgaattccggagttacgcattcaaataaaagaaatactgggtaaaaatccgctttcatttcaaattgggcatgcaagtagaaacatgacattaagatcaagagaatggatacaaggactatcacgttcaacccctaactttcctggttttacatatgccgcaatttatccaaaaggtgttgagatcacagcagagcacttaaactcttatgactttggaattactgacattgaaatggaggcaaaggaaaatataacaaaccatgatgaagattattttgtcggaaaagtttttcatccagaggggggaattatggtgggaccatattttaacacacaagtcgggctattgtggaacaagtgccattgtacctttctggggaactcaagacccattcatattacacttagttgtattttatgcactaagtataattgtaaggtatcttacagaaacatggtatga

SEQ ID NO: 272691 - DNA, 147 bp, Klebsiella pneumoniae
atgttattaggtctatttaaatggaaaacaatgactttgactcgctttctgaaggaggttcaggaagatgaagggcatgtagcagcattgagccgctatgatgaaaatgaactcaagtacgcagaatttcaactgataaaaaaataa

SEQ ID NO: 272692 - DNA, 408 bp, Klebsiella pneumoniae
atgaaactcatcaaaacaactcttttgtgttcctctttagttttttcctacaatgcattagctcaaagcattgagctgcaaacactaaataaaagtttaaagccgtggcaacctgctgagattgtccaaacatcaaatagcattaagatcacgttaccagccaataccgtttcatcggaagcatatgaagccttgatatcatccggagtttgtactcctatctggcttaaagatgcccctacatctttcctcaaaacaacatcagagatacatgtcgttaataagttttccgcatttggctacacgtttgaacaccctttgactacatgtaaaaaaatgggcgaactaatggatgaccaagctaaaagcctgatgtacgaaaacacgcgcacctacacatcaaaataa

SEQ ID NO: 272693 - DNA, 1161 bp, Klebsiella pneumoniae
atgagtaaaaaatttctatccctggtcacaaaacaaggtacggaagccatcgccgccgccattgtaaacgacgaacgggtcgcctttgctgaaatggccgtgggtgacggtaacggtattgtaccggtaccggatgaaaaccagacggcgctgattaatgagcttttccgcacgcagcttaacagtgtgaaaatcgttgatgatgagaaaaatatcattgcggcggaaatgataatgcctccggaagtgggcggttttaccatccgggaggcggcgttatttgatgccgggggtgtctgcctggcagtcgccagcgtgccggaaacctataagccgctgcttgctgaagggtcggggcgttttaccgttctgcgcatctggctgacggtcagcagtacggcgaatattgagctgatagttgacccggggatcgtactggcgacggtagaagatgttattcaggtcgggaacgatgcgaaagattacacggataaccaactgagtgagcacgcacagtcacgcaatcaccccgatgccacgctgactgaaaagggctttacgaaactcagtaatgacacggacagtgaggacgcggatcgggcggcgacacctgcggcagtcaaagccgcgattgcgcaggcaatccgtgccgcctgggaactggataaccccgtcggtaccacgcggttctttaatcagaatgtgaaccccaatgaacaatggtcatggtcagaatgggtttacactggcgaaaacaaaacgatccgcgtcggcaaggctgacggttcaaacgtcgggcagaccggcggcagcgatagcgtcagcattcagaaagccaaccttccggacgtgcagattgacgtcagcggagaaatcagcgaccacccggaacaaatcttgagaacgggccgcgccggaagacataaacatggtggcgtacccagccgggaaaatccgtgggagattggcggcgatatcagccagcaatttaacccggccaacctgggggaaactgacgaagttgacgatcacgaccatgaagtgattatcccggtgcagacccataccttcagcgggaagacccgcagtctgggtagcggtgccgctcttggcgttgttgaatcgcacaccctgctgatgtgctggagtcgtgtcgcctga

SEQ ID NO: 272694 - DNA, 255 bp, Klebsiella pneumoniae
atgcagggtacagatgctaaacaggccgatacactgtatcggggaattattgaatattaccgttattccgggctgggcattaccgctgcgcagatttcgcagcgggatgcgctgattgcgcagaatgccattgtttgtgacgattcactggatgagcgcgtgctgcttcttcaggacgaatatattgcggcggaaggcaacatggataaacagcggcagattattgaagatgttatttctttgctggctgcataa

SEQ ID NO: 272695 - DNA, 2106 bp, Klebsiella pneumoniae
atgacgaacatgacagaatcgccatcgtgggaagacagcattgaactcatagccagaagcgaacgcgtttcaggcggtcaggatggcgttgcaaaccggccattaaaaaaactggcgaaccgtaccaggtaccttaaagaaaaatatgacgggctgaataccgacctttccggaaaggttgaagcggttaaaacctttgccggtggtgccgtgctgaactctccccgtgacgaaattctctacggtattctgcgtctggtctggacggggccttttccgaaagaagttgctccaggttcatccccgcagacaaccggcggggttggcgtcggtgcatgggcgtatacctcggacgcggtcattcgtcatgacctcgcctcttatctgggcccgtcctttatggggatgccggagggcggaacgctgtttgacctgctgggcggctgggtctgcccggaaatgtacggtgccactgccggtgatgaatccgccgcgcatgcaaactcaaaggcattctacagaatgtttgaagtgcttcgccgtcgtggtggcggggttatttatatgaaacccggcgcgacatactgtgtcgattttatcaatttcgttcccgccaacgtcaggctttacgcctgcggcgcgaccattaaacatattaatcccatctccgctttcgggcgtggtgggctggttatcggtggcgggcaggagtggaactacgcgacagcgaaagccgcgtatgaatcggatacttacccggcagcggtacgcgatgacacgctgaaagacctcgctatcggcgattatctggaattcaatgaagaccacgtgcaggcggaaaacgttgatatctatgatttacgcatggaggccgcctttaccgacagcacttcatggggcggctatgccatcaatgtcgctaatgcgcggcatgtccgtattcacaatctcagggcgaagggctggacgcaggcgtttaactttggctctgatgttcacccttccagtccgtcatgttatgacgtgcgcatttataacctggtcgtggaagaagccgaccccaacaggacgtattacgcctttggttttatcgcaaactcgacagaatgtgaggtgtgcggcgctacgctgctgaagccgctgacggcaggcacgcgtaacggctccgggctggcggtgaatgcggtggagcgctgccgtatctccggtatcaacattcctgacctgggcaggacggtttccagcgagggggtgctgataaataacgcccgcgatacctgggtggatgatgtgcgggtggggaatgcgaaatcagcgctgtccacgttttactccgttgacagttataacgacgccagtcatcgcaatattatcgggcgggtctatgcgaacaactgcgaccaggccgtcgccattggcgcaaaatatgcggttattcaggacgtgaaatctgagaactgcacacaggatatttacttcaggaacatcaacgcgaccgggaatatcctgaagtttgagccgggaaaaatgattatcagtgattccagtgtaaataagcttttctggtatctgatttataacaccgtgaaaggctgggcgcgggaatatatccgggtgaggcccatcgatatgtttcgggggaactttgccaacctgtattcatgggacacgaataaatcagtcaagatgaataccggcatcaccgcagaatttatctataagtttcccggtcatattaaggcgctggacgctgtcacatttatggggaactttagcgtaggggcgcaggtagcggctgacccggcgcagactgttccggcgcgcccaacgcaactgacggcagcgatcaggtatatggcctcggatgacccctcgacagcggaagagccggttatcccggcaagcggaaaggttgtgatttcagcgctcactcagggtgacggggatttcatcaaaacctttgacctgcacggagaagccctggggtttctgcccctgaccggttcggtttacggggtggacaattcgatggacatgcgtttttcatttgtgaacggtgtggcagcaaatactatgaaaccggccattttcagagtgtggagataa

SEQ ID NO: 272696 - DNA, 597 bp, Klebsiella pneumoniae
atgaataattcgctaatggcgaccgggtcatcgcagcttgaacaacgagccgccgaggcttgcgcagtcatcagtgatttatctatcccgctgcgtgacttgtgggatccgtggaaatgcccggtaaagtttctgccctatctggcgtgggcgttttccgttgatagctgggatgagaactggagcgaagaagaaaaacgagtcgtaaccagtgaagcattctggctccatcagcgtaaaggaacgattgcagcagtccgctttgtggttgaaaaaatggggtattccatatcaatcgacgagtggtggcaggttgctgaccccgccgggacatttcggctggaagtggatgtgaatgacattggcattacatcacggatgctggatgaactgacccgcctgattaacgatgcaaagcccgtgagccgccatctttcccggttttcagtcgcggtaaaagtgcgggggaatattcatacagggtcatcgctacactgcggggaaatcgtcagcgtgtacccggaaacgtatgaaccggatgacagcattttttataacggcgtgatttttcacgatggtaattttagctacaggtga

SEQ ID NO: 272697 - DNA, 744 bp, Klebsiella pneumoniae
atgaacttaaaaaaccgaaccaaacagttaacagaaaaagaattagaagacctgatctgcgagctggaagcggcaggcttttacctccgtcagttgatagggctgactgagctgcaggaacgccgcaaagcggaagccaataacaagcctgtagcgtggacttgtgcggaacagctgcgcgatgcaaaggctcaaggctgcgggtacgtctttggcttaggtatccctgctaaagcaggccaccagataatgctgtacgccaacatgccgccggtaacttctgaacttttcatttcaggtgttcgtgatgaggatggcgactgcactgcggttgaagatgctgccgcacaattctggaccgtgtatcgccgcaatgaggacgggacctgcgatgcgctgatggactttgtgagcagggaaagtgcggaaaaggcgattcaaatgattgcccctaagcccgcgcaaaccggtgtcgatgacgatgtgcgcaacattattgggctgctggaaaataacgagtgggcggagcattgcactgaaactgtattaggttcgcgtctggaagcggaaataacacgactcgttggtagcatgcagtcagcgccggtagtgccgaagaaaataccgcgcagtgtttatatggtcatctatcaggaatgcggcggtttcgtagactgcggtgcaaatgctcaaacaatctgggaagcctgccgcgccgccatgttgaaaggtggtgcagcatga

SEQ ID NO: 272698 - DNA, 1404 bp, Klebsiella pneumoniae
atgggctttgattttcagttgttagagaatgccggaatacaattaatagatggggatagaggtaaaaactaccctaaacataatgattttatggaaaatggctattgtcttttcctgtctgctagaaatgtaacgaaatctggttttcagtttcaagaaacagcatttatcaatgaaattaaagatagccaattaagagctgggaaactcagttatggtgatattattctcactacccgtggtactgtaggtaatgttgcatactatgatagcagtaacccgtacaaaaatatcagaatcaattctgggatgattatcatccgagctgatgaaaaattatggaaccctaaatttttatacttcatattaacttctggttttttacaagaacaaataattaaccttatttctggttcagctgtaccacagctacctgccagagatattaaaaaatttattctcccagttattggtagaaccattcaggataaaattgctaatatcatatcagcttttagtgataaaattagtataaacattgatacaaaccaaaccctggaacaaatgtcccaaaccctgttcaaatcctggtttgtggatttcgacccagtgattgataacgcgctggatgcgggaaaccccatcccggaatcgctgcaatctcgtgccgaactgcgtcaaaaatttcgcaataatgctgatttcaaaccactttcggcggatattcgtgtactgttcccggctgagtttgaagaagtggagttgggttgggtgccgaaaggttggaaaatatccaccgctggcgatgaattagttgtgaaaggtggttcaacgccaagcacttcaaatgcagatttttgggaaaatggcactattcattggacatcacctaaagacttaacaggtaatgatagtaaggtattactggataccagtaaaaaaattacagagttaggtttgaaaaaaatctcatctggtttattaccaactgatacagttttgatgtcatcacgagcaccaataggatatttagcactggctaaaacgcctatggctataaaccaaggatatatagccattccttcatctaaaaatttatcgccagaatatattatctactggcttgaaaatattatggatgatatcaagggaatggctggaggaacgacatttgcagaaattagcaaaagtgcttttaaaactattaatttagttatcccgtctaaaaatatagtaaatgaatttacacggttagctcaccaacattttgaaaaagtagtaagcaatacacggcaaataactgtattaacaaccctccgcgacaccctgctccccaaactcatctccggcgagctctccctggaggatctaccagatttagtaacccaaaccgaacccgcttaa

SEQ ID NO: 272699 - DNA, 297 bp, Klebsiella pneumoniae
gtgggggataccatctggcgtgatgaaattgcggccgacctgctgaagctgcgcccggacgtggtggtcctcaacgccggctatgcccacgtcatcggctttggcccgattatcatgggcaaagaggatctcctgaacgtacacttcaccctgccggaagcgaaaatcatggctatccacctggaggcggtcaaccactgcctggtgagccgggaagagatgcgccagtatgcgctggataatcagattgccgaggtcgtgtgtatcccgcaggatggggaaaccgtggtttattaa

SEQ ID NO: 272700 - DNA, 1446 bp, Klebsiella pneumoniae
atgacctcatcattaaagaaaactgcagttactggattaatctggagtgcaattgaacgcttctcagtccagggtacacagttcattgttaccattatcctagcaaggctgatatctcctgaagactttggccttattggtatgataactgtgtttattgttttgtcggatcttattatcaatggtgggttttctcaggcactgatccaaaaaaagcatagaacacaggatgattactcaacagttttttactttaacgtattaatcgctatatttatttatggcataatctacttagcagcacccttcgtcgctaagttttacaaccaaatacctttagttgatatattaaggctgcttgcagtatcaatagttttaaagtcattttgtgttgtccagaatgcaattctatccataaagttaaatttcaaattaaggacaaaaataaatctcattagcgcaattttgagtggcgcaatcgctatttttatggcgtataaaggtttaggtgtatatgctttaatatatcaaaccattattttttcattgctggtatcaatattctcatttgctttgataagatggttcccatcattaactttttcgttctattctttaacgacacttttcaattttgggtcaaaacttctcttcgctagtgtagttagaaccattgttgataactgttatgcaatcttgattgggcgattcttgtctataagagatgttggatattatactcagggtcggaacttacctgatgtattatctatgaatttattcaatgtgttacagaatgtattctttccattaatgtctgcacatcaggatgatgagactcagttattaaaaatatataagaaagggattcaaggaactgcttttataattattccagcgatggttggtttgatgcttattgcagacccttttgtccacgccgtactgtcagataaatggaatggtgctatcattgttattcaatggattgctttatcacgtattattataccaattagtgctttaaattgtagtatcataaatgctgtgggtcggtcagatatttatctgaaagttgatttgcttaaattaccacttacaatcggcgctttactggttactttctctttcggtttagaagttatagtcataggtaatgctattgtttccgcaatatgcttctttattaatgcctattacccgggtaaatggtttggctttggtgcttgggaacagttgaagaaaatctcaccgatcatattttgtacattatgtatggcactgccattatattttatagaaatggataacaagttattagaaatgattgtcaagttaggcatcggtcctgtcatatatagcgctatgtgttatttgatgaaggttgatacttttatggaaatatgtgcattatttaaaaataaaatcaaaaaggaatccgcatga

SEQ ID NO: 272701 - DNA, 2160 bp, Klebsiella pneumoniae
atgtcatcagtaagaaataaaacagcggttacagattcagatgaaattgatttaggacgtcttgtcggagaattgatcgatcatcgtaaattaataatttctgtcacatcgctatttacgttattagcattagtctatgctttatttgcgacaccaatttatcaagcagatgcattagtacaagttgagcaaaaacagggtaatgcattgttaaatagcttgagtcaagtattgcccgatagccaaccacagtcggcgtctgaaattgcattgttacggtcacgaatgattttggggaagacagttgatgatctgaatctgcaggcaaaaattgaagaaaatcattttcctatatttgggcgaggcttggccaggttatcagggaataaagcaaataatatagcaatatctcgtttatacctttcaattcctggggaagatgttccagaagttgaggtccaggttttagataaaaataaatttagcgtaacaggggaaggtattgagctaacaggaacagtcggtcaactacttgaagcgaaaggtatatcgctgctggtgtctgaaatcgatgctgagccgggaactaccttcactgtttcgtatatttcacgtctcaaggcaattacaaatcttcaggataatttgactattgccgatgaaggaaaagatactggtattttaacgttatcccttaccggcgatgatcaaacacaaatcaagaatatcatagatagcattagtactaactacttagcacaaaatatcgcaagacaggctgcgcaagatgcgaaaagtttagagtttctaagtgagcagttacctaaagttcgcagcgatttggatcttgcagaggataaattaaatggttatcgtcaacaaaaagattcagtcgatctttctcttgaagctaaagctgtgctcgatcaaattgttaatgtcgataatcagttaaatgaattaacaatcagggaatccgaagtttctcagctgtttacaaaggagcaccctacctataaagcgttaatggaaaaacgtaaaactcttcaggaggaaaagaacaagctgaataaacgcgtatcagcgatgcctgaaactcagcaagaagtattacgtctaagtcgtgatgttgattctggacgtgcagtgtatatgcaactgctaaatcgacaacaggagctgagtattgcaaaatcaagcgcgatcgggaatgtcagaattattgataatgcgataacgcaacctaagccagtcaaacccaataaagtattagttattctgttgggtatcgtaattgggttactcatttccctaggcttggtactcgccagagtagttttacgtaaaggaattgagtcgccagagcaactggaagaattagggattaacgtctacgcaagtgttcctgtttcagaagaatttgccaaacgcgtagagcgttctagcaaatggaaaaataagaatcgtgatgaagctgctgtgttcctggcgattgaaaacccagctgatttggctatagaatccattagaggcctacgtacgagcttgcattttgcaatgatggaagccagaaacaatgtattaatgattactggtgcgagtccaaatgctggtaaaacatttattagctcgaatctcgcagaggtaatagcacagactggaaaaaaagtactatttatagatgcagacttgagaaaaggatatacgcataaattattcaatacagagaataataatggcttatcggacatattgtcaggtaaatcctcaatagagaaagcggtacaaaaaatatcaaaaattggcttcgattatatttcaagaggcatggtgccaccaaatccagctgaattactaatgcataagcgttttggagagttgattgcttgggcgaatgaacactatgatttagttgttatggatacaccgccgattctagccgtgacagatgctgcagtgatcggaaattatgcaggaacaactctattagtggcacgctttgaacaaaatactgctaaagaaatagctgtcagtattaaacgatttgaacagagcggtgtgaatattaaaggttgtatacttaatggtgtggttaagaaggtaagtaactattatggatatggttacaaccattacggctatacatataccgataaataa

SEQ ID NO: 272702 - DNA, 726 bp, Klebsiella pneumoniae
atgagaataaaaaataaatttttaatggcggagagatacttccactcccttaaatttgtaaacatggttcactttatatcaaacattattgttttttttagtgcttgtttttctttaataagtacaactgggtatatttgggatggggaacaaactcacggaagagtaattagttggatttcaagctggtcttctatatgcatgctaatatcagccataacattattctggagcagcgttaaaaaagataagcatgccaaaaagaaagaaaaaatagttgaccatcaaatgatgaagtcattagagagaatcgagaagttaaaactagagtctgaaagttacaagctaaggattgaacaagtaaaatctcaggttaaatggcgagacattaccgatgagcaagtaacaaaactgaaatcaatgttacaaggtgagaaaataaaattttttttgtcttttgttggcagcgattcagaatcaacagtgtacagagaaaagctaaacaatgcgttcgaaggcacttgtgttgaaacatcattttttagtggttatagtcgtgggtatggactaatttttgttggacagataacccctgagtttataaagctttataatgcatttcaatacgctggcattcctatagattttcatgacattgaaaataagcccatgctgggagaatttgaaataatagtaggaaccaaaccgccgccaatattggattag

SEQ ID NO: 272703 - DNA, 294 bp, Klebsiella pneumoniae
atgaacggatcgtcatcacatgatgtagaatggttgtttaggcagatctttgactaccttacagaaaagcaaggtatacctggttaccagttaagcaaaattgagaaggttgttttggactcattgatcaaggatggcggaatcacttgctatgatgaacttgacgaggagttcgcggctattcaggcggaagtagtcgctgtggaaaatgacccagggaaaaaagtccttaaagatgtactcctgcgttatgccatgctgctctggtttaatttcagaccatatcggtattaa

SEQ ID NO: 272704 - DNA, 168 bp, Klebsiella pneumoniae
atgccgatggctctgatgagccattttggcgcgatttcgctatgtgtaaatatttttgtacgtttaatgccgggtatgtgccaattaatttatttgtgtaaagtaaaatttacggaatatggattgaattctttactttgtatggtatcgttacgtcatgcccgctga

SEQ ID NO: 272705 - DNA, 306 bp, Klebsiella pneumoniae
atggtcgcggcagtgagctcaaggtttttctgcgcgtactgcttgagcgtgaagatagaggccgtgctcagcagcagccagaccagcgtcatggaaatcaccacgcttatcacgctaatgcgacgcagcgcgcgtttgaacgtcgggcgcgatgtctgtgaaaagtccttattcatgtggtttcttccgggcaagcatcaggacgtccgggttaacccgaaccccgctgtgcgtcagaacgtccagattaacggagaagcggaccctgtcgtcgttgatgatcaggcaaaacgcgctaccaattga

SEQ ID NO: 272706 - DNA, 744 bp, Klebsiella pneumoniae
atgaaaaataaaaaaagaattaaaatgaaagaacaaaaaaaaccattaccaagcaaaacattagatatgttcaaaaaaaaacgaccaattctctttggtcgccttgaagaaaatgttctccccagtgtgttgtacagattcttcgatgaagccactcatgctgaatctttcataaaaggattcgtgaaagtatcaactctggaaacatgcagaaattatgaagaccctgaacaaggagataagggggaaggcatacatatatatcacatagaacattacaaccctgaaacagatatagaacataaaacagtctttaatgctcgctcaccagtgattattggaaaaaactcaacaaactgtactgtcagcaatatatcaagatcagtaaaaattcctgatgcatacgtgctatgcacaactcatgagtttaacccggaattatttaaaaaaggatttggaaaatattgtgtaagaataaatgatcctttgaatttcatgaagagagtggcgcatgcaatgaacgaaacttatgggataagggcttgcacacacggttatgtcgactattcgagtcgaataataaacctacatgaaaatgataaacctttaggtttcgtaaaaccagaagacccatacgcaccacagaaagagtttcgtttcatttgggaccctatcactctacctattttcccgtcaatattaaaatgcattgaccttagtgatttatgcgaacgggttttataa

SEQ ID NO: 272707 - DNA, 1263 bp, Klebsiella pneumoniae
atggcccgaatacttggcggtattgccgtctcacatacgccgacgattggcttcgccgttgatcaccacaaacaacaggatccggcatggtcccctattttccaaagctttgagccgcttcagcgctggcttgatgagaaaaagcccgacgcattggtctacatctttaacgatcatgtgaccgcatttttctttgaccactattccgcgtttactctcggaatcgataaagagtatggcgtagcagacgaaggcggcggcccgcgcgatctgccgccggtaaaaggcgatgcggcactctcgcggcacattggcgcgagcctgatggccgacgagtttgatatgtcgttctttatgaataaaaaattggaccacggattgttttcccccctctcagcgctcctgccctggcagcaaaaagagggatggccaacgcgggtgatccccctgcagataggcgtactgcaattccctgtgccgagcgcaaagcgttgttataagctgggccaggcgctgcgtcgtgccatcgaaagctatccggaagatattgacgtggcgattgtcgccaccggcgggctgtcgcatcaggtacacggcgagcgctgcggtttcaataacaccgactgggacgcgcagttcgtcgacatgatcgtaaacgacccggaaaaactcaccgaaataaccatcagtgaatatgcgacgctgggcggtatggaaggttcagaggttattatgtggctggtgatgcgcggcgccctttcggccaatgtcacggagacctggcgtgattactacctgccctcaatgaccggcattgcgacgcttattctggaaaataacgcccggatgccacctgtggacaccctgactcgacatcgccagcatatggcgcaggagctggccggggttgataacctgccggggacgtatccgtttacgcatgagcgcagcctgaacggcctgcggctaaacaacttcctgcacaagctcacacagcccgcctggcgcgagcgcttcctgagcacgccgcaagcactgtatgaagaggccgagctgagccaggaggaacaacgtctgctgactgaacgtgactggcgcggattgatccagtatggcgcgagctttttcctgctggagaaaatgggcgcggtggtcggccaatcgaatctgcatatttatgccgccatgcgtggtcaaacgctggaggagtttcagaaaacgcgaaaccagcaggtcacctattctgtcgcaggtacccgttag

SEQ ID NO: 272708 - DNA, 846 bp, Klebsiella pneumoniae
atggatctagggcagtcactcgctcctgcactagccatgcctctttatacatggatcatagctgagcattcctggcgtcatactttttatttttcattttcgttaaccttgttacccattattctaatctatttttttacatcaaacttcccacaagaaaataaatatgttaacgctcttgaactcaaaacaatcaataaaagcaccgaggaggaagttttacataaaaatagcattgaaaaaatttcagttgttgaacgtgccaaagtatatctgtgcaattctaatttttggattttattggctgttttttcttctaactccatgctgtcatggggtgtcgtaacttggcttccaacatatttaaataccgagcgcggtttttcatggacaaatgtcggttggatgtcagcgcttccttttatatttggacttttgttcaaggttcttgctgggtttattgtcgacaaaactgacaggaaaggcatggtaatgtttgtctcggccatgttgtgtgctgcaagcatcctgattggagttaatattactaataactttttcgctgcaatcgtgatctccttcggtatcggcgcctcctcaatgcagctaccctgtgtgtttaccctcttgcaatcaatggttcctgcagaagcgatgtcgtcagctgcaggggctttaaatggtatggccgttggttttggggcgttatcacctgtattgattggatttatactgagtgttactcataacttttacgttgttatgtatatcttgattgggatagttgtaattggcggtttgttttcattattttttaatcgtcgcagaagttcatttttaaaataa

SEQ ID NO: 272709 - DNA, 756 bp, Klebsiella pneumoniae
ttgtcccctcaccctaaccctctccccaaaggggagaggggacggtacggtgcgattatggaatctgcgtgtggactctctttctccctctcgctgagggagagggaaccgttcggtgcggttatggaatctgcgtgtggactctctttctccctctcgctgagggagagggaaccgttcggtgcggttatggaatctgcgtgtggactctctttctccctctcgctgagggagagggaaccgttcggtgcggttatggaatctgcgtgtggactctctttctccctctcgctgagggagagggaaccgttcggtgcggttatggaatctgcgtgtggactctctttctccctctcgctgagggagagggaaccgttcggtgcggttatggaatctgcgtgcggactctctttctccctctccctcagggagaggggcggggtgagggcattggcgactcaagcgcttcaagtatcctctccatcaccgcctcttcatactcttcaaactcattattccagaagcgtaaaacccgccatccctgactctgtagccagcgggtgcggcgaacatcgtagacgcgtctcggatcgtgttgaccgccgtccagttcaatcgccagccgtgttgcgcagcaggcaaaatcgagaatataggggccaacgggatgctggcggcgaaacttatagcaagcaaaacggcggttgcgcagtaagtaccatagtcgacgttctgttggcgttaagctacgtctga

SEQ ID NO: 272710 - DNA, 1281 bp, Klebsiella pneumoniae
atgggattaggcactggtgcgcttgctggcgctggtattggtgcggctgcgtatggtgcttattcatgggggaaagacgctgtaacagcccaggaagagcgtagcgagattgtacagcgtgccagattagggaacgttgattacaacgcgctacaagcacaaagccagtatgcgacggctaacgggattgattccggcatgggcttgcagggaatgagaaaactccttgataactataaggacattcaggatcgcattggtcaaaccctcaaccaggctaaatacgataagaagtctggagagtggaaaggtggcgatcaggggattctgtcagcagtgaacactgccggattcacgatggacgatttacgccgttaccaaacaagcccgatgggcttcgtctctgcctataccaatacgttagagaaacagggcaaatcaccagagcaaatcctcgcatcgttggaacagttaggtgatgacctgggcctataccataaagcgtttatgaatggtggtaaggcgctcactgatcaggtggacgtgctcaagcgtaacgggcaatggttgaaccaggaacagcaagatcagcttgtagcctatcgcaaattcaatcaggaaatagacattctcaacgatagccagaagttagcattctttgaagggtttatggagtctctcgaccctgcgacggttaaagagtttaaggaagctatgcaggaggtgttacccttcttcaaaggcttagggaaagcggcgggtgatgttgtagacggcctaatgaagctaaccaactgggtcacaggtaagctgaaccttcttagcggggataacaccagtaaagaagctgtaagccagcattacggcactacgtcagcacctgcacagcctggtgataatgctgtagctaacgcctacggagccagccagcctaaagcggatggtcatgagcataatgtattcgatactttccatgattggtggaacgggacgggcgacgctaaagacgtgagcagctacgcacagagcaccaacggagattattctcctgtctcgatgttaaaaaaatccgcagcggctactgcgacaccgccagttaataatacgatggtgcaacctgtagtattacaaaataacctgccggaaggaatgatctctctcactatttcccctgatccgacattcggaaacatgctaaatgcgagcgtagatcagcgtattaatcagaacaatcagcgtatggtgctggctgtttcatctggacaagggacggggggctaa

SEQ ID NO: 272711 - DNA, 1032 bp, Klebsiella pneumoniae
atgattatcggaaatgaagttgtggatcttagtccactattcgggctaaccagtacccgcaattttttactgtcgtcactaaacatttttgatggcgacggagttacatctcataaagtgagtgtttctcgtctgctggaagataacaccagcctttataaccagcctacggcgcgtttctcgaatgagcataacgtaacagcacgtcagagcggtaaagaatggcttattgagcttccgtatttcctacgcgaagacgtgatcactccggcagacattcagggcaaacgtaagcctggaagcgacatccaagaaacagtgacggacatttacagcgattacatgaataaacacgctgtagcgtttatgcgcactcgtgaaagctatcttgcacgttctctgttctctggtcaggtgtatacgcctaagacagacgatctgttaatcgactttggcgatctgttcggcgtagccccgatgaatgccactcttgatctgtcagctacagatagcagcactctccgtgccattgacgacatggtgagtcaaatcaccgaagcggcacaaagccaggcggcggcagtggagcgaatcattgtctttgctaaatcctcgttctatagcgatctgcgtttcagccctgcaatggaagcggctttccgctatgtcagcccacttgatgaagggaacgtagtgttccagcgtcgtgacctcttgccaggcgtgagcactttctcgatccctggttcaaatgtagatgtgatcaaagtaactgacccattgctgatcgcacaaatgggcgatgctgatgctatcgctatcccgcaattcgctaagggaagcggtatttacaccaacatttacggcgcagccagcagcacctttgaacttcttaatgcagcacctgcggaagtttatagctggagcttcgaaagcgagcgcggtaacgcaatcaatgtgatttccgagaactcagcactgccagttaaccacggcctgaacttctccgttcacattaaagcctccaaataa

SEQ ID NO: 272712 - DNA, 339 bp, Klebsiella pneumoniae
atgactaacgacacaattcaatctctaatccttagtttcgaagataactatcatctcccgctactacaggaagtgaataaaacatacatcacagcaacgcctgagagccttctgaacgctgtcagacatacagagcaagccattacagcccttgagcatcttcaagcctcagtagctcgtttggtggaacgtgacggtagcacaataaccgctgatcaggcgtggcgtgtagctaatgaccttgaggagcttgcttgctccctgcaatacatcacgcttgagttgggagagcttgccatagccattgcagagaaatacactgcatgtgaaaatgaataa

SEQ ID NO: 272713 - DNA, 726 bp, Klebsiella pneumoniae
atgactgacattataaacagtaaggcttttagtttcaccaacaccgaagacgcatttaacgaatgcaccaggatcaccaacctgaaaacaggcgttacagaatttctatcacctgacgataaacaattttatgtaagaatgcgccaccgctactattacttcgttagagagttgggaagaagttattatgatgacgttgatcagcttggtcaaagtattggtgttagtcctgcaacagcaacacgaattgttgcaaggctacgaaaagtaggattgattgccagcgttaagccaaagcgatcaaaccagtggacaataaccgacattacaccggaaaacttcctctttgagcgtgacgctaacgcgaccaaacgcaagaccgcgcccgaatgggtggattgtctgaaacatccagtgtttggcaaagctaaagaagacgtagcgccagaggcagaggaagaaaaacatcagtcagtgccagaagaggccaaagcagagccaaagccaacgaagaaacccgcgtccattccagctaaagaaattaagatagaagccgtcaaccctgtttctatcgggttgtatcgggatgaatgggaaaatccagacaagaatttacctgtttcacaacatccaaaaatcagatggctacttattaacggatacctggacaccgagaagaatccaaaacttaaaacaatctatgaggaaataaaacatctatgctaa

SEQ ID NO: 272714 - DNA, 441 bp, Klebsiella pneumoniae; identical to SEQ ID NO: 202915

SEQ ID NO: 272715 - DNA, 222 bp, Klebsiella pneumoniae; identical to SEQ ID NO: 202914

SEQ ID NO: 272716 - DNA, 435 bp, Klebsiella pneumoniae
atggcaaaacccgccaagattgattttgcaactgagaacgctcaaaccatcgctgacgctattctgaacggcgtaaccaacatccaaaacctgaaagccttccgctacagagtcgggaccgacagggccgataagctctatccccaaacgcgcgaagcaatgaacctcgttaatgcagaacgaaagaaagcccgtgatcgccaggtctttaaggatctgttgcgcccgttctctcaaaagtacgcagcaggtgcgacgttgacccagattctgtccccagtgcttgagggctatcgtcagatgttcctcgataagcttggtctcgatttgcggcctgagcagattattatgatgattgtcgcaaccgacggagtcgaaaagcttcagaaggctggttacccactaattggtgactttcctacttcctgcaactga

SEQ ID NO: 272717 - DNA, 330 bp, Klebsiella pneumoniae
atgaaaaaggctttatttgcgctcttggcactgatgtcatttagcgcagtatcagcaacgacattcagcattcctacggattcgaaagctaaatataccatcattgataaaaccttgaacggctccatggcgaccatcacgaccatgagagaggggccatcagggacatcctactcacagcgcctgtatgactgcacatcgtggacggtgaagtatcttggtgatggagacacgctggaacaaatgaaagcatccaagcctgacgaaggcatgtcaccaatagttgaaaattcaatagcgtattatataggccaacgggcctgtaaataa

SEQ ID NO: 272718 - DNA, 294 bp, Klebsiella pneumoniae; identical to SEQ ID NO: 181013

SEQ ID NO: 272719 - DNA, 633 bp, Klebsiella pneumoniae; identical to SEQ ID NO: 190295

SEQ ID NO: 272720 - DNA, 477 bp, Klebsiella pneumoniae
atggcaacactacctacaggcgtagagattcgtggtaacagaatatgcgtctggtttatgtataaaggtaagcgctgccgtgaggtgttaaaggggtggattgtaagcccctcaaatataaagaaagctggaaatttaagagcggtaatcaccagtgaaataagcatgggggaatttgattatggtcgtcgattcccatcatccaaaaaggcggtagcgattaacaccacgttacaggtgagcacatttcatgaactgtgtgaactatggcttaaaattaaagaaactgaaatcagcgccaatactctaaagaaaacaaaatcccaaattgatacaataataaaaatcatgaacggaaacactatgctcactgctattggatatagtgacgttcttaattgtagaaacgaattgctaacaggagaaaccttctattcaaaaaacaagcgtaaaaataaaaaaggcagaacagtttag

SEQ ID NO: 272721 - DNA, 243 bp, Klebsiella pneumoniae
atgaagcaacagtcagaatcacttttaccttttaaaatcagtaggattcatacagaaataggtgtattcaaagtctatggatacagatcttcattccgcgcaaggaaaatgactatcatcctctcaacggttttcatactttccacagatggctgggaagagctcgccttaacccaaaccaataatgattttatgaaacaactaattccttacctagaatgccatttaaaggcaagtttttag

SEQ ID NO: 272722 - DNA, 228 bp, Klebsiella pneumoniae
atggcaactcaaatcaagagcaataaaacttatcagggcgatgctgccgcacttccttccccgcaggccccgatgccgaaactggccagcctttacctggattttgagaaggagctgtatattgccctgggcagaacaacgggtaatgccattcgctcccgccgtctggctgacgtggtaacctttactcgcgcatcggctttgttgaataaatcgaacttttgctga

SEQ ID NO: 272723 - DNA, 2157 bp, Klebsiella pneumoniae
atggctttatataaaacgggtaacccagtcccgtcttctgctatgcctgacatctgggatgataaccaggttcaggatattatgattaatagcgaagatttggaagttgaaacccgaaccgggaaaatgcaactgacctgggcggggcttgtaaagaaaaatgaagacgaaattgaagatacccgccagaacctgatccccctcagccgccagtatatgacgctggctgacgcccaggaggatattgccaatattcctgatggttcagctacctacgtgcgcagcactgatggtagttcgctggctgatgagtacatcaacaacggtggtacgcttgaggctaccggcagagtaatgccgtctcaggggtatgttgatgtcaccatcagtgagtccattgataaaaatgatgacagtaacttatcaaaatccattacctcagacggaatcacaactgagctggagactgagtccggagaaaaattcttctccggaatgaatgaaagtcttcaggaaatggcatcgcgaagttggaaagacaacacctctaatcttcattcagctacggataaatacggggtacagctcgttattaccgatgcagaagggaaaatcagtatccctctttctgattttccgctgcaggatctgctggcgcaggttcagcctgtttccgggccgtttctcaacacgctgagctccgctgataaggcggcatatggctatattgatgagctgggcggactcaaccttccggggattccgacatccgtcaacaatatgctgaacagtctttcccggcgcgtgcagcagcaggcagatagccggtttctcaccagtatcaaggattacggttgggatccgagtagccaggaggatgcgcgacaggttatccagcgcgcaatcagggatatggcccgcaacacttacggtggggtcatttatctcccaccgggtatttaccggttgagctccttcctcacgcccgcgccgaacgtatcgattattggcgccggtaccggcaaaacaatcctgatgccgtatggctcatattcggcgctccagttcaccacctcgccgacgaatcccgtcccggaattgaccgattttgtgtattccgattttgaggtggattgtcaggaccaggtattgccggatgagggctatttgcctcggactaaaggcttgtacttcaacttttaccggcgcggccacctgcaccgcctgcgggtgagaaactctggcgctacggggatcggcatcgactttgcgcgcgattccgcgattactgaatgcgtggtggagaatttcggtcggctggcaccgtcgggtaacgataaccctgcgggggcatctggtctcggattaggggctggcggtacgcagagcgagccgctgtatgttgctggcaacttctgccgcaacgggaagaacttcgggatctttcttgagaagcagcacggaacaaatgcgccttacagctctgaacacacgatagtcaccggcaacacatgtacagggaataatgctggcctgggtgattgtggtgttgatggcatgatcgctaccaataacaacttctcagaaaataattatggcgtgattatcagtccgggaactgtgctggcatatcccggttcgcgcgggcgtctgcagtgcaatattatcgccaaaaatgctaaacatggcgtctattacaacagcacgactgagcagcgagacggcgaataccagattgacagcaataccatccgtgataatggcgaagatggaattaacctcaaagcgccaggccaggaagtccgcagtatgtttatccaggggaatgacgtttatcgaaacggacggcatggtctgaacctggaagacgggacggcgatcaatatggatgtggtaaacaaccgcttctggaataacggcctgaccgcttccgggaacggaattaatctggcctcagaagttaagctcagctcgttaagcgcaaataaaattcgcgacatccagtctacgcctactcagcaatatcctgtttatgccagcggtacgcttaccgatgtcgatatttcatttaaccactgcgtgggtaacgcgcagaacacactaaatctgaccggcacgcaaacccgcgtcaccactctgaacaatccaggaatctga

SEQ ID NO: 272724 - DNA, 411 bp, Klebsiella pneumoniae
atgccaaaaaacagcaggcttccgactaaagagcagttccgcaccgacttccccgagttctccgacaccacccgctatcctgaccccgcagtgagtttttatctggggcaagccgacgtcatcctcaatcaggacgtgctgggcgatcagttcgtttatctcgctgagcttttcgttgcgcactacaccgaactgcgcgggcgggctattgcgacggcggctgtcggcggtggggtgaacacggctggtgggggcgtgctgacgtcgaagtcggtcgataaggtcagcgccagttacgacgtctcgggcattattaatcccgatgcgggattctggaacaataccggctacggccgcgagttcttctggtggtggtcgatgttcggcgccggcggcagacaactgctatga

SEQ ID NO: 272725 - DNA, 201 bp, Klebsiella pneumoniae; identical to SEQ ID NO: 204691

SEQ ID NO: 272726 - DNA, 948 bp, Klebsiella pneumoniae; identical to SEQ ID NO: 204692

SEQ ID NO: 272727 - DNA, 519 bp, Klebsiella pneumoniae; identical to SEQ ID NO: 204693

SEQ ID NO: 272728 - DNA, 1266 bp, Klebsiella pneumoniae
atgaaatattactttaccgcccggctgggggcgacgcgctacctgcaggccgatggctcgttgctatgcaaagacgttcccatcgcacgaactggcacgcagatttacctgcctgaagaggtggaccttgagcctgacccattaaccggcacggtgacggtctggcgaacggaggatgaggttttctccactgagactatggcgagctttgagggcgtcgccgtcacgctggagcatccagaaggggcgaatggcgaaatcgtctttgttaacccctccaactactccgatctggcccacggacatattcagaatgttcgccgcggcactggcaataaatcagacctgctgatagcggatgtgctggttaagaggcaggaggctatcgacgccattcaggctggctataccgacgtcagctgcggctacgacgccaaatataaacagctctccccgggtaaggggaagcaataccagatcacgggtaaccacctggccgtcggcattgaccgggggcgggctggcggccgctgtgcaatcggggattctgtcccatcaacgttaagaaaggaaaagccaataatgtcatggtttaaaaacttggctaaggccattaagacgaaagatgaggacgctttagcgaagctcatcgacgaagcaccggacatgccgtctgatggcatgggctcaatccccggaccgacgatcaacatcaacgtgccatcacaggctaccgcgctgccgaccgaaaaccggacgaccacagacgaaacgccagacgaaccggagaaagagaagaccggcgacgaaggcgtgcccgagtgggcgcaggcgctgatcgcccgtatcgacgcgctggaaggcaagaccaccgattccgacccggacgatacgccgaccggcgacgaagacgcggaagaagataagaaggtgacaggcgatgctgcgtttaagcgcaacatcatcgcggatgccgagattatcgctcctggcttccagcctaccggggataaggggcttaaacgtcaggtcctcagccatgccatgcgcacgggtgacagcctgaaagcgtttggcgtggaagacttcagcaaggcgcctaaggctaccgtggacgcagtattttctgcggccgtcgagctgaagaaagcgcagaaccatatcaccccgcttagtgccactacacgcacgcgtgacagcatgggcggcaagcacactccggccgatctgaacaagattaatgccgaattctggaaacgaaattaa

SEQ ID NO: 272729 - DNA, 1470 bp, Klebsiella pneumoniae
atgtcccgtaagaaacgccagaacggcgcacaaaagcccgttaggactgctgacgggtacaataacttcgccgctaaactcggcaccaacacccagaacatccagaccggcggaacgtacgttcctggctatatcacgcgcaaccgtgtgatgctggaatttgcctaccggtcatcgtttctggtgggcgccggtgtcgactctatggctgatgacatgacccggaaagggatcagcattagctcaaagttggagccggggcagaagggcaaggtagaaaccttctgggatgactttgctatctgggacggtatcaacgacacgctgaagtggtcacgcctgtacggtggcgcgattttggtcatgctgattgacggacaggacatgtccacccccctgaatatcgatcgcatcaaggaaggccagtttaaaggcgtgatgtcgctggaccgctggatggtaaacccgtcctacaacgacctggtgaccaactacggcccggagttcggaaagccgaaattctacaaagtggtggttaaccagcagggcatccccccctggagaatccatcacagccgcatcattcgcatggaaggtgactcgctgccattccagcaggcgcagacggaaaacggttggggcatgtcggttgtcgaacgcatctttgaacgcattcaggcattcgatactgcgacggtaggcaccacgcagctgatccataaagctcacctgcgcacctacagcattgataaattgcgcacgatactggctacgggtggtgacctggaaaaaggcctgatgcgtcacctggacatgatccgcgagttccagaccatcgaaggcatgaccctcatggacggtacggacaagttcgagacgcacagctattcgtttgctggtgtggctgacgtccttctccgctttgctgagcaggtctcgggcgctacgggtatccctttggttcgcctgttcggtcagtctcccgcaggattcaacaccggcgacggagaccttgagaactactacagccgcgttaactcgctgcaggagcgacggctacgtcggcatgttcgcaagttgctcgatgtcagctggcgttctctcttcggtcagaagttgccggacgacttcacctttgagtttaacaagctctgggagatgtccgacaccgaccgctcaacgatggctaacaacgtcgcaacggcgctcactgcgctggtagaccgccagattatgccggttcacgcagccatgaacgacctgcggaatatctccgacgtgatcggcatcggcggttcaatcactgacaaggatattgaagatgcgaaagcgcagtgggaggaggctgaatctgaaaccgaacctccgccgccgatcggagcgccagtatcagaaaagcctgttggcgatagtcgaccagataaaccaaatcgtaacgggctcctacgatggttcacaggccagcgctga

SEQ ID NO: 272730 - DNA, 621 bp, Klebsiella pneumoniae
atggcatcgaaaaagctcacggcagagcagcagaagcttttcgatgtgctgactccgctacaaaaaagattcgccctggccatcattaaaggtaagaaccagaccgacgcatataaagcagcgaaggggaaggctaagacgccagaagctatccgcaactcagcgagtcagatctttacaaatcttggtgtgcaagcctttctcaaatcagtgcagggcgagattgtcgacgaggcaatcatgacccgcgaagaagccctgaagcggctatctaaaatggggcgaacttccatcactgacatagccgagttcagtaacagcgttgttggcgaagatgaagacggccagccggtctatcaggctgtctggagcttcaggaactccaccctgcaggaccccgacgcgatgagcgctatcgccgaactgactaccggcaaagacggtatcaaattgaagatgcacgatccgaaagcggctattaagcagctggcagaaatgcagggttgggaagcgccgaagaaatcagaagttagtgggccgggtggcgggccagttaaaacagagaccgtggcaatgacgccgcaggaagcggccgacgcctacaaaaagctgatgggctaa

SEQ ID NO: 272731 - DNA, 1419 bp, Klebsiella pneumoniae
atgattactcctgttattatggccggtggtactggtagtcgcttatggcctatgtcaagagagctatacccaaaacaatttttaaaactctgtggttcaaactctatgctgcaagaaacaatcgtcagattagaggggcttgatgtaagtcatccggtattaatttgcaatgagcaacacagatttttagctgctgaacagttaaggcagattaactgtttagcaggtgacataattctcgaaccagttggtagaaatacagctcctgctattgccttggctgcacttcaatctattgataaagacaatgatcctttgctgcttatattggctgcagatcatattattaatgatacatcaacgtttcatatagctgtaaataaggctattccccatgccaggaatggtaagttagttacatttggaattgtccctacagggccggaaacaggttatggctatatccagcgtggcgctcatttaactagtgataaacaagcttttgatgtaaagcgatttgttgaaaaacctgatttaaacactgctaatgagtatgtttcaagtggtgaatattactggaatagtggtatgttcctgtttagtgcccggaaatatttagaagaacttgggaaattccgtcctgatatcttaaatgcttgcattgatgcgttttcagtagttgaaaaagatgttatgcaagattttatcagaattgatgctgagagatttacagtttgtccagatgaatccattgattatgcagttatggagaaaacagacgaggctgtggtaattcctctggacgctggttggaatgatgtcggttcatggtcagcactctgggatgttaatattaaaaacattgataacaatgccttgattggcgatgtttttacgcataacactagtaattgttatattaatactgatgaaaaacttgttgctgcaattggcgttgataatctggtcattgtcagtacaaaagacgccaccttggttattaacaaagataaggtgcaggatgtaaaaaaagtagtcgaatttttaaaaaaggatgaccgtcgcgagtatagaatacatcgtgaatcataccgaccatggggtgtgcaggataaagtcgttgatactcctcgttaccatgttaataaagtgactgttaaaccgggcggaaaattttcattacaaaagcatattcatcgtgctgaacactgggtggtattgtcaggtactgctgaagttactcttgatgaacaaacatatttattaactgaaaaccaatcaacttttattccggttggtaaaactcatatgcttcataatccaggtaagattccgcttgtcatacttgaaatagtctcaggggcatacttaggcgatgacgatattatccgcttgaaagatcattatggccatttttga

SEQ ID NO: 272732 - DNA, 1113 bp, Klebsiella pneumoniae
atggtaatagcttattgcatatttcgccatcgacttaagttgcctcctccgcagaagtatctcttgatttttatattttatttactggtatcattcctcacaatgatgttgtttggcgggatagaatatcaagaatcaagtccctatttaataagaatggtttctttatatgctcctgtttttcttgtgccatatttaagtgatgatgaaactcagtttgttaagtttggtaaagtatttgtagttatatcgttaatagctacagttgttatcattgcattatatatttcaggttggactggcgtcagtgcgcatcagacgacggaaagtgacgatggtttgacggttaatcgattaggaggtttgcctggtgaatcgggggcctttgcatataatattttatttgtattttatatgtcgcttatcgtatatcttgttgcggaaagaaaatggataaagaaaatagtcatgtttggtggcactctcattgtgctatttttatcatttaaatacagtcttgcacgagtaattgtaatttgtgctggagccgtgattctatgcggctatttttttacatcgatatctattgtaaaaaaatactttctctttctttttacatttctagtatgcagtacttctttgttctttgtttcacctgattcacttgatttatcgaaatatagattgtcgaacgttgcaagtactgatatgaattctgtttcatcaggccgggtttcacattggatagatgctgtagccttatatgcagaaagtcctttcaatgttgtttttggggtaggacatcgtatgtccgtacgattccttggtcatgcggtagaaaacttttttatccagaacctccttgattatggcattgtaggcactattctatttgttattttcttatggtttctactcaaacctattatcaaaaacgcaaaaacaaaaaatggaatttcagttgcaattttattagtttttacaggtatctttttacaatggcaatttaatgatatcaatacatattatcaaacatacccagctactttattcttcttaagttggtggagccaaatttgtcgaaaacggaacgctgccgttgacaatatttaa

SEQ ID NO: 272733 - DNA, 1059 bp, Klebsiella pneumoniae
atgggtgtagtcagggttgcgatcggttttattaccgccgccagcattcgtgccggtatccgttttctgaacagcagaaatataattgccggcagaccattcgcgaacgagtatgccgcggtcaatgtgcggagtttcaaaccacagttttgcaaactggatacgcttgcccagttcgtggcgcttaccttcaggaaatactgctttgttggcgttggtaaatttccacagggtaggcatgtcggcatccttcaaaccctggacgttctcagcggcgagaatcagatcctgcactgcggagttatcggtatccatttccagaacggcgagctctttacggtgcggaatactgatttgatagacgtggttatcattcgccatgtactgcgccagcagcttaatgcggaacggctgctcagcaatattgaacagggcgtttgtatcgttttcgtattcagcattgccgaacgattccacggtatcgacatcaccagcatcactagcatcgtcaccactattgtcatcaaccaactcgccagtaacgggcccagaggttactccggcatcatcgctgtgatgaacatcaacaggtgcctgccctggcttcagtgcccaggtgcggccatcgtcggcgagctggtagcgttcgcaccaggagtaatcgagaacaccttcagccggaagatcgttaaataccgggaaatcggtacggattggcttttgatagtctttgccgcggcctgtttcgatctcagcatcttccaggtcgacgtccaactgcagcagcgcgcgggattcggtttttgcagaacgccagattacggcatcggctttccccgatttttgagtcgcttttatcagataaaaatattccatgtgatagcctcaattttggatgtagaatccctcgggccattgatagcgcccattcagggtgttcattggtttttggtaaattccggtggaactttggtcggtgtcaccggacgtacagcccgcttcggcgggttttacgttaggcctcgttggccatctggtcgtattgaccgcacttcgtag

SEQ ID NO: 272734 - DNA, 159 bp, Klebsiella pneumoniae
atgcagaagaaatgcgcttattgccgcaagccgattgaggaaggcaaggaagcaaaaatgaccatcctcatcattcacggttcgcaactggcgccacgggaaagaacctattgctctacgaagtgcggtcaatacgaccagatggccaacgaggcctaa

SEQ ID NO: 272735 - DNA, 144 bp, Klebsiella pneumoniae
atgagtaagcaaggcatcagagccctgatcatttcggcagttatcgggctcttcatctggacggcgctaatcagcgcactgtgggagttatatcaatggtcgattttgcacgtaaacccgctcgtcagcaggctattcggttaa

SEQ ID NO: 272736 - DNA, 294 bp, Klebsiella pneumoniae
atgaaatcagtaagtaaaccgtgtcctatttgtggcgcagactcattgtcttttaaccatgtcaatcaggttgttaacatcaactcaaagccacctactattcgtgaagtaccatcggttgtttatgtgtgcgatgagcacggatggttttcactttcggaacaggtcaatgatctcgttacgttaaataacgaccctgcggttaaccaaaaactggcagctatcgttaaagagcgatacgtgccggagcaggatcagccattggccctgaaacctattgagtccctctcataa

SEQ ID NO: 272737 - DNA, 861 bp, Klebsiella pneumoniae
atggccgacctggctaacgggtataccaagatcgcaaacgagatacagaagctcaagccgcgtctgcggatgtcaggtcgtgagtggcagtgtcttgaggctgttatctggcttacctatggatggaacaagaagcaggaccgagtaacaaacacggtgattgctgaactgacagacctcggagagtcgcatatttccgacacaatcaaatctctcgcggagcggaaaattatcttcgctcataagcagggagtgatgaaaattgtcggtataaatactgagctatctgagtggattttagacaaaccgaaaacgggaaaacctttcccggaatcgggaaaagtgttaccgaaaacgggaaaacctttcccggaaacgggagacacccaatacaagaacaagaacaatagtaaaagatcttcttcgtctcggaattctaaagaatcccgaaacgaggaaaccttgaagtttctctctcgtcatccagaagcggccgatgggatttatacccctgcgggtaaatcctggggaacagctgacgacctcaaagccgcgcgttggattttcgataaagccctgaccgtgaatgcctccctctctgagccgaactgggttgaatgggcgaacaccatccgcctgatgcgcctgcaggacaagcgcactcactatgagatctgcgaactgttcaagtgggcaaatgaggacggtttctggcaggaaaacatcctttgcccctcaaaactacgtaagaaatgggatcagctcacaactaaacgcctgcgcagccatggtccatcaagaaactcatcaggcgccagtgcgctggacaacacagactggatcgacggggtactcgaatga

SEQ ID NO: 272738 - DNA, 324 bp, Klebsiella pneumoniae
ttggcctgttttacccaattgcgcttgggttttctccagggcatcgcgggattctgcaagtttgcggttgaggcgatcgtaagccaggggcgaaagcatcccggatgttttggctgtatcaagctggcgctgttgctcgttcaggcgacggaatgcttcacctacgggatctatttgggcctcaaggcgacgcaatgcggcaacctgctcgtcgtgggccttggctgcctcgcgttctgcctgagaagctccagtaatctcccggcgagtctcctgcagttttttgctgtaggtctcgaattgggcggtatttattttccctga

SEQ ID NO: 272739 - DNA, 981 bp, Klebsiella pneumoniae; identical to SEQ ID NO: 202607

SEQ ID NO: 272740 - DNA, 219 bp, Klebsiella pneumoniae; identical to SEQ ID NO: 161946

SEQ ID NO: 272741 - DNA, 1008 bp, Klebsiella pneumoniae
ttgccggatgagggttatctccccaggactaaggggctctattttaacttctaccggcgcggccacctgcaccgactgcggatgagaaactctggcgcaacggggatcggcatcgactttgctcgcgattccgccattactgaatgcgtggtggagaatttcgggcgtctggcgccatccgacaatgataaccccgccggtgcatccggtctcgggttaggggccgggggaacacagagtgagccgctgtatgttgctggcaacttctgccgcaacggtaagaacttcggcatctttcttgagaaacagcatggtaccaacgcaccgtacagctctgaacacaccatcattatggggaatacctgcacaggtaataacggcgggatgggggattgcggtgtggacggcatgattatgatcggaaataacttctccgaaaataattatggtgtcgttatcagtccggggacggtgctggcttaccccggttcgcgtggcctgttgttgggtaatattatcgccaaaaatgctaaacatggcgtctattacaacaacacaacagagcaacgtgatggtgaatatgcaatcactaataacaccattcgtgataacggggaggatggtgtttgcttcaaagcgccgggccaggaagtccgcagtatggaaatatctggaaaccgtatttataacaacgggcgtcatggattccacctggaagacggtacagccattaatatggacgtgattaataaccgaatctggaataacggcctggccgctgcagggaacggaattaacctggcctcagaagtaaaactcagctcgttcagtggcaataaaattcgagacatccaggctacacccactcagcaatatccggttaatgctactggcgcactgaccgacgtcgatatttcgtttaaccactgcgtgggtaacgcgcagaacacactaaatctgaccggcacgaaaacccgcgtcaccactctgaacaatccaggaatctga

SEQ ID NO: 272742 - DNA, 1026 bp, Klebsiella pneumoniae
atgtctgagagaataaatttctcagtacttattgatgagactaataaaaaatatgagcaagaacttctcaaggctggcattagcaatgaaagaatcattaaagtaaaaacatgtacagttggtgggcgggcgttaggaggagttaaattgttcacaacggtgttgcaagaggcaagtagattccatattgtccattgtaatactttctatgatggtctttttgcaatgcctgctgcaagattacgtgggaaaagaacaatattccgagccagatgcgggattgaactatcaaatcacggaataatcgataatgtcatttatcagttttcaacaaagattttagccaactcagactatgttaaaagtacttttagtagggtttctaaagatctaagcaaggttatttcgttatataatcctttggatatgaagtttaaacgagatattgctgtctgcaatgctagccccaaaggtgatcttgacaggaattatgttattgctgtaatcggcgctattactgaagtcaaaaatcaaatggaagtgcttagagccttttctaaacttaaagatgcatcactaaaattgaaattcataggtgagccaagaagcactgaaaaagataagcaatactataacgaactattaaaatatgcggaagacaataatcttgcttctcaagtcatatttactggttttgtttcagatgtgagagagaagcttaatgatgtagatttagtctgcgttccgtcagatcgggaaccacttggtcgagttatctttgaaagccagttatatggtattcctgtattggcttctgactctggtggaaactcagaattaattgagaatggagttaccggatatttgtactctttaggtgatatagacgagctcgctatgaagctcttggtggtaaaagaaaataactataaactcgctattaatgcccaagaatttgtattgcaacgattttcaccagaacgaacgtatcttgaagagcttaatctttatagctcaattaaataa

SEQ ID NO: 272743 - DNA, 273 bp, Klebsiella pneumoniae; identical to SEQ ID NO: 216530

SEQ ID NO: 272744 - DNA, 507 bp, Klebsiella pneumoniae
atgaacaaagaatggcaattgccgcccacttatgaatcggaaaagcagaaatcgtacacaatcgccgagtcgttgattgaagacttcgcagaaggtagcttcgcatctcccgatgcattgatcacgtctgtgacagagtacttctgcgctcaggatgatgcagaagatgctcttaagaggtttaccgcccacctaagcggttcccacgaggacttcgatgcgtcggaccatccgaaaattcaggcggccttggtaattggaattgtaacggtatgggcctcttcagaaaccgaaaaccggtatacagccttcaaggctctcgtccgaaactcatggtgggttgagcatttgtggacgaaagtggcactggttgtagctctaaaaaatgatgttttcaaggaaacactcttaaatttggccgaacaatatttcgtcgatgctgaaaaaaatctgcttcatgaagacgtagttgatccatcctatccaatcaccctcgatgcaatttag

SEQ ID NO: 272745 - DNA, 1008 bp, Klebsiella pneumoniae; identical to SEQ ID NO: 250597

SEQ ID NO: 272746 - DNA, 798 bp, Klebsiella pneumoniae
atgatgaccccgatatggttaggaaccagctggaaaatgaacaagccgctgtcccaggccatggcctggtgcgaaacgctggcagcgcggatgccggagggctgtcaccctgctattcagcccttcgtcattccccccttcaccgcgatccaacccgtcagccattttctgcaaacgcatcagttaccgcttctgaccggcgcgcagaatatgcatgaagcggatcagggcgcctggaccggggaaatctcggcggccatgttggcagaaaccggcgccacgcttgttgagctgggacattcagaacgacgcgccgcctttaatgaaagcgatgccgcgattaatcgaaaagtgcatagcgccttaggtcatggcctgcgcccgctgatctgtattggcgatagcgccgaggagaaacgctggcaggtgtcgcgtgaaagcgtggtgcggcagatgaagatcgccctgtatggcctgagccaccagcaggcgctgcggaccctgattgcgtatgaaccggtgtgggccattggcgaacatggtacgcccgcctcaccgcaggaggcgggtgtcattcatcaggcgctacgtcaggcgctttgcgagcggtttggtcacgagacgggaacccgtatcccgctgctctatggcggcagcgtaacgctgcaaaacgcggtggaattgctgcgccagcaggagatcaatgggttgtttatcggccgcgcggcctgggacgcgcaaggctattgcgacattgttcaacgcgttacacaggaatttattttgcaggcgcagtaa

SEQ ID NO: 272747 - DNA, 963 bp, Klebsiella pneumoniae; identical to SEQ ID NO: 138296

SEQ ID NO: 272748 - DNA, 345 bp, Klebsiella pneumoniae
atgcataatccgctggttatcgaagcgatcatgttgatcgcggccattatcgttggcgtctggagccagcgcgctttaccgctacatgtcgatagccgaccgatcctcttcctgctatgtctgttcctcggcactggcagcgcgttgtgcctgctgctggatatcttagccctgctgttcaccggtcaggtcgcgacgggcggtgtgcgaatatacggcccgttgctgctgctggtggtgctgtggaaacctctcaactgggttgtcggcatcattgaagattttgtgcagcggcgagccgaaaaagggaagggcaaaggccagcacgacggcggtcaacgctga

SEQ ID NO: 272749 - DNA, 831 bp, Klebsiella pneumoniae
atgcagtcgcgccgtttacatcgattgagccgttttcgtcgcaataaacgtcggttgcgtgaccgtctgcgtcagcggattttctttagggaggacaggatgaagcctgaagcgatggcaaaaccgagagtggtggtgttaaccggcgcgggcatctcggcagagtcggggatcaaaaccttccgcgcggccgatggcctgtgggaagagcatcgggtggaagatgtggcgacgccggaaggcttcgcccgcgatccggcgctggtgcaggcgttctacaacgcccgtcgtcgtcagctgcagagtccggaaatcgcgccgaacgcggcgcatctggcgctggcgcgtctggaggatctgctgggcgaccattttctgctggtcacccagaatattgataatctgcacgagcgcgccggcaaccgccgggtgatccatatgcacggcgagctgctaaaggtgcgctgctcgtggagcggccaggtgctggagtggaccggcgacgtcaccgccgaggacaagtgccactgctgccagttcccggcggcgctgcgtccgcatgtggtctggtttggcgaaatgccgctggggatggatgagatctacagcgcgctggccgacgcagatatttttatcgccatcggcacctccggccatgtctatccggcggctggctttgtgcacgaggcgcgactgcacggcgcccataccgttgaactgaacctggagcccagccaggtgggcagcgagtttgccgagaagcactacgggctggcaagcgaagtggtgcctgcctttatcgataagctgctgcaggaaaacgcgctgtaa

SEQ ID NO: 272750 - DNA, 912 bp, Klebsiella pneumoniae
atgtattatggatttgacattggcggcagcaagatagcgctgggcgtatttaatcaggagcggcgactgcagtgggaaaaacgcgtcgccacgccgaaaagtagttatgaggattttctccaggcggtagaggcgctggtccgcgaggccgatgagcgcttcgaccagcagggttcggtcgggatcggtattccgggaatgccggaaacggcggacggcacgctgtatgccgctaacgtgccagccgccagcggccggccgctgcgcgctgacctcagcgcgcggttggggcgcgatgtgcgtctcgataatgacgccaactgtttcgcgctgtcggaagcgtgggacgatgagtttacgcaatacccgctggtgatgggattgatcctcggcaccggcgtgggcggcggcctggtgttgaacggtaaatcgattaccggacatagctatatcaccggcgagttcggtcatattcgcctgccggtggatgccctggaggtggttgggcgcgattttccgctgctgcgctgcggctgcggccagctgggctgtattgaaaattatctctccggtcgcggtttcgcctggctgtacgaacatttttatcagcaaccgctctcctcgccggagattgtggcgcagtggcagcagcacgatccgcgcgcgcaggcgcacgttgagcgctatctcgatctgctggcggtgtgtctggggaatatactgaccattgtcgacccggatttgctggtgctcggcggtggattatctaactttacggccattagcgaagggctggcgcaacgattgccgcgccatcttctgccggtcgccagggttccgcgcattgagcgcgcgcgccacggcgatgccgggggaatgcgcggtgcggccttccttcacctgacccattaa

SEQ ID NO: 272751 - DNA, 1245 bp, Klebsiella pneumoniae
atggcgtctccgttatcgttactgattgcattgcgtttcagccgcggccggcggcgcggcggcatggtgtcgctgatctcggtgatctccaccatcggcattgcgctgggggtggcggtgctgatcgtcggcctcagcgcgatgaacggctttgagcgcgagctgaataaccgcgtgctggcggtggtaccgcacggcgaaatcgaacccgtgaatcagccgtggaataactggcaggaagcgctggcgaaggtgcagaaggtgaaggggattgtcgcggcagcgccctatattaacttcaccggcctggtggagagcggcagcaatatgcgcgccatccaggtgaaaggcgtcgacccgcagcaggagagccagctcagcgcgctgcctacctttgtgcagaataacgcgtgggccggattcaaggctggcgaacagcaagtgatcctgggcaaaggggtcgccgatgccctgcacgtgaagcagggggactgggtgtcgatcatgatccctaatgccgacgccgaccatcagctgctgcagccaaaacgcgtcaggctgcatgtgaccggaattttacagctgagcggccagctcgatcatagttttgccatgatcccgatgcaggatgcgcagcagtacctggagatgggtggcagcgtgaccggcatcgccatcaaggtcaccgacgttttccatgctaacaagctggtacgcgacgccggcgaggtgaccaacagctacgtctacatcaagagctggatcggcacctatggctatatgtatcgcgacatccagatgatccgcgccattatgtacctggcgatggtgctggtgatcggtgtggcctgctttaacatcgtctcgacgctggtgatggcggtcaaagacaaaagcggcgatattgcggtgctgcgcacgcttggcgcaaaagacggcttaattcgcgcgattttcgtgtggtatggtttattagccggatcggtaggcagcctgtttggggtggtgatcggcgtgatctgcgcgttgaacctgacgtcgatcatcaacggcatcgaatacctgattgggcataaattcctctccggcgacatctattttattgacttcctgccgtcagaattgcactggctggacgtcttttatgtgctggtgacagcactgttgctgagtttgctggccagctggtatcccgcccgccgcgccagccgcatcgacccggcgagggtgctgagtggccagtaa

SEQ ID NO: 272752 - DNA, 702 bp, Klebsiella pneumoniae; identical to SEQ ID NO: 210733

SEQ ID NO: 272753 - DNA, 1200 bp, Klebsiella pneumoniae
atgtaccaacctgccgcactctttatcggcctacgctatatgcgcgggcgcgcagccgaccgcttcggtcgtttcgtctcctggctctcaactatcggtattacgcttggcgtaatggcgctggtgacagtcctgtcggtgatgaacggctttgaacgcgagctgcaaaacaacatcctggggctgatgccacaggccattcttagcgccaaacagggttcggtgaaccctcagcaactgccggagcgcgaagcgaaacttaatggagtaacccgcgtagcgccgatcaccaccggcgacgtggtgctgcagagtgcgcgcagcgtggcggtcggggttatgctgggcattgatccggcgcagaacgatcccctgactccatacctggtgaacgtcaaacagagcgatctgcaggcgggcaaatataacgttattctcggcgagcagctggcgggccagctgggggttaatcgcggcgataaaattcgcgtgatggttccttccgcaagtcagtttacgccgatgggccgcgtgccgagccagcgtctgttcacggtcatcggcaccttcgccgccaacagcgaagtcgatggctatcagatgctgaccaacatcgacgacgcctcccgtctgatgcgctatccgctggggaatatcaccggctggcgcctgtggctggataaaccgctgcaggtcgacaccctgagtcagcagacgctgccgccgggaactcagtggcaggactggcgcgagcgcaagggcgaactgttccaggcggtgcgcatggagaaaaatatgatgggcctgctgctgagcctgatcgtcgccgtcgcggccttcaacattattacctcgctggggatgatggtgatggagaagcagggcgaagtggcgatcctccagacccaggggctgacgccgcggcagattatggccgtctttatggtgcagggggccagcgccgggatcgtcggcgcgctgctgggagcggtgcttggcgccctgttggccagccagctgaataatttaatgccgatcatcggcgccttccttgacggcgcggcgctgccggtggcgattgagccgctgcaggtcattgttatcgccctggtggcgatggtgctggccctgttgtctacgttgtacccttcctggcgcgctgccgccacccaacccgctgaggctttacgttatgaataa

SEQ ID NO: 272754 - DNA, 3447 bp, Klebsiella pneumoniae
atgcctgaacaatatcgatactcattgccggtcaaagccggcgatcagcgccagcttggcgagttgaccggcgcagcctgcgccaccctggtggcggagatggccgaacgccacaacggcccggtggtgctggtggcgcctgacatgcaaaacgcgctgcgtctgaacgacgagatcaggcagtttaccgacagcatggtgatggggctggcggactgggaaacgctcccttacgacagcttctcgccgcatcaggacatcatctcctcccgtcttgccaccctttaccagttacccaccatgcagcgcggcgtactgatcgtcccggtcagcaccctgatgcagcgcgtctgtccgcacagcttccttcacggccacgcgctggtgatgaaaaagggccagcgcctgtcgcgcgatgcgctgcgcgatcagctggagggggccggctaccgccatgtcgatcaggtgatggagcacggcgaatatgctacccgcggcgcgctgctcgacctgttcccgatgggtagcgatcagccctaccgccttgatttctttgacgatgaaatcgacagcctgcgcctgttcgacgttgacagccagcgcacgctggaggaagtggcggccattaacctgctgccggcgcacgagttccccaccaaccagaccgctattgagctgttccgcagccagtggcgcgaccgctttgaggtgaagcgcgatgccgagcacatctatcagcaggtcagtaaagggacgctacctgccggtatcgaatactggcaaccgctgttcttcagcgagccgctgccgccgttattcagctatttcccggccagcacgctgatcgtcaacaccggcgatctcgaggccagcgcggagcgattccagaatgaagcccgcgcccgctttgaaaaccgcggcgtcgacccgatgcgcccgctcctgccgcctgagctgctgtggctgcgcagcgatgagctattcagcgaactgaaaaaatggccgcgcgtgcagctgaaaaccgaacgtctggcggacaaagcggcaaatactaatctgggctaccagacgctgccggacctcgccgtccaggcgcagaacaaagcgccgctggataatctgcgccgcttcctcgagtcctttaccggtccggtgatcttctcggtggaaagcgaaggccgccgtgaagcgctgagcgaaatgctggcgcggattaaagttgcgccaaaacatgtgctgcgtctggaggaagccaccggcaacggccgctatctgatgattggcgctgctgagcacgggtttatcgacagccagcgcggcctggcgctgatttgcgagagcgacctgctcggcgagcgggtggcgcgccgtcgtcaggattcgcgacgcaccattaaccctgacactctgattcgcaacctcgccgaactgcatatcggccagccggtcgttcacctggaacacggcgtgggccgctacgcgggcatgactaccctggaagccggcggcatcaccggcgaatatctgatgctgacctacgccaacgatgccaagctatacgttccggtatcgtccctgcatcttatcagccgctacgccggcggggcggaagaaaacgcccccctgcacaagctgggcggcgatgcctggacccgggcgcgacaaaaagcggctgagaaagtacgcgacgtggcggccgagctgctggatatctacgcccagcgcgcggcgaaggcgggttttgcctttaaacacgaccgcgaacagtatcagctgttctgcgacggtttcccatttgaaaccacgccggatcaggcgcaggcgatcaacgccgtcctcagcgatatgtgccagccgctggccatggaccgcctggtatgcggcgatgtgggcttcggcaagaccgaagtggccatgcgcgccgccttcctcgccgtggagaaccacaagcaggtggcggtgctggtgccgaccaccctgctggctcagcagcactatgacaatttccgcgatcgtttcgccaactggccggtacgcatcgaaatgctctcccgcttccgcagcgctaaagagcaggcgcagatcctcgagcaggccgcggaaggcaaaatcgatatcttgatcggcacccacaagctgctgcagagcgaggtgaagctgcgcgatctcgggctgctgatcgtcgacgaagagcaccggtttggcgtgcggcataaagagcgcatcaaagcgatgcgcgctgatgtcgatatcctgaccctcaccgccacgccgatcccgcggacgctgaacatggcgatgagcgggatgcgcgatctgtcgatcatcgccacgccgccggcgcgccgcctggcggtgaagaccttcgttcgcgaatatgacgccctggtggtgcgcgaggcgatcctgcgcgaaacgctgcgcggcggccaggtctactatctgtttaatgacgttgagaacatccagaaagccgccgacaagctggcggagctggtgccggaggcgcggatcgccatcggtcacggtcagatgagggagcgcgaactggagcgggtgatgaatgacttccatcatcaacgcttcaatgtgctggtgtgcaccaccatcatcgaaaccgggatcgacattcccaccgccaacaccatcatcatcgaacgcgccgaccattttggcctcgcccagctgcaccagctgcgcggccgcgttggccgttcgcatcaccaggcctatgcctggctgctgacgccgcatccgaaagcgatgaccaccgatgcgcaaaagcgcctcgaggccattgcgtcgctggaggatctcggcgccggctttgcgctggcaacccacgatctggagattcgcggggccggggaactgcttggggaagatcagagcggtcagatggaaaccatcggtttctccctgtatatggagctgctggagaacgcagtcgatgcgctgaaagccgggcgtgaaccctcgctggaagatctcaccagtcagcagacggaggttgaactgcgcatgccttccctgctgcctgatgatttcatccctgacgtcaatacgcgcctgtcattctataagcgcattgccagcgccaaaaacgaacaggatctggaggagatcaaagtcgagctgatcgatcgttttggccgcctgcccgatgccgcccgcaacctgctggatatcgcccgtctgcgtcagcaggcgcaaaagttagggatccgcaagctggaaagcaacgaaaaaggcggcgtgatcgaatttaacgagaaaaacaacgtcaatccggtgtggctgatcggcctgctgcaaaagcagccccagcacttccgcctggacggtcccacgcgcctgaagttcatgcaggacctggaggagcgtaagacgcggatggactgggttcgccagtttatgcgtcagctagaagagaacgccgtcgcctga

SEQ ID NO: 272755 - DNA, 960 bp, Klebsiella pneumoniae
atgagaaaccgtttccccgtgacgctttggctgacgctagtcgcgttagtcgccgcgctggccctccccgcgcgcgctaacacctggccccttcccccgccgggcagccggctggtgggtcagaatcagttccatgtggtacaggatgacggcggttcgctggaagcgattgccaagaagtacaatgtcggcttcctggccctgctgcaggccaatcccggggttgacccctatgttccgcgcgccggcagcgtgctgaccatccccctgcagacgctgctgcccgatgcgccgcgcgaagggctggtgattaacctcgccgaactgcgcctctattattacccgccgggcaagaatgaagtgaccgtctacccaatcggcatcggtcagctgggcggaaccaccatcacaccgacgatggtcacaaccgtgtccgacaaacgggccaatccgacctggacacctaccgccaacattcgcgcgcgctacaaggctatggggattgagctgccggcggtagtgcctgctggtcctgacaatccgatgggccatcacgccatccgcctcgccgcctatggcggagtctatctcctgcacggcaccaatgccgatttcggcatcggtatgcgcgtcagttccggctgcattcgtctgcgcgataacgatatcaaggcgctgtacaacactatctcgccgggcacgaaggtgaacattatcaacacgccgatcaaggcgtcggttgagccggatggccgccgtctggttgaggtccatcagccgctgtctgagcatatcgatgacgacccgcagaccctgcccattacgcttaatgcggccatgactgcgttcaaacaggcgccgcagaccgacgggacggtgatggagcgcgcgatgaattatcgctcgggcatgccgattgacgtcacccgtcatgctgagcctggaccgcagtcgctgtag

SEQ ID NO: 272756 - DNA, 258 bp, Klebsiella pneumoniae; identical to SEQ ID NO: 243974

SEQ ID NO: 272757 - DNA, 636 bp, Klebsiella pneumoniae
atgacaactgacgttcaaagttgcgccaaaaaaagccgtggccgaccgaaggtgttcgacagggatgcggcgctggacaaagccatgacactcttctggcagcacggctatgaggcgacctcgctcgccgatctggtcgaggcgacaggagcaaaagcccccaccctgtatgcggaatttgtgaataaagaaggcctattccgcgcagtgttggatcgttacatttcgcgctttgccgcgaagcacgaagccgtgctgtttgccgagggaaaatccgtcgatcgcgcgttgcgtgactacttcacggcggtcgccacctgctttaccagcaaagagacgccggccggctgctttatcatcaatacctccgccgcgctggccgcctcctcgacggatatcgccaataccatcaaatcccgccatgcgatgcaggagcaggcgctaacccagtttctgcagcagcggcaggcgcagggcgaactgcccgcgggccgcgatgtcgcgcagctggcgcaatttcttaactgcgttctgcaggggatgtcgattagcgcccgggaaggcgcggatttcgacaagctgatgcaaatcaccgacaccactctccgtctctggccgcaggtcctcgagtcctga

SEQ ID NO: 272758 - DNA, 2190 bp, Klebsiella pneumoniae
atgaaaaagcgcctctgggtgctccaccctctgctgctggccagcacgctgcctgcgctggcggctcagtctgatgaagacagcatcatcgttagcgcaaaccgcacccatcgcaccgtggccgaaatggcccaaaccacctgggtcattgagggccaggagattgagcagcaggtccagggcgggaaagagttcaaagacgtgctggcgcagctgatccccggcatcgacgtcagcagccaggggcggaccaactatgggatgaacatgcgcgggcgcgcaatcgtcgtgctgattgacggcgtccggctcaactcctcacgcaccgacagccgccagctcgacgccatcgatccattcaacatcgaacatatcgaagtgatctccggagcgacctcgctgtacggcgggggcagtaccggcgggcttatcaacatcgttaccaaaaaggggcagcaggatcgtcaggtcgatcttgaggtgggcagcaagagcggttttgcgaacagcaacgatcatgatgagcgcgtcgcggcggccgtcagcggcggaacagaccacgcatccggccgcttgtcggtagcctatcagcgtttcggcggctggtacgacggcaataacgatgcgctgatcctcgataatacccaaacggggctccagcactctgaccgcctcgacgtgatggggacggggacaattgagatcgatgataaccgccagctgcagctggtcacccagtattataaaagccagggcgatgatgactacggtctgtggctcgggaagaacatgtccgcggtcaccagcggcggcaaagcgtataccaccgacgggctcaattccgaccgtatccccggcaccgaacgccatctgatcagcctccagtactccgatgccgactttttcggccagaatctggtgagccaggtgtactatcgcgatgagtccctcaccttctatccgttcccgacgctcacgaaaggtcaggtcagtagcttctcctcgtcgcagcaggataccgatcagtatggggccaagctgaccctcaacagtcaaccgctggcggggtgggatctcacctggggtctcgacgccgatcatgagacctttaatgccaaccagatgttcttcgatctgccacaatcgatggcctccggcgggttgcacaacgaatcgatctacacaaccggccgctacccgggatacagtatttccaatgtcgcgccattcctgcagtccagctacgatctgaacgatatctttaccgtcagcggcggggtacgctaccagtggaccgaaaaccgggtcgacgactttgtcggctacgcccagcagcaggatatcgccaacggcaaagcgcgctccgccgacgccatcaaaggcggcaaaaccgattatgacaatttcctgtttaacgccgggatcgtggcccacctgaccgagcgtcaacaaacctggtttaacttctcgcagggtgtcgagctaccggaccctggtaaatactatggcatcggtaaatatggcgctgcggtgaatggtcatctgccgctgatctccagcgtcaacgtcgatgactcgccgctgcaggggatcaaagttaactcgtacgagctgggctggcgctacaccggcgataacctgcgcacccagctggcggcgtactactcgacctcggataagaccattgtcgtcaaccgcaccgacatgaccatcgacgttcagtccgacaaacggcgtatttacggcgttgagggggcggtcgactactttattccggatagcgactggagcgtcggcggtaacttcaacgtgctgaaatcccaggtgcagaccgacggccgctggcaaaaatgggacgtcaccctcgcctcgccgtctaaagccaccgcctgggtggggtgggcgccggatccgtggagcctgcgcgtgcagagtcagcaggtatttgacctcagcgatgccgccggtaacaagctggaaggctataacaccgtcgattttatcggtagttacgcgctgccggtggggaaactgaccttcagtatcgaaaacctgcttaacgaagactatgtcactatctggggccagcgcgcgccgctgctctacagcccaacctacggcagttcatcgctgtatgagtacaaaggtcgtggccgcacctttggtctgaactacgccttaaccttctga

SEQ ID NO: 272759 - DNA, 540 bp, Klebsiella pneumoniae
gtgaataaatctatgttggcgggtatagggataggcgtggctgccgcgctgggcgttgcagctgtcgctggtctcaacgtgttggatcgcggcccgcagtatgcgcaagtggtctccagtacaccgattaaagaaaccgtgaaaacgccgcgtcaggaatgccgcaatgtcacggtgactcatcgtcgtccggtacaggatgaaaaccgcatcgccggttcggtgctgggcgcggtggcgggcggggtgattggccaccagtttggcggcggtcacggacgcagcgtggcgacggtcgtaggtgcgctgggcggcggctatgcaggcaaccagatccagggcgcgatgcaggacaacgacacctacaccaccacccagcagcgctgcaaaacggtgtatgacaaatccgataaaatgctcggctacgatgtgacctataagataggcgatcagcaggggaaaatccgcatggatcacgatcccggcagccagatcccgctggacaacaacggccagctggtcctgaacaacaaaatctaa

SEQ ID NO: 272760 - DNA, 1305 bp, Klebsiella pneumoniae
atgactacgccattgaaaaaaatcgtaattgtgggtggcggcgctggcggactggaactggcaactcagctgggaagaaagttagggcgccataagaaagcgaaaatcaccctggtggaccgtaaccacagccatctgtggaaaccgctgctgcacgaagtggccaccggttctctggatgaaggcgttgatgcgctgagctatctggcccatgcccgcaaccacggtttccagttccagctgggctcggtggttgatatcaaccgcgaagggaaaaccatcaccctcggcgagctgcgcaatgaaaaaggcgagctgctggtggctgagcgtaaactgccgtacgacacgctggtcatggcgttgggcagtacctcgaatgactttaatacccctggcgtaaaagagaactgcattttcctcgacaacccgcaccaggcgcgtcgcttccatcaggaaatgctcaacctgttccttaaatactctgctaacctcggcgctaacggtaaagtaaatatcgccatcgtcggcggcggcgccaccggcgtggagctctccgctgagttgcacaatgcggtgaaacagctgcacagctacggctacaaagggctgaccaacgaagcgctgaacgtcacgctggtcgaggcgggcgagcgcattctgcctgcgctgccgccgcgcatttccggggcagcgcataatgagctgactaagctgggcgtacgggttctgacgcagaccatggtcaccagcgcggatgcgggcggcctgcacactaaagatggcgaatatattgaggcggatctaatggtctgggcggcggggatcaaagcgccagatttcatgaaagagatcggcggcctcgaaaccaaccgtatcaatcagctggtggtcgagccgacgctgcagactacccgcgatgcggatattttcgccatcggcgactgcgcctcctgcgcccgtccggaaggcggctttgtgcctccgcgggcccaggcggcgcaccagatggctacctgcgcgctgaacaacatcctggcgcagatgaaaggcaaaccgctgaaggcatacacctataaagaccatggctcgctggtgtcgctgtcaaattactccaccgtcggcagcctgatgggtaacctgatgcgcggttcgatgatggtggaagggcgcattgcgcgcttcgtgtacatctccctgtaccgtatgcaccagattgctctgcatggttacttcaagaccggcctgatgatgctggtcgggcgcatcaaccgcatcattcgcccgcgcctgaagctgcactaa

SEQ ID NO: 272761 - DNA, 543 bp, Klebsiella pneumoniae; identical to SEQ ID NO: 243969

SEQ ID NO: 272762 - DNA, 1023 bp, Klebsiella pneumoniae
gtgggcccagtgatgttggatgtcgaagggtatgagctggatgcggaagagcgagagattctggcgcatccgctggtgggagggttgatcctctttacccgaaattatcacgatccggcgcagctgcgcgagctggtgcgccagatccgcgacgcctcccggaaccacctggtggtggcggtcgatcaggaaggggggcgggttcagcgtttccgcgaagggtttacccgtttaccggcggcccagtctttcgccgcgctgctggggatggaagaggggggcaaactggccgccgaagccggctggctgatggccagcgaaatgatcgccatggatatcgatattagttttgcgccagtgctggacgtcggccatatcagcgccgcaatcggcgaacgttcttatcatgaagatccacagaaagcgctgacgatggcgcgtcacttcattgacgggatgcacgccgcgggcatgaaaaccaccggcaaacacttcccgggtcacggggcggtgactgccgattcgcacaaagagacgccgttcgatccgcgggcggcatcggttatccgcgaccatgatatggcggtgttcaaaagccttatcgccgagcagcgtctggatgccattatgccggcgcatgtgatttacccggagctcgatccgcgtccggccagcggctcggcgtactggctgaaaacggtgctgcgcggcgaactgggctttgacggggtgattttctccgacgatctgtcgatggaaggggcggcgatcatgggcagctatgccgaacgcggccaggcatcgctcgacgccggttgcgatatgatcctcgtctgcaataatcgtaaaggcgcggtcagtgtgctggataacctgtcgccgatcaaagcagagcgtgttacgaaattgtatcataaaggttccttttcccgtcaggagttaagggattcagcccgttggaaaacggtgagtgcccagctggagcagcttcatgcgcgctggcaagaggcgaagtccgcgtaa

SEQ ID NO: 272763 - DNA, 828 bp, Klebsiella pneumoniae
gtgctgttcagcaacaataagctaacgcgcgacgagctcttgtcgcgcttctttccccattatcatcctgccgcctcgctgagccagagtggcctcagcggcggcagtgtgattatcagcgacggcgaccggcggcacgtgctgcgtcagccgcacgatccgtctgccgccacttactattttcgccgtcagtatcacgcactccgccgactgcctgccaggctggcgccaaccccgctgttttactcaccctgctggatggtggtggagtattgcgcaggggaggtgaaaagcgagttaccggcctccccgcagctgtcaggcttattgtatgatttgcatcagcaaccgcggtttggctggcgggttagccttacaccactgctggcccagtactggcagaggtgcgatccggcgcggcgcaagccgcgttggctgcgctggcatcagcggctgcgccgccagggcgagccccgtcccctgcggctggcgccgctgcacatggacgtccatgccggcaatattattcataatgagtccggcctgaggctgatcgactgggaatatgccggtgatggcgatatcgcgctggagctggccgcggtgtggatcacgcctggcgagcgccgtcggctggtagaagcgtatgcccggcgggcggccatcgacgcgcagctgctttggcggcaggttgcactctggcgcccgtgggtactgctgctgatggcgggctggtatgaaatgcgctggcggcagagcggggaccggcaatttatcacgctggcagatgaaatatggtgtcagttagacaacgaacgtaaaggataa

SEQ ID NO: 272764 - DNA, 648 bp, Klebsiella pneumoniae
atgatgaaaatgtgtcgctatgcgttaatcacagcactggcgatattcctcgcaggctgtgcggggttgcgggagcagcccgcgccggtagaagaggccaaaccgcagccgcagcagcctgcgcagccgcagcccacggtgccgaccgtaccggcggtgccctctgtcccggcgcagcctgggccgattgagcatcaggatcagcagtcgggtcagccggcgccgcgcgtgcgtcattatgactggaacggcgcggttcagccgctggtggggcagatgctgcaggcgagtggggtcaatgccggcagtattctgctggttgacagcgtgaacaaccgcaccaacggttcgctgaatgctggagaagccaccactgcgctacgtagtgcgctggccggtaacggcaaatttaccctggtatcggcgcagcagctggcggtcgccaagcagcagctgggcctgtcgccgcaggacagcctcggcagccgcagcaaagccatgggcatcgcccgcaacgtgggcgcgcagtatgtgctttactccaatgccaccggcaacgtcaacgcgcctgagctgaaaatgcagctcatgctagtgcaaaccggtgagataatctggtcaggtaaaggtgctgttcagcaacaataa

SEQ ID NO: 272765 - DNA, 375 bp, Klebsiella pneumoniae; identical to SEQ ID NO: 210720

SEQ ID NO: 272766 - DNA, 357 bp, Klebsiella pneumoniae; identical to SEQ ID NO: 139055

SEQ ID NO: 272767 - DNA, 1434 bp, Klebsiella pneumoniae
atgtttaagaatgcatttgctaacctgcagaaggtcggtaaatcgctgatgctgccggtatccgtactgcctatcgcaggtatcctgctgggcgtcggttccgctaacttcagctggctgccagccgtggtctcccacgttatggcagaagcaggcggttcagttttcgccaatatgccgctgatcttcgctatcggtgtggccctcggcttcaccaataacgacggtgtatccgcactggctgcagtcgtggcttacggcatcatggtgaaaaccatggcggttgttgcgccgctggtgctgcatttacctgctgacgagattgcggcaaaacaccttgctgataccggcgtgcttggcggtattatctccggtgctatcgccgcctacatgttcaaccgcttctatcgcatcaagctgccagaatatctcggcttctttgcgggcaagcgttttgtgccgattatctctggtctggccgctatcttcaccggcgtgatcctctccttcatttggccgccgatcggctccgcgatccaaaccttctcccagtgggctgcttatcagaacccagtggtggcgtttggtatctacggtttcatcgaacgttgcctggtgccgtttggtctgcatcacatctggaacgttcctttccagatgcagatcggcgaatacaccaacgcggctggtcaggtgttccacggcgatatcccgcgctacatggcaggcgacccgacggcgggcaaactgtctggcggcttcctgttcaaaatgtatggtctgccggcagcggctatcgctatttggcactctgctaaaccggaaaaccgcgccaaagtgggcggtatcatgatctccgccgcgctgacctcgttcctgaccggtatcaccgagccgatcgagttctcgttcatgttcgtggcgccgatcctgtacgttatccatgccattctggcgggcctggcgttcccgatctgtatcctgctgggtatgcgtgacggtacctcgttctctcacggtctgatcgactttatcgtgctgtccggtaacagcagcaagctgtggctgttcccgattgttggtatctgctatgcgatcgtgtactacgtcattttccgtgtgctgattaaagccctggatctgaaaacaccgggtcgtgaagacaccaccgaagagagcaaagctggcgccaccagcgagatggctccggctctggtcgccgctttcggcggtaaagagaacatcaccaacctcgacgcatgtattactcgtctgcgtgttagcgtggcggatgtagcgaaagttgaccaggctggcctgaaaaaactgggcgccgctggcgtggtagtggcaggttctggcgtacaggccatcttcggtaccaagtccgataacctgaaaactgaaatggatgagtacatccgtaacagttaa

SEQ ID NO: 272768 - DNA, 795 bp, Klebsiella pneumoniae
atgtttttagtcgactcccactgccatcttgatggtctggattatcaaactctacacaaaaacgtcgacgacgtgctggcaaaagcggccgcacgcgatgtgaaattttgcctcgccgtcgccacgacgctgcctggctaccgcagtatgcgcgaactggtggggacgcgtgacaacgtcgtcttctcctgtggcgtacacccattaaaccaggacgagccctgggaggtagagactctgcgcgcgctggcagcggaagagggcgtcgtggcgatgggggagaccggtctggattatttttataccccggaaactaaagcccaacagcaaagctcgttccgcgaccacattcgtatcggccgtgagctcaataagccggtgatcgtccatacccgtgacgcgcgtgccgatactctggctattttgcgcgaagaaaaggtgacggattgcggtggcgtactacactgtttcactgaggacagggagacagcgggcaagctgctcgatatggggttctatatctcgttttccggtatcgtcacttttcgtaacgccgagcagctgcgtgatgcggcgcgctacgtgccgctggatcgtctgctggttgaaaccgactcgccgtacctggcgccggtcccccaccgcggcaaagagaaccagccggcgctggtccgtgacgttgccgagtatatggcggtactgaagggggtgtcgcttgagcagctggctcagcagaccaccgacaattttgccaccctgttccacatcgaccccgcccgtttgcaacctgcttga

SEQ ID NO: 272769 - DNA, 1005 bp, Klebsiella pneumoniae
atgaaatggtatccgtggctgcgcccctcgttcgagcaactggtcggtagctatcaggccggacgaggccaccacgccttactgttacagtccctgaacgggatgggcggcgaggcgttgatttacgcgctgtgccgcttcctgatgtgccgccagcccgaaggacataaaagctgcggccactgccatagctgtcagctgatgcaggccggcacgcaccccgattactatgcgctcagccccgagaagggcaagagcgcgctgggtattgacgcggtgcgcgatgtcaatgaaaagctctatgaacatgcgcgccttggtggggcaaaagtggtctggattagcgatgctgccttgctgaccgatgccgccgccaacgcgttgctgaaaacgctggaggagcccccggagaatacctggttcttcctcgcctgcgaggagccggcgcgtctgctgaccactctgcgcagccgctgtcgcctgcatcatctggcgccgccgtctgagccttatgctctggcctggctggagcgtgaggtgagcctgccgcaggagtcattgttgaccgcgttacgcctgtgcgccagcgcgccggctgcggcgctcgaactgttacaggaaccgctgtggacggcgcggcagcagttgtgtcaggcgctggcggctaccctggcgagcggtgactggctggcgctgctgccgatactcaatcatgaacaggcggcggttcgcctgcactggctggcgtcgctgctggtcgatgcgcaaaaacgacagcaggggattaccctggtgagtaaccctgacgtctggccgctgctggagcagctggcgcacagcctgcccgccgcccggctgcaggcgattgcccatgacgtctgtacctgccgagagcaattgctcaacgttgtcggtgtcaaccgcgaactgctgcttaccgagcgcctgctgcgctgggaacattacctgcaacccgggacggttttacccgtctcccacctctga

SEQ ID NO: 272770 - DNA, 642 bp, Klebsiella pneumoniae; identical to SEQ ID NO: 139063

SEQ ID NO: 272771 - DNA, 1023 bp, Klebsiella pneumoniae
atgaagaaaatgttacgttttatcctgttgctggtcgtgctgttgggcatcgccgcggcggcaggcatgtggaaggtacgccagctggcggacagcaagctgctgattaaggaagagaccatctttaccctcgaagccggcaccggccggctggcgctgggccaggatctctatcgcgagaaggtgatcaatcgcccgcgcgttttccagtggctgctgcgggtggaacctgagctgtctcacttcaaggccgggacctatcgcttcacgccgcaaatgacggtgcgcgagatgttgcagctgctggccagcggcaaagaggcgcagtttccgctgcgctttgtcgaaggcatgcgcgtcagcgactacctgcgccagctgcgcgatgccccgtacgtgaagcacacgcttgaagacgatagctacgcgacggtggctaaggcattaggtcttgagcatgccgactgggtagagggctggttctggccggatacctggatgtacaccgccaacaccagcgatatcgccatcctcaagcgcgcgcatcagaaaatggtcgccgaagtggcgaaggtctgggaaggacggatggagaatctgccctatgccgagcagaaccagctgttgaccatggcctcgattattgaaaaagagaccgcggtagcggaagagcgcgaccgcgtcgcgtcggtatttatcaaccgcctgcgcatcggtatgcgcttgcagaccgatccgaccgtaatctacgggatgggcgcaggatatactggtaagttaacgcgtaaggatctcgagacgccgaccgcatacaatacttataccatcagcggtttgccgccgggccctatcgcggtgccgggcgaggcctcgctgaaggcggccgcccatccggcgaaaacgccatatctttatttcgtcgccgacgggaaagggggccatacgtttaccacaaacctggtcagtcataaccgtgcggtgcaggattatctgaaagtacttaaggaaaaaaatgcgcagtaa

SEQ ID NO: 272772 - DNA, 810 bp, Klebsiella pneumoniae
atgttcttgataaacggcgttgtacaggacacgttggcagcgaacgatcgcgccatccagtttggcgacggctgttttaccaccgcccgcatccagcaagggcaggttgcgctactggacgcccatctgcagcgtttacagacaacctgtgaaaaattacatatcccatttaacgactggctgacgctgagcgaagagatgcagcgtctggctcggccgcacgcgcagggcgtgctcaaggtgactctcacccgcggcgttgggggaaggggatacagtgcggcgggctgcgtgtcgcccactcgcattctcagcttctctccattcccggcgcattatgcgcgctggcgggaggagggcattactctgacccagagtccggtgcccctggggcgcaactcctggcttgccggcctgaagcaccttaatcgccttgagcaggtactgatccgctctcatcttgagcagacggacgccgatgaggcgctggtccttgacagtgacgggtggcttacggaatgctgtgccgcgaatttattctggcgtcagggacgtgatgtatttactccgcgactcgattatgccggggtcaacggcattatgcggcagcgctgtatcgcgcagctggcaccatcgacgtttcgcgttgtcgaagtgacagcgcgtcccgagacgttgcgggaggccgatgaagtgctgatctgcaatgcgctgatgccgctggtgccggttcgccgctgggaggagaccacctggtcctcgcgtgagctttaccattttttagcccctttgtgtgagctgtctggttag

SEQ ID NO: 272773 - DNA, 1242 bp, Klebsiella pneumoniae
gtgtctaagcgtcgtgtagttgtgaccggactgggcatgttgtctcctgtcggcaataccgtagagtctacctggaaagctctccttgccggtcagagtggcatcagcctgatcgaccatttcgatactagcgcctatgcaacgaaatttgctggcttagtaaaggattttaactgtgatgacattatctcgcgcaaagaacagcgcaagatggatgccttcattcaatatggaattgtcgctggcgttcaggccatgcaggattctggccttgaagtgacggaagagaatgcaacccgtattggcgccgctatcggctccggtatcggcggtctcggcttgatcgaagaaaaccacagttcgctggttaacggcggaccgcgcaagatcagcccattcttcgttccttccacaattgttaacatggtggccggacatctgaccatcatgtttggtctgcgtgggccaagtatctctatcgcgaccgcgtgtacttcaggtgtgcacaacatcggccaggccgcgcgcatcatcgcctatggcgatgccgatgcgatggtggcaggcggcgcggaaaaagccagtaccccgcttggcgtgggcggcttcggcgcggcgcgtgcgctctccacgcgcaatgacaacccgcaggcggcgagccgtccgtgggataaagatcgtgacggcttcgtgctgggcgacggcgcgggtatggtggtgctggaagagtacgagcatgccaaaaaacgcggcgccaaaatctacgccgagatcgttggcttcggcatgagcagcgatgcttaccacatgacgtcaccgccggaagatggcgcgggcgccgcgctggcaatggtgaatgctattcgcgatgcgggtatcgaaccgggccagatcggctacgtcaacgcccacggcacctcgacgccggccggcgataaagcggaagcgcaggcggttaagtctgtcttcggtgatgcggcgagccgcgtactggtgagctctaccaaatccatgaccgggcatctgctgggtgcggcaggggcggtagagtcgatttactctatcctggcgctgcgcgatcaggcggttccgccgacgatcaacctcgacaacccggatgaaggctgcgacctcgacttcgttccacacgaagcgcgtcaggtttccggtatggagtacaccctgtgcaactccttcggctttggcggcactaacggttcgctgatcttcaaaaaagtgtga

SEQ ID NO: 272774 - DNA, 237 bp, Klebsiella pneumoniae; identical to SEQ ID NO: 210711

SEQ ID NO: 272775 - DNA, 735 bp, Klebsiella pneumoniae; identical to SEQ ID NO: 243955

SEQ ID NO: 272776 - DNA, 930 bp, Klebsiella pneumoniae; identical to SEQ ID NO: 269974

SEQ ID NO: 272777 - DNA, 954 bp, Klebsiella pneumoniae; identical to SEQ ID NO: 210708

SEQ ID NO: 272778 - DNA, 1161 bp, Klebsiella pneumoniae
atgaagcttagtgaggactccccgggcaactggggaatcaccgaaccgggcagcgacgataccttgacacgtctaaccctggcgttagatgtcatggggggcgatttcggcccatccgtgacggtgcctgcagcactgcaggcactgaactctaattcgcaactcacacttcttttagtcggcgatcccgacgccatcacgccattactcgccaaagctgacttcgaacaacgttcgcgtctgcagattattcctgcgcagtcagttattgccagtgatgcgcgacccgcgcaggctatccgcagcagtcgcggaagctcaatgcgcgtggcgctggagcttgtgaaagaagggcgggcgcaagcctgcgtcagcgctggcaacaccggcgcgctgatgggtctggcgaaactgctgctcaaaccgatcgaaggtattgagcggccggcgctggtgacggttttaccgcaccagcagaagggcaaaaccgtggtgctggatctcggcgccaacgtcgattgcgacagcacgatgctggtgcagttcgcggtaatgggcgcggtgctggcggaagaagtggtcggcattgccaacccccgcgtcgctttgttgaacatcggcgaagaagagatgaaaggcctcggcagcatccgcgatgctgccgcagtgctcaaaacgctgccttccctcaactacatcggctatcttgaagccaatgaactgttgaccggaaaaaccgatgtgctggtttgtgatggattcacgggcaacgtcacattaaaaaccatggaaggtgttgtcagaatgttcctttcactgctgaaatctcagggagagggcaaaaaacggtcgtggtggctgctgttactaaaacgttggttacaaaaaagcctggcgaggcgattcagtcacctcaaccccgaccagtataatggcgcctgtctgttaggattgcgcggttccgtgatcaagagtcatggtgctgccaatcaacgcgcctttagcgtcgcgatagagcaggcagtgcaggcggtgcagcggcagatccctcagcggatcgccgcgcgcctggaatctttatacccagctggtttcgagctgccggaaagcgacagtgacgtgaacgcccgacagcaaagcgggacgaatggccacgattga

SEQ ID NO: 272779 - DNA, 174 bp, Klebsiella pneumoniae; identical to SEQ ID NO: 210706

SEQ ID NO: 272780 - DNA, 522 bp, Klebsiella pneumoniae; identical to SEQ ID NO: 210705

SEQ ID NO: 272781 - DNA, 585 bp, Klebsiella pneumoniae
atgtctgatcttatcctcgcgtcaacctctccctggcggcgcatgctgctggaaaaactgggtttaccgtttgaatgtgccgcgcctgacgtcgacgaaacgccccggcctgatgaatccgcacgtcagcttgtcacccgactggcgcaggccaaagcgcaaagtctggccacacgcttccctaatcaccttattataggctccgatcaggtttgcgtactggacggtgaaatcaccggcaaaccgcacaccgaggaaaatgcccgcaggcagttaagaaaggccagcgggtcaatcattaccttttataccggactggcgctgtacaactctgccagcggccatctgcaaaccgaatgcgaaccctttgacgttcactttcgccatctcagtgataaagagatagaaggctatgtgcgcaaagagaacccgctgcagtgcgccgggagtttcaagagcgaagggttgggcattacgctgttcgaacggctggaaggccgcgacccgaacaccctggtcggtttacccttaatcgcgctctgtcagatgttgcgccgtgaaaactacaacccgctgttaggctga

SEQ ID NO: 272782 - DNA, 996 bp, Klebsiella pneumoniae
atgagtggcgctaatgcgtccggctatttagaatcgcgcaccatgaaaactgagaccccaaccgtaaaaatggttgccattgctgctgatgaagcggggcaacgtatcgacaactttttgcgtacgcaattgaaaggcgtaccgaagagcatgatttatcgcatcctgcgtaaaggcgaggtgcgggtaaacaaaaagcgcgtgaagccggagtataagctggaagcgggcgatgaagtccgtatcccgccggtacgcgtggcggagcgtgaagaagaggcggtatcgccgcacctgcagaaagtggccgcgctctctgaggtgatcctctatgaagacgatcatattctggtgctcaataagccttctggtaccgcggtacacggcggcagcggcctgagcttcggcgtgattgaagggctgcgcgccctgcgcccggaggcgcgcttccttgagctggtgcatcgtctcgaccgggatacctccggcgtgctgctggtggcgaaaaagcgctcagcgctgcgttcgctgcacgagcaactgcgcgataaaggcatgcagaaagattatctggcgctggtgcgcggccagtggcagtcgcataccaaagtggtccaggccccgctgttgaagaatattctgcagagcggggagcgcatcgttcgcgtgagtcaggaaggcaagccgtcggagacgcgctttaaagtggaagagcgttacgaattcgccacgctggtgcgctgcagcccggtcaccggccgcacgcatcagatccgcgttcatacccagtatgccggccatcctatcgcttttgacgaccgctatggcgaccgcgagttcgacaagcagctgtccgctaccggcttaaaccgcctgttcctgcacgcggcggcgctgaagtttacccacccggggagcggggaggtgatgcgcgttgaggcgccgctggacaaccagctgaagcactgtttacaggtgctacggaagagcaaataa

SEQ ID NO: 272783 - DNA, 3234 bp, Klebsiella pneumoniae
atgaaaagaatgttaatcaacgcaactcagcaggaagagttgcgcgtcgcccttgttgatgggcagcgcctgtacgacctggatatcgaaagccccgggcacgaacagaaaaaagcgaacatctacaaaggcaaaatcacccgcattgaacccagccttgaagccgcgtttgttgattacggcgccgagcgtcatggtttcctccccctcaaagaaatcgcccgcgaatacttccccgccaactacaatgcgcatggtcgtcctaatatcaaagacgtactgcgggaaggtcaggaagttatcgtgcagattgataaagaagaacgcggcaacaaaggcgctgcgctcaccacctttatcagcctggcgggcagctatctggtactgatgccgaacaacccgcgcgccgggggaatttcccgccgtatcgagggcgacgaccgtaccgaactgaaagaagcgctggcgagcctggagcttccggacggcatgggcctgatcgttcgcaccgctggcgtcggcaaatccgccgaagccctgcagtgggacctgagcttccgcctgaagcactgggaagcgattcaaaaagccgcggaaagccgtccggcgccgttcttgatccaccaggaaagcaacgtcattgtccgcgccttccgtgactacctgcgccaggacatcggcgaaatcctgatcgataacccgaaagtgcttgagctggcgcgccagcatatcgccgcgctgggtcgtccggatttcagcagcaaaatcaaactgtacaccggtgaaatcccgttgttcagccattatcagatcgaatcgcaaattgagtccgccttccagcgcgaagtgcgcctgccttccggcgggtctatcgttatcgatagcaccgaagcgctgaccgcgatcgatatcaactccgcccgcgccacccgcggcggcgatatcgaagagacagccttcaataccaacctcgaagcggctgacgaaattgcccgccagctgcgtctgcgcgacctcggcggcctgatcgttatcgacttcatcgatatgaccccggttcgccaccagcgcgccgtggagaatcgtctgcgcgaagccgtccgtcaggaccgggcgcgcattcagatcagccatatttcgcgcttcggcttgctggagatgtcccgtcagcgcctgagcccgtcgctgggcgagtccagccaccacgtctgcccgcgctgctccggcaccggcaccgtgcgtgataacgaatcgctgtcgctctctattctgcgtctgatcgaagaagaagcgctgaaagagaataccaaagaagtccacgccattgttccggtaccgatcgcctcctatctgctgaacgaaaaacgtgccgcagtgagcgctatcgaatcccgtcagggcgatgtgcgcgttattatcgtgccaaacgacgaaatgcaaacgccgcactactccgtcctgcgcgtgcgcaaaggtgaagaaacctcaacgctgagctatctgctgccgaagctgcatgaagaagagatggcgctgccaggcgacgatgagccggcggagcggaaacgtccggaacagccggccctggccgcttttgtcatgccagatgcgccgccagccccgatgctcgaagagcctgccgccgcgcctgtcgccgcagcagcaccggtcgcggccgccgcaccggcgcagcctggcctgctctcacgcttcttcagcgcgctgaagaatatcttctctggcgccgaagaggccaaaccggctgaagttcaggtcgagaagaaagcggaagaaaaaccggagcgtcagcaggagcgtcgtaaaccgcgcgccaacaaccgccgcgaccgcaacgaccgccgtgataaccgcgacaatcgtgacaaccgcgataaccgtgacaatcgcgacacccgtgcggacaatgccgagggccgtgaaccgcgcgaatcgcgtgaagagaaccgtcgcaaccgtcgcgagaagccgtcgcagaacgtggaagcccgtgatgttcgccaaacctcaggcgacgacgcggagaaagcgaaatcccgtgacgagcagcagccgcgccgcgaacgcacccgccgccgcaatgacgacaaacgtcaggcgcagcaggaagccaaagcgcagactcgcgaagagccggttgtgcaggagacggagcaggaagagcgtgtacaaactctgccgcgtcgtaaaccgcgccagctggcacagaaagtgcgcgttgagtccgctgtcgtcgagccagttgccgagatcgtgccagaagccgtagtggctgaagttatcgctccgcacagcgagccggtgaaagccgagctgccggcaggggtggagagcgtggcggaccaggacgaaaatggcgaatcccgtgaagcgaacggtatgccgcgtcgctcacgtcgctccccgcgtcacctgcgcgtcagcggtcagcgtcgtcgtcgctatcgtgacgaacgctatccgacccagtcgcctatgccgctgaccgtagcctgcgcatcgccggagatggcttccggtaaagtctggatccgctacccggtggttcgtccgcaggatcagcagccggaagaggttcaggttcaggacgccagcgtcgcgaaaactgtcgaggccgtagcggccccggttgccgtcgttgaaaccgttaccgctgcgccggtcaccgtcgagccggctaccatggaaccagtaaccgctgagccggtagtcgtcgagccggtagcggccgccgagccgctggtcgttgatgctgcggaagttgtcgcgccagcagccgtcgagccagcgcctcaggagccggtcaccgaagcaccggctgtcgaagcgcctcaggctatcgcgccagtgacgctcgaccccgagccggtggtggtagaacctgaagcggtggaaacgacgcctgtcgttgcagcgccagtggaaaccatcgccccggtcgcagaaaccgtggagcaagcgccagtgaccgaagcggcccctgccgaaccggtcaaagccgagcccccggtgagcaagccggtcgtagtggcgggtcatcgccatgccaccgcgccaatgacccgtgcgccagctccggactatgtcccggaagcaccgcgtcacagcacctgggtgcgcccgccgttcgcctttgaaggtaaaggcgccgccggtggtcatagcgcgacccataaagccaccgctgaaccgactcgcccacagcccgtcgagtaa

SEQ ID NO: 272784 - DNA, 936 bp, Klebsiella pneumoniae; identical to SEQ ID NO: 210701

SEQ ID NO: 272785 - DNA, 1215 bp, Klebsiella pneumoniae
atgacaccgacttccctttccacccgcgacgcaggctggattatcttcattctcgcactcggcgccggctttagcgtcgcctctatttactacgcgcagccgctgctgccgttgattggcgccaatctccacctgactgtagaaggtatgggtctggtccctaccctgacgcaggcgggttatgcgctcggcattctgttcctgctcccgctcggcgaccgccacgatcgccgccggctgatcctggtgaaaagcgcgctgctggcgctcctgctgctcctgtgcagcctcaccggccagctcagctcactgctggtggtcagtctgctgatcggtatggcggcgaccatggcgcaggatatcgtcccggcggcggcgatcctcgccccggcgggcaagcagggaaaaatggtgggcacggtgatgaccgggctgctgctggggatcctgctctcccggacggtcagcggcgtggtgggcgccgtattcggctggcgggtgatgtatcaggcggcggcggtcagcgtcgcgctgattggcctggtaatgtggcgcgtcctgccgcgcttcgctgtgcactcgacgctgagctatccgcagctgatggcctcgatggcgcatctgtggcagcgttacccggcattacgccgcgccgcgctagctcagggcgcgctctctatcgcctttagcgccttctggtcgacgctggcggtgatgctctccgaacactatcacatgggcagcgcagtagcgggcggtttcggtatcgccggggccgccggggcgctggccgcgccgcttgccggcggtctggccgataaatttggcgccggtaaggtgacacagatgggtgcggcgctggtcaccctctcctttgccctgatgtttatgctgccgctgctgccagtacacgctcagttggcgctgattgccctgtcggcgattggctttgaccttggcctgcagtcaagcctggtggcgcatcagaacctggtatatggccttgagccacaggcccgcggccgcctcaacgccctgctgttcaccgtggtgtttatcgggatgtcgctggggtcggtgctgggcagtaagctgtacgtgctggccggctggaacggagtggtcacgctggcagtgatcactggcgcgctagccctggcgatccgtctgctggagaatgcccgcatcctcgctgccgaacgcagcgcatcataa

SEQ ID NO: 272786 - DNA, 1536 bp, Klebsiella pneumoniae
atgaaccttttaaaatcactggcggcagtcagttcgatgaccatgttttcgcgcgtgctgggctttgcccgcgatgcgattgtggcgcgtatttttggcgccgggatggcgaccgatgccttttttgtcgccttcaaactgcctaacctgctgcggcgtatttttgccgaaggcgccttctcacaggcgtttgtgccgatccttgccgaatataaaagcaagcagggcgaagatgccacccgcgtgtttgtctcatacgtctccgggctgctgaccctggccctggctatcgttaccgttatcgggatgctggcggcgccgtgggtaatcaccattactgcgcccggctttgccgataccgccgataagtttgcgctaaccacccagctgctgcgtattacctttccctatattttgctgatctccctggcttcgctggtgggggcgatcctcaatacctggaaccgcttctcggtgccggcctttgcgccgacgttcctcaacgtcagtatgattggttttgcgctgtttgccgcgccgtatttccatccgccggtgctggcgctggcctgggcggtgacggtcggcggcgtgctgcagctggcttaccagctgccgcatctgaagaagattggcatgctggtcctgccgcgaattaatctgaaagatgccggcgcgatgcgggtggtgaagcagatggggccggcgatccttggcgtgtcggtaagccagatctcccttatcatcaataccattttcgcctcattcctcgtgtcgggctcggtgtcgtggatgtattatgccgaccgcctgatggagtttccctccggcgtgctgggcgtggcgctcggcactatcctgttgccatcgctgtcaaaaagcttcgccagcggtaaccatgacgagtattgccggctgatggactggggactgcgtctctgttttctgctggcgctgccgagcgcggtggcgctggggatcctcgccaaaccgctaaccgtggctctgttccagtacggcaaattcagcgcctttgacgcggcgatgacccagcgcgcgctggtggcttattccgtagggctgatgggccttatcgtggtgaaagtgctggcgccgggcttctattcacgtcaggacatcaagaccccggtcaagattgctattatcaccctgattatgacccaggtaatgaacctggcgtttatcggcccgctgaagcatgcgggtctgtcgctgtccatcggcctggcggcctgcctgaacgccgcgctgctctactggcagctgcgtaaacagaaaattttcaccccgcagccaggctggttggccttcctgctgcgtctgattattgcagtgctggttatggccgcggcgctgctgggcgtcatgcatctcatgcctgagtggtcgctggggacgatgccgttccgtctgatgcgtttgctggcggtggttatcgccggggtggtagcctatttcgccacgctgctggtgctgggcttccgtgtgaaagagtttgtccgtcgcacggcgtaa

SEQ ID NO: 272787 - DNA, 924 bp, Klebsiella pneumoniae
gtggggacaagattgcgcattggggtggtcggcttaggcagcattgcgcagaaagcgtggctgccggtgctgggggcggcggaaagctggacgctgcaggcggcctggtcgccgggtaaagagaaggcgctacggatctgcgaaacctggcggatgccatacgctgattccctcgatgccctggcggcacagtgcgatgcggtctttgtccatacctcgacggcttcacattatgaagtagtgaatcacttactgaatgccggggttcatgtttgtgtggataaaccattggcggacaagctgagtgaggcggagacgctggtcgagctggcggcgcgacgtcgactgacgttgatggtcggtttcaatcgccgcttcgcgcctctctatcgggagctgaaggggcggctgggcgaggcggcctcgctgcggatggataaacaccgtagcgatagcgtcggcaacgatctgcgctttacgctgcttgatgactatctgcatgtggtggataccgcgctatggctggccgacggtcaggcgcgtctgcgcggcggcgcgctgaagatcaccccgcagggcgaaatgctctatgccgaacatcagttcagttcgccccggctgcaggtcaccaccagcatgcatcgtcgcgcaggcagccagcgcgagtgggtgcaggcggtcacggatggcgggctatatgccgtcagcgagatgcgcgaatggcaggaggagtgcggtcatggcgtggtccagcgcccggttgccggctggcaaaccacccttgagcagcgcggctttgtcggctgcgcgcgccattttatcgaatgcgtgcaaaatcagacagttcctgaaactgcaggcgaacaggcgctgctggctcagcggatcgttgagaaactgtggcgcgacgccattagcgaataa

SEQ ID NO: 272788 - DNA, 654 bp, Klebsiella pneumoniae
atgaaatatcagttaactgcgcatgaagcgcgcgtcattggctgcctgctggaaaagcaggtcaccacccccgagcagtatccgctgtcggtaaatgctgtggtgaccgcctgcaatcagaaaaccaaccgcgagccagtgatgtcgctgagcgaaagcgaggtccaggccctgctggatacgctggtgaaacggcactacctgcgcacggtcagcggattcggtaatcgcgtcaccaagtatgaacagcgcttttgcaactctgaatttggcgatctgaagcttagcgccggcgaggttgcggtggtcacgacgctgctgctgcgcggtgctcagacgccgggcgaactacgcagccgggcgcagcggatgtatgagttcagcgatatggcggaagtggaaagcgtgctggaagggctggcgacgcgcgaagatggccccttcgtcgcccggctgccccgggagccgggaaaacgggaaagccgctatatgcatctgttttgcgacgatatggacacgctgatcaccacagtggaagctctcgcgccgctggacgatgacggcgatctgcgcgccagggttgaagcgctggagggcgaggtggcggagctgaaagcgcgcctcgattcgctgttacaccatctgggagactaa

SEQ ID NO: 272789 - DNA, 624 bp, Klebsiella pneumoniae; identical to SEQ ID NO: 135911

SEQ ID NO: 272790 - DNA, 1209 bp, Klebsiella pneumoniae; identical to SEQ ID NO: 135912

SEQ ID NO: 272791 - DNA, 561 bp, Klebsiella pneumoniae
atgaaaaagatattgatcgccgccgcgctaattgtcagcggcctgctgagtggctgtaatcagctgacccaatacacggtaagcgagcaggagattaaccaggccctgcagaagcgaaaccatttcgccaaagatattggtctgaaaggcgttgccgacgcccatatcgaactgcagaacctgaccagcgctatcgggcgcgaggagccgggcaaagtcaccctgagcgggatcgccaacgtcgatcttaactccctgttcggcacgcagaaagcgacgatcgatctgaagctcaaagcgctgccaacctttgaccgagagaaaggcgccatcttcctgcaggaaatggaagtggtcgatgccaaagtggcgccggagaagctgcagtcggttattcaggccctgctcccctacctgaatcagtctctgcgcagctacttcagccagcagccggcttatgtcctgcgtgaggacgccagcaccggcgaagcgctggcgaagaaatacgccaaaggtatagaggtgaagccaggcgagattgtcatcccctttaccaattaa

SEQ ID NO: 272792 - DNA, 1047 bp, Klebsiella pneumoniae
atgacagcacaatcccaggtattgaaaatccgccgcccagacgactggcatatccatctgcgcgatgacgatatgctgaaaaccgtcgtgccttataccagtgagttttatggccgggcgatcgtgatgccgaatctggtgccgcctgtcaccaccgtcgcggcggctatcgcttaccgccagcgcattatggacgccgtgccggccgggcatgattttaccccgctgatgacctgctatctgacagactctctcgacccagcggagctggaacgcggctttaacgaaggggtgttcaccgccgccaagctctacccggccaatgccactactaactccagccacggcgtcaccagcaccgacgccattatgccagtgctggagcggatggaaaaactggggatgccgttgctcgttcacggcgaagtcactcacgccgagattgatattttcgatcgtgaagcgcgctttattgagacggtgatggagcccctgcgccagcgcctgcccggcctgaaagtggtttttgaacatatcaccaccaaagacgccgccgagtacgtgcgtgacggtaatgaactgctggctgctaccatcaccccgcagcatctgatgttcaaccgcaaccatatgctggtgggcggcattcgccctcacctgtactgtctgccggtacttaaacgcaatattcatcagcaggctctgcgggagctggtcgccagcggcttcagccgcgccttcctcggcaccgactccgcgccgcacgcccgccaccgtaaggaagccagctgtggctgcgccggctgctttaacgccccgaccgccctcggcagctacgccacggtgtttgaagaaatgaacgctctgcagcactttgaggctttctgctcgctgaacggcccgcgcttctacggtctgccggtcaatgagagctacgttgaactggtgcgtgaagagacgaccgttgtggacagcatttccctgcctaatgacaccctggtgcccttcctggcgggtgaaaccgttcgctggaccgtgaagaaataa

SEQ ID NO: 272793 - DNA, 252 bp, Klebsiella pneumoniae; identical to SEQ ID NO: 135915

SEQ ID NO: 272794 - DNA, 255 bp, Klebsiella pneumoniae; identical to SEQ ID NO: 135916

SEQ ID NO: 272795 - DNA, 1119 bp, Klebsiella pneumoniae
atgcaatacgatcttatcattattggcagcggctccgtcggcgccgccgctggctattatgcgcaccgtgccggactcaatgttctgatgaccgatgcccatcaacctccccaccaggaaggcagccatcacggcagcagccgtcttatccgtcacgcctatggcgaaggtgagaaatatgttccgctggtgctgcgtgcccagcagctatgggatgaactggcagagatcagtggcgaagccgtgtttgaacgcaccggcgtcattaacctcggccccgccagctccgcttttctcgccaacgtcgccgccagcgcccgtgcgttccagcttgaggtggaagagctggatgcccaggccgtgatgcagcgctggccggagatacgcctccccgatgactatcgggcgattttcgaacccggttccggcgtactgcgcagcgaactggccgtcgaaacctggatccgtctggcgcgggaagcaggctgcgcgcagctattcaactgtccggtctcggctattcatcaccatgctgacgggatcaccatcgataccctcgacggtgaatatcatggtaaaaagctgctggtcagcgccggcacttgggtcacccgcctgcttccggacctccctatccagccggtacgcaaggtgttcgcctggtaccaggccgatggccgttacagcagcaagaatcacttcccggccttcaccggcgagttgcccaacggcgatcaatattacggtttcccggcggaagataatgaactgaagattggcaagcataacggcggccagccgatctccaccccgcaggaacgggtagcgtttggcgctgtcgccagcgatggttccgaatccttcccgtttttgcgtaacgtcctgcctggcatcggcggctgcctgcacggcgcctcctgtacctacgacaataccgtcgatgaggactttattatcgatacgttgccaggcaggccagacacgctgctgatcaccgggctgagcggccacggctttaagtttgcgccggtgctgggcgaaattgccagtcagtttgctcagggcgaagcatcgagcttcaatctggcccccttttctctggcgcgctttaacgcgtaa

SEQ ID NO: 272796 - DNA, 1065 bp, Klebsiella pneumoniae
atgccagtgttacacaaccgcatttcaaatgagacgttaaaggcgcaaatgctggctgaaaccgagccgcgcacgacgatctcattctataaatatttcaccattgtcgacccgcaggcgacccgtgatgcgctgtgggttgccttaacccagctgaaggtctttggccgcatctatctggcccgggaagggatcaacgcgcaaatcagcgtgccgcaaagcaacgttgaggctctgcgtgagtttctctatggcttcgatccggcgctggcggggctgcgtttcaatatcgccgtggaggacgatggtaagtctttctgggtgctgcgcctgaaagttcgcgatcgtatcgtcgccgacggcatcgacgatccctctttcgatgcctccaacgtgggggagtatctcaaggcggcggaagtcaacgtgatgcttgacgatccggatgccgtgtttatcgatatgcgcaaccactatgaatatgaggtgggccatttcgaaaacgcgctggagatcccggcggataccttccgcgaccagctgccgaaagccgtggaaatgatgcaggaccataaagacaagaaaattgtcatgtattgcaccggcggcattcgctgtgaaaaagccagcgcctggatgaagcataacggcttcaataaggtctggcacatcgagggtggcatcatcgagtacgcccgtcgcgcccgcgagcaggggctgccggtgcgtttcattggcaaaaactttgtctttgatgagcggatgggcgagcggatctccaatgacgttatcgcgcactgtcatcagtgcggcgcgccgtgcgacacccatactaactgcctgaacgatggctgccatctgctgtttatccagtgcccgagctgcgccgagaagtttgccggctgctgtagcgaagcctgcatggaagagcataagctaccggaagaggagcagcgtaagctgcgcgccgggcgtgaaaacggcaacaaaatctttaataaatcccgtggccggctgaataccaaactcgggatcctcgacccggagccgtcagaaaaaccataa

SEQ ID NO: 272797 - DNA, 921 bp, Klebsiella pneumoniae
atgactcatttgcctaaattttctccggcgctgttgcatccgcgctattggctgctgtggctgggtatcggcctgctgtggctggttgtccaactgccctacccgctgatctaccgcctcgggaacgccatcggccgtctggccatgcgctttatgaagcgccgggcgaaaatcgcctatcgcaaccttgagctctgcttccccgagaaaagcgagcaggaacgccaccgaatggtggtgatgaactttgaatcggtgggcatggggctgatggagaccggtatggcctggttctggccggttcgccgtatcgcccgctggaccgacaccatcggctttgagcatattcgcgatgtgcaggcgcagcagcgcggcattctgctgatcggtattcatttcctcactctcgagatgggtgcgcggatgttcggtatgaacgagccggggattggcgtctatcgccccaacgacaacccggtgatcgactggctgcagacctggggccgcttgcgctccaacaaggatatgattgaccgtaaggatctgaaaggcatgatccgggcactgaaaaaaggcgaagtggtgtggtacgcaccggatcacgattacggcccgaccgccagcgtcttcgccccactgtttgcggtcgaccaggcggcgaccacctccggcacctggatgctggcgaaaatgtccaaagcctgcatcgtgcccttcgtcccgcgccgcaaaccggacggtaaaggttatgaactgattatcctgccgccagagtgttccccgccgctggacgacgcggaaaccaccgccgcgtggatgaacaagatcgttgagcagtgcatcatgatggccccggaacagtatatgtggctccatcgtcgcttcaaaacccgccccgaaggcatgccctcccgctactga

SEQ ID NO: 272798 - DNA, 1227 bp, Klebsiella pneumoniae
atgtcgtctgctgaaacccccattaactggaaacgaaacctgaccgtgacctggcttggctgctttttaaccggcgccgccttcagcctggtcatgccctttctgccactctacgtcgaacagctcggcgtcaccgggcatagcgccctgaacatgtggtccgggctggtctttagtattacctttcttttctctgccatcgcctcgccgttctggggggggcttgctgatcgcaaggggagaaaaatcatgctgctgcgttccgccctcgggatggccatcgtgatgatgctgatgggaatggcgcagaatatctggcagtttctgctgctgcgcgcactgctcggcctgctgggcggctttattcccaacgccaacgccctgattgccacccagatcccgcgccataaaagcggctgggcgctggggacactgtctaccggcgcggtaagcggcgccctgctcggcccgctggcaggtggcttcctggccgaccactggggattgcgcaccgtcttctttatgaccgcggcggtactatttatctgtttcttgtttaccctgtttttaatccgcgaaaattttgtgccgatcgccaggaaagagatgctcagtgccagagaggtgttctcttcgctgcagaatcccaaactggtgctcagcctgtttgtgacctcgctgataatccaggtggccaccggttccattgcgccgatcctgacgctttatgtacgcgatctcgcgggcaacgtcagtaacatcgcctttatcagcggaatgatcgcctcggtgccgggcattgccgcgctgatgagcgccccgcggctgggcaaactgggggatcgcatcgggccggaaaaaatcctcatcgtcgcgctgattatctcggtgctactcctgatcccgatgtcgttcgttcagaccccgctgcagttaggtatcctgcgattcctgctcggcgccgcggacggcgcgctgctgccggcggtacaaaccctgctggtgtacaactcgaccagccagatctccgggcgaatcttcagctataaccagtcgttccgcgatattggcaacgttaccggccccctgattggcgcgtcggtttccgctaactatggcttccgcgctgtatttctggtcaccgcaggggtggtattgtttaatgcgatctactccaccctcagcctgcgtcggccagccgcggatacttcgcattcagtaaattaa

SEQ ID NO: 272799 - DNA, 387 bp, Klebsiella pneumoniae; identical to SEQ ID NO: 135922

SEQ ID NO: 272800 - DNA, 228 bp, Klebsiella pneumoniae; identical to SEQ ID NO: 269951

SEQ ID NO: 272801 - DNA, 2529 bp, Klebsiella pneumoniae
atgaataagataacaaagtacattgacgcattgccgctgtcggacgccgagaaatcggcgctgccggacaccagcctgcaggccgttcatcaggccctggatgacgaccatcagaccttcgcccgcgaagacgactccccgctggggtcggtcaaggcacggctggcgcatagctggccggattcgctgtctggcgatcagctggtgaaggacgatgaaggccgtactcagctgcatgcgatgcctaaagccaagcgctcctcaatgatcccggacccgtggcgtaccaacccggtcggccgcttctgggaccgtctgcgcggacgcgatgtcacgccgcgctatctctcccgtctgacgcaagaagagcgcgagagtgagcaaaaatggcgtaccgtcggcaccattcgtcgctatatcctgctgctgctgacgctgtcgcagaccgtggtagccacctggtatatgaaaaccattctgccttatcagggctgggcgctgatcaacccggccgacatggtggggcagaacctgtggatctcgttcatgcagctgctgccgtacgtgttgcagagcggcattctgatcctcttcgcggtgctgttctgctgggtttccgccggcttctggaccgcgttaatgggcttcctgcagctattgatcggccgcgataagtacagtatttccgcctcgacggtcggtgacgaaccgttgaacccggcgcaccgtacggcgctgataatgccgatctgtaacgaagacgttgaccgcgttttcgccggcctgcgggcgacctgggagtcggtgaaagcgaccggtaacgccgctcatttcgacgtctatatcctcagcgatagctataaccccgatatctgtgtggctgagcaaaaggcgtggatggagctgattgccgaagtgcagggcgaagggcagatcttctaccgccgccgtcgtcgtcgagtgaagcgtaaaagcggcaacatcgatgacttctgccgccgctggggcagccagtatagctatatggtggtgctggacgctgactcggtgatgaccggtgagtgtctgagcagcctggtgcgcctgatggaagcgaacccgaatgccgggatcattcagtcttccccgcgcgcctcgggcatggatacgctgtatgcgcgttgccagcagtttgccacccgggtgtacggtccgctgtttacggcgggtctgcacttctggcagttgggggagtcccactactggggccacaacgccattatccgcgtgaagccgttcattgagcactgcgcgctggcgccgctgccgggcgagggcaactttgccgggtcgatcctgtcgcacgacttcgtcgaagccgcgctgatgcgccgtgccggctggggggtgtggattgcctacgatctgccgggctcctatgaggagctgccgccgaacctgctggacgagctgaaacgcgaccgtcgctggtgtcagggcaacctgatgaacttccgcctgttccttgtcagagggatgcacccggttcaccgggcggtgttccttaccggcgtgatgtcctacctgtcggcgccgctgtggtttatgttccttgccctgtcgacggcgttgcaggtggtgcatgccctgaccgaaccgcagtacttcctgcagccgcgtcagctgttcccggtgtggccgcagtggcggcctgagctggccatcgcgctgttcgcctcgaccatggtgctgctgttcctgccgaagctgctgagtattattcttgtgtggtgtaaagggcccaaagagtacggcggatttatccgcgtcacgctttcactgctgctggaggtcctgttctcggtcctgctggcgccggtccgtatgctgttccacacggtcttcgtggtcagcgccttcctcggctgggaggtggtatggaattcgccgcagcgtgatgatgactccacgccgtggggggaagcctttatgcgccacggctcgcagctgctgctggggctggtgtgggcggtcgggatggcatggctggatctacgcttcctgttctggctggcgccgattgttgtctcgctgatcctctcgccgttcgtatcggcgatttccagccgggcgacagtgggcctgcgcaccaagcgctggaagctgttcctgatcccggaagagtattcgccgccgcaggtgctcaaggataccgatgcgtacctgacgatgaaccgtcagcgttcgctggacgatggctttatgcacgcggtgtttaatccgtcgtttaacgccctcgccaccgcaatggccactgcgcgccaccgtcagggtcatatcctggagatcgcccgcgagcgccatgtcgagcaggcgctgaatgaaacgccggataagctgaaccgcgatcgccgactggtgctgttgagcgacccggtaaccatgtcgcgtctgcactatcgcgtatgggccgcgccggagaaatactcttcatgggtgaacgcctatcagcagttggcgcttaacccgctggcgctgaaaacgaaataa

SEQ ID NO: 272802 - DNA, 1161 bp, Klebsiella pneumoniae; identical to SEQ ID NO: 135926

SEQ ID NO: 272803 - DNA, 594 bp, Klebsiella pneumoniae; identical to SEQ ID NO: 135927

SEQ ID NO: 272804 - DNA, 528 bp, Klebsiella pneumoniae
atggctgttaaacctgaggtaattctcggcgatattacgacacttgatgtcgatgtgattgttaatgcggcaaatccctcgctgctgggtggtggcggagtagacggggccatccaccgggcggctggtcccgcgctgctggcggcttgcaagcaggtgctgcagcagcagggcgaatgccctcccgggcatgcggtaattactattgccggcaatctgccggccagcgcggtgatccacaccgtgggcccggtctggcacggcggcgaccgcatggaggcgcaaaccctggccgatgcttacaaaaacagtctgcagttggcctcggcaaacaactatcgctccattgcgtttccggcgataagcaccggcgtgtatggctatccgagagaggaagcggcggcgatcgccgtgcgcaccgtcaccgcgtttctcactcgctataatcctcttgagcgcgtcctgttcgtctgttttgacgaggaaacggcgtctatttatcgccgcctgctggcgtcatacccctga

SEQ ID NO: 272805 - DNA, 483 bp, Klebsiella pneumoniae
atgaacatactcttcgcaatcgcattaacgacaggcatcctctccgggatttgggggtgggtggcggtcgctctcggcctgctgagctgggccggattcctcggctgtacggcctatttcgcctgcccgcagggcggcttgaaagggctggccatctcgtcctgcacggtgatgagcggcgtggcctgggcgttagtgattatccacggtagcgcgctggcgccacaggtgcagatcctcagctatatgatgaccggtgtggtcgccttcctgatgtgcattcaggcgcgacggacgctgctgtcgtttgtcccgggcacctttatcggcgcctgcgcgaccttcgcggcagacggcgactggcgtctggtgatcccttccctggcgctgggtctggtctttggctatgccatgaaaaatagtggcctgtggctggcggcccgtgcggataagcataaatcgttcgccaacgacaacgcctga

SEQ ID NO: 272806 - DNA, 555 bp, Klebsiella pneumoniae
atgaacgagttttcaatcctctgccgcgtgctgggttcgctgtattaccgtcaaccgcaggacccgctgctggtgccgctgtttaccctgatccgcgagggcaaactggccgccagctggccgcttgagcaggacgagctgctggcgcgtctgcagaaaagctgtgaaatgcagtccctggcgacggactataatgcgctgttcgtcggtgaagcctgcagcgtcccgccgtaccgtagcgcgtgggtggagggttcctcggaagcggaagttagggcttttctgagcgaacacggcatcccgacaggggaaagtccggcggatcatctcggctcgctgctgctggccgcctcctggctggaggatcatgccgcagaagaccagagcgagacgctggagctcctgttcgccgactatatcctgccgtggtgcgggacgatgctggggaaagtcgaagcccatgcgcacacgccgttctggcgcaccatggcgccgttgacccgcgacgccatcgccgcgatgtgggacgagcttcaggaagaagatgagcaataa

SEQ ID NO: 272807 - DNA, 738 bp, Klebsiella pneumoniae
atgtatcccgttgacctgcacatgcataccgtcgccagcacccatgcctacagcaccctgcacgattatattgcggaagcaaagcgtaaagggatcaaactcttcgccatcaccgaccacggcccggacatggcggatgctccgcactactggcacttcgttaatatgcgcatctggccccgcctggtagacggggtggggatcctgcgcggtattgagtcgaatattaaaaatattgaaggcgagatcgactgttccggaccgatgttgacttctctcgatctgatcatcgctggatttcatgagccggtgtttccgccgcaggatcgtgacacccatacacaggcgatgatagccgcgatggccagcggtaaagtgcatatgattagccatccgggtaatccgaaattcccggtggatatcccggcgattgccgaagcggcggctcgctaccaggtggcgctggagattaataactcctcattcgtatcatcgcgcgtgggcagtgaagacaactgccgggccatcgccgccgcagtgcgtgatgccgggggatgggtggcgctgggctcggactctcacaccgcctttaccctcggggagtttaccgaatgccgcaagatccttgatgcggtcgatttcccggaggacaggatcctcaacgtttctccgcgtcgcctgcttaacttcctcgagtcgcggggcatgccggcgatcccggaatttgctgacctttaa

SEQ ID NO: 272808 - DNA, 804 bp, Klebsiella pneumoniae; identical to SEQ ID NO: 225050

SEQ ID NO: 272809 - DNA, 1464 bp, Klebsiella pneumoniae; identical to SEQ ID NO: 225049

SEQ ID NO: 272810 - DNA, 558 bp, Klebsiella pneumoniae; identical to SEQ ID NO: 225048

SEQ ID NO: 272811 - DNA, 306 bp, Klebsiella pneumoniae; identical to SEQ ID NO: 225047

SEQ ID NO: 272812 - DNA, 1152 bp, Klebsiella pneumoniae; identical to SEQ ID NO: 225046

SEQ ID NO: 272813 - DNA, 903 bp, Klebsiella pneumoniae
atgaaacgccctatttacttgttaaaaaatgatatcgacttttcattagactcaaagataacgttgataagtctcgtttcccctgacacatcgtcaatattaggcgtaatcaatatttcaggaactgactctgagcaaataataaaaagattatctttagatatagataattacgcagatgtagaatataatgaagattacttaactgttaaaatagaagcaaaacaatttctagatgaagtttgtaattcattcaaacaggcacaatatggattggattacaatatgagaataaacctcattttaacgtctaaaattaaagagttaagtggtgtattcccacattacattgaaatagagttcactcgtgtaaaaagaaagaacgttcctaaagtaaacctgtcatccgttttgagaaacgtatattttgacgaaagatcagaaataatttccaatgtattatgtatggagaaaatcattgttgatataatcactgagcgttttcaagataataagatagaaataaaaacaaaaaaaggtgttgagaaaaaatatatcaataaatcaacactataccaaaaaatttgttttttgcatgatcaagacattattgatagtgcattatataatcttcttgacactttaagaaaaatgagaaatcatgccgcacatgatttaagtctaactgaatccgtatataatgactcgatattaaagttaacatctaagtttattgataaagtagaaataagatataatctcaatgcaggaaaggtagctagatttagtaattgctttatgtacgtttttgatgaaattagttcactttgtttatcttctgataatttctctttgggaagagaaaactgtgacgaatggaacagtttcttttacggtgtataa

SEQ ID NO: 272814 - DNA, 657 bp, Klebsiella pneumoniae; identical to SEQ ID NO: 225044

SEQ ID NO: 272815 - DNA, 264 bp, Klebsiella pneumoniae; identical to SEQ ID NO: 225043

SEQ ID NO: 272816 - DNA, 447 bp, Klebsiella pneumoniae; identical to SEQ ID NO: 264383

SEQ ID NO: 272817 - DNA, 1011 bp, Klebsiella pneumoniae
atggacagcaaccgtgacgggaaagtgacggcagaggaaatcaggcaggcgctggcagtgcgggatccgctggtgaagaatgtggtcaaccggctggtggtaaaacatcacagcgagtggtgtgatggccgttcgacaggccgctgggaagggttttataaggatctggactcgctggaagtgaagtactgtgagaagtggcaggcggatctggagtggatgagtaaggtaccgccgtttgataaggatgaggcggtgtggcattttcatccggtggtttttttgaatgaattattatcttcaaaacttattacactggaaatggttcttgctgcaaatctaaatgaaaataaaattcaatgtgaaagggttctaccttatctcaataaatatgcaagagcctataagatggaagataaaaaagaaattgcacacttcctgtctcaaattgggcatgaaagtggttttagtataacagaggaaaatctaaattatagtgctaaagggatgcgaaggatttttgggtgcattaaaggtccagcccaatataataaaaatactgatgattgcaacttgggacgtttaagagacaaactctggactcaggaatctttgtatgcgcatagcccaaaaaatttggctaattatgtttatgccagtcgaatgggtaacgatggagaatcttctggggatggttataaatacagggggcgagggatgattcagttgactggtaaagatggctacagattttttactaataaacataatgaaatgaatccggatgataagagagactttgtcgaacaacctgatctagtgataagtgatactgaatatggtgtagagtcagcgttttccttttgggtaagtaaaggactaaacaaaactgccagagcattgagtgtgcaagaagtcacgcaaatagttaatggtgggcagaatggttaccctgatcgcttacagaggtttaatgcagtggccccattattaagagtcgataaggagtga

SEQ ID NO: 272818 - DNA, 243 bp, Klebsiella pneumoniae
atggcgttgtacggcttgccgcaagctgttgtgtttgagctggagcgcggcggcgcttttgcgggcggcatccattgcctgcgcttgtgcgcgcgtcggctgttcagtatttctaaactggatcgccagcgcggcagcttcctgcttcgctttcttcagctcctgaccggtaacggcgagttgcgcgcttgccttgcgaaacccgtcaatacgggaggcctggccgttcagttcacgcagtga

SEQ ID NO: 272819 - DNA, 243 bp, Klebsiella pneumoniae; identical to SEQ ID NO: 272818

SEQ ID NO: 272820 - DNA, 276 bp, Klebsiella pneumoniae
atgagcaaagaaaacatcgtcaccctggaaaaccccatcaaacgcggcgagcaggtcatcgaaaaaatcaccctgatgaaacccaacgccggaaccctgcgcggtgtcagcctggccgacgttgcgcgctctgaagtggatgccctgattaaagtgctgccgcgtatgaccagcccgtctcttaccgagtcggatgtcgtcatgatggatttacccgatttgatggcgctggcaacaaaggtgatcggttttttgtcgccgaatttggcggattaa

SEQ ID NO: 272821 - DNA, 516 bp, Klebsiella pneumoniae
atggcaatgccacgcaagctcaaatacctgaacacgtttctggatggcgtcagctatctcggcgttatcgagtccgtcaccctgccaaagctgacccgtaagctggaaaactaccggggcggcgggatgtcaggctcggcccctgtcgatttcggcctcgacgatgacgcgctggcgatggagatttccctcggcggcttccctgatgatgcgatctggtcgctatacggtgccgtcggtaccgggacgctactgcgctatgcaggctcttaccagcgggacgataccggcgaaaccgtggcggtggaagttgagacccgtttcaaggtgaaggaagtcgataacggcgagagcaaacagggcgaggataccagcagcaagttatcgctggtctgcacgtactacaagctgaccatgaacggtaaagagctggtagaaatcgacgtcctcaacatgattgagaaggtgaacggtgtcgaccgactcgatcagcatcgccgcaatatcggcctgtaa

SEQ ID NO: 272822 - DNA, 1182 bp, Klebsiella pneumoniae
atgagcgattttcatcacggcgtccaggttgtcgagattaacgacggcacccgcgtcatttccaccgtatcaacagcgattatcggcatggtctgtacggccagcgatgccgatgccgccaccttcccactcaataagcccgtactgattaccagcgtgcaaagcgccattgcgaaagcgggtacaaaaggcaccctggccgcatccctccaggcaatcgccgaccagtcgaaaccggtcattgtcgttgtgcgcgttgccgaaggtaccggcgatgatgccgaagcgcagactatttccaacatcatcggcggcaccgacgaaagcggcaattacaccgggctgaaagcgctgctcacggcggaggccgtcaccggcgttaaaccgcgcatcctcggcgtgccgggtctcgattccctcgaggtggcgaccgcgctcgcgccgatttgccagaagctgcgcgcctttggctatgtcagcgcctgggattgccagaacatttccgaggcgatgctctatcgcgagaatttcagccagcgtgagctgatggttatctggcccgattttctggcatgggataccacggcgaacgcgactgaaaccgcctgggcgactgcccgcgcgctgggcctgcgcgccaaaatcgaccaggacaccggctggcataaaaccctgtcaaacgttggcgtgaatggcgtcaccggcatcagcgcgtcggtcttctgggatttgcaggaatccggcaccgatgccgacctgcttaacgaggctggcgtcaccacgctgattcgcaaagacgggtttcgattttggggtaaccgctgctgttcagatgacccccagttcctgtttgagaactacacccgcaccgcgcaggttatcgccgacacaatggccgctggtcatatgtgggctgtcgacaaacccatcaccgccaccctgattcgggacatcgttgcgggtatcaatgcgaaattccgcgagatgaaaacggcgggctacatcgtcgatgcgacctgctggtttgatgaatcggccaacgacgcggcgaccctcaaagccgggaaactgtatatcgattatgactatacgccggttccccctctcgaaaacctgacgctacgccagcgcattaccgataaatacctggcgaatctggtgtcatcggttaacagcaattaa

SEQ ID NO: 272823 - DNA, 153 bp, Klebsiella pneumoniae
atgactgatatcaccgaactgacaacagaacaggcgctggcacgcatcgtcgacttgaacgactttgcgcggatgatttcctgcgacagcaccccatctcaggggcagtttgtcgtaaccggtccgaatcgcacgtcctcatacggaatataa

SEQ ID NO: 272824 - DNA, 159 bp, Klebsiella pneumoniae
atgaaagaccatgaaattcgaacactggtgaacaagttgcatgagattgctatccagtttcacggctcccagcagttaagagagcagatagcccatacagttagctccgtaactaccagactggagagcgagctagggactaacgaaccaatgttctag

SEQ ID NO: 272825 - DNA, 216 bp, Klebsiella pneumoniae
atgaatgatgccaccatagtcaaagaatatcgaaaagcaaagttacgtgctgctactagtgcaattgagatagccatcattgcaatggaagatttgattaacgactacgatcgcgaaaatacccattttagcggggggcatcccagacagggccatgcaagtacgttgcggcagatgcagcaaattaataaggcattgaagcgggggcgagtatga

SEQ ID NO: 272826 - DNA, 645 bp, Klebsiella pneumoniae
atgacaacagaaaccttaagcagagagtggttacagcatcaaatttcagcgattgaaggcgctggcatcactgacagcaacacattggcagctttcaagctggcgctggccgcgatgagtagcaagccggtagtgccggatgaggtcgagcgtgttgccgctgtattagagcttatcggtagctttgaggctaatgatattgatagcgacacagtagatttacgttttgaggtcgctgatgtcgacgcaggttctgacgtatccattacggaatatgccgcacgcggtgccgcgatgatccgcatgctggcgggcaatgcacctgtaaacccagacggttgcattctagaagcgctggagaacatacaaaacgaaaataaagtttcacgtgaccagttagtcattctccagctaacgctattaaagcagcagagaaagattgcagagttggagtcccgcaccgtgaagctgccgaaacctaaagattctgacccaggctggaaaatagatccggaatttatcagcaaagttcagaacgagatagggtacgatgaccaatgcgaatgttgggaaggtaccccttccatggaggtagtagaggccgttttgctggccgccgctggtgtcaagatggaggctgaatag

SEQ ID NO: 272827 - DNA, 336 bp, Klebsiella pneumoniae
atgaaagaatttccacttagggatatccttgttgtcgggattcctgttctgttttttttggctttgctgtacacgcttaaaagtcactttccggacgtagtgaatgttattggaacattattcgtttttatttttgcaccagcactggttgctctgttgaccatgaaccggggcattttcgtctactttgccggagtgctcgttacacaggtgcttaccgcttctctggtttatcttgtttcttcccgggacattagtgaatcagtgggccttggagcgtgcgcaatcgtgatttacgtaattgctctgtcgaaaattaaagatatcaactcatag

SEQ ID NO: 272828 - DNA, 165 bp, Klebsiella pneumoniae
atgcatatctatgtcttttacgctgtaagggacttttacagtatatttattattttcacaatcgttcagaaaaacggcggcggccatattcaagaactgtgtatttatacagtcatgatatgtaatgacattttattgtttacatcccgaaaaaacattccttag

SEQ ID NO: 272829 - DNA, 957 bp, Klebsiella pneumoniae
atgaacaccaatgtacatcatgtccaagaaaatttttttatatcattgcaggattgtataaataaagaagagaaaacaaaaaaaacatgcattgagtactggcgacgtgaagctgagagggcgaaggaagaaagcgcaagacgtagagcactgtctataaagataattaccgaaaaaagcatgattcttgaaacgttatttctaaatatacaaaaaacaaatgcgctcaaagaacagtatgaaagaaaccttatagctaaatggggtggcgttattgatgaagataaaacaatgcttcatgatatatttctccctagtttggaacatttatctgcttatgtatcatgtgcattgaaagatgaatatagtaggaagatgctttataatagacctgaattatctaggggcatcaagtatgacaatagttatttttgcccgaagcaaaaaaaaaccatatatatgattaatgacaaattccgtccggatctaaaacttctgacaaatcctccttaccctgatttttgtaagaatcttctttatttttatgttaggtcattttcgttgcatctcgaaaaaggtgaaccggggaaaccattagaaataggttttcgtcattcagtgagcaaaaacaattatgaagacatgagcataggtcttgaaattcttatgccatacatgtgcaaaaatgaaaacggcaaagttattattcatgataaaggatacttatcatgctatagctattatagaagcatactggtaaacccgaaaacaggggaggttgagctaattatatacagaaatgggcgctttgaccatcgacagaagccgaatacaaaggaacctcgtaagtggttgaatgaagatagaataataaagaaattccccagcatacgaattgttttgctgtatatcatatcgtgtcggtatcggcagcacttcaaaaacagggatatatag

SEQ ID NO: 272830 - DNA, 1140 bp, Klebsiella pneumoniae
atggttccgaaactacgctttaaaaattataatagaattgaagaaaaaaaaataattaactttgcgccattacagcgtggctatgatctccctgtaagtcaaattgaggatggagattaccctgttgttttttcgaatgggatattaaaaaaacatagtaaatataaagttaagggaccaggaattgttactggccgttctggtacaattggaaaggttacctatgtccaaggaaatttctggcctcataacacatccctttttgtaacagatttttttgataatataccaaagtacgtttattactattatcagcatattgatttctcaaagttttctactggctcgggagttcctactctcaatcgaaatgatctacactctttaactgtattagttcccgcaatagaagaacaaactaaaattgctgattttcttttctctgttgacgaaaaaatcacactgctgaacaagcagtatgatctgctatgccagtataaaaaaggaatgatgcagaaaatttttagtcagaagttgcgattcaaagatgataatggaaaaccatttcataaatggagtactctccagctaaaagatgttgcaatacgtgtaaccagaaaaaataaagaaaataacaatacaatattgaccatttcaggaagagatggtttggtcgatcaaatgacttattttaataagcaaatcgcatctaaaaatgtgacaggttattatttaatcagaaagggggagtttgcatacaacaaaagttactctcaaggttatccgatgggggcaataaaaatgctgtctagctatgaaaaaggtgttgtttctactttatatatctgtttcaaattaaatgatgaacaatcttgtgacttttatcaacattactttgagagcggtttacagaatcgagctattgaaaaggtagctcaggaaggggctcgcaatcacggtttattgaatattggtgttaacgacttttttgatatcgaacttcaagtacctggccttgcagagcaaaataaaatagcccattttctctctgcaattgaggacaagatcgcaatcaaaagagcagagttaaatatgttaaaaaactggaagcaaggcctgctccagcagatgtttgtttag

SEQ ID NO: 272831 - DNA, 657 bp, Klebsiella pneumoniae
atgagcaagaagagaaagcacaagaagacatctggtaaaaacgcctctaatccgtattacgtccggcgtatctcagaaaccattgataaagccctggagcaatatccccggttactggccgtcaggtttgatcttcgctttcctgacgaagaagaacggctggactgccctacacgttactacgactaccctgacgttatctcccgcttcattgactcagtgaaatcccagatagctgaagacattaagcgcaagagaaaagccggtaaggaaacgttaacctgcaaggtgagatatttctgggtaagggagattaatcaggaggaaacaaagcaccactatcacgtgattctgctgctgaacaaagacgcatacccatggccgggcaggagacataccgaagcgtcattcgaccggtacagtgtgtttcagaaggtcattaatgcctggatacggactatcaaacgttcagactctcatagagaccatcatggactggttcatcttcctgtttctggtttttggcagttaaaccgtaataatcccgatttcaaagtcgattacgaagagttgaccgacagagccatgtatctggcgaagatacgcagcaaagataaatcagatggttatcgcaactttggttgctctcagaactaa

SEQ ID NO: 272832 - DNA, 957 bp, Klebsiella pneumoniae
gtggcaggtaaaaacagaattatggtgaatttttcatcaaaaaggctgaaggatgtaattgcaaagattgcagcggaaaaccacatcagtcagtcgaaggctattgagaaactggtttcattccggctttttgagggtaatggagatcccgtggttgatgccttcagtaaggccagtaagagcgttgttgagcaacaacagcaaagcgatgatgaatttcatatcgccctgaatacaccgtatattaaacattctgtacgtctttatatggcggatggacatataaccgaaagcggctcgctaaaattcacatcggatgaatttggaaagcttaatgcttcaattattgaaaagggaattaagaggcttattaatgaccatattgaaaaactaaagcctaatgagtgggtgagagtgttcggggatgataatattattttttctgatttatggctgatttttattaatgagataattgttgaatataaatccgtaaggctggattctggtgatggagtaatttatattgattttagagccaaaaacattcgctgtattccctttacctttaacaaaaatgatttattagggaaaagatattgtaatgcaatggagcatcttgattttaattctgttgaataccgtacttttaaaagcgtggcaacgaaaggctggaacagaaataaacactcacatctcctgtatattggccgggcgtctgattccgttaagggtggtttttttattggtgtacaatatgaggaaaatgataaaaaatttacaaaacagtctcccatgtctccactttcaccccctgaggaggtattacctaatacatttaacacacgttacagtgagattaatacagagctaaaaattaacatttatcatatacccggtagttttaaaataagaaacctgacaccgacgctggagagtaatattaataaaggttag

SEQ ID NO: 272833 - DNA, 504 bp, Klebsiella pneumoniae
atgaacactatgaacgtaattattgccgatgaccatccgatcgtactgttcggtattcgtaagtcacttgagcaaattgagtgggtgaacgtcgttggcgagtttgaagactccacggcccttatcaacaatcttccgaagctggacgcccatgtgctgatcaccgatctgtccatgcccggtgacaaatacggcgacgggatcacgctgattaaatacatcaagcgccacttcccggatctgtcgatcattgttctgaccatgaacaacaatccggcgatcctcagcgcggtgctggatctggatatcgagggatcgtcctcaagcagggggcgccgaccgacctgccaaaagcgctggccgcgctgcagaaagggaagaaattcaccccggaaagcgtctctcgcctgctggaaaaaatcagcgccagcggctatggcgataaacgcctgtcgccgaaagagagcgaagtgctgcgcctgttcgccgaaggtttcctggtaa

SEQ ID NO: 272834 - DNA, 600 bp, Klebsiella pneumoniae
atgcaaaacgatacgcaaaacattattggcgtggatgtcggttcgggcagcgtgcgcgccgggatattcaatctacggggcgagctcctcgcccacgcgacccgggaaataaccctgtttcgcagcgccggaaataaggtcgagcagtcgagccgtgagatctggcaggcggtgtgctactgcattaaaacggcggtggccaacgccggcgtttcgccgtcgtcgatagccgggatcggcttcgatgccacctgctcgctggtggtgattggcgataacgatgcgccgctggcggtcgggccttcggacgatgcggaccgcaacattattgtctggatggatcatcgcgccaccgggcaggcggaaaagatcaatgccacgggccacccggtactgcggtacgttggcggcaaaatctcgccggagatgcaaacgccgaaaattttgtggctgaaggagaatcgcccgcacatctatcagcaggcgcgccacttcttcgacctcgccgattacctcacctggcgctcaaccggcgatgaagcccgctcggtctgcacggtgacctgtaaatggacctatctggcgcatgaacaacgctga

SEQ ID NO: 272835 - DNA, 180 bp, Klebsiella pneumoniae
atgacgatgttgatcgggagctgcgcgaacaattcacccgtaaaacctgaagtcattgataccgcctgcagctgggtgcggatcatctacctgaccgaccacgatattgacgtgctggacaagcagaccaaacgcgacattctggcgcacaacaaagcgtggttaagtaattgcgaataa

SEQ ID NO: 272836 - DNA, 1116 bp, Klebsiella pneumoniae
atggtatttttaatatcggcaacaatattgttatttatgactttcatcgagagtaaaagattatttcaactatccattataatagtgggtttatattatagcctgacctttgcgtatggatatgattggatgaattattatgatacttatcttgatgtacaaaatggatattataatagcttttttatagagccaggctaccttattcttatgcggttgtctgtattcttaggaatggactttcctatatttaattcaattgttactgtattgatgtatatcatggtctactccttctgtataagattgaaaagtccaaatcttgccttttttactatattttgctttttaagttttttcatgttcaccgagcaaataagacagggtattgcattgtgtataattttatatgcgatgcaatacatagcaaaagaaaagaaaatattgtttgtggtttatgtgataatagccagtttttttcatatttcggctattttaacgctgctatatttattcatgctaaaaagcaacaaagcgagtatgattaagtttatgatattatcattcacgcttacatcagttttgctttattcattatacaatcctgctttgttttcttggattccttttgttggagataaaatttcagcatatgcttatttgttttccgataaaaatatcggtttttggacatatgtatttcagtcaaaattgatttatctttattttttattgtttgttttattatatttaaaacggaatgctaatgctggtattttttctggagtaggggctgtgtttttccttttcttgagtagattgtcttcatttttggtgaggataggatactattttgttccgtttttgattatttcagttgacgggttcatgagtcagagcggcaaaggctctaaaatgactctgtttaaattcacttatgtgataattgtttattcgattgcaactatacctttatggaatccactctatcgagaaggtgcctcaaatcatctttctattttttctcaacagaaagatataaataatgagataggtcgaaagtgtacaatattacgtaaatactatgaagatattgtcataactagatgcctttaa

SEQ ID NO: 272837 - DNA, 792 bp, Klebsiella pneumoniae
atgcataagaagattttggtggtaatcgtaacacataatagtagtaaatatttaggttgggcattggaaccattattgcacaattctgagtgtcaggttcgtattgtagattccggttcctctgatacagcatatttgaatacgttaactagagaaaacgaagagatagatatcatcttcgagaataacattggttttgcgaaagctaataatagaggtttatacgatattattaattatgattttgtactttttttaaaccctgatgcaagaattgaaaacgacgttctaaatgtattgttagattctgttccattaatccagtataattttgatgaaggtaacgcaagtaataactatgattccttaggcatatattgtgattatcttggtagatggaaggatattagatgtgaaattaactctacatcattagttaattatgaggctatatgtggtgcttttatgctttgtagagtctctgctttgatgcagttaaaggatagttcaggaaatattggtttcgaagagagcttctttatgtacaaagaagacatagagctttcgttaagaataaaaaggaaatggcagattttaatgtttcatgatttatttgcatatcattgcaggggatggggaggagaacgtaaaaaaaacccttactggagtagattaatttctgccaaaaatgatatgaaaatagcttctaaattcaaaaaaagagctttaccattttctatcttgaaatatctttatgtcatactaattgaaaggaatgggaggagtgaataa

SEQ ID NO: 272838 - DNA, 1083 bp, Klebsiella pneumoniae
atggcgcgagaatcacagccagcacgtaccgggctgacgctggcccttaacaaagatatctggcgggccaatttttatcgtttctgccagttgctggaacaggaaaatccggacgcgccgaaactgggcaccaccagccatccgggcgatgatccggtacgattcagaccctggcctggtatgggtttcccggtcagtaccctgaaagcagtggagactgacgaagaccatccgacattacccccaacggttcgcacgacatttctaggggtgtatggcgtggactcgcctctgccgacgtcctggctggacgatattgcgcagcgccgcgaaggacacgaggcggttacctcattcctggacattttcagccaccggatcaccactcagtattaccggatctggcgaaaatacgcgtatccggcgaccttcgaggccggtggccgtgatgccacatcacagtgtctgctgggactggtgggactcggtataccaggcacagcggaacgggtggcaacgccggtttcccgttttctggccctgctgggcaccatgcgattacccacccgtaatgccgaaggtatccgggccctggtgagcctgttggcaccgaatacccgggcaattatcaccgaacccgatccggttaaggtccatattgataaccgcagtgggctgggtaccggaaaccgcatccgtctttcgcagcgggccacgctgggtaaaacggccagggaagcatgcagtcgggtactggtgacgctggaaacggaagatccgggcgaagcggaaggctggttacccggtgctgtcctccataccgatttgttggtcctgctgcgcgtctatcttggctaccgcagtgacgcccgattgcgcctcacggtacccgtgcggttattgcctgagcctcgccttggcaaaggcaggcgtatccagctgggccggaccggtttgctgggtttgaaagcgggcaagctcagcaatagccgggagagtctgaccgtcagcctgggctgctatgaagggttgcaatgctctgttttacctcctgctgaagacgggcattaccgcttcgactaa

SEQ ID NO: 272839 - DNA, 885 bp, Klebsiella pneumoniae
atgaaaatacttcccgtaatttccaccaaaggtggagaaggcaaatctacgcaagccgcaaacctctgtggcttcctcgctgatgcaggtgtgaagacgctgttaatcgatggtgacttcggccagcccaccgctagcagcatctatcaactcacctatgaagcgccgtgcggtctatacgagctgctgatgcagaccgtggatcttagcgatgccagcaatataatttcccaaagctttattcctaacctcgacgtcatcatctccaacgacccgcaagctcacttactgacggccatgctgcatgcgccagatggtcggttgcgcatgcgcaatattttgcagcacccgcttttcaatcagtacgacgcgatcatcattgattcacagggcgcacgctcagtgatgctagagctgatagtgctcgctgctaccgactccactatcggcatagtgaagccagtgctaccggatattcgtgagttcctgcgtggttcgatagcgatgtttgaacaactgcgttcgctttcctcttacggcataacgcttcccgccgttcgcattctggtgaattgcatggattacacgtcgctggccaaagccacgctgtcgcagcttgagacgatagtcagcgaggggaaatacagtccctacgccgccgaactgcctgtatcgctgctgaatacccaaatcttcgacctcgacatctataaagctggccatttcgctggcgaacctgcgcaccggcttgaaacgcagacgcgtcggaagagtgattcagctctacaaacgatgcataacctggcatgtgaattgttcccggaatggcaaagccagtttgatgcgcttctttcacgctcagtgaaggaggtgaatcatgtctaa

SEQ ID NO: 272840 - DNA, 1380 bp, Klebsiella pneumoniae
atgtctaaatccagcaattacccaatcgatatgccgcattcgattgatgcggaacaggcagtgctgggcgcactgatgctggataacgatcgctgggatgatgtggtcacgttgattcaacgagaagatttcttctctagcccgcatcgttcgattttcaaagggatcgacgagcttgccagaggcaacaatccatttgatctgatcaccctcagcgaactgctggaacgacacaacatcctcgatcagtgtggtgggtttgcttacctcgccgagttaagtaagaacacgccgagcgccgccaacatcctcgcctatgcgcggataattgccgaaaagagccagctgcgtcagctttacatgctcggcaaccaactcacccgagatgtacagcttcccaacgccgccgccagcaatatcactgaaatcgctgaaagccagctgtttaatcttgctgaaaaaggccatgcacgccaacaccaggaaatcaccgtgctcgatggcatgtcgcagctgcttactcggttagaagaaaccaccggcggcaatggcatcaccggtacaccgacaggttttagagaaatggatcaaatgacctgcggtttgcaggcgggcgatttaattctgctggccgcacgcccctcgatgggcaaaacggctctggctttagcaatgtgcgaagcggcgctggatgcgctggagagcaatttagttttttgcttcagccttgagatgcccgccgagcaactgatgatgcgcctggttgcaatgttgggtcaggttgagctgaatttgctgcgcagcggccagcttgatgatgaatgctgggccagaatcagcttggcaatggagcgcgtcaccgcctggaaagatcggctaatcatcgatgaaaacagcgaccagactccggcgctgttgcgtgcccgcgcgcggcgctacatccgcaaatacggccaacccagtctgattctggtcgattacctccagttgatgcgcgcgcctgaacaggagaatcgcacgcaggagatatcggagatctcgcgttgcctgaaggcgctggccaaagagctgaaatgtccgctggtcgcactatcccagttaaatcggcaggtggagtcgcgccccaataagcggccaaacaacggcgacctgcgcgattccggcgcgctggagcaggatgccgacctgattctcttcatctatcgcgatgaagtttacaacgagaactctaccgaaaaaggcatcgccgaaatcatcatcggcaagcaacgtcaggggccaatcggcaccgttaaaactgcctatgatggccgctatacgcgcttctctaacgctgaaagcaactcctatcactttggttatgggagggctcaggcatga

SEQ ID NO: 272841 - DNA, 1527 bp, Klebsiella pneumoniae
atgacagcgatggcaaaacagcgaactaccgatctgacttatgcgcttttgaaacgaggtcgccaggccgaagcgacattgacagtggcaacgccagatgcgcctggcagtgaaatgccaatggtgctgacgctggatcagttgcgccccaatccagataacccgcgcacaagccgcaatccacgttttgatgacataaaagcatcgattcgcgcgcgcggcctcgataccgtgccgaaagtcacgatcgatcccgacaatcctggctcatacatcttcagcgatggcggtaatacacgttaccaggcgttgagtgagctgtgggaagaaactcatagcgaacatttctaccgcgtgcactgcctgttcaagccctggccaggccgcatcaaatgcgtgattggtcatttggcggaaaacgagctgcgtggcgagctgagctttatcgagaaagcgatcggtatacgcaacgcccgccaaatcattgaagatgaatcaggcaaagctgtttccctgcgcgagctggcaacggcgcttacagatcaaggttacccggtcagttactccagcctgagccgaatggacagctgcgtgcgtcatctctatccacatttaccggcgctgctggaatccggccttggccgcccacaaatcaatgcgctgttggtgctgcgcagcgatgcggagaaattgtggaatcactactcgactgaagcgaaaccggaggccacatttgaaaatgtaatggccaaggtgtgcccgcatttcaattcgccggaaagctggtcgctggagatgttccgtgacgagttcattggcgagctggtcagcgcgctgccacatccatcactcaactacgaccgctggctgattgagcttgatcccagtgaacaaaaccgtcgccagctgtttggcgaacccgaaccggttgcaccgcagctgcagcagcaaaaccagcagcctgaacctgaagcagcaccgcgcgcgcctgcgccggttcgcaagacaacgccaccaccaaccacaccaagtgttgccagtggcaacacttccgaaccgaattccactgttgccactggcaacacctccgagccgagttctactgttgccactggcaacacttccggggcggtttctgctgttgccagtggcaacactcaatcagccgcaccggatttctggaccatccccactttgcaggacgatgccgatcacctgcgcaatatcgcctttcgccttgcctttgaattagccgattcggatagcgacggtgaagcagtgatatcggataacagcccgaattcggctggctatcgcattgacgaagagctcagcgcctcgccgatttcatgcctgctttcctcgctagctggcggtgcatgcgatgaggacttaccggacctgatgcgcgagctgctgatcggcagcaccgatgccgcgccgcgctttgatgatgaccttacccaaactttcatgaagttaatccgcacgttgcggcggctgcgcgaactgcagcgccaaagctga

SEQ ID NO: 272842 - DNA, 585 bp, Klebsiella pneumoniae
atgatgagtaatagcttgtctcaggccaccaacggtctgcttacccagttagtgatggaactcaaatcaggctacatccgccgctgcgaagcggtgggtttaatgcctgaggagatgcagatgcttcatggattaaccatcgaagacctgcactatctgatgaacagcccggtatcggtgctgaccttccgcatccaccacgaaaacctgtcgttgatgttgcagcaggcacggcgtgagcaaagacgcctacagcgcatcgatcgcgcactggcgctcaatggctctatcgagttgatgcagcactactttggactttcaactgtggaggttgcagcacgccgccgcatggcaggtatcgaagtgcgcaagggacgcggcgtagtgctcaacgatgaggataacgccgagatctggcgcaagtggcagaaagccagcattgacgatcctgacagcgccgatggcctcgacgtgatgatgttgtgtgctgagcaaatggatctgtcgcttactgctatctggcacgccgtgcatggctggcacagcaataaaaagcctgagcccgccatgcggaaaatggcatga

SEQ ID NO: 272843 - DNA, 255 bp, Klebsiella pneumoniae
atgagtcatcgccaccaaacgctaactgaaggacttgtcgcaccggtcaacgtgccagagccttaccgtcgaaaagcggtaaagcagctgacattgttccggtgcggcaagaacaacttcacgcggatcaaagcgaaaggatcggagtatctcaaaatcgacattggcctgttctggcggctgttaagcaaaaacagcggcaaagactgggaactgatgacgcatgagagatacagcaaagcgatctggaaatag

SEQ ID NO: 272844 - DNA, 1185 bp, Klebsiella pneumoniae
atgaatctcccctctgacagcttaatcgctttcacgatggaaaaaatgcaggcgcgcctggcggaaaagtccagtgacgatggcgtctcgcagctgcgtagcggtttgctctatctcggtaatgtgcaggattcatacccgcgccagctgctgcttgatacgcggctctcaccgctcgataaaatggcgtggatgatgatcaggctgtacgcgcagcagaatcatggcgcagtgttccccagctatgacgaactgcaactgcagctcgcctccccgcataaaggcaaggcatcgcgcgaaacggtcagccgcgtgctgctgatgctgcgactaaccggttggctcagcctgtgtaagcgcgttcgcgacgatcaaggccgcgtgcgcggcaatatctatgcgcagcacgacgagccgctaacctgctttgacgccgaaatcatggacccggcgtggctcgataccgtcgctgaagcgtgccgtagtggcaataaaaccatcaagcaaaccgctttgcaggtattggatgaaatcaaaaatgacccgcaaatgcgtcactgcaaaagccatatcagccagattgaaaaccgcttgggcaaaccacaaacgccacaggaaatgaccatagccaggaagctcacctcaccggattcggtttccgaaccgggtataaaaataccgagttcggaagccgaactcagcttaccggcgcattcaaattcactgagttcggtttccgaaccttcgctgataccaaggcttcggcccggagttcggaatccgaacggtaacgtacgttgttttacacaaggtgtgaaaaaaaacacgtatacatcggcagtgccaacatctgaatttatccctgttcgctaccggcagcgtttcagccaggaagatctcgccatgcttgaacaccggctggcagccttgccctctgagcagtcgcagaagctgcttcaccaacttggccagaatctcgatgccggttcaatccagaacccaaccggctggctgttggcagtgatcaaaaaagcgagaacaggccagttcactcatgttgctgaatcgccgtctgtcaccgcaccggctaaaccggcacatcctgtaccgacgacaagagcaaccagctctgccgctgacatcgctgggattgtgcaatcgatacgccaacgtctgaacagctaa

SEQ ID NO: 272845 - DNA, 723 bp, Klebsiella pneumoniae
atggctgaagaaaagaacgaaaccgatacggccaaagtgggcgcgttacgctcctctttgaccattgaactgcactcgcattatgcgattcgattatgggaaggccgcagacgccaacctgatgacctgcgtgaacgtggcagaccacaaatactcagcatgccgcgcgtaattcagcgcgccggtttgatgagccgtgacgctgagggtgataatccttatgcagatatggcgctgttgaagctggagaacgcgctggatttggcgactacagagatccagaaattagtggatgagctggaggcgacgctcaaagctatccccgcacggatctcactgacggatgtgtcttcggtgtcgccgctcaatattggcgtcttcagccgcacaccgctaggttatcgctgcgtctggttgctggttggctacgatcagctggcgatgaaagtgtttcaggcatcccattacggcctgatcagcggcaaagagcgcgatgaaatgctcagcaatggcggccatctggtgcgcaaagtgtatggcgtggcgcagcattaccgttcgttcgccgtaacgcgcgccgatctagagcagaagacggtgattgccagcgaagccgtcaagctgctgggcgacgttgatctggaggtgatggcggggaaaatgctctcaactttctcaccgaacctgaaaaagctggcggaaaatagtgaagcttctgaataa

SEQ ID NO: 272846 - DNA, 492 bp, Klebsiella pneumoniae
atgactgctaccactactaacaacgctgcaaacaacaccaacaccacttcaaccaaagctgaatacttcaatctcaacatcaagggcctgggatatctgagcaacattcgcagaattgaaaccctgaatggtggcttcctcagcgtggtgattaatgcgctgagcggccctactgacaaccctacctatgtgcgctttgatgccactgtcgccggtaaagaagcaacggaccttataagccgctgccagaaagccgtagacgaggaccagaaagtgctgcttggttttaccctcagcaacctgacgtcagacattttcactctcaacaaaggtgaccatgcaggcgaacagcgggttagcctgaaagccagactgattaaggtcgattggatcaagattggtcaggcgatggtttataaggctgagaaaagtgaaactagcccgccaaattcacgtgaccatgctaagtcatacgcatcaaattctttttaa

SEQ ID NO: 272847 - DNA, 696 bp, Klebsiella pneumoniae
atgtctgcaaaaaacacaaaaaatgacatttggctaattctctttaagccgccaataattgcctttctaaaatgtgcaatattttttcttatttctggctttgccgtttgtcttttttactatttttttcataatccaataagagagtttgtttcgacatttcagtggtatgtttccggcgattccatttcggatatgactgttcaagaaaaaaaagagttagctcatttaatgagtaaaaattacatattaagcactaacgatcttgtgtcacagataggtagtttttttgcatatacaataacaattctggttttcttttgcaccatttcagctttctttgcagtcttagtaattaaattaaactctgatgataaattcgactcaactatcagctctaaagttggttatttttttgataacaacaaaggttttgatgtcgatttgagagtaaaagttacagaagttgttgcagaggagattgaacgtttttcagatgctgatacaagcgaagaagtgtcacaactcagacgagacgttgaagagctaaaagagcaaattgattctctgatgcaaaaaccttcccttaaagaaagtgaagataatattgatacagactcatactttgacaatatgcttcaaagcttgagagctggtaatgcaaaaaataaggaacctaatgatggcaatccttaa

SEQ ID NO: 272848 - DNA, 546 bp, Klebsiella pneumoniae
atggcaatccttaaaagaaaagtaaaaataaacagtgagtttttacctgttagcatgttgcatttaagtaatccattagatgtattagactatgcaaagagtctaaatatcacattagttccattcgatcttgatgggtttattaacaggattgatatcgatcttgtgaaaactgtactagatgatgatatatctgggaaacttcaaaaaactaacgaaggtaaatgggttatcactgtcaactcactacatcatataaaaagacagcgttttacccttgcccatgagttagggcattactttttgcatagaaacagagcgattgaatttgttgatgaagccttgtaccgtagcactcacatggactctatggagtatgaagcaaataatttcgctggagcattattaatgccaaaagcggttatttctgagtttattgctaagcatggtgcaagtgcagagttgatttctgagcattttaacgtttctgttcttgcggcgaaaataagggtggagactttacagaggaagttatatgagtattaa

SEQ ID NO: 272849 - DNA, 1080 bp, Klebsiella pneumoniae
atgagtattaattatttcccgattattaaaactacaattgctgaaatgcgggctttaaaaaatttaaatactgatgcttggcaaaagataacccccatccttgagttgaccaaatcaaggaaaggaaaaaacaaccaagattcaaatgtttacaagaaaattgatgagttgtgtcaagtcataaaatcacgagaattaattttagatctgactactattgatgctctatcaaatgagcagatagagagtttccaagatgacactaacgcctttaataactggtgcaacttcattgattatgtcaactccaagctttcaggagtggttcccgtcttattagcctaccctgattcaactcttaccgagttactaattcaacttgaatgcctcagtaaaaaaacaggtaaagttgcaatccgtattcctatgtttgaagaagggcttgggaatttatttaataactttgtcagcgtaataaaaagcaagccgaatttaattcatagtgtaattttcgatgcttcatacattaataaagaaataggccaaaagtcattaaagtacattattgactttataaattacttccatagtcaagttggaggtatttatgctggaaacttcatcttttgctcagaacactacccagccaatataactgagtatttaaaaaaagagcaagatcaatataataattccgtcgatttctttaatgttgaactatataaaaaagtcaaatcttctttattggctttcaatataaataatatcatgtatggcgattatggatgtattcatcctttcagaaatgatgttaaagcgtacaactggataccaagaatcgattaccccacgacttataaaatccacttttctaaggttcgtagagatgttggaggttatagccaatgtgctaaaaatattgttaaactatctgagttccaaaatgacactttaaagtgctggggtatggaacaaatagttaatgccagtcgaacaaaaccaggcggcctgaatccatcatattggatttcagtaaggtcaaatattcatatgaccagaatgacgcatggcatcaaatag

SEQ ID NO: 272850 - DNA, 606 bp, Klebsiella pneumoniae
atgaatgaacttgatttcaaaattccgctgacaaattatttcatgaacgatccgtcagttgccttaaactttgagtttccctttgattacaaccggcggcgttgtgatttattagttgtctcaagtaatgagataataggcattgagataaaaagtgatattgataatttagataaacttgaggagcaacttgattcttattataagtgtttcaataaagtttatgtggcttgtggtcagaaacattatgcatccataaagaagttggatggggactttggaatcatttatataacgcgagatggacttaagataaaaagaaaacccaaggttaagaaaaaactcagcatttccccaatattagatatgtgtgataaagcgttgctggaaaaatggactggaatcaaatcctctaataagtcagatttgatcattcaaatcgaaaaaaaactttccaaagcacagatttatgccgcacaccgaaatgcaatttttgagaaagtatcaaggatttttgaagctttcatttctgaaagaggagcagtaataacacgagaagatattacgctccttagtttgaaatccatgaatttaggttctatttga

SEQ ID NO: 272851 - DNA, 675 bp, Klebsiella pneumoniae
atgtttttatatatcttaagctttcatgctttggctgaagtgaaaaccaatcaatccattcaacaaaccacccctcttaataataaaatgggagaaagtcagttattaggattaactgaatcagacattgtgcgctatgaagcacttaaaaagtcattgcgaggactacaatctccaaacctagacccagtaacagcattaggtattgaatctaggaatgaatctgaacgccgtcactacgccgaactctgggtaaaacaggagtacgagcgcacggaaaaggagctcaaattccagcgcgaagttgatgccgcctggaagcgcttgatgcccaacatgctgccggtcaatatgggcaacgcggcaggtatcgcgcatgattcaggtggtcgcctcgcattgttcgtgcgcgaagcagattgccagcgctgcgatgcccgactctccgccgttcttgccgataaacgtcccgttgatatctatctcgtcgatagtgaaggcagcgatcagaaactccgcaactgggcgcaacagcaccgcattcccgccgaacaagtccgcaaacgccgcatcaccctgaaccacgacgcaggccgctggctgcggtacggcaacggcatcatgccggtccttctgcaacagggggaaagcggatggcatatcgcagcgttctaa

SEQ ID NO: 272852 - DNA, 636 bp, Klebsiella pneumoniae
atggcatatcgcagcgttctaaccgtcactttattgttgagttccgccagttctgtggcgtcaaccagcgtgcaaagcgtgccgtcgggttatcagcaagtcgctctgcagcatggtgttccagcagagtcgctttactcgctggcgttggctgaatcatcgcgccagttaccacacggcacgcgcccgtggccctggacaatcaacgtcgcgggtaaaggctaccgctacgaaagtaggcaagctgcctggcaggcgctgcagcagtttatgaaaatccatccgcttaagagaatcgatgtcggtatcgcgcaggtcaatctcggctggaatggccatcgcttcagctcaacgtgggatgcgtttgatccgtatatcaacctgagcgcagcggcgcgcattcttcgcgagtgctgggaacgcagccccggcagttggttgaaagcggctggctgctatcaccatccggcaggcggcaaacctgcagcccactatcggcagattgtcagcgaaaaattggcctcactctcgccgattcaaccccagccaatcgcaacgcaggctcctgccaatcttgcgagtaaccaaacaccttcaaccgaaatcatctggacagagccccggaggcagcaatga

SEQ ID NO: 272853 - DNA, 507 bp, Klebsiella pneumoniae
atgaaaaaattgatgctggctggcgtgatcgccgcgctgccatttctctcacatgcggaactcaacgttatcgctgatctcggaggtcaatcggcagcgccgttctatgagggaatcaacgctgagcctcagctgcaacagcaatcaatccaacctgattacagtgaaggttcagtgttgccagtggcaacacctgaactcacccccggcatcattgagccgcgcgcgctgaaactgccaggaattggtgcgctatttctggttggtgatgatgctcaatcgcaggaatggctatcgcgaaacgctgaattactgagccgacgtggcgcggttggaatggtggtaaacgttagcagcccagtatctttgcagcaactgcgacagattgcgcctgctctgcagctagcaccggtatcaggtagcgatctggcgcgccgcctcaagttagaacattacccggtgctcataaccgagcattcactgagccaacaggtttcagcccagtga

SEQ ID NO: 272854 - DNA, 2085 bp, Klebsiella pneumoniae
atgagcgatcgctatgttattgaagcactactgcgtcccgcagttgagttcaacaccacgctggtagccgccaccgccagctatgtctgtgtggcagctccttgggctgtcgctctgtcgccatcggtcagttatgtcaccgcaaccggctttgcggtgcttgccgccgtccgtgcccgtcagggatgtcaggtgatccggtatcgccgaaaccttcgccgcttgccgcgctatgtaatgaccagccgccaggttcctgtgagcaatcaccggctgttcctggggaaaggttttctgtggcagcaaaaacacactcagcgcctgctcgatacgcgtcggccagaagtcgaaaagtatgttcagccagcgaagatctatcagtacgcgcgcaggcttgaacgcgcgagcgagcattctctgccctggctgtcatcgttgatttcagctgatacgccgctgaatccggttcgcccgctaccgcccgtaggcggcaatccggcgctacacggcattgaaccgaatgagcgcgatgtatcgatggatctccgcgagcgcgtcgggcatacgttagtcgttggcaccacgcgcgttggcaaaacccggctggaagagttgctggttacgcaggatattcggcgcggcaatatcaccatcgtcttcgatcccaaaggcgatgccgatttgctaaaacgcatgtgggctgaagcgcaccgagcaggtcgtcaggatgacttccacgttttccatcttggctggccagagatctcggctcgttacaacgcggttggccgcttcgggcgtgtgtcggaagtggcttcgcgcatcgctggtcaattgggtgctgaagataacagcgccgcgtttcgcgagttcgcctggcggttcgtcaacatcgtgacgcgcgcgctggttgcgcttggccaacggcccgattattcactgattcttcgctacgtcaccaacatcggcgagctctatcagcgttacgtggagcatctggttgataagcatctgccggagctacgcagcaaaatcgagaatggcagcaatgtgctgaaagagaaggatctgccgcgtaatatgcaggggcaatcaaatgccacgcgcatctgggcgatggagctggcgctgagttctgaagccggtaaaaagctctatgatcccatccttgaagggctgcgttcagcagtacgttatgaccgtacctacttcgataaaatcgttgcctcactgctgccgctgttggagaaacttaccaccggcaaaacggcggcgctgctttcaccggactatgaagaccttgacgatccgcgcccaatttttgactggcaacaagtgattcgccaacgtggcatcgtttatgtcggacttgatgcgctttctgacagtgaagtcggtgctgccgttggcaacagcatgttcgctgatttggtgagtatcgcggggcatatctataagcacggcatcaatgacggtctgccggagaacggcgacggcaaactgccgatcagcctgcattgcgacgaattcaatgagctgatgggcgatgagttcattccgctgatcaacaaaggcggcggcgcgggcattgaggtgacggcttacacccaaacgatctctgacattgaggcgcgcattggcagcagcgccaaagctgcgcaggttaccggcaacttcaacacgcttattatgctgcgagtgcgtgagaaccgcaccgccgagctgttaaccagccagctgcctgaagtggatgtgtattccaaaactctggtttcgggttacaccgatatcaccaaccaggagcaaggcaccgatttcacctccaacactcaggatcgcgtgagcatggttaaaacgccgatgctcacaccagcggacatcattaacctgcccaaaggccaggcgttcgcactgctggaaggcggccaactgtggaagattcgtatgccgctgcctgctgctgataaaaccgatttaatgccggaaagtctgcagaagatcgccgctgagatgcggcgcaattaccgcaccagtgaagcctggtggtctggtgctgctggcgcagaaccgccgggaggtgattaa

SEQ ID NO: 272855 - DNA, 762 bp, Klebsiella pneumoniae
atgccaccaccaaacacttcagcgccgccagctcgcgttcagcagcctaaagagcatggctttctgtttaatttgctatggggatggccgtggaagctaatcggcatgctactggcttcgctgcttttcagtctggtaatggagtacatcggcattgctttcttctggccggagcaaggcgcggaacatagccagcaggtgatgcagatcgagagcggctatctctccactgagttcacgcgcagcctgctgctgtcacagcccacggtgactatcactggctggataactcaggtttatcagtggctggttgttgatagtggtttgcaggtatggatcgcgcagcaaaatcagggaatggaaagcggtggtaatgcagttgctgccggattgagtgccggtagccgctggctggcatcggcgatgcaggaatatctgttggctacggtttatgtcgctgtggtgacgctgattcgtgtgacaattttggtgctttcaataccgctgtttctgatggtggtgctggttgcagtagttgatgggctggggcggcgagatctgcggcgctatggcgcggcgtacgaatccagttttgtttatcaccacgccaaacgcttcgttaaacccgcgttctatgtaccttgcatggtgtatctgtcgtggccatcagctgtgtacccaaatctgctgttattgccagctgcgttgctgctgggaatggcgctggcggtgctgacggcatcatttaagaagtacctgtaa

SEQ ID NO: 272856 - DNA, 1629 bp, Klebsiella pneumoniae
atggctattaataaaaatgcagttgtaaccatcaaaaatgtagcatgtatcagggatatgaagttttcttttgacttgaagcctgggttgatatgtttggtcggagggaatggtagtgggaaaacaacattactgaatatcctttcccgcttcatgtattactccctgagtgactatttttatagcgatatagataaagatgccgaaataaaatactcctatggcgatgaggcttatgaatggactcgaagtggtaatcgatgggttaaatcaaacaccatcagaagcctgataaaaaaagggacttatgaatctggaatagtttacggcaaaaggtttatagtctctagcaaagaaaatataaaagagtacagtgatttttatcgtaattttactagtggtgatcttattgatgtcagcgaatttatgatcagcagcttggggcggattttaaaaaacgaccgagactattataagggcatgaaaacgattgcaaaatacaaaaaggatgcactctctaagaatgataattacctcataaaaagagaatccccttatttaataaaaagggggagcgagtatattactcagtatcagatgagttctggtgagtttatgctcttgagactactgagtttcatcgataccagaatgacatccaaagaggatgataccaggcttgtattgattgatgaggttgaaattgctcttcatccgtcagcacagaagagactcttttatttcttcaaagagatagcaaaagagaaaaatatatttgtcgttttctcaactcatagccaagcaattattagcatgtgtaaaccaaatgacatttatcttttggttaataaggcggggaatgtttccgtaaaaactccatgctttccaaattatgcagtaagaagcacgtacgaaattaatggttatgacttttttataattgtggaggatgagttagctagaagaatagttaatgatattataaagaagcacaatctttcagaaaataaacttattaatgtccttgtaggtggtggatggagtcagatagttccgctaataaatgatcttgtcagcaataaagtattgcctacatctagaatattagctgttctcgacaaggatattaaggataaatttttcaaaaaacacatgtcaccatgcctaacatgcaaggtcattgataatgcttgtaatacatgtagcttaacaacagttgcttcgaaaaaccctccaattcctcataaaatcgcattccataatgatgttctttttttgccagttgaatccatggagaaagaaatcttcaataaattagttgataatgttgattatgatttgttaaatcttctagataatggtgttttctttaaagtttcctcactggatgattgcatttcagattataagacaaaggctagagcatctaaagactttacaagtttgaaagaatatgacaaagatgggaagaagttctgggatcacatcatattaaacttaaatccgcatttttctaaagacgattttatttcttcagtttgcgatgtcttgatggatatggctaaaacaactaatgagtggaatcaattttccagccatcttaaaagccaacttagtttcacaagatga

SEQ ID NO: 272857 - DNA, 336 bp, Klebsiella pneumoniae
atgggttctaatcatccactttcaaaagcaataatattctttattctgagtgtggtcttaagcacaacagctttggcaagtgaactcgacgaactagccaccactcaacgcctgctcgaccaagtccagctatccctcgaccgtgcccgcaccgtcgctgcgcagtccgatcccaataatcgtcgccgttacctgttcgactacaagaaagccaacgaagacctcaacaccatgcgtgctggcatcgaccgctacacgcagccttcgcgtgcgcagccgctggattacggcaaggtcagcggtgattacacgcgaggccgtccgctatggcgatga

SEQ ID NO: 272858 - DNA, 243 bp, Klebsiella pneumoniae
atggcgatgactgccgcgcagatcaacgcgtttaaaacggcatccggcaacatcgatattagcgttctgtatctggtgtccgttgggctactactgtgcgtgctgtttctctgggcagcatgggcggcggtggatgtctggcatggctgggcaaataccaaaatcagggatgccgcacttgcccgatttgttatccgttctgtggctttactgatcgtctgcatctggatgttcgccagttaa

SEQ ID NO: 272859 - DNA, 378 bp, Klebsiella pneumoniae
atgaaatcaaagttagttcgcttgtctcgctttaaagaccgtcaggtcatgcgtctgggttccgggttgattctggcctggctgtcctgcaaaccggcgctggccgatctgccttcggttgaagcgccagaatccagcggcggcactggcctgatgggccagatcaaaggttacgcgcaggacttcatcgtcttcgccggtctgctggtctgcgccgtggcatttatcaacgtcgcaaccagcgcggtgcatacgttcgttgaagtgcgtaacgagcgcgccacctggaccaagtttggttccattgttgcaaccggcgtcgtgttgctggtcgcgactatctggctgctcggtcagtctgccgaaatcattctgtaa

SEQ ID NO: 272860 - DNA, 363 bp, Klebsiella pneumoniae
atgcagaccatccgtttcctgcccgatcgactgaatgccgaacctgtcgtgtttcgcggtttcaccacgccggaattggggctggcggcattgattggattagcggttggcggcgtggtgtgtctgccgttttttccactggttggctgggtcatcatcccgaccgggatgctgctcatgcctctgctactcattgcgtttggcgggcgctggatggcccgtcttaaacgcggcaagccagaaaactatatctggcagcggcttgaggagaagaaacgtcggatgggctatggcgatcgttctctcatcatcagctcacacagctggtctctgcgccgtacaccgaagggagccggaaaatga

SEQ ID NO: 272861 - DNA, 657 bp, Klebsiella pneumoniae
atgagccagttccgcaatgctattcaacgcagcgaccagcatatcaaatcgctgcgcgtcgcctgcgctttcctcattctgttggtgttgatcacgtcatccggttggatgctcgcgccacgcagcatgaccattcataacccgccagacttacgcaccggcagcacgcgtccctggtgggaagtgccgccatcatcggtttacgcctttgccttctatatcttccagcagctcaacgcctggccgaaaaacggtgaggtggattatcccgccaaaattcgggcgctgtcgccttacctgacaccaggctgcaaagactttctggaacgagacgccaccgagcgcaccaaccgcaacgagctgattgaccgcgtgcgcgtggtgtatgaaatccccgagcgcggctacagcaccaaaagcgtcacagtgcgcgaccgtgacaactgggttgcgcagctggatttggtggctgacgagtatttccacaccgagccggtgaagcgcgcgatggtgcgttatccgatgaaagttacccgctggaatggcgatcccgaaaccaatcagtttggcctggcgctggattgctacgacggcgtgccgcagcgtctggaggccgcaccacctgaacctaagcctgagcacaaggggatgttttga

SEQ ID NO: 272862 - DNA, 765 bp, Klebsiella pneumoniae
atgaagtgggagcgcatcccgctgcaggtcacgctcaaggttggccaggagcgcgtggtattcgtcgataaaaacgtgcgcgtcggtatcgcgccagcgctgaagggcaaactacgcgtgcaaagcaccggcggcgcggtgtacctgaaagcgaacgaagcgttttcccagacccgcgtccagctgcaggatgtggagaacggcgagatcatcatgctcgatgttatcgctggcgcgaagggttcagccgagccggtaaagcttgtttatgaagctggcgacagcgaagcctcagctaatccagagcaagccgacacagccaaagaagagaagaaagtcagctactctgcaccactgccggtgcttctcacgcgttacgcatcgcagcgattgtatgcgccgctgcgtacggttgagccggtccccggcgtgcgttcgctaccgctgcatttacccaaacgcattaccacgctttatcctgccgaaccgttagagatccagccaatcgccgcatgggcagtacaaagtcagaacgtggtggcgtttcgcgtccgtaacatgaccagccgtaaaatcgttctcgatccgcgttcgctgcagggcaagtttgtctccgccactttccagcatcgcttccttggtttagtcggcacgcctgaagacaccaccatgctttacctggtaatggattcgcgtcccgaaaacgccttgattcctgaagcgaaggtgagccgcaaagcgcgaggtaaacagcatgcagattaa

SEQ ID NO: 272863 - DNA, 1491 bp, Klebsiella pneumoniae
atgcagattaaatcgaacacgctggtcaaggtgttggtcccggtgttcctgctcgcgggcgtcgcggtgggcatgaaaagttgcagcatcaaaagcgagaccgagaaaaccagcgccacgccagaaaagcccaaagtgctggccgatttgacacctgccgaacttaaggcgctgggcgtcgaaggtgatacgccagaagatacgttacgtacgctggtcggcacgctcaaaaccattcgcggtaagcaggaaacgctcgaccgacagaaccttgatctggtgaaagagaacgagcgtctgcgaacacgtaaccagaacgttgccggtcaggtaaacgaagcggtatcgaactatcaaaaaattgctgaagatcgccgccagcagctgcagcaggaacagcaatccctgaccagcaaagttcaggagctgagtaatcaactggccaagcgtatggcgtctgataagcaggatcagagcaacagcgatattccactggggctcggtctggatgatgttgccagtggcaacaccagtgacggtgtgatgtgggtatcacccagtgatcagcgcagcagcggcacggactcgggcgcaacatccagcgacggcaaatcagcaatcggcggattcccgacctcgttcctcggcgataacgcattgagtaagagcaaaagcaactacgagcagaaggtaaaaggctactccaacagccagaaagaagaggaaagcaccgagcctgtttacacgctgccggaaaactccacgctgattggcagtaaaggcatgactgcgctcttgggccgcgtaccgattaacggcaccgtcaccgatccctatccgttcaaagtgctgattggccgcgacaacctgacagctaacggcatcgatttacccgatgttgaaggcgcgattgtttccggtacggcttcaggcgactggacgctttcctgtgtgcgaggccaggtgaactctatcactttcgtcttcagcgatggccgggtgcgcacgctgccgcgcccggacaccaacggcaaaagcaacggccaggatggtggcaagaagcaggacggcggtatcggctggatctcggatgaagccggtattccctgcatcagcggcacacgtaaatccaacgcgtcaacgtatctgccaacgctcttcgcactttccggtgcagccgctgccggtgaagcgctcaacgaaaatcagcgtaccggacaaaccaacgcctacggcggcgtgacctccacgctaacaggcgatgccggacaggcggcgatgggcaaagcgattgccggtggcgtcggcgatgtttccgaatgggtgaaacagcgttatggccagacgttcgatgcagtgtatgtgccacccggagcgaatctggccgttcacatcacacagcagttggcgatcgattacgaagataaaggccgcaaggtgcgttacgacttcagcgtgccgggtaacgctgcgcgtatcgggctggactaa

SEQ ID NO: 272864 - DNA, 414 bp, Klebsiella pneumoniae
atgaaaaaagcatttatgccggtcgcgctcgtcgcactggtttcagtcatttcaggctgcagcacgtcgaaagatgagatgctgccagcgggcgacagcaacatgctggagctgtggcaaggaaaaggcgcgagcggatcggctcaacgcggtgcgctgggacgtaaagcgctgcgccgtccgctgagtgaaaccgaagatcagcgcgccgacaaactcgaccattcatacagccgcacgcaggaaagcgagatcacgcagcagttcccgcgcctgccaaatcccgacatggtgatgtacgtgtttccgcatcttgccggtggcaactcgccggttcccggctacagcacggtgtttccgttttacagccaggtgcagtacgccttgccgggtgagcgcacggaggatctgtaa

SEQ ID NO: 272865 - DNA, 2805 bp, Klebsiella pneumoniae
atgatgttttccctgtttaaaaagcccgcttcaaaagccaactacatccctgaaaacagccagccacagccactgccgcgccccggcaaaatgacggtgcaggatgaatctgcgctgtatcacgccaaaccttccatcattgattacctgccgtgggccgaatatctgccggaagataaatgcctgctgcttgatgacggcgtttcagtcggcgcggtttataccatcacgccgatttcatccgagggtcgcaccgctgcgcgcctagaagaaatccgcgatcaggtggaagatgcgctgcaggacagcctggaagaagacgacatctcgccttgggtggtgcagttcttttgccaggatgaagacgatccatcgccctatctgaacacggtcaaagagtacgtaaaaccctgggcgcgcggcacggaatttaccaatgcatggctgggtgaaaccgagcgccatctgcgggacatcgccattccaacgggattgtttcgcgatacgctggtcactggccagccgtggcgcgggcagcagcgccgcacacgcatggtgatttatcgctgggtgccaggtgccgccaagggtgtgaaagatgtccacgcgctaccgcccgttaccatgctgaatcaggtttgcgaccggctggcggcatcacttggcgcatcaggcgttgcctgccagcgccagaccggcgcacaaattcatgaatggctgctgcgcctgttcaatcccgatccgcagcatggtctgagcaaagaagcgttttatgccgccgcgaagcatcatgatgcgcaagcgggtgaactgccgatgaccaacgattttgccgaaacgctgtggtacacgccgccgcgttcggacgtagaaaacggcgtgtggtggttcgatgataagccacatcgcgcgatcgccattgaacgtctgcgccgcccgcctgaacccggcatgctgaccggcgaaatggcgcgcggcgagcacattaacgcgctgatggatctgctgcctgaaggcactgtggtttcactgaccattgtttcccagccgcaggacgtgctggaaaacgacttcattaagctggccaaaaacgccgtgggtgaaaacaccgaatccgggcgcgtacgcgaggatgtgcgagaagtgaaagagtatcttggccgccgccacaagctgtatcgcggcgcgctgactttcatgctgcgcggcaacgatctgaccgacctcaaccgacgccagcaaaacatgtcggcggtgctgctgaccgctggcctgcagccggtgcgtcccgaatacaacgtctcgccgctaaatacctggctgcgcgcgctgccgatgtgcttcaacccacagaaggatcgccgccactggtatacgcgcctgacgtgggtgcagcatctggcgggtttattgccggtcactggacgtgcgaccggtagcggtcatcccggcttcagcttcttcaatcgcggcggtgaaccgctgaccttcgacccgatgaataagcaggaccgcacgcagaacgcacatatgttgtatttcggaccaaccggcgcgggcaagtcggcaacgctgtgcgcgacgctttcccagctgatggccattcaccgcccgcgcttgtttattgctgaagccggtaactcgtttggcctgtacgctgactactgcgaaagccttggcctgacggtgaataaaatcagtattcgtcccggctgcggcgtcagtctggcgctgttcgccgacgcgcatcagttgctcgacctcaaaccggaacagctgcagctcaacgaagctgacatcccggatgccgatgaagatgacggtgatgaacagcgcgacatcctcggcgagatggaaatcgccgcacgcatgatgatcaccggcggcgaaaagcgcgaagaggaacggttaacgcgctctgaccgtggcctgatccgcgaagccattatgatggcggcgcaaaccagctacgacgagtcgcgccagatgattgctgaagatctgcagaccgcgctgtttgctatcgcgcgtgataacagcgtggacagcagcggccagcctttgctgaccgaacgccgtcgcgcgcgtgccgatgagatggccggtgcgatgtcgatgtttaccagcggctttgaaggcgagctgttcaaccgtcctggcacaccctggccggaagccgatgtcacgcttatcgatttgggcacgctggcgcgcgagaactatggcgcgcagatggcgctggcgatggtttccctggtgaacactatcaacaacatcgccgagcgcgatcagtatctcgaccgcgaaatcgtctttgccattgatgaagcacacatcaccaccaccaatccgctgctgtcgccgtacatgaccaaagtggtcaagatgtggcgtaagcttggtgcctggctgtggatggcgacgcagaacctggcggattacccggacatcgccgagaagatgctgaacatggctgaatggtgggtgtgcctgacgatgccgcctgatgaggtggaacaaatcgcgcgctttaagaagctgagcgatgagcaaaaatcggtgctgctttccgccagcaagctgccgcgctgctacaccgaaggtgtggtgctgtcgaagaaaactgaagccctgtttcgggccgtgccacccagcctttacctcgctctcggtatgaccgagaaagaggagaaagccgaacgccgcaagctgatgaaacaacataactgtagcgagctggaagctgcagtgatcgttgcccgccagctcgatgcggcgcgcggcctcaagtctgcagctgcataa

SEQ ID NO: 272866 - DNA, 405 bp, Klebsiella pneumoniae
atgttaaaactaaaatatcccgtaccccgtattaccacagcaatttcccggcatgcagcgcgcacgctgttcactctgatgccgcagggtgaacctgaaatccttatgagcgatctgaccttactggacaggctctgcgatgaaattcgcacgcgcgttaatccaccgatattgatcaccagccatccgcagcgcgttggcagtcattcctgccttgcgctgcagttcaaaggcaagctctgcagctcgattgatttgctgattacagtgaatagtcatctgagttggccaactgaagatgactataatcatccgcgttggtacatgacggttgtggatgcagcggacctgctttacctggaactttatctggcgcacaaacttgcagctaagcacacaaaatga

SEQ ID NO: 272867 - DNA, 393 bp, Klebsiella pneumoniae
atgaaagcgctgcttccgcttgtactgatgcttttggcatcgcctacctttgctgcaattaccgtttttaccactgcgaatcatcctgccatcaatgcggatgctaatactcgtgttgtttttctcgatgcaccagacaggcaacagaatgcaatgtttggccaattcagcagtgatcctgctcgcgctgctcaggaggcgaaaagcggcctacagcaaatgagcgctgagcaacagcagcagatagttgaagcctggcgaggcgtaatcgttgcatggaagctgggcatcgagaagtatcccgcagtggtgtttgatgacgttgatgtggtgtatggcaccactgatgttgaccttgccagcaacattcgcacgcaaggcggccaccaatga

SEQ ID NO: 272868 - DNA, 963 bp, Klebsiella pneumoniae
atgacgcgcgcgaaactggctggcgctgctttgcttttcgctgcggtgcagcctgcaactgaagcagctatcaccagcgcgcagataatcgcgagtgcggtttctccctcatgcatcagttggcgcgtcagtgggatttgctactggctgttctgcacaccgtttggctgcaaggtgcgcacgtcggtgagagtgacgcacttcattcccgaagcagtggtatcagcgtatgcgcagcctgccgcgaatccgtggagcgaaatggcattcgtcagccaggccgcaggcgggctggaaaatggcatgtacggtgtgccagccggtggtggcaatgaggagctaaaagcgccgggtcaacgcaaaaccaatctgcacttcaaatacgccgatgcgattggccatccagcgacttcgctgattggcggcagcatatcgggctattcctgcaaaagcgccgcaacaccgttgaacccttatttcctcagcacgcttgatacgctggcatggcgcagcggcataacggaatcactctacccggaagctctggttccaggcatgcgcgaaatcggcagccaggcaacggccaacatgtggagcaacgtctatccgcgatcgggcttcgtcacgcagaccgatgacgataaagcggcggctgtggtggctcaacgagtggccgatatcatcacccgtgctggtcagcctcacgtttatcaaaccctcaaaggcaatccatcccccggctactggccgcccggtcctgtcgaagaaaataccggattcaaaaatcacaaatggcagcggttgtcgccgcaactcagcgaaaactgcgctgtgttcccggatggcaatttcacgccagccgttgatggtaatgaagcctttgcactctggcagccatacagttgctgccagcggcgcggccagaccttcctctatagcaccgactttggaggtgaatcatga

SEQ ID NO: 272869 - DNA, 1416 bp, Klebsiella pneumoniae
atgatccctcgtttttcattcgccgcgactgcattgctaattgctaccagcgctcaggcatttgatgtttcgctgccgcaggtgcaggacagcagcatgggctacggcaaaagtgccagcggcgcggtgtccgacaagctgttttatacccttggcggcggttcggtgatttcacagcccgccacgcgcagcagcatgcagaaactggggctggatgttggctggagctcagatctgcaatgcggcaacttcgatctgaaaaccaccgtcggcaatcagctgaacggcatgactaacggcttcaaaaatctgatgggcgatgtgattcagggtgcaaccggcgcagtggccagcctacccgcgatggtgattcagcgcgccaatcccggcctgtatgaaatgctcaccaacggcgtgttgcaggcaaatgtggcattcgacaaggcgcagctcaactgccagaacatggccaaacgtatggtggatttctcggactccagcaagtggacgcagcaggcagcgatggatgagtacaagaaactggtgaacagcggtgatgcagacgcgatacgcgttaacgatgccggtgaaaaagtgacgggcgagtcaggtagcaattgggtcggtggtgaaaagcgcggcgggcgtggccagcgcgcgatccgacctacacatgatctcactgccgctggctacaacatgatgaacaacctggctgttaccagcaccggcagcgtgacgggtgacagctgcacgggtggcagctgtggaaaatttgccaatgctgaagaagctgcagcagccgtggtaaaagtgctcggcgatcgctcgattcgtacctgtaaagatgccgcgcaatgcaccgatggcgatatcgatcagcaacctggtgccagcgtcgccggaaccggcttttcgcccatgcttgaagaagccacgcgcatcaatggcgagcagctggtgaagctggttaatggcgcggagaaacccaatgctgagaatctggcgaaactgcgcaccggcagcctggcgatcaccagcggcgtgatcaaagcgctgcagcgtgacccggacaacgcggcactggttggccgtctagcgggtgaacttgcgatggctgacacggttgaaactgcgctgctgatgcgcagaatgatagtgaccggccaatcggaaccgaatgcagcggcaatgcctgaagcgctgcaggaaggcgatcgtcgcgttgaatctctcgatcgggaaatcaccgccctcaagaatgaaatggaattgaagcgcgaactggcacgcaactccgtgctgaccatcatcgaccgtgaaaacaatcgcgccacaactaacccgcagcgccagccgcatgaaaataccgattcgcgtttcaatcaactttccgcgccatccggggaggagtga

SEQ ID NO: 272870 - DNA, 321 bp, Klebsiella pneumoniae
atgcgtaaatttctgaaggtttttgcatggctgttaacgctcatcacattagtctgcatcgccttcgctttgttctggtctgcgagtaaatcacctgaagcactgacgcatctcatgcgctggttcgatagaacatgggtggtatggctgatatggcgactagtgatttatgcggtaaccgcttacttcgcctatcaatgctggcaattgaagaaatcagatccagcctggcgtcgcatgattctgcgcatctgcagcattggcacgctctatatcgtcgtcatggaatgggcgctgtactccacaacaggaggccactga

SEQ ID NO: 272871 - DNA, 1512 bp, Klebsiella pneumoniae
atgagcacgaacagctatctggagttctttcttaccctgctgggttggatcatcaataacggcatctggagtttgctgatatccactggcctgtttgcagtgccgctgatattcaaagtggtggggatctggctcaaggtgcgcgaggaaggcgacgacgagggaaacaaaggcaagttgtcgctgccacgcatcgagaacgcgctctacagcgcgtttttcgtcatgctggtttgttgtctgcctatcatcaatgtcagcctcgacagtattcaatacgatgaatcccgctccaagagctgcggcacatggacgccaaaatcgccggatgaaagcggctattcgacgatcattagcagtatggacgggcaaacggcagcagcgccaatttggtgggtgctcatgcacaaactatccaaaggcatcactcaggcagcagtggcgacaattccctgccgcccggatttacgtcagctgcgctttgaagtgcaacacacccgcatcagcaatccggcactcgccgccgagctgcaggatttcaccaacgattgctatgcgctggcgctttacctatggaagcagcaggatcagggacaaacgaaagaggaggatgcgctgcgcgatgttgagtggctgggcagcaacacctttttgaacggcagcggctattacgatcagctgcaatccaagacgccacgcgcatcatttccgtggaatgagggccgcgacatcggcagaccggacatcggtcgcggtggctatccaacctgccgcgaatggtggtccagcgccgataccggccttgaggcgcgcgtagtcgatcaggcttcgccgggtatgtggttgcgcatgtctgctgcattgaaaatgatgggcaaagacaacgccgaatacaaagaaagcattgttcgccgcctggtcagccccgaaaatttgactgtttcacagaatggccgcacctatgccggttatggcggcaatgccgatttcacgctggataactctgccagccgaattggcggtattgcgggaatgtcattaggtagtctggcggcgttcccagcatttgatgcaatgcgccaggcattaccgatggtacaggctttattactgatggccatttacgtgatgcttccactgatattggcgttcggtagttatgagttcaaaaccgttattaccgtcagttttgtggtgttcgcgcttaatttcctgacgttctggtgggaactggcgcgctggctcgacagctggttgatggaagcgctttatagttctgatacgcatagccgctggaacgcggctgggttccagaatagctctgatgatttgattatgaactttgttatgggtgcgatgtttattgtgttgcctgcattgtggatggcagcgtttggatgggctgggatcagagttggcggaatggctgagatgtttacgaatggagcaaagaatgtgcaaggggctgcagggaaagctggagagtcagtttcgaacggatttcgaaaataa

SEQ ID NO: 272872 - DNA, 990 bp, Klebsiella pneumoniae
atgaatgtaactcaaatgaatagagaactttacttgacccttcacggagttccttgtgagtctgctgaaggtatggataatgtatatttttactataaccctataggggcttggcacccaagccaagataatcatctcaatgatattgaatctatctgtatcaacattcatgatgcattagctgataaaattttcaatggattggaaaattactatttctttcttaatgtagctccagattttttatcaaccgctggaatgaactctgaatcaatgatgtctaaagaacaatttatttctattcttgatgatcactcaggcaatgttaatataaataaagcattgtatctttatgactgccgaaaactagttagtgggatacaagaaaccagtaaggaaatactggatcttcaaggtgagttttaccgcaccctaaatactgaagagcttttttatccacctatgaatgaagaagacgggatcagatatattacttcgtctatagtgacaaagctttttgcattactaggctttaattttattagaatgcacagccttcttgattatgcaactaaattggcagttgaaactgagaatatgagaactgatttttctacatatggtcggctagcatcaaagaatgtgctatatggaaatcgacaaagatcttctttgaacaatagacatggaactttatttgaaacctgccctttaattaatgaaattgaaagcattagaaatcatttaattcacgatgggcaaattgatgatatgcctaaagcgtataagattaatgaaaatggaaagtgtgtggagaaattcattctattcccagatcaaacacctgaggggcgtttcgtttcattcaagaataggaacttattttacagcggtgaaaataaaataaaccttagactcccttgtattattagggattttcaattgcgacttttatctactttaaggatgatattggccggaattgcctaa

SEQ ID NO: 272873 - DNA, 366 bp, Klebsiella pneumoniae
atgcagaacaattttttccaaagtggaatgagaattggtaaagcggttaaattttttgcgaattttatcgtggaaatcagacgacatatgatggctattgctgggaaatcaaaaaccaaaagaaacatagcaaatatactttttctagttatgttcgtggccttaatagtctccatgtcattcattctatacgttgctattggggtggtagggccaatactgataatcttagcagttattgcaatatcaaaatcacacaacacctccagcaacggcaccgataatgaatatgagttcggtgatggctaccgagatggacctgaaggatatggatattatgctggcgggtataaagttgatgactga

SEQ ID NO: 272874 - DNA, 888 bp, Klebsiella pneumoniae
atgtcgcgaggaaataagcagttcagcaagcaattggtgacgttggccagacagtctggcggcagttttaaaaccgttgccgatcgttcgcgtatagccgcacggctggctgagcagatgctgaaactcaacatccagatcagagacgtgaatcatattaagacccaccacatcgaaaattacgtgcgtagccgcctggcggaagatatttcaaaacgcacactgcagaacgagatggcggcgctgcgcgcgattcttaccactgcaggcagaacaaaacttgccgatccgaaacatgagaagttgagtaatcatgcgctcaacctgtctggtaccagtcgcgacggatcaaaaacggcgataacggacgagcgctttcacgaggcgctcgccctcgtacgcagtaaagacgaaggtgtcgcgttggcgatggagattgcacgttatcttggattgcgaacggaagaagcggtgcagtcggcgaaatcgctcaagacgtggcagcaagcgctggagcgcggggatgaacggttgcgtgtggtattcggcactaaaggcggcagaccgagagatacgacggtcgttaggcgcgaagaactggtgcgaagcttaaatgaagctatggcttattcttcagaacatggcggcaagttgattgataaatctgggctaaggagcgcgatcgatcgctaccgaaatgtgactaaggatgctggactgtcagggaaagaagcaccgcacagtttgaggtatgcatactcgcgagaggctacagagtggcatattaaaaacggcctcagcaggaaagaagctgaggcgatggtatcgatggatttaggccatggcgattcaagaggagcgtatgtaaataaggtatataacctttaa

SEQ ID NO: 272875 - DNA, 1977 bp, Klebsiella pneumoniae
atgattgttggattaatcttgcgaaacataagaaattacagaaatcagcattatattcctttgacacatgatggaaaaatatcatttgttattggtgaaaatggtgtgggtaaaagttcaatattatccgccttacattgtgttttaaatgaaactgacataaataagcttgatattaataatgatgtgagaacgcaagggcttgaaactcgcgagcctttcattgtccctatatttctacttgaaaaaaagaaaataaagaaatctaactttatctataagattcttgatgttataagcaataatgcatggcaactggaagtcgaagatttcaaccaactacagcgcccgatagttgaaaagtttgttgagcacaaagataaactccaggcaaacttcagtgatgatgaatattttcttatacccattggctttataaaaaataaagcaagcgagagccctgcaacctatctttctttcctagagtcattttcctatgtggaagaagaggtaaaagccctccttgaagaagaagactgcccttcttggttaaaaaaatataataaacaagaatggtcatctagagtgcttaatacgatgagggaagcacatagttacatatatgtgccagctgagataacagctgaaagctactcaaagatagaaggagaacttcttcagagtcttctaggtgatgatattcactcacagataggacagacgataagaaaaagtgacattagaactataaataaacacttgaatgactttattgagaagatcagctcaatcttaggggataggtatcattttaaaaagccttctcaaaggcaaagtcagtttacacagcgtcatatgattgccaagataatagatgcgtatttttccgaaagaattttacataggaaagataataatagagatactaacattcacaatttaagctcaggtgaaaaacgcaagtcactattagatcttgcattggcatttttacagaacaaccctaaaagagctaatcaagacattatttttgcaattgatgaacctgaactttcacttcatcctgcggcatgttactcacaattcgaaaaactcaggatgatttcagggcttcaaattcaaacgctagttacaacccattggtacggttatttacctgttgtcggtgaaggaagtgctgtttatatttcaccaagtcaggctactataaaaatgattaggctaaatgattatagaggtgaactgaaaaatcttgtttctgaaactaaggggcgatattttgatacacttgaaattaaaagtaactatgacattgtacaatcaataatttcatcattaacctcaggcaacgcttacaactgggttgtctgcgaaggcattaccgatagagagtatcttaaattttatcttgatagattagaggtaaagaacctagttatattgccagttagtggatttgtgactttaaagaaaatataccaacacttggttctagctcttgaagaccgtaagccctcaatctctggaaaagcatttttccttatcgatactgatgagcgatttgaaaacataagtttgactgaatcaataagcgcaattagaattagaaggattcaccaagttatcgaagaaaataaaataactcttaaaacattatcggatactcacatatctcccaaaaccgccattgaagatgcacttaattctgatatttatttcaacactcttcattcgatgaaggatgatggtttttttgagctcgatttttttgatgataaccttgagtattatccaaataaaacatcaggaagatgtatagattgtaatgcttatgaacaattagaaatagataaccttttcaagatccctgggtttaaagttgagttttgtaagcggtatgtgagtaatgtaagtgatgactttgaaagcttgacatggatcgatgaaatagcatcatttttaaaagggtcagtttaa

SEQ ID NO: 272876 - DNA, 504 bp, Klebsiella pneumoniae
atgggctactgccattgctacacccaactgaaatcagtacctgacgatcagtggttactgttgaccgtacaactatcaaacgtgtttttaataatacaaaaccggcatgttcccggctataagcaaccgttggtgctttgcaccagtgatggccgttatccacttctgcagcccgctgatttgatagtacaaagcggtattctacaacccgctatctcttttaacggcgaagagaaggaagatcttgagtacgaaagtttctttcttggccaacattcgtctggcagtgaattctgtaagacatcgttcaactggtcaccagaccggccttatgactttatggtgaaagccacgctactgctggcacatcgattttgcatcggctgttatgacatttcatcggatggcacgcttgcagaatggcttgatgttcaggaatggctaacgaagcacttaggtggccaatggccaatacctgaagcaatcctgaacaaccccgagtaa

SEQ ID NO: 272877 - DNA, 987 bp, Klebsiella pneumoniae
atgccgaccaaacgcaaatcccgtaagtcacaaaccaatcaaattgatctctaccaacaagtcaccgacaaaatcatcgcgtcgatcgagcgaggagttttaccctggcgtaaaccgtggcgagacagcaagcgatccgctgaatcaccgataccagccaatgcatcgaccggtaggcactacaacggcgtcaacatcatgctgttatggctgtcagctgaagagcaagggtttaattccaatcgctggctgacgtggaagcaggcacaagctgccggtggcaacgttcgtaaaggcgagaaagcgactatggcggtgttctttaaaccgtttgaagttgaatctacagacaagactggccaaccgcgcaccaacgctcaaggtgaaacagtgatggagcaacgcatcatgttgcgcagcataatgctgttcaatactgagcaatgtgaagggctaccggagagattcagcagcgctccaactgaaattctggatgaagaatgcgaggattcggtgagcgtgccaatcttcaatgacattgtgactgttgcaggtgaatctggcgttcgcgtctcgtattccgagcagaaccgggcctattaccattcactaagggatcaaatcgtcctgccgctacgtaagcagttttttaccgcagcagacttttactcaaccttgctgcacgaactggtgcatgcaaccggccatcacaaccgacttgatcgggaaggcataacatcgacatcgcgcaaatttggcgatccggtttatgcgtttgaggagctgatcgctgagctgggcagcgcattcctgtgtgctcacttaggtgtgtacggtgaagtgcagcacgacagctatatcgatcactggctgaagatactgaagtcagataaaaaggcgttgttccgtgcaagccgtatggcacgtgaagcatcagagtaccttttgaagccgctcaatgcagcggttgaagaagacgccgcctga

SEQ ID NO: 272878 - DNA, 1485 bp, Klebsiella pneumoniae
atgttccaaaaattacaatacaaattaagacgcagcactattcagccttcattaccggttgaacgcgaaggctacttcacaccgcaaaattacccaacgctgctaggcacgccagtgcggcagatgcaggtaaagaaaatttggcagaattctttgctatcccgctctctctttaacgccttttgcctggagccgctgcaagagctggctgaacgcttccaaaatctgcccacgggacgcttaccggaatggagtcatagcggcggtttacttgacctaacgctgcaaaatatcgtggtaatgatgcaactggctaaaggcattatcctgccagccaacgcgctgccagaggatcaatctgcacagagcagccactggaattgcctggtgttttggctggcgctctattggtatgtcccggaattgttgaacattgagggcgaactggatgatggccaaagctggaatccgctatcaattgcgccgcaacaaccgtttcgcttccagctgaatcacgttgatcatggtttagacgctgcgggagtaacacgtctcgcatttgctgttgccatgctgcctaaagaagcgatccgttggctagaatctcagcccgctgcgagaaattgcttttatttagagttagctggattcgaatcgccggaaaaacagatccacgatttaattaacagagtttcagatcggctcagccgcaagccatcaaatttagcggaaaatactcacgtcgatgatgaggaattacatcttcgtgcggtggacgttaaaacgcacaaaaacgcgccacgacccgagctcgatgatgtttacgaacaatactttaatcaaggtaatgtgacgtcacaggctggagccagttttgatctggaggaacaatttaagatccgtcaccaggaatggagtattggttctgatttagatgaaaatcaaacccaaaaaataggaatagtttcagacgacgatcaccaagtaattgatttaatggcctacggatcttccgaaagtgatcaaacaaacgtcagaaatacttatcaaacgcaaaaacctgatcaagaatctgcccctgtagcacctgagacaagctcacaaatttctaagaaacagatcggcgaggccttttggcactggctgagtgagggtctcgaaaatggaacgatagcatgcaatgaagcagattcacgcgtgcaactggtcgcaggttttgttttcttgctagtaccgggaattttttatcgttatctgaagcataccggtcagtctgcagacgaacgtgaaaacgttcaggcagggtttgaaagactcaaccgacatcggcgtaacaacggcaaacggtttacgtttgccactctctacaacagtgccgaccgtaacggcccttataaacgtgtgaaaggctatctggtcaaatccacagtgctgtttcaggccaatcatgtgcctgatgatagccagtttttagtggttccctga

SEQ ID NO: 272879 - DNA, 1053 bp, Klebsiella pneumoniae
atgggagcagcggttattttgctgattaaaggaaatgttatgagtcaagtaagcgatactagctgggaatttttgctcgatgaatacttctttgtgaaagtgcttcgcccggatacggagtggagctatcgcaaagttgttaatgtctttcgaaaatattatggtgatgaaaagaggcctggtgacatcagtcgacgcgacgttcagcaatggcgtcgtcatgtcattaacgttgagaaatcttccgccaacacctggaacaataaagtggcacatctacgcgcgctgcttaattttgccatcaaagccaacctcgttgatcagattgaaaatcctttcaacgatgtctcaatgcgcgccgataacaagcgaaaaaagaccttatctcgccagcaattaacccgtgtttatttattaatgcagcagtacgctgatatggaccagaagattacgaccatcgaaatgaagcgttgtgctttgtatccagcttggtactggattaccgtattagatactcttcgttatacaggtatgcgcgttaaccaattaatgcatattcggttgaaagatattaatcttgaagaaagctggatagaactgcgtttagacggaagtaaaacacatagagaatggagagtgcctgtcgttgggccgttaaaatttaagttaaagcacttaatcaatgaggcagaaaataacggagcagaacttaatgatgctttattcgatgttaatcgctatattggcaatctaattaaccaagataaattgccattggttccacctatacagcccataaaatcattttttaggcgactatctaaagagtgtgggtttgccgtttcccctcatcgctttcgacacacattagcaacagagctaatgaaatctccagatagaaacctacagatggttcgagggttattaggtcatcggagtgttacaactactatggagtatattgatataagcttagacattacaggcaagacattggaaaaagaattaggtttacacacggataagtatctcccagagtatatcaagacttag

SEQ ID NO: 272880 - DNA, 834 bp, Klebsiella pneumoniae
atgattgatagtattgcgttacttaaagcttcagtaatgggtatagttgaaggattaacggagtttgttcctatatcttcaacaggtcatttaattttaactgcgtggttgattaattttaatgaaagtagtgcaaagatttttgagatagctatccaaacaggagcaatgttagctgttatctggcaatatcgtaaggttctaattttcacagtatgcggaattttcaatgaaaaaaaagctcaaagattttcattaaatattataattgcttttcttcccgccgtggtgtttggactttccttgggtggatttattcaagaacatctatttaatccaatagtggtatcgctggctttcatttccggtggtgttattattttaatcgttgaaaaaaacaacaataaatcaataataccaaaggttgataagattgatgaaatgactaaatttgaggctcttgccattggtgtattacagtgttttgcactgatccctggtatgagtagatctggatcaacaataattggggggatggtattaaacttatcacgaaaatgtgcaacggaatttagtttttatcttggaattccaacgctcatgggagctggcgtttattcagtatggaaggaccgcgctcttcttcaggcgtcagaccttccactgttttctgtaggttttatattttcttttattagcgcgctgatttgtattaggtggcttattcaatatgtttcctctcatgatttcaaaccattcgcctggtatcgtattgcctttggcatcatcgtattaataacatattggaatggttgggtgagttggtcagtgtga

SEQ ID NO: 272881 - DNA, 576 bp, Klebsiella pneumoniae
atgatttcatctgtggttgattctgtaaatatcattgattttatgaccgagcagtggttttttagtatcagagatgggttttggtttgaaattttcaaagctataaccactctgggaacaattgtgttttcaagctgtatattaatatgtctaacaggcattgcagcatatcgaaaaaaagttttttttacaggggcaatgtggctttgttatctcttgtcagaaggaactacctggggcctcaaatttctgattaaaaggcaacgtcctgagatcatagatggtgtatttgaatcaaatccatcattcccaagtgggcattctacagccataacctacgtgacaatctgtattatgtacataattttcattatgacacccagtgtaacctacagagtattaattacggttttatccatctttttattaattgcagtgctttttagcagaatgtacctaaatctacactatctcagtgacgtaacagttggagcacttatcgggctcgtttggggttgtatatttatgaagctagcccgcaataatttgattaattcttttttaatatggaggtga

SEQ ID NO: 272882 - DNA, 1266 bp, Klebsiella pneumoniae
atgagtaatgatttaaaacaagagcaggaaccatcaactactaaggtgagaccagcctggcttaatcgaactgtcaccggcgtgggtattaccagtgcgttgggcgacttctgctatgaaacaacaaccgtaattctgcctgggtttttggcggtcctgggtatccctgccgcatggctaggaacaattgaagggacagcggatgcagttgccgcattcacaaaactctgggctggctatatcgcagaccgtcttggccatcgaaagtttttggtgctaattggctacttgctaacccctgttggtcaggctttgatagcgatggcgggagcctggccgttacttttattgggcaggataatatcctggtttggtaagggattacgcggcccgttacgtgacgcgattgtaatacaatctgttacccctgaaacacgcggtcgggcgtttggatttcaccgagctgccgacacagtgggggcagtagttggtcctctattaggggtcgctttgttaggttgggcacaacaattgccatgggaagatgcagcagggccattcagacttgttctatggtggtctattattcctgggttacttgccgtactcgctttttttctgttgattcgcgacccagaacaatcacccaatccgggactgcgttttttcagctctctgagcaggttgccgagacgcttcaaatattacctttctgcggttggaatatttggtctgggtgatttctctcacagcttgctcattcttgccgcaactactctcctgacacctgagcatggcgttgttcgcgccgctcaaattgcgggattaatgtatgtctggcgtaacgtgctacaaatgattttctcatggccagtaggtgcattagctgaccgcataggacaccgctcggtacttacaggtggatacttacttggcgctttgacggcgggttttaccggattggcattcatgattaatagcggaagcctaacgttcctggcaatgattttcgctgtggcaggcatttatactgctattcaggaagcacttgaaccgacagtcacagcagaaatgattggatcggaaacgttggctataagttatggtgcgctaggcattactaatggattaacgaaattcatatccagcgcagcattggggcttgtctggacagcattgagccctgcactggggttcatgttagccatgatacttatgttgatcggttcatatgcattaatcagaagccgctatgtatggaattga

SEQ ID NO: 272883 - DNA, 804 bp, Klebsiella pneumoniae
atgtctgaagtaaatgtgttgacatggaatactttatttgctggttatgacggcaatgaagatcatcgtgctaaattacagattcagctacttaatgagattcgcccagacatttttataatgcaggaggcaaaaaccttccttgtcggaggtcatgcgcggctttatgaattcgaagcgttaactgggttgcgaggatttattgctccggccacagataccggccagcatgttgcagtatttattcgccaacctatacggccacgtagttttatcagtgattgtgttcattttcaccacggcctggctgcacttcacgtaaatttatttgatggcactgacattacatttatcagcacacacctttgtccggctggtgtggatgtaagacgccgtgaagctgcctatcttgccacacaaattgacccagcaaaattgatgctattggcgggtgattttaacgccgcatctccacatgatccgttacctggagattgggcttcgcttccggcacagcatcgatctcgttatgcctcggataattatgttgacttggatcacagcatacttgaacggctggaatctgccggttgggtagatcttggccagcaacatgatcctcaacttgttcctactgtcccaacagcaggattccataacaccgagtttccaaccatgcgctgcgattatctgctggcgtcacctctgttagccagagcatgccgacgctatgaagttatccgcaatcagcttacggatgcagcatcagatcattaccctgtgttgggtgtgttctcggtttaa

SEQ ID NO: 272884 - DNA, 630 bp, Klebsiella pneumoniae
atgaaaaattatatttatggtctaggaggaggtagaagagtaagatttattccagagccctctcaggcgatccttattgttgcatcgctaaatttaatttacttttttattgagtttataatcgctgaccagttggggtcgctttcactgtacgctgacagtgtagatttccttgaagatgctttctcagggtttcttattctctttaccatgtcattatcagctaaacaccgtgctgtaatgggacgaagtttatcggttttaatgcttatacccggcattgcattcctgattttcgcaatcagcaaagtcaatgcatcagtaccaccggaaggatggctgcttactctcactggtgtcggtgcattattgataaatggcggctgtgcattgttaatggcacgctttaggctgaacaacattccggtcacgcttgccgcattcctgactgcaagaaacgatgtaatagcgagtattgcactgattgtaacagggctagtaacaatatattggcagtcagcatggcctgatattcttaccggaacggccattttcataatgaatattaatgctgcaaaagtaatctggctagcagcttcaagtgaggaatcgaatcctttatctaattga

SEQ ID NO: 272885 - DNA, 552 bp, Klebsiella pneumoniae
atgagttcacatagttggttgctgatatcttacaaagtaccctcagagcctgctcgtaggcgcgttgcactgtggcgcaagttaaagaccatgggggccgtttacattcaaaatggtgtctgcctgctgccgcgtaatgaggagcatactcgccagcttaaaattattgaaaacgaaattggaaatatggatggagagtgcgtacttctcgattcggtagcgcttgatgatgctcaacaggacaaagttattgctcgcttccaggccgaccgcgaagaggaatacacagaatttctggggaaatgtcaggactttgaggacgaaatagcgaaggaaacagctgataagcattttacctttgccgaactggaggagaatgatgtcgacctcaaaaaattacaatcctggctcgataaaattatgaagcttgatttctatcactcccctgttcgagaaacggcatctgaacgtctaaaaaattgtgaaagccttctggaagaatatgcccagaaagtatttgaagcttcagacgatcatcgtcaagactgctaa

SEQ ID NO: 272886 - DNA, 909 bp, Klebsiella pneumoniae
atgataaatgtattcggtcatacccatcccgatagcgatgctgtttgcacagctgtcgtaactgccttttggctgcagagcctggggcgaccagctcgtgcatggcgattaggtgagattaatcgcgaaaccagatttatttttcgagcgtctgggctgcctttacctgagctgctcacatctctggaaaatgacgctcctgtctggctggttgatttcacagaaccctcccaaggtccaaacttccttcataactgcaacatcgtgggtgttatcgatcatcatcgcctgggtggcctcatcacacagtttcccccagaggtttggataaggccggtgggaagcagcgcaacgctgttgtggtcactaatgggtaggcccattcgcaatcatctcaccgcaggtcacgcagttttgctgctcggcgcgcttctcagcgacaccatcgccctgaaatcaccgactacaacaaatgatgaccggcgcgcggccgaagaactcagcgagcatgctggcattgatctgaatgaattcagccgtcagttactcgctgctaaaacggatattgccggactcaatgccgaagagttgcttgagaaagatctcaaggcatttgtgattgctggtacagacgttcggattgctcaattggaagtcgcatccatcgatcagctagctgaactacgtagcgcattaaataaagcaatagcagatatggccaggcgtactggtgctgggttggtcgtgctgatggtcacagacatcgtgaaatctttttccacgctttatttcgccggaaacgcaatccatgaatccggcccctgttcaataccgggcatgctcagcaggaaaaaacaactcctgccctggcttgatgcccgcctgaaaaaaagccgaggtgaatcatga

SEQ ID NO: 272887 - DNA, 426 bp, Klebsiella pneumoniae
atgagttgttattcccatgctctggtgcttgtccacgataaagaggacggtacggtactgttaaatcaggctgccgcgctggctaagccattgcgcatgaaaattaccatagcccatgtcagcgacgattatcgagagatgaattatgtgtctgacagccttatggacgatgtagtttcggaagaaatcattcgagcccgggccacgtttagtgagcttgtgagcggttgttctgagccggtagacacgcgcgaactggtgacaatgcgacgactggaggacgttgataaatgcgtagaagatttaggcatagatcttgtcattgttggtcatcgcaaccgtttccttggaacgttcacctcacagtcgatggaatacattaatcatcttaacgtcgatgttctaacgcggcatattccggattga

SEQ ID NO: 272888 - DNA, 1293 bp, Klebsiella pneumoniae
atgagctataagttggagaaactgattgcccgagaaattctcgactctcggggcaatcccaccattgaggttgacgcctggaccacgggtggacaaatggcacgagcctctgtgccatcaggtgcaagtacaggttcgcgggaagcggtggagcgtcgtgacggtgataacacgcgctattctgggaaaggcgtactggaggccgttaaatctgtaaacgctgaaatcagcgagctgttgtcaggttttgatattcgtgagcaacggcttattgataacgcaatgctgacgctggatggtacggaaaataaaagtcgtctcggtgctaatgcacttctcggcgcatctctggcagtggctcgtctcgcagctaaagcagcaaaccaatcgctctatcgctggatggggggaatgcgcgcaaatcttcttcctgtaccctgcatgaacatcattaatggtggtgttcatgcccgggggcagggtgccgattttcaggaattcatgattgccccacacggtgcagccacatttacagaagctgtgcgccagggaactgaggtgtatcaaacgctgcgccaaattcttctcaaaaataacttgtcggttgctgtcggagatgaaggcggatttgccctgcctgtctcatcaaatcggcagccactggattttattgttcaggccattgagcaagcaggttatcggccaggagaagatatcagcatctgcatggatccggcatcaagtgagttctatgcaggggaaaaatatgcattgcgtactgaaaaaagcagtctgacatctgaagagttaactggatattatgaggacttaattaagcaatatcccatcgtactgcttgaagatgggctggccgaagatgactggtccggttggaagcacctcaatcagcagcttggtggccatattgaactggttggggacgatctgtttgtcactaatgtgaaatacattcgccgtggtattgaagaaaacgtagcaaactcagcactcattaaactgaatcaaatcggtacgttgagtgagacgtttgatgcggtagcactttgccagcagcacggatggggcacttttatttcacatcgtagtggcgaaaccacagatacctttatcgctgatatgacagtggctttgcgggctggtcatctcaaaacaggcgcaccgtgtcgtggagagcgcgtagaaaaatataaccagctaatgcgcattgaagcagagctgggagatgacgctcaatatgcaggacggcatgcgttcgtccgtaatagccgctga

SEQ ID NO: 272889 - DNA, 717 bp, Klebsiella pneumoniae
atgaagccatcgacgttaattttacttcgacatggcgagagtcagtggaatctggaaaacaggttcaccggttgggtagatgtacctttgactctcacaggccaaatagaagcacagcgagcaggtgctcagctgaaaaatacaggaatgctgcctgatgtagtttttagttcattacttactcgctgcatacacaccgcgtggcgggtactcgatcagctcgatcgcgcctggttacccgtggaaaaaacctggcgcctcaatgaacgccattatggtgctttgcaagggctcaacaaagcagaaactgctatccggctgggtgaggatcgtgtcaatcactggcgtaaaagcttccgtggcataccgcccgcagattacgacgcgccagccactcttcatggtgatccgcgttatcggcatgtcatgcttcccgatttgccctttggtgaaagtcttgaaatgacgatcatgcgtgtgctgccttggtgggaaaatgttgcggtgccgcacctattaagaggtcagacggtgctagtcattgcacatcgcaactccttgcgggcacttatgatgtttctcaccggtatgagtgaagagaaagtggccaagcttcaagttcccacaggtgtgccgatcgtgtacgacatggacgagaacgctcgtgtaatcacatctcgcttgctggaagaacacttggataagagggaagcatga

SEQ ID NO: 272890 - DNA, 381 bp, Klebsiella pneumoniae
atgatcccatctttttttgctgtggcgattggtggcgtactaggctgcgttatccgttggcaacttggagtccgccttaacggtttttttccgaatctcccacccggcacattgctggttaacctcgttggcggcttcattattggtgctgcaattgcgtggtttctcaagcatcctcaactcgatccggcctggaagcttttaatcactaccgggctgtgtggtggaatgacaaccttctcaaccttttccgttgaagtatttgcattacttcaagccgggaactacacatgggcggcgctctccgtattgatccacgtactcggctcattgatgatgactgctgcaggtttctaccttgtgatgttaatgttcaattaa

SEQ ID NO: 272891 - DNA, 492 bp, Klebsiella pneumoniae; identical to SEQ ID NO: 80082

SEQ ID NO: 272892 - DNA, 1209 bp, Klebsiella pneumoniae
atgagtagggaaattaaacttccggcgatcaaggttgaacaacccattggaacgttttatgcagtttcgattagctctgatttattatcaaaggttgcatttagctctagagctgagtataaaaacaaagatctccaagatggttttttgtccttattgaaaggcaatcaacgtgatttagatatcaaacgtagtaaacaaataggacaatatattgacagcatagaatcaacctttcctaattctataattcttggagctaatttcgatagagatggtaatttaattgaagattacgatatacgatggagggtagaaaaagatggagaacagtatttcttaattattccttcagaggataatgttgtcgctacaataattgatggtcaacatagactatccggctttaaatattctgagcgtaaaaacatggaccttttatgctctgtatttattgatcttccagccccgtatcaggcatatatttttgcgacaattaattttaatcagaaaaatgttaataaaagtcttgcatatgacttatatggcttcagagttgaagaagaagaacgaaaagagtggtctcctgaaaaactcgctgtctatatttcaagaagattaaataaatactctatcccattgaaagataaaataaaattaggtgctccttcagatattgacgagacaagtgaatccagaaaattcatatcattatcaactgttgttgatggtattataaaattaatcacaaacaaccccaaaaaagatagggatcaacttttaaatttcaaaaacaaaaatggccgccaagccttaacagataaaatgcctgcacagccattaaggagtttttatttaaactacaaagatgatgagatcgagaaaataattaataaatatttttccaaatctaaagaattattatgggactatcaatcagaaacaagctacttacttaaaacgattggttttcaaacacaatttgaaattcttcgtcaatatttgctggctacatctgattatgaattaaacaatatagacgaaaaacttaccttgctaagggaaattgatttttctgatatcttttttacagcttcaggtattggtgcctcacgaatgaaaaatatagcgttgattaaaatcggtttaaagccccttgctgacttgaaagaacataaagactataacgattatatgcgattactataa

SEQ ID NO: 272893 - DNA, 726 bp, Klebsiella pneumoniae
gtgagtgataaatacgtaattgaagcccttctgcgcccggctgttgaactgaatacagcggtcgcagcgggcactgccgccatcgtctgcgtgacagcgccctgggcagtcgccctggcaccctccgtcagctacgtcaccgccggcggattcgccgtgctttctgccatacgcgcgcgtcagggaatacaggtcattcgctaccgccgtaatcttcgccgtttaccgcgctacgtaatgacgtcaaaacagatccccgtgagtaaacgccggctttttctgggccgtgggtttcgctggacccagaaacacactcagcgcctgcgcgatacgctgcgcccggaagtggcccactatcttaagccgtcgaagctgtatcagcttgcccgccagttagaggaagcgacagaaagcagtttgccggcgatcggcaagctgctcagtgcagattcgccagtcaatccggttcgcccgcttcccccggttggcggtaatccggccgtacacggcattgagccggatgaaactgacgtcacgctcgatttacgtgagcgggtcggccacacggttgtctacgggacaacccgcgtgggcaaaacgcgcctcgctgagctgttaatcactcaggatatacgtcgtggagacgtcaccatcgtatttgatccgaaaggcgatgcggacctgctgaaaagggtctgggcggaagcgaaccgggcggggcgatga

SEQ ID NO: 272894 - DNA, 339 bp, Klebsiella pneumoniae
atgaacaaaataaactatcaaatcaaatacattgaatatttgttgagaaaatgcagaacaattttgactaatgacatttcatttcatgcagacaggttaagagaaatatctggcacatatccggatttactcaaccctgtaacgcttaatgagaaaatttgccatcgcattttatttatccacaacccattttatacattgcttgctgataaacttctggtcaggcagtatgttgagaaacggactaatttaattaagcttattcctttagtaggtgtttataatagagttgatgatattgatttcgacaaacttccctcaaaatttgttttgaaatga

SEQ ID NO: 272895 - DNA, 993 bp, Klebsiella pneumoniae
atgaataatttcgagcaccccctttttacagtagtgatacctaattacaaacgagttgaagagcttaaaagagctttacaaagcataatagatcaaaaaaactttgaggagttggttgataaaattattattgttgacgataaaagtgaaaacgtaaaattaatagatgatactataagcttatttaataataataaaatattgcacataaaaaataatttcaaatcaaatgctgcttatactcgtaaccaaggtgctaaatgtgcaaaaactgaatgggtatgttttttagattctgatgattcatttgcagtcgataaattaataaaacttgcacatgaaatagtcgagaataatcattctaataaaacggtatttatcaatcaagctgtggtatatttcaataaggaaattgaagatatagttcctcaccgtgcaataggagaaaaagagcatataagcgattatctttttgtttctgatgaatatatgcagacttctactttaactattcatagctcattctttgaaagatttgggtttaatgaagagtatgtaaggcatcaagattatgatttatgcctgactttatacgaaaatggttacacgtttaaacaacttgattttgtagggactaatatttactggggtacacatgaacgaccgataagtaagggggaatctgtaaattactcgttgaaatggataactgaaaacaaaggaagggtaacagaatgtgcctataataattttatgtttaaatttgtggtgatgaaatgcctacggggtggggggaagttacattcattacaatatatttcaaaggtgaaattgaattatatttcatataaatacaaaatgtatttcttgatacttttgtttacccctggttttttatatttctatttgtataattcttttaagaaaaggaaagtaaatgcgcgaaaaaaaaataaatcccttatcgttgctaatagcgaaaacaactactaa

SEQ ID NO: 272896 - DNA, 738 bp, Klebsiella pneumoniae; identical to SEQ ID NO: 270565

SEQ ID NO: 272897 - DNA, 876 bp, Klebsiella pneumoniae
atgtcatttgaattttctcaaaacccgcaggccatctggctctatcagtacgatgccggtggtgtttatattggctccgtctttatgactatcccggcgggcaccggtctgcccgttaataccacacatattccctgtgtgccggataaaggccagaccggtatttataaaaatggtgtatgggaatatgtggacgatattcgcgggacccgttactggaatattcacggcactggctttgttatttcattcctgagtgaatcgctaccagaatgggccatcaccactgagcctccggtcgtggatgccggttatgttctgctgttcgctgatggccgctggacgcagattgaagacagaaccggtcagatttactacgagactgacggcacgaaacataccgtctctgacgcgtggttcgcgctgcctgagggctgcacgttcgtgcccccgccagaggacaaagcgacgttcgtcacccgctggaacggggctgagtgggtttatatcaaggacctgcgcggtcaggttatctggaacaccgcgacccgtgagcctctgaccgtcaccgatattggtcctgtacctgatggctataccctcaaaatgccgggccagttcgacgagtgggatggctcagcctggattaaaaatgctgatgctgaacgtgcttatatcatcgctcaggctgaccgtcagaaggcgaagctgctctctgaggcttcggagcagatttctctgctgagctatgccgtcagcagcggccaggctactgacgatgaaaccgcacagctggcacgctgggaggcgtaccgccttgcggtgagtcgtgtggataccactgcagccgatattgtctggcccgagaagccgtaa

SEQ ID NO: 272898 - DNA, 981 bp, Klebsiella pneumoniae
atgactgactctggcatttcgggtgcgttagctatcgtgcaaaaagcagccaaaccattatacaaccttgtaaaggtaactggcccttttctgattgcgcaatctaagacggctgttgaaaactactctgatttcaaactaaacaaagcgcgcttagaggcaatatcagcactacttcaagaagaagtaaaaaacatttcagctgaaagatcgacacttcgagataaaatcgcaaactccactggtcttgagagagtccgtgcacagaatgattatgatctattaacaaaagaaataaacaagctatccacggtggagaaaataaaggattttattggagataatgaggttgtagatgaaaacattgaaatttatgataattggattgataaattcaatcaattagcatcatcacttaatgaagagtggagaaagcagctacttgcgaaggcattcgcgcttgagttaaaaaaaccaggtacagtaaacctacttacattaaactgcatagcgtcttttgatgaaaaaacctttaggatatttggttttttagttaactcaagtataagattgtacgaaataaatttccttcccgttattgatgccaaaaagtctttcaggatcaatgacgaagaatttaacattgataaggccgggtatgaactaggccatttaaatctcctgagctttggagataatggctacctcaaaatagaaaataaggatatttacatgaggtatggtcgccgcgtaatgagaatacgacgtcctgaacacccttggattcaagaacctaatagcaaaatttacgcaactttctttacaccgctcggtaataacatagcgagtctttatacaagaagccttaatgactatggaaatgataattttgatcgacttctagctgaagccaaaggaaaaaaattcgtatatcaagaaatagaaatgtctgaacaactctatagtgagcttggtaattaa

SEQ ID NO: 272899 - DNA, 591 bp, Klebsiella pneumoniae
atgctgcgtaaacctccggcaaaagtgaattgggggatcgatatcgacccgcaaaccgtcgaagcatttaaccagggaaatcctgattttctggatagactggctgataccctgtctattgatgttggcgatgcggtgaaattcttagatcgctttgatttttcttctgccggtcgtgtacttatctatgccgatccgccgtaccttcatgaaacgcgcagcagcagcgcccgctatcgacatgaatattctgctgaagaccacagaagacttctgatgtgtttgcgatcgcttcctgataccgccagcgtgattttgtcgggatatccatcagatctgtatgatcactacttgaccggctggcgtagcaaggagtttcaagctatgacgcgcggcggtgtacgaaccgagaaaatctggatgaactacccggaaggggctgcgtactcacatgctttcgccggtaaagactacaatgatcgctatcgcattaaacgaaaagcacggcggtggaaaaacaagtttgcagcccttcccgctgctgagcgcttggcgataatgcaggcgctttgcgaggctgatggtgattga

SEQ ID NO: 272900 - DNA, 396 bp, Klebsiella pneumoniae
  misc_feature (299)..(308): n is a, c, g, or t
atgaagatctatttaactataaatgaatcgtttaaaaagtatcttaaacctggaaatgacagggcattctttctcaagatacctgatgccatcccctctctatttgaaggattagaatgcgacttagtcatagtgggtgggagtgattatatatgcattgatgatttctcacgcattataattgataaaaatagtaacttctataatgatattagtgaacaattatccaaaagtggaacgatagagatctctaaattattaactgctaaaaataacaaaagtttctttagccaggttannnnnnnnnncatattatcagataaaagatattctaaaaaccaagtcaaaaagatttcttctaaaaataagagatataggagcactttcagaatataa

SEQ ID NO: 272901 - DNA, 294 bp, Klebsiella pneumoniae
atgcaattgaagattctgggtgtgggcaacgcgccgttgctgtctgtcaaggttaagacgttggacgatgcagaagggttgctaaacgtatcagcactcgccagggcgttggcggtaaagcgcagcaccttcttgtcgaagatcgccagcgtgggcctggaacaggccatcattcattacgctgccatcaaaaagcagaaggacgtgctcgccacactgtcagagaaagacgctgctgcattcctcgcttcctgcaatgctaatagtgcaagcggcgaggtattttcattataa

SEQ ID NO: 272902 - DNA, 1239 bp, Klebsiella pneumoniae
atgagtaagttaaccaaatataagtttagcgacttgtatagtatgtcgtctggaatatcttcaactaaagaacaagctggccatggaagtccatttttgtccttctcagtagtattcaataattattttgttcctgatatccttaatgatctgatggcctcatcagaaaaggaaaaagaaagatattccattaaatctggtgatatttttttaaccagaactagtgaggttgttgatgagctagcgatgagttgtgtagctgttaaagattatcctaatgcaaccttcagcggttttcttaaacggttacggccgacacaagataatattacttaccctaaatttatggctttttatttaagaagccctatgtttcgtaagacaatgactaacaatgcggttatgacgttgagagctagtctgaacgaagcaatattctcttatcttgaacttttattacctgcatattcagaacaaaaaaaagcgggcgatcttttatatttattaaaccataaaatcgccctcaacaaccgcatcaacgccgaactggaagggatggcgaaaacattgtacgactactggtttgtacagtttgatttccctgatgccaacggaaaaccgtataaaacctccggcgggaagatggagtataacgctacgctgaaacgggaaattccggctggatgggcggttaaaacgctgtctcaaatagcggatatcacaatggggcagtctccagccggggagacttataacgataatggaatcggaacgctatttttccaggggtcaacagactttggttggcttttcccaactcctcgtcagtacacaacatcacccgcgagaatggcgaaaaaaggtgatattttactcagtgttcgtgcgccggttggtgatatgaatattgccaatgccgattgttgtattgggcgagggcttgcggcattaaacagcaaaagcggctcagatggatttttattctacgtgatgaagtatttcaaacaggtatttgatcgtcgaaatgcggagggaacaacatttggctccatgacgaaagatgatttacattcactgcaagtcgtttgcccagaacccgaattactgaaacgatatgacggtattgtttcagaatacaataaaatgatttttacgcgtagccttgaaaatcaggaacttatcaaactccgagactggctcatccccctgtttatgaacggacaggtcacagttaaataa

SEQ ID NO: 272903 - DNA, 426 bp, Klebsiella pneumoniae
atgtttaccaaatcctttatcgtactcgacggtaattgtcgcttgaccggtgcaagaacgacaaaacagtatccgtatggccataacagcggccccctgtgtggcagtgcgctgcaattcaatcctcaatacgacactaaacggtcgtggtttgaatacggtgcagaagatctcacgaagagctacagcgagcagtactgctcatatgtaaagcccggtgtgacggagacctgccatatccagcaaatgcaacattatgtacaggatgcacgaccgttggttttcttggctgtttggcactgttacgactgcgacagcgattaccactgtgaacgccactgcctgacctgccgaaccggtgagcacaaccatatgttctctgatactgaaacccagcctgcggaggtggtgatatgcgcatgctga

SEQ ID NO: 272904 - DNA, 1563 bp, Klebsiella pneumoniae
ttgtggaaagagtgcctgacgctgccggacttcgacaacatctccaacacccttatcccgatgggcaccaaagaagacccgttctggcagggctccggtcgcactatctttgccgaaggcgcgtacctgatgcgtgaagacaaggatcgcagctacgagaagctggttgataccatgctgtccattaaaatcgacaagctgcgcgcctatctgcagaacacgccggcagcgaacctggttgaagagaaaattgagaaaacggccatctccattcgtgccgtgctgaccaactacgtcaaggctattcgctacctgcagggcatcgagaagaacggggagccgttcactatcagggactggatgcgcggtgtccgtgaggaccgacccaatggctggctgtttatctcctccaacgctgacacccatgcttccctgaagccggttatctcgatgtggctgtcaattgctatccgcggcctgctggcgatgggggagaaccgtaaccggcgcgtgtggattttcgccgacgagctccccacgctgcacaagctgccggacctggtcgaaatcctccctgaggcgcgtaaatttggtggttgttatgtgtttggtattcagtcctatgcccagctggaagacatctatggcgtcaagcctgccgccacgctctttgacgtgatgaacacccgggccttcttccgctccccgagtaaggagattgcggagtttgctgccggtgaaattggcgagaaggaaatcctcaaggccagtgagcagtactcctacggtgctgacccggtgcgtgatggtgtatcgaccgggaaagaaaaagagcgggaaacgctggtcagttactccgatattcagacgctgcctgacctgtcctgctatgtcacgctgcccgggccgtatccggccgtgaaactggccctcaaatacaagccgcgtccgaaaattgccgagggatttattcctcgcactctcgatgcgcgggtggatgcgcggctcagtgcgttgcttgaagcgcgggaagctgaaggcagtcttgccagggcacttttcacgccggatgcgccggcatccgggaccgctgatacaaacagtcacgccggtgaacagcctgagccggtcagtcagcctgcgccagcagaagtgacagtatctccggcaccggtaaaagcgccggcgacaacgaagatgccggcagcggaaccctccgccaggacagctgagcctcccgtcctgcgggtcacgaccgtaccgttgatcaaaccaaaagcagccgcagcggccgctgctgccgcaacagcatcctctgccggtacccctgctgcagctgcaggcgggacagaacaggagctggcgcagcagtccgcagagcaggggcaggacatgctgccggccggtatgaacaaggacggcgtcatcgaggacatgcaggcgtatgacgcctgggctgatgagcagacactgcgggatatgcagcggcgtgaggaagtcaatatcaaccacagccaccgccacgatgagcaggatgatgtcgagattggggggaacttctga

SEQ ID NO: 272905 - DNA, 306 bp, Klebsiella pneumoniae
atgacgggagacgaattaaagcggtaccgtttcccggaaacactgactaaccagtcccgctggtttggcttatatctcgatgaacttatcccggccgtgatttgtctcggctggggtttctggaccagcaagttcatttttggtatggctgcagcggcactggttttctggggtatcaagaaactgaaaaaagggcggggcagttcctggctacgcgacctgatttactggtatctgccaacctcccttcttaaaggtttctttcatgatgttccggactcctgtttccggcagtggattaaataa

SEQ ID NO: 272906 - DNA, 489 bp, Klebsiella pneumoniae
atgaaactggccctgacgctggaagccgacagcgttaacgtgcaggcactgaacatggggcgcattgtcgttgacgtcgatggtgttaatctcagtgaactgattaacaaggtctctgaaaacggttattcactccgcgtggtcgataaatccgaccaacacgcaaccagtacaccaccaccgttaacaacccttacctgcatacgttgcagcaccgcacatatcacggaaacggacaacgcctggctgtactcgctgtcacaccagactaatgacgacggcgaaacagaatggattcattttacaggcagcggctatctgttacgtaccgatgcatggtcgtacccggttctgcggcttaaacgcctgggcctgtccagaacgttccgtcgtctggtcgtcactctcacccggcgttatggcgtcagtctcattcatctggacgccggcgcagaatgtctgccggggctccccactttcgactggtaa

SEQ ID NO: 272907 - DNA, 873 bp, Klebsiella pneumoniae; identical to SEQ ID NO: 6091

SEQ ID NO: 272908 - DNA, 213 bp, Klebsiella pneumoniae; identical to SEQ ID NO: 6092

SEQ ID NO: 272909 - DNA, 198 bp, Klebsiella pneumoniae
atggtgatacgcaaaacggtgtgcagggattgtagtaacgcaattactcataatacggaatgctgcccgagctgcgcgtcaacagcttcctcaggctattaccgaaataccgatcgtctgctctttctactgacgttactgcctgtgctgattctggctgtcgtttcagacgtcagtgtatttgtactgttgcagtag

SEQ ID NO: 272910 - DNA, 570 bp, Klebsiella pneumoniae
atgacacacgagtacaaccccttctggcaacaacgtatccgtgagacggtgctgcgcgcactggatgttcatccccgcctgacggcattgcgggttgacctgcgtctcccggatgtaccggcagcaacggacgcagctgtgatatcccgcttcatcaatgccctgaaagcccgaatcaacgcttaccagaagcgtaagcgccgtgaaggtaaacgcgtacatcccacgaccctgcattacgcctgggcccgggaattcggggagcttaaaggcaaaaaacactatcacctcctgctgctggtcaaccgggatacctggtgtcgtgccggcgattaccgcgctccgagatcactggccgggatgattaaacaggcctggtgcagtgccctgggggtggatgccgggccttatgccacgttggcgcattttcctgacacgtcggcggtgtggctggaacgcgatgatgacactggctttcagcaggtgctggaacgtgctgactatctggcgaaggaacataccaaagctcacgccactggtgagcgcaactttggctgcagtcgtagctga

SEQ ID NO: 272911 - DNA, 528 bp, Klebsiella pneumoniae; identical to SEQ ID NO: 102255

SEQ ID NO: 272912 - DNA, 216 bp, Klebsiella pneumoniae; identical to SEQ ID NO: 102254

SEQ ID NO: 272913 - DNA, 252 bp, Klebsiella pneumoniae; identical to SEQ ID NO: 102253

SEQ ID NO: 272914 - DNA, 660 bp, Klebsiella pneumoniae; identical to SEQ ID NO: 102251

SEQ ID NO: 272915 - DNA, 825 bp, Klebsiella pneumoniae
ttgagtcatttacccgccaaaattttccagatttcacgtagcgacgcctggaatttaaccctctctcccgatgcagcccgtaatatgcgggatcttgcagcacagattggcgcaggaatgccgaaatatctgatagcaccggaagtctcactgcttctctcctacatcgatgatctgaacatccgtatgtattttgagacgctctggaataccggagcacgactgaacgaagctctggcactgaaaccagccgattttatgctgactccgacgcggcagtacccgcaacccgtggtgatcctgaaaacactcaagcaacgtctaaaagaagcagaaagaagaccaggacgcccgaccaccaggcatccaccattacatcctgatccgcgatacagaaaaccacaggagcctgctgtaaggctggttcctgttctggatgccggatacgcattgcgtatgcgggaatacctggcgacctggaaaaagcggatcaaacatcagcctgtgtgggacataacatcgagacagacaccgctgaactggataaacaccgcagtggcacgggcagagcgtgacggcgtaacattttcggttccggtcacgcctcacacgtttcgccacagttacgccatgcacctgacaatgagtggcgttcctccgcgcgtcctgcaatccctgctgggacaccgttatgcaagaagcaccgagatttacacccgcgttttttcgctggacgtcctgacaggaagtggcctgtcctttacctgcgatccacggcgagcaaaacagcttctcggataccctgaacgcattaatgatgagtaa

SEQ ID NO: 272916 - DNA, 654 bp, Klebsiella pneumoniae; identical to SEQ ID NO: 102250

SEQ ID NO: 272917 - DNA, 465 bp, Klebsiella pneumoniae; identical to SEQ ID NO: 102249

SEQ ID NO: 272918 - DNA, 159 bp, Klebsiella pneumoniae
atgaacgccatcattcataactacgtggcaacgattgtgctcggtaaagcaggtaactgcaaagaaactcctctcacaaagtattgttcgaggactatgccagagcgtatttcagttgaagaaattaatgagtttaaaatttatccagagttattctga

SEQ ID NO: 272919 - DNA, 420 bp, Klebsiella pneumoniae
atgaagaagttagtgtttttattgatttccattcttgctggttgttcatcaccgccagagccaacacccgtgcagtttgaaaaggcaaatgaagtgatcaatccctcattgccatatgtccccgattttcacggtgtcataaagtcagacgttagcggtaaaggatgggtttatgagatcacttccttatccggagtacaggccagaacgccgacgttttattacgctctggctcatgcggacaggattgtagtgacaacacatgatgctgggctgtggtttcgaatcagagatctgttgaagatggaaggggcaacagcagtcgtggaatggcgaaacgagaaaagttttttacctgaacaggtaaaaatagttttcattaaagcacaaaatgaggtgaaaaatgactggaaaaaatag

SEQ ID NO: 272920 - DNA, 1863 bp, Klebsiella pneumoniae
gtgaaaacttttaataagtcgcaatctgtttttatattcgctgttatgcttgttgcggcatggtttgcaggttcatttattttctttgtgctttacttcagccagataaagaatctgaaaccattgaaggctgtgttcagatccattgatgcgtacaggatggatatttttacagacagccttactttatctgttgtgactacggatatcagagttttagcctttgttgcacttggagcaggatttgtcgtgtctcttatcatccctgttgcggcgttgataaaactgaacgagaagaaagaaaatattttcggtgatgcgcgatttgcaacaattaatgatattcgtgagtctaacagtttcacgcttgacggtgacgaaaaagacgggattatcgttggtataaaagacaagaaaatcatacgctatgtgggagcagcattcagtgctatgggagccggaacaagggctggtaaaggtgctggtatagtcatcactaatcttatgaagtactggtggagtgttattattctcgatccaaaaagggagtgttttaatatcaccagtcttatcaggaaggtgattttaggtcatgaggtttataaatttgatccctttagtccggtaacgcaccgctttaaccctttgtattatgtcagtatgggaacgagtgaaggttttaatcagcttgaaaatctttcgttgattatttacccctataagacagatggtgcggatgctggtagctatcttaataagacggcgggtggtgtttttaaatcttatgctgtcgctttatggtttatgattaagaatgataaggctggactaaaaacgcttgatattgagcctgtcttctcaatgtctaaaattaatcagctttttgagcgtgcagaacccgaacatcttctttcattcatgaatgatattcgttcagaattaagggggaaagacaaaacgcttgctgatattggtgtcgctggccttaaggcattcattgagatggaggataaaacaaaagcacaactcaaaagcaactttcttaatggattatcaccgtttgctaaccccaatgtggcaaatgctactgatggaaatgatttcgatttgcggcaggtgcggaaaaagcggatgacaatttatttctgtatttctggtgataatgccaggttggctgaaaaaataacaaatattttctttcagcttgctatacaggtgaatcttgaaaagatgccaacggatgatccggaaataaagcatgactgcctttttctactggatgaattcccgtcaattggtgctgtagattacatcaagagtaaatctggtctcattgctggttacaagctgaaattgttgattgtttaccaggtcggctctcagcttgaggaaatctacagttatgcaggcagtaaaacattactggcaagtgcaccctgcaaaattgtttattccgcttctgatgttaaagatgcgcgggagttatcagaagcgatggggacacgaacagtaactatcggttcgaaaagcaaaagtcgtagtcgtggaggaacatcgagatctgaatcagaaagccttattgagcgtccactggtaacaacaaatgaactacttacactgaaatttagtgaagaaatcctggcaatgaagggagaaaacccgattcgttgtgaaaaggcattctactatctcaatgagtatttctttggtgactttgtgaaggttgctccggaacttgcaaacattttccccaggaagaaaggaaagctggttatgcctccacagaaagtatttgaaaatgaaatcgtcgcaaaagggtatctggtagtaaaagatgttcctgatctcgataaagcggcataa

SEQ ID NO: 272921 - DNA, 1029 bp, Klebsiella pneumoniae
atgagtggcgttattcctgtcagcattagcaataaatcgctcgatttttataaaaatcaagtattccagtcttttcttgatattgaagggctaacagaaattgctgtcaaccgtcctggtgaaatctggacggaaattaatggtgactggacattccataataatgacagtgtgacctttgatttttgtaaacgtttttctcatacgctggcatcatttcggggagatgaaatcggcgagaccaagccattactttcagcaacactggaatcaggagaacgtgtacaggtcgtttttcctcctgcatgtgagagaaatactatttcaatcactatacgtaaaccatcgacacggcagataacacataaagaatatgtggcgaacggtttttatgattatgtccagtcaggaaaaaaacacaggacatacgatgatgagcttcttgatttattcagagcgagaaatatcgctgcttttatggagcttgccgtagcagcagggaaaaccattgtatttgccggagcaacgggttccggtaaaacaacttatatgaagagtcttatcgatttcataccattgaatacacggctgattacgattgaagatgcagaggaaatcaaattttttatccataaaaattatgtgcatcttttttacccttcggaatccggcagtgattccggctctatcataacagcagcgaaattaatcaaatcctgtttgaggatgaaacctgacagaattttactggcggaaattaaaggtggcgatgcctgggattttgtgaaagttgctggttctggtcacagtggaagcatgacgtccattcacgcggcctcggcaaaagatgccatcattcagatggtgacaaaatgttatcagaacagagaatgtcagaatcttccttttgatgttcttcgtaaaatcattatggacagtattgatattgttgttcatgtaggcagggatggtgttgtcaggcatatgagcgacatctattacaaaggggctgaatgtgaaaacttttaa

SEQ ID NO: 272922 - DNA, 1119 bp, Klebsiella pneumoniae
atgactgatatgaaaaaaacagatgatttagttgatgatgcgaatcagtcaaagctggaaagtaaacccgttcatgatatcggtgatatcaggaacaaaaataatcgtatgcgttctggctttctgtttggtctgatggctgtattagttattggtatttttgcgctgaaaacatataaaaattattttgcagatgaccagcagaaagcatcagaatcaacaggcgataccagcatttctcaggtaagtaaaatccgtactggtcttggtcagaattttgaccctgttgagaacaaagcaattatcaatccaggcgctactggttctggtaatactgtttctgacggtcataaagaagtgccacaggaggggttcaggaaatatttgtcaatacctgttgctggtcagggagggagtcagactggcgcgagtggcagcagcaggacatcgcagacatcagagccacaggaagaaaggaaagaatcaaaagaaaatgtgcctggtaaatcaggaatgaaagtaactgcgattaatctcgatcctgatctctatattgaggaaaacaggcttataccgtgtgctttaaccacacgctttgtttctgatgttgcaggtcgtatcagttgtgtttttacagaagatgtatggagtgctaatcaccacacaaaattactggaacagggaactaaggcttttggtcgttaccagaccggaacgctgaatcatggacagggcagaatgttcgttatgtgggagcagttgcggacgcctgataataaacgaatcgatatggtaaatacagcagcagctggtcccctgggagaagcgggcattgatggatggatcgattctcacttctgggagcgttttggtggttctcttatgctcagtatggttcaggatgtagcggcggcggcggcggataatgcacctggtaaagatcgtaatgtggattataccgaaaactcacgacaggcaatggctgaaatggctaaagtcgcacttgagaattcgataaatattcctccaacaatgtataaaaaccagggtgacataatcactattatggtcggggaagacattgatttttctgatatctatgagttaaaggtaaaatag

SEQ ID NO: 272923 - DNA, 906 bp, Klebsiella pneumoniae
atgaagaaattatttattgctacatgtttattgcttcctgggcttgtgtattcagcagcgactccgttaccttctggatttgatgcaaggatgcagactgtgagttataacggtgcgaatacgaccgttatccggtcaaagacaggatttctcacatcagttgtttttgatgaaggtgaggctgttatcagtgcaaaggctggttttcctgccggatgggaaatcacaaccgatgataatgttgtttacatcaatccgcgtcccgttgttcaggaacaggaaggcgatgaaggcgaaaaactgaaaaaggttttccagccaacagaaaaggaatgggatacgaatctttttgtcagaacaacaaagcggatttacagtctggatctaatccttctgtcagaagaaaaacaagcgcaacctgcttatgttgtacaattccgctatccatcagaaatagcgaaaaagaatgcagaagaagtaaggctggcaaaagaaaaacaggaaaaactcagacagaagaaactgatttctgaaagttttgaaaaagccgatgcgcctaaaaactggaattatttcatgcgagtcaatgaaaaatatgacagtcgtcgtatcgcccctgattttgcttatgataatggcatatttacctttttaggttttaactcagggaaagtattcccagctccatttgctgtaagagatggtcaggaacagacacttgcttttaatgtggaaacaaaaggcaagtataaaattatggttatccacaacgttaatgacaaatttgttttacgctatggaaacagcgttgttggtgttgtgaataaatctttcggaaaagtattaaccgaccagaggaatacatcttctcctgcggtagaacgtgttgaggtgaataatgactga

SEQ ID NO: 272924 - DNA, 687 bp, Klebsiella pneumoniae; identical to SEQ ID NO: 102237

SEQ ID NO: 272925 - DNA, 180 bp, Klebsiella pneumoniae; identical to SEQ ID NO: 102235

SEQ ID NO: 272926 - DNA, 1095 bp, Klebsiella pneumoniae; identical to SEQ ID NO: 82471

SEQ ID NO: 272927 - DNA, 342 bp, Klebsiella pneumoniae
atgtgtaatacgggctatgaacgtaatgataatctctgtaaagcacggattgtgtcaacggctgccagtattgaacagggaaatgagatcaataagcagttatcaagtgcaatgtctcagattcagagtttaagtagccgaattgaggcttcaaaggatatcaaagaatcccaggatttggctaacgcattacaggcgcagtcgttaaaaatgcaggcgataaaaatgcagtatgatgtctggaataataaaaataaagcagatcatgagatgttggtcacacaagaacaagaggcctttattaaacagcagaaagaagctgaaccattaacttttgattaa

SEQ ID NO: 272928 - DNA, 2748 bp, Klebsiella pneumoniae
atgtctacactttataaagcgatgacacgccctgctatgtatgtgggtgttcctgtcgtccctcttactgtggttgcaggggcgttatttctggcgggggtttatatcagcaagctgatctggctggctattcctgtcgcggtttttgttctcagaatgatcactaaacaggacgaccacatttttaacctttactttcttaagctgaaaatgctcggaaactcagtgtgtaatcgtttttttggcgcacgagcgttcctctccggacaatatgaagctgttgaaattgatgagtttgttaatgccatgaaactgaatgagcgaatcactactggtaaatatataccctattcaagccatgttgataaaaatattgtcaaaacaaagaacggtgattatgtagcgacatggcaactgatggggattaactttgagtcaatctctgcggagatgttagaaactattgactcacaggttgccactcttgttcgttcattttccggactgcccgtttcattttataaccattcatgcagggcgagtttttatgatgcctttaccacaaaatcaggtaataaatatgctgatataatatcagattgttactatggttcgatgaagaaaaataaattcaaggggaacactctttactttacgctgatctacagaccagatgggcgtgtagaaaaactggaaaaacgcaaaaaaagtattaaagaaaagaaagatgatattaacattcatgtgaagagaatgaatgaaatgattaatacattctctggcgctcttgataaatttacctgtaaacttcttggtatgtatgaggagaacggaaaggtattttcttctcaactgtcattctataattatcttctgacagggaagttgcaaaaaatcagagtcactgattctccggtgtataacgttcttggtggagtggatgtattttttaatcatgataccggacagatatgccgcattgatggaaataaattctttcgttctattgaaattaaagatttctgtagtgagactgcatccggtgtttttgatgtgctccagtattctgatgctgactatattattacgcattcatatacatccatgagcaaatcagaagcattgagtaccattaaacgtgcggaaaaacagttaaagagtacagaagatgatgcggttactcaattgcaggaactggaaaaggcaaaaaatgatattgtgtccggtgatatatcctttggttactaccatttcacgctaatggtaatggcggacagtatcagggagcttgacgaatctgtaagtaaaattacggcagactttactgacctgggcattattccggcattgtcaaccatgtcattgccagcggcatattttgcccaacttccggcggtttttcatttaaggccgcgtttatctccggtatcgaatgtaaattttgttgaactggcatcattccataatttctaccaggggaaacgcgataaaaactgctggacagaagcggttgctattctcaaaacaccaagcaaacaggcgtattatctgaatttacataactcagtactgtttaaagatgaaacaggtgaaaagaatcttgctaatactaaagttataggaacggcgggttcaggtaagacaatgtttctgtcatatcttgcctgttcattacagaaatacaataaccccgaaacttttgctgattctgcaaaaaataagaagttaacgtgtgtctttcttgataaggacagaggggctgaattatgtatccgaatgcttggtggggaatattacaccgtaaaaagcggtgagccgacaggatggaatccttttgctctggaggcaacaaaacgtaaccgtatttttgtcaagcaactgatggagattctgtgtaccagaaatggtgaaagattatcgacaagagaaagattgcttattagcgaaagtgttgatgctgtgatggattttcctcctggcgaaatgcgggaatatggcattaccagaatgcttgagcatcttatgcagagagatgatcgggatgagcaggagaacgggattatccttcgtttgtcccaatgggctaatggtcaggctcatggctgggtttttgataatgctaaagacacattcaatattcagcatgtcaataattttggcattgatggcaccgagtttcttgatgatccgatggtatgtgcaccaattactttctatctgctgtatcgcattacgcagcttctggacggtcggcgtcttgttatcttcctggatgagttctggaaatggctacaggatgaagcattcagcgactttgtctataacaagctgaaaacaattcgtaagctgaacgggctggttattccggcaactcagtctccggatgaaatactgaagaataagatttcacgggctgtggttgaagtatgcagcaccagtatttatctggctaaccctgatgccgattacaatgattatgtggaagggcttaagctgacaccagaagaatttaatattgttaaaaatcttgatccaatgtcgagacagttcctgattaaaaaaagcagtcttaaaaagggggatggtaaatcattttcagcacttgcgacactcgatttatcgggacttggtggatatctgaaaatattgtctgccagtgcagataatctggaaatttttgaaagtatttatcatgaaggaatggagcctgatgactgggttcctgaatatctcgaacgggcaatctga

SEQ ID NO: 272929 - DNA, 327 bp, Klebsiella pneumoniae; identical to SEQ ID NO: 102231

SEQ ID NO: 272930 - DNA, 621 bp, Klebsiella pneumoniae; identical to SEQ ID NO: 102230

SEQ ID NO: 272931 - DNA, 177 bp, Klebsiella pneumoniae; identical to SEQ ID NO: 102229

SEQ ID NO: 272932 - DNA, 216 bp, Klebsiella pneumoniae; identical to SEQ ID NO: 12971

SEQ ID NO: 272933 - DNA, 294 bp, Klebsiella pneumoniae; identical to SEQ ID NO: 82469

SEQ ID NO: 272934 - DNA, 1230 bp, Klebsiella pneumoniae
atgggtgtgtatgtagaacaggaataccgtattaaacgcgctaaagggactgggcgtgatccgaaatctcctaagttatcgggaagacatatacatgccagtaaatcggcttttaatcataaagtcagacatggtgcggacaagaaagcatatacctggacacctacaaaagaagtcacttttaaaatcactggctcaggtaaaacagccgcaggcatcaaaaatggtattgattacattacccgtaatggtgaacttgaggcttactgttatgatggaaaaggttcagagcaaacagggaaaggagaagactttaatagggagtttacttcaactttatctaaaggaaatgattactccaggacatatcgtggagaaaacatcgatcatgtgaaaaacatggtcttttcaccaccaccagaagctggagtaagcagggaagacgctctgaaagctacggtagaatttcttaaagagacttatccaaaccatgctttcgttgccgtataccatgatgataaagaagatcatcctcatgtacatgttaatattaaacttcgtgatgaagaaacaggaagaagattaagacttactaaatctgaaaccaggaagttcagaaacggttttcatagaaaactgaaaggtatgggatatgatgttaccgctacctggaaaaaagatcccgaacgtaaacgggagattgagcgattacaggctgaaaatccgaaaagactccggaatgtttacaaggtggtggattttggggagacttcatatcagaataaggcaggggaaaaacgaacacctttcctcacttatgaaactttaaaaggtggaaaacaggttacgatttggggtaaagacctgaaaaatcatttcgagtctgaaaagctccagccaggaacgcttatcaaagtaaaaaaactggctcctacgcttgtacgtagtccaatgtttaatgatgatggaactgttgcaggctacagggaaacgcatcgcaataactggcagattgaaaatattgcccttgagcggaacagagaacgtcaggttcatgagcgtgaaaccaggcagccggaagagagcgacgttaaaaagcagctatccagaaaacatgagcaaggtcacaatatcgggtttgctcttgaacacgggtttacaaaggattcagaagaacataaaaaactaagaatacagcaagagaggaactggaaaggcctgggattttaa

SEQ ID NO: 272935 - DNA, 348 bp, Klebsiella pneumoniae; identical to SEQ ID NO: 19716

SEQ ID NO: 272936 - DNA, 249 bp, Klebsiella pneumoniae; identical to SEQ ID NO: 102264

SEQ ID NO: 272937 - DNA, 351 bp, Klebsiella pneumoniae; identical to SEQ ID NO: 102262

SEQ ID NO: 272938 - DNA, 300 bp, Klebsiella pneumoniae
atgaaatgctcatctgtttttacttcaaccactaatcatgttttcacattcgaacgagtaacgctttgcactattatccttatgcataaggatactggacaacagtatgttgtcatatttactgataacaataaaattcgtgactataaagccggaattgttcctcagtttggcgaacttaagcagagtgatgttgatttagtccttttctacagggacgaatatgaaaaatattttgattcattaaaagatggcgatgaatgcttgagttttaaagattttattgagtgtctttgttaa

SEQ ID NO: 272939 - DNA, 228 bp, Klebsiella pneumoniae; identical to SEQ ID NO: 12412

SEQ ID NO: 272940 - DNA, 252 bp, Klebsiella pneumoniae
atgagaaaaaataaaggtgatgtgacttattttcttgaaaaagaaggtgacaattacaggcttacaaaaaggataaaagccagaacaaatgttaaaatcgggaacaaaactacgaaaattacattgtatgatgctgtactgaatgagaatgaattacaacatattgattttacgtgtgccggattaagggaagacgatgagacgccagttaagaatttaattaaggagtttatgttaaatgaaacccgataa

SEQ ID NO: 272941 - DNA, 873 bp, Klebsiella pneumoniae
atgagaatgacgacaaataagacttccctttctcgcttaacaaaagtgagacatcgaaatgaattgaattcaacgctgtcaacattgcctatggctgctaaaaaagtcttatttttagccatgtgccagataaactctaaaaatgaattcgatgatgatcacatattttatgtgacagttgccgattacattaaatgggttcaggttaagcctgatgcggcttatcttgctttgagggatggctctaatatattagatacgacgcttcttaagctgaaacatgatgaaatattagaactgagtagtgatttgggatttaagttcactaaaagtaatgtacctgattcaatgaatttgagtctgactgttttttctacttattacaggaatgaaggtagagtggggatcaagtttacgaaagaagcgaaaagatttttatgtaaacttattggtgaagaaaaacgttatacaacgcaagttttattatctgttgttcgactgacaagtgttaatgctgcatcactatatcaactcattcgtaaaatatatagtaataattctcgcgcgaatagttttgaaatgacaatagatgaacttaaagatgaattgaatctttatacaataggggcggggggggtgaaggattataagtatccagattatcctgcttttaaaagagatgttcttaataaatcagtaaaagaaatcatgaaacatacggaagtaaagaacttaagtttcgtagtttcagaaaaaattgggagaaaagtttataaattaaagttctcttatacaattggttatgagggcaataccagggaagactcagagtttactaatatgtttgataaaatgtacccacctgaaaattga

SEQ ID NO: 272942 - DNA, 405 bp, Klebsiella pneumoniae; identical to SEQ ID NO: 12977

SEQ ID NO: 272943 - DNA, 174 bp, Klebsiella pneumoniae
gtgatcaataaaatttgccaggtaattgacggggagtacgtctgcgacattgatatcagtgtggaagaatggaaagctctgttaatgaatgaaaaggtttttgactctaaaagtattgaggcgttaaaaaatggtatgttgaaccaaatcattcctgcacatgtttcgatatag

SEQ ID NO: 272944 - DNA, 261 bp, Klebsiella pneumoniae
atggatcaggaaatgacgttttcactcagctacgagcagttgacccggttcgcggaacaacgtatccgggaatgtaaactggacagcgagggcctggcttacatgactgcatcgacccaggccgccaccgttctgggcttctggtatgaactggccataaatggctatgcctcgatgaatgccataaagagaaaagagctcatagacgccgatcatctgcgcctcagaaagctcatctggccggaggcggataagcaatga

SEQ ID NO: 272945 - DNA, 1422 bp, Klebsiella pneumoniae; identical to SEQ ID NO: 230712

SEQ ID NO: 272946 - DNA, 564 bp, Klebsiella pneumoniae
atgcgcatcgctctcattgttggaataaattattatgagcacggaggctctcttcatggttgcgtgaacgatgctcacgaagttaaagctgtgctagagagacatgatggaggtgcagtaaatttcgattgtcgtttgttgactggtacaggaccaacagaccgcgttaatcgcggcgaattaaaagatcaaatcgagcagctttttaaaacggatgcagatattgcgttgttttactttgctgggcatggccatattgaggcgaccggtgggtacctattggcaactgactctagtcgaggagatgaaggtgtttcattgactgagattctcactttagctaataactcacccgcaaaaaataaaataatctatgtgaacagtctgattcggtcgccaggcgagcctgaaaaggccaccgcaagaccgccggcatcctcccaaccggcccccaagaaagccaccccagcgacacccaaaccagtaccatcagccagccataagccgggggagattcccagcttcaacttcaaccccagcccgaacaaagcggacttgatttga

SEQ ID NO: 272947 - DNA, 372 bp, Klebsiella pneumoniae
atggctacaaaaaagacgatatttgttgcgtttgcaattgaagatgaaaggcaacgggattttcttaaggggcaatcactaaatacaaattctccttttgaatatgtagatatgtcagtaaaggaagcatatgacaccgactggaaaaacaaagttagaacaagaattaaacgatctgatggtgttatcgcgctaattagtagcgactcccttacctcaagcgggcagaaatgggagatcgcttgcgccaaagaagaagggaagaaagttttagggatatgggcttataccgacgatagaactaatgtccaaggtgttcgaactgttgtatggacatggaaggctatcgaagatttcatcgacagcttataa

SEQ ID NO: 272948 - DNA, 732 bp, Klebsiella pneumoniae
atgggtatcattatttgcctgcggttcggtatccgaatcggaatcggagtcagagtccgagtcgctgtcagagtccgaatcactgtcagagtccgaatcactgtcagaatccgaatcgctgtcagagtccgagtcgctgtcagaatccgagtcgctgtcggagtccgaatcgctgtcagcatcggaatcactgtcggaatccgaatcgctgtcggaatcagagtcggagtcactgtcggaatccgaatcgctgtccgagtcagagtcgctgtcagaatcggagtcgctgtcagagtccgagtcgctgtcggagtccgaatcgctgtcagagtccgagtcgctgtcggagtccgaatcgctgtcagaatccgaatcgctgtcggagtcagagtcgctgtcagcatccgaatcactgtcggagtcggaatcgctgtccgagtcagaatcgctgtcggagtcggaatccgagtcgctgtcggaatccgagtcactgtccgagtcggaatcactgtcggaatccgaatcgctgtcggagtcagagtcactgtcagagtcggaatcactgtcagagtccgaatcgctgtcggagtcggagtcactgtcggaatccgaatcgctgtccgagtcagagtcgctgtcagaatcggagtcgctgtccgaatccgaatcactgtcggagtccgaatcgctgtcagagtccgaatcgctgtcagagtcagagtcgctgtctga

SEQ ID NO: 272949 - DNA, 141 bp, Klebsiella pneumoniae
atgaaaagcattcaagatcaggttttagacttgtttaaagatgagatctcaacccgtttagataaaattggaaagaaatcccattggaacttgattatgacttatttgatgctcccggcgacgatctgcatgacgctttaa

SEQ ID NO: 272950 - DNA, 318 bp, Klebsiella pneumoniae
atgatcgcttccggtggcggcgcgcgcagctcgctgtggcttgaaatcaaagccgcggcgtacaatctgccgatattatctacgcgtaatcaggagaatggcgtcaccggatgcggtattatcgccggggttggcgtagggttgtacgccgattttgccagcggcgtgcggcaaacggtgcagttcgacaaactgatctcaccggatccccgtctgcgggattattaccacgcctgctgcgagctttttgatacgctgtaccggcaatccgctgccttatacgacaggctggatgcgctcagcgtaggacccgactga

SEQ ID NO: 272951 - DNA, 1131 bp, Klebsiella pneumoniae
atggctagagctggtttaggcgatagctggacctgtgtgtttgctaatgattttgatcataaaaaaggtgctgtttatcaacagaactggggggaaggagatctttttgttggcgatgttaaaaccgttacgcaagagcagctctcaaaaaatgccaacttagtctgggcatcatttccttgccaggacctttcccttgctggggctggggctggattgaaaggtgagcgttcaggaacgttttggcctttctggagcattgtgaaacagaaaattgcatctggttcagctcccgaaattattgctttagaaaacgtttgcggaatgctaacttctcataaaggtgatgattttgctgccatatgctcggcgtttaacgatattgggtaccattatggagcctttgtagttgacgctgcgctgttcctgccgcagtcgagacctagactctttatcattggtgtcaggaacgatatttctgttggtgatatgacttctcaattgccatcaaaaatatggcatacccgaactttattgaatgcctacagtaatctggatagtgaagtcaagtccaattgggtatggtgggatctgccaatgccagcacagagaaaatctgtctttgccgacctgattgaggaaaatccgagcagtgttaaatggcatactcgaaaagaaacacagcagctcatggatatgatgactgatgtcaatctagctaaggttgaggccgccaaaaaactatcagtcacttctgggaaaaaagttgttgggacgatttataaaagaactcgtactgataactttggaataaaagctcagcgagcggaagtgcggtttgatgatgttgctggttgtcttcgaacacctggtggtggttcaagtagacaagtcataatggttgttgataaaggggctgtaaaaacgaggttgatctcaagtagagaaactgcaaggcttatggggttacccgacgaatacatattgccaaaaaattataatgaggcgtatcacttaacgggtgatggtgttgtagttcctgttgtatcctacatagctactcatatttttgatcctgtgatggaatgtgtgtttgaggattcagcggggctgcttaagcaaatcgcatag

SEQ ID NO: 272952 - DNA, 858 bp, Klebsiella pneumoniae
atgagcgttattccgtgtaaaaaggaccttcagttaaaaaaattgattgaatcctatgctgaagccttaaaagttgaggctcacaagctaggaactcatgggctaactgaagctgaattttatgacagtggcctctttcgcggggcaattgagcgaatccgaggacagttctccgcaaccatgcgggagaaaagaaattttgttaagcatgttttaaattacatgcaggataacgagtacattgctgattgggagtctgctggggaatcaaatcgtcatgattatatggtaaccctcaattccggacgtaaagctgctatcgagttgaaaggatgtcttgacggtaataacaccaacatttttgaccgccctcctcaagcggaagaatttgttatctggagtgtatgtacaaaccctggcgctgatccccagcacaatgtctggtctgggcttcatactaggcttagcgctgaaattatttctcgagagcaaagaattgatggcatggttatttgggattgggcttgcggaacagtcggaagaccatgccctaaaattgcaactgagcctgagcgggcagtaacgtttggcccattcaaattgccaccaccatgtttgtacctgttaccttcgacaatcccaagcccaagaaataatccgtcgccaaaagctcagcagatcgaagatgtacagctaatcaaagcctttcacgattgttttggatgccggccagaagaagttaactttgttaacttcgacgtaggttatcatggtaaagataccgttcgtaaaacgaccattattcgaaacggcacagttgaacgtgaatcagaaatgacggcaataaggcgttcttaa

SEQ ID NO: 272953 - DNA, 270 bp, Klebsiella pneumoniae
atggttgatgtgatgcattacgaagtaatagacaaagtgagcaatcctgaaaaacatgtaaatgtttacctcttccaaagcgatggtggccgatggttttcagccgctgcagcccctgaagaaattgaatttgaagtaggtgatatcttaaaacattatgtgggggatgaatggaaactagcggacggcgataccatcaaaatctcacctgatattaggtgtgcatcaaaaaaggaggcgcagatcaaattcaatgaattacgccaataa

SEQ ID NO: 272954 - DNA, 459 bp, Klebsiella pneumoniae
atgaccaaatcaaccataaccagagagccaattactcacgaccttaagatttaccctgagttcttctctgctgtatccactggcgttaaacgcgcggaactgcgtaaaaatgaccgtgattatcgtgttggcgacactcttcacctgatggaaactccgcgcggaagttgtcatcaaacgggagagtttatcaatgtgaaaatcacccatatcgctgacgttggggaatggatgcctggttatgttctactgagcgttgagctacaggaacgccgcaaggccgccgagcctgaactaaagccagcgaacctcgccaataagttctatgagcgctacccgcttgcgacgtttaaaagcgacagtgaaagggctgaggcatttggttatttcatggctggcgcagagctccagtgctttggtgagtttattaaatacgaggatttgtgcggtgatgaataa

SEQ ID NO: 272955 - DNA, 831 bp, Klebsiella pneumoniae
atgaaaaccccttgtttatatagcataatcaggtacatcccattcgctgaaactgaagagttcgctaatgtcggtatccttttgtgcgcaccgaaacagggggtattgttatacaagttagcgaaaggaaacgatgcgagagtaaaaacgttcttccgtgacgacaagattttcccactagcaaagcaagccctcactgccgaactaaaatttgcgagagagaacttatataactttagcggtgctcagaaattatccgatttttttcatgcttttgtatctactcgtgaatctatattccaattcagcgactcaaggataatcatggctgacaacccggcacatgaggttgaagccctatatgacagatttgtaaatcatgctgaatatacacccgagagacaggaagacatcttagctaaagaactacgattgagatttgatagctttcaagacctcagaaaaaccttcaaaaaagaaacaattggaggggagttcgcgaaatttaccatgcctctagttgcttcagaggatggagttgctgtatgtgccatcaagccactagtatttgatcagtctgataccagtaaaatgatggagcattgtgataagtgggttgctcgggtgacaagagcggcggatgaaaggcttttgaacctatctggcgtcctcttccccatagcggggccattaaagtccaccatcagggcaaaaaatgccattgaaaagattgtgaaaacttttcttggccatcaaatcaactgcgttgaccatgaaaatgagggctcaataattaagttcgcacaatcaacaatttatcaaataagataa

SEQ ID NO: 272956 - DNA, 747 bp, Klebsiella pneumoniae
atgcttggtaatattttgcacataaaccatatcatcaggcgcatgtctacaggcgttaccgagccgttcctgtgcgaatgtgatgatggattaaaatatgtcataaaagggcaacctcgagtcacaagaaaggaactcatggcagagtgggtttcctcgcaactggctcataggcttggcctttcaataccagaaagctttttagtctatattgatgacgatgtcatttccttcgctaaaccagaatggaaacgagacctcagggagggtcatgcgtttgcttgtcagtacatagagcaaagtatacctatctccttctaccaagctcacagcaacgttgatatccagacaagaaaattcatatatctatatgataaatggataaataactctgatagaacgctatcaaataatggattgggtaacgtaaatcttctttttcatgttctgagcaataggtattacctgattgaccataaccttgctttcttccacgattaccatcaagaagaatttgagtcacatgtgtactgcccaaaccatcggaactggacatatgacttggttgatacacaggattttcgtgaccgtctaaccttggccgcctcaaactttgacagcctagtaagcagcatcccggatgactggaagttagacgagccagagtcacaagaagagtatttaaactttttcaaaacaacactcgaaagggctataagtgatgaattttggagtaacttgatatga

SEQ ID NO: 272957 - DNA, 297 bp, Klebsiella pneumoniae
gtgcaaacgtccgtcgatttatctcagatcccacagcctgatatcgtcgaggtgcccgattttgaaacggtgctggctgatatccgggcgcttatcgtggcggccatgcctgtggaacttcaggcttctgtgtctgctgcgctgctgctggaatctgaaccgatggcggcactggcccaagccttcacctatcgcgagatccatctgctgcaacgtatcaatgaagccgcgcgcggtgctgctttcgagcgccttgggggcggatctcgatcagatcgccgggaatttttacactga

SEQ ID NO: 272958 - DNA, 762 bp, Klebsiella pneumoniae
atgacgaatgcagagtgggcagcgatagctctcatctgctactcccaaaatgtttttccgcgtggaaacactcgatggggattgtcatctgacaacatcagtgaaatggggcgtcggactgacggtttgaaggcgggaatcgaatcagggacgggactaacgctaactggttcaggacccgttggctggcgccacaaccgtgactatgcaggaattgcagacttagcaggcaatatttgggaggcggttactggtgtccgtttctgtggcggtgagctgcaggtaatggcgaataacaatgcggcgatggggtctactgaccactccctgtcgtcaactgcgtggaaggcagtgagcggcgtcgacggctccctgctgacgcctaccggcacggggaccgccgggacagattcctgggtgccgaccacgatcaattccgttcgaatcgacacctcggggacaggaaattacacattgatttacggtgagaacacattgttcaccagtgccaggaaccccggaacaacgccggtatcggatacggcgctcagggtgttgcgcagactaatgttgttcccgctggcgggcctggtttccgatgattcgctgtcgtactcaaaaggaggcgaggtgatgacactgcggggcggtgcatattcgaacggaacaggcggcggtatcaacgcgctactcgctaaccgtggacgtacttcagttggtcaatctaactctggtgtccgtccggtatattacaagccataa

SEQ ID NO: 272959 - DNA, 996 bp, Klebsiella pneumoniae
gtgaatattattcccaaatttgacgtcagcacgattgatgcatcactgggttcgggaacgcatccggcatttattgtgaatggcgtcgagattgaccagatattcgttggtacgtatcccgggtgcattgtaaatggccagctgctgtctcttcctgaccgcgctccagcggtatcggttgcgtacggtgacggcatcggcctggcgcaagctgcgggtccgggctggcacgccatgactaacgctgaatgggctgcaatcgcattactgtgctattcccagggccattccccgcgcggcaacacaaaatgggggctgtcatctgacaatatcagtgaaaaggggcggcgggctgatggcaagacagccggggtagaatccggaacagggctgacgctgacaggttccggtcctgttggctggcgtcacaaccgtgactatgcaggcattgcagatctagcaggcaacgtttgggaggcggttactggtgtccgtttctgtggcggtgagctgcaggtaatggcgaataacaatgcggcgatggggtctactgaccattccctgtcgtcaactgcgtggatggcggtgagcggtgttgatggttctctgctgataccaactggcacggggaccgccgggacagattcctgggtgccgaccacgaccaactccgtgcgaatcgacatatcggggacggggaattacacactggtttacggtgctaatacgctgtttacgagtgcccaaaatcctggcgctacgccggtatcagaagctgcactaagggtgttgcgcagactgatgttgttcccgctggccggcctggtttccgatgattcgctgtcgtactcaaaaggaggcgaggtgatgacactgcggggcggtgcatattcgaacggtacaggcggcggtatcaacgcgctactcgctaaccgtgggcgcacgtctgttggtcaggctaactctggtgtccgtccggtatattacaagccataa

SEQ ID NO: 272960 - DNA, 1632 bp, Klebsiella pneumoniae
atgaatcgctgtccgaatcggagtcactgtcagagtccgaatcgctgtcggaatcagagtcggagtcagagtccgagtcgctgtcggagtccgagtcgctgtcggaatcgctgtccgaatcggagtcactgtcagcatccgagtcgctgtcggagtcggaatcactgtccgaatcggagtcgctgtccgagtccgagtcgctgtccgagtctgagtcgctgtcagaatccgaatcgctgtcagaatccgaatcgctgtcggagtcagagtcgctgtcggagtcagagtcgctgtcggaatccgagtcgctgtcggagtcggaatcgctgtcggagtctgaatcactgtcagaatccgagtcactgtccgagtcagaatcgctgtcagaatccgagtcactgtcagagtccgaatcgctgtcggaatccgaatcgctgtcggagtcagagtcactgtcagagtcggaatcactgtcagagtccgaatcgctgtcggagtcggagtcgctatcggagtcggaatcgctgtcagagtccgagtcgctgtcggagtccgagtcgctgtcggagtcagagtcgctgtcagaatccgagtcgctgtcggaatccgaatcgctgtcagagtcggaatcactgtcggaatccgaatcactgtcggaatccgaatcgctgtccgaatcggagtcagagtcagagtcgctgtcggagtcgctgtcagaatccgaatcactgtcggagtcggagtcgctgtcagaatccgagtcactgtcagaatccgaatcgctgtcggaatccgaatcactgtcggaatccgaatcgctgtcagaatccgaatcactgtcagaatccgagtcgctgtcggagtcggagtcgctgtcagaatcggagtcggagtcagagtcgctgtcggagtcagagtcactgtccgaatcggagtcactgtcagaatccgaatcgctgtcagcatccgagtcactgtcagcatccgagtcgctgtcagaatccgagtcgctgtcagaatccgagtcactgtcagaatccgagtcgctgtcagagtcggaatcactgtcagagtccgagtcgctgtccgagtccgaatcgctgtcagagtcggagtcgctgtcggagtcggaatcgctgtcagaatccgagtcgctgtcggagtccgaatcactgtcggagtccgaatcgctgtcagagtcagagtcggaatcgctgtccgagtccgaatcactgtcagagtccgaatcactgtcagagtcggaatcactgtcagagtcggaatcactgtcagagtcggagtcgctgtcggagtccgagtcgctgtcggagtccgagtcgctgtcagagtcggaatcgctgtcagaatccgagtcgctgtccgagtctgtatcagaatcggcatcggcatcactttcgctgccgccagggtcggtatcgctgtctgagtcagaatccgaatcactgtccgcatcagaatcagtatcatcgttcggagaatgcgacgaatgatctttatcggaagatcctgcaatcatcgcccctataccaagcaaagccgctccggccattacccatggagcaatgctgccaccagaactgcctgcagctaataatcctgagatatcactga

SEQ ID NO: 272961 - DNA, 243 bp, Klebsiella pneumoniae
atggtcgaccacggcgttgaagtggtgaaccggcagttggcagttgaagacgtcttcattgccgctcaccacccagccgccgttttccgccacgaaggcgatctgatgggcgatctccgggaaaaaggagatcagctgataatattggttgccgctggcgaccacgaagcgaatattctgttcgcgcattcgctggtactgggcgaggaagcgcggccggttgtaagttttggcatcgcttaa

SEQ ID NO: 272962 - DNA, 144 bp, Klebsiella pneumoniae
atgagtaaccagccagtgactgccagccagaaaacagacgaagtcaccaacaaagctatcccgtcagtgattacagacacgatacttatgggcacaggcttcactccttttcagtggcttgctctggatcggtacagttcataa

SEQ ID NO: 272963 - DNA, 486 bp, Klebsiella pneumoniae
atgctttctgccattgcggttctggtggcatacgaaactatgctgacgggactgagaccctttccccttctcacggaaattcttacccactacagcaaacttattttcaccatatcgggcaatgactccaatttactggtagtgttttatgttcaggtaatgcccgatgactttgtcatgcagctccaccgatttggagaacgacagggacttcctgcccagccttgccagatgctgtctcagattcaggttgtgtcgctcaattcgctgcgtgtaacgcttactgatgacgtgcagttttcccttcagacgtttttgccattacgcatcacgccttcagtagcggaacaggagggacagcagacggagactgaagccacgggagcacctcaaaaacaacattatacactaaatcagcaagttggtagcattaccaggaatgcgcactattgcgcacgattattcttaaggctatttgcagtctag

SEQ ID NO: 272964 - DNA, 1137 bp, Klebsiella pneumoniae
atgcgtgcatcaaaactcacaaagataggtatggcgaccctgatgttttcttgctctgtctgtgctcaggagagcatcaagctgggcatgattgaaccgcttactggctcagtggcttataacggaaccgcgtatgttaatggcgccaggctggcgttggcggagtacaacaagcgtacggcagcgaagccggtgcagctggtgattgaagatggacagtgcagcccggctaactccgttaacgcggcagaaaagctgattcagaaagataaggttgtcgccctgcttggcgccttttgcagttctgccaccgcagcggtcatgccgctggcgcaacagtataaagtgcctttcctgaccggcgtctcttcccaggccgatctgaccgaaagaaataatccttactttttccgttccgctgaaaccgatgcgctgttggcgaaagcgttcgctaaaatcctggcggaaaaactgcaactaaaacgtgtcgcctatattggcgtaaatgatgactggggtcagggcagtattcagggcttctcccaggacctcgctacgcacggcgtaaaaaatgtcatgacggaatattttgatcatggcgccaccgatttctacacgctgctggccaaactgcgcaacgctaaggctgacggcgtgtttattgccgcagagactcaggatggctcgattctggtcaagcagctcaaagagtttggtattgatatcaatgtctttggtgtcggctcttgggcaacctcagactttattaacctggtgggcgaggcttcagaaggcatttacgcagcggtgccttatgtctataccttgccgggcgacagcaaccagcaatttgttaaagcttaccaggcgcaatacaagcagtttccggataagtacgccgctgccggctataactccacgcacatcatgctggatgcaataggtcatgcggattctacggatgccgcaaaaattattgccagtctgaaagccaccgattatcacgcccccaatggcaattaccgcttcactgatcaaggccaggcttacgggtttgatgccgcgttggtgcagattcgccagaaagtccctgaggtggtaaccagcactgccgttgaggcgccggagaaaaaataa

SEQ ID NO: 272965 - DNA, 873 bp, Klebsiella pneumoniae; identical to SEQ ID NO: 186953

SEQ ID NO: 272966 - DNA, 987 bp, Klebsiella pneumoniae; identical to SEQ ID NO: 186954

SEQ ID NO: 272967 - DNA, 783 bp, Klebsiella pneumoniae; identical to SEQ ID NO: 186955

SEQ ID NO: 272968 - DNA, 726 bp, Klebsiella pneumoniae; identical to SEQ ID NO: 186956

SEQ ID NO: 272969 - DNA, 1230 bp, Klebsiella pneumoniae
atgaaccataaattacgagttggaatcattggcggtggaattggcggtgcggcgctggcgcgcgctttgcagcagcaaggtatcgatttccacctgtttgaacgtgctcccgcgtttggtgaagtgggggcaggcgtacagatgacgcctaacgcggtaaaagtgttgaaagcgctgggactcacagagcctcttaaacaggtaggttttttaccggaagcgatggtaggacttaactgggaaagcggcaatgaactcttccgcacgccgctaaaatcaacttgccccgaggtttacggcgcggaattttatcatgtccaccgtgccgatttgcatagcctcctgacgtcggatattcccgccgaaaaggtcacctttaatgcgcaatgcaccgccgttcagcatagccccctgtcagcgacagcattttttgctgacggtacctcttttgaagcagacctgattgtaggcgctgacggcatccattctgcagtacgcagcgcgctctggggtgatgaaaaaccgcagttcaccgggcatatgtgctggcgagcactggtatcggttgctgagcacccattgccgtttgtcggaccttacgccgccttttggatgggaccttcagcccatgtcgttacttactatgtcaaaggcggcaaggcggtgaacattgttgcggtcactgaaaccgcagaatgggtaaaagagtcgtggaccgaagccagctcaaccgatgaattattaaacgcttaccagggctggcatccggatgtgattcagctgtttgaacgcaccgatccgactcagacctttaaatggggcttgtttgatcacgatccgatggcgcagtggtctgttcctcatgtcacgctgttaggcgacgcagcgcacccaatgctgccatttttatcgcagggcgcggcgatggccattgaggatggctatgtactggcgcaggcgctggcgcatttcggcggcgatgttcctgcggcgctggcagcctatgaagctgaacgccgtccgcgcacgtctcaggttcagctccaggcccgtgaacgtggtcgcacctatcatctctcctcgccggaagaattacgacaacgagacctcgcgtttcaacaggagcaggcgaaaaaccctaatgcggtgggtatccgcgctgaatggatttacgaatatgacgccactcgctgtcgcgagcgatttgatgagacccgagcgcacgcgtaa

SEQ ID NO: 272970 - DNA, 753 bp, Klebsiella pneumoniae
atgaaaaaaacctttcgtatcggacaaatcgttcccagctccaacgtcacaatggagacagaaatccctgccttgttgcgggctcgcgaaagcgtgggcgaagagcgcttcacctttcattcttctcgtatgcgcatgaagcatgttaccagggaagaactggctgcaatggatgccgacagcgaccgatgtgcgctggagctttcggatgcgcgtgtcgacgttatgggctacgcctgcctcgttgccattatgtcaatggggcacggttaccattgtgtctcgggatcgcgcttgcagcaggtgacagcgaacaatggcgctcccacgacagtgattacctcagcgggtgcgttgatcgaagggctgaaggccataggagccagaagggttgctgttgtggctccctatatgaagccgctcaccgaaatggtcgtcgactatattcgccacgaaggtatcgaggtctccgattaccgggcgctggagattcaggacaacctggcggtagccgcgcacgatccgatgaatttgccggatatcgttgctgacatgaataccgacgatgttgatgcggtggtgttgtcggcctgtgtccagatgccttctctgtccgctgtaacgatagttgaagcccgtaccggaaaacccgtagtgaccgcagcgatagccactacctggcagatgctcaaggcactccatatcgaaacgcgggttccgggcggcggaacgttgctttccggcgcttactga

SEQ ID NO: 272971 - DNA, 816 bp, Klebsiella pneumoniae
atgacgatcaacaccagaacaaacgaaacccaaggtggtggatacaacgttcacgccaatggcatccgccagcacctgctccattatcctggacccggcccgcagttattgttaattccggggatcacttcaccggcgataacctggggattcgttgctgaacggctagctgaacgctttgatgtacacgtacttgatgtgcgtggccggggattgagtgaggcaggggagctggattattcactcgatgcgatggctgccgatgcactggccgtgatcgcagccgccggccttatgtcaccggtaatactgggccattcgatgggcgcacgcacagccattcgcgctgcacggatcaattccactgcgattggtcagcttgtactggtcgacccacccgtttcagggccggggcggcgcgtctatccctctccctggaactggtacgaagattcaatccggctggctgcaaagggctgctcgggagaagagatgcgccagttttgcccctcctggagcgatgagcaaaacgctttgcgcgctgagtggttgcatacctgccagctctcagcgatccgcaccgcctatgacggtttccacagcgatgatatccatgccgatctggccaatatcacgctacccgttcgcctggtggtcgccggtggcgccccggtaatcgagcctgatgatgtcgcagaaatccaggcgctggcgccgcagaccgaggtcagggtcgttgagcgagcgggtcatatgattccgtgggacgatctcgaaggctttctcggtgcggtcatggacctggaaatccgttga

SEQ ID NO: 272972 - DNA, 1032 bp, Klebsiella pneumoniae
atggatcaagcaagctttaccgagatctgcctgcatcagttaaaaatgtccggcgtgcacgaggatgaaaagcttgtcgtgctgacgcaaggcaacgaacgcctcgagtacgctgacgccttcatggcggcaggacagcgtctgggggcgaatatgtatcatatgcgcctgcctgcgccgataccaacgggaggctggaatgtaggtgtcacggggttggcggcgttaccctgggcagtcgaggcgctcaaacaatgcgacatgctgatcgactgcgtctttctactcttctcgccggaacaattcgcgattcaggctgccggtacgcggatcctgacggctgttgaaccgcctgaattgttagcgcgcatgctgcccaatcctgagctgcgtgaaaaggtcgaaatcgccgcgggtatgctggaaaaagctaacgttatgcgcatcacttctccctatggcacagatgtgacctatcagcttaacagctatcccaccgtagccgaatatggctgtaccgatacgccgggacgctgggatcattggccttcaggcttcgtttttaccggtggcgacgatgacggcgtcaatggtcagattgtcgtagcccccggcgatatcctgctgccgcaaaacatttatgtgcgtgagccaatcacttacaccattgaaaaaggctggataacggatattcgtggtgggcttgatgccgaactcgttaaatcttatatggcggctttcgacgatccgcgcggcatgggcatgagccatgtcggctggggtatgaacccgcaggccagctggcacaacatgacgccgggcgcatttcccggcggtatggggatggaaccgcgcagctactatggcaatgtgatgttctctaccggacccaacaatgaacttggtggtccgaatgataccgcctgccatctggatattccgatgcgtggctgctcgctgtttctcgatgatgaagcgatcgtgattgatggcgatatcgctgtaaaagagattcagatgcagcgttactag

SEQ ID NO: 272973 - DNA, 672 bp, Klebsiella pneumoniae
atgtcccaagagacgatctatgatcaggcgggatttggccgcgcggtaccgcgcggcgagcgtccggccatcgtggtagttgacttcagctatggctttaccgatacccaataccccacagctgccgacatgcgcgcgccgatcgcggctacccggcggctgaccgatcgtgccagagccgctggcttcccggtgatctataccacaatcgcttatcatcccggcgagctggaacaactgccctggctgaagaaggccaccggtatggcggcattactgacaggctcgcgactggttgacattgatgcagcaactggcattcagcctggcgatacgattgtgacaaaaaagggagcgtcggccttctttggcacctcgctggcagccctgctggccggtaccaggaccgataccttaatcgtgacgggtgcaaccacatcaggatgtgttcgcgccagcgtggtcgatgccgtgcagtccggcttcagcgtgctggtcccgcgtgactgttgcggcgaccgggcagcgccaccgcatgaggccagcctctacgatatgaatcaaaaatatgctgatgtcaccgatgctgctgagattctgagctggctggattcgctggccgggcggacggccgccgcaagcacgggcgcagcaccagacaagtctgtttga

SEQ ID NO: 272974 - DNA, 717 bp, Klebsiella pneumoniae
atggataacacagaaattcgggggcgcaagggcgtagctatacgtcgcggccgtccgcctaataaaaacaaacccggcaggccagagggaaaaaataataacgtaaaagatgaaatccttgatgccggggaaattttatttgccgatctcggttatgccggcacgacgttgcgagaggtttcggaagcggctggggtgacccaggcgttagttatctattacttcggctcaaaatatggtttgttcgaagcggtttttttacgacgcagcaggcgggtttccgaagagcgtatggcgcgcttacaggcgctggagcaacaggacacgatgacggtagaagcgattatgcacgcttttctgaaaccgacgctgaccttacgcgaaaccaaacagggacgcgcgtttatccgcctgcaggcgcgtttgcataccgaaccgccagaaatctcttatggtctgcgcaaccatgcttatgacaattccaccaaggcgtttgtcagcgcgtttatgcgccagcttcctcatttatccgagagcgaagcgtattggcgcatgacgatggtcattggcgcttacatgtacaccttctctgatacgcatcgtctggaagaactggcgccccaggtttgtaacacgcaggataacaacgaactgctggaaaacattatgcgttttgcctgtgccggtatgaaagccaccggtcagctcgctccctga

SEQ ID NO: 272975 - DNA, 219 bp, Klebsiella pneumoniae
atggcgcaggccattgatgatggcatcccggtgatgggttataccacctgggggtgcattgacctggtggcggcctccacgggtgaaatgagcaagcgttacggcttcgtctacgttgacagagacgaccggggggccggccccttagcgcgcaaacgtaagaagtctttctggtggtataagaaagtgattgccagcaacggccgggacttagattga

SEQ ID NO: 272976 - DNA, 1134 bp, Klebsiella pneumoniae
atgaaagcggttgtttacaacggaccttatgacgtttcagtaaaagacgttccggaccccaaaatagttcgcccaaccgatgtgcttgtccgtatcaccaccacgaatatctgcggttctgacctgcatatgtacgaagggcgaaccagcttcgaacagggacgcatctttggccatgagaacctgggacaggttattgaaattgggagtggtattgagcggattaaagtcggtgattacgtctgcctgccctttaatgtgggctgcggcttctgtgaaaattgcgagaaagggttaaccggttactgcctgacggcaaacccgggtgcggctggtgccgcctatggctttgctgaaatgggccagtgggatggcggacaggcggaattacttcgcgttccctttgctgactttaactgtctggtattgccaccggatgcggtggaaaaggaagaagactacgtcatgctttccgacatcttcccgaccggctggcatgccactgaactggcgggattacgccctggagagaacgttgccatttacggtgccggcccggtcggcttaatggctgcgcactcagccattattaagggcgcatcagaggtgtttgttgtcgatacccatccggatcgactggcgttagccgaacaaattggcgcagtggccatcaatgctgtgggtgatgatgcggtaaataaaattctcgagttaaccgacgggcgcggcacggattgcggttgcgaatgcgtgggctatcagtgctgcaacaaacatggccacgaggataactcagccacactgaacagccttgtcgcgtcaaccaaagccacgggcggcattggtgcggtaggggtttttgtccctcaggatcccgggggggcaaccgatctggctaaagagggtaaagtcccgttcgattttggtactttctggttcaaaggtcagtcaataaagaccggccagtgtaacgtaaaggcgtataaccgtcagctggccaggctgattcatcagggcagagccaatccggggcagatcatctcacaccgtctcgcactgtcagacgccgccgaggggtataagcactttgataatcgtgacgatggctggacaaaagtgattttgaagccctga

SEQ ID NO: 272977 - DNA, 369 bp, Klebsiella pneumoniae
atgagtgccggcttatatatgaaactcgactatctctggcgctcctgtaccggtaacctgaaacagcaaagtgacctgttccgtctgacttatgccatggaaacggcaaaagaaaatcgcagggtctaccggttattgtcagacagcgaatggcagggccggaacaaactgaagctggatccggagctaaacggtatctatctgcttaaggcttcgctgaatactggtttcgacggggaaggtaatcagacaggcccgcttaaagtcaaaattaccgggaacgtggcaggtctgatgatttttctggatacctgtgactggcaggcagtgccggaagaagagtgctggtatttagccgcccggaattag

SEQ ID NO: 272978 - DNA, 261 bp, Klebsiella pneumoniae
atgaccgtacgtgcgaaatttaaatgtaacagcatccagaaatctcaggataacagcagtgctgtcgttaacatgatggcggtaacgacaggcagtgcggagaacgagagctggtcggagtacactcccagcggccaactgcaaatggtcatctctaaccctgctgcggtagaacattttgagcagggtaaagagtattacatcgacattcagcccgccgagttatcatcgaaaggcgcactcgcaaatgagcctgattaa

SEQ ID NO: 272979 - DNA, 918 bp, Klebsiella pneumoniae
ttggacttacgtcgtttgttaaccctcaggaccattctggaagaaggttcgtttgccaaagcagcgagtaaactttgctgtacgcagtcaacggtgacatttcagatcagacaacttgaggccgaatacggtgttcagctgtttgaaaaaattggtcgccgcatggtgccaactgatgccgccaggaatatgatgccccatattgatgcgatgatggtcgccataaatggcattaaacaggccgtccagcaaaacgctgaaccggaaggtgagttgcgcattgccgtgggcgagacgctgctttcctaccggataccgcaggttctgaagagatttaaaaaaattgcgccgaatgtgatattgtctctgcaatcccagaactgttatacaatccgcgacagcctgctggccaatgaaattgatttggggattttctatcgggtgggtaaggatgtttccctcatcatggaaaactatggcgaatatcctctcgtactcgttgcctcccccgaattaatgctggttgatttcacccggggaaatcagcatatccccgtcagtttcattattaatgaaaaacaatgtgtattccgtctgatgtttgaatctgtcctcaggcaaagaaaaataacgattgactccaccattgagctcatcagcattgaaagcattaagcagtgcgtcatggccaatacaggcgttacgtacttaccgcgattcacggtggagaaagagctgcgcgccgggttgctgcaggaacttcctctgtcaccggccctgaaaccctttctgcagtgtgtgctcatcactcaggtaaggtcattacgccagcaatgggactgtttattcagtccttacgggagagtctggacgcctgaccgctcctcgtattgctttgtagtgccctgtcggttttaa

SEQ ID NO: 272980 - DNA, 645 bp, Klebsiella pneumoniae
atgcagggtgtgcacaaccatgccgggcggggccacgaaaatggttcggttgaaagcgctcacggccatctgaaaaggcgtatccgtcaggcgctgatcctgcggggcagtaacgacttcagccaggtaccggaactgagtggcgctcagttccggcagccctgtgaaacgacagactggattgatgcgggtgaaaacgtcctactgttcgctgccagcgggccgggaaaaagccatctggcggcagcgatcgtggatggcgttgtagcccggggctaccggtctcggttctacagcgccggagagctgctgcaggagctgcgcaaagccagagcgcagctgaaactgaatgagccgttactgaaactggatcgctaccgggtgatagtggtggatgaccttggttatgtcaaacgcgacaacgctgaaacgggcgtgctgttcgagttaatcgcgcatcggtacgaacgcgggagcctggtgatcaccagtaaccatccgttcagcacgtggggcagcatcttcgtggatgagacaatggcggtggccgttgcagaccggttgatccatcacggatatatgttcgaactgaatggagaaagttacaggaaaaagacggcaaaggcagtaaccagcgcggcttaa

SEQ ID NO: 272981 - DNA, 2127 bp, Klebsiella pneumoniae
atgtttttccatatgaagcagcttgaggatgagagccgcagcggggctaagcagcttatggcggacgtgcaggaaaaacaccgtcgcgaaacgtctaaaattggacgtctgctgtcgcttttcgttgatgacagagttccggatcccactacctttggtgaagtccgtcgccgggcctggaaaatcatgccgcgggagacgctgaaaaccaccgcacaacgcatgagcgtgaaacccatcagtaggctggcgctacaatggcaggttgtagacggtatgacggcattaatccggcgtcatctgcgaccattatatctgtccctcgatcttaccagcgtcgcccaggacagcccgtgggccgaagccctgagctggctaaaaatggtgttcagcaaaaagatgacgctttcgcagcgaccgctggcggaatgtccaccggaaacgttaccggaacggctgcgaccgtacctgcttgagtttgacgaggatggtgagcccacagggctgaatgccggacgctatgagttctggctctaccggcagataagaaagcgctttcagtcgggagcgttccacctcaatgacagcctccggcaccgccatctttctgatgaactggtatcagcagaggaacaagccgcggtgctggctgacatgaatatcccgtttttgcaaaagccggttaaatcgcagctcaaggcgctggagtccgaactgcaccgacagtggaaagcgttcaaccgcgaactaaagcaggggaagctgaagcatctggaatacaataaagaaacgcagaaactgacctggcataaatcggtggtcagccgtcacaatgcacagaagaagcgtttttatgaacagctaccgttctgcgatataaccgacgtcttccgctttgttaacgaacagtgccggtttctcccggcgatgaagccgctgcagccccgttatgcaaaaaaatatgccgacacagacagtctgatggcggtcatcgttgctcaggctatgaaccatggccatcatgtgatggcccgaaccagcgatattccactccatgtgctggataccacgtacgaacagtaccttcgtctggcgtcacttctcacagctaataacggcattaccgatgctatagaagcgctgccggttttcccgctctattcgtttgatccggagacgctttatggtgccgttgacgggcaaaaatttggcgttgagcggccaacggtaaaagccagatattcacgtaaatattttggccgcggtaaaggtatggtggcctacacgctgctgtgtaaccacatcccaatcaacggttatctgattggcacaaacgagtatgaaggccaccatgtctttgatatctggtaccgtaacacctcagaagtgaaacccacagccattaccggagacatgcacagcatcaataaagccaactttgcgatcctgcactggtttgggcttcgctttgaacctcatttcaccgacctgaacaaacagttgaaggagctgtattgtaccagggagttatcggcctataaaaaaggtctgattcagccagttgggcagattaatcaggaccttatcatccgcgaaaaatgcaatcttgatcgtattgtcgctacgctgggactgaaggagatgacgcagggaacgctgatgcgcaagctatgtacgtacacaacaaccaacccgacaagacaggcgatatttgaatatgaccggctggttcgtagcatttacacgctgaagtatctgcgcgatccgcaactggaacgcaatattcgccgttcccagaaccggattgaatcttatcaccagctacgtgccgcagtatccaaagtcggcggaaagaaagagttgagcgggaaaaatgaccttgaaacggaaatcagtaaccagtgcgggcggttgatctccaacgcgatcgtttactacaactctgcaatcctgtcgcgattactggagcgactggaagcggaaggcaacgctaaaggtattgaagcgctgacccggatatcaccggtagcctggcagcacattttgttgaacgggcattacacctttcatagtagcaatgaaatcatggacctggatgcactggttgcaggactgaaactggggtaa

SEQ ID NO: 272982 - DNA, 192 bp, Klebsiella pneumoniae
atgttcagagctgtgatgatgttattcatgcgctcctttcacgtttttttcaatgtcaagatcttttattccagcaggcctgtttctgaagcggtaatactcattaacaaattcttttcgcagcaggaacaacgcaatgacattaggtataaccagaaatcggctttgttgaataaatcgaacttttgctga

SEQ ID NO: 272983 - DNA, 792 bp, Klebsiella pneumoniae
atggctaaagactcaaagcttgtatacggcgccagtggcaaaacgaacgttttgacgttcgaacctgaaaacctgcacctggtcaccgataagagccacccgctttacgatgagcgtatccacctgcctatcagcgaggcaatggtgctgaacatcatggaccagggcgttcttgagccgattatcgtctggaaagacccggagacagggctgtcttgtgtagtcgatggtcgccagcgcgtgcgccatacactggaagctaacaagcgtctgacgaaagaaggcaaagaaccgttactggttccggcagtcgctaaacgtggctccgccattcgcatggcgcaggcgatggtaagtgctaacgaaatccgccaggcagatacaccgctgggccgagcaaagaaaatggctgatgcgctggagcgcggccacgacgaggacgatttagcgctgatgtttggcgtgagtgtccagaccgtacgcgcaacgctgtcactactggatgccactcaggcagtcaaagacgctgtggagtccggcacggtgacggttacccaggcgcgtcagctggcatcgcttaaacctgaagagcagcgggagaaagtctctgaaatcgaagcggcaactgctggcacaaccggccatgaaaaagcccggcgacagcgtcagatcctcggtgatgcaaagcctcgcctgaaaacccgtaaagaaatcacaaaagccctcgacggcgccactggcgattacgctgcggctctgcgctgggtgcttggggaggccagccatgactga

SEQ ID NO: 272984 - DNA, 267 bp, Klebsiella pneumoniae
gtgaatgacgtcaaaggcaaaatcatgcaggtgatgaccgcgggcgcagcgcaacaggatgcaacgctgggaagtggatacccgttccgcatggccaccttgaatatccgctgcgcgatggagcgcaaattccccgggatagagtggaagagcgccgacctgcgcaaagagcttatcgaactggcgaaagaggggctggtatccaaatgtccccacgagagccgcattggtcaggctgtctggcgtctggaggtgaaccatggctga

SEQ ID NO: 272985 - DNA, 480 bp, Klebsiella pneumoniae
atggataaaattaattaccctcccctttttaatccggggttccatgatatggatgaaatcggattaaaagcatcatgcgttgactgctttcctgcgtcatcaaggcgcggcatgctatactgtaattttatacagctaatagaatcaattcgcgagctttcaactcaatatggatgttttactgaaatatggattgatggctcttatacaacatcaaagccagagcctgatgatatcgatatcttgttagtttgcgattatggaaagataaactccattccagtaatgcttaaaaatcaggtagatacattacttgacagaaactacatcaaacataattacaaaattgatgtcttacctctaatgatgaatgttgatgatcccacatatgattatgaatattggcgtagctactggcgcgggtggtttggttttgatcgaagtgaaaccccaaaaggtttagtgaggattattttatga

SEQ ID NO: 272986 - DNA, 933 bp, Klebsiella pneumoniae
atgaatgataaatcaatgtttgaaaatgaggctaaacgcattgatttcattcaaaaagaagtcgatgtcatgaagtccaacaaagataggtcatttgcggacatgcttctttatcgttctatggatactcacttgagcgatttgaaagccgaggtattgaaacgggatagtcgacacccacttattgatttttttgagctgcgcttaaaaggccaagaagttgattttggaaccattccgttagaaatcctcggcaccttagcaaccaaccttgccgctttgatacaaagagcaacacacaaaatttcctcaggaaaggactcgacaaaagttcctcatgacgtgaaaagctcattaaatcttcggttagctgatctatctcctggctctacaaagttgggggttacattctcaacaggaatagctgaactagtagagaccgtacccagcaaggccgtaaaagggatattcgatttattgttaagcgataatgataataattttatgaatcatgtagcggaaattggatacaactctacggtaagcctaaagagaatcattgaagaatgtgataggcacaacataacatttgatgcaagttggactggaccgtttagcgatggcacaaagacagcaactatagactcggaaaaaattaagtatttagtaagcagactctcctcaacggtttcatcttctcccattgttgaaaccgttacaggagagttggtcgtactatcaaaatatgggaaacttgaacttgatgtaagcggagaacgaattaaggccttctatccgattgaaatgcttgactcaattcaaagcaaacacaaagttggtcaggttgtttcactatcaatagagaccacagaaattcataatcaccgcatagggctatatcgtaagaaccatttagttaagtcagttctttga

SEQ ID NO: 272987 - DNA, 294 bp, Klebsiella pneumoniae
atggctaatttactgcatggcaacccggcttttaaagcagcgcaaagcaaggttgctattgctgaacttattggcaatggcgaaatgtgggccgaagcattttcctctgtgaaagatattttcgagaaagcaaagcatgcagaagattttatgttttgcggtcgcgaagaatctctctcagccctgaaattcaatgatgtcattttgaatcatgacatgtatggcgacttggtttctgttaacgcagacactggcaatgcacattataaaataaataccgaagtttcttactaa

SEQ ID NO: 272988 - DNA, 288 bp, Klebsiella pneumoniae; identical to SEQ ID NO: 100294

SEQ ID NO: 272989 - DNA, 786 bp, Klebsiella pneumoniae
atggctaaaaactcgatcgacgcgtatggcgccagtggcaaaacaaacgttctcatgttcgaaccggaaaacctgcacctggtcaccgataagagccacccgctttacgatgaacgtattcacctgcctatcaacgaggcgatggtgttgaacatcatggatcagggtgtgcttgagccgatcatcgtctggaaggaccccgaaagcgggctggcctgtgtggttgatggccgtcagcgcgtgcgtcataccctggaggctaataagcgactggttaaacagggtgactctccattgctggttcctgcggtaactaaacgcggctctgccgttcgaatggctcaggcaatggtcagcgcaaacgaaatccgccaggccgatactccgctgggccgagcaaagaaaatggctgatgcgctggagcgcggacatgacgaggacgatttagcgctgatgtttggcgtgagtgtccagaccgtacgcgcaacgctgtcactactggatgctacccaggcagtcaaagacgctgtggagtccggcacggtgacggttacccaggcacgtcaactggcatcactgaaacccgaagaacagcgggaaaaggtagcggaaatcgagcaggcgaccgctggcacaaccggccatgaaaaagcccggcggcagcgccagattcttggtgaagcgaagccacgcttgaaaaccagaaaagaaattactaaagctttagaaggtgctggtggtgaatatgcccttgctcttcgttgggttctcggggaggccgtatga

SEQ ID NO: 272990 - DNA, 675 bp, Klebsiella pneumoniae
atggccaaaagtaatatagcaaaaaaattacgaagtaacggtttaaatctggcggactatgctatatatcttttgagtaaggggggggtacccctgattcgtgggatgtttgtcacaatccaaaatatcaggaaaataaaatttcctttttttcgtggtaaaggtaccaggataatccattcagggcatcttaccactgggagatattgttatataggtgatttctcatatattaattgtttaagtaaaagaggtgtaactttaggaaatagggtaactatacgagaatatacatggttacaaataactagtgatactagcaatcttggtgatggaattagtattggtgatggaacgtatattggacctcgctgtaatcttggtgccgcagccttccttagaattggtcggcaatgtcaaattggtgcaggtgtgagttttatagctgaaaaccacagttttgatggcaatgctccaatttttgagcaaggagtcactcgtaaaggaattacaattggcgatgattgttggatcggcaataatgttattatattagatggcgtaacaatagggaatggcgttgttcttggggccggagctgtagttacaaaagatattccttcaaacatggttgctgtaggaaacccagcgagaataattaaagagcgactctaa

SEQ ID NO: 272991 - DNA, 171 bp, Klebsiella pneumoniae
atgaataaacagccgcttgtcatgaagatcacggatccttggcgcaaaagcgaatcccagcaggtgcatcagggcgaaaacatgttcagtgaagcctgcggtatcggtgtaatgctcggtaatttccagatcgctttcatggtacagcaggccatcaagcacgtgggttga

SEQ ID NO: 272992 - DNA, 693 bp, Klebsiella pneumoniae
atgctgatacccgacacattaacacttaatattttacattcaagaacagaagaggtaaatggagttcccgttgttccattatttgatacaccattaaatggtatcaatatggttattaaaagggtggaagatatcattttatcattacttatccttattctgatctcccctattctgatcttaatttcctgtgtgattaaatgtacaagtaaaggacctgtactctttaagcagattagatatgggatggatggtaaaccaataaaagtttggaagttccgctctatgaccgtaatggaaaatggcaccgtcataaagcaagcaacaaaagatgatattcggattactcccgttggtaaatttttaaggcgaacatccttagatgaattaccacaattttttaatgttttatttggtggaatgtcaattgttgggccaagaccgcatgcagtcgcacataatgaattatatcgagatctaattgagggttatatgcttcgacataaagttaaacccggaatcacaggctgggctcaaataaatggctggagaggagaaaccgataccattgaaaaaatggaaaagagaatagaatatgatttagaatatataagagaatggagtatatggtttgatttaaaaatagtttttttgacaatatttaagggttttattcataaaactgcttattag

SEQ ID NO: 272993 - DNA, 444 bp, Klebsiella pneumoniae
gtggataacttttctgaatcgactcagaaaactgtcatcccggaagcagtcattcctgacgctgccgaagcaaacaacctggctaccgatgacgattttgacctcgctacgtggttctggtcgaccatcatcgagctgtacgaacgcgcagcagagttcgacggcactctggcaaaaccgagagagccgaacttcacagcctgggcgcaagaaatttgcatgctgcgccaggagcacggctgcagccatgaccaaatccgtaccatgattgagcgcattcagcgcgatcagttctggtgctcccgagttcaatccgtgaaaaccctacgcagcaaatggcaggagctggctctgaagttatgcccggtaaacctggcaaccggcagctcgttcggtgtgagcagcaaactggataccgacatcccgaaaggtttccggggctaa

SEQ ID NO: 272994 - DNA, 396 bp, Klebsiella pneumoniae
atggaaaaaattactgaagtgctgaaagagctggagaaggtcacctgccgtgagctggctgtttatttcgacctgacagcacctgaaatgctggcccgcctgatggtgcttgagcgcgaaggcaaagcgcaaaacctgaatggctactggatgcctggtggaagcaccgagcccgtagcagtaaccagcaaactcaccgcgctggatatcaagctgctccagtcagtgccggttggcgtctggttcgagtggcagtccctggctggttttgttgatcgccctcgctaccgctgcgagcgtctggtggccgccgggtttatgaattcgaaggtaactaaccctggcaatccgtttcacggcactaaattccagaaaatccgcgaggtggcccggtga

SEQ ID NO: 272995 - DNA, 633 bp, Klebsiella pneumoniae
gtgactcggattctgacagcgattccgattctgacagtgactcggattctgacagcgactccgattccgattccgacagcgattcggactcggacagcgactccgattccgacagcgattctgactctgacagtgactctgactctgacagcgattcggattccgacagcgactctgactcggacagcgattcggatgctgacagtgactctgactccgacagcgattcggattccgacagcgactctgactctgactccgactccgattccgacagcgactcggactctgacagcgactcggattctgacagcgattcggattccgacagcgactcggattctgacagcgactccgactctgacagcgactcggattcggacagcgattccgactccgacagcgactcggactctgacagtgattcggattccgacagcgattcggactctgacagcgactcggattctgacagcgactcggattctgacagcgactcggattctgacagtgattccgattccgacagcgattcggactctgacagtgattcggactctgacagtgactccgattcggataccgaaccgcaggcaaataatgatacccatacggcggctatcgataccgtag

SEQ ID NO: 272996 - DNA, 759 bp, Klebsiella pneumoniae
ttgaacgtcacctccgccgtacgccaggctgtcgaacggacatcctggtttaaaaaacgtcagcgttatcgtgtgctgtactggcgcgaaatcagccctctcgctgtgcccattctgctggaaaatgcctgtgtgctgctgatgggggtgttgagcaccttccttgtcagctggctgggaaaagaggccatggccggggtggggctggccgatagctttaacatggtcatcatgtccttctttgccgccatcgatttgggcaccacggtggtggtggcctttagcctcggcaagcgcgatcggcggcgggcgagggcggccgcgcgccagtcgctggccattatgacactgttttccattttgctggcgggggtgatccatgcctttggccaggagattattgattttgtcgccggcgatgccaccgcccaggtcaaggacctggcgctgacctatctggaactgacggcgctgagctacccggcggcggcgattgcgctgatcggcagcggggcgctgcgcggcgccggcaccaccaaaatcccgctgctgatcaacggcgggatgaatatcctcaatatcttgatcagcagcgtgctcatctacggcatcttctcctggccggggctagggtttgtcggcgccgggcttgggctgaccattgcccgctatattggcgcgatagccactctgggtgctgatggtgggcctcaatccggcgctgcggctgtcgctgaagggctacttcaaaccctttaa

SEQ ID NO: 272997 - DNA, 2694 bp, Klebsiella pneumoniae
atgcatgccgctaaccgtaacgaccttaacctcctgccctcggcggtgatgatctacgatgagcgcgaacgactgcaggcctggaatgataaggtggcgctgttttatccaacgatcgcgccctggctcgccgtcggcgcctctcttgagagcctggcggagaagtttatcgatgccggatacaacatcgacccaggccggcaacagacgctgcgcgaggcgattatccgcaactgccgccagacgaaccactgcgaggtccgccagtcgggcaaccgccggatttacgttcagcatcagcggctggcggatggcgggattgtcagcctgcataccgacatcaccgagcttgacgaggcccggcgttcgcgtcatcaactgcatgatgactttttattcaccgcggagtcgatccagatcggtatctgggactggcaggtctcccacgacagcctgaaggtgaatgacaccctgctggcgatggtcggccagtcgcgggcgcagtggcgctttccgctgcgctttatgctcaacctggtccacgaggacgatcgcgccactctgcagcaggcgatgatcgcctcgcaaaacgagcacatgccggtttttgaatgtgagcttcgcgtccagcacccgacgcagggctggcgctggatgctgctctcggggcagatcgtcacccttaacatgcagcagcaggcagagcgggtgatcggcaccttgcaggatattacccggcgtaaagccgcagagctgctggccattgaggcggcgaaggaggcccgcgaggcgaacgaagcgaaaagcgccttcctcgccaatatgagccacgaaatccgcaccccgatgaacggcattctcggcatgacgcagctctgcctcgacacgccgctgaccgcggagcagcgagagtacctttcgctggtgatgagctcagcccagtcgctgctgcacattatcaatgacattcttgatttttcacgcattgagtcgggcaagatgcaggtggacgtagagccgctggagatccgcccttttgttcagtcgctgatccgcccgcatatgcctgccgccagcgaaaagggcattgagctgctggtggatatctcccctgcggtgcctgaggtgctgatcgtcgatggcccccggctgcggcaaatcctgaccaacctgctgggtaatgccctgaagttcactcatcagggggaggtcctgctggcgatagcgccggccgaggacgacaaccgctggcgctttcgcattcgcgataccggcatcggcattgccccggagaagcaaaaggcgatcttcgaggccttcagccaggccgatagctccaccacccgtcgctacggcggcaccggactggggttaaccatttcggcccgcctggtcagcctgatgggcggtgagctgacggtggagagccagcctggggcaggcagcgaatttgccttcaccctgccgctggaaggcctgaacgccgcggcctccggtagcgccccgctgagccgcttcaaccaccagcgggtgctggtggttgacgacaacagcaccaacctgcgcctgcttgacgccatgcttcgccagatgggactgatgccaacctgcgtgaacaacgctggcgaggcgctacgccgggccgccgaaggcccgccatggccgctgatcctgctggacgcgcagatgccggatatggacggcgtatccctggcgctggagctctccgctttgcctgaagccaggcaaaaccagattgttatgctcagctccatgagccgtcattttgacgccaatatgcttaagcgcatcggcattgcccactatctgcataaaccggtggcacagcgcgaactgcatcaggttatcgccggcattctggtgcccacgccggtggcgacgacaacgcctgcccccgttgcgcaaccggtcagggaccagaccgggctaaatatcctgctcgccgaggacaacctggtaaaccagaaggtcgccagacgactgctggagcagttgggtcatcgctgcgaggtagtgaacaatggtcgggaagcgctggagcgctggcgcgcagcctgctgggatcttctgctgatcgatctgcaaatgccggagatggacggtgaaaccgccatccgcctgctgcgggaagagacccacgcgctgggcaggcaacatcagcccgcgatggccatgaccgcccacgctatgcagggcgatagagaacgctgtctggcgatgggttttgacggctatatcgctaagccggtgagccaggaggcgctacgggaagccatcgcccgcgtcggcgcggcggaagatagcgcgccggaggaagaggaaggcctgccggacgaagcccgcctgctgaaacagtgcgccgacgatcctgagcttgtcgaggagttgctgggactcttcgctgcaggacttaatgctgcggccgccgccctcaaccacgccattgacgccaatgaccgggagacatggcgccgcgccgcccacaaactgcgcggcgaggccgccacccttggttttcaacgccttgccagtgtgctccagcggctggagagccaggcggcctcgccagaccaaagcgtgccgggcgacctgcgcgacgcgctgaccgaggcgatcgcgggctgccacctgtggctgcgccgcagaacgcaggaggttccccatgatcgctag

SEQ ID NO: 272998 - DNA, 141 bp, Klebsiella pneumoniae; identical to SEQ ID NO: 139621

SEQ ID NO: 272999 - DNA, 462 bp, Klebsiella pneumoniae
atgagccggttaaccgccattatcagcgccgtggttatctgcctgatagtcagtcttgggtggctggctaatcactaccacgacagcgccactgagttcaaagagcagcgcgataaagcgactgagcagctcaaccttgctaacgccaccatcaccgacatgcagacccgccagcgtgacgttgctgcgctggatgccaaatacaccggagaactgtcagatgctaaagccactatcgatcagcttgagcgtgatgttgcttctggtaagcgtcggctgcagctcaacgccagatgtcccacgagcggagcgcccggcaccagcagcgtgggcgatgcttccggcccccgacttactgactccgctgagcgggattattggagtctccgagccggaatcgccaccatcacagggcaagtgagctacctgcaggactacatccgcacgcagtgcctgaggtga

SEQ ID NO: 273000 - DNA, 540 bp, Klebsiella pneumoniae
atgatacatatcaatttttcaaattgtcaggaaaaaattcaacgatatttaaatatattctataaagaacataaaatctttgaggatagatacttgtctgaggaactcaatgttttattaaatagatggtcaacagataagaagaaacgtgattattatactattttagatgagattttatttgatattccagttgaaaaacagataaatttcatcgagtattggagtgaaacaatacctaagctttctaacgattaccattactctgatccgagagaagaggcgtatcagtggtcctcaatggtcagaaaaggtgagataatggtcaaaaaagcaattgaattaaaattattgaatactatcgcttggcctgagctaatgtcagcagcggaagatatattgccagagtttgaaattaataaattagtagaaaggtatgatggtttggttcctgtttgggctctatggcatgtagttaaagaatatactaattttattgaagggcgcttgagagaaatgaaagtggaaaatctaaagtaa

SEQ ID NO: 273001 - DNA, 1191 bp, Klebsiella pneumoniae
atggaaattgagaaaagcaaagagatcgatctaaacaatataataaataacattttgacctccaaccgtatttcccctccaatcacactaaaaaccgatattgtttcagactttaaaggcagatgtgaatactatataaatgcccttaagaagtatgacaaagaaaatgtttccgatataaatttcacattattaataaagcgggtaagggtgattgttgatggaattactaagtgtcttgaggaatttttatctggtgatattaaatctgcttatgatgctttcgatgataccttctcagcggatacgattaacagacacattcaaagaattgccatacctttaaatgatatctgcaatgaaaacaaaccgttattccgagtcagaaagtcagatacccctctttcagaaagagaggaaatatttcacattccttttactgaaaggcaaaatgttagtgcacaaagatactcagtagctggattaccatgtctatatctgggtacgtccttatatgtttgttggcaagaaatgaacaaacctgattttgataaattatatctatcatcctttatttgttatgatagaaaatctaaaatattaaacttctcgcctgacatattaaataaaccaaccacaggtcttttgtatggagatgaattaaaaaccactaactggagaaaggcatcttacttaatcttatggccgttaattctttcttgcagttatattaagaagaacgctaatgcatcctttatccaggagtatatagttccaaatttgttaatgcagtggataagtcgccgcactaactctcctattttcgggattgcataccattcaacaagaatgcctaatgcaattaaaacatctcgttccattaatgtggtacttcctcctaaagcaacttatagacaaacgatactaaacgaatattgccctcgtttaaaagatttatttcaatttacaccgccagtatcctggcaggttttaaaaaccttagattataaacatgatgatttcaaaacatctgaacaggaagaagcagaaaaattcttgcggagaagggaaaaactaacgggaatctcaaatctctatgaagatattgttaaattgtaccctttaacggacttctataaacttgaaatttggattgatagactgtttgactatgacaaaatcattggataa

SEQ ID NO: 273002 - DNA, 738 bp, Klebsiella pneumoniae; identical to SEQ ID NO: 193936

SEQ ID NO: 273003 - DNA, 1893 bp, Klebsiella pneumoniae
atgacagaccagtcagccgatctcgtaacgaaaattgacgttattcctgaccttgacgggctcaatagctttgatgccgcgattgataaggctatcgcaaaggttaaccagcttgacgccgctatcaaacgcgtcaacaacctgaagcctgcaagcccttacgcgcccagcagtgcatcaacagcgccgacagcagccactacagcagcaatcgccacagtagccgccacaggcacgaatttgattgctcgtacaccactggcggagactgtgcgccgcgagtctcagaaggtcgcacgtgcagccgttcagggcatgggtaacggtattggtcttcctcttctgggcggtggcggttctggtggcggaggtctgctattgccgccgccgcgtgctggtggttttaacccgttcgacgcgtccaatttttccggagagccgctaaataccaggaaaaaacctgttgctgatgccgtacagagcgggatacgtaacccgtttggtgttgatacgatgctggccggggccgggctaaccgtcggcattatggcggcgggtaatgcgctggccgagagccttgattcaattcagcggcagcaggcgcagattgcgaggttgacacagacaaccggtgacgcaaaagaggcgttctttgcacttaatcaggccgcgagtgatgttcgaagcgacagcggggcgtttatctcaacgtataccaatatggcgaccgccacgcagaagcttggaaagtctcaggaggaaacaatccgggcaacgcaggggctggtaggggcattgcagttaggtggcggcagtgctgaagcggtaaacgcatcgctttaccagatgggccaggcattttcttctgaccggttcggcggggatgagtttagatcctttatggaggccatcggcacaatggccccggaagttgcgaaggctttcggcacggatgtaaaagggctgcgagcaatgtcagaggccggaaagctgacgacggaaacgatgattaaagcctttgaaaaaatggcggcgagtaatgccgacttgcttaaaaaacagggctggacatggggccagacaatgacagtaatgaaaaatgactggcaggcatttttagcgcaggcaaccatcggcggagagtggaaaaaattcactgattgggccgccaatactcttattcccttagcccgaagcgcagaaaaagagattgcagcattctggtcaacactggcagatgaaagcaagtcggcgattctgataggtattcttggcgctgtcggcgcagcatttaccgcgttggctattccggtcatggctgctttatggccttttctggctattggcgctgctgtatgggttgtttatgaagcgtttgtagaatggaaagcatggatggcgggtgaaagcggaacaatatttgatggtttattcggtagttttgatgaatttgaaaagcgatatccatcgattgtgaaaggtctaaaattattgtctgaatggatagggaaatcaggtggtattgcgccggaaagctcggttccgtcacaggcgcaaatagatgaatttctgaagaataaaaacggcactgacggaaaaccagaaaaaggtttaatcgagagatttcttgagtacaacggtaactttaacccattgccgggggttgagagatttttagggctatttggtggtgatgatggtgccgggcaagacgcatcattgatgacaccaccatcaaaaggaggggtgattattaacaatgatgtaaaaaatgaaaataacattaatgtccctgatgctaaggatgtgggaactgtcgtcgaaggcctgagcaaaactagtacgacacaaagtcttagtggggtaaactgggctgaggcgaacggtgcttaa

SEQ ID NO: 273004 - DNA, 246 bp, Klebsiella pneumoniae; identical to SEQ ID NO: 182384

SEQ ID NO: 273005 - DNA, 396 bp, Klebsiella pneumoniae
atgagttatagcgatacacttgctacaatcgcgcttgtagtatctgtggccgggactatttttagctgctttttcagttatcgtctttcagtaagggcagaaaaacgcaaagaattcaatgcagttgaagaccgaataaccctgtcattagtccaccagcaagagtctgctgataacgggcattatccgaacaaaaccctgactgaatcagaccttcacgcgctgttactggttagtaatgagcgcgacgcagccaaaataagaaatgccttcgcaaactaccagctttcgcttgagagggctggtgagcgtcatggcgggatatatgacttccactcgccgcatgaaattatcaaggccgcagagcaattgaagatgtggacaaaacacaagtag

SEQ ID NO: 273006 - DNA, 1611 bp, Klebsiella pneumoniae
atgtctacattactcactatccctgacgccgctgaacttgcagtacataccatgatggcacttaaagccgctggttatgcaactgctgctatgattcccgttcacaaaaacgcctcaaatgaagtcgaaaaaacggaagtgaccgcgccggaagtctacgtagcgcccggtcagcagtatgccaacgcccgtgatgcgctggcacatatggttcatgaactcaaaaaccccgaccgcaacaactacaacgaaatgctggatttcacctatgccacgttggcgcagttgctggatatgctgcgggatccgatttaccagcatggtctgatgctgaatcaggaactggtgcatgccgataatgccactgacagcctgccgttcaacatggtgacgaccttccaccacaacccaaccggcacggaagtctctttcaccctgcctgcttatatcaaacaggataagcgcctggatgcctgtcagcagtttggggcgacatacacctattaccgtcgctatggcctgcgtcaggcactcgatatcactgatggtgatgacgatatcgaccaggcagacagtaaacgcgaacgccgtaaggcccgcgccctgaacagtagccgcaaatggaagccgaccaaatcagatcgcactaaagcggaatctatcctgaatatgctggtcgcggctggtgaattcactggcagtgcggtaatcgcccaggctaaagcccgtaaccctttcctgcgtactccgtcagaagtggcagaggatgttatccattcccgcgacaatgccaaagacgatgacgcaatggcccgcgatactgtgttgcgctatggcctgacggatgagcactggcaaagtttctacaaacaggccgggttcttccaggtagacggtgatgaacttatcgacacccgaaccggcgcacacgtcagtgctgaagttgctatggatattgcggaatccctttcatctgttgcgatttccagcgctgattcaaacgatgtggatgatacccgcgatatgtcagcgccagtcgcccggacattcattcctgactgtaccccgcttgatgacgatgaagaggcttttgttgctgctgttgaagcgggccacgattcggaaattatcgaaatcgctatgcgtcagatggaagttcatgtgtcgcacggtctggatatgcgctcagtacacagcgatacgagctatcaccgccgtaactggtataacgcctgtcgtgaattctatacgctggcgctgatgcgtggtgatgtgaactttgaagcgctggcaaatcctgaaatgaaagttgccagcaccatcatagatatcgtcggcactgacggcgataacgaggccagcgaatccaccattgcagcctcacaagcacaactcaccaccgatgcgatgcaacaaaaggtcgatattgcgcaggaaatcgcgacgggtaacgctgacaccgatatcaagctgcaacagcttcatgaaattgcgcgtcgctgcgatgcgtacaccgctggctatatcgaaactctaatccttcatgttgaaagtggtggcttcaacaatgaaatcccggcgtacatccctgaatctgaccttccttactga

SEQ ID NO: 273007 - DNA, 183 bp, Klebsiella pneumoniae
atgtggtcagcctgcatcatatcgacgggagaacagcagcaggcgcacacgctcgcgtattgccactatgtgaccatcaccaccagcacgccgcgccagcagcagtacgcgctgtttatgcctggctggttccgattcatgctgatggaacatgcggaggaaaatcagtatttgaagcactaa

SEQ ID NO: 273008 - DNA, 1899 bp, Klebsiella pneumoniae
atgtccgaaaataattatggtgcgctgatgatgaaatcggcactcagcgccagtgatgatattgattctttaatgtcatcaggtatatatcctgtcccccctgaaaacccttcatctcccaccccaggcggaggtgttttaactatccttcctggacaggttaaattccgcacattcacttctgattccacacttatatctacatctctatttaataaagaattgtctatttgggaggaatggattgtccctgtatctcaaaaaaaattgggttcagacgaaggaactaagtctataggtataccaggcagtggaggtactcttcacgactggatctcaggtcagttgcgtagcatgttctattatctttctcctgcaaaaatagcgtcagtaatcggtggggcggcaacagacataacgacagaactccaggcggcaatgaatgacaacaggcctatctggctgcctgctggccagtattatgtaactggctccattacagcctctgtgaattcgagcctcattgggccggggccccgcctggcgtcaatagataaccgtggaagcagtcatttatttattatcggtgctggaggttatctcagagggtggaagccatggcgtgggttctcaataaccgcttctggtaacaatactgccgacgcctatgcattttactactctgacaggcaggacgcgaacggggccccggtttatacaatcgctcaggtattctctgagattgaaataaacgctaatgggaaactgggcggcggctggtttttgcaggactgtttccgtgttgttattcgtgactgcggcggtaccgggctatcccaaccgttccgtcttgtggggagtgtcgttcagacaacgattgataacttcgtccagaacggcgacggcgcggcatcaatgactggccgttcgtatacttatggcctcactactgagaaaaaaacttatggcaatgggtcggtatttaccccagaaggattaaccgtcgttaataccagattcgtgaaacaagatatcggggtcagggtatcgggcggcttattccttgtatttgacgcagtagaggcggattacagcaaatataagggcttctggtacgacggaggaagccaggtatcattcgataactgttatgttggtgttcaggcttcccgtgatgctgattttattggcttcgatattccggctcgagcacccaatgttgcagaggcggttaacgtcaggggctgcactgttaatatgtcggtgaatacccatgaatcggcggcatcatacaaatctcttggggtgcgagttggtgatacatctgtgggagaaaatggcgcactgattgacgggtgtaccttccgtggtacggggtatgatgccggggtttatgtgtaccggggagcctcagtctctgtcaacaacaaccgttttcaatataccggtgtaaatatcagcgttgctgagtgtaccaacctcgtaatgattggcaataccgggaatggtgacgggaaatacattctgaactcatcatctcccgtcgcgacatggacgttactgaataacacggaatcgtttgagttagtatcaaacatcaaccctggcggattagttgcaaaaaatcccggctacaactcagcaactctgcgcagaatagaaagagctagcagcccggtaaacataagcattgctgccggaggtttatatcaacacgcggcaccagccacaacatcattgacagcatcaattactgttgggggagccattcccgcagggttgatatttagtgcggtaccggcgtccacatcgttaatacggtgtacgtttttcaaccccacaggttcagctataacgctgagtactacgatttattttgatatcacataccagaactaa

SEQ ID NO: 273009 - DNA, 258 bp, Klebsiella pneumoniae
atgaaagtggtaactaacaggtttttcaggggcattgaagttaaggattccagtgttgtagttgggggtatacaaatagacgacaggcatacaacggtaacattttctgttggcttttttgctggcgagaatgatgagccatttgacggtgaaatcatgtccttcccgtatgtttctgattcctcttttaatttattggatgcctgttataactatttgttaagcatagacggatacaacactattggcttgatgtga

SEQ ID NO: 273010 - DNA, 180 bp, Klebsiella pneumoniae
atgactgattttagtgcaacaaaacgaactgcgtcgctcgaagattggggggaagcgctggagttaatcgttgaattaaacggtaaagaattcgatatcaccgaaatggaaatagaagccgcttacgaggcatataagcgtgttgatgattttttctatgacgaatggggcgaagaataa

SEQ ID NO: 273011 - DNA, 267 bp, Klebsiella pneumoniae
atgaccagcaaattaaccaaaaaagaaaaagcgtggtttgccgaagttaacgcggttctggcgagatgcccgtcgccggagaaattcggtttctacactatcggagattctaacgtgatggtgtacgacaggcgcaaagagaaagagatcgagcaaaagcttgactcccggtcatcctccgattggtgtattgctgttcgcgatgccaatgtggagatctgcgaagatatctactttccatccgcagtactaagcacggcaggataa

SEQ ID NO: 273012 - DNA, 723 bp, Klebsiella pneumoniae
atgaaaaaaagaacacaaataatccagtttagagcagatgaagatacctatcatcgtgcgcaggagcgagcgaaagaaggcggtgtgcagtttactgacatgatgagagcggccctgaaatccgttgctgacgcggatgtttccggtttagctgacattatcaacagtgctacatctggcagtgaagatattaaccaagcatggctctatcaaaagtgtcatgaactgtttgaatatcgtgaaggtacgttgtttcgtaaatcaagaaagggaatgggtgagcaaggcactcctgtatatataagggttcgggaaggtgaagaacacgtattaattcagggcaatcattacccgcttaaagatatcgtttggcttatggcaaacgggagtattgccggggaagtgacgtataaaaacccttatagggtaaacctcaaacactctatcgaaaacctaatggttgaagcggttgcagaaaaagaaatatgccttattaaatatttaaagggatctgaaaagatcaatgttttgaaagttaagcagcgggcattcctgtttgatactaataacgacgaaattgctaaggatgcaatagagaaattaattaacaacgaaaagacaattccgttacttttgcgcggtgatgatggttgggttgcatcacgtaccgccattcacgctttcaaattgggtgataaccagtacgtagtaagcattacataa

SEQ ID NO: 273013 - DNA, 171 bp, Klebsiella pneumoniae
atgacctgcttattcgcaccttccctggaggagctggatctgccttatcagcagatcctcgccgggctggagtttggtctcaatcatgacccggaatatctggcgatgaacccgaacgggctggtgccgttgttaaaggacgatgccaccggggtggtattgtgggaataa

SEQ ID NO: 273014 - DNA, 318 bp, Klebsiella pneumoniae; identical to SEQ ID NO: 147158

SEQ ID NO: 273015 - DNA, 1041 bp, Klebsiella pneumoniae
atgaacaggtataacagaaatgacaaacctgactgggtccctccccgatccatcaagctgctcgatcaggtgcgcgaacgggttcgctacctgcattacagcctacagaccgagaaagcttatgtctactgggccaaggcatttgtgttgtggacggcccgcagccatggtgggtttcgacatccgcgcgaaatggggcaagctgaagtcgagggttttctgaccatgctcgccaccgagaagcaagtggcgccggccacccaccggcaggcgctcaacgcgctgttgttcttgtatcggcaggtgctgggcatggaattgccgtggatgcagcagattggtcggccgccagaacgcaagcggattccggtggtgctgacggtgcaggaggttcagacgttgctttcgcacatggcgggcaccgaagcgctgttggccgccctgctttacggcagtgggttgcgcctgcgcgaagcgctgggcctgcgggtcaaggatgtggatttcgaccgccacgcgatcattgtgcgcagcggcaagggcgacaaggaccgcgtggtgatgctgcccagggcgctcgtacctcggttgcgggcgcagctgattcaggtccgcgctgtgtgggggcaggaccgtgccacggggcgcggaggcgtgtatctgcctcatgcactggagcgcaagtaccccagggcgggcgagagctgggcctggttctgggtgtttccatcggccaagctgtctgtggacccacaaaccggcgttgagcgccgccaccacttgtttgaggaaagactgaaccggcaactaaaaaaagcggtagttcaggctggcattgccaaacacgtatctgtccacaccctgcgccactcattcgccacccacttgctgcaagcaggcacagacatccgaacggtgcaagagttgttggggcattcggacgtgagcacgacgatgatctacacgcatgtgctgaaagtcgctgccggaggcacctccagcccgctggacgccttggccttgcacttgtcgcccggctga

SEQ ID NO: 273016 - DNA, 1200 bp, Klebsiella pneumoniae
atgaagccactacaaccccgttatgccaaaaaagaagcggatgcagacagcctgatggcggttatcgttgcccaggcgatgaaccatggcaatcatgtcatggcgagaaccagcgatattccgttccatgtgctggagaccacttacgaacagtaccttcgtctggcgtcgttgctgacggccaatgactgcatcaccgatgccatagaagcactaccggtatttccactctattcgtttgatccggagaccctttatggcgccgttgacgggcagaaatttggtgttgagcgtccgacagtgaaagcccggtattcacgtaaatattttggtcgcggtaaaggtatggtagcttacacactgctgtgtaaccacatcccagtcaacggatacctgattggcacaaacgactacgaaggccatcatgtctttgatatctggtaccgcaacacttcagccgtgaagcctagggccattaccggagacatgcacagcatcaacaaggccaactttgcgatcctacactggtttggccttcgatttgaacctcattttaccgacctgaacaggcagttatcggagctatactgtaccagagagccctcgacatataagaagtgcctgattcagcctgccggacagattgacctggaccttatcacccgtgaaaaaagcaatctcgagcgcatcgtcgccacactggggatgaaggaaatgacgcagggaacgctgatccgcaaattatgcacatatacaacggctaatccgacaagacaggcagtatttgaatatgaccgactggttcgcagtatttacacactgaagtatctgcgcgatcctcagctggaacgcaatatccgccgttcccagaaccggattgaatcttatcaccagcttcgtgccgccgtcgccaaagtcggcggaaagaaagagttaaccgggaaaaacgacattgaaacagacatcagtaatcagtgcgggcggctgatctgcaacgcgatcgtttattacaactccgcgatcctgtcgcgattactggagcggctggaagcagaaggcaacgacaggggcattgaggcgctgacccggatatcgccggtggcctggcagcacattttgctgaacggacattataccttccagagcagcagtgaaattattgacttggatacgctggttgccgggctgaaattggggtaa

SEQ ID NO: 273017 - DNA, 852 bp, Klebsiella pneumoniae
atgaaactgctgctctacccgttattgctgttccttgtcattccagcctttgcccaggcggactttgaacatgccatttcagatcttgaggcgcacaatcaagccaagatcggagtggccctagttagtgaaaatggcaacctgattcaagggtatcgtgcgaatgaaaggttcgcgatgtgctcaactttcaagttgccgttggccgctcttgttctgagtcgcattgacgctggggaagagaatcctgagcgcaagcttcattacgattccgcgttccttgaagagtacgccccagccgcaaaacggtatgtggcaactggatatatgactgtaactgaggcaattcaatccgccctccaactcagcgacaatgccgcagctaacctgctgttaaaagaggttggcggcccacctttattgacaaagtatttccgtagcctgggtgataaagtaagtcgccttgatcgtattgaaccgactttgaacaccaatacgcccggcgatgaaagagatacaacaacgcccatgtccatggcacagactgtgtcaaagctgatttttggagacacgttgacatataaatccaaggggcagctaaggcgattactcatcggcaatcagaccggggacaaaaccattcgagctggcttgcctgattcatgggtaacgggtgacaagacaggctcgtgtgcgaatggcggccgtaacgatgtggcgttttttataaccactgccggaaaaaaatatgttctttctgtatataccaatgcacctgaattgcaaggcgaggaaagggcgttattaattgcttctgtagcaaagttagcacgtcaatatgttgttcactga

SEQ ID NO: 273018 - DNA, 198 bp, Klebsiella pneumoniae
atggtctccctgacttcgatgatgcacagcggctggaatatcttgctctggatgaatctgagctggcactggcctgtagtcgtcaggggcttcacgctcaaatttattgcatcctccagatcgcttactttaaagccaagcacctgtttttccgcttcgggtggagcgatgttatggatgactgcaactttatcctga

SEQ ID NO: 273019 - DNA, 198 bp, Klebsiella pneumoniae; identical to SEQ ID NO: 273018

SEQ ID NO: 273020 - DNA, 198 bp, Klebsiella pneumoniae; identical to SEQ ID NO: 273018

SEQ ID NO: 273021 - DNA, 369 bp, Klebsiella pneumoniae
atgggcatcgtgccgagcttctttaatatcaacgagccgattctgttcggggcgccgatcatcatgaacccgatgatgtttatccccttcgtctgcgtaccgatggtcaacgcggtgctggcttacggcgcgacgcgtcttggctggctgggccaggtggtgtcgctgacgccgtggactacgccggccccaattggcgcgtcgtgggcggctaactggaccctgagcccggtggtgatgtgtctcatctgcatggtgatgtcggcggtcatttatctgccgttcctgcgcgcttatgaacgttccttaatgaaaaccgaagttgagaaagccaaaaatagcgttccggtagcagaaaccgttagctaa

SEQ ID NO: 273022 - DNA, 2208 bp, Klebsiella pneumoniae
atggcgcgtccaaaaactgctcagccaaatcactcgctgcgtaaagtcgcagctgtagtagccacggcggttagcggcatgtctgtctacgcacaggcagcagaacaaccgaagcaagaagaaaccatcaccgtcgttgccgccccggccgcccaggaaagcgcctggggaccggcgccgactatcgcggcaaaacgctctgccacggcgaccaaaaccgataccccgatcgaaaaaacgccgcagtctgtgtcggtggtgacgcgccaggagatggagatgcgccagccgacgacggtaaaagaggcgctctcctatacgccaagcgtcttctccactcgcggcagttcgaccacctatgacgtggtcaccattcgcggcttcaccacctcgacgaccgtcaacaccaaccagtatctggacggcatgaagctgcaggggaataactactctgaagtctccatggatccttacttcctcgagcgtgtggaagtgatgcgcgggccaacctcggtgctgtacggcaacagcaacccgggcggtatcgtcagcatggtcagcaagcgcccgactaccgagccgctaaaagaagtgcagtttaagatgggcaccgacaatctgtggcagaccgggtttgactttagcgacgccattgatgatgccggcgtttggtcgtatcgcctgaccggccttggccgcagccaggatgcccagcagcagatggcgaaatcgactcgctacgcggtggcgccctcctttagctggcgtccggacgataaaaccgacttcaccttcctgagcaacttccagaatgacccggatgcgggctactacggctggctgccgcgcgaaggcaccgtggtgccgtattacgacgccaacggtaaggcgcacaagctgccgaccgatttcaacgaaggcgagtccgataataaaatctcccgccgccagaagatggtgggctacagcttctcccatcagttcgatgacacctttaccgtgcggcagaacctgcgctatgccgatgtgcatacgctctatcgttcggtatacggcaacggctatgtcgcgccgggctacatgaatcgcgcctacgtgcgctccgacgagcacctgaacaccttcaccgtcgatacccagctgcagtctgatttcgccaccggcgcggtcagccatacgctgctgaccggcgtggactactcgcggatgcgtaacgatgtggatgccgactacgggacggcggatcctatcagcatgagcaatccgcagtacggcaatccgaatattcaggtcaccttcccgtacgcggtcctcaaccggatggagcagaccggcctgtacgcgcaggatcagatggagtgggataaatgggtgatgaccctgggcggccgttacgattacgccacgacctcaacgttaacccgcgccaccaacagcctggcggagaatcacgaccagcagttcagctggcgcggcggcatcaactacctgttcgataacggcatctctccgtacttcagctacagcgaatcgtttgaaccggtatcgggttccaacagccgcggccagccgttcgatccgtcgcgcggtaagcagtatgaagccggcgtgaaatacgtgccgaaagatatgccggtggtggtcaccgcggcggtctatcagctgaccaaagacaagaacctgacggctgatccggctaaccaggcgttcagcatccagaccggcgagatccgctcccgcggccttgagctggaggcgaaggcggcggtgaacgctaatattaacgtcaccgcagcctacagctacaccgatgcggagtacactcacgatacggtgttcaacggcaaacgtccggcggaagtgccgcgtaacatggcctccctgtgggcggattataccttccacgaaaccgcgctgagtggtctgacgattggggccggggcgcgctatatcggttcaacggtcagctactacaaaaatgacaccagcaccggtaagaaaaatgatgcctttagtgtggccggttatgcgctgatggatgcgacggtgaaatacgatctggcgcgctttggcctgccgggatcgtcggtcggcgtcaacgtcaacaacctgttcgaccgcgaatatgtctccagttgctacagcgaatacgcctgctactggggcgccggacgtcaggtcgtcgccaccgccaccttccgtttctaa

SEQ ID NO: 273023 - DNA, 282 bp, Klebsiella pneumoniae
gtgatccattgtccggagggggcatggggcgtctcccgtaccgaagccgggcgctgggtaccgtcatggcggctaccgccggaggagattatcggcagcgtcggcgcgggggacgccttctgcgccggtctgctgtatggcagtcacgaacgctggccgttaaccgccagtctgcagctggctcacgcctgcgcccgcgccagcctgcaggccgccaacgcgatcgacggcgccaaaacgctccctgagctgcaggcatttatacaattgcagaatggttag

SEQ ID NO: 273024 - DNA, 855 bp, Klebsiella pneumoniae
atgctcaaatgggctaagagcgaacgttatctttttgataatcctgctgagaatgtgctggctcagcgccgcatgatggtgcgtgagcaggatcgtcgcgacctcttcaccgatgatgaattagtgcaaattttctcggctgactggtttaagaaaggctcgggaacgcccaatcaatatggacgttatacgagttttcgcccgtttcactactggttgcccctgctggcattatatgtaggcgggcgcattaatgagctttgccagctttatctgacggacattcgcgtagataaaaacggcgttgtctacattgattttaaccttgatgcgccagataagatgatggatgaagaggcgcaggctggcggcgataaatcattaaagacggtgaatgcaatccgtcaggttccaattcatccgcgacttatcgaactagggctgctggagtatgtggatgcgctgaaagcagccgggtatgatcgtcttttccctgagttaaagcacaacaaaatcaaaggatatcgcgccgccgcctcaaaatggtttaacgaaaactactttggcaaaattcttggctttccccgcgatggtaagaaaacgttccattcgctgcggcatacttttatcaatgccgtagacgagtttgagagcaacgagcgcacgattgcgcagcttgtaggacatgttcgcggcagcaccactgcgatgacaacctatcgtaaggatgctgatgtgggagagcaatttggcgtgatttcgcagcttcgctacagtttgcctgatattgcgcagttcgacttgcaagcgggtatcaaggcggtcagtgacgcacggcgcagacataaatcgtga

SEQ ID NO: 273025 - DNA, 324 bp, Klebsiella pneumoniae
atggaaaatatatttacagttcacattgaggaaggtttcccaatttcaactattccggctttgatcgatttgtttttgcgtcattatcattgtaatgtttttgatatagataaagctcttgaggctacaagggaaaatatagaagataatttagaggcactaactaaaatgaaaaagccaaaagtcgatcttgaaaagattatggttgaagatattatgtcagggttaaaaacaatggtttcagaaatgggagtgttagaattatataaaattcattttgaaataaacgaaatgggaatgagttggggggttgataatgagtaa

SEQ ID NO: 273026 - DNA, 252 bp, Klebsiella pneumoniae
atggaatataaaaatatatataaaaagtgttgtaagtgtaggaaagaaacagaacacgaaagagaagaggcttatgtaatggaaaaatctttaagtaaagacgattgggaatattcgccgtctgaattggcttcttatatgaatggtgagttttatgacgattatgaagaggttttaaggctatttgatacctgttgtgtatgtggtgataaatcttatggtagttggtcaagtgaagaattaacaagataa

SEQ ID NO: 273027 - DNA, 279 bp, Klebsiella pneumoniae; identical to SEQ ID NO: 101025

SEQ ID NO: 273028 - DNA, 279 bp, Klebsiella pneumoniae; identical to SEQ ID NO: 147302

SEQ ID NO: 273029 - DNA, 2133 bp, Klebsiella pneumoniae
gtgtttgcgggaaaaaaatcggcccagatccgcgaaattttaatcagcgagtcagcttgggaagaaatgacctgcttattcgcaccttccctagccgatggctggtttaatccagcgccgcttaaattatttggtaaatataacctgagagagaccttaaccatcggtgaaccacaggtcatcgctgacatttatatgaagtttgcagaccgcgaaatgatcatcggtagtgatgccgactggcaatattgcgaaggcgcttataccttcaataatatctatttgggcgagcgcctggatatgaaactgtttcgcggagacaacaccaccgatttgctgatgcctgactggaaaaatgtggtgctgagcaacgggcctgaaggccgtctggtctcgagttttattccgaaaattaaccatacgttgtccctcggggcagagcatatccacgtcgtagacgaagagacattcattattgatttcggtgccatcgtcaccggatttatcgatttatccattaccgcgtctgagaatcaacgtgtggaactgctctatagcgaagacgttgatgaaaactacgaactaaacactgactccacccttgcgggatttgtcggcaaacaggttactgaaggtgtgattattgacggcggaattggagcaccggcgagggcggagcagaaggatgcctttgaatgccgcagtgggaagaatcattttatcaatgcctttacctgtcattcgtttcgctatgtgcagttaagcggtattaatattgaacaattaaacaacgttcaggcgctttcagtacatactgtactaagggaaaacgggggcttttactgctcagatccttacataaataagctctttgaggttgctaaaagaaccaaactgaataacattcattcggtcttcggggattgtgcccgcgaacgtttcgcctatggcggagacattgtcgcgttggcccggtcgcaagtgtatcagtttgactctgccgctatttataagaaaactatctttgattttatcaatgatattcgtccctgtggtggtgtgacggaaactgcgccatttatgggaattaagactaatggagtcggcggggaaacgggccccctgggctggcaactggtattaccttatttgatagccattcactatcgacattatggcaatgtcaatctgctggccgaaagcttgccatttcttgagaagcagatcctctccctggaaatgcgcgactttgatgacctggtgacctgctgcctgggtgactggggaagccgcgttcatgatatgcgtaattacaaaaatggctcgccagctctccattttaccagtgcttgtttctattattatcatttgttaattatcgcaaaaatatgtgatgatcttggctttaaagaaaaatggctaaaatatattggcaaggccaataaaattagagagaaaattttatcactctataagaatacggatggcagctttgccgatcgcagtcagaccagctttgtttttgcaatctacttcgatttgtgtgatgatatcgagagttcattgaatgaactgatcgatctcatcaaaaaagagcaaaatgttatcacttgtgggatttttggccaaagttttgcctatgaaatatttcatcgctatggtcataatgaattaatccttgaatggttaagagtcgaagccggattcaagaaaatgcttaaaaatgatgccagcacattgaagggatttttcggtgataacctgaatggttcgaataatcatgcgatgttcagttcttattccagttggctgtttcaggctttgggcggcattaccgtcgctgaggaggcggttggtgctgatgttattttaatcagtccatcctttactgacacaattaactttgtggattgctggcatcaaaccatcagagggcgtattgagtgtcgctggcggcgctataaaaaaggcatagaattagtcatcaaagtgccatttaacctcaaaaaatgcactcttaaattaccaaaagtgtatcaacttaataaacaattacctgcgccgatagactgtgatacctatcatcacttttatgacattaccgatgcaggtgagataaaagtactattgtaa

SEQ ID NO: 273030 - DNA, 279 bp, Klebsiella pneumoniae
gtggatgtggactggctgatcgccgagcgccccggcaaggtaagaaccttgaaacagcatccacgcaagaacaaaacggccatcaacatcgaatacatgaaagccagcatccgggccaaggtggagcacccatttcgcatcatcaagcgacagttcggcttcgtgaaagccaggtacaaggggttgctgaaaaacgataaccaactggcgatgttattcacgctggccaacctgtttcgggcggaccaaatgatacgtcagtgggagagatcccactaa

SEQ ID NO: 273031 - DNA, 819 bp, Klebsiella pneumoniae
gtgttacccgccgaagtgacgtcgcatatggtgctggagtggcgtcattacctgctaaatgtgcgctgtatcaagccggtaagctggaatcactatatgcgccatatgcgggctttgtataacttcgcaattgagcaggggctgctagagcagtttatcaacccattccagaaaacatcgctgcgggaatctcgtaagaaaaagaaaaccctgacccgcgagcaaatcctcgcttcccgaaaagtgctgaaccaatttatcgaacgggagaaaatgcagcgcggctatcgttcgcctttatatccggcatggttttggctgaccgtggtcgaaaccttcaactacaccgctatccggctgaatcagcttattcacctgcgagtaagggatatcgatttggtccatgacacgctgtttattcagatcgaaggcagtaaaagccatgatgaacatattgttcccattgcctcccggctgcggccttatctggagcatctgcttgaagaagcaaaaacaaagggaatacgggccgacgatcagttgttcaacatcaatcgtttcagtcggcggacgctgcgccagggtaaaccgatgacagaaaatcaggtgagttatttctttgccaaactcagcgatgcctgccacagccgtttttcatcacaacgctaccgtcataccgttgccacagaattgatgcagaaaccggagcaaaatctgtatgtcacgcagaaactactcggccaccgcgatattaaggtgacgctcagctatattgaacacaatgtcgagatgctcagaagttgcgtggagagagattga

SEQ ID NO: 273032 - DNA, 141 bp, Klebsiella pneumoniae
atgtaccgggtaaaacagctgttcggaggttcactgacactgcgtgactacgatggtcaggttgcggaggctatggccctggtacgagcgctgaacaaaatgacgaaagcaggtatgcctgaaagcgtgcgtattacctga

SEQ ID NO: 273033 - DNA, 951 bp, Klebsiella pneumoniae
atgagccagttagacgaactgaaaaaatacaccacggttgttgctgataccggcgatattgaatcgattaaaaagtttgcaccccaggatgcgaccaccaacccctcgctggtgctgaaggccgcgcagctgccgcagtatcagccgctgattgccgatgcgattggcaaggcacgccgccagggaggcagcgcagaaacgcaattgattaacgcctgcgatcaggtggcagtggatatcggcagcgaggtgctgcgccatgtgcccgggcgtatctccaccgaagtggatgcccgctttgcctgggatcgcgggatgtgcgtcgcgaaggcgcgcaagctcatccagttatatgaaaaaaatggcattggtcccgagcggattctaattaagctcgccgccacctgggagggcattcgcgctgccgaagagctggagcagagcggtataaactgcaacctgacgctgctgttctctttcgctcaggcccgggcgtgcgccgaagcgggcgtctttctcatctcgccctttgtgggccgcatctacgactggtatcagaagcaccagccgcagtcagcctatcaggtggacagcgatccgggcgtggtctctgtgcgccagatttatcagtattacaaatcccatggctatgacacggtggtaatgggtgccagcttccgtcgaattgagcagatccaggcgctggcgggctgcgatcgcctgaccatctctccggcactgctggacgagctggcggccagcgaaggagtgctgacccgccagttgactcccggctgcgtgacggaaacccgtcccagcccgatgacgcaggcggagttcctctggcagcatcatcaggatcccatggcagtagaaaaactagcggaagggatccgactgtttgctgtcgatcaggtgaaactggaacaacagattcagcagatgttgtaa

SEQ ID NO: 273034 - DNA, 582 bp, Klebsiella pneumoniae
atgggtatcattatttgcctgcggttcggtatccgaatcggaatcggagtcagagtcgctgtcggaatccgaatcgctgtccgagtcggagtcgctgtcagaatccgaatcactgtcgctgtcggagtcggagtcggagtcgctgtccgagtccgaatcgctgtcagaatccgaatcactgtccgagtcggaatcgctgtcagaatcggagtcgctgtcagaatccgagtcgctgtccgaatcggagtcgctgtcagaatccgagtcgctgtccgaatcggagtcgctgtccgaatcggagtcgctgtcggaatccgagtcgctgtcggagtcagagtcgctgtccgaatcggagtcactgtcagagtccgaatcgctgtcagagtccgagtcgctgtccgaatcggaatcgctgtccgagtcgctatccgaatcggagtcactgtcagagtcagaatcgctgtcagaatccgaatcgctgtcggaatcggagtcgctgtcggagtcagagtcgctgtcggaatcagagtcgctgtccgagtccgagtcgctgtccgagtccgagtcgctgtccgagtctga

SEQ ID NO: 273035 - DNA, 882 bp, Klebsiella pneumoniae
atgagtaagttatttaagctcaaagaatggctgacgttatcggaagcctcagagaggctatcagtattcttaggtgaaaaggtttctgttgctgattgtttgcagctggcattggataagcacataaccatttcagcaatttttaacgagagccagcacgctatccatgcgaaggtaatcacaacgactcaacgtaagcagttttctaaattcattatccggacaacagaggatggggcctatattggccttataggggaagatcgctttgtctcaaacagtgaattagattttgagtatgaagatattgaaaggtacggtgatgttttcaagttgcgtcatgggatctatgacctgcctatgctgggggccgaagaattggatgtcatgcatcagcttgatttgaacgctggaagagcgcctcgggaattctgcaatatggaggggccatttttgataactccatatggcttggtgaatatcttaaaccagttcaatccttggatgttaaagacgaatgatagcggctcaccagagtattacgataaggtaaaaaacgagttcgtagatttgagccatgaaggctaccacgggtttctttatccggccgatgctttgggcgattttgagcttgtattcagaagagaaaacatcgaaaagtttgagcaagaaaattctggtgatggccaacaatcgctaaaacttgatgagagcctgcatgtaataggtgctctgcttaacgccttaaaaaaagctgaaccagcatctaagcgatggacgcaagaggcgctaaaggcggagatgatagatcacggggttaacctaagccctcgacatctcgataaatatttctcggcagcgaataaatcttttaaatcatag

SEQ ID NO: 273036 - DNA, 264 bp, Klebsiella pneumoniae
atgaacataaataccatctaccgccacccagcaaagctggaagccgaatcggcgctatctcgtaaagaagcatacccggatgattttacgctggcagaccgaacagcagaacgcatgacccgcgcccacaatgggctgactcacgttatgaccgatttattaccactcctcgaagttgagcaagcagtcatcgtgcattgctggctgtataaagtcctggcgattgtcgatatggccagaattgatgcggagggcagcgcatga

SEQ ID NO: 273037 - DNA, 198 bp, Klebsiella pneumoniae
atggccctggataccgaaatggatttgtttattgagtatcggcttcaaatgcccgtgattgctgggtttcttgtaatgcgttttctcagtgggtacacccttgtgtacacggtatttttaggtgctgcctttggctgctcattttatgctctcatgcttgctgttctggcctcttatcttttgcgccttattgtatga

SEQ ID NO: 273038 - DNA, 1176 bp, Klebsiella pneumoniae
atgaagctcaacgcgcgacagatcgaaaccgccaagccaggcgagaaggactacaagcttaccgacggcaacgggctatttttgctcgtaaaaagtaatggcgcaaagtactggcgtttccgctacacctttgcaggcaaagaaaagatgctggcgatcggggtctacccggcggtgtccttggccacagccaggttgaagcgtgacgaagcccggcagaatgtagccgccggtattgacccggtgaaggcgaagaactacggcgcggctactgcggccgctcaggcgatcacgtttcgcgatatcgcagctgaatggcacgagtttagagcgcctcgctggtcggcgggctacgcaagtgacattttggaggcattcaaaaaggacatatttcctgccgtgggtgatgtggccgtcatcgacattgagccgatcaccatgctgaaggcgctgaggaaaatcgaagcgcgcggcgccaccgagaaagcggccaaaacccggcggtggtgcggcgaggttttccggtacgctgtagcaacgggccgctgcaaatataacccggtaggagagctcaacagtgctatggccggccacgagggggagtctttcccgtttctttctgcggagcagctacccgactttcttgatgctgttgataattactccggcagcccgctgccaaaattaggcgtaaaaattatgatgctggccggtttgcgcacgcacgaattgcgccactcgcagtgggcgtgggtggatttcgataaggccttgtgggagatccctgctgaatttatgaagatggggcggccgcatttagtgccgctttccagacagataatcgaattgcttaaagagttatatgcgttgacgggaagatttaaaaacatgttcccaggcaggaacgatccgtcaaaggttatgagcgaaaacacgataaaccaaatgattcacgcgctaggctataaagataaggtagtagggcatggtttccgccacacattcagcacaatactgaatgatgaaggtttcaactcggattgggttgaaatccagatcgcacacgtggataaaaataaaacgcggggtacgtataaccatgccctctatttggaggggcgtaaagaaatgatgcagtggtacgcggattacatagatgggctgcggttgatttaa

SEQ ID NO: 273039 - DNA, 186 bp, Klebsiella pneumoniae
atgacgccaattactttagacactgacctgatcagcattaaagaagtggaacgcgccacaggttttaaaaagtcgtatatttatcaaaaaataaaagacggggaattcccccgtccgaaaaaattgggtgcatcttcgcgctgggttcgcggcgacgtggaggtatggaaaaagcagtttgattaa

SEQ ID NO: 273040 - DNA, 969 bp, Klebsiella pneumoniae
atgtcgcaccagacgacttgcgcggttttacacaatgccatttcttcgccgggatcggcgtctggtcgtatgctctgcgtctggccggatggccggataacaagcaggtctggacaggaagttgcccgtgccagcctttcagctcggctggtaaaggcgctgggtttgatgacgagcggcacttatggccagcattattccacctcatcagcgagcgacgccctgagctggtatttggcgaacaggttgcgggagtcaatgcctggttcgatcttgtacaaactgacgtggaagcaatggactacacctttgggcttgtcccgtttccggctgcgggcgtcggtgccccgcatatcagagacagagcatattgggtggccgacgccagcggcgagcgatcacagcggtggaggaagcgcctcaatagcattgaggaaaatgtcaggagatcggcgcccctcaggcaacccgttacacagttcgctacgggactttgctcacctggcgggatggtacaccccaacatgcaacaccaacccccagccggaaaaaaagcggggtctggaaacgttggcggggtcagccaggctagcaggctggccaagtcctctggcgagcaataccaaaactgcctaccaggacgcggagaaagtgatagcgcgacagcaggcgggacgacaaccgaatttacgggattatgcctgtctgagcgggtggccgacggttacgacgatcgacaacaaccaagttcggggagaaggagcggccgccaaccacaaggaaaggggaacgacgttaggcggagcctcaagattatgcggcccgatacgattaacggctgctgggacgatgctgactggctcctgtgcagggatggccgctggaggccagttgaacccggcacattcccgctggctcatgggattaccgccagagtgggacgactgcgcgcctacggaaacgcgatag

SEQ ID NO: 273041 - DNA, 507 bp, Klebsiella pneumoniae
atgattaaatggaaagatattcacgggtacgaaggcttatatcagataagttcagatggcagagtaaaatctctgccttttttacaacgttatacccactggagaacaggcgaggaattattcaggcaaactaaagagcgaattctttccgtcaacatcatcaattccggctacgctgtcgttcaactctggaagaacgataaaggccaaccatttctaatacatcgtcttgtcgctgagtattttttacagggttcaccaaaactaaccgtcaaccataaagatggtaataaattaaataataaagtttctaatctggaatgggcctcttactctgaaaacctcaagcacgccgttattaacggactaaatcatcaagccaaagcagtagtagaccccgtgacaggcattcgttatccctctattacgcaggctgctaaacaatgccgccgctccccccgaaccatccgggctagtttccttcgggaagggggcagcaatggctag

SEQ ID NO: 273042 - DNA, 1089 bp, Klebsiella pneumoniae
atgtctgaaaccattctctggggcgacctggaaacctattgcgaaatccccattaacaacggtacccacgcttatgcggagggcgtcgaagttatgctgttcgcctgggctattggtgacgaaccggttagcgtctgggatctgaccgccggcgaacctatccccagcagactgcgcaaggcaatagctgacccaaacaccattttgtttttccacaattcgcactttgaccgcacggtgctgcgccatgctatgccggagttagcaccgccagttgagcgctggcgcgacacaatggtgcaggcactggcgcacagcctccccggcgcgctgggggcgctctgcgaagtgttgggcgttccacaggacaaggcgaaggataaagaaggcaaatcgctgatccagctcttctgtaagccccgcccgaagaacagcaagctgcgccgcgcaaccagcaaaacgcacccggtagagtggcagcggttcgttgcctacgccgggctggatattgaggcaatgcgcgaagtctataagcggttgccaaagtggaactatcagggcgccgagctggcgctgtggcatcgcgaccagcgtattaacgaccgcgggttttgtgtagatatggatctcgtccacggtgctattcgtgcagtagacagagcgcaaaaacgccttgctgaacaaacagtagaaattacaaacggcgaagtgcaagcagcaacgcagcgcgatgcgatgattaagcatattgtcgaatcgtacggcgttgagctgcccgatatgcagaaatcgacaattgaacgtcgcatcgccgatcctgatttgccacctgccgttaaagaactgctgcacattcgactacaggccagtgctaccagtaccagtaaatacaagactctactgaaatccgtaagtagcgatggccgcctgcgcggcacgctgcaattctgcggggcatcgcgaacggggcgttgggcagggcggttatttcagccccaaaatctcagcagagaatcactttcgagagaagaaatagagttcggcatcgaatgtatgaaagccgattgcgaggacttattttatgattaa

SEQ ID NO: 273043 - DNA, 894 bp, Klebsiella pneumoniae
atgagcttagaatccaatctcgaacttaataaccagctggtcgcgcgccagaacgagctgcaggaacgcaatatcgcgctgctcgagcggctcgtgcagtccctggcttctggcgtagcgctgaaagccgacacagtgtcgcaagtgcaggagtatcgcgaaactgtcaccgaatctaaaaccgcgctgacgctggacgatctgcagttcggcgacgttatcgcgctggccgccttctacccggtaccgcagaaaattaccgaagagatgttgcagcgcgcaatcgactaccgcgacgctgaagctgacgcccgagtagtgcagattgatgcgctggacagcgccctgcagggagtgaagcgcgccaaagcgttgctgaaacccgccctgctcgacctgtcccgtaacgttcttaagtactgggacgacctgccaaccatcggcgaacgccgcgggtttgccgagcgccttctcgacgcagcaccaaccgagcgtgacgctgtgaagccgaaaaaaaccagcggtaaaggcaatcaggagcgtaaaggcccgttctactggaaagacgttgctcagggtttacatggttgcgaagaaactctggaagagctgaattgttacatcgaccgtggtgctgaagagatcagcaaagtcgaataccttcagctgcaagaagttgttcctctaaacaaagcccagccagaaggcgacgcgccggactttgatgcgctgcgcaagcaggcggaagagcacatcaaaacgctgtgcaaaggcggatatcgcgctgaggccgtcggcatcctggacagcttcggcgcgaaaaagctgggcgaagtggaagacaaagacctcgctgatctgatcgccaaagccgaaaaagctctggagggctga

SEQ ID NO: 273044 - DNA, 858 bp, Klebsiella pneumoniae
atgcaaatcaccaaagagcaggttaaaaactggcatgcgtgcaccgacggttaccgctggttccttgaaaaattcccgcagggtggcgcgtacgctgatgtgcatggcgctctggtaactgacaagcgcttcgatgatgcgcactggctggtcgataagatgtaccgcaccttcctggacagcgccaagtttatccaggctgagacagcggccaccgataagatgatcggcgagctcaccagcatgccgcaaccttccgatcaggtagagggtgagaacagctccggcgacgacgcccaaatcggcagctccggctacaacgcccgaatcggcagctccggcaacgacgcccaaatcggcagctccggcaacgacgcccaaatcggcagctccggctacaacgcccgaatcggcagctccggctacaacgcccgaatcggcagctccggctacaacgcccaaatcggcagctccggctacaacgcccgaatcggcagctccggctacaacgcccgaatcggcagctccggctacaacgcccgaatcggcagctccggcgacgacgcccaaatcggcagctccggctacaacgcccaaatcggcagctccggcgacgacgcccgaatcggcagctccggcgacgacgcccgaatcaccgcttcaggtgcaggatctgtagtggcctgcgcaggcagcatccagcgtgttgttctgggcgacggtggctgcgttgcggtcccgtggtatgacggagagcgcacgcgctttgccgtggcgtacgttggcgaaaacggcatcgaagccaacaccccttactacctgaacgacgaaggccagttcgtcaagattgaggaataa

SEQ ID NO: 273045 - DNA, 150 bp, Klebsiella pneumoniae
atgaaacctgaacacctccaccggctgacggggcgcgatgtgctccgccggtgccgtaaacaccaaatcgactttattaccgggctggccatcgtcattggcctgagcctgaccgcaactttactccttcttatcgcgagggtcgcttaa

SEQ ID NO: 273046 - DNA, 519 bp, Klebsiella pneumoniae
atgcagactttgcttaaggaatctttccattacgcagagggtcaattgatctggaaatacagaccagcatcgcatttcaaaagccctcatgcgtggaagtccaccaactcaagactggcgggcaaacccgccggaagggtcacttctgagggctatgtctccctttgcctgaatggaaaaggccagtacgcccaccgccttatctggatttaccacttcggaaacataccggcgggtatggagatcgaccacatcaatcacaaccgactggataacagaattgagaacctgcgctgcgttacacgtgctgagaacgccagaaatctgggtcaacgtagcaccgaaaagcgcaacggagtcagttggaaagaatcaagaaaacgctggcacgcgcagatcaccgtcggcggtaaatctcttcacattggctatttcaccgggctggcggaagccaccgcagcacgaatccaggccgaaaaagaccatggcgtttttaggagcactaccaatgaaacctga

SEQ ID NO: 273047 - DNA, 252 bp, Klebsiella pneumoniae
atgacaggcgtattagataaaaaaaacgatgtcttttttgatagaattactgatatcacagctaaaatgagtgcgtccgttgataccttgcttcagttgactgatgggaaaacaaaatatttcagcgaaaataatgaaaaaatcatccgtgatgtaattgatgacatcatccgtgcagcatcccttattttaactgaagcaatcaatgctacacatcccgaagagcaggataaggttaagccgctacaataa

SEQ ID NO: 273048 - DNA, 2163 bp, Klebsiella pneumoniae
atgtctaaaaatttagcactatctttaagcctgatcgccaaagacgctggttcgaaagttcttcgtgacgcaatgcagcagaccagcaggcaagccaagcagcttgaaaaagagcagcaacgatcaagtgaatccggaatacgagcatcaaaagcactggctgatgaataccgccgttcttcggaggcccgctctgttcttggtattcgttcagagcgccagattcaacgggaaatccaacaaaccacggcagcatataaccggctaacacgtaccggccttatgtctgcaagtgagcaggcacgagcctttgatgcaatgaggcaaaaggtagccggactgcgaggggagctaaccagtacctcagacacgatgtcacgcatgagtaaggcgagggttcttgggggtaatgttgccgctattgccgggggggttactgctgccggtgcggttattgctcagccagtccgcgagcaaatgaattacagtcagcgcctggcaaatattactaatacagcctacaaccagttacccgcagaggaaagaatagcggctaaaggccaattaagtaacgcaataaaaggggctgtcaggaaaggcggaggtacggctgataccgccgccaatgcgcttggcgtattaatgtctaaaggtggagtggatgataaaacagctatgtctgtcctgggggatgttatgtatacctccacggctaccggttctaatccagaagaaattgcacaactcgcggttaccgctctgaataactttaaaattaaaaaagaagaacttcccttattttttgataaacttactcgctcaggtgaacttggtggtttcgaactatccaatatggcaaaagaactccccacaataatgacgaactattctaaattgggtatgggtggaatcgaagcacttgatttacttcttgcaaaccttcaggctaactctgaaacgtcaggaaataatgataccgcggctaataattacagtcagcttttacttaaaatcaccagcgcggatactattaacaatatgaagaacagaaaattcagagtgtctggtggtaaaccaatgtcatattctgagtttcttgtttctcaaagagcgaagggttacaacacttatgagtcatttaataatgctatcgatgcgataatttcagatgacaaggggtacaaaaagctgacggctgatataggacgtaataaaggaacaaacaaggaaaaagacctgcttgcggcaagggatgtacttgtttctaccattatcgcgtcgattatccctgattctcaagctcaaatggcactgactacagcttttttaaagaaagactacattaaggagcaggtagcgggaacgcgcaaagctaatggggctgttaattcatcttttcaggttgtatccagcgagcctatttttaaatttaatcagctttccaatgaaaagttttttgcagatggtgatgtgttcggcaaatttaataaagtacttggcaatactgccattacaatcgctgattacgctaaggaatatccagagctgacagttgctataaacggagcgacgcagggaataaaggccatgaccgcagcagcatatgtttttgcgggtctcaggcttctacaggtaggccttggttcaggttcagactccgttcccggaggcactgcacgagcagggggtaaacttgcgggtgcattatcaatatccactccactgattgctattaccgccggttctgtagcgttgggcatgatgcaggataagctgagagaagattttgataagaaaaccatgcctgaaaaagttaaatccattcaggatggtacctcaggttatagctttgttgatgttgcctgggcggtattaaaaagcaaatttggccaggataaacgctcatcatcaattgacatcccccgcctacccgatggaggcattgacatagcccctcagctcgatcatgatggcgtcaatttcggcgtacctgcttatttgcaacgcaataataagagcaactattctggtggtgcgccatctgaaaacaagcaaccactcattatcaaaaatcaaatcattcttgacgagaaagtccttgctgaggctgtaaataacgtcaatggtgaacaggctaacagaggtccgcgagggctgtactaa

SEQ ID NO: 273049 - DNA, 297 bp, Klebsiella pneumoniae
gtggtgggctattcgcgactggtcatccatgcgcattccgtctcggaagtgattgccggcctgctgctgggcgctgctggcagcgctttgttcctggtgttgcaaaaacgtacctctgatccggaaagcgtgaatatctcatggggcggtgttgcatgcctggtgatggtccctcttatcctgttacatagcggcagcaaagcgccgactcagtccctgctgggacaaatcgccaccgcggtggggccgctggataaaccctttacgcgtaccgatctgcacaagcaggcctggtaa

SEQ ID NO: 273050 - DNA, 579 bp, Klebsiella pneumoniae
atgatggtcatgaaacgcccttccctgcgccagttcagctggctgctgggtggttctcttctgctcggcgccctgttctggctttggctggcggtgcagcagcaggaggccacgctggcgatacgcccggttgaccagggtatcggaatgccggacggtttctccgtctggcatcatctcgatgccaacggcatccgctttaaaagcatcacgccgcagaaggatggtctgctgattaagttcgttccaccgcccagggcgcggcggcgaaagaagttctcggccgcgctctgccacatggttatattattgccctgctggaggacgataactcgcccaccgcctggctatcccgcctgcgcgacgcgccgcatcgcctcgggtaagctgccgccagactgcgtttttaacccagtctggtggtttcccgcatttgttactatgcttaaacctgcgggaatcaacgcattcacgttcaccaacgggaacgggtatatcctccgggtatcccctcagacaatggaaggtactatccatgaaacaccgcatcgctctgcttctggtcctgacttcacttag

SEQ ID NO: 273051 - DNA, 318 bp, Klebsiella pneumoniae
atgccagcgctttcgcagtccgtccttgatcgctttcagtgtcgccgtcatcctgtcccggcgcgtctttcgtatcagcatgaacctgccactacgatctttcccactgatatgcgtgaacccgaggaagttgaacgtttctggtttaccttttcccctgctggcgcgattttcggctgcgaagcggccgaactccatcagtcgggttttcttcggatgtaccgtgagtccgaactccttcagtctgcgctgcatggctatacggaagcgggtagctgcgataactgccaactttcaggcaaccacgtcgatcggtaa

SEQ ID NO: 273052 - DNA, 1329 bp, Klebsiella pneumoniae
atgaaagataattttgtggtcaccattgccggcggcggcagtacttatacccctgggattgtgatgatgttactggaaaatatgtcgcgctttcccctgcgggagatccgtctgtacgacaaccatcaccagcgtcagaagactatcggcgacgcctgcgccatcctggtggctgaacgcttcccacaggtgaagttcagctataccaccgatccgcaggcggcctttaccgacgtcgatttcgtgatggcgcatattcgcgttggcctgtatgagatgcgggaaaaggatgaaaagatcccgctgaaatatggcgtgccgggccaggagacctgtggtccgggtgggattgcctacggtatgcgctcgattgccggggtgctggagctggtcgattatatgcagcagtacgctccaggggcctggatgctcaactactccaacccggcggctattgtcgcggaagcgatccgtcgcctgcggcccgacgcgcgcatcatcaacatctgcgatatgccggtggctatcgagggtctgttcgccgacatcctcggcctgccgtcgcgcaaagcgctgaacgttcgttactatggcctgaaccacttcggctggtggaccagcatcaccgataaagccggtaacgatttgatgccggcgctgaagcgtcacgtggcggagcagggatacagcagcccaaaagaagactttcagcataaggcgccgagttggatcgagacctttaaaaaggtgaaggatgtgtttgccctcgatccgacgacgctgcctaacacctatctgaaatactatctctacccggactatgaagtggcgcattccgacccggagtttacgcgggccaacgaggtgatggccggacgcgaaaaagaggtctttgatatggcccgggagatcacccgtcgcggcacggcggaaggcgcgcatttccatgccggggcccatgccacctttatcgtcgacctcgcctgcgccatcgcctttaacacccaggagcggatgctgttgatcgtcgagaacaacggagccatcgccaacttcgatgagacggcgatggtggaagtcccctgcctggtgggcgttaatggtccggaaccgctggcgatggggaaaatcccgtcattccagaaagggttgatggagcagcaggtggcagttgagaaactggtggttgacgcctggattgagggcagttaccagaaactgtggcaggccatcgccctgtcgaaaacggtgcccagcgcttcggtggcgaaagctatcctcgatgaactgatcgtcgccaacgaaggctactggcccgcactgcactga

SEQ ID NO: 273053 - DNA, 615 bp, Klebsiella pneumoniae
atgtcgttattgcctctgcgtcggccggtggtcagccgcacgacttatctgattctctttgcttgctatatcggtatctgtctcaacctggctttttatcgccaggttttcccgttactgccggtaaatagcctgcataactggctggtattcctcagtatgccgatcgtggccattagcgtgatgaatatcctcaccactctcgcctcgttcctgaagctggaccggctggtgattagcctgttcattctgctcagcgcctcggcgcaatacttcatctggaactttggcgtggtgatcgaccgcagcatgatcaccaatatcctcgacaccactccggcggaaagctttgctctactctccggcgaaatgattgccgtcctcggcctttccggggttttggcggtattcgtcgcctggtgggtgaaaatccgtaagcccgccacccggtggcacggcgcggcgatgcgcctgctcaatatcgccgtttcggcgctgctgattattctggtggccgcgctgttctacaaagattacgcctcggtgttccgtaacaacaaagagctggtgaaatccctgagcccttccaacagcattgtggccgtgaactcctag

SEQ ID NO: 273054 - DNA, 249 bp, Klebsiella pneumoniae
gtggactacttcctggtcgaggagagcatcatcaagcgcgagggggaatttacgcttaatctcgcggcagacgttgaaaacttcaccgcgctcccggcagggtatgagatcgcccgccaggcagagaaacgttgggtggtgcaggcccgggccccctatatcctctttcccaacgccggggtcgccaccggccagcgcgccgggctgttgctccgcgccgctgcccttcgtctcccgcaaccagcctga

SEQ ID NO: 273055 - DNA, 1956 bp, Klebsiella pneumoniae
atgtttgtcacagtgaatgagctgataggaataccggggcttcccagcacggtacaggggctcaggctcaccctgaacaaaagagcatccggctcgccggagctggtacgtaagcgcgaaggtagcaaggcctttgaatatcacgttgactgccttccagaagaggcacgccggacatttatggaacggcattaccggcagttgcttaacaaccgagacaacggaaaagaaagaccagtttctgcgcgagcagaatcttcgcgcaaatcggatgagctgcaattgattcgccagtgcccggccctgcttgaacgggaagtcggttcgctgacgacgaaacaaaaagagatcgcccatgcccgtgctacgctggcgctgtatatagaaaagcttagggatgctggaatgtcacgcacagcggcagttaatttcgtctccgtgggatcacgaaaaggctcgctccccgagcacctgatgaaagcggcagagcttgctaatgcgcgtaaaggcaacagccgcgccggagtcggtacccgtagtctgcaggagtgggtgagcgtctttgagtcaacaaaacccggtatcgaacgtatggccatgctggcacccggtcatcttaaagcgaagaaacctgagcagattaaatggttacctgattttcttgctcactggcgtaaccgtaaagggccgagtcttaccgaggcatatcgtgatttcaaagctgaatggactgctctctatgctggccagccagcaatgattgaggcgtgcccttcctatgatgcggttcgccgggctatggaaaaactgccccgccgtgagaaagcacggggccgtgtcagtggttctgctgcgctggcttatgagtgcttccagaagcgtgactggtctctgatgccagttaatggctgctggattgcggatggtaagtcactggaaatgaaggtcgcacatcccgatcatggtcgcccgttcacgcctgaactgacgctgattattgatggccggacacgttttgtcgtcggctggagcctggctttatctgaaagcgttatcgcagtggctgatgcctaccggtacgccatgcgccacttcggaaagccactgtttgtttactcggataacggtggtggtgaaaccaacaaaacccttgatgctgatgtgacgggtattttcagtcgcctgggtattgagcacccgaccagtattccgggccgtcctcagtctcgcgggatcatcgagcgactgaacaagggtataccgcgccgtgttgccatgcagtttgacacctttagtggtgacagcgctgaccgggagcacgcacgtattacagcacgagctattcagtcagctgtaaaggcgcaggagaatggccgcgaactaacaccggtacagcgtacagctttggggaaacttccctcctggcagcagctgcttgacgccatcgctgaggaagtggacgtctacaacaacacacatgagcaccgggaactgcctaagcgtaatggtaagcatatgacgccggcagcgtatcgccgcgccgttcttgaggcggaaggtgatgagacggaatatctgaccgacgttgagttgcgtgaagcgttcatgcctgaaatggtccgtaccgcgcagcgtggctggttacgtctgttcaataacgattatttctcagaagaattgatccaggtcgacagcgaagacgtgcgcgtggcctttgatatccatgacccgcaatccgtcattgttcgccggatggatggctcttatgtctgtaccgccatctggaatggcaataaacgtgcagcgattccggtcagtgcaatggatgtagccgttgagaaacgccgtcagcgccgaatgaaacgcgttgaagagaaagtcctggagattgaagccgaaggccgctccgttctgccggggcagcgatttgatgacctggggagctttatccggtaa

SEQ ID NO: 273056 - DNA, 219 bp, Klebsiella pneumoniae
atgttagattaccgcttcccgacagctttgcagatggttctcagcgtagcaatggcggagcagatgggtgaacgttcgacgagtgcgattctggcctacggcctggaagcgaacccgagctttatccgtaaactaatggttccgctaactcgtgacggcattatcgtctccacgcttggccgcaacggctcaattcatcttggcgatcaccctgcgtga

SEQ ID NO: 273057 - DNA, 756 bp, Klebsiella pneumoniae
atgcctggttttagaattcctcaacgatttaacaatcccgcattactgcccggagcaagcattgcagatgctttaaaagccgatacgggattgcttcactggtttcaggctgacgctaaccatgtgacactgagaggaaacgatatcctttcgtttaatgacagaaaagacacagccagcaaacttactcgctcatccgataccactggggcaaccttggtaagtgaagcgttcggtgactattctggggccagatttaattcttcagaatcggatcgatcattgttcagtggtgatgcacaagacttaactcagtcatttagctgggctggtattgcaactctacgcacgctggcggccactagtaacctttgcggtacttttacctcctcatcagtccgggcaatactcaacgtgagccccactaccaacgccgggaaattgcagttcctgtacggttctgcaacctgtgttgggccaactctggagttggatacgccgtttgcgttcgcatgtggatacgacggcacaaatatatttctgcgcgttagcggcatcgcctcatctgtcgccgccgccggcagtccatcactatccgcttttgcgctgggagcattaccagggggcagtcagttctgggatggcgatgtgggggatttatttatgtgcaatgttgcgctgaatacaacagatggagccactctactgaataaaattaaagcataccttaaagcctgttatggagctacgctttag

SEQ ID NO: 273058 - DNA, 534 bp, Klebsiella pneumoniae
atgattgataacctgtccaaaagtgagctgtttacccgagcctcgctgcttattaaatatggatttcgaacaaccattatcgcgctcgatactggtttgccaatccacattatcagaaggctgcacaaagaagtgactggcaagtcaccttgtcctggtcaattaccagaatctgatgccattgttaaaagcagaagagccctagttgaaggctccctgctgatggcgctttatgtcaatattggtggtgataatgtctacaagcaattaaatatcgatgctttgatgaaggcttacgatgcgtatttggttgcaagagaagaagcagatcttccagctgagatcccctggaaaaaactgaccatcaatgaaggctgggttctagctcgtgatttaagatcacagctcgcatccttacaccggtgtcgatgcggtagtctgtatttgacggtatctcaacagcgcattcagcttaaatgccctgtgtgcgagattatggccgagcaaaccgctagagcactttttgagaattaa

SEQ ID NO: 273059 - DNA, 300 bp, Klebsiella pneumoniae
atgacaaccaatcaacaagacttctatcaattaaacttggcgtacctacacgcagcacgagaattagcgcgaattgatccgcaagaggccgtcttgcgctttggacttacacgcgacgtggttgatgctctgattaatgctggtgttgacgacctgcaacgagtggcgacctcatcattcatgctgtttcaaccaaggggtaaccaaagccaactgattgagatggtgaagagcaaaggcacaggtatcccaagaatcgcttatttattatcaaccctaaacaacaagggggatgcatga

SEQ ID NO: 273060 - DNA, 549 bp, Klebsiella pneumoniae
atgaaaacgattaaagcaaaaaccattgccctagtgatagccatgtccgcaagcacttcagtctatgcatttccgggctatcagtgggaaaaagcagcacaaagcgttggtattgatcctgtcatgctctacgccgttgccttggctgagtcagcctcacatcgtggtctcaacatgaccagcccatggccatacgcaattcgcaatggttcaaatgcaacctacgccaaatctaagacagaagcagagcaactgttaaaccaagcactgcaagagagtgaaaaataccagctcgatattggcctaatgcaaatcaatttgcattggcacggacatcgggtgagctcagcagcagaactgctagaccccatcaccaacctaactgtcggctccagtattttggccgaagcaatcaaatcttcaccaaacgatttagagcttggcataggccgctatcacagctggaacgaagagcgtgcacgctggtatgggcaaagagtgctttctatttatcgcaatattttacatgacctggaggtccgtcaatga

SEQ ID NO: 273061 - DNA, 609 bp, Klebsiella pneumoniae
atgtatggcaaaagcgtatcaccacaattgctatccatcgcatttgaagcccttcgtgcttatagcattgaagaagtgcgaatcggtctgactcggcatattcaatcaccggatactgggcaattttttccaaagcccgctgacgtcatcaagcatatcgatggcaactcgggttcaagagccatggttgcttggaacaaagttgacaaggctgttcgtcaggttggcgcttggacatccgtgatgtttgacgatgcgcttattcaccgcgttatttcagacatggggggatgggttgaactctgcaaggtagatgacagggaatacccctttaaacaaaaagagtttttaacacgctaccaggcttacttgttgcgggacgaagtgggtgaatacccaaggctattacaaggtattgcagaccatcagaaccagcaaaaaggatttgatatgcaagcgccggttgccgtgggtgactggtcaaaagcagcacaagtttatacaagaggcatcaccgactttagcgcagtgcctttgaaaagaataagcccgaaagccattcaggcgcttctcggaaatcaattagaggacaaaaatgaaaacgattaa

SEQ ID NO: 273062 - DNA, 870 bp, Klebsiella pneumoniae
atgcgtgattatggcaaggtctatacccgcttttggctaaagcaaaacgttttgtcctggagtgactcagcgaagttgctaggactgtatttgcttacatgcccacattgtaatttgcttggctgctttcgattgccgattggttacgttgcttctgacttgaactgggatgagcaacaggttgccaaggctctaaatgagttagaacaagatcagttcctccttcgttgcgaggaatccggttggactttgattcggagctttctgaagcacaacccaatcgaaaacccaaaccaaggtaaagcagcctttcggttgcttaaagatgtacctgccgacttcattggtatggcatcgcttttgaaatctcttgccgcttttcaagctcggctaccagaagaattttcatcattgtttatgcctgatggcaacccggtaagggactctcaacggtcggatgactctgagagaagcaataaaccaacagttaaaactgttaaccacatacagtttgaagacttctgggatgtacaaatacgcaaagaaaaaaaagcgaaagccaaagaagaatggctacgcatgggcctcaatgaagaccatgaactcgccttggaagtgctaacacgctggaaagagcaacgagacaaccgattgcagtatcaagatcggactaagacccctatgccacataactggcttttaaaccggcaatgggaagacgagtacgttcgcattgatgaagtacagcaatcatcgacgagcctaaagggcagcaatcaccagttgaacattgaagaaagcaatcgccgcattgctgaaagctgggccggaccaggtattcgggaggttcgttcaagtgcaggaggttga

SEQ ID NO: 273063 - DNA, 252 bp, Klebsiella pneumoniae
atggaagtgttcaacacgacacaaaaacatctccgccgtgccattgacttggtcggcgggcaatcagcattagcgcgagccatcaactcaaaacagcaaaacgtctggttttggttgaataaatcaggacgtgttcccgctgaattcgttttacccatcgaacaagctacgcaaggacaggtaacccgatctcagttaagaccggatatctatcccgaaggccaaagcgagctgaaagccagtaaccagtag

SEQ ID NO: 273064 - DNA, 648 bp, Klebsiella pneumoniae
atgaaaactttatccgaacgactaaaccatgccttgcagcttactggggtgactcagtctgagttggctcgtcgcattggtatcaaacagcagtcgatcagccagatttgctctggtaaatcggctaggtctcgttacaccatgcagatcgcggaggcgcttcgcgtgaatgctcattggctcgccacaggtgatggcgagattggcttgggggtcggtaatgtagaagttgggcctgacattaagggaagaattcctctcattaactgggttcaggccggtgattggactgaaatagcggagggatttgcccatgaagatgctgaggagtggcgtgaagtcacagggaaagcacatgagggttgtttcgcacttcgcgtaaaaggcgacagtatggaaaatccaagcggaaaaaaatccatacctgagggagcagtgatcgttgttgatcctgaattaccttactcttcaggttcattggttgttgcgcgtttggatgattcgaaagaagcaacctttaagcagttagttattgatggtgaacagaagtacctaaaacctttgaacccccaataccctgcaataccgatcaacggcaactgcaccatcatcggtgtagtacgacaagctatcatcgatttctggtag

SEQ ID NO: 273065 - DNA, 264 bp, Klebsiella pneumoniae
atgttcatctcgggtcagggggatataaagcgtaaaaatggtgccaaaaggaatattattttcgacgacgatactgccgcctgcttgttccacgtagctgcgtaccagccagagtccgataccatgatctttgctggcgctgctggtgacgccgcgctcgaagatccgatcgcgcagcgcctcgtcaatgccgcatccctagtcggcgatctcaatgatcacctcctggccatcactgttgatcaggcattcgatctgttttga

SEQ ID NO: 273066 - DNA, 504 bp, Klebsiella pneumoniae
atggcgcttaatacgcgaggagataataaacgcggtggcatggaaaccgtactgtttcagcaccggataggcgtagcggttcaccgatttcaagccatcatcgaaagtgatcgccaccgcccgcgccgggagattgattttattacgcacatagccttccagctgatacagggtcagcgtggtatagccctgatcgcgcagccaggtcatctgattcgtgaaggcgcgaaccgaggtggtggtcgacgtatgacgaaaacgggtgttctcttcatcgcgcagaatatggtgataggtcagcacgggaataccgtgatcctcctgcgcgtccagactactgacccacgccagccggtcgccaatgcggatctgaaaccaggtctgattgagccggtccttcagcttgctgaggatcggatagcgcagattgttggccagcgtgccgaacggcgcgctgcttaccgagggagcgtcatagagcggtgtatctttccaggtgagtaa

SEQ ID NO: 273067 - DNA, 903 bp, Klebsiella pneumoniae
atgaaaaagaaaatcgttattgcgctgggtggtaatgcactgctgcagcgtggagaagtgctcagcgcggaaaatcagcagcgcagcattcaactttttgcccgaatggcggcggaattagcccgcgattatcagctggtgatcgtgcacggtaatggcccgcaggtcggattgctggcgctgcaaaacgccgcctatcaggaatctcccgcctggccgctggatattctggtcgcggaaagtcaggggatgataggcttcgctatcgctcaggaactgatgcagtacgccggtgcgccggtcagcaccctgatgacgcgcgtagaggtggcggcaaatgatgacgctttcgcggcgccggggaaatatattggcccggtttatccgccgcagcagcaggcggagctggaaaaacgctatggttggcagatgaaagcggatggcgactatatccgtcgggtggtcccttcccccagaccgctaaatattgttgatagcgcggccattcagacgctgatggatgccggtcatctggtgatttgctgcggcggaggcgggatcccggtggttgccgatacgcacggttaccggggagtcgaagcggttatcgataaagatctgacggcggcggcgcttgccagcgccattcatgccgaccacctgctgattctgacggatgccgatgcggtctatgttgactgggggacgccgcaggctcgcccgttgcatcacgccaccattgcgacgctcgcgccatttgccgcgccggacggcgcaatggggccgaaggcggaagcggtcattcagtttgtcaaacagaccggaaataacgcctttatcggcgcgttaaaggatgcgccacagatattagccggggagaaagggacctgtgtaagccgctaa

SEQ ID NO: 273068 - DNA, 1224 bp, Klebsiella pneumoniae
atgtcaggaacgtatgaggtaaccgaggtgaccaaaagaaaaggaatacccgcctggtgggtcacggtatttcttttctggttaggttgggtatttatgtatgccgatcgcacggtattaaatccggtgatgggtgagctggaaaaagagtttggtttaagcggaacgcaattaggagtgctcaactccgtattttatttttcttatgcattgctgcaggtgccggcggggatcctcggggacaaaatcggtaagaaaaaagtgctggtgcctgggtttattctatttggcgtttttaccgcggtcaccggttgggtaaaaagctggtatatgctgctgtttgcccgcgtggtcaccggcgcaggcgaggggacatattatggcccgcagtacggattgtcttccgagcagatcccgaaaaagttccgctcgctgggtagcgcgattatcaatagcggaatggcctttggcatcgcgttgggtctgatgacctccagttggctggtttatgaccagggttactcctggcggatgccgttttatgccatggcgataccttcggtgctggtaggggttgctatctggctctttgtgaaagagaaaaaacgcaccgccgacgccgagggcaagctggtacaaaaaggcaaatttagcgatctgttgaagaatcgtaatttaattctgacctatatcatggtgttctgcagcctgtttggtttcttcgttattctgacctggcttccttattatctgcaaaacgagcgcggtattgccggtagcgaaactgggtttatttcgtcgctggtcgcgtggatctctattcccggcgcgctgttgttctcggggctgtcggataaattaggtcgccgcaaaccgttaattttattcctcgtgccggtggcgattgccagcatgctttccattatttggatgccgagtatgaccggcgtcatcgtggcgctgtgcgtgtacggcctggttggcaaactggcgctggatccggtgctggtggcgctggtcgccgatagcgttgatgagaccaattacagtaccgcgtttggtttatttaattttatcgggatgagctcatcgattctggcgccaattattgcaggggcggcgcgtgatattaccggcagtctggcttcgagtttttatgtttccgcggcgctgctggtcattggtctggtcgccatgctgtttttaaaagaaaaacgcacataa

SEQ ID NO: 273069 - DNA, 1662 bp, Klebsiella pneumoniae
atgatttacgcttttattaagaagggaagctttcaggattccgtaagcctgatgattatttcccgaaaattaagtgaacgcccggaagtggatcaggtttcggtcatgatgggtaccccggcgaataaatcgatgctggagtcgaccggattctggcacccggatttcgccgaggcgacgcccaacgatatttgtgtcgcagtccgcacgcaggaagcgcagccggaaattctcgatttaatccgtgaacaattagagaaagagctgagcgctatcgctaatgcatcgggcagctcaacgcagctggtcaaggcgcggcgctgggagagcgcctgccagaaattaccggacgcgaatctgttgctggtttcggtggcaggcgagtacgccgccggggtggcgaaagagggattgttagccaataagagcgtgatgctgttttccgataacgtcccgctggagcaagaagttgaactgaaaacgctggctcgcgagaaggggctcattgtgatgggaccggactgcgggacggcgatgatcgccggcagtccgctggcctttgccaacgttttaccgcagggcggaattggcgtcatcggcgcatcggggaccggcatccaggaaatcacctcgcaggtggcgctgcatcaacagggaattagccacgccatcggccttggcgggcgcgatctcagcgccgaagtcggcggtatcagcgccctgaccgcgctggagatgctggcggccgatagcgcgacgcaggttatcgcttttgtctccaaaccgccttcgccacaggtgcgtgcccgcatcattgccgccatgcaaaaacagaataaaccggtggtggcgctgttcctcggcagccgtgccgagcagcgccgcgagggcaacgtctggctggcgaactcgctggcggacgccgcgcaactggcggtactgctgatgcgcgtagcgcaacagcggcagagccagccgcaggttgcaggcaaggggatttatggcctgtacgctggcggtacccttgccgccgaggccgcgatgctgctttccgcccatctgggagtgccggtcagcgacagccacgccgacggtgtgatgctggaagccggcgggcatcgcattgtcgaccttggcgacgatagctacaccctcggcagaccgcacccgatgatcgaccccaccacccgcagcattgaaattgagaagctggcggcgatgccggaagttggcgtgctgttgctggatgtggtactgggctatggcgcctgcgccgatcccgccgggggggtggttgaggccatcgagcaggttcgccgtaaacgtgtcgcgccgttggtagttatcgccaccatgaccggtaccgatgccgacccgcagggccgtagcgagcagatagccatcctgggcaatgccggggtcgcggtggtcgaaactctcgaagaggcgacgctactggcggttagcctgacgcagcatcagccgcagagcgaatcgacagcgcataacccgctgctcgacggcgtgcaggtcattaatgctgggttgcgcagcttcgcgctggatctacaaagcagcggtacgccggtagtgcattatcagtgggcgcccgttgccggcggtaacgctcgtcttgccagtttactcaagcagttacattaa

SEQ ID NO: 273070 - DNA, 1263 bp, Klebsiella pneumoniae
atgtactcatcaattgcacaggctaacgaagccattatcgaacgaattaaagccgcgcgcccgcattgggttgccgtccgccctgcgaaagaggcggtggctgaattatcttctggacgtaaattactgcacgccgggccgccaatcgcctggcaagagatgaccgggccgatgcgcggagcctgtatcggcgcatcgttgtttgaaggttgggcgacgagcgaagaagaagccgtgcggatgctggagcagggagaggtggaattcatcccttgtcaccacgtgggcgcggtggggccgatgggcgggatcacctcggcgaacatgccggtgctggtggtgcgcgatgtggttcatggtaaccaatcctgctgcaacctgaatgaagggatcggcaaagtgatgcgcttcggcgcctacggcgaggatgtgcaaacgcgtctgcgctggatgcgcgacacgctcgcgccggtgctgcaagaagcgctgtcgcggatggaaaacggcgttgacctgacggcgatgatggcgcaggcgattaccatgggcgatgagttccaccagcgtaatatcgccgcctcgtcgctgctgctgcgcacgctatcgccggtcattgccggcctggatcggtcgaatgcggaaattgtcgccgtgctgcagttcctcagcgtcaccgatcagttcttcctcaacctggcgatggcttacagcaaagcggtgatggatgcggcggcggaaatcaaagccggctcggtggtgaccgccatgacccgcaatggccgcgagttcggcattcgcgttagcggtaccggagatcgctggtttaccgcaccggtgaatacgccgcaggggctgttcttcaccggatacagccaggcggatgctaacccggatatcggcgatagcgcgattaccgaaacgctggggatcggcggcgcggcgatgattgccgcaccgggcgtgacgcggttcgtcggcgctggcggaatgggcgcggcgctggaaacatcggaagagatgtctgaaatctatcttgccaacaacccgctgttccagatcccatcatgggatttcaaaggcgcctgcctggggctggatgttcgtcgggtcgtggaaaccggcatcacgccgcttatcaataccggtattgcccaccgcgaagcagggataggccaggtgggagcgggaaccgttcgcgcaccgctgctgtgctttgagaaagcgctggaagcgttagcggaactgcaccacattactgcctga

SEQ ID NO: 273071 - DNA, 933 bp, Klebsiella pneumoniae
atgctcgatcaggaaaccatccgcacgtttatactggtcgccgagaccgggagtttctcccgcgcggccagtctgctgcacaaaacgccggcggcgattagttatcgtatcaaaacgctggaagagcaggtggcaacgcagctcttcttacgcacgacccgatcggtaagcctgacgctggccgggcaacatctgcttgagcactgtcggcagtggctgaactggctcgacgtgatgcccgatgaactccagcagattaattccggcgtcgaaagacaggttaatatcgttatcaataatcttctgtatcagccgcagagcgccgcggatcttctgacctggctacatcagcagtttccctttacccgctttcagctttcccgccaggtctatatgggggtctgggactctttgctatacgacgatttccagctggcgattggcgtcaccggctcggaatccctgtccaacaatatctctttattgccgctcggcgatattcgctggcagtttgtggtggcgcagaatcatccccttgccactcatcccgcggcggtgctctccgacgatgcgctacgccgctatccggcaattaatattgaagatacatcgcggactctgacgcgtcgtgtcgcctggctgctcaatgggcaaaaagagatcaaggtgccggatctcagcaccaagctggcctgccatcttagcggtctgggggtcggctttttgccggagcggatgtgtcgcgcttacctggagtccggcgcgctggtggcccgtgcggtcgccaacccccgccagccttcgccgctctccgttgcctggaagaatgccggcagcggtaaagttgtcagtgaaatcgccagggtattcgagcgcaaagaggtattagtcagcggttttttgcggatggtggatcgtcctgcgcaagcgtaa

SEQ ID NO: 273072 - DNA, 369 bp, Klebsiella pneumoniae
atgagcaataatctcgagctggccagcgccgaggtcatgaagcaggggcgctggaaaatcattgtcaccatgctggcggtgacctggcttaaccctcatgtgtatctcgatactttcgtggtgctgggcagtcttggcggccaactggcggtcgagcccaaacgctggttcgcgctggggacgattagcgcgtcattcttatggttcttcggcctggcgctgctggccgcgtggctggcgccgcgtttacgtaccgcacgggcgcagcgaatcatcaacgtgcttgtcgggctggtgatgtggtttatcgccctgcagttggcaaaagatggcctgcaacatatacagatgctcatcaaccaggcttag

SEQ ID NO: 273073 - DNA, 597 bp, Klebsiella pneumoniae
atgactatacagcccgatatcccgctctccagacagcaaattcgccagcagatccgcgagcgtagacgcgcgcttagcgccgaacagcagcagcgcttcgccctgcaggccgctgagcgaatgatggcgtatccgcccgtcgttctcgctcataccgtggcgctgttcctctccttcgacggcgagttggatacccaaccgctgatcgagcaattgtggcgggcgggcaagcgggtttatctgccggtactgcatccgtttagccccggcaatctgctgtttttacattaccatccgcaaagccagctgattttcaatcgcctgaagatttacgaacccaggctcgacgtgcgcgatgtcctgccgctggccgaactcgatgtgctgattaccccgctggtcgccttcgatgacagcggtcaacgcctggggatgggcggcggtttctatgatcgtactttacagaactggcggcagtatcgcctgcagccggtaggctacgcccacgactgccagcaggtggatactctgccgagcgaacagtgggatataccgctgccggcggtgattacgccaggtaaaacctggcgctggtag

SEQ ID NO: 273074 - DNA, 1158 bp, Klebsiella pneumoniae
atgagctggcagcagcgaatcgatcgggcgctggacgagcggcgggcggcggaagcttttcgccgccgcctgccggtgacgcacggcgccgggcgctggctggagcgggaaggggagcgctggcttaacttctccagcaatgactatctgggcctgagtcagcatccggcgattatcgccgcctggcaacagggggccacgcgctatggcgtcggtgccggcggctcgggccacgtgagcggctatagcgaagcccaccgcgcgctggaagaggcgctcgccgactggctgggctatccgcgcgcattgctgtttatctccggctttgccgcgaatcaggcgctgatcgccgccctggtggagaaagacgatcggattgtcgccgaccgcctgagccacgcctctctgctggaggcggcgagcctcagccctgcgcagctgcggcgctttacccacaacgatccgcagcagctcgcgcaactgctggctaagccgctggcgggcgaacagttggcggtcactgaaggcattttcagcatggacggcgacagcgcgccgctggcggccattcacgccgcgacgcaggccgcaggggcagtgttgctggtggatgacgcccacggtgttggcgtggtcggcgacgaaggacgcgggagctgcgccgcgcaggcggtgcgccctgagctgctggtggttaccttcggcaaggccttcggcgtcagcggcgcggcggtgctgtgcgacgaagcaatggccgattatctgctgcagtttgcccgtcatctgatctacagcaccgcgatgccgcccgcccaggcggtggcgttgagcgctgccctggggatcattcgcagcgatgaagggcagcagcgtcgcgacatcctggccgcccgcatccgtcagttccgtgaggggatgggcgaggtgtcgctggggttgaccgactccgtcagcgcgatccagccgctgatcgtcggcgacaacgcccgggcgctgaacctggcctgccgtctacgcgacgcgggctgctgggcaacggcgatccgtccaccgacggtgccggtaggcagcgcgcgtttgcgcctgaccctgacagccgcccatcatactgaagacattaaccgtttactggaggtgctgcatggccacagtgaataa

SEQ ID NO: 273075 - DNA, 387 bp, Klebsiella pneumoniae
atgctcgcttttttcgcgaagagcgcacgctataaaacgctcggtaagatcgccttgccgccagctatcttcaccattggcgaaccgatggcttatggcgtgccgctggtaatgaattttactctggcgattccttatatttttatcaatggcatcatgctcggcattgcatggtatctaacggtcattggcgtattgcctcgcgtcgctggggtgagtaccccggccggcatgccgatcattatttctggttttatgcaggggagctggaaaattgccgcattccaatttataggactttttgcgcgatttgcaggatggtatttcttcttcaagactgccgatcttgtcgcttgccgggaagaaaatcagacggataccatttga

SEQ ID NO: 273076 - DNA, 222 bp, Klebsiella pneumoniae
atgcggattaaccttcggggcgcctggacggggctgccgatcctgatcgcaatggggctgtcgggaggcggcgtggcgctctggcgcgatctgcgcccgccgcaggcggcggtaacctgtgatgcggcgttgcaaacgcagtggcggcggatcatggcgcgcgcatccccggcgaggaaaatcccggggcgcgcatcgacacgcagtcattttcgcccatag

SEQ ID NO: 273077 - DNA, 465 bp, Klebsiella pneumoniae
atggactccatgagaaaaaaaacactcgacgcggacgaatcagaaaccgctcaacgtctccgggatatctggaacgaaaaaaaagtaactttacgcctcacgcaagaaaaggcggcggatgcacttggcttcagtacacaggctactgtcagccactatctgaacggtaatattccgctaaacaccgacgccgctctaaaattcgcagctttgctgggggtaaaacctgaggacctacggcccgatctggccgagctgatgaactatgttcgaaaatcgggtacacacgttgatgattattcgtcagcagggtggcgtctgttaaagccagaagaagccgaactcatcgagctgtatgaaagacttcctcaaagtgaaaaagaaaggcatctaactgaattaaaagataaagtagtcggttttgaccgtttatttgaagagttactcgcagcaagaaagcaataa

SEQ ID NO: 273078 - DNA, 273 bp, Klebsiella pneumoniae
atggatgagcaaatgcgggaaacattactaaattatgcctattccagaatagttgaattagaaaaattattgctccccgattttgaagaaacagtctggccagcagaagtagtaatagttttctcccagattgaaaacgccggaaaactcccggcgcatcaccaacgccgattgcagcaccatatcaaccgcatgtggctggaaaaaatgccagtaccttcaattattgccgcggcaggttcgctggccagcgctatggagaaatacgcgtga

SEQ ID NO: 273079 - DNA, 339 bp, Klebsiella pneumoniae
atggctaaatcatccgcagaacgtaaagccgcgcagcgggcgcggcagtctgccgctggcaaccgtaaaattgagctggttctcgatgctcaggaacgggaaatgctggcgcgcaactgtgccgcacgtcgtcccggtagagatccctacgatgcagctgagtatattgcgctgctgatccgccaggatgacgcgcgagtgcgcagccgtattaaatccatcagtaaacggctatgtggaaagtgcggcgatgcattaccgatcaccagttgcccctgtgtcggtgattcgcagtgctgggttacttatgggtggcatgagacgaaacttactgtgtaa

SEQ ID NO: 273080 - DNA, 2787 bp, Klebsiella pneumoniae
atgtcggtacctaaccaaataccttataacatctataccgccaatggtctgacaaccgtttttacttaccagttctatatcatcagtgccagcgatttagaggtgagtattaacggttctgtcgttgccagcggttacaccgtctccggtgtaggcaacaaagatggcggcgatatcacctttctaacgccgcctgctaacggctcagtggtcatgcttgaacgagtggtgccgacgtatcgactcactgattaccaggataacggtgacctgctggcggataccgtcaataaagattttgaccgtatctggatggctatccaacgtgctttcattgaccttggtttaacactcaatcgccctttactgggcgggccattcaacgcgcttaactaccgaattattaatcttggtgatccagttagcgattacgatgcagttaacaaacgtttcgttacctcagctatagctgataactcgtcagcgtggcgggctgctgacgcggtacttgaaaggaaaattgattccaattactcgcgctccctgcgggtgccagaatcgagcgtgccggcgttgccaaatagccttgctcgccgtaactctgtgtttggctgggacagtaacggttaccccattccggtttttggaatgacggatacggcagatttagccgttaaactggcatcccatgaaaacgggcttggcggtgatttggttggtactccgcagggtggcacagtcaatgatctggctaattctgtttatcaaacatctgtatccagaattaccgatcacggcattggttttgctaactggccgcaaggtaaggcagttaagttcaataataacctgtatgttgggtataactacgcaactgctcatggatctgtagtacaggatgcgatggttatttcttcgcataatgggctggactggacggcgccggtgatgattgcgcagcacaatagtactgagtctgcatcggcctggtcgctcggatataacgcagccgcaaataagttaatcgctctggtacgttttcgtgctggcggtggcgatacttcagcaatgcggtacgaggcatatgaatcaagcaacagtggagttagctggtcaaaagtcgctgatataaatataaaatcaactacgggttatgatgctgttgagctacacggtttttgccttgattctcagggtagatatatcacaggctatcacagcattgatggtgagcttggttatcttgcaattaatactgacaactattctttccagagaattgtactgatgaatgccgctgataacttcaacggcacacttattcaatgtgagctgaatttcctgtactcatctggaagaaatgaaatacttgtaacagcacgttcacaggatatttcaaaaggatatcctaaagcatgggttattgatgcaactactcttgctgtgaaaagaggcccaactactacgccatttgctcaatctgtaaaccctgtatcacctgtttatagtcctgactttagtgaagtatggtttgtctatgcaaatcgctatgatgcaactaacgtttcatcgcaacaggctggaatatgggtaagcagaaccagcctaaatgatgctttcgaccttattttttcatcagctaaaacctatatgctatgccaggcatcaggcgcattaagcacttcagctgcggtagctggagcccagcacgcatgcttgtttggtaaccgtatcgttattccatttgccgccagggttgagcataattctgatagatctgatgtgtttgtggctaccgttgacatggatgctgacagaacgagattaggtgctgcgcgttacaatccagttaatacgatggcctcaactgcgaaccagaaggtagaacagcgctattatagtgtcgggccttatcaggcgcgtattcgttttaatggccttaacctggtcaatgacacaggcgagagttttgattttggtttttcaaactataacaatggctatagaaattttaaattctttactggttcggcaactccaacgttatatatagccagtgctaaaacggttgatggaagccctaagattgatttaaatgcttcatcgcagttctatgggacggaccaccatcttcgccccggcgcccggctgcgcattaattcctcgataggtagaccagggccgtctgtcttgtattatgaccagaatcttggcatgattatggttggttccacagctgttggcgcttcgccacttgcattggtcgggaacgcagttaccacagcatttacttaccgaaatattggtggtgtttctgcggggcatggattcagaaatgctgacgataccgccgcaacacagacgcttgtgaggggttctggttcttccggtttcgcggttgatatttctggcattgctaacgcaatgtcgatatcgccaacctccggtaatgtttcgtttgtggggcaagtcagtgcaccggcttttaatccaacatcagaccgtacactgaaatcgaatattggtgatattaacccggttttaatcacggtagctaaagctgtaaaacctcaacaatatacgcttaacggcgatagcgagcagaggataagaaccggatttattgcacaggatattatcgcagagatggaagcaaacggcctcgactggcgggattattcccttgttgtggaaaataccgtagtgcaggaaaccgatagcggcctcacaacctcgacgtattacagcgtagactacatgcagttgcttatgttgcgtagcctttaa

SEQ ID NO: 273081 - DNA, 792 bp, Klebsiella pneumoniae
atgaataaaaatgttgatgaacattcgattaacccaaaagaaatcgaatctggtcttcctggcgttcacgaacgcattcttgaagtgcgaaaggagttgattagatgttcaagagaggaggtggctaaacagcttaacgtgggcaggtccactgtccagcactacgagaatggcaccagagaacctagcgcaacgttccttgtcagactctctgattgggctggtgtgcacctcgagtggctcatgacaggaaaaggtgtaaaactttcaaaagataagaatgttatagacggttttcttgaaaaaaatgatgtttatgagtttattggacaactcagaattctggcagatgtcgatgcgcaacttgttgaatcaaggaaactagccttcagaaaagattggttggataagaagaagctggatgttaagtcgctctgcatatcagagataaaggatgaggggatggctccattgcttaccgtaggtgatatcgtgcttctttcgacctttcattaccgggaagaagtcgttgttgatgggagatctagaacgactttcagaacaggcctggatccgcatgatgataaatcgtatgaggtaattaaggatgggctatacctagtccgtgcaggggcacatagccaagtcagaagggttcagcttgacccgcttggaggcatttttatcacggcagacaaccctgtttaccaaacaattcacattgaaaaggagaaattcagcccttcaatcattgaagcaaaggttgaatggcttgcaaaatcattatgttaa

SEQ ID NO: 273082 - DNA, 2064 bp, Klebsiella pneumoniae
atgagttcagtgcaactttattacagcgcccctgagcttgcattaatgaagttaagcggctttccacaaacatcacaagcaatcaatgccaaagctaaaaaagaaggatacgtaagccgctcgaaggcagtagggaaaggagttgaatatgctttggaatcacttcctagcaatgtgcggaaacaaatcctcaaaaagcactatgcagacttgctacatcagactccgtctcagtctgtagaggttggagaggtcaaagctaaaatcggtataaaaccacgtggcgagctggaagtgatgcgcaaatgtcctgccctgctggagcgcaagaccaacgcgctcaccaccgggcagaaagacattgccgacgcgcgcatggtgctggttgtcgaggtgatgcgacttatggatggtggcatgccccgcaaaggggcggtcgaactggtcgcgaaggagtcacaggccagctcgttgccgccagccctccagaaggcggccgataaggccaatgcgcgcaagggttcgacccgtcgcggcgtcggcaaaagcagcttgcaacagtggctgtctgactacatggcggcggacaacgccagcgagcggctggctacgctggcccctggcaagatccaggtcaagcaaccggaaactatcggctggttgccagacttcctggctatctatcgagacccgcgcgggttcaatatttccgaggcttaccgccgcttcgagaaatggtgggcgcaggagttcgccggtcaggaggatgtgctggaagccatgccgtcaatggacgccgtgcgccgtgccatgaaaaaactgccggttgtggtctcgcaaaaataccgcgtcaccggctctgcctggcgttcgctcaatccgttcattcgccgtgattgggagcaagtgccggttaatggagtctgggtcggcgatggtcataacatgaagctggacgtcctgcaccctatccatggccggccgttcagtccggagatcaccatggttattgatgcccggacgcgctttatcgtgggctggagtctggcgctgtcggagaacgtgatcgccgttgccgatgccattcgccacggcgtacagcatcacggtttgttcgggatttattactcggataacggcccaggtcagaccggcaaaacgctggatgccgatgtgacggggattctcgcgcgattgggcatcgaggatggcggcgttgaacaccgtaccggtatccccggcaacccacaggggcgcggtatcatcgaacgtcccaacaagggtatccccaaatacgcagcgcaatcctttgattcttatcacggtaaggatgcggacaaagagaccgtcagggttaggaaacgcatcgcgcaatctgctattaacgccgttcgccaggggcgcgagctgaccaacaagcaagcggccgcgttgagaatgataccgacctggcagcaactgctggacgtgatcgaggaagaggtcaactggtacaacacccggcatcatcacagcagtctgccgaaggcaccggacggcaagcattacaccccagccgcctaccgtcgtcacctgcttgaagtggaagaaaccgtgattgcctatccatctgcggtcgagttgcgcgatatgttccgtccacagcaaaagcgcacagtcagtcgttgcgaggtgcagattttcagcaacttgtatttctctatggagctgctgaaccaccacggcgaggaagtgatcgtcagctacgatattcacgacccgcagacggtgattattcgcagtctggacggaacctttatttgtgatgcggtatgggacggcaacaagaaagcgccgtttgccatttcggcgaaagaccacagccagaatcaacgtaccaaaggcattatcaaacgtgctgaggaaaaaatcgcggtggccaaggaggaaaacagtctggttattgaaggcgagcgtcctaatttcggcggcctgttaatcgagccggagccgcaagataaagagcctttattcctgctggaaaccgaacgcgaagaatattttaagaaagtcaactcccggtaa

SEQ ID NO: 273083 - DNA, 897 bp, Klebsiella pneumoniae
atgtcaaatatcagtgtacaacttgacgaactgatgacccgcaagggttacacccaatcgcatgtggcgcgtgccattggcagaagcccggcggcgatcagcactttcctgagcggaaaatacagcggtgatattaaaaccctggaatccgaactgtccggctttattcagcgtgaatctgataaagaccggctgcaccacctgaatattgatttcgtgccgacggtcaccgccaagagcggccttgaggtcattcgcatggcgcatctggaaaacgatatcaacgtgatcttcggtgctgccggcctcggcaagaccatgatgctgaaagaatacgcacgccgctatcgcgatgccatcctgattgaggccgaccccggctataccgcgttggtactcctgcaagaattgtgcgagagcctgggccttggcaagcgtggcaccatccatgagttgagcgagagctgcattaccgcgctgcgcggcactggccgggccgtgctgattgatgaagccgagaacctgccctatcgcgcactggaagtgatacggcgtatccacgacaaggccggcgttggtgtcgttctggcgggtatgccgcgtttgatcatcaacctgaaaggcaagcgcggcgagtatgcgcagctctacagccgcgtcggctttgcactcgacctgcaggagaaactgccccaggcagacctgcagcagatcctcaccaatatggtcgaggaagccggaagcgaaagtgttttttccgccttttacaaggcatccaaaggtaatgcccgccggttgttcaaattggcacgtggcaccatccgtgccagcgaaatcaacgccacgccgattgatgcggctatggtgaataaagtcgccggcatgttgattagctga

SEQ ID NO: 273084 - DNA, 273 bp, Klebsiella pneumoniae
atgactgttaatgctgaaattcaggctctgagactcatacaggaacagaggtcgggaggtggcgaaatcacccaacatatcattagcaccaagccgggttgtctgatttttgatgtgtattcatgggagcacgaagggaaatgcatcgtctgggatgtggatgctttctccagggaaatgattgttctcgatttcaatagcaaagcgtcgtttaaaaaagcctacggtttagcgcggcttttacgtggtaagggtcagttaaagaggatgtga

SEQ ID NO: 273085 - DNA, 237 bp, Klebsiella pneumoniae
atgatgggtaatttatctgtgagcgataagaaggttatgtcgaagttgaattgtctggcgcgtgttggattaaaggttgttgagtgccatgttaatttccgtcgcccggttattgaagttgaagcaccactgcaagattgggtaaagggtgccgtggaaatcacggaaacacgaaacggaattaagcgcactgtcaaaatgacgatatggcatggcgcacacatcatctggtgttaa

SEQ ID NO: 273086 - DNA, 630 bp, Klebsiella pneumoniae
atgaccactgaaattgcaaaaaataacggcgttcctgaaggctatatgaaagaccgcaaaggccgcctggtgccaattgagcaggtatctccttttgatatcgaaatggacgcttttgttcgcgcccaggtcaaagaggctgaggaagagagccagcgcatcaaggcctttaaaaataagtcctttgacaattgttatgcctatctcgatctggtggcggagaaatacggtcgtcagcgcggcggcctgaaaggcaacgtcacgttcccctcgttcgacggtagccaacaaatcagcattgccgtgcaggactcgttgacgttcgggccggagctgcaggtggccaaggacattatcgatgagtgcctgagcgagtggtcagagggtgctaacaaaaacctgaaagccatcgtgaatgatgcgttcgccgttgaccaggaaggcaagctcaacaccggacgcatcttatcgctgcgtcgcatcaagattgatgatccacgctggattaaagccatggattgtatttctgagtccctgcaggtggcggtcagtaagacctatattcgtttcctgaaaaaggatgaatccggcaagatgaccagtatcccgattaatatcgcggcggtgtga

SEQ ID NO: 273087 - DNA, 132 bp, Klebsiella pneumoniae
atgatggataagaaatcaatcgtggatgcatgtgcaaaagatatctgggaaaccctattttgggggtgtgtgattttttgggttctccttatctctggcagtgttggcatttactttctctttaaggggtga

SEQ ID NO: 273088 - DNA, 219 bp, Klebsiella pneumoniae
atgatattccccaaacgtaaaccattaaaaccatcagccattgccaataaatatcttttcgcgcgggctttcttcaagaacgtgcggccaggaattgaaattagcgtgtgggctgggcgacaggaagtgcgtaagtacatgtccgatgcttggtggaacaatgacccgattaaagctgccggtaatattcatcgtaattggggagggattggcgcatga

SEQ ID NO: 273089 - DNA, 231 bp, Klebsiella pneumoniae
atgacactaacaagctttttgtcggtttctggctgccaatatcaggatgatggcgccaagcgtatctatcacctgaccaataaagctacggtgatcgaatatccgcgtttgcctgtacgttcgcgctttcagttctatgacccgcgcggcaacaaggttcacaccaatggtgagcgtgtcgcgatgaaacaggcagtggaacgccataaaaaactctggaggttccaatga

SEQ ID NO: 273090 - DNA, 540 bp, Klebsiella pneumoniae
atgaacattcctcaaacgcgttatatatacaaacgcgaggcgcatccatggatgatgcataaggtaaaaatcaaacaatggcatccaatccgcgttgctcttttgttcaggcttggccccaaaatacccgcgccaaaattggcgtcgcttctgcaatgccacgtcagcacgttaagaagaaaggcgattaagtacggagttgaacttttccaatgccacagaaaatttgaggagtgggaaataaagttcatgcgggataaaagacaagtaatgtcgcaaagggaaatcgctgagtttttggggagaacggaagataccattcgcacaactatgcgcagcaatggaatacaaccgggccgtcctttcggtgagcgccacttattttgccgatatgggaaggacgaggtagagctggctcgaaaactatctgacgttgggctgacgtcaaaaatgatagccgaaaaattagaactcaatgacagaacagttcgcagttgggtgagtttcgaaaaaagaaaacattatgagggggcattgtga

SEQ ID NO: 273091 - DNA, 768 bp, Klebsiella pneumoniae
atgaaaaatgaaaccctgaatattcgccaacagtacgccacggcagccatgcaggcgttgattatcagcggcctgaataccggtgcctgggacgattacgccgacctgggcaaatcggcctacaggatagcggatgccatgattgattccgaactgctggcgacctgcgtcgagttcaagctgcaacaggaaccggcgtttcattacatccgcacccacagtggccgccatttctgctatgaggccatcagcctggacgcgattgatatcgacgacatcgcgcaagcgctgtcgaatatttgccgctttgccggtcatttggatgatttctacagcgtggcgcagcattccgttctggtcagtcgcctggtgccgccggaattggcgctggaggctctgctgcacgatgcctcagaagcctactgccaggatatcccggcaccgctcaaggcactgctgccggactaccgcgacattgaggcatcggtcgataacgtcatccgctctttgtttgggctgccgctggcgcatagccccgaggttaagcacgcggatctggtcatgctggcgaccgaacggcgcgacctgggcattgatgatggcgacaagtgggacattttggacggcatcgcgccgactgatgagtttgtcatccatcctcttaacccacgccaggcgcgccaattgttcattgcccgatttaatgagctgtggcgcatccgggttgagcaacgccggcaagagatgctgggagattcaacaccatga

SEQ ID NO: 273092 - DNA, 249 bp, Klebsiella pneumoniae
atgaaaaatgtcctgcgcaaaaccagtgccaaagactttaaccggcgttttccggtggggtcgcggtttcgctactaccccgttgtcagcgtgcctgacagcgaggaagtggtgacgcgctcggtggcctggcacctgcagaacggtaagaccgtggtgcgggtcgagggcaagattggcggcgtttccgtctaccgtctggagcctctggaggccttccatgaagtaccccaagggcagcgtggttaa

SEQ ID NO: 273093 - DNA, 198 bp, Klebsiella pneumoniae
atgaagtaccccaagggcagcgtggttaagttgccgccccggccaggccggggcgttgttctcaacgtgttcccaatgccggatgagcgatttcgttacggcgtcgagtgggacagcggctcttaccaggtctacgacgagaaagagatccagtgggcgacggttgaccgccccaaagtgtacgggagtttggtatga

SEQ ID NO: 273094 - DNA, 423 bp, Klebsiella pneumoniae
atgacacctaacgcgaaaggcctcatcggggccatcaaagcgggccaggcattcctcgggatggatgacgatacctatcgtcagatgattgccagggtcaccgacggtaaaacatcctgccggcagtgctcgctggacgagctgcagcgcgtccgggaatacctgcatcagcaagggttcccccgcaaaaccgcccggcatggacgccggccgaaggttgcccgctcacgcgaagccatcctggccaagattgaggcgctgctggccgaggccaagcgcccctggaactacgccgaggggctggcggcgcacatgtaccagcagcatgtgctggagtggctgaccgtcgagcagctgtctgcggtgatgaaggcgctgatcatcgacgccaaacgccgcaaaaacaggagtaagccatcatga

SEQ ID NO: 273095 - DNA, 450 bp, Klebsiella pneumoniae
atgaaatttaacgagatcaagcccgatttaagccaggttgaagcgctgttgccgtcggtggtcattgagctgatctcactgattggctacgccaagaccgaggaaatgataagccacctgggcggcatcaccttcaaggtcggcaagtccgtgcgtaaaaagggcaaccggcgcggcgagctgctggtcgaactgcttggcaaggagacagcaaaggtgattgaaaaacactttggcagcgaaccgctgtacattccgcgcagtgacagcgcgttgcgcgagtggcgtaaccgccgtttcatcgacgaacacaacgccctggtggcggccggtgaaagctcccgttttgcgcgcatcacgctttgccctaaatatggcgtgactgaccggtgggcgcaaaagctgttggctgagcgacaggtatcgtcacagcaattagatctgttatag

SEQ ID NO: 273096 - DNA, 651 bp, Klebsiella pneumoniae
atgattacccccgaacagttacgccgtgcagccaggttaacccccgccaatgtgtcacgctggcacgcgcctatcacgtcagcgatggctgagtttggcattgatacccccaaacggcaggcggcgtttctggcgcaggttggccatgagagcaacagtttcacctcgctgtccgaaagcctctactacaccgacgcccgccgtattgcgaccatctttcgcaccggctttgatctcgatggcgacggcgtggttgacccggacgaaatcgagtttgcgcgcggctacgttcgccgcccggagaaactggccaaccgtgcctatgccaaccggggcggcaatggcccggaggcatccggggacggctggcgctatcgtggccgtgggctgattcaaaccaccttcaagaacaattaccgcgccgccggcaatgccctggggcttgatctgctaggcagtcctgacttgttgctgcagccgctgcctgcggcacgttctgccgcgttcttctggtggtcgaacaatctcaacaactacgccgacagcggtgatttcaaggggctgacgcgccggatcaacagcgggatgttggggatggatgaccgcctggcccgtctgaaagatgccgaggccgccttatgtccgcgctga

SEQ ID NO: 273097 - DNA, 285 bp, Klebsiella pneumoniae
atgtccgcgctgataagcacgctgttgcgccgcctgggcgaactcatcaccaatccggccaccggccgcttgtccacctcggacaccatggtgttgggtgcgttcctggtggcgtcgttcgttatcgtctgggttacggtgaccggtcacttggaagagtggcacctggccgcctacctgggcgcgttcgttttccagtctcaggcgtcgaaattcgtcgctatcaagcgagacaaggccaagctggaggtgggcgatgccgttaactctcagtctggtgtttag

SEQ ID NO: 273098 - DNA, 594 bp, Klebsiella pneumoniae
atgccgttaactctcagtctggtgtttagtcaccttaaatcctatttgcttgcctacctgctaccggtatgtatcggtgccggtgcgtattacctggggcaatctgccggccgcgctgaacggcagggcgacctgacgaaggctaacaaaaccatcggccagttggctgcggataagtctgagctgaatgaaacgctgcgccagcaggccgagcagcacgccctggccatggctaaagcgctgcgcgagctgcaggcggcgcagcagctcggcgacaagctctcccgtgaactgcagcagagccaatctcacctgcaggcaacgaaagacaaactcaagaaggcgatcgacgatgcggttaaaaacgatgtgggttttaccggcattggccctcgcgggctgtgcctctacaacgccgccctcggctatgccgattgtggtcagcagttgcccaacaccgccggcggccttgctggccattccgccgaagcctccggcagcgaaggcggactctccgccggcggtctcatccggcacagcgccgattatggcgcctggtgtcagtccttagaggctcaggttgcagcaacttaa

SEQ ID NO: 273099 - DNA, 249 bp, Klebsiella pneumoniae
atgacccttgaaatggcgtttaacatcgcaatgggcctgttgatgggcctgttcggtggtctttttaaacatctgtttgccgagctgaaagacctgcgtaatggcctccaggccatccgcacggaataccagcgccgggacgatgcacagcgaaacaatgaccagttactggacttgttgaaggatgtaaaacgcagcgtcgagcacatcgaccagaaactagaccgcaaagcggataaaaggagctaa

SEQ ID NO: 273100 - DNA, 228 bp, Klebsiella pneumoniae
atgggccgacgcgcatcgcgctaccgccgggggccggcaacgtctgccgaaatggcgttgctgtctgaaatcaatcagcgcctggcgcgaatggagagcagcctggatgacgtgaaatcctcggccatccgccagggtgctatcgccggcgcgatcaccggcagtgtcagcggcggcctcgtgtacaccacgattatgttgatcaaggcaaaactgggggttggctga

SEQ ID NO: 273101 - DNA, 609 bp, Klebsiella pneumoniae
atggatttacaagcatgggataatattatctctatcgcttcgaatgctgtcacagcgttgggtgtggtaggaggggtagtttttggcggttctaaactgaaagactatcttgatgtaaaaaagaatgatgttgcttttcagacagcattagctttgtatgatgaatttgatgcactacgtaaaaaacatcttaaaataagagttaacatcaatgtcattttaaatcatatggatgagtcatttgaaggacaacatccaataacagctaacaagtattttgaattgcaaagattaggtattgattctcttgatgattctctttcaataacccgccttgttataaaagcggataactttaatacgcttttcaatacagagctacacgataaaatcattaaaatttcagaccttacaaacagtataagtaagaatctggacaatttttttaacttaactcttaattcattaaaaaatagagtggtacaagacagtgacattgataaagctcatacattatgtgaagaatacgaagaattaacactacaatgccatgagctttgctcagatataaaagaagttaaattcaaagatttttgcaaattcacataa

SEQ ID NO: 273102 - DNA, 537 bp, Klebsiella pneumoniae
atgcaaacactttcctttcaacaaaataccggattcaacaccggcgccctgataaagcgaaatcagctgagagagtcagatcacgacgctattcgctctgctgttcgcgcctgggctgcagctgagggccaggatgttgtatcggcacatatcatcgatgagtggcgccagcagggcggcgaggagatcgcgttccctgatgatatcagccgtgcccgacagaagctttttcgctacctggacaacccggccgagtctgagcgctatcgcgagaatgttcgtcagctgacaccggcaatcatggccgttcttccgctggagttccgacatcgtctgatgccacaggacgatattttgtcgcgcctgtcttcggccatgaaggaatgcgctgaagcaaagcaagcggtgatgctgaacgcgccagagcaccagaaactgaaggaggtgagcgagggaatagcgtcgcttttcaggctaatgcctgagcaggcaggagcgctgatgacggtggtgagctcaatgcttggcgtgatgtaa

SEQ ID NO: 273103 - DNA, 768 bp, Klebsiella pneumoniae
atgtctaaatcgcttgttttacggtccccgtcatcgctggacagcgatgtgatgcccctcatgctgagtgatggaattcatatcgcagcggaaaatgcatacacagatcaaactgactcactggttaaagtcgcggattacatgcagccttcgatcatttatacctctccggcgattgctaaaaacctgggaattattactgatgatgctggctttgtcggtctggttttcagtggcgcccagggtttgcttgtaagaccttttgcttcccttgccgggtatggcgaggtcaccttctatctggtaggtaaatttatcgctggtactgcgaatgatatttactttaaatgggggcctgttcagtcggcgaacagcaatgataacaagtcggtattcctcaggcgatatgcgtcgaataatgaactgcaattcacctacgatcctggaaaaccagtaaacgtagcgacagtccacgtaccgaggccatcaaccgaaacggcaatcgtatcatgcggttattcagttgccagtaaagaagtctttgtcggattcaatggagctgaagttatcaccgcaatgcctcaggtcagtcaggctttgatcagcgaagcgactggcgattttacgctagggtacaattattacagggccgggcaggaaagcgagatgaccctgaaccggatgcatgccttccggcagtaccatagtgccgcccaaagggcgaaggtcgtagcggccttagcatcggcctttggtattgatatttag

SEQ ID NO: 273104 - DNA, 672 bp, Klebsiella pneumoniae
atgtacaggctctatcacgattttttatattataacggcaggatgtacaccgggtatcattttgcaaattcatcccggatgggctttctctcatttgatatttccgacccactgaacaccatcacaacgttcgacgctattgcccatggtgtttatcctacgaccaagctggttgaaccaacactgggtatcgatctggttcaggatggtacgggatatatttatggcggcatacgaacgcaggatgcagcatacccgtcaaagttttatttcatgcgacctgatttttcgggttttacgatgtataacgccccggaaaacgtgatttacagcgatgtggtagtgaaacgcattaacgggatgatggtggcgttattcattgagcggtataagactgggacaatgaacctatggttcggaacgccgtctgacttttacagtagttcagtggcttcattttacaaaatgaaaatcggacagatactgaactccgcaatatccggcagaaggtccactaacgtaggcgtccaggacatggatgttatcgggaataacctggtgatggcatggtctacagaggatgaggctggaaacagtgacaccttctttgctgttatgaatgttgttcagtcggagtcgtttatgacccttaattatctggagtccttctaa

SEQ ID NO: 273105 - DNA, 453 bp, Klebsiella pneumoniae
atgcagcagcccgcgggcttgttcggtatccagcatcagctgcggctggccggggatcggcgcgccgaaatcaggcgccggctgctgcgccggcggcatgccgcgctctaccggcagcccggcgtcggaccaggtctgccagccgccgtcaagcaggcgcacgtctttgaccccggcgtacagcatgatctgcgccacccgcgctgcggcgtagacgtcgcgaccatagaggatcaccgtggtgtcatgccggatgccgtgcttcgccagcatcgccttcagctgcgcgtcggacactttattccacagcggttcgctctccacctcattggtatcgatatagcccgcgccagggatatggctcagcagatagagcttcggcgctccccaggcggcttcaaacactttccagtcgcctgccggggcggcggcgaccgctttcccttgctgtag

SEQ ID NO: 273106 - DNA, 222 bp, Klebsiella pneumoniae
atggctaggatgatccgcctggcaagtgcccattacgttgcttacaacgtgattagcgatatgcacgtagacagcaaccggcaggtcaaagtgctgttgagtgacgggcgtattgcattggctgaacagagtcacggacagaccgcctgggcgcgcctggcgcagttggtggatgaggtgaatatcgccagcgcgagtgatgcgcctggctcactgcagtaa

SEQ ID NO: 273107 - DNA, 1521 bp, Klebsiella pneumoniae
atggtgaaaaaaatggttcaaattgtcgatgtcaacgggaaaccgatccgccgcgatgtgctgcgcgagccgcaatcctcgcatgtggccgcactggccggcctgtatgccgagcaccccagccagcggttgacgccccaacgcctggagcaaattctcaacgaggccgagctgggcaacctgcaggcccaggccgacctgttcaccgatatggaagaacgggacgcccatttgtttgccgagatgcaaaagcgcaagcgcgcactgctgaccattccgcacgaaatcacgccgccgcccaatgccacaccggcagagcaagcggatgcggcctggctggcggagtacatcaccgagcaagacggctgggaagatttgatcatcgatatgctcgacgccatcggccaggggttcagcaacatcgagattgaatggcaacagctcggccgcgagtggttcccgaaggcgtttaaccaccggccggcgtcctggttcgaactggcgcgggacaatcaggatcagctgctgctgcgaaccgatgacggcatgggcgcgccgctgcagccgttcggctggatacagcaccgccacaagtcgcgcagcggctatgttgcgcgtgcggggctgttgcgtaccctgtcctggccgtatgtgtgccgcaacttcggcactcagagcctggcggagctgctggagatctacggtatcccgctgcgtatcggtaaatacccggagggcatcggcaagaaagagaaaaacgagctgatgcgcgccgtcaccgagctgggacgctatgccggcggcatcattcccaaggagatggaaatcacgctgcatcaagcctctaacagctcgcatgagccgtttatggcgttggctgattgggcggaaaagtccatgtccaaggccattctgggcggtacgctgaccacgcaggccgacggcaagacctccactaatgctctgggcgtgatccacaacgaagtgcgtcacgatcttctttcgtcagacagccgtcagttagccatgacgctacgcagcgacctgttctggccgctgctggtgctcaaccgccgggcaaacgccgacccgcgccgcacgccgcgtatcaagttcaaagtgcctgaaccccaggcacccgaacctgtcggggcaagtcgcaccgtgcaggttaatttgggcgcgccggcagcgccgacgccggcacgcagttataattcccaggtcattgccgcgttagtggccgcgttgacccgaaaacccggtgcggatgacacgcaaaccgggattgatgaggcattaacggcactgttaagcggcaataaacccgctgagggtctgattgccatgttgcagccggctatcgctgcgttgtccggggagttggacgaacaaagcctgctgggtgcgttggctgatgcgttccctcagctcgatccgaccttactgcaggctaacctcggtgatacgcagaccatcgcgcgcctgattggcctgtatgcccagcaggaggggcagtaa

SEQ ID NO: 273108 - DNA, 1236 bp, Klebsiella pneumoniae
atgccaatatcgaaggcagaaatcagcgcgctgttcggcatgaagccggaagccgcgttgcgttacctggagaacaagggtctgcgcatccgaactgatgccgacgccatgcaggcggtggatcatgcgcacgcattcggctttgccaatctggcccgcctggatattgcccaggatttggtgaacgggttacgcgaaggcctggccgccggccagacgccggaatggttcgtcaagaatctggagccggtactgcgtaaaaagggttggtggggtagcgaggagaatatcgacaccgataccggcgaaatcaccacccgccagctcggcaaccccgcccggctcaataccatctaccgcaccaacacccaggcggcctacatgtcggcgcgccatgagtccatgctggccaacgccgaaaaccgtccgtactggcggtatgtggcggttatggatgcaaagactcgtcccagccatgcccggctgcataaccgcgtcttccattacctcgatccgatttggcagtacatcttcccgccgaacggctttaactgccgctgccgcgttgaagcgctgaccgagcgagaagttaagcaatggggttatgtgatttcgcgcaccgacagtgaagtcgtgcagcaggtgatgaccggcgaggacgagaacgggcgcccaaccttcaccccggtgaatggcgtgcggttcagtggcccggacggccaggcggtgaccttcttcccggacgtgggctttgatatcaaccccggcaaagaggtgtggaaagccaacctggacaagtacgatgtggagctgtcgcgcccctatgtcagcgcgggattggccggcccggagttgactcacatgctgagcgatgtagcccagggcaaccgcaccggcgagatactggccgccggcgtgctggatgccggcgagatggcgacgctgggcaccgccggccgtactgcctggctggctgagcaccagcttgccgcccaggccggtgccggcacgttgccgactcagcagcaatgggccagcgtgcagacggttatcgagtcatccaccgtcgcggtgcgtgccggcgagctgctgcacctgttccgccagctcgatgaggggcaatggtggctggcgacgctggacgtgggtctggtggtcaacacttttgcgcctgtgaatgcgtcaaccctcgatgccacaatacgccgtggcacggtcttgaaggatgcacgctga

SEQ ID NO: 273109 - DNA, 582 bp, Klebsiella pneumoniae
atggccaatatcaaagtcaccgtcgatgacaaagcggtaagccaacgtctgcagcagctgctgcaggtagtcgataagccccggccgctgatgctgcaggttgccgaaacgctccatgctcaaagcatggcgatgttcgagcagcagggttttcccgccaacagctggccctcactcaggcccagcaccatccgctcacgttcccgtgccggccactggccagggaaaatcctgcaggtgaccggccgcctggcggcatcggtcacgccggcctccggtgacgactttgcgcagattggctctaacctggtctacgccgccattcagcacctcggcggtaccatcaagcgccaggaccaggtgcggctgcgcaccgaccgccagggtaacctgatgaagcgcggcaacctggcgacgttcgccaggcgcagccacaagcaagccgtcgcgcgcgccgtcaattacagcatcgtgatccgtccgcgtccgttcctgccggtgacggaaaatcagcagctcaacaagccggcctttgaggcggtgatgggcgtgctgaatgatgcctttatgaagtcccgctaa

SEQ ID NO: 273110 - DNA, 1137 bp, Klebsiella pneumoniae
atgaaacgaaacgttgctgtcgcatccctggcctttgagctgaacctgaccggaaacacgatccagttgttcccggccggcgagttccgcgcaaatgatggccgccccgcagaatgtgccaactgggtactcaacgagagcctggcgcgccaggtcatcgagcacctgtcgtcacgccaaaacaaaatcgtcatcgactacgaacaccagaccctgcggactgaaagcaacggtcaaccggcacccgctgccggttggtggaaaggcaccgataccgtctggacggatgcgggcatgttcgcccagaacgtcgaatggacggaagccgcccgcaaaatgattgccggcggtgaataccgctatatcagccccgtctttgcctatgacaagaaaactggtgcggtgctgcaggtgttgaatgcagcgctcaccaataaccccgccctggacggcatgaatcaagttgtcctggcggccgcctctcgtctcatcgtgcaggcatcaactcaaccctccccggagaagaccatgaacgaagagctgttaaagctgctgcgcaagctgcttggccttgccgatgatgcaaccgaggccgatatcctggccgcgctgcagcaggcggccggctatatgccaaaggaaaatgaaggtgatgcggctgccgcgagcctcagtaagttgctggaaatgtttaccgccctgacggcgtcggtgaaaggcaaggacgacaaaatcgccgcgctgacggtcgccgccaccgccaacaaaggcaccaatgttgatccgaccaagtatgtgccgatcgcagtggtcaccgacctgacgacccagttagccgcgctgaccgcgcgcgttgatggcggcgacctggacggcttgatcaccgaggcgctgtcctccgggaagctgctgccgaccatggaagaatgggcgcgcgagatgggcaagaaagacattgctgctctgcgcaactacatcaaggcagctgcgccgatcgcggcactgaccactcagcaatccggtggtaaaaagcctgccggtgaaactcacgggttaaccgcaactgagcttgaagttgctgcgttgactggcctcaccccggctgaatacgccgaagccaagaaggaaatgcaataa

SEQ ID NO: 273111 - DNA, 417 bp, Klebsiella pneumoniae
atggctaccccaacccaaaagaaagcggaagaaaaatacgtcaaggacgataaaaagccaggcgatggcaccgagaccgatgcgggttccgctgcaggcgatggcaccgagaccggcgcaggttccgctgtaggtgacggcaccgagaccggcacgggttccgctgcaggcgatagcaccgagaccggcgcgggttccgctgtaggtgatgacaccgaaaccggcaccgatgcgaaaccccattggttcaccgtccaggtggtgcgctcaccgagcgggcggcgtttccgtgctggtgttgagttcacctccgagccaaaaccttacgatttctcgctgtttagtgctgagcagctcaacgcactggctgcagatccgttcttgcgcatcaagcggattgcgccggctgaggagtaa

SEQ ID NO: 273112 - DNA, 465 bp, Klebsiella pneumoniae
gtggtaaccgactatctcttttgcgagccgttgttgattggccggctgcgtgatgctgtaccggagtttgtcgaggtgaccggcgtcgccgggctgtctcagatgaacgatgacaacccggtttgtccgatggcgtatgtgatgtacctgggcgataccgtcaacacttctacggccgccaccggtggcagccagcgccgtctgcagttcgtgacgcagctctgggctgtggtggtctgcgtgtatttcgccgacggtcgcggcctcggcgcagatatcagcagcgaagccggcccgctgatgttgaaaaccgtcgaggccctggctgggtggtcaccgctcgaaggggttacccggcagctggcaaggagcaatcagagcctgccggcacagtacgagtccggctatggctattaccccctggtgtttcaggtggaggttcccgccgcgattggaggctattga

SEQ ID NO: 273113 - DNA, 198 bp, Klebsiella pneumoniae
atgaccaggcgaattgtactgaccggcccgcacacccatcagggcgtggtactggctgccggcactgagatggaagtggacgacgcaacggcgcagtggctgattgagcacgccggcgcgaaaaaggcgggcctgaaccgcaaaaccaaaaccgagaccggctccgccgactcaccgaccgaggaacaggaacaatga

SEQ ID NO: 273114 - DNA, 747 bp, Klebsiella pneumoniae
atgaccccagaaacttactactacggccagggcaaggtgttcctcggccgtcgcaatgcgcagggccaggcggtatcgctgcgctggattggtgacgtgggcgagctacagattgcgctcaccacggactcattcacccacaaagagtcctacaccggccaacgcgcgcccgtgcgccgcatcagcaccggcaaggatggcacggtcaccgccacctggtatgagcattcgccggacaacctggccattctgctgtacggcgagaaagtggcagtcccggccggcaccatcaccggcgaagcgctgccggcaggcattcaggctggcgaccgtgtcacgctgacccaccagaacgtcagcgccgtgacgattgccgatctggccgaggggacggattacaagctcgacgccaagtttggcgcgctggagttcctaaccacgccggccacgcagccgcttagcgtcaactatacgcacgccagcagcgttaacacctcggtattcacccaaacgcccgatgaactgttcctgcgttacgaggggatcaacctggcagagaacggcgcggccgtcgtcgttgagctgtatcgcgtgcaatacgacccagcgtcggcgttaagcctcatcaataccgacacctcgttgcctgggctggaaaccaccgcgaccgtcctgttggacactgaacggccggatgatgcccagtttggccgctatgggcgcgtgatccacgtcgggagcgtctga

SEQ ID NO: 273115 - DNA, 474 bp, Klebsiella pneumoniae
atgacggatgagctgaacatcctgatacctgaccggacgctgactatctgcggcgtcgaggtcacggtgcatgagtacacgctggccgagcagctgcagcaccgtcaaccgctcaaggcaatcagcgaagggttcatggatgcgatgaacgccaagccggatgccgaggtgtcgattgatgagctgtacgacgtactcggggcgaactgggatgcggtgctgcaggcggtagcggtctcctgtggccgtagcgtcgaatgggtcgccggtttgactggggacgatagcgaaagcctgctgctgatctggtggggcgtcaacgcggatttttttacccgcaacgccattcgcccggcgctcaccaggctggtgcagcagctgcaaaacccgccccctggggagaggtcttcggctgcctcatcgaccacggccaccgattcggcgatctgcggcactacactgcccgccagttga

SEQ ID NO: 273116 - DNA, 3717 bp, Klebsiella pneumoniae
atggcaagcggaaacggcaacctggaattgcgcctgcgtattcaggcagatttaaaaagcgcccaggcctccctcaagcaactgcagtcctccctggacagcgccagccaaagcggcacccggttgggcagtgccggcggctcggcagcgtccggtctcgatcgggttggtggtgctgcagacagcgccaaccgaaagctcgataaaaccgccgctaacgtcgatggtttgagcaaccaactgacccggctcaagccgctggcggcggccatcggcattgccctgggcggtggtctgatagccaacctggccagcacctcagatgaatacaccaacctggcggcgcgcattcgcctggtctccacgtccaacgaacaggcggccacgacctttaaatcagttatcggtgtggcaaatgaaaccggtcaacgcatcgcctcgaccgccgaactgtatacccgcatggcccgctcgcttaaaggcagcgcgacccagaccgaactgctgcaggtgacgagcaccatcaacaaggcggcgatcgtctccggtgcgacggccgaagagtccacgaacgccatcatccagctgagccaggggttggcgtccagcaccttgcgcggggaagaattcaactcggtgtccgaacagatgccgcgcatcatggagatgctggagaaatccctgggcaaaacccgtggcgaactgcgcgcgatggctgagcaagggatgctcaccacgcaggtggttttcaaggccctgaaagacggtgccggcgacgttgatcgcgaatttgcgcagatgccgctgaccatcggcagcgccgccacggaaatggccaacgcctgggtcgagtttgtcggcggcaccaacgatgcgctgggcgcatccaaggcgattgcggccgtcatttccggtctggccagcaacatgtccacgttgaccactgccgccattgccctggcggtggtgatgggcggccgtaaggtcgccgcgctggttgcagcgaccacggccgcgcgtgccgatcgcatcgagacgctgcagctagccgaggcggaatatgccgaagccaaggccgccgtggctgccgcgcaggcgcaggccgcccgcgccaaagtctccggcatcaccgcaccaggcgcacgcgccaaagcggaagacctggtgaccgcgtcgctggttcgtcaaaccgcagcagagaaagcgctgggcgttgcccgcgcctctgcatcgacctttggtcgcctggggacgggattgatggggctgctgggtggcccgatggggctggccatcactggcgtgacgctggctgtcggcggcctgagcgccgcctatgcggccaaccaggagcatgaagccgcgctggcgcagcagcaccagcagaccatccagacgctggaagaccagcgccagaagaccgaggcgctgataagcgcccagggccgcctgaaagattcggtcagcacgggcgatgcgctgacgcagcagcgcaccaacgccgatgtgctcacccaggacagtaagaaactcagcgacctgcagagccaggcggcatcgcttaaacagcagattgacggcctgctgagcagcccggccccgagcgggatcggcatcgtttacctgaccgacaagctggccgaggtgcaaaagcaaatcgatgcgctgacgccgaagttcgacaacctcagcgacgtgcaagacaagctgtccgatgagctggaaaaccgcctggcacgcgcgatggatgcgccgaccgccagtggcaagacgctgcgtgatgtgttgaccgatctgcagaacgccggccccattcgctggatggatgaggccgtggcgcagatggcgcaaagcgaggaatcctttaccgcgctgagcgccgaagccgacaagctgcggccgaagctggagaaagagctggccgatgcgacctacacggccgcccagcagttggagcagctgcgtgacaaaaccattgcggcggcgctggcggccggcaaggcgccggaagatatcgacaaactgcgtgaaagtctggaaaagctgatcaacttgcagaagcaaaccgaccaggccaaggagaacaagaagaactcagacgcggcggcccgttcggccaaatgggccgcctcggccaatgaaacctacgtcaaggggctggagaaacaggcctttgccgtcggcaagaccaaatcgcaggtcgcggcttacgagctggcggaaaaaggcctgtccggggcgctgaaagcgcgagccgaggcggcgctggcagttatcgctgccggcgagcagaaagagaaatcggacgccaacgccaccaagaatgcccagttgcaggcgcaatatctgaaagccaccggcgacgtgctcggcggcggcctggcggaagtgcgggccaacatcgccgagatgcgcaaggaattcacccagaccggcaacaccgaggggctggcctggctggataagttgctgccggtgcaggaagccaaggtgcgcgccgatgcgctcaaaaagagcctggatgacctgcagacctaccgcagccagaaagagagcagcatccaggcgcaggtgcaagcgggcctcatctcagaactgcagggccgccggcagctggtcgcattgcatcaggaagtcggcagcaaaatcaccgagagcctgccgcaactgcgtgaaatggcggcattgcctggcgaagccggcgagcagatgcgcgacctgttggccaacctggaaaacgagctgataacgctgaaatccaccacggacgacctgacggccgcgtttaaagacgggctgcaggatggcatggaaagcacgctcaacgggctggccgatggcacgctaaacctcagtgatgcagtgttaaacctggctaaatcggtcgccaatgccatggcgcaagtcgcatcacgcaacctggccggcatggcgatggaggggctcggcagcgtgaccgacagtctcaaggggctgctaggtctcggggccagtacggccggcaatgctgccggcaccgctgttaatgcagccaccgataccgcgaccgatgctgccggtgcgaccacctacgcgacggccatcaccaccgcctccacggcgggtgccaccgccatgggcacctcaatcacagccggcagcacggcgctgacgggcgggttcaccacggcgctgaccaccggcatcacggcactcaccacggcgttgacgactgcattcacgaccggcgcggcaacgctggcctcggccattgcgtccgccagcgccgccggcagcgcgtcatccggcctgggtgcggctgccagcgtggcggccgcgaccggtggccaggtaaccggtcctggcaccggcacctccgacagcatcgcggctcgcctgtccaacggggagtttgtcatgaagactgccgctgtccagcgctatggcgtggacttcatgcacgcggttaaccagggccggcttggcgcgttcgcggatggcgggctggtctccgaccccggctttagtcgcgcggccggggttaatcaatccgttaaccctgatgcaccgggtgcgcaaggtgccggcggcggtacgaccaacctgcaacagtacctggtgctcgatccgaacgagatgctggatagagccgtgaaaagcgcgccaggcaaccgcgtcatgatgacctgggtcaaggccaatactgcgacgctcaagcaactgctgggggggaaatga

SEQ ID NO: 273117 - DNA, 1176 bp, Klebsiella pneumoniae
atgatggccgttcgtctcccgtggttgatggagcctgattgggccgagggtgtcagtgaaaccctgtcctggaaaacggacgtcctgatctccccgtccggggcagaacagcgcattgcccgacgtctgtcgccgcgccggctgtatgagtttaccgtgcttgccggcaatgccgacgcccgcgcgttggagacccagctttttcatgccggtggcgtcacctgggatatgccggtatttcctgacgttgcggttttggctaccccagtcacagccggcagccaggttatcgccgtgccgaccgccggccgtgattttgtcgtgggcgataacctgctgcttaaacagggtttagggatgttggccaaccaggccgtcgcgcagatccagagcatcgatgccggcagcatcaccgtcgcggccccattaggcgcatggcctgccggcacttgggtgtatccgctacggccggccgtctttaccgatacgccggctatcacccgtcacagtgacagcctgatgcgtctgcagctgcgctttcgcctggcggcgcataacccgtttgcgccggcgatgaatgccgtcctctatcgcgggcatcccgtgcttgaacaagacgccgactgggttgatgacctgacggccgagtatcagcgccagctcctggagctggacaacgaggtgggcattccctaccgcaccgacaccgccggccgggcctttatcatgcagcagcatgtgtggtctgaaatcggccgtcaggcccaggcaaggctacgcggccagctctattacctgcgcggtcgccagcgtgcgatttgggtcgccagccaggcgcaggacttcatccccgtgcggactgtcggcaatgcgttggttgtggcggttgccggctttagtgagttcggtgtggtgcctggccggcgtgacctgcgtctgcagttggtcgatggcactcgcgtttatcgccgtatcctcaccgccacgcgccagagtgattacgagctgctggcgctggacggtgacgttccgccggcggattccatcagccaggtgtcattgatggcgctttgtcgccagaacacagacgacatcacatgggaacacacgaccgatgcggacgggtttgcccaggtatcaaccacattccgagggctacgcgatgagctggagtga

SEQ ID NO: 273118 - DNA, 816 bp, Klebsiella pneumoniae
atgagctggagtgattttgagtattccaccgccaacggccagccggtcacgctctatgagttcgtgcggggcgatacgcagtttttccgctacaccaacgccgatcaggatatcaacgccgccggtgccgtctggcagcagcaggcgatcagtgatggcggtctgagcgtcggtgccggcgacagcatggacattacgctgcctaccaccaacccggtggccatgctctttcgcggtctgccaccgtcccagccggtgcgcgttcgtattcatcgctggcacgtcggcgacagccagggcgagttccgcaccgtctggatcggctccattaccgaggtcaagcgcgaggcgatagaccgcactcggctggtcaccgccagtctggccagcacattcacccgcagcggcctgcgcctgacctgggggcgcgcctgtccgtattcgctgtatgaccacaattgcaaggtgtcgccggcagcgttcggcgtcggcggcctggttatcagcgcgctcgatggggtgagtatcaccgtcaatctgccggccggctcccctgacggttggttttccggtgggtatctggaatggctggcggatggcgtgacagaacggcgcgggctacgcgcgcagagtggcaacgtgctggggctgttcggcggctcggccgggctaagcgttggccaggtggtggcggtttttccaggatgcgatcgcaccatcgcgacctgtaacgacaagtttaacaacgtcctgaactacggcggccagcctcatatgccgggcaagtcgccgtatcagatcatcaaactgttttga

SEQ ID NO: 273119 - DNA, 204 bp, Klebsiella pneumoniae
atgttgattacgatggaagatattcgcgccggcggcggttgtgcgcctggtctgcgcgccttctttgcccgctatgggctagaccttaaagccttcatccgtgatggcggtatcgatgccgagctactggccggcaccggcgacgccctggccatcaagattgtgcgcctggcgcaatccaaatctgagccggaggccaactga

SEQ ID NO: 273120 - DNA, 2286 bp, Klebsiella pneumoniae
atgggaggcggtggcaaggggtcgaagaaagtcacggtgggctacagatattcctgggatatccaggcaggcattggccgtggcccggtcaatgagattgtggccatcagcgccgataagaaaacggtgtttgccggcacgcccggccaggttgccggcaacacgtcgctttacatcgacaagcctaatctgttcgggggtgaagacaccggcggtgaaggcggtatccagggaacacttgaagtgatgatgggcggccctgaccaggtgccgtctccctcattattgacattactcacggggttagtgccgggttttcgggggctggtcaccaccttctttagcgggttggtcagctgctacagcgcctcacctaagccgtggtcttaccgcgttcgccgcaccacgcaaggctgggatgggccggtgtggtatccggagaaggcgcttattctgctgcagaataccgaggggcagcttgatgacgaggccgacctgaccgctgaacagattgccaacctgcgtgcgatccacgccatgaacccggcgcacatcctggttgagtgcgcgctcaatcgtgactggggacgcgggcttgtgctgggcgacctgaacattgacagctaccgcatcgcagctgaccggctctatgacgaagggtttggcctctgttttcgctacaaccgccaggacgacctaaacacgtttgtgcagcaagtcctggatcatatcggcgcagcccaatacggtgacctgagcaccggcaaactgacgctcaagctgctacgcgacgattacgaccccaataccttgccgctgtttacctacgacaacggcatcgtgggtgtgcaggacgacgacagcaccagcgccgacgcggccccgaatgaaattgtggtgacgtaccgcgacccggtgaccaacagcgaaggcgaagtgcgcgcgcagaacctgggggcgatccagaacgtggggttgatatcagagagtgtcgaatacaaagcggtgccgacccacgcgctgggcgcgaggttggcgcagcgtgaccttgaaacccgcgcggccggattgaccaggctgataatcaatttcgaccgacgcggcggcgtgctgacgccggccggcgtttttcgcatcagcttgccagagcgcaacatcggcaacatggtgatgcgggttggaaagattgaagaacaggacaccggagagttgaaggtgaccgccattcaggatgtgttcgggatgccgagcacgtcgtacagcagcggcgaacaaggcagcacctggtcaccaccggacaagacggcacgccccgttactgatagccagctccttgaactgccctatatcgtcctggctgccaccgtcgggccggcggagctggcggccattcccccggaagccggttacctgggcgtgatggccagtgcgcccagcagcgcctccatcaactacctgctgcagacgcgcgccgacggtgtgaactggcgcggtaatcttaacggcgattggacaccagccgttacgttaacgcagcctgcaggtcgctttgataccacctttaaggcgtcattaaccacgctgccggctgtgggggccggagcaattatcggtgatgagattgttcgtatcgatgccgccgatctggcgaccgggacgttgaccgtcgggcgtggctgtgccgatacgctgccagctggccatctggccggcgcgcagctgcgtttcttccaggatgcgattgaaagtgatgggttggaatatctggagggagaaacggtagacgttcgtttgttgacgagaacggcacaagaaacactcgctgccggcgctgcacctgttaaccatttgacgcttcaggcacgccaggcaaaaccctatttgccggcaaatattcgtttaaatgacgaaccttatcccctcgttgcagaaccggcagcggaatatattttaacctggtctcaccgtgacaggcaattacaagctgaccggttaattgattatctcgatagcagtattggccctgagtcgggggtggtttatgtaattacactcgttcgccctgataccggggatatcgtctggacaacaaataccgttgaagcgacattgacgctgccgtattcgtccgcgatctcccccttaaatcgggttcacacggtcagtatagaagccaggcgtggcgatattgcatcgctgagcaattggatcatcacattaccaacaggccactatgttgaacctactccggagccggagccgcaaccggaagaacctgcggcataa

SEQ ID NO: 273121 - DNA, 801 bp, Klebsiella pneumoniae
atgagtgatttttattacggtcaagggaaactttacctggctcgtcgaaattcggcgggccaggctttatcgtggcgatgggttggtgatgtttcggcgctggctattgaaatagagtttgatgagaagaaaaccaaaatgtcgctgggtggtcggttgattgactcgcagcgctatatcacctctgccagcgccaaagtgacatcaacatggcatgagtattcgacagaaaacttgcaattgctctttcttttcggtgcgactaaccaggcatccgcgattgtgacgggcgaacttttacctgccgacattaaagcgggagataccatttcattacgccatcagaatgtattcagcgttgtcctgcattcgcttgtcgctggcgtggactatttaattgatccgctttggggggttattcgctttatcaaaacccctgcccagcagccggttattgccgactatgcccatatcggttacgcgacaatcccattactgaatgatgatgagccggagttttgtctgcgttatgagggcatcaaccttgccgagaaaaacgaaaatattttggttgaattgtatcgcgttaaattcgacccggttgaaaagatggatttaatcaacaacgagcaagatttagcagcattggaaaccagtgccacgacgttgctcgatgcctcaaaaataattgacccgaacttagggcaattggggcgaattgttaagtttagaaaaacaaatgggatcacccacaacggcgccattttacacaatggtttttatacccacgggggaaattaa

SEQ ID NO: 273122 - DNA, 2343 bp, Klebsiella pneumoniae
atgccgaagacgttacctgaaagccctgagtgggtagacggtatttaccaggtagaattagacacccccgtgctcggcggggatggcgggcctgacaattggcaggctcaacaactggctaaccgtacttcctatctcaaacagcgcaccgacatgattgatgaccgcctgcagtccgcgacaggggattatgcctctgtcgcggaggcacaggccgccatcgacagcggcagcgaaacacgccgttattttaacgtgatgctgtttgataataactgggttgagcgttatgaaaatgtcaatggcgtggcaacgccaaccggcattcgcttgccaagtagccaggccgttgatgaattgagcgcgtcacttgatgaggctaacgcacttattgcgcgattaacgctgctgacggccccgctgcgtaaatacatttccactaaatataccttttcggtcaataccgccgaaggcccggtatctaccggacttgcactcgacagggatatggggctatggcttcctgggttgaaagcggaattgcagcaatatgtacagcagttaatcccgtggtcaattgcgaatcgctatccgggctatcaattaatgttcacggatgtgaccggaaaaaaaggaattgtttcgattgatgataatggcgatgtgcgtgtgctcggtatcgatgacgttttgcaagagcgtctggccgcgctgtgctcatcgacatttgcacgacgcattaacgggttccagttcgttattttttcatccgacctcaaatcggcgttgtttgccattgatgatgatggcggggtacatattccgggcatcaaaggcgcgctgcaggataacctgggtcaacaacctgcacgtattacgccgtatcagggcttgcctgccgtgtactggaatgatgcgttgttgtggcatgaacgtcccgttctgagcgtaaaccaggtatcggccaccggcctgtcgatgacctacatcccaggcggccaaatcaccaaaggttacgggatgatgtattaccggggtggcgctgaaatctcgccggaggcgatgaaagcgttaatcctttgcagcgacggccaatcgctcggtgtgccgagtgatgccggtaaccggccgaatccgaatacctggaacaaggttaactacgacccgaaatggcgcgcctatgcgctggccatcgccggaggtaaacccgagggcagccaggacacgccgatcaccgaggccatgctggatttgctggccaatctggtttacccgctttaccgccaggggcaacagctgccgtttgtctatgcgctgctgtattcgcatgaaaatgctgacttgaatctgcctgttatgttcagcgcggttgccaacagcggcggcaagtcatttgcgcaaatctggaaaggcacagtgccttacagcaacggcctggcaatggtggagcgttatgtgaaaattgcccaggcgctgggcaagcccgccagcgttgatgtggtgtcgctggagcatggcgagacggataacgacaacggcacctcgcaaaacgtcggggattatcgggtgcgcatggaggcgtattacgcgctgcgccgtgctgattacaaggcgctgacagggcaaaccaccgagattctggcggttatcggtcaggtcggcagccgtatcaacacgaaagccggtggtgttgatgaacaggggaacccaacgggcgaaagcgtggttgttaagccgttctcagtggtcgcggttgaccagctccagttcgttaaaaacaacccgaccaacgcgattatgtacggcccgaaatatccgctgaactggctgtattcggacggctcgctgagtcacctggacaactgggggaaagtcctgcagggcgaatatcaagagcaggccattttctggcatttatatgaccccgcgcgtaaaggcacctggacggggctaaaaattaaaagcgtcacgctgacggataatatcgcagatttactttgtgacgtgccgtttgcgccaattgttatcgacgctgactttattgccgactgcctgaataaaggggtaggcctcgaaaataactcagccaccgtgcaaagcatcactatcgtcgatggcaatatcattcgtgtcgtatttgaccaggcaccggcggcaacggatgcactgctgatggggttcaccaacaccgcagaacattcaccagaaaacgactctgtttatccgttgacctgtttccgtgactcctcgccgcgcgtgtcgcggtgggtgacgcgcaacggttcaccattcccactctataactggatgtgcctcgaccgcatcccgctaacccaggagtaa

SEQ ID NO: 273123 - DNA, 909 bp, Klebsiella pneumoniae
atggctatcgctctcaacaccggtaaagtttatgcaggctttcgggagcctctcgatttgtcggcggacattcttgatgccaccgcgttatttaatgcctacaaagcccgcgtgcaggccgatggtggcattattccgaatgcggcgggctgcaaggaacgctttgagtttttggtcaataacggcatgtatgagaatgccgtgatgtgtgccgctcccgcctttggcgtcaaactgggcggcacagacggcaacgatgttctgaccgtttacagcctgctgggcgaaagcaccgacctgattccggtagcccagggaaccggtgatgccgttcggtatgactcaacgaataagacggccacggtacggatcacctccagcggcggcacctatctgcgcacacgcgagaatgtccgtgttcagattggccgcagctatatgattgccggtcggctcagtgacgcgagcaatgccgatgtgctggggatgactatcggcatctcgttatcaaacctgccgctggcgtacatgcgcacgatgataacaaaccagcaggccatcacggaggcctggcgttttggcacccgtgacagtgcctggacggggcctgttgccggtggggctgttggtgcggcagcaacgacgtatgcggattatgtgcctgcggcaggcctgttcaaagtcgatgagggggttgtttacgggtatacacgcgggaagctggacaagacggctacggccaccacgggcaagttggcagacctggtgaactataccgcgccgatcgttgttggtggcggtatggcatccggcaccgtatctccctgctacggctcgctgcttgatatgttgttcctgcatacggcatcggaaccggatgccgtattggcgtctcgttttggtatgtga

SEQ ID NO: 273124 - DNA, 141 bp, Klebsiella pneumoniae
gtgcgcgctgataaatcactcaagccatttgagatccgcttgtatcgccattatcgggtggtgcatggtgtgcggattgcgctggcctttgtgctcacttttttgctggtgcggctgctgaacgtgcctgagggaacctga

SEQ ID NO: 273125 - DNA, 1062 bp, Klebsiella pneumoniae
atggaggtaggtggtctctccatttccgatgacgaaattcatcacctcacattacaggcactgcataaatggattaaggttccggccagacgtgtgcgaatgcttgaagaagcactggcgaacatccgcacatcaaacgcaatgcctgaaaacccagagcaagatgatctgcaggacaaaacaaatcagatattagctgctaaccgtggcgaatatatcgaaggtatcagcgatcctaacgacgccaaatgggttacagaagatctaaccaaaactaattctaacgcagaggccaccagcgatgtgcagatggaagagaatttcggtaatgaaaccgaagttaataatgaaatttctgaaagcgaaacagcagttgagacaggtacaggtaatgctgacattggtagcgaaacaactaccataaatattgaatccggtcatcataatgatgttgaagaattaccagcagataatgttcacgtcatggttgaccttgaaaccatggggaataaacaagatgcccccatcgtcgctatcggcgcagtcgtgtttgatccggaaacaggctcaatcggagaaagattctacaaagtcgtaagcctggagtcctcagtgaattggggcgccaaaatggatccatctaccgtcatctggtggcttaagcaatcctctgaagcgcgttcggcaatcgtgaatgatgacgccatcccgctgcttgatgccttgctccagttcggtgaattcatttttgaaaatatccctggaggtcgtaaaaaagctcaggtctggggaaatggcgcatctttcgataattgtattctgcgttcttcatttgattacatctctgaagaatacccatgggaatactggaatgatcgcgatgttcgaacaattgtagagctcggtaaagcaattggaatcgatccgaagaaaaccatcccgtttgagggagaacggcataacgcccttgcggatgccatccaccaggcccggtatgtttctgcaatctggcagcgtctcattgagggtaatagagtgctgcaaaaactgactcaaaactga

SEQ ID NO: 273126 - DNA, 894 bp, Klebsiella pneumoniae
atgtctaaattgtgggcgcggtatgaagaagaaaaagcaaaacagcacgatattatgacgtttaccaaattatggcatctgttcacggccagtccggcattttgcgctttgtcgcctcgaacccagacagattatcgccaatacgaaaaaaatcttcttcccgtattcgggaatatgcgtgctgatgatatcaagattgaaatggtgcggatctatatggacaagcgtggcgaacgcagcataaaccaggcaaatcaggagttgggtggtatgtcccgtgtttatggctggggtttcgaaagggggtatgtgaaaggtaatccctgcaagggtgtccgaaaatttaccctcaaaccacgggaagtgtatgttactgatgaagagtacctggcgatctatgaggaagcttcgccggcgttgaaggttgggatggaaattgcttatctgtgcgctacccgtcttggcgatatattgtcattgacgtgggatcaggccagaaaggatggcttattcatccagcagggaaaaacagggaagaaacagttgaaggcatggacagaccgccttctgcatgcgcgtaatttggctgcaactctgggaggaaccgagtatgtggtttgcagcagcaagggggagaaatactcaaaaagtggatttagtgatttgtgggagaaagcgcgcgcagctgcttcagaaaagttaggacgcaaactcaaagtgacctttcacgatttgaaggcaaaaggcatttcagactacaaaggttcgagcagagataagcaacttttctccggccataagacagagagtcaggtgctggtatacgaccgcaaattgaccgtttcgccaacactggatctgccgattatcgaggattcggaacatgatgattga

SEQ ID NO: 273127 - DNA, 225 bp, Klebsiella pneumoniae
atggcgtatacccatttggcgctgatccacttatcggcgacgatgccgagcagcgtcggcatcaacaccgcggcgataccgagcgagctatacactgcgccgattgccgcgccgtcaaacttcagcgtgacaaacatgtacgagccaagcgtggtgagccagctcccccaaaggcagaactgcaggaacgacagtattttgagctgcagcttaagattcatgtag

SEQ ID NO: 273128 - DNA, 126 bp, Klebsiella pneumoniae
atggctatcaggtacaaagaaatcttgcttacaattaccaaacaggccgaggaaatcccggtgataaagattttattccaaaggacgaaacaaaagcgtgtgcttggagaaaaatcttactcatag

SEQ ID NO: 273129 - DNA, 234 bp, Klebsiella pneumoniae
atgtgccgtcatctgccggaaggcggcaaaatgaccctcaccaacttccactttacccattgggagaataaccatgtggtggagaagatcgattttgccgatgtctccgcgctatatgaagggctgcagacccgcttcggcctgggggtggacgatcctaaacatggcttcagcgaagcggcgctggcggcggtgatggcggcgttcgatacccatccggaagccgggaagtaa

SEQ ID NO: 273130 - DNA, 399 bp, Klebsiella pneumoniae
atgatgaaatcgaccggactctacagcggcctcaagctctttcatcgggtcagacatgttggtgtagttctggataatggttatagggttgagctgttcatcagcaagctgatgagaaaggtttgttgcaccgtgcgggtcaattgggctttgttcaaccggagtttgctgattatcacgcttggcatcttcaagtattactcggtaatcaatttccgcaccatcagtcacggtgatatatcctgcttcaacccatttacggtaacgctcagcggtgcggtgatcgtcaacatcgttgctgtatacggtgtcatacggaacatagaagcgcggagatatacagtaataatgccgtttcccatctatttcacgggtaatgctgccaacttactgatttag

SEQ ID NO: 273131 - DNA, 426 bp, Klebsiella pneumoniae
atggacgaattagacatttttatcggcggtcagtggcgtcgcggcggcggcaatttgatgcacagccagtttccggcggatggcgctattaacgcggcgctgcatgcggcaagcctcgatgatttacaggaggcgatcgactgtgccgaccgcgcctggcgggagccaacgtggcgggcgatgctgccgcatcagcgggcgaagatcctgcataaagtcgccgatctaattgaagcacagcttgatgagctcacccaaaagcagagccgcgataatggtaaaccgctggcggaagcgcgagggctggtgatgagcgcggcggggacggcgcgctattttgccgccgcctgtgaactgctggaaggcgagcagccgacgccgcggcaggcagatctattgaccctgagccgctatgagccgctatga

SEQ ID NO: 273132 - DNA, 480 bp, Klebsiella pneumoniae
atgagaaaccttatcggcaaaattcgcattatcataacgagtgggatctgtttgattatgactttgccaactaaaacgtcagccttggatgtggctgcacagtgcttcctgaattccctggttcgtgaaaccaaagactggcgactgacggaataccagccaaccgaattgatcatcccgctggacgaacagcaggcgctccatttcagagtggcttatttttccccaacccagcatcaccgctttgaatttccggcgcgtctggtcacggcctccggcagtcaccccgtcgatttcgccaccctctcccggcttattgttgataagctccagcaccaactcttgctgcccgcgaccagttgcgaaaccttccaccagcgcgtgatggaaagccacgcccatacgcagcaggcgattgatgcccgccatgactgggcagccctgcgtgaaaaagcgttgaactttggcgaggcggagtag

SEQ ID NO: 273133 - DNA, 213 bp, Klebsiella pneumoniae
atggccatttttgaattcaaccgtgtcgttaatcgcgttgacatcagtaaccacaaagtcacggtactggtccagaccattgctaagatcaaaaagattatcgcccttagtaaccttcttgggtatgcgtttaatgccattttgttgtttaacttcgatctcaatgcgagccactggcatttttttcgagatctcgatggattccaaatatag

SEQ ID NO: 273134 - DNA, 804 bp, Klebsiella pneumoniae
atggcaccaacttctattcttttttataaagaagtagggcacagtcaagaaggtgcaaaagaagttgttagtttatttgagggcaatggacaatttgatggtcctaaacctgtgcgacttttaagacgtttaattaatctctcaaatgctagtaataatgatattgttcttgatttttttgcaggctcaagttccaccgctcacgcagttttacaggggaattctgaagaaggaactaatagaaagtttatcatgatccaactacctgaagagtgtgatgtgaaatctgatgcttataagtccggttttaaaaatattgcggagatttcaaaagaacgcattcgtagagcaggaaacaaaattttaggaagtgattgccacgaagcctggaataaagatgttggttttcgagttcttcaagttgatacctcgaatatgtcggatgtgtactactcaccagatcaggtttctcagggttcgttagacttattggtagataatattaagactgaccgcactgatgaagatttactcttccaagtgctgctggattggggcgtcgatttaaccttaccaatcagaaaagaaacgattcaaggcaaaaccgttttctttgttgatgatgatgcgttggtggcctgttttgatctgcgcataaatgaagctttgattaaagagttagccacaaaagaaccacttcgcgtagtgttccgtgatgacggctttgagtctgatgcagtaaaaattaatgccgagcagattttcaagcaagtgtcgccacatactgaagttaaagcgatataa

SEQ ID NO: 273135 - DNA, 969 bp, Klebsiella pneumoniae
  misc_feature (921)..(930): n is a, c, g, or t
atggataaattaaagatgcacagccccgacatgacgcagcaaaacatagagaaaattcaggcgttgtttccgaactgcgtgacggaatcaaaaggggccgacggagagctaaagttagccattgattttgaccaacttaaacaagagctatcaaattcaatcgttgaaggcccgcaagagcgctatcagctgaactggcccggtaagcgagaagcactactaacagcgaatgcacctattgccaagaccttaagaccctgtcgagaagaaagtgtcaattttgacaccactgaaaacctctttattgaaggtgataatcttgatgcgctaaagatgttgcaagaaacatatttagggaaggtcaaaatgatttacattgacccaccatataatacggggaatgactttatctacagcgatgatttttcagaaaaaaatgatgagtttttattaaaatccaatcaggttgatattgatgggaataggcttgtagccaataaagatacaaatggtcgatttcattcagattggcttagtatgatgtttcctagattaaagctggcaagaaatttattacgaaatgacggtgttatatttttaagtattgatgaaaaagaggttcataacctccgtaagctatgcgatgagatatttggttcttcaaacttcatcgcggagttgatttgggagagagcctatgcgccaaaaaatgacgctaagtttatatcaaatagtcatgattacatacttatgtatgcaaaagaggctaacgattttaccataggtagattgccacgtactgaagaggctaatgcaagatataagaaccctgataatgacccacgaggcgtatggaagccaagtgatatctcggttaagacctataatgctgacaatgattatcccataacaacgccatcnnnnnnnnnnaggtcgctgttggaggctttcaaagaaagcattttctga

SEQ ID NO: 273136 - DNA, 687 bp, Klebsiella pneumoniae
atgaactcaccttggatatttcctgacaaagcaaagttcggtcgagtcgttccgaagaacaaaatatacgaacacagcgctgtaagcgctgggttgaagtcactttttgtagagcaaatagaccaaatcctttgggcttacaagctatcgcccaacacactgaatattcctcacactagtgaggtcagtgaaatacaggttttcactgtgaagcttaaaggtgactcgatagatgacagcgtactcaaagcgattgatttggcgataccttttcccattctatttgaggtatggcttgccggtggtgagcaaggccactacgccgcttgctataagcgtaaggcagagaacgatcagtccaaatggttttgtagccgttatttacactcagaaaccttcaatacaggtgatgcattaacagtgacttcagaaattttgggtttgcctaccgcaatcgatatggcggagttgtatcaaaagcttcttactcgcttgttacccatacccaaacgaacagctgagagtattgaagaggtcattgaacgcttggtggcaattcagacattggaaaagcaaatctcgcagtatcggaagaaggttcatgctgagaaacagtttaaccgcaaggttgagctcaataagcagttaaagaatttaaggtgcgagctcaaagagttgctcgtataa

SEQ ID NO: 273137 - DNA, 2829 bp, Klebsiella pneumoniae
atgaaaataatcgataaccttaacaacctattaggtgacgagcttcaacagacgctgacaccgaatacaaagttaaagattgctgcgtcttgcttttctatttatgcgtatgaggctctcaaaaaggagttagcgaagatagactcacttgagttcatcttcacatcacctacttttgtcgcagatgaagttaccgataaattcaaaaaagaaaaacgagagttctttattcccaaagcagggcgtgaacgcagcctttacggaactgactttgaaatacagttaaagaacaagctcactcaaaaggcgatcgccaaagagtgtgcaaactggatcagaaagaaagcgacattcaaatcaaacaaaacagattctccaatgcagtcgtttgttgtggcggaagcacctagacagcaaacagagacaatgagtgcagtttttgctccggttagcgggtttacggcggttgatctagggtatcagcgaggaaacgctatttcgaattttgtgcaaaaaatcgatgagccaaatttcacagcgcagtacttacagttattcgaccaaatttggaaagaccctgcgaagcttcaagatgttactaaaacaatttgcgagcatatagagtctgtctaccaggaaaactcgcctgaaaaagtctatttcattattttgtataacatttttaatgaattccttgatgatattacagaggatgtattaccaaatgatcgaaccggctatcaggacaccttgatttggaacaagttatttaactatcaaaaagatgctgcgaccgggatcatcaataagttagagacctataacggctgcattctggctgatagtgttggtcttggtaaaacatttacagcgttagctgtcatcaagtattacgagctcagaaacaaatcagtgctgcttctatgtccgaaaaagttagcggataactggctcaactttaatcgaaacctaaaaacaaatatctttgctaaagaccgttttagttacgatgttttgtgtcacacagatttgagccgaacctctggcgaatccttcggtactccgttgaatagaatcaactggggtaactatgacctggtcgtcattgatgagtcgcataactttagaaataacgatgcagtgaaagatcgagaaactcgatatcagaaactgatgaataaagttattcgcgctggcgtgaaaaccaaagtcctgatgctatcagctacaccagtgaataacagatttactgacctaagaaaccagcttgcgctagcttatgaaggtgagtcgagcaatctcacaaagcatcttaaaaccacaaaaagcgtagagcagatattcaaccaagcacaagctgcatttaacgcttggtccaaactagaccctgagacgagaacagctaaagccatactcgatgccttggattttgacttttttgaactgcttgatagcgtcactatcgctcgctcacgaaagcacatcacaactttctacgacacaacagatattggccatttccctgaacgtaacaagccaatctcgtttcattgtccgcttactactcgttcggatgtagttagcctgaatgagatctttgaacagcttaagctactcaagctatctgtttatgcgccagtgagttatatcctcccgagtagattgaagaaatacgaggagatgtatgacacgcaagttgaaggcggaaaaggtaagttaaagcaaagcgaccgtgaaaaaagcttggttgcattgatgacaacgaaccttctaaagcgtcttgagagctccgtatactcgttcagaagcaccttgcaatctctccatgataaccatgttcgtgttcttggcattatcgacgaattttataagcgagacgggcaaactgaagtgagcagtctggttgaagcgctagagtctattgaagcagatgaagacgatatgccttcttatcacgatatggaaatcggcaacaagatcaaaatcaagctgatggatatggatcttccatcctggcagcaggatttagatggcgatttggagctgatcaaagggttactagattctgttagcaaaattaagccagaagaagatgctaagttgcagcatctgaaatcacatattgctgcaaaaataaataatccgataaatcctgggaacaggaaaattatcgtgttcacggcgtttgctgacaccgctcaatatctgtacgaacagttgtcacctgtgatgctaagcgagcatagaatacatactgcgatgatcactggtggtgccagtttacctaagaccaccttaaaaaccggacgaaaaggttacgacacacaagaagtgctcaccttgttttcgccagtttccaaatcgaaagcaagtgtattacctgacgaacccgctgaaatcgatttgttgattgctacagactgtatctctgaaggacagaacttacaggactgtgattacttaattaactttgatattcattggaatccagttcggattgttcagcgctttgggcgagttgaccgtattggctcgccgaataaatgtattcagttagttaactactggcctgatatatcgctggatgagtacatcaacttaaaagaacgtgttgaaagtcgaatgacgattgttgacgtgacagcgaccggtgatgataacgtcttaagtagtcaagcgaatgatgtgtcgtaccgtaaagagcagttaaagaagctgcaagaagaagtcattgagcttgaagatttaaaaacgggggtctctatcaccgatctaggtctaaacgaatttcggatggacctacttaatttaatgaaactctacggctaa

SEQ ID NO: 273138 - DNA, 804 bp, Klebsiella pneumoniae
gtgcgggcggatttagtcgatcacttcagtatagccgccgcacaagcaacgaaagacttcacaatgtatcgagagcttgcgccaggcaacattgagtatgaccaaaagctcaagttgcataagcgtggtgaagcttttgaacccttgttcgactatgacgttgtgagaacactggcaaccattagccaagggtacggtgatggcttcactggaaaggtaaaaccccctctggcttgtgaagcgccttatcaccttaacaagccgagtttatcgatagtagcgaaagtcaccgaggccatacacaaaggcaaagccttgagtatcacctatgtatcgttatcgagcggtgaaaccacgcgtgaaattgtaccgcatacgctggtggacaatggcctgcgttggcatgttcgtggttttgaccgcaagcatagcgagttccgtgactttgtactgacccgcattaaagcagcggttgtgattgaggattcgacgttgtctgaaacggagctcgaaacccaagaccggcaatggaatcgctttgtagagctagagttagtgccgcatcctcgtattgagcacagcgaagcgatagagttggactatggcatgaaatgtggcgttttaaagattgagattagagcggcaacggcaggctatttactcagacgatggaatgtggattgttcttccaacgccacactaaaagatggtggagctcaattgcatttaaagaacagagcaacactttatggagttaaaaacatcatgctagctccagggattgaaaaagaacttggtaactaa

SEQ ID NO: 273139 - DNA, 909 bp, Klebsiella pneumoniae
atgacaagagcccctgcgccatttccgctagagcgcctcgcggatatcccagaaagaccagaggattttagattgctggaacggattccattaacgcgtgaaccgcagacttggccacttgaactttctcctatggtcggtgatgaacagccaatggtgctgctcgatacagagacaaccggactgtctgccgatgatgagtccattattgagcttggtatggttaaggtgctttacagcccctctgctcagcggattgtgtcgattgttgatgtgatcagcctgtatgaagatcctggcaagccaatccctgacctgattaccgagttaaccggtatcaccgatgacatggtgcaaggccagcacattgatgattcactggtagcgagttggttatccgatgatccgctggtggttgcacacaatgcacagtttgatcgtcctttctttgaaaagcggtttgctgcattaggccatctatcttgggcctgttcagccagtggcatagattggaaggcgctgggttttgaaagtcgaaagcttgagtacctgctgcttcgcttaggttggttctatgaaggacaccgagctgcaaccgattgtttggcgatggcttggttgtttcatttgttgcccgagtccgttgcaaacttgttgtctgaagcagacaggcgaactgtgttagttcgtgcgtttggtgcgccgtttgacgtaaaggactatttaaaagagcgtggttaccgctggcatgacggtgttaaaggtgccaacaaacattggtggcgcgaaatcagtgaagacgagttgccacaggaacaaacttacctggatgatttgtaccatcgtggctcagaacatgcccactatgactacaaagatgcccgcaatcgatttaaggctttatcatag

SEQ ID NO: 273140 - DNA, 450 bp, Klebsiella pneumoniae
atgagtgtctcgctgataggccgtagcggcgcacttgccttcatcaaagccaagcgccttcgtattccattgttcatggaacgtgtttctgctggttttccctccccagcgcaggattatgttgagcaaacgctcgacctcaacgagctgtgcatcaagcgaccggctgcaacgttctttgtgcgtgttgaaggtgattcaatgattgatgctgggattcacccagatgatattttggtggttgatcgctctgtccaagccgaacacggtgacattgtcatcgcgggtatccatggtgagctcacggtaaaggagcttcaactcaggccgtgcgtcaagctgatcccaagaaatcgggcgtatgaacccatccatattcccgaagggacagagttagagatatttggtgtggtcaccaatgtggtgcgaaacatgcgccgcaagtcgtga

SEQ ID NO: 273141 - DNA, 1269 bp, Klebsiella pneumoniae
atgcctgtatttgccttggtggactgcaacaacttttacgccagttgtgagaagctgtttcgtcctgatttaaaagatacgccggttgtggtgctgtccaacaatgacggctgcgtggttgcacggtcgcgtgaagctaagttactcggtattaaaatgggcgtacccgtctttcagatcaaagctgaaatgcagcgccatggcattttggcattctcgtccaattacgcgctgtacgcagatttgagcagtcgagtgatgcgcactttggaggagatggcaccacgagtagaggtttactccattgacgaagcgtttttagatttaaccggtatagagtctgccatatctcttgtcgagttcggacaacaagtgcgagagcgcataggccactggattgggatcaccgtctgtgtaggcattgcaccgacaaaaacactcgccaaactggcaaaccatgccgccaaaaagtatccagccactcagggcgttgtagacctgaccaatccagatcggcaacgtcgattgctcgcattagtcccagttgatgatgtttggggcgttggtaaacggctttctaagcgtttaaatgcgttgggtatcaccacagccttagacctagccaacgcctctcctagagccatcagagaccagttttcagtagttttagagagaactgtcagagagctaaatggtgagtcgtgtattgaacttgaagagatctcgccaactaagaaacaaatcgtctgtagccgttcatttggcgtaaaagtaacgcaatttgaattgttacgtgaagccgtatgcgaatacgcaacccgcgccactgagaagcttcgcaaagaacagcagcaagccaaagtgctgaccgtgtttatacgtaccagcccctttaaggacaacgagcctcagtacagcaactctgcatcgggtgagttactgatccccagttgcgatacgcgggattttatcgagctggccaatcacttactcaagcgaatttggaaggatggttttcgttatgccaaagcgggcgtcatgctgtctgacttttacgatcctggcatgtttcaaccaggactattcgatgacgtatcgacccgctccaatagccaacagttaatgtctgtattggacaccattaatcaaagcggtgccggaaaggttttctttgctggacaaggtacgaagaaagattggtcgatgaagcgagagcatttgtctcccgcctacacaacacgctgggaccagttaccgcgagtgaaataa

SEQ ID NO: 273142 - DNA, 666 bp, Klebsiella pneumoniae
atggcaaggaacaaaaaaaataatcgatatagttatgtgcaaaagcaggcagagcacactaaattttacaacaaaaacttcaataaaacttcgagttttagttccgtattcagcgggtcacatttcaaaaatacatctctggttggtgcaaagttcaaatattgcaatctcaataatgtgagatttgaaaactgttttttacagggagctcattttaaaaagtgtacacatgacggccttaagtttgaaagatgcatattgatttcaacttcctttgagcgtatgcagttacatggtgtcgaatttgttgattgttatattttaagtactaacactcatgcatgtaagcagtttcaaaacagcaaggtatataacagttttcctgatggtgctcagtatccttctgatttaatgagtattgttgatgttttgagagagaattcttgtataagaaaatccggggtgcttcataggaagggcggcaaagtaaatacaattgcactggattttttgcttgatgaattcggagttaactacctaatcaataacttgtctaagctaaacacactagagtccggtttctatacattgagttatatttcggcattcttgcggagggttggaaatcctgatagcttagacattacccggcccacagcaacatag

SEQ ID NO: 273143 - DNA, 426 bp, Klebsiella pneumoniae
ttggtagaaatcgtcaatgaacaatggaaagcagaggtaacagatttacttcagcaagaaacggacaggctaaaagcgctggcacgagctgaagttgatgacttttgggttacccattacaaggttcgagagaatgagccctttaaagactggggtctgcttggtgtccgtatcagagactttaagtatggctttggcatagagtggtacatcaacagctttcacggtcaacgaggcaagcgcgtggtctttagcaagggactgcgtatttcaaagacgaagctgagatactcatttttggactgccaaggtctagccaaagaatgggagttagcgctggccatggagaaagaagaattcttcagtgatattcgacgccaggttgataagctcaacatgcttcgtcgaagagtcaatgcatattga

SEQ ID NO: 273144 - DNA, 975 bp, Klebsiella pneumoniae
atgtttgtactaggcgtagatatcggttactcaaacctgaagctggcaattggccaatcaggcagtgaaccgaaaaccattattttgcctgcgggtgccggtcctgcggatcgtatgccagagcgtatcggtggaggcgatgatgacacttgtttgtatgtgtctgtcgataatgagcgttgggccgctggtgttcctgctggacgccttcaaggctgggaacgagagcttcacccggaatatccgaccacaaaaacctataaggcgctttttcatgccgccttgttaatggctgaaacagaatccatcgatttggttgtcactggattaccggtttcccagtttcatgaaccacaacgtaagtctgaccttgtacagcgtttaaaaggtgtccatcaagtgacgccaaagcgcagcatcaccgttcatgacgtcaaagtgctgccgcagcctgccggtgcctatatggatctggttcaaacaggtggtgatttgggcttgattgaagaaggtcgcgtcgttgtcatagatcccggctttttttctgttgactgggttgcccttgaggccggagaaattcgctacagctcatcaggaaccagtcttcaagcaatgtccgtgctactggaaactattgataagctgatttcggaagatcacggtgccaaagtaggtatggatcgacttgaaaaagccatgagaaccggcgacttgcaggtgctgctgtttggagaaaaggtcgatatttcaccttatctaaatgctgccatgaaaaaggtagcgcctgttgctcttacagccatgcgccaatccatgcgtgacgaaagcatcaatgcggacttggttttgatcgccggagggggagccttggcttataaggaagcggccaaagagattttttcacgaagcaagatcatcgtgccggaacagtctgttttggcgaacgtccgaggcttctggttttatggggcctga

SEQ ID NO: 273145 - DNA, 1227 bp, Klebsiella pneumoniae
atggcgttatcagttagctggctcgatgccaggttaaataaagaagcaaaagaaaccgtagtaaaagccgaccgagatgggctaagtgctcgggtatcgcccaagggcaaaattgtttttcagtttcgttatcgtttcgatggcaaacaacagcgggtagacattggtacttacccacttatgaagcttgctgaagccaggaatgagctggataggttaagggcagtacttgatcaaggccgaaaccccaagctctacctacagcaggaacgggctaagtattctgccaatcaaagcttcgaatcgatttttcgagactggatagactctgccggtaagcaagggctaaaggagaaaacgtggcactaccaaaaacgcagcagtgaaatatatttgctgccccgacttggcaagtacccattaactgacatcaatgaattgtccttgcgaaactgtcttcgtgaggtttcggagtcgtccccttcaaacacagaacgtctggtgtctgtgctgcacaagttttatgactggctgattgatgaacaaattttggaaattaacgctgccgctgggatcacagcaaaaaaggttggcggtaagaaaggaaaacgaactcgggtgctaaatgacaacgagatcaggatactttggcgctatttgcatgagtcaaaaatcactgagaagaatcgcatctacataaaactgcttctcttattgggagggcgcaagggcgaactcattcaagctgaaaagcatcactttgacttgcaatctgcaatgtggacagtgcccatagagatccgcaaacaaggtgagaaaattggagcgccgatcatgcggccattgataaggcctgctattgagctgattgaactagcgatgcagatgagcaaatcaacttacttgtttcccgcgaacggacaagaagagcttgccacaaatggctttgataccactattcctaacaatgtgaaaatctgggctcgcaggtcgcttggtattgagatggaacactggtctatgcatgatcttcgcagaacgatgcgaacgcgaatgtctgccatcacgacgcaagaagttgccgagttgatgattggccacagcaaaaaagggttggatgctatctacaaccaatatcagtacctggatgaaatgcgtcatgcttacgacgtttggtatcaacagctagagaccatcatcgaggagcctgtacatagatttgtgtaa

SEQ ID NO: 273146 - DNA, 147 bp, Klebsiella pneumoniae; identical to SEQ ID NO: 84866

SEQ ID NO: 273147 - DNA, 834 bp, Klebsiella pneumoniae
atgagagaggaaaccacgattcgcatccgggcattccgccaggctctggaaaaggctgtccgggagctgccggatgaatacaggaacggatcacgctggtgtgaactgaaaagcttcccggccggcagctgcgacctggccagtaattgcctggcgcaataccttaaagattgcggagaaagaggggagcctagcattctgtttatgtgcgggaatgagactttccgtgaggaagaaaattccactgttcatggccatgtcatcgtcatacttgacggtgagtacatcgacctgacgctcgatcagtttgatgaatatacggactacatactggctgagccactcgaaaccggcggcgtacttggcacgctgctgagaaaaatcccgcagtatgaaggagaaatagagacccgccggataaacctcgatcgcctccagggaatttacgcatggttacggaaccgcgccgacgcaatactgaaagcagatcctgaatggcagggctgggaacggtcgatagaagaggcaagggaagccgcggttaaggcgttcccgtttctgtctgacacgcaaataactgggagcgaacagatccaggcagatacggcatctcacgtctctgcacagaaaaaccggcagccaatgacgcatgtgggggtcattacagaatgctaccggccccgcgaggtcaggctgcgggaaaccggcacccagtgggtcagcgagtgcggcctgcgcttcagaaagtccaccggcgcagcggtcggaagcggtgtctggagtgcaaaccgtctcgatttaaagagcatacggaaaatccagtctgaagattaa

SEQ ID NO: 273148 - DNA, 1122 bp, Klebsiella pneumoniae
gtggatgaaaccggtcataccggtccgaatctttttgaccgcacccagcctgtgctttcctacggcgtgctttcctcacaggatgacctggacaaggttgccgaagcagatcttgctgccttgcgtaagaaactgggagtacagcgcctgcacgccgcagaactgggcatgcaccgccttgatgaggtggttgatacgctgcttgtcctgcagaagaagcaccgaatacggtttgatgtctggcaggtggttaaacgggatcacgccattatttcgttctttgatcaggtgttcgatcagggactgaatccggtggtgccctggactgcttactggacacccctgcggtacccgctgctgctgaatctgtcaaacctgttcgatgatgaactggctgaaaaagcgtggcgtgcccgtcacgaagcccatgatgagcgttcctcatccctgttcagtgaggtctgcagggcgttactttcgcgagtccatactctgggcgatccccgttttactgaactgattaccgatgcgttgtcctgggcgatggtccactttgacaaactgggatataactgcaaaaccggtaaggaaaagctgcagatcatgcccaacatgatcgggttccagtcagtgttgcacggtatctgttcccgactgggggcaccgaataaaaaagctgaaatcattgtggaccagcagtcgcagttcaacaccacccagcgggagctgagccagttctattaccagatccgcgaacagccctgggtactcggacccggtttaccggttatggatatgaagaacatgccggccaaaccgctggtcttccagtcgggtacaaaaagtgcaggactggagctggttgatatatatctctggatcttcaaacgctttatggaagggaaagagctgaccagagcccttacccgcctggtttacaccaaccgcaatacctcccgcacagacagtgtttccctgcagtcggtcgctaaacgatttaaggaattctttgaaaaactgccggagccaacggcagaaatgatggaaaaggcgaatgaataccgggatcaggaagaggcgaggcggctggcacatagggtgcaagtcctgccgccatcctga

SEQ ID NO: 273149 - DNA, 792 bp, Klebsiella pneumoniae
atgatgaaacttgaaaataatctttcaaccaactcaaatgaggttgaaatgtcaatcagaggtatacacgaacgtatctatcatattcgaactgaggttatagactgctcaagggatgtattagcgaagagtctgaaagtggggcgctcaactatccagaattatgaaaacggcacaagagaacccagtgcctcgttccttgttagtctgtcatcacttgcaggtgtacatattgaatggctaatgacagggaaaggagcaaagctgactagagatcaatcggttactgaggggtatatagaaaaaaatgatgtttatgagttaattggtcagctcagaattctgccagaggctgacatgcagcttgttgaatcaagaaagcttgccttcagaaaagattggttagaaaagaagaggttggatgcaaagtcgctatgcatatcagagataaaggatgagagtatggctccattactttcaacgggggatatagtgctgctttcgacctttcattacagggaggatatcgttattgatgggagaactaaaactactttcagaacaggtctagatccgcatgatgataaatcctatgaggtgattaaagatgggctgtacctagtccgagcaggagcgcatagccaggtcagaagggttcagcttgacccgcttggagggatctttatcacggcagacaaccctgtttaccaaacaattcacattgaaaaggagaaattcagcccttcaatcattgaagcgaaggttgaatggcttgccaaatcattatgttaa

SEQ ID NO: 273150 - DNA, 1326 bp, Klebsiella pneumoniae
atgttgactaaaacaaaccgtaaactgaggtgctggaagggggcggcttcatcgctggccctcgcattgccgctgatgtttatcagtgcgaacgcgttggctttcgaagtcggggttcatgcgcattttcgctggtaccccaacgatccggataaatatttggatctgattaagcgttacggtttcacgtcgtatcgagcggattttccctggagcggattggaacagcaaaaagggcagtatgtcataaccggcaatatgcaaaaggccgaccaagcgtttaacgatgcccaggcaaaatttggtctgaatgggttattagtattggcgtacggtaacaaactctacgatccatcgggttatccaacgacgcctgaagccattcaggcttttgccaactacgcgtattggacggcctccaaatataaaggcaagatcaagtattacgagatctggaacgaatggacgaatgccactgcgattaagccgaagccgcgtacgccaccgccgccggagattttcgtcgcgttggtgaaagctacggctgctgcggttcgaaaggccgatcccaacgcaattgtcattacgggaacggccaacccaacaggaacccgcgatccttcctgggttgataacatcgttaaactcggcgtgttgaattacgtcgatggtttctccatccacccttactcctatggcaacgataattacgctatacgggcccctgaggggaacctcggcgtcgtggataaattcgaggcccggcttgcaaaggcagcaggtaagacggtgccgatttatatcactgaaatcggcgtgccaacctatgacggtaaaggcgggttatcaaaagatgtggctgcgcaatatgtggtgaaatatactttcctggccaaatcgcggccctttatcaaagggatatggtggtacgatttgctcgatgatggagacaacccgaaaatcaatgaacatcgatttgggctgctgacgagaaacggtcaaccgaagccgtcgatgctggctttaagtaaggtcgcagatgttgcgcgatcgtattccgttgagaaataccaagtgctgccgggcggtaaaatttccatcgcattgaaagggaataatcaacatgcgatgctattctggcaggaaaaaccggtggctaagccatccagcggtatttcttcaggcttgcgcagttttatggcgagtgaggcgccgcaaaaccaaagtgctacgccgctcaaagaggttcaggggaattcggctgcgcccgatggcgatgtaccggtaatgatgcgctctagtgctccgattgcctcgccctggtag

SEQ ID NO: 273151 - DNA, 1395 bp, Klebsiella pneumoniae
atgaacggtttccgtcggggcgtgttgcatactaatgcgtctcttacttcaatgcttcagcgcttctctgatattttcgttatctttagcgggctgtacttgtcttgcctaatctccggtgccgcatttagcgtgcaacactggattatggtattaatatcgatcgttatcttccaaatgattggtgggattactgacttttatcgttcgtggcgtggtgtgcgtgcggggctggagatccagctcattttgcaaaactggtcgctgagcctgctgttgacctcaggaacggtggagttgataaatgtcttcaataacgagtattccgtctatatccaatggtatctgctggtctgctgcggtttggtcattacgcgcagcgtgatccggctgctcttgggatacatgcgcaatattggcttcaatacccgtaatgtggccatcatgggtgcgatgcccgtcggtattcgtctggcagaatctttacgtgacgcgcactggatgggatttaaagtgttgggcatttacgacaacgataattctccgttgaacagcaaaatcgaacgctgcggcgacttgtctcagctcgtgagcgacgcgaaaagtggccgtatcgatagggtctatatcgcaatgtcgatggagcaggaaaaattgatcaaagatacgatcgcggatctttctgatgcgacctgctcagtgatgctggtcccggatatctttacgttcaacatattacagtcgcgatcggaagagattaatggcgttcccgtcgtttcgttattcgatacgccaatgagcgggattaatcaggtaattaagcgtattgaagacatcattctgtcaatatttattttgctgttcatttctccagttctgttgctgatcgcctgcatggtcaaatttacctcttccgggcccatcattttcaaacaaaggcgttatggcatggatggcaaggccatcgaggtatggaaattccgctcgatgaccgtgatggaagatggcgataaagtcgttcaagcgaaaaaaggggacgcgcgcctgacgccggtcggctccttcttgcgtcgtacctctctggatgaattgccgcaattcgtcaatgtactgaaaggcgacatgtcgattgtaggcccaaggccgcatgccgtggcacataatgagcagtatagaaagttgatcaacggctatatgctgcgccataaaatgaagccgggtatcacggggtgggcgcagatcaacggttggcgtggcgagacggatacgttggaaaaaatgcaaaagcgcgttgagttcgatctcgactacatccgtaactggagcgtttggttggacattaaaatcgtcttcctgaccattttcaagggattcattaataaagcggcgtattag

SEQ ID NO: 273152 - DNA, 1374 bp, Klebsiella pneumoniae
atgtctcaatcattgacttgtttcaaagcatacgacattcgcgggcagctgggtgaagagctgaacaacgatattgcctatcgtgtcggccgtgcatatggggagtttttgcaacctaaaagcgttgtcgtcgggggagacatccgtttgaccagcgaggaactgaaactcgcgttggcggaagggctgcgcgatgccggggttaatgtcctggatattggcgtcagtgggacggaagaaatttattttgccactttccacttaggtctcgatggcggcatagaagtgacggccagtcataatcctatggattacaacggaatgaagctggtgcgtagccaggctaaaccgatcagcggcgataccggtttgcgcgatattcagcgtttggcagaagataataacttcgctgcggtggatccgacccgacgcggcagctacgaaacaatatcgattgaaaaagaatatgtggatcatctgctgagctatgtgaatacggctaacttcaaaccgttgaagctggtcgtcaactccggcaacggcgctgcaggtcacgttatcgatgctgtcgaatcgcgtttcaagcagcttcaggtgccggttgaatttatcaaggttcaccaccagcctgacggcaatttccccaacggtatccctaacccgctgctgccggagtgtcgggaagatacggcgcaagcagtgcgtgcgcacaaggcggatatgggaatcgcgtttgatggtgatttcgatcgctgcttcttgttcgatgaacacggcggattcattgaaggttactatatcgttggcttgttggcggaggcgttcctggagaaagacgctggggcgaagatcattcatgacccgcgcttgagctggaacaccatcgacgtggtcaagcaggcaggcggggtgccggtgatgtcgaaaacgggccatgcattcattaaagagcgtatgcgcctagaagatgccgtttacggtggtgagatgagcgcccaccattacttccgcgacttttcatattgcgacagcggcatgatcccatggttgttggttgctgaattgctgtgcattaaaaacaagacgctcggggagttggtcggggatcgaatgatcgcttatccagcatcgggtgaaattaacagcaaactgcaagatccaaaagctgcaattgaaagagtactcaatcgctatcagccttcggcacaggaatttgacacgaccgatggcattagtctggaatttgcagactggcgatttaatttacgtagctcaaatactgagccggtggtgcgtttgaatgtcgaatcacgagccaatcctgcactgatgcagcaaaaaacagaggaaatactggccttgcttcgacgctga

SEQ ID NO: 273153 - DNA, 1416 bp, Klebsiella pneumoniae
atgagtaacctttatcctgttattatggctgggggaacagggagtcgcctgtggccgctttctcgtgaattattccccaaacagttcttagcgctgtgcaatgaattttccatgttgcaaacgacagtcatgcggcttaaagggttagagattattaatcctcttgttatatgtaacgaagagcatcgttttatcgtggccgaacaactgcgccaaattacgcgtttatcgcataatattattctggagccggtagggcgtaatacggcgccggcgattgcgcttgccgctttgcaggcggtttccagcggtgacgatccgctcatgttggtattggccgcggatcacgtcattcaggacgaagcgattttccgcgatgcggtcaatcaggcaattccctatgctgaagcgggaaaactggctactttcggcatcgttccgacgggcccggaaacgggctatgggtatattcaaaaaggtgccagcgtcgacggttccagtatctgcagcgtttcgcgctttgtcgaaaagcctaatcttgaaacggcgcagcagtatctggccagcggcgactatctctggaatagcggtatgtttttgtttaaagccagccgttacctggaagaattaggccgtttccgcccagatattctggacgcgtgcaagcagtcgcttgcgcatttgacccccgatatggactttatccgcgttgaccgagatgcattcattgcctgcccggatgagtctgtcgattatgccgtgatggaacagactgccgatgctgtcgtcgtacccctagatgcgggatggaatgacgtgggatcatggtctgcgttgtgggaaatcagtgataaagacacaaaagggaactctactttcggtgatgttcttgagcataactgttcaaataactatattcgcgcggagcataagttggtggccgctgtcggggtgaccaatttggttgtggttgaaaccaaagatgccgtgttgattgccgataaagataacgtccaagacgtaaaagaaatcgtcaaccaactgaagcgacaaaagcgttccgaaagcaaacagcaccgtgaagtttatcgtccgtggggcaaacatgatgcgattgcgcagggcgatcgcttccaggtgcgcctcattactgtaaagccaggcgagaaattgtccttgcagatgcaccatcatcgttcggaacactgggtagtggtgtcaggcactgccaaagtgcataccaatggtaaaatgcaactgatcagtgaaaacgaatccgtttatatccctcttggggtcgaacattctctcgaaaacccgggaaaaatcccgctggatttgattgaaattcagtcgggtgcctatttgggagaagacgatatcgtgcgaatcggcgactccgctcagcataattaa

SEQ ID NO: 273154 - DNA, 1065 bp, Klebsiella pneumoniae
atgaaaaaaaaagtgctgcatgtcgccgaaacagtgaagggtggcgtcgctacggtaattagacaacttgtacagcaaaatgatgaatttgatttttactgtgtgttgcccgatagtcaatatcgtgagattggcgctttccccgcagaaaaaatgaaggtatttacgcggacagggagaaatatttcttcgtttatctctttggctattaactatatccagatggtacgtaaagaaaaaccggatgtcattcacgcccacagtacttttgcgggggttgtttgccggctgttaacgccattggtaagaatgacatgcaggcctaaaattatttattgtccacatgctttttctttcctgatggacacatcagaaaagaaaaagaaggtttatgccaagatagagaaaattctgcaaaagaataccgatgttatcatctgtaccagcgaatatgagaaacgagcggcactgatggccggattgagtcctgataatttgactgtggtgtataatggcgttgaaccccctgtaaagctgccggatgataccaatccttatcgccaagataaaataaatatattgtttgtcggccgttttgattatcaaaaaggatttgatttggttcagcggattgccgacgaattggatgacagatttttaatcacgatcgtcggtggcaatgtacacgcaaaagagcaaccggcgccacattcccggatggattttaaaggttggttgacttcggcagagatggcgccttatttcacctacgccgacgtgttgttgatgccaagccgatgggagtcgttcggtctggtcgccgttgaagctgaaagctatgggttgcccgttgtcgccagccgctgcagttcattgccggaggtggtgagcgaaggcgttacggggtatctgtttacgaccaatcaggccgatgaggccgttgagatattgaatgctcgcgaccaacgcgattggagtgcaatgaaagttgactgtgtcgatttctacaatgctaattttacttcagaaaaaatgatatccaatacttatcgtcattacagataa

SEQ ID NO: 273155 - DNA, 1062 bp, Klebsiella pneumoniae
atgatttatgtcaatgcgcgattcttaacgcaggatttgacaggggttcagcggttcgctcaggaaatatgccttgcgctgagtaagattaggcatgatatcgtttttgtctcgccacctaacattattcaccacgatatcgcgtcgcaattgaatgttcaggtggtgggtaagaaaagcggtcacttttgggagcaggtagagcttcctgcttttttaaagaaaaataaaagcccgcttctaataaatctttgcaatacggctccgatcttttatcgtaataaaattattactcatcacgatgttatatataaacgctatccgcaaagttactctgcaaagtttcgtttcgtttataataactttgttcccctgatgttgcgtcacagtaaggcgttgattacagttagcgaattttctaaaaaagaaattagccaggcgtttgactacccattaaataatatttacgtaatctataatgcggtgtccgagcagtttaaacccattgcgtcggcatccaatacagaacgcccttatttattggccgtttcgtctccaaattatcataagaactttcatggtctgattgccgctttctctcaaatggcaaacggccaggatgtgacgctgaaaatcattggggccgccaacaagaatttcgcggatgttgggttttcgacggaaggaactgcaaggaacgataacatacagtttttggggcgtgtgagcgatcaacagcttgtagaactctattctcatgctcgcgcctttgtgttcccctctttatatgaagggttcggcattcctccgttagaagcgcaggcttgtggttgtgcggtagtagcgtccaatcgggcttctatgcccgaggtattgtcgaagagtgcattgtactttgatccggaaaacatcctggaaatgaaacaggcactggagcggattatgcaggatgaagcgttgcgccaaattttaatcgctgagggatttacgaatgtcaaacgtttcgattggatgtgttcggcagcagcgttgagcgagataatgacgagatctatgcaatga

SEQ ID NO: 273156 - DNA, 1335 bp, Klebsiella pneumoniae
atgagggtatcgacaaagtcgttggttgtttttcttttgctgatgtacatgacattgctctcattgaatggcgttgtgaccgtcgctgcgtatatgtcgaccagggcacttttattatataaagacttttttgccatggcagtgccggttttcgtcctaatcttgctttttgcgcgtaaccctaacgtgtcaaaacagtgtagaagcgtaatgatctttttcctgtcgatggtgatcttctcgttagtttatgtacttttaagtatgatcaccggcaggtttgatttcttccgctctatcgttcagtttcgcttagagttactgacattcggttcttttttctttgccgccgttttacttctttttgaatataatgagcgtgtcgagattgttaataaaatcattaagtactatattttctttgccgtattgaatgcgctctttgcggtcgccgaatccagtttggcaggcctgctttatgcactaatcggttttgaccctggcccacagttgacacagtttggtaaagaatatggtcttctgttacgcaccattcaggggcaattacgtgcttttggtctgctcaccgggccattcagcctcagtgaatatctgttttttgcactggtattatcgccttatgtaagcgaaaaaaattgcaagaaatatattcttctcattatggttgggatcgcattttcaacatcgaaaacggcgattatcatggcactgatttatatcatgttcctgatgctgagatgctttttctctcaacgttttagcctgaattcagtcactatggtaacgatggtcttgtcactgttcttttatattacgacgaccaatcacagtatttatgagatgatattcccgaaggagaatgcttacgcggagaacagcattttacttcgtacggtcaatatagaagccgtgcgagctgacagtaaatattcgccatttatcggtgctgggtacgctgtgaatggcaacgcggtggttggtgatgacaatacgaactcaatcccgcttgatagtatgtatatctacatgttgtcgaattacggtaatgtcggcattatccttctggttattgtcgctacgttaattcttggcattctttatcagcgtactcgttttggccttaatcccagtgtttacctatactggatgatctcgctttcgatgaatttcgtttataataacccgttgacaaactatccaggctatatattcgcaatcataatatcgattttgttattatcaattagaacgccggagacgggttccgtgggtcgctcaagaaagaatgtaggttatgtgcaatcgctacattga

SEQ ID NO: 273157 - DNA, 1140 bp, Klebsiella pneumoniae
atgaagattgctttaattaacacactttatgctccttataaaatcggtggtgctgaagtatcagttcagttgttggctgaaagcctgcaacgagccgggcatgaagttggtgtgttttgtcttcatgaatttgatgagataaaatatgacactcttaatggcgttcatattgcttatttacctctcaaaaatatgtactggccatttcaggcttcttcggcaagcaaattaaagaaagcggtgtggcatcttcttgattcttataatccatttatggctcgtgccatgcgtaaggagctgagcaaattttctccggatgtggtgcataccaacaacctcagcggtttttccgtcgcagcgtggcgagtggccaagaagctgggggcgcgcgtggtacacacgactcgcgattattatctattccatccgaacggcacgttgtttaaacatggccaaaatatggacgtacagtcgtctgcagtgcgcatcgcatcttttctgaagaaaaaagccagtcagcgcgtagacgtttttgttggcataagtaaatatatttccgccttgcatcgggaaaatggatttgcgcgcaacgcggtacatacgcatatctacaaccctgtcgccgcgatagagtatgtaccgaccgtcaacgaaaaggtcaggatcggttttgtcggtcgcctcaccgaagacaaaggttttgatgagttttgtgctctggcaaaacaggccagcggcgatccgcaggttgcattctacgccgccggcagattcaatggtgacgccgctggcgagaagttgaaggtgttagcgttggaggcaggtattcatttgcttggctttatcaagattgaagagtttatgacgcagattgacgccgttgttctaccaacgcgatggaatgagccctttgggcgaaccgttgcggaatcggccatctctggtaaggttgtgtatacgcctttcaatggcggagtggcagaaatcgcagctttttatgataatattttcgagctaaaagatttttctgtcgccagtgtggttagcgtcgtgagagaaaataacaacaaaccgcgtcgttcgttttttgaactagaaaaaataaccgatgcttatgagagcgtgtatagagggtcataa

SEQ ID NO: 273158 - DNA, 1017 bp, Klebsiella pneumoniae
atgagtaaatacattgcgtatattgagtcaccgcttcaggcttttaatctcattgagtatcttgatgcgaagaacattgtgctcgatctgctgattgtcaataagcgttcggccaattctgcgttgaatcacgggcagattgtttatctgttgaacatgattaagcatcgctccctagaaaccattgatgttgaagggaaactgggtaatgcttttgatattaaacggcaattgaagagtgtaacatcggtggtgagtgcgaaggaaactgtcactttgattgccggtgagtatcgcgcgagggttttttggattttagcgcataaatattcgagaagaaatgtggtcctgctggatgatggtacggcaacgctcagaattaaacgctacaataatctcactgctcggggcgttgtgaagtcggttttcctcaagtcacttggtatgaccaataatgagagagaaaaaataacctttttctctgtttatgacatcgaaggtaatgtttcaaaaagagatgtggtcgttaagcacagttaccaaaattttaaggctaaactggccagtcttcctgatggaaagaacagggtcttcattataggtacgccgctttatgaggcaggggtaacgtctgttgatgatattgacttgacgctaagaatgataaatgacttaaagtcaaatcagatgggggccgagcttgtttatattccccaccgccgcgagcgtgaagagaaaatagatgaaatcagaaagtctgtagaggtccgtcggttggattttccctttgaggtttatcccattgtggctggtgagaacgtcagttgtatagccggattttattcatcattgtatgacaatctcgtaaaaatatatgatgaaaaaattaaaataatcgcttacgttcttgatgagaaagttttatcgccagagtggagtggatttgttaacgcgatttataaaaactatgagagttatgaaaacgcggatattacgctgattaaaaacaaattttaa

SEQ ID NO: 273159 - DNA, 426 bp, Klebsiella pneumoniae
atggtgctgacccatgacggaccagaaatcaaaatccggctccgggggcgagaacacatacgcattcatgaccagattcccgccgtgttgtctgaggaacaacaaaaaatctttcaggtttccgtaccctcccgaccccataccggcaccaaggaaaaacgcctctgttaccacgccggcagtgatacgaccgttctgctcatgctggcgcaggatcatcagggtgccatcatggcgcccaccgtcgatgcggatgaactcaaagacatacctttcatcatcatccgggaagaaaaattcctcccagctgacaccggaatacgttcccagtatcaccagcgggaacatcatcccgtcaccggtagtcagccagtccgcactggtgccgaaccggctttcaatccgttcagccagatcacgggttaa

SEQ ID NO: 273160 - DNA, 1344 bp, Klebsiella pneumoniae
atgaacaactacgcgtatctcattaaagcaaaggcaaaggccaccgaagcgaaaaacctattctgctggttctctgcaaaatctgattcccgtgccgaacgccggatcctggacattctggaagacgctgagattaatgttggccgcggcgccaaccatcagctgcctatccgcaccaactggctcatcgttgatgacctaccggaagaaggtgtgctggatgacacctggtgtgatcgctacgaactggcagaagacgggttgacatggcaaaaaatcgttacgccggcggccgctgaacctcaggcggacaacgaaccggaaaacaacacctctactaatagcgatgaagaggactattcggccaatgaagatgccctgttcaacctggcagaaatgtccttccgcacgcagctgcttgcccagtacacggctgacgatcgccacgtgtatcacattagcattccacatcgtgaccgcctttccttaatggaaatggatacagagaatcacgctgtacagaatctgatcctggctgctgaaaatgttccggaaattaagaaatacgatatgcctggactgtggaaatttactagtgcattcaaaaccgttttccctgaaggaaagcgctatgagcttggtaaacaggttcagtttgccaaattatggtttgagacggcgcacattgaccgcgggatcctaactaaagaatgggctgcaggtaatagtatttcagccgttaatcgcactccctccggcgcgaatgctggcggcggtaatgtaacagaccggaaaacaccgctgaccagaacagggctggcctacgaaatcgcagctggcctgctcgcccgtgttaacgagttcgatatctataacccaccattcaaaaccgaatgcgccattaacgccataatgaacgactgtgacaacctggagttcacggcgaccgtcaagttattcgaggaaatgccgggcggcatggattattcccgcgcctgcaatattgcgacggttaaaacaacaccagaaggtttgtggaaagatccggtgaagcatcgcgaatatctgaaccgtgtcatgactgaagcagaccacgctcacccggacgaacttattgttgatatcgcctgcggccgttcctcgatgcctatgccaatgcgtaaagttgaagaacctgacaatagtgatgcagataagatgaccggcgcgaatgatcaggccgatgatacgccggcgcgcgaacttgaaatcaggcctcaggtagaactggctatttccggtaaaactgcagtaatggatctgtcagaagcaagtgaactgcttaaccttttagaaatcgggtaa

SEQ ID NO: 273161 - DNA, 297 bp, Klebsiella pneumoniae
atgtcagctaacgaactggcattgaaatttagcactgctccagctgagcagctcatcggcgttctgaccgttcacgaagtgaaagaggcacttcacgatgaagtggaggaagaagtgcagagtgaagtatggatggaacataactttgctatggaagccgctgaagaggttacagatgcctttgctacagcgatgaagctggcgctgacgcaacctgcaaaggtggctaaagctacattacgcaaagcgctaaaggattatccgggttatggctcagaaccaaagagcggcccataa

SEQ ID NO: 273162 - DNA, 195 bp, Klebsiella pneumoniae
atgaatacgctgtttgcccttgtcatcagcgtatgcgccctgaccggcgagtgctctgatgtcctgataggcgtgtatccatctgagaccagttgtaacagtgatgctgaggcccagaaggtaaaaggcgcatgccagccatacaaaaaggcatttaagacggctgacgaccaacagcctgcagtaagtttctga

SEQ ID NO: 273163 - DNA, 123 bp, Klebsiella pneumoniae
atgatcgatttcaaacgcaagccagcgcgccagcaggccatccgcctgagctggttcgagacaagagttcgccagctttgctacctgttagcccagaaaggaaaccctgaggctaaagcatga

SEQ ID NO: 273164 - DNA, 270 bp, Klebsiella pneumoniae
atgtctgaggagactttgaaactggccgttagctactcaaatgccagcatggttatcgaacgatcagtaaacattttccaaaacgtaaatgaaatccgttcatcgctggatgatatgcgcgaagcaatgaaatcctgcggcatcgttatggatgatcacttggacagttacgacactgctctgcgtaatctggaaaagctactgcaaaagattgaaggcgatgcccgtcaagaagctattgctctgcgttacaagctcaaggcgcagtaa

SEQ ID NO: 273165 - DNA, 555 bp, Klebsiella pneumoniae
atgcaaaccatctcttttgaaaatcatacctcggtgaagggtgtgcagctgaaaacagaaaatcagtatttaccgatgcgccgcgatcgcaataagtgcagggccatttataccgccgttcaggaatgggagtcctcattacctggacgtgcgcaagaccacgtcgcgcagctggtggccgaacagtgggaaaagcaaaacggacgcggtatcagcgtcaataaacagaatctgtatcgctacctgaaaaacgagggcggttcagagaagtacaccagttatgtcatccagctttcggcggcgatcgctgatgcaatgccgatagagatcgcgcgcaaacatggcctaaaacgtggcttaactgaaaccgagctggtggccaatgcaatcaaagaatgcagcgaagcgcaccaggccaagttacttggcgcacctctgcagaaactagagcgtgaaatacgggaagctgcaattgctctttttaacatgctccctgcagatgcggcgggaccactactggcgagcattagcgccgtagcgccgcaatttttttaa

SEQ ID NO: 273166 - DNA, 987 bp, Klebsiella pneumoniae
atgagcattgatgcaatgcgatgggccaaaaaagtcaaaaccgggaaatcttctgcgaaggcagttctgacgtggctggccgatatgtgcggggctgatctctgtgcttttccatccattcctgcgctggctgaagcaactgaactggataagaaaacagtccagtcgagtctgcaatatctggtctcgattgggcttattgaagatacaggtgaacggcgtgggcggactaaacaaatccctgtttaccggcttcttggtgtggaagaaagcattgccgaagtggaatacacccaaaaacgggaacattaccaaaaacgggatcgtttaaatacacccgaaaactggattgttccctgtacgcaaaataaccaaacgatcccgttttttccgtcaaacgatcccaaaaacgggatccggaatctaccagaggaaccaaaagatataacccccacatatagcgatctggtcgaaccagttaagccgggttatccgaatcagcccgggattgcctttggtgctagtcagactttcgggaagtttgcgatgcaccaggactggaaaccatccgcggaatttcccagacaggccacgctctggggtatgccgctaaagccggggttaaatcttcccgcagagctaagtagcttcattgcctactggcaggccgaaggaaaagtattccatcaggtgcaatgggaacagaagttagcccggcatctcaaccgggcggaagtccgccagaaaaaaccagttaacgggggtagtgcgaatgcaggagttcaaccagataacacgagatctcgggcagtccaggaaattcaggcagcccgagaacggtgggagcgcgaaaacggacttgctcgcggcggaaactgcatggcgcctgtggacggttatgggggaaatattttcgaaccggtggacccagaagaacggggcagcgccctcggatatgtggattgcccagattggatcgatgagtga

SEQ ID NO: 273167 - DNA, 288 bp, Klebsiella pneumoniae
atgaccaaaaaaatcaaatccagatatcgcaatgaaataaccgcctttgagttcctcagggccaacccggatatgacgtccggcgaaatagccaaagcaatggggcgtagtggcagttctgtcagtgggcaggttaagcagctggcgggtacaggacgaattgtccggacgggcactaaagatggttccccttcgtggagagttaacgatatgccgtttggctgcggtaacccgatcagaatgaggttcgaacagttgctacaagaacaccgcacaaagggactttaa

SEQ ID NO: 273168 - DNA, 453 bp, Klebsiella pneumoniae
atgaaatttatggaatgtgctgtccgggatgtgatttatgggaccaatgtccgtcttgtcaaaccggtcaacatttatgaatgtgaactcagggacaatgtgtttgtcggccccttcgttgagatacagaaaggctgtgtcattggtagtggaagtcggatacagtcgcacacgtttatttgtgagaacgtaacactgggggagaactgcttcattggtcataacgtgacgttcgccaacgatctgtttcgttcaggagcaccagatccgtcaccggataactggatcagcattatcctgggggattcggttactgttggcagtggagccattattctgtctccgtatatatgcagcggagctgttatcggtgcgggggcagttgtagtaaaaccgattgagaacaaaggcatttatgcaggaaacccggcaagactgctcagaatattatga

SEQ ID NO: 273169 - DNA, 426 bp, Klebsiella pneumoniae; identical to SEQ ID NO: 273159

SEQ ID NO: 273170 - DNA, 288 bp, Klebsiella pneumoniae
atgaaaagtatagctactgctggccttgtcattatatctgtttttagtctttctggatgttttgaagaaacaaaatcggttgattggtggaaggagcaccacgatgaatctttaaaaaaagaaatcgaatgtaagaaaacaggaagtgatagccagaattgccgaaatgtgaaagaggccaactttcgttatcaacagttacacgcaactcccccatcttttaaagatgcattcaaaaagatggagaaagaacaaagtgaattttttaaagaagataataaaaaatga

SEQ ID NO: 273171 - DNA, 1131 bp, Klebsiella pneumoniae
atggggctggttactggaattcctgctgggtcagatttttccggtaatgtaacgtctcctgctccggcaggaggcgtaccaggatttgaatctgattttttccaaacaactcatcaggttatctttgatatactaaataaaactgttgctggaaaattaaatgaatattcatctattgcttatgaattaggtaaatatggtgtttctatatatgtgctgtggtatgcgtttactgttttagttcgcaaacagcaatcgcctgttcctgattttatctggaatgtatgtaagttttatgtgatattgctcttcgtaaaaaactctggaggtatgctgatatctgcaacaaatgcaatcgatggactaagagaaagtcttgcaggaggtgatccttggttgtggatagatcaactttggacaaaagtaattcaagttgcaaaggttatttgggataaagatacatctactgttccaattgccggtggtttatcctctttatttgtatatttcggtggaatagtggcattgttattatgctcaatagtgtttttttctgccgaaattacgctcctgttgttatctgttacagcccctatatttgttttatgtatcgcttttggcttcctcaggcaaatgtttaatagctggttgcagcttaacttcagttcgttattaatatttctctttggagcactagcgttacgggctggtacatggcaactaaatgtaattctgagtgtaactattgcgtcagataaacaggacttacttcaggctggggctacagctttggcttcgggcttgtttatgggctttgttatctggcaggcgaaaagttatgcttcacagattgcaggtgtgggtgttgaaggtgccatgcagggcgcagccgctatggggattggtgctggcgttttcggtgcatcccgtatggcgcgtggcgcacttggtatgggcagaaatgccggtattggtgcatggaaaggtctgcgtcgtcaggaaggcgggtttggtcagtctccgggaataacgggtaagacagctaacttggccggacagggcattaatattggtgccaaaaagcttcgtcaggcagctattgagagagcaaagaaaatgtatggtgggtaa

SEQ ID NO: 273172 - DNA, 2169 bp, Klebsiella pneumoniae
atgacgattaaacatgctgaagaattgacggaagaagtcattttaaatatgaattaccctgattttgttgctctgatgcaacaggataacactcctcctggagcagagtacaccatagactactggattaagcatggatgtattaacaaaaagtctcacctattagatttagcatgttccacgggttttagttcacgtgaatgcttcaaaaaagaaggtgcatctgcagagggtattgatatatctgaatcagctgtaatggtcgcaaatgaaaaggcaaaaaagcttaaggctaataatttattgaaatattatgtagctgatgcttgtgatttaccatttgaagataactcttttacacatgttctcggtggatgtaattttgcatttatacaaaatcggttaatagctttgaatgaaactcatattgttaaacatgcccgggagttaattattaaggggattgaatcgggcgataactcatttgtcatttttgatgtagatggagctctggagcgtctggaacattacaggtgtcaacttaagagttttttccccaacagcagtatcgcatattcatataagtcaaataatctggcacaatggtgccagattatctcaggtaaaggtttgtatgcagaggtgtgctctgttgatgaaatgaacctcgccaaaagagacggttttaaccggattgtttttgatggccctttaaaaaaaacgagtgaactattaaaggcaatagagattggggcattaattgaagttgacaatattgatgaatgtaaaagagttaatgaactatgtaagttgcataagctgacatgtagaattcatttgagattatcgcattactatgatgataatttatcaagatttggcttatctgaaagtgaggctattaatttactggagatgttgatcagtaagtcagagtatctcattttagacgggttccatttacatgttggctctaatctacccaatgcggaaaaaatatgtaaagctattatacagtatcatgagttgattcttaggtatatgccagatgatggcactcttaatcttggtagtgggatacctgcagattctttctcagcatccagtgataacccaactccatgtccggaggtatttttctcatcgatatatgatacaataaaaaattgcttcggtactgaatgtgataaatggaactatatttttgagccagggaggcatctggtcgaagactttggctactttatagggaaggttattagtactaaaaacaggtatggtgttaaagttgctcaaactaacattggtataaactggataccttcgatcagaaattgggaccattcatttacattgtttcataatcataaccatatttcagatgataaatctgatgagtatattattgctggattcaattgctttgaatgtgattgcttgtttccttcagttattcttcccagtaacttatctgattatttattttctgttcgagggtgtggtgcttatgatatgcaaacaggaaaccagtggacgcgtaatctttatgctgtatataccataacaaatgatgttgttaatatatcaaggattcacaggagagaacttgatttccggaagtatgatgtatctcttacgccatcaggaataaaagtaaatgatgagattacattgttgtatccagcgttaaaatacgctgaagagttatatttgctcattaatcaaaataaaatgaatttcattaaaagcatggcatggccagcgtttgttaataacatttctgattctgtttctttcattgagcaatcaatgattgataaccagaatgaaaaagcattaatcctctttattaaatacaaaactaagatagctggcgttgtatcttttaatattattgaccatgccaataaaacagcatatattggctattggttaggcgctaactttcaggggaaggggattgtaaccaatgctataaataaactgatacaggagtatggggattcgggcgttataaaaagatttgttataaaatgtattgttgataataaaaaaagtaatgccacggcattgaggtgtggcttcatcttagaaggtgttctgcaaaaagcagaaatactcaacggtgtatcatacgatcaaaatatttattcaaaagtaattggttaa

SEQ ID NO: 273173 - DNA, 1035 bp, Klebsiella pneumoniae
atgatgatacaatctcatccactactggccgctcccctggcagtaggagatacaataggtttcttttcatcatctgctccggcaacagttactgcaaaaaatcgtttttttcggggagttgagtttcttcagagaaaggggtttaagctggtatcagggaagcttaccggtaaaacagatttttatcgttcaggtactattaaagaaagagctcaagaatttaatgagttagtctacaatcctgatattacttgcatcatgtcaacgatcggtggagataacagtaattcactactaccgtttctggactatgatgctatcattgcaaaccccaaaattatcataggttactcagatacaactgctttattagcaggcatatatgcaaaaacagggttgataacattctatggaccagctcttattccttcgtttggtgaatatccacctcttgtggatataacatatgaatcatttattaaaatactaacaagaaaacaatcaggaatatatacctacacattacctgaaaagtggagtgatgagagcataaactggaatgaaaacaagatattaaggcctaagaagctatataaaaacaactgtgccttttatggttccggaaaagttgaggggcgtgtaattggaggaaatctaaatactttgacaggtatatgggggagtgaatggatgcctgaaattcttaatggagatatattgtttattgaggacagtcggaaaagcattgcaacagttgaacgattattctctatgctaaagcttaatcgcgtgtttgataaagttagtgcaataatactcggaaaacatgagctttttgattgcgcaggaagtaaacgcagaccatatgaagtattaacagaggtattagatgggaaacagattcctgtactggatggatttgattgttcacatacacatccaatgctaacccttccacttggtgtaaaattagctattgactttgacaacaaaaatatatctataacagaacaatatctatctaccgaaaaataa

SEQ ID NO: 273174 - DNA, 282 bp, Klebsiella pneumoniae
atgatgcccataactgttccatcctatattgatgacccgccgcacttcctgctttggagtgccgatgagatggctcccattttgttggggctagtgatcggcatttttaccggaaatgccttggttttatgcctgttggggttggtgacaaccaagctctatcggcgttttcgtgatggtcgcccagatggttttattcttcacgccatctactgggccggactgttgccaaccaaagccaagacgatccctaacccatttatcaggagctatctgccgtga

SEQ ID NO: 273175 - DNA, 627 bp, Klebsiella pneumoniae
gtgaagttcgacgtgtttttaaaatcatggcaaggcacgcaattagagaaccgatggcaacggcttctgattgcagtgctagtgctttctaacttgctgcttgcggtagcggcattttctcgcaataccgtagtggccattcaaccaccaaccttgtctgaaacggctgaagtgtcacgaaaccaagccactcaaccttaccttgaatcctggggactctacctggcagagcttatgggtaacgtgacgccgggcaatgtgtcctttatccgggttgctatcgagccgctgctttctccagcggtgtaccagcaagtggtcgatgcactggaaattcaggcaagacaaatccgggaagaccgagtcacgctcaaattccaacccagacaagtggagtatgagtatgaaaccggccatgtctttgtgaccggttattccttggtctctggaccatctggagatgaacatcgccaaactcgcacctatgagtttgacatcgatattgagcaataccgtccaaagctcagttggatggatacgtacgaggggcaagctagaacgaagcgagttcgtgaaaagttgacccaagagcaaaaccggagggtgaatgatgcgaaccaaaattag

SEQ ID NO: 273176 - DNA, 900 bp, Klebsiella pneumoniae
atgatgcgaaccaaaattagtcgatggataacaccaagcttaatcgcaatgagcttgagtggcgtcctgttatctcaagcgtcatatgcagacgtggaattgccgattgtgccagccagtgtgatgaagcagtctgctactgcaaatccaccggttcaaaccaatacggtttcaacggatgtgccaacaacgctactgatgacaccgggggttaatgaactgatccctgtagctcttggtcatctgaatcggattgtgacgccgtttgaatcgcctcaggtaagaacaaccagtgatgctcagacgcaaatcaaggggaatgttgtatatgtggccacggacaaagaatcaccggtttcactttacatcactccgcctggtcaggaagcgcccgcgttatctgtcacattagtacctcgtcgtattccaccgcgtgaaatcaccttagctattgatggtcagcagtggcctattaagggcgtcgtgaaccgaaaagccgccacttgggaaacggctcagccatacgtcgatagcttacgtgatttactcagacgccttgcactaaatgagttaccacaaggctatgacatccgtttagctggccaaactgacacaagcccgaaatgttttcagccaggtttaaagtttggttttaagcaggggcaaattgtgacgggacattacttcaccgtctatgtaggactggttgaaagctttgccgatgagccgatagaagccagtgaaatagcctgtcatgcaccagatatagtggcaagcgcctactggcctcgcaatatcttgttaccgggtgaaaagactgagttgtatgtggttgttcgcaatcatcgtgaagaagcggtggaaagtcagcgaccttcgcttcttgtgggaggtaaataa

SEQ ID NO: 273177 - DNA, 1290 bp, Klebsiella pneumoniae
atgaaagcacaatgggaacaaatgagcccgaacatgaagcggggtctatcggttgctggtattgctggtggtctcatccttatggtgatggtgttttcacctaatcctgacgatggctcaagtagtcggaaccgacaggaaacgatccggcacattcttacggataccaatactcgtgatgttggggtcgatagtttggctgcgaacgtaaaactactcagtgagcgcaatgaacagttacgtcgtgaagttgagcgcttgcgtcgtgacgtcgattcaggacggctaagcccaggttcgccttctataccaagtgaggtcaacgcggagttggctcgccttcgagcggaacttgatgatgttcgcgctggaggtgatgcagcagttgaaggcacaaatagccgtttcgaagtgcctttatctgccatggaattgcctaaagacgaaaagccactgccgtctaacccagacgactattttgccaatgcgccgctgcctgatccgctctatcagcagccagtcaatggtcaaggtacacgagcacgagatgttccattgccgccaatcacgattcgtatgattgagcctgaagtggttgctgaaccagaggttgttgtgcaagaagcgcctcctttgtatctaccggcgggcagcatcatctcgggtactttgatcacgggtttggatgctcctactcacgagtccgcaagacgagaaccttttcctgcattgctgaggattcaaaaggaagccattttacctaaccgatttagagcggatatcaaagagtgtttcttgatcgccgcaggttacggtgatttgagctctgagcgtgcctatttgcgaggcgagaccatttcatgtgtgagagaagatggtggcgtcattgaaacgcgactggattcttatgccgtgggtgaagacggcaaagccggtattcgtggccgattagtgtcgaaacaaggccaactggtggccaaatcaatgatggccggattccttcagggcttggcaggcgcatttgatgtaaatcctgttccgacgattcagacgggtaatgctggtgatactcagctgtaccagcaagtcatgagccaagaagcattacaaggtgctgcgattaaaggcaccggtaaagcattggatcgcgtggccaagttctatttggacatggctgaaaatatgttcccagtcatagaggtagacgctgcaaggaaaattgaagtcatagtcactcgtggggcctcgttgtcgttggccacttcgcaagggggaggtgcaagaagatga

SEQ ID NO: 273178 - DNA, 573 bp, Klebsiella pneumoniae
atgacgacatcaatgcagaacaacccaaagcaccagtcaaaacagtggtctaaagctggattacttttattggcagtcggctcaaccttattgtctggctgtagttcattgggtcttgggagtagtgaatatggatgcccaggtatgcctgacggtgtgcgctgtttatccgctcgtgaagtctatgagcttaccagtaatggcgctgcacccaagacgattgatgctgtggcgactcgaatgggtgctccctctgggtattcacaatctgatttagagacaggactgctgagccatccagcattacccgagacgcagcaatctgcacttattcgcattccttcaagggtaatgcggatttggattgcgccttgggaggatgaccgtggggatctgaatttatccagctacgtgtttaccgaaattgaaccgcgccggtgggatattggggtgtcagcacctcgaacggtttcgccagtgctacgtccacttcagactcaaagcgattctgcctcagcgggagctgatggtaagcgcgataacttgagtatctacggagaaactaacgaatga

SEQ ID NO: 273179 - DNA, 387 bp, Klebsiella pneumoniae
atgacaaatgcagttcgcagcattcagactcagcgcctaatgaccattggtgcgcttggtttgatggcgttaatgatttcggagccctcatttgcgggcaccggtggtgatgctttcaccgatgtgtgggataccctaaaagattggacccaaggtactttgggacggatcgtagcgggagccatggttctggtgggtattgtgggcggtatcgctcgccaaagcttgatggctttcgctctgggcattggtggcggtatgggtctctacaacacaccaacagtcgttgaaagtgttatgtctgcaactttacctgttgttgccagcactcaagaagtcattggcacaacagttccagcaatcagcgccgtcttactgggcacctga

SEQ ID NO: 273180 - DNA, 834 bp, Klebsiella pneumoniae
atggtttatactgttcgtgatattcatactttgggtgttaaaatgtcatctaagataaactggcttgttgctcatacttctcctggtgcgctagtacttcagcaatggctgactgaaaacggcgtgagctactcgttggctcaaaagtacgcgcagaacggttggctaaagaagcttagttctggtgtgtactatcgtccaaatgcgcagggcgatataaagccaacttgggttgatgccattcaagcattggatgtgcaattgggcgttccagttcatttggctggattgagcagcttaactcaccaaggactgagtcactatttacagctgaacaaagagcaagtttggatttgcgttaaaaataagtcgtccttaccaaaatggtttcgtgaattcccttatcagaattggttttactgtggaaatcataagcttgaagtgaatcccgagaaagatttgaaaaggatcacggttaaagagaaagaactcactgtcagctgtgcagaacttgctgcctatgaagtggtagacgggattgggaagctgatttcatttgagcatgtcgcagaattatttcagggtttagtcaatcttagccctagaaaagtacaagatattcttgagcgaagcagctctgttcaggcaaaccgaatatttctatttctgggtcgatactacgatcaccagtgggtcaatcgcatagatgaaacaagaattaaattgggtgcaggaaagcggcaggttgtcgaaaaaggacgttttgatgagcgatatcaaatcacagtgccagagatattaagcgtcaaaaaaggtgaacaacataatggataa

SEQ ID NO: 273181 - DNA, 939 bp, Klebsiella pneumoniae
atggataaagatagcccatactacaaacaggtttctttgctcataagaatgctgcctgtggtagccacagagacggtttttgcacttaaaggtggcacagccattaatttatttgtgagagattttcctcggttatctgtagatattgatcttgcttatcttccacttgaaccaagagatgaggctttgattaatgtcagggctgcattgcaacggattacagatagaatcaatactcaaccagatatccgagcggcatttcaggataataaagctgatgaactgagaatagttgtatcaagtccggttgcgacgatcaaaattgaagtgtcgcccgtcgccagaggtacactgcatagtgcagaaataatgccagttcaagagtctgttgaagacgagtttggttatgctgagattcaggtagtcagtcttcccgatctgtatggtgggaaattgtgtgctgcaatggatcgccaacatcctcgcgacttatttgatgtgcgtaggttacttggcagtgaagggatttcgagagagattttagtgggctttttaacctatacactaagtcatcctcggcctattaatgaagtcatgtcgccaaactggcagcctctgaatgagaaatttcaggcagaatttgacggaatgacttttgaaaaagttgaatgcgaagacttagcctctgttaggcctatcatgttaattgaactgcaaaaaaatttcacagaaagggatcatgctttccttatgtcattcaaaagagggcaacctgattgggcattgtttgactatcctaatgcagcagacttgccagcgattcgttggaagttgcagaacattaacaaattggcaaagaataaagcaaaacatcaagagcaattagataaattgaagcaagtgcttgatgattggcttgttaacgcaaacgccgagtaa

SEQ ID NO: 273182 - DNA, 2730 bp, Klebsiella pneumoniae
atggcgttattaagatacgcaaacttaggaattcacaggcctgacatcctgcttagtaaagcagtgagtggtcttggtgacttttataagtatttagacaccactcgaaaatacctagaaagtacgaaggctgttaaagcgatagcttgggaaaagctggacgatgctcaaagtggagtatggatacaattagttgagcctgccgataactgcggtgatttcgaaaagaacttaaagctctttttagatgaaagtaccgacacggtatacgaagcaagccccgctagatggaaagccgtgggtagtgccgctagagaatgcccaaattgtagaagtcacggtaaacctaaaatggcttatgcaactgaggagcacgcggacgaaattgcgagtgaattaggcaatgggctgtcgtcgtatgagtgtccagacggttatggttggcatttgactgggaaatcacaaagcaatgttggattcaataaatccaacgcaatttcagtcctggacagaaatgtagagaatgacagcgtgttattggatcgtttacctgaccacgactatttggttattcgtccaaacacataccagttaaagtgtcagattaatgcattacaaagcttacaagacaccccttctattcaccatcttccgctattgaggctgtttgaaggtaaggatcatgctaagtggccgaatgttccttatgatgagcacttatttaacgatgactactacgttcttaccgatggagcaagagagggaacatctcagcagcgtgagtttgtaaatattgcactcaatacaccagactttgccttccttgaaggccccccaggatctggcaaaactacagccatttgcgaactaattcttcaattaataaagcgaggtaagcggattttactttgtgcatcaacacacgttgctgttgacaatgttcttgaacgaatgatgtctgaagaaaatatttatcgcgacatggtgttacctgtacggattggagataaatcaagcgtttctcaaaaggcaaagccatggcaattggaagagtttgttaaaactgaacgcacaagattgctaaaacatcttcagcaacaaccgcacatttcagttagtcagaagttacttaaaagtaaggtcggtgaaggtaaacatattgttgagcgtcttgttcttgaagcggcgaatttagtttgcgggacaactattgggttgcttcagcatcctgatatcaaaaataaacaatcaacatcgccaatcttcgatgtgatgattattgatgaagcatcaaaaacaacttttcaagagtttttggtgccagcggtacttgccaagcgttggatcatggtgggagacccaaaacagctttcaccttatgttgatgatgaagctaccgaagtaaatttgcagccatgtttacaggatagttatcagcgagaagcatgcgcagatattttctctgctcgacaaatcaatattcagaaacgagaagtatccttggtttgcactgacgatgaaaagacaattgaattttatcatcagcaagcaaagtccaaaaatgtattggttgcatcatctaaaggtccgaagacagatctcccttacgcatcagtagtcattggttcgtcagcgttcatcgctcagaatgctaatcaccttcccctagatttgacgaccataagggggctgcctgcgttaccggaaaagttagaaatgcgacttgcagcgcattcgagattaactcgtacaaaaatcaagaccgagtccgatagctgggaatcccagttagcgtggcgactggctcgtatgtacgaacagcgcctaaatacagaatctaacgggagttctaaaactgttaataagttagaggaagatatcaaagcgctactaccatttgactcagaaaaagatacgttcactgcaatagacagggtacgtaggatcgcactgccttctatccttgaatcactgcaagttggatttgaacgaacagagtatcagaaacaaggcaccgctctgtctgatggacttccagccagtgttttggaacaacgacaaatacggcttagttaccagcacagaatgcatccagacattgccgagttttcccgagtacatatataccatgaaaaagcactgcaaagtcctgatggccaagctgaaaagcgggactggggataccgaagcggctcacatcgttgtatatggcacgatgttaaaggtcgaaaaggcaaagaaggtgaaatcaccgctgaagtagaagaaatattaaaagaattaagtcgctttgattcttgggcaaaatcaaacccaaatgttgagaaaaaccaacaaaagccttgggaagttgctgttttggcattctatcgggctcaagagcgagctatacgtcgagctttacgaaagtggacgggaaatcatcacggagtaaggcatttctatcgaggtgaaaaatcctcaccgtatattgatattcagatatgtaccgtagaccgttttcaggggcatgaggctgattttgtcatgcttagtttcgcaaataaccatcccacgagttttcttgaaagcccaaatcgcttgaatgtggcaattacgagggccaagcatcagctcattgtgtacggaaaccgccctgcaatgcaaaaggcatcgggtgtgttaggtactcttgccagcaattcttactggtctacaacaatcgagactgaatcacaggaggcactatga

SEQ ID NO: 273183 - DNA, 660 bp, Klebsiella pneumoniae
atgagccaggacatcatactaaaacgagaaattaagactgaaagttggctcatacagggtgaaatcgcgctggcagatagccgtccagaaattaactgcgtgctgcaattccttcaagattatccgaatgcgagttctgctgagtgctccgagcatttatttggggacaaaatcggacgtcgtgtcgttgctgataggttactaaacatatgtcgattatatgggcttgctgagtctaatcgagaccaatacaggctcactgaatcaggactgattgctcttgagaaagatcaaatcctagtgccagaagatgggtgttggagcctttgcgtttgtcatgagcctttattgcctcatccacttcttagtattgaagcgcacacagagcctagtgcagcgtcgatcggacttggaaaaaacagaaatgagctaaatgaaagagcaaagcgactcgttgaggttcctcaactagtcaaagacgttcgtggactaaaggttgaaccaataggtggcggttcggaagtacgcgttgataaaattgaactcaaaggtgagcgcatctcacctcaaggaaaaccgtattacatcgagtggaatgtgactgatggcaatgtcgatgtgaagcgcggaaaggatcttatattttcacatcgggggtaa

SEQ ID NO: 273184 - DNA, 780 bp, Klebsiella pneumoniae
atgactgaaaatacgccttatcagcagcttacccgtacctttcagcgcctgtcgcgcttttcgcgcctcgccgccatcgccggctgggatatgttcgcgatgatgcccccgggcgggagcgtcgcccgcggcgaagcgctggccgagctcggcgtgctgcagcatcagatcctgaccgataaaaaagtgggacaatggttacaggaggcccgccagcaggatcttaatgatgttgaacaggccaacctgcgggaaatgcagcgtcagtacgatcaggcggcgctgctgccggagagcctggtggaagcaaaatcgctggccggcagccgctgcgaacatgcctggcgcagccagcgtcccgccaatgactggacgggctttgccgacaacctacgcgaggtggtcagactgagccgtcaggaagcgcagatccgcgccgatgccaggggcggctcacgctacgacgcgctgctggatattttcgaaccggatatgaccagcgcgcggctggacagcctgttcgccgatctcaaatcgtggctaccttccctgcttagccaggcggtggagaagcaggcgaagcagacgctaatcgccccgctggggcctttccccattgctgaacaacgggagctgggcctgcaggcgatgcgtatccttggctttacggcgggcgcctcgacatcagcgcccacccgttctgcggcggcgtaccccaggatgtgcgcatcaccacccgctacaacgaaaacgacctgctcagcgctctgttcggcgtga

SEQ ID NO: 273185 - DNA, 351 bp, Klebsiella pneumoniae
atgttaaaactaaaatttatcctgccgttgctgatcatcatcagcgtcctcgtctggtggtttacgccgcattacagtgaggaggacaaagcgtattacatcgccatgttttgtacgctgacccacgatgggcgcagtcattcggtgcaggatatgcagcagattattgaaggcagcaattcagactatgcgctgcaaaagattcacttccagcgaggcctcggtgagcgtctgcaaaaggtgtggcaaggcttgtcgccagaacagcaacagcaggcgcatcaggatcgcactgaatgtcgccgtctgatgtcgcagacattattaccgggccaggaattacagggctaa

SEQ ID NO: 273186 - DNA, 1077 bp, Klebsiella pneumoniae
atgactgattttgctgccctgctcagccagggcatcaccagcgcctggttgtttatccccagcgcgattttgttgggcgcgctacacggcctggagccgggacattcaaaaaccatgatggcggcgtttattgtggcgactcgcggcacggtgaaacaggcggtgatgttgggacttgcggcgacgctgtcgcatacgctgattgtctggctgatcgcgttgggcggcatgtacatcagccgcaaactgacggctgacaccgccgaaccctggttccagctaatctcggccattatcattctggctaccgcgctatggatgatttggcgcacctggcaaagcgagcagcagcgtaagcaacatcagcatgatcgtcggccagaggcgcaggtgattgataccggccacggtcatgttgagctggcgctgcatcagggtcactggcgactgcggactctggagggggcggcatggcaggccaatcaagtcagtgtcgccacccggcgcggtatgggtttctcgcagatctttacctttgcggcacaggacggtgtgctgcaatcgacgctggcggtaccgcagccgcacaccttcaatgcgcgtctgtcactcggtcatggtggtcattcgcatgattacgatgtggtgtggcagcagggagaagtacagcgtgccccaggtgagcatgatgtcagttttcaggatgcgcatgagcgcgcccatgccagcgatattaaaaaacgttttgccagccgtgctgtgactaacgggcagatcattctgtttggtttaaccggcggcctgatcccctgtccggctgctatcacggtgctgctgctgtgtattcaggtgaaagccttcagccttagcgctgcgctggtgctgtgcttcagcattggcctggcactgacgctggttggggtgggggccgctgccgcgttaagcgtacaaaaagccacccagcgctggcaggggctggatacgctggcacggcgcgcgccctggttctctggcaccctgatcgcgctggtagcgatctacatggggtatcatggtctgagtggcatcctgcactaa

SEQ ID NO: 273187 - DNA, 141 bp, Klebsiella pneumoniae
atgtctcatacccagaaagatcaaaagaagctgctggcgcgcgtacgtcgtatcaacggccagaccgcatcgttggaaaaagccctcatcgacggggaagagtgtctgaaagcaggtggcggcggtgcgtggcgcgattaa

SEQ ID NO: 273188 - DNA, 144 bp, Klebsiella pneumoniae
gtgcgtggcgcgattaacgggctcatgagcgagttgctggaagggcatattcgcgagcacctgatgaatccactcgccagcgagcaagagcgcaacgccgatatggaacaaattgttgcggtggtgcggagttatatgaagtaa

SEQ ID NO: 273189 - DNA, 1293 bp, Klebsiella pneumoniae
atgtcaccgaaaataccccccgttaccccctctgccgcttttcccgccaccacctctgtggtgattattggcggcggcattgttggtttaaccgccgccttaaccctcgcggaacgtaatatcccggtagtggtgctggaaaaaggccgcatcgcgggcgagcagtcatcgcgtaatctgggctggattcgtaaaaccagtcgtgctgccgatgacatcccgttggcgcaggccgccgatcgcctgtgggcggggatggcggcgcgtgttggctgcgatgtagggtatcggcaggcgggcattatgtttatcgcccgtaacgacgcccagatggcattgcatgaaagttggttcaaggcggtagcgccgttggcgctcgacacccggttgctgagcaaggcagagattgccacacgggtaccgggcggtcagggccactggacgggggggattttcacggcctccgatggtcgggcggaaccgacgctggctgccagcgccattgccaaagcggctatcgcgcgcggggcgatcattgttgagcagtgcgcggtgcgaacgctggaaaccagcgacggcaaggtcagtggggtgattaccgaacgtggtgaaattcgctgcgatcaggtgctgctggcggcgggcgtctggtcgcggcgcttccttggcaacctcgggatcgcattgcctacgctgccattgatctgttcggtgctgcgcaccaaaccgctggaaggcccaacggatattgccgtgggagcaccggatttctcgttccgcaaacatcaggacggtggattcgtcattacccagcgtggcgcgctggatgcgccgctcaccctcgaccatctgctgctggggacgcgctatttaccccagttacggcatgcgcgggacaatctgcgcatctcgcttggccgctattttgtcaaagatctggcgctggctcgccgctggcgtggcgatcgtcgttcaccgtttgaacgcgttcgcaccctcgatcccgcagccaacccggcgcttaatcaggaggcgatgcgtaacctgcgcacagcctggccggtgtttgagcaagccgagctggcacaggcctgggccggggtgattgatgtgacacccgattcgaacccggtcatcggcccggtggctgcgctgccgggcctgacgctggcgaccggattttccggccacggtttcggtacttcaccggcagccgggcaactggcggcggatctggtttccggccatacgccgctgatcgatccaacaccgtatcggtttgagcgattttga

SEQ ID NO: 273190 - DNA, 423 bp, Klebsiella pneumoniae
atgacgcagattattaaagtgaaaaccggttcgaagtttgaagagatggggagctattcacgcattgtcgcggtggataactggatttatgtctccaacaccgcaggccgtaatccggtcagcaaggagattccggccgatgttacggagcaaaccttgcaggtgttcgccaatatcgaagcggcgctggcggcgattgatgcctcgcttaaggatgtggtgttctcgcgggtgtttattcagcagccggacgatgtgccgacggtgatggccctcatcggcgagaagtttcggggtatcaacccggccaccactgtgacctgcccgccgctcggttccacggtgtacaaggtggagctggaggtcacggcgtatcgtggggccgggcaggccgccgttcaggaaatcaccgtggcgctgtaa

SEQ ID NO: 273191 - DNA, 297 bp, Klebsiella pneumoniae
atgatcctcacccagtcgcaggccgtatcaacgactaccggggcgggtgaagtgctcgcgcagctcgcgatcaacatcgtcatcgcccatacgcttaacgtcttcctgtacatcactggcccctttcacaacttccgccttacgttctgccgctgcgacggtggcggcggcctcctcttcggtacgctgctgatcggctttggcttccgccttactggtcccgcgagcatgaccaatgccgaacgcaccagcgatagcgcccaagataacgaccaccagcccagcaataatttctaa

SEQ ID NO: 273192 - DNA, 222 bp, Klebsiella pneumoniae
atgttcagatatttcattctgcaccctgagcagcagttattctgttatttctgcggcatcgtgcttgcgatggttcttatgctcctgttcccttctgttttccgggggagtgggttttatctgcttttattgtctgttgtgctgttctgggtaggtctttccctttataccggtcacatcgaccggatgagaaagccaatcagaagagggacagaaagatga

SEQ ID NO: 273193 - DNA, 1071 bp, Klebsiella pneumoniae
gtgtttcctggaacccatttatcgaccagcggaaaagaagtcgtaaaacaagaagatgctgacttcgatatcgataagatggttaacatttacccgatgacaccgaagttgttggactcgatgcgtccgacaaaggtggttgctcagccgaatgcgcagttggacgcatcgctgcgcacgtatgaataccggatcggggtaggtgacgtccttaatgtcaccgtttgggaccatccagaattgaccacgcctgcgggccaataccgcagcgccagcgacacaggcaactgggtacactccgacggcacgattttctatccttatatcggtaaggttaacgtggtgggtaaaaccgttacccaaattcgcgatcagatcgcctcccgtttggctcagtacatcgaaagcccgcaggttgacgttaatatcgccgctttccgctcgcaaaaagcttacgtgacgggcgaagttaccaaatccgggcagcagcctatcaccaacgtacctttgacggtgatggatgcgatcaacgccgccggcgggctgacggagaatgccgactggcgcaacatcatcctgacccacaacggcaaagagcagcgtctttcattgcagcaattgatgcagaatggggatttgactcagaaccatctgctctatcctggggatattctgtatattccgcgcaacgacgatcttaaagtgttcgtcatgggtgaagttaaaaccccatcgacgctaaaaatggatcgcagcggcatgacgctgacggaagcgctgggcaattctcaggggataagccaagctgcggcagatgcgaccggtgtcttcgttatccgcccactgcacggaacacagggcgacaaactggctaatatttatcagctcaacatgtccgatgcgacagcattggtgatgggggctgaattccatctgcaaccgtatgacattgtttacgtgacggcagcgcctatcgcgcgttggaaccgcctgatcgttcagctggcaccaaccatcgatagcttcaacaatctcacggaaggctcactgcgtatccgtaattggccgtag

SEQ ID NO: 273194 - DNA, 354 bp, Klebsiella pneumoniae
ttgaagcagcatctgccggacaaagagatcgcttccgcaggcatcggtgccttggttggcaaaaccgcggataagagcactatttccattgcggaaaaacatcagctgtcgttagaagggcatgaagccaggaagctgacgaaagaaatgtgccgggaatattcattaattttggttatagataaagggcatattgatgctgtttgccgcttggcgccggaggtcagaggcaaaaccatgcttttcgcccattggttggggcagaaagaaattcccgatccttacagaaagagcgccgaagcgtatgagtttgtttaccgccttcttgatgatacagcccaaaaatgggcctag

SEQ ID NO: 273195 - DNA, 2142 bp, Klebsiella pneumoniae
atgactgataatacgaaactagatttatcaacagccaataatcatgatgagattgatctaagacgcttgctgggaactttaattgctcaccgatggctcatcatcgggattacagcgttattctctgttgccggtatcatttattccctgctcgccacgcctatatatcaagctgacgccatggttcaggttgagcaaaacgtcgggaacttgttggtcaacgacctatctcaaatcctgcctaacagtcagtcgggttcttccacggagattgaactgatcaagtcacgcatggtgacgggtaagactgtcgatgatctgaatcttgaaacggtggtgcagcagaagtactcctcgatttttggccgcggctgggctcgtttgacgggtaccgaacctgccaaaattgcgctgtcccgtctcaatgtgcctgccaactctggcgatgttgagctggaattgaccgtgattgatgcccagcaatatgtgctgagcaacaacggcaccgagattatcaaggggaaagttggcgcgctggagagtggccatgggatttctttgctggttagcgaaatttcggcggagccaggcactgtctttgaaatcgccaagttgccgcgtttggtggcgatcaacaatctgctggatgctttgacggttgaagacaaaggtaaagacaccggcgtgctggcgttgagtctggtcggggatgatcctgtcttggtgcgaaacattcttaacagcatcagcaaaaattacctgttgcagaacgtcgaacgtaaatcggaagaggcggctaaaagtctggacttcctgaaagatcagttgcctgaagttcgtagttttttggatagtgccgaagataaactcaaccgtttccgtcaggcgaatgattctgtcgatttgtcccttgaagcgaagtctgttttggacacggttgtgggcgttgaggctcaactgaacgagctgacgctcaaagaggcggaaatttccaagctttataccaaagagcacccggcttatcgtgcgttgatggaaaaacgcgccacgttgcaacaagaaaaagataagctgaacaagcgcgttagcgttatgccgaagacccagcaggtaatcttgcgtttgacccgtgatgtacaggctgcgcaagagatctacatgcagttgctgaataaacagcaaaaactgggcatcaccaaggcaagcacagttggtaacgtacgtatcgtggatcctgccgttacgcagcctcgtccggttaaaccgcaaaaaaccattatcgttttgatagccacgttgttaggcggtctattctccaccggtttcgttttgcttaaaaccatgctgcatcgcggcatcgaaagtccggaacagttggaacagctggggatcaacgtttacgcgtgtattccgctgtccgaattgcagcacaagagcgaccgcgagaccatgctgtccggcaagcgcagcagtaacaggagttccaccctacttgccgtgggcaacctgtcggacttggcgattgaagccgtcagaagcttgcgtaccagactgcattttgccttgctggaagccaaaaataacgttctgatgatttccggtcccagcccaagcatcggtaaaacgttagtcagcattaacctggcggcggtgatcgcccaggcgggtcggcgcattttggtcgttgacgccgatatgcgcaaaggtcatgcccactcgttgttgaactgtgaattgggattgggattgtctgacgtgttgtccggccaggcgtcgccgcagcaagcgatcaagcaaacatcgatcgagaatctcagctttatctcgcgcggcaagattccttcgaacccatcggagttgttgatgcaaaaccgcctgacagagttcctggaatgggcgggcaaagagtatgacatcgtgttggtcgataccccaccgatcctggcggtaacggatgccgttattgtggcgcgcaatgtcggcacgacgctgttggttgcacgttacggcgtgaactcgctgaaagagattgaggtgagtattcgtcacttcgaacaaaacggcattgaaattcaaggtattatccttaacgccgttgaaaataaatcgggtaacgtctactacgcttatgaatataaataa

SEQ ID NO: 273196 - DNA, 690 bp, Klebsiella pneumoniae
atgagtaatcttgcaattattccggcaaggggtgggtcgaaaggtattcccaaaaaaaatattaaagaaattgcaggtaagccattaatcgcttggagcatagagcaggcattaaattcttcgagtattgatcgtgttattgtttctacagattgtgaagatatcgctgccgttgccagagaatatggcgcggaagtcccgttcatgcgtccggcccatttggcgaacgataccgctgcgactgagcccgcgcttttgcatacgctggagtggttggctgaacatgagagttaccaccctgagtataacgtcctgttgcaggctacttctcctgttcgcaaagatgatgcgattgattctgcaatcagaaagattattgaaaagaaagccgattcactgctgagcgtatgtgagttttggcatttcttgtgggaaaatgaagataatccgaaagccaattacgactacttaaaccgtccgcgtcggcaagatattaagcctgaaaatatcaaacttaaagaaaatggttcaatttacgttacgaaaagcgaaattctcctcagtaccggcaatcgtcttggtggcaaagttgtagcgcataagatgtcggaagaggaaagctttgaaattgacaccatgctggactgggcggttgttgaagtaattttgaaaaattggagtgggagataa

SEQ ID NO: 273197 - DNA, 2241 bp, Klebsiella pneumoniae
atgttaattcagaaaaaaatatctgactttttagtgtttgaaaccgaatcaatcattaaagccatagaaaaaatcaactcgaataaaaaacgcattatttttgttgtcaccgaagacggcaagctgtgcggctctttctcagacggtgatttccgtcgttggatcactaacggtgacttcgatctgagccgcgaaatgtcggaagtgatgaatcagaacgtccgctataaaaaagtggatgcgccacgcaatgagattgaatcgctgttttcgaatggcgttgacgttctgccgctggttgatgattatcgtcgtttggtcgccgttgcgctgcaaagcgaaaaaggcctgacgattggcaaacacactatcacggaaacctcgccgacttacattattgctgaaattggcaacaaccataatggcgatattaagctggctaagcatctggttgacctggcggttgacgcgggcgccgattgcgtcaagttccaaatgcgcgatctgagctctttgtataagggcggcaacgataaagacaaatccgccgatcttggcgcacagtacacgctggatctgctgagaaaattccagctcagcaatgaagaactgattgaagtgttcgattattgcaaggagaaggggctgaccccgctgtgtactccttgggatctgaagagcctggaagtgttggaaaactacggcatggaaggttataaggtcgcttccgctgacttcactaaccacgaaatgttggccgcgttggccgctacgggcaaaccgctgatttgttctaccggtatgtgcagcgaagcagaaatcaaaagctcggtagacttcttgaaatcgaaaggtgccgagtttgtgatcctgcattgcaactctacgtatccgacgccgttcaaagacgtcaacctggcctatatcaaacgtctgcagcaggtgacgggctgcttggtcggctattctggccatgagcgtggcatttcagtgccgatcgccgtgaccgcgctgggcgcaagagtaatcgaaaaacacttcaccatcgacaaatccatggaaggcaacgaccacaaggtgtcgttgttaccccctgagttcaaagagatggtcgtacgtatccgcgaagttgaagagtccatgggcaacgccggcgaacgtactatcacccaaggggaaatgatcaaccgcgaaactctggcaaaaagtttgattatcaatcgcgatctgaaaaaaggtgaaatcatcactcgcgagatggttgaagtgaagagtccggggcagggtctgcagcctctttatctggagcaattggtcggtaagaaagccaatcgtgaccacgaaaaaggcgggtatttctatgagtcggatctaaatgatgtggcgatagaagccaaggactatgatttcaatcgtccgttcggcattccagtgcgctaccacgattacggcaagttgaagaataaatccaatctggacttcgtcgagttccatctgagctatcaggatatggaactcgatttgacagaattcttctccggcgctgaaaatatcggttttgcggtacatagccccgagctgttcgccaacgatcatattttggatctggcgacggatgatcccgtttatcttgctcattcgatcaaacagctgcaccgtgtctgcgatgtgactcgcgcgttgaagcaatatttcccgaaaactgagcgtccggtcatcgtggtgaatgcaggcggtttcaataccaccggtttcttgccaaaagaatcacgtcaggcgatgtacgaacgcattggcgccgctctgggtgaaatcaatcaagaaggcgttgaaatcatcatccagacgatgcctccgttcccatggcactttggtggtcaaagctatcataacctgtttgtcgatccggacgagattaaagcgttctgtgagaaatacggctaccgcatctgctatgacacgtcgcattccatgatggcttgtaattactaccaatgggatcttcatgagtttacccagaaggtcggcccttacaccgcacatatgcatattgttgatgctttgggagtggatggtgaaggggtacagatcggtaaaggcgatgtgaactttgacgagctggctgatgatctgcgtcgtcatgcgccgggagtgcagtttattcctgaagtgtggcaggggcacaaaaaccaaggggaagggttctggcatgcgcttaacttcctggaaaagtatctgtaa

SEQ ID NO: 273198 - DNA, 1224 bp, Klebsiella pneumoniae
atgggggctgcggccttgtcggtaggggatattctcggcaaggtcatcggcttcatcatattaccttatttgacagcacacctaggcgcgtcggggtacggcgcgctgactctttatttgtctgttattcagatcttgatcattttcatttcgttcagtggtcaaggtctgttgccggtcaaatacatgcaggagggggaagggagctccctggtgttccgcagagataacatcgccttggctttcgcgtcgagcgcgctactggtggctatattctacattgtcacactggtcaccaagatctctgtttctttcagcgacggttttctggttgttttggcatctctggcgcaggcgctgaactttatcaatttatcgcatttgcgcattagtcagacctataaagttgccgctatcggccaatttttgctttccgcattcaacgttttattcactatcgctctttttgaaatgatagcgtcgacgccaggacaacgtttgatagcgatcgcggcatcatttttcagcattcagctggcctacgagttctttgtttacagaaaaatagcggttgaacgcagcgtgctccaaccgttgcgtaaacgttataaggaaatcattagctacggggtatccctattgccacatcatggcagttattggattaaatcctcggttgatagattcttcatagcgcattacatgagtacggcggtagtcggggtttatggcttggcgtttcagctaacctctatcgttatgctctttttcggcgtaatcaaccaggcgttccaacctttcatttatcgcaagcttaaagcgaacgattttagaggggtcgagctcattcaatatggttacacagctctggttatcgtttcgtgcattatttacttctttattttgccatttgctttcccgtatctgtttaatgctgagttcaatcgcgccatttattacttcaacatttttttgcctggaactgcatttttatctatttattatatttttacgcactcactgttttactatcgtaaaaataaattaatctcaattattaccatgggttcgatgataacgcatttgattggtatatttgtcatcaccatgacagaaatcaaagttgagtatttctgcctggtttatgcaatttctagtttttatgcgtgtgcagtgactttttattgcggcaagcgaaagatcagtattgagaggaaaagatga

SEQ ID NO: 273199 - DNA, 414 bp, Klebsiella pneumoniae
atgtataactgccgttcaatgaaatttgccttcagccttaagctgcagatagtgagcaacatcgcgttgcgaaaatggtttcgctggatggccgccggctatagcgtagggctctatatctttaaccaccacgctgccggcttggataatggccccttccccaatggaaaccccaggcagaacaatcacattgatcccaagccaaacattatccccgatatgcgtatccttaatcacataagtgttatcgtagggaatcgcattcccatgatgattgtgattttctgtgatcaatacacaaccaaaaccacagtggaaattatcaccgatagtaacaccgccctttccaaccaccgtcaaaccattggagttaaagttatcaccaagtcgggttttattattaacgatagttaa

SEQ ID NO: 273200 - DNA, 309 bp, Klebsiella pneumoniae; identical to SEQ ID NO: 21175

SEQ ID NO: 273201 - DNA, 1920 bp, Klebsiella pneumoniae
gtgcccagtggggataccgaccagctgccgcccatcgcgtcgggccagccgttcaggctgacgcagcagcgcagcgccgccgacgttgccatcatgaaagagattgtgcaccaggtacctgagctgcgaccggcggtctacagcctgattgagcgggatgtgcaccgcgccctgaccaccatcgagcaggtcacgccggagcaggtgccgagaaaagaaggcgcctgggcgccgggcagttctgtggtggaattcacgccaaagcaggaaaaggcgatagaaaaggcgctgagcgaggggaaaaccctgccggaaggtcagcccgcgacgctctacgaggcgctggtgaaggactataccggacggaccccggaggcacagtcgcagacgctggtgatcacccatctgaataaggaccggcgggcgctgaacagtctgatccatgacgcacggcgggagaacggggaaaccggcaaagaggaaatcaccctgccggtgctggtcacgagtaacatccgtgacggtgaactgcgcaaactgtcgacctggacggctcacaagggggcggtggcgctggttgataacgtataccaccgtatcagcaaggtggataaggataatcagctgatcaccctgacagtcacgctctatcgtcaggaaaagatcaccgtgtctcagggggaccgaatgcgcttcagcaaaagtgacccggagcgcggctatgtggccaacagtatctgggaagtgcagtctgtttcgggtgacagtgtcacgctgtctgatggcaaactcacccgtacgctgaccccgaaggcggagcaggcacagcagcatatcgacctcgcctacgccatcaccgcccacggtgcccagggggccagcgaaccgtatgccatcgcgctggaaggggtggccggtggtcgggaacagatggccagctttgagtctgcctatgtggctttatcccgcatgaaacagcatgttcaggtctacaccgacaaccgtgagggctggataaaggccatcaagcattcacctgagaaagcgacggcgcacgatattcttgaaccccgtaacgaccgggcggtgaaaacagccgatctgctgttcgggcgggcaaggccactggatgaaaccgccgcgggccgggcagccctgcagcagtccggtctggcacagggaagttcaccgggaaaattcatttctccggggaaaaagtaccctcagccgcatgtggcgctgccggcatttgataaaaacgggaaagccgccggtatctggctcagcccgctgaccgatcgggacggacggctggaggctatcggcggagagggacgaattatgggcaatgaagacgcccggttcgtggcgctgcagaacagccgcaacggagaaagcctgctggccgggaatatgggggagggcgtcagaatggcccgcgacaatcccgatacgggggtggtggtgcggctggccggtgatgaccgcccctggaaccccggggccatgaccggtgggcgggtatgggctgaaccggcgccggtggctccggtaccgcaggccggggctgacattatcctcccgccagaggtactggcacagcgggcggcagaagaacagcagcgccgggaaatggaaaaacaggcggaacagactgcccgggaagtggccggggaggcgcgtaaagccggcgagccggcggaccgggtgaaagaggttatcggggacgtcattcgcggactggagcgtgaccggccgggtacggagaaaacgacgctaccggatgatcctcagttccggcgccaggaggaggcgattcagcaggtggcctcagaacgtctgcagcgtgagcgtctgcaggctgtggagcgtgacatggttcgtgaccttaaccgcgagaaaacactcgggggcgactga

SEQ ID NO: 273202 - DNA, 243 bp, Klebsiella pneumoniae
gtggcgacaaaccgtctggaagagcaggagttgtctgttctggcgctgcatctgttgcagatttgcctggtctacgtgaacacgctgatgatccagcaggtactccatgagcccgtatggctgtcacgaatgaaggcagaagacttcagagcactgacaccgctgatttacgctcatgtaaacccctatgggatatttgagcttgatatggaaacaaggttaccgatcgacgtggttgcctga

SEQ ID NO: 273203 - DNA, 294 bp, Klebsiella pneumoniae
atgattaagaaacccagccaacaggcttcttcacgaccttcgattacaccagagcaagcagacgaactggcaagacgtctagccgacaaaccctatggtgatcctgaaaaatctgctcctgaggaagaaaaaccagaaaaacaatgtagaacaacaatttctctatatgaatcattgctattgaaagtcgaagatttagctctgaagaacaaaaggaatggtaaagagcctaagaacgtaagcgcgattgtcagggaagcactggaactctatctgaaaaacaaagggttataa

SEQ ID NO: 273204 - DNA, 639 bp, Klebsiella pneumoniae
atgataactgtaattggtggtaataaaggtgggtcagggaaaaccaccaccgctgtaaacctcgcgataggtctggctctcagaggcaaggatgtatgtctggtgaatggagatctacagcgaacagcagcaaaacacctagctgagcgtgaagcggcagaagtaaagccaactatcactcttattgagaaattcgataacctctctcaaacgcttcgcgcacttgatgagaagtatgaacacgtgatcgttgatgttgcaggccgaaactccagagagttcattaccagtggggtggtcgctcaccaaataatcgcaccactgcaatgttcgcaacctgaccttgatacgctgatcgagttgcagcaacaagttgaaggcatgagggctctcaatccagacttaaaagtctattgtctgcaaagcatggcaacaacaaatccagttttaaggggcaatgaacgaaaggaatttattgaatatcttgaagaattcccgtcgatagcaacacttgagtcggtaatttgtttcaggaaggtctatcgtgactgcatgagcactggcttaggggtgttagagactgataatgctgctgcaaaatccgaaatggaaaagctaatggaagaggtatttggataa

SEQ ID NO: 273205 - DNA, 447 bp, Klebsiella pneumoniae
atgcgtacagagcctcacttctcaccgaccgtgctgcaggtgcatccgcagacaccagcccggctggccattccccttttttccgaggcgtgtccggcaggctttccaagcccggcaggggattacgttgagcaggagcttgaccttaacaccctgtgtatccggcacccttccgccacctactttctgcgcgccagcggagaaagcatgcgcgatatcgggctgcacgacggtgacatcctgattgtcgaccgcgccgaaaccgcacaggaaggggatatcgttatcgcggaaatagacagggggtttaccgtcaaacgtctgaggctgcgaccccgcccggctcttgagccaatgaacccggattacccgacgctgtacccggaaaccctcaccctgttcggggtggtgacgcacttcatccaccggaccagggcgcgcctttaa

SEQ ID NO: 273206 - DNA, 246 bp, Klebsiella pneumoniae
atgctacaggtttcagtacgtttttctccggaacaggtaaaggccatgcccgccggggcatttgccgctctgcagcaggaaattgagcgacgcctgacgccgcattatccgtcactgtggctcaacgtcagcaagggatcacagagcagcctgagcgtcagcggcgcccgaaatgaccgggagaaggctgacgtcatggaagcgctggaggctatctggctcgacgacagctggctgcctctgtaa

SEQ ID NO: 273207 - DNA, 261 bp, Klebsiella pneumoniae
atgatcaccatcatgaggccacaatctagtcatgtacgtggcgaccgtttcatttcaatcttagacgcttgcaatcaatctatagtggacgccacccgtaaacccggctatcacgagtggcgggaaaaaatgaagcgcaaaggttggttgatagatcgcgaagtggataaccagatcatggcacaacggcgcggagagcagatactggaaatcgttcctctggaagaactggaaggaacgagcaacatgctaggccggtga

SEQ ID NO: 273208 - DNA, 282 bp, Klebsiella pneumoniae
atgttgaaatcgatcggtttttttgaggcggatcgcgcaatgtctgaccaacaagaaaaaaaacgaaaaagagagtaccggaaaggtagtccattaacaaatacagagtacagcaaacgctacgaagcatctcagccatcatctcatgttttcgttagagcgcttgtgccaagaacagttgtagaagactttaaaaaacgatgcgctgagaaaggtgtatccatgaaggatgcgatcagtcatgcgatgattgattatctggaagatgacagtaaatggtaa

SEQ ID NO: 273209 - DNA, 651 bp, Klebsiella pneumoniae
atgaataagcaccgtgcgcgtgcggtaaacgcgatttgtgtgtgttttgcagatcgtctcaatattgttaccggcaaagtgtatatgacgctggcgcaaatctccgacagttgcggtctgaccacctacaataaggatggaacgccctgctacagtcgtgccagccgtgccattaacgagcacctagaagccattggtgcaatccattgcgaccggatatgggacgagacaaccggctcatggattccgaacctgatatgggtatctgaactgttttttaccctgataggttacgagtacgggaaatatgaagcagcacaacagcagcaactggcatgggaaaacaaagggctgaaagaacaaggcgaacaggctatttcattgaccgaagcccgcagacgggcaaaggtcaggcatatccagactgcatttgaaatacgagccaaaaaacgcgcgttcaaaacgcagctacgtcaggccagaaaacttgccgcgatggaaaagcagcaggcacaggccaaaatccttaatgacctcgttaaactctacacgcaggaagaactgacagcgatgggacatgttgaacttaaaagacaggtcgagcatcgctatgcggccatgagaaagctcgccactgcgcctccgcattga

SEQ ID NO: 273210 - DNA, 219 bp, Klebsiella pneumoniae
atgaaacacagagtgagtgtgaccgtcgataaagacaattatcagttactgaatgctgccggggtgaatgtttccggccttgtcaacgaggccatcggcaacgaagcccgccgactcaaggccgagcgctggaaagcagaaaaccgggctggaatggaggaaatcgccgcgttcatttctcaacacggctcttttgccgacgaaaaccggaactggtga

SEQ ID NO: 273211 - DNA, 306 bp, Klebsiella pneumoniae
atgcaatttactgtctatgaataccggcgggaaagcgcctacacgatgttcgttgatgtgcagagtgatattgttgaaacgcctgaacgccggatggtgatccctctggttgaagcccgtcacttttcggcaaaagtcagcccggcattgtttccggttattcaggtatcgggaatcgattaccggttactgaccaccgaactcgccagcgtaaacagccgtttcttcggtgaagttttaggcgatgccagccctgatgccgaagccatcaagaacgcactgaacctgatgttctggggggtataa

SEQ ID NO: 273212 - DNA, 264 bp, Klebsiella pneumoniae
atgagattgaaaaaaccgcctgttgaggcagaagtgacaacgccaagtgctttcgtgcgtgaggccagacaagtgccggccaaaggagcatccaagccaacatcctttgtgttgcagcagttttatcgtgaccttattgatgaagaaagtgatttatcggaacagaaccgcaccaccgtgctgaaagcggcgttgctggcattcagtaatatggcgccaaatgaaaaaaatcattggttgctggaagccaacaaaaaaagatag

SEQ ID NO: 273213 - DNA, 657 bp, Klebsiella pneumoniae
atgtcaattttattgattgcttcggataaaggtggtgtcggaaaatcgacaacagcggtgaaccttgccgtttacctgtcgcagagtggtaaacgagtcattctgttcaaagcaggcaaagataaagcgctgctcaactggcaggaaaaacgccagaagcagggattgcccgttattcccgtacaggaagcctatgggaacattgctgaaccgataactaaagctgctcggcttgctgacgtggtgatcgtcgattgtccgggtttcgataacgcagaataccgcagcgctcttaccgtcgcggatgttttcattacgccaatcaaaccgtcttccgactttgaagctgaaacgttgacagatgtaaccgccacggtcagaaaagcgcagaaaatgggtaataccaaacttcgtcctttcgttctattcacccgtgtcaaacataaccgaacagccactgccgctgaattagccaaggagctaaagagcgacgatgtatggctcaggccgctgaatacccgcattggtgaactgaccgtttatgaagattgcgcaaacatcggcgctggcgtacatgacgttgaccgcgcctccagtctgggtaaggcaaaagcacaaatcgaattactggcaaatgaattggggcttgtaccatga

SEQ ID NO: 273214 - DNA, 645 bp, Klebsiella pneumoniae
atgacggctgaaacggcggcaaccatgcgggcgatggcggttgctgccgatctggatctgccacgctacctgctggccggtgaaattcagtgcctgctggattatgtgccggatctgcgccagcgcctgttgctggaaaccctgtggaataccggcggtcgcattaatgaagttctggccttgacgccggctgattttcatcttcatggacatcaggcatttgtcgtgctgcggacgctcaagcagcgccagcgcggaaggggaagaccggtgaggggtgaacgtatcagccgtgcggttgccctccccgatccccattaccagcgacgggtgagggaatttattgccacgttcgggctgcgccagcatgagcgtttctggccgttgtcgagcgacaataccccccgtaactggatcagtgctgccattacccgcgcagccgatgataacgtgacgtttccggtagatcccattacctgccatactttccgccacagttttgccatgcacttgctgttacatggcgtccccctgaaagtaatacaggcatatctgggtcacagtcgtgtttcctcaaccgaaatatacacgcggatatttacgctcgacctgaactggctgggtagcgtcagattcagtcaataa

SEQ ID NO: 273215 - DNA, 609 bp, Klebsiella pneumoniae
gtggaatggttagcagcgttattatcactcattaatcagaatccgtgggcggggacgatactcgccacgttcgctaccgcgctggcaggaatgtttacctttcacctgaaagagcgcggacgcaggcgaatgaaacgttatgaactgacgctggaacattacaacgcatacagttgcctgatgttcaccgcgatggatgcgttatgtaccgataaagggtttgaaaaagttcagacccggatcattaagccggatctgcccgaactggtgctggaagagtctacctatgatgcgctcaatgaccttctgtgtgcttcggggcgggcaacgctggttgccgatcctctggcgcgtgaacggatagccgcctgcacgaattgcatcatccataaagtgaatggaaatcaacaaacatctgacgactgccacgacaaaatactggatgcgctcagggcaatgaaccagcatctgcggcgttttgaatactggtggctgctgcgctggggaactgcgggtagagcaagttggcaggcgagagcggtaaagcgcacaaacaataaatgcggtaacagcatgaagaataagaaaaataatgaaaatgatgaataa

SEQ ID NO: 273216 - DNA, 753 bp, Klebsiella pneumoniae
atggatacatttgtagagaggtatgacaatccatcttggaatgcgtttcttgaatataagaggaaaagactaataaaaggagtagaggaaataagtcgcggcgtatacgttaaaaatgtgaagaataagagatttaatggtttaattaacgttcggcagcttgattctgagtatatcgatattcgttattgtcataagggttgtgaagatataactggatatcataattcatttgtcaataacatcttggatgtaagggctaatatgaatgatatttataaacgactaggagagatattaaacataaaaagcatccatcaaggagtaagagtttttggtaacgagtctatttttgaagcccttgttgtcgcgatttgttcacagcagctatccgtaaggtctgcattttctataatcagcgacttagtatcaaaagtaaactcaaggaattgttatggattactgtgtttccccgaaccaatgagcataaacaatcaggttttacaaatgtttaaattaagtaaaaacaaaaaagaagcattatcggagattataaaaacattcagcattggcgtaccacctgaattgtcagacctaattaggataaaaggaatcggaaggtggactgtcgattacgtaaaaatattcggcttacatgactgtaatatatggttgtgttccgatcgtgcatgtagtgagttctctcgtaaaaacaacgcattagaattgggctgtgaatttccctgcgcttaa

SEQ ID NO: 273217 - DNA, 819 bp, Klebsiella pneumoniae
atgatcattagtgcaagtaggagaactgatattccagcattttacatgaaatggtttttaaagaaactaaaggatgagtctgttaatattcgcaatccatttaacaaaaaacaggagaaagtaatatctctggcaagagatgatattgactttatcgtattctggactagagatgcaagagcgttattaaaaaatattaatgaattagactcatataatatcccatattatgttaattatacagtaacaggatatggtcgcgaagttgaggttaacgctagagaacttgatgaatccattcagacaatcataagactttcagaaaaaatagggaagtcaagagttgtctggcggtatgaccctattataattagcgacagaataaactacgaatggcatgagaataacttcttaaggattctatccgaaacaaaagattatataaataaaataatagtaagtattattgatgaatacaagaaaaataaaaaaaacctgttagatattggcgtgctatcaccaaccgaaaacattaatgaatatcacatggttgttaaaatgatagccgagcactgccagactcgaaaagtactcgtgcagtcctgtagcgaagaacttatacccaatgaaattatccccgcaggtgcttgtatagatccaagtataatctatggcaatatgataacttctcgtaaagatcacggacaacgacgttgctgtaaatgctatcctagcacagacatcggagaatataacacatgtttttatggctgtaaatattgttatgctaccagtcgagagccgaaaaaattaacttaa

SEQ ID NO: 273218 - DNA, 432 bp, Klebsiella pneumoniae
ttggcgggataccagcacgagcagaataagattaaacatgcctctagtttgcagcagacgtggtatcgctataaccgcaatcgagatttcatctcggaagcaattgactggggtacaggcgtcgccggtagcaattcgcagacggccattatcggcgggtacggtgagtatggaactgaaaagaacacaacgacactgaaacaggacgctgaacttaatgcgttttcaacttcaggtatcactcatcaaatagatgctggttggcaagttgacagttatcaggcggagtatcgccgcttcggtgatgcttacgtgagccgtggcgtagccaccatcagtccaaaaacgcagtgtcagtccgacgatgcttggtgtatcggtggcgaacagtacattggggtgcaggcccggcgggtttccgggatcgcctga

SEQ ID NO: 273219 - DNA, 636 bp, Klebsiella pneumoniae
atgcacgcatgtccatacctggagatggtgaagaaggctcccgctaacccaggcgctgaaagcgccgcccagggcgaccccgtcgccccttggactcgtggcaataactgtcccccaaacccaaaaacccccaaaaaagggaagataactgacgttgctatacccgagataatgacccctgatgaaggaactggaacgctcgatgtgagtaaactatccgcaaaagagcgccgggttgtactgagaaggattacagaggagatctataacaagaagaaagcacagggccacgtagaatcacgcaattactctccgcttgaggtcttgttgagcgattttgcttcatctattggcatcgaacttagagaatcccaggttaatcatttacttaatggtaaacacatacgttatggtgatcgcatttactacgcgactcacgatggggcgctgcacagtatggaaccagagaattcagatgttcagattcggaacgtgtggaaactgttgaaaaaatacaataaagtagatgtaggtcacatcacagataatccagtagggcattattccgacatgctcaggaaactggatcctaggggatggacggtactctttgggggagataaggacagggggtga

SEQ ID NO: 273220 - DNA, 423 bp, Klebsiella pneumoniae
atggattttttccgcaaccatgatctgattaacgaagatggcgacacgctcagcatggaggatgtggtgcttgcaagtgccagcaatccagcgcaccgtcgtaatgagatgatggcctgtgttaaaggcctggaattgatagctgaaatgcgtggcgactgcgccatgttatataccatcaactgtccttctaagtaccacgccacactgatgaacgggaagcctaaccctacatgggatcactcgacagttaggaaaagcagcgactatctggttgatacgtttgcggcattccgtaaggcaatgcacaaaaaagagctgcgctggtacggcgtccgcgtagccgaaccacatcacgatggcactgtgcactggcatttattgtgttttatgcgcaaaaaacatcgacgtgcaatcacatag

SEQ ID NO: 273221 - DNA, 627 bp, Klebsiella pneumoniae
gtgggaaacaggtcaacttcgcggtcggcccggactatgggaaacaggtcaactttgcagacgtccgggactatgggaaacaggtcaatttcgcggtcagcccggactgtgggaaacaggtcaacttcgcggacggcccggactgtgggaaacacgtcaactccgcggtcagcccggactgtgggaaacaggtcaactccgcggacggcccggactgtgggaaacacgtcaactccgcggtcagcccggactgtgggaaacaggtcaactccgcggacggcccggactgtgggaaacacgtcaactccgcggtcagcccggactgtgggaaacaggtcaactccgcggacggcccggactgtgggaaacacgtcaactccgcggtcagcccggactgtgggaaacaggtcaactccgcggacggcccggactgtgggaaacaggtcaacttcgcggacggcccggactgtgggaaacaggtcaactttgcagacgtccgggactatgggaaacaggtcaactttgcagacgaacgggactgtgggaaacaggtcaactacccggacagccgggatgcgggaaaccggtcaagttaggcaagcactatgggaaatacagcaagtttag

SEQ ID NO: 273222 - DNA, 282 bp, Klebsiella pneumoniae
atgaatcctgaaaaatacaatagaagtataagcttgctttgcccgacttgtggctgttcagacttttcctacgaagacggttgcgatgaaacaatacaagtaatgacttgtgcatcttgtggccgagagttcaataaagatgagcttattcaagagaatagcgaaaatattgatgagcacctttctgaaatcaaggaagaagttttaaaagacgttcaagacgaactacgtaaaactttgaaaaaggctttttctggtagcaagaatataaggattaggtaa

SEQ ID NO: 273223 - DNA, 474 bp, Klebsiella pneumoniae
atgccagtaactattgatgcaggtgatgtgatagctggattagctttccttttatctggctacgcaacatggcaaacggtcagctttaataagaggcagaagtcacttgtcgaaagccaagaaaagctaaacaccattctcttggaaaaagaaaatgaagatgctctgaaaggaaagcaagctgaccttggtgcatcaattataaaacttggcagcagtaagtatcggcttaaggtttggaataaaggagctgctactgcaagaaacgtcagaattgagttccctgaaggtaacgatttagttattgaatcagaagtgactgacaaatttccgatggaaagcctcgaaaagtatcaagccgttgagctaatagccgctgttcatatgcaaacgaaacgaaagcatgttgttcggctagtttgggaagatgatgcccagtcttacaatgaaaagctgtcttaccctacactgtaa

SEQ ID NO: 273224 - DNA, 2151 bp, Klebsiella pneumoniae
atgttcaaaaacctattttttcaaaccaaagcactaccagaactctcatctcaactggatgcggaaattccacgctacccgccattcctgaaggggttgccagctgcgtcacctgaagatttgcagtccacacaagacgagctaattgccaaactgcgccaggtacttggctttaatcagcgtgagtttcaaaggctgattcagccctgcattgatcatctggcggcttatgtccacttgctgccagcttctgagcatcatcatcacagtggtgctggtggtttattacgtcattcgttggaagttgctttctgggcggcacaagcagctgaagggatcatctttgttgccagtggcactccagttgagaaaaaagagcttgaaccaaggtggcgtgttgcggcggctcttggcggtttgttccatgatattggtaagcctgtttcagacttgtccattacagacgaagatggacgctatcagtggaacccttttttagaaaccttatctcagtggaccactaataacagcattgaacgctatttcattcgctggcgcgacggacggtgcaagcggcacgagcaattttcaattctggtgttaaaccgggtgatgacacctgagttgctcgtctggttaacccagccgggccctgagattttgcaagccatgctggaagcgattggcaataccgatcccgagcatgtcctgtctaaattggttattgaagctgaccaaaccagtgtccagcgagacctgaaagcgcaacgaatttccgttgacgacaatgcccttggtgtcccagttgaacgctatctacttgatgccatgaggcgattacttgccagttcgcaatggttggtcaatcagcgagacgccagagtctgggtacgaaaatcgaatcaatcaatccatctttgcctggtttggaaaagcgcggctaaggacatcattgagctattggccaaagacaagatacctggcattccaagagatcccgatacccttgcggacatcctcattgagcgaggattggccactaaatccgcctcaaatgagcgatatgaaagccttgcccctgaagtgctgatcaaagacgacaagccaatctggttacccatgctgcatatatctgaggccgatttattgttcagctcgaatgtaccaagtagcgtgagactgtttagtaaacctgagtgggaagcaacgcagcaaacacaagcagaacctcagagtcgctccagtgggcattcagacttgcctgaagcgtcatcatcaatcgaacatagcaattcggctaagtcgccatcgacaaaaccgtccgaacaagatgatgaacttcgtcatacaagcgatgttagtaatcctcagatatctgaagacgttccaggtgatggatgcgaaaagccaaacgattcaagcgaagctgctatcgcagataacgtaaatcagcaaaacgaagcagcattgaatctccctgaatatttggcgtggctcccagaggccagcagtgcgttggttgtggttggtgagcaagtcctgatccgttatcccgatgccgtaaggccttggtgtgctccccgaaaactgcttgctgaactcagtcgattagactggcttgaactagatcctgcaaacctgacgcgtaaggccagaactgtgactacgaatgatggcgttcaggagcaagggttactgctgaaagtatcgatttctaaagggcttactgcactgatagaccttcccaaacaagacgcagaaccggcggcagcaattcagaacgaagaggttttacagcgtccgagtcgaactaagacaactaatgcccaagcaaaagagcccgccacaagagcggagcgtaagcaaaagccgattgcggccaatactaactcaagtacagaccccaaacacgcgcagcgccaacagatggttaattttgtgaaagatttgcccatcttactgaccgatggcgattacccagacgtggatcatagtgccgatggtattcgcgtcacgattcaaaccttacgccaagtcgccaatcagcatggcattccagccggacagctgcttcgggggatctcggccagtgaccaatgccagtttgatgagggggaaacggttctgtttaccgctcacgctaagcgttaa

SEQ ID NO: 273225 - DNA, 1821 bp, Klebsiella pneumoniae
atgaaagaaaacgcatatgagatgccttggcgcacgaattatgaagccatggcagtagcaggttggctggtaggggccactggggcaattgccgcagaaatgctgactgagctaccacctgagccattttggtggatgacagggatttcctcgggcatggcgttgtaccgcctgcctgaggcttaccgtctttataagttgcagaaggggctaaaaggcaaaccattggcttttatggagctgtcgcatttgcaaaaagtgatggcaaaacatcctgatgaattgtggttaggttatggctttgagtgggaccaacgccatgcccaacgcgcttatgaaatcctaaagcgggataagcaaaccttgctgaaccaaggtcacggcaagcaaatgggttctacttggattcatggtgttgagcccaaagaagaagatgtttaccagccagttggtcacactgaggggcacaccttaattgtcggtacgaccggtgccggaaaaacccgttgctttgatgcgatgatcactcaggccattttgcgtaatgaagccgtgattattattgatcctaagggagacaaggaacttaaggataatgcgcagagagcctgtattgccgccggtaatccagagcgctttgtgtattttcatccgggttttccagagcattcagtacgtcttaaccccctgaggaactttaaccggggcactgaaattgccagccgaattgcggccttaatcccatccgaaaccggtgctgatccatttaaagcttttggccaaatggcactgaacaacatagtgcaaggtttgttgcttacttcacagcgtcctgatctgaaaacgttgagacgattcttggaaggcggtccagaaggcttggtggtaaaagccgttacggcctggggggagcaggtgtatccgaactttagtgtggagattaagcgctttaccgaaaaggccaataccttggctaagcaagctatggcgatgctgcttttttactacgaacgcattcagcccgttgccgccaataccgatttggaaggccttttgagtatgtttgagcatgacagaacccactattccaagatggtggcctcattgatgccggtgctcaatatgctcacttcaagtgaattaggcccattgctatcacctattgcaaacgatgtggatgacagccggttaattacggattctggccgtataatcaacaatgcccaagtggcctatatcgggttggattcattgaccgacgccatggttggcagcgccattggttcgttgcttttatccgatctcaccgccgtggccggtgaccgctataactatggtgttgaaaatcgtcccgtaaatatcttcatcgatgaggcggctgaagtcgtcaacgatcccttcattcaactgctcaacaaaggccgtggcgcaaaaatgcgttgtgtgattgctactcagacctttgctgactttgcagctcgtacaggcagtgaagctaaggctcgccaggtgttaggtaacatcaacaacttgatagcccttcgggtgatggacgccgaaacgcagcagtacattactgacaatctgcctaagactcggttgcagtacatcatgcaaactcaaggtatgtcgtccaactcggacagccccgcgttgtttaccggcaatcatggcgaacgcttgatggaggaagaaggcgatatgtttccaccgcagttattaggccagcttcccaacctggagtacatcgccaagctttcaggtggccgcgtgatcaaaggccgcattcctattttaaccagctctacacaggcagcataa

SEQ ID NO: 273226 - DNA, 561 bp, Klebsiella pneumoniae
atgcatcattctgtctgtctgaaaatgacaacacttaccagtaaagaaatgctcgctcagtggcagcaacataaccctcagttcaaggaaaccttaagactgcttgaaaccgactggcctcatgctttggcctcggtgtattgcttggcggactatttaacagatgcgttcacgttagatggccattccatctttgatttgtgtctgtgtaatggcttgggcagttatgaagaagtcagttgtgatgatgacagtgtacgcctgtggcatttcattgaggcactgacctggactgccgccagtgctttaacagggattcgcctgcgtgatcctgaccatttcgagtgggccgccgtggatggtgtgtatttccacacctggattcgtaatcgtctaaatcggatggcgtatttggctgaaggacgcattgatgttcgttatgtcagtggccatacgacgacaaagcggcttcaacaagtgattaaagcccggattatgacgccaaccgttgcagccatgctggcgcgagtagaagaggatgtttggcatgagcaagcataa

SEQ ID NO: 273227 - DNA, 513 bp, Klebsiella pneumoniae
atgaaatacatagatgaattaacccataccagacttaaagaggtaattaaatatgacccagaaactggggtatttacttggctaaaaagagagcatcgcaaagacctgattggttgtgatgcgggaagcgttagcggtacaggatatagaacaattcgagttgatggggttctttaccaggctcaccgcattgcatttttgtatatgacaggtcagttcccttcgcatgacattgaccatataaatcgcgataggtcagacaacaggtgggaaaacttacgccctgcaaccagaagtcaaaattgcttcaacaaagcgatgattagcacaaacacttctggggttaagggtgtgtattggcacaagaaaaataagaaatggaccgtatacgtacaaatcaaccagaagtacacataccttggaatttatgaagacattgagttggcggaactaattgctaacgaagcaagagttaagtactacggcgatttcattaaatctaaagtctattaa

SEQ ID NO: 273228 - DNA, 426 bp, Klebsiella pneumoniae
atgttagaaagaatacgcttcaaaggatttgatatcgaaggatcatccttgtatatcaaggatgatgacagtacagagggcgggaaatttaatgttaaatttactgaacaaaaagtgatccctcagcttgatgaggatggtaatttcctctttatcgaagtaacaccctcaatgattggttatcctcatgataagactgactctggaaatgatgaagatgtcatctttaaagccgaggttaagcttacattgacgtttgaatgttaccttgaggaggaagtaagccaggaaacgtatagcaataaccagtggttttttgaaaattacacctatatctgcactaaacttgctttagaaaagattttaaaagacacggttctggaaacgataagtcttccatgggcgccttcttttactgataagtaa

SEQ ID NO: 273229 - DNA, 462 bp, Klebsiella pneumoniae
atgaataacctgatgaaatataaaggttactatggaagttcaactatttcgttcgaagatggtgtcattcatggaaaaatagaatgcataaacgacctcatcacttacgaaggagccactgttgatgaattgcgttccgcctttgaggaggcggtggacgattatcttgccacctgcagagaaatcgggaagtctccggacaagacgatgagtggtacgttcaacgtcagaatcggtgaggagctgcataaaaaagcttttttagcagctgttgcaaaaaaaatcaccctaaacgattttgttaaacaatcattagctgaagctgttaacgatagaaaagagatacattatcactttgaaaaacaaagtgaagttagtgaaacagcgtccttctcttactctagaaaacggactggcataacatcgtcttgggagatagtgaaacatggagcacatcactaa

SEQ ID NO: 273230 - DNA, 255 bp, Klebsiella pneumoniae
gtgggaagaaaggaaaagctaaaatcaaagctagatgggctgcccaagaattttacatgggatgaactcgttacgcttatgagtcagtatggtttccgattactgaatgccaagcgtggatcaggtcgaaagttctacaacaaagacattgatagacttgctatttttcacgagccgcatcctgaaaatacactaaaaagatatgtcttagaagaagttaaacagttgcttgaagagattgaagatcatgaataa

SEQ ID NO: 273231 - DNA, 744 bp, Klebsiella pneumoniae
atgaaatctatcgcagaaagcatgcacaacttcgaccgtgaaaacttccagcgagtggctgccgggcttccggaaatgcaggacgagcaggcagtaaagcgccaggcggccaagactgcggagatcttcaacgagctgttccgccagctgcttgccgtattcccggtgttggccaacaaatctgtggaagacctcaacgagatgcgtcgccagtggttgttggcgttcaaagagaacgggatcaccacagttgagcagattaacgcagggatgcgtgttgcccgcaaacaggaaaaacccttcatgccgtcgccgggacagttcgtcgcctggtgtcgttctgaggaggcgggaactgtaggcctgccagatgcgaatgagctggttgaaatggtttaccagtattgccgaactcgcggccagtatccagacgctgagtcgtacccatggcctgagcacaaaatcgaaccgttaacgctgaaacacaaagcctgctactggatggtgactggcttgtacgcagacatgcgcgcaaacggcctcagcgacactgagctgcgacgtaaggcgcaggatgagcttctgcgtatggttcgtcgcattaagaccggtgaagctatccccgagccggttaaacagatcccaaagcttggcggacgtccgctgagtaacgagcagggcttaaacaaaatcgctgaaatccgcgcgaaattcggtttaggcagagggcggaatcatggctag

SEQ ID NO: 273232 - DNA, 183 bp, Klebsiella pneumoniae
atgccagtacaccgcgccgcgagtcactcccgccgcatcggcgatatccgtcagggtggtgttggttactccgcgcagggcgaactgctggattgcggactcaatcaggagctgccgcgtgcgctgcgcctcttcttttgtttttcttgccatacaaggccccacttcccgataagcagataa

SEQ ID NO: 273233 - DNA, 201 bp, Klebsiella pneumoniae
atgaactggatgaaagttaaaaattttcgtacgcttctctcatctcttttcatctcaaagtccggcgattatgcctatgaggtggttttcgtatttattgtgctggaaagcacgcataataactacctactgaccggctttgtatattttttcggtttatcccttttctattcttcggccccgttggcggctggctggtag

SEQ ID NO: 273234 - DNA, 402 bp, Klebsiella pneumoniae
atggaagatttaggccatcattatgttctggatgttgttttagatgataagatttttcttaagaatgagcatcggctacaggtgttctttcaggatattttgagtaagacaagctttaaagtaattggattcctgtctcacaagtttacatcgggaggagagggcgttactggtatttttttattaagtgaatcccatctttcctaccatacctatcctgaaagtaattatatcagcatagatctatacacttgtggagagaaatgtctctcggccatacgggaaatcgaaactagcctgaattcggttaccaagatagttgttcgttatattgagcgtggtagccatattaatgcaccgcagtttaacagagctaacataactgttgaaaaggtgaaatga

SEQ ID NO: 273235 - DNA, 594 bp, Klebsiella pneumoniae
atgagtaaaagcaaaaactgccgggtctccacactggaacaaaccactgaaaaccagcgccgggaaattgaagcagccggttttacagttaaacctcagcgcctgattgaggaacaaattagtggttcggtagcggccagcgaacggcccggttttgccagattacttgaccgcatggaaaatggcgatgtgctgacagtgaccaaacttgatcgcctgggtcgtgacgcaatagacgtgcgaaagaccgtagagcagctggcagcgtccggtattcgcgtacactgcctcgcgctgggtggcgtggaccttaccagcgcggccggcaagatgaccatgcaggtcatttcggcggtggcagagtttgagaaagacctgctgattgagcgcacacattccggccttgcaagggccagagcagcaggcaaacggtttggtcggccaccggcgctgaaccaggaacagcggcaggcagcgcttgaacacctgaaagcaggtgccagtatcagcgccgtttcccgcgagtttggtacctcacgtcaaaccatcatgcgcctgcgtgacgatgcagtcagcccagagttaccagaataa

SEQ ID NO: 273236 - DNA, 186 bp, Klebsiella pneumoniae
atgcttagtgttctaaaagaaagcatcagggacactggagttaaatcgttccgcacggctattacccagcgtcagatttacgtcaaatcgattcttgatggtgacagcgtgttcgagtctagtgatggagcggctaaaggtgaaatcgaaatccttacaaaagagatagttagcatatttgagtaa

SEQ ID NO: 273237 - DNA, 516 bp, Klebsiella pneumoniae
gtggacacaattaaatatcaacttaacgcccggcggcagccctatggccagggagcagacttgagtctgctgaatgaaagcgtggggaacgaagtgctggcattccatcaaaaatttcctgattaccgggtcacgccgctgcgtaagctggaatttttaagccagcggctggggctgggatcgatccatataaaagatgaagcgcagcgattcggtttgaatgcgtttaaaggattaggcggatcttatgcgatggggaaatatctcgccgctctgcttgagcgagatattaatacgttgagctttgccgagcttaattcaccagtgattaaggcgcgtatcaaggacatcgtatttgtgactgctaccgacggtaaccacggacgtggcgtggcgtgggcggctgagcagcttgggctgcgtgcggtggtgtatatgccaaagggctcgtcgccggtacgcgcgcagaatattcgccggcatggcgccgaatgcacgattactgaactgaactga

SEQ ID NO: 273238 - DNA, 225 bp, Klebsiella pneumoniae
atgagaatattcattgtattagctggtcttctcttgggatgctggaacttatttgataactacagatcctataaaaaaggagtttataaagagcatcgcaaaatggctcctcctgtttattattatcggggagatcatacttttgtcatacggatagtaattgattcacttttaagtctggtgattattggctttgttgtctggttctggtttaaaactgcttaa

SEQ ID NO: 273239 - DNA, 234 bp, Klebsiella pneumoniae
atgaaaatagaactcacaattgcaaaagacaaaaaactccctacaggagctgttcctgcgcttgaaaaggaactgctccgccgtttatcccagtcctatgacgactgcaagttaagaatacggatcaccagcaatgatggtctcagcgtgttgggcggcgctgacggcgataaaaagcgtgtagagcaaatcctgcaagagacgtgggaaagtgctgacgactggttctattga

SEQ ID NO: 273240 - DNA, 312 bp, Klebsiella pneumoniae
atggctaaacgtatgcaagataaagaaagcattgccggagtttcatggctgattgtccttgctctgtcatgctggggcggtcttgtccgatacctgattgacgttaagcaaaacaaagccacctggagctggattaacgttctcgcgcaaatcgtggtatcgggattcaccggagtcatcggtgggcttgtcagcatagaaggcggcctaagtatttacatgattctggccactgccggtatcagtggtgctatgggttccgtagcgctcacgtatttctgggaacgaatcaccggagtgaaagtacaatga

SEQ ID NO: 273241 - DNA, 1434 bp, Klebsiella pneumoniae
atgtccggatttaaagcaggttttctgtggggcggcgcggtcgcagcgcatcagttagagggcggctggcaggagggcggcaaggggatcagcgtggcggatgtgatgaccgccggcgcccacggcgtgccgcgggaaattaccgacggcgtggtggccgggaaaaactacccgaaccatgaggcgatcgatttttatcatcgttatccacaagacctggcgctgtttgccgagatgggcttcaaatgttttcgcacctcgattgcctggacgcgtattttcccgcagggcgatgagctggagcccaacgaggctggcctgcagttttatgatgatctgttcgacgaatgcctgaaacacggcattgagccagtcattacgctgtcgcattttgaaatgccttatcacctggtcaccgagtacggcggctggcgcaaccgcaagctaatcgactttttcgtgcgctttgccagggtcgtcttcacccgctatcaacataaagtgaagtactggatgacctttaacgagatcaacaaccaggccaacttccatgaggactttgcccccttcaccaactccggtttgaaatatttgccggatgaagaccgggaaccggtgatgtaccaggccgcgcactatgagctggtggccagcgccctggcggtgaaagcggcgcgcgagatcaacccggcgctgcagattggctgcatgatcgctatgtgccccatctatccgctgacctgcgccccggacgatatgatgatggcgatgaacgccatgcaccgccgttactggtttaccgacgtccacgtgcgcggtcgctatccgcagcatctgctcaactattttgcccgccgcggctttactctggatatcaccgaagccgatcgtcaggcgttaaccgagggctgtgtcgactacattggctttagctactatatgtcgttcgctaccaaagccaccgaagacaaccccttgcttgattatgatgaaaccaccagcctggtctccaacccgtacgtcaaaaagtcggactggggctggcagattgacccggtcggcctgcgctattcgctgaactggttctgggatcactaccagctgccgctgtttattgtcgaaaacggctttggcgcgattgatgtccgcgaagcggacggcagcgtcaatgaccagtatcgtatcgattatctctccgctcatatcgcggagatgaaaaaggcggtggtcgaggatggcgtcgatctgatgggctacaccccctggggctgtatcgatctggtttccgccggcacgggggaaatgaaaaaacgctacggctttatttatgtcgataaagataatgaaggcaatggcacgttggcacgcagccggaaaaagtcctttgcctggtatcagcaggtaattgccagcaacggggagaacctgtcgtag

SEQ ID NO: 273242 - DNA, 591 bp, Klebsiella pneumoniae
ttggcagttatcgcagctacccggtcactaccccatccgggaaaaacctttgaagtattccgcgatgtgatggggcaaggcgcagttgcagaaattagccagatccaagacaaaagtggcatgttctccagtgccgggcaggtatctgatacctaccatgtgaaagataaagaccgtattacgatgcgcgaactgcgcggcatggcggagggcgaaggggtgatgtcactggaagaccgccttgtgcgcagccgtgcattctacatcccggacgaagaaaaaatatcgaaaaccctgtcagtcagaatcaaccggtttgtcgaagtgctaccgccgacaactaaaacggtgatggaaatctaccccgccctgattgagcgtaaaccgctgccctttgattcgcgtatttctggtatatccacgttatgggaagggctggaaaaaatccatgccatgcgcaaatacgtgccgccggaagaaatcgggatttgcctctttgaatatgctgccgagtttttcgcacaaatggaagcgatggacgccccatgctatgcgcaagagccggaagaagaattcgtttacttactctaa

SEQ ID NO: 273243 - DNA, 699 bp, Klebsiella pneumoniae
atgttatcagataatgtacgaagcaccttcgatataatttctacctcgtgggacacaaagaaaaaactcataaagttcaaagacggaataagtaatcgcatggaaatcctactggatgattatgtgttcgatgaacataccattttggatatcggaagcggcacaggaaaagtttatgagatgcttagaggcaagcaaaaaaaatgcgtcgtggatatgattgatttcagtgaaaaaatgtgtgctatcgcgatggccaagtgttatcaagatacagatgcaaaagtgtactgcacaaaccttaatgattttaaaccatgtaagaaatacgacgttataacctcattacaggtaatacaccatatgccatcaatcagggacttcctattaagaagctcaaaactaatgaattataacggagtaatgttgatacaaactgtaggcggtggttatctcgaaaacatattcggcttaaaaacaaaaagtcataatcttgatgatttaggtaggttttcaaaatgggaactggagaatgaaataaacaatacagaattagaaatagatagtttttacagtgacagattcagtttttactttgatagtgatattgatatcgttaaatttattgagtcgattggaacggtccacaaaatcaatggttatagaaaaggggaacttccagaagccttaaaaaaataa

SEQ ID NO: 273244 - DNA, 201 bp, Klebsiella pneumoniae
atgcaaacaagactcaaggcagtgatccccgttgcggggttgggaacccgtatgttgccggcgaccaaggcgattcctaaagaaatgttgcccgtggtcgataagcctttaatccagtacattgttgctgaatgcgtggcggcggggattaaagatatcgtattggttacgcacggtaatgctgccaacttactgatttag

SEQ ID NO: 273245 - DNA, 414 bp, Klebsiella pneumoniae
atgccacccaatacccgcatcgccgccctgttccgcggcaaagaactgctgcacccaagcggcagtacccgcctgcgggagaacgatattctgtgcgttatcggccatgagcacgacctgcccatcctcggcaaactgttcagccaggcgccggccgtgacgctcgacgagcgcttcttcggcgactttatcctgcagtccgatgcccgtttaagcgacatctcgcagctttatggcctcaatctgcaagacgacgtggacgagcagcagacgctgggccagttcgtcattcagctgttcggcggcgaaccggtgatcggcgaccaggtggaatgggacggcctgacctggaccatcgccgaaatggacggcaatcaagtcagcaagataggcgtgcggatcgtaaccgactga

SEQ ID NO: 273246 - DNA, 246 bp, Klebsiella pneumoniae
gtgccggtgatcctggcggtgttcccgatgatggccgggctgcccaacgcccagctgtttttcaacgtggcgttcttcgtggtgctagtctccctgctgctgcaaggcaccacgctgtcgtttgccgccaaaaaagccaaggtgatcgtgccgccggcgctgacgccgatctcccgcgttgggctggacgtacatccggaaaaccagtgggaacagttcgtgtatcagctttcggcggaaaactag

SEQ ID NO: 273247 - DNA, 1014 bp, Klebsiella pneumoniae
ttggatgccagcaccattaacagtttgttcgtcatcggtgccgtgctggtgggggcaagcattctgctcagctcattttcttcccggctcggcattccgatcctggtgatcttcctggcgatcggcatgttggccggcgtcgatggccccggcggcatcgtcttcagcaattaccccgtcgcttatctggtcagcaacctcgcgttggcggtgatcctgctcgacggcggcatgcgtacccgggtcagctctttccgcgtcgccctgtggccggcgctgtctctcgccaccatcggtgtggtgatcaccgccggtctgaccggcatggccgccgcctggctgttcaatctcgatctgctgcaggggctgctgatcggcgccattatcggttccaccgacgccgccgcggtattctccctcttggggggcaaaggtttgaacgaacgcgtcagcgccacgctgaagatcgaatccggcagcaacgatccgatggcggtgtttctcaccatcacgctgattgcgatgatcgccgccggggaaaccgcgctgagctgggccttcccgctgcatctgatgcagcagttcggtatgggcatcgtcttcggtctgggcggcggctggctgctgctgacgctgatcaaccacatcaaactggcggacggcctctatccgctgctggcggtgagcggcggcattcttatttttgcgctgaccaccgcgctggacggcagcggcattctggcggtgtatctgtgcggcctgctgctgggcaaccggccgatccgcaaccggcacggcatcgtacaaaccttcgacggcctggcgtggctcagccagatcggcatgttcctggtgcctggcctgctgctcaacccgcacgagctgctgccgatcgccatccctgccctgctgctgtcgctgtggatgatcctgttcgcccgtccgctgtcggtgtttatcggcctgctgccgtttcgcagctttaccctgcgcgagcgcggctttatttcctga

SEQ ID NO: 273248 - DNA, 225 bp, Klebsiella pneumoniae
atgaccgacaagaacaccccggctcaggaagccatagcggaaaacgctaccctgctgaagatcctcggcaggttgctgtccgcgctggacgcttcgatcagcggcaaagaacgcagcattctggtcgctgagctctccaacttcaatctcgacggcatttccgaagcggaaagcaagctggcctccgagctgatcaaacgggcgctggaatcgctcgatcattaa

SEQ ID NO: 273249 - DNA, 963 bp, Klebsiella pneumoniae
gtggtttttggccacgtcaatcggggtctatacagcgcgggcattcagctttccggttcatcctatctactgacggacagcattatctacagttttcatatgccgctgtttttcttcctttccggtctgttttttacgcaatccttggataaaaagggaaaaaccagctttgtgatcagcaagatagacaccatcgtttatccctatgtcgtctggtcgctactgcaaggcatggtggaagtactgttgtcgcgctataccaataacccttccagcctgggcgatgtcctgtcgctgtttacgcatccacgcgcgcagttttggttcctgtacgccttgttcatggtctttgttttggccaccttgctgtacagcaaagaaaaataccgttatctcctgccggtattgatcgttatcagcgcggggctgtatctctaccaagacagcctaaccaaagccttccattttgattacattacccgattcttgatcttcttcctgcttggcgcttttgccattcgctacgcttccctcatcgccaatctgggtttcggttcgctgctggcctccttgatcgcgttcatcgcgctgcagtggggattccacggctattctggcttgctgtataccgataccggcagtttctccctgttactggcggttgaagccatcttcttgatcgtcagcctgtcggttctgctggccaagacgaatctttcctacctgagacgactcggcgaattgagcatggtcatctatttgatgcatatcctcgcggccagcggcttacgcatcatactgaccaaatttatgcatatcagccattggccaacacaagcgatcgccggcacgctattcgggctgctcgcctctgttatcgcctatgcgctgatacagcgtctgcaccttacttttctcttggatcgtcctcgcttcaataaccctgcgaaaaaaatctcctga

SEQ ID NO: 273250 - DNA, 297 bp, Klebsiella pneumoniae; identical to SEQ ID NO: 232812

SEQ ID NO: 273251 - DNA, 1167 bp, Klebsiella pneumoniae
atgaagataaatttggttggtgcggttggtggcggcaattttggagacgaattcatattgaattgctgtatagctgagcatatcaagaacaaagacgcaaaggtttcagtcagtggatttagccctgacattattttaaagagtggcttttcagttgaaaatcattctttaaattttttcaacatactagataaattaagacaaaaggcagaaaatggattaaaaatatccataaatgaccttatctcacagtttgaaggcgccgaggaatttgatgccattcattttataggcggtggctatattaattcactttggcctagcaactatgccttactaggcatagcttacatttattcaaaaatccataaaaaacctatttatgccacaggccttggactatccccatacgaagaaaatgaaagtttaactagcctttttaatagcctggacataatagatgtaagagacgaaaaatcaaaaagtttaattccatcagcttcttttacaggagatgacgccctcttggccttaaacgaacccagcatgctggttaaaaatgacgactctcctgcattaatattatcattacaaagtcatctatttgaaggacagtctttgatagaaaaaattttcaccgatggaacattcaaagaactaaaaaacaaaaaaataaaaaaaataattataatcgaagcagcaccagaagataacatccccttttcaagggaaacatttaacaacaccttagcaaatggaatagaaatagaattcgtgacaggaaatgaaattttaagacgcggcataccatttaactcaaggagctttgtcatatcttctagatatcatatcaacttaatttattcaatgctcaacgttagtggaatagctgtataccaaaatgaatattatagaaacaagcataaatcagtaacagaaatgggaggggcgtggtcaatattaaaccatgataaactcagtgaagcccttgatcactggctccccctagattcagaaaattacacatcgcccaacaacatgataaataaggcgaaggagaagaaaaagttattcaataaaataattgctaatgcacaaaataaagataaaaaaagcatctctttagaaagtgcattagcagtaatcaataaatttattaccaaataa

SEQ ID NO: 273252 - DNA, 345 bp, Klebsiella pneumoniae
atgaaacatttaaaatataaaggctatttgggtacagtagagccagattttgataataatatcctgtacggaaaactggcgtttattggcgatctggtgacttatgaggctgaaacattagcagaactggaacaggagtttaaagtatcagtagatttgtatctacaggcttgtgcagaggacgggaaaaaaccagacaccccatttaaaggcgtgtttaacgtgagggtagatcccgatctgcatcgtcgtgttgcagaactggcgttagaagaagatttatcgctgaatgcgtttgttaataaagcgctggaaaaagaagtcagcaatcatcatctggcctaa

SEQ ID NO: 273253 - DNA, 246 bp, Klebsiella pneumoniae
atggggaaaaatgataaattgctggaaaaatttataaacagcaagaaaacatttgaatggacagaactggttgtactgctttcatttcttggttatgaaaaaaaggaaatgcagggatcacgagtcagatttgtacacgagaaatacaaaacgataatgctacatcgcccacaccctgaaaatcatatcaaaggcggggcgctgaaagatgtcaagaggatgttaaaagaggaaggtttattatga

SEQ ID NO: 273254 - DNA, 261 bp, Klebsiella pneumoniae
atgagtagcaaaatgtatgaaaaagaatatgaattttatttcaattctttaaaagaaggtgacgaggttttaagttttgcggaatttatcgaatgtatgaaatgttttgaggatgaaaagtatcaatatcgagtttttttaaataaagaaccaaacaatgccagattgtttaaaactgaaaaagatgcactggatgcttatcgtattttgacaatgtacggtcataaagtaacgatagaaaaaaaggaggtgaaaaaataa

SEQ ID NO: 273255 - DNA, 135 bp, Klebsiella pneumoniae
atgactgaactgacccgcgaagacgaatacaacatcattctgaaacatctgggtagcatcacgtccctgcgtaagtttgcagaccagcaaaactttagcctgctggaagaaatcagcaataaaaagtcatgctga

SEQ ID NO: 273256 - DNA, 858 bp, Klebsiella pneumoniae
atgacgatccttacaagaatttctgccgcactggataacatgacgcttcatgagaagcagattgcgcgctttatacttgaacagccagagcgtgtttgtcagctgacctccagcgagctcgctgaagtgattggaaccagtcagtcaggtattgttaaattcagtaaaaaacaagggctggctggcttttcccagctaaaaatggccgtaaataaagcagttgccagacgtcatgcgtcagcccaacaaggccttcatggtacgattaatgctactgattcactaaatgaagtgtcgctgaagctactgggaagtaaattacattgtctgagggaaaccatagagctgaacaaagaagctgtaattttacaggctcttgaatttcttgatggcgctcgccgcattcatctaagtggcgttggatcttcatcccttgtagcacgggattttcagttcaaattgctcaagctgggacgagtggcgattcacgatcgggacagccatgttcagatagctaacgcatccacaatgacacaaaatgatgtattactggctttatcacacgccggaaccagtcgagaaatcattgaaatagcggatgtggccaaagcacagggggcgaaaataatttcaatatcaagaccgactgaaaatccactgacagcgcggtcagatatttccctctataccgtcgctgatgaagaaaaagcaagggtatcttcaatcactgctcgtgatgcccagcttttattaatcgatctcctgtttattcagctggctcaacgacagccgaatgcaggtgaatatgttcgtaaaagcagagaagcggtagaaaaactgaagaaatcaaaattgtga

SEQ ID NO: 273257 - DNA, 1149 bp, Klebsiella pneumoniae
gtgacaaatgaattctatgtgggattaatgtccggaaccagtctggacggcgtggatgccgttctgatggatttgtccggcacaaaacccactcttatggcagctggtttcaccacgatgcctgatgatctgcgcacagaactctcgatgctgtgccttaagggcatggcatcgctgaaaaatctgggtgaactcgatcatcgtctgggcgagctttacgcacgcgctgttaatgaacttcttgcatcacagaacatgaacgctgcagatgttaaaggtattggctgtcatggtcagactgtctggcacgccccgtggggtgagtatccgtttacaatgcagatcggggatgcgaacattattgcggcccgtaccggaatcacgactgttgctgactttcgtcgaaaggacattgcttttggcgggcagggcgcaccactggtacccgcttttcatgaagcgttattcaaacagcccgacagtgtaacggttgtgcttaatattggcggcataagtaatatttccattcttaattccggccagcctacgcttggttatgatacaggacccggcaatcttctgattgacgcctggacggaacagcatcttggcgaacgttttgaccgtgatgctgcctgggccagcacaggggaggtggatctgtctctactggatcatcttatggatgaggcgtttttttctcagactgcacctaaaagcactggaagggaactattcagcctcacatggcttaaagataagttaaataatttcaggaacgtcgctgctcatgatgttcaggcaacactcgtggaattaaccgctctgagtatcagccgtgagcttcaaaaattaccggaaaacaaaactacccaacagttgctggtatgtggcggcggggcaaaaaacccgttacttatgcagaggcttaccctcctactgccttcctggactgttggtaccacaactgaaaatggccttgatgtggattatgtagaagctgctgcttttgcgtggctggccttccagcgtctcaataatcgacctggtaatcttccttctgtcactggggcttcgcagcttgtttcgcttggggccatttatccggcagatcgttttcaacccttaggaatcttaaatgatagataa

SEQ ID NO: 273258 - DNA, 882 bp, Klebsiella pneumoniae
atgatagataagaacctgctccggattctggactcgctggtatccgaaaagcgcaatgaaaaaacccgggatattgatgatctccctcctgaaagcatactgacgcttatcaataatgaggattcacaggtatcactggctgtaaagagagaactgcccgctatcgcggctgcagttgaaaaagcagtcctttctttccgtaacggtggacgtcttatttatcagggtgccggtaccagcggacgcctcggcgttcttgatgcatccgaatgcccgccgacatttggggtatctccggatagggtaattggcctcatcgcaggcggggagcaggcgctccgaaatgccgtcgaaggcgcagaagacgatgttcgtgccggtatggctgatttacacggcatcagacttaccgatcgcgacacgctcgttggtattgcagtaagtgggcgaactccttacgtcctgggcgggctacgttacgcaaaagaggttggggcggcaacggtgtcgctgacatgcaaccctgattcagaaatggctcagattgctgatgtcgccatctcgcctgtagttggaccggaagttctcacaggttcgacccggttgaagtccggtaccgctcaaaaattagtacttaatatgctgtccacaacaagcatgatcctcatcggcaaatgctatcaaaatctgatggttgatgtgcaggcgagtaatgaaaaacttcgtgcacgcgcgacacggatagttatgcaggctacagagtgtgaagagtctgaggctgttaatgttctgaaacgcgcggacaataatgccaaactggccatcttaacctccaaagggtactcccgccttatgtcggcgggagtaccctttggaggttaa

SEQ ID NO: 273259 - DNA, 195 bp, Klebsiella pneumoniae; identical to SEQ ID NO: 112430

SEQ ID NO: 273260 - DNA, 624 bp, Klebsiella pneumoniae
atgttgattggttatatgcgggtatcaagcaatgatgaacgtcagtcagttgctttacagcgtgatgcgttgattgctgccggagtggatccccggcatttacatcaggatcatgcttcaggtgctcgtgataatcgcccgggacttaagtcctgtctctcagaacttcgcgaaggtgatgtactgatagtctggaaactggatcgacttggtcgttcactctcacatttgctccgaattattgaagacctgaaaattcgtggtattgctttccgatcattgactgaatctattgatacaacaacgccacacggctcgttcctctttaacctttttggcacgctcgcggagtacgaaagaacacttatcacagaacgcgttaatgctggtctggctgctgcactccggcgggggagaaaaggcggaaggcctccggcgatagatgctgaaaaggttgatcaaatcctcgcagctctggaaggaggtgccagtaaagcgtcagtatgtcgcgcattcagtgtgccacgctcaacactcaccgatactctacgacgaattggctgggccggacctgggggacgtaatctgacaacggatcagagcaatgtcatttctcgacgctaa

SEQ ID NO: 273261 - DNA, 204 bp, Klebsiella pneumoniae
atgggtatgaggatgagtttttcgcggagatgcacccgcaaaatagcgccggttatcgggatagcggttacgcagctactggttgagaagcaagagccgtcgagagagacgctgatagagatgattcaggtgttgtggcaggaagaccatgtcgatctggctgtggaattggcccttgacgttctgtcgctaccgaaagagtag

SEQ ID NO: 273262 - DNA, 384 bp, Klebsiella pneumoniae
atgagaaaagaagaacccaacaaagcattgatagcgcgactcaacgaggtctatgccagaggcattaccaaagcagatatggcgcgaatagccggagtctcgcctcaggctgtcaataactggtttaaaaaaggtgttattagcaaaaaatcagcactggctatagccgatgctgttggtgtttcggtcgcctggctgctcggggaagatgtcggcgagaaagatggtatgaagcctgacgaacagcgcctgctggaactctatcgccagctgcccgaagaagagcaacagaacatgctgcggatcgtatctctgcggctcaaagagctcgatgagctgtatgccaagtacatggggagaaggattaagggcgatgaagaataa

SEQ ID NO: 273263 - DNA, 234 bp, Klebsiella pneumoniae
atgacagcacttgataaagcaattaaggccgctggttcagcgagaaagctaagcatggcacttggtgtaaccagtatgtcaattagccattggaaacatcgcgacagaggcattgtgccgccagattacatattaaaaattcacagcataaccggtgttactccccacgaattgcgccctgatctgtatccgaacccaacggatggattaccggctcaggaagtgagggcgtaa

SEQ ID NO: 273264 - DNA, 564 bp, Klebsiella pneumoniae
gtgcattcaatttcattgcaacagactaccggatttcagcagggattgctgattccaaattatcaaaatgtcccgcgcaacaacaatatgctgactcatatcagggaagccgtccgcgcatggaacaaagccacccccggagctgcccaggatcacatatcgcagttggtcgcgcgggagtggattgcgcgcggtggacgtgggctgcttctggtgggatcgaagcacaacgttaagcagaactttttcagaatgattaacacgccgggcccgaagaacgacgcaaatctgacagctctgctcccagtgattatcgacgtgatgtctcgcgacaacgagaaagtggcccgggaatttggcctgctgaaggggaagaccaaggaagagattatcgccgaggctatcaaggagtgcgccgaagcaaagcaggcagtgatgctgaatgcgccagagcaccagaaattgaaagaggtaagcgaggggatagcttcgctattcaggttgatgcctgagcagacaggagcgctgatgacaatcgtgagctcgatgctgggcgtgatgtaa

SEQ ID NO: 273265 - DNA, 183 bp, Klebsiella pneumoniae
atgaagaaaaaaattgttaaaatttcggcattagcgttggtaatcggctttttatcgggctgtaccattatcccgggtcagggattgaatagtttacgtaagaacgtggttgagctaccggatagcgattacgatctggataaattggtcaatgtcatatcctatgacacctgggttaattga

SEQ ID NO: 273266 - DNA, 1455 bp, Klebsiella pneumoniae
atgagtaaaaacataatgcacagtcggcatgatgaatatcataaattaacccgtggagaacgaattggttatggcatgggcgactttgcgcaaaacctggttttcggcacaattgggggttttctggctttgcatatgctgacggtaaataccatcagcacggcaacggcaggctttatttttctttttgtccgtatcattaatgtgttttgggatccgatggtcggaacctacgtggataaacgaacctcaaaagcagggaaatatcgcccctggctgttacgagccggcgtgccgctggtgatcctgtcggcattactgttcgcgccaatccctggggtgaaaggttcggtggctttcgcctttattatttatctggcgctggacctggtttattccttagtcaatattccctatggctcgctgaatgcgtcgctgacccgcgacccggaatcgatcgataagctgaccagtacccgcatgatgctggccaacagcaccaacctgctggtctataccctgttcccgatgtttgtgcagatggcggcgccgaaagatcgcagcctgaaagataccggctttttcggccttgagctgaatctggggaactataccgatccgtcagcgaactacgcctggttcggcgtgtacgccatctatatgatcatcggcgcggtggccctgtttatctgctacaaatgcaccaaagaacgcgtggtcgcgaccgccgagcagaccgccaacgtcaaaactaccgaccttttccacgagctcagacataaccgtccgctggttattctcggcatgttctttatgctggcctttaccttcatgttcttcatgaacaccgttaacggcttcttcaaccagttcgtcgtcggccactccgaatggatgggcgccgtgggtctcgtcgcgtctattcccggcatcgccttcccggtgttctggccgaaactgaaaaaaatctttggtaaaaaaggcttcttccatctgttcctcgccatgttcatcgtcggcgaactgctgacctacgtctggtcccgcgaagggatgcacgacgccctgtggctggcctacatcgccacctttattaaacagtggggcttaacctccgccaccggctttatgtgggcgctggtaccggaagttatcgcgtacggcgaattaaaatcgggcaaacgcaatgccgccattatcaatgccattatgggactcttcttcaagatcggcttcaccatcggcggcgctatcccgctgtggctgctggcggtgtatggatttaatgaaagcggcgccgtgcagagcgccagcgccatcgatgggatcattatgaccgcggtgtggatcccaatcgcgctggccgctatttcgatggtgatcatgcaggtttatccgatctccgataaacatgttaccgacatcaaccgtcagctggatgagatccgcgtgtag

SEQ ID NO: 273267 - DNA, 1086 bp, Klebsiella pneumoniae
atggccatagaacatgtcgtatttgtcggtgctctgccgacgaactttggcgtcaaagttcaggccgccggtggtgaatcccccggctttaaggatctcgtacatcaccagggtattttcttccacactgttcgggaactgatcggtatcccagccgagctgcgcatcgccgcggttggcatcaacggagccgaaaatgcccagcgcgatggcgctggcgatttcatggtggaaagagtgccccgccagagtggcgtggttggcttcaatgttcaccttgatctcattttccagaccaaactgcttcaggaaaccatacaccgtcgcgacatcgtaatcgtactgatgcttagtgggctcctgcggtttcggctcgataagcagcgtgccgccaaagccaatcttatgcttgtgctccaccaccatctgcaggaagcggccaatctgctcgcgctcctggcgcagatcggtattcagcagggactcgtaaccttcgcggccgccccacagcacatagttttcgccgccgagctggtgggtggcattcatggcggtcactacctgcgtggccgcccaggcaaatacctccggatcggggttggtcgccgccccggcgccgtagcgcgggtgggtaaagcagttggcggtgccccacagcagtttcacgccggtttgctgctgtttctccgccagcacttcggtcatcacggcgaaattgtgcagatattctttcagcgacgcgccttctggcgagacgtcgacatcgtggaagcagtaatacggcacgttgagcttgtagaaaaattcaaacgccacgtccgctttgcgtttggccatttccagcgcatcgcccgcggcctgccagggacgctcaaacgaaccggcgccaaacatatccgcgccattccagcagaaattatgccagtaacaggcggcaaaacgcagatgatcggccatgcgttttcccagcacgatttcatccggattatagtggcgaaacgccagaggattatcggttttaggtccggcaaaaagaacgcgttcgagctggtcgaaataggtttgcatgatgaactccgaaattga

SEQ ID NO: 273268 - DNA, 162 bp, Klebsiella pneumoniae
atgagctgctccattaatcgcatcctgcacacggatcagtttcatactccatgcgccagccataaaccatccgtctttctggacattctctttgaaatcatcccactggtcgccagtggagaaaactgttcttactgcagtatcaataatggatacatatga

SEQ ID NO: 273269 - DNA, 195 bp, Klebsiella pneumoniae
atgtcggtgtgggccttcccgcgttttcctgtcttgaagaaccgcctgtacaaactgaatatcaggttgctgttcgttctgacgataattcatcctggtctgttaccgatgattatcgcggtatcactgtctatgacattcagacgttggccaaccgcgttattaccgaacccggccctatacccgatactgtaa

SEQ ID NO: 273270 - DNA, 360 bp, Klebsiella pneumoniae
ttggcattagcgagaaacacagtttttgaggaaacaacagagattggatttaacagcagaacaaaaaaagtaaaaacccccaagaagttaaaacctctacaaataatcaaactctacgaaccatccccaccactgacaccagaagaacaagaaacaatcgattctatgcacggtgttaaatggaagccacgtcagaggtatataggttttaaattcaatagagaaccgctcaagtttgaatatctctttgataacatcaatgaatacgagggctggcttgagtttaaccgcttggaaaatgaaaacttcacaggaaatgatcttgggcttgattttgatgcaccaggcgtcaccgactaa

SEQ ID NO: 273271 - DNA, 438 bp, Klebsiella pneumoniae
atgaacaaaacagaacagtttttaagcgttgattacaagattctaaaaataaatacaataacaaatcagggaaaagtatttaaattcactgatagcctcaaaaatacctattcctacctcgcgggttggaccacagcatttccaagttacaaccaaatcgcggatgtttttggcatttctcgcgatgctgcaaaagaccgaatcaacaaactcattgaaatgggactgattgaaaaaaatgaacgttgggcaggggataaacgaacctcaaatctctataccgttttgccgctcagagtcgaggatacaacaggacgaacctattctgaaaacaagggaaccaggcacgaggttaaagaagaacaggaagcacctacgataaaataccacgttgtaatagatgatgatggtgatgaaatcccatctttttcaagataa

SEQ ID NO: 273272 - DNA, 159 bp, Klebsiella pneumoniae
atgctgaacattcgttttgaaccagagttgtaccaacagctattagcagaggccaaacgaaccgggacgagtattccggcgcttgtctgccagcttctaaaaaccatcctaaacaatgaggaaaagaatgaacaaaacagaacagtttttaagcgttga

SEQ ID NO: 273273 - DNA, 225 bp, Klebsiella pneumoniae
atgaatagcgacgccatgttcgccgccaccgataccgcctgggcgccgtggttcgtcgcccgctcggaggataaaaagcgcgtgcgtctgaatatcatcacccatctgctgtcgcagatcccctatgaagctttaccggtggagcctgtgacgctgccgaagcgcaaaattggcaaaatgaaacagactaattttcctttccgcttcattccagagaagttttga

SEQ ID NO: 273274 - DNA, 1275 bp, Klebsiella pneumoniae
atgcaggcactgtggctgctggctctggaacccgtatccgagaccactgctgaccataacagctatggtttcagaccaatgcgcagcacgcatgacgccattgagtccatttttctgcggatgagccagaaagtatcgcccaaatggatactggagggcgatattaaagggtgtttcgataacatcagccatgactggctgctttcccatattccgatggacaggagactgcttaaaaaatggttgaaagcaggttacatggaaagaggcgtgtttaaccatacgaacagcgggacaccgcagggaggcatcatatcccctgttctcgccaacatggctctggacggactggagaaggaactgatgcaaacgttcaggaaaagtggttatcacagtgcaaagcaccaggtgaattatgtgagatatgctgatgatttcatctgttcaggcagctcccgtgaactgctgggaaacgaggtcagaccactgattgcagctttcatgcgcgaacgagggctggaactgtcggaagaaaaaacagcgatcacacatatagataaaggcttcgactttttagggcagaacgtcaggaagtacaacggtaaaatgctgattaaaccgtcgaagaaaaacctgaagaacttcctctgtaaagtcagagaaataattaaacgcaatccgacgctcccggcatggaaactgataggccagctaaacccggtgatccggggatgggctacctatcaccgacacgtcgtggcgaaagaaacatttaattatgtcgacacccaaatctggcgagctatatggcgatggtgtgtaagacggcatccccggaaaggattgcggtggatcgccggacgatacttctcctttgaaggcaggcgctggatctttaaagccataactccggaagggaaaattctgacactcttccgggcaatggaaacaccgataaagcgccatataaaaatcaaaggcgaagcaacaccatacacccccggaatggaaatctactttgaacgtcgtctggatctaatctggaaaggcaaatcaaagaagatgaagacagtagttcaactctggaagaggcaggggaaacactgtccgcagtgcggacaactcataaccaaccagaccggatggaatatacatcaccggatcaggaaagttatgggcggcagtgacgaactgaccaatctcgagttgttacatccgaactgccaccgacagttacacagcagggaagccggtgctcaccgaaagcacttataa

SEQ ID NO: 273275 - DNA, 999 bp, Klebsiella pneumoniae
gtgtcgattccgggtctcccgtctctgcaggtgagcgtaccgaaaggtgttccgacagcgaaagccccgccaaaaggcattgttgctgaaaaaggtgattcacgtccggctggttttacagccggtggtaactcccgtgaggccgttattcgtttcccgaaagagaccggacagaagccggtttatgtgtcggtgacagatgttcttaccccggcacaggtaaaacagcgtcaggaggaagaaaagcgtcgccagcaggcatgggacgccgctcatccggaagaggggctgaaaagagactatgataaagcgaaagccgagctggatgccgaagataaaaatattgcgaccttaaacagccgcattgcatcgacagagaaggcgatccccggtgcaagggctgctgttcaggaagccgataaaaaggtgaaagaggcagaggcgaataaggatgattttgtgacttataaccctcctcatgaatatggctccgggtggcaggatcaggttcgctatcttgataaggatattcagaatcagaatgcgaaattaaaagcggctcaggcatctttaaacgcaatgaatgaatccttatccagagataaggctgcacttcccggggtgatggagagcaggaaacaaaaggagaaaaaagcgaaggatgcagaaaataagttaaatgaggaaaagaaaaaacctcgcaagggagttaaagattacggccatgattatcatcccgctccgaagaccgaagaaatcaaggggttgggggaattaaaaaaagcacctaaaaaaacacctaaacaaggtggtggtggtagacgtgatcgctggattggtgataaaggccgtaagatttatgaatgggactcccagcacggtgagcttgaagggtatcgtgccagtgatggcgaacacctcggggcatttgacccaaaaacgggtaagcaaattaaaggtccggatccgaaagggcgaaacattaaaaaatatctttaa

SEQ ID NO: 273276 - DNA, 870 bp, Klebsiella pneumoniae
atgaataagtatattagaatccaaaaagaagcctttgacaagggttttgcttggcaaagcgatgatgaggcactaaacaaaattcaggaggaattgaatgagcttaagattgagtctaaaaagaagtgtatcaatggcgtaaaagaagaactcggggatctcgttttttcttgtctaggtttctctgttttcgcaaatgtggatatcaattgctgtctagaggcaacatatgacaagtttaaaaaaagacttgactatgtattatcatctgccaacaacaaggattacagtacattacgtatgttgtgggaagacgccaaaagtaaagcggatatcaattttgttgaatcaaaaaaaagaatcaaggttgccattataggatgttgggatgaaagtaacgcgagtaatctaaagcttgcaaagaagttagcgggagaactttctaaactagactgtttcatttttaccggtggcggtgatggaataatgaagtccgttaatgaaggggtggctgaatatggtggaatgagtatttcattcagtgcgtatgacaaccctgacgctgaggataacaaaaacatctcattagtaattccaacagggatgggatgggatgtcaggagtgcattgctcatgcgaacggttgatgtaactatattaataggtggagccatcggttctttgcaggaggtgtcaatgagctatctttataaaaaaccgattatagttgtaagtaataccggtgggctagcagataaactaaaggatttttgtgatacagatggctttcttgatcacaggaagaatgtcccattacttttcctgacggaaatagaagacattgttaaaaatgtgataagtggagtatga

SEQ ID NO: 273277 - DNA, 246 bp, Klebsiella pneumoniae; identical to SEQ ID NO: 233363

SEQ ID NO: 273278 - DNA, 291 bp, Klebsiella pneumoniae
atgctgggagcggtggaacgccgcttcggcaacgagcttccggcgtctccagtagagtggctgacggataatggttcatgctaccgggctaatgaaacacggcagtttgcccggatgttggggcttgaaccgaagaacacggcggtgcggtgtccggagagtaacggcatagcagagagcttcgtgaaaacgataaagcgtgactacatcagtatcatgcctaaaccagacgggttaacggcagcaaagaaccttgcagaggcgttcgagcattataacgaatggcggtaa

SEQ ID NO: 273279 - DNA, 261 bp, Klebsiella pneumoniae
atggcgctgtacatggtatttattgaagatgcggaggaccgggacggcgagcgctgcatcatgccgaccagcgagcatcttgaagatatggtggtgctcgcctggcagaccggggcgtatgttttctgttttgtcgaccgggcccagcatctggcgatgatgaaatccatcgggatgtatgacgagcggctcaacagcgacgaaaaagccacgtactttttcaccggtgaaaatccgcaatggggggtagtgaccgggtag

SEQ ID NO: 273280 - DNA, 525 bp, Klebsiella pneumoniae
atgttctatttcccgttcatcttcttcgatcttttcttcggcacgtgccagtgcagagcgcaggaaggcctccgtctcttcaaccagactcagttgctggtctttctgacggagctggctttccagttctgcaatgcgaatgaggtatttctgactcatggccgtttttataatgcggccaggcgttttttacaacattgtcagggcgttaaggcgggatgtttttggctgacgccagtccagcttatcgaggagcattgccagttgcgagcgggtaatggataccttgccgtcacgtaccacaggccagataaactggccttcctccaggcgtttggtgaacaggcacagaccatcagcatcagcccaaagaattttaacggtgtcaccccgtcggccacggaagataaacaggtgaccggagaagggattatcattcagcacatgttgtacctgttctcccagtccgttgaaggatttacgcatatcggtaacgccggcaacgagccagatacgggtacctga

SEQ ID NO: 273281 - DNA, 330 bp, Klebsiella pneumoniae
atgtttagcgtcttttatcacccggaagccagggaagaagccacagcattacccgtaaaaatcagggtgaagtttgaccgtctcatcggcaaactggagtatgacgcccgattactgcgggagccggacactaaacccctgggcgatggactttttgagatccgcacgatggggacggacatagccaggggtatctgggtataccacaaaggcaataccatcatcatgctccgggttttcatcaagaagtcacagaaaacgccagcgaaagaaattgatctcgccaaaaagcggttagcggaggtacttaatgaaactggtaagccataa

SEQ ID NO: 273282 - DNA, 183 bp, Klebsiella pneumoniae
atggccgaagaacagatggcaggtcataaaaaaataggtagcatcagcggaactgcgccaactcagggagaactggagaagaaatttgccatggctgcggcgcaaatgggggccagatattacgttatcaccggcctcagtaataacaaccatgcctttggtaacgctgatatctacgaataa

SEQ ID NO: 273283 - DNA, 258 bp, Klebsiella pneumoniae
atgggacttaaattaaatttaacctggtttgataagaaaactgaagagtttaaaggggaagagtattctaaagactttggtgatgatggttctgtcattgaaagtcttgggatgcctttaaaggataatattaacaatggttgttttgatgtgaaaaatgagtgggtttcattattgcaaccctactttaaacataaaatcaatctttctgatagttcatattttgtttcatttgattatcgggatggtaactggtaa

SEQ ID NO: 273284 - DNA, 150 bp, Klebsiella pneumoniae
atgctgctcagcgtatcgggcaatattatccaacgacatctgcccgctcataattttctgccccagctcgccctgccagccggcatagcgttttgccagaccctgatcgagcttgccatcctcggtaatgctgccaacttactgatttag

SEQ ID NO: 273285 - DNA, 444 bp, Klebsiella pneumoniae
atggaaacaaataaatttacacgccatgatttttctgaaactgcctttactctgatgcaaattattggagataatcgtgaatttgaggctaagaatagagaagattattatcaatcagctactttctctttaaatcaacttaatgctttaatggcaattgatgaagcaaagaccatagcgaataagcgtatagtaatcaccctaggaggtagtttatcttttaatcttgaacttaaaaattactttgataagactgctataacattaagttacattgatcaagatgaatatggcaaagagtttttaagcaaagataatagttatacatttacaatagacgaaaatgggaagttaagcgatgttgacggtgccttaaatcgtagacattaccatgaacacttcgcacatatctttaccttgcttgtagagaaaatcatcaattaa

SEQ ID NO: 273286 - DNA, 258 bp, Klebsiella pneumoniae; identical to SEQ ID NO: 273283

SEQ ID NO: 273287 - DNA, 354 bp, Klebsiella pneumoniae
atgtatgtcattaccgcgaacgtaaagaaaaaggggcagagcacgtcgcaaatgacaaatgataaagattatcatatgatattggttatcattatcgttgtgagaggtgaaaccatgctgcagcgagcattaggaagcggctggggagtgatgattcccggcgcgctaattgtcgctctcgggtatgccggagtgtcggctgacgtatggcggatactggtcgcggtgggcatgctgatgtccgcggcgatgatctggcatcgtcaattgcgccattttatcctgctgccatcgtgcgtcgcattgattggcggaataatgctgatgattgtggatattaaactgagaggataa

SEQ ID NO: 273288 - DNA, 216 bp, Klebsiella pneumoniae; identical to SEQ ID NO: 232813

SEQ ID NO: 273289 - DNA, 3711 bp, Klebsiella pneumoniae; identical to SEQ ID NO: 235899

SEQ ID NO: 273290 - DNA, 858 bp, Klebsiella pneumoniae
atgtacgggctttttttcgcatgtggcaccgcagacatccccggggtcggcagcaatgcctctcccgggctaccagaccctacccgccaggtagtccggccacgcgcagtaccgccgggaagcgagtcaatccccccctcaccgccatattttaagaagagctcgtacgcatgtacgggcttttttttcgcatgtggcaccgcagacatccccggggtcggcagcaatgcctctcccgggctaccagaccctacccgccaggtagtccggccacgcgcagtaccgccgggaagcgagtcaatccccccctcaccgccatattttaagaagagctcgtacgcatgtacgggcttttttttcgcatgtggcaccgcagacatccccggggtcggcagcaatgcctctcccgggctaccagaccctacccgccaggtagtccggccacgcgcagtaccgccgggaagcgagtcaatccccccctcaccgccatattttaagaagagctcgtacgcatgtacgggcttttttttcgcatgtggcaccgcagacatccccggggtcggcagcaatgcctctcccgggctaccagaccctacccgccaggtagtccggccacgcgcagtaccgccgggaagcgagtcaatccccccctcaccgccatattttaagaagagctcgtacgcatgtacgggcttttttttcgcatgtggcaccgcagacatccccggggtcggcagcaatgcctctcccgggctaccagaccctacccgccaggtagcccggctaagcgcagcgccgccgggaggatgcccaaaaacaacaaagcccgggctagcccgggccttgctcacagtatga

SEQ ID NO: 273291 - DNA, 360 bp, Klebsiella pneumoniae
atgacagaaagtagcattaccgaacggggcgcgccggaactggccgatacccgtcgtcgtatttgggcaattgttggcgcttcctcggggaatctggttgaatggtttgatttttacgtttactcattctgctcgctctatttcgcgcacatcttctttccatccggaaataccaccacccaactgctgcaaacggcaggcgtatttgccgccggatttctgatgcgtcctatcggtggatggctgtttggtcggatcgctgaccgccggggacgtaaaacgtccatgcttatgacgtggtacgcccgacaagacagattgcagtctttgctggagcaatataacaatgacagaaagtag

SEQ ID NO: 273292 - DNA, 1392 bp, Klebsiella pneumoniae
atgaacgattacctcgacagcgtctccacaaaaatctactaccagcataccgaagcccatgactggacttatatgccggacagcgtcacccgcaaaatgcagacggtgaactctaactacgataccgacacctggggcctgcagaccgcgctggcgaaaaccctgggccgccacgatctgagcgccggtttcaacgccagcaccagcaaaacccagcggccgttcagccagtcgccgatccccagcgtttacagcgagatcatgcagccggaggcagacagccgcagctacaccctcggcggctttgtccaggataagatcaacttcgatctcgacagccacaacttcgccgttattcccggcgtgcgcgtggtgcatcaatcgactaagccggaaaatctgtccgatctcgccgccaacagcagcgtgctgagcgaatcgtcggtggcgaatctgtacggcaaaaacagcgatacccaggttctgccgtcgttgaccttccagtacgacctcaccccgcgcctgatgacctacctgcagtaccagcgcgggacgcagttccccaacgccagccagctgtatggctcctggaacctcggctccagctacgccggcagccagcagtatgccctgatcggcaataccgatctgaagacggaaaccagcgataatctcgagtgggggctgaagggggaagttaccgaaggcatcaccctgcgcacggcgctgttctacaacagctataagaactttatcgcctatacccgctatacccgcgccaacaatccgggccagttcacgaatgtgccgtcgaacatctacaccatttatcaggcggaaaaccgcgataaagcctatatctacggcggtgagattagcaccaaatttaactttggcacctggtttgagcaggtggacggcctgagcgccaccctcgccctcggctatagcgaagggaaatcgaaatccagctacagcggcgataaatacgtcgacctcgacagcgtggcgccaatgaaagccatcgtcggcgtggcgtgggacgatccggcgaaacgctacggcaccgccctgacggcaacctttgtcaaagggaaacaggcgaccgccaccaaccgcgaaagctacagcaacagcggatccgccatcaccgatgccagcagcgactatatgcgcgtgccgggctacggcatgctggactggaccgcgtactggcaggtggcgaaaaacgtgcgcctcaatggcggggtctacaacctcaccgatcgtaaatactgggattacctgagcagccgcaatatcgagaccggcaccaaccaggacgccaacgataaagcgctggcggtgatgccgggccgcacctggcagctgggcgtcaacgtcgacttctga

SEQ ID NO: 273293 - DNA, 1200 bp, Klebsiella pneumoniae
atgcaatctttaccagatctttatccaatctttatacagcaaaatgtgcgttttttagacaggacagcttcctctgaacgctcttttatgtggcagcgtcgattagctgggaaacttcttcgggttagcctacgcacccaggacagaaatgtggctcagtatcgtgccgtaaagctcactgaagcctttataaggctctctcagctaatggggaatacaaatccactattgattcgtgaaacgcttctaaaggccagagataagcaaatagaggatgaatttttatccgccgtctctgtatgtcatgtctcgccgcatccagtaatacaagaaaagagcatttcccctctattgtcatcagtacttaatgagtggcttgaagaaatgagttctgattgggcgaagagtaccaaagtgcttaatgagagaacggtaaatggtttcctggaatggtgtggggatattccagtcgattcagttacgaaaaagacggtgagtacttataaaaagtttcttgataagtcgggtaagtcacctcgatccagacaagatgccattattaaggtttctgcgatgttcaatttcgctatgaagcaacgtgattacatcgtgaagaatccttttttggggatgaactataagaatgttgaaaatgtgagtattaaaacgggtgtttcattaagggagcatcaaaaaataatttcttctgagcatgttggtaataccagatccttatggtggttactaaacctacttttttacacaggagtacgtatcggtgaggcgatccaaatctcttcaaatgattatattgagaaagaagaccaaggaatactcatcaagtgtatcagcattaatgatgcgggtactaaaaccgttaagaataacgagtcaattcgcgatatacctttaagtgatagtcttctaaaggctggtatatgggaagagaaaccaatatatcattgggttaataattcatctgcaagtaatgccgtaagcaaggctttcaaaaaagcaggtatgaaacatacagcacatgactatagatatggcttgtcagaccgattgagagatcttcaagaagtgccagaccatataagattctcgatacttggacatgctcatcgaacaatgacggatagaacatacaggagtaaacaaccacttctgcaaatgaaacaagtgattgatcgtatctga

SEQ ID NO: 273294 - DNA, 234 bp, Klebsiella pneumoniae
atgtactactttctctacattaccgaggaagtaaggattgaaactaatggcgtatcaggcatacagttacaaacccgcgattcgagggtaaggaatttaggtgatccgttccagtacttaacactgcgagaacgaaaagatgagtactttaatgaaagtcttatcaatccgtatgtagatgaagtgattaaagctgttgaagtacttgttcctcttttgactttagatgattaa

SEQ ID NO: 273295 - DNA, 726 bp, Klebsiella pneumoniae
atgaacagaaaacaattcatccagtcgcatggtgctacttgtagtaactggacttggagttggtcatttgttaatcatgacaagaaaatggtgatctttggtgcttgggatgttcagaaagagcaagaaagatcagtcatactaagggagcggtggaaaaccaaagtagttgacggtaggacaagaaaaaatctgggatacattcaagctattgaacacatccagttgatagctgaaggttatgatcttttcacgtttgatatggagcaggggcgaaacgatgaggatagagatgtagctgttatcaaacgtttcacccctaaacttgaaaagcgttaccttagaaaagaaggtactgtttggtatgcagacttcttacctaatccgtttcctgatgaaattacctcacctgaaaactacgctgaaggtgcaaaaaagcaagttacagtaaactcctacgagcgtgatccaaaagcacgacaggcttgtattgaccatcatggaacttcatgcatgtgttgtgggtttgactttgagaaagtctatggcgaacacggtaaaggatttatacacgttcatcatataaaaccactgcatacagtaggtgataactatgtggtaaacccgattgaggacatggttcccctttgtccaaactgtcatgcaatgatacataggggaagtgaagtgttaagcgttgatgggttaaaagatcttctacgctaa

SEQ ID NO: 273296 - DNA, 522 bp, Klebsiella pneumoniae
atggaaagagtaaatgatttaaaaaatgtacgtgaacatattgattatcctcatctaaaagaaggtcgcaaggcattcaataatatgttcgatagaacgctatataaccctgattatgctgatgtaagtattggtgaaggttttagcaaactaacattattcttggattggcatgaacagaattatgaagagcattggcaacttgataaagatatactaaatccatgttcacgagagtactcacctcaaaactgtatgtatgttcctcctgaagttaaccaactcttcaaaagtaccaaacctggtaagtacatgaaaggtgttgaagcatcaggtaagaaattcaaagcatattgtagtgttgaagggaaaaagatttgtttaggtacttatcccacagaacttgaagcacataaagtacatatgaagtggcgtaaggcacgtttgatagaactcgctgagaagtacaaggaatatgaaaaactaagtgcggcactattagaacacgctaaaaaaatataa

SEQ ID NO: 273297 - DNA, 168 bp, Klebsiella pneumoniae
atgaaaaacaaaaaggatgtaaaaactaattgtgtgaccgtgcgattaactgatgctcagttaaccgcattgcaggaactatctaagagtggtgtctgcgagcgtgaaacactcgcaagtgcttttcagcacctactgacgcaattcattattttgaaaaaaggctaa

SEQ ID NO: 273298 - DNA, 1935 bp, Klebsiella pneumoniae
atgctccgtcctatttgttatgagcgagtatcaagcattcagcaagtcgaaatgggaaatggattggatgatcaaaggtcttctttaactgcctatttagacaaaaattctgataagttcacgaatgatagagttttcataacagatgcggggctttcggcatttaaaaatgccaatatttcacctgagtctcaacttgggatatttttgcaagatgtggggaaccgcaagtacggtaagggtgacgcacttatagtcattagccttgataggttatcgcgtcgttcaagttgggctgaaagtactatccagtacatcgtgaacagcggtgtagaaatccacgacatttctacaaatctcgtgttacgggcagatgatcctatgtcgaaaatccacatggaacttatacaacatcgctcgcacaatgaatcattgatgaagtcggtacgtgctaagttagcttgggataacaaaatcttacgtgcattacagaatggagaggtgatttccaatcgtatgcctaactggttaaaaaatgttgataacaagtatcaggtgatccctgaacaggctgaacttattgttaagtgttttgagtggtatagggaagggcttagtactggagagattgttaagcgtatcggtaaaaagtggcagatggtaaccgtgtcaaggctgatacgtgaccgccgcttgttgggtgaacatgagcgatacaatggtgaggttgtaccaaatgtttacccgaaaatcattgatgaagacttgttcctaacggcgaacaggatgatggatcgcgttatgctggagaagaaaaagccagccgaggatctgttacttgaacctgatgtagttcgtgaaattttcaaactatatgaaagtggacttggctcaggggcaattgttaaacgcttgcctaaagggtggagtactgtaaacgtactgcgagtactacgcgataagaaagtagttactatgaagattatcgataatctcacttttgaacgggtcaatgagaagttatcaaggaatggtatagccaatcgtattcgtaaagatataacaattgctcaggatgattacatcacaaacctgttccccaaaatattaaagtgtggtaattgtggagggaatatcgccattcactataaccatgtcagaactaagtacgtcatttgtcgcaacagggaagagaagaagatttgtgatgccaaatctttccagtacacaagaattgagaagaatattcttcagcttgtcaaaaacatcgatttcaataaattaatgatggaaggacagtctgattctgaccttttgctggcatcgttacgagaagaattgtctactctgaagaaggaagaggaaacctatcagataaaaattaatgaacgtaaggtagcaggtaagaagacctctttaccattaatgactggtttgaccgaggttcaagatagaattgaagaaattgaatccgatattttaaatgctaaaaatatcaaagaaatccctgtttttgactttgatattaataaagtacttgatccgatgaatgttgaactacgtgcaaagctaagaaaggaattaagattagtacttaaatcagtaaagtactggatttttggaaaacgtatttttgttcagttagaatatttcaatgagatcctatcccatgtacttgtgattgataataagcggggtggtggtgaagtactacatgaaattgtcatttcagaatctaatggtgaacgtgtttatacggtcaatgaagaaggtaaaacagtattcattgcgtcagtaacatctggtacagatatgtggtcacttgcgattagtcgtacaaaaacactggatgatgttggattgtatcttaatttactcaatcgtgaaaattttgagatcgtggtgaatgaagatttgattgattggatagattaa

SEQ ID NO: 273299 - DNA, 126 bp, Klebsiella pneumoniae
atgatcactgggaccacgaattacgatgaagaagctcttgacgaaattgcgtgtgatatctgcggtttcaaaagcacagaccctggcggcgatcactactgctgcgaggataactccgatgactga

SEQ ID NO: 273300 - DNA, 2217 bp, Klebsiella pneumoniae
atgaaagtatatgatgtgtttacaattgattttaaagaagctggatttagtaataacaagtacagatgtattcaacgtactgtaccaatgaccgttgataaagtaggcattatccagatcaccgcgatttcatatgatgatggtatatatcaaggaaaagatccgggacaattcccccaggaaggtttgactaatctccctaacccaacatacgtagaaccgccaagtaacctacaggctcaacgtttaggggcaacggcatcaggtaacaccgttctattaacatgggatttatcacaggatacaactgtacgtggttataagattcgttataaacgcagtgattccagtgtttggatcagcattggtaacgtagggcagtactctacgagttttgagatattaaatctgttatatggtgtacagtacgattttgctattgaggcgtataacacattaggttattcatcggaattagtagctatatataatcaaacaccacaagttatattcgcattaccgaagattactaatcttgatatggtgaatgatgatgtaggcttaaaccagacttatgctcaagattttattttacgttgggatgatcagaataacttagccgttaatggtaaaacttttgctgatttcttcaaacactatgaaattcgtgtgtatgaccgatacaggaactacatcacatcgtactacaccactacaagcaactggacgtactcatattcaatgaataccagtgatggccttagccgttaccgtgtgtttgggatcatcgctcatggttggggtactggtatctatagtgaagaagttcagattgaagttagtaacccacaacacccacaattgttaggtatcaatttgaagagtggttatgattctgtgttcatcgactggactgaatcaaacgtaccggattatgcgggaatcgttctacaaatcgcacttgatgaggggtttagctcagggtcgaagtactttagcagtgctaaccgctattcagcatcattcgggatcgaggacggttcattttttgcacgtattgccgctcaagatatatttggggccgatgaacttgtatggtcgcctactatcggtttcaaccagaatacgaaggttccatacagcaaattgaatgaagatgttattgatggcctacttaatagtgatacggctactggcattgttgagaaacagatcgtagatgaacttgggtcacgctggcagctacaggtatcaaacaacggtaacgtaacgggcattgctttagccgcagatgaaaaaacatcagtgtttaccgttatggcggatcgctttagtgttatcagtacggatagtgccaaactatcagacagggtttatccacttgttgttcaaaatggaaaagtatttcttaattcagcggttatagctgatgcgagtatcaatacagcccaaattaacaacttagcagttactactgccaagattcaaaacgcagcgattgataatacaaaaattgccaatgccgctattcgtaatgcacatatcatgaatggtgaaattgactcagcgaagatcagccagcagatacaatccagtaattgggatggtacgaacggttggatgattaacaagaacggtacagccaactttggtaacgctactattcgaggtacaatttttgcgaacagtggagtactcaacaacgttactattaatgaaaactgtaacattcttggtactttgagtgccgcacgtatcgtaggggatatttgccgtccacagtctacaggtattgcatcagtaccgttcatattcggttctaaaacagtgtcaggtggacaggttggattagatccagttgcaaaccagcactatgtagcgttacgtatccgtggtgaggattttggtagatatcttgatagtaacatgacaattacattaggttcatatgaacgtcagtacttctatattcgtatgggtggtgatggtattggtatgactaacttaacgtatgttgatgcgggcaatggtggtaataacacaccatttacattccgattaaatggtatctatattccacctgtaggacgtggcaactggaactatatctatgtgatgtgtactactaaccgttccggtactgccaaacttgatgtaccagatttattaaatgctttggtatatagagctggtgatcaacctatatataacgcctaa

SEQ ID NO: 273301 - DNA, 294 bp, Klebsiella pneumoniae
atgattggtgtaatagtagaactactaacaaaaggtgtggacttctttctaaaacgtaaaacgatagaacaagaagtgcagaaaacaaatgctgaaggacagatagaaaccaacaaagaagagatcgaaaaggttactttccactggcgtaatgctcttggattcgtaattaccttaatcattctttataattggatcatagtaccagtactggatgcttttggtattgtggttatccaagtaccattaggacaactgatgcaagtactattgatcatggttggtggaagctaa

SEQ ID NO: 273302 - DNA, 687 bp, Klebsiella pneumoniae
atgaagaaatggtttgaagcacaattggaacgtataaatctttcacatataagatggatgattataggagtattgctgaccgaacttattacatggcttttatataagaatccaaaaaagattactgcaccgggtttatcagcgactgtggcagtctgtgctttgatcttagctttatattcagcttatcaagttaaaaaatgggtgagtgggaaagtgaatgaaaaaggtttcaaaaaatgtgaagccattattgataaaacacaagaaatagcgatggccgttgcaaggattgatagtgagattcaagggttacataatatgaacttagtcatccttgaagccactaagtataatgaaaaagttgaaaagatattaaaacaaagagaagttattacggatgcagtattagagatatacacacatgaaatgcaccttaaaatttggggctttgaaatttcagaaaaacattccttaaaccagcttacggatagtataaagccctacaagaaagctatcgattcaacccttgggaattctaaaaaatattatacaattggaagctataaagaagcagctgtagatggagaacaatataaaaaaggactgagacttatgagtgcatacattgataaggtaaatgattctgttttcaatgaaatatttctaccttactgtgaaaaataa

SEQ ID NO: 273303 - DNA, 714 bp, Klebsiella pneumoniae
atggcaagaattacaaaaaaggaatcagcattacacattcaagtactggatctcatccactcagataagcaactaactcaagacgataaagagtttatctttaacaactacaaaggcgatggtataggggctactggtgctttcttcacacctgaaatgctcgcatgggatttcatacttgatgctggttgtactggtcaatgtattgaactttgtgcgggtatcggtcgcctcagctattaccagtacttaagaaacaacccaacacacattacctgtgttgaactcaatccagagtacgtaatgatcgggaagagggtactaccagaggcagaatggatcattggtgacgctctccagtactcaccagaccgtttctatgatgttgcctatggcaatccacctttcggtaagatcaacacttcagaagcgtttacaggccgttataaggggagtgagtttgaatacaaggtgattgaacatgcaagtaccttatcctcatatggggtatggatagtacctcagagttcagcagggtttaagtactctggacataggtactatgacgcttcagtacaaacagctaagtaccagaagttcgtgaaagagacggggtacacgttccagcctggttgcggtattgacaccagtatctacaaagatgaatggaatggcacgaatgtgatttgcgaggtggtgacggttgagtactaa

SEQ ID NO: 273304 - DNA, 846 bp, Klebsiella pneumoniae
atgagccttatagatcttagtctctctggattatctaaacctggagcaaagttaattgaaaaaatcagtgatgcaattggtgtgttgtacgaaccaacaaaaataagaaagcttgctaaggctgaagccgatgctaatcgcacacaactcatttctaaattggagcttgagggtatcgaaaaaagagctgttgagaggtttttaaaaaaagaatcgaaacgtcaagaaaatattgaaagcatatcaatccaagctgccatgaatctcaatgaaaatgatagcattagcgatattaatgaagactggattaatgcattttttaaagaatgtgaagatattaatgataaagaaatgcaaacactttgggcgaggatactttctgaagaagctaaatcagaaggttcttttagtaaaagaacgataaagttattgtctacattaaataaagaagaagcaaatttaataacttactttggtagatttgtttggcaagcaagtattttaacaccaatccttttattggatgataacggtgatacggatgagatatccttcatacaattatcgaccttagattctttaggtgtaattcaacaaggcctgggatacaatcttacctttaatggaaagaaaggtagaatatcctattatggaattcctgttagcgttgagtttaataatgatagtaaaaatgaatggacaatgaatacaggaacagccttactgacaccgattggttctgaattaatgaaaatatgcggttcaactccagacatggaatactttaacaaggtatttaaccattttaatcaaaagggtagtcaactaaacataacaatgctataa

SEQ ID NO: 273305 - DNA, 438 bp, Klebsiella pneumoniae
atgcgtacacctcatttggtgccgctttcaaggcaggctctggcaatcctgaagcagataaaacagttctgcggcgaacatgaactcatttttattggcgatcacgatccgcgtaagcccatgagcgagaatacggtaaacagtgcgctacgggtgatgggctatgacactaaagttgaggtttgcggtcacggctttcgtacaatggcctgtagttcgttaattgagtcagggctatggtcgaaggatgcggttgaaaggcagatgagccatatggaacgcaattcggtgcgggcggcatatatccataaagcggaacatctggatgaacgcaagttgatgctgcaatggtgggcggactttctggattcgaaccggaagaaaagtatcagcccgtttgattttgcgaaaattaataaccccatgctgaccagatga

SEQ ID NO: 273306 - DNA, 573 bp, Klebsiella pneumoniae
gtgtatggtttcctgaagcagtttggtctggaaaatgagatcaaggtgaacattgaagccaaccacgccactctggcggggcactctttccaccatgaaatcgccagcgccatcgcgctgggcattttcggctccgttgatgccaaccgcggcgatgcgcagctcggctgggataccgatcagttcccgaacagtgtggaagaaaataccctggtgatgtacgagatccttaaagccgggggattcaccaccggcggcctgaactttgacgccaaagttcgtcggcagagcaccgacaaatacgacatgttttatggccatattggcgccatggacgtgatggcgctgtccctcaagctggccgcgcgcatgattgaggatggcaagctcgatcagggtctggcaaaacgctatgccggctggcagggcgagctggggcagaaaattatgagcgggcagatgtcgctggataatattgcccgatacgctgagcagcataatctgaatccgcagcctcagagcgggcgtcaggaattactcgaaaatctcgtcaatacctatatctttggttaa

SEQ ID NO: 273307 - DNA, 2463 bp, Klebsiella pneumoniae
atggcaaataacaatagacaatcaatgatctttgaaatcaatggtgatgaatcaggattgcaaagatcactaaaaaatgcagccaatgatataggtcactttggtgatcaggcgggtggagtatttggtggtatcaataccggcctatctactacctctaaagctatgtctggtttcgctggtgctgtaggggtcgcaggtatcgctattgctgcaactatggcaaaagtgcaagaacaatcagaaaaggcgtttgaagtatttcaggcagcttcactatcacagtctggtatattacagattcaacaggccgctaatatgttcgccgccgttggtcttactatggataacgtagcggaccaaattaaggatagtaaggataaattgggcgatgcgatcacgaataacgcaggcagtaccttgaccgacgtgcttcaaccgttaaagttgaatatgttcgagttacagaaagcagcagatagcggtgaggatattattgctaagatttactatcaagctaaacaaatgggattcagtcaatcccagatagtaaacatgatggaaacagttgcaaacgacgcgtcaaaacgcatgacaatataccgagagtttaatagcgaacaagagtaccaaaacagtcttgctaatgaatctattcaattaaccgcagaacaatcacgacaatttgaagaatacagggcggcaactaataacttatccaaagcatgggatacctggaagaactcaacgcttgcacctatcgcacagaaccttgctgaaattctcgacttaatgacgaaaattattaatagtaaaccagttaatgcagcggcagcagcagttagtaaagaaggtattcaggctactcaacaataccaacaacagtttcaacagcagatactaaaaaattcttcaatttatggtactcagatagtagcagatcagcaaaagcaacaggaggaaaataataaaacctttgcaaacttattagcaaatcttgatgcggcacataacctacttgataaacagaaagaagaatataataaaggctcagatagaagtgttattgatactgctctaaaaccttatctttcagcaaaacaaaaaactcaggcacagattgataccctggatgcaactcatgcacaattacgagctactattaaagattctttagtacgtgcttataagggtgatcaagcggcaatgaatgccgatctcgctaaacttgatgaagggtataaagctaaccgtgagaagttagtgaaaagcctaacagccgatgaagataaagcacgtgaagacaaagctaagaaagatgaagcagcagccaaaaaagcacaagccgcacaagacaaacttaatgaacaaactaaaagagcaaaggcactgttagaacagacgctatcacaaatcggtactaatgaagctcaaatacgtattactcgttttaactatgaacaagaccagattgaaaagcgtatacgtgaagcaggtaaattagcaggaagtactgaatctgaaattacagatatgttatccaagcaatatgaaagccgtaaaaccaagtacaaagacatggttgatcagatgctttctgaaactaacagactcaaacaggcacagaacattgcagccattgctaatgatcctaatgcaacagcagatgctaaggcacgagcagcggcagcgggtactacctggatgaatgacacggttagtcagggcttagggtacaagaacccattaaacttttcgccagatccggtacagaaccagaacatcaacaccgaagaacaagagaacaaagatggggctaaggctctatatgatgccaaagtacttggtttccaggagtaccaggatcagctaacagcgattcaggccaacgccgatatgaaacgtggccgattaaccgcagacgcactaaccagtactttagggatgtggcaaacgggagcaggtaacgtagcggatatcatggctggtgtattcggagaatcatcagcagcggctaaggcagcatttgccgtaagtaaaggtattgccattgctcaggcagtgatcaacatccagcagggtatatccgaagctatcaaacttggttggcctatggggatcgcagcaggtctacaagtagcagctcagggtgcttccattgtccgtactatcaaaggtacagctatccaggggcaagcccatgatggttgggattcactaccaagtactggtacatacaatcttgaaaaaggggaacgtgtagtaggtaaatcactaaatcaggatttaacaaaatacttgagtaatcaggatggtagtaaatcaggtgatattaagattgatgcaccgttaattattaatagtaatggtcaaatttctgattcagatttccaaaagatgtgtgataaacacgctgatactatcgttcaggcaacacgtaaatctcaaaagaataacgtataa

SEQ ID NO: 273308 - DNA, 711 bp, Klebsiella pneumoniae
atgatcatctcattttggtggtcaattatagccattccatctatacaagaaaaccaccccgcattaacgcaaaaatttccaaagttttttaataactttcttctacctatcatcattgtcattttattattaatagctgggcaagccaatgtatatatgatgaacctacaaggaaagaatcttggatttatgagcgaagatcaattctctgaagcgaagagtgccgggatctttaacagagaaaagtggattgaggttaaagctaagcaagatgagtcaataaaattagccgataaacatgctgccgctgtagcattagaaaaaaagaacaaagactacatcgaaagtaagattaatagtctcgacaagagtagtggtaagtacttagtagctgaaaatatctacaaacaacatggtgtttgggtcgatgattacattgctgttcaaaagaagtcatgctcacgtgaattcaatcgactgttagctgctaatgcagcgtctgagcaagccattgagtactggaatgaaacctctgattctttaacccggtcgggtatttcgccatttgcaggggggaggagtcctacaaccgatcctgacatccagagaaccaacaacgatattagatttgcccgttctcaattagaaaactgtggtatagctcatcttaacgagatagaacatcgtgttacagtacaaactgataattga

SEQ ID NO: 273309 - DNA, 567 bp, Klebsiella pneumoniae
atggcacacatcgcttatattcgcgtatccagcttgcaacaaaacagcgagcgacaattagcagatacggggatcacctttgaaaaagtattcactgagaaagtaagtgcgaaagataccaatcgtgaagcattcttagcgatgatggagtacttacgcgaaggcgatactttgcatgtgcatgacatcagccgccttgcccgtaatacaaccgaccttctctcaactgtagatactttgactaaacggggtgtcgcgatccagtttcatcatgaaggcattaagacgggagataactcacctactggtaaactggttctaactttactttcgggaatttgccaaatggaacgtgaaatgatgctgctcaggcaaagagagggttacgaagcagctaaggctgctggtcgtattgctggacgtggaaatggtaggcatatcccgcgtactgaaatcctcgcggcattggcatctggcggaagtgttcgctctgtagctgctgacttcggtgtaagtaccaacactattagccgaatcaagaaagaaatgaactgtgcggcatcttaa

SEQ ID NO: 273310 - DNA, 612 bp, Klebsiella pneumoniae
atgaacaataaaaagcagagtactaaagagttcagtgaacgcttaaagcacgtcatagcagaacttggaacaacgggtagagagttctcaaaacgtgcgggtattggctatagtactgttcacaactacatgcacggttcatcaagccctacactggataacttggtactcttggcaaaagcaggcaatgtctctattgagtggctggctacaggccaacaatcgagcatgggcatcactgattcagatgtcatatgtgtaccttttattgatcatgccgatgaaatgttgaaacttgatgctcaactggttgaggtgaagggtttacactctctgcgtgccatcagggtcagtaccgatgtaatgactcctacttttcttacgggtgcagtgctactcattgatactaacgatacagatttaactgataacaaacttgtagtattaaaacagagcgggaattatttgtttaagagagtacaggtgctcatggacggagtacgcttactgagtgataatgacaattacccatcaatcacggtcgcttttgaagatatgaaaagcatcaatgtcattggtactgtagtgatgattattaacaaagttaattag

SEQ ID NO: 273311 - DNA, 204 bp, Klebsiella pneumoniae
atgtctatcaagggaatctacggggtattatccgattcctttatagtgccacattgccgtgactcctgcgttttcgtcttttttgtctggaatttacgctcgggaaatttgcacgggtttcatttgcactgcgttctgttgaacaactcatctgccatctacttgtcgataggatcaggttttaatttattataccaggaataa

SEQ ID NO: 273312 - DNA, 1923 bp, Klebsiella pneumoniae
atgaaaatggattttcagaatcagaagaagctaataaagatattgaaccaggcggtgaagaacatactaccgccagagaagatcaaaccgagtgaatgggtagagaagaatcttaaattctgcgatggtgagttacaaggctcaccaatgcgtttgtacgaatttcagaaacaaccgttagattcaattatagaaccaggggtacgcaaggtagtactaatgagttccgcacagttactaaaaacaacaatagttactggtgcatccctgtactttcttcaacatgatccatcaaacatggtaattgctggtacaacagcaaatacagttaagaagtataagaatggtaagtacgacccaactatccagctaacaccatcacttgcaaagttaatcacgagtaaatcagacaagaccaaaactaacgatgcaaccacgcaggaaactaccgttggtactttcaactatttcgttagtctctcaagcccaagtaccctacgtggcctcacggctaagcgtgttttctgtgatgagatttcaggggtagatatcgagggtgatgaagggaaccccatagcccttgtatcacagcgttgtgagtctttccgtgactcattaatcatgatgtgctctacgccgttagtacctgatgatcccatatgccaggaatttgctatgagcgatcagaggtactttcacgtaccttgccctgaatgtggtgatgaacaacgcctgatatggaaaaacgttaaattcgaatggaaggtaatagacggtggccgccgttctatccctgatgccgatactgcctatcttgaatgcccgcactgtaaacaccagtactcagaagccgaacgcgtaagagcagtatcacaaggacgttggatcgctacacatccagagattaaggatgtgaggggctatcacatatcacgtttgtactctccagtttcgtcgatccgcaagctggtacaggattttgcagaagcgtttaagaactttgaccatatgcgttttgtgaacaacgcattaggcgaaccatacattgataaagaaaacgtagaacacgatttaactctactggaacagctacgtgattttgatattgatatacagaacatacctaatgattgtgttggtttagcatattcaattgaccaacaattagaccgccttgaatgtactttagttggaatttctgaaaagaactattatgtacttgatcatcgtagcttctatgcggtcgattgtaataaatatgactcgccagcatatgtagaattacaaagttttataaataatacaaagctaaaaacgaaaaatggaacacctctacgagtacttcaggtatgggtagatagttctaatggtgctgcaactaataccatctaccgattctgtaataaaacaggtaatgagatatacaaacctatcaagggtgatggacgtacaactattcctctatacaaagaaagtacatcgggtggttataagttcatgctacttaacgttaacgaagggaagaaccgtatcaggaagctacttaacgcagctatgaacgatgaagcacatgaaggtaaaagaatccattttagccattcattaccggatgatgcattccttcagtacaccagtgaaaagcgagtaatgaaaggtggtcaacttgtttgggtgaaacgtactggttcaaaagatgatcgtaacgaaatgcttgatacgctcaactattgcctaattagctttgaatatatgttaaataaattgggtgttgatgcctataaaaaactaagtaactacaacgccaatatagctaaaactaaatacagtgaagaaatacaaactaatgatacacctatagaacatgttccagtacgtaaacaacgtaaaaggcgtatggggggaagaaattggtttaatgaataa

SEQ ID NO: 273313 - DNA, 996 bp, Klebsiella pneumoniae
atgccaagtgcccactgtgtttgccctgaatttattgctaatcatatttctgatcctttagtttttaataatgtgtttcttggtgttttgttacaatcagatgatcaaatcataactgattctaaagggattttgtcttatgaatatagtaaagctgttgaaaatgattctaatgccttctctttatataaagtttggcaaagccaattagatgcacgtaccgatgggaagttgttaaaaactgaaactgaagtgacttcttcattcgaggaaataatattcgacgttgtgcaaaaagcagcgacaacgtttgataaacatatcataacctctaataatgaacgctatcgtccattcatatctgaactcacccgacaaagaatttctctttataacttgcaaaacttgacgccttcaaacatccataaagctttgagtaaaaaaatatcatttgaagaactttctcatgatattggatggatacttcacagattagcaagaactaaaagtaaaggtacaactgaagatgactttaatgatcatctacgtaatttgttattattcaagcattacgaagttaaagatcaaacaagagagggagtatcatctgctggaaatagtgcgggagaattagatttagtaatagaagaaaagggttttctgtttactatcattgaggctatgattttagagagtgtcgactcttcgtatataagaacgcactataagaaattgttgaataattataatccgttaggggttgataagaactttttgataacttactacacaggctctcgatttgaagaatggtggcgaagatattttaacttcattcgtgacataagtacggatgtttttgaactgtcaggtgatatatatttgactgatactgtagaggaggcaacattgtattcttctttgaaaaaattaactcagcattttgaaattaatggcaggcatacctgttgcgtgcattatgcggttaaattttga

SEQ ID NO: 273314 - DNA, 1098 bp, Klebsiella pneumoniae
atgttctggaaaaagaaaaaaattgatgagcctgaacaagtacctaaactacagtttgaacgtaaacaacttacagataatgcattaaaacgtgaactaaaagagattcgtactaactcacaatcaccaatcatcagttttgggttttcagcaggtaattcagcaggaaatattaatagtatcatcaatatgacattacctaccttagtcgctaaatcacgtgaactaagtttgaataatggaattgctaaaaagtactttcaggttaacagtgatggcgtaacgggtgcatcaggtctgtatatccgtcctgatgtaaatcttcatgatgataatgaagaaaacttagttattaacgaagaacttgaacagctattctacaaatacgcagataatccagaagcatttagtatgaatggtaagatggatttagcagcttttcagcgtttagtggaacgtactcgtagtattgatggtgaagcattcattatttgtcatgatgtaaacggtactgtgaagtttgaacttatcgacactatgcgaatacctactactggaaaccgaatttttgatgatggttcatatgtatctaatggtattcattttgatcgatatgggaaagtaattgagtactatgtaactcgtttgaatccttctacatatacgtatcaaacaggtgattatgaagtaattccagcatcaaacatgcttcatctaatgatccaggattacccaaatcaagagcgtggcataccggatatcattgcaggtactactttattaaaagatcttgaagcctttattaaggcagcaatcatatctaagaaactatcagcctctgcaatggctttcattactaactcagcaggtagtgatgaagatattgattttatgaaagggtacgaacctgattactacgaaaatgacagcttacaaagcggtgctttagtagaacttcaaccaggacaaaacgtaacgagtgttaacccaaacggggctactgatggtatcacagagtttgtagatactcagatgcaacaaatagctatgtctcttggtatcacagagcaatcactaaatttcagatttaaactctga

SEQ ID NO: 273315 - DNA, 552 bp, Klebsiella pneumoniae
atggctatgtcggtcgaagggaagaaggaactactgaaacaacaattagagactgtagaagttcatgcgtcatggttcagagagcaccggcttttctgtaccgttaacgttgataccatacaggcacggctatgtgtgtttgacagggagattattcagctattggataaaatggatttcatcaggcttgagatatcagagaactttgaagggcttgaactcggtatcaatcatccagtacttaaaacactgttaaacgttggctatcgcctgttccttgatgatcttggctcaggccgtgcgaataccgcagcactttctactggttgctatgaggcggtcaaacttgatagggcgttctacaatcaagaagtacagaaacctacattcaacgtactgataaagaacatcatgaagtactgcccgtatgtgatcgttgagggagtagagcagcggcaagaactaccagtactacgtgatgtgggagtatcagcggtgcaaggatatctttatcgttcagtgaacttctctaaggtgacatctcttttataa

SEQ ID NO: 273316 - DNA, 366 bp, Klebsiella pneumoniae
atgaatattagaaatgagatgttacatggaaatgtaaatccatacaccaatcattttgacactgtttattttgatgatagaaccccgctctttgcaaaatttaccaatttagcttttgactcctacctcgcctcgcaaacaggaattgaataccaaaccttattaaaaagatatgagagtgtacaaaacttcatttcctatgtattgtcatgtttggaattaaatattacaaaagaaattatggatatgttggatgagccctttccaggatggaatccaaaaactaaaagattaggcaaacttttcgcggataaagctattgattttcaaatagatttaggtaaaacaataaagttaatttattaa

SEQ ID NO: 273317 - DNA, 918 bp, Klebsiella pneumoniae
atgctctacaaaggcgacaccctgtacctcgactggctggaagatggcatcgccgaactggtgttcgatgccccaggttcggtcaacaagcttgataccgcaaccgtagccagccttggtcatgcgctggacgtactggaaaaacaaagcgatctcaaaggtctgctgctgcgctctgaaaaagcggcatttatcgtcggcgcggatatcaccgaattcctctcgctgttcctggtccctgaggagcagttaagccagtggctgcattttgctaacagcgtcttcaatcgtctggaagatctccccgtccccactatctctgccgtcaatggctatgcgctgggcggcggttgcgaatgtgtgctggcgaccgattaccgcctggcgacgccggacctgcgcattgggctgccagaaaccaagctcggcattatgccgggcttcggcggttccgtgcgtctgccgcgcctgctcggcgccgatagcgcgctggaaattattgccgccgggaaagacgtcggcgccgatcaagcactgaaaatcggcctggtggatggcgtggtcgctgcggaaaaactacgcgacggcgcgctggcgatcctacgtcaggccatgaatggcgacctggactggaaagcgaaacgtcagccgaagctggagccgctgaagctcagcaaaattgaagccgccatgagcttcacgattgccaaaggcatggtcgcgcaaaccgccgggaagcattacccggcgccgatcaccgcggtcaaaaccattgaagccgccgcgcgtcttggtcgtgaagaagccctggtgctggaaaataaaagctttgtcccgctggcccataccaatgaggcccgcgcgctggttggtatcttccgaacgaccagtacgtcaaagcgaaagcgaaaaagctga

SEQ ID NO: 273318 - DNA, 372 bp, Klebsiella pneumoniae
ttgggaagaaatgacctgcttattcgcaccttccttgaagcgttcaacgccaacggggctctcaccgcgcgggcggtggtgagccagcgggtgccgccggggatgaccatgatgtaccacgctcaggaacggattatgaatatcccgggttcggaagtgaccggtcgtcgcggcggcattcataactcggtaacccgcgtctgtccgaagccaacgcacatgattggcggctacgcccagctggcctatggctttaactactacggcaccgtcggatcgaaccgcgacgagttcatcatgatccgcaaaatgaagaatattgcctggctggatgacgaaggtcgcgatcaggtacaggaggcgaaaaaatga

SEQ ID NO: 273319 - DNA, 378 bp, Klebsiella pneumoniae
atgaaaaaaccttttttggccttgttgcttgttgcatctcaaagcgccctcgcagacaaaatcccgaactcgctcgaaaatttaattgctgtttacgatacacggatgcacagcctggaaggtggggtgctctcgatcaaatacagcaaacagaaactgcatgttgatgcggcagaagcaatgtttaatgggatttgtactgacctagctatgcacaagtggaaccccgaaacaattaagaagttaatgctgctcaacgtctcacttgatcagggctttgaagtcgatgccggtggagctgaatgtaaaaaatccagcacaatgacatttgatgaagcacaggcgtacaggcgaggatttatcaaaccaattccgtaa

SEQ ID NO: 273320 - DNA, 129 bp, Klebsiella pneumoniae
atggatactattaaaaaaatcgctcaggtcatcgcgaaatccaaggaagtttacgtttcccgcaatccccagcttctgtgcaagctggataaattgatgttcatccggccctttgcctgcaatatctaa

SEQ ID NO: 273321 - DNA, 366 bp, Klebsiella pneumoniae
gtgctgcgccgccaggcgaacgagctgccgggcgcgccgtcgcaggaagaggcggttatcgcctttggtaaattcaaactgaatttaggcacccgcgagatgttccgtgaagacgagccgatgccgttgaccagcggcgaattcgcggtcctgaaggcgctggtgagccatccccgtgagccgctgtcgcgcgataagctgatgaacctcgcccgcggccgcgaatactctgcgatggagcgctccatcgacgtacagatctcccgcctgcgccgcatggtggaagaggacccggcgcatccgcgctacatccagaccgtctggggtctgggctacgtcttcgtcccggacggttctaaggcatga

SEQ ID NO: 273322 - DNA, 315 bp, Klebsiella pneumoniae
atggggcccgccggtcttattgccctggtcgccgggtgggtgaccaccgagatgggccgccagccgtgggtgatatacgggttgttgcgcacgcgggatgcggtgtcgttgcacagcaccctgcagatggccatcagcctgctggtatttatcgtggtttactgcgccgtgtttggcgtggggtattactacattttccggcttatcaaaaaagggccgcagccggtgacggagctgacctcgcaaaccgcaggcaccccggcgcgtccgctctcagcggctgagccggtgcgtgatgaggagaacgcatcatga

SEQ ID NO: 273323 - DNA, 1158 bp, Klebsiella pneumoniae
atgagctggcagcagcgaatcgatcgggcgctggacgagcggcgggcggcggaagcttttcgccgccgcctgccggtgacgcacggcgccgggcgctggctggagcgggaaggggagcgctggcttaacttctccagcaatgactatctgggcctgagtcagcatccggcgattatcgccgcctggcaacagggggccacgcgctatggcgtcggtgccggcggctcgggccacgtgagcggctatagcgaagcccaccgcgcgctggaagaggcgctcgccgactggctgggctatccgcgcgcattgctgtttatctccggctttgccgcgaatcaggcgctgatcgccgccctggtggaaaaagacgatcggattgtcgccgatcgcctgagccatgcctccctgctggaggcggcaagcctcagcccggcgcagctgcgccgctttacccacaacgatccgcagcagctcgcgcaactgctggctaagccgctggcgggcgaacagttggcggtcactgaaggcattttcagcatggacggcgacagcgcgccgctggcggccattcacgccgcgacgcaggccgcaggggcagtgttgctggtggatgacgcccacggtgttggcgtggtcggcgacgaaggacgcgggagctgcgccgcgcaggcggtgcgccctgagctgctggtggttaccttcggcaaggccttcggcgtcagcggcgcggcggtgctgtgcgacgaagcaatggccgattatctgctgcagtttgcccgtcatctgatctacagcaccgcgatgccgcccgcccaggcggtggcgttgagcgctgccctgcggatcattcgcagcgatgaagggcagcagcgtcgcgacatcctggccgcccgcatccgtcagttccgtgaggggatgggcgaggtgtcgctggggttgaccgactccgtcagcgcgatccagccgctgatcgtcggcaacaacgcccgggcgctgaacctggcctgccgtctacgcgacgcgggctgctgggcaacggcgatccgtccaccgacggtgccggtcggcagcgcgcgtttgcgcctgaccctgacagccgcccatcatgctgaagacattaaccgtttactggaggtgctgcatggccacagtgaataa

SEQ ID NO: 273324 - DNA, 1086 bp, Klebsiella pneumoniae
atggctgtcagcaaactaagcaacggaaaatggcaggcgcagttttttcccaatggtcgcgacggcaaacgcatacgccgccagttcgctactaagggggaggccctggcatttgaacgccatgaaaaggaaaaaactcaagacaagccttggttaggtgagaaaacggataaacggcgggttattgatttggtcaagacctggtatgacgctcacggcgtgacccttgctgatggcctaaagcggaaaggtgcaatgaagtttgcctgcatcgccatgggtaaccctcttgcaacagaattcaacgcaaaactattcgcaacttatcgccagcaacgcctaagtggggaaatcacccgttcagacagggttaaggctgttactcctcgcaccgttaatcttgaattagcctacttcagagccatgtttaacgaactcaaacgccttgatgattggaatccacccaacccactggataacgtgcgagagtttaaaattgatgaagccgagctggcctggctgacagtggaggaagcaacccggcttttggaagaatgcgagaaaagccgggctggtgatttactgatggttgtaaaaatttgcctggcaactggtgcgcgctggggtgaagctgaatcattgaccggcaaacaaatcagccccggtaaaattacctacatcaaaaccaaaggcaaaaagaaccggaccgttccaattagtgatgagttatttaaagatctccccacaaaccggacatcaaagcctttgttcacgggctgttattctgcgtttcgtggcgccattaaacgtgcaggcattgagttgccagatggtcagctatcccacgttctgcggcatacctttgccagtcactttatgatgcgcgggggaaatattttagtgctacagcgcatcctcggacacacggatattaaagtgactatgcgatatgcccactttgcgcctgaccacttaactgaggccgtaaacctgaacccgttaaacctgattaatggcagcaaaatggcagcagagctaagcactatgcaacgcttttcgacaatatacgaattactatgcacctga

SEQ ID NO: 273325 - DNA, 894 bp, Klebsiella pneumoniae
atgagtcagttcagcgcattaaattactcaaataatagagataaggctatagcaaaccttattaatattattgagggcatgacctgcgacggaaaaatcagcgaaaaggaaatgatttttcttgatacatggttattggaatcggaaataatttctcaaaattattatgtgggttgcattagagataagattgcagacattctttctgatggtatcgttgaacaaaacgaactagacgatttaaaagaattacttcttgagatgcagcgcggcctgatcgacacaccaaacattgacctttattccgttgattcagacaagcatctactggaagggttatgtaaaggaatggcttctgattatcatctgagtaatgatgaaatcaattatcttaattggttcctctccactaatgcctgccttaagaataactaccccggtaaacatttgtatgaattagtcagagaaattctcagtgatggggtaataactgaggacgaacgcattgcattgctgcaggagatcaccgcgttcacaggctctaacatctctgagggaatagtagatggatactccacaacgtcaccggtagacctcatagagaagttcaacccagaaagcagcaaggtatgcctcacagggaagttcttatgcggttctcgtcgccagtgtgaagccgacctaattaaactagggtgtaaaatatctgatcgcgtaacccaagatttggattacctcatcattggagcacttagctctaaagattggaaattccaaagttttggcagaaaaattgagcaggctattgactaccgggacaacaaaggcacctctcttaaaatcctcagtgaagagcattggcaaagcctaatgcgttcaacaaaccagggttaa

SEQ ID NO: 273326 - DNA, 630 bp, Klebsiella pneumoniae
atgaacgtgtcaacacaaaacttaacgaaaaaagatgacatcagcttgattcgagatttcatatttcagaatagaggtgggaaagaggtgataggtcgcatccttgaagcctatgggtttacaaccagaatttccttatgtaatcaattaggtgtatctcaaagcaccatggcaaacaggtatgcacgcgacacatttccggctgattgggtcatcgtttgccatcttgaaacgggcgcatcattaatctggctaagcacgggaactggaaacaaatttgtggatggacgcgacgacaaaaccgtgtacctaaaacacatagacatcacaaatgggaacatggctacccaaaaagacatcatcactgatgcgtcaaccattcccgacggcttaacgtcaccatttattctgacggctgataagacaacgtatctagtagacagctatgagggggagctagtagatggtttctggtttattgaaatcgatggaatcgctagcgtccgagagatttaccgcttccctgcaggccgtatacgggtagagaacggcaaagcatcatttgaatgctccgtgtctgaaatcaaggtccttggaaaagtcatcagcaaaactgagtttatggaataa

SEQ ID NO: 273327 - DNA, 435 bp, Klebsiella pneumoniae
atgggattttttggatttgctaaaaaagcacgtaaagcagcagcggaagttaaaaagtttgaaaagcgtgatttggcgcaggcggtggtaaacgcagcgtacctggttgcctacgctgacggcgagtgcgaagcgtcagagaaagcaaagatcgagcaggtgctgcgtaatcagccagcactggcggcgtttacctctgagattaactcaatcagcgcagcgatcatcgggcagctggataccaactttaaaattggtcgccgtgcggctctgcgtgaaattgaagatgttaagcacgatacccgcgaggcagaggacgtgatggatgtggcagtggctatcgcggaagccgacggcgaagtggagccggaagagcgtaaggtgctggaagagatcgccgccgttctggggctgcgtctggaaaaccatctgtga

SEQ ID NO: 273328 - DNA, 258 bp, Klebsiella pneumoniae
atgtctgcattaggtcacacccgggcacactggagcggcgtcctggcgatgacgctctgcgtatttgtgctcattgcctcagaatttatgccggtcagtctgttgacacccatcgcgggtgatttacacattaccgagggattagccggtcagggcattgcgctctctggcgcgctggcggtactgaccagcctgacgatatcccgcctcccggatcgctggaccgtaaatggctgctgctggggctcacggcgttga

SEQ ID NO: 273329 - DNA, 663 bp, Klebsiella pneumoniae
atgcgtgatctgatccttcaactcagcaaaagttcgatttattcaacaaagccgtttccaggtaatccgtacgtctttgaaacaaattctgaagacggagtccgtgcgtttgttaatggtccaggtttcgtaaactcagtgaattgcactggtgacatagtatctggagccggaatgatacctctccatcggagcttatgcccgttctttaactggaattttgagcgcggcacttttgaagggtggtcgctgaataattcagggagcgtttcgcaaacggctgaggttttaaacatagccgctaaaactgggaattatggtttaaagctcacatctgtcgccggtctgaatgtttttgccacccagtcaaccaggtctcttagtggtcgatattttacattttccgtatgggctaaggtgataacgccttcgtcttccggtgggaatgcaggcaatgcaacacttacctttaaatcagagcaaggtatacaactagatggttcattcacagcgaacataagttctggtgctacggattgggccgtttacggagcgtatttacaaggccgcgttccaccttctgctgcatcagttgaagtgtctttaagggcttcgaatggtgctgttctccattttgattgcgtcttgctaaattttatttag

SEQ ID NO: 273330 - DNA, 132 bp, Klebsiella pneumoniae
atgatgatctcatatcaggaacttgttcgcaccttccttagcatagctttcgccgcatgtctcctggtgtctcgcttcagcatgacgcaggtcgccttccgttgcgagaattgttatgtgcgcgtaatctga

SEQ ID NO: 273331 - DNA, 210 bp, Klebsiella pneumoniae
atgacagaacatcaatcaccacttcccacaagcggctatattcgccgctttcgcctggctcaagcgctgggcgtccatgtagcaacgattgatcgctgggttcgagataagcgactgccgcgcccggtaaagctgggcgagaagattaccgcctttgatgcggtagagattaacaactggctggcagagcgccggggaaaggtggcgtaa

SEQ ID NO: 273332 - DNA, 852 bp, Klebsiella pneumoniae
atgaaacgggctaaatacggcgatgtgatggaatggttttcactggacaggtacgactacgtgttagatctaagtgtcaaacatgtggtaagcgagatgttcatgatgcgttatctatctgatcatcttgagttccgaaaagatgaggttttctcaattattccattcccccttatagaggatataaccttcctggatggggatttgccggagggaaatctatcctttgatgacaggggaattattccgctacctttttcgatgatttgcgcctttgttaatacctgcctaagtgatgggcgtatgacgataacggataatggcaggattgaagcaagaccagacatagaaaattgcgatatctacaaccaatcgatgctatatgatagcgacgatccaaggtcagaaggtaaaacagggatatttgtcgatatcgggcttgatttgatgaacgatgacgaaatgatagctggatttaaaacattgctaaaaagctggagggttcagaccggtatacctgaaagtgccgtcaaagaaaaaaagaggttcggggcgtcaacaattgccaagatccatcattaccggataatcccatatcttgatatatcaagatgggcgaggattaacggcattatggtatccaatgagctttatgcacgtctactgttcccagagccactacctgacggaacggtcaagggtggcgctcacatccgtgacactgtgaaaccatttgcagagtctgtgagagatgtacttagtcgagtggaattaaaaaaatactacgcagataacccccacataaaaaacatgaggttttcagattttctgaaattgatagattttcaataa

SEQ ID NO: 273333 - DNA, 1686 bp, Klebsiella pneumoniae
gtgaatataaacgtcgcagatttgttaaacgggaattacatcctgttattattcgttgtacttgcattaggactatgcctgggaaaactgcgtctcggctcagtacaacttggtaattccattggcgttttagtcgtttctctattattaggccagcagcatttcgcgattaacaccgatgcccttaatctcggctttatgctgtttattttttgcgttggcgtagaagccgggcccaactttttttctatttttttccgcgacgggaaaaactacctgatgctggcgctggtgatggtcggcagcgcgatgctgatcgccatggcgctgggtaaagtgttcggctgggatatcgggctcaccgccggtatgctggcaggcgccatgacctccaccccggtgctggtgggcgcgggcgacaccctgcgccatttcggcctgcccagcgatcagctggcgcagtcgcttgaccatctgagcctcggctatgccctgacctatctggttggtctggtgagcctgatcgtcggcgcccgctatatgcccaagctgcagcatcaggatctgcagaccagcgcccagcaaatcgcccgcgagcgcggcctcgataccgattccaaacgtaaagtctacctgccggtgatccgcgcctaccgcgtcggcccggagctggtggcctgggcggatggcaaaaatctgcgcgaactgggtatttaccgccagaccggctgctatattgaacgcattcgtcgcaacggcattctggccaacccggacggcgacgcggtgctgcagatgggtgacgatattgcgctggtgggttacccggacgcccacgcccgcctcgacccgagcttccgcaacggtaaagaggtgttcgaccgcgatctgctcgacatgcgcatcgtcactgaagagatagtggtcaaaaaccacaacgccgtcggccgccgcctggcgcagctcaagcttaccgaccacggctgcttcttaaaccgggttattcgcagccagatcgagatgcctatcgacgataacgtcgtactgaacaaaggcgacgtgctgcaggtcagcggcgacgcccgccgcgtaaaaaccgtggccgaccgcatcggctttatctccattcacagccaggtgaccgatctgctggccttctgcgccttctttatcgttggcctgatgatcggcatgatcaccttccagttcagctccttcagcttcggcatcggcaacgccgccggcctgctgttcgccggcatcatgcttggcttcctgcgcgccaaccacccaaccttcggctatatcccgcagggggcgctgaacatggtgaaagagtttggtctgatggtgtttatggccggggtcggtctcagcgccggggccgggatcaataacgggctgggcgccgtcggcggccagatgctggcggcagggcttatcgtcagcctggtgccggtggtgatctgcttcctgttcggcgcctacgtgctgcgcatgaaccgggcgatgctgttcggcgccatgatgggggcccgcacctgcgccccggcgatggagatcatcagcgataccgcgcgcagcaatattccagcgctcggctacgcaggcacctacgccatcgccaacgtgctgcttacccttgccgggacgctcatcgtgatcatctggccagggctacaataa

SEQ ID NO: 273334 - DNA, 513 bp, Klebsiella pneumoniae
atgaaaacgctgctggcagtgatcataggcgctttggcttttcagacccaggcggccattaccatcgatgcctcacgggttatttattcgggcaaagataaatcggccagtctgaaaattaacaaccgaagcagcaaaaactatatcgtccagacctggcttgatacgggtccggagacccccagcagcggcttacccattgtggcaacgccgcccctggtcaaattacgccccgagcaatcggcacaactgcgctttatttactcaggaaccggtcttcctgccgacagggaaagtctgttttgggtgaatattcaggaggtccctcctgcgcctgaggaaaataatatcctgcagttcgcgattcgcacccgattaaaactattttatcgcccgcaagggattgccacatcgctgcccaaagccgttgaaaatctgcagtggcagcaaagcgctaacacgttatcttttactaacaacagggctttgttgaataaatcgaacttttgctga

SEQ ID NO: 273335 - DNA, 990 bp, Klebsiella pneumoniae
atgcatattacctacgatcttccggtatctattgacgatattctcgaagcgaaacaacgcctcgggggaaaaatatataaaacaggcatgccccgttcgaattattttagcgagcgctgccagggcgaaatatttcttaaattcgaaaatatgcagcgcacgggttcatttaaaattcgcggcgcctttaataaactgtgcggtttaaccgcggcggaaaaacgcaaaggggtggtggcctgctcagcgggcaaccacgcccagggcgtctcgctctcctgcgccatgctcggcattgacgggaaagtggtgatgccgaaaggggcgccgaaatcgaaagttgccgccacctgtgattattcggcggaagtggtgctacatggcgataactttaacgatacccttgccaaagccagcgatattgttgaacttgagggccgcatttttattcccccctatgacgacccgcaggttatcgccgggcaggggacgattggactcgaaatattagaagatctgtatgacgtggataatgtcatcgtgcccattggcggcggcggcttaattgccggtatcgcgattgcgattaaatccattaacccgacaatccgcattatcggcgtgcagtcggagaatgttcacggcatggccgcctcctggtatgccggggaaatcaccagccatcgccacgccggcaccttagccgatggttgcgacgtcgcccgcccggggaaactgacctatgaaatcgcccgccagctggtggatgacatcgtcctggtgagtgaggatgacattcgccagagcatggtcgccttaattcagcgcaataaagtgatcaccgaaggggccggggcgttagcctgcgccgcgttattaagcggcaaactcgacagctatatccagaaccgcaaaacggtcagcctgatttccgggggcaatatcgatctctcccgggtatcgcaaattaccggttttgttgacgcttaa

SEQ ID NO: 273336 - DNA, 348 bp, Klebsiella pneumoniae
atgcaagagaattataagattctggttgtggatgacgacatgcgcctgcgtgcgctgctcgagcgttatctgaccgagcagggcttccaggttcgtagcgtggcgaacgccgaacagatggatcgtctgttaacccgtgaatccttccacctgatggtgctggatctgatgctgccgggcgaagatggtctctctatctgccgtcgtctgcgcagccagagtaacccgatgccgatcattatggtgacggcgaaaggcgaagaggtcgatcggatcgtgggtctggagatcggggctgacgactatattccgaagccgtttaacccgcgtgaaggctttgttgaataa

SEQ ID NO: 273337 - DNA, 375 bp, Klebsiella pneumoniae; identical to SEQ ID NO: 135689

SEQ ID NO: 273338 - DNA, 273 bp, Klebsiella pneumoniae
atggcgggcgcagagctcatccatcacggcgagcccgaggaaggacagcgacggggcggctttcagcggcccggcctccatcaaatcttccagcagcgcacaggcaatcagacggcctttttcctcgccgtgctggcgcagatagaagccctccagctcggcagcgatggcgctttccagcgcgtcgagggtgaggtggggatagcggtgctgacgttcgcacagggtcagccaggcacaggccacggcgcggcgatacagggcggcacgtaa

SEQ ID NO: 273339 - DNA, 1059 bp, Klebsiella pneumoniae
atggcgctgaagctattagccaataataacgcaaagagtgttctcgctgcgggaattagcgcgtccgctaccgttattaccgttgggacaggggcgggggcgttatttcccgtaccggtatccggtaagagttattttaaattaacgataacagacgcggccacaaaaacaatatcagaaattatgcacgtcacttctgtagctggtgatgtgatgacggtaattcgtgggcaggaggggaccacagccagagtttggtctacaaatgacattgtatcgaatatgataactgctgggacattcgattcaatgttacaaatagcaaataacttttcagaaataaagtcagcaggaaaagaatcccaggcagcagcaagaaacaatataggagtgggtgacttatcaggatatgtcggaagattagttaatgttcaaacattcaattcatctgggacatatacaagaacagacggagcaataaaaggcattgttcatgttgttggcgcagggggaggaggcggcggtgcaagagcgaccagcgtggggtatctcgcgggtggtggtggtggcggcggcggcggttatgcatcagcatttatttctcttccatccacccaagaagtcatcgttggtttagggggggctggcggggtagatagtgggtcaggtgcaaatgggggtgcttcctccttcggatcaatttctgctacaggcggggaagccggggcatcgtctggactcgatcagtacgcttctggtgacatcaggcaacaaacgggtgggagaccaggggtggggagtggaggaaatcttgtaaattcctatggaggaacgggggggaaccttctcctgtcaaccagtgggaacagctgcgcaggaagcggtggtagctcgcactttagcggcggaccaaggggcgcaataggtggctctggtaatggtgaatctggggtttatggggccggaggttcaggtgccgcttcagacagtagcccatctatttcctatagcggaggtaggggcggcgatggtgtggtaattgtatgggagtacgcgtga

SEQ ID NO: 273340 - DNA, 3450 bp, Klebsiella pneumoniae
atgaacatcaacgaatcagcgcaatgggcaaatactatcaggatgctgacccggcaggacagggtcgaaggagggccggggggcgtggcaaacgagcaggctacgcaactggccgcccgcacgcagtaccttaagcaggctattgaggctttcgacagcctggtgaaatcgggtgagtctccctattccagcgaagcggaagccagcgctgccatcgctgccggtaaaatcgccgaaggggcgttatttgccgttcgttcggccagttcgtttttatgggttgatgaatataaaaatgtgggcggaatcgcaacgccgacggggaagcacttaccctccagcctgctgaccacaccgacattcagcccggacgataccgaccctgacggcacggtgacgggggtttctgtcactgcggcggggcagtatttctgcgtgcgtaccggcaacccggatttaccactggcgctgtggagaaataataacggaacggcggaacgggtatttgatattcccgatggccggattatgccggagttttccgccctgtctgcgggtacgctttaccgtcgcgttgacccggaatcgccgctcctgaaaggggtgtattacgaggggggtgtaaagaaaaccgatggcgataccacctgggacacctcgcttatcagcgttgctgccggagacctgataaagctgacaggcgttgtcggctcctatacccgccaggagtcacgcgcggtcatgacgcagcttgacgcgacaggtgcctgggtgtccacgctggccgctgtgcgcagccaggccgcgccgttccacaccaccgtttatgctgttgcgcaggtgtccggctatgtcgcggtgacgtatcgtgctgactccccgaatctcggcgcaaacgtggtgtatcgcaatacccgtaaaatcatcaccgatgcgaccctgggcgcagaactccagtcccggctcactgacgcccgcagatacggcgcagggattgattacaccagtacggttcgtacattttccggtgcgcgctacctgtctgatggcacactggaaacaggcaagggtaacgcctacgccgtaatgtacgttcctgccagtgccggagatgtggtgagactgtcaggggcggcgggtgtggcatcacgcgcggaagtgatacccgtcctggtgcagaccgacccttcacgccggttcgtctctgtgttgcagtccgtgacctctgacggcaactactcgaaaggcgacttttacgccgtggcggcacagaccggttatattgccgtctgctggcgcgttatcgccggtatcaccaccgccgtgaccagattcccccgcctgctggattaccgtagcggtattgcggataccgtgttgcgcccggtgacgcatgaggcgaccatcacgcgcggccagcgtatgacgatggccggtgtggcggaggcggccagcggctggtttattgccacgctcccggtgaggcgcggggatgatgttgccattgatgcgctgcatgattcgttctcaaaggatgtaacgccggttatctgtcagctcgacagcaaaaaagcctttgtgtcggtgctgtgccagttcaccaataccggcgcggggccgaaccgtgacacgtttatcgccaccgccagccaggatggttatgttgcggtcaccgcccgcctgaccggtaatgcgccgtttactctgttcgcctcccggcaggcattctgtgacccgctggatatctggctggaacagcagactgacgccagcggagaggctgattacaccctcgttaacaaatacgaggttaacaacacggtcattgacagcggatttgccctgctgacggacgccagctggcgcacggtctgggtgcccgtccgtcgcggcgagtccgtttctgcgtacacggccaccggagccgctgcgaccggcgaaacccccgccgctgacgggtctgtgccggtgatgattcagtacgacacccgccgggcaaaccccgtgattcgtgcaaccgcaagcggaaccgggtcactcactggttatcagaccgtatctgcaaaggcgacggcggatggctttatggcggtacgcctttatgcagcagaccggggctggccgaccgtgaagcgcctggcggcaaaaaatggttcagattccggcgctgcatcgctcccggtcgtgccgggacagttcgaacgccttccggtcaatgcggacactaactgggattacaacaacagcccgtactcacaggataacgttgtgattgccggggattatcagtacgcggtggtgattggcgcggggcgggtgccgtacatcgcccaacgcagcaaatggggcggtgcctggctggccgtttttgacctcggcacgattgccggtaatccgctggcctcgccgaccactgccgacggtcataacgtctataacatcggtgtcagtaaaatcgggcatattatcgtcgccgggaatatgcacggtgacggcccccgcgcggttgtgtcggataatccgcacaatatcaccgcatggacggcggtggatttctcggcgggaatgttcacgaaagacgtgacctatccgcatttcatcagctaccccgatggtacgctgcaatgctattaccgctggggcgtgcgtcactatctgacaacctatgatgagtccacaaaaacgtttatcaccccgcgtcacattgtcggggcgaaggcggacggccgcggcgggccgtatgagcaaaaatacgttgtcgataacgacggtattctgcacgcgtgctggggctaccggatggatgccacctctgcgctggcgaatgagggtctgtactattctcagtccgcagacaaaggggcgacctggcgcgcggcggatggctctgtcatttcggctgcaggcacgcgtaacgatgcaaattcaacccggattttcagcgcggaaaccggcagcggctacgtcaatcagaacggcggttgtgtcgatattcacgggcattatcacacctgcctgacgcagtacgacgataacggcaatacccagattgtgcatgtgtggtgggacggttcggcgtggaaatcagaggttgtcacggattttgatttcaggatgaatctgtcgagcaacctggtcatgaatgatatcacccgcccggttatcggcgcgacaccatcgggccgggtttatatcatctatcacaccacgtacaacggcctgagcggagccattatggcgattgatgttaccgatgagggtaatcctcagtcgatggtggttgcggggtttgatatcggtactcagtcgatggggttcaacgtggcgcatatgctgaaaaccggtgattttatggcgctgatggcgaaaggtgttgcgaacagcagctcacagggttacggcacattcagcgcccagcctgtcatgatcgccaccgtcccgatgccgtaa

SEQ ID NO: 273341 - DNA, 840 bp, Klebsiella pneumoniae
atggacgctatctttgacagagtcgtaagggaattttttccaaatacaaccatacatttttggaaaaaatggctgttcaggacggcatttggcaataaggtattttctcgcttaatatataacgagcgactcgttaataaaaatggggtcgagtgggttaatgcagttgttgaactccttgagttgaaatatgaaagcgaacaccaccaacttaacaacatacctgggcatggggctacggttgttatttcaaatcatccgacggttatcgatggacttagtttaatacatatggtctcccgagtcaggagcgatataaaaataatagccaatcacgttttgccaattatattcccccaggtatcggaacttaccattggaattgagaatatggccggtaagatgagccataaaaaattccgcgagatgaacgatcacctgcgaaaaggaggcgtattgattatatgtcctgcgggtaagctagctaactggtctctttccgggttacaggagcataagtggaaccccggttttttacagcttgctatgagaaataatgcagcattggtaccaattcatattacgggagcaaacagtaagatttattatcttactgcaacattctggcggcaactgtcgaatatgatggttattcgtgaagctctccgccatcatggcaagaccatgaaaatcaatataggacagcaaatagccttatcctcgtttaaagaatacaataaagatctttctgccgcggcaaatgtatgtctgacgcacctccagagtatagcgaagaatggcccggctatgttagatacgattgcgccgcaagaattataa

SEQ ID NO: 273342 - DNA, 657 bp, Klebsiella pneumoniae
atggactccggctcagcaggtgccaatgaagggctgtattatgctaaatctgctgataaaggtgtgacgtggacgaacgcagccgggaccagttcctggtctctgtctggcggcagcctgaatgatgtacggtctgagaaaatatttaatgcagctcagggctcagggtacatcaaccagaacggtggctgcgtcgataacaacgggtactatcacacctgcctgactcagacggacgcgttcggttacacccagatagttcatatctggtgggatggttcctcgtggaaaaacgaggtggtgagccggttcacattcacgatggacctgtccctgaacctggtgatgaatgacctgtcccgcccggttatcggctgcactccgtcaggccgggtctatgttttctatcacaccacgaaaatgggacgacaggggcagatacgcgcgattgatgtgaccacagcaggcagtccggtagattcggtgattgcactgtttgatatcggcacgcaggctctggcatgtaataccgatataatgctaaaaaccggtgattttgttgcgctgctggcgaagggaacagcaaacagttcgtcggaaaactacggcgtttacagcaatcaaccggtaatgctggcaaccataccgatgccgtaa

SEQ ID NO: 273343 - DNA, 306 bp, Klebsiella pneumoniae
gtgagaaatgccttccatcatacagccgtcgcccatgaaggcgtaggtgtagtggtcgacgatatcgtgtcccggacggttgaactgcgccgccagggttttctcggcgatagccatcccgaccgcgttagcgataccctggcccagcggaccggtggtggtttccacgcctgcggtgtagccgacttccgggtgacccggggttttggagtgcagctggcggaagtttttcagctcggatatcggcagatcgtagccagtgaggtgcagcaggctgtaaatcagcatcgaaccatggccatttga

SEQ ID NO: 273344 - DNA, 771 bp, Klebsiella pneumoniae
gtgcagcgcgataccgttggcgatagcggtcataccgaactcgcgcacgccgtagtggatgtagttcccggcagcgtcttcgttgatcggcttagagccagaccacagggtcaggttggacggcgcgagatctgcggagccgccgaggaattccggcagcagcgggccgaaggcttcgatggcgttctgcgaggctttacggctggcgattttcgccgggttggcctgcagcttcgcgatgaactcgttagctttcgcgtcgaagtcagacggcatctcgcctttcatacggcgggtgaattcggctgcttcctgcgggaaggctttggcgtaagccgcaaacttctcgttccatgcggcttctttcgcctggccggcttctttggcatcccactgggcatagatgtcagacggaatgtcaaacggcgcgtgtttccagcccagcgcttcgcgggtcagggcgatttcggcgtcgcccagcggcgcgccgtgagagtcgtgggtaccggctttgttcggcgaaccgaaaccgatgatggttttgcacatcagcagggacggtttgtcggtgaccgcccgtgcttcttctaccgcgcgtttgatggcgtcagcgtcgtgaccgtccacgccgcgcaccacgtgccagccgtaggcttcaaagcgtttggcggtgtcgtcggtgaaccagccttcaacgtggccgtcgatggagatgccgttgtcatcatagaacgccaccagtttacccagtttcagggtaccggccagtga

SEQ ID NO: 273345 - DNA, 708 bp, Klebsiella pneumoniae
atggatgaaaatgctttagggtttgcctcatactggcgcaactcgctggcagatgctgagtcaggaaagggcagttttgaacgtaaagacgccaaaaatttcactcactggcatgggatagcggcgggacgtcttgacgaatcgatcgtcgataaattttttgaaggagaaaaagacgacgtcgaaacagtcgatgtcatcttgcggccaaaggtttatttccggttactgcagcatggaaaggaccgttccgctggtgcgcctgatattgttaccccgatagtgacgccagccctgttgagccgtgaaggttttttatatccgacaccagcgacctccattcctagagacctgcttgaacctttgccaaaaggggcattttcgattggtgagattgagctgtatgacaaatataaaacgacacatacgtcattctctatcaactttgatgacagcgttgataacactgccgaaacggatgaagaacgagaagcacgatatgcagcctggcagcaggattggcgtcaatatctggatgattcggagaggctactgaagaacgttgtcggcgactggattaaaaatcccgagcaatatgaactcgctgagcacggttatattgttaaaacggcgcaatccggtggtgccagtttccatatcctttcgctttatgacggtaatccccccgaaaaaccagtgcatgcataa

SEQ ID NO: 273346 - DNA, 192 bp, Klebsiella pneumoniae; identical to SEQ ID NO: 246859

SEQ ID NO: 273347 - DNA, 402 bp, Klebsiella pneumoniae; identical to SEQ ID NO: 227672

SEQ ID NO: 273348 - DNA, 192 bp, Klebsiella pneumoniae; identical to SEQ ID NO: 217366

SEQ ID NO: 273349 - DNA, 792 bp, Klebsiella pneumoniae; identical to SEQ ID NO: 265219

SEQ ID NO: 273350 - DNA, 348 bp, Klebsiella pneumoniae
atgacagaggatgatctctatgacctgctgtcgtcgctggcagacgggcgggtttatccgtgtgtggtgccactaggcagcgacggacttcctgcagtttccactccctatgtcattttctcgataccgactgatgttgccggggatgttttctgcggccaggcagagtcgacactgcgcattcaggttgatgtatgggctgaaacgaatgacgaagccagagcattacgcctggatgccctggctcgcctgcaggttctttcacctgtcgaggtgacaaaaattcctggctacgacacgacaacccatcttcatcgggcaaccctcgaaataacggttattgcctga

SEQ ID NO: 273351 - DNA, 348 bp, Klebsiella pneumoniae
atgacagaggatgatctctatgacctgctgtcgacgctggcagacgggcgggtttatccgtatgtggtgccgctaggcagcgacggacttcctgcagtttccactccctatgtcattttctcgataccgactgatgttgccggggatgttttctgcggccaggcagagtcgacactgcgcattcaggttgatgtatgggctgaaacgaatgacgaagccagagcgttacgcctggacgccctggctcgcctgcaggtactttcacctgtcgaggtgacaaaaattcctggctacgacacgacaacccatcttcatcgggcaaccctcgaaataacggtcattgcctga

SEQ ID NO: 273352 - DNA, 360 bp, Klebsiella pneumoniae
gtggtgagccggttcacattcacgatggacctgtccctgaacctggtgatgaatgacctgtcccgcccggttatcggctgcactccgtcaggccgggtctatgttttctatcacaccacgaaaatgggacgacaggggcagatacgcgcgattgatgtgaccacggcaggcagtccggtagattcggtgattgcactgtttgatatcggcacgcaggctctggcatgtaataccgatataatgctaaaaaccggtgattttgttgcgctgctggcgaagggaacagcaaacagttcgtcggaaaactacggcgtttacagcaatcaaccggtaatgctggcaaccataccgatgccgtaa

SEQ ID NO: 273353 - DNA, 348 bp, Klebsiella pneumoniae; identical to SEQ ID NO: 273350

SEQ ID NO: 273354 - DNA, 360 bp, Klebsiella pneumoniae
gtgacaggcgccgctcttggggcggggattaccgcttacaactccagttccgcgggagcaaccctgggagtagggcttgcagccggtctggtcgtaatggcggctgacgcgatggtggaagatgtgaactacaccatgatcaccgatgtacagatcgcggaaagaaccaaaacacaggttcagactgataacgtggccgtattacgtcagggaacatccggagcaaaagtgcagacaagtactgaaacgggtaatcagcataaataccagactcgcgtcgtctctaacgcgaataaagttaacctcaagttccctgaagcccagcctgttcttgaagaccagctgggctttgttgaataa

SEQ ID NO: 273355 - DNA, 360 bp, Klebsiella pneumoniae; identical to SEQ ID NO: 273354

SEQ ID NO: 273356 - DNA, 165 bp, Klebsiella pneumoniae; identical to SEQ ID NO: 260110

SEQ ID NO: 273357 - DNA, 162 bp, Klebsiella pneumoniae
atgaacaaacacgtcgctgctatgctgacgatgcttattattccgtctgcttttgcgcaaacacctttaacagacagcaaaactatcgttattaaacccagcgctctggccgtcgagatggtgcctgatattgcctattcatttacgcaaaatatcatgtga

SEQ ID NO: 273358 - DNA, 894 bp, Klebsiella pneumoniae
atgtgtatccaccttaacttaatgatttttaccaaaatcattaggggattcatcagggcagagcatatccacgtcgtagacgaagagacattcattattgatttcggtgccatcgtcaccggatttatcgatttatccattaccgcgtctgagaatcaacgtgtggaactgctctatagcgaagacgttgatgaaaactacgaactaaacactgactccacccttgcgggatttgtcggcaaacaggttactgaaggtgtgattattgacggcggaattggagcacctgcgagggcggagcagaaggatgcctttgaatgccgcagtgggaagaatcattttatcaatgcctttacctgtcattcgtttcgctatgtgcagttaagcggtattaatattgaacaattaaacaacgttcaggcgctttcagtacatactgtactaagggaaaacgggggcttttactgctcagatccttacataaataagctctttgaggttgctaaaagaaccaaactgaataacattcattcggtcttcggggattgtgcccgcgaacgtttcgcctatggcggagacattgtcgcgttggcccggtcgcaagtgtatcagtttgactctgccgctatttataagaaaactatctttgattttatcaatgatattcgtccctgtggtggtgtgacggaaactgcgccatttatgggaattaagactaatggagtcggcggggaaacgggccccctgggctggcaactggtattaccttatttgatagccattcactatcgacattatggcaatgtcaatctgctggccgaaagcttgccatttcttgagaagcagatcctctccctggaaatgcgcgactttgatgacctggtgacctggtga

SEQ ID NO: 273359 - DNA, 777 bp, Klebsiella pneumoniae
atggcgagagtcgtggtaattaccggtggcggaaccggaattggcgccgcctgcgcgcggctgatgcgcgccgcgggcgaccgggtgtttattaccggacggcgcgaagcgccgctgcaggctgtcgccaatgagaccggcgccacggcgctggtgggcgatgccgccgacggcgaggtgtggcgccagcggctgctaccggccatcctcgaccagaccggcgggattgatgtcctcatctgcagcgccggcgggatgggcaacagccccgccgccgagaccagcgaccgccaatggcgcgaggcgctggacggcaatctcaccagcgccttcgccagcgttcgcgcctgcctgccttcgctgattgcccgccgcggcaatgtgctgtttgtcgcctccatcgcctctctggccgccgggccgcaggcctgcggctacgtcaccgccaaacacgctttaatcggcctgatgcgctccgtcgcccgcgattatggcccccagggggtacgcgctaacgccgtctgtcccggctgggtcacgacgccgatggcggatgaagagatgcacccgctgatgcaggcggaagggctgtcgctgactgaggcttatcagcgggtctgtcgtgacgttccgctgcgccgccccgccagccccgaggagatagccgaggcctgtcagtttctctgttcaccgcaggccgccatcatcagcggcgctacgctggtcgccgacggcggggccagtatcgtcgatgttcccactctggcgtttgcctaa

SEQ ID NO: 273360 - DNA, 495 bp, Klebsiella pneumoniae
atgtccatcgtactttctatcagcgaagccgatgcgctacgagcctatcaggataatatctcggccctggcgctggccgccaaggtcattcctggggccacggtgaagtatatgagcgttattctcaatgtgttttccattgtgacggcattcctggcgctctatctggccgtacatgaatcttttgtaggtctgatcaaagtcactgttgaaaaaatagttaagcctcaggaaaacaatagtaaggcgatctcagttgccgcttttgtcatggttgtgctggtgctgtggctgatagtactaacgaactttcccattctgaaggtgtttgtgtttggtggcgtgacttacggacttattagctgcatcattcctggttttattattcttaagaatgacaagttttctgaccttcgtggcgtctcggtttactatgtgattttaatcggcatgctcatgtgcattggaccttttgtcatgctgttttcacaataa

SEQ ID NO: 273361 - DNA, 183 bp, Klebsiella pneumoniae
atgataagaaaaccactggccctggcgttaatattggcggcgctgccggcggcggcaatggcgcaacactgcggcagcctgacgctggatgtctgcccaacgccttacgatcaaacgctacccgcggccaaagacatgctcagctctgatgaatcccctaatgattttggtaaaaatcattaa

SEQ ID NO: 273362 - DNA, 792 bp, Klebsiella pneumoniae
atgaggggatctctcagcgtttcgcacctcaacctgcataaaaccttctgcattccgcacggcggcggcggcccgggcatgggcccaatcggcgtgaaagcgcacctggctccgttcgtgccgggccacagcgtggtacagattgaaggtatgctgacccgccagggcgcggtttccgccgcgccgttcggcagcgcgtccattttgccgatcagctggatgtatatccgcatgatgggcgcggaagggctgaagcaggcgagccagaacgcgatccttaacgccaactacatcgctacccggctgaaagacgcctacccggtgctctacaccggtcgcgatggtcgcgtagcgcacgaatgtattctcgatattcgtccgctgaaagaagagaccggcattagcgagctggatatcgccaagcgcctgatcgactttggcttccatgccccgaccatgtctttcccggtagcggggacgctgatggttgagccgacggaatcggaaagcaaggtcgagctggaccgctttatcgacgcgatgctggcgatccgcgcggaaatcgaccgcgtcaaagccggcgaatggccgttggaggataaccctctggtgaacgcgccgcacacccagggcgagctggtgggcgagtggaaccatccgtacagccgcgagctggcggtattcccggctgggttgcacaacaagtactggccgacggtgaaacgtctggatgatgtctacggcgaccgcaacctgttctgctcctgcgtgccgatgagcgaataccagtaa

SEQ ID NO: 273363 - DNA, 591 bp, Klebsiella pneumoniae
atgttatttattgacagcagtaaaataaatactctcggcagtacgctgttaaaaagataccgtagagctactgccgttatggccgttatactgctgttgtgtgcgctggcctgtatgctcttcccaatatatagcggtgtggtcattagcaccctgactggtgctttaatgttcatctgtggcatgtactctgtggcgatggcattgatattcattaaatacaatactcgttcttacatctcatcgttattatttggaattatttattttggcgtcggctgtggttttatctttagcacgtcattcggtattaatactttgtcattgctgttttgtgttttatttatccttgccgggtatagtcgcatcgccatgggatttaaagatcgggctatgaagggtcgttattggtgtattttcattggcataatagacctcatcatcgccctggcctggctccgcgctagcgaagacgccaactatatcatcactgtcatcttcattggtctggaaatgctgttctgtgccggattcttcttagtgctcagctatgcactgaataaagcacaaaaaaaattaattaccacgtaa

SEQ ID NO: 273364 - DNA, 600 bp, Klebsiella pneumoniae
atggcttggctaggaatacctttcccattagaaaaagttgaaggcacaatattttctaattatcaattttctcatttgactattgataagctaccttcggtagtagtagatagctcattttcatgggaaacattattatcagcaattattgcgggtgctattcctgcctggattgcatataaagcaataagaagcaataatgagcttgctacttatcaaaataaattgcaggctaaaacaaaaattaatgaagaaataaggatggcagctgctgattatgtaacggcggttcattatatatcaatagagtatagtgaatggataaaagggctgattaatagaagagttgcaccagtatctgagctgaagctgccggaaaatatacaagaaaatatttataaggcagagctgagtaagaatgcccttatgcttttagtaaaaccaaacgaagccggtaaagtattgctaagccacatggctgagataaaattaaaattgggtcctgttctagaagtgcatgcaacccaaaaggatattttaaatttacaaaaagcagccagtaaatttatactcgcatgccacgaatattttgataaataa

SEQ ID NO: 273365 - DNA, 261 bp, Klebsiella pneumoniae
atgattgcatcactactcaccaatgaatacgtaagtgcctttggatatatagttggggtggtctctgggtgtatagcaatataccagactatgcaagtgaccaagaaaaataatgagatacaacagcttaatgttacgataaatgatctcaattcgcagattacaaatatcacaaccaataggaacaatattaatcaaggggagcgttcccaatatttccaagataataatgggcctgttaatattgataatcgggggtag

SEQ ID NO: 273366 - DNA, 1698 bp, Klebsiella pneumoniae
atgcggctcaataaacttattgttttaaaaaacaatgctattgttagggaagtgacgtttaaagacggtttaaacctaattgtaaataaaagaacgtcaggtaaagacagtggtaatagtgtaggtaaatccacgttatcacgcgttttagattacttgtttatgtcttcaggtaatgatatctatcatgatgctgaatttggaaaggatatacctgaaatagtatcattaatcaatgataacatattgaaatttacattggattttaatacggtagaaaataaaaaagcaattgtttctcgaacaatatctactgatgagaaaaattcaaagtattatttaagcgatgttgaagttgataagaaacaatattatgacttcatagctcaagcagtatttgggttgactacagataagccatctctaagaaatgtgtcgcataaattcattagaaacacgaatgaaaaaatgcagaaaacccttaactttttacatgctaatacaacttctgatgtctacgatttattatacttgtttttgtttggattcaatgggttgccattgataaagaaaaagggcgaatttaataaagatataaaaaaacaaaaagcatatcttgccgcatacagaaatccgaacagagagacagttttatcaaaaatgatcaagcctctaaaaaaggaaattgcagaggcagagaaaaatattaaaaattttgattttaaagatagccatgatgaaagcctaaaaaagctatcagaaatacaaagggttatcagtgactactctttgatttatgcttctttaaatatgcgcgttaggaatattgaagaatcgatcttgtctctaaaaaataatatcacgcaactcgtagacgacgatttaatcgaaatatataattcggccggtctttattttaaaggcgagcttaaaagatcttatgaagaaatggtattattccataatgatgtaattaaaaataaaattaattttttagagttggagttgttaaagaaaaaagaagagattgatgctgtaaatggaaaaattaatgattttcatgagcaagagtcatctttatttaaaacaatcaaagagcctgaaacgttaaagtctataaatcaactatttaataaattaactgagttacgtgaaaatctggctagcatagagactaatctcactcgtattaacgatactaatgccttaataaaatcgcttgaagatagtagggagaagttacttgaagagatcgagttggctgttcaaggtctagagaagaatatcgagatttttaacgagttttttggtgatcttacaaaggaaatttatggcgagagatatatctttgatctttctttcgatattgataaaggaaaatgtaactttgatatttcatgtgttacgccaaatagtaacgggggtaagaagaagggcgagataactgcatttgatttagcatatattaaatttgttgataaggttaaattgaagagaccaacttttgtaattcatgatagcattgaagatgttgatgtgaatcaaattagagatatattttttgaagcaaacaatataaatggtcaatatattgtgtcaatcttaagtgataagttttcagaagatgttgatttaaaaatgatgaaggataactccatccttgagttatcttcgacaaacaaattctttaaggtataa

SEQ ID NO: 273367 - DNA, 1062 bp, Klebsiella pneumoniae
atgtatcagaatatcagtcaacaccgtcctcctaagccggtcgacagtactacccctcgtcatagtatgttccgccatacggaagacgataaatggcaaatcaatctctatgtgttgttcaaaaaactacccaaaccacggggttcgagagccatttggtataaaaccagtcaaaatatggttcaaaaactaccggcagaaacctttggaagagaaattcgtgagattggtgctgtttttcatgacgaaattgacaggaacacatggattacagccagttcagcactcgttttactaacttacggctccagaaatcacaaacatcttgaagtcgttcagtgggtcgaacgatacacaggcatcagactgccacgccaacatgggttaagccgaagagaagcagtgtttggtcgtaaattacgtgaattcattaataaagaactcgtagacatcacctatggggactatgaactggaaactcagcaccgaatgtgcaatgggaagtactacgtcgatttcgcagttaagcattactggaacggtaacgaagatagctcaaaattttacctttatctcattgagtttgatgaagaagaacacacgttggctccaaatcaggtagctgattcaatcagggactctgagatcaaaaggcaagagccacaagctaccatcatcagggtaaaacatgatgagagtgatgactggtttgaactagtacgtaacaacaatgggctaattagctttgaagcagctcttttatcaggtatttctgctgcaagccgtggtgctgatggcgacagaatcatcattgattcaaagtccgccagagatgcttatgatgacctccaaaaccggagtgcttggttgctaaactatgagaaacagccgttgagagggatcgaggaagctattaaacgatgtggaatccaatatgaaaaagcacgctcaaaaacaagcaggcagttgagattatctctcaggtcattcagctctaaactctaccgttggttacctgatggctccgccgaatacgtccttcaaaacctgaaaccagactga

SEQ ID NO: 273368 - DNA, 1704 bp, Klebsiella pneumoniae
atgccatcaaacagcatcccccattacctctacaagcgtaaccacgtatggtggttcaggaagcgtttcgtcgctcagggcaatgcaatcgaatacagactgagcctgcaaacaacaagctttcagcgtgctcgtcttcttgccctgcgtttacaaacgctttgccaacagatggtagcctctttgggggcccccaagaaactgaagaatggcgtgatggaaaaatcagcacaagagcaaatcagagcaaaacttcgagcaaaaattgccgaatggaccgccgaggaaacagaacattggttctgcggctctaaacgtaatgaaggcgatctgaacgattatcttgagacattagatatggttgtctctgatttgaaagaacgcatcgcttacgatgataaaccatctctgcaccgggccgaagcaagtaccgttctggacgaactgccacacctcaaagctactctcagtgagtacgattaccaagtcattgctcgcatggtggcacaagccaaggtcaaatccttacaggatgccagagcaattattcttggtggggatgctgactggctctcaaccacatccccagcccctgcgactacttttgtggacaattcgttgaacacaccaacactatcagagttgttacaaacgtatgccacagaaaacaaggccaagggtcattcaaaacgcactcagaaaaagtacgaatggtatggagcgcttattctcagttcatttggtgatgtccccgttcataccattagcggggcaatgggcagagaattttatgacaacctgtcaaaacttcctatgggcctccagaaggaggtattacttacctcaaagctaagccagcttattgggactaatactgaaaaatcaatcagtttggttactgccaatgcccatcatggcaaaattaatcagttctttgattgggtggtggataagaagcacattccgtctagtccattcccaagtaaaggtatccctatgcccaagaaaaatcacaaagatgatagggggtctatcactgacgcagaggctaagcgaatattcagccataccttgtttaccgatcaccaaggcattaaaacaaagctagtacagcatcctcatcatttctttttacctttaatttgcctagttacgggaatgcgtgctggggaggtatcgcaactttacattgatgatatcgtgaatgttgatggagtgttttgcttccttattgacaaccgccgagatgatcaatggctaaagacaccgaatgccaagcgtttcattccaattcaccatgagcttatcaggctaggttttttagatttcatcgaggatctgaagaagaaatttacagacgatacacgcctgtttcataacatcccgctgattcaagatagctactcggctaaacctagcgagtggttcatccgcaatttccgggacgcgttaggccagccttctcacgtaacattgcatggatttcggcacatgttcagagacaaactggtgaatttgacagattctgaggagcgaatttgccgattaatgggccatcagctcaatagctatggcaattccttgctggctgatcagcgagtgatgcaacagttggtaaattctattgattttagtggaatcatttccgatgtacggccctacacatcattaggaatgttccaccagctcaaagggagggcgtaa

SEQ ID NO: 273369 - DNA, 849 bp, Klebsiella pneumoniae
gtgattccgactctgacagcgactccgactcggacagtgactcggatgctgacagcgattcggactctgacagtgactccgattcggacagcgactctgactctgacagcgattccgactccgacagtgactccgattcggacagcgattccgacagcgacagtgattcggactccgacagcgactctgattccgacagcgactctgactccgacagcgactccgattccgacagcgattcggattctgacagtgactcggattctgacagcgattctgactctgacagtgattccgactcggacagcgactctgactccgacagcgactcggattccgacagtgactcggattctgacagcgattcggattccgacagcgactccgactcggacagcgattcggattctgacagcgactcggattccgacagcgactcggattctgactccgactctgattccgacagtgattcggactccgacagcgactccgactcggacagcgattccgactccgacagcgactcggattccgacagcgactcggactctgacagtgattcggattctgacagcgattccgactccgacagcgactccgactcggacagcgattcggatgctgacagcgactctgactctgacagcgattctgactctgacagtgactcggattctgacagcgattctgactcggacagcgactcggactctgactccgactccgactccgacagcgactcggattctgacagtgactcggattccgacagcgacagcgactctgattcggataccgaaccgcaggcaaataatgatacccatacggcggctatcgataccgtag

SEQ ID NO: 273370 - DNA, 2325 bp, Klebsiella pneumoniae
atgttagatccgattggcggttttcgccgcattcaggacttcttcatttcatatatagaaaccagctttcgaattgccgatccttcagtcgcggactcaagacgcaatcttttgaatagcagcggggaatttgccgcggagccctacattgaacctgttttacggtatgagtcttcggataaaacgcttgaagctttggccgagatggacggcgggccgctgaatcgcttgtctcccaaaggccgtaaagcgttcgtcgaactagcgttatccggtctgttcgattctaaacctggcgacgaagtctggccgcgtcgttcggtccatgcgccgtatagccaccagactcaaatgttggagcgcggtattagccctggttgccccggcattgtgacatcgggaacaggctcgggaaaaacggaaagttttatgttgcctatactggctgcattatcgaacgaggctgtcagctgggccgcaccttgcaatggctatctgcaaaatcggtggtggaatagcgaaaaaacaaactgggtttctcgtcgcgaaggagaaaaacgtcaggcggcagtcagggcgttagtactttatccaatgaatgcgctggttgaagatcaaatggcgcgtttacgtaaaacattggattcagatgacgcgcggcaggtaatggaacatcgcttctccggaaatcggatcttcttcgggcaatataccagtgcaacaccgattaccggctatgccaaccatcctcgtctttccggagccacctcggaaaaaagtcgccgggcccgtaatcttgaaaaattacgtaaggcgttgaagcgaattgatagcgatcagcaggctgcgcgcgcattcgacgaaaaagaaaacgcttcggaaaagacccgatatatatttccttcgacagacggcggggaaatgatgtctcgctgggatatgcaggctgccccgcctgatgttcttgtcactaacgcctcaatgctaggggctatgctttcgcgcgaagtcgaagacggtatttttgatgctacgcgcgaatggttgatgaataacaacgatgcgtatttctatctggtattcgacgagctgcatttaatgcgcggttccgctggaaccgaaaccgcaatgttgattaagtcgctgattatcagacttgggcttgacgatccgaaacatcgctacaaactgcgtttgctggcgtcttccgcatcgctgccgatggatggagctgatggagaacaatcacggaaataccttcgggatctctttgcgccctttggcacttgccgcgattctctggatcccggtagcgataagcctgatttctggcgtaactgcgtcattcagggaaaaccttatataccgttgaagccagaaggaaaaatcgccgtgcggccttttgccgcattaatgcgggttgcccttgagaatcagggaaatgtcattcgccatttgaacatgacggacgcgctgagtcaggctttgtctgatgtcttcctggctctgagcgtgagtgcaaaaaatgatatgcaaggcattaaacaagcggcggaaaaagcggctgcgctattgaccaacgcttgtatagaagaagacggcgagttgccacgagcaatgcctcctggacttatcatagataagatttttctgaaggaagactcggataaaccagatgaattggaattagcattacgcgggttaatgctggtgcgcgcgctgccggaatgcggagtggtttgcgagaagaccgccaacgtcacaccagcttttcgcgtgcatacattcgtcagaaatattgaaggtttctttgcctccgtatcgccgggagagcaaaaggcgaaattcgcagatttttgcctagagcgagggctgtcgcacgcgccatcaacaccagccggaaaacgtggtcgccgtttgttcgaaatgttgtattgtgaagcgtgtggcgagttactgatcggggggcagaagggacagaatcacggtaaaatcatcgaattattaccttcagcgacaaatctggaaaatcttccagaacgccctggcgctgaatattacgatgatatgacactggatgagtttgcggttttctggcctgtcgatatagcttatcggccaccggtaggttgcgaaaaaggttgggatgtctgggaaaaagcggcgcttaatcctattacaggcatagtgaccattgggcaggaaacatcaacgacgaatactgacgtagttcgcgggtatatctatttccagaatcaggttaagcctaaaaaaggtgagccgccgaagaaaccttctgcgcaacctttctgctgccctaaatag

SEQ ID NO: 273371 - DNA, 1218 bp, Klebsiella pneumoniae
atgtcccccatcgaaaaatccagcaagttagagaacgtctgttatgacatccgcggcccggttctgaaagaagccaaacgtcttgaagaagaaggcaataaggttctgaaactgaacatcggcaacccggcgccattcggcttcgaggcccctgacgagatcctcgtcgacgtcatccgcaatttgcctaccgcccagggttactgcgattcgaaaggattgtactcggcgcgtaaagctatcatgcagcattaccaggcccggggtatgcgcgatgtcacggtggaagacatctatattggcaacggcgtgtccgaactgattgtgcaggcgatgcaggcgctgttaaacagcggcgatgagatgctggttcccgccccggactacccgctgtggacggcggcggtgtcgctttccagcggcaaagcggtgcactatctgtgtgacgaatcctctgactggttcccggatctggacgacatccgcgcaaaaatcacaccgcgcacccgcgggatcgtgatcattaaccctaacaaccccaccggcgcggtctattccaaagaattgctgcaggagatcgtggagatcgctcgtcagcataatctgatcattttcgccgatgaaatttacgacaagatcctctacgacgaagcccagcatcactctattgccgccctggcgccggacctgctgacggtgacctttaacggattgtcgaaaacctatcgcgttgccggcttccgtcagggctggatggtgctgaatggcccgaaaaaacacgcgaagggctatatcgaagggctggagatgctggcttcaatgcgtctgtgcgccaacgtgccggcccagcatgctatccagacggcgctgggcggctatcagagcatcagcgaattcatcatccccggcggacgcctgtatgaacaacgcaaccgcgcctgggagcttatcaacgatattccgggcgtctcctgcgtgaagccaaaaggcgcgctgtatatgttcccgaaaatcgacgccaaacgcttcaatattcatgacgaccagaaaatggtgctcgacttcctgctgcaggagaaagtcctgctggtgcagggcaccgcctttaactggccgtggccggatcacgtacgcatcgtgaccctgccgcgcgaagacgacctggagatggctatctcccgctttggccgcttcctctccggctaccatcagctttaa

SEQ ID NO: 273372 - DNA, 183 bp, Klebsiella pneumoniae
atgagtcagagtcatttctttgcccacctctcccgcctgaaactgattaaccgctggccgctgatgcgcaacgtgcgcaccgaaaatgtctccgaacacagcctgcaggtggcgatggtcgcccacgcgctggcggcgattaaaaaccgcaaatttggcggccaggtcaacgccgagcgctga

SEQ ID NO: 273373 - DNA, 2079 bp, Klebsiella pneumoniae
atgtcagcatccgagtcgctgtcagagtccgaatcgctgtcagaatccgaatcgctgtcagagtccgaatcactgtcggagtcggaatccgagtcgctgtcggaatccgaatcgctgtccgaatcggagtcgctgtcagagtcagaatcgctgtcggaatcggagtcgctgtcagagtccgaatcactgtcggagtcggaatcgctgtccgaatcggagtcgctgtcagagtccgagtcgctgtcagaatccgaatcgctgtcagaatccgagtcgctgtccgaatcggagtcactgtcagagtccgaatcgctgtccgagtcagagtcgctgtcggagtccgaatcgctgtcagagtcggaatcactgtccgaatcggagtcgctgtcagagtcggagtcactgtccgaatcggagtcgctgtcggaatccgaatcgctgtcggagtcggagtcactgtcagaatcgctgtccgagtccgagtcgctgtcggaatccgaatcgctgtcagaatccgaatcgctgtcggaatcggagtcgctgtcggagtcagagtcgctgtcggaatcagagtcgctgtccgagtccgagtcgctgtccgagtctgagtcgctgtcagaatccgaatcgctgtcagaatccgaatcgctgtcggagtcagagtcgctgtcggagtcagagtcgctgtcggagtcggagtcactgtcggaatccgaatcgctgtcagagtcggagtcggaatcgctgtcggagtcagagtcgctgtcggagtcggagtcactgtcggaatccgaatcgctgtcagagtcggagtcggagtccgaatccgaatcactgtcggagtccgaatcactgtcggagtcagagtcgctgtccgagtcagaatcgctgtcagaatccgagtcactgtcagagtcggaatcgctgtcagagtccgagtcgctgtcggagtcggaatcgctgtcggaatccgaatcgctgtcagagtccgaatcactgtcggaatcagagtcggagtcagaatcggagtcgctgtccgaatccgagtcggagtcgctgtccgaatccgaatcactgtcggagtccgaatcgctgtcagagtcggaatcactgtccgagtcagagtcggaatcactgtccgagtcagagtcgctgtcagagtccgaatcactgtcggagtcggaatcgctgtcagaatccgagtcactgtcagagtccgaatcgctgtcggaatccgaatcgctgtcggagtcagagtcactgtcagagtcggaatcactgtcagagtcggagtcgctgtcagaatccgagtcgctgtcggaatccgagtcactgtcggagtctgagtcgctgtcagagtcagagtcgctgtcagaatccgaatcgctgtcggagtcagagtcactgtcagagtccgaatcgctgtcggagtcagagtcactgtccgagtccgaatcgctgtcggagtcggagtcgctgtcggagtcggaatcgctgtcagcatccgagtcactgtcagcatccgagtcgctgtcagaatccgagtcactgtcagaatccgagtcgctgtcagagtcggaatcactgtcagagtccgagtcgctgtccgagtccgaatcgctgtcagaatccgagtcgctgtcggagtcggaatcgctgtcagaatccgagtcgctgtcggagtccgaatcactgtcggaatcggaatcgctgtcggagtccgaatcactgtcggaatcggaatcgctgtccgaatcggagtcgctgtccgaatccgagtcggagtcggagtcactgtccgaatccgaatcactgtcggagtccgaatcgctgtcagagtcagagtcggaatcgctgtctgagtccgaatcactgtcggagtcggaatcgctgtccgaatcggagtcgctgtcagaatccgaatcgctgtcagaatccgagtcgctgtccgagtctgtatcagaatcggcatcggcatcactttcgctgccgccagggtcggtatcgctgtctgagtcagaatccgaatcactgtccgcatcagaatcagtatcatcgttcggagaatgcgacgaatga

SEQ ID NO: 273374 - DNA, 702 bp, Klebsiella pneumoniae
gtgctttgcatcggagctgccattggctccggaatcgtctttttcccattacaggttggattaaaaggggtatgggtctttgccctggccgttatcctgggctatccggcagtttattacatgcagaagctgttcatcgaaacgatggcgcgcagcgatgagcaagattcctacctgagtattattaccagctacgttggcagccgctggggcgtactgcttggcgcgctttactccttcaccatgctgaagtcgatggtggagtatgctcttgccattaccaacgacagcgcctcgtatctgaaaacctttggccttactaaccagacgttatccgaacactggtggtggtctctgctgttaatcgccgggctctctctggtcgcgtcgaaaggagaaaagctgctcttcaaagtttcaggcagcatgatcgccgtaaagctggtgatcatcgtagcgattggtttcgtggtgatccctttctgggatgtgagcaatattggtgcattcccaaccgttagccaccttgtcgtaggtacgttcccgacgcttccgttcgctatcttctccattatgtttgttgggatactaaatccgatgaacatcgcctataaaaaacgtgaagaagataaggacgtggcaaaatataaaattttacgcgtacacaaagtggcttatttagttcttgtcgggctttgttga

SEQ ID NO: 273375 - DNA, 306 bp, Klebsiella pneumoniae
atgctggtagagcgtccgacggtgcaggccagcgaggtcgccttgcaggagttacgcagcggcggccgtgagctggtgcggaaaattgaggagtatcagccgcaggcgctggcggtgctcggcaagcaggccttcgagctggcctttaaccagcgcggcgcgaagtgggggaaacaggctatgaccatcgggacgacccaggtgtgggtgctgcctaatcccagcggcttaaaccgggcgacgctcgataagctggtggcggcctatcgtgaactggacgatgccctggcaacccgcggccagtag

SEQ ID NO: 273376 - DNA, 756 bp, Klebsiella pneumoniae
atgttaaatacgctgattgtgggtgccagtggttatgccggcgcagagctggtgacctatatcaatcgtcatccgcatatgaacataaccgctttgacggtctccgcgcaaagcaatgatgcgggaaaattaatttccgacctgcatccgcagctcaaaggcattgtcgatatgccgctgcagccgatgtccgatatcagcgaattcagcgctggcgtggacgtggtgtttctcgccaccgcgcacgaagtgagtcacgatctggcgccgcagttccttgccgctggctgcgtggtgttcgatctctccggcgccttccgcgttaacgatggggcgttctacgaaaaatattacggtttcactcatcggcatcccgacctgctcaaacaggcggtgtatggtctggcggagtggagcgcggatgcgcttaaagacgcgcagttaatcgcagtgccaggctgctatccgacggcggcgcagctgtcgctgaagccgctgattgaggccaatctgctggatctcaaccagtggccggtaatcaacgctaccagcggggtgagcggcgcgggtcgtaaggccgcgatcggcaacagcttctgtgaagttagcctgcagccgtacggcatatttaaccatcgccatcagccggagattgccagccacctcggggcaaaggtaatttttaccccgcacctgggtaattttaagcgcggcatcctggaaacggctttgttgaataaatcagatttcgggtaa

SEQ ID NO: 273377 - DNA, 240 bp, Klebsiella pneumoniae
atggcgtcggactccgccgaagaacgcgccacctctaccgctaacggaattatcaccacggcgatgtttatcggcggcggcatttcgccattgcttatgggctggctcattcagtttggcggcggctgggaaaatccagcgggttatatctacgccttctttaccatggcgggatgtgcgctgctggggatgttattacagctcatgaccaccgataaaacgccgcgcaaagcgcattaa

SEQ ID NO: 273378 - DNA, 1236 bp, Klebsiella pneumoniae
atgtttgaaaagataggtttacccaggaatttattatggggatatatcggcctgaccatctttatgattggcgatggtgttgagcaggcgtggatctcaatctggcttgtagagaaggggctgtctgttgcacaggcatcctacctgatcaccgcgtatggtgttactgttacgctggcagcctgggttactggcgttctggttcagacgctaggcccgcgtaaagtcatgttttacggtctggtaacctttatcattggcagtatcggttttatcagtgttggccttaaacacatggaaatggcgtggatgcttcctttctacgcattacgcgggattggatatcctctgttcgcttactcattcctgatatggattaactacagcacgcctgttgcgcgcagggcgactacagttggctggttctggtttacgttctcattagggctgagtgtgattgggcccttcttctcttcgatggcgttaccggtgctgggtgagatccacgtgctctgggtcggcttactgtttgtcctggtcgggtctgttctcggaatctgggtcaaccgtgatgttgttcctgcttcagaaattcacccattcagcgcgggtgaattactgaaagggatcaccattctgcagcggccggtcatcgcgatgggcctggtggtgaaatccgtaaacggtatcgcgcagtacgggctggccaccttcctgcctctgtacctgatcagttatggctacagtaaaacagagtggctgcatatgtggtctgcagtattcctggtggctatttttgccaatctgttctttgggttctttggtgacaaatttggctggcggaaaaccattatgtgggtcgggggatttggttatgccgctgttctcattctggtgtgggcggtcccccaggtactgggtcataatttctatgtgatggcatttgtactttgcctttgcggcgtgaccatggcgggctatgttcctttgtcagcgttatttccgatgcttgccccggacagtaaaggagccgctatgtcagtactgaaccttggtgcaggcctgggagccttcatcgctcccgctattacagcattgttctattcatctcttggcgcaggtggtgttctaggcatctatgccggtttatatatcctcagtggcgtgcttacacctttcctcaaaacgccggaggagcttaatcagcaggctgaactgaaagataaggtcgcataa

SEQ ID NO: 273379 - DNA, 201 bp, Klebsiella pneumoniae
ttggaatacggtattgacgtggcggttttccgccggaacatgagtgatatcgtgatcttcgagatggatccgtccgctgtcgacgttttccaggccggcaataaggcgcagaacggtggttttaccgcagccagaggggccaagcagagtgagaaactcaccattgttgatggtcaggttaaggttggctttgttgaataa

SEQ ID NO: 273380 - DNA, 1209 bp, Klebsiella pneumoniae
atgccactggtcaccacaacatttaatcaaaagacgctcattcggattgctatggtaatcgcttttgtccagtttactaatgcgctggaatatatgatgttcagccctgtttttaaatttatggctgcagatttcgctgttcccgtcaccttctcaggctatgtatccggtatgtacacatctggagccgtcctgtcgggaattatcgccttttactggattgatcgttgcaataagaagcattttttaatcgctaatatggtactgctagccatggcgacactgttgacgacattcactaccagttttcctcttcttcttacattgcgcttcttcgcaggactggttggcggtacgacaatggctgtggggatcactattttgataaaccacacaccggctgacttgcgcggaaaaatgttggcgacggtgattgcgtcattttcgatggtcagcatcgtggggatgcccgctgtactatttttgtgtactcattacggttggcatgtcgcgttgtggttaatttgtacactgtgttggttggcattgccactgatcgtctccatcatccctcaggatcccgtcactttcgacacgtcccacgcgctgcccctcgatgtagatactttactgtttgcttccggtaatgcgctggtacagtttagtccaatgctgatcattcctgtcctggcgccattaatgacgcagctgttgggggtttctcaaggtctgctgccctggttgttcttcggcgggggcctggcggggtatctgtctaccagaatgacaggcgcattaacctctcgtgtttctgctttgagtttggcgaccgggtcgaccctcgtttttatcctgagcttactgatacccctgatgggctatccgcatccagcgctatttattacgttatttctcggcgcagcttacagtcgtctggtctcatcgtcggcggtgacgattcagtttcctgataacaagcaacgagcgggattctcttcattacagacatccatgatgtatctgatgacgactgccgcatttttcctgtctgcttttttgttacccgaccatcgcatggcgctacaaaatatggatacgctgttggcggtatgtgcaattaccgcatcaggaaccccaattattgtcatcattttgcaaaagaaactggctaagcgttcgttcgagcccgatcgtttcaccactgagtag

SEQ ID NO: 273381 - DNA, 648 bp, Klebsiella pneumoniae; identical to SEQ ID NO: 232500

SEQ ID NO: 273382 - DNA, 555 bp, Klebsiella pneumoniae
atgaacattattaaaacagatattcctgaggtgctgatttttgaaccgcgcgtgtttggtgatgcgcggggtttcttctttgagagcttcagcagcaaggtgtttaatgaggctgtgggccgccaggtggaattcgtccaggacaaccactcccagtcccagaaaggcgtattgcgcgggctgcactatcagctggatccgcacgcacagggcaaactggtccgctgcgtggaaggtgaggtatttgacgtggcggtggatatccgtcgttcatcgccaacctttggcaaatgggtgggcgcggtgctcagcgcagagaataaacgtcagctgtggatcccggaagggttcgcccacgggtttatggcgctgagcgacacggtgcagtttgtctacaaggcgacgaactactacgcgccacagtcagagcggagcatcatctggaacgatccggagatagggattgactggccggcgctgagcgactgcgcgctgtcgctgtcggagaaagatctgcaggcacatactctggccactgcagaagtttataaataa

SEQ ID NO: 273383 - DNA, 282 bp, Klebsiella pneumoniae
gtgaaaattaccgcctatgattatgccatctatggcgccctcaatggtgttgtcgaaacgatatctcccgacacgattcaggacgaggcaaaacctgatgtttactattatcgggtgtttatccgtaccgatcataactatctggaaaataaacgcggtaagcgttttttaataggtccagggatgatcgctacggttgatattaaaaccggagagaagacagttatggattatttggtgaaaccatttaatagggcaaaagaagcgctgagagaaaggtaa

SEQ ID NO: 273384 - DNA, 1251 bp, Klebsiella pneumoniae
atggctatattgaatgctataaaaaatttttcaatacacaagggaaaattaacatcaccattatttacgttttgctttatatggtttggtgtttttatcctctatactctaagtttatcagatttattgatatttcctattagtgaaattgcggttacagtaacaatcattattgtgcctttcttggttgggtattctctctttacttcaataaataagttggcacctaagaagaaaatagatgtgaagtatagcgttgttgatttcaatactggagctgcaaaggttttaaggaaaacgagaaatttgactttcattttttttgctctcgtattagttgaaattgcaattgctggttatataccattaatatcaatggctacaggacgcacagtttcccaattcgcatttgggattccatcattgcatggttttgttcttgcatttggttgtcttttggttgcatctaattattatgattatatatgttttaaaaataaaaaatcattatggttcactttttttattatttctatttttgttctgctcgttactagaaaaatgattatggtatcctttatacaattaggaatgatacatctaatcacaacaaaaattaggccaaaaacaatttttttagtcgttttgtctgttttgttagtgtttctattgtttggatatattggtgatattagaactggcagacaactatttatacaattggctcatccaagttttgaatatcccgactggatgccaagtgggttcatgtgggcgtacatttacattgtaacgccaatagtaaatttaactaatgctattcacatgggacaaacagatacaaaccttaacttcttatgcagccttttgccaaaagttgcgcgaggggcattagaatgtgttgtaacagatgaagatgcatttgctagatcttatcaaataagtggtgcgtttaatgttggaagtggatatattgaaattttcctatcccagggaatacttggaatggttgtttttagctttgtacatggcctaatctcatcttatgtatttaatcgtgtaaaaaagaaaaaatcagcaattttgcttttctctgttattagccagataaatttgctcttaatttttggaaatggatatttcaatctcaatgtattagcacagattcccatggcagttttattcttcaataataaaaaattgaattatatttatgactctaataaccttgatggagtgattcgtgaataa

SEQ ID NO: 273385 - DNA, 561 bp, Klebsiella pneumoniae
atgttaattgaaactccagaatataaatcagcccccggacaggaagtcgttaaacctcaactacggatggttgatctcaatctgcttaccgtttttgatgcggttatgcaagagcagaatattactcgtgccgcccatacgctcggcatgtcacagcccgcggtgagcaatgcggtttcacgactgaaagtgatgtttaatgacgagctttttgtgcgctatggccgcggtattcagccgacggcgcgcgcctatcagctgtttggctcggtacgccaggcgctgcagctggtccaaaacgaattgccaggctccggttttgaaccgctgagcagtgagcgcgtgttccatctgtgcgtctgcagcccgctggataacatcctgacgtcggttatttttaataaagttgcagagatagcccccaatattcatttagtctttaagtctgcgcttaatcaaaatacggaacatcagctacgttatcaggaaacagaattcgtaatcggttatgaagagttccgtcgccctgagtttgcctgcgttccgttatggctttgttga

SEQ ID NO: 273386 - DNA, 927 bp, Klebsiella pneumoniae
atgaacaccgataacgcttccctgtacgtaaaatggctcaaacaagaggtcgccccggctttaggttgtactgaacccgtcgctatttccttcgcggccgcctacgccgcacaatatctggatcagccttgcactaaaattagcggttttatttccgccaatctttataaaaacgcgatgggcgtcaccatacccggcaccaccgtttgcggtgtaccgctggcagccgcaattggcgcatttggcggcgacccgcaaaagggattaaaaacgctggaagatatcactccgcaacacgttgaaatggcgcagaagctgatcgccaataacgccgttgatattgccgtcgaagagactcctgattttattcatctcgatctaaccctctctgctggcgagaattgctgtcgtgtcgtggtcaaaggaacccataccaacgtggtcgaactttatattaatggccagccgcagccattaagcgaaaaacagaatacgcgcacccagcgcgaaacgctgcccactttctcgctacaacaggcttacgactttattaatcgcgtcgactttaatgatattcgctttattctcgacgccgcgcgcttaaactccgcgctggcggcagaaggcaaaacaaaaaaatatggcctgaacattaacggtaccttttctgacgcagtgaaaaacggcctgatgagcaacgatctgttaagcaaggtgatcatcaacaccgtcgccgcttcagatgcccgcatgggcggcgcgccggtggtagcgatgtctaacttcggctcaggcaatcagggcattacagcaaccatgccggtagtggtggttgcagagcatctcggcgtcgatgaagagaccctggctcgcgctttatctctctctcatctcacggctttgttgaataaatcagatttcgggtaa

SEQ ID NO: 273387 - DNA, 918 bp, Klebsiella pneumoniae
atgaaaacgggtatcacttttaccaatcatcagaacacggccaacgtttgtacgccatcgcgctctgtcatgtacaccgggctccatatgccgcacacccggatgtttgataatcttggcttcccctggatgaattacgatctggacccggaattacgtaccgtgggccatatgatgcgtgaactgggttattacacggcgtataaaggtaaatggcatcttacccgggagatcgatcagccggtcgctggtaaatcggtagaagaaatggacctgggcgagatcccgacgccgcgactgcatgaaattatggaaaagtatggtttctctgattatcacggcattggcgatgtcatcgggaaaagtaagggcggctatttctttgattcagtcaccacggggcagaccattagttggctacgtaacaccggccgcccgctgaatgatgaaaataagccctggttcgcggcagtaaacctggttaacccccacgatgtcatgtttatcaacaccgatgagcatggtgagcaggtgcagtggaaagggccaatggataaagaaaaccacaccctgctgccaacccaacccccgcacaaccaaatctatcagcaaagctggccagactatccgctgcctgcaaaccgccaccagccgctcgatgagcctggcagacctgccgcccataaagagtaccagaatgccagggcggtgatggagggacagttccccgatgaagaccggcgctggcgcaaattactggattattatttcaactgtattcgcgataatgaccagcatcttgaggcgattctcaatgagctggataacctgcagctgacgcaaaatacgattatcgtctttaccgccgaccatggggagctcggtggggctttgttgaataaatcgaacttttgctga

SEQ ID NO: 273388 - DNA, 291 bp, Klebsiella pneumoniae; identical to SEQ ID NO: 136706

SEQ ID NO: 273389 - DNA, 123 bp, Klebsiella pneumoniae
atgatcatgctttattggacgctgtttatctatgtaatagtttattattcagggatgttttcctcgtacagggaaaaaaataataatgagcagaaaagaacgaaatgtattagcacgtattga

SEQ ID NO: 273390 - DNA, 255 bp, Klebsiella pneumoniae
atgcagacctatgacaatggcctggatgatgcctatggtctgctgcatatcaatggtagtaataactcggttattgccaatcatatttccgaaactattgatatccagtatcttcggccacagggaataaagccggtcatcatccggctggttgccggtaaaggaaactaccttgcgaataatcatattgttgcgaccacggaagcgtcagtgcagcaggcgcaggctttgttgaataaatcgaacttttgctga

SEQ ID NO: 273391 - DNA, 1284 bp, Klebsiella pneumoniae
atggcacagcagaaaccccacgacgtgaacgagccgtcacgtcgtcgcttactgaaagggatcggcgcgcttggcggcgcgctggccatcaccggcggctgcccggtagcgcatgcggcaaaagcggaaagttccccggggacgctcacacccgacgcgcgccaggaaaagcagccattctatggccggcatcaggcgggcattctgacgccgcagcaggcttcgatgatgctggtggccttcgatgtgctggcggctgataaagccgacctcgagcggctgtttcgactgctgacccagcgtatcgcctttttaacccagggcggcccggcgccggacacgccgaatccgcggctgccgccgatggattccggcatcctggggccgtggattgcgccagataacctgaccatcaccgtctcggtcggccattcgctatttgatgagcgctttggcctggcggataaagcaccgaaaaagctgcagccgatgacccgcttccccaacgattcgctggatgccgcgctgtgccatggcgacctgctgctgcagatctgcgccaatactcaggatacggtgatccacgccctgcgtgatgtcatcaaacatacgccggatctgctgagcgtgcgctggaagcgggaagggtttatctccgacagcgcggcgcgtagcaaaggcaaagagacccccatcaacctgttggggtttaaggacggcaccgctaacccggcgagccacgacagcgcgttgatggataaggtagtgtgggtgacagccgatcaggacgagccggcctggaccgtgggcggcagctatcaggcggcgcgcatcatccagtttcacgtggagttctgggatcggacgccgctcaaggagcagcagacgatctttggtcgcgacaagcacaccggtgcgccgctggggatgaaaaacgaacacgataccccggattacagtaaagatcctaacggcgaagtcattgcgctggatagccatattcgtctggccaatccccgcacgccggaaacccagtccagcctgatgatgcgccgcggctacagctattcgctgggggttactaacgccggacaactggatatggggctgttattcgtttgctatcagcacgatctggaaaagggttttctgacggtgcagaaacggcttaacggcgaggcgctggaggagtatgtcaaaccgatcggcgggggctacttctttgttttacccggcgtagttgatgaaaaacactatctgggagagtcgctgctgcaggcctga

SEQ ID NO: 273392 - DNA, 219 bp, Klebsiella pneumoniae
atgaactcaaaagcggccatcaccatcacctactgttcccagtgcaactggatgctgcgcgccagctggatggcgcaggagctgttacataccttcagcaccgacatcgcctcggtgacgctggtgccggggaccggcgggatcttcacgatcaatgtcgacggtcagcagatctggagcgcaagcaggatggcggttttccggatgcggccgagctga

SEQ ID NO: 273393 - DNA, 1110 bp, Klebsiella pneumoniae
atgactacaattctcgtgaaagatgccctgcgtaccgctattgaagcggcatctggcggaaaacaaacggtgctctacacaccaaaagggcaaccaactttcgtgaatatcatcccgaaggtgagcattgagacccttaaccccgcgctgggtattacgggtgtgcatccggcctttaagtcaggtgacaaagaaatttcgcaactgtatatcggtacctatcagggaacgattatgaacggggagctgctgagcctgccgaatgttgatccaggtgcccgcaacaccacgctgaatgctgccatcagtgcagcaaaggctatcgggagcacatggcatgtcatgactaatgccgagttttcattaatgcaggccgtcgccatcaacaacggattcaaccctcacgggcagaatacgattgccgggtacaacgccactggcgagcatggccggcggattgatggcaaagcgccaggtgaagccgggaaccgttatatttatacggggtcaggcccggtctcattccgtcatgacggcaatttttctggtatcagcgatattgtgggaaacctttgggaacgaaccccgggcgcccgtgttgttccgggtggtgagattcaggtgtatggcaaagggaatgaggccgccaccgcagaagccaccgtgtttgcctcaacggaggcgggaaccgggtggtatgcgttcgatgctaccacgggcgaactcatcccggcgacattctcaggctcgctcgcaggaggagactatgtgccaaccacggctaacagcgtaagagcaaaaaatagcgcaaccggccttgccgcaaatgaattttacttcggcagttgggcaagtctgaccgcgcagccgataaacgcactccctgccgtagtgaaaagcgcaatggaattacatggcctgtggccgaccatcaccggcgcgggaatcgtgcggggcggagaaaccgcgcaatacgccccgtcggctacgtcggcagtccatccggttcgctctctgtcggggatcttccagtttggattcgtgggcagcccgataacaaccgttactgagcaaggcgtccgtccggtttattacgatccgcttgcttaa

SEQ ID NO: 273394 - DNA, 603 bp, Klebsiella pneumoniae
atgaataacacgctgcttcccccgtcagccagtacgtggatgcgcagcgccgaagctgccacggcgaagctgtccgggataacggttgccatccgctccctgtggacgccggctgcctgcccggttgatctgttgccatatctggcatgggccttgtcagtcgacaggtgggataaggactggccggcagatcgaaaaattgccgcaatcaggcaatcctactggctgcatcgccggaagggtacccgtgcagcggtgaggcgcgtgattgaggatatggggttttctgccacgttcgcagaatggtttgacgtcggcgacgagccgggcacgttccggcttgaagtggatgttaacgaagtcgggctgacgtcgaaaaccctggacgagttaaaccgactgatcggagatgcaaagcccgtcagcaggcaccttgcagaactgaaaatttcaacatcatcaacggcgattgcgtgggcgggactggcaattacagacggcgaaaccatcaacgtttatccgccgggatataaacctgaaagccgcattcgttatgacggtctgattttccacgacagcaattttatttacgaagaggaataa

SEQ ID NO: 273395 - DNA, 1116 bp, Klebsiella pneumoniae
gtggttgcttattacaacgaaatagaccctcacgcggtgcagcacctgcgcaaccttatcgacgccggccatattgcgccgggcgtcgttgatacccgttcaattgaggatgtaacccccaatgaccttatcggattcaatcagtgccatttcttcgctgggatcggcggatggtctctcgcgctgcgtcgcgcaggatggccagacagtcgcccggcatggacagcatcatgcccctgccagcctttcagccaggcaggcaaggggcttgggtttgctgacgagcggcacctatggccctccgcacactggcttgtcggccagcgccgccctgtcgtggtctttggcgagcaatctggcagcgctgacgcgaatgactggatcgaccttgtacaagctgacgtggaagccctgggctatgccttcggggcggttgcgtttccgtctgcgagcgtcggcgcgccgcaccagcgagacagagcatattgggtggccgccgccgatcgccagcaatgggagaggcgcggggaatttcaaccgacaggggggggtaaaccttcagacagctgcgttattggctggctggacaacaccgagcgcgaccgacggagtgcgcggaggaacggggatcacctcggggatgacgggcagcagccttacgcagatggtgaaaatggcggtatggccgacaccgacggcaacggacggcaagggcggttatcagggcgggcggataagaaacggcaagctgtcaacggacaggctggatgtggcggcacagctcgcgggctggcctacgccgaccacgagcaacgatcgttcaccatgcccgcaggaagctatgcagacgtatcgcgacaatggaacaaagattcagaagaggcttcaggatgtagcggcgttatgcggcccggcccggttaacggtttctggcgagatgctgactggcttcactgccgggatggaaagtggcggccagttagacccggatcatccccgttggctgatggggttcccgccagagtgggaagactgcgcgcctacggaaacgccatcaacattgaagcggcggcagcgttcataaaatcctatatggcagcggtggatcatgtctga

SEQ ID NO: 273396 - DNA, 630 bp, Klebsiella pneumoniae
atggcagtaaattcaactggtgagcaaaatcgcatctctggtcgtgattttaatgaaaataatatccagatagataaatttgatggtcgtcacacaattaacattgcaataccttcggaaaagcatgatgaacggccactcgtaaaagcgcagcgcaaagaacttaataccctcgttgccacggtatccgctacctgtggcggcgaagcatatgaaatttggcaaaaggtgcatgctgaaataggtgtttccagcattgaggaaatgaccgtcaatcagtaccagaccgctattagttttttgcaggcaatgattgggcacggcaaggataaagacgccagtaaagccctggttagccttctccttcgcaatagcgaagacagcgatctacggcaaaagttaattcgttactgtcatgtcaacttcggcactggcaggctgaatgatcttacccgatctcagcttcaaatggtcctctcgtggctggatcagcagcaagttcgcgaaactccagtgtctactcaaacacctgccaccaagcttaacctatttcagttacttaaaactcaccccgtagagtttgctgtcatatttgctgtcggctttgtagtgggtgcgtctgttttataa

SEQ ID NO: 273397 - DNA, 345 bp, Klebsiella pneumoniae
atgctcagcaagactaatttacttgctcttattgttggtgctcttttgtctacttccgccctagcggtgccgttcaaagcgattgagaaaaatacctttggtggtaactggccttttagtgctgatgaggttcaattgcagtgtctggatggcaatccatacgtaatgaactttgatgacaataaaatatacgcgttaaccggttccgctaaagtcaagggcaaatccttcggggctttaccgctggataacagtaaattttggctagatgataaaaaatctccgggcatgaaggttgggcttggtgatgtaattgaagcagccttagatctttgcggcaagtaa

SEQ ID NO: 273398 - DNA, 1137 bp, Klebsiella pneumoniae; identical to SEQ ID NO: 269702

SEQ ID NO: 273399 - DNA, 213 bp, Klebsiella pneumoniae
atgctcaccaccgttgagcttcagtacttttgcaaaaaagtcgatggcacgctgcgccgctgcaacatcccataccaacccgcgagcatgacaggattccaaatccctgagatgtcgtttacaggagtttctaatatcaggaccggcgatttctttgccggagtctacatcccgcgcatattgcgtggcgggatcaaccgaagaactggttga

SEQ ID NO: 273400 - DNA, 654 bp, Klebsiella pneumoniae
atggtggcgaaagatccggcgctgccggcctacgaggatctgaagcgaatgggcatctacaagcgcaaagacccgaacggccacttcgtcgcctatcgcgacttccggcgcgatcctgaagcgcatccgctcaaaaccccgtccggcaaaattgaaatcttctccagccgactcgcagagattgccgcccgctggcagctggataaagacgaagttatcagcccgctgccggtctacgcctccacatttgaaggctgggacgatccgctgcgcagccagtatccgctgcagctgtttggtttccactataaagcgcgcacccattccagctacggcaacgttgatgtattacaagcggcctgtcgccaggaagtatggatcaatccgcttgacgcggaaaaacgcgggattaaaaacggcgatatggtgcgcgtttttaatcagcgcggcgaagtccgtcttccggcgaaagtgacgccacgcatcatgccgggggtctcggcgatgggccagggcgcctggcacgacgccaatatgaccggagatcggatcgaccatggcgcctgcatgaataccctgaccacccaccgcccgtcgccgctggcgaaggggaatccacagcataccaacctggtcgatatcgagaaggtttaa

SEQ ID NO: 273401 - DNA, 234 bp, Klebsiella pneumoniae
atggttaatcatttcgccaactggatgaggatcgatatcagagactgcacctgtcaaacgattactaataggacaaacctcaatgcaaatgtcccgttctctaatcaaatccattatctccggagatcttataacagcagtaccatgtccgatacgatcagctccataactaattatggcattccttatattatcagcatttccagtctcacccgcatgaattgttatgcctag

SEQ ID NO: 273402 - DNA, 342 bp, Klebsiella pneumoniae; identical to SEQ ID NO: 242404

SEQ ID NO: 273403 - DNA, 537 bp, Klebsiella pneumoniae; identical to SEQ ID NO: 250668

SEQ ID NO: 273404 - DNA, 1539 bp, Klebsiella pneumoniae
atgaacgacatctcttctgacgacatcttcctgctgaaacagcgcctggccgaacaggaagcgctgatccacgccctgcaggaaaagctgagcaaccgggagcgcgaaatagaccatctgcaggcgcagctggataaactccgccggatgaacttcggcagtcgttccgaaaaagtctcccgccgtatcgcacaaatggaagccgatctgaaccggcttcagaaagagagcgatacgctgactggtagggtgtatgacccggctgtacagcgtccgttgcgtcagacccgcacccgtaagccgttccctgaatcactaccccgtgacgaaaagcgactgttgcctgcggcgccgtgctgcccgaactgcggcggttcactgagctatctgggcgaggataccgccgaacagctggagttgatgcgtagcgcctttcgggttatccggacggtacgggaaaaacatgcctgtactcagtgcgatgccatcgtgcaggcacctgcaccttcgcggcccatcgagcggggtatcgccggaccggggctgctggcccgcgtgctgacctcgaagtatgcagagcacaccccgctgtatcgccagtcagaaatatacggccggcaaggtgtggagctgagccgttcactgctgtcgggctgggtggatgcatgctgccggctgctgtctccgctggaagaggcgcttcatggctatgtcatgactgacggcaaactccatgccgatgataccccggtccaggtactgctgccgggtaataagaagacgaagaccgggcggttgtgggcgtatgttcgtgatgaccgcaatgctgggtcagcgttggcacctgcagtgtggttcgcttacagcccggacagaaaaggcatccatccgcagactcatcttgcttgcttcagcggtgtgctgcaagcggatgcgtacgccgggttcaacgagctgtatcgcaatggtgggataacggaagctgcctgctgggctcatgcccgccgaaagatccacgatgtgcacgtccgcatcccgtcagcactgacggaagaagccctggagcagatcggtcagttgtacgccatagaggcggatataaggggaatgccggcagagcagcggcttgctgaacgtcagcgaaaaacgaaaccgctgttgaaatccctggaaagctggttgcgtgaaaagatgaagaccctgtcgcgacactcagagttggcgaaggcgttcgcgtacgcacttaaccagtggccggcactgacgtactatgcgaacgatggctgggtggaaatcgacaacaacatcgctgaaaatgccctgcgggcggtcagtctgggtcgtaaaaacttcctgttcttcggctctgaccatggtggtgagcggggagcgctactgtacagcctgatcgggacgtgcaaactgaatgacgtggatccagaaagctaccttcgccatgtgcttggcgtcatagcagactggccggtcaaccgggtcagcgaactgcttccgtggcgcatagcactgccagctgaataa

SEQ ID NO: 273405 - DNA, 336 bp, Klebsiella pneumoniae; identical to SEQ ID NO: 236516

SEQ ID NO: 273406 - DNA, 210 bp, Klebsiella pneumoniae; identical to SEQ ID NO: 235802

SEQ ID NO: 273407 - DNA, 210 bp, Klebsiella pneumoniae; identical to SEQ ID NO: 235802

SEQ ID NO: 273408 - DNA, 210 bp, Klebsiella pneumoniae; identical to SEQ ID NO: 235802

SEQ ID NO: 273409 - DNA, 336 bp, Klebsiella pneumoniae; identical to SEQ ID NO: 236516

SEQ ID NO: 273410 - DNA, 942 bp, Klebsiella pneumoniae; identical to SEQ ID NO: 223422

SEQ ID NO: 273411 - DNA, 141 bp, Klebsiella pneumoniae; identical to SEQ ID NO: 223421

SEQ ID NO: 273412 - DNA, 1236 bp, Klebsiella pneumoniae; identical to SEQ ID NO: 223420

SEQ ID NO: 273413 - DNA, 954 bp, Klebsiella pneumoniae
atgaaattttcctcccgaattaattctttccgttcaagacctgaactattcgatgcgaaaaacaaaatggatacgtgtgatctcattacccgtatgggtagtgcggaaggattaacacatatcgaacttaactatcctgagcattttattggccaggataaagaactgattaaaaaatgtattgctgataatggtctgcaggtaggtggtattgcgctgcgctacaataaagactttattgatggcgagtttaccaacccgaatcctgcgttgcgcagtaaagccattgagacgacgctggaagccgctgagatgtgtaaatttctcgagggcaataccgtcaccttatggtttggatatgacggctatgattacccgttccagcaagattacttccgcgcgtatgagctgctcgttgatgccttacgcatcgtgacccaggcacatggggatatgcagttcagctttgaatacaaaccttatgagccgcgtactttctcctttattggggatgtttcctcaaccttgatgttgattgatgatgttggcagtgacaatctgggtatcaccctcgatttctgccatatgataatgaagaaggaaaatccggccttctccctgttccagtcagctcgtaaaaaccgcctcgtcggtttccatcttaatgacggctacggtcatttcgatgatggcctgatgctgggttccgtacatctcctccagactctggaatatatctactacgcgaaacgcgttggttttagtggcctgatttatttcgataccttcccgagccgcgaagatccggtcgcggagtgcgctcagaatatccgtatgtacaaagcactgtctgactttattgaccgtctcagcattcctgaaattgagcaaatgatccaaagccaggacgccctgaaagtacagggtatgttactgaaaatgatcgccgaataa

SEQ ID NO: 273414 - DNA, 927 bp, Klebsiella pneumoniae; identical to SEQ ID NO: 223417

SEQ ID NO: 273415 - DNA, 924 bp, Klebsiella pneumoniae
atggacagcctcacctcgctgacgtcctttgtccgcaccgccgaaacgctaagctttgttcaggccgccaggctgctgggcatatctgcctcggcggtgggtaagaatgtcgcccggcttgagcataaactgggggtccggctgttcaaccgcagcaccagaaacgtcagcctgacggcggagggggccgcatttctgacccgctgtcagagtatcctggagcagatccaggaggccgagtcagagctgaccagcagtctctcacagcccaccggcaaactgaggatttcactgcccgtcattggctaccgcctgttgctccccgccctcaccgcctttagccgtctttatccgcaggttgaactggatctcgactttagcgaccggctggtcaatctgatcgatgagggagttgatgtcgctatccgcagcggtgaattagcggactcccgcttgatcgccagaaagctgggagactttcgttttgtgctctgcgccagtccggcctatctggcggaatacggcgcccccgactcgccagcggaattggcggcgcacaagtgcatttttttccgcttccccgcgacggggctgatccagccctgggaactgcgcggtatgcgactgacgggagatttcaggtccgctgccgtgatgacggtcaataacattgaggccgccattcgcttaagcgcggcggggatgggcatcgcttatgtgcctgattttgtcgtgcgcgaggcaatggatgagggacaactgcaggaggtgttgcccgggtgttgcatcaaggatgggtatttctccgtcctgtggcccgccagccgctacctgtcaccaagaatacgctgttttatcgattttatagctgcggcagagatacctttgtcacccgcatcggcgacccctgccccttgtgtctaa

SEQ ID NO: 273416 - DNA, 1533 bp, Klebsiella pneumoniae
atgttactcaccgccagaacaccttcccgatacgccagcgccctggccgcgctttctgtctttatggcggccttgctgctgccgttaagttttaccggcggcgtcatgaccacccccgcgatacagcagtcgctgggcggctctcccgctgcgctgtcgtggctgaccaatggctttatgctgacattcggcagctttttgctggccgcagggttggcggcggatgccatcgacagaaaacgtatttttatcgccggcgccgcgctgttttgcctgagcagtctgctgttttgtctgacgcacaatctcttcctgtcaggcgtgttgagggcgctgcagggcctggccgcggcgatgattttagccagcggcagtgcggcgctggcccagctgtatgatggcgcccagcggacgcgggcattcagcatcctgggcacggtgttcggcattggcctggcgttcggtccgctgctgatcggcttcatgatcgacgcggtgggttggcgcggcgtatacgccctgtttgcgctgctctcggcaggggttctgcttataggcctggtatctctgcctgcgacagaaaaaagcgagccgcggacacccgacaacctgggcttaaccctgtttacgctggccctgatgctgtttactgcatcgcttatggtcattccggcccgcggttttttatccctgaccacgctggccttgctcatcgcgtcgggggggctgttcgtggcgtttgtcgtacgctgccggagggtgaacaacccggtgctggaactctccctgctgcgtcatccgcgttttgtcggcgtactgttgttgcctgtcgccacctgctgttgctacgtggtcctgctgattattgttccactgcattttatgggcggagaggggatgagtgagtcgcagagcgcactgtatctgatggcgctgaccgcgccgatgctggttttcccatccgttgcggccctgctcacccgctggttttcaccggggcaggtgtccacggcgggactgatgatggcctccgtcgggttgttgttgctgggcgatgcttttcacagtaaccacctcccgcaactggtgctggcgctgatcctctgtggggcgggggcggcgcttccctggggactgatggatggcctggcgatatccgctgtgccggtcgccaaagccggtatggcggcaggcctgttcaacaccgtacgcgttgccggcgaggggatcgccctggcggtcgtctccgcggtattaacggcaagcaataccctgaccctgcagagtcgcgttcacgggtatgcccccgaggtgattcaccgcgccgcaggctggctgggggccggcaatatgccgcaggcggctgcgcttttgcctgatttttccctccgggtgctgcgcgagagctatgactctgcttatacgctactgtttagcgggctggcggtcgtcaccctgctgtgcgccctgatgatctggctgacgctatgccggaaggggggcgctatccaaacccgcgacagtggatcctga

SEQ ID NO: 273417 - DNA, 285 bp, Klebsiella pneumoniae
atggcgagtgatacggaccggatttatatcgagatcctggaaacggtgctgatggccaccctggatcctgatttgtggaaatcggcgctgcagaaactggcgtttctcaccggcagcgccttgatggagttgtttaacgtcaagcccgccgaaaacgcagtggcggagctgctggtgcggggtatgacgccttacatctgggcgtatctatcgccacgatcggaacccaccttagcgccctgtaccagaaaacccatactcgacatcaggcagagctcctgctga

SEQ ID NO: 273418 - DNA, 489 bp, Klebsiella pneumoniae
atggacaaagacacagtagtaacgctgttgaaatacaagcgctggattgactttgccaccttacaggcgatccgcgcgattgacggaacggtacatggcgaaaagcgtcacctgaccatcaggctgatgaaccatatccatgtcgttgatatgattttccgggcgaacctgcgcggcaggccgcacggctacaccgcgctgaatacccctgagacgccaaccgttgatgagctggaaacggccatgaccggctgtacggacaaatacattcagtacgtcagcgccatgacccccgccgatttccacgaacgtatcgccttcaaatttgtcgacggcggcgacggcaatatgaccgcgatggagatgctgaaccacatgctctttcacggcgcctatcaccgcggcgcggtgggctggatgattggcgaatgcggcggcgtgccgccgaaagaggtgctgaccgttttcctgcgcgaccatcattcctga

SEQ ID NO: 273419 - DNA, 528 bp, Klebsiella pneumoniae
atgcttaagcgtcgcactctcaaaacagcactggcggcggttatttctcttgccgtcatggccgcgccagcatatgccaacccgggtaatggcaatggcaacggcggtggtaatcacgggaacagtggtaaccatggcaatagcggcaatcatggtaacaacggtaacagtggcgaccatggcaataaagggcaaaataaaggccagtccactgaagatcacggcaaacggaaaaactacggcaagcccgaccacgtcgacagcgatattagcttctcacgggcgcgctcccttgccgtgaactacggtctggtcggctatcaggcgctgccgccgggtatcgccaaaaatgtcgcccgcggcaaaccgctccctccggggatcgccaaaaagaccctgccagcttctatgattaacgacctgccctattatccgggctatgaatggcgggcggtcggcgatgatctggtgctggtggccctgagcaccgcgatcgtcaccgccgtgattaacggtgtgtttgactaa

SEQ ID NO: 273420 - DNA, 972 bp, Klebsiella pneumoniae
atgagcgatcgctatgttattgaagtggatggattgaagaagtattttccgctgcgcgacggcctctttggccagcagaccggcgagcttcgcgcggtggacggcgtcagctttaacatccgtccgggcactatttttggccttgtgggtgagtccggcagcggcaaaaccaccgtcggccgaaccctgcttggcctgtacgagaagagcgccggcagcgtgaaatttcacggtcaggagctggccgacctgaccgcgcctgccctgcgcgctatccggcccaggatgcagctggtgtttcaggacccctatagctcgctgaacccgcggctgcgtattggcgacgcgattggcgaagccatgctggagcacaaactgtgcgcccgcaatgagctatatgaccgggtgatcgacgtgatgaagatctgcggcctggcgccggaacactatgcccgcttcccgcatcagttctccggcggccagcgtcagcggatcggtattgcccgggcgctgatcctcaacccggattttatcgtcgccgatgaacccatctcggcccttgatgtgtcgattcaggcgcagatcatcaatttgttttccgacctgcgcgacaaccgcggggtcacgtttctatttatctcccacgacctcggggtggtggagcatttatgtgacgatgtggcggtgatgtatctcgggcaactggtggaaagcgccagccgcgatgcgctgttcaaccgccccctccatccctacacccgcgccctgctggctgcggtgccgaccctcgacccgcacagcgaaccgcaggcgctggtgcaaggcgagatcccggatccggccaatccccccgccggctgccgcttttcatcccgctgcccgctggccagcgaacgttgccgcagagagcctccggcgctgcgcgaggtggccccgggccatcgggtcgcctgtcattgggtcgcatcctga

SEQ ID NO: 273421 - DNA, 981 bp, Klebsiella pneumoniae
atgaccacgccgttagtctcctttaatcatctctccgtctctttcgccggcgaacgctctcgcgtgcgcgcggtgcaggaggtctctttcaccattcaggccgggcaaaccgttggcgtggtgggtgaatccggctgcggcaaaagcgtcaccgccatggcgctgatgggcctcctgccgccgcagacggcgcgcatcgacggcggcgagatccgcttcgcggaccgcgatctgctgcggctgaaagccagacagatggccgatctgcgcggtcaccagctggcaatgatttttcaggaaccgatgtcggccctcaacccggtgttgaccatcggggagcagctgtgcgaaccgccgatccgccacctcggcgccacgccgaaagccgcctggcatcaggccatccagctgttaagcgaggtcggcctggcgcgcggggacagcctgatgacccgctatcctcaccagctttccggcggcatgctgcagcgtgtgatgatcgccatggcgctgagctgtcggcccaaactgctgatcgccgacgaacccaccaccgcgctcgacgtgaccgtgcaggcgcagatcctacgcctgctgcgggatcgggcccgggccagccagatggcgatgatgctgattacccacgacctgggggtgatcgcgcagatggccgagcaggtggtggtgatgtatgccggacgaattgtggaacaaggcgccaccgcggaagtgctacggcatcctcagcatccctacacgcgggggctgatcgcctcccgaccggtgcccggtgagcggcgtcggcggctgtactcaattcccggccaggtgccggatctggccgccctgccggagggctgcgcctttgccgggcgctgcgaacgggcgacgccgcgctgccgggaggcgattccgccgctgctcggcgagcgccagcgggccgcctgcttttatagcgaatttgcggaggcgacagcatga

SEQ ID NO: 273422 - DNA, 948 bp, Klebsiella pneumoniae
atgatccagtcttacttagcttcccgtcgccgccagcggcaggcggctatcccggcgctggcgcacattactccctctccctggcgccaggggtggcgacagctgcgccgtaaccggctggccatgttctgcctgctcctgctggcggtgatggcggtgtggtgcgtgctggggcccgtctggtcgccgtggagagatgatgccaccgacgccctgagcatcaaccagccgcccggggcggaacactggctggggaccgatttcctcggtcgcgatgtctacacccgcctgctgctggccgggcgcatctcgctggttatcggcctgctgaccatggtgatgtcggtgtgcctcggctacctgctcggcgccctctcgggttacgtcggcgggttaaccgacaaactgatcatgcgcgtggccgacctggtgatgactatccctgggttaccgctattgatcgtcgccggggcgatgctttccgagctcgatttttcgccggactcgcgcatttatatggtggtggtgatgctcagcctgctggagtggccccgactggcgcggctggtgcgcgggcaatgtctctccctgcgcgaacgcgattttatgctggccacccaggtgctgggcctgtcggcgcgtcgccggctgtttggccacctgctgccgaataccattccgattctggtggtgatggcgaccatggccgtcgccaacgccattctcagtgaatccgcgctgagctatctcggcctcggcgtggtgccgccgacgccgtcgtggggcaatatgatggatgccgctaacagcctgatcgatttccagcgccgcccctggctgtggatgccgccgggcatcgccatctttatcaccgtgatcgccatcaacgtgctgggcgatggcctgcgcgacgccatggatcccaatatgaaaccgaggctgaaatga

SEQ ID NO: 273423 - DNA, 1704 bp, Klebsiella pneumoniae
ttgtccagattacaacaaggattaaaaaccagacaaacccgcttcgccctggcgctaaaagtggccctgctcggcggcgtggtagcattttcttctgctgtctttgctgagggtctcctgaaagaaggtatcaccccggccactgacgccagccagatcccggccagcgccaaactgcggaaagacacggtggtggccgggatctccgagccgcaggggatctttaacccctactttttcgtcaacggctgggatgagaacgtgactaacgtcattttttcacgcctgatcgactgggacagtcagggtaagctggtcccgggactggcggagagctggacggtcagcccggataacaaagtctataccatcaaattgcgccctggtctcacctttagcgacggctcaccgctgacggcggaagatgtcgcctttaccctgacggtcctgctcgaccccagctatgatggcgataccgacatcaccctggccaatatcgccggcgggacggactacaaagccggcaaagctgacagcgtcagcggcctgaaggtcatcgacccgctcaccctgcaggtgaccaccacgcagccaggcgccaccacgctggccaaaattggcgggcctgtactgtcgaaagcctggtacggcaaagggtatcagcggggaaatctcgactatctgcgctcactgcacggcaagccgctgggcaacggcccttacgtgtacgacaaatacattcccggtcaggaaattcgcttccatgccaatagccatttttaccgtgggacgccgccaacgccgcgctttatctatcgcgtgaccaatccgtccaccaacttccagctgttccagaccggggagaccgactacgacgcctttacctcgcgccccgacgatattgagcaattgaagatgctcggcttcgccaatattaatctttacggctccagcgactacagccaggtggaattcaacgtgcatcgcccggcgctacaggataagcgggtgcgccaggcgctgatttacggcctggataggcagaagctgattgacgttgtctatcagggatacggcaaagtcgccatcgaaccgatcgcgccgatctcctgggcctttaacgctgaaggcgtcaacccttacccttacgatccggcccaggcgaaaaagctgctggatgaggccggctggaaagctggcgccgacggtatccgcgccaaagacggccagcgcctggagctgaccctgctggtgagcaagaaggtactcaacgatgcgctgatccccatcgccaaggagaactggcggcagatcggcgtgctgcttaagccgcaggtggtggatttcaacgccctgatggcgcagcgcaaagccggaaattacgatttggcctcgttcagcaccagcaccctcaacgacccgcacgacggggtatgggatttctacagcagcgaagctaaagagtccggctaccataacgcggaagtcgataagctgattaacgccggcaacgcggtgctcgacattgaacagcgcaagccgatctaccaccagctgtataaagtgctggccgacgatccgccggttatcctgctcggctatcgcgagatcctttccgccagcagcgcccgcgtcagcggctttaagccggatatctacaacggcctgaccggcagcctgccggatgtaaaaatcgtcaaataa

SEQ ID NO: 273424 - DNA, 684 bp, Klebsiella pneumoniae
atggcacattaccggattatcgacaccgcatcctggccccgccgggaccatttcactttttaccgccaattcgccaaccccagctttaatctctgcgtgccgatagcggcgcagcgcctgtacgaatgtgcgaaggaccgtcgggtctcgttttttcagctcgcgctctatgccctgctgcgcgcggccaacggggtaccgcagctacgccagcgcgtgcggaacgatgaggtgattgaatatgacagtctggcagtaatgacgccggtgatgaccgtcggagagggattccgtcaggtgtggtgcgacaatgcccccgagttcaccgccttcagcgccgcggccacgccgaagattgtcgcggcaagagagacatccccggcgccgctcatcgtcgatggcgagcattttatctgcgccagctgtctgccatggctccacttcacctcgatgacccatgcggaatatgccgtcggcgcggcggtccccgcgctcacctggggaaaattgcagaatggcgttatcccggtggccgggcggtttaaccatgccttcgtcgatggtctccacgccagccgcttttatgcccttgtcgaagagggatttaatgaccccgagcggctctggttgccgctaaccgaaaccgcaccctccctgcttcccccagcggcgaaggagcgctaa

SEQ ID NO: 273425 - DNA, 384 bp, Klebsiella pneumoniae
atgaaaattgcccatttcgccctgtggacccaacagctcgacgtccaggcccgcttctgggtggacttctttgccgccagcatcaatgaaaaataccttagccagaccaaccccggctttgcctcctattttgttactatcgacgacgaggtggtgatcgagctgatgaccaagcctggcctgcagcaggccagcgcggataataaccataccggctgggcgcatctggccctctcggtgggcggggcggaacaggtcgatgccatcgcccaacgcgccggggccgccggaatactgatttcgccgccgcgcaccaccggcgacggctattatgaggcggtgatcgccgatcccgatggcaacctgatcgaaatcgtcgcatag

SEQ ID NO: 273426 - DNA, 771 bp, Klebsiella pneumoniae
atgctcgattatgctgctttccctcaacagcgacaagcgctgatttgccagatcctgcaggaaaacggcagagtggtgtgcgcggagctggcggcgcgtcttcaggtgtcggagcataccatccgccgcgatctgcatgagctcagccgcgagggattctgtaaaaaggtgtatggcggggcggtgctgagtctgccggaagcgggggattacagtcagcggaaagataaaaaccgcgcgataaagctcaggatcgcgcaacagtgtgcccggctggtgaagcccggcggcactattttcattgataccgggaccaccaatctggcgatggccgaggcgctgcccaccgagctggcgctgacggtggtaacgaactcgccggagatcgccgcggtactggtgaaaaaaccgctgtatgacgtggtgatccttggcggccaggtacagcgcgcgagcggcggttgcgtcggcgccgcggcggtggctcaggtgcagggcatgttattcgaccaagggtttatcggcggctgcgcgatggcgccagagtcgggcctgaccggctttgactatgccgactgcgagttcaagaaagcggtcattaaacagtgcagcgaaattattgttggtctgacttcggataaaattccggcagcagcgcggtttgtggtggccgccagcagcgatatcgatgtgctggtggtggaagagaatatcagtcgcgaatatcgcgttgcctttcagcagcacgatattcgcatctataccgtgtaa

SEQ ID NO: 273427 - DNA, 630 bp, Klebsiella pneumoniae
atgttcctatccagcctgatggccattgccgcggtgctgatcatgggcgtgatcagtcccggcccaagctttatctttgtcgcgcgcaatgccgtcgctcgctcgcgtctgcacggtatggttaccgccctcggtaccggcgccggtgcggccattttctccattatggcgatgctgggcctgcagaaggtgctcaccgcggtgccggagctgtttattggtttgaaggtggcgggcgggctctatctgctgtggctgggctataaaatttttcgcgggtcggcgcagccgatggacttttccgccagcgggatggccggcaaccgctctttgctgaagacctttcgcgacgggctatatactcagctcagcaatcccaaaacggcgctggtgttcgcctcaatttttaccgccctgctgccggcgcagatccccaccgccttctattacatcgtgccgctgatgagctttctgatcgacgtcagctggtattcgctggtggcgctggtgctgtctgccgaccgcccgcggcgcgtctacctgcggctgaagcggcggatcgacatcgccaccgcgacggtgctgggggcgctgggcctgcggcttatcgccacctccctcacccgctag

SEQ ID NO: 273428 - DNA, 636 bp, Klebsiella pneumoniae
atgcaacatatcattgagggcttcctcaacttccagaaagagatcttcccccagcgtaaagaactcttccgcagcctggcctccagccagaatcccaaagcgcttttcatctcctgttctgacagccgtctggtgccggaactggttacccagcaggagccgggacagctctttgtcattcgtaatgccgggaatatcgtgccgtctttcgggccggagccgggcggcgtttccgcgaccatcgaatatgccgtggttgcgctgggcgtgacggatatcgtgatctgcggccattccaactgtggcgcgatgaaagcgatcgccacctgtcagtgccttgagccgatgcctgcggtgtctcactggctacgctatgccgatgccgcgaaagcggtggtggaaaagaaaacctgggctagcgaaaccgataaggtcaacggcatggtgcaggaaaacgttatcgcccaactgaataacatcaagacccatccttcggtggcggttggtctgcgcgaccataccctgcgcctgcatggctggttctacgacatcgaaaccggcgatattcaggcgctggataaaaacacgaaatcctttgtttcgctgtcggaaaatccggacgtctttttcgaataa

SEQ ID NO: 273429 - DNA, 210 bp, Klebsiella pneumoniae
atgaaattcatcaaaactttcgttgctgttgctgcgctgtctctgttctctgctgccagctttgctcagagcgtcagcgccactgcctccacgctggaccgcgcggaagctaaaattgccgcccaggccgcagaacagggtgcatcctataaaattaccagcgcccagtttaacaaccgtgttcatatgacggctgaactgagcaaataa

SEQ ID NO: 273430 - DNA, 699 bp, Klebsiella pneumoniae
ttgaatattttaattcacagcaataatatttattttaatatcggtatcgcccagtgttttcgggatattcagaaaacagcgcccgaattaaaggttattcactccctgcccctcagccatcttccagaactgtccgggctggatgtgattattttgtcactggaaaactatcatgattacctggctgccgctgaaatcgctcagcactttcagggcctggtcatcggctttacgtcagccggcaacgtaaggcgcggacgcccctttttcgcggataccctactgtgggtcagccagcgcgaagcggtacgtgaagtgagccgccttctgcgctgcctggccgagcgccgctggccactcgtgccgcgtcaccaacgtcagagcgtttctttccgtcaacgagccccgctcaaccgcctggagatgcggatgattgatgccaccatgaagggtcagtcggttcatcaaatggccgctacgctggggattaatcgcaagcgggtctataacggcctggaaaggattaaagtgaatttccgcctggtcagtcatagccattttcatcatttcatgaccgacaggctctcttttagtcgcctgtctgccgacctccgatgcctgaccacagcagctaatgcaaccctgccgccgcgcgcagcctcgcggccggcggaaaatcattcatattatttgaaatag

SEQ ID NO: 273431 - DNA, 435 bp, Klebsiella pneumoniae
atgactaaaggctataaactacttggctataagttagcggataatattttctactgcctgcatcatcgggaaattatcacgctgcgcgggacacggacgcaagtccagctacgcagcaccatggcctgtttactggagtacctgctggcgcacggcagagaacgtctggtcagcgatgaagagttaatgattaacgtttgggaaaaaaataatctccgcccttccgcgcagcgcctatggcaggttattcagagcttaaagtctcgcttacaccaggctggcgtggagagcgcgttaatcatccgcgttaagtgtgcggggtattatattaataacgtttacgtagccgaaatttattcatacaaaccgccggggatgatgaattatataaacacttcgcctgctgatatgaataagcttctggtacgcagctaa

SEQ ID NO: 273432 - DNA, 150 bp, Klebsiella pneumoniae
atggtcattgcaactcgtaagcctctgtgcaacaaacgctggtcggccagcccggcctcccaggatcttcagttgactcagctacgtcacccgtgggtcgccaccaaagctagctgcaaaagtaaaaaaggctggaagagccgcggttaa

SEQ ID NO: 273433 - DNA, 885 bp, Klebsiella pneumoniae
atgcgtcgtaaaatccccagcagcgctgcgctactggcttttgaggccgcggctcgtcacggcaactttgcccgcgcggcggcggagctcgcgttaacggaaggggccatcagccggcagattgcccgtctggaagcgctcctcgacagtaaactcttcgacaggacggggagccgggtgcggctcaatccggcaggcgcccgctatgctcgtcaggtccgcgagatcctcgctcgcctggaacgggacacccatgacgtcagcgggatgcccgtcgatggccgcagtctggagatcgccgtgctccccaccttcgccagccgctggttaattccccggctcgggcgctttgcggcgcagcatccgcatatcgtggtcaatatcgccgcccgcagcgatcccttcattctgccgggaagcggatttgatgccgctatccattttgaacacccggcgtggaccggaatggaggtgacgtttttatttgcggagtatttgctgccggtctgccatgctgcgctgctgacggatgacgatcttccggggctgcttaaccggctaacgcgcattcaccggcggcaaaacccggacgcctggctgcactatgcccgtgagtgcggtctggcgctggataaccccgcccaggggccgcgctacgatctgcatgagatggcgatcgccgcggtactaagtcagcagggagtggccctggtgccgaagatgtatgtggaaagcgagctgcgcgccggaacgctggccgccccgtggccgggctccccgacgctggctaagcgcttctgcttgatcaaacccggcggcggggagggggagccagcgctgcagatgtttgagcgctggctgcagacggagattgcggcaggttaa

SEQ ID NO: 273434 - DNA, 927 bp, Klebsiella pneumoniae
atgagcgatccgctggcggaggtcatcgcgatgttaaatctcagagcggtgctgaccaaaaccatcgagggggcgggagactggcgagtccggcgctcggatcaggggttgtcattttatggcgtcgtgctggaaggcggctgtcggctggaaattgaccagcatgagccgcagatcctgcgcgccggggattttattctgatcccggcggcgtaccgcttctcgctaaccagcctgaccccgcctccttcaccggcgctggaaaccatcccggtgcaactggcggagggacactttcggctgggcgccctcgacaagcctgcgcagatgcaggcgctgattggccactgcgcttccggttcaacgaacgccagcctgctggcctcgctgttgccagcctttgtggtggtccgcaatcaaccgcggctggccacctttgtcgggctgctgaaagaggaagcgcaggcggatcgcgcgggcaaatctttcgttctggcgcgaatggttgagctgctttttatcgaggccattcgttcctccggcacgctcgcgacccccggtctgatgcgcgggctgagcgacccgcgggtcgcccaggcaatccgtctgctgcatcaggcccccgccagacgctggacggtcaacgccctggccgccgactgcgcgctgtctcgctcgacgttatttgaacgctttaccgacctgaccgggatgaccccgatgggctatctgttaggctggcgaatgaccctggccatgcagtggctgagcgagacgggcatcagcattgcggatatcgccgagcgcatcggctatggctcggccagcgcgttcagcgtagcttttacccgttataccgggatatcgccgggcaaatatgcccgccagcgggcggcgctaaatgtctcccgaccagctctgacttaa

SEQ ID NO: 273435 - DNA, 579 bp, Klebsiella pneumoniae
atgaaatcgattggtactttctgcggttcttcagctggcgaacatccgctgtacctcgaaaccgcccgtctggttggacgtacgctggcgcagcaggggttggcgcttgtctatggcggcggcaaagttggtctgatgggggcggtcgccgatgcggcgctggaggccggtggtgtggtgatcggcgtgatgccgcgcggcctggtggagcgggaaattgaccaccgcggcttgacggagctgcatgtggtcgaggatatgcacgagcggaaaaccaaaatggcggcgctggcggatggctttattgccctgccgggcggggcggggacgctcgaggagattttcgaacaatggacctgggcgcagctggggatccatgagaaaccgtgcgcgttcctgaatattaagggttattacgatccgcttcaggcgatggtcgataacatggtacgggaagggtttatgcacccgcgctacgcggagatgctgccgttcgctacctcggcagacgagattatcgccggttttcgcgactatacgccgccggcccgaaaatgggttcagcagccagctatttaa

SEQ ID NO: 273436 - DNA, 237 bp, Klebsiella pneumoniae
atgaaaaaagtattagctctggtcgttgccgctgctatgggtctgtcatcagttgctttcgctgccgatgcggcaagcaccaccccgagtgcagcagccagccatactaccgttcaccataagaaacatcacaaagcggccgcgaaaccggcagccgagcagaaagcgcaggcggcgaagaaacaccataaaacgacgcaccatgcagctaaaccggcggttaaaccggcggcataa

SEQ ID NO: 273437 - DNA, 1374 bp, Klebsiella pneumoniae
gtgcagaagtatttcgttgaagcgcgtcagttattagctctggctatacccgtcatccttgcgcaggtggcgcagacggcgatgggttttgtcgataccgtgatggcgggtggctacagcgccacggatatggccgccgtggccatcgggacctccatctggctgccggcgatcctcttcggccacggccttctgctggcgctgaccccggtggtggcgcaacttaacggatccgggcggcgagagcgtatcgcgccgcaggtgcgtcagggcttctggctggccggctttgtctcggtgctgatcatggtcgtgctgtggaacgccggatacatcatcagctccatgcataacatcgatccgctgttggcagagaaggcggttggctacctgcgcgcgctgctgtggggcgcgccgggctatctgttcttccaggtcgcccgtaaccagtgtgaagggctggcaaaaaccaagcccgggatggtcatgggctttattggattactggtcaacattccggtgaactatatttttatctatggtcatttcggcatgcccgagctgggcggcgtcggctgcggtgtggcgacggcctccgtttactgggtgatgttcgccagcatgctgtggtgggtgcgccgggcgcgtacgatgcgcgatatccgctgcgccgagcgcttcagcggccctgattttgccgtcctgttacggctggtgcagctggggctgcccattgctctggcgctgttctttgaagtcactctgtttgccgtcgtcgcgctgctggtctccccgctcgggatcattgacgtcgctggtcaccagatcgcgcttaatttcagctcgctgatgttcgttctgccgctgtcgctggcggcggcggtcaccattcgcgtcggcttccgccttggccagggctcaacgatcgatgcccaggtttcggcccgcaccggcgtgggcgtgggggtctgcctggcggtatttaccgctatctttaccgtcctgatgcgtaagcagattgcgctgctgtataacgataatcccgaggtggtgacgctggcctcgcacctgatgctgctggcggctatctatcagatctccgactctattcaggtgatcggcagcggcattctgcgcggctataaagatacgcggtctatctttttcattacctttaccgcgtactgggtgctgggtttgccgagcggctatctgctggcgctgaccgatatgattgtgccccgcatgggacctgccggtttctggtgcggatttatcatcggtctgacctccgccgccatcatgatgatgctgcggatgcgttttctgcagcgccagccttccagcatcatcttacagcgcgctgcgcgctaa

SEQ ID NO: 273438 - DNA, 636 bp, Klebsiella pneumoniae
atgtttactggtattgttcagggaaccgcgaaagtggtctccattgatgataaacccaattttcgcactcacgtggttgagttaccggcacatatgctggaggggctggaaaccggcgcctcggtagccaacaacggctgctgcctgacggtgaccgaaatcaacggcgcgcgcatcagcttcgatctgatgaaagagacgctgcggattaccaatcttggcgatattcaggtcggcgatgaagtgaacgtcgagcgagcggcgaaatttagtgatgaaatcggcgggcatttaatgtccggccacattatgaccaccgcggaaatcgtgaagattctgacttccgaaaataaccgtcagatctggtttaaagtgcaggatccaacgctgatgaaatacatcctctataaaggattcatcggtattgacggcattagtctgacggtgggtgaggtgacggcgacccgtttctgcgtacatcttattccggagacgctgcagcggaccaccctgggagcgaaaaaactgggcgatcgcgtcaatattgagattgatccgcagacccaggcggttgtcgatacggtcgaacgcgtgctggccgcgaaagagatggcggctaaggtcaatgaagcctga

SEQ ID NO: 273439 - DNA, 1149 bp, Klebsiella pneumoniae
atgagttcatcgtgtatagaagaagtaagtgtaccaaatgatgactggtaccggattgcagctgaattattaggccgtgcgggaattgaaatcaatggctccgcgccgtccgacctgcgggttaaaaatcctctcttttttaaacgggttttgcaggaaggttcgctgggtttgggcgaaagctatatggacggctggtgggaatgcgagcgtctggatatattcttccacaaggtgttacgcgccgggttggaaaagcagctcccacaccatttcaaagacacactccgcatcgcaggcgctcgtctgtttaatctacaaagtaaaaaacgtgcctggattgtcggtaaagagcactacgacctcggcaacgatctcttcagccggatgcttgatccctatatgcaatattcctgcggttactggaaagaggcgcagagcctcgaggccgcccagcaggctaagctggatctcatctgccgcaaactggagctggagccaggcatgcgggtactggatattggctgtggatggggcggtctcgccgaatatatggcgcgaaattatcaggtcagcgtcgtgggtgtaaccatctccgctgaacagcaaaaaatggcccaggcgcgctgcgccgatctcgatgtagagattcgtctccaggattatcgcgatctgcacgacagctttgaccgcatcgtctccgttggcatgtttgagcacgtggggccgaaaaattacgccacctactttgaggttgccgaccgtaatttgaaacccaacggccgctttttactgcacaccattggttccaaggtcaccgaccataacgttgacccgtggatcgataaatatatcttcccgaacggctgcctgccttccgtgcgtcacattgccgaagccagcgagaagcattttgtgatggaagactggcacaacttcggcgccgattatgacacgaccctgatggcctggtatgagcgtttcctcgccagctggccggaaattgccgataactattctgagcgtttcaaacgcatgtttacctattatctgaacgcctgcgccggcgccttccgcgcccgcgacattcagctctggcaggtggtgttctcgcgcggtattgaacatggactgcgcgtcgcccgttaa

SEQ ID NO: 273440 - DNA, 1182 bp, Klebsiella pneumoniae
atgtcacaacccgggaaaggatttttagtctggctggccggcctgagcgtgctgggctttctggccaccgatatgtacctgccggcgtttgccgccatgcagcaggatctcaacacctccgccgcctccattagcgccagcctgagcctgttcctcgccggcttcgcgctgggccagctgttctggggaccgctgtcggaccgctatggacgtaaaccggtactgctgagcggcctggcgattttcgcggccggctgtctggggatgctgtgggtgcacaatgccaccctgatgctggcgctgcgctttctgcaggcgattggcgtctgtgccgcggccgttacctggcaggcgatggtcgccgattactatcctgcccagcgcacgaaccgcatcttcgccaccattatgccgctggtaggactgtcgccggcgctggccccgctgctgggcagctggctgctggtgcacttcgagtggcaagccatcttcgccaccctgttcgccatcactctgctgctgatgctgcctgccctgcgcctgaaggcagccgcgaagtcagtagtagtgacgcagcaaaagatcacctttctcgcgctactgcgctcccgggaatacagcggcaacgtcctgatctacgccgcctgttccgccagcttcttcgcctggcttaccggttcaccttttatcctgcatgaaatgggctatggcccaaccgctatcggcctgagctatattccgcagaccatcgcctttctggtgggaggctatggctgtcgcgcgctgctgcagaaatggtccggtcaacagatgctgccgtggctgctggtgatttttgccatcagcgtagccgccacctggctggtgggcctgcaaacccatgcctcgctggtggcgttaatgatcccgttctgcatgatggcggtggtcaacggcgggatctaccccatcgtggttgctcaggcgctgaagccttttccgcaggcgaccggccgcgcggcggcgctgcaaaataccctgcagcttggcctgtgcttcctgaccagtctgctggtatccgcgctgatcgccacgccgctgctgaccaccaccagcgtaatgctggtttcgattggcttagccggaataggctatcgcctgcagcagacgccggagctgacaccccactcttcccacgcgtaa

SEQ ID NO: 273441 - DNA, 1005 bp, Klebsiella pneumoniae
atgtggtctgaatactctctggaagtggttgatgccgtcgcccgtaacggcagcttcagcgcggccgcgcaggagcttcaccgggtgccttccgcggtcagctataccgtgcgtcagctcgaagagtggctcgccgttcccttatttgagcgtcgccatcgtgatgtggagttgacccccgccggggtctggtttttacaggaagggcgctctgttatcaaaaaaatgcagatcacccgccagcagtgtcagcaaattgcgaacggctggcgcggacagttgtcgatcgcagtggatgatattgtgaaaccggcgcggatgcgtcagatgatcgtcgatttctatcgccattttcccgacgtcgaactgatcgtctttcaggaagtattcaatggcgtatgggatgcgctggccgacggccgcgttgagctggcgattggcgcaacgcgatctattccggtcggcggtcgctatgcgttccgcgatatggggatgctgagctgggactgcgtggtggcgagcgatcatccgctggcaaagatggatggacccctgagcgacgacgtcctgcgtaactggccgtcgctggtgcgggaggatacctcgcgctcgttgcctaaacggacaacatggttgctggataaccagaagagggtagtcgtccctgactgggaatcatcagcaacctgtttgtcggcaggactctgcgtcggcatggtgccgagccatttcgcccgtccatggatagatcgcggcgagtggactgcgctggcgctggaaaatccgtttccggatgccgcctgctgcctgacgtggcagcagaacgatgcctcaccggcgctgaactggatgcttgactatctgggggacagcgacacgctgaatcgggagtggctgcgggcgccggagagacccgcgcccgccagatgccttaacgacgataatcgacaaacgggccatccgctaccgagcggcgctcaaccagacgagggtgcacttcgatag

SEQ ID NO: 273442 - DNA, 1026 bp, Klebsiella pneumoniae; identical to SEQ ID NO: 135711

SEQ ID NO: 273443 - DNA, 1167 bp, Klebsiella pneumoniae
atgaaaatcaactttcctttacttgcgctggcgatcggcgcctttggcatcggtaccaccgagttctccccgatgggattgctgccggtgattgcgaaaggtgtggacgtctcgataccggtagcgggaatgctgatcagtgcgtatgccatcggcgtcatggtcggcgcaccgctgatgacgctgctgttgtcgcatcgcgcacggcgcaatgcgctgatttttctgatggggatcttcaccgtcggcaacctgttgtcatccatcgcgccggattacaccacgctgctgctgtcgcgcattattaccagcctcaatcacggcgcttttttcggcctgggatcggtggtggcggccagcgtcgtgccaaagcataagcaggccagcgcggtagccactatgtttatgggcctgaccatcgccaacattggcggcgtgccggcggccacctggcttggcgaaaccatcggttggcggatgtccttccttgctactgcgggattaggcctgctggcgatggttagcctgtggttctccctgccgaagggcagcgcgggggaacgtcctgatgtcaaaaaagagctttctgtcctgctgcgcccgcaggtgctctccgcgttgctgaccaccgtgctgggcgccggggcgatgtttacgctgtatacctacatttcgccagtgctcaatacgctgacccacgcttcatcgctgtttataaccgcgatgctggtgctgattggcgtcggtttttcgctaggcaactatctgggcggcaaatttgctgaccggtcggtctccggcacgctgaagggctttctgctgctgctgatggcgatcatgctggcgatcccgctgctggcgcaatcccaggccggggcggccatcagcatgattgtctggggcgcagcaacctttgcggtggttccgccgctgcagatgcgggttatgcgcgtagcgcatgaggcgccggggctctcttcttcggtgaatatcggcgcgttcaacctcggcaacgcgctgggcgccgccgccggtggggcggtgatctctggcggactgggatatgcgtttgtgccggtgatgggcgcgattatcgctggtctggcgctgctgctggtctggtttagcgggcgagcgcagccggaagaggctttcgccagccagtaa

SEQ ID NO: 273444 - DNA, 582 bp, Klebsiella pneumoniae
atgtcgtttgaattacctgcattaccatatgcaaaagacgccctggcgccgcacatttccgcagaaaccctggaatatcactacggtaaacaccaccaggcatatgtcactaacctcaacaacctgatcaaaggcactgcgttcgaaggcaaatccctcgaagagatcgtccgcacgtctgaaggcggcgtattcaacaacgcagcgcaggtttggaatcacaccttctactggaactgcctggcgcctaacgccggcggcgaaccggaaggcgaactggcggccgcaatcgccaaatctttcggcagcttcgcggattttaaagccaaatttaccgatgccgcggcgaaaaatttcggcgctggctggacatggctggtcaaaaatgccgacggcagcctggctatcgtctccaccagcaacgccggtaccccgctgaccaccgacgcgaagccgctgctgaccgttgacgtttgggaacacgcctactacatcgactatcgcaatgcccgtccaagctacctggaccacttctgggcgctggttaactggaagtttgttgcggctaacctcgcggcataa

SEQ ID NO: 273445 - DNA, 486 bp, Klebsiella pneumoniae
atggcaaaaacagatgaggtggtgagcgcgaaaatgatcccggtggtgcaggggattgttgactggatcgaagcacatattttcgacaccctgtcggtgagcgcgattgcgaaaaagtccggctactcacactggtacttccagcgacaattcgccatggtaacgggctgcacgctggcgagctacgtcagccgacgaaagatgacgattgcgacaatctatttaacgcagacgcaggcgtcgatacagagtatttctcagtgcctgggatacgagggacaagccgctttctgccggacctttcaccgtcactttggcatgtcgccgacccgctatcgtcgtgatacgccgggcaaagagagcaatctgcaatatcccttgcgggtggggatagagatcgagcaggagaggcggtctgccgccgcagcggcagaccgggatcagcgaatggttttcggcgtcatgacgcgacgagcgccgacataa

SEQ ID NO: 273446 - DNA, 873 bp, Klebsiella pneumoniae
gtggcgcggctaaacaaaatcgcgatatcgctctgtgcattactgttcacgtctatctcattcacgccactggctcaggcatcagggcatacgcacgcctccgcttcgccaaaagcgttgcccgcgaaaagtggctcagagcgcaagaaaaaagcaaccagtcaaaaaactaaaaccaccgctaaaaccaccagtaaaaagtcctcgcgcacccggctccctacccgcactaccgcagcaagccaaaccgcacttcatcgtcaggccgccggcgcgacgaaaaaatgcgtgctgcgtaaaggttataaaaagcagtgcgcgaaaacggtcgccgccagcgccgagccgaccctggcgctaaacagcgtcaaaagcaaatgcgtggtgcgcaagggctataaaaaacgctgtaagcccgaggccagcgaagcgaatttaacgatcgccgacgcccacaaggtccgggtgcaaaaagcgcaaagtaccgcgatgaacaaactgatgggccagttgggtaaaccctatcgctggggcggcacctcgccgcgcaccgggtttgactgcagcgggctggtctattacgcctataaggacctggtcaagatccacatcccgcgtacggccaacgaaatgtaccacctgcgcgatgcgcgtccggtggatcgtgatgaactgcagagcggcgatttagtcttcttccgcacccgcggacggggcgctgccgaccatgtcggcgtctacgtcggcaacggaaaattcattcagtcgccgcgcacaggtcgtgatattcaaatcacctccctgagcgaggattactgggttcgccattatgtcggcgctcgtcgcgtcatgacgccgaaaaccattcgctga

SEQ ID NO: 273447 - DNA, 348 bp, Klebsiella pneumoniae
atgagctcgactttagaaaagatccaacgccaaatcgctgaaaacccgatcctgttatacatgaaagggtcgccgaagctgccaagctgcggtttctctgcccaggccgttcaggcgctgtccgcctgtggcgaacgttttgcttacgttgatatcctgcagaacccggatatccgcgccgagctgcctaaatacgccaactggccgactttcccgcagctgtgggtagatggtgaactggtgggcggctgcgatatcgtcatcgaaatgtaccagcgtggtgaactgcagcagctgatcaaagagacggcggcaaagtaccataccgacgagccaaaagcggagtaa

SEQ ID NO: 273448 - DNA, 648 bp, Klebsiella pneumoniae
atgtccgagaacgctcaactgaatggtctgtgcgaccgtttccgcggtttttatccggtggtgatcgatgttgaaaccgcaggatttaacgccaaaaccgacgccctgctggagatcgccgccattacgttgaagatggatgagcacggctggctgatgcccgatgaaacgctgcatttccatgttgaacctttcgagggcgccaatctgcagcccgaagcgctggcttttaacgggattaacccgcatgacccgcagcgcggggccgtcagcgaatacgatgccctgcatgccatcttcaaaatggtgcgcaaagggatgaaagagagcgactgcagccgggcaatcatggtggcgcacaatgccacctttgaccacagcttcaccatgaccgccgccgaacgcgcgggacttaaacgcaaccctttccatccgtttgttaccttcgacaccgccgcgctaagcgggctggcgctgggccagacggtgctgtcgaaagcctgtattgccgcgggtatgccgttcgacggcgcgcaggctcactccgccctgtatgataccgagcagacggcgcagctgttttgcgagatcgtgaaccgctggaagcgtctgggcggctggccgctgcccgtagccaccccggagtga

SEQ ID NO: 273449 - DNA, 408 bp, Klebsiella pneumoniae
atgcgcttactccacaccatgctgcgcgttggcgacctgcaacgttctatcgacttctataccaacgtgttgggcatgaagctgctgcgcaccagcgaaaacccggagtacaagtactccctcgcctttgtcggctacggcgaagagagcgaaaccgcggtgatcgaactgacctacaactggggcgtggacagctatgagctgggcaccgcctacggccatatcgcgctgagcgtcgataacgccgccgaagcctgcgaacggatccgtcagaacgggggcaacgtcacccgtgaagccgggccggtaaaaggcggcaccaccgtcatcgccttcgtggaagatccggacggttacaaaatcgagctcattgaagagaaagatgccggcaaaggtctgggcaactaa

SEQ ID NO: 273450 - DNA, 1098 bp, Klebsiella pneumoniae
atgtcggaagcaaaattattcagcccactgaaagtcggtgcggtcaccgtccctaatcgcgtatttatggcgccgttgacgcgtctgcgcagcattgagccgggcgatatccctactccgctgatgggcgaatactaccgccagcgcgccagttccgggctgatcatcaccgaagcgacgcagatctccgcgcaggccaaaggctacgccggcgcgcctgggctgcacagcccggagcagattgccgcctggcagaaaatcaccgccggcgttcatgccgaaaacggtcatatcgccgtccagctgtggcacaccgggcgtatttcccatagcagcctgcagcctggcggcgccgccccggtagcgccttccgcgctgagcgcgggcacccgtacctcactgcgtgacgaaaacggccacgccattcgcgtcgacacctcaatgccccgcgccctggaaaccgcagagatcccagggatcgtcaacgatttccgtcaggcggtcggcaatgcccgtgacgccggcttcgatctggttgagctgcactcagcccacggctatctgctgcaccaattcctctcgccatcggcgaaccagcgtaccgatcagtacggcggcagcgtggagaaccgtgcccgtctggtgctggaagtggttgacgccgtgagtcaagagtggagcgccgagcgcattggcatccgcgtgtcgccgattggcagcttccagaatgtggataatggcccgaacgaagaagaagacgcgctgtatctgattagcgagctggcgaaacgcggtatcgcctatctgcacatgtccgagccggactgggcgggcggcaaaccttacagtgaagctttccgtcagaaagtccgcgaccgcttcccgggggtgatcattggcgctggcgcttacacagtagaaaaagccaacgatcttatcaataaagggctgattgatgccgtggcctttggccgcgattacatcgccaacccggatctggtggctcgcctgcagaaaaaagcgccgcttaacccgcaacgcccggaatccttctacggcggcggcgcggaaggctacaccgattacccgactctgtaa

SEQ ID NO: 273451 - DNA, 600 bp, Klebsiella pneumoniae
atgaacagacacagcgattgcgatacccgagaacatatcctggccaccggcgagcagctttgcatgcatcgcggttttaccggaatgggcttgagcgaacttctgaagacggcggaggtgcccaagggctctttctatcactactttcgctctaaggaagccttcggcgtcgcgctgcttgaacatcactacaccggatatctgcagcgcctggtcgaccacttcgatcatggcgacggtaactatcgcgatcgcctgctggcctactatcagcacacgctgaatcagttctgccagcaggggattattagcgggtgtcttactgtcaagctatccgcggaggtttgcgatctgtcggaagatatgcgcgccgccatggatcgcggagccagccagattatcgccctgctgggcgacgcgctggagaaaggacgtcaggaaggcagtctcgcatttgacggcgaggccatgaccctgtcgcaggtgctgtattccctgtggctcggggccaacctgcaggccaaaattacgcgtagcgcaacgccgctggaaagcgcccttgcccacgccaaacagattattgcagcgcctgcggtataa

SEQ ID NO: 273452 - DNA, 240 bp, Klebsiella pneumoniae; identical to SEQ ID NO: 135701

SEQ ID NO: 273453 - DNA, 897 bp, Klebsiella pneumoniae
atggttcagcgtattgctatggctccccaggggccggaattttcacgttttgtgatgggctactggcgtctgatggactggaaaatgtcgcctggcgagctggtcagctttattgagcagcatctcgatttaggcgtaaccaccgtcgatcacgccgatatctatggcgattatcagtgtgaggctgcctttggcgaagcgctgaagcaagcgccgcatctgcgtagccggatggaaatcgtcagcaaatgcggtatcgccacccgggcgcgcgctgagaacaccattggccactacattaccgaccgcgatcacatcgtgctcagcgccgagcaatcgctgcgtaatctggcgacggaccatctcgacttgctgctgatccaccggccggacccactgatggacgccgacgaggtagccgaagcttttctcgcgctgcatcatagcggtaaagtgcgccattttggcgtctcgaactttacccccgcccagttcaccttgctgcagtcacgtctgccgtttaccctggccaccaaccaggtcgaaatttcaccggtgcatcagccgctgctgctcgacggtactctcgatcagctgcagcaactgcgtattcgtccgatggcgtggtcttgtcttggcggtggtcgcctgtttaacgaagagtgcttccaggcgctgcgcgatgagctggcgcaggtggcgcacgagcttaacgccgacagcatcgaacaggtagtttatgcctgggtgctgcgtctgccgtcgcagcctctgccgattattggctcgggcaaaatcgagcgcgtgcgctcggcgattgtggctgaaaaactcagcatgacccgtcagcagtggttccgcatccgtaaagccgcgctcgggtacgacgtaccgtaa

SEQ ID NO: 273454 - DNA, 522 bp, Klebsiella pneumoniae
atgcaacgatctattctcgcgatcttatccctcgcattttgcgctggcgcacaggccgttagtgaagatgtgcaacttaatctcgtgaccacccagggcgtcggtcagaccatcggcagcgtcaaaatcaccgaaaccgaccgcggactcgagttcgcccccactctgcgggcgctaccgccgggtaagcacgggtttcatattcatgccgaaggcagctgccagccggcgatgaaagaaggtaaagccgtggccgccggggcggcgggcggacattacgatccgcagcataccggcaaacacgaagggccgttgggggccgggcatcttggcgacctgcccctgctggtggtcaacgatgcgggcgtagccgaccagccgattattgctccgcgcctgaaaacgctggcggaggtgaaagggaaagcgctgatggtccacgtaggcggggataacatggccgacagtccgcagccgctgggcggcggcggcgaacggtttgcctgcggggtgattaagtag

SEQ ID NO: 273455 - DNA, 2025 bp, Klebsiella pneumoniae
atgaacctgcagaccctgtcgtggcgcgcactcccctgggttaaagccacccggccgcagtggcggtacgcattgcgcaacggcatcgcgatgtgtcttgcgctgagtatcgcctatgcgctggatcttgatgagccctactgggcgatgacgtccgcggcggtggtcagctttcccaccgtcggcggcgtgatcagtaaaagttttggccgcatcgcaggcagcctgctcggcgcctgcgccgccctgctgcttgccggtcatacactcaacgatccctggctgtttctgttcagtatctccggctggctggcgctctgcacctgggcctgcgccctgttcaccaacaacgtcgcctacgcctttcagctggcgggctatacctgcgccatcatcgcctttccggtgattaacatcagcgacagctacgagctgtgggtcatcgcccagtcgcgcgtctgcgaagtcatcgtcgggatcctctgcggcgggctaatgatgatgatcctgccaagcacctccgacggcagcaacctgctgacggccctgaaaaccatgcacgcccggctgctggagcacgccagcctgctgtgggtgccggagacgacggatgccattcgcaccgcccatgagagtgtgattggccagatcctgaccatgaacctgctgcgtatccaggccttctggagccactaccgtttccgtcggcagaatcctctgctgaactacctcctgcatcagcagctcagaatgaccagcgtcatctccagtctgcgacggatgctgctgaactggcctgacgcgccggcgaacactcgccaggtactggagtcgctgctcgccgagctcgccacccctcatgccgacagttatcacgttgcgcggatcctggcgccgctggcgccgcggcaggatgccgattaccggcacatcgctttctgggcgcgattgcgctatttctgtcgcatttacctggagagcagccgctggatccgccgcgttgaaaatgcctcggcgatcgccgagttcaatgtgcccgccgccccgccgttagcccgccataccgatcaggcggaggcgttgctcaacggtgtccgtaccttttgcgcgctggtggcgattggcgcatgggggatcagtacccagtggaccagctgcgcggcggccctgaccctggcctccatctgctgcgtgctctactccgtatccgcctcgccgtttcgctcgctgacattgctgatgcagactctggtcctgctgtcgctattcagtttcgtggtgaagttcggcctgatggtgcaggtaaccgacctgtggcagtttctgctgttcctgttcccgctcctgaccaccatgcagttactcaaactgcagtggcccaaatacgccggcctgtgggggcagcttatcgtctttatgggctcgtttatcgccgtcaccaacccgccggtgtacgattatgcggcctttttcaatgataatttgagcaagattgtcggggtaggctttgcctggctggcctttgcggtactgagtccgggctctgacgcccgcaaagggcgacgccatatcagagcgttacggcgtcactttgtcgatcagcttagccgtcatcctcagcacagtgagcatgaatttgaatcgctggtctatcaccacgtcagtcagctcagccagagtaaggatgccctggcgcgccgctggctgttgcgttggggcgtcgtgctgctcaattgctcgcacgtcgtctggcagcttcgcgaatgggaaacccgctccgatcctctcgcccaggtgcgcgacctgtgcatcaacctgttacgcgatgtgatgagcgagcgcggcgtgcagcagcgcccgctggcctccaccctgcaggagctgcagcggatctgcgacgccctgaaccaccatcatcagccggcggcgcgggaactggccgccgcgatttggcgactgtactgcgccctgtcgcagctggaacaggccccggtggccggcacaattggcgaaggaactacttaa

SEQ ID NO: 273456 - DNA, 897 bp, Klebsiella pneumoniae
atgaaaagattaaaatatctgtcaacgctgctggtcgcggccgtcgccctgattgccgcatggttgttatggaatttctacactcagtcaccctggacccgcgacggcaaagtgcgcgccgagcaggttgggatcacccctcaggtctccggcagtattctgcagttgaacgtaaccgataaccaacgggtcaaagccggggaagtattgtttaccatcgacgacaccccctatcgcatcgcggtgctgaacgcccaggcgcagctggcgaaagcccaggcggaggtggcgaaagcgcaggcggagcaaagcaaggccgccagcgaggctcgccgtcgccgaagcctgtcgcaaaatgccatctcggctgaagaccttgagaacgtcaataccgccctgaataccgccaccaccaccctggctgccgccagagcgggggtcggcgtaaccgaagcggcgctgaaacatgcgcagtggcagctcagccagacggttgtcaaagcgccggtggatggctgggtgaccaacctttccacccgcgtcggtgattacgctaccaccggccatccggtctttgccctggtggacagccattcgttttacgtactgggctacttcgaagagaccaaactgcgccacattcgcatcggcgatccggcacaaattattctctatagcaatcagcagacgctaaagggccatgtcgccagcatcggccgcgcgattgtcgaccagagcgtggaacagggaaccgggctggtggccaacatcaaaccaaatatcccctgggttcgtctcgcccaacgcgttccggtgcgaattgcctttgatacgctgccggccgatgtcaccctggtctccggtaccacctgcactgtctcaattggcgggcagtaa

SEQ ID NO: 273457 - DNA, 237 bp, Klebsiella pneumoniae
gtgaaactgagtcttaacacatccggattgccgctgcaggacctggtgttcggcgcatccgtctatttccctccgctgttcaaagccgtcttgttgggtttctttatctggttgtttttacatcgccagctgcgtgactggatgtatgcgggcgacatctggcacccgctactaatggatctctccctgttcgcgctctcggtctgtctggccctggtattgctcattgcctggtga

SEQ ID NO: 273458 - DNA, 435 bp, Klebsiella pneumoniae; identical to SEQ ID NO: 210864

SEQ ID NO: 273459 - DNA, 1362 bp, Klebsiella pneumoniae
atgcccgaacatgtgcatcatatcgttaaacgtctaatcctttatatttgcatttgtttactggccgggattggcatttccgggatgactgctttttttcataccagcttcagtagtacttcctcaatattatttccgctgctgaccagtttcctgatggtttttcatattaccattgcctgttttatgggcatgaaatactggagcagcaagcggcgtctgtaccttactccagtctctttcgggtttgcctgctcagcgctgctgatgcttggcacgctcagcagctatccggactggcttacctgcaatccggccccggtcgttaatcaaaatgacgccgttatctattatttcttccgcaatataatgatggctgtgttattcatgtcatctattattttgtactattttcgccagcgcatcatgcattcgtggaaagcacacgttcttacatttacagcatgtattctttttacgttgaccattattgttttatcatggctatactccagccattcgccgtggctgagcgtcaattttatcgacgatctgagccatacctttaccccgttgtggcaaagtattatcggctggctgctgatggcagtttggttcatcacgctgattttattaattagcttgagtaaactgcgtaatattttttggttcagcggcgcttttttttgcagcgcttatttgttcacgcttttccagctgctctccaccgcaggggagctggatcagacctggtaccaggcgcgttttttcgaaacgctatgcaccttgttcctgattctggtgctactggttgacgtctttatcctctatcgcgagtctaaccacaaatatgtccattcgtatcagaattcgatccgcgacccgttgacccgcctctacaaccgcagctttttctacgacacccttaaccaacagctggcgaaggtgaatgcccagcatccgctgtcggtgctcatcagcgacctcgaccatttcaaacgcatcaacgatagctacggccatgtcgccggcgacaaagtgatccagttcgccgcctcggtgctggaaagccattcgcgggtagatgacgccgccgcacgcatcggcggtgaggaatttgctctgctgctggtcaacaccggtgaaaaagaagcgcaagctatcgccgagcgtatccgcctggcggtcagtgccggggagagccatttaccggagcgaatgactatcagcatgggggtgtataccacctacgacaatagcgtgacagcggaagcgtgcgttcagcgcgcggacgaagccatgtatgaagcaaagaataacggacgtaaccaggtgatcgtctggcatcggcagggagggtga

SEQ ID NO: 273460 - DNA, 468 bp, Klebsiella pneumoniae
atgattttacgtgttttggctgtatcgatgattggttttacgctcgcaggctgcgtgagcagcagcggcctgtccggcgacgtttattccgcatctgaagccaaacaggtgcagagcgtgacttacggtaccatcgtgcatacgcgcgccgtacagatccagagcggcgacgatagcaatgccatcggggccattggcggtgcggtactgggcgggttccttggaaacaccatcggcggcggtaccggacgctctctggctacggcggcaggtgcggtcgcgggcggcgtagccggtcagggcgttcagggcgcgatgaataaaacgcagggcgttgaactggaaatccgtaaggacgatggcaataccattatggtagtgcagaaacagggcagcactccgttctccgttggtcagcgcgtggccattgccggcagcggcagccaggtcaccgtctctccgcgataa

SEQ ID NO: 273461 - DNA, 1125 bp, Klebsiella pneumoniae
atgagatcgggtcgctttattggcgttatgtctggtaccagcctggatggtatcgatgtcgttttggccaccattactgaaaacatggtggcgcagcaggctagtctcacctggcccattccacacgcgataaaagaagagattctggcgatttgccaggggcagtcgctgaccctttcgcagctaggtcgtctggacacccgtctgggacggctgtttgccgatgccgtactggcgctgatgcgccaggaaagtctcaaacccaccgacgtcatcgccatcggctgccatggacagaccgtatggcatgaaccgcagggagaggctccgcataccctgcaaattggtgacaacaaccagatcgccgcccacaccgggataaccgtagtgggggattttcgtcgccgggatatggcgctaggcgggcagggagcgccgctggtgccggcttttcatcatgcgctgctggcccaccccgttgagcgacgtatggtgctcaatatcggcgggatcgctaatgtgtcgctgctggcgccagggcagccggtgcgcggctatgataccgggccgggaaatatgttgctggacgcctggatctggcgccagaagggcaaaccgtacgacaaggacgcccaatgggctagcgaaggtaaagtgctgctgccgctgctgcaggacatgctgagcgatccgtggtttgccttgccggcgccgaaaagcaccggtcgggaatatttcaattacggctggctggagcagcatatggcccgctatccggggctacgcggggaggatgttcaggctacgcttgcggaattgaccgccgtcaccatcagtgagcaggtattgttaagcggcggctgcgagcgtttgttagtgtgcggcggcggcgcgcgtaaccccttgttaatggcgcgcctggcggcgctgctgccgggaaccgaggtctccaccaccgatgaggcggggatcagcggcgatgatatggaagcgctggcctttgcctggctggcctggcgaacgctggctggtctgccgggcaatctgccctccgtgaccggcgccagcgaagcctcggtgctgggcgccatttttccggctaacccgccgcagaatcggagttaa

SEQ ID NO: 273462 - DNA, 360 bp, Klebsiella pneumoniae
gtgcccgccgtgaccgggaaagtcgaaggcaaacgaatgaaaaaaattcttatcgcagttgtaccttttatgctggcgggctgtagctactacaaccagtttgtcgagcggatgcagacggacacgctggagtatcaatgcgaccagaaaccattgacggtccatcgcaataacgcacgccagcaggtcagttttatctatgataatcagcaactgaacctgtctgaggggctgtcggcttccggggcgcgctataccgacggcgtctatgtgttctggtcaaaaggcgataccgccaccgtctataagcgcgaccgcatcgtccttgataactgtcagctgcagacggccaaacgttga

SEQ ID NO: 273463 - DNA, 663 bp, Klebsiella pneumoniae
atggccatgtctgataacgacgaactccagcaaattgcgcatttgcgccgtgaatacacccgtggcggtttgcgtcgccacgatcttcctgctgaacccctgccgctgtttgaacgctggctgcgtcaggcctgcgatgcgaaacttgccgacccaacggccatggtggttgccaccgtcgatgggcgcggccagccctaccagcgcattgtgctgctgaagcactacgacgaaaaagggttggtgttttataccaacctcggcagccgcaaagcgcatcaaattgaaaacaacccgcaggtcagcctgcttttcccgtggcatatgctggagcgccaggtgatggtaatcggcaaagcggagcgtctgtcgacgctggaagtggtcaaatatttccacagccgtccgcgcgacagccagattggcgcctgggtctcgaagcagtcgagccggatctcagcccgcggcatcctcgaaagcaaattcctcgagctgaagcagaagttccagcagggtgaagtgccgttgccgagcttctggggcggattccgcgtcagcattgagcagatggagttctggcaggggggagaacaccgtctgcacgatcgctttttataccagcgcgatagcggcgcctggaaaatagaccgtctggcgccgtaa

SEQ ID NO: 273464 - DNA, 1275 bp, Klebsiella pneumoniae
atggcaagcagtaacttgattaaacaattgcaagagcgggggctggtagcccaggtgacggacgaggaagcgttagcagagcgactggcgcaaggcccgatcgcgctctattgcggcttcgatcctaccgctgacagcttgcatttggggcatcttgttccattgttatgcctgaaacgcttccagcaggcaggtcataaacctgtggcgctggtgggcggcgcaaccggtctgattggcgacccaagcttcaaagccgctgagcgtaaactaaacaccgaggataccgtgcaggagtgggtggataaaatccgcaaacaggtggctccgttccttgattttgactgcggcgacaactcggcgatcgcggcgaataactatgactggtttggcagcatgaacgtgctgaccttcctgcgcgatatcggtaaacacttctctgttaaccagatgatcaacaaagaagcggtgaagcagcgtctgaatcgtgacgatcagggtatctcctttaccgagttctcttacaatctgctgcagggttacgactttgcctgcctgaacaagctgcacggcgtggcgctgcagatcggcggctctgaccagtggggcaacatcacctccggcatcgatctgacccgtcgtctgcatcagaaccaggtgtttggcctgaccgtaccgctgatcaccaaagcggacggcaccaaattcggtaaaaccgaaggcggcgccgtgtggctggatccgaagaaaaccagtccgtacaaattctaccagttctggatcaacaccgcggatgctgatgtctatcgcttcctcaaattcttcacctttatggacattgcggagatcaatgccctcgaagaagaagacaaaaacagcggtaaagcgccgcgcgcccagtacgtgctggcagagcaggtgacgcgccttgtccacggcgaagaaggcctggaagcggcgaagcgcattaccgaaagcctgttcaacggtaacctgagcgacctgagcgaagcagacttcgaacagctggcccaggatggcgtgccgatgatcgaaatggaaaaaggcgccgatctgctgcaggcgctggttgattccgagctgcagccgtcccgcggtcaggcgcgtaaaaccgttgcctctaacgcggtgaccatcaacggcgaaaaacaggccgacccggaatatgtattcagtgacagcgatcgcctgtttggccgctacaccttgctgcgtcgcggtaagaaaaattactgcctggtctgctggaaataa

SEQ ID NO: 273465 - DNA, 861 bp, Klebsiella pneumoniae
atgaagaacatcctcgccattcagtctcacgttgtgtttggccatgccggcaacagtgccgccgaatttccgatgcgccgtctgggcgccaatgtctggcccctgaataccgtacagttctctaaccatacgcagtacggcaaatggaccggctgcgtcatgccgccttcgcatttgacggagatcgttcaggggattgccgatatcgacaaactgcagacctgcgatgcggtactgagcggctatcttggctccgctgagcagggagagcatatcctcggtatcgtgcgtcaggttaaggcggccaatccggcggcgaaatatttttgcgatccggtgatgggtcacccggagaagggctgcatcgtcgcgccgggcgtggcggagttccacgtgcgctatgcgctgccggccagcgatattattgccccgaatctggttgagctggagatcctgtgcggtcatccggtcgccagcgtcagcgaggcagtggccgccgcgcgggagctgattgcccaggggccggaagtggtattagttaagcatcttgcccgtgcgggtctgagtatggatcgttttgagatgctgctggtgacggccgaagaagcctggcatattagtcggccgctggtggatttcggcctgcgtcagccggtgggcgtcggcgatgtgaccagcggtctgctgttggttaaattgctgcagggggcaagtctgcgcgatgcgctggaacacgtcaccgccgcggtgtacgagattatgctcgccaccaaaaatatgcaggaatacgaactgcaggtagtagcggcgcaggatcgcatcgccgtaccggagcactgcttcagcgccacccggctgtaa

SEQ ID NO: 273466 - DNA, 606 bp, Klebsiella pneumoniae
atgaaactgttctacaaacccggcgcctgttcccttgcctcgcatattgccctgcgcgaaagcggtctggattttaccctgcagagcgtggatctggcccaaaaacggctggaaaacggggaagactatctgctgatcaacccgaaaggtcaggtgccggcgctgctgctggatgatgatatcctgctcactgagggcgtagccatcatgcagtacatcgcagaccaggtgccggatcgtcatctgctggcgccggtgggctcgattgcgcgctatcagactctcgaatggctgaactatgtggccaccgagctgcataaaagctttaccccgctgttccgcccggataccccggaggactataagcctgtcgcgcgggggctgcttgagaaaaagctgcaatacgttgatgcagcgctggcagacaaacagtggctgaccggccatcgcttcaccattgccgatggttatctgtttacggtgctgcgctgggcctatgctataaaactggatatggctgcctatggtcatatcggcagctggatgacgcaggtggcagcgcgtccggcggtggctgccgcactggcggctgaaggcttaaaataa

SEQ ID NO: 273467 - DNA, 1506 bp, Klebsiella pneumoniae
gtgtctactgcaaacaataaaccagcagaaagcgtgagtctgaacgctttcaaacaaccacgcgcgttctatctcattttctcgatcgagttgtgggagcgttttggttactacggcctgcaagggatcatggccgtttacctggtaaaacagctgggtatgtcggaagcggattccattactctgttctcctcctttagcgcgctggtttatggcctcgtcgccattggcggctggctgggtgataaagtgctgggtaccaagcgtgtcatcatgctgggcgctatcgtgctggcgattggctatgcgctggtggcctggtccggtcatgacgccgctatcgtctatatgggtatggcgaccatcgccgtcggtaacggcctgtttaaagccaacccgtcctccctgctttctacctgctatgacaaaaacgacccacgtctggacggtgcatttaccatgtactacatgtccatcaacatcggttcgttcttctctatgctggcaaccccgtggctggccgcacgttttggctggagcgtagcgtttgccctcagcgtggtggggatggtgatcaccattattaacttcgccttctgtcagaaatgggttaaacagtacggctctaaaccggactttgccccggtacacatgggtaaactgctggcgaccatcgctggcgtggtggtgctggtcgctatcgccacctggctgctgcacaaccagggtatcgcacgtatggtgctgggcgtcgtcgcactgggtatcgtcgtgattttcgccaaagaaaccataggcctgaaaggcgctccgcgtcgtaaaatgatcgtcgctttcctgctgatggtagaagcgattgtcttcttcgtgttgtacagccagatgccgacctcgctgaacttcttcgccatccgtaacgtggagcactcgatcctcggtctcgcctttgaaccggaacagtatcaggcgctgaacccgttctggatcatgattggtagcccgattctggccgccatctacaacaagatgggcgaccgcctgccgatgccgcacaaatttgctatcggtatggtactgtgctctggcgcattcctcgtcctgcctttaggggcgaagttcgccagcgacgccggtatcgtctcggtcaactggctgattctgagctacgcgctgcagtctatcggtgaactgatgatttccggcctcggcctggcgatggtcgctcagctggttcctcagcgtctgatgggcttcattatgggcagctggttcctcaccacggcaggcgcggcgatcatcgccgggaaaatcgctaacctgatggcagtcccggagaatgtcaccgatccgctggtgtcgctggaagtgtacggtcacgtattcctgcagattggtatcgtcaccgcggttatcgccgccctgatgctgctgaccgcgccgaaactgaatcgtatgactcaggacgacagcgcggacattaaagcacgcgaaaccgcggctgcctga

SEQ ID NO: 273468 - DNA, 258 bp, Klebsiella pneumoniae
atgttatacagcgttaaattttaccgtttcgatatcgttggtatttttatctttcgggttcgccggtttaccgggaaaaggcgatatattctactgatctggcgtaagcatagtgatatggtccattatcttaaaaaatcatgggtcattatcctgacaatctttactcatccgttgtattgcctgacatttatttccattccagtaacattcaatcaacataaagttgcgagcatgatctggatcacaaatgcatag

SEQ ID NO: 273469 - DNA, 636 bp, Klebsiella pneumoniae
atgaacaaagccaaacgcctggcgatccttaccaggctgcgggaaaacgatccccaccccaccaccgaactgcatttcagttcgccattcgagctgctgattgccgtcctgctttctgcgcaggccaccgacgtaagcgtcaacaaagcgacagccaaactctatccggtggccaatacgcccgcagcgatgctggccctgggggtggatggggtgaaatcgtatatcaagactatcggcctgtttaacagcaaagcggaaaacgtcatcaaaacctgccgcatcctgttggagcagcacaatggtgaggtgccggaagacagagcggcgctggaggcgctgcccggcgtgggccgtaaaaccgccaacgtggtgctgaataccgcctttggctggccgaccatcgccgtggacacgcacatcttccgcgtctgcaatcggacgcagttcgccccgggcaagaatgttgagcaggtggaagagaagcttctgaaggtggtccccgccgagtttaaggtcgactgtcatcactggctgatcctgcatgggcgttatacctgtattgcccgcaagccgcgctgcggctcctgcctgattgaagatctttgcgaatacaaagataaagtctacgcctga

SEQ ID NO: 273470 - DNA, 699 bp, Klebsiella pneumoniae
atgagcgaagttaaagacgtcatcgtccagggcctgtggaaaaataactccgccctggttcagctgttaggtatgtgtcctctgctggcggtcacctcgaccgccaccaacgccctcgggctgggtttggccaccaccctggtgttaaccctgaccaacctgaccatctccagcctgcgccgctggacgccggcggagatccggatccccatctacgtaatgattatcgcctcggtggtgagcgtcgtgcagatgctgatcaacgcctatgccttcggcctctatcagtcgctggggattttcatcccgcttatcgtgaccaactgcatcgtggtcggccgcgccgaagcctttgccgccaaaaaagggccggcgctgtcggcgctggacggtttctcgatcggcatgggcgctacctgcgcgatgtttgtgctgggctccctgcgcgagatccttggcaacggcaccctgtttgacggcgccgacagtctgcttggcagctgggcgaaggttctgcgcatcgaggttttccacaccgacacccctttcctgctggctatgctgccgccaggcgcctttattggcctcggcatgatgctggcgattaaataccttatcgatgaacgtagcaaacagcggaaggcgcaagcggcccgggccgtctctgtcgccccgtccgacgtgacagggaaagcataa

SEQ ID NO: 273471 - DNA, 624 bp, Klebsiella pneumoniae
atgatgttaaaaacgatgcgtaaacacggcgtcacgctggcgctgtttgccgccggttccaccgggctgacggcggcgatcaatgagctgaccaaaagcaccatcgaccagcaggcggccctgcagcaaaaggcgttattcgaccaggttttacctgccgaccgctataataacgatctgcttaagagttgctatctggtcagcgccccggcgctgggcaaaggccagcataaagtgtggatcgccaaaaataacgatcgaccgatcggcgcggtgatggaagccaccgcgccggacggctactccggagcaatacagctgctggttgccgccgattttagcggcacggtcctcggcacccgcgtaactgagcatcatgaaacgccgggcctgggtgataaaatcgaacttcgcctgtcggactggattacccattttgccgggaaagtcatccacggccagggcgatagccactgggcggtcaaaaaggatggcggcgattttgaccagttcaccggcgccaccatcaccccccgggcggtggtcaatgccgttaagcgcgcaggcttatatgcacaaacgctgcctgcgcaacttcctgaattcaccgcctgtggagaataa

SEQ ID NO: 273472 - DNA, 1053 bp, Klebsiella pneumoniae
atggttttcagaatcgcaagctccccctatacccataaccagcggcagacctcgcgtattatgctgctggtgctgctcgccgctgtgcctggcattgtggtccagacctggtttttcggctggggcaccgtactgcagattgtcctcgccgccctgacggcctgggcgaccgaagccgctattctcaaactgcgtaaacagcctgttgctgccacgctgaaagataattccgccctgctcaccggcctgctgctggcggtgagtattccgccactggccccgtggtggatggtggtgctcggcactgcctttgccgtagtcattgccaagcagttgtacggaggcctgggccataaccccttcaacccggcaatgatcggctatgtcgtgctgctgatttcgttcccggtgcagatgacctcctggctgccttcctatgagatagccgcccatctcccggcattcagcgacgcgctgcagatgatcttcaccggtcataccgccgccggaggcgacatggccagtctgcggctgggtatcgacggcgtcggccaggccaccccgctggatacctttaaagcctccctgcatgccggacatagcgttcagcaggtgctgcaattgccggtctacggcggcgtgctggcaggtctgggctggcagtgggtgaatatcgcctggctggcaggcggccttttcctgctgtggcagaaggcgatccgctggcatatcccggtcagcttccttgttagcctcggcctgtgcgccaccctcggctggattttttcgccgcagagcctggcctcaccgcagatgcatttgctctccggggcgaccatgcttggcgccttctttatcctgaccgatccggtgacggcctcaacaaccaaccgcggccgtctgatctttggcgccctcgctggcctgctggtctggctcatccgcagcttcggtggttatccggacggcgtggcgtttgccgttctgctggcgaatattaccgtgccgctgatcgattactacacgcgcccgcgcgtatatggccaccgttga

SEQ ID NO: 273473 - DNA, 693 bp, Klebsiella pneumoniae; identical to SEQ ID NO: 243887

SEQ ID NO: 273474 - DNA, 129 bp, Klebsiella pneumoniae
atgactaaacaaaaggtagttcgtgatgcgggtactggtcagtttgttaagcctgaagaggctaagcgccgccccggtactacggttacagaaactgttaaaattccttccaaaaaagggaaaaagtaa

SEQ ID NO: 273475 - DNA, 1158 bp, Klebsiella pneumoniae
gtgactgtctgtatcagctggcccgggttccggcgtatccggcgtgaaaagcgcccgggcaaggctgccttcagcttcccgggcctcaagcagcgcactgagccgtgcatccacccgcgcatcgagagtgcgaggaataaatccctcggcaattttcggacgcggcttgtatttgagggccagtttcacggccggatacggcccgggcagcgtgacgtaacaggacaggtcaggcagcgtctgaatatcggagtaactgaccagcgtttcccgctctttttctttcccggtcgatacaccatcacgcaccgggtcagcaccgtaggagtactgctcgctggccttgaggatttccttctcaccaatttcaccggcagcaaactccgcaatctctttactcggggagcggaagaaggcccgggtgttcatcacgtcaaagagcgtggcggcaggcttaacgccatagatgtcttccagctgggcataagactgaataccgaacacataacaaccaccaaatttacgcgcctccgggaggatttcgaccaggtccggcagcttgtgcagcgtgggaagttcgtcagcgaagatccacacacgccggttacggttctcgcccatcgccaggaggccgcggatggcaatcgacagccacatcgagataaccggcttcagggaggcatgggtgtcagcattggaggagataaacagccagccattgggtcggtcctcacggacgccgcgcatccagtcccggatagtgaacggctcgccgttcttctcaatgccctgcaggtagcgaatagccttgacgtagttggtcagcacagctcgaatggagatggcggttttctcaattttctcttcaaccaggttcgctgccggcgtgttctgcagataggcgcgcagcttgtcgatcttaatggacagcatggtatcgaccagcttctcgtagctccgatcgtcgtcttcgcgcatcagatacgcgccttcggcaaagatagtgcgaccggagccctgccagaacggatcttctttggtacccatcgggataagggtgttggagatgttgtcgaagtccggcagcgtcaggcactctttccacaaatcccaggctgcacagcgcgagtccagcgggttgaggattttatccagtga

SEQ ID NO: 273476 - DNA, 477 bp, Klebsiella pneumoniae; identical to SEQ ID NO: 243797

SEQ ID NO: 273477 - DNA, 147 bp, Klebsiella pneumoniae; identical to SEQ ID NO: 92401

SEQ ID NO: 273478 - DNA, 393 bp, Klebsiella pneumoniae; identical to SEQ ID NO: 224058

SEQ ID NO: 273479 - DNA, 393 bp, Klebsiella pneumoniae; identical to SEQ ID NO: 235414

SEQ ID NO: 273480 - DNA, 954 bp, Klebsiella pneumoniae; identical to SEQ ID NO: 134435

SEQ ID NO: 273481 - DNA, 1539 bp, Klebsiella pneumoniae; identical to SEQ ID NO: 134434

SEQ ID NO: 273482 - DNA, 561 bp, Klebsiella pneumoniae; identical to SEQ ID NO: 134433

SEQ ID NO: 273483 - DNA, 1017 bp, Klebsiella pneumoniae; identical to SEQ ID NO: 134432

SEQ ID NO: 273484 - DNA, 1218 bp, Klebsiella pneumoniae; identical to SEQ ID NO: 134431

SEQ ID NO: 273485 - DNA, 546 bp, Klebsiella pneumoniae; identical to SEQ ID NO: 134430

SEQ ID NO: 273486 - DNA, 648 bp, Klebsiella pneumoniae; identical to SEQ ID NO: 134429

SEQ ID NO: 273487 - DNA, 279 bp, Klebsiella pneumoniae; identical to SEQ ID NO: 134428

SEQ ID NO: 273488 - DNA, 684 bp, Klebsiella pneumoniae; identical to SEQ ID NO: 134427

SEQ ID NO: 273489 - DNA, 954 bp, Klebsiella pneumoniae; identical to SEQ ID NO: 134426

SEQ ID NO: 273490 - DNA, 993 bp, Klebsiella pneumoniae; identical to SEQ ID NO: 134425

SEQ ID NO: 273491 - DNA, 624 bp, Klebsiella pneumoniae; identical to SEQ ID NO: 134424

SEQ ID NO: 273492 - DNA, 309 bp, Klebsiella pneumoniae; identical to SEQ ID NO: 78834

SEQ ID NO: 273493 - DNA, 366 bp, Klebsiella pneumoniae; identical to SEQ ID NO: 134422

SEQ ID NO: 273494 - DNA, 417 bp, Klebsiella pneumoniae; identical to SEQ ID NO: 134421

SEQ ID NO: 273495 - DNA, 1434 bp, Klebsiella pneumoniae; identical to SEQ ID NO: 134420

SEQ ID NO: 273496 - DNA, 762 bp, Klebsiella pneumoniae; identical to SEQ ID NO: 192502

SEQ ID NO: 273497 - DNA, 891 bp, Klebsiella pneumoniae; identical to SEQ ID NO: 134417

SEQ ID NO: 273498 - DNA, 216 bp, Klebsiella pneumoniae; identical to SEQ ID NO: 134416

SEQ ID NO: 273499 - DNA, 1188 bp, Klebsiella pneumoniae
atgtgtgcagaagaggtaataagctccgtaggtgattttcttaaggtggtgaaaagattctcaccgggaaatgaaaaagttttttatcgtgggcagggaaatgctattcatggagtgaattccagcctttatcgcttgttagataatacgaaattaaaaccgtttaatataacacagtataattttattactcaacaaatgcagactgatgacatttcagagtatgtgttggcacataagctttatgagaattttaaagataatcatgttgtgtatcctgatgtgaatataatcagcggatacactatgaacgaaattgatcttcatgtgacagctcaacactatggtttatcgacaagggttatcgactggacaaaaagcccattagttgctctgtattttgctacagaaaaaagaaaaaattcagatgagctaactgatgcttctgtttttatgatttgggatactccagatagtaaattagatgtagtgcaaagctcgaaatttctcgctgcaataaaatcagagaaagatgcttacaaggaaatttaccgtcgaagttctcagttttataaatctaaccatgctctttatatttcgaacccttctgatccagttttattgaaaaatataaaagattatctggatgatgtaagttcactcttaattcattatgaaccagggacagggattaaattatatttgaatcaaagccttcatctttttgatttaatgactctgaatttcagttttactggtcaaagtcttgtcacccgtttgtttgggagtttgacacaattcttaggggatctagactacaattacagtaggagtcacgataacgttgatatttttaataagcatcagactataataaaaccactaccgataaatcaacgggtaaaaaaccagcagggcgtattgcttttttcaaataaaataaatgaagaagtttatgcggcctccatgtttggtgcaagtaatacggtgtcgaaaatagatgaggaaagtctttccggtttacaatcaaactcggggcttttgaagatagtcattccaaaagagaaaattattgaaatcaggaaggaactggatttatatggattcactaaagaattcatatatcctgagataatgtctttcacagagtatatgcaagagaaaatagtttcagaaagtcaaaattga

SEQ ID NO: 273500 - DNA, 819 bp, Klebsiella pneumoniae; identical to SEQ ID NO: 134412

SEQ ID NO: 273501 - DNA, 285 bp, Klebsiella pneumoniae; identical to SEQ ID NO: 134411

SEQ ID NO: 273502 - DNA, 3120 bp, Klebsiella pneumoniae; identical to SEQ ID NO: 134410

SEQ ID NO: 273503 - DNA, 291 bp, Klebsiella pneumoniae; identical to SEQ ID NO: 134409

SEQ ID NO: 273504 - DNA, 1542 bp, Klebsiella pneumoniae; identical to SEQ ID NO: 134408

SEQ ID NO: 273505 - DNA, 339 bp, Klebsiella pneumoniae; identical to SEQ ID NO: 134407

SEQ ID NO: 273506 - DNA, 1395 bp, Klebsiella pneumoniae; identical to SEQ ID NO: 134406

SEQ ID NO: 273507 - DNA, 972 bp, Klebsiella pneumoniae; identical to SEQ ID NO: 192488

SEQ ID NO: 273508 - DNA, 408 bp, Klebsiella pneumoniae; identical to SEQ ID NO: 134404

SEQ ID NO: 273509 - DNA, 408 bp, Klebsiella pneumoniae; identical to SEQ ID NO: 134403

SEQ ID NO: 273510 - DNA, 2817 bp, Klebsiella pneumoniae; identical to SEQ ID NO: 134402

SEQ ID NO: 273511 - DNA, 417 bp, Klebsiella pneumoniae; identical to SEQ ID NO: 134401

SEQ ID NO: 273512 - DNA, 264 bp, Klebsiella pneumoniae; identical to SEQ ID NO: 134400

SEQ ID NO: 273513 - DNA, 1527 bp, Klebsiella pneumoniae; identical to SEQ ID NO: 134399

SEQ ID NO: 273514 - DNA, 900 bp, Klebsiella pneumoniae
ttgaaaaaattctcagtgatcctgctgaccctggtactggtctcagccggagctcgtgctgttgagcttatgaaatgggaacggataccgttgcagattcccctgactgtagggcaggagcgaatcgtttttgtaaacaaaaacgtgcgagtggggtttccgcccgcactcaacgacaagctgcgtattcaaagctccggaggtgtagtttatctcgatgcgaaagaagcctttccggtgacgagactggaacttcagaacaaggaaaacggggaaatacttctacttgatgtttctgctgcccccggtaaaaccacgcgggaacctgtcaaaattgtctacgacggagaagtggctaccgcttcggcgaccgataaacagacggtcagcagtgatggggacagtgccggccgtcagtcgtcggcagaggcaaaggcagaaagccggaggcccgcaaaactcaatgcgccgctgcccgttgtcctgactcgttatgccgcacagaacatttatggaccgttgagaacggtagagcccgtaccgggagtaagtccggtttcactgaagcttcccccccggatcaccacacttatgccctctgagtccgtcagcgtcacgccgatggctgcctggagtctgcagggcagcagtgtaattgcgctgcaggtgcgtaaccgatcagcagtaaaggtcatcctcgaccctcgttcgctgcaaggtcagtttactactgcgactttccagcaccgttggctggggcgtgccggtacaccggaagacacgacagttctatatctggttactacaggacgtcccgaaagtgcctttattgctgaacagcgtttacccgaatctgaaggaaaggagagtaagcggagtaaccgaggagcgcataaatga

SEQ ID NO: 273515 - DNA, 660 bp, Klebsiella pneumoniae; identical to SEQ ID NO: 134397

SEQ ID NO: 273516 - DNA, 381 bp, Klebsiella pneumoniae; identical to SEQ ID NO: 134396

SEQ ID NO: 273517 - DNA, 366 bp, Klebsiella pneumoniae; identical to SEQ ID NO: 78783

SEQ ID NO: 273518 - DNA, 246 bp, Klebsiella pneumoniae; identical to SEQ ID NO: 78782

SEQ ID NO: 273519 - DNA, 318 bp, Klebsiella pneumoniae; identical to SEQ ID NO: 78781

SEQ ID NO: 273520 - DNA, 690 bp, Klebsiella pneumoniae; identical to SEQ ID NO: 134392

SEQ ID NO: 273521 - DNA, 228 bp, Klebsiella pneumoniae; identical to SEQ ID NO: 78778

SEQ ID NO: 273522 - DNA, 549 bp, Klebsiella pneumoniae; identical to SEQ ID NO: 78777

SEQ ID NO: 273523 - DNA, 219 bp, Klebsiella pneumoniae; identical to SEQ ID NO: 134388

SEQ ID NO: 273524 - DNA, 624 bp, Klebsiella pneumoniae; identical to SEQ ID NO: 78775

SEQ ID NO: 273525 - DNA, 726 bp, Klebsiella pneumoniae; identical to SEQ ID NO: 134386

SEQ ID NO: 273526 - DNA, 867 bp, Klebsiella pneumoniae; identical to SEQ ID NO: 134385

SEQ ID NO: 273527 - DNA, 1122 bp, Klebsiella pneumoniae; identical to SEQ ID NO: 134384

SEQ ID NO: 273528 - DNA, 678 bp, Klebsiella pneumoniae
atgaaagaacgcggaatgatattcaacggggagatggtgcgggcgctgctcgacggcaggaagacgcaaactaggcggattatggcaccacaaccagcagacgatatcgagcgttgcatttttcctaacccagaagcaattggctggaaatcatctctgagacacaagcatggcagcaccactgctcatttttgccattatggaaagccaggcgaccgcatttgggtacgcgagacgtttcagggaccactgttcgactacgacctaatggatagctattgcaaagaccccactccgtttgagaagcccgaattctgcgtttacaaggctgatggagtgccagcgccagagttttacgatgcagatgatgaactgcattgctgctggcgcccatctatccacatgccgcgctgggccagccgcattcttctggaaatcaccaacgtgcgtgtggagcgccttaattcaatacacgatgtcgatgctatgcgagaaggaatccagaacctgacgacatgttcacacgctgatttcggcattcctggcgccgtaaatgcgcagcatcctgtacgagcgtttcaactgctatgggaatcaatctacggcgctgacagctggcgcgctaacccatgggtctgggtgatcgagttcaagcgcgttgaaggcggtgcagcatga

SEQ ID NO: 273529 - DNA, 309 bp, Klebsiella pneumoniae
atgatcgaacagaacacagtcgtgcatgtaacctatgggcaacagaaaactatcatacttggcgaaatcgcgatttttgaatatatcgctcctcaatctgcaggaagaataaacctgacaattacgaaggaagatgttcagtttgatcgtgatggaatgtcagaactcattaagcgcatgaacgcaaccgttgaaatttctctaattagcggttctagcaccagcacttatcaagttatcttagaagcactcagtctagagtctcaaggcggatttgaaacgctagaaatcggtgttcttcgcgtgtag

SEQ ID NO: 273530 - DNA, 993 bp, Klebsiella pneumoniae
atgacctgcttattcgcaccttccctaaccgagatgaaattaacggggtgtttccgtagtagccaatctattgttgatttttatagtaaatacaaagacgaagattatgagattaattcactttcagataataaggatttcaactcagtaatttttaaagaaagcgaggtagatgtttctcaactgccgatttatgtatcaggtattattagaactcatttggctcagggagtacttccaaatgaaattgctattctgtgtcctggttggtttgatgtgataaaactttcaaatgatattgttactcttaatccggatatagaaattgatggagtcatgatctctcctatacctaaaaacaatgagaatctttggcttgctttagttaaactatttttaattaggagagttccctctaattttaatactagacagaagctattgcgggatttccttcaagaattaaatgttgttgcaccctatactgaatcgttgtctcctaaaaaaatattaaagattattaataaaatatcattatctgtggattataattgtgaaattgatgtttggttgagacaggttataacgagattttgccattctattaatttgggcataagtaatgatagctactattatcaagaaatggaacttttgattaatgccacattgaaaagaatgttaaagtataatatggcttataaagcaaatgaattacatttgtttttcaattttagaagcggtgttaaaatcacaacttgtcattcgacaaaaggtgatgagtatgaagtggtcatttgcactggattactaaatgggaaaatacctaattggaatgatattataaattgtagctcagagcatcaaaattatgttgcccgtagacttttatatgttgtttcttcgcgtgcaaagaaacatttatatatgatatcagagagaggttacaagacaaaaaggggatatccatatcagacaactccacagctttga

SEQ ID NO: 273531 - DNA, 552 bp, Klebsiella pneumoniae
atgcctgtgttcacatataaaacgactgaccggggctgggctatcctcagcactggtgcttcattgattattctcctggtggtcagcgtctggggctttacccttatcagtgactggatgcaaaaacggacctggctgaataccgcgtcacaggtatctcgctttacacaagctgtgaagagctacactggccgttattacgatactttgctttcaagtgccaccaccacgaccccggttacggttacacccgctatgctgaaaaacaccggatttctggagcaggggttcagcgagacgacagtagacggacaggcttatctggctgctgttgttcgtaatgccactaatacagatcagctgcaggcactggtttacactcaaaacggcgcggcactgccttttctcgcactgcgccagatatcaatggatatcacctcgggtatgggcggctatatatggacatcaggtactgctaccggcgctatgggcagctggactattcctctttcacagtttgggataagtacaactcagggacggctttgttga

SEQ ID NO: 273532 - DNA, 669 bp, Klebsiella pneumoniae; identical to SEQ ID NO: 134436

SEQ ID NO: 273533 - DNA, 480 bp, Klebsiella pneumoniae; identical to SEQ ID NO: 134437

SEQ ID NO: 273534 - DNA, 597 bp, Klebsiella pneumoniae; identical to SEQ ID NO: 134438

SEQ ID NO: 273535 - DNA, 1116 bp, Klebsiella pneumoniae; identical to SEQ ID NO: 134439

SEQ ID NO: 273536 - DNA, 1575 bp, Klebsiella pneumoniae; identical to SEQ ID NO: 134440

SEQ ID NO: 273537 - DNA, 498 bp, Klebsiella pneumoniae; identical to SEQ ID NO: 134441

SEQ ID NO: 273538 - DNA, 1281 bp, Klebsiella pneumoniae; identical to SEQ ID NO: 134442

SEQ ID NO: 273539 - DNA, 1674 bp, Klebsiella pneumoniae; identical to SEQ ID NO: 134443

SEQ ID NO: 273540 - DNA, 228 bp, Klebsiella pneumoniae; identical to SEQ ID NO: 192613

SEQ ID NO: 273541 - DNA, 1356 bp, Klebsiella pneumoniae; identical to SEQ ID NO: 134445

SEQ ID NO: 273542 - DNA, 246 bp, Klebsiella pneumoniae; identical to SEQ ID NO: 134446

SEQ ID NO: 273543 - DNA, 393 bp, Klebsiella pneumoniae
atggggctctggccgcgagtgtcactttttcgcagtatccgccgcagcgagcgcttgcgaattgcggccgcacttgagcgtgtggggttgctgcatctcgcaaaaagccctattgagacgctttcaggtgggcaatttcagagaatgctttttgccagagtctggttacagcaggctccattgatcatgctggatgaaccgttgaccggggtagatgaaaacaccagtcatgtcctgatgtcattgatcgaagaaatgcatcaacggggacaaacgattctggccgttctgcacgataccacgcgggtgcagcgctattttccttctgtattgcgtctggaaagtgagcgcagctactggcaaacgcaagtgcacaaggagtgtgtgtcatga

SEQ ID NO: 273544 - DNA, 873 bp, Klebsiella pneumoniae; identical to SEQ ID NO: 134448

SEQ ID NO: 273545 - DNA, 879 bp, Klebsiella pneumoniae; identical to SEQ ID NO: 134449

SEQ ID NO: 273546 - DNA, 249 bp, Klebsiella pneumoniae; identical to SEQ ID NO: 78759

SEQ ID NO: 273547 - DNA, 243 bp, Klebsiella pneumoniae; identical to SEQ ID NO: 134451

SEQ ID NO: 273548 - DNA, 549 bp, Klebsiella pneumoniae; identical to SEQ ID NO: 134452

SEQ ID NO: 273549 - DNA, 204 bp, Klebsiella pneumoniae; identical to SEQ ID NO: 134453

SEQ ID NO: 273550 - DNA, 492 bp, Klebsiella pneumoniae; identical to SEQ ID NO: 78755

SEQ ID NO: 273551 - DNA, 2010 bp, Klebsiella pneumoniae; identical to SEQ ID NO: 134455

SEQ ID NO: 273552 - DNA, 723 bp, Klebsiella pneumoniae; identical to SEQ ID NO: 134456

SEQ ID NO: 273553 - DNA, 1233 bp, Klebsiella pneumoniae; identical to SEQ ID NO: 192600

SEQ ID NO: 273554 - DNA, 231 bp, Klebsiella pneumoniae; identical to SEQ ID NO: 134458

SEQ ID NO: 273555 - DNA, 597 bp, Klebsiella pneumoniae; identical to SEQ ID NO: 134459

SEQ ID NO: 273556 - DNA, 780 bp, Klebsiella pneumoniae; identical to SEQ ID NO: 134460

SEQ ID NO: 273557 - DNA, 255 bp, Klebsiella pneumoniae; identical to SEQ ID NO: 134461

SEQ ID NO: 273558 - DNA, 1083 bp, Klebsiella pneumoniae
atgagccgtggtcaggcaacaccactcctgagccttcgttcttcagctatgaaggtctggaaatctttcagcggtgacgtaaacccagaatgttctcttgatgatgtgtttggtgcagtttgccggtgttttgatgaacctgaaagctatgcccttgatattttcagggatgagtttatcggtcaactggttaaggctcttccccatccaagcctgaattatgaccgctggttaattgaacttgatcctcgtgaacaaaaacgcagggaacagtttggcgagccgcctccactgccagcacctacacctgcgtctgaacagtcaggtggtcgggaacgcacatcaccaccaattacgactctgccagcagatacttcatcccagccccctgttactggtctgcgtagcggtacgctgactactccagggcgtccggaagctgtaccagaacttcaggacaatactgcacttcccggcggtatgtctgttggaagtgagccgcgtcgtgaagttcagaatgacctgtttggcggaaatcctgtgattaccggtcagacagagaatcctgataacgatggagagtggcaatttaagtcagatgttaatgccaactcgctcgtttctgcttttggcgaacaggatgaaacttccacaccttcagttagctcagtggccttcgccgcaaccgggttggaaccggtcaatgatatctggcacatctccgctttacaggacgacatcgagcacctgcaggatatggcttatcggcttactttcgaaattgccgaagcgatgggctgcgcggactgtgttcgggaggataaagaccatcattcagctggtttctccatttcagagaacgccagtgagtttactcttttcctcgccgggctatcaggttcactgcctaacaaacagttcaatatgttcatgttctgcctgaatttttttggctctcaggaacctgcagatactgccgttttcgatgatgtcactgttgtaaaaacaatgcgccttatccgcgttatacggcgtctgcgtgagctgcagcgtctggttgtgaagggaggggaaaatgtctga

SEQ ID NO: 273559 - DNA, 618 bp, Klebsiella pneumoniae; identical to SEQ ID NO: 238269

SEQ ID NO: 273560 - DNA, 1770 bp, Klebsiella pneumoniae
atggatgatttaaccctgcgctattacgaagcagagatgcgctacctgcgtgaagccggtaaagagtttgcccgggctcatccggatcgtgcagcgatgcttaatctggataaacccggcgcccgcgatccttatgtggaacgcctgttcgaaggctttgccttcctgatgggccgtttgcgtgaaaagctggatgatgatctgccggaactgactgaagggctggtgagtctgctgtggccgcactatatgcggactatcccgtcactggccattgtcgagttctcccctgactggcgtagtctgcgtcaggccgagatgctggcggaaggcttctccgttttgtcacggcctgtaggaccgcataacaccgcctgtcagtaccggacaacccgcgatgtgtctctacaaccgctgcaacttgcggaggctcgcctccatacagaaaccgatggccggtcagctatccgtctgcgcttcgaatgccctgaaaaagtggactggcgtaaagccgggatcgataaagtcgccatttttcttaacgcagagagtccagttagctcagcgctgcatctggcattgacccggcgtgtacatgccatgtatgcccggcacgcagggacgcatactgaacgtcatcagtttaatggttggtgcaaacccatgggctttgacgacaatgatggcctgtggaagaaagccgatactgccttcagtggttaccagcttctgctggagtatttcagcttccgtccgaaatttatgtttgttgagctgcgcggtctcgacaccatcgggctcactgcggccagcacctggtttgaaatcgacattgtgctcagtgaagcatggtcatccgatctgccttttgagacagaaaacttccggctgcactgtgcgccggtcatcaatctctttaccctggaagccgacccgctgacgcttaacccgctggaaaacgaatacctgctcaggccgctgcgtcttcaggatggacacaccgagatttatagcgtcgataacatccatggcgcggtgaagaatggcaaacacccctatgtgccattcaccagcttccgccaccggggcggtatgatgcgccacgatgcccctgagcgttatttccatacccgcgtgaaacgcggtccctctggcctgtatgacacctggttaattctcgggggacgctcgttcgaactggagcagctgtccgataaaccggagtccctctcgatgcgaataaccgggaccaacggtcagcttccacgtaaggcactggaaagtaccctgctggacagggtggtcaaaacaggcaaagtgcccgtcagagtactgaacgtcacagcaccgacgatgccactatatcccccggcaaacgatcgttttcactggcgggtgatgagccacctcggctcaaactttctgagcatgatggacaatccggaggtactgcggggcacgctggcgctgtatgactggaccgacgatgaaatgaaccgccgtcggcttgaagcaatcgtcgccgtgaagcacaccctgatccgtcgttttgagaagggttttatgctccggggcgtggacattgaggtcacgctgaatatggacaatttttcaggcgagggcgacgtgaatctcttcggggaaatgctgcaccggttcttcgcgctctatgccgatattcacctctttaaccagctcacgctggtgctgcaaccgacagggaaacgactgagatggcgcgagaatcacagccagcacgtaccgggctga

SEQ ID NO: 273561 - DNA, 489 bp, Klebsiella pneumoniae
atgagcaacgtccgtagtcttaaccttggcgacgccatgttgcagcgtggaaaatcaccggctcaggctgctgataataatactcccaccgttacccagccagtaaatgaaatggcaatggttcttacccttgaccagcttcgcccgaatccggataacccgcgcaaaggacgcaatcctcgttttgaggaaattaaagcttccgtccgtgcacgaggattggattcgattccaaaagtgacccgtgatccggatggtgatgatgtttatatctttagtgacgggggaaatacccggtatcagatactctgcgatctctggcaagagactggtgatgaacgtttttatcgcgttcacacgatcttcaaaccctggcctggacgtctaaaatgtctggttggtcacctggctgagaatgaggtcaggggagatcttacctatatagaaaaggcattcggtgttcataaagcgcgggtaatttatgagtaa

SEQ ID NO: 273562 - DNA, 1368 bp, Klebsiella pneumoniae; identical to SEQ ID NO: 134463

SEQ ID NO: 273563 - DNA, 468 bp, Klebsiella pneumoniae
atgtctgagttaattatcctggcctccaccggaaccatggtgggtattgccaaaccgattcttcctgatgtcagggagttcatgcgcggaacagtcgcgctgatggaagaattgctgccttattgtgcgtttggcattcagcttccagtcacaaaattgctcatcaactgtatggaatacgacaatctgtctgttgagaccctcgctgaagtcaaagcgatcgttgaagataaacgctacagcgcccatgcagacaaaattcatatcgacctgctggagacatgtatctatgacctgactgtctatgtccttgggcatgttaagggcgtaccggtacatcgtcttgaaaaaaatacccggcgtaaaagcgactcagcgtttacgtcaatgtatcaattggcttgtgaacttttcccagagtggaaaacgaattttgatgcgttagctaatgcggggggcgaggaatga

SEQ ID NO: 273564 - DNA, 585 bp, Klebsiella pneumoniae
atgccagaagaaaaagaaactgaatttgctttggatgaagatgaaaaggaaagcatttcagtgaggattagacagctcataggtacaaggacggtcagaatggcggcacgagagtggggactatcattttccacattaaacaactatttaaccagagggactgagccatcgctcaatgtggcaataaaaatagcaaatgtggaaggggtttctgtggagtggcttgctactggggaacatcctccaactgatagacctcgcaagggagcagcagctagcaccagtaaaagagatgaggtgtcgccacctcaagaggcggaatcaatggcatggaatgtgatactgaacgctcttgacaaggatgagcgggcgattttaataaattcttttgtgactatcggtgctcgtagaattataagaatgatatgtaaaatcaatgatgtaaattcatactggcaagatctcacaaatgaagagaaagagagactgattcgagtcaatgaacaaatgaaaaagggggcatctgaaactgatcaacagatgatccaggcaggcctaaccagtagtagcaagaaggctggttga

SEQ ID NO: 273565 - DNA, 198 bp, Klebsiella pneumoniae
atgaatatctatcttgagccaggcaccagcaatgtgtttgttctctccccggaatctccgggggaagggtacgaatacattggtgaggtcagtaatgatatatcactgacccctgtcattcctggcgcgatttatgaggttattggcgcctttagtcaggaactgctatcaactggttttgaaatatctataagataa

SEQ ID NO: 273566 - DNA, 1005 bp, Klebsiella pneumoniae
atgaagtttttggtcactggtgccgcaggttttatcggcttccatatcgcgcagcgcctgctgaatgaagggcatgatgttgtcggaatcgacaacatgaacgactattatgacgtcagcctgaagcaggcccgtctggatcgcctggcatctccggcattccatttccagcagctggatctggccgatcgtgaaggtatggcaaagctgttcgccacagagcaatttgatcgtgtgatccacctggccgcccaggccggtgtgcgctactcgctcgaaaacccgtatgcctacgcagacgctaacctgatggggtatctgaacattctggaaggctgccgtcataccaaggtgaaacacctggtgtacgcctcctccagctcggtttacggccttaaccgtaaaatgccgttctccaccgaagattccgtcgatcatccggtctccctgtatgccgccaccaagaaagccaatgagctgatggcgcatacctattcccatctgtacggcatcccgactaccgggctgcgcttctttacagtgtatggtccgtggggtcgcccggatatggcgctgttcaagttcacgaaagcgatgctggaaggaaaaagtatcgacgtttacaactacggcaaaatgaagcgcgacttcacctatatcgacgacatcgtcgaggcggtggttcgggtgcaggatgtgatcccgcaggccaatgccgactggaccgttgagagcggttccccggccaccagctccgcgccatacagggtatataacattggcaacagctcaccagtggaactgatggactacatcaccgctctggaagaggcgctggggatggaagcgaagaagaatatgatgccgatccagccgggcgatgtgctggacaccagcgcagacacccaaccgctgtatgacctggtgggctttaagccgcaaacgtcagtgaaggacggcgtgaagaacttcgtggagtggtacaaggattactatcagatctaa

SEQ ID NO: 273567 - DNA, 711 bp, Klebsiella pneumoniae
atgaaattaccagagcgcatgtattatcccctacctgaagctgccgaaaagctaggttgtaaagtgagtgatatatatcattttgcatatatcggcgttattgatgtttctgtttttattccatcatataaaaatgataacctattaataattctcccgtccggattaataaatgaaattgataatgatttcggcggggttttaggggatgataagtggagcatttttggtatcgagttcagacaagaaggcgtaatgtcgggttattacgcaaagtcaataagtggtttcttttacgtctggagggatttctttgcactggctgaatttaacagtggtgttgacttgataaaaacgcctagcttaacaactaagcctgaagccgagggtggagaagttgagataacaagtatacagggagggattgaactggactcccgttatctgtgtattatggctagcgatttggaaaaaataaaggaggttggttctttaccgattaaaaaaatagacactccaaaaactattgctaagaaaggtgagcttatttcagctttgatcaagatgaatcctgagttatcggatattgatttagataacacaccagtgtcaaaggtaattatgattatagagactgccgccgcatctaaaggtgttgagttgccacctactgataaaaacacttgggctaagtatcttggtaggaagtga

SEQ ID NO: 273568 - DNA, 198 bp, Klebsiella pneumoniae
atgaatatctatcttgagccaggcaccagcaatgcgtttgttctctccccggaatctcctggggaggggtatgaacacattggtgaggtcagtaatgatgcatcactgaccccggtcaccccggatgaaatttatacggtaatagctgcatacaacgaaaatcttttatcgacaggctttgaaatcatcactaagtga

SEQ ID NO: 273569 - DNA, 498 bp, Klebsiella pneumoniae
atgacggacacacgactcacttcttctgccacacgtgctgacggtgcatcaccggtgcttgctgttcagaaccttagcgtctcatttcgtggacgcagtggtgagaatcaggcgctgaaaggcatcagtttcgccatttatccaggcgaaattgtcgccgtggtgggcgagagcggctcaggtaaatcagtcacgtcgctggccgtgatgggcttgctggcgagcagcggccgtatcgatcgcggcagcatgcagtttcgcgatcgccgcggagaagttcatgcgttagaaacgctggatgacagtcagcgccgcacgttgcgtggccgtgaaatggcgatgatctttcaggagccgatgacctcactgaatccggtgctgcgtatcgatgatcaactcaccgaagcgttacgcgaccatcatcagtgcgacaagaaacaggctcatgcgcgcgtacgtgaactgctgcgacaggtacgtattgccgggctttgttga

SEQ ID NO: 273570 - DNA, 393 bp, Klebsiella pneumoniae
atgaataatataaaagccaagaaatcttacttcaagcacaaccaacttcgaacttattgcataagtgttcggttaaatattgaagaactacaattgcttaatcttaaacgcggttcttataaaaaaggagagtggcttcgtatggcttcccttcaaaagttgcctcctgttataccaacgattaataccaaagcctggaaagctttaactgatatatcgcaaaagctaaatcgaattgcgacccatatagattgtaaaagcaaggacagtaagcttacccatactgaattgttcgcagtgaagcgacaacttgaagagcttcgtcacaacttgttaagaacagatttttggagtatccctagtgaagggtatgcggaagatcaagaggggtaa

SEQ ID NO: 273571 - DNA, 1170 bp, Klebsiella pneumoniae
gtgaagggtatgcggaagatcaagaggggtaaaagcttcgcaggtgttgttcaatatgcattgaagccgggagcacatcataaaagcgatccagtcgtcattggcgggaacatgttaggtgattcagcctctaaactgatcaatgaatttgatgacactaaacagcttcggcccgatgttcagaaaccagtttggcacaactcgctacgattgcctgacggagaaacattatcaaatgaccaatgggtaaacatagcagatgactacatgaagaggatggggttcagtgatactcacctccgttgctatgtcttacatgacgacgaaggccagcacatacacattatcgccagcagaatcgacatagccggtgggaagctctacttgggtaggaacgaaaaccttataagcacacggatcattggtgaactcgaaatcgctcatggtctggcagtgaccaagacagcaccatccctctcaaatacacaaccgaagcggaagagaatctctcgaaacgaacagaagctatcagaacggactggtgttccctgtcccaagaaatcccttcaacagatcattgataaaagtttggctgataagcctgaccttttaacttttatcaagaggctggaacaagcagaagtatcctggaaggttaatgttgcctctaccggtaagatgaacggcttttcattcgaatatgcaggaatcgctttcaaagcttcgcaattaggtaaaagctactcttgggcaaatctcagtaatcggcttaactacacccccgaccacatagaagctctgcgagcgacaaaggaagttatccctgctcctgctcctgctcctgctcctgctcctgctcctgctcctgctcctgctcctgcaacagttttgaaaaacactgagagaaaggaaagtatcagtgaaaaaattgctcaactcgaactacgactcaaagaagacagaagaaacgaaatcgtagaaaagattcttcaaaaaaactcagtacaacagcaaaagcatctcaggcttatcggctggattccatttctcagaaggctcgcagagcttctcagaaactatgggaagagcattcttcacaagccccaccatggattctcaaaactctatgccacacgacctctacacaaaggaagaaaaattcatttatag

SEQ ID NO: 273572 - DNA, 429 bp, Klebsiella pneumoniae
atggacaaaagcaacatcaatccagaatttactctggaagagcaacttatcattatcatcgataagtatatctcaaaaagataccagccaggcgataaaagtttctcataccagctttacctgctttttgttggctatcatttaaagtatttctacccaagacagctatacactcgctctaatcgtaacatagacaacattatgacgatgttcagttctgtatacaaatgccttacaagtactttgttgcagcgattgaataataaggaggctgttatcagagagttaaactttctcgtgaactatattgacaacaatcaagaaaaagcagagggaatttatacggttgtaagaacacagtatgaagtgaaggttatcgagaaagagttaacccatgaagtagtcagagtaagaaatgttagattataa

SEQ ID NO: 273573 - DNA, 141 bp, Klebsiella pneumoniae
atgtaccgggtaaaacagctgttcgggggttcactgacgctgcgtgactacgatggtcaggttgcggaggctatggccctggttcgagcgctgaacaaaatgacgaaagcaggtatgcctgaaggcgtgcgtattgcctga

SEQ ID NO: 273574 - DNA, 141 bp, Klebsiella pneumoniae; identical to SEQ ID NO: 273573

SEQ ID NO: 273575 - DNA, 180 bp, Klebsiella pneumoniae
atggctaagatccaagtttatgtaaatgacaaagttgcagagaaaattaatgcgatagcagttcagcgtcgtgctgaaggtgcgaaagagaaagatattagctattcaagtattgcatcgatgttgcttgagcttggtttgaatcgccacgggtttaacagacacctcagagtcatttaa

SEQ ID NO: 273576 - DNA, 1377 bp, Klebsiella pneumoniae
atgtttactcgcagaggtgtattaaaaaccattttcccagcatcagtgttttctttttttatcaataaaagtttcggacaaaactctgtcactcatgttgagtatagttcgcataatgaaaacattgaaggttctaatctttattttacttcagttaatgaattacgtaaaaaaaatgggattgaatctgaattaatttacgttaaaaaaataagacctactgggagtgttgattacattccatataaactagactccaaagataacgtggccaaagataatggttggctgactattgttacgaaagatggaaaaagatataagcggtttcttaacaatgagaacataaatttagaatgggctgaaataaaagatggggatgacatcgcacaaccatggcaagatgctatagactttttaatatattcctcacaattgattgatttttatgctcttccggcaatagaaataccgaggggaaaatacaaaataacaaatggtatcatttgccccccatttgttaaaaatgtagccatggggcaagtgattatagatggcacagattatgaggaaatgaactctcctattttctggataaaaggctacaaaattaattatgatcaacaattattagttggtgagatattatcagcaacaatgggcggtgggtttacatttataggtccgtttcctagtagaaagaatcatatagttgttcttagaataggtaacactgataaagaaaatggacgtaatggtttctccaattgtaatatttcaatgtccaatgttcatataaaaagaggaacaattgggcttgaattaacatcttttgatgttttcttatgttccttttcgtattgtacatttgggccaggtagctataaaaacatttgcgtttcagatatatttgaccgtgaatctaataatgctggagaaaggatatcatttactgattgcgtaatctatggtggagggcaaggagctcatgtttttataagcgtaccaggatttaatatcgactttactaatgttagtttcgactattgtttcggtgactatatttatatagacgcttcttatactaagttacggattattaattgtcatatggagggattcgatggttatgttataaactcaagtgatacaaaaaaaattagtaattgtgtagtctctttattcaatacagacataatgagtacacttggtgatggtaatcatgttaagatggttaatgatacaataatttcggctaactctatatgtagacctttttttaatcattttaaaggggttcaagtagtattgaatcagtcgggtaatgttagccaagtcattccaccggctttgttgaataaatcagatttcgggtaa

SEQ ID NO: 273577 - DNA, 996 bp, Klebsiella pneumoniae
ttgtataaattacttactttaaaaagtaaacaaattgatgatagaagagatattgtagaaaatgttaaagagatcaatggtaaaatttcagctatacctgaaattgagagattgagtaataagatatctgcttcattacttaatacagtaggctcgacttattcccctaaaatattagtatcctcacaacttccagaagatttcacagaattaattcaatcacttggcttagtggttgaagattctctggattacaatggctcaggaaagattgatgatctgagtcttggtggagcaaacttaatttatcttgctttaaagttatatgaatacgaagaaataagggatagtgaagagcatattactcacttcttgttaattgaagagcccgaagcacatattcataatcatatccaaaaaacccttttcgataacttcaattttaaaaatacgcaagtgtttgtttctacacattcaacacaaattagctctgtatcaaaaatatcatcaatgaatatattatcacgccaaaatggattcactgatgtatatcatccatcgtttggtttgacgccaaaagaaatttcttccgtagagcgatatcttgatgcaattcgtagtgaccttttgtttgctaaaagtgtcattctggtagaaggcgatgcagaacttattttaataccagcaatggtaaaagaaacgttaggaattagtttagatgagttgggtataagtcttatcaaagtagatggcactgtttttaaacatatttctaatcttttccatgaaaaacggttgaaaagaaaatgtgcaattctcacggatcttgattcggcctatgtaaaagtagctgataatatttttgatgcggattttgtcgaatctctggtagatgccgaagatgatggattacgaagaaaagaagagttagataaatatattgaaggtaatgagtttataactgttcattacgcagaaaatactttcgaaacttag

SEQ ID NO: 273578 - DNA, 411 bp, Klebsiella pneumoniae
atgattgaagtgctgagaagtggatacgaaaagtcatctgaaggctgcgtagtcatcgacaaatttagcgatgcccgtataaacaaggtacttagcgcaattcatcaggaaccagaaaacaactggagtttgcttgagctggcaacaatatctggtatgtcacgagctggcttttcaaaaaaattcagggaggtaacgggactcacgcctcttctgtatctgacaaactggcgtatgcggcttgcgagtaaatccctgagatatacccgtgagtctgtaaagctgatttgttttaagctgggctacagttcagaaagtaccttcagtagtgccttcaagcgcgtttatggcgtcgcccccagaatttatcgtgatcaacactttcaggcaggcttaaaaaaagacgattaa

SEQ ID NO: 273579 - DNA, 810 bp, Klebsiella pneumoniae
atgccatatagaaatttaacttctgagcaaatggatgccgttaaattcaacgggaatttattattaacggcatgtccagggtcgggtaaaacaaaaacattggtttctaaactttgtttcattttagaaaataaagaactattttgtattggtaaaaagaagataattgctcttacatatacaaatatagcagccgatacgattcttgaacggattatgtcattcggcataagtagtgaatctttatggattggaacaatacacagtttttgtttgaattggattataaaacctaatgtagataagataccaagactttgccgaggatttagtgtaattgatgaacatgaaaaggaatttctcataaatgaattaaaagaaaaacatggcctatctgcaaatgataaagtttttactaatttagattttaaccttggtcagttttattcccgtgggaccaaagaacatttgattgtaaaagaatatcataatcatttgtatgagaaaaaattaatcgattttgatttgatattaaatctgacttgtcgagtgttgacaaaatacaatgcactttgtgaaagattgtctttacttttaaagtgtattttagtcgatgaatatcaagatacatctcttatacaatatgagatactcagacaaattgtattaaagaaaaatacaatgattacttttattggggataaagagcaagctatatacactggtttgggggctgtcgtaaagaatagagatgaattaattaattgtttccaacttgataatctaaggaaggtgcgaacaagttcctga

SEQ ID NO: 273580 - DNA, 795 bp, Klebsiella pneumoniae
ttgggaagaaatgacctgcttattcgcaccttccttaataccacgcatattccctgcgagccggataaaggccagaccggtatatttaaaaatggcgtctgggaatacgtggacgatattcgcgggacccgttactggaatattcacggcaccggatttgttatttccgcgctgagtgaatctctgcctgaccgggccattactgtcgaaccgccagcccctgatgccggttgcgttctgctgttcaatgacggccagtggatgcaggtcgaagataagaccggtcagctttattacgagagcaacggcacgaagcacgtcgtttctgacgcgtggtttaccctgccggagggctgcacgttcgtggccccaccagaggacaaaccgacgttcgtcacgcgctggaacggcacagaatggatttacctcaaagacctgcgcggccaacttgcctggaatactgaaacccgtgaggcgatcacaatactggaggtcggccccgttcctgacggatataccctcaaaatgccaggtcagtttgatgagtgggatggctcagcctgggtgaaaaatattgacactgagcgggcatatctcgtcgctcaggctgaccgtcagaaggctaaattgctgtctgaagcgtctgagaagatttcactgctgagctacgccgtcagcagcggacaagcgactgacgatgaaaccgcgcagcttgccaggtgggaagagtaccgcctcgcagtgagtcgcgtggataccacttccgtcaatattgtctggccagagaagccgtaa

SEQ ID NO: 273581 - DNA, 462 bp, Klebsiella pneumoniae
atggttattaacatccgccgttcccggcctgatgaaggggataaactgactgcgatctggtgtcggtcggtcgacgccacgcatgattttctaacaaaagcgtatcgaaaggagctggaggagatggtacgcgcatttttaccggaggctccgctgtgggtggcggttagtacggaagaccagccgatcgcctttatgctgctgaccggagatcatatggatgcgctgttcgtcgatccggatgtccgcggctgtggcgtggggaagttgctgattgagcatgcgctgtcgttaacgccgaagctgacgaccaatgtaaatgagcagaatgaacaagcggtcgggttttatcagaagatgggttttagggtgacagggcgctctgaaacggacgatctggggcaaccgtatccgttattgaatttgatgtatgagcagcaggctgaagcagactacgattga

SEQ ID NO: 273582 - DNA, 576 bp, Klebsiella pneumoniae
atgaaccctaaggctaatggcgatctgaagattattaattatcaaggtgaacatcctaaacctatatctaaaaataaactaatgctgtgtattgagaattttaacgaggaaaaatattcctataccaattcatctacagttaatgcagaagttgaccatgatctttctctaaatttaagagtaataaataatgctgcgattgcaagttttattctaaatcaaactgaattgcttccctgtacccaattgcgttcatatgcagcagtattatttcttggtttttcaggtaaaaatgaaaccttaaaaagtaatcaacaattatatatagaaacacaatatatttggtttgattataatcagaagcaaattcttcaagaatctgttaatgtatcccttcaagatatgttaaagtcatttgatgaaatgttacctaatatttcaaaggtagatactcttccggtgtggccacttcaaaaacaagctcctccttgtgcatgttatttcaaagttagatggcacattgggaaaattgaaaatgctattcaccttaaaaaaatttttgtttgggaaatatag

SEQ ID NO: 273583 - DNA, 165 bp, Klebsiella pneumoniae
atgcaatacaagctattttttcacgaagcaaggctgttattggtgttattcattgcgacccatttcctggctcgccaaaatatcgaggaaaatcagtctaggatattgttgaacgtgcgcttcgcgatgctgaaaattatatttcaggcggtgttcatggtctga

SEQ ID NO: 273584 - DNA, 783 bp, Klebsiella pneumoniae; identical to SEQ ID NO: 199856

SEQ ID NO: 273585 - DNA, 336 bp, Klebsiella pneumoniae; identical to SEQ ID NO: 199854

SEQ ID NO: 273586 - DNA, 330 bp, Klebsiella pneumoniae; identical to SEQ ID NO: 199852

SEQ ID NO: 273587 - DNA, 249 bp, Klebsiella pneumoniae; identical to SEQ ID NO: 199851

SEQ ID NO: 273588 - DNA, 3975 bp, Klebsiella pneumoniae; identical to SEQ ID NO: 229153

SEQ ID NO: 273589 - DNA, 300 bp, Klebsiella pneumoniae; identical to SEQ ID NO: 229134

SEQ ID NO: 273590 - DNA, 1197 bp, Klebsiella pneumoniae
atgagtgagctaagttatctggagaagctgctggatggagctgaggttgagtggttgccattatcttcattatgcaacctaataacgacagggaaattgaatgcaaatgcaatggaagataatggggcttatccttttttcacgtgcaatgaagagccttacagaattaatacatatgcatttgacctagaggcaatactcatatcaggtaatggtagtcaggttggacacctaaattattacaatggaaaatttaatgcctatcagagaacgtacatacttggagggtttaatgaaaatgtagatataatgtatctctattattatctaatgcacacattgaaaccttatattcataaaaactcaagaaaaggctctgttccatatataacaatgcctatgcttgagaattttaagttccccataccttgccccaacaatccggaaaagtccctcgccatccagtcagaaattgtacggattctggataaatttaccgcccttaccgctgagcttaccgctgagcttaccgctgagcttaccgcacggaaaaaacagtacaactactatcgcgaccagttgttgagttttgatgaggagcaggaaaaacctatttatctggaaaaattgctggatggggttgaggttgagtggttgccattgagtgatttggctcgcatcagaaatggcaaggatcataaatctctcagcgaaggcgagttccctgtttacggttcaggtggaatcatgcgatatgtagatacctatgcctataataagccttcagtcttaattccgagaaaaggctcgcttggtaatttatttttcatcgatgttccattctggaccgttgacaccattttttatacggaaattgatgaagcacaaattaggccaaagtatctttactacttcttgacgacggttggccttggcgaaatgaaccaagcaggaggagtaccaagccaaacacaatccgttttaaacaaactgaaaatcccaatcccctgcccggacaatccggaaaaatcccttgccatccagtctgaaatcgttcggattctggataaattcgacacactgaccaactccatcactgaaggtctcccgcgtgaaatcgagttgcgccagaaacaatacgaatactaccgtgatttactgttcagtttccctaaacctgattccgtaacgaactga

SEQ ID NO: 273591 - DNA, 555 bp, Klebsiella pneumoniae; identical to SEQ ID NO: 220729

SEQ ID NO: 273592 - DNA, 141 bp, Morganella morganii
atgctgatcatcaacgcgatcattcttcttacggcctgcctgctggcgggctgttatctgtattcactcccgaatcactgtaagccgctgccgggtaacccgctggacggtgtgatccacgatgagtgtgaagcgccatga

SEQ ID NO: 273593 - DNA, 384 bp, Morganella morganii
atgaactggaaagaagcggtaattgctgcactgtttattactgctgcctggcgggtatatgacacctactgggataaccagcagctgaaggtgaataacacaaggttgtccggacagctgtcagcacagcagacgataaataccatcacgctttcagccgttgccatcagacaccgcgcagcactcgacaatatcaaagccaaacaggttgaggacacagagcatgtcgacgttaagacagttatcaaaacagtatttaaggacagcgaatgcgctgctgctcctgttcccgctgatgctgtcagtgagttgcgcagatacgcgaccggaattaatacccgcgccggtggtgccgcttccgccgcaactgaccgccgattgtga

SEQ ID NO: 273594 - DNA, 1095 bp, Morganella morganii
atgaacataaaaacaatatcagtattaattggtataaccacatctctcagcacttttggcgcgctcgctttccaggacggtggcggaaatgaccatggcaatgcttcttctgtcgccataggtaccaatgcaaatactaatagcgtggaaggtgttgctatcggcaatacatcaaaaacaaatgatttcggtactgccgtcggaagcgcgagcgaagccactggtactggttctacttcaattggatttcaatcaaaagcgactggcggaaccagtacagctgtaggccacggcgctaatgcaaaagatgctaacgccatagctgtcggtcaggcatctgaagcaggctattactccactgctgtaggaccatatgctaatgccaaggatgggggttccggtgcattcggatatggggcaacagccagtaacggtggatatgctgtaggtcatgatgccaatgcaacaggttcagattctgtcgcattgggaaacgcaacatcagcctcaaaccaaaatagcgttgctctcggctccggctctaaaaccgaaagaaataactcggtgtcaatcggtaatgccaataacaaaaggcaattgactaatctggccgatggtactgaagatactgatgcagttaatgtcagacaactgaacagtaaagctcaggattcaattaacgtagccaatacatataccgatagcgtaaacaatattacaaagaacgaattaaataataatatcgataaatctcagaaagaaagtatagcgataagcaacagctacactgataaccgattcaatcaggttcaatttcaaaatgaggcccgatttgactctatggataaaaaaattaacgacaatgctaataaagcgaacgcagggattgcatccgtagcatcgatggcaaacattccatacaccacaaacactaccttcagtgcaggtatgggggttggtaactaccgtaacggcaatgcgatcgcggcaggcgcccaatataaaatctctgacaatgtgaatgtcagaacctcagtatcgtggaataatgaagatagtgcagtcgttggtggcggtattgctgtcggctggtaa

SEQ ID NO: 273595 - DNA, 354 bp, Morganella morganii
atgccactacgcatacccagagtatgccgcaaacgcggctgcgcaaagacaaccactgaccgcagcggatactgcgaagagcaccggaatacaggctgggagaaccaccagcagggtaagagcagacaggaacgtggctatggcaccaaatgggacaggctgcggctggtggttctgagccgggataagcatctgtgccaacaatgcctgcgtgaaggtcgggcaaccgaggcaaagacagtcgatcacatcatacccaaagcacatgggggaaccgatgcggaaagtaatctgcaaagcctgtgctggccctgtcattaccgcaagacggcgacggaacgtaaccacgtctga

SEQ ID NO: 273596 - DNA, 471 bp, Morganella morganii
atgtcgggaccaccgaaaaccccgtcacacctgcgtttggtcaggggtaacccatcaaaacgcccgatcaataaaaaagaaccgaaaccgccgtcaggggtacccccaactccgaagcactttaccaagcaggggaaatactggtttaagcggatcggggaagaactcgatgccatgggcgtgatgagttcgatggatgccaaagcgctggagctgctgatcgaggcatataccgaataccggcagcactgcgatacgctggatgaacaaggctatacctacaccacagaaagcgaaggcggcacactgataaaagcacacccggtggcagcaatgaaagccgatgcctggaaacggatccgggcaatgctgggtgaatttggtatgactccggcgtcccgctcgaaggtaacgattaacacaccagccgaagaagaccctttcgaggcatttatgaaaaagcgcaaatga

SEQ ID NO: 273597 - DNA, 1731 bp, Morganella morganii
atggcaaccgtagcagatgggatccggtacgccgaacaggtggttgccggagaaatagttacgggcgaactgatacgcctggcgtgtcagcggtttcttgatgatttggagcgtggccctgagcgcgacatctttttcattgaagaacgcgcccagcatattctggatttttaccagtttgtcccgcacgtcaaaggggcgctggcaggcaagccgatagagctgatgccgtggcatacctttattctgattaatatctttggtttcgtgatcccgctggttgatgaactcagcggtgaggctcagtacgacgatgacggcgatccggtactggttcgtcgcttccggacagcctataacgaagtggcgcgtaaaaacgccaaatccacactttcatccggcatcggcctgtatatgaccggtgctgacggtgaggggggcgccgaggtttactcggctgccaccacccgtgaccaggcccgcatcgtgtttgaagatgcaaaaaacatgattaaaaaggccaaaggctcactcggccgcctgtttgaatttaataaactggcgatttaccaggagcggtctgcatccaagtttgaaccgctttccagtgatgcaaacaacctcgacggcctgaatattcactgcggcattgtggacgaacttcacgcccacaaaacccgtgatgtgtgggatgtgctggaaaccgggaccggtgcccgcctgcaatccctgctgtttgcgatcaccacagcgggatttaaccgcgaaggcatctgctacgaactgcgggattacgccatcaaggtactgcggggcgtagtggaggatgacacttttttcgcggccatttacacgctggataaagatgatgaaccgttcgatgagtctgtctggataaaggctaatccggggctgggtgtctgcaaacgctttgatgatatgcgccgtctggcgaaaaaagccaaagagcagatagccgcccggcctaactttctgaccaaacacctcaatatgtgggttaacgcggagtcgatctggatggactcaggaaaatgggacaactgccctgaaaatgcgccggatgatgaactgaagaactaccctgtctggatcggtgttgacctggcaaataaaatcgacgtggccgcggcaattaaggtttatgaagatccgcgcggacaggtgcatgttaagtgtaaattctggctgccggaaggccggatagaaaccgcaccgaaccatattgccgatctgtaccggaaatgggcggctgccggacatcttgaactgacggacggcgaagttattgatcatgacatcatcaaagccgacattctggcatggtgcgaaggtgatgatctgcgtgaactcgggtttgacccgtggagcgcggtgcagttctcccgccgcctggcggaagagggtatcccgctggtggaagtggcgcagacggtaaaaaacatgtccgaatccatgaaaacagtacaggccgatgtctattccggaaaatttcaccatgatcacaacccgatgatgtcctggatgatgtcgaacgtgaccgtaaaaccggacaaaaacgacaacatcttcccgaataaatcgacaccggaaaacaaaattgacggaccggttgcgctgtttacggccaaatcacgccagatggtaaatggcggggaagataagcaggatctctccggattctttgaaaacccaattatggtaggtatttaa

SEQ ID NO: 273598 - DNA, 1338 bp, Morganella morganii
atgaagcaacataagcaaccgggccgcatccgcagtgcgctgcttaactggctgggtgtgcctgttcatctgacatccggtgagttctggcaggaatgggccggtaccagcagcagcggaaaggtagtgacggcagataaagccatgcaactgtctgcggtatggtcctgtgtgcgcctgctcagtgagtccatctcaacattaccgctgaaaatctatcagaatcagcgtgacggctcccggacgctggcgaaagagcatccggtataccggcttttatgtaagcagccgaacgccgagatgacaccatcccgttttatgctgatggtggtcgccagtatctgcctgcggggtaacagctttattgagaagcggtatatcggatcaaaactggtcgctttgcacccgctcttaccacagaatatggtggtaagacgcggaaaaagcggtcgtctggaatatgaatataccgacccgctgacacaaacaaagcgcgatattcctctgaaatcgatgatgcatatacgtggtttcgggatggatggtatctgtggcatgatcccggtaaaaaccgggcgtgatgtgattggtgccgcgatgtctgtcgaggagtccgccgcaaaaatattcgaaaatggtcttcagagttccggatttctgtcagctgagatgccgctgaacgatgatcagcgcgggcggatcagaaaatatattgaggcatttgtcggctcgaaaaatgccgggaaaattatggtgcttgaagggggcatgaaatacaacaatgtcaccatgaacccggaggccgctcagatgctggaaagccggaccttcagcatagaggagatttgccgctggttccgcgtgccgccgttcatggttggtcacatggataaacagagcagttgggcgtcaagtgtggaaggaatgaatatgcagtttctgaccaatacactgcgtccgctgctggtaaatatcgaacaggaaatcagccgttgcctgctgaatgatgacgatgattattatgctgaattctctgttgaggggttactcagggcagacagcgcggggcgttcagcttactacacaacatcactgcaaaacggatggatgagccgcaatgatgtccgccgccttgaaaatcttccgccgattgatggtggtgatatttatactgtccagcttaacctgaccccgatcgatcagctcggtaaagacaacgggaaaaatgaatcagaaaaactgcgggcaggaatagcgaactggcttttccctgaatcatcttctgccgctgcgggtccacaacaacaatccacgcaatcacctcattccggggagtaa

SEQ ID NO: 273599 - DNA, 852 bp, Morganella morganii
atgaaaaaaagtaacctgccggcagcgccggagggtcgcccctgcgcgtcagttaattatgaactgaaaccgaaagcacttgaaaactggagcagcggcataaaagccgccagcgctgataacactatttccattcttgatgtgattggtgccgatatgtggggtgatggtgtttccgcaaagcggattgccgcagcgctgcgggttatcggtgacaatgatgtggtggtaaacattaacagccccggcggtgacatgttcgagggcctggctatttacaacctgctcagggcacacaatggtcatgtcaccgtcaatgtcctaggtatcgccgcgtcagcagcatcaataatcgcgatggccggagatgaaattctgatgggccggggcgcgtttctgatgattcataactgctgggctatcagcatgggtaaccgacatgattttgcaaaactggccgctgatcttgagccgtttgataaagccatggcgggtatctatatggccagaaccggacaggatgaaaaagatatctgccggatgatggatgaagaaacctatatcggcagcagcgatgccattgataacgggtttgccgatggtcttctggcagcggacgctatcgataacggtgacgaaaccccgcaggccgctgtcagaaaaattgatgcgctgctggcaaaaacaaacacaccgcgcgctgagcgccggaaactgatttctgctttaacgggaagtatgccgggcgctgcttccgaccctgaaggtacgccatgcgctgccgctgaaataaatccacaaaccttatctgaactggaagaggcggtaagagcctttactccggcacgttaa

SEQ ID NO: 273600 - DNA, 1215 bp, Morganella morganii
atgtctgatacaaacgaattactgaaaagcctgaaagcgcagattgaaaaagcaaacagcgactttaatgccaaggcggagagcgcactgacagaagcacaaaaagcgggcggactcagtgcagagacaaaagaggctgttgataaaatggcgctggagcttaacgcgctgcgcgaagccgaaaaaaccattaaatccgcgatgggggaactggaacagcacattgcccagatacctcttcagagtgccctgaaagccgcgcaatcttttggtcagcaactgatttcggcagaagtgctgaaagatattaactccagcatccaggggaataaacgcatttctgtaccggtacaggcggcgctgatttcaaccggcgttgccgaaggtgttgttgagcctcaccgtctgccgggtgttgatgtggcaccaaaacaacggttatttatccgtgatttgattgctccgggaaaaacgcagtcaccggcaatcttctgggttcagcagaccggatttaccaataaggcagcagtggttccggaaaataccaccaagccttacagcgatattgagtttgcaaccaaaatcaccccggtaaccactgttgctcacatgtttaaagcatccaagcagatcctggatgacttttcacaactgcagtcactggtggatgctgaaatgcgttacggcctgaagtttgttgaagaacaggaaattttgttcggtgacggctccggggcgcatctgcacggcattatcccgcaggcatcgaaatacaaagctgaattcagcgttgaaaaacagaatggtattgatgatctgcgcctggcgatgctgcagtctcagctggcacgtttcccggcatccgggcatgtcctgcactttattgactgggcgaaaatcgaactgaccaaggattcgctggggcgctacatccttgccaatccggcctcacttaccggccctacactgtggggattgccggttgtggcaacagaaacggcagcattcaaaggtaagttcctgacaggggcgtttaatgccggtgctcagttgtttgaccgtgaagaaaccaatgtggtgatctccactgaaaacgccgacgattttgagaaaaatatgatctcaatccgttgtgaagagcgccttgctctggcagtaaaacgcccggaagcctttgtttatggcgatttcactgtagccggtgctggtgaataa

SEQ ID NO: 273601 - DNA, 267 bp, Morganella morganii
atgaaaatgactgtactccgggcattttatttcggacaccgtgtcgttgtggaaggtgaagaaattgaaacgacagaattacacggccgcgaactgatacaaaaaggttatgccggggagattccggataatattctgccagagccagagccagagccagagccagagccagagccagagccagagccagagccagagccagagccagagccagagccggaaaaaccagctgcacctgaatccaagcgaggtgctaaggggaaataa

SEQ ID NO: 273602 - DNA, 321 bp, Morganella morganii
atgctttctctggaacgtgcaaaacagcaggtgagactggatcaggatttccatgatgaagatgagttgctgaaatcttacattattgccgccggccgcctggtggaaaatcataccaggcgcaccttaatcacggattctgatgaaagcccggatccggaaataaccctgatttataacggtgatattgaagtcgctatgctcctgctggtgggtaactggtatgcaaaccgcgaatcagttgtaactggtgaatctgtggcggtgttgccgatggcggttgatgcgctgctgcaaccttatgtgaggtacctggaatga

SEQ ID NO: 273603 - DNA, 333 bp, Morganella morganii
atgagcgggttaaaagccgggagattaaggcaccgggtcacatttcagcgctctgagcgggtaacgttgccgtccgggcaacgtgaaaatcagtggcttcctgttgctgtaacctgggcagaagtcagacccgtcagcggacgcgagcttatcaccgccggagcagaaatgtcagaaatcactgcccgtgtgtggatgcggtaccggccggatattcatcctgcatgccggatggtatatcgcggtcaggtctacgatattcaggccgtgatcccggatgtgaaatttacccggctggaactgctgtgtaaacagggggggaaagatggctga

SEQ ID NO: 273604 - DNA, 450 bp, Morganella morganii
atggctgatatggggctggatttgtccggttttgctgaactgtcccgtgatctggaattactcagccgggctgaaaatacccgtgtgctgcgggaagcgacgaaagctgcagcggatatgctgcgggatgaggtccggcggagcgctcctgtcaggaccggaaaactggcgcgtaatatcgttaccggcggtcagcggagccgttataaaggtgaggttgtctccggtgtatacatccggggaaccaacgccgccggaaccaacagtgataacacactgaaaacggacgacccgcgtaatgcgttttactggcgtttcctggaaaacggtacatccaaaatggcaccacaaccgtttatccgttcggcatttgacggtaaagcggatgaggcagcggatctggcgctgagcaaactcagtcaggctatcgataaggtgctgagcggatga

SEQ ID NO: 273605 - DNA, 336 bp, Morganella morganii
atgaaagaatctgatttgttttctttgcttgacccggtgctgccgggcagggtttttccgtatgtggctccgcaggatgaacccaaaattcagccgccgtggtgtgttttttcactttatgataccggcggcgatgtgctgtgcggtcgtgctgagacaatgaccaatatccagattgatgtgtatgcaaaaaccatcgatgaagcccgccggatccgtgaactgtctgttgctgctgtttctccgctttcaccggcggagttcacagagaggcaggggtatgaagccgataccgcgctttaccgggccacgctggagtgtcaggtctggcaataa

SEQ ID NO: 273606 - DNA, 468 bp, Morganella morganii
atgtctagcaaatatgaaaaaacgcagggcacgaaaatcagtatttcaaaactgccggcaacagaagcaaatcccgcatctgctgagtttctgccgctggcctgtgcggccaaagagatcggttataccggcggacaaaaatcggacattgatgtcaccaccctgtgttcgactgagcaggaaatgactaatggcctggcatccccgggggaggtcacaatttctggtaactggtcaccggatgaggggcaggaagcgctgcgtgctgcctatgacaatgacacgatccatgcgttcaaagtggagtttccgtcaggtaatggttatgccttcctggcggaagtccgtcagaacagctggagtgtggcaaccagcggggtagtcaccgcgtctttcacgctgcgtatgaaaggtaagcctgttccgctgaaaaacgggacggtaactgagccgggaaagggggaataa

SEQ ID NO: 273607 - DNA, 384 bp, Morganella morganii
gtggcgaatccgaaactgtcattaaaagaactggcactcagtccaaaaaacgccttccgctcaaaaatggtgaaggtacctgaatggaacggagtcaccgttattctgcgggaaccgtcttcggcagcctggctcagatggcgtgagctgatgaataccggcgcagacggtgatgaaaaattgtcagaggcagaacaggcgcagcgcaatctgcgggctgatgtggtgatgttttctgatgtgctgctggatgaagataaagagcgggtgttcagtgatgacgacacggaaacggtgatggctgtttacgggccggttcatgcccgcttactgaaacaggcgcttgacctgatgaccacgccggatgaagcggaaaaaaagtag

SEQ ID NO: 273608 - DNA, 273 bp, Morganella morganii
atgacactggcgctccggatggggcgcacagtggatgagctgaccagaacgatgagcgccggtgagctgaccatgtggatggcctttgaccgcctcagcccgatcggggacatccgcagtgacatacagacggcccatattgtctcatcactgtacggcgcacagggcggcaaactgagcctgaatgatgcgatgctgaaatggggggctcaggatgagagaccggtcggtgacagtctggaagagtttctcggatctatttctgaacattaa

SEQ ID NO: 273609 - DNA, 3261 bp, Morganella morganii
atggcgaagcttcgtgagcttattattaaaatatcggctaattcatcctcgtttcagtctgaaatagcccgcgcctcacggatgggggagaattattaccggacgctggagcagggcggccgcaaagcagcatcggcatcacgcgaaacgaaacgggcaatcagtgagctgaacaatgaactgtcatcaataaaatcgacagtaaccggtgtaatgggggctatggccggtgcctttgccacgcagcagcttatcagttatgccgatacctggagccagttaagcggacgcctgaaactggcctctgtgtctgcggaggatttcagccgggcgcagcaggagctgatgtcgttaagtcagcgtaccggcacatcactggcggcaaataccaacctgtacgcgcgtattgcgcagtcgatgcgtgatgcgggttatgcctcgggggatgtggcaaaagtcacggaaaccatcgcaacttcactgaagctgtccggtgcaagtactgaagaagccagctctgttattacacagctgagtcaggctctcggatccggtgttctgcgcggtgaagaatttaacgcggtgatggagaacggcggacgactggcaaaactgctggcggacgggatgggaaccaccatcggcggtctgcgtgaaatgtcacagagtggtaagctcaccattgacaagatagtgccaattctgaccagcactgaacaactcagaaaagaatttgagcaattaccgcagactgtcagcggcgcatcccagaaaattgaaaacgccttcatggcatgggtgggcggggctaatgaggcatcgggcgcaaccagcacgctgaccggcgcactgaatggtattgcgggaaatatagacaccatcgccactgttgccggggcactggtcggggttggccttgcgcggtatttcggcgggctgaccgccagtgtgaccaaagcaaccatcggggtggccggtgccgcaaaaggcgaggtcgctcttgcacaggctcagctgcgcgggacacaaattgcggttgccagagcgcgtgcggcagaataccgggcacaaaaatcactggccgctgcacgcggaaccgatgcacaggcgggagccgaaaagcggcttgccgctgtacaggcatccgttgcacgcaatattaacgcccgcaatatcgcacaaaacaacctgaataacgtcacatctgtcggttcacgtcttcttggtggtgtgctggggctggtcggtggtattccggggctggtgatgctgggtgccggtgcctggtacaccatgtaccagaagcaggagcaggcaagacagtccgcacttgaatacgccgccaccattgaccaggttcgtgccaatcttaataaaatgacgctgccggaaaccgctgataactccggtaaaaccaaagaatcgctggcggtgcaaaataaactggttgatgagcagcgtcagaaagttgagggattaaaatcagcgatagcaggatatcagcagatgctggcctcacccggccccagcatcaacggctatctgattaaccatctgatcagtcaggaagatgcggttaaatccctggcggctgcgcaggatgagctttcggttgaacagagcagacttaatgagctgagcaaaaaatcggaagagattcagtcagcactgaaggcggtcgaaagtcagcgtgattttcttattcgtcagcagtctgctgcccagaataatatgcgtcattcattactgatggtgaatgcggagcatagtgaatttaaccggataatgtctgccggaaatcagatcctgactaaccgtctggctctggttaacagcccgatgcgtatcccggcagcgcctctcagcgaaaaacagcaggatttcattcaaaaatcagagcgggataaagagctgtcaacactgaccggggaagcccgtgttatccggcaggctgagttcgctgcggatgatcaggggctgactgatgacagtgcccatcgcgataaccggcagagatatatagataaccaggttgccgcttaccggaatctggaaaaacagaacaaagaattaagagagggtaaaagcgcccagagtgccttcaataaagagcagaaagaagcggaacgtcaggcagagcagtatgcccgcaaaatagcagatctgagtgtggccacggaggttcagaaagtcagggccacgcagggagaaaaagccgcagatctttatgccgcagcacatgagtccggcgcaaaatggacggatgagcagcgaaaagcgatccgcgcatcctctgttgccctggcggagtggacacaaaaggccgatgaggcggtcagaaagcagcgtgaaatggatgatgcgctgaaagcgatgcgtgacggtgcccggaaattcagtgacgaagcggagcaaattgataaaacccggggaatgggcggaaaccggcgcagtctttacgatgagcgtcagcagattgatcgtgtttatgccaaatcggatcagggaaaaagtgcgaccgaagcctataaccgcgagattgaggctctcgatctgaaatataaaaacctcggtgaagcgcagtctgactgggcagcaggggtaacacgcggaatggaagactgggtgactgaggccggagactatgccgaacaggcagcatcggcggtacagagtgcaatgggcggtatggtgaataacatcactgacatgctgaacggaaataaagccagctggcgcgactggtcaatagatgtccttaaatccatccagaaaattctggtcaacgctgccatcgtgaacagcctgaaatccatgtcagatgccggtggctggatcggtgctgtcggtaacttcctgggaggtgccgcggcaaatgccaaaggcggggtatatgattctcccggcctgagtgcgtacagcaatcagatagtcagcaccccgacttattttgcgtttgccaaaggtgccgggctgatgggggaggccggaccggaagcgattatgccgttaacacgggcggcggatggctctctcggtgtccgggcgatcggcagaaatcagaataccggttctgcagcaccacaggtgtttattaccattgacagtaacggcagcagccagacgcagtcgtcagctggttatgaacagtttggccgggagattgggcagtatgtagaccagcgttaccgggcgctgattaatacagatctgcggcccggcggtgccatctggtcggttgcgaaagggggtcgtcaatga

SEQ ID NO: 273610 - DNA, 336 bp, Morganella morganii
atgattgaaattttcacctggtgtccccgtgttaatcccacggaggacatcacctataaaacccgcagggcgaagttcggtgatggttatgagcaggtgtccggtgacggtattaacgcccgcagccagaagtggtcactggaatttaccggtcgcggggagtatatcgcggctatccgtcagtttatcgaccgtcacggcggcataaaggcttttcagtggaaccccccgcttgagccggtcggtctgtaccggtgcgacgagcataagctcaccccgctcggtggtgacaactattcactttctctcacttttactcaggcatttaaaccatga

SEQ ID NO: 273611 - DNA, 759 bp, Morganella morganii
atgatcacaaatgactaccagaagctggaaccgggtaatgctgtccggctttttgaggttgacggtaccgcattcggtgcgccggatattttgcggttccatgcatacaacatcccacatacagaggcagaaattacagccgccggtggtgatcctgaaaaattaccggcgaaatccatctggtggcagggagaggagtatcgggcctggcctgcgcagattgaagggatagaggcatccaccaccggatccggtgcgcagccgaagttatccgtggcaaacctcgatggttcagtcactgcgctgtgtctggcatacgatgacatgctgaaagcgaaagtcacgatacacgataccctggcgcactatctggacgcagcaaactttccggacggcaacccggcggcagatcctacccaggaaaaagtctccgtcttttatatcgacagcaaatcatcggaaaccaatgaggttatcgagtttgatttagccagcccgatggatttacagggggtgctgatccctacccggcaactgcattcaatgtgcacctggtgcatccgtggaaaatataaatccggtgacggctgtgattatgccgggcagaacggctggttcgataaacacggaaatccagttgacgaccccgcgcaggatcagtgcagcggtatgctgggcaacggctgtactttgcgctttggtcaagataacccactcccgttcggcggctttcccggaacatcattactgaggaaatag

SEQ ID NO: 273612 - DNA, 708 bp, Morganella morganii
atgcgtaaaaacattcaggcagctatttttgcccacgcagaacgtgaatacccccgagagtgctgcggggtgatcgcgcaaaaatcccgtgtggtaaaatactttccctgccgtaatatcgcggctacgccggaagagcattttgtcttatcgccggaggtttacgctgctgctgaggattggggaacggtgaccggtattgttcacagtcacccggatgccactacccagccgtcagaactggacaaagcacagtgcgatgctctctgtgtgccgtggtatatcgtcagctggccggagggggatctgcggaccgttcagccgcgcggcgagcagccattacttgggcgaccttttgtgctcgggtttacggactgctgggggctggtaatgagttggttccggcaggagcatggcattgaactgccggattaccgggtggattatccctggtgggagcagggcgaaaaccggtacacagataattggcgggaggcgggatttattcaggttgatgacccacaacctggggatatcattgtgatgcaggtgcaggcaccggtcgccaatcatgccggtattttgctgggtgataatatgctgctgcatcatttgtatggacacctgagccagcgggttccgtatggcggttattggcgtgatcgcacagttatggtactgagacacaaaatattcatgacaaactag

SEQ ID NO: 273613 - DNA, 420 bp, Morganella morganii
atgaaaaaattattaattattttttctttaataatggttggttgtgctacatcggcagtaaatccaaaattagcgaaaataacgcctgaaaacaggatatttttgtctgagacatataatgaaaatgctggaaaggtaacagtgattcgtgactctggtgtcacaaacggaaagatgcttatcactatgtatatagatgggaagcgtgctgcagaaatggatacatcagagaaagttacatttaatgttaatagcggtgagcatattattggggtaacttttgaggggatgtttttctcttcaccagacgagataatgcaagaaagagaatttaccataagtgaaggtgaccataaatattatcgtatatttaccgatcagttcggaaatttagatattaagccaacaatgctcaggtaa

SEQ ID NO: 273614 - DNA, 651 bp, Morganella morganii
atgaaacccgcgaaagcgggttttttaatggaggagaaaatgtcacaggaaataatggcaaaaatagagctgggtggtgtattgggtaagacgttcggtaaaaaacatcagcgtcttgtcagtactacgtccgaagccgtccgggcgctgtgctgtactatttcgggctttgaacagttcctgaataccagcaaatcacgtgggttaacttacgcggtatttcgcgggaaaaagaatatcggggtggatgacctggatttcccgatgactgatgatgttatccggattgtaccggtagtgatcggcagcaagcgcggtggatttcttcagacaattcttggtgctgtcttagttactgttggcgcaataggaatgtacactccatttggtcaggcacttggtggtgctgcatggggcagttatatgatgcaggctggtgctgctgtaatgctcggcggcattatccagatgctgtccccgcaaccaaacgggatcgccatgaaagaccagggcgaaaacaaaccgtcctatgcgttcggcgcaccgaccaacaccgtttctcagggctatccggtaccgatcggttacggtaaacgccgcatcggcggagctgttatctcagccggaatttacgtcgaagatcagcagtaa

SEQ ID NO: 273615 - DNA, 3180 bp, Morganella morganii
atgacacaaatcacaggccgcaaaggtggcggcggcagcccgcgcacgcccgtcgaacaaccggacgatttacagtctgttgcaaatgccaaattgctgattgccctcggtgaaggggaatttgccggtgagctgaccgggaagaatatctttctggatggtaccccgctgctgaatgctgacggctcggaaaattttcccggtgtggtgtgggaataccgtcccggcactcaggctcaaacctatatacaggggatgcctgcggcggagaatgaaatcacggttggtaccacggtacaaagcagtacaccgtgggcacatgcattcaccaatccgcaattatctgctgtccgcgtccgccttaaatggccgtccctgttccgccaggaggataacggggatatggtcggtaacgaggtggcatacgccattgatttacagactgacggcgggagctggaaaaccgttgtggacggacgtgtaaagggcaaaacaacttccggttatgagcgtactcaccgtattgatctgccgcagtctgcgacatcctggacactgcgggtacggaaaatcacggcagatgccaacagcgcaaaaattggtgacaccatggtgctgcagagttacaccgaggtgattgatgccaaactgacctatccgcacaccgcgctgctgtatattgagtttgactcaaaacagtttaacggctccatcccgcaggtcacctgcgagccgaagatgcggatcatccgtgtaccgtcaaactatgacccggagtaccggacgtattccggtacctgggacggttcgtttaagtgggcatggaccaataaccccgcctggatattttacgatattgtggtttccgatcgctttggcctcggcgaccgcatcaaaatgcagaatatcgataaatgggaactgtaccgtgttgcgcagtattgtgaccagccggtaccggacggcaagggcggcagcggtactgagccacgctatatctgtgacgtgtatgtccaggatcgcaatgaagcttataccgtgctgcgtgactttgcggctatcttccggggcatgacctactggggcggaaaccagattatcaccctggcggatatgccgcgcgacattgattacagctacaccaaagccaacgtgctggacggtcgttttacctattccggcagcagcagtaaggcccgctattcctccgcgctggtgtcgtactcagatccgttaaacggctatgccgatgcgatggagccggtgtttgaaaatgaactggtttaccggttcggatttaatcagctggaaatgacggcaatcggttgtacccggcagtctgaggccaaccgcaaaggccgctggggcatcctcaccaacaacaaagaccgcgtggtgacattcggtgtggggctggacggcaatatcccgcagccgggctacatcattgcagtggcggatgaaaacctgtccgggaaagtcaccgggggccgcgtcagtgcggtgaatggccggagtatcaccctcgaccgcaaaccggatgccgcgccgggtgacaggctgatgctgaatcttccatccggtaaatcacaggcccgcaccatccagatggtcacggataacgttataaccgttaccacggaatacagcgaaacgccggagccggaatgtgtctgggtaacggaatcagacgagctgtacgcacagcagtatcgcgtggtgagcgtgactgagaatgatgacggtacgttcacgatatctgcggccatgcatgatccggacaaatacgaccggatagacaccggcgcggtactcgatgaacggccagtcagtgtcattccgcccggcaaccagttcccgtcgaaagatattactatcagctcttattctgtcgtgaaccaggggatcagcattgaaaccatgcaggttacctggtcaccggcagagaacgcgattgcttatgaggcgcagtggcggcgtgatgacggcaactggatcaatgttccgcgcaatgccaccacttcatttgacgtgcccggggtctattcaggccgctatctggtgcgggtcagggcgattaatgcagcggaaatctccagcggctgggggtattcagaggaaacccggctgaccggcaaggtgggtgatccgccgatgccgctgaacttccgcgcggccacattggtattcgggatcaaactgaactgggagttcgggaaatttacggaagacaccctgaaaaccgaaattcagtacagcaagaccaatgacgggcagaatctgttactgctggccgatgtgccgtacccgtcccgctctcatgagcttgccggtctggccgccggtaccgcgttttatttccgcgcccggctggtggataaaaccggcaatcagtccccctggactgagtttgagcgcggtgtggccgagttcgatgcatcgaccattattgatgaagtagccgtcgggctgggcgactctcaaattatcaaagacctgcagtcgcaggcggatgataatttcgaggccattatcaacaacgccaacaacgcttacggccagtggggatactggcagcgtgaaaccggcgcgatgaaagcagaaattatcgaagtccgcaactacacggtcacggaaacgactgcacttgcggagaaactggacgcggttaaggtgactgcagacgacagtttcgccatggctcagaactctatccgcgcacagtgggatatggcatcaggtcaggcatcggtggtccacgatatgaaagtccggatccgttatgagggtgaggactattccgccggcatggttatcggggccgagctgaaaggcggggaggtgaacacgcttatcggctttaacgctcagaagtttgcattttataacccatccagtaagtcgatggatctgtttatgtacatggagggcgggcagatcttcatgcgcgaggcatttatcaaccaggcctggcttaatgaagttgtcgttactgacaaaatgcagtcggagaactatgtaccgggtaaagccggattcctgattgatgcaaaaaccggaaaaacagaaataaatgggtcggatgcttctggtggccgaatggaaattaagaatgaccaaatccgcgtgtgggatgaaaaaggccgcctgcgggtcgaaatcggaagattaacagggtga

SEQ ID NO: 273616 - DNA, 282 bp, Morganella morganii
atgaaatataaattgcttattttatctgtggttgtcttgtctgccaccggatgcgctgtcagtacgccggtgattgcggatgtggattgtgttgcatggtaccgggaggctaccttcccgaacccggttcacaaactgcacctgataaaaaagaaaaacgacaacaaacggcaccagaacaccatctggtataaacaatcaggcctgagcggggttaaattttccggcggctggatcccggaaaaagtactggagggaatggaatgtcggcattcggaataa

SEQ ID NO: 273617 - DNA, 264 bp, Morganella morganii
atgtcggcattcggaataagagcttttgatgaccaggggcgggataccgttcatatgttgtctaattttgcccagccactactgccggtcagcggtagtggctcaaaaacctataatctgccggcgggagcaaagttatatgcttttccggttgatggtgtgttcggaaatattgatatcaccatttccggtaacacgatttcatggaaagatctgaggtcaccaaataaattaattgttattttttccatgggtgcattatga

SEQ ID NO: 273618 - DNA, 684 bp, Morganella morganii
atgacatttggtttcgcagtgaatgatttgtccgggaaaaaattatttaccccttccggaaaatgctatgttttatatcgtatcatcaaagccggcgccgggcagaatcaaacgtcttatcatgacaccggtattaatcgcaccagtgacccggtgccgttatgttttatccggagcacaacacgatacccaccaattaataccccgcctattggatgtgtgctattaggaagagtcagtaattataatgatgtaaatcatattattactgccgaaaatacctattcaacaatttatttgtttatgccgggtgactgggtggaagccagagaaggaaagcaaaaatggggagccagattctacgatgaagatggtgaggtaagttactgcggatggcagaaaccactgacaatagacggatatgtggcgtcagatacaaatactcctccggcgctgaagaatagtaacagcgccatcctgatgagaacaatgggcactgtttcctttttggtgcctgctatcaacccgaatttaccaacaatatttctggttaccgctacagcgtataacggccacggcgagttgttataccgagtgctgggttcacaagggggcggttccagtttttttaataactataacggccacattccctatatagatgcatccatatacgaacaataa

SEQ ID NO: 273619 - DNA, 1641 bp, Morganella morganii
atgatttacacagacggcactatagccattaaagcaggttcaccgattgtgaccggcaccggtacgcagtggaaaaagaacattcacggtgtggcacccggccagcttatcagcatcgagaacggcacagcaccagtcagtatgatgatccgcgcggtaaacagtgataccgaactggtgttgtcattcaatgctccggtaacgctcagtggtgcaaaatactccattgccaccacggtaccggataccatttcagatgcagcccgcaccatgtcagccaatcagggctatatcgtttattttctccaggcaatgcagcagtggatgacagataccggtcaggtggaaattgagctgccgaacggccagaaagtgacgctggaggatgtaaaagggctggcttcacaggaatgggtcaaaactgtgttgtttggtgtgggtgacaaaacggcaaaagcctctgggataatgaatcccgataatacaatgtggtggggtgcgcataatgattatctgtatgcgaaagcatcaggtaatgaatataactccttatttctgacgaaaggcggggagctgacagttaaaagctttttaaactgtactcacagattgtctatcgctgatatggatacccccaatacttttgcgcatttttattgtaataaaggccggatctttctatcggctaaccttaacggaaaatggccgggtgaactccagtttccactggaaagtggcatgattgcatctcagggatgggttaaaagcatgatttatagtgatgttgatacaacgacattacgtaatccgcatggagaaccaagattatgtctggttgcgagagacaatggcactgccggaatttgggacaacgcaaacagaagatgggcatttactcataaccaagctaattggaatatgcttggaaccggtacaatacaagggactggtgattatgtaggtattaaatttcttaaatcagacagcttttcaaccacgatagagacactaccaacatcttcaacaggaattttgaatattattcagagggatggcagtggaggcaatagagctgttcatagtgttccgacaggatatggaacactgctgtcggttggagctaatgcatatgcagatggtagcggatattacaaaaaatcatcacctattgtgttaatccatcatgatggacactacgagaccaacgacgaatccgccggtgccgaagtccgccgcaccggcaccggccaatatcacattaccggcattcttggttacaactcagatggtgcctggggcgtaaacggtggtatctcagtaccgaaagacaataacggccttgagctggtttacgtcgcggaccgcgttctggaggatggcagtattatcatcgaaacctgtcaccgtcagcatgcgcatttaccggaccgtttccagaactggcggctgaaagaggtcaccccggaaggtgagcgcattttctatcaggacggcgaaccgtgtgatctgccggaatccacccgcctcgatgttcgtgtcgaaatgccgcagggttctgtatggaatgtgaagcagcgtgaactgtctgaacagatggagcgtgaacaggcagaacgtgaagcgcaggaagcagcggagtag

SEQ ID NO: 273620 - DNA, 390 bp, Morganella morganii
atgaaaaaactcttacttcttgttccgttgatgtttgccttgccggtacaggcttccggagtcacggtaggtcaggtttgcaaggctgcttctgctgcgatgtttggccgtgaccataagattatgcagttggataaagttgaatcaggtattgcctatgtacattatatccggcagaacgatggcacccgctgggcaatcaagtgcaaacttataggcgatcaagttatgtgggcatctgacaatcctgatagtaccggtcgctggcgggatgatccggcagacagtaaagtcaaatatgctgttgatggtaacaaaattattattaccgagctttacagtgacggttccagtactactgcctcttatccattgaaacagctaaagtga

SEQ ID NO: 273621 - DNA, 417 bp, Morganella morganii
atgaaacttgtcaagatcaacgatgatgcaattctgacattacctctgttcctggagcatgtccccgccggattcccgtcaccggcggcggactatatcgaggaccgcataaacctgaacagcgaactgatccggcatcctgaaagcacctacctgctcagggttgaaggtagttcgatgatagatgcaaatatctttgatggcgatgtggttatcgtggacagcgcggtaactgccgctgaaggcgatatagtaattgccagttttgaaggtgagtttactgtcaaaaaattgcagctgtctccggcgcccatgctgatcccgatgaatcccgattatcagcctatcgcaatcagcggtgagcaggatttgcagatcttcggtgtggttacctacatcatccaccgggcgcggtaa

SEQ ID NO: 273622 - DNA, 1263 bp, Morganella morganii
atgtttgcgctggtggatgtaaacagcttttacgcaagctgtgaaagagtattccggccagacctgacgggaaagccagtcatcgtcctgagtaataatgacggatgcgtgattgctaggtcagcagaggcgaaagccctcggtatcaaaatgggggcgctgtattatgaatgccgcgccttttgtcacaaaaataacgtggcagtattcagctcaaattatgcgttgtacggcgatatgagcagccgtgtgatgacattgctttcatccttcgcacccgccacagaaatctattctatcgatgaagcctttcttgattttaccggcatgaccaggacattcagcctggaggattacggccgtgagatacaggctgccattctgcagaaaacacaccttccggtcggtgttggtattgcaccgacaaagacactcgcaaaactcgccaaccacgcagcaaaaacatggaaaaaaaccggcgggatagtcgacctttctgatccgctgcgccagcgtaaattgctggctttgataccggtcagtgaggtatggggtatcggcaggcgcatatctgccaggctgaatacaatgggtattcatacggcattagatttggcgagcgccgcaccggcgactatccgtaaaacctttggtgttatcacagagcgcacgctgcgggagctgaacggggaaccctgtatcgagctggaagaagtcagaaaggtgaaacagcagatcctctgctcccggtcattcggtaccaaagtgacggacattaccaccatgagaaaggcggtatgtgaatatgccgaacggtcagcggaaaaactccgggaagaaaaacaacgctgccggatgatcgggctgtttgtgcagaccagcagacatgccaacgggccggactatgcgaacagtgcaaacatttcactcgagtatcccagctgcgacacgcgggacatcataaatgcggccatgagagcactggatggtatctggtgtgacggctaccggtattataaggctggcatcatcctgtctgacttcacggattcagcagtcactcagctcgatatgttcgccacgcggcagccattcaaaaacagcgacgagctgatgaagaccatcgacacgatcaataacagcggcatgggccgcgtgtggtttgctggtaaaggcagcgacagcgggtacaagatgaagcgcgaaatgttgtcaccggcatacacgacaaattttagtcagttgccggtggtgaaaagttaa

SEQ ID NO: 273623 - DNA, 153 bp, Morganella morganii
atgggctggtttgaggctgcagacttaatcgttaaaggaatggaaggggcaatcgctgccaagaccgttacttacgatttcgaacgtctgatggaaggcgctaaactcctgaaatgctcagagtttggtgacgcaatcatcaaacacatgtaa

SEQ ID NO: 273624 - DNA, 1008 bp, Morganella morganii
gtggctttatataacatttccaacaaaacattgacacctttagagagaactgcgttttctattgagggattgcaagagcgttatgatttgcaagaggcaattaaaaacaacatcaccatattggcacctgattgtcttgtcatcgccgaagaattctctgattgggaagatagtcgccgaaggattgatatattagctattgataaacaggcaaaccttgtagtaatagagttaaaacgtgacgagattggtgctcatatggagctccaagcattaagatatgcggcgatgatatcgacaatgagtttttctaaggcatgtgaatattatcaggactatcttcataaaaacaatattgatatcgatgctaaagaaaaaatactagactttgttgaacttcaagatacagagcttgccgactttggaaaagatataagagtcatattggcatcggctggatttagtaaggaacttactactacggcaatctggttaagagataaaggcgttgatattagttgcgtaaaaataacaccttataatttcaaaggtgaagttctaatcaatgcagagcagataataccggtccccgagttgaatgaataccaagttaaatttagagagaagcgtatagagcagattgccagctcgaaaaaatcagagaaggattattcaagttatagatacaaaggacttgttctaaacaaaagaaatcttgcattagaaatttttactgattggatagaaaagaataatcctgctaacttcgatgagttgagaaaaaaattatttggcgtcataaaaaaccgtactatagctctagctgaatgtattagtgatgagagaaaaaatcgataccacatgaatgacgatgatctgattgagctcgaatcaggtgaagtaatagtaatatccaatcaatggggtataggtaacattgaacgagttttggacttttttagcaaagatggctttgttgtcgaaaaagttgaggttgaacagaaataa

SEQ ID NO: 273625 - DNA, 345 bp, Morganella morganii
atgaacagcacgtatataaaccccgtgattgcgggtttgaatgtccgttcggtattgattgatgtattcaaagaggcacagcatgccagtgaagttccgacgggatataacccagccctcgcaacaaagcaaccgtgtcagacactcaatatcagcctgcgggatgtgattgccggatgccgtgatctgtatgtcagcaaatatttagtccactacacacggattacatcacagtcacaacccggcggccaggtaaccgcaaataccctgaccaccaactttaaaaaagccagggataaaaccgatatcgactggagagatggtacaccggcaacaaggaattaa

SEQ ID NO: 273626 - DNA, 357 bp, Morganella morganii
atgaaaaagaacgatctgattgattatattcagcataactacggcacatcccctgattatccgtggattaaatatccggattatgccgtattcaggcaccgggggagttccgggtggtttgctcttattatgtcagtatctgctgataaaataggtgccggagacgcaaagacggtggcggatattattaatgttaaggttgcgcccgaactggtgggttctctccgcttaaaagagggcgtctatcctgcatatcatatgaataaagaacattgggtcacaataatactggatggaaagtttaacagcggggaactgaaatcactgattgatgatagttacaggctgacgcagtaa

SEQ ID NO: 273627 - DNA, 459 bp, Morganella morganii
atgcagaacattagttctttttcattatttccggcattatctgacagcttgctgtcaacgcgttttgatcagatggatcgtttattcagccagcttacgggcaacagaccaataacctcagaacatccgtataacctgaagcaattaaatgatgcgcgttatcagttgacggttagtgttcccggctacagggacgatgatcttgaggtatcactgaaaggcggcaagctcagtattcagggcaaacagcctgctgaagtggttaatgaatcagagaaatgggtacatcaggggatagtaaaaaatcagttttcattagaatttaaccttggtaagaatgttaaaatccaaaatgcagagttatcctgcggattattgacattggatatagagtatgaaattccggaagaagaaaagccacagttaatcgctattgaaaataaagataccaaggcttaa

SEQ ID NO: 273628 - DNA, 207 bp, Morganella morganii
atgcacaaaactaaggcattattatttatcgtcttctttttcctggtagcaggctgttcaccaaaaaccaggcaccagccggaacaaaatgtatgcgtaatcaaaatggatacgccggaagggaaccagcccgggaaaatagatcaggtcgatggaatcagccctgagtgcagagctgtcgaaaaatcaataagcaaagctatttga

SEQ ID NO: 273629 - DNA, 381 bp, Morganella morganii
gtggcagcttcaacattatcccaacagttacgcgacggtaatttatttgccgcgcaatgcccttcccgggaaattcttaaacatgtaacaagccgctgggggatactgattttaatttcccttcgtgacgggacacaccgtttcagcgatttacgacgcaaaatcggcggaataagtgagaaaatgttagctcagtcattacaggcgctggaacaggatggcttcattaatcgcgtgtcatatccggtattaccgccccacgtcgagtatacactgaccgattccggtgaacagataagtgaaaaagtcgccatactggcagactggatagaaataaatcttccggacatactggcgcaaaaggaaagcaaaacagtatag

SEQ ID NO: 273630 - DNA, 849 bp, Morganella morganii
atgattgcgattaccggtgcaacaggcctcctgggccaacatgttattgaaaaccttctgcaaacagtcccggcaggccagattgtggcgattgtccgtaatccggcaaaaggtgcatccctgagccggaaaggcatttctgtacgtcaggctgattacaatgatgaagcatcattaatcagggcgttacagggggttgagaaactgcttctgatttcctccagcgaaatcgggcagcgagtcacgcagcatcgtaatgtgattaatgctgcaaaatcagccaatgtgaaatttattgcctataccagtttgttacatgccgatacctctccgctgagtttgcatactgagcatgtggaaacagaaaaaatgctggctgattccggtatcctgtatacccttttgcgcaatggctggtatacggaaaactatctggccagtgtgcctgctgcgcttgagcatggtgtctttattggtgcggccggagacggaaaaatcgcttccgcagccagagctgattatgcggcggttgccgcccgtgttatcagtgaagacgggcatgcgggtaaggtgtatgagcttgccggagatgaggcgtggacattaagccacctggcgaaagaactgactgaacagagcggaaagaatgttgtgtatcagaatttaagtcaggctgattttgttgctgcactgaaaaatgcgggtctgcctgataaattgtctgagatgcttgctgactctgacattggtgcgtccgaaggaggattgttcgatgatagtcatactctgagtaaactgattggacgaccaacaacaacacttgctgagagcatcaaaagtattctgtaa

SEQ ID NO: 273631 - DNA, 273 bp, Morganella morganii
atgaaagatattaattttattgtagggcagaatatccgcgacctaagataccgtaatggcttgactacaaagatgttagctaaaatgctgggggtctcacagcagcagttgtcaaggtatgaacggggtgttaataaaatagatgtcagtgttgtatttaagataataaatatatttcatgtgtcttatgaatatctgtttcctgaagctcagaatgattatactgaatcagtaaaaagctcctttgtatatatggagcctttagcaatctga

SEQ ID NO: 273632 - DNA, 357 bp, Morganella morganii
atgaaaaagaacgatctgattgaatatatccggactaattacggctcagcccctgactatccgtggattaaatatccggattatgcggtattcaggcaccacggaaatgccaaatggtttgctatcataatgtcagtatctgctgataaaataggcgccggagacgcagagaaagtagtggatattgttaatgttaaagctgtaccggaaatggttggctctctccgcttaaaggatggcatctatcctgcgtatcacatgaacaaagaacactgggttacgataatactggatgctgaattcagcagtgaagaactgaagtcattaattgatgatagttacagactgacctggtaa

SEQ ID NO: 273633 - DNA, 1047 bp, Morganella morganii
atgatgaaaaagtatctgattgggtttattgctgtcattttttcattctccggccaggcggcgcgggagtttacagatcagctggggcgcaaggttgttattgatgatcatgttgagcgcgtggctgttcttcagcatcagacactgaatttactggttcagctggatgcaacggacaaaattgtgggtgtgatgggaaactggcgtgagcagctcggtcaaaattatgaacggctggcgcctgaactagtgaaagtgcccaatgtaggcgatctgaaaagtgtcaatcttgaaagtctggtgcagctgaaaccgcaggtggtttttgtcactaattatgcgccacaggaaatgatcgataaaattacgcaggtgggtatcccggttatcgccatttcactgcagaaagacaacagcagccacgctaagaataatgtgaatcctgagcttgataatgaagagcaagcctacaatgacgggctgaaagaagggattaccctgattggtgatatcgttaataagccggacaatgcaaaagagctgattaaacaaacctttgacagcagggatatagtcgcccgtcgcctgaaagatattcctgaaaatcagcgtgtccgggcttatatggcaaacccggatttaaccacttacggttcaggaaaatataccggtttaatgatgcagcatgccggcgcaatgaatgttgccgctgcgaccattaaggggtataaacaggtttctctcgagcaggttatcagctggaacccggaagttatttttattcaggatcgctacccgggcgttgttgacgaaattaataacgacccccgctggcaggttattgatgcagtgaaaaacaaacgtgtttatttaatgccggaatatgccaaagcctggggatatcctatgccggaagcgatggcaatcggtgagctttggatggtggctaaattgtatccgcagaaatttgccgatattgatgtggatgcaagagtgaataactggtatcagaaattctatcgcactcaatatcagggcagtcattaa

SEQ ID NO: 273634 - DNA, 714 bp, Morganella morganii
atgcatattatggcggccggcagtctgcggggagcactgactgccattttaaccggttattccggtaataaaataccgccggtaacctgtgattttggtccggcaggtttattgcggaaaaaaattgaatccggggtaaagtgtgacctgtttttgtccgcggatcgggcacatccggaagcattactccggaataatatcgtattcagggttgagccttttattgccaattacttagggatcaccaccactactgaattagctgaacagtatcctgactggcagcaattactgcgtgctccggatttaattatcggtacctcaacgccggttgatgatccctgtggggattatgtggtgcagttttattctgaactcagtaaagccgatccggaactggcggaaaatatccgcaatcgtacacggcatctggtgggcggaaaaaattccccggtgatccccgcaggacaagtggcgtctcagtggctgattcattctcatcaggcagatgtatttattggttaccggcactatcagaaaaaaacgtcagaacttcccgggctcgcgacaatcgctattccggaagcagataatattaaggcaatatattgtatggccttaatgtcgccgctggctcagactttcgctgattacctgttacagactgaatcacaacagatttttatagaaaatggttttgtgtctcttagctga

SEQ ID NO: 273635 - DNA, 588 bp, Morganella morganii
atgccggggctgagagtgaaaggaaaaaacgttattattgttcacggttatactgcatcaccggcagataactggtttccgtggttaaaaaaagaactggaattgcgtggtgccacagttgccgttcctgcgatgccggaaccgcattctcccgatccgcaaaaatggcagcaatgccttatcagcaacaatataacagcggatggaaatacaatttttgtcggacacagtcttggttgtattacggtgctgcgatatatcgccgaacatattccggaagggacaaaactgggtggttatattttagtctccggctttgattgcagtcaggaaacattacctgagctggaggcgcatgttcagtatcctctggattatactaagctgacagagatttctgataaacgaatttcagtcatatcttccgacgactgggtggtcagcccgcaggcatcgaaaacgctggcggagtcgttgcagactcaggttattgttgaaaataacgccggacattttctggacagggaaggatatactgagtttccggcgctgcttaatatattcagaactgtcttttctgtttcctga

SEQ ID NO: 273636 - DNA, 159 bp, Morganella morganii
atgctgtttatttcaatatgtcgcgggattatgggagcacttggctacggtactgtattaataaatggggagtcagtcaccggtattacgactctgccggcttctgtactgattggtacgctgtttattggtgcgtttactgttatttccatcctttaa

SEQ ID NO: 273637 - DNA, 396 bp, Morganella morganii
atgcattatgtagttatatctcatttgtcattatgtcttcttgtcggatgtgctgaagcaggcaataaaactaacgctgaattaaccgtcgccaccaaaaaaacacctgaaaaccttatgaataagacgactggtaagccgacctatatgcttgccgggcattcgaaatttgaacaggatgcagagaaaagccgaaataaacagaatgaactttttaaagccggattaaaggagagcagaaataccggcatcgatagtgatttttcttataagcctgcgaaatttccttcttatgcatatggccagtatgcatcgccggaatttgtctggaatagtgaaaaacagctctatgaagtaaaaccatcagccagcatgaccttaacaataaccccttga

SEQ ID NO: 273638 - DNA, 222 bp, Morganella morganii
atgtttccggaataccgtgatttgatctcccatcttcgccaaaatagtcatcagtttcgcacgctgtttgataaacacaatcaactcgatcatgaaattgcccgtctggaaaaatcagacagaagcggctacagtgaggaagtggtggaactgaaaaaacagaaattacgcctgaaagaagaaatccaccagcttcttaaagatccgccggaagatgactga

SEQ ID NO: 273639 - DNA, 489 bp, Morganella morganii
atgatttgttaccggcagatggttaatacagattgcgggcaggtagctgcattattacaggagaatgctcagtcacggcagggcggattgctgggggaatatcccctgcagaaagttgaaaatatgtttgcgcatgcactgacggtgattattgcacaggatgatgacgtgattgccggggtggtgttcagttttccggtacagtccgcacaaatatcgccggtgaccgcggtgatttcacagcaattcggtgagttactggaaaataactggttttacggcccggtctgtattgcggcagattatcgcggacagggaattttaccggcgctgtatcagcggctatgtgcagaaaacagcggaaaaccggttgcctttattaatcaggataatgaacgttcggttcgtgcacatctgaaatccggtatgaaagaagccggtcattttatctgtgataataccccttacttattgatgattggccgctga

SEQ ID NO: 273640 - DNA, 186 bp, Morganella morganii
atggggtattacgagttaaaaaaatcaaccaaagatataccgcagccgtactatttcgttttgaaagccggaaaccatgaaattatcgccaccagcgaaatgtatgcctcaaagcagggggcaatgaatggtatcgcgtctgtacagaaaaatggcccttctgaagtgattaaagatttgacctga

SEQ ID NO: 273641 - DNA, 600 bp, Morganella morganii
atgatagaaaatcatcttaacattttcataaaagcagcctttattgagaatatggcactaagttttttcctcggaatgtgtaccttccttgccgtatccaaagaggttaatacctcttttaaactcgggctgaccgtcgtttttcttctgaccgttgccacaccaatcaacaacttaatttatcattacctgctgtctgatggcgcaattattaagggtatcgatctctcttttctgtcatttgttacttttattgctgttttggctgctttggttcagattctggaaatgtttcttgataaattcattccgtccctctatcactcactcggtgtttttctgcctctgctgactatccactgcgctattttcggcgccaccatttttatgattgaacggcattatacctttactgaagccattacatatggtgcaggctgcggtataggctggctgctggccattacggcgctcgcaggattaagggagaaaatgaagtattcagatattccggcaggattacgcgggctgggtattacctttatctccgccgggctgatgtctctcggttttatgtcattttccggtatttctctgtaa

SEQ ID NO: 273642 - DNA, 219 bp, Morganella morganii
atgaaatcagtcaaaaataaatgcgtgatagccttgcttgatcactattttcctgagttatccgctgatttatccggttacaatgttgcggagaataattgtttttttagcgtaagagtctggattaaaaacgaaatttatcctgattatattatttttgagaagtgtgatgtgtcaggagagctgtatctgattaaatcactgtcaaactgctgttaa

SEQ ID NO: 273643 - DNA, 876 bp, Morganella morganii
atgcaaaagcagattgcccgcctgctgtttatagtatgggtaacaattatgttcagcggggtggtttctgtgtttttactcttatttgcgtgtggctgtattgtcgggtcgacaacggtattgtttggttttggcggcggattttttattgttccgctgctttatgcattgttaacagccacggcagacagccataccgcagcggcggctatgaatattgcagtggcaacatccaccggagtgatgatattcagcgcgtcaatggcaacccttcgtcagcaccgcgccggaatgattaactggccgcaggtacgcccgctggcgggatatattgctgccggtgcggtagccggtgcgctgctggcgattgcagttcaggggctatgggttaagtggatgtttattgcttaccttgctatcactattctggacagtattttccgccccggctttatgacacagtcaggatctcatctgcggacaatgtcagcgggtgctgttgcggtggccggtactgtgattggtgtggtggctgcatttctgggggtgggcggcagtgtgatgaccgttccgctgatgcgccgccgtggtgcggaaatggcacaggcgacggcaatggctaatccgctgtctttgccgatggcactggccggtacgctgacttatattttgctggcccgccatgaaacggcggcattcggcagcggttttgccggttatgtggatattcaggcttttatgttactgattgccggatcctggctggggcaaaaactcagcgcgccgctgattggccggatcccggataaactctatgctaaatcttatctggcgttgctgatatttgtgcttctggtgatggtggttgtgcaataa

SEQ ID NO: 273644 - DNA, 219 bp, Morganella morganii
atgaaacattcagcccttattgttgcaactctggccggtttattctctttcggtgcaatggcatcgactccggcaccggcagtttccgcggcacattccggtattaccgccactaaagcggacagccatgcaaaagccgtaaaacacgaagcaaaagtaaaaagtgaaaaaggaaaaaaagcgaaaaaagttaaagaggaaaaacagggcgcaatctga

SEQ ID NO: 273645 - DNA, 171 bp, Morganella morganii
atgaatacaaatcagagtgatatcgataaagccgcagcaaaaatcatcaaaggcatggagcgtattaaccgctttgcggataattacactgcatatctttcagaaaaagacaagatgcaactgatccggctgacagaagaattacaaaaaaaacttaatccgggaaaataa

SEQ ID NO: 273646 - DNA, 1272 bp, Morganella morganii
atgaaaacagcaaacacagcaataccggcagggttctctttacaggagcgggatcgccgctgggatctggcgcgtgacatcatgcgccagcgtaatctggatgttctgattgtttatggtgaccgggaatctgctgctccggcaccgttctgcgtggatcactattttaccaatgaccgcctcgggtctgtggtgatcttttatcaggacaatgacccggttgtggtgacatttgcgccgatgatgattgctgaccatatgcaggccgcattacggggggacaatcagtggttgtcgccgtcacagattatggtcggtaaaaccggacgtaatatcggggcactgctccgggagatgaatgtaccggcgacggcgcaaatcggcgtgatcgggctggagccgtatccgccgttctattttgacggtgcgatgccgttcaataccctgaccgggattaaagaagcgtatccgcaggcggcgattgtaccggtttaccgtgacttttttgtccgcgcttccgtaaaaagtgaggaagagctggcacatatccgtcacgctgccgccatcggtgaagcgatgagtgaagccatgcgtgtgacagcagtaccgggaaacagtgaggcagatattgcggcggcagtcactgccacctgtttatctgcggggggatttacggcggagatcctgatggggtccgacccggaatatatcggctggggtcagcctgcctggcagtaccgctcacagaaaccccgggagattgagcgcggtgatattgtgttgtcagaaattttcgcactgtacggaatgtatgaaacccagcatcaggcggcggttgcggtcggtaacattcatcctcagctggagaaagcggcacaggtcgcccgggaatgttatgacatcggggtgtcatatctgaaagagggtgtgacattcggggaagtggtcgatgagatggaaaaaccgttgctggcttccggcggctggcatgtgcatccgctgatccacagcatcaatccgtatggtccgatcgggtttggtactgcgccggggattgaatcgctgccgctggtatcccgttaccgcaaagtagagcgtctgccgaatcccggccgggaactggtgctgaaggcagggatgagctttgcatttgaaccgaattgtgcctttggttatcatctgtgtaaccttggcggtacggtcattgtcgggaaaaacggcggaattgagcttaatgataattccacccggctgatgcgtgctgatctctga

SEQ ID NO: 273647 - DNA, 663 bp, Morganella morganii
atgaataaacatacgctctcctcagagcagaccagagagaaactgatacaggcggggatccgcctgtttgccctcagcggtgtcagcggtgtccggacccggcagctggcggaggaggcgggtgtgaatcagtcagccattccgtatcatctgggcggtaagtcgggcgtgtatgcggcagtgatccggaaaattaccgatgacctggccgcggtgacggatgtcagcaggatcgatgctgccacagaggcactgacggaacaggcgcagccgggcaaaacggcactgaaaacggtactgatcagtatggtcaccgggctgtgcaaggcattgttatcgccggaacgtgcgctgtatggcacgctgatcctgcgggaacagctggagcagactgaaaattatgatgtcatttatcagtcatttattgaaccttttcataagcggctctctctgctggcacagctcgcagatccgcaggcggatacaaaaacaaccattatcagggcacacgccctgatagggcagattctggggtttgtggtggcacgaaaggcgtatttgtgccgcagtgaaacggaatctgtcagtgaggatgaactggctgaaatcaccgggcagattgtactgctttcctgccgggctctgggactggatgaggcgtga

SEQ ID NO: 273648 - DNA, 816 bp, Morganella morganii
atgaaaaagcaattctctctgtttttttccggtgctgttttagcactgggatttttactgtcaggctgtgataagggcacaactgacatgacaaaaattaaagtcggtgtgattaatggcgccgagcaggatgtggctgaggttgccaaaaaagtggccaaagaaaaatacggactggatgtcgaactggtcggtttcagcggttcattgttaccgaatgacccgacggccaatggtgatcttgatgccaacgtcttccagcatcgtccgttcctggcccaggataataacgccagaggttataacctggtcgccgtggcaaatacctttgtctttccgatggccggttattccgataaaattaaaaatatcagtgaattaaaaaccggtgataccattgccatgccgaatgacccgacaaacctgggtcgcgcattattattaatggaaaaagagaaactgattaaattaaaatccggcaccggtttattaccgaccgcgctggatattactgaaaatccgctgaaactgaatatcatggagctggaaggcgctcagttgccccgtgtgattaaagatccgaaagtcacagtagccattatcagtaccacctatattcagcagaccggtttatcaccggtaaaagacagtgtgtttatcgaagataaagaatcaccgtacgtcaatattattgtaacccgtgaagataataaagacgcggagaatgtacaaaaatttattaaagcttatcagtcaccggaagttgccaaagccgcggaaacgctgtttaacggcggcgccgttcccggctggtaa

SEQ ID NO: 273649 - DNA, 216 bp, Morganella morganii
atgccaaataaaatcttttcaccaaaatataatccggtagagcgggtggcttttgatatggcactggcacttgcatcaaaaattgaatcagttaacacaccagcacaattaatggccgagatcgcggcactgtatcctgaatgctacaaagcggctgataaccagcgtaagcgggaatacctcggatcacacgtcaaattgcattcggtcggataa

SEQ ID NO: 273650 - DNA, 246 bp, Morganella morganii
atgagttgccgcggatatcagtgtgccagagcccgccgggctgcacgcagacaacaactacaggcggaataccggcttaatgcagcactgaaagctgccatcaacggagaatgcaatgaaaaaccgccggtcttatctctgaacaggcgtccgatggacagagtcacaaaagcactctctgtccgccgtacttatgctgtaaattcgcccgtcattgacaacattatccgaccgaatgcaatttga

SEQ ID NO: 273651 - DNA, 708 bp, Morganella morganii
atgaatgaaaaacgacaactgacgacagaacagctggcagactgccgaagactgaaagctttgtatgagtcaaagaaaaaagagctgggtatcacccagcagagcattgctgacatactgaatatcagccagggcgccgtcggtcactatcttaacggccgtaatgcattgaatttgcagacagcaagtgtgttcgccacgcaactcaatgtccctatttctgatttcagtccgtctcttgccgcagaggcacaggcactgagtgccgctattgacagcaacatttccggtcttcgcccttataaaccctccccgagatacccgttaatcagttgggtacaggcgggtgcctggaatgaggcgaatgaagcttacgggctggatcaaatcgacgaatggtatgaatcggaaacccatgttcagggggccgcattctggctgagagtcgaaggcgaatccatgaccgcaccaaccggcaagagtgtgcctgacggctctttgatcctgatcgacaccggcaaagattccgaaaacggtagcctggtcgtcgcaaagctgacggactccaacgaagcaacgttcaaaaaactggtgatcgatggcggcaactggtatctgaaaggacttaacccgacgtggccggccatgaaagttaacggtgactgtaaaattatcggtgttgctgttcagatgatgatgaagctgtaa

SEQ ID NO: 273652 - DNA, 438 bp, Morganella morganii
atgactgaggaaaaatttaaaatatacgtcaatattatccgggcctgccgggattatgatttctttaccaactgtgatgctgcgcgatatacggagacatctgaaatctttatccgcacatatactactattctgcataaaatcggcagtctgataaaaacagggatggttaagcaggggcggcattatattccgcaatatgctgtggcaccggatgctgtcacgcgtttgtaccgctatgtccgtgaaatcagaggggaacctgaacccaacccgataatgaaatgtccgtcaaagggaatgaaacggattaaattctgcggacgggtggtcaataaagcctttatttctccggagttcggacgttctgcgattaccgatattgattcacgattaaaggcagtaagaaataaagatccggaaacggttttacattaa

SEQ ID NO: 273653 - DNA, 195 bp, Morganella morganii
atgagcatgtcagataaatattccgggcccgcagcatatacctgggggcttatcacttccgttttgggtgtgttatcgccggatcagtgggcagtccttatcgggattgtctgcaccatcggtacattttttatcaattggtattaccgacggaaagagtttcagataaaagccggagatcatcatgaagaataa

SEQ ID NO: 273654 - DNA, 408 bp, Morganella morganii
atgaagaataatctgagtaaaaaagtcattgctgcagcagcaggcggcgcaatttctgccgctctggtgctgattccggcctatgaaggcgtggaataccggccctaccgcgatgtggccggggtgctgactgtctgttacgggaataccggcagtgatattcaggccggaaagatttatacggcggatgaatgccgggcgctgctttaccgtgacctggataaaatccgccgcgcggttgatccgatgatcacggttcctgtggatgacaccacccgggctgccatctattcctttgtttacaacgtcggcccgggggcgttttcctgctcttcgatgctgcgaaaactgaacaacggtgatattgccgggacatccgcaggcggctgttattcactatcagtgtga

SEQ ID NO: 273655 - DNA, 192 bp, Morganella morganii
atgatgtccggccataaaagccacccgggtcagattattgacagccaactgctggtcatacttatctttcagtatcaggtaattacctttttcaccgctgtacagatgcagtgtcagcagcaggccggtcagtattacaatgcagagaccggccagtatttttgtcagtatattcatggggtttcacactga

SEQ ID NO: 273656 - DNA, 318 bp, Morganella morganii
atgttaagacaattatcaaaacagtacttaaagaggatgaatgtgctgccacttctgtgcctggcagtgttaccggcaggttgcagcaatacgaaagagacattcgtgcccgcgccggtggtgccggttccggctcatcttctcgctgactgcctgctgccggttatcccggatgaactgacttacggcggcgcgatcctgctgctgacagatgcgatgaaaacaatcgcggactgtaatcacgataaacgggtaatacgggagtttgagcagatgcgggcttccggagcggaaagtaacaaaggaaatgtgctgtga

SEQ ID NO: 273657 - DNA, 129 bp, Morganella morganii
atgaaatccggtacaataaagtatggtgttatcagtctgctttttctgactttgacaggcgttgcgagtgcggatgtttatcgtgatcgcagcggtaatgtaaccggaacacagcaaaagcaaaattaa

SEQ ID NO: 273658 - DNA, 198 bp, Morganella morganii
atgtctgatggtatggccggttttgcggcgggtcatatgttaacgctcaaccccgcattctatcaagtctttatttccgctttgttttttctccgtttccggttgccggtgcgttttttatgtggtgcgccggtcccggatgtacagattgagtgcattacctgcgggatcccggggggccggctgtatttatggtaa

SEQ ID NO: 273659 - DNA, 966 bp, Morganella morganii
atgtcatcggatataaaccggtatgaaccatcaggctccctgcggcgtaacaagcgggtatcgggtcatcagctgtcacgtctgcatactttcgaagcggcggcacggcacagctcatttgcactggcagcacaggaactggcgctgacccccggtgcggtcagtcaccgcatcaatatgcttgaaagcgaactgggtttccggttatttgagcgttttcaccggcgggttgaactcacatcagacggtgaacgcatctactgggcattacggaaaaacctggatgacattaaccaggaaatcattgatatcaaaaatcaggaaatttccggcgagttaaccgtctattcccgcccgtcactggcgcaatgctggctgattccggggatcgcggattttacggatcaataccctgctattcagctgaatctgttaaccggtaatgatgatgtcaattttcgcggctatggcattgatatcgcaatttattacgatgatatatcaagacctaatctctattgcgaggatttgatgtcagaatcaatcgtgccggtttgcagcccggaatatgcgaaacgttatgagctgcataacaatattcatcagctcaggaactgcatgttattgcatgaccgccaggcatggagcagtaactcagattacgacgaatggaaagcctggagtgaacactatcagcctgatttgttccctcaccggcgcaatctgtgttttgatcgttcagatttggcgattgtggccgcgatgaatcatgccggtgtcgcgatgggacgtaaacaactggtggaaaaacgtattcagagcaggatgctggtgatgcccttcggcgatatttcactgacatgcagtcagcgatattactttgctatgctcggagacaggcgtaatccgaaagcagatatctttatttcgtggctgaaacaaaaggttacgaagacattaccataa

SEQ ID NO: 273660 - DNA, 1338 bp, Morganella morganii
atggactctgtaatgtggatgatcggcacgctggttttcagtatcttgctgatcattatttcaattattaaatttaagtttcacccgtttttagcattgctgctcaccagcttttttgtcgggatcgccatgaatatggaaccgcaggatatggtcagcgccatcgaaaacgggattggcgggacactcggatttttggcggccattatcggactggggaccatactcggaaagatgatggaaatatccggcgctgctgagcgaatcgggatcacgctggaaaaatgccgctggttaagtcccgatgtcaccatgatattgatcggccttatttgtggtatcacactgtttgtcgaagtcggggttgtattactgatccctctggcgttttcgattgccaaaaaaacaaatacctcattattaaaactggcaattccgttatgtacggcgctgatggccgtacactgcattattccgccgcaccctgctgcgttatttgtcaccaatgaactcggcgcggatatcggaacggtgattgtggccggattagcggtgggactggttgcatcactgattggcggaccgctgttcctgaaattttttggggatcgtttaccgttcaaagttgtaccggccgcgtttgctgacctgaaagtgcgtgaagaaaaagacttaccttcattaggcgcggcgttatttacggttctgctgccgattgtgctcatgctgataaaaacaaccgctgatttaaacatgagcaaagatagcccgttattcacctttttacagtttatcggtaatccgataaccgccatgtttatcgccgcgtttgccgcttattacgtattgggtatccgccgtcatatgggaatgagcgtcctgctcagcaaaacggaagaaagctttagttcgattgcgaatatcttattgattatcggggcaggaggtgcatttaacggcatcctgaaaggcagcgggctgagtgattctctggcgctggtgctgtccggtatcgatatacatccgattttacttgcctggctggtggctatcattcttcatgccgcagtcggatcagcaactgtcgccatgatgggcgcgaccgcaatcgtggctcctctgatgccgctgtacccgcatatcagtcctgaaattatgacgctggctatcggctccggggcaatcggctgcaccattgtgactgattccttattctggctggtgaaacaatattgtaatgccacgctggcggaaacattccgttattacagtgtcgccacgctgattgcgtccgttgtcgcgctggccggcacctttgcactttcctatgtgatttaa

SEQ ID NO: 273661 - DNA, 1335 bp, Morganella morganii
atgactcagattaatattgaaaagttaattgctgactatccattggttcaggaactgattgatttaaaacaggtggcatggttcaaccccgtcgtaaccaccacggaagcgggtttaccgtatgtgggactgacactagaggatgtgaaggatgcacaagcacgcttaagccgctttgccccgtatctgatgaaagcttttcctgaaacacaggtcatgcaggggatcattgaatctgacacggtagcgattccgcagatgcaggcggctcttgcggcacgttatcagacgccgctgacagggaaaatgtatctcaagaaagacagtcatttgccgatctccggttcgataaaagcgcgcggcgggatctatgaagtgctgactcatgcggaaaaactggcgctggaggcaggattgctgtcaaccggtgatgattatgcggtgttattctctgatgaattcaggcagtttttcagtcagtatcgtattgctgtcggatcaaccggtaacttagggatgtccatcggcattatgagcgcgaaactgggtttcagtgtcagtgtgcacatgtctgcagatgccagacaatggaaaaaagacaaattacgttctcacggtgttaatgttgttgaatatgaacaggattacagtatcgcggtggagcaggggcgtaaggaagccgaaaaagatccgtcctgcttctttattgatgatgagaactcctcaacactctttttaggctatgcggtggcgggtctgcggctgaaaacgcaatttgctgaaaaagggattaccgttgatgagcagcatccgctgtttgtgtatttaccgtgtggtgtcggcggtggccccggcggtgttgcattcggattaaaactggcatttggtgacgcggtacattgtttctttgcggaaccgacgcattcaccctgtatgctgctcggggtgcataccggtcttcatgatgctatctctgttcaggaaatcggtattgacaatattactgcggccgatggtctcgcggtcggcagggcatccggatttgtcggccgggcaatggagcggctgatcgacggttattacactattgatgatgcggaaatgtataacctgctgggattgcttgatcagacagaagctatccggctggaaccttccgctttagcgggcatgcccggttgtgtgcatgtgacccggaatcaggcgtatttacaggctgaatcgctgacaccggaacggatggcgaatgccatacatctggtttgggcaaccggcggcgggatggttccggaagatgagatgcagaaatatttatcacaggccaaaggtaactga

SEQ ID NO: 273662 - DNA, 810 bp, Morganella morganii
atgaataaaaaagtcggatttattggttgcggaaatatgggaaaagccatccttaacggcctgatttcaggaaaaattatttcccctgatactgtttttgtacataaccacagcccggccagtaccaaccgcgtggcgcaggaattcggtgttcacggtgaggcacaagcgcagcgggtggcggaacaatccgatattatttttataggtgtaaagccttacgccgttcccggtgtattacgtgatatttccccttgcctgaaagcggataccctaattgtttcaatggccgccggtgtgactctggaagctctggaagccgccctgccgccatccgccaaagtggtccgtctgatgccgaacacccccgcgctggtcaatgccgggatgacatccgttaccgttaatgcttatctgacggatgaagaaactgagctggtaatgtcactgtgccgcagtttcggacgtgccgaattagtaccggaatcgctgattgatgccgtaatcggtgtcagcgggtctgctcctgcgtatgtttttatgtttattgaagcaatggcagatgcggctgtggctggcggtatgcctcgaaaacaagcctatgaatttgcagcacaaaccgtaatgggtgcggcaaaaatggttctcgaaaccggcacacatccgggtgaactgaaagatatggtctgctcgccgggcggcaccacgattgaagcagtcatcaaactggaagaaatgggtttacgtcaggcggtgatagccggtgtccgcagtgcgacagaaaaatcacaggaaatgagccgtaaataa

SEQ ID NO: 273663 - DNA, 759 bp, Morganella morganii
atgaagtatcaggtaagtggcctgacacttgctgcggtgctgctgattggcgggtgcgcaagttcggatcagacaccgggaacgcgcagtgatccgctcgaaggatttaaccgctcaatgttcaattttaactataacgtgctggatccttatgtgctcagaccggtggcggttgcctggcgggattatgtgccgacaccggcgcgtaacggcaccatcaacttcctcggtaacctcgaagaaccagccagtatggtaaacaattttctgcgcggggatttttaccagggatttaagcactttaaccgcttcttcctcaacacagtctttggcctgggcggcctgattgatgtcgcgtctatggcgaaccctgaactggcgaaaacggaaccggcacggtttggtaataccctgggttattatggtatgggttatggtccgtatgtggttattccgggttatggcggcgcaacaccgcgtgtggatggcggcgactggctggataccacgtatccgatgctgagttacctgactatctggatgggtgtcggtaaatgggctatcgaagggatcgataaccgtgctcaggcactggatgcggaaggggtgctgcataactccagcgatccgtatctgatgatgcgtgaagcttatttccagcgcaatgacttcctggcctccggcggggcactgaaagtgcaggaaaacccgaatgcggcagcgattgctgatgagctggattctatcgacagcgaataa

SEQ ID NO: 273664 - DNA, 1341 bp, Morganella morganii
atgaaccagaaaaacctgttcactcgttcagcactggcagtggcagtttcattaacagcaactcaggcttttgcggcgggttttcaattaaatgagtattccacgtctgcactcggacgtgcgttttcaggggaaggtgccgtggcagatgatgccagcgtcggcagccgcaacccggcagcaatgacattatttgatcgcccgtccatgtccgccggtgcgatcctgatcaacccgtcagtggatatcagcggtaagtccccgctgaccggtaacagcactgacgccaaagatatcgcgccaagcgcggttgtcccgaacctgcattttattatgccgattaatgaaaaatggtcagtcggcgcatcaaccaccacaaacttcggcctggcaacagagtttaaagataactactctgccggtgctatcggtggcaaaaccgatctcgtgactgccaactttaacgtagcgggtgcttaccgtctgaatgacaatttcagttttggtctggggctgaatgcggtttacgctgatgcggaaatctcgcgtcataccggtgagctgggccaggttgcagccgggttgaccaaaaatcctgcattagcaaaaattcctgcaaactctaaccttgccaagctgaaaggtgacggctggggttacggctggaatgcggggatgttatatgagctggataaagataaccgtttcagtctgacatatcgctctaaagtcactgtgaaatttaaagacggtgatttcactcaaaacattccgggtcttcttgaccattccaccaagggtaaactggatctgaatttaccggatatctgggaattctctgcttatcaccgtgttgcaccaaaatgggcggttcattatacctttgcttacaccggctgggattcattccaggagctgaaagcaacagataaaggcaacggcaacgtcctgtttgaaaagcatgaaggtttcaaaaatgcataccgcgtggcattaggtaccacctattatcatgacgataactggaccttccgcggtggtgttgcctttgatgacagtcctgttccggcgaacaaccgttccatctctattccggaccaggatcgtatctggttcagcctgggctcaacctacgccttcaacaaagatgcatctgttgatgttggtgttgcctatatgcacgggcgtaaagtgaatatctcggagccgctgatgagtaaagatcagcttgctgctatcggtggcaaattgggtaatccgaacctgcaaatgccaaactacgaattcagctcctccggtaaagcctggttatacggcgttaactttaactacagcttctga

SEQ ID NO: 273665 - DNA, 297 bp, Morganella morganii
atggctgacgaaaaaaaactgtgcagcgcagaagaaaccgcagcatgctgctgtgtggatgtaggcactattattgataacgaaagctgcacctcttctttcgagcgcgtatttgcatctaaagcagacgctgagcagatgatggcagcactgactgccaaagcaaatgcagcagcatctgaaccatgcaaaatccacagcgaatataaagaaacggctgacggcgttctgctgaaagcggatttcactttcagctgccaggctgaaacactgatctttgaactgggtctgcgttaa

SEQ ID NO: 273666 - DNA, 1293 bp, Morganella morganii
atgaagcaggcacaggcagaacgcattgcagttgttgacggattacggacaccgtttgcacggcagtccacggtataccgtgatatcccggcggttgaacttggccgggcagtggtgcaggaacttctttttcgccagtcatttccggcagaattggttgaccttgtcgttttcggccaggtgatccaaatgcctgccgcgcccaatattgcccgtgaaattgtgctcagtaccgggttgccggtaaccaccgatgcgtattctgtgacccgtgcctgtgccaccagttttcaggccatcgccaatgcggcgcaggcgatacagtgcggacagaatcagatagctgtcgcaggcggggctgattccgcttctgtgctcccgattggcgtgtcgcgcaaactggccggagtattgccggatctcagtaaagcccggaaattaccgcagaaactccggttactggcctcactgcgaccgcgtgacctcctgcctgttgcccctgcggtggcagaatattccaccggtctgcgcatgggtgataccgccgaacagatggcaaaacgttaccatatcagccgtcaggcacaggatgcgtttgcccatcagtcacatcaggccgccacacaggcgtggacatccggtgttctgcgcgatgaggtgatgacagcccgttttccgccgttcagtcaggtatgtgaagaagacaatacgctgcggaaaaactctctgcccggcagctatgcacaactgaaaccggcatttgataaacgtcacggcacagtgacagcggcaaacagcactccactgacagacggcgcggcagctgttctgatgatgaccgaaacccgcgcctgtgaactcgggctgacaccgctgggttttctgcgcagttatgcatttacgggtaacgcggtgctggaggatatgctgctggggccgtcgtatgccgcaccgctggcacttgatcgcgctggtctgacattgtctgacctgacactgattgatatgcatgaagcttttgcagcccaggttctgactaatctgcactgttttgccagcggggattttgcccgtgaaaaactcaaccggacatcggcaattggtgaggtggatccggcgcggtttaatgtgctcggcgggtcaattgcttacggacatccttttgcggctaccggtgcccggatggtgacacagacactgcgggagctgcggcggcggggcggcggttttgcaatgaccaccgcctgtgcggcgggcggactcggcgtggcgatgatctgggaaacagaataa

SEQ ID NO: 273667 - DNA, 2151 bp, Morganella morganii
atgacacaacatgatgaaacaccttctgccttccgcctgaccgtgcgtccggatcacaccggggtcattactgtcgatgtcccgggtgaaaaagtgaataccctgaaggcggagtttgccgcacagtttgaggcagtactgcgtgatgcccggcaaatcccggggttacgggcaatggtgattatctccggtaaaccggatacgtttatcgccggtgcggacattcatatgatagccggatgtacagaggccgcacaggcgcaggcactgtctgaatccggtcagcggttatttaatctgattgaaaattatcctttgccggtcgtggcagcgattcacggcagttgtctcggcggcggacttgagctggccatggcctgtcacagccgtattgtcacagacagtgataaaacccggctcgggctgccggaagttcagctggggctgttacccggttccggcggtacacaacgtcttcctgccctgaccgggctggtggctgccctggatatgatgctgacagggcggcagttacgggcaaagcaggcagtcaaaatgcggctggccgatgatattgttccgccggacattttactggaaacagcggtggcccgtgctttgtcggcaaatccggcacagcgggatccggtacctttccggcagagactggaaaaaatgaaggggctgcgggatatcatcttccgtataacccgcaaacaggttcgccgccgcagtggcggactctatccggcggctgaacagattattgacgtggtgcagtgcggccttgaaaaaggccgggtggccgggtttaaagccgaagccgctgcattcggtaaactggcggtcaccccggtatccggtgcactccgtcatctcttttttgcctcaactgcactgaaaaaagagtctgccgatggggtaaaacccgcagaactgcatcatgtggcggtgctgggcggcgggctgatgggggcgggaattgccacgattacccgtcagcgtgcagggctgccggtcagaatcaaagatgtttcgcaggaaggggcaaataaagcgctggcttttttctggcagcatctgagcaaacaggttaaacacagacggctctccccgcgtgagcggacacaactgatgagcggcatgaccggcaccacggattaccggggatttcaccgcattgattttgtggcggaagcggtttttgaatctctgtcattgaagcaacagatgattgctgagatcgaggcagtgacatcaccggatactatttttgcctcgaacacctcgtcactgcctatccgtgatattgccgcgaaggcatcacggcctgaaaaagtgattggtttacattatttcagcccggccgaaaaaatgccgctggcggagattatcccccatgaaggcacagatgccgtgacactggcaaccacgttgcaactggcacgcagacagggaaaaacagcgattgtggtcggtgataaagcggggttttatgttaaccggattctggcaccttatattacggaagcactgcgttgtctgactgaaggtgaaccgccggaaaaaattgataaagcgctggctgatttcggttttccgattgggccggtagcgcttttggatgaagtgggtattgatgtcggtacgaaaattatgccggtactggaggctgcatttggtgagcggtttgcactgccgtcgcagttggatgcccttttccgtgacaaccggctgggcaggaaaaacaaacgcggattttatgattacaccccgttaccgtggtggaaacgctgtggccgtaaggcatcgcgtaaagcggataagcaaatttatccgttattgggtatcactgtacaggaacgcctgacatcacaggaaattacagaacgctgcctgatgatgatgttaaatgaggcagtaagggcgctggatgaacaggttatccgttccccggcggacggggatgtcggcgcagtgtttggtattggttttccgccgttcctcggcggaccgttttattatatggacagtatgtcagcagtcgtcatgacagaaaaactgacggcactggctgcccgctacggtgatcgcttcataccgtgtgaggcattacagcagcgggctgcggataaccgccgtttttactga

SEQ ID NO: 273668 - DNA, 372 bp, Morganella morganii
atggcaaaatggctcgccgggcagcacgttcagattgataccgttctggtcagcccgtatctgcgtgcagagcagacactgaccgaaatccatgatgcgctgagtttaccggctcaggaagaggtgatgccgggactgacgccctccgggaatgcggatagcacggcggattatatccgttttctggcggaagaggggcacaaaggggtactggtggtatcgcatctgccgctggtcggctatctggtggcggcattgtgtccgcaggaaacggcaccgatgtttgcaacatcgtctgttgcctgtattgaactggatgatgacggacgcggcacactgctctggcaccgcggtcccggacagattgactga

SEQ ID NO: 273669 - DNA, 546 bp, Morganella morganii
atgaaaaagaagacgcccctgactgatgatgacctgaacctgtttaaagaggccatcagcgggacacgtaaaatcagacaggatattgtggtgcatccgaaaccacggacaagtgtgaccaaaattgcgcctgaacggctgttgcaggatcagattgatgccagtttttatttctcagatgagtaccgcccgaacctggatatggacggtccggcgcgctatctgcgggaaaatgccagcccgtatgagctgaaaaaattgcgtcgcggggattatgtgccggagctgtttttggatctgcacggactgactcagcttcaggccaagcaggaaattggtgccctgatagccgcagcccgccgcgaaaacacctattgtgtctgtattatgcacgggcacggcaagcatgtactgaaacaacagacaccattatggctggcacaacacccggatgtgattgcctttcaccaggcccctaaggaatggggcggcaccgccgcattactgctgctgattgagattgctgaaaccgcccggcgcgagtaa

SEQ ID NO: 273670 - DNA, 930 bp, Morganella morganii
ttggataaaatttacgttgatgaagccgtcagtgagcttcacacgctgcaggatatgctgcgctgggcaatgagccgttttaatgcggccaatatttactatggccacggcacggataatgcctgggatgaagccctccagctggtactgccgacactgtttctgcctctggatttacccgctgaactgtatcagtcccggctgacctcctcagagcgtcaccgcattgtggagcgcgtactgcgccggatcaccgagcgcgtgccggtgccgtacctgactaaccgttcctggttctgcggccatgaattttatgtcgatgagcgcgtgctgatcccgcgttcaccgattggtgagctgattaacaatcactttgcaggattgctggatgctgaaccggaaacgattctcgatctctgcaccggcagcggctgtatcgcgattgcctgcgcatatgagttcccggatgcagaagtggatgcggcagacatctcagctgatgtgctggaagtcacagaaatgaacattgagaatcacggcttatctcaccgtgtggtgccgatgcgttcagatctgttcaacgatctgcccggggtgaaatatgacctgattgtcaccaatccgccgtatgtggatgcggaagacatgagtgatctgccggatgaattccgcgtagaaccagagctggcgctggctgcgggcagtgacggtctgaaactggtacgccggatcctcgccaatgccccggattatatgtcagaagatgcggtgctgatttgtgaagtcggtaacagtcaggtgcacctgatggccgaattcccggaagtgccgtttatctggctgtcgtttgaaaacgggggtgacggtgtctttatgttaactcgtgatcaattagcagaacatcatgacgcttttaaacttttcaaataa

SEQ ID NO: 273671 - DNA, 1089 bp, Morganella morganii
atggccggaaacagtatcggcgaactttttcgcgtaaccacctttggtgaatcacacggcccggcgctgggttgtattgttgacggcgtaccgccggggctggcgctgactgaagccgatatgcaggcagatcttgaccgccgccgtccgggcacatcccgctataccacgcagcgtcgtgagccggatcaggtcagaattctgtcaggggtatttgaaggaaaaaccaccggaaccagtatcgggctgctgattgaaaataccgatcaacgctcacaggattacggcgccatcaaagatctcttccggccgggacacgcggattacacctatgagcagaagtacggctttcgtgattaccgcggcggcggccgctcatcagcccgtgaaacggcgatgcgcgtggcagccggggctatcgccaaaaagtatctgcatgagaaattcggtgtgacagtccgtgcctgtctgactcagatgggggatattaaatgtgatatccgcgactgggcgctggcagagcaaaatccgtttttctgtcctgatgaacgtcagctggatgcgctggatgaattattgcgcggcctgaaaaaagagggagattccatcggtgcgaaagtcacggtagtggccgaaaatgtcccggcgggtctgggtgaaccggtctttgatcgtctggatgcggatctggcgcatgcgctgatgagcatcaacgcggtgaaaggcgtcgaaatcggggacgggttcggcgtggttaacctcaaaggcagcgaaaaccgggatgaaatttatcagaccggctttaccagcaatcacgcgggcggcattctcggcggcatcagcagtggccagccaatcatcgcgcatattgccctgaaaccgacatcatcgattaccgttcccggtaataccctgaaccggcagggcgaagaggtggctatgatcaccaaagggcgtcatgacccctgtgtcgggatacgtgctgtgccgattgccgaagcaatgacagcgattgtgctgctcgatcaccttctgcgtcaccgcggacaatgtgcggatgtcacgccgccgttaccggcctggtcatga

SEQ ID NO: 273672 - DNA, 801 bp, Morganella morganii
atggaatggtttcagttcggtgttgaaatctatgtattgctgttctttgttgcgctgattgccgggtttattgatgcgattgccggaggcggcggattactgacaatcccggcgctgctggctgtcggtgtaccgccggtacaggcactggcgaccaacaaattacaggcggtcggcggctctttctctgccagtttctattttgtccggcgcaaagcggtggatcttgcggggcaacgggtaccgataatgatgacgctgattggctcggttatcggctccgggctggtgcagtttgtgaatccggaattcctccgccagttgctgccgctgctggtgattgccatcggcctctatttcctgctgacaccctccattggcgctgctgaccagaaacagcgcctgatgccgtttgctttcggctgtaccgccggtatcggtatcggtttctatgacggtgttttcgggccgggcgcgggctctttttatgcactggcgtatgtgaccctggccggttttaacctggcgaaagccaccgctcacgccaaagtgctgaactttgcctctaacgtcggttcactctcattctttattttcagcggtcatgttatctggctgatgggttttgccatgctgggcggacagcttatcggtgcccgcctcggcgcccgtatggtgctgagccgcggacaaaaactgatccggccgatgctggtaactgtctctttcctgatgagcatcaaactgatttatgacaatcacggcgatactatcagtacgtggctgtctcagcttttttaa

SEQ ID NO: 273673 - DNA, 552 bp, Morganella morganii
atgagtacacatcaatatcagcagttaattgagatttttgataacgaattttttgctgatttcaatacccgcctgattaaaggcgacgatgagccgatttatctgcccgcagatgatgaagccccttataaccgtatcgtgtttgctcacggtttttatgccagtgctatccatgaaatatcgcactggtgcattgccgggaaagagcgcagaaagctggtggattttggttactggtattgtccggacggccgggatgcgcaaacgcagtcagaatttgaggtcgcggaaataaaaccgcaggcgctggactggttattttgtcaggctgccggttatccgtttaacgtcagttgtgacaatcttgacggtgatttcgagcctgatcgcgtcaaattccggcgtattgtccacgggcaggtgatggagtatctggcgcagaactcaatacccccgcgtgcagcaaggtttattaatgccctgcaatcgttctacaatacgccgccgctgactgcggaccaatttccatggccggaagatccgtttgcctga

SEQ ID NO: 273674 - DNA, 282 bp, Morganella morganii
atgcttgcggattatgaaacgcgtatcctcgcccagattgatgacatggtcgaacatgccacagacgatgaactgtttgcgggtggctatctgcaggggcatctgaccctcgcggtggcagaactggagcagtcgggtgatcactccgttgaggcgcttcacaaccgggtggaggagagtatccgtcaggcaatcagtgccggggaactgacaccgccggaccaggtgctggtgctggaaacctggaaacgcctgctgcaaaccgcgcaggagcaggaatga

SEQ ID NO: 273675 - DNA, 528 bp, Morganella morganii
atgacagccaaaccgcaataccgtatccgccaggcccgcccggcggacgccgcattgttaccggccgttgaatcctctgccggtgcgttatttgcgacagtgccgggttatgaatggatagcctgcagtgaaggccattccgaagcggcattccgcaattatattgccagtggcaatgcgtgggtggcagcggacagtcaggatcagcccgccgggtttgtgctggtgtccaacctcggtaccgggctgcatattgatgagctttctgtctctgcggcgcatcagcgtcaggggctggggcgtcagctgattgagcggatacagaatgtggcgattgcacgcggctgtgcggcagttacgctgaccacattccgggatgtggcctggaaccggccttattatgagcatcttggttttgaggtgtgtgatgtttcccgcgccccgacacttgaggctgttatgctgaaagaggcagaatacgggctgcaattctgtgatcgctgttccatgatttaccggattttctga

SEQ ID NO: 273676 - DNA, 264 bp, Morganella morganii
atgtttgaattacaaccgaaaaacgcagcacaacaggctgtgactatttacacgaagatagcggttgctgcggtggtcttgctggcactgttattttctttctggtttaaacttgacggaatgagcgtcattgaaagagcagtcccttccatcggtatgattttatttaccggattaataatttttaatgccaaacgggaattagattcgctgtaccgttcagaggataaatgcgcgaaaagcgtggttgccctgaacgcctga

SEQ ID NO: 273677 - DNA, 1008 bp, Morganella morganii
atgaagaataaaatagttatcgccctaaccttttcgctgttttgttttacctctgcctatgcaaagaacaataatattcccgataatactgttcgctacgatacgattgctgagcaggcgtatcagaaattcaaaagcgaaaaatccggtgacgtggcggattatattccggctctcgccaaatacagccccgataattacgccgttgtgattgccacggtggacggcaaaatctacagcgccggggataaagataagctgttcccgctggaatccctgtcaaaagtctttaccctcgcaatggtaatggatcagcagggtccagaggtggttctggagaaactgggcgccaatgccaccgggttgccgtttaactcagggctggcgattgaactgcgaccggatcgcccgcagaacccgctggtcaatgccggggctatcagcgccgtcagtctgatcaaggccaaaaacccgaacgaccgctggcagcagattatggagaacatggaagcttacgctgataccaaactgacggtaaacgatgaagtgtaccgctctgaatccgaaaccaatcagcacaaccaggcactggcgcggctgatgcagtcttacggcatgttatacggcaatccggatgaggcggttgatctctatacccgtcagtgttctgtggatgccacaacggttgatctggccaaaatgggggcggtactggctaatcacggtaagtccccgtacaacggcaaacagttactgagtgcggagaataccggcaaagtgctggcagagatggccattgccgggttatatgacggttccggcacctggttgtatcaggtcggtatcccggcgaaaagtggtgtcggcggcggtattctggccgtggtgccggggaaatatgcagtggcggtctattccccgccgctggataaagcaggtaacagtgtcagggcgcaggcggctatccgctatattgctcaggaaaccggcgctgatttatatcagtaa

SEQ ID NO: 273678 - DNA, 2106 bp, Morganella morganii
atgtcacatccggcatggcagtatagcgcaaagcagagtaaaatcagggaaaaccgaacagaatcctcaggccgtaacgtgaaaaaaaccgcaattgaaactgcacatttaacctggaatgaacagggtacacctgtttcgcaacattttgatgacgtctatttttcgaacgatgacggactggcagaaacccgctatgtgtttcttaacggaaacggttttccggacagatttgcacaaataaccaccccggcctgcactgtcgcagaaaccgggtttggtaccggactgaattttctcacgttgtggcagagcttcctggcgttcaggaatgccaatcctgtgcatccgctgaagcgcctgcactttatcagttttgaaaaattcccgctgaccgtggctgatttacaggcagctcaccgccactggccggaattcgcggatttctccttacagctgtgcgctcagtggccgcaaccattacccggctgtcaccgtattcagctgtccggcggtgaaattaccctcgatttatggctgggagatgttaatgaactgctcccttccctcactcacgcgctggacaacaaaatcgatgcctggtttctcgacggttttgcgccgtccaaaaacccggatatgtggcagcagtcgctgtttgatttgatgattcgtttttcaaaaccgggcggtacctttgccacctttactgccgccggttttgtccgccgtggtttgcagcaggccggatttaccgttgagcgccgcaaaggctttgcgcacaagcgggaatgccttgccggggtaaatctccgtgacgcggcaccatccgtgacaccgtggtttgatcgccatccggctgccgcccggcagaagatagcagtcattggcggagggatagccggagttctctctgccctcgccctgctgcgccgtggtgcggatgtgtccttatattgcgcggatgcagatctggcactcaatgcttccggcaaccgccagggtgcgctttatccgctgctgaccggacgggatgacccgcttgagcgcttttttgccgccgcatttccgtttgcccggcgtacatatgatgcattgtcagctcagggtgtgaaatacgaccatgactggtgcggcgttattcagctgatgtatcacgaaaaaagcagtaaaaaaatcaataacatttcatctgtcccatggccggaagaaatggtgcagcgcctgtcgcgggaacagctttctgagcttgccggaaccgatgtcaattttgacggcctgcactacccgcagggcggctggctctgcccgcaggaactggtacgcaataccgcagcgctggcacaaaaagaaggacttcatctgcatttaaactgtgaggtgaaagcgctgatccccgcagaacagggctggcagctccgctttgcagataacagcacagcagaggcggatgtggtggtgctggccaacggtcactgtatcacgcagttcccgcagaccgccccgctgccggtcacgccggtgcgcggccaggtcagccatgtgccatcggtaccggcgattgccgggctgaaaaaagtactgtgttatgaaggttatctgaccccggtgaatccggctgacggtctgcactgtattggtgccagccaccagcgcaatgattcgggcacggaataccgcgaagaggaacaaactgccaacaaacagcggctgctcacttcgctgcccgatgtcagctggccggagatggtggatatcagcgccgggacgtcccgtcaggggatccgctgcacattacgcgatcacctgccgctggccggaaatgttcctgattttgccgaattaacagcgtgttatgcgcatctggatgaacaaaaatcgtccccggaaaccgtatgcagtgtaccgcatctgcctcagctgtttttactggcagctctcggctcacgggggttatgcaccgccccgctggcggctgaagtgctggcagcgcagattttcggtgaggcccttccgctggatgatgacacactcgcggccattcaccccgcccgtttccatgtccgtaaattgctgaaaggccgtccgctgccgaaaaaatcctga

SEQ ID NO: 273679 - DNA, 1215 bp, Morganella morganii
atgaagcgtgcagtaatcaccggtctggggattatctcaagtatcggtaataaccgggaggaagtactggcttctttgagagaaggtcgttccgggatcacattctcagaagaatttaaagagatcggcatgcgcagccaggtttggggtaacgtcaaactggacactgcgggtcttattgatcgcaaaactgcccgtttcatgagtgatgcttctatctatgcgtatctttccatggagcaggccatcgcagactccggtctgacagaagagcaggtatctcactaccgtactggtgtggttgccggttcaggcggaggttccccgcgtactcaggctatcgcggctgacggcatgcgtgccaaaggtctgcgtggtgtcggtccttacctggtaccgcgtgcaatggcatccggtgtgtccgcaaacttagcgacaccgtttaaaatcaaaggcgtgaactactcaatcagttctgcctgctccacctctgcacactgtatcggccacgcggtggaactgatccagctgggtaaacaggatgtggtgtttgccggcggcggtgaagaactgtgctgggaaatgagctgcgaatttgacgcaatgggcgcactgtccaccaaatacaacgaaacaccggacaaagcatcccgtacttatgatcagggccgtgacggcttcgtgatcgcaggcggcggcggtatggtcgtggtggaagagctggaacacgcgctggcgcgcggtgcacatatctatggtgaagtggtcggctacggcgcgacatctgacggcgcggacatggttgccccgtccggtgaaggtgcggtccgctgcatgcagatggcgatgcacggcctggatacgccggttgactacatcaacacccacggcacatccacgccggtcggtgataccaaagagctggaagctatccgtgaagtcttcggtgaccatactccggcactgtcagcgaccaaagccatgactggtcactcactgggtgccgcaggtgttcacgaggctatttacagcctgctgatgctggagcacggttttatcgcgccgagcatcaacgtggaaaaccttgatgagaaagcggaaggtatggcgattatcaccgaaccgaccgaacgcaagctgactactgtgatgtccaacagcttcggtttcggcggcaccaacgccacactggttatgcgcaaatatcagaactga

SEQ ID NO: 273680 - DNA, 270 bp, Morganella morganii
atgaaaaagctgactatcgcagagatgactgagccgcagaaaatccgtgtccgcacccggctggctcaggaacagaaaaaactggggcgtccgctgaccaatgcggagcagaataaagccaaagatcagattatcaccgaaatttccaaagaagtggatgccgctaccgccaaagtcagagcacagaaaaaaaaggataaaatcaaacccggcggcggggaagaaacttttaactggtcagcgaaaactcatacgcggggattgcgctga

SEQ ID NO: 273681 - DNA, 210 bp, Morganella morganii
atgatatttaaggtgattttatcgaaagcactcatggctgttatgttcgttttatctgtcagtatagcagccaacgcggctgagaaatcatcatggctgtttgtcggaccttacttctccggtgacgggactatttattgtaaatatgtaaaaaagggaaatgtcatgcttcgcaaaggatatccgaattgtcctgctgttatccggtaa

SEQ ID NO: 273682 - DNA, 930 bp, Morganella morganii
atgaaaaacctgcttttccccctcggggctgtattaatctggtctgtgaatgccgtggtgaataaactggccgccggtgccatcgcccccggcgcgatttccttttaccgctgggcactggcactcgccgtgatgacgccgttcctgattatgccggtctggcagcagcgtgcggtgatcaaacaacacgcgtggaaactgtttatcctcggttttctcggcatggggctgtatcagagcctggcgtactacgccgcttataccgtcagcgccacctttatggggattatcacctcgctgatcccgctgctgaccgtggtgttaagtatcccggtactgcggatcgcaccgaccatcggtattgtactcggcacaattctctccctgagcggcctgacctggcttatcagcaagggacatccggcagatttactgcatcaggggctgggacagggtgaaatgctgatgtttatcgccggtctcgcttatgccttctacggcgtgctgaccaaacgctgggcgatcccgctgtcgagcattcactcgctgtatatgcagattgtttttggcgtgctgctgctgatcccggtattcctcagcgccggtgatgtgacactgaaccgcgataatatcggactggtattgtatgcagggattgcggcctctatttttgcgccgctgctgtggatcctgggcgtcacccgtttgggtgcaaacgccgcctctatctttatgaacctggcaccggtactgaccgccattatcgctgctgtcttcctgaaagaagagctgcacagctatcatattatcggcggtggtgtggtactgatcggggtaattatggcgcagcgtctgcgcacaccactgacacagattatccgccgtaaaacgaaaaaaacacagccgcagcggtgtggtgcgggagaatag

SEQ ID NO: 273683 - DNA, 777 bp, Morganella morganii
atggcccgcaagtcagatatttcatcactgggtgtgaaagacccggtgacattaatctgccgtcatgaacagttttattcggaaacggagtttgcccttcatcatcaccccttcggccagttgctgtatgtcgccagcggtgtgatggagatgaccgttgagggacagcgctatctggcgccggcggggttttgtatctggatcccgccgggaacggaacatgccagttataacaaagcctgcgcctctttcaaaattattgatatttcgccgcagtgggcaccgcagttaccgcagatggcctgtgtgatagagctgacgccggtgttcagtgcggtgatgcaggatttgttcggccgcaaagtccgtgaaccggaaactgacgcggacaggcggctggcgctggtactgaccgatcaactgctgctgtcaccctgtcagccgacctatctgccggtcacggatgataaactgctggcaccggtgctcagtgcgctggagaatgatccgtccgataatacgtcgctggcggagtgggcggtacgacgctttacctcggaacggacattatcccgccgctgtcagcagaagctggggatgtccttcagtgaatggcgtcagcgcctgcgttttctgcgggcggtggcgttattacaggaaggccgcagtgtgcagaatgtcgcgctggatgtgggttacagctcatcatccgcctttattgccatgttttcccagctggccggtgtcacgccggagcgcttccgtcatcagccttaa

SEQ ID NO: 273684 - DNA, 1146 bp, Morganella morganii
atgaaggtgaagcccgtgaaaatcgttgtagatgagaatatgccttacgccgaaaccctgttttcccgtctcggggacgtggtggcggtgccgggacgtccgttaccggacggggtgctggatgatgctgacgcactgatggtgcgttctgtcacgaaagtgaatgcacagctgctggaaaatacgccggtgaaattcaccggtaccgcaaccgccggttttgatcatgtggataaagcctggctggcggagcagggaattggtttctcctccgcgccgggttgtaacgcaattgctgtggtggaatatgtcttttctgccctgatgctgctggcggagcgcgacagttttcagctgacggataaaaccgtcgggattatcggggccgggaatgtcggcggccgtctggcgaagcgtctggaagcactgggtgttaatattctcatctgtgacccgccgcgtgcggataatggcgatgccggggaattttatgatatcgataccctggtggcgcaggccgatatcctgacattccataccccgctgaataaatccgggccatacaccacactgcatctgatggatgaaacccgtctcagtgccatgaaagacaacggcattctgatcaacgccagccgtggtggggtggtggataaccgggcgctgttatcggtactggccggcggcaaaccactgagtgtggtgctggatgtgtgggagccggagccggatctgtcaactgaactgctttcactggcggatatcggtacgccgcatattgccggttataccctagaaggcaaggcgcgtggtaccacgcaggtctttgaagcctttgcggaattcaccggacaaccacagcaggttgcgctgtcagaattgttaccggcaccggaattcggctgtatcacactgtcaggtaaagtaacgcaaagtattctcaaacgtttaatgcatctggtttatgatgtccgccgtgatgatgcggcattacgtgcggtggctggtgtggcgggtgagtttgacaaactgcgtaagttttatcctgatcgccgtgagtggtcatcactgactgttatttgtgatgatgcacagagtgcggcgctgttgtctgacctgggtttcacggcagaataccgcgcataa

SEQ ID NO: 273685 - DNA, 1011 bp, Morganella morganii
atgtcagaaggctggaatattgccgtattgggtgcgaccggggctgtcggcagcgccgtggtgtcattactggaagagcgtgaatttccggtgggagagttatatttactggccggggagcgcagcgcgggagaatcggtgcgcatgaacggcaaaagctatctggtcaccgaagcccgtgattttgactggtcacaggtgcagctggcctttttcatggccggtgcggaagccaccgccgcgtattatgaagcggcgacagacagcggctgtattgtgattgacagcagcggcctgtttgcgctggagcctgacgtaccgctggtggtaccgtcggtgaacccgcaggcactgagcgaataccgcaaccgtaacctgattgcgctggcagacagcacagtcagccagttactgactgctatccgtccgctggtggaaagcgccgggttatcccgcattaatctgaccaacctgttctctgtttcccgtttcgggaaaagtgcggtggaagagctggccggggagtgtgcaaaactcctcaatggcatcccgccggaagccggtcgtttcagtaaacagctggcgtttaaccttctgccgctgctgactgatgagcagggcagtgtgtcagaagagcgccgtatcgcggaagaaacccgcaaagtcctgcaggatgccggtctgccgatcagcgtgagctgtgtgcagtccccggtgttctacggcaacgcgcagatagtgcagctggaaacactgcgcccgctcggcagtgaagaggcccgtgatgaactggaacgggcagaggatattcagctctcagaagagcaggagttcccgactcaggtgacggatgcctccggcaatcatctgctgaatatcggttgtctgcgtaatgattacggtattccggaaattctgcatttctggtcagtggcggataacgtacagtttggcggcgcactgatggcagtcgaaattgccgagcgtctgacgcaggagcagttttactga

SEQ ID NO: 273686 - DNA, 822 bp, Morganella morganii
atgtcagaggtgattttaccggcggaagagggtaaaaccactatcgcgctgggtattgaatatgacggcagccgttattacggctggcagcgtcagtcagaagtcgcgagtgtgcagggctgtctggaaaaagcgctgtcaaaagtggcggcagagccggtctcggttttctgtgcgggccggaccgatgccggggtgcatgccaccggtcaggtggtgcattttcatacggcagctgtccggaaagatgcggcctggacgatgggcgtaaacacccatctgccgccggatatcgcggtgcgctgggtcaaaaccgtgccggaaaacttccacgcccggttcagtgccacagcgcggcgttaccgctatgtgattttcaatcaccgttttcgtccggctatcctcagcaagggtgtgacccactttcattatccgctggatgaaaagcggatgcatgaagcggcacagagcctgctgggggagaatgatttttcctctttccgcgcggcgcagtgtcagtccagaagcccgtggcgtaatgtgatgcatgtgaacgtcacccgtcaggggcagtatgtgattgtggatatcaaagccaatgcctttgtgcatcatatggtgcgtaatatcaccggcgctctgctggaggtcggctgcggtaatttaccggtcagccggatggcggagctgctggcactgaaagaccggacactggcaccggcgacagcaccggcggaaggtttgtatctggtttcagtggattacccggaagaatttgccctgccgtcaccggcgatggggccgcttttcctggcagattaa

SEQ ID NO: 273687 - DNA, 672 bp, Morganella morganii
atggaatatattcaatatctgatcgattttattttgcacattgacttgcatatgaaagagatggtcgcggattacggcatctgggtttatgcgattttattcctgatcctgttctgtgagaccgggcttgtggtcacgccgttcctgccgggagactcgctgctgtttgtggcgggaacactggcggcactgccgtctaacgacctgaacattcatgtgatggtgctgctgatgattacagcggcgattatcggtgacgcggtaaactatactatcgggcactttttcggggagcggcttttccgtaatccggactcaaaaatcttccgtcagagtcacctgcgcaagacccatgcgttctttgaaacccatggcggtaaagcgattattctggcgcgatttgttccgattgtgcggacatttgccccgtttgttgccggtatgagtaaaatgtcgtatcgccactttgcgatgtttaacgttatcggtgcaattgtatgggtggtattatttgcctatgcagggtatatcttcggggaaaccaagattgtacaggaaaacttgaaattacttatcgtggcgattattttcatctccatattgcccggtattatcgaggtatggcgtcaccgccgtgcggcgaaaaaagcacagaaacgtgatgacgcctga

SEQ ID NO: 273688 - DNA, 951 bp, Morganella morganii
atgagctggattgaaaaaattctgaataagaccccaatgaaccagacacgcaaggcgagcattcctgaaggtgtctggacgaagtgcgacagttgtggtcaggtactgtaccgccaggaggtggaacgtaatcttgaggtgtgtccgaaatgtgatcatcacatgcggatccctgcacgtgcgcgcctgctgacgtttctggatgaaggcagcaccacggaactgggaactgatctggagccgaaagacgtcctgaaattccgtgattccaaaaaatacaaagacagactggtgtccgcccagaaagcaaccggggaaaaagaagccctgattgcgatgaaaggcaccctgaaaaccatgccggttgtcgcggcagcgtttgaatttgcctttatcggcggttcgatgtcttctgtggtcggtgcacggtttgtccgcgcggttgaacaggcactggaagataactgcccgctggtctgcttctccgcaagcggcggcgcacgtatgcaggaagcgctgatgtcgctgatgcagatggccaaaaccagtgcggctctggccaaaatgcaggagcgcggtctgccgtatatctctgtgctgactgacccgaccatgggtggtgtctccgcaagtctggctatgctgggtgatatcaatatcgccgagccgaaagccctgatcggctttgccggtccgcgtgttatcgagcagactgtccgtgagaaattaccgccgggattccagcgcagtgagttcctgattgaaaaaggggcgatcgatatgattgtccgccgcccggaaatgcgtgataccgtcgcggaaattctgtcaaaactgacgaactatcagttcccgcaggaaggtgaagtcattgaaatcctgaccgcggatgaacctgattccgacttatcttctgaaacagagactgatgtcaaaaaacacgatgtctga

SEQ ID NO: 273689 - DNA, 1353 bp, Morganella morganii
atgaacctgattccgacttatcttctgaaacagagactgatgtcaaaaaacacgatgtctgataagcgagaaagaccgacagccgcgtcatcgatgatgacgtggctttcttatctgggtgatctgcatacgcaggttattgatatgggactggaacgtgtcggtgcggtggcggatatcatgaatctgcgctatcccgccccgaaagtgattactgtttccgggaccaacggcaaaggcaccacctgccatacgctcgaatctatcctgctggccgcagggttgcgggtcggggtatacagctccccgcatctggtgaattacaccgaacgggtgcggattcaggggcaaaacccgccggaagcggatttctgccgtgtttttgcggatattgacgcgcagcgcggcgatatcacactgacctattttgaagcgggcactctggcagcactgcagctgttccgcgaagccaaccttgacgtggtgattctggaagtcggcctcggcgggcgtctggatgccaccaatattgtcgattctcatatcacggctattaccagtatcgcgctggatcacaccgactggctcggcgctgaccgcgagcatatcgcccgtgagaaagccggaattttccgcccgcactgtgtggcggtgatcggcgagccggatgcgccttataccatcgccgacgtggcaaacaagctggaaacctcactgttctgccgtgccgatgactggtcttacaaagagcagggcgaccactggacgtggcagtgtgaggatgaaaccctcgacaatctgccgctgccgaatgtgccgctggcaaatgccgcgactgcccttgcggtgatccacaacctgcgtcaggtgaaagacaaaaccggccgtgccatcacccgtgaggcgattgataccgggctgcgtcaggcacaactgccgggccgttttcagattgtctcacaacaaccgctgaccgtgctggatgtggcgcataacccgcatgccgccggttatctggtctcaaaactggcacagttaccgcgtactgcgcagagccgtgtccgtgctgtgatcggtatgctgggcgacaaagatatcaaaggtaccctggctgtgctgggtgagcaggtgacagactggtatgtcgcgccgctgaccgaactgcgcggagccccggccgaacagctggcggagcatctgaccaacccgcagcagtttgccgatgtggaaagtgcctgggaacaggcgcgccgtgatgcctcaccggaggatatcgtggtggtgtgcgggtcattccacacagtggctcatgttatggatgttttagcgaaggaaggtgcgggtggccagtaa

SEQ ID NO: 273690 - DNA, 693 bp, Morganella morganii
gtggccagtaaatttcagaatcgcttagtcggaaccattatcctggtggcggtgggtgtgattgtcctgccggtgctgctggacggcgataagaaatataacgaagaccagttcgcagccatcccgcttatcccgaaagaaggggagcaggatgagattgatgcggtgaatccgatcaatcagactatgccgacgatgccgtcagaaggggcatccagcgccatgattaccgaagcagcacaaaccgggacggaagaagcccccgcggaagcatctgcgggcggcagtaccacctccaatgtgccgccgggggcggatccgctgccgccggtggtgattccggataaacaaccgcagccgaaaccggaacctaagccggaaccgaagcctgaaccaaaaccggtgcctgagccggaaccaaaacctgagccgaaaccggaacctaagccggaaaaagcgccgcagggacaagcttatgttgtgcagctgggtgcattatctaatgcccgtaaggtggaggagattgtcgccacactgcggttatccggttatcaggtgtataccgtgccgcgcggcaagctgacgctgattatggtcgggccgtcagcctcgcaggccgagctgaagtcctcgctgggggaactgagacagcttaccgggctggatggccgggtgcagtcttataaaccgtag

SEQ ID NO: 273691 - DNA, 507 bp, Morganella morganii
atggtttggattgattacgcaattattgcaattattgctttctcggcattagtcagcctggttcgtggtttcgttcgcgaagccttatcgttagtgacctgggtctgtgcgttttatgtggccagcgagtttttcccgctgctggcggactattttacgcgctttgatgacccgctggtccgcaacggaatcgccattgcgattttatttgttgcgacactgattgtcggctcggtgattaaccatgttatcggttcactggttcagcggacaggcttatcaggcacagatcgtgttctcggggtttgttttggtgctctgcgcggggtgctgatcgtggcggcaattttgttcttcctcgacagcttcacgcagatgagtcagagcagcgactggcagcagtcacaactcatcccccaattcagtcatgttatcaggtggttctttgactacctccagaatgcgtcaagtttcctgccggagaattttccttctccgcccggctga

SEQ ID NO: 273692 - DNA, 1518 bp, Morganella morganii
atgtgtggtattgttggtatcgttggttttacgcaagtcaatcaatcaatttatgacgcgctcacggtgttacagcaccggggccaggatgcagccggtatcgcaaccattgacagtaacaatggtttccggctccgtaaagccaacggactggtgaaagatgttttcgaaacccgccatatgctgcgtttgcagggcacactcgggattggccatgtccgctacccgaccgcaggcagctccagtgcatcggaagcacagccgttttatgtcaattcaccgttcggtatcactctggcgcataacggcaatctgaccaatgcgcacacgctgaaacatcagctgtttgaaacagcccgccgtcatgtcaataccacctccgattctgaaattctgctcaacgtgctggcgtatgagctggatcgctttgatgctcacccgctggagccggataatatttttgccgctgtcagcgcgatgcacaccaaaatccgcggcgcgtatgcctgtgtggcactgattatcggccacggtctgctggcgttccgtgacccgaacggtatccgtccgctggtactcggcaagcgtactctggttgatggccgtgaagagtacatggtcgcgtctgaaagtgtcgcactggataccctcggttttgaatatctgcgggatgtggcacctggtgaagcggtgtatatcacggaaaccggacagctctacacccgccagtgtgcggcaaatccgtcactgacaccgtgcctgttcgagtttgtttatttcgcccgtccggattccgttatcgataaagtctctgtctataacgcccgtctgcgcatgggtcagaaactcggtgcgaaaattgcccgcgagtgggaagacctggatatcgatgtggtgatcccgattccggaaacctcaatggacagtgcgctggaaatcgctcatatgctgaacaaaccataccgccaggggtttgtgaaaaaccgctatgtgggacgcacctttatcatgccggggcagcaggagcggaaaaaatctgtccgccgcaaactcaatgccaaccgcaccgaattcaaagggaaaaatgtgctgctggtggatgattccattgtgcgcggcaccacgtcagagcagattgtggaacttgcacgggaagccggggcgaagaaagtctattttgcttctgcggcaccggaagtgcgtttccctaatgtctacggcatcgatatgcctaatgccaacgagttaatcgctcatggccgtgaagcggatgaaatctgccgcctgattggggcggatgccctgattttccaggatctgagtgaccttatcgatgcggtgcgtgaagagaatccggatatccggggtcttgaggcatcggtgtttgatggtatctatgtcaccaaagatatcgaccaggattatctcgactatgtggaaaacttacgtaaggatgatgaattaaagttgcgggatcataacgaaattgagaaccttgagatatataatgagggttaa

SEQ ID NO: 273693 - DNA, 594 bp, Morganella morganii
atgaaaaaactgattgtggggctgaccggcgcaagtggtgctgtctatggtgtgcggctgctggaggtcctgcaaacggtgccggaagtggaaacccatctgattgtcagtcaggcggcccgtcagacactggcgctggaaacggcgtacagtctgcgggatgtgcaggcactggcggatgtggtacatgatgagcgtgatatcgccgcctgtatatcttccggctctgtcagaacactggggatggttatcctgccctgttcggtgaaaaccctgtcagggattgttcacagttacacggacaccctggtgacccgtgcggcggatgtggtgctcaaggaagggcgcaaactggtgctgggcgttcgtgaaacgccgctgcatctgggacatctgcggctgatgacacaggcggcagaaatcggtgcggtgattatgccaccgatgcctgcgttttatcatcagccggaaacggtgcaggatattattgaccagacggtcaaccgtgtacttgatcagtttgatattgaattaccggaagatttatttacccgctggagcggggcaaaaaatccccgtaccgtacagcagtaa

SEQ ID NO: 273694 - DNA, 912 bp, Morganella morganii
atgcgtattctgatcacaggcggcaccgggctcgtcggaaccccgctggtgcaggcactgattgcccggaaatatcaggtggtggttctgagccgctcaccgcagaaagtctattcccgtttttgctcggccgcagaaaaccttaactcactcaatgatataacacatctgaatgatatcgatgcggtgattaacctcgccggcgagcctatcgcggataaacgctggagtgaagagcagaaaaagctgctgtgtgagagccgctggcagataaccgagcggctcagtgagcttattaatgccagtgaaacgccgccggcggtgtttctctccggctctgccgtgggctggtacggtgatcagggacaatccgtcgtgacggaggatgacgaaccgaatcaggaattcacccacactctgtgtgaccgctgggaatccctggcgatgaaagcacagagtgagaaaacccgggtctgtctgctgcgcaccgggattgtactctccccggaaggcggcgcgctggcgaaactgctgccggtctaccgcgccggtcttggcggccctattggtaatggccgtcagtatatgccgtggatccatatcagtgacatggtcagcgccattctgtttctgctcgacgatcccgcacagaacggcccgttcaatatgaccgcgccttatccgtcccataatgagcagtttgcagcggtactggcgcagatcctgcaccgcccgcatctgctgcgtgttccggcatttgtggtgaaggcgctgatgggagaagcggcggtactggtactcggcggtcagaatgccctgccgaaacggctggaagaagccgggttcggctgtcagtttattaatctggaagaagcactgcgggatttactggacagtccggcggactattaa

SEQ ID NO: 273695 - DNA, 576 bp, Morganella morganii
atggaacaagatagcgctatcgagtgggtggacgtggtcgatgagaataatgatgtcatcggccaggcgacccgcgagcagatgcgggcggaaaacctgcgtcaccgggcaacctacatcgttgtgcatgacggcatgggaaaaattcttgtccagcgccggactgagcacaaagactactgcccgggtctgctggatgccactgccggcggcgtggtgcagcagggcgagctgatgctcgattctgcccggcgcgaagcagaggaagaactcgggatcgccggtgtgccgtttgccgagcacggcctgttttattatgaagagccggtctgccgtgtctggggcgggttattcagctgtgtgactcacgggccgttcgcgcttcaggaaagtgaagtatctgaagtcacctggctgaccccggcagaaatcactgcccgctgtgacgaatttacggccgattcactgaaagcactctcactctggctgacccggaataatcagaattataccacggcagagcggcagaagccggttgcaacgcctgaagctgaaatgagcagcgacggcgaataa

SEQ ID NO: 273696 - DNA, 2079 bp, Morganella morganii
atgagaaataaattagcaggatggctgttgttattaccactgctgctcaccgcatggggtgcatttcagtattggcgcatcagtgatgaatatcaggcttaccagtatattatgtcagaaaaaacggagcttcagcgtctgattgcggaagatccgaatacacagattacctacgatgacggggaaactgtgtctgccggtcagcaactgggcatgattaaccgtgatctgaataaatacagcagcgaaattgccatgattctggccagggctggtgtcagtctgggaactgtcgccaccgggattttatcactgctgtttggtgcaggggcgatttatctctgcatcagcagcggccgggcggcccggcgttcacgcgatacgctgctgaatgtctttgcccgctgccgcaaaatgctgccgtttatcctgaccgggcagatgacgctggtcggcctgagcatcatttgtgtgatggcgtatgaagcgctgtggttcgccggtaatttcgtgctgagcggcggcggtgcgaaaatcatgatctttattctgatcagtatcctgctgattatctggtacatcatcaaagggctgtttaagctgcgcaagagttttgccatgttccgcagcgaaccgtcggatgtgacagggcatgccgtcagccgggaggaagccccgggactgtggcagtgggtggatgagattgccgcgaaagtcggcacgccgtcgccggatcatattgttgttggtatgacagagtgtttttatgtgacatcccacagtatcagcctgaatgaaaatcagctgattgaagggaaaacgctgtactttccgctgctctattccgcactgctcaaccgtgaggaagccagtgcggttatcgggcacgaactggggcacttcaccggcgaagataccacctacagtctgaactttgcgccaatctatgccggaatgagccacagtatttcgctggtggccaacgaggtgcaggattactacagcaaagtgattatgagcccgtcagtgtatctcgggatcttcttccttgagcagtttgattttgccgtcagtcactggagccgtatccgtgagctggaagcggataaagcgggggcatcggtcagctcaccggcggcggtggcgtcatcactgctgcgtatctctgcggtcagtgaggtgatttcggaaaccctgggtgagttatatgaaggtaccctgaaaacagatgatttactgcctgtggtgatggcgcgtctgcgtgagcgtggtgtaccggaagccggacagttcctgaatgaggcaaccagtcacccgagcgatacgcatccgcagacccgtacccgtatcgaagcactgtctcaggatctcagtgatgagctgctggccgacgcttcccgtgaagtgcagtcggatgattacggcaatatcgcggatctgtttacggatgccaaagcgatttccatgatgctgacggcgtcactctccggcatggtcgcggagtacaccacacagcggacagaagcactggaaacgatgctgcatgaatctgacgcggcagatgaggtgatcatcaccgagcggcgaaaaatgttccggatgatgtttatctttggtctggtggttgcggccgggatgggtattgccacggtgaaactaggcgcggaagatctggtagcttccggtgcggttcacggcttctggctgttactgctgttctggggtgtggcctttatgtaccgcgacagaggcaaagcgccgctgtttgcgttccgtcacgggcaactggtcagtgaaaagctgacacagccgtatccgctgcactatatcgttgattatgacatcgcggaaacctccggtgtggcgacacttacactgcatgtggctgagggtgcaccggcaccgggtatggcagcaaaaagccgtttctttaaatacgatgccaaaaagcagaagctgatgattatgatggccggtgtccggatctggcagggaaaatcattatctctgcaggatttatcagaactggtacatggtcagttgcagatggcacatgtgaagcatgaattgcggcagtaa

SEQ ID NO: 273697 - DNA, 2148 bp, Morganella morganii
gtgtcccgtactattatcctcattcctaccggcaccagtgtcggcttaagcagcgtcagcctcggggttgtccgctcaatggaacaaaaaggcgtcagcctgagtttcttcaaaccggttgcacagccgcgccgtgcaggtattgaagatcagaccacccagatcttacgcgctcactcttccctgaagatggcagagccgctggatatggattatgtcgaaaccatgctgaccaccaatcagaaagatattctgatggaagaaatcgttgcccgttaccacgagcatactcagggtgcggaagtgatcctgatcgaaggccttgtaccgacccgcaactacccgcatgctcaatccctgaactacgatatcgcccagactctgggtgcggaaatcgtgtttgtgacagcaccgggcaatgacaccgcagcggaaatcaaagagcgtctggaactgatccgcaatgaattcggtggtcacaagaataccaacatcgccggtgtgatcgttaacaaagttaacgctccggttgatgagcagggccgtacccgtcctgatctgtctgaaatttttgatgattcatccaaagccactatcgctcacctgagcgcggatgatctgaaatccctgcctctgccggttgtcggcagtgtaccgtggaacttcgaactgattgccacccgtgcaatcgacatggcgaaccacctgggcgcgaaaatcatcaacgaaggcgacatcaaaacccgccgtgtgaaatctgtgactttctgtgcacgcagcattcctcatatgctggagcacttccgtcccggttctctgctggtgacctctgctgatcgtcctgacgtgctggtttctgcctgcctggcagcgatgaacggcgtggaaatcggtgcgatcctgctgaccggcggttatgaaatcgacgacagcattgccaaactgtgcgaacgtgcgttcgaaaccggcctgccaatcttcactgtgaacaccaacacctggcagacctcgctgaacctgcaaagcttcagcctggaagtccctgctgatgaccgtgagcgcattgaactggttcagaactacgtggcaagccacatcgataccaaatggatcgattccctggttgcggattcagagcgtccgaaccgtctgtcaccaccggcattccgttacctgttaaccgaactggcacgcaaagcgaaaaaacgcgttgtcctgcctgaaggtgatgagccgcgtactatcaaagccgccgctatctgtgctgaacgtggtctggcgacctgcgtactgttaggcgatccggaagaaatccgccgcgtggcagctgcacagggcgtgactctgggcaccggtatcgagctggttaacccggctgacatccgcgagctgtatgttccgcgtctggttgaactgcgtaaaaacaaaggcatgaccgaagtcgttgcccgcgagcagttacaggacaacgttgtactgggtacaatgatgctggagcaggataaagttgacggtctggtttccggtgcggttcacaccactgcgaacaccattcgtccgccgttacagttaatcaaaactgcaccgggcagctcactggtatcttccgtgttcttcatgctgatgcctgaagaagtgctggtctacggtgactgcgcaatcaacccggatccgaaccctgaacagctggcagaaatcgcaattcagtctgctgactctgtgaaagcattcggtatcgacccgcgcgttgcgatgatctcttactctaccgggacctccggccagggtgacgatgttgagaaagtccgcgaagcgacccgcattgctcaggaaaaacgtcctgacctgtgcatcgacggtccgttacaatacgacgccgctgtgatggctgacgttgcgaaaaccaaagcaccggactctccggttgcaggtaaagcaaacgtcttcatcttccctgacctgaacaccggtaacaccacttacaaagctgttcagcgttcagcagacctggtctctatcggaccaatgctgcagggtatgcgcaagcctgttaacgacctgtcccgtggtgcgttagttgacgatatcgcgtacaccatcgcactgactgctattcaggcagcgcaggacgaagcgaagaaaaaataa

SEQ ID NO: 273698 - DNA, 1203 bp, Morganella morganii
atgtcaagtaagctggtactggtacttaactgcggtagttcttcactgaaatttgcgatcattgaccctacaactggtgatgaatatctgacgggtctggcagaatgctttaacctgccggaagcacgtatcaagtggaaaatggatggtgctaaacacgaagcacaattaggcgcgggcgctgctcacagtgaagcactgcgtttcatcgtgaaagatatcatgggcgacaaacctgagctgtccgcacagatcggctgcatcggccaccgtctggttcacggcggtgagaaatttgctcactctgttatcgtcactgacgaagttatcaaagcaatggaagagtgctctgcctttgctcctctgcacaacccggctaacctgttaggcgtggaagaagcactgaaagccttccctcacctggctgataaaaacgttggtgttttcgataccgctttccatcagaccatgcctgaagaagcttacctgtatgccctgccgtacagcctgtacaaagaccacggtatccgccgctatggtttccacggtacaagccactacttcgtcagccgtgaagccgctaaaatgctgaacaaaccggttgaagaactgaacgtaatcacctgccacttaggcaacggtggttctgttgcagctatcgttaacggcgagtgcgtggacacctctatgggtctgactccgctggaaggtctggtcatgggtactcgttccggtgatatcgacccggctatcattttccacctgcatgattcaatgggcatgagcgttgaagaaatcaacaaaatgctgaccaaagaatccggcctgcagggtctgactgaagtcaccagcgactgccgttatgttgaagaaaactacggtaaacaagctgacgcgacccgtgcaatgaacgtattctgccaccgtctggcgaaatacgtcggtggttatgcaaccctgatggaaggccgtctggatgcgatcatcttcaccggtggtatcggtgaaaacgcagcgatggttcgtgaacacactctggagaaactggctctgctgggcttcaaactggatcacgaacgcaacctggctgcccgcttcggtaacgcaggcaaaatcaccactgacgacagcagcattgccctggtgatcccgactaacgaagaattagtcatcgcacaggatgcagcccgtctgactgcataa

SEQ ID NO: 273699 - DNA, 456 bp, Morganella morganii
atgcctgataacacaccggcaaaaccgggtctgttccgcgcactgcgtctcggcaaacgttacgccgccacctggccggccgtgaaacagctcgccccggttttcccggagaatcgtgtcataaaatctacacagttcggtatccgttttatgccgccgctgtcggtgtttaccctgacatggcagatagccctcggcggggcattaggtcccgcagtcgccaccgcactgtttgcctgctcgctgccgctgcaggggttatggtggctgggacggcgtgccgccacgcctttaccggccgggctgctcagctggttttacgaaatccgcgcaaagtttgccgaagccgggattgcgattgcgccggttgagggtacaccggattatatggcactggccgagttactgaaacgcgcttttaagcagctggataactcttttctggatgacctgtaa

SEQ ID NO: 273700 - DNA, 495 bp, Morganella morganii
atggaaatgaccaacgcacaacgccttatcctctctaaccagtataaaatgatggctatgctggatccggataatgccgagcgctaccgccgccagcagactattattgagcgcggcttcgggctgcagatgcgcgagctggatcgcgatttcggcgagctgccggaagaaatctgccgccgtgtgattgatatgatggaaatgtaccacgcactgcgtatctccttcgataacctgaaagaagcaaaagatatcgacccgcgccgtatccacttcttaggttttgatgcggcgactgaagcacgttatttaagttatgtgcgttttctggtaaatacggaggggcgttatacccactttgacagcggcagccacggctttaactcccagacgccgatgtgggataaatatgtccgtatgctgggtgcatggcataactgcccgcgtcagtatcacctgagtgaagtagaaattaatcagatccttaacgcataa

SEQ ID NO: 273701 - DNA, 669 bp, Morganella morganii
atggcactgactgcaaaaggttttttgtttgatctggacggcacactggccgattccctgcatgtggtggagcgtgcctggctggcgtttgcccgccgtatcggtgcggatgaggacgaagtaaaacattttattcacggcaaaccggcggttgagtccatccgccattttctgccggatgcggatgagaacgaaatcgccgcacagctggcgtgggtgacagagcaggagatcagggagagtgatcaggtcacggatctgcccggagcgcaggcactgctggcgcgtctgacctcccttgatattccgtgggcgatagtcacctccggttctgtggcgatagcccgtccgcgtcacagtgcggcaaatctgccggagccggatgcctgggtgacggcggataatatcacccgcggcaagccggatccgcagccctatctgctgggcgcggaaaagctggggctggcgccgcgcgactgttttgtgtttgaggatgccaccgccggcctgctttccgggctggatgccggttgtcaggtgattgccgtgcatgttccggccggaacaccgcgcacggatgaactggccatgcgggtggattcactgacagaacttgaggttgagaaagcggcggacggtacggtaacactgacccgccgtcccggctga

SEQ ID NO: 273702 - DNA, 1830 bp, Morganella morganii
gtgaatacggaactcgtgtgggtgctgaccctgctgtttatcgccattgttttatttaccaccaacaaagtccggatggatgttgtggcgttgctggtgatcaccgcctttgtactgagcggcacgctgacggttaatgaggccgtcgccggtttcagtgatcccaatattctgctgattgccgccctgtttgtgatcggggaagggctggtgcgtaccggggttgcctatcagatgggggactggctggtgcgggtggccggttccggtgaaacccgcctgctggtattccttatggtcagtgttgccgggctcggcgcgtttatgagttcgaccggtgtggtggccatttttatccctgtcgtgctcagtgtctccgcacgtatgaaaatctccccttcgcggctgatgatgccgctcggcttcgccgggcttatcagcggcatgatgactctggtggcaacaccgccgaacatggtggtgaatagtgtcctggaaatggaaggcatcaaaggctttaacttcttctcgattacccctgtcggattactgatcctgctggccggtgtcggctatatgctgattgcccgtcactggctgggcagcaaacagccggaaaaagcaggggacaatgtgcggcgtacctttcgtgatctgatccgcgactacaaactgagcggccgtgcgcggcgtcttgctgtccgtaacggttcgccgctgatcggcaaaacgctggatgaactgcatctgcgcacccgctatggcgcgaatgtggtggggattgagcgctggcggcgtttccggcgggtgatggtcggtgcgaccggcggtatggagctgcgtgaccgtgatgtgctgctgatagatatgtctgccagtgatatggatttgcgcgaattttgtgccgagcagatgctggagccgatgatcctgcgcggtgaatatttttccgaacactcccgcaacgtgggcatggcggaagtctccctgaacccggaaagtgagcttatcggcaaaagtctgcgggatatcggtttccgtacccgttacgggctgaatgtgctgggtctgcgccggggcggggccgcccttgacggcaacattgtggatgagccgctgcagctcggggatatcctgctggtggtcggggactggaaaatcatccgcgtgctggcgaccaaacggcgtcactttatagtgctcaacctggcggcggaagcggaggcggtggtacctgctgcatcccaggcaccgcatgcgttgttttgtctggcactgatggtggctatgatggtcaccaatgaaatcccgaattttatcgcggcactgattgcctgtctgctgatgggaaaattccgctgtatcgatatggaaagtgcttaccggtcaatccactggccgagcatcattctgattgtcgggatgatgccgtttgcgctggcattacagaaaaccggcggtatcacgctgattgtcagcgggctgatggacgtggccggtgatctgggcccgcatgttatgctgacagccctgtttgtgctgtgtgcgactatcgggctgtttatctcgaataccgcgacagcggttctgatggcaccgattgctatccaggcagcgcatgaaatgcaggtgtcgccgctgccgtttgcgatggtggtgggcgtggcggcatctgctgcctttatgacaccggtttcctcccctgtaaacacgctggtgctcgggccggggaattacaccttcggggatttcgtcaaaatcggcgtgccgtttacgctggtggtcatggcaatcagtatcgcggtgatcccgctactttttccgttctga

SEQ ID NO: 273703 - DNA, 582 bp, Morganella morganii
atgagttacttttttgcccacctttcccgtctgaaactgatcacccgctggccgctgatgcgcaatgtgattcaggaaaacgtctctgaacacagcctccaggtggcgtttgtggcacatgcactggccgtgattaaaaaccgcaaattcggcggcacactcaatccggaaaaaattgccctgctggcgatgtaccatgatgcaagtgaagtgatcaccggcgacctgccgacacccatcaagtattacaatccgcagatagctcatgagtacaaaaaaattgagcgcatggcgcaaaagaaactgattgccatgatccctgaagagttacaggcggattttgcacccctgattgatgaagatacccattcaccggaagatgcggcaatcgtcaaacaggccgatgccctgtgtgcctatcttaagtgtctggaagagattggtgcgggtaataccgagtttcatctggcgaaagcgaggctggagaaaacgctggaagaacgccgcagcccggaaatggactatttccgcgatgtgtttattccgggattcagtctgtcactggatgaaatcagccagtaa

SEQ ID NO: 273704 - DNA, 1215 bp, Morganella morganii
atgaatataataaagaaatccagcaaactcgataatgtctgttacgacattcgcgggccggtgctcaaagaggctaaacgtctcgaagaggaaggccagaaagttctcaaactgaatatcggtaacccggcgccgtttggttttgatgccccggacgaaattctggttgatgttatccgtaatttaccaagctcccagggttacagcgattcaaaaggcctctattccgcccgtaaagccattgtccagttctaccaggaacgcggtatgcgcgatatgacggtggaagatgtctatatcggtaacggggtttctgaactgattgtgcagtccatgcaggcgctgctgaataacggtgatgaaatgctggtaccggcaccggattacccgttatggaccggtgcggtctccctctccggcggtactgccgtccactatatgtgcgacgaagaacagggctggatgccggacattgaggacatcaaaaagaaaatcaccccgcgcacccgcggtattgtggtgattaacccgaacaacccgaccggggctgtttacagcaaagatttgttacaggagattgtcgaactcgcccgtcagaatgacctgatcatttttgctgacgaaatctacgacaaaattctgtatgacgatgccgtccaccactctatcgccgcgatggcgccggatctgctgaccgtcaccttcaacggcctttccaaaacctaccgtatcgccggtttccgccagggctggatggtcctgaacgggccgaagaaacacgccaaagggtatattgaagggctggaaatgctcgcgtccatgcgtctgtgtgccaacgtgccgatgcagcatgctatccagaccgcaatcggcgggtaccagagcatcaatgagtttattcatccgggcggccgcctgtatgaacagcgcaacaaagcctgggaactgattaaccagataccgggctgctcctgtgtcaaaccgatgggcgcactctatatgttcccgaaatttgatgccaagcgctttaatattcacgatgaccagaagatgatcctcgacctgctgttacaggaaaaagtactgctggtacagggtactgcctttaactggccggaaccgaaccacttccgtatcgtgacactgccgcgtgaggatgacctggagatggcgattaaccgcttcgggcgtttcctctcccactaccgtcagtaa

SEQ ID NO: 273705 - DNA, 912 bp, Morganella morganii
atgataaattcaaaccgtccagtgttaaacctggatctcgatctgctgcggacgttcgtggcagtcgcggatctgaacaccttcgcagcggcagctgcggcagtatgccgcacccagtctgccgtaagtcagcaaatgcagcgtctcgagcagcttgtcgggcgcgaactgtttgcgcgtcatggtcgtaacaaattactgaccgaccatgggttacaactgttaggttacgcccgtcagatcctgcgggcaaatgatgatgccaccgcatcactggcctataacgacgcagaaggggagttacgtatcggtgcatccgatgattccgttgactcactgctgcctttcttactcaaccgtattgcatcggtatacccgcgtatggcggttgatgtccgcatcaaacgcagccagtacattgaaggtatgctggataaccacgagattgacctggcgctgaccaccgcgcgtattgcccatcacccgcgtactgctctgcgtaccgcgccggtgctgtggcattgtgcgccggattttcagttacagccgaatgagccgattccgctggtggtgatggacgaaaccaacccgttccgtcatctcgcggctgaaaccctggatgaagcaggggtgcagtggcggattgcttacgaggcagcatcactttctgctgtccgcgcggcggtgaatgccgaagtcgggatcacagcccgtccgctggaaatgcagaatgccgacctgcgtattctgagcgtcagcgaagggctgccgcgtttgccggaaattcagtactggttataccgcaacagcgacgagcagagcgagtcagtgctgacggtgtaccaggccattgaaaacaagaagacaccgtatactgtcacgccggttgacgatgacaaaacagcggagtaa

SEQ ID NO: 273706 - DNA, 447 bp, Morganella morganii
atgagtatgtcaacagccactgaagttctggcccataactgggcatttgccatctatcttttaggtgctctcgggttatgtgcatttatgttgctgggcgcccgttatctcgggggccgtgcaaaagcacgcgccaaacatctcccttacgaatcaggtattgactcggtcggcagcgcacgtctgcggatgtctgcaaagttctacctggttgccatgtttttcgtgattttcgatgttgaagccttataccttttcgcctggtctgtttcggtcagagaatcgggctggatagggttcaccgaagccgcgatctttattctggtgttattggcaggtcttttctatctggcacgtatcggcgcgctggactggactcctgcacgttcgcgccgcgaggtgaaacacccgagcgttgtgaacaaaatcaataacaatcaaccgtag

SEQ ID NO: 273707 - DNA, 675 bp, Morganella morganii
atggattatacgctcacccgcatcgatccaaacggtgagaatgaccgttatcccctgcaaaaacaagaggttgtcagtgacccgcttgagcagcacgttcaccgcagcgtgtatatggggaaactcgaacatgcattacacgatatggttaactggggccgtaaaaactccctgtggccgtataacttcggtctttcctgctgttatgtagagatggtgacctcctttacggcggtgcacgacgttgcccgtttcggtgcggaagtgctgcgtgcctccccgcgtcaggcggactttatggttgtggccggaacctgctttaccaaaatggccccggttattcagcgcctgtatgaccagatgctggaaccgaaatgggttatctccatgggctcctgcgccaactccggcggtatgtatgacatttactccgttgtgcagggcgtggataaattcattccggtggatgtgtatatcccgggctgcccgccgcgtcctgaagcctatatgcaggcgctgatgctgttgcaggaatctatcggaaaagagcgccgcccgctgtcgtgggtggtgggtgatcagggcgtttaccgcgccaatatgcagtcagaaaaagaaagaaaacgcggtgaacggattgcagtgaccaatctgcgctccccggacgaaatttaa

SEQ ID NO: 273708 - DNA, 1800 bp, Morganella morganii
atgatgacagaaagtaatacgcagaccgcacagcgtcccgcgtggcagactcacgattacctggatgatccggtaattgaggaactgcgccgtaagttcggtcctgacgcatttacggttcagccgacacgtaccgggatgccggtcgtctgggtgaagcgtgagcagcttctggaagtactgttttaccttaaatcgctgccgaaaccgtatgtgatgctgttcgatctgcacgggacggatgagcgccagcgcacccatcgcgaaggtctgcctgcggcggactattccgtgttttatcacctgatttccattgagcgtaaccgcgatatcatgctcaaggtggcgctgagtgaaaacgatctgcatgtgccgacggtgatttccgcattcccgaatgcaaactggtatgagcgcgaaacctgggaaatgttcggtatcattatcgacggacacccgaatctgcgccgtattatgatgccgccgacctgggaagggcatccgctgcgtaaagattacccggcgcgggcaacggaatttgatccgtttgtcctgaccaaacagaaagaagatctggaaatggaggcgctgaccttcaaaccggaagagtggggcatgaaacgcggcaacgagaacgaggactttatgttcctgaacctcggcccgaaccacccgtcttctcacggtgctttccgtatcatccttcagcttgacggtgaagagattgtcgattgtgtgccggatatcggctaccaccaccgtggtgcggaaaaaatgggcgagcgccagtcctggcacagctacattccgtacactgaccgtatcgaatacctcggcggctgtgtcaacgagatgccgtatgtgctggcggtggaaaaactggcggggattgaagttccggcacgtgtggatgtgatccgcgtgatgctgtcagaactgttccgtattaacagtcacctgctgtatatcagtacatttattcaggataccggggcgatgacgccggtcttctttgcctttaccgatcgccagaaagtttatgatgtggtggaagccattaccggtttccgtatgcatccggcctggttccgtatcggcggcgtggcacacgatctgccgaaaggctgggatcgcctgctgcgtgatttcctcgactggatgccgaaacgtctggaatcctatgtcactgccgcactgaaaaactccatcctcaaaggccgttccgtcggtgtggccgcttacaacgcgaaagaagccctcgactggggggtgaccggtgccggtctgcgcgccacggggattgatttcgacgtgcgtaaatggcgtccgtattccggctatgagaatttcgattttgaagtgcctgttgccgccaacggcgactgctatgaccgcgtgatgctgaaagtggaagaagtgcgccagagtctgcgcattctggaacagtgcctgaaaaacatgccggaagggccgttcaaggcggatcacccgctgaccacgccgccgccgaaagagcgcacgttacagcacattgaaaccatgattaaccacttcctccaggtgtcatggggtccggtgatgccggctcaggaatctttccagatgattgaggccacgaaagggattaacagttactacctgaccagtgacggcagcaccatgagttaccgtacccgaatccgtacaccaagttatgcccatctgcagcagatcccgtcggtgatcagcggcagcctggtttctgacctgattgtgtacctcggaagtatcgatttcgttatgtcggatgtggatcgctga

SEQ ID NO: 273709 - DNA, 549 bp, Morganella morganii
atgcaagaactgaaccctgaagcaaaaaaagcactgcaaggcgcagtgaatgcggcgcagccagccggaaaacaacctgattttgtgctgagtgacgaagagcgcgccgaaatcgaagcggaaaaacaccattacgaagatccgcgtgccgcctccatcgaagccctgaaaatcgtacagaagcaccgtggctgggtggaagacggcgcgatttacgccatcagcgatgtgctgggcatcccggcgagtgatgtggaaggtgtggcgacattctacagccagatctaccgtcagccggtcggccgtcatgtgatccgttactgtgacagcgtggtgtgccacatcaccggttaccaggggatcaaggccgcactcgagcgcaaactgaatattcagccgggacagacaaccgctgacggccgctttacgctgttgccgacctgctgcctcggaaactgtgacaaggggccgaccatgatggttgatgaagatacccacagtcacgttacgcctgaagccattgaaacgttactggagcagtatccatga

SEQ ID NO: 273710 - DNA, 1353 bp, Morganella morganii
atgacagtgaaaacggtttgccgtactgcggaaacgcatcctctcacctggcggttgcgcgacgaccatcagccggtgtggctggatgaataccgcagtaaaaacggttatgcgggggcggaacgcgccctgaaaggcatggcaccggatgagatcaccagtcttgtcaaagacgcgggtctgaagggccgcggaggtgcggggttctccacgggtctgaagtggagcctgatgccgaaagacgagagcatgaatatccgttacctgctgtgtaacgccgacgaaatggaaccgggtacctacaaagaccggctcctgatggaacaactgccgcacctgctggtggaagggatgctgatcagcgccttcgccctgaaagcataccggggctatatcttcctgcgcggcgagtacattgaggcagcgaaacacctgcgtcatgccattgaagaagcgaaagccgccggtctgctggggaaaaatatcctcggcagcgggtttgatttcgagctgtttgtgcacaccggtgcagggcgttatatctgcggggaagaaaccgcgctgattaactccctggaaggccgccgcgccaatccgcgctccaaaccaccgttccccgccagttccggggtgtggggtaaaccgacctgtgtcaacaacgtcgaaaccctgtgtaacgtaccggcgattctggcacacggcaaagagtggtatatcggtctgagtgaaggcaaaagtaccgatgccggtaccaagctgatgggcttttccggccgcgtgaaaaatccgggtgtctgggaactgccgttcggcaccaccgcccgtgaaatcctcgaggattacgccgggggcatgcgcgacggactgaccttaaaagcctggcagccgggtggtgcgggaacagactttctgacacaggatcaccttgatttaccgatggatttcgagcatatcggcaaagcgggcagccgtctgggaacggcgctggcaatggcggtggacaatgaaatcaacatggtgtcactgacccgtaacctcgaagaattttttgcccgcgaatcctgcggctggtgtacaccgtgccgtgacggattgccgtggagcgtgaaaattctgcgcgcaatagaaaaaggggaaggccagccgggagacattgagacattagagcaattatgtcgtttcctgggaccgggtaaaaccttctgcgcacacgcgccgggcgcggtagagccgttacagagtgcgatcaaatatttccgtgatgaatttgaagcggggatcgtacagccggtttacggcaacgtgcagaccattgccgggatccagccgaacctgctgaagcagcgctggtga

SEQ ID NO: 273711 - DNA, 2733 bp, Morganella morganii
atgctgactatggctacaatacatgtagacggcaaagaatatgaagtcgacggcgcggataacctgctgcatgcctgtctttcgctcggacttgatattccgtatttttgctggcatccggcgctgggaagcgtcggcgcttgccgccagtgtgcggtaaagcaatatcagaatgccgatgacacccgtggtcgtctggtaatgtcatgtatgacaccggcacaggacggcacctttatctcgattgatgatgaagaagccaaaaagttccgggaaagtgtggtggaatggctgatgaccaaccatccgcacgattgtcctgtctgtgaagagggcggtaactgccatcttcaggatatgaccgtcatgaccgggcattcagtgcgcaaataccgcttcacaaaacgtactcatcagaatcaggagctggggccgtttgttgcacatgaaatgaaccgctgtatcgcctgttaccgttgtgtccgttactacaaagattatgcggacggtacagatttcggggtttacggcgcacacgacaacgtgtacttcgggcgtccggaaagcggcacgctggaaagtgaattctccggtaacctggtggaaatttgtccgaccggggtctttaccgacaaaacccactctgaacgttataaccgcaaatgggatatgcagtttgcaccgagcgtctgccagcagtgcagcgtcggctgtaacatcagcccgggcgagcgttacggcgaactgcgccgtatcgaaaaccgttataacggcaccatcaaccattatttcctctgcgacaaaggccgcttcggttacggttatgtcaaccgtgatgaccgtccgcgtcagccgcagcagcgccgtggtgatgactggcttactattaatgcggagcaggcagaacgcgcggcggcagatatgctgtatcacgcgaaacgcaccatcggtatcggttcgccgcgtgccagtgtggaaagcaactttgcactgcgtgaactggtcggggcggaaaacttcttcagcggcctgtcagccggtgaacagcaccgtctggaaatgatgctggaaatcttacagcagggcggtatctacaccccgtcactgcgtgagatggaaaactatgatgccgtgctggtgctgggtgaagatctgacccagaccgctgcccgtgtggcactctctgtccgtcaggccgtgaagggcaaagcccgcgaaatggccgcagcacagaaagtggcggactggcagattgccgctatccagaatatcggtcagcgtgcgaaatacccgctgtttgtcacggcggtggataccacccgtctggcagatgtggcggcactgcactacaacgcgccggtggatgaccaggcgcgtctgggctttgctgttgctaatatcattgataacaccgcgccggcagtcacggatttacctgcggatgtgaaagcacaggctgaaatgattgcacaggcgctgaacggtgcgaaaaaaccgctgattatcagcggcagcaatccgggcagtgatgcactgattcaggctgcggcaaacgtggcctgggcactgaaagataaaggcattgatgccgggctgacctttgtcggtgcggaagccaacagctttggtgccgcgatgacagaagcgcagccgctggataaagcactggctctgctggcagacggcagcgcggataccgtggtggtgatggaaaacgatctttaccgccatgcggataaagccgccgttgaccgtgcgctggatgccgcagcaaatgtgattgtgctggatcatcagcgcactgacatcatggataaagcatcacttatcctctccgccagcagttttgcggaaagtgacggcacactcatcaaccacgaaggccgtgcacagcgtttcttccaggtgtatgagccatccttctacgacaaatctatcattatgcatgaaagctggcgctggctgactgccctgtacaatgatctcaatgaaaacacccgtgactggtcacagcttgatcatgtgattgatgcctgcattgagcagatgccgcacctggccggtatcaaagatgccgcaccggatgccgcattccgtatccgcggacagaaactggcccgtgagccgcaccgctacagcgggcgtaccgcgatgctggcgaatgtcagtgtacacgagcagcgtcagccgcaggataaagacacggcgtttgccttctcgatggaggggaacaacagcccggcagcaccgcgtcagcaaattccgtttgcctgggcgccgggctggaactcaccgcaggcatggaacaaattccaggcggaagtaggcggtcatctgcgtttcggtgatccgggtgtgcgtctgttcagcgaaaaagacggcggtatggattatttcagcgccatcccggcggcatttgcgccgcagcagaatgtctggacggttgcgccgtattatcacctgttcggcagtgaggagttatcacagcgggcgccggtgattcaggaacgtatgacggacagctatgtgatgttaaatgcacaggatgcacagcagcttaatgtggcggaaggtcagattctgtcggtacagctgtctgacggcacactgacactgccggtgcgcatcagcacacaactgacagccgggcaaatcggtctgccgctgggtatgccgggcatttcgccggtactggcgggtgcggcggttaatctgcaggaggtggcacaatga

SEQ ID NO: 273712 - DNA, 978 bp, Morganella morganii
atgagcagctggtttacacctgaattaatcgatgtgctgattaatgttctcaaagccattgtgatcctgctggtggttgtgacctgcggtgcctttatgagcttcggtgaacgccgcctgctggggctgttccagaaccgttacgggccgaaccgtgtgggctggggcgggtcgctccagctggtcgcggacatgatcaaaatgttctttaaagaggactggacaccgaaattcgctgatcgctttatcttcaccctggcaccgatggtggcattcacctcgctgctgctggcctttgcaattgtgccggtcagcccggactgggtggtggcggatctcaatatcgggatcctgttcttcctgatgctggcgggactggcggtgtatgccgtgctgttcgcgggctggtcgagtaacaacaaatactcactgctcggcgcaatgcgtgcatcggcgcagacggtcagttatgaagtgttcctcggactctcggttctgggtgtggtggcgcaggcgggttcctttaacctgctggatatcgtcaactcgcagagcacagtctggaacgtcattccgcagattttcggctttatcacctttgcgattgcgggcgtggcagtgtgtcaccgtcacccgtttgaccagccggaagctgaacaggaactggcggacggttatcacattgaatattcggggatgaagttcggtctgttcttcgtcggggaatatatcggtatcgtgacagtttccgccctgattgtgacgctgttcttcgggggctggcacggaccattcctgccgccgtttgtctggttcgcgctgaaaaccgctttctttatgatgatgtttatcctgatccgtgcgtcgctgccgcgaccgcgttatgaccaggtgatgtcattcggctggaaagtgtgtctgccgctgacactgataaacctgctggtgacagcagccgtgatcctgatagctcaataa

SEQ ID NO: 273713 - DNA, 543 bp, Morganella morganii
atgacattgaaagagttagtggttggtttcgccacccaggtacgcagtatttggatgatagggcttcatgccttccataaacgcgaaacccagatgtacccggaagagccggtttacctgccgccgcgctaccgcggccggattgtgctgacgcgcgacccggacggtgaggagcgctgtgtcgcctgtaacctgtgcgccgcggtatgtccggttggctgtatctctctgcagaaagcagaacatgaggacggccgctggtatccggaatttttccgcatcaacttctcacgctgcattttctgcggattatgcgaagaagcctgcccgaccaccgctatccagctgacgccggatttcgaactgggtgagtttaagcgccaggatctggtgtatgaaaaagaagatttattaatctccggtccgggtaaatatcctgactataacttctatcacaaaaccgggatggcggttgcgggcaaagccaaaggcgaagccgacaacgaagccaggccgattgatgtgaaaagtctgctgccataa

SEQ ID NO: 273714 - DNA, 537 bp, Morganella morganii
atggaaattaccttttatgtcgccggactgatcgccattctggccacgctgtgtgtgatcacacagaccaacccggtgcatgcgctgctgtatctgatcacgtcgctgctggcactctctgcggtcttctttgctctcggcgcctatttcgccggggcactggagattatcgtctacgcaggtgccatcatggtgctgttcgtgtttgtggtgatgatgctcaacctcgggcgggcggttgtcgaccaggaacgcaaatggctgtccccgtctgtctggatggggccgggcctgctttcggcggttctgctcggcgtgatgatttacggcatcagctctctgaaagataacggtatcgccggtgaggtggttaccgcgaaacaggtgggtatcagtctgttcggcccgtatgttctggtggttgaactggcctccttcctgctgctggcgggtctggtggtggcataccacatcgggcgtgacgaaaaagcgggcggcgatattgtcagtcagcgcaacacggaggaaaaagcatga

SEQ ID NO: 273715 - DNA, 303 bp, Morganella morganii
atgatccctctgcaccacggattaattctcgcggctgtgctcttcatcctcggtttcacctgtctggtgatccgccgcaatctgctgtttatgctgattggtctggaagtgatgattaacgcggcggctctggcgtttgtcgtcggcggcagctactggaaccagccggacggacaggtgatgtatatcctggccatcagcctggcggcggctgaagcgagtatcgggctggcactgttgctgcaattgcatcgtcagcgtcaggatctggatattgataaagtcagtgagatgcgcggatga

SEQ ID NO: 273716 - DNA, 1842 bp, Morganella morganii
atgaacttactctttttaaccattttgctgccgctgattggctttctgttattagccttttcacgcggccgctggtcagaaaatgtgtcagccaccatcggcaccggttcggtgggacttgcggcacttacggcgctgtgggcggggatggatttcttcgccagcggcggcggagtgtatcagcagacactgtggacatggatggataccgcttccttctccatccctgtcaccctggtgctggacggcctgtcgctgaccatgcttggtgtggtcacaggtgtcggtttcctgatccacatgtatgcctcctggtatatgcgcggtgaagagggctactcccgcttcttcgcttacaccaacctgtttatcgccagtatggtaattctggttctggccgataacatgctgctgatgtacctcggctgggaaggggtggggctgtgcagttatctgctgattggcttctattacaccaatccggctaacggcgcggcggcaatgaaagcctttatcgtcacccgtatcggtgatgtgttcctggcgatcggcatgtttatcctgtgggataaactgggcaccctgagcttccgtgaactggcggttctggctccgcagcatatcgcggccgggtctgacctgattttctgggcaaccctgatgatcctcggtggtgcagtcggtaaatccgcgcagttaccactccagacctggcttgcggatgccatggccggtccgacaccggtttcggcactgatccacgccgcaaccatggtaaccgcgggtgtgtatctgattgcccgtacccatgagctgttcctgttatcaccggaagtgctgcatttagtcggcgtggtcggtgctgtcaccctggtgatggccggttttgccgcactggtgcagacggatatcaaacgtgttcttgcctattccaccatgagccagattggttatatgttcctggcgctcggtgtgcaggcgtgggatgcggcgattttccacctgatgacccatgctttcttcaaagccctgttattcctggcctccggctcggtgatcctggcctgccaccacgagcagaacatctttaagatgggcggactgcggaaaaaaattccgtttgtctatctctgcttcctggtgggcggtgccgcactggccgcactgccgctcatcaccgccggtttctacagtaaagatgaaatcctgtggggcgcggtggttcagggtcagaacccgctgtttatcgccggtctggtcggtgcctttatgacatcgctctataccttccggatgattttcatcgtgttccacggcaaagagcatacacaggcgcatgcggtgaaaggctttacccatactttccctttactggtgctgatggtgctctccactgccgccggtgcctttatcccgcaaccgctgcacggcgtgttcccggcggaaaccattaccggttctgctgacggcaaactgactaccgaaattatttccggtgtggttgctgtggcggggattgtgctggctgcaatgctctggctgggccgtcgtacgctggtgacagcggttgcgaattccgcgccgggacgcttcttctcggcctggtggttccgcgcatggggctttgatgacctgtatgatgcgatttttgttaagccgttcaaagcggtgggctggttgctgcagagtgacccgctgaacagcctgatgaatctgcctgcgctgtttgcccgctggagtaacaaaggactgagcctgagtgaaaacggacaggtccgctggtatatcgcctctatggggctgggtgcagtgctggttctcgctctgctgtttttggtttaa

SEQ ID NO: 273717 - DNA, 1521 bp, Morganella morganii
atgctattaccctggctgattttacttcccttcatcggcggcctgctgtgctggcaggctgagcgcttcggcacaaagctgccgcgctggatcgcgctgctggcgatggggatcacgttatttctttctctgtatctgtggatgcaggggaactacagcttagttaacccgaaaggtgttccggactggcaggagcagtatttcctggagtggatcccgcgtttcggtatcaatattcatctggctctggatggtctgtcgctgctgatggtggtgctgaccgcgctgcttggcctgctggctatcctctgttcctggggggaaaaccagccgtatcagggcttcttccatctgaacctgctgtggatcctcggcggtgtgatgggcgtgttcctggcaatggatcttttcctgttcttcttcttctgggaaatgatgctggtgccgatgtacttcctgatcgcactgtggggacacagcggttccgacggcaaaacccgtatcggggcggcgaccaagttcttcatctatacccaggcgagcggtctggtgatgctgattgccattatggcactggcgattgttcatcataacgccaccggccagtggagcttcgcgtatgaagatctgctgaacacgccgatgagttacggtgtgcagtatatgctgatgctgggcttctttatcgcatttgcggtcaagatgccggtagttccgctgcacggctggctgccggatgcacacagtcaggcgccgacagccggttctgtcgacctggcggggatcctgctgaaaaccgcagcttatggtctgctgcgtttcagtctgccgctgttcccggaagcttctgcggacttcacaccaattgcgatgtggctgggtgtcgtaggtatcttctatggcgcgtggatggcgttcaaacagacggatatcaagcgtctgatcgcctacaccagcgtgtcacatatgggctttgtgctgattgcgatttactcggcgagtatgctggcgtatcagggggcggtggtgcagatgattgcacacggtctgtcggcggcgggtctgtttattctgtgcggtcagttatatgagcgcctcggcacccgtgatatgcgccagatgggcggtctgtggaagcggattaagttcctgcctgcactgtcactgttctttgcggtggcaacactcgggatgccgggcaccggtaacttcgtcggtgaattcatgatcctgttcggcagcttcggcagctacactctgatcaccgtgatttcctcggcgggtctggtgtttgcctctgtttacgcgctgtggatgatgcagcaggcgtattacggtgcaccgaagtcggaagagccaatcgcgggcatgaatctgcgtgaattttccatcgtgatgctgctggtggtcttactggtgattctgggtgtttacccgcagccggtgctggatacctcgtctgcggcgatggcaaacattcagcagtggtacactgcttcaatttcaaatacagggttgtaa

SEQ ID NO: 273718 - DNA, 1458 bp, Morganella morganii
atgacaataactcctcaacaactgatcgcactctcaccactgctgattatcgggttgacagtggtggttgtgatgctgtccattgcgtggcgacgcgatcactttattaatgccacactgaccgtcattggtctgaacctcgcgctgctgtctctgtactttgtcggacagcagccggcgatggatgtgacaccgctggtgcacgtcgacggctacagcatgttttacaccgggcttatcctgatttcgtcactggccaccacgacctttgcgtattcgtggctggagacctatccggataacaaagaagagttctatctgctggtactgattgccacactcggcggcatcctgctgtcgggtgcggatcacctggcatccttctttatcgggattgaactgctgacgctgccgctgttcgggctgatcggctatgccttccgtcagaagcgttctctggaagcgtccatcaaatatatgctgatgtcagcggcggcctcgtcgttcctgctgttcgggatggcgctgctgtacgcggaatccggtgacttatcttttcagggcttaggccgcagcctggcggacagtcagattcaccagccgctggtcctgaccggactggggatgatgattgtcggtatcggctttaaactgtcactgttcccgttccagttatggacaccggatgtgtatcagggtgctccggcaccggtctccacctttctggcaaccgccagcaagatcgggattttcgctgcggtgctgcgcctgctggtactcgcgccgatggcggattccgggacattgcagatcgttctgacggtgattgcgattgcctcaatcctgttcggtaacctgatggcgatcacccagaacagcatcaagcgtatgctgggttactcttcgatcgcacacctcggttatctgctggtggcctttatcgcggtgaatgacccgaaactggcggaagaaacggccggtatctatctggccggttatctgtttgccagcctcggtgcgttcggtgtggtcagtctgatgtccagtccgtacaccgggccggatgcggattccctgcatgcctatcgcggcctgttctggcgtaagccggttctggctgcggtcatgaccgtgatgatgctgtccctggcgggtatcccgatgacgttcggctttatcggtaagttcttcgtggtggcgaccgccgtgaatgcggaactgtggtggctgacagccgctgtggtcctgggcagtgcaatcggtctgtattactacctgcgtatgatgatcagcctctatatccgcggttcagaatcaccggcccgtatggcaccgtccaactgggcgatgagtgcaggcggtattgtggttctgctctccgcgattatcgtggtcgtgcttggtatctggccgcagccgtttatcacactgaccggatttgcagttctgagttactga

SEQ ID NO: 273719 - DNA, 987 bp, Morganella morganii
atgatatattctgacatcagtcctgaaaacattaccctggcacatattaaagctaaaattaatgatatcagtaaaaatattgaaacattatcattgcctaccgctgagctgcatgctcagctccgtgatattaaaaaatggcagacacggatgctgaatattatttcatcagaatccgcaaccatttattctcagctgcacaatttagatcctgatattctatttaattccctctctgcggataacggagctaattctttttcactgcctcatgaaaaacagatttacgggtttttgctcagtcagattaataccatctatcattccgtgaatacgattaacactcagtttaatactgaatatgatgctaccgcgctcccgttactgcagggcggattattacatcagcagtcctacctggacaaaacgatcaccctggcactgccggatattgaaaaattcacctgtgataaattatattgggaggaaaaactggctgtgattattcagtcagaagagattattcatcagcgcggatttcagtcaatcttcggtacaaccacactgccaaccgctgaacaactgaaggatgtggagttatcctcttccgaacgatttattctcaatgaactccagcgtgttatttccgctgtagtaaatactctgacagaggggctgagctatgctcagctggtcgataccagaacaacagtcagtcaacggatctatgacctcagtaaaattatccgtaatctgaaaaaagacctgaaacacatgcaggatcagatgcaggaagtcagtaatgcgcaggtgttactgcctgagctgcgggaatttaacaaccggatcagtacggtattattgcactggctgcaaagtgtcagtcagtatgagccttatttaagccagaatgtccctcttcctgggctcgatagccttattctggcgcaccgccgctatttttcggtctttatcggtatggcataa

SEQ ID NO: 273720 - DNA, 1200 bp, Morganella morganii
atgcacacacaaaccatgccggctgaccggcttattacagctgatgaaataggcccggccacattaaagttacttcttaatgaagaggaggatactttccgggctgcaggtatattcacacataatgatctggttcatatcaaacgctacattaattacggaatgacactcccgagggaaaaagaagacgtaattgagtttatcggataccgcgatactgaactgcccggttttgagcctcataatatacagagtttattcattcatgttcaccagcacgcactgagctgggatcatgttgaatccatgaccaaacaacaggctattgatcttgaaattgccggttccgctattacagcaaccggtagctatattcttgatgccatcaatgaaatgccggtgatccgcagggctgaaatttcattacaggatgcaactgcagataaattaagagatattacttacaggaggcaggataacattatttcaggagaactgacaaaaatactgtcagcaatgaaagacgatattgcggaggaacgacgaaaaacgcagaaggtgaaaaatatcatttcacgcttccggctggaaatgatcggcggagccgatgaatccggtaatgaaattccgtcgctgatttatgacgtcaaacgtaaacagaaaatattattaaagaatcaggacagcgatgccaccaatgatctgctgtctgaaatacggatcagaaatgaagagattgaaatcctgaagcgggagtacaatcagtttgtgaagctttcattctccggtctgatcggcggtatcatcgggctgattatcacagggggtatttttggttaccgcgccgaacaggtacgccgccgtaaaaataaattactggaagaagtagcagagctcgaagaacagattatttcccggcaagctatacaacagctgattatcagactggataaagaactgagcacactggacggttattttactgatgcccatgttgccgtcgatcatctcgatttcatgtggcaggtcatgctgacagaaattactgaatccctgaatacctttatgcagataaatgatgcatacagcctattacaattttctttgcatctgaaaaaaatcacacttccctggcagcgtgttcgtggctatgcaaaagaacttgtcgctgtttttgataccgctaatctggcagcataa

SEQ ID NO: 273721 - DNA, 1332 bp, Morganella morganii
gtgactcttttttctgattttatttctcaggtctgtactgaaataacgcataacaaaaataaacccgatggtatttatcagtacgctgtgactctgccgccgtcactggcagcggtattccctccgtcagcgctgaccggctggctgaatgcgcagacctgctggccgcaattctattggcagcaccgcgacggcacagaaacagcggcagtgtgcggggaagtgtgtcgtttcacgcatatcagtgatgctcaggcgctgctggataccttaccggcacagagtcaaatccggatctgggggctgaacagctggcagtttgataccccgtctccggcacagggtaccggcggcagttatctgtttgttccccgcaccgaactgcggatatccggcagtgaaacacagtttctggtcaatattgacagccgccgcccggcggaagagaccacagaatttctgcgttcgctggtctggcagacagaaattccggccttgaacagcacggttatcagtgcgcggcatcagccggatgaagcaggctggacacaactggtgacggatgcggtgacggctatcaccggcggcgaaatggaaaaagtggtgacggcccgtaaaaccgcactggaactgtccgcaccggtctccccggcggcctttatgcaggccagctgtgactgcaatcatcactgttttcactatatgcttgccaccggaccaaatactgcgtttgtggcttcaccgccggaacgcctctatttcagagccggggctcagttgtataccgaagcgctggcgggaacagtggcaaactatccggaagatgaccgcgcggcacaagcggcgcaatggcttctggctgataaaaagaatgtgcatgaaaacagtgtggtggttgatgatatttgtcagcgcctgcagggagctgtcagtgcgctggatgtgagtgcggcggcggtgatccgcctgcgcaaagtgcagcatctttaccgtgttatttctgccacattatatgccccccgtgacagtaattgtttacagcgtcttcagccgacggccgccgttgccggtctgccgcgcagtgccgcgctggcctttttgcgtgataacgaaccgtttgaccgtgactggtatgcgggcagcggcggttattgcagtccgtcacgcagcgaatttgcggtgtcgctgcgctgtgcgaaaatcagcggcagccgggtggatttgtatgccggggcaggcattgtcgccggttcggatccgcaggcagaatggtgtgaaatcgaaaataaagcagcgggtctgagaacactgctggagagcgacgctcactga

SEQ ID NO: 273722 - DNA, 1671 bp, Morganella morganii
atgtcaaacagtgcattgaaccgccgctgggcggaagtgattttggaggcgctgagccgtcacgggttgcgtcatatctgtatcgccccgggatcccggtcaacacccctgacactggctgccgccggcaatgacaaatttatctgtcacacccattttgatgagcgagggctcgcgcatctggcgctggggctggcgaaaagcacccggctgccggtggcggtgattgtcacctccggtacggcggtggcaaatctttatccggcactgattgaggccggactgaccggcgaacgccttgtttttctgaccgccgaccgcccgccggaactgattgactgcggtgcaaaccaggctatccgccagcccggtattttttcttctcatccgtttgccgcactggcgctgccgcgtccggtctttgatatcccggcgtcctggctggtctcttccctcgatgacatcatgaaccgcctgcagcacggcgcagcgcatattaactgcccgtttgctgagccgctgtatgatgatgacggacagaccggcaaagaatggcaggcacaactcggcaactggtggcagagtgataaaccctggttgcagcagacccgttgcacatcggtgatcagcgtggatgactggttcttctggcggcagaaaaaaggcgtaattattgccggacgtatgcaggccgccgaaggtaaacagttgcgccagtgggcggaatgcctcggctggccgctgataagcgacgtgctctcccagaccggtcagttgttaccgcatgcggatctctggctggcatctccgcgttaccgcgaagtactggctcaggctgatgtggtgatccagttcggctcaagcctgaccggtaaacggttgttacagtggcaggccgcctgcacaccgccggaatactggattgtggataccatcccgggacggctggacccggcaaatcaccggggccgtaaatttgaatgcagcgtcagtgaatggctggatgatcatccggcacaaacccgcacaccgtgggctccgcaactggcggaatggacgcgggcactgaacacgcatgttacagaaaccctgggcgatggctggggcgaagcgcagattgcctgccgtctgccggaactgctgccgccgcagggtattttatttgccggtaacagtctgattgtccggctgattgatgcgtttgctcagctgccgtgcggctatccggtatacagcaaccggggcgcgagcggtatcgacggcctgatttccacagcggccggtgttcagcgcggcagtgccaaaccggcacttgctgtcgtcggggatatctccgcgctgtatgatcttaacagcctggcgctgctgcgttacacctccgggccgtttgtgctgctgatcgtcaacaataacggcggacaaattttctccatgctgccgacaccggagcaggagcgtcagcgcttttactgcatgccgcagtcggtcagttttgccggtgcggcgcagatgttcggcctcagttacagtgccccgcaggattggccgtcactgaaagccgccgtcagcaaagcctggtcacagcactccgcgaccgtaattgaggtggtgacaaacggcgacgagggcgcaaaataccttcagcagctggttcgtgaggccgcacaatga

SEQ ID NO: 273723 - DNA, 774 bp, Morganella morganii
atgacggttctggccgcacagcgctgttatgcggacaggcccggtccgtggctggtctggctgcacggtctgtggggaaataaagaagagtggctgacggcagcagcagaagccggacattatccttcattactgattgatttaccgggtcacggtggctcacaatccgtccgcgcaaaaaattttccgcatgtcagtcagctgattgctgataccctggccgcacatcaggcagacgattactggctgattggctactctctcggcgggcggctggcgatgtatcacgccgcatacggtgaccgggctgggttgcgcgggctgattattgaagccgggaatcccgggcttgccacactcgatgagcgcaatgcccggctgctgcatgataaccgctgggcacaacagttacgtgaacgtccgctggcatcggtgctgtatgactggtatcgtcagggcgtttttgctgatctcaatgaggttcagcggcagcagcgggtagaacagcatctgcatcataatgcttttgcgatcgcggatatgctgtcgggcacctccctcgggcatcagccgcagctggcggagaaactgcatgccctgaatctgccgctgctctatctctgcggtgagcgggacagtaaattccgcgccattgcagaggcacaccattttccgttacggactatccaatatgccgggcataacacccatcaggcaaatcccgccgcgtttgcggaggcagtccggacatttttatcatcacattctgtttaa

SEQ ID NO: 273724 - DNA, 858 bp, Morganella morganii
atgatgtatccgagcgaagaaaagctctctgccccggttgaatgggtcgactgcaccggcgattatcaggatattctgtttcataaatcaaaagacggtatcgccaaaatcaccattaaccgtccgcaggtgcgcaacgcgttccgtccgttaacagtgaaagagatgatcagtgcgctggcgaatgcccgttatgatgacggcatcggcaccattatttttaccggacagggcgaaaaagccttctgtgcgggcggtgaccagaaaatccgcggtgattacggcggttaccgtgacgacagcggcactcatcatctgaatgtgctggatttacagcgtgatatccgtacctgtccgaagccggtggtggcgatggtggcggggtatgctatcggcggcggccatgtgctgcacatgatttgcgacctgaccattgcggcggataatgcggtattcggtcagaccgggccgaaagtcggttcatttgacggcggctggggcgcttcttatatggcgcggattgtcggccagaagaaagcccgtgaaatctggttcctgtgccgtcagtacaatgcacaggaagcgctggatatgggactggtcaacaccgtggtgccttacgcggatctggaaaaagaaaccgtgcgctggtgccgtgagatgctggaaaacagcccgatggcgctgcgctgcctgaaagcggcactcaatgcggattgtgacggccagtccggtctgcaggagctggcgggtaatgccaccatgctgttctacatgaccgaagaaggtcaggaagggcgtaacgcattcaacgaaaaacgctcaccggatttctctaaattcaaacgtaacccgtaa

SEQ ID NO: 273725 - DNA, 972 bp, Morganella morganii
atgcgccacgccacattatacagtttcagcctgccgatggaggcaggcgttattctgcgtaatcagcgcctgaaaacccgcgacggcctgctggtctgtctgcgggaggatggccgcgaagggtggggggaaatctccccgctgccggaattcagccgtgaaaccctcaccgaagcacaacaggcggcggaagcgtggatcaccgcctggtgtcagggcagctttccggcggaaagtccgctgccgtcagtcgcattcgggctgagctgtgcactcgccgagctggatgatacgctgccgcagatcctcagtacccgcaaagcgccgctctgtaccggtgacccggatgacctgatccttgcgctcgatgccatggaaggtgagaaaatcgccaaagtgaaagtcgggctgtatgaggcggtccgtgacggtatggtggtcaatctgctgctggaggctgtgccggatctgcgtctgcgcctggatgccaaccgcagctggacccgtaccaaagcggacggtttcgcgaaatatgtggcaccggaacaccgcgcccggattgattttctcgaagagccgtgcagaacgccggaagaatccctgtgttatgcgcaggataccggtattgctatcgcctgggatgaatctgtccgtgaaccgggatttacggtaaaagcacagcccggcgtggcagcgattgtgatcaaacccacgctgacgggcagtatcgcccgctgccgtgaactgatcacagcggcgcaccgcgaagggttgcaggcggtgatcagttcctcggtggagagcagtttcggcctgacacaactggcccgtcttgccggatggctgacgccggataccctgccggggctggatacgctctccctgatgcagtcacagctggtgcgtccgtggccgggcagcacactgacactgataaccgcagatcaattaactcagacaggacaatggtaa

SEQ ID NO: 273726 - DNA, 1392 bp, Morganella morganii
atgacggcagcacaatggccgtgggttgcgcatgctcagcagacaccggacaaaaccgcgctgcgctgtgcggactcatcgctgacatggacagaactggcggccctcgcggatgcccgcgccgccgggttttatcagcagggattgcgggaaagtaactgcgtggtgctgcgcggcaaaaacagcacagagctggtgatcgattttctggcgctgctgcgctgcggggcagtgattctgacactcaatcccgcactgccgcgcgggttacagacagaactggtcgcgtctctcgatgcggattatgtgtgtgaccgcagcgacggtacaatcgcgctgccgctgaaaacactggatccgtccgtgaccggcacagcaccgccggacgtgatcccgcatccgaaacggctggcaacactgatcctgacctccgggtccaccgggttaccgaaagccattgcccaccgtccggtcgcgcatctggctgcggcacagggtgtggtttcactgcttaactatcaggcgggtgacagctggctgttatcgctgccgctgtgtcatgtttccggccaggggattctctggcgctggctgctgcagggcggggaaatggttctcagggcggaaggggaaacgctggcggaatcgctgcgcggatgtactcatgcttcgctggtgccgacacagctctggcgtctgctgcagtcaccggacacgctgccgccgctgcgggatgttctgctcggtggtgcggctatccctgttgcgctgacggaagcggcggaagcccgcgggatccgctgctggtgcggctacggtatgactgaatttgcctcaactgtctgtgccaaacgggcggacggcaaaccgggtgtcggacatccgctgcacggcaaagatatccgcctggatgaacaacagcaaatcctggttaaaggtgacagttttgctgccggtgtctggctgaatggtgcactgcatacactgccttctcatgacggctggtatccgacccgcgacaaaggccatatgcaggacggtgagctggtgatcgacggacggctggataatcttttctgctgcggtggtgagaatgtgcagccggaagtgacggaaaagcagctgatgcactatccgctgatcacggagtgtctggtggtaccggtcagcagtgaggagtttggtgccgtgccggtgtatctgatccgtgattatgatgactggacagacgagcagcggcagcatttcagtgactggtgcctggcggaactgcctgcatttatgcgcccggcggcctgctatgcattaccggaagcagatgcgggcagcggcatcaaacgcacccgcgcaccgctgattcagatggcgcaggatcgttttcataccaactga

SEQ ID NO: 273727 - DNA, 1443 bp, Morganella morganii
atgaaaaagaaaggattaacaacggctgcgggcgcccccgtcgttgataacaacaatgtcatgactgccggaaaacgcggcccgatgctgttacaggatgtgtggtttctggaaaaactggcgcattttgaccgcgaagtgatccctgagcgccgcatgcacgccaaaggatccggtgcgttcggtacatttaccgtcacccatgatattacccgttttacccgcgcaaaaattttctctcaggtcggtaaaaaaaccgatatgtttgcccgcttctccaccgtggccggtgagcgcggcgcggcagatgcagagcgcgacatccgcggctttgccctgaaattttataccgaagaaggtaactgggacatggtcggtaacaacaccccggtgttctaccttcgtgacccgctgaaattcccggatctgaaccacgtggtaaaacgtgacccgcgcaccaacctgcgcaatatggcttataagtgggactttttctctcatctgcctgaatccctccaccagctgaccatcgatgtcagtgaccgtggtctgccgcagagctaccgccatatgcacggcttcggcagtcatacttacagctttatcaacggtaataacgagcgtttctgggtgaaattccatttccgctgccagcagggtattgccaacctgatggatgatgaagcagaacagttaatcgggaaagatcgtgaaagctcacagcgtgatctgttcaatgcgattgaaaaaggcgattatccgcgctggaacctgcaaattcaggtaatgccggaaaccgatgcggcaaaagtaccgtataacccgtttgacctgaccaaagtatggccgcatgcggattatccgctgatggatgttggttatttcgagctgaaccgtaaccctgaaaactatttctccgatgtggaacaggcggcattcagcccggccaacgtggttcccggcattggtttctcaccggataaaatgttgcagggtcgtctgttctcctacggcgatgctcaccgctaccgtttaggggtcaatcaccatcagatcccggtcaataaaccgcgctgcccgttccacaactatcaccgtgacggtgcaatgcgtatcgacggtaacagtggtaatgcggaaacgtatgagccgaacagtgccggtctctttcaggaacaacctgatttcagcgagccgccgctgtctgtggacggtgccgctgaccactggaaccaccgcgaagataccgattacttcagccagccgcgtgcgctgtatgaattactcagcgacgccgagcatcagcggatgtttgcccgtatcgccggtgaactggtacaggcagccgaagaaacacaagcccgccagatagcgctgtttaaacaggtgcatccggagtacggtgccggtgtggaagccgcgatcgcgaaactgaaaaaataa

SEQ ID NO: 273728 - DNA, 540 bp, Morganella morganii
atgaaaaaatataaagcagctgtggctgcaacactaatgcttgcggcaggtgctgcaaacgcaatctctatggatgttgaagccggtaagaaatttactgatatcaatgtgggcttaggtgacccgtactccggtctgtcatttgacggtaactgggcgcgcagtgatcaccaggggcagttaggcggcgcgcgtgccaaatttgctttcccgctgggcccggtttccgcgagtgtcggcggtaaagcggtttacatcgatcctgaagtgggtaagaaaggcatggccgtggcaccgggtgtcggtgtggcatggagcattctgccgtcagtacgtgtttacggtgagttttacggtgcgccgtcaggcctgacttccggtaacgactcttataaagaagcggatgtcggtgcaaactggacagtatttgccccgctgaatgtaaaagccggttaccgtaagattgaagttgaatccaacagcggtcatgaaaaccgtattgcggatggcgcttatctgggcgcaggtctgagtttctga

SEQ ID NO: 273729 - DNA, 570 bp, Morganella morganii
atgagctctgaccgtattgcgaatccaggcccgctgggcttactgggatttggtatgacgactatcctgctgaatgtccacaacgccggattcttcccgatggcttctgttattctgagcatggggattttctacggtggtattgcgcaggtcatcgcgggtatttttgaatttaagaaaggaaatacgttcggtgcgactgcctttacgtcgtatggctttttctggataagtctggtcggcatactactgatgccgtcaatgggattcggtgaagcaaccagtcatgaattcctggctgtctatctggcactgtggggtattttctcgttctttatgtttattgccacactgaaagcaaacctgaccctgcgcgcggttttctttttactggtgattttatttgccctgctcgttatcggtaatgctaccggtaatgccgcattactgaaatttgccggttatgaaggtattttatgtggtgcgactgcattttatctggcaatggctgaagttctgaatgaacagtatggccggacaattttaccaatcggtgaacgtcacgcctga

SEQ ID NO: 273730 - DNA, 201 bp, Morganella morganii
atgatttcagaacgagttagcgacgcatatatttatggcgaaatttgccaggcaatcggcagagccgctgtccttttatgcaaaagtggcgagccggttactaaagaagccattcaggtgatgccggaaatatattgggaacagcagaatgatgactttatgaatgtcatctatgagaaagcgatcaatgcactggactga

SEQ ID NO: 273731 - DNA, 1455 bp, Morganella morganii
ttgaccgatataattaatacattaaacggactgctctggaaccacctgctcatctatttattactgggtatcggactgtacttcacatttcgtaccggatttatccaattccgtcacttcggacacatgttcagcgtgctaaagcacagtaagaaatcggataaatccggcatctcgccgttccaggcgctctgtacaagcctggccgcgcgggtcggtaccggaaacctgaccggggtggctatcgccctgactgcaggtggccccggtgctatcttctggatgtgggtggtcgccctgatcgggatggcaacatcctttatcgaaagcacactcgcacagctctataaaacacgggacgaccagggaaattatcgcggcggaccggcatattatatggaacgcggactgaaagcccgctggatgggtgtgttgttctctgtcttcctgatcatcgcgttcgggctggtctttaacgcggttcaggctaactcgattgcccaggcgtccaaaatggcctttggtgcggatgccggttatgtcggtgccctgctggtggttatctgcggcgtgattattttcggcggtctgcgctcgattgcccgtgtggcggagctggtggtgccggtgatggcggttgcgtatcttatcctcgctttctgggtgatggggcattacgccgagcgtctgccggatgtctttatgctgattatcaaaagtgcctttggtttacaggaagccgtttccggtgctgtcggttacggcgtggcgcaggccatgattaacggcgtgcagcgcggtctgttctcgaatgaggccggtatgggctccgcaccgaatgctgcggcttctgctgcaccgttcccgccgcatccggtttcccaggggtatgtgcagatgctgggggtctttatggacacactggttatctgcagtgccaccgcgatgattattctctcctccggggtgctggataatccgctgggcgatatcaatggcattgagatcacacagctggcgctgagctcggttgtcggcagttggggatccacctttgtggccgtggctatctttttcttcgcctttacttccattattgctaattacgcttatgcggagagcaatatggtgtttctcgagcataaacacaccaaagggctgtttgtgctgcgtctggcggcgctgggaatggtgatgttcggggcgctgtcagaaatgccgctggtctggaaaatggctgatttctcgatggggctgatggcggtgactaacctgattgctattctgttgttatccggcgttgcatttaagctggcgaaagattataaccaacagcgcaaaacggggaaattaccgcagtttgatatcaacctttatcctgaaatccgtaaacaggtcgaagacggcatctgggaagaagtaccggaaccgctggtcgaacaaaaggttaactga

SEQ ID NO: 273732 - DNA, 651 bp, Morganella morganii
atgaaacaaaagcattggtccgtttgcgaacggctgcatgaaaccgttacaaacccgaatattcatatcaaaggtacgcacagttattacagcgattgctgggataatggctttgaagcttctgttgtccgctatttacagggcgatgaaatcagccgcgactggcagctcagctggaaagtagatgagctgtatatcggggattatgtctgtatcggggcagaagctgtgatcctgatgggcggcaatcatacacaccgccatgactggttcagcctctatccgtttccggatatgattgatgaggcttatatcggtaaaggggataccaggattggtgatggtgcctggataggcatgcgggccatgattatgccgggtgtgactatcggggagggcgcagtgattgctgcgaacagtgtggttgtccgcgatgtaccaccctatgctatcgttggcggtaatccggctgcctttatccgcagccggtttgatgaaagtaccatccgcgaattgctggcgcagtctctttatgactggccgcaggcgaagtttgatgccctgaaaccgctgatttgttcggcagatcttgccgggctgaaagcagcgtcagaacagtatgacagaacagaaaaactcactcagtcataa

SEQ ID NO: 273733 - DNA, 612 bp, Morganella morganii
atggatatttacacctacccgaagtcgcgctccatccgtgccacctggatggcagaagagctgagtcttgattatcagtgtcactttaccgatgtgatgtccgctgaaaagcaggtccccggaaaaaaccagaaagtcccggcactgtctgataacgggctggttatttttgaatcctccgctatctgcatttatctggcacaaacttacggcaatggccgcttttacccgcaggatccgaaaaaacaggccatcgtaaatcagtggcttgcctatattatttcggagctggaaggtccgctctggatcatactgagacacgccgtggttctgccggaagctatgcggcagccgggggcaattgaaccggcaaaagcggattttctgcgggcaattaaggtgattgagcaggagatcagcggaaaaacatggctgtgcaatgatgatttttctgtggcagatatcttcttatttcatatctcacgctgggcaatgatgctgggctttgtattgtcagaggatttggtgcattacaccggcgagctggaaaagcgcccggcattgcagcgcgcccgtcagcgggagcaacaggcggctgaaaacgcacgataa

SEQ ID NO: 273734 - DNA, 828 bp, Morganella morganii
atgtggcgtagtgtgtgtctggtgtgtgcgctggtactgacaggatgcagtaatcagagccagtatattgatcgcggtgagtatattgttgatcagcgaagtatcaaagagccgtggctatccaaaccgaataattatctggttttccattataccgcactgaatgatgaggcatcgctgcgtgtgctgactgccggtggagtgagtgttcagtatctggtgccgacaatccctgcggtgcgtgacggtaaaccggtggtattgcaactggtgccggaaggcaatgaagcctggcatgcgggaaaaagtcactggcgcggggaaaacagcctgaataaaagctcgatcggcgtggaaattgtcaatccaggcacagtgaaaatgtctgtcgggcagcgctgggtgccgtatcagactgcacagatagacctgattgtaaaactggcacaggatgtgatagcgcggcataacattgccccgcagaatgtggtggggcacagtgatatcgcgccgcagcgcaaactggatccgggcccgatgttcccgtgggaatatctggcaaaacgcggggtcggtgcctggccggatgctcccgatgtaaaacgttttctcggcaaccggcatccgtcggataaaatcagtgtcggtgaattacagcaggcactgaaaaaatacggctatgagatcccgctgaccggtaaggcggacggaaaaacccgcaatgtgattaaagcgttccagatgcatttccgctctcacaaggtgaacggggaagcggatgcggaaaccctggcactggtgaaagcattgctgaagaaatataactga

SEQ ID NO: 273735 - DNA, 1323 bp, Morganella morganii
atgttttcaacaaaagacatgctcgttctcgggatgatggtttttgcgcttttcctgggtgcgggcaacataatttttccgccgatggcgggttatcactcgggaactgactggttcaatgcctctctcggatttatcgtcaccggcgtcgttctgccatttctcaccctgattactgttgcggtcaaaggccgtggtgagcggctttctgtcgatctgccgcgctgggtttctgtgacattctgggtggcgctctatctgatcctcggctcaacattcgccatgccgcgtgtcaccaacaccgcgtatgaactgggttttctgccgctcggtttcgttgagaaaagcaccgccagccatctgatttttgcctttgtatttaacttcgtttctatgttttttatgcttaaacagggaacgatgatcagtgccatcggtaagtttatgaccccggccctgctgttcctgctggttgccgtggggatcgccgtggtgcgcaccccgctctccccgattaatgaaccgatcaatcagtatgtggattttgcgttcttctccggtattgtcgatggttatcagaccatggatgtgctgtccgcaatggcattcggcggtattgttgcccgtgcgctggcctctcgcgggatcacctcaccgcaggacgtggtgattatcactatcaaagccgggctgattgcagtcggcctgctggctgcactctacatctgtctgttctacctgggtgcgaccagtgatgctgtttcacagacagccaccaacggcggacagattttctcccgctatgtcgatgccctttacggcgcgctcggtacctggctgatgtgcagtatcgtactgctcgccagtatgaccacctttgtcggcgtgaccagtgcctgtgcggatttcttcgcgacattcaacccgcgcctggattaccgtttctgggtggtggtatccacactgctgaccaccattgtctccaccttcggccttgatacgctgctgcgcgtcaccattccggtgctgctgctgatctacccgaccactgttgcactggtgttcctgcagtttgcccgccgtaaaatgcgtaacccgcgctttacctacggctttactgtcgcggtgctggtggtgatgagtgcgttcgacaccctgaataacatcggtctgctcaatgaaaatgtgctggcagtgttacaccggatgccgctttttaaggaagggatcggctggttactgccgggcgtgattgcctttatcatctcgtttgttgccggcaacatgagaccggcaaaaccgcagccggatgcggccgcgtaa

SEQ ID NO: 273736 - DNA, 807 bp, Morganella morganii
atgtccgtaaaacttatcgccattgacctcgatggcaccctgcttaactctcaccatcagattacccccgctgtcagtgctgctgtcacccgcgcaaaagagaaaggtctgcatgttatcctgacgtccggccgcccgtttaacggcattctgccctacctccgtgaactggggctggataaagagaatcattactgcatcagtaacaacggtgcggtgatccatgatgccgaaaccggcgagccggtgattgaaacgctgatggattttgaggattaccgctattttgaggcgctggcccgggatattaacgtgcattttcatgtactgagcaacggcgaaatgttcaccacaaaccgtgatatcagccactacaccctgatggatgcttacctgacacaaacacagctgcactatcgtccgctggcagaaatggacagcgaaatgcagttcagcaaatttatgatgattgataacccgctgcgcctgaatgaagccgccgggtatatcccgcaggtctcctttgacagctacaatattctgcggacagcgccgcattttgtggagatctctgccaaaaacgccacgaagggacaggctgttgcactaatcaccgaaaaactggggctgacaccggataaagtcatgtgtatcggcgatcagaacaatgatatttccatgctggagtacgccggggtgggtgtcgcaatgggcaatgccgccgaccatattaagcaaaaatccggatatgtgacaacctcaaatgatgaggatggtgtagcggcagccatagaaaagtttgtgtga

SEQ ID NO: 273737 - DNA, 384 bp, Morganella morganii
atgccgcaagataatcatgtcgcacttgtgtgcgcacttagtaaatggatagaaaaccacacaggtcgtgttatccacctcgaagaactggctgcctattccgggtactcgctctggcatatgcagaagatcttcaaagaagttaccgggatttcgctcggcaaatacatccgtcagcgccgtctggccggtgcggttaacgccctgcgccggagtgaacagactatctttgatatcgcccttgatttcggtttcgggtcgcaatctcatttcacctatatgttccgcaaagaatataacatcaccccttacgactaccgccagaacccggatatcactctggatatcaaagagccgtggcatttcagtcatgactgtaactaa

SEQ ID NO: 273738 - DNA, 135 bp, Morganella morganii
atgaaaaaaatcataattatcctgctgctgattgttgccggtgtatttttttatattgcggcgctcgataagtactgtgatcagcgtgaggattttatgctgggaatctgtgaaattacgaaattttttccgtaa

SEQ ID NO: 273739 - DNA, 1401 bp, Morganella morganii
atgtcagaagtacagcaggagcagacgctcaagcgcgggttaaaaaacagacacatacagcttatcgcattgggtggtgctgtgggtacggggctgtttctgggaacagccacaacgattcagatggcggggccttctgtcctgctcggttatgcagtcgccgggtttatcgcgtttctgatcatgcgccagcttggtgagatggtggcagaagagccggttgccgggtcattcagccattttgcccataaatactggtgcggttttgccggctttttatccggctggaactactgggcgatgttcgttctggtgggcatggcggaactgacggcggtcggcgagtatattaaattctggtgggatgtcccgacctggatctctgcggcagttttctttgtgctgataaacctggtaaacctggtgaacgtcaaggtttacggggaaactgaattctggtttgccatgatcaaagtggtggccattctcggcatgattgcctttggtgcttatctgctgatcagcggtaacggcggcccgcaggcgtctgtcagtaacctctgggagttcggcggatttatgccgcacggctggggcggactgattttcgcaatggcgatcattatgttctctttcggcggcctcgaactggtcggtctggcggcagcggaagcggaaaatccgcgttacagtattccgaaagctatcaatcaggtggtttaccgtatcctgattttctatatcggttctattaccgttatcctttctctctatccgtggacaaaaattgtcgagaacgtcagcccgtttgtgctgatcttccgtgaaatcgggcatgcctttggtgctgcggattctgtgcagggcaatatcaacctgtggattgcccatgtgctgaacgtggtggtactgactgccgctctctctgtttacaacagtggtgtttacagcaacagccgcatgctctacagcctggcccgtcagggcaatgcgccggcatttctgaagcgcatcagtccgcgtggtgtgccggtgaactccattattctgtccggtctggtcacctcagtggggatcctgatcaactacctgctgccgaaagaagcgttctctctgctgatgtcgctggtggttaccacactggtgattaactggattatgatctgtatctccaacctgaaattccgtcaggcgaagatgaaagagggtgtggagccgttctttaaggcactgtggtatccgtggggcaactatatctgtctcgtgttcctggcctttatcctggtgctgattgccctgatggatggtctgcggatttcagtgatcctgctgccgttctggattggcttcctgtggctgacataccgctattatgaacaccgccgtgccgcgagagcataa

SEQ ID NO: 273740 - DNA, 606 bp, Morganella morganii
atgaagctttctttaagcacaatcagcgccctgacgctcacctctctgctgatggccgcacaacccggagcagcacaggaacaggacacattaaaaagtgacagcgtcacaaatgatacggcagcttcagaaggactgtggggaacgtttaaacgcaacgtcaccaacgtctggcaatcagaccagtatgatttatatgtcccgttctggacgtggcataaccgcctgacctacgacaaagaaaaaaccgataaatacaatgaaaagccgtggggggccgggttcggcaaatcctactatgatgaggataatgactggcacagcctgtacgccatggcatttaaggattcacacaataaatgggagccgattgtcggttacgggttccagaagatgtggatgccgcacgggcaggacgggttcaaagccggtgtcggctttaccattggtgtgacggcgcgggatgactatcactatatcccgatcccggtaccgctgccgctggcgtcggtggaatataaccgcctcgcgattcaggccacttatattccgggcacttacaataacggtaacgtcctgtttatgtgggcccgctggcagttttaa

SEQ ID NO: 273741 - DNA, 210 bp, Morganella morganii
atggctaaacttaaaggcaccgttaagtggtttaacgaatcaaaaggttttggtttcatcactccagctgatggcagcaaagacgtgttcgtacacttctctgcaatcatgaccgatggtttcaaaacacttgctgaaggccaacaagttgaatttgaagtgcaggatggtcctaaaggccctgctgctgccaacgtcactaaagcataa

SEQ ID NO: 273742 - DNA, 798 bp, Morganella morganii
gtgagaatcaacgcattaaccattgcaggaacagatccgagcggcggcgcgggtattcaggcagatttaaaaaccttttctgcattgggcgtttacggcaccacggtgatgacggcgctggtggcacaaaatacctgtggtgtaaattctgttcattctgtcccgccggaatttgtcgcagcgcaactggatgcggtactgacggatgtcagaattgacagcgccaagattggtatgttgtctgacggcggcgtgatccgcaccgtggctgagaaactgcgtcagtatcctgtgccgtatgtggtactggatacagtcatgctggcgaaaagcggcgatccgctgctgaaagccgaagcggttgatttactgatctctgaattattacctcacgtttcggttattacccccaatcttcccgaagcggcggcattgctgaaaacgtccgtcgccacagatgaaaaaatgatgctgcggcagggcgaggcactgatggccgccggggcaaacgccgtattgctgaagggcggacatctggataacgccgaaagccctgactggctgtttctgccggatggccgccaccgctttacctcaacccgtattccgaccaaaaacagccatggcaccggctgtacattgtctgcggcaatggcggcactgcggcctcagtgtgcggactgggcggaaaccacggaggcggcaaaacagtatctgcacggggcgctggcggcggcagacagcctggaagtggggcacggacatggcccggttcaccatttttatcagtggtggtga

SEQ ID NO: 273743 - DNA, 897 bp, Morganella morganii
atggaaacgggttcatctgtgcgtcttaataaatacatcagcgaaagcggtatctgctcccgccgggatgcggaccgctatattgagcagggattggtcctgatcaacggcaaacgtgcggctatcggctcacaggtaatgccgggtgatgtggttaaagtcaacggacaactgattgaggcgcgggagcaggatgatctggtgctgattgccctcaataaaccggtgggtatcgtcagcaccaccgatgaaggcgagaaagataatattgtcgatttcgtcaatcacagtacccgtatcttccctatcggccgcctggataaagattcacagggattgattttcctgactaaccacggcgatctggtaaacaaaattctgcgtgccggtaacgatcaccagaaagagtatgtggtgacggtaaataaaccaatcaccgatgattttatccgtggtatgggtgcaggtgtgccgatcctcggtaccgttaccaaaaaatgtaaagtgaagcaggaagcgccgtttgttttccgcatcacgctgattcaggggctgaaccgtcagatccgccgcatgtgtgagcatttcggttatgaagtgacgaaactcgagcgtgtccgcatcatgaatatcagcctgaccgggatcccggtgggggaatggcgtgatttaacggatgacgagctggttgaactctttgatgcgattgagaaatcttcctctgaagataaaaaagtcaaaaagccggctgcaaaaccgcagaagcgtgataacaaaattaaagttgctccgccggtttatccgggttcagataaacagcagaagaagaaagagagcagcagcgatagcaaccgccagcgttttgcccaggcagggcggaagaagaagaaacgataa

SEQ ID NO: 273744 - DNA, 1050 bp, Morganella morganii
atgactgatatcgttaagttgttaggcaatgatgcatcatctcttcttgaacacacctgcaccaccattcccaaagacaatctttatctgccgggcgatgactttgtcacccgcgtgatgattgacaataaccggccgaataccgtactgcgctccatgcagtcactgtttaatcacggccgtctggcgggaaccggttatctttccattctgccggtagatcagggtgttgagcactctgctgcagcctcttttgccgccaacccgctctattttgatccgaaaaatattgtcgagctggctatcgaagcaggctgtaactgtgttgcctctacctacggtgtactggcttctgttgcccgccgctatgcacaccgcatcccgttccttgtcaaaatcaaccacaatgaaaccctgagcctgcctgcgcagtatgatcagacactgtacgccagtgttgaacaggctttcgaaatgggcgcggtggctgtcggggcgacgatttatttcggctcaccggaatcccgccgtcagatagaagaaatctctgcggcctttgaacgtgcccatgaactgggcatggtgaccgtgctgtgggcttacctgcgcaacccggccttcaaaaaagacggggtggattatcatgccagcgcggatttaaccggccaggcaaaccaccttgcggctactatcggtgcggatatcgtcaaacagaaaatggcggaaaacaacggaggctttaaagccatcggcttcagccatactgatgagcgcgtttacagcacactgaccacggataacccgattgacctggtccgttatcagctggcgaactgctatatgggccgtgcggggctgattaactccggcggtgcgtccggtaataatgacctggcggatgcggtccgtactgcggtgatcaacaaacgtgccggtggtatggggctgatcctcggccgtaaagcctttaagaaatcgatgaaagacggggtggcactgattaatgcagtgcaggatgtgtatctcgataagaaagtgacgattgcttaa

SEQ ID NO: 273745 - DNA, 894 bp, Morganella morganii
atggcggaaacgcatatagtggttcttaacggaaaacgtgccggtgatgacggtattcgtcaggctgtccggcacctgcgggaaagcggtgaggatattcaggtacgggtgacgtgggagccggaggatattccccgctttgtccgcgaagcccatcagctgaaagcagcaaccgtgattgccgccgggggcgacggcacgattaatgccgtatgcagtgctctgatggcatatccggctgaaaagcgcccggttctcggtattctgccgctcggtaccgccaatgattttgccaccgcagccggaataccggcggataaaaccaaagccctgctcctggccgcaaaaggcagcgcggtcgccattgatatcggctgtatcaatgaatctcattattttatcaatatggctacgggcggattcggcccgaaaatcaccacagataccccggaagccctgaaaagcaccttcggcggtgccgcgtattttctccacgggctgacacgcagtgatttgctgaaagcggatcactgtactatcagctgtgatgatttccactggcaggacgacgcactggtgattggtgtcggcaacggctgccaggcgggcggcggacataaactgtgtccggatgcgcggatcaatgacggtctgctcaacctgagtattctgcccgaacgcaactggccgcgctcactctggaacagcctctttaatgagggcgaggcggaaggcgtcatcatgaagcgcagcacacggatcaccatcaacgcggcacatgagatggtgtttaatctcgacggcgaaccgctgactggtcagcaattcaccttttccgtgctgcctgaagcgatccagtgccggttaccgccacactgcgggttgttatcttaa

SEQ ID NO: 273746 - DNA, 1392 bp, Morganella morganii
atgtttacacccgaattactctctccggcgggctcgctgaagaatatgcgctatgcgttcgcctatggtgcggatgcggtctatgccggacagccacgttacagcctgcgtgtccgcaataacgaatttaaccacgaaaacctcgccaaaggcattcaggaagcccacgatctgggcaagaaattctatgtcgtggtcaatatcgccccgcataacgccaaactgaaaacctttatccgtgacctggagccggtgattgccatgggtccggacgcactgattatgtctgaccccggtctgatcatgatggtgcgcgagcatttcccgcagatggatatccatttatccgttcaggccaatgccgtaaactgggcaaccgttaaattctggcatcagatggggctgacccgtgtgatcctctcccgtgaactgtcactcgaagaaatcgctgatatccgcaaaaatgtgccggaaattgagctggaagtgtttgttcacggtgcactgtgcatggcctactccggccgctgcctgctctccggttatatcaacaaacgtgacccgaaccagggtacctgcaccaatgcctgccgctgggaatataaagtcgaggaaggcaaagaggatgtggtcggtaatatcgtccacaagcaggaaccgattccggtgaaaaacattgagccgaccctcggtgccggtgccccgacagacaaagtgttcctgattgaggaagcacagcgtccgggcgaatatatgaccgcgttcgaagatgaacacggcacctatattatgaactccaaagatctgcgggctatcgagcatgtcgaaaagctgacacagatgggtgttcactccctgaaaatcgaaggccgtaccaaatccttctattactgcgcccgtacagcacaggtttaccgccgtgccattgatgacgctgttgccggaaaaccgtttgacccgtcactgctgaccacgctggaaggcctcgcacaccgcggttataccgaagggttcctgcgtcgtcatacccatgactcttatcagacgtatgagtacggttattccgtttccgattcccagcagtttgtcggcgagtttaccggcaaccgcgtgaacggactggctgaagtggatgtgaaaaacaaattctccgtcggcgacagtctggaactgatgaccccgaacggcaacatcagctttaccctcgatgccatgaataaccgcaaaggggaagccaccgaagtcgcgccgggtaacggtcatattgtctacctgccggtaccggatgatgtaaacctggaatttgcattgctgatccgtaacttaccgggcaccagcacccgtaatccgcatatgccggaatttaccgacgctgcggccaccaacgggtaa

SEQ ID NO: 273747 - DNA, 762 bp, Morganella morganii
atggaaaaacgtcatattgcagtctggatcggtctggctcttaacctgattttcctggggattatctcctatattccgtcggcacttgagccgtaccgggatgaactggattatcagatgcagcaactgattgaagtcttaccgtacgtgaaaattctgatgaccggcgggatggccgcacagctggccagtctggcattcttgcgtaaccagccgaaactgggcctggttcttgccatgatcggcggtattatttttattccgctgggctttatctttatcgtcggttacctctacgactacaaccgcgtggtttaccgttcactgaaaacagtaccgaaactggcacaactgccgtttgaggtcctgctgaaattcaataaacagcgccagatcagcatggcggtgctgtacggaatactcggcgtggcactgctggtgttcgggatggatatcggcggcattatggtcgcggtggcgattgtgctggtgattaacgcgcggcgtatccagtattatccgatgctggcgattgccggtgataacctgctgtttaccccggggcagtacgcggtctgctatgaagcgccgctgagtgctttcactgtgataacagacaaccgcgctgcgctgaaactgcatatcagaacagcagagctggatcggacattccgtattgcaaaagcggatttattacaggatgagcaaaatacgcttgataaaatcctggcgcggctgaagcgtccgtccgttattcagtaa

SEQ ID NO: 273748 - DNA, 720 bp, Morganella morganii
atggaacaaaatgctgaactgattcttattgtggaagatgagccgaaactggctcagttactgacagattacctgcacgccgcccattaccgcacgcactggctggcacgcggcggtgaggtgacagcctgggtgcaggaaaataaaccggatctgattttgctggatctgatgctgccggagaaagacggcctgacactctgccgtgaaatccgtcagttcagtgatgtgcccatcatgatggtcacggccaaaactgaagaaattgaccgcctgctggggctggaaatcggtgcggatgattatgtctgcaagccttacagcccgcgtgaggtggtggcacgaatcaaaaccatcctgcgccgctgccggcgcagtaacgatatgtcagaggataaatgtgacaccctgactattgatgaggtgaattatcaggtgcgtttcgggacacagagcctggatctcactcaggttgaattccgcctgctgcgcaccatggtgtcacagccgggcaccgtgctgtcgcgcaatcagttgctggataatctgtatgatgattaccgcgtggtaactgaccgcacgattgacagccatatcaaaaatctgcgccgcaagctcgggcagttagatggtgaccgcgattttattcattccgtctacgggctgggttaccgctgggaaggcggaccggctgagattattgccgccaccattatctga

SEQ ID NO: 273749 - DNA, 1362 bp, Morganella morganii
atgaaaaccggaataggtcacaaactgtttcttgccatttttgccacctgtatgctggtggtgctgaccatgcatctggctatccgtttcagttttgagcagggctttctcggctatcttcagcgctccgccgaagaccggacggagatgatcgccgatgttgtcgctgaacaatatgccgattacggcagctggtattttctgcgcaataatcagcgcggttttatgcaggcgctgcgggcactggataccgaccgccacatggaacatatggagcgcggctggaaaatgcgtttctggctgctggatgaggatgaccgccgcctgttcgggcacggcccggtaccacccggcgagctctaccgcaaaccggtaaaatacaatgataatatcgtcggctgggtggtaatgccggcggatgacaatatcaaccgtgccgccgaccagagcttttcacatcagcaggcacgcaccagctggatagtctcggcgctggtgctgctggtgactctggtggtcacctggctgctgacgcgcggcttcctgcgtccggtcaaacggctggcagaaggcacacatcagctggcggcgggtaatttcagcagccgcgtgccggttcacggtaaagatgaaatcgcgcagctggccaatgattttaaccagctcgcttccgcgctggaaaaaaatgagctgatgcgccgtgactacatggctgatgtctcacacgagctgcgcactccgctggcggtgttacagggcgaactggaagcccttcaggacgggatccgccagccgacaccggaaactctggcatccctgctggcggaagtgcagacgctgacaaaactggtcagcgacctgcatcagttgtcattatccgatcgcggctcactctcttaccgcaaagagttatgcaatctgaccgatgtgatcagccggtctatcggcgtgttccgccaccggttgcaggaaaaaggtctcactgtcacgacggagctgccggatcccctgatgatcttcggggatgatgcgcggcttggccagctgttccataatctgctggaaaacagcctgcgttataccgatagcggcggacagattgtggtacgcggacagcaggatgaaacacagatccgtatcgactggtcagacagtgcgccggggctgactgaagaacaattttcacagatttttgagcgtttctaccgcagcgaatcctcccgcaaccgggccagcggcggatccgggctcggccttgcgatttgtgataaaatcgcggaagcgcatcacgggcagataagtgcatccgcgtccccgctcggtggcgtgaccatcactctgatcctgccccgccctgactga

SEQ ID NO: 273750 - DNA, 3093 bp, Morganella morganii
atgaggctgttcgccctgtttatcgcccgtccggtagccacgacgctgataagcctcgccatcactctgtgcggggcgatcagcttcctgttcctgccggtggcaccgttgccgcaggtggattatccggtgattaatatcacggcatcactgccgggtgcctcgccggaaacgatggcatcgtctgtcgccacgccgctggaacgctcgctcgggcagatagccggggtatcggaaatgacctcctccagctccctcggcagcaccagtatcaccctggaatttgagcttaaccgcgatatcaacggtgccgcccgcgatgtgcaggcggcactgaatgccgcgcaaaacctgctgccgtccgggatgccgtcgcggccgcgttactataaatcaaatccgtccgatgcgccgattatgatcctgacgctgacatctgacaccctcgataccggcaaactctatgatatcgcctccacccggctggcacagcgcctgtcacagattgagggcgtgagtgaggtttcggtcggcggcggctcgctgccagccgtgcgggtggagcttaacccgtcacagctgtttaaccagggggtttccctcgacagtgtgcgcaaagcgattagcgatgccaacgtgctgcgtccgcagggctcggtgtctgacaatgaacgccgctggcagattgacagtaacagtgaactgaaaacggcggatgattatcgaccgctgattgtgcattacaatgacggcgcggcggtacggctggcagatgtcgccaccgtgaaagactcggtgcagaacgtccgcgccgccgggatgagcaacggcaagccagcgattctgctggtgatccgccgcgaagccggtgccaatattatcgccacggtggcccgcatccgcgaacaactgccggtattgcaggataccattcccgccagtgtggatttgcaggttgcccaggatcgcacccccaccatccgcgcctcactgaccgaagtggaacgcgcactgaccattgcggtggggctggtgatcctggtggtgttcctgtttctgcgttccggacgcgccactattatcccggcgctggccgtgccggtttctcttatcggcaccttcagtgccatgtatctgtgcgggttcagcctcaataacctgtcactgatggccctgaccgtcgccaccggctttgtggtggatgatgcgattgtggtgctggagaatatcgcccgccatattgaaaacggcctgaaaccgaaagaagccgcgctcaaaggggtcagcgaagtcgggtttaccgtgctttccatgagtatctccctggtggcggtgtttattccgctgctgctgatggatggtcttgtcgggcggctgttccgtgaatttgccatcaccctgaccaccgccattgctatctcactggtgatctcgctgacactcactccgatgctttgtgcacatctgctgaaaaaccgcgcggcaccggcacgggagcgcaaacgcggcgcaggccggatcctgttccgcatccagcaatggtacgggcgcagcctgaccgtggtgctggcacacagccgctgggtgctgctgattttcaccggcaccattgccctcgcagtctggctctatatctctgtgccgaaaacctttttcccggatcaggataccgggcggctgctgggctttgtccgcgctgaccagagcatttcgttccagtcgatggagcagaaaatgcgcacctttatgcagcgcattcacagtgataaagatgttgccagtgtcaccggttttaccggcggcggacgggttaacagcggatttatgtttatctcgctcaacccgctggatgagcggacagacagcgcccaggatgtcattaaccggctgcgtgtcaccctcgcggatgaaccgggcgccaatctgtttctgatcccggtgcaggatgtgcgggcgggaggccgtgagtccaactccagttatcagtactccctgctggcggatgatttatccctgctgcgtgaatgggagccgaaaatccgcaaagcactcggtgaactgccgcagctgaccgatgtaaactcagataaagaagataaaggcgcggagatggcgctgacttatgaccgtgatgtgatggcgcagctcgggatcagtgtcaatgatgccaataatctgctgaataacgccttcggtcagcggcagatctccaccatttatgagccgctgaaccagtataaagtggtgatggaggtcgcgccgcagtatacgcaggatgtcagtgcactggataaaatgtttgtcatcaataaagagggacaaccggttccgctggcgtatttcgcacagtggcgtccggcgaatgcaccgctgagtgttaaccatcagggattgtcagcagcctcgacgatcggctttaacgtggcggaaggctattccctgtccgatgcggtggcagcggtcgaacgcaccatggtggaactgggagtgccgtccggggtgcgcggaacttttgccgggaccgcacagctgttccaggaaacattacagtctcaggtgctgctgattatcgccgctattatcacggtgtatctggtgctcggcatgctgtatgagagctttattcatccgctgactatcttatccaccctgccctcggcgggggtcggcgcactgctggcgctgcgcttctttgatacgccgttcagtctgatcgccctgatagggattatgctgctgatcgggattgtgaagaagaacgccattattatggtggacttcgccattgccgcccaacgcggcgggcaaagtgcgcgggatgcgattttccgggcctgccttctgcgcttccgtccgatcctgatgaccacgctggccgccctgttcggtgcgttgccgctggcactcggcagcggagacggtgcggagctgcgccagccgctcggaataaccgtagtcggcgggttgctggtcagccagatcctgacactctataccacgccggtgatttacctgttctttgaccggctgcgccgcaaaaaaaccggagaatccgccgggcaatccgttatcagtacggagggaaatgcatga

SEQ ID NO: 273751 - DNA, 3141 bp, Morganella morganii
atgtccggaaacaaccctgaaacccgtgccggcggcccgtcccgcctgtttattctgcgtccggtcgccaccagcctgtttatgctggcgatcctgctggcggggattgtcggttaccgcatgctgccggtttcgtcgctgccggaagtggattacccgactatccgcgtggtcacactctatcccggcgccagtccggatgtgatgacctccgccgtgaccgcgccgctggagcgccagttcgggcagatgtccggactgaaacagatgtcgtcgcaaagctcgggcggtgcctctgttattaccctgatgttccagctctccctgccgcttgatgtggcggtgcaggaagtgcaggcatccatcaacgcagcaaccaatctgctgccgaatgatctgccttatccgccgatttacagcaaggtgaacccggcagatccgccggtgctgacccttgccgtcacatctgatgccatgccgatgacgcggttgcaggatatggtggaaaaccgcatcgcccagaaaatctcccaggtggaaggggtcggtctggtgacactcgcgggcggccagcgccctgccgtacgggtgcagttaaatgccaatgctgtcgccgcttacgggctggacagcgaaactatccgcaccgcgattaacaacgccaacgtcaactccgccaaagggagccttgacggcccggcgcgttcggtaacgctgtccgccaacgaccagatgaaatcagcggaagattatcagaacctgattgtcagctacaaaaacaatgccccaatccgcctgcgggatgtggcaaccgtacaggaaggaccggaaaacacccaactgggtgcctgggttaatgataaacaggccattgtcatcaatgtgcagcgccagcccggcgcgaacgtgatttccaccaccgataccatccgtgctctgatcccggaactggtggaaaccctgccggaatccgtgaccgtaacggttctgactgaccggacagatgctatccgcgcctcagtcaaagatgtgcagtttgaactgtttttagcgatcgcgctggtgatcatggtgatgtatctgttcctgcgcaatatggctgcgaccctgataccgggagtggcagtaccgctctcgctggtcggtacgttcgcggtgatgtatttctgcggcttttccgtcaataacctgacactgatggcactgactatcgccaccgggtttgtggtagatgatgcaattgtggtggtggaaaacatcgcccgctatctggaaaaaggcgacaagccgctgaccgctgccctgaaaggtgccggtgaaatcggctttaccattatctcactgaccttctcgctgattgccgtgttaatccctctgttatttatgggggatattgtcggccgcctgtttcgtgagtttgccatcacccttgcggtggcgatcctgatttccggtgtggtgtcactgacactgacaccgatgatgtgcgcccggtttctgaaaccggaatccgctcaccgccataaccgctttaaccgcgccactgaacgcttttttgagcgggtgattgccggttacggccgctggctgacatgggtgctgcgccatcagtggctgacactcggggttgcgttcagtaccatggcgatcaccgtcatgctctatctgtttattccgaaaggctttttcccgatccaggataacggactgattcagggcaccctggaagcgccgcagtccgtgtcgtttcaggccatgagtgagaaacagcaggcggtcagccgtctgctggcagatgacccggcagttgctaatattgccgcctttgccggtatcgacggcagcaatgccacactgaacaccggccgtctgcaaatcaccctgaaaccgctgtctgagcgggctgaccgcgcggaagctatcatcacccggttacaggaaaaggccgataccctgcccggagtgaaactgtatctccagccgtctcaggatctgacaattgatacccagacctcccgcacgcagtatcagtttaccttacaggccaattccctggaggagctggatctgtgggtgccgcgtctgatgacagaattagagagcagtgatgccctgaccgacaccggcaatgactggcagaataagggactggtggcctatatcgatattgatcgcgacaccgcgtcacggctggggctgaccatgaccaacattgataacgcgctgtacaatgcgttcggtcagcggctgatctccacgatttatacccaggccagtcagtaccgcgtggtgctggaaaataacacgtcgctgacaccgggggcggatgcactgaacagtatccgtctgaccaataaagacggcaattctgtgccgttgtcagcctttgccactgtctcgcagcgcttcgggccgctggcgatcaatcatctggcacagttcccgtccgctaccttctcctttaatatcccggcaggcggttcactggaagcggctgttaatgcggtaaaatcagcggagcagcgtatcggcctgccgaaggatatcaccacacaattccagggtgccactctcgcctttgaaaatgccctgtccaacaccctgtggctgatccttgccgctgtcgtggcgatgtatattgtgctcggcattctgtatgagagttttattcacccgattactatcctctccaccctgcccactgccggggtcggtgccctgctggcactgattatggcgggtaatgagctggatgtgatcgcgattatcggtattattctgctgatcgggattgtgaagaaaaacgccattatgatgattgacttcgcccttgcggcagagcgcgaacaggggctgtcgccgtatgatgcgatttatcaggcgtgtcttctgcgtttccgcccgatcctgatgaccaccatggccgcgctgtttggtgcggtgccgctgatgctcagtaccggggtcggtgccgagctgcgccagccactgggggtctgtatggtcggcgggctgattatgagccagatcctgaccctctttaccacaccggtgatttacctgctgtttgaccgcctgtctcactggcgcgataacgcccgctttaccccggaaagtgacaacacgggagcctcatcatga

SEQ ID NO: 273752 - DNA, 1218 bp, Morganella morganii
atgaataatgtacaaaagagaaagaaacgcacaggcattacgattgccgttctccttctgggcgcagccggttacggcacctatcattactttaactctgcggcaccggccaccccgcctgctgccggaaaaccgggggcttccgcaggcaaaaacagcaaccgtcccggccggccgccgctggcaccggtgcaggtagccaaagccgtttcggagaccattccccgtaccttgtcagctctcggtaccgtgcaggcggcaaattctgtgacggtgaccagccgcgtggaaggccagctcatgcaaatccattttgaggaaggtcagaaagtgaatgccggtgatttgctgttcactatcgacccgcgtccgtttgagatccaactggcccaggctcagggacagctcgccaaagatcaggccacgctcgccaatgcccgccgtgatctgagccgctatcagaaactcgcggccaccaatgtcatttcgcaacaggagctggatacccagcaggcaactgtcaaatcggcggaagccggtattaaggtggatcaggccgctatcgacagcgcgaaactgcaactgacctacagccgcatcaccgcacctatcagcggaaaaatgggtctgcgtcaggtggataccggcaactttattaccgccggaactgccatgccgctggtggtgatcaaccagacagcccctgccgatgtactgtttaccgttccggaaaatgatattccgctgatccgcatggcgcagcgcactatgccggaactcacggtcaccgcgctgagcaaagataacagcatccgcctggctcagggcaaactgctgacactggataaccagatagatgccgccaccggcacagtaaaagccaaagcacggtttaccaatgatgatgacctgctgttccctaaccagtttgtcaatgtgctgctgcaggtcggtcagctggaaaatgcggtagtgatcccgaatgccgcactgcagatgggaaccgaaggcaattatgtctggctattggaagcagagaataaagtccgcaaacagattgtggatgtggaattacagaccccggaacgcgtggtgatcaaaagcggcgtcagcgccggtgataccctggtgactgacggaatcgaccgtctgactgacggcgcgcaggtggaagtggtgtccggtgagaaaaaagccgcagccggagataaggcctga

SEQ ID NO: 273753 - DNA, 360 bp, Morganella morganii
atgatgaaaaacagacttattcttgtctctgcgctgctgctgtccggttgttcttctgtctgggtggaagttccgggcggctctgaatacacacgggcagaggcaaatgccttctgtgaaccggaatcacacaagctttatccggtcaaaaatgaagttgcccagcgcagtgtgatgcgggatgtggaaaaacgctgcaaaaaggacgatgactgcggtaacagcaaaacctacaaagagcagacaccggtaacggaaagttatgtgatggatgtgaatgaagacagccgcaaccgctatttctacagctgcatgaaaacaaaaggctgggatcgggaagatcgctggatgtgggaataa

SEQ ID NO: 273754 - DNA, 747 bp, Morganella morganii
atgaaaaaaaatattattgcaggttgtctgctctcactgtattccctttccgtaccagcgatcccggcgggcaatgatgccaccaccaagccggatttatattatctgaaaaatgaacagactatcgacagtctgaaactgttaccgccaccgccggaagtcggcagtattcagtttttaaatgatcaggcgatgtatgaaaaaacccggatactacgtgatacgaaacgcggaaaacaagctcatactgatgccgatctggctgacggcggtgtagcgaccgcattttcaggggcattcgggtatccgataacgaaaaaagacttaccggaactgtataatctgctgactaatatgatgggagatacgggagacctggccacccgctccgccaaagagcattacatgcgcatccggccgtttgtgttttacggtacagaaacctgtaataccaaagatcagaaaataatatcaacgaatggatcttatccgtccggtcatacctctatcggctgggcaacggcactggtgctggcggaagtgaacccggcaaaccaggatgcgattctggaacggggctatcagttcggacagagccgcgtgatttgcggctatcactggcagagtgatgtggatgccgggcgcattgtcggttcagccgctgtcgcgacattacattccgatccggcatttcaggcgcagttagcgaaagccaaacaggaatttgcacaaaaatcacagaaataa

SEQ ID NO: 273755 - DNA, 423 bp, Morganella morganii
atgacaggtgtaatcaacaggctgttatcacacgacgatgccggaaaactattactgcggctggcggtcggcgggttaatgttgtttcacggtatcggtaaattactcaccggcgcggcggggataaaagggctgctggcctctttcgggttaccggagtttattgcttacggtacctatttcggggaaattgtcgcgccggtctttattatcctcggcattctgactcgtccgtccgccttgctggtgtcctttaccatgattgttgcctggctgatgatcggtgtgaataagacctttatgctggatccgaccggggcatgggcgattgaaagcctgatgtatttctttatcagcggtattgcactggcctttatcggcccgggtaaatattcggtaatgaaaaaccctgcctggcgctga

SEQ ID NO: 273756 - DNA, 1350 bp, Morganella morganii
atgacaaccgacacatcgccattaagtcagcctcaggcaaggccattaaataaaaacgattataaaacactgggattatcctccctcggcggcacgcttgaattctatgattttgtcatatttgtcttttttaccggaacactaacccacctgtttttcccgggtgataacgagtttatcgcccagatgaaaacgctgggaattttcgccgccggttacctggcgcgcccgctcggcgggatcattatggcgcacttcggcgatattatcggccgcaaacgcatgtttaccctgagtattttcctgatggcagtaccgacactggtcatcggtatgctgccgacctacgaaagcatcggcgtggcagcacctgtcctgttactgctgatgcggattttacagggcgcggctatcggcggtgagatgccgggcgcatgggtatttatcgcggagcacacaccggaacagcgctacgggctgggtgtcggtacgctgacctccgggatcaccggcggtattctgctcggctctctggttgctatcgcagttcaggcttcttatactgcggcggaagtgactgcatgggcatggcgtattccgtttatcctcggtggtgtgttcggcctgatttcggtgtatctgcgccgctttttgcaggaaaccccgatctttaaagagatggcggccaaacggacattgtccgaagagatgccggtaaaaacagttctgaaaaaccataaaatggcctgttttgtcaccgccgggctgacctggtcgttatccaccgctatcgtggtgatcattctgatgaccccgtccgttgtggtggaaaagatgtacggcattgatcgcacattgtcattacaggcaaactgcgtagccacgctgaccttaaccctcggctgtattttctggggctggctggaagataaaatcggcagccgtgtgacactggcattgtcctggggcggattagcgatcaccgcattccacttctacggtgcattgtcaccggatattgcggcggcttcgctggtgattaactatgcggtgatgggcttttttgtcggtgcgattgccaccacaccaatcatcagtacgcgggcatttccgccggcaatccgtttctccggattatcctttgcctacaacatggcttacgcggtattcggcggcttaactccgatgctgaccggtgcctggttacagaaaagtgcaatggcaccggcgtattatgtggcaggcgtgtccgtactggcgattatcatcggtttcttaccgctggcacacaaaggctggacagcgcgtaaagcacagaatgtgaaaactgtcgcagcacaacagtcttaa

SEQ ID NO: 273757 - DNA, 1464 bp, Morganella morganii
atgtctgaacacagtttctccattgacaattcatcaccggtcaatccgcactcccagcggctggctcacattcgtcagcaggttttgcccctgttcctcaacgactcacagtttgtggaaaccattctgggcaccgccgatgagcatgccaggctcagtgatgatgaactgcattcaaaatcgaagttagtcaaaaatctgctgactgacctccacgccgctgaccttgcggatatgctggaagccctgccctatgatgagcgtctcgcgctctggcatctgattgataaccaccagcgcggggaagtgctggtggaagcctctgtgtccgtgtgggacagtctgattaaagatatgtcagacaaagagctgctgcgtgccgttgccaccctgcatgtggatgagcaggcgtatatcgccgagcacctgccgcgcgataccatgcgccgcctgctgacctatctggaaccaagtctgcgtaaccgcatccgcaccgttcttcagtacccggcggacagtatcgggcagatgatggactttgagtttgtcaccgtgcgcggcaatgtcccgctgaaaacggttcagcgttttctgcgctaccgcagcaatatcccggaagccaccgataaaatctttgttatcgacagcaataatattttgcagggtgaactgccgctgaccaccattctcacccagtcgccggacaaactggtctctgatgtgatgaaaaccgagccggtcaccttcctgccggatgaaaaaggcgaagatgcttccggtgcgttcgaacgttatgacttaatttccgccgcggttgtggataataacgggcggctgctcgggcggctcaccgttgaggatatcgttgataacctgaatgaagagagtgaagaaaacatccgccgtatggggggtttaagcccggaagaggatgtgtttgccccggtcggccaggcggtgaaaaaccgctgggcgtggctggcgattaacctctgtaccgcgtttgttgcttcccgcgtgattggtgtgtttgagcataccatttcccagctggttgcactcgcgaccctgatgccgattgttgccggtatcggcggtaataccggtaaccagaccatcaccatgattgtccgcgctctggcgcttcaccagatccagaaaggcagtttttccttcctgctgctgcgtgagctgggcgttgcctttatcaacggcgtggtctggggcgggattatgggggtcgttacgtatctgctctacggcgatatcgctatgggcgccgtgatgacgctggctatggtacttaacctgctgatggcggccatcatgggtgtgcttatcccgctgacgatgatgaaactcggacgcgacccggcactcggctccagtgtgatgatcaccgccatcaccgataccggcggatttttcatctttttaggtctcgccaccctgttcctggtctga

SEQ ID NO: 273758 - DNA, 1533 bp, Morganella morganii
atgccattatcactgatcactgaaaaagatcgtccgctggaaattgcagccatcgacctcgggtcgaacagctttcatatggtgattgcccgtattgtcaacggcgcactccaggttctcagccgcctgaaacagcgggtgtatctggctgaaggcttaaatgatcagaatgagctgagcgaagaagccatggagcgcgggctggcctgcctggcgctgtttgccgagcgccttcagggttttcccgccgcacaggtcacgattgtcgggacacacagtctgcgtgaggcggtcaatgcgcacgagtttctcgaacgcgccgcgtccgttatcccctatccgattgaaattatttccggtcacgaagaagcacgcctgatttttatgggtgttgaacacacgcaaccggaaaaaggccgcaaactggtgatcgatatcggcggcggttcgacagagctggtgatcggcgaacgttttgagccgattttaatcgaaagccgccgtatgggctgtgtcagtttcagccgtcagttttttccggacggcaaaatcaccgaagccaactttaaccgcgcccggctgatggccgtttccaaactggaaaacctggcaattgccttccgggtacagggctgggatgtatgcctcggtgcatccggcaccatcaaagcagcctgtgaaatcctgcgtgaactgggggaacgggacggcattatcacccctgtccgcctggaaatgctggtcaaacaggtactgcgttataaacggtttgatgccctgaatttaccgggactgtcagacgatcgcaaaaaagtgtttgtgccgggtctggcaattctgtgtggcctgtttgacgcactggaaatcactgaactgcgcctgtctgccggcgccctgcgcgaaggggtgctgtatgagatggaaggccgtttccgtcatcaggacatccgccagcgcaccgcacaaagtctggtggaacactataatgtggataacgcccaggtgctgcgtgtcctgaccaccatgaaaaacctgtaccgccagtgggcggagcagaatccgtccctggttgatcctcagctggaagccattctggtctgggcggtctggctgcacgaagtcgggctgagcatcaacctctccggcctgcaccgtcattcggcctatattctgcagaacaccaatttaccgggattcacccaggaacagcaactgctgctcgccacactggtgcgttaccaccgcaaagcggtaaaaagtgacgacatcccgaaattcacactgtttaaacgtaaacaggtcatccccctgatacagatcctgcgcctcgcggtcttactgaataatcagcgccagtccaccaccaaacgctcctcactgcgtctggaaaccaatgaaggacactggacactgttttttccgcgccgctatctgactatcaacacattaatgcagcttgatctggaaaaagagcaggcttactgggatgatgtgcccggctggcacctcggtataaaagaagaagacgtctga

SEQ ID NO: 273759 - DNA, 2073 bp, Morganella morganii
atgtcccaagataggctctatatggaaaaagaactcagttggctgtcgttcaacgagcgggttcttcaggaggctgccgataaacgcaacccgctgattgagcgcatgcgttttctgggcatttactcaaataacctggatgagttttataaagtccgctatgcggatgtgaaacgccgcatcctgattaatgaggaacagcgtggttccggtgccagcgggcgccatctgctgcgtaaaattgaaaacaaagtggcaaaacaggatcaggcttttgataccctgtataacgacctgctgctggaaatggcgcgtaaccagattttcctgatcaacgaacgccagatttcgccgaaacagcaaatctggctgcgtcagtatttccgtcagcatctgcgccagcacatcacgccgattatgatccagaccagcaccgatttggtcgaattcctcaaagacgattacacctatctggtggtggagattgtcaaatccggccgtgagacccgctatgcactgctggaaattccgtccgataaagtgccgcgttttgtcaatctgccgactgaaaacggccgccgccgccagtcgatgatccttatcgacaatattctgcgctactgcctggatgaaatcttcaagggcttcttcgatttcgatgccctcaatgcctattccatgaaaatgacgcgcgatgcggaatatgacctcgccaccgaaatggaatccgggatgctggagctgatgtcctccaccctgaaacagcgtctgaccgctgagccggtgcgctttgtctatcagcgcgatatgccggatgaaatggtgacgctgctgcgtgaaaaactcggcctgaccaatgatgactccgtgattgccggcggtcgctatcataatttcaaggatttcatccgcttcccgaatgaaggcaataagaatttattaaacaaaccgctgccgcgtctgcgtcatgtctggtttgatcatcaccgcaacgggtttgatgctatccgcgaacgggatgtactgctctattatccgtatcacacctttgagcatgtgctggaactgctgcgccaggcctcctttgacccgagcgtgatttccatcaagatgaatatctaccgtgtcgccaaggactcccgcattatcgattccatgatccacgcggcacacaacggtaaaaaagtcaccgtggtggtggaattacaggcacgttttgatgaagaagccaatattcactgggcgagacacctgaccgctgccggggtgcatgttattttctccgcgccggggctgaaaatccacgccaaactgtttattatctcgcggctggaagacggggatgtgatccgccgttatgcccatatcggcaccggtaacttcaacgaaaaaaccgcgcgtatctacacggattactcgctgctgaccgccaacgaagagatcaccaatgaagtccggcgcgtgttcaactttattgagaacccgtaccgcccggtctcctttgataacctgatggtgtcgccgcagaattcacgggcaatgctgaatcagctgattgatgatgaaatagccaatgcactggccggttatgaagccggaattacactgaagatcaacaacttggtggataaacagctgagtgagcgcttgtatgacgcttcggaagccggggtgaaaatccgtctgctggtgcgcggcatgtgcgcactggtgccgggacaggttccgtacagtgaaaatatccaggtgaccagtatcgttgaccggttcctggagcatgaccgggtgtatgtgttcaccaacaaaggggacgaaaaagtctatctctcctctgcggactggatgacccgtaatatcgattaccggattgaagtggcggttcgcctgctggatccggtgctgcgccgccgggtgctcgatattctggatattcagttcagtgataatgagaaggcgcgttatctcgataaagagatgtccaaccattatgtgccgcgcggcaacaagcggaaagtccgctcgcagatggcagtttatgactatattcgttccctggaacaaccggataattaa

SEQ ID NO: 273760 - DNA, 591 bp, Morganella morganii
atgtccggtggtactgctgttccgcctgtaaaactgcgcccgcttgagcgtgaggatttagcttttgttcatcaaatggataataacgccagcattatgcgttattggtttgaggagccgtatgaagcctttattgaattaagtgatttatacgataagcatattcacgatcagtcagaacgccgcttcattgtggaaagcgacggcaccaaggtcgggctggtggaactggtggaaatcaatcatgtacaccgccgcgctgaattccagattattatcgccccgtcacatcagggtcacggatttgcgtcccgcgctgcccgtctggctatggattatgcgttttctgttctcaatttatacaaactgtatctgattgtggatgtggaaaacgaaaaagcgatccacatctataaaaagctcggttttcataccgaaggccagttaattgatgagtttttcgtcaacggggaataccgcactgctatccgtatgtgtatttttcagccggaatatctggtcatgaaaaataaatctgcggatgcggaaagctacgttgaaaaaaatgcccgcgtaaagcagaacctgtaa

SEQ ID NO: 273761 - DNA, 303 bp, Morganella morganii
atgaacccgacaaaagtgtgccgcacccgtctttatacgcttaccgacctgccgaatatcggcgaggcgatggcggaagatctgcgtctgctggggtatgagacgccgcaggatattaccggttcagacccggtgattatgtatgaaatgctctgcgcggtaaccggcgtccgtcaggatccctgtgttattgatgtgttctggtcagtcactgattttcttgcaggacaaccggcacagccatggtggaattataccggacagcgcaaagcgtatcttaatgagatggcgaaactgcggtag

SEQ ID NO: 273762 - DNA, 633 bp, Morganella morganii
atgaaaaaacgccttgttgtcctgatttccggcagcggcagtaatctgcaggcgttgattgatgcctgcagttcacaaaccctcaatgcggaaattgttgcggtcttcagtaataaagcggacgcttacgggctactccgcgcacaacaggccggtattcccgcactggcactcagtccggcggaattctcttcacgggatgattttgatgccgcattgcagacacagattgatgagtatcagccggacttactgatcctcgccggatatatgcggattctgacacccgcctttgtccgccattaccacagcagaatgctcaatatccatccgtctctgctgccgaaatatccgggcctgcacacgcaccgtaaagccctggaaaacggcgatgccgaacacggtacctctgtacatttcgtcacggaagagctggacggcggcccggttatcttacaggcacgcattgccgttttgccggatgataccgaagacaccctcaccgcacggatacaacaggaagaacaccgcatctatccgcaggtggttaactggtttgtgcaggggcgtctggcactgaaagaagacgggatatatctggacgggaaattatattttcacaatacgctctga

SEQ ID NO: 273763 - DNA, 1041 bp, Morganella morganii
gtgactgacaaaacttccctgagttacaaagatgccggtgttgatattgatgccggtaatgccttagtttcccgtattaagcatgttgtcaaagagacacgccgtcctgaagttatgggcgggctgggtggtttcggtgcgctgtgtgcggtaccgcagaaatataaagaaccggtgctggtttccggcactgacggcgtcggcaccaagctgcgcctggcgatggatctggcgcgtcatgacactatcggtatcgacctcgtcgccatgtgtgtgaacgatctcgtcgtcgccggtgctgagcccctcttcttccttgactattacgcgaccggcaaactggatgtcgatactgccgcccgtgtggtcaccggtattgccgaaggctgcaaacaggcgggttgtgcgctggtcggcggtgaaaccgctgagatgccgggcatgtatcacggcgatgattatgacgtggccgggttctgtgtcggtgtggcggaaaaatcagaaatcatcgacggcagcaaagtccgcgccggtgatgtgctgatagcgctggcctccagcggcccgcactccaacggctattctttgatccgcaaaatccttgaggtcagcaaaactgacccggcagccacagagcttgacggcaaatcactggcggatcatctgctggcaccgacaaaaatctatgttaaatctgtgctgaaactgatcgaaaacaccgatgttcacgccatcgcccacctgaccggcggcggtttctgggaaaatatcccgcgtgtattaccggcctgtacccaggcgcggattgatgcctcatcctggcagtggccgtctgtctttaactggctgcaaaaagccgggaatgtggaagactatgaaatgtaccgcaccttcaactgcggtgtcggtatggtgattgcactgccggcggcgtctgtgccggccgccctcgccctgctgacagaagcgggtgaaaatgcatggctgatcggtgatatcgcggtatgccgtgaagatgaacctcaggtcatcatccgctga

SEQ ID NO: 273764 - DNA, 627 bp, Morganella morganii
atgaaagtcgtcgaggtaaaacacccgctcgttaaacacaaacttggcctgatgcgagatcatgatataagcacaaaacgctttcgtgaactggcctcagaagtcggtagcctgctgacctatgaagcaacttcagacttagaaactgagaaagtgacaattgacggctggtgtggtccggtcgaaattgaacaaatcaagggtaaaaagattaccgttgtgccaatcctgcgtgcgggtatcggtatgatgaacggtgtgctggaaagcatccctagtgcccgtatcagtgttgtcggtgtttaccgtgatgaagaaacactggagccggtaccgtacttccagaaattagcctctaatattgaagagcgtatggcgctggtggttgacccgatgctggcaaccggcggttcaatgatcgctaccatcgatctgctgaaaaaagcaggctgtaccgcgattaaaatccttgtgctggttgcagcgccggaaggtctgaaagcgctggaaaaagcccatccggatgttgagctgtataccgcatccatcgacgatcacctcaacgaacacggttacattgtaccgggcctgggtgatgcgggcgataagatatttggtacgaaataa

SEQ ID NO: 273765 - DNA, 1290 bp, Morganella morganii
atgacgcgccgcgttattgaagtcgatgaacgcccaccactgctggtcaccattccgttaagtttacagcatctgtttgcgatgttcggtgctactgttctggtgccgatcctgtttcaggtaaacccggccacgatcctgttatttaacggtatcgggacactgctgtatctgtttatctgtaaaggaaaaatcccggcgtacctgggctccagctttgcctttatttcgccggtgctgattttactgccgctcgggtatgaacttgctctcggcgggtttatcatctgcgggctgctgtttatgctggtggcggggattgtcaaaatcgccgggcgcggctggatcaacgtgctgttcccgcctgcggcaatgggtgcgattgtggcggttatcggccttgaactggccggaaccgctgccggtatggccgggctgaaattcgagaatggcgccacgccggacagcaccacgctgatcatctccctgaccactctcggggtgacgattctcggctctgtggtgttccgcggcttcctggcgattatcccgatccttatcggggtgctgaccggttatgcgctggccttctttatgggcgcggtggatttaaccccggtaagtgaagcaccgtggtttgcactgccgacattctacacaccgcgttttgaatggtttgccattctgaccatcttaccggccgcgctggtggtgattgccgagcatgtcggtcacctggtggtcaccgcgaatattgtcaaacgcgacctgatgaaagaccccggtctgcaccgttcgatgtttgccaacggtttttcgactgtactgtcaggcttcttcggttccacaccaaacaccacatacggcgaaaacatcggcgtaatggctatcaccaaagtgtacagttcgtgggttatcggcggggcagcggtactggcgattctgctctcctgtgtcggtaaactggctgccgcgattgctgctgtgcccgtaccggtgatgggcggggtatcgctgctgctgtacggggttatcggtgcatccggtatccgcgtgctgattgattccaaagtggattacaacaagccgcagaacctaattctgacggcagttatcctgattattggtgtcagtggtgcaaccatccatatcggcgcagctgaactgaaagggatggcactggcgacggttgtcggcattggtctggctctggtgttccgtctggtgaacatcattcgtccggaagagcgggtggtggatgtgaatctggatgaagtgaagaaagattaa

SEQ ID NO: 273766 - DNA, 1188 bp, Morganella morganii
atgaaaataaaattaatatcattagtaatcgccactaccatctcatcaccatctttttctgccaatgagtattggtatactgatgaccagaaaattaagctaagtgaaaaaaacatacaggcacatctgactgaaagagttggcaaacccgttcttcatattgaaaaaccggatagcaatggcgtatcccataatttctttgatgaattcagtgtaggtaaagaagggttgttcattaataataaaaacaaagctgatgtaatcattaatgaagtgatatctgattcacaatctgtattatcaggaaacattagagtcgtatttaataatgctgatttgattattgctaatcctaatggcattacctgtgatggatgcagtacaactaatgcccctaatactacactcattacgggtaaaattacggatagtgtaaataaaaaagatccgctcagctatcaaagttcagatggtaaaatagaaataatcaatacatctaacattaataataattataaaaaaaatgctgaaaagaacaaactatctctgatcgccaaccagataattattaagaacagcaccattgatatacctgatgtttttatcaaaacaacagaaacaaatgaatatatatcacacaaaacaggtacgtattatcatagccatacaccaggtatcttaacggaagaaactgtcgaagagcgcagaccttcgctattatacattgatgaatcatcctctattttaagtgataaactgaaaatagatgctcattccggccatgtagttaataatggaagtattaaatcatataaaaatgataccaatctgtcacatgtattatttgtcaatagtggtaatattacctcagtaatatctgatgtaacatctttttattccagcatgtataatcggggaaatatcactgctcaaaaactaaatatgtcatttaatgatactcatcatcattttgatacttctgaaaaagaatatattccggcaaaatttgcttttgttaatgacggtattatcaaaggatcattcgcaaaaattgattcacgcggagctgatcttaaaaacaatggtaacatcgatatgtgggggcgaactaatatcgctctccataatgaatatgatatggtcgagcataaattaatcaataatggcaccatctcaaatcaatactaa

SEQ ID NO: 273767 - DNA, 717 bp, Morganella morganii
ttggccgaggtaattctgaacacgccgtctcagctctcattaccactttctcttcccgatgatgaaacgtttaccagtttctatgcgggggcaaacgcatctctggtatctgccattcaggcggcgatcagtcagccacacggcagttatctctatttctggtcccgcgatggcggcggtaaaagtcatctgctgcatgcggcctgtgccgaagtatcttccaaagaccgggcggtcggttatgtgccactcgataagcgcgcctggtttgtgccggatgtgctggaaggcatggagcatctgtcgctggtctgtattgataatgtgcagtgtattgcgggggatgaagagtgggaaatggcgctgtttaatctctataaccgcattctggagaccggcaagacctgtctgctgatcaccggggacagaccgccgcgtcagatcccgctgcagttaccggatctcgcttcccgccttgactgggggcagatttacaaacttcatccgctcagtgatgacgaaaaaattcaggcactgcaactgcgggcaaaactgcgcgggtttgagctgccggaagatgtcgggcgctttatcttaaaacgcctcgaccgtcagatgcgcacactgtttgacatgctcgacaggcttgatcatgcatcgattgttgcccagcgcaaactgaccattccgtttgttaaagatatcctgcggctgtga

SEQ ID NO: 273768 - DNA, 393 bp, Morganella morganii
atgaataacagacctcatgatgaacagattatggtgattttcacggcgggctggcgttttctggccgccttatcggtgatggcctttctgacgcagtttttgctttatatatcaggattttccggtgaatatccgatggcggcggggatcctgttctttctgtgtgccatgtactttatcttccggttgtggctggatcaccatctgttccgccgcctggcacaatcgtccgataccgatatttttgatgaatccctgacgacgctgtttccgggcagagcacagcacacccacttctcacagcgctggcgaggcacaaaacggctgtttcagcagggcgctctctgcatggtgctccagtggggagtaacggtgattgccctgcttaactga

SEQ ID NO: 273769 - DNA, 1332 bp, Morganella morganii
atgtctgatgccgcactgccgctgcctgcttcccgccgtaaacggtggggatttgccctgctctggctgctgtttctggcacctttcttttttctgacttacggacaggtcaatacctataccgcttcgctgccgtcagtcccttcctttgcgttcaactgggaaacacatattccgtttctgccgtggacaattattccgtactggagcatcgatctcttctacggtttatccctgtttatctgcacctctctgcgcgaacagtgtattcacgggcttcggctggcagttgcgtcactggcagcctgtgccgggttcctgctctttccgctgaaattcagttttccccgtccgcagacaggcggtaccgcaggctggatgtttgaccagctggagatgtttgatctgccgtttaatcaggccccttctctgcatatcattctgctgtggttgctgtggctgcgcttccgggcgcacacaccgcagaaatggcactggtttctgcacctgtggtcaattctgatcttaatttctgtactgacaacctggcagcaccattttattgatgtgatcaccggtgccgccgccggtgtggtgataagctatctgctgccggtaagtacacgctggcagtgggccccgcaccgtatccgccgcggctatcagctggccggacggtacgccgttatttcgctggtgctgataacagcggctgtcgtgatgggtggtcagggctggtggctgctgtggccggggctggcatttttatgtatcacagcgggttatctcggtgccggcgcatccgtgtttcagaaggacagcgccgggcgcatttcaccctctgccgcactcctgctgctgccataccggattgcggcgcaaatcagctattactggtatgcaaagcggtgccgtcacaccagtgtggtcaataagcatatcgcgctgggcggttaccctgcggcaccactgacggcctccgctgtactggatatgacaggggaatttccccgcagccgctataccgccgggctggcttatcactgccagccgcagctggatctgtttccgctgacagagatgcagattgaaacggcggtgaacaatctcagccgcctggcgcaatccggtcaggtttatgtacactgtaaactgggttacacccgcagtacgaccgtcgtggtcgcctggctgatacgtgccgggctggcagacaatgtggagcaggcgctggcggccgtcagacaggcccggccgcagattgttctgcgggaacagacaattgccgccctgacccgctgggcagcccgttacggaaaaaacgatgaataa

SEQ ID NO: 273770 - DNA, 1767 bp, Morganella morganii
atgagtgtatcttctgattatccgactcagcgtgaatctattgaatctcactttaccaccagtgaccagcagcggttattcttccgttactggccttccgcgaccgcagaaaagaaagccgtagtgctgtttcaccggggtcatgaacactccggacgtgtggcacatcttgcggatgagctggcgctgcctgatttcgcggtatttgcctgggatgcccggggtcacggccgtaatgacgggccgagaggctacagtccgtcaatgggaacatccatcagtgacatcaatgaatttattaacttcattacatccgaatatgaaattccgatcgaaaatatggtcgtgctcggacaaagtgtcggcgctgtcaccctgaccggttgggtacatgatttcgcaccgaagatccggggtctggtactggcttctccggcctttaaagtcaaactctatgtgccgtttgcccgtagcggactggcgctgatgcagaaaatacgcgggctgttttatgtaaactcctatgtcaaagccaaatatctgacccacgacccgctacgtatcgcttcatttgagcgggatccgctgatcacccggccgattgctgtcaatatcctgctggaactctacaaaaccgctgaccggctggtggcggatgctgccgcgataacagtgccgactcagctgtttatctccggcagtgaccacgtggtgcaccgcaagccacagaatcagttctatgcgcggcttaacaccccgtataaagaaaaacatattctgccggggttctatcacgacactctgggcgagaaagatcgtcatatcccgctggcggaaatccgccgctttgtcaccaccctgtttgaacagccgcgctatcagcacgattaccggtttgaggatgtgtgcagcgccggtgccgatgcttatcgtgaattgcaggttccgctgccggattactgcccgaaaaatctcggctataaactgctcagcaaagcgatgtccaccctcggcaaagcctcggaaggcgtcagtatcggctacgataaaggctttgattccggatccaccctcgattatgtctaccgtaaccaggctcagggcaaaggcattttcggccgcattgttgaccgtcagtatctcaacagtatcggctggcaggggatccgccagcgcaaagtgaatattgagaaaattctgcgccgcaccatccgggcattacaggaagaaggccagccggtgcggatcatggatatcgcagccggtcagggacgctatctctttgatgcgattaatgattacagccggatagaatctgttctgatgcgcgattacagcaccatcaatgtggaacagggccgtttacagatcaaagagcgcttcctggaagacaaaatccgttttgaagagggcaatgcctttgataccgccgatctggcggcggtcaccccgaaaccgaccctcggcgtggtgagcgggttatatgaactgttcccggaaaaccatctgctgcgcgattcccttgccgggctggcgcaggcgattgaaagcggcggttatcttgtctacacctgtcagccatggcacccgcaggtagagatgatagcccgcgttctgccgagccatcagggcggtaaagcctgggtgatgcgctgccgcagccagggggaaatggatgcgctggtggatgaggcagggtttgaaaaactggatcagctcattgataactggggtattttcagtgtatcagtcgccagacgccgctga

SEQ ID NO: 273771 - DNA, 630 bp, Morganella morganii
atgaccatttatgatctaaaaccgaagtttcagaacctgctgcgtcccgtggtaatccgcctgtttaatgccggaatcacggccaaccaggtcacgctggcagcgatgttcctttccctgcttaccggtttcatcctgatcctgtttcccgatccgcgcctgtttctgctgctgccgccggtactgtttatcaggatggcgctcaacgccattgacggcatgctggcccgcgaacatcaccagaaaagccgcttcggcgcgatcctcaatgaactgggtgatgtggtatccgataccattctttatttcccgtttgtcctgctgttcccgggagccgccatctggatactgctgatcctgtttatctctgtactgactgaatttatcggggtactggcacaaactatcggggcatcacgccgctatgacggcccggccggaaaaagtgaccgcgcctttttgttcggcgcactgggtctgtgggcggcggtttttcccgcatcacttgactccgtcctgtttcctgtattgtttgcggtctttgccgccctgctgtttcttacctgttatcaccgtatccggcgtgcgttgcaggaatctgcgcaacaaagcgcatctcaaaaggactga

SEQ ID NO: 273772 - DNA, 558 bp, Morganella morganii
atgaaaaagacattagctgcattatcattaatttctgctgtactattttccgcacacgctgttgccgggccggggagcactgaatatacctacaaaaacggcgataaaatccgtgtagtcagcccggaagtccaaaccaaactgtttaaagatgaatcaggaaaaccggttctggtcattaattcacctgatggtcgcgggatctctcacaatgtcttctcagattataatgtcggtaaaaaaggactggttattcataataaagaaaatgccaagaccattattaatgaagtgatcggtgacaataaaacccgtctgcgcggcagtaccctggttgcaggcggcaaggccagcctgctgattgttaacccgaacggtgtggtctgtcagggttgcagctcaaccaatacctctctctattctcaccgcgaaacactgccggtgattatcaatgctgcaaaaaataatgaggtgattttcgatgcccgcaaaccgctgcatgcatcagaacgtctgaccggcatcagtcataatatttcagtaaattcaccacgctga

SEQ ID NO: 273773 - DNA, 126 bp, Morganella morganii
atgcattttgacagcaagattaaaaaattattacttatattattttttgtttttccctgtgatttacatgcttcggaaataattccgattgatagacatttaaaagtaaacatcaaaaaaatgtaa

SEQ ID NO: 273774 - DNA, 2295 bp, Morganella morganii
ttgtcatacaataaatacagggaacttaatgttcctgaaacaggtgtggtattgaataacggaataaaagacagtgaatcttatctggcaggtaaaatagagggaaacataaattttcaggggagtagtgccagtttaattattaacgaggtaatcaattggtatccttctgacttgtcgggggctatggaggtttccggtaatccggcatcagttattattgctaatcctaatggtattacctgtgatggctgtaatttcattaaggtacctgatattacccttgctacagggaaaattaattttaaagccgttaacgactctctttatgagcaaaccatcagccattcaaaggggttctacattacccgccgggatcaggggcactcgctgagccgctggcggttgccgcagatttattacggcggaaatttatctgttgatgcagcaaatggcataacagcagacagtaaaacattcagcattcctgaatttaaagaatccgcaatgatgctgagcagccataccggaaccggttggctgaaagaactgataacccgcgatgatgttcagtggaaccgggttgctgatgcctgtcagcgctgggactataaagagcagcaccttaatccggtagcatcagctgttctggctgttgccgtcaccgctgcgacatcgggctccgggctggccgcatgggcagggagtaccgcatcttccgcagccacaggaacggctgccgctgttatttccggagctgcgcattccggaatgatagcactgacaacacaggctgcggttgcactggcagagaataaaggcgatttatctgaaacatttaagtcactgggacgcagtgaaagtgttaagtctgttattggtcagatggttgtcggaggggcgttcaatggtctggataaatcgatgggctggcagaacggaaatcctgcacaatcgcggattccgttactgagtgacggagattggcacaaggttgcacagcgcgtttccgcccagtctgtaatcagctcagcggtgggttcggcagtatcagaaacaagcttcagggagaactttattaatgcgcttctcagtaacacgggaagtcagtttaatgctgaaggcgcaaaattaattggtgaccacggtgaaatattaacggaaccgggcaaagcaattacgcatgctgcggttgccgctgtcagagccgagctgaccaaccggagtgtcaggggagcggttaccggggcgctggcagcgtcggcagccggtattatattaggcgattctttagatcagacagcgcaggaacatgaacaacaggcacagctggcccggatgacaggtgctgttgccggattgattgcaacaggccatatcaacgggctgaccactgcggcggatgctgctgagatcgttgaacgttataaccgtcagtttcatttgcaggaattaaaggcgatagaggaactggctgacggtgataattttaaaaaagagcgcctgctcgcagcaggttgccgtctgatcaactgtactgtgcaggaatctgcaaattcaccggataaattacgttttgatgcgttaatggtaaaatatccggagacgtatcttgaagataatttactgacaaattactgggtgacaaaagcggatgacggcattcgttattatccctggtcagttgcacctgaaaaagtacagctttttacttacagtgaaactgaacgacatgatgatattgatgattttgtccgtaatcaatatgcggaatatataacagattttaccggtctgaaaaaagcaactgccgaaattattatcgacagtatattgatgtcatcagtgaatggcaggagaggtaatcctgccagaatgcataaacatatcagaaaggtcagttatgcagatttaaatcaaatctataccaccgataaaaagggcaataaaatcccgatgaagtggtatcagtcaggttcctctatcaaccagcagggtatgccgtttgagcattatattggtacacaattaccggcaggctcaaaacttccggatggattcaaaacctttgattattatgacagtaaagataaaatagcgattagcgtaaaaactattaacactcaaacagatagtagactaaataaacctgatgccataaaatataccattaatggccatgttaataaaatagctcagtttacagatcacataaaagagggtactccattgagcacagatgatatcaagaaaagagtattacatattggtcttccggaaaaaaacaacatctga

SEQ ID NO: 273775 - DNA, 507 bp, Morganella morganii
atgaattcgataaattcggatgagtttaatgcagtcgtaagttttaatgaagattatttttattttttaaggatgattaatcatgggttgttaataccggactatttatttggtgatattattattccagtggatgcagcaattgacaatattggcttaagtttaaagcaggttcttacaaaaaataaagatggagggtctgaaggttcttatatatttgatcatgaattaaacaaggagaattataaagaaaacatagtaaaattaatgaggttatgcggatataagaataaaaaattactttttaaaaaaatgaataaatgccttgtaaggcaagttggtaatattattaaaataaaacccctgaaccatattaaacttgaagcctgggacggtgatggtatatcagaaactgattatgtcattattccggtatcggcttcagatgaagagttgggtaatgccgttatcgaggcgttttcccgctgtaagggaaggcaattctga

SEQ ID NO: 273776 - DNA, 354 bp, Morganella morganii
atgactgagactgtcaccatctggcacaacccgcgctgctccaaaagccgtgaaactctggcactgctggaagaaaacggcgtgtcttcggcagtaatgctctatctggacactccgccgtcagtagcggacatcaaaaccgtgctccgtgagctgaaatttgatgacgcccgcaaactgatgcgcaccaaagaagccctttacagtgagttgggactggcggcggtcactgatcaggatgcactgattcaggccatgcatgataacccgaaactgattgagcgtccgatagtgattaaaggcaagcaagcccgcctcggccgtccgccggagcaggtgctggagattatctga

SEQ ID NO: 273777 - DNA, 1464 bp, Morganella morganii
atgaatacgtttctgaaaaaaccgttagccgtcttactgagccttgccctgaccttcccggtactgcctgccgcacaggctgcggttgaggatgcgttacctgaaatcggcaccaccgccggcggtacactcagtatcggacaggaaaacctgatgggggacttttatctgcggatgatccgcagcagctccccgatggtctatgaccctgttttactgcaatatattaataatctcggccagcgtctggtctcaaacgctgactcggtcaaaaccccgtttaattttttcctgatagccaacccgaacattaacgcctttgctttcttcggcggcaatgtggtgctgcacacctccctgttccgctacagcctgacagaaagtgaacttgcctctgtgatggcgcacgaaatcgctcacgttacccagcgccacctggcgcggatgatggaagatcagcagaacaaagcaccgctggcctgggcggccactctgggctctatcctgcttctgatgaccggcactccggtcggtgccgccgccatgacttcgaccatggccgggatccagcaaaatatgatcagctttacacaatccaacgagcaggaagcggaccgcatcggcatgggcacactgagccgtgccgggtttgatccgcagggtatgccggactttatgaccatcatggtggatatgtcccgttacagctccaaaccaccggaaatgctgctgactcaccccctgccggacagccgtctggcggatgcgcgcagccgcgccggtcagatgccgcgtaaaaacccgccgcagtcctttgatttcctgctggcgcgcgcccggacgatggcaatgtacggcggccagccgctgcgcaatgcgactgaccagatgattgacaactacagcaaaggcaacagtaaagaacaaatggcggcggattatgcccgtgccattctgctataccgtgacaacaaatatgagccggcctcacaaattctgacgaaattgctggccgccgatcctgacaatgtctggtttatcgatgtcatgacagatgtggatatcggtctgaacagaacctctcaggcggtgacccggctggaaaatgccctgaaacgggaaccggggaattcggtatatcagataaacctcggtaatgcctatattcagaataaacaatatgataaagcaactaagattctgcgcaattatacctttgatcacccggctgacccgagcggctgggatctgctggcagaagcaggtggtaaagccggccaccgtgcggatgaactggccgcccgggcggaatatcagaacttaatgggcaactttgacggtgctatccgcagcctgaccgaagccgcccgtcaggcgaaacccggcagttatgatcaggcccgttatgatgcgcggattgaccagatccgccagttacagctgcaattcaaacaatttaaataa

SEQ ID NO: 273778 - DNA, 1095 bp, Morganella morganii
atgttagatttgatcattcagtggtaccgacgacgttttgccgatccgcaggcagttgctttgaccgttattttactggcgggtttcggaattatttattttttcagcggtatcttagcgccgctgctggtggcaattgtactggcgtacctgctggagtggccgattcatcagatggaaaagcgcggcgtatcccgcaagctggcgattatgctgatcctgacgctgtttatcggtgtcagtgtgctggtgatctttatcctcgcgccgacggtctggggacaggggcgcaatctgctgttggatatgccgacaatgttcagccgtttcaatgagttcgcccgcgaactgccgaaccggttcccggcgctgatggatgtcgggctgatggatatgatcctcgataatgcccgcagcaagctgctctcggtcggggattcagtggtgaaaatgtcgctggcatcgctggtgggattactggcgctgacgatttatctgattttagtaccgctgatggtgttctttttactgaaagataaagaacaactgctgcgaggcttccagcgcattctgccgcgtaaccgctcactggccgggaaagtgtgggtggagatgaatcagcagatttccaattatatccgcggcaaagtcaccgagatgattattgtcggtgtttgtacttatatcgtcttcgcggtggtcggtctgaattatgcgttactgctgggtgtactggtggggctgtcagttcttatcccgtatgtgggagcggtgattgtgacggtaccggtcattctggtcgggctgttccagtggggactggattcggatttctggaccatgtttatcgcctatctggtggtgcaggggctggacagcaatatcctggtgccgatcctgttttctgaggcggtgaatctgcacccgctggtgattattctgtcgatcattattttcggcggattgtggggattctgggggatatttttcgcgatcccgctggcaaccctgattaaagcggtgatccactcctggccggaggagacaatgccggatgacaaaataccggataagaaaatgtcagggcaggcgtaa

SEQ ID NO: 273779 - DNA, 471 bp, Morganella morganii
atgagcccattgaacgccggtgataaggcgcccctgttcagccttcccgaccaggatggtgaatcaatcagcctggccgattatgccggtcagcgtgtgctggtgtatttttatcccaaagccatgacgccgggctgtactgtccaggcatgcggtctgcgcgacaatatggatgaactgaaacagttcaatgttgaagtgctggggatcagtacagacaaacccgaaaaactgtcccgtttcgcggaaaaagagttactgaattttaccctgctgtcagatgaagaccacgcggttgctgaagcatttggcgtctggggtgaaaaacagtttatggggaaaacctacgacggtattcaccgcatcagcttcttaatcggcgctgacggtaaaatcgagcatgtttttgataaattcaaaaccagcgaccacgaccaggttgtgcttgaatacctcaaaacccacagctga

SEQ ID NO: 273780 - DNA, 543 bp, Morganella morganii
ttgccgcaacgcgatcagcaatatctggttatcactgcactgggacgggatcgcgcagggattgtgaatgcgattacccgtcatgccggagagtgtgactgtaatatcgaagacagccgtctggcgattttcggtgaggagttcacgtttattatgatgctgtcaggcagctggaatgccattgccatgctggaggctaccctgccggtactggcggcggagcttgacctgctgacagtcatgaaacggacacagcgcgggcatcagcctgccgccaccaccggtgtcagtgcgcaggtcacggtgcctgatgccgcggggctggtggaacgctttaccaatctgtttatgagactggattacaccctggctgaactggtgtccaaaacccggccggaggatgatacagacgcagtactgctggagattcagatcaccgcgcatcacccgacaggggaaaacaacgcggtgctgcagcagcagttttaccgtctttgtgctgagttacaggccgaaggcactattaccctgatgaatcattaa

SEQ ID NO: 273781 - DNA, 900 bp, Morganella morganii
atgtcacacataaatgacgttttaaaaggcagtattgttgcgatggttacaccactggacacacagggtcgtgttgataaggcggggctccggaaattagtggattaccatgtcgcggcaggcacgtccgccattgtggctgtcggaactaccggggagtccgccacactgtcacatcaggaacatgtggatgtggtactggcgacactggagtttgcggaaggccgtattcctgttattgccggtaccggcgctaacgcgaccaacgaagccgtctggtttactgagcaatttgaaaacagcggcgtggcagcctgtctgaccgttaccccgtattacaaccgtccgtcacaggaaggtctgtatcagcactttaaagtgatttcagagaataccgcattaccgcaaattctgtataatgtgccaacgcgcaccggctgtgatatgttacctgcaactgttgcccggctggcaaaactggacaatattgtggcaattaaagaagcgaccgggaacttaagccgtgtgaatgaaatcaaaaccctggtgaatgatgaaaacttcattctgctcagcggtgatgacgcatcagcactggatttcaccctcctgggcggcaaaggtgtgatttctgtgacagccaacgtggctgcggcagagatggcacagatgtttgatcttgccctgcgcggggattttgaccgtgcgcgtgtgattaataatcaactgatggacctgcatcacacattattctgtgagccaagcccgtcaccggtaaaatgggcctgtcatcagctgggtctgatcgcagagcagacactgcgtctgccgctgttaccgctcacggaagcggggcagaatacggtcggccgtgccatgaagacggcgggcatacgataa

SEQ ID NO: 273782 - DNA, 1050 bp, Morganella morganii
atggcaacactactgcaaaaatcaaaggttacgaagctcgctggtctttccgtggttttattactggcagcctgctccggcgatcagcactataagcgtcaggtcagcggcgatacttcgtacctggatgcgccgcagttacaggcgctgaatgttcctcaggggatgatcctgccgttacagagcggccagtatgatattcctcaggttaagcaggatggtgcgaccggtctggcgctggacatccgtccgccggtacagacggtcagcctgttagcaggttcccgtactgaaacagcaggagacgcaagccgtcttctgctggagaattcagcggaaaacagaacgctgtgggctcagatcaaccgcgttctggccgatcgctcagtgccggtcagccagcgtgatgaagccggtggcgtgattgtcactgactggattgtctggcagcgtgcggatgaagacctgccgttacagtcccgccagcgtattaaaattgaaccagccggttcacaggtggcggttgttgtgaccagcgaaggtctgaagcagggggaaaacccggtgacagacaaaacggaaatcacccgttataacaacctgactctcaacgagctggtggacggccttgaccgtatgcgtaatgccgcgcgtcaggaaaccaatgcgtcacagtatgcggctccggacgttcagagcggcagtgataaaaccggtctgccgcagattattgtccgcgcgccgtttgatgtggtctggtcccgtctgccggttgtgctggaaagcgtcggcatgaaagtgggcgaccgcacccgttcgaccgggaatattgaagtgacatacaaagggctgagttctgcagagtggagcagcctgggtatggatgatccgtcagtggccgaaggcgattacaccttacaggtcggtgatctggataaccgcagcagcctccagtttatcagtgccaaagggaaaccgctgacacagaaagaaaatgatgaaatggtgaaagctctggaagcggcattcagcaaatcatctgtaaaataa

SEQ ID NO: 273783 - DNA, 1029 bp, Morganella morganii
atggatttatcttctgactcttcacgacctttactgagcattgttgttgccgtctataacggggaaaaatttcttcctcagttttttgactgcctgctgaaacaaacacttcctgcctgggagctgatcctcgttaatgacggttccaaagataatacggatgctgtgctgcgtgaatgggaggataaattcccttctgtcactattctggagcaggcaaatcagggcgtctctgtggcgcggaataccggttttgcagtggcaaaagggcaatacatcacgtttccggacattgatgatgtgattcacccgcagatgtacggccgcctgctggagattgcgcttgccgggaaactggatgtggcaacctgcaacggcacctatgtttatgaagacgggcgtgaaccgcggccgattttcccgcctgatcgtctgcgttccaccggggttatttccgggccggactggctgaaacgggcgctcaactcccgtaagttcctgcatgtgacctggctgaacctgtaccgcactgattttctgcgtgagcagggctattattttgagccggggctgcatcatcaggatattccgtggacaaccgaactgctgatgaccgcagcgcgggtggaatatattgatgagcgttattacgattatctgattcattccgaatcggtatcacatacgccgcctgatgacaaaatccgggagcggacagtccataattacatgaaaattctggaaatgctgaatgatatcaatcagcgccatgcggatgtcgcgaagcagatccctgcctgctactggcagatttccaaagaaggactggggatcctgcacaccatcagtgagatagaatcgccggaggtgaaacaggagattgtgcgcgaactgtttgatcgcgggatatggacactcatctgggataacgccaaagatttgcggctgcgctggcggctggcccgccgttatccgcgcctgaaagcgattctgaaagacgctgcggagaatacagcaacaccggcctga

SEQ ID NO: 273784 - DNA, 1155 bp, Morganella morganii
atgtgtgatgtaattgcagtaacgccgcccgccgtaccggcccggcgggaacagatggccacccgcgcgctcttttttgttgccggttttgcctccgcggcctgggcggcactggtgccgtttgccaaactgaacaccggcgtgaatgacggggttctcgggttattactgctctgtctcggcggcggtgcgctggtcgccatgccgctgaccggtgtgctgaccacccgtttcggctgccgcagggtgatgaccgtttccgttctcctgcttagtgcagccctgccactgctggcgatcattaatcacaccgggttactggctctgacgctgattattttcggtatggggatcggtattaccgactgtgccatgaatattcaggccattattgttgagaaagcggcaccaaaaccaatgatgtccggctttcacggattctacagtgtcggcggcattgccggtgcaggagccatgagcggctttatgctggcgggaatgggcgcattacaggcggccggtgccgtgacggcgatttgtcttctgctgctggctctcagttataaaggcatactggattacgcctggccgtcagaaggccctgcatttgctgtgccgcgcggtgcggtattgctgatagggattatctgcttcgccacctttctggccgaaggcagtgtgctggactggagtgcggttttcctgactgaatatcgccatgtgccggagagcatgggcggactgggttttgcctgcttcgcggtgctgatgtccctcgggcggctgaccggcgacaaaattgttgcggtactcggacggccgcaggtggtgctgtggggtgctctgctggctgccggtggtcttctgctgagtgtcctgagtgacaactggcttctggcgctcaccggttacgggctgatcggcctgggatgtgccaacgtggtaccggtgatgttttccgctatcggccgccagaccagtatgccgcaggccgttgccgtcccggcggtaaccacgctgggttatctcggtattctggcaggaccggcgtctgtcgggctgattgcttaccgcttcaccctgcccgcagcgctgctggccgtggtcgcgctgctgttgctggtcgcgctgctgtcgcgcaaagtccggatgtaa

SEQ ID NO: 273785 - DNA, 798 bp, Morganella morganii
gtgaacacacatcatccggatatcgcattttttcatcagttagccaaccgcgcagcacaagagacgttaccgcgttttttacccgggcatacactgtccgtcgataccaaaatcaaagaaggtgtcagttttgatccggtgacggatgcagaccggcaggctgaaatcgcgctgcgggaaatgatcagcgcagcatatccgcagcacagtattctgggtgaggagttcggtctgaccggcgaaggggactatcagtggatccttgatccggtggacggtacccgcccgtttatgctcgggttgccggtctggggaacactggtcggattaacatgtcgcggaacgcctgtaatgggaatgatgagccagccgtacaccggcgaacgtttctgggcggatggtgaacgcagctggcacagcagcccgcacgggacatatgtgatgaaaacccgcaaaaacatcaccctggccaatgccattctgcataccaattcaccggagccgatgccccgtttcccggaaatccggctggccgatctgatggaaaaggtcttaatgacccgtttcggcggcgagtgctatgccatggcgatggtagcggcaggcaaaatcgatctgtgctttgattacgcccttcagccatatgatatcgctgcatttatcccgatcattgagcaggccggtggttgcgtgacaacccttgacggcggacccgccatacagggcggtgctgttctcgccagtggttgtccgcgtcttcatcagcaggtgctgactattctgaacaaaaatatttaa

SEQ ID NO: 273786 - DNA, 771 bp, Morganella morganii
atgctcgattatgcagcttttccggaacaacggcaagccctgatccgacagttattacacagtgacggccgggtacagtgcagcacactggttgaacagcttggtgtatcagagcacaccatccgccgtgatttgcaggttctggcggatgaagggctctgtaaacgggtgtatggcggtgcggtcagtgtattgggtgatgtggcggattttcagcagcggatcgggcagaacagtgcagaaaaagaaaaaattgcgctcggttgtgcaggattgatccgtaatcacagcacagtttttctggacggcggcagtcagaacctgttgctggcacagcatatgccgaaagatttttctctgaccgtgataacacacagtccgcttattgcagccgtactgagtgactacccgcattttgagctgattgtgctgggcggaaagctgcaccgtgcatccggaacctgcatcggggcgcaggcactggagcagctgtcttatctgaatattgacctctgttttcccggcggatgcgcactggatgcggacagtggtctgacggttaccgggtttgaggaagccgctttcaagcgggctctgataagacagagcagtctgaccgtggccggtgtgaccggtgacaaactcggccgtattgcaccttatcgtgtggcggcatgtgaggaactggatcacgttgtgcttactcagaaggctccgcaatctgcccgtgacctgctgacagcccggggtttatccctcattatggtgtaa

SEQ ID NO: 273787 - DNA, 714 bp, Morganella morganii
atgcaaaaacatgctgaactgtatcgtgggaaagccaaaacggtctacaccacggataatcccgatctgctgattctggaatttcgtaatgatacatcagcactggatggtgagcgcatcgagcagtttgaccgcaagggcatggtcaataataaattcaaccactttatcatgggcaaactggaagctgccggtatcccgactcagatggaacgtctgttatccgataccgaaattctggtgaaaaagctggatatggtgccggtggagtgtgtcatccgtaaccgcgctgccggttcgctggtaaaacgcctgggtgtggaagaggggatggtgctgaatccgccaatcttcgatctgttcctgaagaatgacgccaaacatgacccgatgatcaatgaatcctactgcgaaaccttcggctgggtcagccgggaaaatctcgcagaaatgaaacgtctgagctatatcgccaatgacgtgttatcccgtctgtttgatgaagcgggtctgatcctggtggatttcaaactggaattcggtctgtataaaggtcaggtcgtgctcggtgatgagttctcaccggacggcagccgtctgtgggataaagaaactctggataaaatggataaagaccgcttccgccagagcctcggcggcctgattgaagcttatgaggaagtggcacgccgtctgggtgtgaaactggattaa

SEQ ID NO: 273788 - DNA, 888 bp, Morganella morganii
atgcgttggcaagggcgtcgccagagcgacaatattgaagaccgccgcagtgcggggggcagaattccgggcggatccgcaggcgggccgcgtattccgctgccgcgcggcaaagccggactggttgtggtcgttatcgtggtcgtggccggtttttacggcattgacctgaccggcctggttaccggtgacccggtcaatatcgggcagaccacctcacagcagcgtccggcacaaaacagtgcacaggagcagaaacaggcggaatttaccggtgtgatgctggcggaaaccgaagcggtctggggacaaaaattcgcacagatgaaccggcagtaccgcgaaccgaaactggtgctgtaccggggcgcaacaccgaccgcttgcggagcggggcaggcggtgatggggccgttttattgtccggctgatcagaaagtctatatcgacctctctttctatgacgatatgcgcaccaaattaggggcgggcggggatttcgcgcagggctatgtggttgctcatgaggtgggacaccatgttcagcatctgctcggtatcgatcgtcaggtacgtgaacgtcagcagcgcagcagtcagaaagaggcaaaccgcctgtcagtgaaaatggaattacaggctgactgttttgccgggatctggggccatgagatggaaaaagccgggatcctcgaaaacggtgatctggaaaatgctctgaatgcggcgcaggccatcggcgatgaccgtctgcaaaaacagagtcagggacgggttattccggacagcttcacacacggaacatccgcacagcgttatgagtggttcaaacgcggttttgacagcggtaatattgcgcaatgtgacacattttccgcactgaaataa

SEQ ID NO: 273789 - DNA, 453 bp, Morganella morganii
atgagtaatattgacccgaccctgattatcctcctggtcttagccgggctcgggcttatcagtaataacatgacggtaaccctggctattctttttctgctggctgtgcgcatcacgccgctcaacggctatttcccgtttgtggaaaaatatggcctcaagctggggatcctcattctgaccgtcggtgtgatggcaccgattgccagcggtaaaatcagtgccaatgatgttttaagctcctttctgaactggaaatccctgctggcgatagcgatcggcattctggtgtcctggctcggcagccggggcgtcacactgatgagtaaccagccgtccacggttgccggcttgctggtgggtaccattatcggtgtcgcgctgttcagaggggtgccggtcgggccgctgattgcggcggggatcctgtcactgcttgtcggtaagatgtag

SEQ ID NO: 273790 - DNA, 2007 bp, Morganella morganii
atgttacctgcactgtttcacgcctgcacagaacagctccgtatacagggtatccgccgtctgtgggtactgagcggcagtgatgactggtgtgaatcccggttacaggaaatcagagacgcggcgcccggcgactggccggtcatttccgctcagctgcccggcggtatcgcggcggaaaaagcccgtttgttgctgggacaggagttccgccacggcgtgtttgatgccaggcgcgggctgcacagtgaagcactggctatgctgaccggcacactacaggcgggcagctggctgattctgctgctgccgcctgcctcacaatggcagacccggccggatgaggacagcctgcgctggaatgacggcggacagatgatccccgcgccgcattttatgcgccacttcgcccgtacacttatccatcccgctcatccctgccggtatgaaaacaggccatttgacatgactctgctgccgccgcaaaacgcgtggcagccgccggacggcacaccgacccctgcgcagcagcagatactggcacagctccgccgtgcggaaagcggcattttctgtctgaccgcggccagaggacggggcaaatccgccgtggccggtctgttcctggcagaatcgccgggccgtcatttattatgtgccccggcaaaagccacggtcacggtgatacagcgctatcttcatgattcacaacaaacggaatttatcgccccggataatttactgacactggcggaaacggcggatgtcagcacatacggctggctggtgatcgacgaagcggcgatgatcccgttgccgctgctcgcgcgttttacggcggtatttccccgtgtgctgctgctgaccactgttcagggttatgaaggcacaggacggggatttttactgaaattttgtcactcactgccgcagtttaccgcactgacgctgacgcagccggtacgctgggcagagcatgatccggcggaagcctggctcgataaggcactgttgctcaccgagccggcggaaaaaatcatacagacggggaagtgtgaatatcagtccgtaacacagcaggcgttatgtgatgatccggatttattgtccgggttttacggcctgctgacggcagcgcattaccggacatccccgctggatctgcggcggctggccgatgcgcccggacagcatttcgcgctgttccgccaccggcagcaggtgactgcggcgctctggctgaccgacgagggtgggttaccggcagcactgacactgtctgtctgggcgggcacgcggcggccgcgcggaaatctgctggcacaatcgctggcggcacacagttatttcccgcaggcggcacaactgcgttcacgccgtatcagccgtattgccgtacatgcaggctaccggcgcaatgcgctgggacgtcagttattacagcgggcggctgacgcggcaaaaaacagcggtatggattatctgtccgtcagtttcggctataccccggaactggctgcgttctggacatcctgcggctttcgttttgcccgaatggggacacacccggaagcgggcagcggatgttatactgcaatgctgctgctgccgctgacgcgggccggacaggcactggcggatgacgcagaacagcagtttgcccgggattgcactgttttttctcagatatggggattttcaccggtaccgccggagcaggcggaatcactcaatgaatgggaatggcggatgctggccgggtttgcgtatgccgctaaaccacaggcggtggcagatcctgcattggtactcctgcaaagggaatacccggcacagacagcggaattgtcacagttgctgtccggtaaaccggagatactgaaagctcgccatatcagcggaaaaaaggcattacttagtgtgctgagacaggaaacagcagtgatactgcagatactgcgcccgcagtgggcgcagcagacagcagaagagatcaggactttttag

SEQ ID NO: 273791 - DNA, 198 bp, Morganella morganii
atgcattggttagcagactactggtgggtcatcctggtgctgtttgtcggcgtgatcctgaacgccattaaagatctcaaacgcgtggatcacaaaaaatatctgcagaaccgcagggaactgccgcctcaccgcgataataacgcacagtgggatgatgaggatgactggccggataataaatctaaaaagtcctga

SEQ ID NO: 273792 - DNA, 1629 bp, Morganella morganii
atgggaaaaacaatccgtcaggtgacatttgaattactccggcaactgaatatcacgactgtttttggtaatcccggctcgacagaagaaactttcctgaaaaactttccggcagatttccgttatatccagacactgcatgaatcgtctgcggtcgctgctgcggatggttatgcacaatccacccgtaatgttgcactggtcaatgtgcatacctccgccgggctgagtaacgcgatgagcaatatcctcacagcatatatgaaccgcacgccgctgattattaccgccggtaaccagacccgcgacatgctgctgatggaaccgtggctgactaatatcaagccggaaacactgccggaaccgtgggtgaaatggagttatcagccggtgagggcggaagatgttccggcggcctttatgcgggcgtatgcgatggcgctgcaaccaccggcgggcccggtatttttatcgatcccgctggatgactgggataaaccggcggaagcagatgcagcggttgtccgcaccgtgtctcaccgtatcagtgccgacccggtgcggatgcgggagtttgcgcagaatgtatcagaggcgaaaaatccggtgctgatttacggctcatcccttgcgcggggggagggctgggatgccgggatccggctggcggaaaaactgaatatcccggtgtattcggcacccgcctccgagcgaccgccgttcccggaatctcatcctctgtatgcaggcggcctgccgtttgccatgaaaccgctctcggacaaactcgccgggcatgatgtggcgctgatcatcggtgcgccggtcttccgctattatccgtatgtggccggtgactatatcccgccgggactgcggttgctgcatatcacggatgatccgcaggaagccggccgggcgccggtcggggacagcctgttatgcgatgcggtactggcggttgagcagttaactgagctggtgagtgcacgaccggtgcggtcagccgccgtcagtaaacaaccgcacggtatggcaccgcatcctgccgcgcaggaagcggtatcagacgggttactgagtgcttcacaactgttccgcgcagtcagaaatgcaatgccggaagaaacgattctgactgaggaatccccctctaacctgggggagttgcatgctgcctggccggttaataaaccggactcattctatacctttgccagcggctcactcggctggacattaccggccagtgcggggattgccctcggtgaacgggacagcgggcgtaaccggccggtggcggcgattatcggtgacggctccatgcagtactctgtgcagggattatggactgccgcacagcatcagttaccgatcctgtttgtcattccggaaaacaggcagtacggcattctgaaatctttcgcagtgctggaagatacgccgggggtgccgggtctggatattccggggctggatattgcggctcttgccaccggttacggctgcaccgcagtccgggcagaaacagaggctgaggtaattgcggcctgcaaagcggcattacagcgcaaggggccgacagtgctcgttgtgccgatccggccgtcagtaccgccactgatgtga

SEQ ID NO: 273793 - DNA, 417 bp, Morganella morganii
gtgaagccgttcacccgcatactgctgctgttatcaggctggattgccgtcatactggcaaccctcggggttgtgctgccggtattgccgacgacgccgtttctgctgctggcagcgtggtgtttctcccgttcatccccccggttccatcactggctgctgtaccgttcctggtttggcggctacatccgtcactggcagacacacaaaggcctgccgcgcaaagcaaaacggcgtgcagtaatcgtgatcctgctgacgttcgcggtgtcgctctggctggtgaaactgatttatatccggctgctactgctgtgtattctggtctggctgctgatctttatgctgcgcctgccggaaacagatgaaatgacgccggagaataccccggcgccggaagaaaaatcaccggactaa

SEQ ID NO: 273794 - DNA, 678 bp, Morganella morganii
atgatgacctttgaaatgctgaccgggcagacccgtgatcatgtcattaattttgccggtaatcatcacctgcaatttaatgccaccaaagcgtttcttgccatgcagaaagcggcggcaaccgccggatttaaactgatgcccgccagctccttccgcgatttttcccgtcagcagattatctggaatgaaaaatttgccgggatccgcgctgtgaatgatgcagaaaaccgcccgctggatgtctccggactgtcagaggcggagcgctgtcaggcgatcctgcgctggtcagccattccgggtgccagccgtcatcactggggaacagaggtcgattattacgatccgttccgcctgcctgccgatacttcccttcagctcgaaccttgggagtatgaggaaggcggctattttgccgccctttccgcctggctggcggacaacatggcacagtttgatttttatctgccgttcacacagcgtcagaccggtggtgtggcttatgaaccgtggcatatcagctactggccgctttcgtatgaagcagaacagctttacaccccggagacgcttgaaagagtgctgaaaacacaggatatcgccggtaaaacatggttactggctaatcttgacgcaatttatcagcaatatgtcacattaccggagagccattag

SEQ ID NO: 273795 - DNA, 1131 bp, Morganella morganii
atgcattgtcctgtaacagaactggcaaaacagcttatcagccgggaatcggtcagcccggatgataaaggctgccagacactgatggctgaacgcctgattgccgccgggtttatcgtcgaacatatgcctttcggcgacacgcagaatttctgggcataccgtggcggcagcggcacaacgctggcctttgccggtcacaccgatgtggtccccccgggtgacctcagccactggcgtaccccgccgtttgaaccggcactgattgacggcatgctgtacgggcgcggtgctgccgatatgaaaggttcactggcggccatgattgtcgccgccgagcgtttcactgaacgttatccggactatccgggacgccttgcttttcttatcacctcagatgaagaagcgtcagccgtcaacggcacagtgaaagtggtggaaacgctgatggcgcgccatgaaaaggtggaatattgcctggtcggtgagccgtcaagccagtcgcaattaggggatatgattaaaaacggccgccggggttccgttaccgcaaacctgacgattcacggcacccagggccatgtcgcctatccgcatctggctgataacccggttcaccgcgccgcgccgtttatacaggagctggtggctgaacactgggacagcggcaatcagttcttcccgccgaccagcatgcagatagccaatatccgtgccggtaccggcagtaacaacatcattcccggtgatctgtttattcagttcaatttccgcttcagcactgaatctaccgctgaatcactgaaagcacggattgcggcactgctggaaaagcatcagctgaaatacactatacactggtcactgtccggccacccgttcctgaccccggaaggccctctgaccggtgcggtctgccgtgccatcggtcagtactgtaatctgacaccggagctctccaccagcggcggaacctctgacggacgctttattgcacggatgggcacacaggttgtggagctgggtccggtcaacgccaccattcataaagtgaatgaatgcgtcagcgccgctgatttgcagcaactcagccgtatctatcaacggattatggagcagatactgctatga

SEQ ID NO: 273796 - DNA, 378 bp, Morganella morganii
atgaaaaatacaacctccgtctgccggattttcgggattaaaaactgcgacacgatgaaaaaagcccgggcatggctggatgctcatcagatagcgtatgagtttcatgattaccggcaggatggtgcggatacagaactgctcagtgaatttgcccgtcatattgactggacacaactgcttaacaaacgcggcaccacctggcgtcagctggataagactgaacaggatgcggtgacagatgcgcagtccgccatccgtctgatgtcagaaaaaccggcgctgatcaaacgcccggtgctggtctctgcggacggccgttatcgccttggttttaaagctgatgattatcagcagttcttcagtcttcctgcctga

SEQ ID NO: 273797 - DNA, 558 bp, Morganella morganii
atgaaagagtacttagccggaagcacgctgttatttgccagctttaccctcgcgggacaaacggacgtgtatctgaatgaacttcagctcaaatttacggaaaacagcgaactgtgcctggatgaacacaaatggccgcagttcagctcaagtcagtcagagccatggatgatttcacggctgaatgcgctggcttccgtcggttttatcagtgcgactattgaatcgtccggtgtggaatatcagctgacggacaaaggtaaagaagcctggcaggcgcatgaggatttttgttacggcgcactgcgtatcagtaaaatcaaggcgatagagccacaaggcaacggcatcagcaccgtgtacttttactatggtgtgaccggtatgccggactgggcgcgtgataaaaacattcgttacgcctacagtgaagtggatacgatcctcagggggatgaataaagaggtgatccaggtggatgtccgcgaaaatccggacggtaccctggaactgctcaattacccgacaccggcgagtatcgacgaagaaagcgagtaa

SEQ ID NO: 273798 - DNA, 630 bp, Morganella morganii
atgcctcatcacactattatggttattgatgaccatccgttgttacgttatggttttaaaatgcttttacagccggattatgcgttaaccatcatgccggaatttactgataacaatggtctgttcagccatatccatcagcatacccccagaatgattatattggatatcaatgtccgtgctttttccggtattgattttattaaaaaattacgccacaagaaaatatccagttatatcctggtgttttcacagtcacgggaacggaatgatatatacgctgctattgatgccggagctgatggttatttattaaagaattgcgatgttgattatttattaagtcagattaaaaatgcttttaaaggaaaaaagattttcagtgaggcaatttataagattttgcaggaacgtgaacactatcacgatccggtcagttacctgacacaacgggaagccgatgttctcaaagaactggcctgcgggatgaaaaataaggaaattgcacgggcactgtttatttcggaagagacagtgaaagttcatatccgcaatatactgaaaaagctgaatgtctccacacggctcgccgccagcctgctctatctgaaataccggctgccccgctga

SEQ ID NO: 273799 - DNA, 2280 bp, Morganella morganii
atggacgaacaattaaaacaaagtgcccttgagtttcatcagtttccctctcccggtaaaattaccgttaccccgaccaaaccgctgaccacccagcgtgatctggctctggcctattcacccggagttgcagctccctgcctcgaaatcgcggatgatccgctggcagcttataaatataccgccaaaggcaacctggtcgcggtaatttccaacggtacggcggtgctcggcctcggtaatatcggggcgctggccggcaagccggtgatggaaggaaaaggggttttatttaaaaaattctccggtgtggatgtctttgatattgaagtcaatgagaccgacccggacaaactggtggatattattgcctctctggagccgacattcggcggcatcaacctggaagatatcaaagcaccggaatgtttctatattgaaaagaaactgcgcgaacgcatgaaaatcccggtcttccatgatgaccagcacggtaccgcgattatcagtactgcagctgtactcaatggactgcgtatcgtcaataaagcgatcggcgatgtccggctggtggtctccggtgcgggagctgcctctgttgcctgtatgaacctgatggtgctgctgggcctgaaacgcgacaatattattgtctgtgactcgaaaggggttatctacaaaggccgtgaagccaatatggcggaaaccaaagcggcgtatgctattgatgataacggcatgcggacactcgcggatgcgatgccgggcgcggatattttcctcggctgttccggtccgggtgtactgacaccggagatggtcaaaggcatggcgcgtgacccgctgatcctggcactggccaaccctgagccggaaatcctgccgccgctggcactggcggtccgtccggatgccattatctgtaccggccgctcggattatccgaaccaggtcaataacgtgctttgcttcccgtttattttccgtggtgctctggatgtcggcgcaacagcgattaatgaagagatgaaactggcctgtgtgaaggcgattgccgatctggcgctggcagagcagagcgagcaggttgcctccgcttacggcggtcaggaattatctttcggccgtgaatatattatcccgaaaccgtttgatccgcgtcttatcctgaaaatcgcgccggctgtggcaaaagcggcgatggaaaccggtgtggcgacgcgtccgattgaggatttcagtgtctatctggaacacctcaatgagtttgtctacaaaaccaccctgtttatgaagccgattttctccatggcacgcaaagatcgcaaacgtatcgtgctggccgaaggggaagagccgcgcatgctgcatgcgacacaggagctggtcagcatggggctggcgtatccgatcctgattggccgcccggatgtgattgaaatgcgaatcaaaaagctgggactgcagattgtgccggatcaggattttgaaatcgttaacaatgaaagtgacccgcgttttgctgaatactggcaggaatattatcagctgatgaagcgcaagggcgtgactcaggaacaggcccgccgtgccattatcactaacccgaccagtatcggtgccatcatggtgcaccgtggtgaggcggacggtatgatctgcggcgtggtcggcgattatcacgatcactaccggattgtggaaaatgtgtttggtttccatgaaggtgtgcatacggcgggggcaatgaatgcgctcagtctgccgaccggtaacacctttatcgccgatacctatgtgcatgatgagccgacagccgaacaactggcggagatcaccctgatggccgccgccgcggtgcgccggttcggtatcgagccgaaagtggcgctgttatcccgctccagcttcggctcctgtccgtcgccgtccgcagagaaaatgcgtgataccctggcgctgatccgcgaacgggaaccgtcactggaaattgacggggaaatgcacggtgacgcggcgctggtggaagctatccgccgtgatctgatgccggacagcccgctgaaaggtgcggcaaacctgctgattatgccgaacggggaagcagcccgtatcagttataacctgttgcgtgtgaccacctcggaaggggtgacggtcggtcctgtgctgatggggattaacaagccggtgcatattctgacgtctatctcctccgtgcggcgtatcgtcaacatggtggcgctggcggcggtggaagcgcaaactcagcctctgtaa

SEQ ID NO: 273800 - DNA, 390 bp, Morganella morganii
atgctgaagattgaaaaagtggatcatatcgccgtgattgcttctgacctcacggccagtctggcgttttattgcgatgtactgggattaacagtgctcagtgagcactatcgtgcggaacgggattcttacaaggtggatctggcactgaacggagaatacctgctggagctttttacctttccggcaagcccggtgcgggtatcacagccggaagcttgtggtctgcgccatctggcatttgcagtgcaggatctgaccgtatgggaaacacatctgaaacaatgtggtgtccgttgtgacagcattcgtacggatgaatttaccggcaaatcatttttcttctgttttgacccggataatctgccggtggagttttatgcccgctga

SEQ ID NO: 273801 - DNA, 882 bp, Morganella morganii
atgatgcgaattgcattatttttactcacaaacctggccgtaatggttgtcttcggcattattctgtcgctgaccggcgttcagagtcaaagtgtgaccggactgatgattatggcagggttatttggtttcggcggcgcatttgtgtctcttctgatgtcaaaatggatggcactgcgctctgtcggcgggcaggtgatcaccaatccgtccactcagacggagcgctggctggtggagacggtacgccgtcaggcacagcaggccggtatcggcatgccggaagtggcgatttaccacgcaccggacattaacgcctttgcaaccggtgcacgccgtgatgcgtcactggtggcggtcagctccgggttactggaaaacatgagccgcgatgaggcggaggcggttatcgcccatgagatcagccatatcgcaaatggtgacatggtgaccatgacgctgttacagggcgtggtaaacacctttgttatctttatttcccgtattctggcacaactggcggcaggttttatgtcaaacaacaatgacgaaaattccggcagccagggcaacccgatgatttacttcgcggtatcgatggtactggaaattgtgttcggtattctggccagcattatcaccatgtggttctcacgccgccgtgaattctatgcggatgcgggctctgcaaaactggtgggccgcgagaagatgatcgccgcactgcaacgcctgaaaaccagctacgagccgcaggaagagggcagtatgatggcattttgcatcaacggccgcaataaatcattcagcgaactgtttttatctcacccgccgctggataagcgtattgaagcactgcgcagcggtgagtttctgaattaa

SEQ ID NO: 273802 - DNA, 1395 bp, Morganella morganii
atgaactttccattaatcagcaatctcgccatattcgttattctgctgctggtgctgatgaagctcagcagtaataaggactggagtctgtccaaaaaggtactcaccggtctggtgatcggtgttctgttcggcctcgggctgaatgcattttacggcacggagcatgacgcggtaaaacaggcgctgccgtggtttgatatcgtcggtaacggctatgtgaagctgttacagatggtgatcatgccgctggtcttcgcgtctattctcagcgcggttgcccgtctgcaccaggcatcatcgctgggtaaaatcagcgtgctgacgatcggcaccctgctgatcaccacagcaattgccgccttaatcggtattttgatcaccctcgctttcggcttaaccgcagatggcctgattcagggtgtgaaagaaaccgcgcgtctgactcagctggaatcccagtatgcaggcaaagtgtctgacctgaccgtgccgcagctgatcctgtcctttattccgaaaaacccgtttgctgacctgaccggtgctaacccgacctctatcatcagcgtggtgatttttgccgcctttatgggtgtggctgcacttcagctgattaaagacaacgaagagcgcggtgccaaagtgctcagcgcgattgatatcctgcaggcgtgggtgatgaaactggtgcgtctggtgatgcgctttaccccgtacggcgtatttgctctgatgaccaaagtggttgccggttcaaacattcaggacatcattaagttagggactttcgtcgttgcttcttatattgcgatcctgctgatgttcgtcgttcacggcctgattgtcggcgctgccggtatcaatccgctgcgtttcttccgtaaaatcgcgccggtactgactttcgcctttaccagccgttcaagtgcggccagtattccgctgagtgtggaagcacaaacccgccgtatcggtattcctgattctattgccgggttcgcagcttccttcggtaccaccatcggtcagaacggctgtgccgggatttacccggccatgctggcggtgatggttgccccgaccatgggtatcaacccgtttgacccgctgtggattgccacactggtcggtatcgtcaccgtcagttctgccggtgttgccggtgtcggcggcggtgccactttcgcggcactgattgttctgcctgcaatgggtttgccggtcactctggtcgcgctgctgatctctgtcgaaccgctgattgatatgggccgtaccgccctgaacgtcagtggttccatgactgccgggacagtcaccagccagatcctgggccagacagacaaaaccctgtttaataatgataacgacgaagatttacagcagggataa

SEQ ID NO: 273803 - DNA, 558 bp, Morganella morganii
atgacagctgagggtcacctgcttttctctgtcgcttctgtagtgatggttcatcagcttcagatttcgcctgatatcagtcaggggaactggctgcacctgatccccggcgccctcgccggtgcactgctgccggatatcgatcatcctaaatccatgctggggcagtgggtccgctttatttccgtgccaatctcccgcctgtgcggccaccggggtttcacccacagtctgctggctattctgaccggcgttattctgttccgcacacaactgccggtcagctggtctgttccggcggatttttatcaggcagtgattgtcgggtatctcagccacctggccggggatatgctgacgaccgccgggatcccgctgttatggccggtacgctggcgtttctgcattccgctgctgggcagcaaagccaataaacgggcggaacgcagtgtggcgctgattgtactggtggcctcgttctatctgcctgctcactgggaggtctggtgggatcatgtccgggaactgatactggctcagatatcggccaggctataa

SEQ ID NO: 273804 - DNA, 666 bp, Morganella morganii
atgtcccacaccttaccggtacaggccgctgtttttgatatggatggtttactgattgactccgagccgttctggcttcagagcgaaaatcaggttttcagcagcatcggcctggatatgtcattgcgggataagttgcccgatttgctgggtctgcgtatcgaccaggtcgtggagctgtggtatcacgtttcgccgtggcagactccctccaaagaagaggtcattcagcggattattgattccacgattgccatggtggaaaaagagcgtccgcttctgcccggtgtggaacatgcgctgtccctgtgtcagtcacagggactgaaaattgctctggcctccgcctcgccgctctatatgctggaatctgtgctggagatgtttaacatccgccattattttgatgcggtggtgtctgccggtgatctgccttacagcaagccgcatccgcaggtttatctgaatgccgctgaagcgctgggtgttccgccggtacagtgcgtggcgctggaagattcggttaacggtatgattgcctgtaaagccgcccgcatgcgctccattgtggttccgtccgctgaaatggccgccgacccgcgctggtcactggcagattaccgcctgtcatcgctcagcgaactgactgcggcgatgatccgctga

SEQ ID NO: 273805 - DNA, 540 bp, Morganella morganii
atgacgctgcaacaggcacgctgggttgctgtatttaaacgggtggcaggctgggtggtttttattccggccctgatctcaaccattgtttcgttactgaaactggctcatcagcagagtaccggcagtgataaaattaatgccgttatcggggattttatcaatgtggtgacggaaatgatccgtgtgaatacaccgttcctgaacacattctggaataactctcctgtaccggataaattactcggttttgaaggtcataatctgagtttcttactgatttatatcctgatgtttgtggggctggcgctgagtgcatccggtatccgtatgtcccggcaggtaaaatttatccgcgagaatattgaagatcaggccattattgaaaatgccagagagagcggaaaaacaccggcggatttaatcgccaaaatacgtattccgaatcacactattttccggcaaatttttgtgctgtatgtgctgccggtatttatcggcgcgattgcgtggttcttaattaagtttcttaactggtaa

SEQ ID NO: 273806 - DNA, 864 bp, Morganella morganii
atgtggcaggcagcaggacgtatactcagtgaacatttcggcgaacactcgttctctgacaagaaacaactcgatggcggtgaaatccaccgttcccggagtgcccgttacggcgatcatccggtttttatcaaatataaccggcgtgacatgttgcaggtattcaaaaccgaggcggagcagcttgatgctctcagccgcagccgtacactgacaacccccgccgtttatggtgtcgggtcgacaaaagagttcagcttcctgattatggaatatctgccgctgaagccttttgattcccattccgcctatatgttcgggcagcagctggcgcgtctgcaccagtggcatgaacagccccgttacggtttcgatgaagataacctgctgggcaccaatccccagccgaatgcctgggataaaaaatgggcttctttctttgctgaaaaacgcatcggctggcagttacagctggcgaaagaaaaaggtatcatcttcggcgatattgacagcattatccggcgtgtacagcaaaagctgtctgaccaccagccgcagccatccctgctccacggtgatctgtggccgtcaaactgtgcggcggtggctgacggcggaacagtcgcgtttgacccggcgtgttactggggtgatcgcgagtgtgatctggcgatgctctcttttttccctgagctgccgatgcaaatcctcgacggctatcagcaggtctggccgctggaaagtggtttcttagagcgccagccgctctatcagctctattatcagcttcaccgcagccatttatttggtgatcgttattatcagagtgcacagacgattattgacgatattctcgccggttaa

SEQ ID NO: 273807 - DNA, 855 bp, Morganella morganii
atgagtgattttctgacctctctgtttattgacccgtttgcctttccgtttatgcagcgggctatgtttgctgctattctgaccggcgcggtctgtgccgttctctcctgctttctggtgctcaaaggctggtcgctgatgggggatgccatttcccatgcggtattgccgggtattgtgctggcctttgtgatgggcattccgctgattatcggtgcgtttgtatcagggcttttctgtgcttttgccaccggttacctgaaagaacacagccggatcaaagaagataccgtgatggggattgtgttctccggtatgtttgccctcggtctggtgctgttcacccgtattgataccgaacaacacctgacacacattctgtttggtaacatcctcgggatcacgcaggcagaactgcgtcagaccctgatcatcgcggggctgaccatggtggtactgatggtgaaatacaaggatttcatgctgtactgctttgatcccaaccaggcacgggttatcggactgccgatccgcatgctgcactacgggctgttatcactgctggcactgaccatcgtcgcctctctccaggcggtcgggattattctggtgatcgccatgcttatttctccgggtatcatcgccttcctgctgtgccgcagcttcggcaaaatgatcctggtggcgattctggtctctgtcagctccagctatatcggcactgtcgtcagcttccatatcgacggcgccaccggtgcctgtattgttcttgtgcaggcactctattttgtgctggcactgatttataaccagctgcggttatctgccctgaaacgccgcagacaggttgcctga

SEQ ID NO: 273808 - DNA, 876 bp, Morganella morganii
atgacagagctgttactccagccgtttgaatacaactatatggtaaaagccatctgggtaagcggtattgtgggcgcggtatgtgcctttctgtccgcttacctgatgctcaagggctggtcactgatgggagatgctctctcccactctgtggttcccggtgtggcgggggcttacgctctcggtttcccctactctgtcggtgcgttcttcaccgggatgctcgctgccctttccatgacctttgtccggcatctgacccgcctgcgggaagatgcggtgatcgggtttatattttccaccttctttgccgccggtctgctgatcgtttccctgaacccgacctctgtgaatgtacagaccattattatggggaatatcctcgggattgccgatgaagacatgctgcaggtggaaattattattgcggtttctttcctcgtgctgatgttcatctggaaagatctgctggtggttttctttgatgaaacccatgcccgctcaatcggcctgaacccgctggcactgaaaattattttctttaccctgctcagtgcctgtactgtcgcggcactccagacagtcggggcgattctggtgattgcgatggtaattaccccgggagccaccgcctatctgttaactgatcagtttaaaaaacttctggttatcgcggttgtattaggggctgtcaccagcagtgccggcgcctacatcagttatttcctgaacggcgcgaccggcggcatgattgtgaccttacagactattgttttcctgattgccttcttcttcgcaccaaaacacggcatgctctcagcccgccgccgtgcccgccgtgaatcagcaaaactgcgtcaggaggcaaactcatga

SEQ ID NO: 273809 - DNA, 885 bp, Morganella morganii
atgagtgatcaattcagcaaaccacagctggttgtcgataacgccactgtcacttataacaacggccataccgcgatttttgatgccagtttcagcatagagggcggctctatctgcgccctcgtcggtattaacggcagcggtaaatccaccctgtttaaaactattatggggctggtcacaccgacacagggccgggtgacactgaatgatgaaccggtgcgtgccgcgctgaaaaagaatgtcattgcctatgtcccgcagacagaagaagtggactggaactttccggttctggtctctgatgtggtgatgatgggccgctacggaaaaatggggtttctgcgcattcccggtaaagaggacaaaaaagctgtcgccgatgcactggaacgtgtcggccttaccgggctgggtcaccgtcagataggcgagctttccggcggtcagaaaaagcgcgtgtttctggcccgcgcgctggcacaaaacggtaaagtattgctgctggatgagccttttaccggtgtggatgtcaaaacagagaatgccattatcgatttactgcgctcactgcgcgaagaggggcatctggtactggtctccacccataacctcggcagtgtgccggaattctgtgaccatgtgattctgataaaccgtacggtgctcgacagcggcccgaccgccaccacgtttacccagaaaaacctggaaaaaaccttcggtggtgtgctgcgtcatatcaatctgtccggaccggatctgcatgacgacgatgacccgcgttcactgactgttattacagatgatgaacgcgccgctgtcttctacggccatcaggacaatctgacggtgaaaaccggcagtaaggaagagcagccatga

SEQ ID NO: 273810 - DNA, 930 bp, Morganella morganii
atgaacaaaaaacaaaatgcgttttcccttccgtccctgacacagatattccgccatgctgtgctgctgcttaccctgtgcgcggtcagcgggtatgccgctgcagcggagaaaaaatttaaggtcgtaaccaccttcaccattattcaggatatggcgcagaatgtggccggtgatgccgctgttgtggaatccatcaccaaacccggggccgaaatccatgactaccagccaaccccgaaagacattatgcgggcgcaggatgcggatctcatcctgtggaacggcctgaacctggaacgctggtttgagcgcttctttgaaaatttacaggatgtcccggcggttgtcattaccgaaggtattacccctaattccatccgcggcggcgcctataacggtaacccgaacccacatgcctggatgtccccgaccaacgccctgatgtacatcgaaaatatccgggctgcgctggtaaaacatgacccggcgaatgcggaaacctacaataaaaacgcagctgagtatgccgcgaaaataaaagcacttgatgccccgctccgtgcccgtctggccaatatcccggaaaatcagcgctggctggcgaccagtgaaggcgcattcagttatctggccaatgattatggttttcaggaagtgtatctgtggccgattaacgcagaagagcaaggtaccccgcaacaggtccgccacatgattgataccgtccgcgaatataaaattccggttgtattcagcgaaagcaccatttccgacaaaccggctaaacaggtcgccaaagaaaccggtgcagaatacggcggcgtactgtatgtggactccctgtctgccgctgacggccctgttccgacctatattgatctgctcaataccactgtagatactatcgccaaaggatttcatcaatga

SEQ ID NO: 273811 - DNA, 681 bp, Morganella morganii
gtgaaaaaaaccgttagtgtgattgctttagcattattgttggcgggctgctcaggaagcagcaaacagtcccgtaccggttccggcggctggataacgccgccatcgtccggcatcggtgattattccgcctatccggtaaagggcagtggtgtctatccggccactccgtttgatcagtttatccgccaggcatccaaccgttatgaagttgatgaaacactgatccgcgccattattgaggtggaatcctcttaccggccggacgtgatcagcaaatccaacgcggtgggtctgatgcagattaaagcctcaaccgccgggcgcgatgcctatcgtgtgaaaggccgcaacggcgaaccgagcacccgtgaactgctggatccgcaaaccaatatcgacatcggtaccacctatatccggattatccgtgaccagcatctggccggcattaccgacccgcaaaccctcaattacgcaacgattgtctcttatgttaacggcgccggtgcattactgcgtacgtttgataacaaccggtcactggcgattgaaaaaattaacgcgctgtcagccgatgaattttatgagcatgtgcagagcaaacaccctgcatcacaggctccccgttatctgtggaaagtgaaaaacgcgtaccgcgcgctggcgatggccgactga

SEQ ID NO: 273812 - DNA, 1551 bp, Morganella morganii
atgacaacacgtatgttacggatttttattgcgacagccggactttttctgtttctgtcggttctgcatttaagttttggttatgaatataagtttatttatgttctcagtgcggcggcgctgtttacattctgtttgtcattcagccgggtgctgtatgttctgctgctgacaatatatttacttttgggccttatttacggggcggtagggattaattacggttatcctgatgtgaatgcggttggttcactgatgtatacggataacggtgaatcactggaatatattgccgggctgccgtttaaaacctatctgtatcttgccggactgctggtatccgcaggctgtgcgctgctgatgaagccgccgaaaaaacgccatcagcgaattgtattgtttaccgtcttttttattaccgcattctggtcatcctcaaaagattatattcagggaaaatctgaaggatttgtctcggtatttaagtccggtttaccggaaattcgttttttccgtgacagttatgaaagctatgtgcaaatccgcaaagataatctgcgttatgccaaggttattgaaaccagtgatcactgggatccgcaagtcacagagaccggttatgacacctatattcttgtcatcggtgaaagtgtccgcaaagattttatgcatgcattcggttttgaattacacccgaatacaccgtggatgagcagccgcaacggcctgtttttcgataactatatttctgcatccggctctaccacactctccctgacaaatgcactcgctgtccgtgaagggaaggtgacaaacctgagtgataatcttatcgcactggcaaataaagccggttttcatacgtactggatttcaaatcagcatatgaaaggcatttatgattctccggtggggattatggggaaaaaagcgggtttttatcattttctcgccccgaaccgttcagataaaggcgggccggatgaaatgctgctgccgtttgtccgcgatgcgctggcagagaagaacggtaaaaaactgattgtggtgcatttaatcggttctcatccgcaaccctgcggaagactgactgaaaatttcgataaatttatcggttcccgtaatatttcctgctatatcaaaagtattgagaataccgataaattactgtccgatattgccgcgatggcagggcaggagcatcagcgctggacaatggcttacttctctgaccacggtctgctgtttacggataagggcacagagaataccaatctgacacacggcgacagcatgaaacaaaattttcaggtgccgttttttattactgcatttgatgcacagtcacaaaaccgcataacacatttccgcagcggattatcgatgctgcctctgctgagtcagtggatgggcattaaagaggccaaactggataatcattgtgactggttgcgggataccgaatgtgccggccaaaagagtgtggtgaattttaaaaatgaactgaaatcatttgatttattacctgaagataatctggttcttccctga

SEQ ID NO: 273813 - DNA, 1932 bp, Morganella morganii
atgcctgtaattactcttcctgacggcagtcagcgccagtttaaccatcctgtttctgtccttgatgttgcgaatgatatcggtgccggtctggcgaaagcctgtatcgcgggtcgtgtcaacggtacgctggtcgatgcctgcgacatgattgaacacgatgcaaatttagccattatcaccgccaaagacgaggaaggactggaaattatccgtcactcctgtgctcacctgttaggccatgccatcaaacaattatggccgaacacccgcatggcgattggtccggtaatcgataacggtttctattatgacgttgatcttgatgagtcactgacccaggaagacctcgagaaactcgaacagcggatgatggagctcgccaaaaaagattatgacgtcgttaaaaaacgcgtcacatggggcgaggcccgcgagacgtttgtttcccgcggcgaagattacaaggttgaaattctggacgaaaatatcggtcaggatgagcatcctgcgctgtatttccatgaagaatatgtcgatatgtgccgtggtccgcacgtaccgaatatgcgcttctgccataacttcaaattacagaaagtggccggtgcctactggcgcggcgacagcgaaaacaaaatgctgcagcgtatttacggcacagcgtggggcgataagaagcagttagccgcttatctgcagcgcctggaagaagccgcaaaacgtgaccaccgtaaaatcggtaagcagcttgacctgtatcatatgcaggaagaagcgccgggtatggcgttctggcataacgacggctggacaattttccgtgagctggaagtgttcgtccgtgtgaaactgaaagagtacgattaccaggaagtgaaaggtccgtttatgatggaccgcgttctgtgggaaaaaacaggacactgggaaaactacaaagagcacatgttcacaacctcttccgagaaccgtgaatactgcattaagccgatgaactgtccgggtcatattcagatcttcaaccagggtctgcgttcttaccgtgatctgccgctgcgtatggcggagttcggcagctgccaccgtaacgaatcttccggtgcactgcacggcctgatgcgtgtccgcggctttactcaggatgatgcgcacatcttctgtacagaagagcaggtaatggacgaagtcagttcctgtatccgcatggtctatgacatgtactccactttcggctttaaaaagattgtggttaaactgtccacccgtccggaaaaacgcatcggttctgatgtccagtgggacaaagccgaagctgacctggcaagtgcactgaaagaaaacaacatcgaattcgaatatctgccgggcgaaggtgccttctacgggccgaaaattgaatttactttgtatgattgtttggatcgtgcatggcaatgtggtacagtgcagctcgatttctctctgccggctcgtctgggggcaacttatgttgccgaaaacaatgaacgcgtgaccccggtgatgattcaccgcgcgatcttaggctcgatggagcgcttcattggtatcctgactgaagaaactgccggtttcttcccgacatggttagcgcctaaccaggtagtggtgatgaacatcactgattctcaggccgattatgtccagaaagtcgtcaaagaactgcaggatgccggaattcgtgcaaaagcagacttgagaaatgagaagattggctttaaaattcgcgaacacacgctacgtcgtgttccgtatatgctggtctgcggtgataaagagatggaaacaggcgaagtgtctgttcgtacgcgccgcggcaacgatcttggcagcataaacgtgagcgaatttaaagacgcactgcttgaagaaattcgcagtcgcagacttgaagaacaaccggaggaataa

SEQ ID NO: 273814 - DNA, 339 bp, Morganella morganii
atggattacggcaaattcctctacgagaaaagcaaatcggctaaagagcagaagaagaaacaaaaagttattcaggttaaggaaatcaaattccgtcctggcacagatgaaggcgactatcaggtcaaactacgcaacctggttcgttttcttgaagatggcgataaagccaaaatcacactgcggttccgtggtcgtgaaatggcgcaccagcagattggtattgaagtgcttaaccgcatcaaagacgatctgagtgaattagcttccgtcgaatccttcccgtcgaagatcgaaggtcgccagatgatcatggtgctcgctcctaagaagaaatag

SEQ ID NO: 273815 - DNA, 198 bp, Morganella morganii
atgccaaagattaaaactgtacgtggtgcagctaagcgtttcaaaaaaaccgctaaaggtggtttcaagcgtaagcatgctaacctccgtcatatcctgactaaaaaatcaactaagcgtaaacgtcatttacgtccgaaaggtatggtctccaaaggggatctgggtttagttgtcgcttgcctgccatacgcataa

SEQ ID NO: 273816 - DNA, 357 bp, Morganella morganii
atggctcgtgtaaaacgtggtgtcattgctcgcgcacgtcacaaaaaaattctgaaacaagcgaaaggttactacggtgcccgttcgcgcgtttatcgtgttgccttccaggcagtaatcaaagctggccagtatgcttaccgtgaccgtcgtcagcgtaagcgtcagttccgtcagctgtggattgcacgtatcaacgcagcagctcgtcagaatggtctgtcttacagccgtttcatcaacggtctgaaaaaggcatccatcgaaatcgatcgtaagatcttagccgatatcgctgtattcgataaagccgcatttactgcgctggtcgaaaaagcaaaaggcgctctggcgtaa

SEQ ID NO: 273817 - DNA, 984 bp, Morganella morganii
atgccacatctcgctgaactggttgctcaggcaaaagcagccgtcgaagaggcaaaggatgttgcagcgctggaatcggtacgtgttgaatacctgggtaagaaagggcatttaaccttacagatgcaatcgctgcgggatctgccgccggaagatcgtcctgctgcgggtgcagtgattaacgaagccaaacaagaagttcagaccgcactgaatgcccgcaaagattccctggaatctgcggcgctgaatgcccgtctggctgaagagcggattgatgtctctctgccgggacgccgcatggaaaatggcggtctgcatccggtcacccgtacgattgagcgtatcgaaacctttttcagcgaactgggtttttctgttgaatccggccctgaaatcgaagacgactatcataactttgacgcactgaatattccggcacaccatccggcacgtgctgatcacgataccttctggtttgacgccaaacgtctgctgcgtacgcagacctccggcgtgcagatccgtaccatgaaagataaacagccgccaatccgcattattgcgccgggccgtgtttaccgtaatgactacgatcagactcacaccccgatgttccatcagacagaaggtctgattgtggatactgatatcagtttcactaatcttaaaggcacactgcatgatttcctgaatcatttctttgaagaagaagtgcaggtgcgtttccgtccgtcctacttcccgttcactgaaccgtcagcggaagtggatgtgatgggtaaaaacggcaaatggctggaagtgctgggctgcgggatggtacatccgaatgtgctgcgcaatgtcggtattgacccggacatttactccggtttcgcctttggtatggggatggagcgcctgactatgctgcgctacggcgtgagcgatttacgcgcattcttcgaaaatgaccttcgtttcctcaagcaattcaaataa

SEQ ID NO: 273818 - DNA, 2388 bp, Morganella morganii
atgaaattcagtgaactctggttacgcgaatgggtaaacccggctgtcagcagcgacgcgttatctgatcagattaccatggccggcctggaagtggacggcacagaagccgttgccggtcagtttaacggtgtggttatcggggaagtggttgagtgcggacagcacccgaacgccgataaactgcgtgtgacaaaagtgaataccggcggtgaccgcctgctcgatattgtttgcggcgcgccaaactgccgtcaggggctgcgtgtggctgttgcgacagtcggtgcggtcttaccgggcgattttaaaatcaaagctgccaaactgcgcggcgagccgtcagaaggtatgctctgctcattctctgagctgggtatcagcgctgaccacagcggtattattgaattaccggcagatgcgccaatcggtaccgatctgcgcgactatatgaagctggatgataccgcgattgaaatcagcatcacaccaaaccgtgcggactgcctgagcatccgtggtgtggcccgtgatgtggcggttctcaataagatggattatcaggctccggatatgtccccggtcgccgctgtccatcaggacacgttccctatccgtgttgatgcgccgcaggcgtgtccgcgttttaccggacgtgtgattaaaaacgtcgatgtgacagcaaaaactccgctgtggatggtggaaaaactgcgccgcggcggcatccgttctatcgatccggtcgtggatatcaccaactacgttctgctggagctgggtcagccgcagcatgcttatgatctggatacccttgagggtgaactgattgtccgcatggcagagcagggtgagaaactgacgctgctggacggcaacgaagtcacactgacagataacattctggtgattgcagatcgccgtggtgcgctgggtatggccggtattttcggcggcgagcactctggtgtgtctgacaccactaaaaatatcctgctggaaaccgcattctttaacccgctggctatcaccggccgtgcacgtcagtatggtctgcataccgatgcttcacaccgttttgagcgcggcgtggacccgcagttacagcgtatcgcggctgagcgtaccacccgtctgattctggatatctgcggcggtgagccgggcgaaatcattgaagtggtttctgaggctgatttaccgaaaacggcaacgatcacactgacccgtaacaagcttgaccgtctgatcggccatcatgtggatgatgcgcaggtaacggatattctgacccgcctgggttgtgatgtgaaaatgtctcaggatcagtggctggtgactgcgccgtcatggcgtttcgacatggaaattgaggaagatctggtggaagaagtggcccgtatttacggctacaacaatatcccggatgttccgctgcgcgctgacctgattatgacctcccgccacgaagcacatctgccgcttaagcgtgtgaaaacactgatggttgaccgtggtttccaggaagcgattacctacagttttgtcgacccgaaaattcagaccctgctgcacccgggtcaggacgcgattattctgccgaacccaatctctgcggatatgtcagccatgcgtctgtcattgctgaccggcctgttaagcactgttgtgtacaaccagaaccgtcagcagagccgtgtccgcctgtttgaatccggtctgcgctttgtgccggatgcggccgcagacctcgggatccgtcaggaaaccatgctggcaggcgttatcgccggtaaccgtaatgaagaacactggtcatcggaaaaacaggtcgttgatttttatgatttaaaaggtgatctggaagccattttggaattgactggcaaattagatcgtgtatcgtttaaagcaacgacaaatccggccctccatccgggacaaggtgctgagatttatctggaagatgagcatattggttatatcggtgtggttcatccggaactggagaaaaaactggatctcaacggccgtacggttgtctttgaaatccgctgggacgcactgacaaaccgtattattcctgaggctgaagcaatttcacgcttccctgcgaaccgccgggatatcgccatcgttgtgccggaaaacgtcgctgcacaagacattctgaacgaatgtaaaaaagttggcgtaaatcagttagttggcataaacttatttgacgtgtactgtggtaagggtgttgctgagggttataagagtctggcgatcagtctgaccttacaggatacagagcgtacacttgaagaagatgaaattgcagcaaccgtaaacaaatgcgttgccgcgttgcaacagcgatttaaagcatccttgagggactaa

SEQ ID NO: 273819 - DNA, 297 bp, Morganella morganii
atggcgcttactaaagctgaaatgtcagaaaatctgtcggaaaaactggacctgagcaaacgcgatgcgaaggacctggttgaactgttttttgaagaggtacgccgttctcttgagaatggtgagcaggtaaaattatccggtttcggaaactttgatctgcgggacaagaatcagcgtccgggccgtaaccctaaaacgggtgaagatattcctatcacagcccgtcgtgttgtcactttccgtccggggcagaaactgaaagccaaggtcgaaaaatcgacaccgaaagagtaa

SEQ ID NO: 273820 - DNA, 1011 bp, Morganella morganii
atgcatattcacaaccccatcacgaagctggtacagacgcggaaaaagcgggatgtacagcgcataattcttctttctgttaccttgctgataatgatcgccgttgcactgtgcgccggtgagatgtggattttaccggaccagtggctatctgaaaccgcgcagttatttgtctgggatctgcgtttcccgcgagtgctggcggtgattgccgtgggggccgggctggcaatggctggcgcggtgatgcaggctatttttgaaaacccgctggcggaaccggggttactcggtgtgagtaacggtgccggggtgtttgttgtctttatcgtcctgtttttcaaaggcatgccgccgctgtgggtgctggggggcggggcggtgatcggggcgacactgctgacactgattttactctggtttgctcatttccggcggctgagtaacagccagttgcttctggtcggggtggctctcggggttatctgcggcgcatttatgacctggatggtgtatttcagcaccagcctggatttacgtcagctgatgtactggatgatgggaagtttttccggggcggactggcggctcagtccgctgctggcagcgatagccgtagtggctgtgtggctgctgtggcaggcaccggtgcttaactatcttgcactgggcgaggttaatgcccagcaactgggggtatcggcacaccgctggcgcaatgtgtttattattgcggtcgggttgctgatcggcctgagtgtggcggtggccggcgctatcagctttatcgggctgattatcccgcatatgctgcggctgatgggtattaccgatcaccggacattattacctgcctgtgcattattcggcgccgtcagtctgttgctggcggatttatgctcacggctgattttatccaatgccgaaattccgatcggtgtggtgactgcaaccatcggtgcaccggcctttatttatctgctgacccggcatcacggaggacgccgctga

SEQ ID NO: 273821 - DNA, 774 bp, Morganella morganii
atggacaatctgttacttgatgtcagcgggatccgcatcggccgccgtctctcctgtgatgccctgcagttttttgccggacagcaaatccatctgctggggccgaacggctccggcaagagtacactgctggcggcactggcggatgctgtgcgttatgaggggcaaatccgctatcgcggcacagatttaaaatcgatccccaaacggcagcaggcgcagttccgtgcgtatctgacccaaaccaccgactgtgtcccggtgatgacggtgtttcagtatctgcaactctatatgccggcggtgcaggagaatacacagcttatttatcagctgtgcggcgattttcagctggagctgttactgccgcgtatgctgacgcaattatccggtggtgaatggcagcgggtgaaaatagcagccatattcctgcaattatggacaacggacgacttgtccgggaaatacttattactggatgagccgcgtaaccacctggatattacccagcaggcgatgctggataaatggatagcccggttttgtgaacagcaggggacgattattaccagcggtcatgatttaaaccacagttatctgcatgccgatgcggtggtgttacttaaagatggtcagttacttgcggccggtgaaactcagataattatgactgaagatattttgagcgaactttttcagtctgaaataaaaagtatcagaccaacgcaagaaacacagtggcaaataacagattggcatcaacaacagcgctga

SEQ ID NO: 273822 - DNA, 1146 bp, Morganella morganii
atgcttgagtttcttccgttttcccggcctgctatcggggagtcagaaatcgcggctgttgaaaaagtactgcgttccggctggatcaccaccggcccgcaaaatcagcagctggaggcggatttctgtcagcgtttcggctgtaaacatgccattgctctggcatcagcaactgccggtatgcatgttgcgctgatggctctgggtgtcggccccggagatgaagtgatcacgccttcacagacctgggtttccaccatcaatatgatcgaactgcttggcgcagtgccggtgatgattgatgttgaccgcgatacactgatgattcagccggatgctgtccgtgcagccattaccccgaagaccaaagtcatcattccggttcattatgccggagcgccctgtgatttggttgctttacgtgctattgcacaggaacacaatattttcctgctggaagatgccgcgcatgccgtcggtacccgttacggggatgaatggatcggcgaaaaaggcaccgctattttctctttccacgcgattaaaaacgtcacctgcgcggaaggcggattaattactacagataacgatgaacttgcacagcgtatccgctgtcttaagttccacgggctgggtgtggatgcgtttgaccgtcagatgcagggccgtaaaccgcaggcggaagtggtcgaaccggggttcaaatataacctgtcagatatccacgccgcgattgcggtggtgcaactgagccggatggacgaactgaacgcacgccgcgcacacctggcacagctttaccgtgaagccctggacgggctgccggttaaattgttatccgtgccggattacccgcatctgcatgccaatcatctgctgatgatccgtgtggataaagcggtctgcggcatcgatcgcgatgcctttatggagcagttaaaagcggtcaatatcgggacaggtctgcatttccgtgcagcgcatacccagaaatattaccgggaacggtacccgtcattatcactgccgaattcggagtggaacaccgcgacattatgttcgctgccgttcttcccggatatgaaagacagtgatgtgacccgtgtgacagacgcaatcagagctattcttgcggagcagaaataa

SEQ ID NO: 273823 - DNA, 990 bp, Morganella morganii
gtgtcatttaacgaaattaagaaagtctcagtggtaattccggtttacaacgaggaagagagtctccctcagttgctggaacgtacaatcaaagcctgtcagtcgctgaagcaggcgtatgaaattgtgctggtggatgacggcagccgtgaccgctcagcggaaatgctgacgcaggcagcagagatccctgaaaaccatgtggttgctgtcctgctgaaccgtaactacggccagcattccgcaattatggcgggtttcagacaggccggtggtgatctggtgatcaccatggatgcggatttacagaacccgcctgaagagatcccgcgtctggttgagaaagcagaagagggttatgacgtggtcggcacacgccgcgcaaaccgtcaggattcctggttccgcaaaaccgcctcaaaaatgatcaacaaaatgatcatcgccgcaaccggcagcgctatgggtgactacggctgtatgctgcgtgcgtaccgccgtcatatcatagatgcgatgttacagtgccatgagcgcagcacctttattccgattctggcaaatacctttgcccgtaaaacgattgaaattgatgttaaacacgcagaacgtgagttcggggactcaaaatacagtttcctcaaactgatcaatctgatgtatgacctgctgacctgcctgaccacagcgccgctgcgcctgttaagcattgtcggcagtatcattgccgcgtccggtttcctgctggcgctgttactgattatcctgcgcgtggctttcggcgcgctgtgggcggcagagggagtgtttaccctgttcgccatcttatttatgtttatcggcgcacaattcgtggcaatgggtctgctcggggaatatatcgggcggatttataacgatgttcgtgcacgtccccggtattttattcaaaaagtggtcggcgctcaggcgaaagagaccagtgaaactgaaactcaggaaaaaaactaa

SEQ ID NO: 273824 - DNA, 1986 bp, Morganella morganii
atgaaagcaatcgtatttgcctaccatgatattggttgtgtcggattgaaggccctgaaaaaagcgggctttgatattcaggccgtctttacccatacggacgacccgggtgaaaaccatttcttctcatcggtggcccgcgtcagtgcggacatggaattgccggtttatgcccctgaaaacgttaaccatcctctgtgggtggatcgcatccgtgaactgaaaccggatgttattttctctttctactaccgcgatatgctgagcgaagagattctggcgctggcaccgaaaggcgcattcaacctgcacggttctctgctgccgaaataccgcggccgcgcaccaatcaactgggccgtgctgaacggtgaaaccgaaaccggtgttaccctgcacaaaatggttgccaaagctgatgccggcgatatcgtcgcgcaggaaaaagtgactatcgggggtgacgatacttccctgattgttcacggtaaagttcgtgaagccgcagaaacactgctgaacaaaactttaccgctgattgaggccggtacttataaaaccaccgctcaggatgaatctcaggcaacttacttcggccgccgttgtgcggaagatggtctgatcgactggaatcagcctgctgcacagatccacaacctggtccgcgcggtgacagaaccgtatccgggcgcattcaccttcctgggtgagcgcaaaatgatcatttggcgcagccgcgtgctggccgataataaaggcaaacgtccgggaactgttatttcagctgaaccgctggtgattgcctgcggaaacggcgcgctggaagtgatcagcggccagggtgaatccggcctgtatgtgcagggcgcccgtctggcagcagaaatgggtatcgtgactgatgtccgcgtcggcccgaaagccactgcgcaggttgcccgccgcaagcgtgtgctgatcctgggtgtgaacggttttatcggtaaccacctgacagagcgtctgctggaagacggcaactacgatatctatggtatggatatcagctcttccgcgattgaccgtttcatcggtgatgagcgtttccactttatcgaaggggatgtcagtattcacaccgagtggattgagtaccacatcaaaaaatgtgatgtcattctgccgctggtggcgattgccacaccaatcgagtacacccgtaacccgctgcgcgtgttcgagctggacttcgaagaaaacctgaaaatcgtccgttactgcgcgaaatacaacaaacgcatcatcttcccgtctacctccgaagtgtacggcatgtgtgatgacaaagagtttgacgaagataattcacgcctgattgtcggcccaatcaacaaacagcgctggatctactccgtttccaaacagctgcttgaccgggttatctgggcatacggcgcgaaagagggtctgaaattcacgctgttccgtccgttcaactggatgggaccgcgtctggacagcctgaactccgcgcgtatcggcagctcccgtgctatcactcagctgatcctgaacctggtggaaggttcgccgattaaactggttgacggtggtgagcagaaacgctgctttactgatattcacgacggtatcgaagcactgttccgcatcattgaaaaccgtgacggcaagtgtgacggccagatcatcaacatcggtaacccggtgaacgaagcgagtatccgcgaactggcagaaatgctgctcgactgcttcgagaaacatccgctgcgtgataacttcccgccgtttgccggcttccgtaaaatcgaaagcagcacttactacggtaaaggttaccaggatgtggaacaccgtaagccaagcatcaaaaacgctgagcgtttactggactggaaaccgactatcgatacccgccagactgtggaagaaactctcgacttcttcctgcgcggtgcggttgaagagctgaggaacgacgagtaa

SEQ ID NO: 273825 - DNA, 894 bp, Morganella morganii
atgaaaaatgtcggcctgcgggttgacgtggatacttaccgcggcacactggaaggtgtgccgcagttactgaaggtatttgcgcagcacgatattaaagccagttttttcttcagcgtcgggccggacaatatggggcgtcacttgtggcgccttttgcgtcctaagttcctgtggaaaatgctgcgctccaatgcggcttcattatacggcctcgatattctgctggctggtacggcgtggccgggtaagaaaattgcccgtgacctgggttacctgatgaaacagacgctggatgccggtcatgaagtcggcctgcatgcgtgggatcaccagggctggcaggcgaaaatcggccgctggacaccggcacaaatcacagagcagattcgtctgggaaccgatgccttatcacaggctaccgggcagccggtgcagtgctctgcggtagcgggctggcgcgcggatgagcgggtgattgaagccaaacaggcgtttgattttgcctacaacagtgattgccgcggaacgcatccgtttcgtccgcttcttgcagacgggactaccggaaccgtgcagattcctgttacactgccgacctatgatgaagtggtggggccgcaggtggctgatgcggatttcaacgactttatcctcgatgcaatcagacgggatcagggcgtaccggtctatactatccacacagaagtggaaggcatgtccaaagccgcacagtttgaggcgttgctggatcggattaaaaatgaggatttccgcttttgtccgctcagtgaactgctgccgtctgatttatcaacattaccgacaggcaaagtggtccggggtgatttccccggccgggaagggtggctgggctgccaacaagagggatag

SEQ ID NO: 273826 - DNA, 1662 bp, Morganella morganii
atgctgaataaccgggcgagtaaaatcggagcctttctgctggctctttttttcgtgttaacttaccttttcccgatcaatgatcgtctgctctggcatccggatgaaacccggtatgcggaaatcagccgtgaaatggtgacacagggcgactgggtcgttcccaaattactcgatctgcgttattttgaaaaaccggtggctggttactgggtgaataacgtcagccagctggtcttcggtcataccaattttgctgtccgtgcaggctctgtcttcagcatccttatcagtactctgctggtttattggatgactctcctgatgtggcgcaaccgtcatacggcatttgttgcgtcgctggtctttgtctccatgtttctggtgttcagtgtcggcacatacagtgtgctggacccgatgtttgctatgtgggtggtggcctcaatggccttcagcttcagggcactgaaagccgaaaatgtgaaaaccaggataacctcctggtgcttgctgggtctggcctgcggtatgggctttatgaccaaaggcttccttgcgctggcgatcccggtggtggcaatgctgccggtgatgctgtaccagcggcgtttccctgagttactgaaattcggcccgctggcggtgatctgcgcggtgctgatcagcctgccgtgggcgatagcggttcatcagcaggagccggattactggcgctatttcattgtggtggagcatttccagcgtttctccggggaagatgcccagcacgcctcaccggtctggtactacattccggtgatcctgctcggttgcctgccgtggctggcgttactgcccggcgcattgtttaaaggctggaaagagcggcgcaataatccgccgatgtttttcctgttctgctggtttgttgccccgttcctgctgttcagtattgccaaaggtaaactgccgacctatatgctgccgctgatggcaccgctcgcggtcatgatcgccaaatacggcgttgactgtgtgcgtaaacaccggatgaaagcgctgcaggcgaacggcattcttaacctgacctttggtgcggtggctgttgccgggctgatcgtggccagctatctggtgaaaaaaccaatctatcagccggatgaatggtccaaagtggtactgggcattgtcgcctttactatctggggcatcatcgggtatctctgttatctgctgaaagcaaaacactggctgtgggcggcttcctgctcactggtgatcagtctgacatttggcagtgctgtgcctgatcgttccgtggattccaaactgccgcaggcgtttatccgccagaatatggctgatctggaaaaaagtccgtttattgtcagtaacagtgtcggcatcggtgccgggctggcctgggagctgaaacgcagtgatatttatctgctgaataattccggtgagctgacttacggcctgaaatatccggacagtgaataccgtctgctgaatgatgcgactttcgcagactggctggcggaaacccgcaaaaaagggcaggtcgcactgctggtaacagataaaaatgacacctacgatgccaaactgccgccggcggacaaacggaccgaaaatagccggatgaccctctatatctatgataaacagccataa

SEQ ID NO: 273827 - DNA, 351 bp, Morganella morganii
atggtgttcgggcaaattgttttactgattattgtcagttttcttacctgcggcggccagatctgccagaaacaggcggtggatgtctggcaggcagcgcaggaaaatgcaaaacgcagaggcctgtactggctggtgctggcggtgtttctgctcgggctggggatgctgctgtggctgaaactcctgcaggtgatgccgctgaatatcgcctatccgatgctgagcatcaattttgtggtggtcactctggtggcgcagtttttatacggtgagcgggtgacccgcaagcactggtgcggtgtggccgcaattgtcaccggcgtgattctgatgggagcgggacactga

SEQ ID NO: 273828 - DNA, 393 bp, Morganella morganii
atgcgcggatatctctgggtgctcggcagtgtgctgtttgtcacagccgctcagttgctgctgaaattgggcgtgacacaattacccgatattgcactgagttcacaatggctggatatccgctggctgttgtctcagtggcagccgttcgcagtcgtttttgccggattggcggggtatgtcctgtcaatggtgtgctggctgctcgcgctgcgggatttgccgctcaataaagcttatccgcttatcagcctgagttatgtgtttgtctatctgctggctgcctttctgccctggtttaatgaaggtgtgtcgctgataaagagcatcggtattatttttattctgtttggtgtgcgcctgattcacagcaaagagaagccagcctcatag

SEQ ID NO: 273829 - DNA, 1698 bp, Morganella morganii
ttggacgttaacagccgtaagtccgcgtttaatgtggcgtatccgtctgccgcaatgtggactgtgttatttctgttgtttattgcagtgacctattttattcctttggaatttcgtgtgttatggcagccggatgaaacccgctatgcggaaataagccgggaaatgctggctgacggcaactgggtggtgccgcatctgctggatatccgctattttgaaaaaccggtggcgggttactggataaataacatcagtcagatgctgttcggtcacacacaatttgccgtgcgttttggtgtcctgttctcgacgatgatcagcacattgctggtttaccggctggcaatgaaaatgtgggatgagaaagtcatcgcccgtacagcggctttcctgtatgccagtatgttactggtgcttgctctcgggacctacagtacgctggacccgattctgaccatgtgggtcacgctggtgatttacctcagttatggcctgaccaccgcgcagtcacgccgtgcattgctgggctactggatcaccttcgggctggcctgtggcatggcactgatgacaaaaggctttctggcattggtgctgcctgttattgcactgatcccagtgcatattttttaccgccgttttaaaaccatgctctgttattgctgggcgggaattgcggccgccgggcttatcacactgccgtgggcgctggcgatatatcacgccgaacctgatttctggcgctattttgtgatggttgagcacatacagcgctttatgagtaaagaggcgcaaaacctctcgccgttctggttctttattccgatcttgtttgccggtgttttaccctggagtggttttttattcggcgcattaaaacagggctggcaacagcgccgtgaaaataagccgttattcttcctgttgtgctggacagtattaccgttcttatttttcagtatcgccaaaggaaaattactgacctatattctgccggttatcgcgccactgacactcctgatggcggcgtatatccataccctgataaagaaacaagccgtatcagtctttaaactgaatgcggtaaccaatattattttcgggagttgcgcagttgttgctctgctggtgataaataacctggaaaataccctggtatattctgcggatgagcgcgggaaatttatcggcgccattgcaattttcctgttctggattgctgtttcggtgttcaccctgataaaaggatgtcgttactggatgctggcagcattttgtaccgtggcgatcagcttatcggtcagctcactgctgccgagccggacggaacgggcaaatttaccgcagatctttattcagaataatatcgcgctgctgaaagacgcccgttatattctggttaacagtgtgggtgtcggcacgtcagcggcctgggaattacagcgcagtgatatttatatgtttgaccgcccgggagagctgaaatacggactgagtgatatctatccggataccagatcaaaatttattgcacatgatgattttgaatcctggctgaaaaatgcccgtaaaaccggtaatgttgcactgatcctgcgtgaccgtcacggggtggatgaaaatgatgtttctccggcggatgaatttgtcactgatgaaaacctgacattactttattaccggaaaatgccttaa

SEQ ID NO: 273830 - DNA, 486 bp, Morganella morganii
atgaaaatcatattccgttctctgctttttatctgcgtattagccgttgtcggctgttcatcaacgccgcgtaaatatcatgcaccgccgatcaaaacagaattatcggacccgattatggtgattgcccagttgcgggaacaattatcgcaatggtacggcacgccatatcattacggcggaatggatttaaacggcattgattgttccggtttcgtctaccggacatttaatgaccgctttgctatttctctgccgcgcaccaccaaagctcagacaacctacggcacccggatcgatgttgaggatttacaacccggtgacctggtattctttaaaaccggcggtggcgagaacgggttgcatgtcggcatttatgattctgaccgtgcctttattcatgcctcgaccagcaaaggtgtgatgcgttccagcctggataacgtttactggaaaaaagtcttctggcaggcgcgcagactttaa

SEQ ID NO: 273831 - DNA, 1017 bp, Morganella morganii
atgtcgtcacttcgtctttttatttctgattcctttgatccgtggtttaaccttgccgttgaagagtgtattttccggcagatgcctgctgaccagcgcgtgctgtttttatggcgcaataatgacaccgtggttatcggccgggcgcaaaacccgtggaaggaatgtaatacccgcaaaatggaatccgaccatattaaattagcccggcgcagcagtggcggcggggcggtattccacgacaagggaaatacgaatttcacctttatggccgggaaaccggaatatgataaaacggtttccaccaatattattctcagcggtttatcccggctcggtatttcggtatcggcatccggccgtaatgacctggtggttaactgcgaagacggtgagcggaaaatttccggctcggcgtaccgggaaaccaaagatcgcggctttcatcacggcacggtattaattaatgcggatttaagccgtctggcggattatctcaatccggatccgaagaaattgcaggccaaagggatcacttctgtccgctcgcgggtgaccaatctgacggaaattattccggggattgaccatgagcgggtttgcgaagcgattaaaaccgcgtttttcgactattacggcgagaaagcggaagcggaactgatttcaccggattcactgcccgatctgccgggatttgctgaaacctttgccagacaaagcagctgggactggaatttcggcaatgcaccggccttcagccatctgctggataccctctttaaatgggggggtattgagctgcattttgatgtggagcgcgggattatcagccgggcgcagatttttactgacagtcttgacccggctccgctggagcaactggcacaactactgaccagtcagcggtacagcgctgatgctgtaacggcggtattcactgagctgatggccggttatccggacatgcacgatgagctgatccagttgcgggactggctgatatcagagcttcagtaa

SEQ ID NO: 273832 - DNA, 369 bp, Morganella morganii
atgtcagaaagtgtagtgaacgatattatcaaatggctggaaacccagttacagcgcaatgaagggatcaaaatcgatactattgcggataagagcggttattcaaaatggcatctccagcgtattttcaaagatatcaagggatgcacattaggcgagtatgtccgtaagcgccgcctgctggaagcagcaaaatctctgcgcgataacgatatgtctattctggatatcgcgttgcagtatggcttcagctcacaggcaacctttacccgcatctttaaaaaacatttcaataccacaccggcaaaattccgcgaccacggccagctgccggaaccgcgctgttttatggagtgcgggtcacactaa

SEQ ID NO: 273833 - DNA, 627 bp, Morganella morganii
atgtcacagcaatttcggtttctttttggggcaatgggacgtttttttatgctggcactgatcatggctgccagtacaggtctgttgtttattgatattctggttcttaagaatgatttgggtgaagactcggtgacagaaattgttgctgaggtgatgctgctggcagtgattgtgttgtttttccgcaaagggctgcaggagccggaggacagggcgggcttttttctgattgccggattttttgccagcatgctgatcagagaattggatcagatttttgactatatttcccacggggcatggttctggtttgccgttccggtctcactgattgcgattatctatgcttttctgcatccgcgcacggcggttaacgggctgtaccgttttgtctcacatccggcatacggcatgatggttaccggtttgcttgtggtgctggttttttcccgcctgttcggtatgggaattttatggcgtggtatgatgggggatgattttaaccggctggtaaaaaacctggcggaagaaggctgtgaattgctcggctacaccttatgtctgctttcggcaatcatgttttgccgcaaacaacgggttacggcaaaacctgatcaacattaa

SEQ ID NO: 273834 - DNA, 801 bp, Morganella morganii
atgccccgtataaccgtcaataatccgccacctgtgctggttgcagagaatgtcagtttttcccgccacggacagccggtagtcagtgatatttccctggctttgcactgcggaaccatcactgccgttaccggcccgaacggtgctggtaaatcaacccttcttcgtttactcagcggctattatccctgtgacaacggacagattatgcttcgcggaaaaccaatggcgtcctggtcttccggtgcactggcacaaatcagggcggtaatgacacaacaaagtgttatctctgccccctaccgggtcagagatattattgcattaggggatttgcacagagaatacacacaccaggtaactattgatgaagtgatacacctgacagcctgtgaaccactgctggagaaacgctggtatcagctttccggtggtgaacaacagcgggttcatctggcgcgcgcactgatgcaactaagctgtccgctgccactcccccgtctgttattactggatgaaccgactgccgcactggatcttcaccaccagcaacacctgatgcggatgctgaaacagcgggtaagcacgacctccctggcggtcttctgtattctgcatgacctgaatctggcctctttatatgctgatcacgtcataatgctgaataacgggcgcattacccgtcagggaacaccaagcgaggtgctgcaaaaaatggtactcgcggaaacttatcaggcagacctgataacgctccgccatccgcttaccggcaatacatctgtgttacttgcaccttaa

SEQ ID NO: 273835 - DNA, 993 bp, Morganella morganii
atgaataatccgcccgcctttcatctgcgccgcctgtgcctctgttttctgttggcgctcatggtattaactgccatgaataccggcggactgccggtctctgtcagcgcattcctgcggggtgaaataaccccgcaactctggcagatctggttatctgtccgtctgccgcgaattgttctggcagttctggtgggtatggcactggccaccgccggggtattattgcagggattattccgcaacccgctggcagaccccggtctgcttgggatcagcagcggcgcagccgttgcggtggcactgggaattgtttttatcgcgccttatctgagtggtgcaatcacactgtacctgcatattattacagccttcagcggtgcactttgtatcagcggactgatttttctgctcaaccgccgccgtcagcctttgctgcgtctgttgttgtgcggcattgctgttaatgcaatcagtatgtcctttgtcggcgtgctcaattatctgagtgatgataaagaattacgccagttttcactgtggatgatgggcagcaccggacacatcagctggactttgcttctgcctgctatcgtactggcactccctgtgttttataccgcattcagactggcacgtccgctggatataattcagttgggggaagaagaagcgcattatgccggagtgaatgtccgccggacacaacagtgtgtcctgctggtaagtgctctgctcaccggtatcgctgtggcactgagcggaattatcggttttatcggcctggttatcccgcacctgatgcgtatgattttcggctggcaccaccggcttctgctggtgacatcagcccttgccggtgcactgctgttactgctctccgatacactcgcccgcacgctggtggtaccggcagaaatcccggtcggattactgaccggactgcttggcgcaccttattttctctggctgattttctctgtgaaggattga

SEQ ID NO: 273836 - DNA, 831 bp, Morganella morganii
atgaaaaaatatgtcctcctgctactgctgctctgtttttttccgtctgcacgcagtatgcagggcagcattattacccttggcggtgatgtcacagagattgtatttgcactcggtgccggtgacagagtaattgcccgtgataccaccagcgagcatccgccgcaggtcactcagttgccggatgtcggctatctgcggcttctgaatgcggaaggtctgctctcgcttcagccttcactgatcctcgccagtgaactggcttatccttctgccgtgttatcgcagatcagcgcggcgggtatccctgtcgtcactgtcagtgccgctgcagagctgccggccattaccgcgaaagtccgtcagattgcggagactctggccttgcagtcagccgccgccgaactagtcgctgacattaactggaaactggatgctgtaccgcagacacctctgccggtgaatgtactgtttctgctcagccacgccggtactgctccgatggcagcaggtacagatacggcagcagacagccttatccgcagtgcaggcggcagaaacgcagccgcttctttccgccgttatcgcccgctgtccgcagaaggaatgattgccgctcagcccgatttagtggtgatcacccgcagcggtctggcttctctcggcaacaccggcaatctctggcagttaccgggactggctcagacacctgccgggaaacataagcgggtgctggtggctgatgatatggggtttctcggcttcgggttacaaaccccggatacactgcatcagttacgtgaagcgatggaggcagcagccgtgttatga

SEQ ID NO: 273837 - DNA, 1068 bp, Morganella morganii
atgcacagtgaaacactctcccgttaccttgccctgaaagaacaggggcatcttatccacgcccgtgatatcgccgctgagatgggtatatccgaggcagaactggcacactgccggaccggttatgatgcctgccgcctcaccccggatatccccgccattttccggatgctgggcaccgccggggagctgaaaggcatcacccgcaatgaccacgcggtacatgaacataccggcacctatgataatgctgaattcggggaacacgcctgcctgctgctgaacccgtacgggctggatttacgctttttcctgtctcagtggcagacagtatttgccttcgcggaaaatactccgcgcggcctgcgccacagcctccagttttttgatcgtcacggggatgctgtccataaaatttacaccaccgctgatactgatatgggtgtctggcatcatctgacggcacagttcgccgcatatgataacccgccggttgttccggaaccggccgtcatcccggcctgcacatcactgacaccggagcagcaggctgaatttacccgtcactggcagaaaatgacggatgttcaccaattttttgttctgttaaaaagatttaatatcagccgcttgcaggcattccgttgtgtggataacaccctggcacagcgggtggataacagcgcgttgtcacgcctgctcgcacaatgcacggaagaacagaatgacattatgatctttgtcgccaaccggggctgtgtacaaatttttaccggcgccattggccgggttgaaccttatatcagcccccgcgacgcacagcactggatcaatattttcaatccgtcgttcactctccatctgatcgaatcagctgttgcggaatcctggattacccgcaaacccaccacagacggtattgtcaccagcctggaattatttgataaaaacggtcaggctatcgcccagctgttcggacagcgtaccgaaggcgaaccggaacaggctctctggcgcagtcagattaatgccctgctgacagactgcggcggtgaggcggcggcatga

SEQ ID NO: 273838 - DNA, 1050 bp, Morganella morganii
atggaaaaaacggatgaactgcgcacacgggcgatagacaaactgatcaccccgtctgcgctggccggtgagtttccggccacagaagcaattaataagaatgtcaccacatcacgaacccgcattgaacgtattttaaccggcgatgacccgcgtctgctggtgattgtcggcccctgctccgtgcatgacccgattgccgcactggattacgcacagcgcctgagcgagctgctgccgaaatacagctcacgccttgaaattgtgatgcgcacctattttgaaaagccgcgtaccgtggtcggctggaaaggactgatttcagatccgcgtctggataactcctgccaggtcaatgaaggtatccggctggcgcgcaaactgctgatcgacgttaatgcactgaatgtcccgacagccaccgagtttctcgatatggtcacggggcagtatattgcggatcttatcagctggggggctatcggtgcccggaccacggaaagccagatccaccgcgaaatggcctccgcactctcatgcccggtcggcttcaaaaacggtactgacggcaatatcaaaattgcgattgatgccatccgcgccgcacaggccggtcatatgttcctgtcaccggataaagacgggcagatgacgatttatcagaccaaaggcaatccgttcgggcacattattatgcgcggcggtaagacaccgaactatgctgccggtgatattgctcacgcctgtgatcaactgcgccagtttgatctgccggaacatctggtgattgatttcagccacggcaactgtcagaaaatccaccgccgtcagctggatgtcgccaaagatgtcgcacagcagattaaagacggctcgcgggctatcgccggtgttatggccgaaagctttattcaggaaggcacacaaaaactggtgaatcacaaagcgtcggtttacggacaatcaattaccgatccgtgtctgagctgggcagataccgtcaccatgctggatattctggctgatgcggcggatgcccgtttcatctga

SEQ ID NO: 273839 - DNA, 864 bp, Morganella morganii
atgtctatcacaaccggctcatcttctgatacacaaaataaagaaacacggagtgtcttctttatttctgacggaacggcaattacggcggaagtattaggccatgctgtattatcacaattccctatcgatattatcgcttacaccctgccgttcgtggcaactgtcgagcgcgcgctggaaatcagacaaaaaatcgataccatttttgaaaccaccgggttacgccctctggtgttctactccattatctgtcaggacgtgcgcgaagccattaccggcagtcagggctgctgccaggacatagtgcaaaccctggtcgcgccgattcagaaagagattcagatggatccgcagccgatattcaaccggacccacggtttatccaaacgtaatctgagccagtatgacgcccgtatcgcagccattgatttcgcactggcacatgatgatggtgtatccctgcgcaatatggatcaggcgcaggttattctgctcggcgtttcccgctgcggtaaaaccccgaccagcctgtatctggctatgcagttcggtattcaggctgccaactatccgtttaccgcagatgatatggataacctgcagctgcctgcggccctgaagccgtataataataagttattcggtctgaccattgatcctgaacgtcttgccgctatccgcgaagagcgccgcgaaaacagccgctacgcctcaatccgtcagtgccggatggagctggcagaggtggaagcgctgtaccgcaaacacaaaatcagctacctcaataccaccaactattcggtggaagagatatcgacaaaaatcatcgattctctgggattaaaccgccgtatgttctga

SEQ ID NO: 273840 - DNA, 2379 bp, Morganella morganii
atgtccaacaatggtcaaaccccgtgtaatgtactttggtataaccagttaggtatgaatgacgtaccccgtgtcggtggtaaaaatgcgtctttaggcgaaatgataaccaatctttccggattaggcgtgtctgttcccaatggttttgccaccacggcacaggccttcaatgactttcttgagcaaagtggcgtcaaccagcgcatttatgagctgctggataaaacggatgttgacgatgtcaaccagctggcgaaagccggtgcacagatccgcgcatgggtaattgataccccgttctccgcggaatttgagcaggacatccgtcacgcgtatgagcagctgtccgaaggcgagaaaggcgcatcttttgctgtgcgttcttccgcaacggctgaggacatgccggacgcttccttcgcgggacagcaggaaaccttcttaaacgtgcagggtattgatgcgatcatggtcgccatcaagcacgtatttgcctcattatttaatgaccgcgcgatttcttaccgcgtgcatcagggctatgaccatcgtggtgttgcactgtctgccggtgttcagcgcatggtgcgttctgacctcgcgtcttccggcgtgatgtttactatcgataccgagtccggttttgaccaggttgtctttatcacatccgcttacgggctgggtgagatggtggtacagggcgcggtaaacccggatgagttttatgtccacaaaccaaccctggaaaaaggccgtccggccattgtccgccgcaccatgggttccaagaaaatccagatggtttatgcggatgacaccagccacggcaaacaggtgcgtattgaggatgtggatgcagaaaaatgcaaacgtttctcactgaccgacagcgaagtggaagaactggcaaaacaggctgttaccattgaaaaacactacggtcgtccgatggacatcgagtgggcgaaagacggtaacaacggcaaactgtatatcgttcaggcgcgtccggaaaccgtccgctctaaccagcaggtgatggaacgttatcagctgaacggccagagcaatgtgctggttgaaggccgtgcaatcggtcaccgtatcggtgccggtgtggtcaaagttatccatgacctgagccagatggatcgtattcagctgggtgatgtgttagtcactgatatgactgacccggactgggaaccgatcatgaagaaagcggcggcgattgtcaccaaccgcggcggccgtacctgtcatgcggcaatcattgcccgtgagctggggatcccggcggtggttggttgcggtgatgccaccgaactcctgaaagaaggccaggaagtgacggtttcctgttctgaaggggataccggttacgtctacggcggcaaactggattttgatatccactcttctgaaatcgataaaatgccggaagtgggtaccaaaatcatgatgaacgtcggtaaccctgaccgtgcatttgactttgcctgcctgccgcatgaaggtgtcggcctggcgcgtctggaatttatcatcaaccgtatgattggtgtgcacccgcgcgcactgctggaatttgatcagcagactccggaattacaggctgaaatccgcagcatgatgcagggctatgatgatccggttgaattctatatcggtcgtctggttgaagggattgccacgattgcagcggcgttctatccgaagaaagtgattgtccgtctgtctgactttaaatccaacgaatatgccaacctggtcggcggagatatctacgaaccgcatgaagagaacccgatgctgggcttccgtggtgcaggccgttatgtgcatgatgatttccgtgattgtttcgcgctggaatgtgaagcagtgaaacgtgtgcgtaatgatatggatctgactaacgtcgaagtgatgatcccgtttgtccgtactgtggcacaggcagaagccgtggtgaatgaactggcggttcatggtctgaaacgcggtgaaaacggcctgcgtctgatcatgatgtgtgaaatcccgtcaaacgcactgctggcagatcagttcctcgagtatttcgatggcttctctatcggctccaacgacatgacacagctgacactgggtctggatcgcgattccggtgtggtttccactctgtttgacgagcgtaacgatgcggtgaaagcgctgctgtcgatggctatcaaagcggcgaaagcacgtaacaaatatgtgggaatctgtggtcaggggccatccgaccaccaggattttgctgcttggctgatggagcagggaatcgacagtgtttctcttaatccggatactgtagtgaaaacctggatttcattagcagaaaatcactga

SEQ ID NO: 273841 - DNA, 1116 bp, Morganella morganii
gtggaaaaatcgcaaccgggttatgatttacctaaactaatattcgccgtcggagcgatatcaattctcattgtcattagtttttgggtattaagtccgtttcttccgggcttcgtctgggcgggtatgatagtgattgccacctggccggtttataccgcaatccgccgccgtgtccgtaacagccgctggatagccgcatctgtgatggtcatgctgattattctgctgtttgtctttccgctggcgctgcttatcaacagtattgtcgagaacagcgagccactgatgcgctgggtcaaatctcccggccagctgacactgccggaactctactggcttgactcaatcccggttatcgggccgaaactgtttgccagctggacaaccctggtcgccagcggcggcaacgcgatgatggccaaaatccagccttacctcggacagggcgcggcctggttcctgactcagctactgagcgccggtaaattcctgttccatctcgcgattatgctgctgttcagcgcgctgctctatcttcagggcgaagaaacaatgcgcggcttccgtcactttgctctgcgcctcgccggcatgcgcggtgatgccgccgtactgctggcagcgatgtctgtccgtgccgtagcgctgggggtggtggtcaccgcactgactcaggcaattatcggcgggctgggactggggcttgccggtgtgccgtttgccgctatcctgacggtgcttatttttatctgctgtgtggcgcaactcggcccgctgctgattatgatcccgtccatcatttatctgttctggaccggagataccacctgggctgtcgtcatgattgtctgggccggtattgttgccaccatggatggcgtactgcgcccgtacctcatcaaaatgggggcggatttaccgatggtattgattctgaccggcgttatcggcgggatgttatcgctcggaatgatcgggctctttatcggccctgtcgtgctggcggtctcctacactctgctgaaagcgtggatgaatgatgtgccgaagccgtcagatgacctgaccgaggttcgcgcctatatggaagaacaactcacagaaaaagaataa

SEQ ID NO: 273842 - DNA, 3069 bp, Morganella morganii
atgatcccacgattaacgcaatccccacaggtaagcccggcggttgaacgttatattcacgccctcaatgaaagcggatttaccggcgataccaccacccgctatggcgatcggctgacactcgcgaccgacaacagtatttatcagcttctgcctcaggcaatcgttttcccgcgttcgaccgccgatgtgattctggtgatgcgcctcgccgcacagaatgaattccggtcggttacctttaccccgcgcggcggcggtacgggcactaatggtcagtcgctgaataacggtgtggtgatcgatttatcccgctatatgaaccgcattcttgaaattaacccggagcagggctgggtgcgggcggaagcgggcgtgattaaagatcagctcaatgcgtatctgaaaccttacggctattttttcgcgccggagttatccacctccaaccgcgccaccctcggcggaatgattaacactgatgcttccggccagggctcactggtatacggcaaaacctcagatcatgtgctggggctgcgctcggtactgcttaacggtgatctgctggataccgcgccgctgccggtcagtgaggcgcggcgctgtgcacaggaggaaagtgctgcgggggaactttaccgcaccatactggagagctgcgaaactcaccggcagaccattctggagagctttccgaaactcaaccgttttctgaccggttatgatctgcgccatgtcttcagtgatgatatgcagacctttgatctgacccgtatcctgaccggctcggaaggcacactggcggtgatcactgaggcaaaactcaatatcacaccgatcccggaagtgcgccgcctggtgaatgtcaaatatgatgcatttgattccgcgctgcgcaatgcaccgtttatggtggcggctcaggcgctgtcagtggaaaccgtggattcaaaagtgctgaatctggcacgggaagatatcgtctggcactccgtcagtgaactgatcacagatgtgccggataagaccctgctgggattaaatatcgttgaattctgtggtaatgatgaagcgctgattgacgggcaggttgcgtcactgtgtgaacgcctggattcattaatggcaaataatgaagcgggtgtgattggctatcaggtctgccgggaactgagtggtattgagcgtatttatgcaatgcgcaaaaaagcggtgggcctgctcggtaacagtaaaggggcggcaaaaccgatcccgtttgtcgaagatacctgtgtgcctccggaacatctggcggattacatcactgaattccgtgcactgctggacagtcatcacctggaatacggcatgttcggccatgtggatgcgggcgtattgcatgtgcgtccggcgctggacatgtgctctccggaacaggaaatgctgatgaagcagatttccgatgatattgtcgcgctgactgccaaatacggcgggctgctgtggggggagcacggtaaagggttcagggcgcagtacagtgaggctttcttcggtgatacgctgtatcgcgaactgcgccgtataaaaggggcatttgacccggaaaaccggctcaatcccggcaaaatctgtgcgccgttaaccagtgacgcaccaatgatgcaggtggatgccattaagcgcggcacctatgacagaacgatccccgttgaggtcagaaatactttttccggtgcgatgaactgtaacggcaacggcctgtgttttaattttgatgtcaaaagtccgatgtgcccgtcaatgaaagtgacgcaatcacgttttcactcgccgaaaggccgtgccggactggtacgtgagtggctgcggctgctggcagagcagggcacagaccctgcattattatcacaggccgtaccgcagaaccgtatttcacttcgcggactgattgaaaaaatcggtaatacgcggcgggcctcacgcggggaatatgatttctcccatgaagtgaaggaatcgatgtccggttgtctggcctgcaaagcctgctccacacagtgcccgattaaaattgatgtgccggaattccgcgcccggtttctggcactttatcacggacgctatctgcggccactgcgcgaccatctggtggcgaatgtggaggccggtgcgccgctgatggcgaaagcgccgaaggtgtttaactttttcctgaaacagccgtgggtgcagaaactcagtgaaaaaacagtgggcatgaccgatttaccgctgttgtcctcaccgtcactgaaacagcatctggcgggaagcaatgcggtttccgtcaccctggaaatgctggaaagcatgagtgaggaacagcgccgggccgggcgctatctctttatcgttcaggatccgttcaccagctattttgacgcaaaagtggtggccgattttgccgcgctgacggaaaagcttggttttcagccggtactgctgccgttcagtccgaacggaaaagcgcagcatattaaaggttttctcgcccgctttgcccgtacggcaaacaaaacggcggatttcctcaaccgggttgcgcggctcggctgcccgatggcgggggttgatccggcactggtgctctgttaccgcgatgaatacaaaaccgttctgccaccggagaaacaacagttccgcgtgatgttagtccatgaatttctgacggaacatacggatttattaccggtgaaagatgtcagtgaggatactcccccctggtatctgttcagccactgtactgagtccacagcactgccggacagtgtgaaaatctggcagaatctcttccgtcgttttggcgcctcgctacagtctgtcagtaccggctgctgtggtatggcgggaacctacggtcatgagatgccgaacctggcgcgctcgaaagggatttatcagctttcctgggcgcagccgtaccagtctctgccgtcagagcgttgcctgaccaccgggtactcctgccgcagtcaggtaaaacggatggaaggcaaagtgatgctgcacccgttgcaggcgctgctgacactggtatcctga

SEQ ID NO: 273843 - DNA, 426 bp, Morganella morganii
atgatatggaaacgacctgcaacaccggcagaactgaatcgcatttcggaagggaatatgctcagccacctgggcattgtctttacggcagttgagccggagcagttaatcgcgacgatgccggttgatgaacggacaaaacagccgcacggcctgctgcacggcggggcatcggtggtactggcggaaagcctcggctctgtggccggttatctgtgcagtgaaggggaggaaaccgtggtcggtgttgagattaacgctaaccatgtgcgtgcggtgcgcagtggtgttgttaccggttattgcaaggcgatacacctcggacgcaatcagcaggtctggtctattgagatttttgatgaacagcagcgcttatgctgtatttcccgtctgaccaccgcgatcctgcgcgggtcaaaaaattaa

SEQ ID NO: 273844 - DNA, 381 bp, Morganella morganii
atgacaacgcacagtaccaacccggtggaaactttttcactgaatgataatgactggacaggtatcacactgacagcggccgctgcaaagcagattgtgacactgatgaaaaacaccccggacagtatcgggctttgcctgagtgtcaaacaatccggttgtgccgggtttggttatgtttttgaaatgattaatcaggcggatgcagaggatatgctgtttgagcgtgatggcgcccggctgtatgttccgcgcaaagccatgccgtttatcgacggcacggaagtggattttgtccgtgagggactgaatcagatatttaaatttaataatccgaaagctcagcatgcctgcgggtgtggtgaaagcttcggggtttaa

SEQ ID NO: 273845 - DNA, 1485 bp, Morganella morganii
atgtctcagagcaatgcagagattggtgaagacgtccaaacctggctgaatgacggacgctataaagaaggctttttcactaacgtcgccaccgatgaactggcgaaagggatcaacgaaaatgtgatccgcgccatttccgccaaacgaaatgaaccggagtggatgctcaatttccggctggaggcttttcagcactggctggggatggaagagccgcactggctgaaggcgaaatatccgcagctggattatcaggattacagctattactccgcgccgtcatgcggctcgtgtgatgatacctgcggctcacagccgggggcagtgcaaagcccggcgggcagtttcctgaccagtgaagtggaagaagcctttgaaaaactcggcgtgccggttcgcgaagggcaggcggtggcggtggatgcgatttttgactccgtatccgtctcaaccacttaccgtgatgagctgaaaaaacacggtgtgattttctgctcgttcggggaagcgattcacgactatccggaactggtgcagaaatacctcggtaccgtggtatccaatcacgataactttttcgccgcacttaactcggcggttgcctctgacggcacctttgtttatgtcccgaaaggggtgcgctgcccgatggaattatccacctatttccgcattaatgcagccaaaacaggccagtttgaacgcaccattctgattgcggatgaaggcagttatgtcagctatatcgaaggctgctccgcaccggtgcgtgacacttatcagctgcatgcggcggttgtggaagtgatcatccataaagatgcggaagtgaagtattccactgttcagaactggttctccggcggtgacagtgaaggcggcatcctcaactttgtcaccaagcgggcactgtgtgagggtgaaaattccaaaatgtcatggacacagtctgaaaccggctctgctatcacctggaaatacccgagtgtgatcctcaaaggggataactctgtcggtgaattcttctctgttgccctgaccaacggcacacagcaggcggataccggtaccaagatgatccacatcggccgcaataccaaatccaccattatctcgaaagggatttccgccgggaaaagccagaacagctaccggggactggtgaaggtgctgccgggggcggaaaacgcccgtaactttacccagtgtgactctatgctgatcggcacagagtgcggcgcacacactttcccgtatgtggaagtgatgaataacagtgcgcaactggagcatgaggccactacctcgcgtatcggtgaagaccagctgttttactgcttacagcgcgggatcagcgaagatgacgccatctcgatgattgtaaatggtttttgtaaagacgtgttctctgagttgccgctggaatttgctgtggaagcacagaaactgctggcgataagcctggaacacagtgtcggttaa

SEQ ID NO: 273846 - DNA, 747 bp, Morganella morganii
atgttaagcgtaaaagatttgcatgtcagcgtggaaggtaacgaaatcctcaaagggttatcactggacgtgaaaccgggggaaatccacgccattatggggccgaacggctccggtaaaagtaccctgtctgccacactggccggccgggaagagtatgaaattgacagcggaaccgtcacttttaaaggtaaagacctgctggaactggcaccggaagaccgtgccggtgaagggattatcctcgcctttcagtacccggtggaaattcccggggtaagtaaccagttcttcctgcaaaccgcagtcaatgcagtgcgcgaatatcgtggtgaagaggcgctggaccgcttcgatttcgccgattttatcgaagataaaattgagctgctgaatatgccgcaggatctgctgacgcgtgcggtgaacgtcgggttctccggcggtgagaaaaagcgtaacgatatcctgcagatggccgcccttgagccgtcactctgcattcttgatgaaacggattccgggctggatattgatgccctgaagaccgtggctaacggggtgaatcagctgcgcagtccggatcgcgcctttattattgtcactcactatcagcgcatcctggattatgtgaagccggactttgttcatgtgctgtatcagggcaaaatcatcaaatccggtgatttctcactggcgaaaaaactggaggagcagggatatggctggcttattgaccaacagtga

SEQ ID NO: 273847 - DNA, 1305 bp, Morganella morganii
atggctggcttattgaccaacagtgaacgcgcgctgaaacgccgcgaggtcagtgagcgcaatctggccgcaatggggcggatagagcagctgatcgcgcagcatccgctctccgggcacgccgcacagcactggcagcaggcacagaaaaccggcttcccggcctttcatcaggaagactggcattatacgtcgctgacaccattgctggaggcagattatcaggataagaccggaacactgaacgtcttaccggaggcggtgctgacctcactgaatgcataccgcatagtgctggtggacggtgtgtttgccccgcagtggagtgatgcggattttggtgtgtttgagttatctgtggctgaccgccacagtgaattcccggcaccggttaacggcgagattttcctgcacctgactgaaagcctggcgcagacaccgttaatgatccgcgtgaaagccggcgcacaggcggaaaaacccctgtatatcgtgaatatttcaacggcacataatgacgcactgaatatgcgccacagccgctatcacctcgatatcggcgcgaatgcggctgtttctgtgattgagcactttatcagcccggatgaacaatccgcccatttcaccggggcgcggatgacggcagtcgtgggggaaaacagtgatttccgccatctgaaactggggtttgaaaacccgcaggcgtaccattttgctcataatgatttggtgatcgccgctcatgcccgtgtggaaagcaccagttttctgctcggcggcaaactgacccgccatcacaccagtacacagcttaacggcgaagctatcgtgctggccatgaacagcctggtgttgccgaaacacggcgaaatcgctgatacccgtacttatctggagcataacaaggggtattgtgaaagccgccagcgccataaaaccattgtgatggataacagccgcgcggtatttaacggcatgatcaaagtggcaccgcatgcactgaaaacagacggccagatgaccaacaataacctgttgctgggccggaaagcagaaatcgataccaaaccgcagctggaaatctatgccgatgatgtgaagtgcagccacggtgcgacggtcgggcggattgatgaggaacagctgttttatctgcgcacacgcgggatcgcggaaaaagccgcgaagcagatgatcatcctcgcgtttgctgcggaactgactgatgcgatcagcgatgaagtcctgaataacgtggtgatggcgcgtatccgtcagtcgctggatcagggggataaacagtaa

SEQ ID NO: 273848 - DNA, 1239 bp, Morganella morganii
atgagttattcagcacaacagcggcgggcagacttcccggtactggccggggaggtgaacggcaaaccactggtctacctcgacagtgccgccagtgcccagaaacctcagcaggtgattgatgcggtgagtgattttacgtctcaccattatgctgcggttcaccgcggcattcacacattaagtgcagaggccacggccgccacggaagcggtgcggcagaaagcggcggcgtttatcaatgcgccgcagacggaagagattatttttgtcaaaggcaccacggaagccatcaatctggtggcggacagttttggccgcgcattctgcaatgatggtgacaatatcattatcacggagatggaacatcacgccaatattgtgccctggtatatgctggcggagagcgcggggattgaaattcgtgtattgccgatggcggatgacggcactctggtgctgagcaaactgccggaactgctcgataaccgcacccgcctgctgagctttacccatctttctaatgtgctcggcaccgtgaacccggtgaaagcgattattgcgcaggcgcgtgaactgagccgtgccgccgggggagaactggcagtgctggtggacggtgctcagggtgccatgcatcagccggtggatgtgcaggcgctggattgtgatttctatgcattttccggccataagctgtacggaccgaccggtatcggtattctgtggggacgtaaatccctgctggataacatgccgccccgcgaaggcggcggtgccatgatcgcagaggtcagcctgacgaacggcattacctatgcggatgtaccgtggcgttttgaggcgggaacacccaatatccagggcattatcggcctgggagctgctctggattacctgaataacatcggtatggcggagatagctgcgtatgagcacacgctcatgcagtatgcactgacgcggctggcagaggtgcccggtattattctgtacggtaatgcacagcgggaaggggtgatcgcctttaacctcggggcgcatcacgcttttgataccggcgcatttctggatcgctacggcgtggctgtccgcaccgggcatcactgcgcacagccgctgctggcgcattatggtgtcagtgccatatgccgtgcctcactggcgctctacaccacggaagctgatattgatatactgacggacgcactgaaacgtaccgcaaaactgctgggttaa

SEQ ID NO: 273849 - DNA, 420 bp, Morganella morganii
atgaaaattacgctgccggatcaggcaaaattactgcgcaatttctcccgttgccatgactgggaggaacgttatctgtacctgattgagctgggggaaaaattaccggcgctgacagaagagcagcggcagccgcagtataaaatatcaggttgccagagtcaggtctggatcatcatgcagcaggatgaggaagggcgggtctggttcgccggtgacagcgacgccgcgattgttaaaggcttggtggcgctggttatcgcgctgtatcagggaaaaacgccggcggaaatccgtgatctggatatcgcacaaatcttttcggaactggcactttctgtccatctgaccccgtcccgtactcagggactgaacgccatggtcagaacaatcatacaaaacacgcagcaaatgagataa

SEQ ID NO: 273850 - DNA, 1083 bp, Morganella morganii
atgaaacgaattctcccgttgctgggcgggctgttgttagcggttactgcgttaacagcccgggcaaccgaatatcaactccctgcggataagggccgggtcatcggcgaaaacgtcacctatgttgtgccggatgacggacgctcactggaagcgattgcagccgaatacggtatcggcctgctggcgatgctggaagctaacccggggacggatccgtatctgccgaaacccggcagcgaactgattatcccgtcacaactgatcctgccggacaccccgcatcagggtattgtgattaacctggcggaactgcgtctgttctattacccgcagggcaccaataccgtgcgggtctacccgattggtatcggccagttggggcgtgataccccggtcatgaccacctcagtttcccagctgatcaaagatccgacctggacaccaaccgcgaatatccgcaaagcctatgcggctcaggggatcaccttaccggcagttatcccggccggcccggaaaacccgatggggctgtttgctctgcgtctggcgcacggtcgcggtgaatacctgatccacggcaccaatgcggactttggtatcggtatgcgtgtcagctcaggttgtatccgtctgcgtccgcatgatattgaagcactgtttaaaaccattccgaaaggtacacgggttcagatcgtgaatgagccggtgaaatatgccgttgaaccggatggtcagcgctatgtggaagtacaccagccgctgtcccgtaataaaaatgacgacccgcagactatgccgattgcacgttctgccggactgaccagctttattcagtctccggacactaacagcgccatcgttgagcaggcgattgcccgccgctccggtatgccggtgaatgtcagccgtgatgcgcagtataagcaggaagcagcaccggcagagaaaactaactttgcaccggtggaaatggacgaagaagcggaagtgaaagcactgaacctgaaaccggccgattttgctccgggtcagttaacccagccgggtccgattgtccgtgaggaaaacagcgcagagtaa

SEQ ID NO: 273851 - DNA, 237 bp, Morganella morganii
atgggtcgttctaagattgtattaggtgctgtagttttagcttctgcattattagcaggttgttcttctaacgctaaatttgaccaactggacaacgacgttaagacgctgaatgccaaagttgatcaactgagcaacgatgttaacgcaatccgcgctgatgttcagcaggctaaagacgaagcagcacgcgctaaccagcgcttagacaaccaggttcgttcttacaaaaaataa

SEQ ID NO: 273852 - DNA, 1413 bp, Morganella morganii
atgaaaaagaccaaaattgtttgtactatcggacctaaaaccgaatcagaagagaaactcgaagcactgttagatgccggcatgaatgttatgcgtctgaacttctcccacggcgattacgaagaacatggtcagcgcatcaaaaatctgcgtgctgtctgtgcgcgtaccggtaagaaagcagccattttactggataccaaaggccctgaaatccgtaccatcaaactggaaggcggcaatgatgtcgcactggtggcgggtcagacctttatctttaccacggataaatctgtcatcggtaacaatgagcgtgttgccgtcacttatgcgggcttcgcgcaggatctgaaaccgggcaatatcgttctggtcgatgacggcctgatcggcatgcgtgtgaaagaaaccaccgcaacagaggttatctgcgaagttctgaataacggtgacctcggtgaaaacaaaggggttaacctgccgaatgtgtctatcggcctccctgctctggcagaaaaagacaaacaggatctgattttcggttgcgagcagaatgttgacttcgttgcagcttcctttatccgtaaacgtgccgatgtggacgaaatccgcgctcatctcaaagccaacggcggcgaacatatccagatcatctccaagattgaaaaccaggaagggatgaacaacttcgacgaaatcctcgaagcctctgacggtatcatggttgcccgtggtgacctgggtgtggaaattccggttgaagaagtgattttcgcgcagaaactgatgatcgaaaaatgtaataccgcccgtaaagtggtcattaccgcaactcagatgcttgactccatgatcaaaaacccgcgccctacccgtgcggaagccggtgacgttgccaacgccatcctcgacggtaccgatgcggttatgctgtccggtgaaagtgcgaaagggaaatacccggttgaagctgtcagcatcatggcgactatctgcgagcgcactgaccgcgtgatgcacagccgtctcggcgatttacaggccggtaaaaaactgcgtgtgactgaagcagtctgccgtggtgcggttgaaatgtcagaaaacctggatgctccgctgatcgttgtggcaaccgccggtggtaaatccgcgaagtctgtccgcaaatacttcccgaaagccccgattctggcgctgaccaccaacgaaaccactgcccgtcagttactgctggtgaaaggtgtgaccaccaaactggtgaacgaaatcttatcgaccgatgatttctaccgtatcggccgcgaagctgcgctggaaagcggtctggccaccaacggtgaaatcgtggtgatggtatccggtgcgttagtaccaagcggcaccaccaatacctcatccgtacaattactgtaa

SEQ ID NO: 273853 - DNA, 1374 bp, Morganella morganii
gtgcagaagtatttgaaagaagcgcgtactttgctggctcttggtattcccgttattatcgcgcagtttacacagacagcgatgggcgtggttgacactgtgatggccggcagagtcagtgcgacagatatgtccgccgtggctgtcggtacctccatctggctgcccgctatcctgttcggccatggcctgctgatggcgctgaccccggtggtcgcgcagctcaacggctccggtcgccgtccggtgattgccaatcagatccgtcagggtatgtggctggcggcatttttatccgtcctggttatcgcggtgctctataacagccgctacattattgaaaatatgccgcatattgacccggttctggctgaaaaagccgtcgggttcactcacgctattatgtggggtgcgccgggttacctgttttatcaggtgctgcgcagccagtgtgaaggactgtcgaaaaccaaaccggggatggtgattggttttctcggcctgctggtgaatatcccggtcaactatatttttatttacggaaaattcggcgcgcctgctctcggcggtgtcgggtgcggtgtcgcgacagcttccgtgttctgggcaatgttcctgtttatgcgctggtatgtgaaacatgcccgttcacagcgcgatgtgcagccgaagacccgttttaccccgccggactgggcggtaatgaagcggatcacgcagctcggcctgccgattgccctggcactgttctttgaggtcacgctgtttgccattgttgccctgctggttgcgccattaggtgtcacggcggtggccggacaccagattgccctgaacttcagctctctgatgtttatgttcccgatttcactggggatcgccaccactatccgtatcggctttaacctcggaaaaagttccacggagaaagcgcgtgtatccgcctataccgggctgggtgtcgggctgatgatcgcggcggtgacagcgctctttaccgtgctgttccgtgagcctatcgcgctgctgtataacgacaatccggaagtagtgattatggcctccggcctgatgctgtttgccggtatttatcagttgtcggattccgttcaggtaatcggtgccggtgtgctgcgcggttataaagacacgcgcgccatcttctatgtcacctttacggcttactggatcctcggcctgccgtccggttatattctcggactgacagatctggtggtaccggcgatgggccctgccgggttctggatcggttttatcatcggattaaccgccgccgccatcggtatggcatgccggatcctgtggttacagaaacagccggacagttttattctgcaacgcgccggtcgttaa

SEQ ID NO: 273854 - DNA, 666 bp, Morganella morganii
atgtttaccgggattgtacaaggcaaaggccccgtcgtcgccatcgaagaaaaagaaaattttcgtactcacactgtgaaattcccgcctgatatgctggccgggatagaaacgggcgcatcagtggcacataacggctgctgtctgacagtcacaaaaatagacggggatttaatcagttttgatctggttaaggaaaccttaagactgaccaatctcggcagcattaaaaccggtgatgtggtcaatctggaaagagccgctaaatatggcgatgaaatcggcgggcatattatgtccggccatattgtcaccacggcggaaattgccaagatttttgtttctgaaaataattatcagatctggctgcgtatcgaagataaagccctgatgaaatatatcctgcataaaggctttgtcggtattgatggtatcagcctgactatcggggatgtggttaataaccgtttctgtgtgcatctgattccggaaacccgtgagcgcaccacgctgggtaaaaaacggctgggcgataaagtgaatattgagctggatccgcagacgcaggcgattgttgataccacagagcgggtgctggcgcagaaaatgcagcagttgcaggaaagcctgacgccgccggtgccgacggaaaaaccgcaggtctga

SEQ ID NO: 273855 - DNA, 1164 bp, Morganella morganii
atgagttctgattgtgtcgaaaatcaaaaaacgcctgccgactcctggcagcggattgcctccgatcttttagacgaagccggcattgagattaatggttcccgccctttcgatattcaggtgcataaccagcagttctttaaacgggtcttacagcagggctcaatgggactgggtgaaagctatatggatggctggtgggactgcgagcggttagatattttctttcagcgggtgttacgcgcagggctggaaaataaactgccgcagaatatcaacgatattataaaaatcgccatggctcgtctgcgtaatctgcaaaccaaaaaacgggcgcggattgtcggcgaagaacattatgatctgggtaatgacctgtttgagctgatgctcgacccgtatatgcagtattcctgcggctactggaaaggtctcagcgatgaccctgccaatctggcgaaggcacaggagcagaaactgcatctcatctgtgaaaagttacagctgaaaccgggtatgcaactgctggatatcggctgcggctggggcgggctggcagcgtatgccgcaaagcacttcggtgtgtccgtgaccggtgtgaccatttccgctgagcagcagaaatatgctcaggcgcgttgtgctgatcttgacgtaaatattatcctggaagattaccgcgatttacatgaacagtatgaccggattgtgtctgtcgggatgtttgagcacgtcgggccgaaaaattacgccacctattttgatgtagtcaaacgcaatctgaaaccggacggcttatttttacttcacaccatcggttcaaaccgcaataaagtgaatgtggatgcctggatcggaaaatatattttcccgaacggctgtctgccgtctgtgcagaatatcggtgacagcagtgaaaataaattagtaatggaagactggcataatttcggggctgattatgaccggacactgatggcgtggcattcccgttttcaggcagcctggccgtcactggaaaataattacacaccgcgctttaagcggatgttcacctattatctcaacgcctgtgccggggcattccgtgcccgtgatatccagctgtggcagatattatggagcccgcagggttgtgagggcggattacgcgttccgcgctga

SEQ ID NO: 273856 - DNA, 1155 bp, Morganella morganii
atgctgggttatctcgcgattgatatgtatctgcctgcattcggtatgatgcaggactctctgaactccaccgccagcgctatcagcgccagtctgagtatcttcctggtcggctttgccatcggccagctgttatggggaccgctctccgataaaatcggccgcaagccggttctgctgatgggcctgagtctgtttgccctgagctgtctggccatggtctgggtttccaccccggcacaattattattactgcgttttgtgcaggccgtcagtgtctgctctgccgctgtcacctggcaggcgctggttatcgaccgttatgatgatcaccgtgcgcagcgtgtttttgccgcaattatgccgctggtggcactctctccggctctggcaccgttactgggcgcatggctgctcaaccacggcggctggcatgaaattttcctcgtgctcggcggtatcaccctgctggtgctgctcccgaccctgatgctgaaagaaaagcatcatatcgcgccggatgcggtcaaaacggaaaaacagaaaatctccttcttccgtttgctgaaatctccggtttacagcggtaacgtactgatttacgccgcgtgcagcgccggtttcttcgcctggctgaccggttcgccgtttattttgcgcgatatgggttataacccgaatgatatcggtctgagctacattccgcagactatcgcctttatggtcgggggctacggctgccgtgccctgctgtcgcggattaacggcaaaacactgctgccgttcctgctggccggttacgccgtcagtatggtgggtctgtatgcgatggcaaaattcagtactccgtcactggtggcgatcctgatcccgttctgctttatggccgccatgaacggcgcgtcttacccgattgcggtatcaaacgccctggcggtttatccggaacacagcggtaaagcagcggcattacagaatgccattcagctcggtttatgctccgcgatcagtttcctggtctctgctctgatgcatgagccactgctctccaccacagcagtgatggcggcaacagtgatactgaccatcggcggttatattatccagcgccgcccttcgcgcacctccgtgactattgcggaacaaaatcaatag

SEQ ID NO: 273857 - DNA, 903 bp, Morganella morganii
atgtggtcagaatatacgctggatgtggtggatgctgtggcgcggacaggcagtttcagtgcggcggcagaggaactgcaccgggtgccttctgccatcagctacagtgtccgccagctggaagagtggctgggggttccgctgtttgaacggcgtcaccgcgatgttgaactgacacctgccggggcgttgtttgtcaaagaagcgcgtgatgtcatcaaaaaaatgaaatccacacgtcaccagtgccagatgattgccaacggctggcgcggacaattcagcatcgccgttgactgtatcgtaaaaccggaacggataacgcgacttctgctggatttttatcatcatttcccggatatcgagttgtatatttatccggaagtgtttaacggggtgtgggatgcgctggtggacagacgggtggatgtggcaatcggtgcgacacgcgcatcccctatcggcgagcgctataatttccgcgatatgggctttatgccgtggcgtgcggtggtcagtccggatcatccgctggcctctgccggtcatgtcctgaccaatgaggagatggtgccgtacccgagtttgtgtctggaagatacctcacgttctctgccgaaacgcgatacgtgggcactggataatcagcgccgcctggtggtgccggactgggatcgcgggattgcctgtgtggaatcgggattgtgtgtggcaatgatgccggcacaccgcgccgatccgctgattaaagaggggcggctggcagcgctgaagatagagcagccgttaccggacagcccgtgctgtattacctgggtggataaagacacctctccggcactgagctggctgctcgattatctcggggacagcaacacgctcaatgccgaatggctgcgctga

SEQ ID NO: 273858 - DNA, 1026 bp, Morganella morganii
atggcaacgattaaagatgtggctaagcgctcgggcgtttcgaccacaaccgtctcccatgtcattaataatacccgtttcgttgcggaagaaacgaaggcggctgtctgggctgctatcaaagaactgcactattcaccgagcgccgtggcgcgcagtctgaaagtcaataacacaaagtccatcgggctgctggccacctccagtgaagcgccgtattttgcggaagtgattgaggcggtggaaaacagctgctacagcaaagggtataccctggtgctgtgtaactctcacaataatcctgacaaacagaaagcctacctggcgatgctggcgcagaaacgtgtcgatggtctgctggtgatgtgttcagagtacccggatcagctgattgccatgctggaaggctaccgcaatatcccgatggtggtgatggactggggcaaagcgcgcggggatttcaccgatgcgattattgataacgctctgcacggcggttatctcgccggccgttacctgattgaacgcggtcaccgcgatatcgcggttattccggggccgcttgagcggaacaccggcggcaaccgtctggaaggattccgcaaagcaatgaaagaagccggaattacagtacgcgatgaatggattgtccagggcgattttgaaccggattccggttatcaggccatgacacagattttatccggtaaacagcgcccgaccgcggtattctgcggcggtgatgctatggcgatgggcgcgatttgcgcggctgatgaaatgggtctgcgcgtgccgcaggatatttctgtgatcgggtatgacaatatccgtaacgcccgttactttacccctgccctgaccaccatccaccagccgaaagagcggctgggacagatggcactgacgatgctgctcgaccgcatcgtcaacaaacgcgaagatgcgcagaccattgaggtgcatccgcgcctggtcgaacgccgctccgtggcggatggtccgtttatcgattaccgccgctga

SEQ ID NO: 273859 - DNA, 579 bp, Morganella morganii
atgtcgtttgaattacctgcactgccttatgcaaaaaatgcattagcgccctatatttctgaagaaacactggaataccactacggcaaacaccacaacacctatgtggttaatctgaataacctgatcaaaggcaccgcatttgaaggtaagtcactggaagagattatcaaaacctctgatgccggtatcttcaataacgctgctcaggtctggaaccatacgttctactggcactgcctggcaccaaatgccggtggcgaaccaaccggtaaaattgctgacgcgattaacaaagcgttcggttcatttgccgaattcaaacagcagtttaccgattccgcagtgaaaaacttcggttccggctggacatggctggtgaaaaaagcagacggcagcctggctatcgtcaatacctctaacgcggcaacccctgtcagcggtaacgacaaaccaatcttaaccgttgatgtctgggaacacgcttattatatcgactaccgtaatgcccgtcctaaatacctggaaaacttctgggcattagtgaactggaaatttgcggaagaaaacctggcgtaa

SEQ ID NO: 273860 - DNA, 309 bp, Morganella morganii
atgctggcagattatatttcccgcgcgatacaaaaccatactgattgcgatgttatttgtgaccattatcagaaagatgaactctctgaagtgatccggcgggtccgcaaatggcagttccgcgatggtattgagctgatgtgcagtgaagagatagaaactgccgtacagaccggtgacgaacagtgcccggagcagtggattgtctggacggtcacgggggataacgcgaaaacggtttctccgcagcacaaagaatttttcagtctgtgccagcaggattactggctgaaaatgcagcaggcctga

SEQ ID NO: 273861 - DNA, 540 bp, Morganella morganii
atgacaaaactcacattacaagagcagatgctgaaagccggactggtgaccagcaaaaaaatggataaagtccgcagaacagcaaaaaaatcgcgcgttcaggcccgtgaagccagggaagcggtggaagagaataaaaaagcgcagcttgagcgcgataagcagctgagtgagcagcaaaaacaggctgttttatccagagaatataaagctcaggtgaagcagctgattgaaatgaaccggattattatttcaaaaggcagtattgattttaatttcaccgacaataacgtaattaaaagcattacggtggataaaaccacacagtctcagctgatcagcggccgtctggcgattgcccggttaagcacggaaaacagcagtgtcagtgaatatgccattatcccggctattgttgcggataaaatcacacagcgtgatgcggaaagcattgtattaaataatgcactggcgcaggacgaagcggatgaagacgacccgtatgctgattttaaaatcccggatgatttgatgtggtga

SEQ ID NO: 273862 - DNA, 762 bp, Morganella morganii
atgattcgccactgtactgaaaattggttattattcccttccgctttttacccggataacccgatgtctgacattaccgatacctttatcgccccgccgtgcccggaacagatcgatattctgtatcaggacgaacacctgctgctgattaacaaacctgccggccttctcagtctgtcgggaaagaatccacagaatctggattccgtgcattaccggctggtacagctgtttcccggctgcacactggtacaccggctggatttcggcacctccgggctgctggtggtggcccgtaacaaaaccatcaatgccgcgctttgccgtcagttcagtgaacggactgtgcagaaaggttacagtgccctgttgtgcgggcatctgaatgagaatgaaggaataattgatgcggcgattaccaaagatccggcgctgtttccgcgcatgacgatatgtgctgtccgggggaaaccggcccgctcacattatcaggtgactgagcgtttttattatgaaactgaggacgggttctctctgccggtaacccgggtgacactgacaccggaaaccggccgcacgcatcagctccgcattcattgtcagtatctgggccgtccgattctggggtgtgatctctatggcgggaaattattgccgggcacagaaaatattccgcggctgatgctgcacgccggggagctggattttgtgcatccggtcagcggcgaaccggtaactgcccgcagcccctgcccgttctga

SEQ ID NO: 273863 - DNA, 456 bp, Morganella morganii
atgcgcagatttacacaggtatgtaacgtagtgctgttaatgaccggacttttagtcgctccggcagcgtcttatgcggatcggggacacgataaaggacatagtcaccggcatgagcatcatcatgggcattataagcacagagataatcaggatgatcagggagagcgctattaccgtcagtacagaaaggatctgagttacgcacaggcacgctggctggcgtcagaaagcggattaccgggatatcacgcgctgccgccgggaattgcgaaaaaccttgccagaggaaaaccgcttccgccgggcattgccaaacggtcagtgcccgtacatatgcgtgaccgcctgccgcattatccgggctatgagtggaaaattgccggtgatgatttagtgcttattgcactgagcaccgcggtggtaacctacattattaatgatgtttttgagtag

SEQ ID NO: 273864 - DNA, 621 bp, Morganella morganii
atgacctttgagtggtggtttgcctatctgatgacatccgttattgtcagtctgtctcccggcgcaggtgccattaacagcatgacgacgtccgtcaatcacggctaccggggcgcgattgcggccattgccgggttgcagaccggcctgatgatgttgattatactggtcggtgtcgggctggggacattgttgtcacaatcggttcttgcttttgaaatactgaaatgggccggcgcggcctatcttatctggctggggatccgccagtggcgggctgcgggaaccattgagctgagcacacagacagcaacgctgtcacgcaaaaagctgtatcagaatggcgtactggtgaatatctcgaaccccaaaagtattgtttttctcgcggcactgtttccgcagtttattatgccgcaccagccccagctgatgcagtatctgattctgggcgtcaccaccgttgccgctgatattattgtaatgacagggtatgccgtactggcacggcaaatcgcggtatttatcaaaagtccggcacagacccgcgccatgaataaagtgttcggatcattatttatgctggtcggcgccctgctggcctttacccgtccggcatga

SEQ ID NO: 273865 - DNA, 342 bp, Morganella morganii
atgacgacgactattgaaaaaatcgaacgccagattaaagaaaacccgattctgctgtatatgaagggctctccgaagctgccgagctgcggtttttccgcgcaggctgtgcaggcgctggctgcctgtgaagagcgttttgcttatgtggatattctgcagaatccggatatccgtgctgaattaccaaaatacgctaactggccgacgttcccgcaactgtgggttgacggtgagctggtcggcggctgtgacatcattatggaaatgttccagcgcggtgaattacagccactgattaaagaaaccgcagcaaaataccggactgaaaacgaagaataa

SEQ ID NO: 273866 - DNA, 681 bp, Morganella morganii
atgcagccaacatcagcagggcaaaatgttattttaaccgggtatatttcatacagcggaccgggtgctgcgctcggtacactgactgaagacacggcagcaagagtccccgggctggctgagcgattcagtggtatttgcaacagcatggcagatttttttatgtcagcaaaagggaaagtgaataactcactgcatcagttaggtgaccggataaaaaatatctcttttcgttgcgaaaaaccggaaatacaagcggaaacgccgcacccgcctgtgcagattccgtcgttttctcagattttacttgagtcggctaaagaatgtctgccaaagcatctggatatactggcaggtaaacttgagaataacgaacctctgcaaccggacatgctggtgagtatctcaggtggtccgctgaggggggttattacccagctcagttctataaacgggaaaatatatgagccgggttctgaaggtatccgtgaagaatcgggaaatctgctgagaaaggaagtggtacaggaggagttctctcagcttggcagtatcgctgatttgggcaaagcaaaagagtatcttgccagaccgggatttgaagcgatattccgtgaaagcgttggtctggtgatatccgaaatccgcgggaaaattctgccggaactgatgaaactttaa

SEQ ID NO: 273867 - DNA, 648 bp, Morganella morganii
atgtctgaaaatcaaaatcacaatgctctgagcgcacgtttccgcggctattatcctgtcgttattgatgttgaaaccggcggttttaatgccagaacggacggaatgctggaaattgccgccattaccgtcaaaatggataacaacggctggctgatgccggatcagcggcttgaatttaatgtgcagccttttgagggtgccaaccttgaccccgctgctctggcatttaccggtattaatccggccgaccctgagcgtaatgcggtaacagaatatgaagcgctgcatgccattttcaaaatggtgcgcaaaggcatgaaagatgcggattgcaagcgggcaattatcgtggcgcacaatgcaaattttgatcacagctttgtgatggcagctgcagaacgctgcgggctgaagcgcaatccgtttcacccgtttgccacttttgatacagccgcattaagcggactgtcactgggccagaccattctggcaaaagcctgtatcaccgcagggatcccgtttgacagcaaacaggcccacggcgcggcttatgataccgaccgtacctccctgctcttttgtgacattgtcaaccgctggaagaaactgggcggctggccgccggcggcaaaaagtaatcagtga

SEQ ID NO: 273868 - DNA, 408 bp, Morganella morganii
atgcgtgtactccataccatgctccgcgtgggtgatatgcaacgttctgtcgatttttacaccaaggttctcggcatgcgtttactgcgcaccagtgaaaacccggaatataaatattctctggctttcgtgggttacagtgacgaaagtgaaggctctgttatcgaactgacgtataactggggcacagattcctatgagatgggaacggcattcggccatatcgcactcggtgtggatgatgtcgcggcgacctgtgacgctatccgcaaagcgggcgggaatgtgacccgtgaagccggtccggttaaaggcggtaccaccattatcgcttttgtggaagatccggacggctataagattgaattaattgaaaataaaagtgccggggctgctctcggtaactga

SEQ ID NO: 273869 - DNA, 237 bp, Morganella morganii
atggcagaacaacttcacttttttgatatcccttcaccttgtgtggggatatgtcagctgaatgaaaaaggctactgccggggatgctaccggagccgcgatgagcgttttcagtggcagtcactgagtaacgcacaaaaagaaaatgtgattcggctgtgccgtcagcgtcgttacagaaccgcaaaaggggacacaccgccggaagcaccatccggacagctggatttattttaa

SEQ ID NO: 273870 - DNA, 435 bp, Morganella morganii
gtggagttaacattgggatcagacttagcgaggttagtgcggatttggcgatcactgattgaccaccggctcaaaccactgaaactcacacagacacactggattacactctacaatatcagcctgctgccgccggatcagtctcagattcagctggcaaaagcgattggtattgaacagccgtcgctggtccgcacgctggatcagctggaagaaaagcggttaatcacacggcatatctgtattaatgaccgcagagcgaaacggattaaactgacggaggaatccgaaccctttatccgtgaggtggacgcggtaattgaaaaaacacggtgtgaaattctgggcgggatcacgcaggatgaattatatacgctggcggagattgtcagaaaactggacaacaatatcgtgcagttgcacaaccgtaactga

SEQ ID NO: 273871 - DNA, 468 bp, Morganella morganii
atgtataagcgttttctcgtcggtgtatttgccgtcgtggccctttccggttgtgtgaatatggacacactgagtggtgacacttatagtgcagaccaggcgaaacgtgttcagaccgttacctatggtacagtgatgagcgcccgcccggtaactatccagggcggcagtgacgaaaatatcctcggtgcggccggtggtgcaattctgggtggtattttaggcagcactgtcggcggcggcacaggtcagaccctggctaccgcagcaggtgcaattgccggtggtgttgcaggccagaacgttcaggcagcaatgaacaacacctccggtgttgagctggaactgaaacaggataacggcgaaatcattgttgttgtacagaaacaaggtaaaaccccgttctccgtcggtcagcgtgtccgtatcgcgaaatccggttcaacctataccgtatctccgcgttaa

SEQ ID NO: 273872 - DNA, 1119 bp, Morganella morganii
atgcgttcgggacgttatatcggcgtgatgtcaggaaccagccttgacggggtggatgttgttctggctgcgattaatgattcagtggtggcgcagcaggcggcgtattcgcatccgtttccgcacgcgctgaaaaagcgcatactggcggtatgtcagggacagcagacgacgctgtcagaaatcggccgtctggattatgaactgggcacactgtttgctgacgctgtcggcgggctgctggcacaaacccggctgaacccgcaggatattgccggtatcggctgtcacggacagaccgtctggcatgagccggacagcgaaacaccgtttaccattcagctcggggataacaaccgggttgccgcgctgaccaatatcatgactgtcggggatttccgccgccgtgatatggcttacggcgggcagggcgcgccgctggtgcccgcctttcatcaggcggtgctcggcgtggcggatgaaaaacgaattatcctgaatattggcgggatcgccaatatcaccacactgatcccgggggcggaggtcagagggtatgacaccggtccgggcaatatgctgatggacagctggacatggcggcatcgtgcagagccgtatgataaagacggtgaatgggcgaaaagcgggcacgttaatcaggacttactggcacagatgctgagtgatccctatttccgccgtccggcaccgaaaagtaccgggcgtgaatatttcaatatgcagtggctgaccacacaactggacaatttccccggcctgaaaccggaggatgtgcaggcaaccctgctggcgctgaccactgtcagtatcagtgagcaggttacgctgtgcggcggctgtgaacgcctgctggtatgcggcggtggtgcgcgcaatccgcagattatggcgcagttatccgcacagttgccgggcactgaagtgagcccgactgataaatacggtctgagcggcgatgatatggaagcgctggcatttgcctggctggcggcgcggacactggccggtgaacccggcaatctgccgtctgtcaccggcgcagaccgggaaaccgtattgggcgcggtctatcctgttatccgccggcagccgtaa

SEQ ID NO: 273873 - DNA, 651 bp, Morganella morganii
atgtcagatgagtttactgacgttgcggatctgcgacgtgaatacaccagagggggcttgcgccgccgtgatctcagcgacgacccgctggaaatgttcgaacgctggcttaaacaggcgtgtgaggcaaaactgaccgacccgacggccatgtgtgtggcgaccgtggatgaaaccggccagccgtatcagcgcattgtgctgctcaagcactttgataaagacgggctgattttttataccaatatgggcagccgcaaggcgcagcatctggctaaaaatccgaaaatcagtgtgcatttcccgtggtacagcctggacagacaagtctgcttcctcggtgaggtggagcgtttatccacactggaagtggtgaaatatttccacagccgtccgaaagacagccagattgccgcatgggcatctcagcaatcctcgcggatttccgcacgcggtattctggaaggcaagtttcttgagctgaaacaaaaatttaagcagggtgatgttccgctgccgagcttctggggtggtttccggattaaattcagttctgttgagttctggcagggcggtgaacaccgtctgcatgaccgcttcctgtacacccgtaccgcagacggctgggatattgaccgcctcgcgccgtaa

SEQ ID NO: 273874 - DNA, 1275 bp, Morganella morganii
atgtctggtacgaacctgataaaacaactgcaagagcggggcctcattgcccaggttacggatgaaaaagcgttagcagagagactggcgcagggcccgatctccctctattgcggtttcgatccgaccgctgacagcttgcatttgggccacctggttccgttgctgtgcttaaagcgtttccagttagccgggcaccgtccggtggcactggtcggtggggccacggggctgattggcgacccgagctttaaagcaacggagcgcaaactgaatacacaggatacggttcacggctgggtggataaaatccgtcagcaggtttctccgttccttgattttgactgcggcgcgaacagtgctatcgcggcaaacaactatgactggttcggctcgatggatgtgctgactttcctgcgtgatatcggtaaacacttctctgtgaaccagatgatcaacaaggaagcggttaagcagcgtctgaaccgtgatgatgtcggtatttcattcactgagttctcctacaacctgttacagggttatgactttgcccgtctgaataaagatcacggcgttgagctgcagatcggcggttctgaccagtggggtaacatcacctccggtatcgatttaacccgtcgtctgaaccagcagcaggcctggggcctgaccgttccgctgataaccaaatctgacggtaccaaattcggtaaaaccgaaggcggcgcggtatggctggatccgaagaaaaccagtccgtacaaattctaccagttctggatcaacactgcggatgcggacgtctatcgtttccttaaattcttcacctttatgagcctcgaagacatcgatgcactggaagcggaagacaaagccagcggcaaagcaccgcgtgcccagtacgttctggcagagcaggtgacaaaactggttcacggcgaagcgggactgacggctgcccgtcgtatcactgacagcctgttcaacggagatgtatcaagcctgactgaagatgacttcgcgcagctggcgcaggatggtatgccgcatatcgaactggacagcgatgcggatttacagcaggcgctggtggttgcggaactggttccgtcacgcggccaggctcgtaccatgatcggctccaatgcggtgtctctcaacggcgaaaaacagtctgatgcggaataccgcttcactgacagcgacaagctgttcgggcgttacacactgctgcgccggggcaaaaagcattactgtctgatctgctggaaataa

SEQ ID NO: 273875 - DNA, 867 bp, Morganella morganii
atgaaaaatattctctctatccagtcccatgttgtgtatggtcacgccggtaacagtgcggctgaattcccgatgcgccgcatgggcgttaatgtctggccgctgaataccgtccagttttctaatcacacacagtatgcacaaggctggaccggctgcgtgatgagcgcagagcacatcacggagattgtggacggcattgataaaatcgatcaactgacccgctgtgatgcggtactcagcggctaccttggctcggcagagcagggcaagcgtatcctggatgtggtgaaaaaagtcaaaacccgcaatccgcaggcatggtatttctgtgacccggtcatgggacatccggaaaaaggctgtatcgtcgcaccgggagtggcggatttcctgtgtcaggaagcgctggcagtcagcgatatgatcgcgccgaacttgctggagctggaaaccctgagcggacaaactattcacaatgtgggtgaagccgttgccgctgcccgtgaactgtgcaaaaaagggccgcgtctggtactggtcaaacacctgtcccgcgccggttaccgtgctgaccgcttcgaaatgattctggtcactgctgatcacgcctggcatgtcagccgtccgctggtggacttcggcgaacgtcagccggtaggtgtgggcgatttaaccagtggtctgatgctggtgaatctgctgaaaggtgaagaactgccgaaagcactggaacacgtagctgctgctgtgtatgaagtgatgctgaaaaccaaaactatgaatgagtacgaactgcaactggttgcggctcaggatgaaatggtgcttccgacacacaaattctgtgctgaacagatcgactga

SEQ ID NO: 273876 - DNA, 606 bp, Morganella morganii
atgcaattgttctataccccgggaagttgtgcactgtcaccccatattattttgcgtgaaaccggcctggatttttccctggtccgtgtcgacctgaaagcaaaaaaaaccgaaaacggtgatgattacctgaaaattaatccgaaaggacaagtccccgcactgagtatcagtgacagtcagctgctgaccgaaggtgtggcgattgtgcagtatcttgctgatcagaagccggatcgcaagcttattgccccggcgggaacgatggaacgttatcatcagattgaatggcttaactatattgccagcgaagtgcataaaagctacggtccgctgttctctccggaaactccggaagattaccggccaattgcactgcgtaatctgatgaataagtttgcctatgtggacggcgtgctggcgaaaagcccgtatatcaccggcaacagttttaccgtagcggatgcttatctgtttactgtctgcggctgggctccgcatctgaagatttcacttgagccgtatccgcatttacaggcgtatctggcgaaaattgcccatcgtccgcatgtgcaggatgcgatggaagcggaaggtctgatttaa

SEQ ID NO: 273877 - DNA, 927 bp, Morganella morganii
atgaataaaatccgtatcgggatcgccgggctgggcgggatagcacaaaaagcgtatttgccggttctgaccagaacggataactgggtgctgtccggcgggttttcgccgaatcaggaaaaggcgcgtcaggtctgtgatgcgtaccgtttccctctgtttccgtcactctgtgcgctggcagaacagtgtgatgccgtgtttgttcacagcagtacagagagccattttcaggtggtcagcgaattactgaatgcaggatgccatgtgtatgttgataaaccgctggcagcatcgtatgaacaatcagaggcactcgtcagcctggcggagaaaaaacagcgggcactgatggtcggattcaaccggcgcttttcaccgttttatctgcagctcagagaacatattgccggaaaagcggcatcgatccgtatggataaacaccgcagcaacagcgtcggcccgcatgatgtggcttttactgtaaccgatgattatctgcatatcgcggataccctgctctggctgggacgggatggtaatgcggcactgaaaagcggccatatgcaggtgaatgaggaaaatcagctgctgtatgcggaacaccatttacagacagataacggcacctggctgacagcctctatgcaccgctgtgcggcgagtcagcgggagcaggtcagtgtgaccggacgtgacggctgttatcaggtgacggatatgaatcactggcgcagtgaaactgccgccgggatacaggaacagcatccgaaagcgtgggatccggtactggttcagcgcgggtttgacggtgcggtgcggcattttatcgaatctgttgccaatcagacacaaccgctggtcagcggcgaagaggcgctttatgcacagcggctgacggagaaactgttagcggaaaagatgtga

SEQ ID NO: 273878 - DNA, 789 bp, Morganella morganii
atgggttttatgaccggtaaacgcatcctgatcacaggtgttgcaagcaaattatcgattgcttacggtattgccaaagcaatgcgtgaccagggggcggaacttgcattcacctaccagaatgacaagctgaaaccccgtgttgaagagttcgctcagtctctgggctcctccatcgttctgccttgcgatgtggcggaagatgaaagtattgaaaacctgtttacagagttagccaaagtctggccgaaatttgacggttttgttcactccatcggctttgcccctgctgaccagctggacggcgactatgtggatgcggtaaaccgtgaaggcttccgtatcgcccacgatatcagcgcgtacagttttgtggcgatggcaaaagcctgccgcagtatgctgaacccgaattccgccctgctgacactctcttacctgggcgcggagcgcgctatcccgaactacaacaccatgggtcttgctaaagcctctctggaagcgaacgtccgttatatggcgaacgcgatggggaaagaaaccatccgtgttaatgcggtttctgccggtcctatccgtacactggcggcatccggtattaaagatttccgcaaaatgctgtcgcactgtgaagcagtcactccgctgcgccgtacagtcaccacagaagatgtgggtaacgcggcagcgttcctctgctctgatctggccggcggtattaccggtgaaatcctgcacgttgacggcggtttcagtatcgcggcaatgaatgagctggaactgaaataa

SEQ ID NO: 273879 - DNA, 810 bp, Morganella morganii
atgcccggtccgctgctggaagtcaaaaacctgagcaaaacctttcgttaccgggatggttttttccgccgtcatcagcttgaggcggtcaaaccagtcagttttacgctgcaacccggccagacactcgctattaccggtgcaaacggctccggcaaatccaccctcgcgcggatgttatccgggatgatcgaaccgagcggcggggaaatcctgatcgacaagcacaaactgacatttggtgattacagctaccgcagccagcgcatccgcatgatatttcaggattcggccacctcgcttaatccgcgtcagcgcacggggcaaatcctcgaactgccgctgatgctcaataccgatctggatgccaccggacgccgtctgcgtattaacgcgacactgcgccaggtgggtttgctgccggatcacgcggattattatccgcacatgctggcctccgggcagaaacagcgtgtagccctcgcccgagccctgattttgcagccggaagtgattgtggcggatgaagccctggcttctctggatatgtcattacgctcacagatcataaatctgatccttgaactccaggaaacgcaaaaaattgcctatatttatgtcacacagcatctgggcatggcaaaacatgtcagcgaccagatactggtgatgcataacggtgaagttgtcgagcgcggtaatactgccgaggtactggcgtcgccgctgcacgatgtcacgcgccgccttatcaccagccactttggtgaagcactgtccgccgaagcctggcgccgggatgtggattaa

SEQ ID NO: 273880 - DNA, 993 bp, Morganella morganii
atgccgttactggatatccgcaatttaaccattgaatttatgactgccgcagggccggtcaaggccgttgaccgcgtgacattatccctgaccgaaggggaattccgcggccttgcaggggaatccggttccggtaaaagtctgatcgccaaagcgattgccggtatcaccaaagataatctgcgcgtaacggcagaccgtttccggtttaatgatatcgatctgctgaaactcacaccccgccagcgccgccgggtgatcggccacaatgtatcgatgattttccaggagccgcaatcctgtctggatccgtcagaaaatatcggtaaacagctgattcagtccatccccggctggacttacaaaggccgctggtggcagcgttttaactggcgtaagcgccgggcaattgaactgctgcaccgcgtcggtattaaggatcataaagatgtgatgagcagctacccctacgaactgaccgaaggggaatgccagaaggtgatgattgccattgcgctggctaatcagccgcgcctgctgatcgccgatgagccgaccaacgccatggaacccgatactcaggcacagattttccgcctgctgacccggctgaaccagaacaacaatatgactatcctgctgatcagccacgatttgcagttaatgagccagttggtggatcgcattaatgtgctctactgcggccagaccgtggagagtgccgagccggatgacctgctgctcaaaccgcaccatccgtatacccaggcactgatgcgggctatccctgattttgaaaaggcgctggcacataaatgccgcctgaatacccttccgggcgcgattccgtcgctggagcatctgccggtcggctgccgcctggggccgcgctgtccgtatgcccagaaagtgtgtattgacgcgccgcgactgcggacagtcaaaaaccgcagttttgcctgtcacttcccgctgaatatggaggatgtgtaa

SEQ ID NO: 273881 - DNA, 891 bp, Morganella morganii
atgccttcagataatttctaccgtgaagaccggatgccgtcaccggggcgggttatctggcagcatttcaccgcagatattccggctatgatcggcttttacggcgtgctgtttctgattgcactggcgatcggcggtacctggatagccccttatgcgctcgaccagcaatttgccggtcatcagttactgccgccttcctggtctcattacgggaatgtcgccttcttcctcggtacggacgatctcggccgtgatattttcagccgtctgatcctcggtacacaatccaccttcggcggtgcactgcttgttaccatcattgccgccgtcgccgggattatcatcggctgtctggcaggaatgaccaccggtctgcgctcagccatttttaaccatatgtttgataccctgctggcgctgccctctctgctgctggcaattattgtggtggcttttttcggcgccagtctcagtcacgccatgattgccgtggcactggcactgctgccgcgtattgtgcggatgatttatatcgcagtacatgatgagcttgataaggaatatgtgattgccgcccggctcgacggtgcgtccaacctcaatattctgatccatactgtgctgccgaatatcagtgccgtgaccgtcaccgaactgacgcgcgctctgtccattgctatccttgatattgccgcgctcggttttctcgagctgggggcgcagctgccgtcaccggaatggggggcgatgctcggggattctctggaactgatttatgtggcgccctggaccgtacttctgcccggaaccgccatccttatcagtgttctgctggtgaatctgctcggtaccgggttacagcgcgccattaatgcgggggttgaataa

SEQ ID NO: 273882 - DNA, 966 bp, Morganella morganii
atgattatttttattctgcgccgtctgctgctggtgctgatcacgctttgttttctgtcggtgctcagcttcagcctgagttacttcccggcaaatgcgccgctgagcggcgcttccctgacggatgcggtactgttctactataagagtctgttttcatgggacttcggcagttccgtgattaacggtgagccggtcagccagcaattgtgggcagcactgcccgcaactctggagctatgcggcctggcgtttctgctggcgctggtgatcggtattcctgccgggattattgccggggtctggcgcaataaaatggcggatatcgtcatcagcacctttgcactggtcgggttttctgtgcccgtattcgggctggcactgctgcttaccctgttcttctctctgcggctggactggctgccggtctccggacgtattgacctgctgtatgatttaacaccggttaccgggtttgctgtgattgatgcctggctgtcggattcaccataccggcaggcgatgatcctcaatgtgctgtctcatatggtgttgccggtgatcacactgtccattgcgccgatgacagaagttatccgcctgatgcgcaccagtaccgaagagattatcagccagaactatattaaagccgccgctatccgtggtttatcccggctgaccattatccgccgtcatttgctgcacaatgcactgccgccggtgatcccgaaactcgggttacagttttccaccatgctgacgctggcaatggtcacggaagtcgtctttaactggccggggatcggccgctggctgatcacggctatccgccagcaggactttgccgcgatttccgccggtgtcatgctggtcggcactatggtgatgattatcaatatgctgtcggatattctgggtgccgtcagcagcccgctgaaacataaggaatggtatgccttcagataa

SEQ ID NO: 273883 - DNA, 1689 bp, Morganella morganii
atgcgccattggattatccgggcctgtgcggttctcctgcctgtttcaggctttgccgccgcacctgccccgcagacagaccagccggtaaaaccggtcacggctcaggccgctccgctgccgccggtccgcaataccggttttgtctattgtgtgaacggcaacatcagtacatttaacccgcagctggccagcagcgggctgattgtcgagccgctggcggcacagatttacgatcgcctgctggatgttgacccttacacctaccgcctgatcccggaactggccgcccgctggacagtgctggataacggcgcgacctaccgtttttatctgcgccgtgataccgattttcagactactgactggtttaaaccgacccgcaaaatgaatgcggatgatgtggtgttcagcttttcccgcgtggtggataaacagaacccgtatcactatatcaacggcggccgctatccttattttgacagtctgcagttcgcgtccaatgttaaatccatccgcaaaatcaataattataccgttgaatttaaactgaatacgccggacgcttccttcctgtggcatctggcaacccattacgcgccggttctgtccaaagagtatgccgataacctgctgaaagcccgccgtcaggaacagctcgactggaaaccggtcggcaccgggccgtattatctggatgattaccagagcggccaatttgttcgtctgcagcgccatgataattaccgcaaaggcaaaccccgcatgcaggaagtggtggttgatctcggggcgggcggcaccggacggatgtcaaaactgatcaccggtgagtgtgatgtgctggcctatcccgccgccagccagttacaggtgctgcgcgacgacccgcgtctgagcctgatgctgcgcccgggaatgaatatcgcgtatctggcgtttaataccagtaaaccgccgtttaataatccgcaggcgcgccgtgcaattgctttcgcgattaataatgagcgcctgatgaaatccatctattacggcacggcggaaaccgccgcgtctattctgccgcgcgtctcctgggcgtatgataaccaggcccgggtgacggaatataatcccgaaaaagctaaagcgatgctcaatgagctgggactcagcggtatgacactgaatctctgggtaccgaccgcctcgcagtcttacaaccccagcccgctgaaaatggccgagctgattcaggcggatctggcccgtgccgggataaaaatgaatatccgtccggttgaggggcgttttcaggaaaacagcctgatggatcgcagccacgatattacccttgcaggctggtcaaccgacagtaatgacccggacagttttttccgtccgctgctcagctgtgcagctatcggttcgcaaaccaacctcagccactggtgttccccggaatttgatgatgtgatccaccaggcgctgcttgagcagcaactgagcagccggatagagtattatcacaaagcgcagcagattctggcacaggatctgccggtactgccgctggcctactcactgcggttacaggcattccgctatgatattaaagggctggtactgagcgcattcggtaatacctcttttgccggtgtctaccgtgataccggggatgacccggagccggaggctgaaccatga

SEQ ID NO: 273884 - DNA, 987 bp, Morganella morganii
atgaaaaataacacagaaaccctgatcggtatcgataatacctttctcgatgcactggaaaaagtgtcgcggctggcaaaaattgcccggccggtactgatttgcggagaacggggtaccggtaaagaattatttgctcaccgtcttcattatctctctccccgctgggatgagccatttatcgcactgaattgtgcggcacttaacgataatttgctcgattccgagctgttcggacatgaatccggggcttttacgggggctcagcgccgccatcagggccgttttgagcgggcggacggcggcacactgtttcttgatgaactgggtaccgcgccgctgacggtgcaggaaaagctcctgcgggtgattgaatacggggaatttgagcgtgtcggcggacaacagaccctgaaagcggatgtacggattgtctgcgccaccaatgcggatttaccggcgctggcggcagagggaaaattccgcgccgatttactcgaccggctggcctttgatgtcgtcaatatcccgccgctgcgcgagcgcccgcgcgacctgaccgaacttgccggtcattttgccgtgcagatgtgtcaggagatgggcacgccgttctttgccggtttctctccgcacgccctgcagcagatgcagagctatcactggccgggcaatatccgtgagctgaaaaatgtgattgagcgctccctgtaccgtcagggagataccaccgaactgctggcagaactggtgatcaacccgtttgtcaccgcgccgggatcttctgcggacacggcatcacgatccctgccgccgctgccgttctccctgaagcagtggcagcacacacaagagaaggacgcgctggatgccgcattacagcgcgcgcagtttaatcagcgggaagcagcacaactgctgaatctgacctatcatcagtttcgcggattactgaaaaaacatgccggcagcccgcaaccggattaa

SEQ ID NO: 273885 - DNA, 675 bp, Morganella morganii
atgggaatcttttcacgttttgccgatatcattaacgccaacgttgcatcactgctggataaagcggaagatccgcagaaaatgatccgcctgatgattcaggaaatggaagatatgctggtggaaatccgctccacctctgcccgtaccctggcggaacgcaaaaatctgtcacgtcagattgaaagcggtgagcgtcaggtgagtgactggcaggaaaaagcggaactggcgattgtcaaaggaaaagaagatctggcccgtgccgcactgctggaaaaacagcgcgtggaaggccatgtcgatacactgcgtcatgagctgattattctggacgaaactatcgcccggctgaaaaatgaaattaacgaactggaacagaaactgactgaaacccgtgcccgccagcaatccatggtggtgcgtcacgaagcggcaaaatcatcccgtgcggtgcgccgtcagctcgacagcggccggatggatgaggcaatggcccgttttgagcagtttgaggcgcggattgaccatatggaaggtgaagccgcaagctatggtctggggaaagaaaaatcactggaacagcagtttgccgagctgaaagcggaagatgagatcagcgcgcaaatcgcggccatcaaagcacgtcttgaaaaagaagaaaagggcgaataa

SEQ ID NO: 273886 - DNA, 222 bp, Morganella morganii
atggcatttgtatttttaggtataccactgacaattttcgtgttgttcgtgctgccgatctggttatggctgcactataacagtcagcggggaagccgggccggtgaatttgaaacccgccgccttgcggcgctggcggaaaatgctcagcagatggaagcgcggatcaaaaccctggaagcgattctggatgcggaaaatccgggctggaggcaatcataa

SEQ ID NO: 273887 - DNA, 354 bp, Morganella morganii
atggaatttcagtcacgtaaactgtaccgctatccggatgaaggtatgttccggggcgtatgtgccggtattgccaactattttgatgtaccggcctggatgatccgcattatcgcggtggtggcaacatttaccggctttttctggctgactattaccctctatattctgatgggaatgatcctgccggtggtgccgcgtgattaccccggccgggacggcggagtgaatgcggccatgctgcttgaacagacagaacgcagccaggcgcgtaccgaaaaacggatccgcgacattgagcgctatgtgacctcagaacagtatgcgctcaaccgccgcttccgtgatctgtaa

SEQ ID NO: 273888 - DNA, 237 bp, Morganella morganii
atgaagtggccggataaacacaccctgctgcgggccgggaaaaccggggcgcagctgttaaccgccgcagcactggcggcggcacccggcggtattgccgcggtgattctgaaatcggtaacccgtcctgctctgcgcggggcggcaatacttgtactggaaccagttatccgtgccggtatgaaaaaagtgattggccgttttacaccggagaattatgaaacgactgcaaaatga

SEQ ID NO: 273889 - DNA, 1398 bp, Morganella morganii
atgaaacgactgcaaaatgagctgagtgccctcgtcaaccgggggctggatcgtcatcttcgtcttgccgttaccggactgagccgcagcggcaagaccgcgtttattacctcgtttgttaatcagctgatgaatgtacagagcggtgcacgtctgccgctgttttcggctgcccgtgacggccgcattctcggtgtgaaacgcatcccgcagcgggacctgggcgtaccacgctttgcctatgatgaaggtctcgcttcactgtacggcacaccgccggactggccggtgccgacacgcggtgtcagcgaaatccgcctgaaactgcgttaccgcactcaggacagtctgctgcgccactttaaggaaacctccgcgctctacctggaaatcgtcgattatccgggagagtggctgctggatctgccgatgctggaacaggattaccttacctggtcgcagcagatgaaaaccctgctcaaaggcgaacggggtgaatgggcagagccgtggctggcactgtgccgtcagctggacccggatgccccggcggatgaacagcagctggccgctattgcacaggcctataccgattacctgcaccgctgcaaagccgcaggttttcactttatccagccgggtcgttttgtactgccgggagatatggccggtgcaccgggattacagtttttcccgtttattaccgacctgatgccggatccgtcccggctggccaaagcggcaaaaagcagtgtcctcggcatgctgcgcgatcgctatcagtattattgtgaccatgtggtcaaaggtttctataagcactatttccagcattttgaccgtcagattgtgctggtggattgcctgaccccgctcaacagcgggccgcaggcatttacggatatgcgtctggcgctgacccagctgatgcagagcttccattacggtaaacgcacattattgcgccgcctgttttctccctgcatcgacaaactgttgtttgccgccagcaaagcggatcatgtcactgccgaccagcacgccaatcttgtggcactgcttcagcagctgacgcagtcagcctggcagcaggccgcttttgaggggattaaaatggactgcaccgggctggcgtcggtacaggctaccgaatacggcatggtgatgcataacggggaaaaaatgcctgcgctgaagggcacccggctggcggataacaccccgctgactttctatcccggcgaagtaccgaaacggctgccggatgcagacttctggcagcagcagggatttcagtttgaatccttcagaccgctgccgatgcggatggacacgccactgccgcatatccggatggacagtgcgatggaatttttactgggagataaactgtcatga

SEQ ID NO: 273890 - DNA, 1071 bp, Morganella morganii
atgagtgagccgatcaaatcccgtattgattttgaggaagcaccgttgtcgccgccggtacaggacagtataaaaccggcgcaacaatttgcggacgatgacagcatacagtttgaacgcacggagttcacggcagagcaggatacagacggggaagcggaagcattgctgattcaggcgctgaaaccccggcgcagcctgtggcgtaagctggtctttgtggccggcggattgctggggatcagcgccatcgcacaactgattcagtgggtgaatgatgcctggacaggcaatgactggacagccctcggcggcattgccgccacctttctggtgctgattgccgctgccggatctgttatcacggaatggcggcgcatgtaccgcctgcgccagcgggctacagaacgcgaggtcgcagaggaattactgcaaagccaccgtatcagcgacggacgcgcgttttgtgaaaaactggcgaaacaggccaatatcccgtcacaccatcccgcattgcagcaatggcagagcctgttacagagcagccataatgaccgcgaagtggtgaccctgtacagtcagcttgtccagccggtgacggatgaacaggcgcgccgggtgatcagtcgtttcgcagcggaatctgcgctgatgattgccgtcagcccgctggcactggtggatatggcctttattgcctggcgcaatatccgtctgattaaccaggtggcggctatctacggtattgagctgggatattacagccgcctgcgtctgtttaaactggttctgctcaatattgccttcgcaggggcatccgagcttatccgcgaagtggggatggactggctctcccaggacatcaccgcacggttatccgcccgtgccgcacagggtatgggggccgggttgctgaccgcccgtctggggatcaaagcgatggaactgtgccgtccgctgccgtggactgcaacagataaacctaaacttatggatttccgtaagcagttgttacaacagcttaaacaggcagtaccaaaagggaagagcgcggaaaaatccgccctgtaa

SEQ ID NO: 273891 - DNA, 1587 bp, Morganella morganii
atgcgattggaagtaatttgccaggaccgaatcggactgacgcgggagttattggatctgctggtattacaaaatatcgacctcaaaggcatcgaaattgcccgtaatggccggatatacctcaattttatgcagatcgatttttctgtgttccagtctctgatggctgagatccgccggattcagggcgtggtggatgtcagaactgttcactttatgccgtctgagcgcgaacaacgcgccatgtgggcgttactcgaatccctggaagacccgattttatctctcgacctgcgcgggaatattgaactggccaacagcgcggcactctccctgtttgccaccaccgaagagcgcattcgacagcgcaatatcacttactatttcagccagttcaacttcacccgctggattgaggatgaagaacctgcgccgtacaaggaaaccatcactctcaaaggccgctcttacaccctgagtgtgacgccgattaattttgatgagaaagatgacgcctccgccactatcggcgcggttgtgctgctgcgcactgtcagtgagagcaccagcgggcagaagcgccgcatgcaggtgatgcattccggcagttttgatgacctggtggcgaaaagcgccaaaatgcgccatgtggttgaacaggcgcagcgcatggcaaaaatggactccccgctgctgctggtcggcgaaaccggtaccgggaaagacgtgtttgccaaagcctgtcatctctacagcgtgcgcggcaatcagccgttcctcgggctgaactgtgcctcgatgccggatgatgtggtggaaacagaactgttcggttacgctgccggtgcttacgccaatagtaccgagccgaaaaaaggcttctttgagcaggccaacggcggcacggttctgctggatgaaatcgcggaaatgtccccgcagatgcagatcaaactgctgcgtttcctgaatgacggtacattccgccgtgtcggggaagagcatgaggtgaaagtggatgtgcgggttatctgtgcgacccagaaaaatctgctggaactggtaaaagagggcaaattccgtgaggatctctattaccgtctcaatgtgctgacgctgactattccgccgctgcgtgagcatcaggaagatatcctgccgctgacccgtgattttgtgaagcgtttctctgaggagcagggttgtgaggagccgcgtcttgcaccggaactggggcagtttctttgtgcttatcactggccgggcaacgtccgccagctgcgtaatgtgatttatcaggcgctctcttcgctggaaggctcgctgctgcgtccgcaggacatcgttctgccggaactggaagcggaaatcggcttcagtgaggatatcctcagcggctcgctggatgatatcaccaaacggtttgagtgctctgtgctgacacggctttaccgccactatccgagcacccgtaagctggcgaaacgcctgaatgtctcacataccgcgatcgccaataaactgcgcgaatacgggctgagtcagcggcgcggcgcggcaaaagacgatgagggagaggaggaataa

SEQ ID NO: 273892 - DNA, 504 bp, Morganella morganii
atgacacaaactgtaaaacttcagggtaatgatgttctggtttacggcgcactgctgcgtgccggtgaaaaagccgtaccatttaaattagtcgctaatgatttgtcagatgtccagctcaccaaattcgccgggaagcgtaagattctgaatattttcccgagtgtggacaccggtgtctgcgccgcctccgtgcgcaaattcaatgaaactgccgcaaaactgtccaataccgtggtgttatgtatttccgctgatctgccgttcgcgcagtcccgtttctgcggcgcggaaggtattgagaatgtggtgatgctctccaccctgcgtgatccggaattccgtgaaaattacggtgtcggtatcggcagcggcccgctggccggtctgtgcgcccgtgcggtgatcgtgctggatgagaatgatactgtgatttacagccaactggtcggtgaaatcaccgaagagccggattatgacagcgcactgaatgcactgaaataa

SEQ ID NO: 273893 - DNA, 1635 bp, Morganella morganii
atgttcaggccagcaaaattttcccgttccgcacttcttgcagggacgtttttcacgttttcttcactgttttgtgcaacggcggcggagatccccgcaggaacacagctggcaaaagaacaatctgtttatcgtcatctgaaggatgaacccgcgtctctggatccgattaaagcggtcggtctgaccgaagcccagattttgcgtgatttatttgaagggctgaccagccagggtgcggacggcaaaccggtgcccggtgtcgctctctcctgggagacccgcaacaatcaggtatggacattccgcctgcgtgacgatgcccgctggtcagacggctcaccggtgaccgcacaggactttgtctacagctggcagcgcctggtgaacccgaaaaatctctctaccttcgcctggtttgcaccgctggccgggattaaaaatgcacaggcgattattgacggaaaaatgctgccgaaaaccctcggcgttgaagctgctgacagccggacactgcgggttacgttagaccgtcctgtgccgtatttcccgggcctggcggccaatttcagccttttcccggtcaatcgtgctgctgttgagaaatatggcgacagctggatccgcacagggcatctggtcggcaacggggcatttgtcctgcatgaccgggtggtgaatgagaaaattgttctgacaccgaacccgtattactgggatcacaaacacacggtgctgacatcggttacctttgtaccgattaaccatgaatcccaggccaccaaacgctatctgtccaatgacctcgatatcacagagtctttcccgaaaaaccagtatcagaaactgaaacaggcgattccggatcagatttatatcccggatcagctcggcacctattattatgcctttaacacacagcgtgcaccgacaaacgacccgcgtgtgcggcaggcgctttccatgaccattgaccgcgcagtgatcgcagagaaagtgctgggtacaggcgaaaaaccggcctggcatttcacgccggatgtcaccgccgggtttacaccggaaccgggtctgtaccagaaatttacacaggatgagctcgacagccaggcgaaaaccctgctggccgccgccggttacgggccgcataatccgctgaaattatccctgctgtataacagttcggaaaaccatcagaaaattgccattgccgtcggttcgatgtggaagaaaaaactgggcgcggaagtgaaactggtcaatcaggaatggaaaacctatatcgacagccgcaataccggcaattttgatgtgatccgcgcctcctgggtcggggattacaacgagccgtcaaccttcctgtctctgctgaccagtacacacagcggcaatatcgcgcagtatcataatgaaaaatatgacgctttgctgaaaaccgctgcgctggaaacagatgataacgcccgtaataccgactataacgacgccgaaaaactgctggcggaagacatgccgatagcaccaatctaccagtacactaacggccgtctgattaaaccgtggctgaagggatatccggtcaataatccggaagatgtggcatacagccataatctctatattattaaacactaa

SEQ ID NO: 273894 - DNA, 984 bp, Morganella morganii
atgagcgctttgtacggatccgcttttcagggaacagatcccatctgccgggtacagtttgacggcgaaggcggttgcacgccggtggatgtcaacgccgttgccgggataaaagaaccggtgtggctgcacctggactatttatccgcggataaccagcgctggctgcgtgaaacggagctgttgccgccgcaggcgcgtgacgggctgacaaacaatgttatccgccccaggacactccgtattggtgagggtgcattaattaccctgcaaaccatcaacaataatgacggcgaccggcctgatcagctggtggcattccgtatctggatctgcggcagttatattatctccacccgccaccgtaaagtgcactccattcagaccattcaggatgatttacaaaacggtgaaggcgcaaaaaataccggagaatggctggcggaagcggcgttctgcattaccgacgaagtggcagattttattgaggacttgcacgataccctgattgatatggaagatgcgatactcgatcagcatattccggcacgcggggagctggcactgctgcgcaagcagctgattgtcctgcgccgctacatggcaccgcagcgggatgtattttcccggctggcctccgagcgttacacctggctctcagagcaggacagacatcagctgacggatgtcagtgaccgcctggggcggattattgacgatattgactcctgtatcgcgcggacatcggttatctcggatgaaatcaccaatatgatggcggatgcgatgaaccggcgtacttacaccatgtcgctgctggcgatggtttttctgccgacaacctttctgaccggattgttcggggtcaacctcggcgggatcccggggggcgatttcccgtttgccttcagtttgttctgtgtgggactggcgggtgttatcggatttgttgcctggtggttacgtaagagtaactggttgtaa

SEQ ID NO: 273895 - DNA, 927 bp, Morganella morganii
atgaatacaccgaaagaacagtacaacatcaataagttgcaaaaacgcctgcgcagccataccggcaaagcaatcgcagattttaatatgattgaggacggcgaccgcatcatggtttgcctgtccggcggcaaagacagttacaccctgctttccattctgcagagcctgcagcaaagcgcccccatccgtttttccctggtggcggtgaatctcgatcagaaacagccgggtttccctgagcatattttgccggaatatctggaaaaactgggcgttgaatataaaatcgtcgaagaaaatacctacgggattgtgaaagagaagattccggaagggaaaaccacctgttccctctgctcccgtctgcgccggggtattttgtaccgcaccgcgactgagctgggggcaacaaaaatcgcccttggccaccaccgcgacgatattctgcagaccctgttcctgaatatgttttacggcggcaaactcaaaggcatgccgccgaagctgatgagtgacgacggtaaacatgtggtgatccgcccgctggcctattgccgtgagaaagatattgagcgtttcgccgaagccaaagggttcccgatcattccgtgtaacctgtgcggctctcagccgaacctgcagcgtcaggttatcaaagatctgctgcgcgactgggataaacgctatccgggccggattgaaactatgtttcgtgccacacagaatgtcgtaccatcacatttatgtgacactgaattattcgatttcaaatctatccatcacggcagtgaagttgtcgacggcggtgatctcgcgtttgaccgcgaaactctgcctgttcagccggtatgggaagatgaggatgatgacggcgatagcccggatttcacagaattacgtctggatgtgacggaagtgaaataa

SEQ ID NO: 273896 - DNA, 342 bp, Morganella morganii
atgaatgagagagaaatcagcctctttatcggtcagcaaatttcacggaaaagaaaatcgctgggattatcaggtatggcgcttgctgaattactgggtttaagtcagcagcaaatatcccgctatgaacagggcattaccaatataagagccagcacattactgcaaatcgcttttttgtttaatgttgacgtgaaaagtttttttactgattgtatcgaaaaaaacagcaaactgagttcacttaactataaagagaaaaagagtcaggaaacagactatgacacgatcactattgacatgaagaacagaggaaggggtaaaatccgcagtaaaaaataa

SEQ ID NO: 273897 - DNA, 378 bp, Morganella morganii
atgcagcccgataattgccacgcacttagttgtcaacaccaggtctttaaaaaggagcttcatgcagttataggccaggaaattaaaatattacgaaaatcaaaaggtatcaccggccatgagttaggctcaataatacagttatcgcagcagcagatatcccgttacgagaatggtgacagtgctattccgctggatacactgatattaatactgcgtatttttaatatatcgccggagaaatttatacacagagtattatttatcttaaacagagacccggattcaaaaaaactattatcccatatgtcgaatcatcttaattcttatactgacggcagttatctgggaacatttgaacaatataaacataattaa

SEQ ID NO: 273898 - DNA, 345 bp, Morganella morganii
atgtctgtcagcaataagactgtttattctgtatgctccagattaaccctgatggttatgaagctgaccggccttgagcgggttattactgtcggccagtattttgagcgggcaacagataaatcactccttcagcgactgattgaagaaaacagagatctcagcacaccgttctcagcactggataaatcaaacaaggactgcaaaattgagctgattgaatatctgaatacagcaatccgtgagtacgctgcatccgaaataaaggaaaactacgctgcactgaaaaacggtaatctgctggttgtaaaaacattcaatacgattatgcaaaatcacgcttaa

SEQ ID NO: 273899 - DNA, 195 bp, Morganella morganii
gtgactaaaaaaatactgagcctgtttattgtactggttctgtccggatgtgtttcacctggtacacaaccggaaaaatatgaaaagaataacgatgatccttataaaaacagcacagtaaatactatccgtgaaaatcaggagatttacagggagcaactgagaataaaacaatacaccggcggagagggataa

SEQ ID NO: 273900 - DNA, 600 bp, Morganella morganii
atgacagttattgagaataatcatgagtataccggcagccggtttgaaaaagccgatctcagtgatcagacaatccgtggtgtggtgtttgaggactgcacatttatccgctgtgatttcagctcggcggttgcgcagcagtgccgtttcactgactgtgtgtttgagcagtgcaatatgagtctgctggcagttccggaaacccggttttccggcactgaatttaccggaacgaaaatgattggtattgactggacaaaagcatactggccgaagtttgatttttattctcagctggtgtttaaagagtgtattttagacagtaataacttttttgacctcagattacatgaatcgcactttgaatcctgccggatccataatgccgatttcagacaggcggagctgaataaatctgtcatgcaggattgcgatttaaccgacacgctgtttatgcacactaatctggaaggggcggatctttgcggttctcactctttttatatcgatattcgtgaaaacaaaactgccaaagccacattttccgcatacgaagccctgaatctgctgcgggtgcttgatatccgtctggctgattaa

SEQ ID NO: 273901 - DNA, 573 bp, Morganella morganii
atgtatacgggcggggcaatgagaaaatttattctgtcagggattatggccgcattattatccggctgcgcaggtaccggaagtaaaacaccggaagcaccctggggctttacatgggggcagacgcccgcagaattaaaagccctgaatctggacgattttgattgcacaaaaacccgtgatggcgggcaattatgcagctcactggcatcaccggatgttgaaaagcaattctttatgatggtcttttcaccgggagggcaaaaattaaatgcaatatcccgttttggtgtctggagccatgatcaggccgcattactgaatgagtacgataaagtaaatgcggagatggagaaaatctacggcaaaccggccgggataaatgaagaatatgatcgcaaaacgccgttcctggcaaaagtcgccaagggaaaaatcggtcagtttaagcgcaaatatgaatcagaagataccgaggttgtggtgggcgtggtcagtaatgccaatctggtacagataaatgatgaaaaagatgtcacttatactgtgctgaccatgtatacactgaaataa

SEQ ID NO: 273902 - DNA, 1293 bp, Morganella morganii
atgaaatttattaatcgttacagtgcaattgcactggctgttggtatgttgtcactgaatatgactgcacaggctgagactgtttccctgaatgccgctgccgcaccgcaggctgtgacagaaatagcggtgttacagcaggggcagtgggacagttttaataaacagcgcctggatgccatgatcgccaaagcaaaacaatcaccggcacatacctattatgcggtgtttgactttgataacaccacggcatttctggatattgaagaagcggtgatgatttatcagcttgaacacctgttatttgccatgacaccgcaggaactgaaatctgttattttcaaagatattccggccggcaatttttccgctgagttcaacaataaagatggtaaaccggtcaatattgagaaggtcggagctgatattctggaaagttaccagtggctgtatgacaactatgatggtctgaagggtgataagccgctgtctgaaattaaaaaatcgccgcattatcagaatttcatcaccaaaatgcgctatttatatgcggcaatcggcggcacatttgatcatgccgtttcctatccgtgggtcacctatttatttatgaatatgacaccggagcaggttgcggatattaccgctaaaaccattgaatggcagaaatcagagccggttgaaggcgtggtatgggaaagccctgaatcgttaccgggacaggcgggtattgttgaaattgactggcataatggtttccgtctggtgccggaaatgcaggatctgtatcaggtgctgcaaaaatccggtattgatgtctatgtgatttccgcatcgaacctggaagtgattaaatcgattgtcacacaaccgccgtattctgtaccggagtcacaggtatttgccatgcatttactgcgcaccaaagataataaactgacatccgatctggatccggtttatccgcagactcagggcaaagggaaaacagagactatccgtaagtttattcaggataaatatgccggtaaagggccgttattagtcgccggtgacagtgaaggcgaccagaatatgatgtctgacttccctgatacggatgtggtgctgattattaaccgcctgcgttcaccggatagcattatcgggcagttatcaaaacaggcagttaaagagcacggtcaaaaggatgccaaagtattattgcagggacgtaatgacagcaccggtgtatttgtaccgtcacagcttcataccccgttgggtgccaaagaagggcgggcgttaaaataa

SEQ ID NO: 273903 - DNA, 204 bp, Morganella morganii
atggataaatatattgtgtgttatgaaggtctggggttaaccggctcggtactattccgcagccatgtggctattaataccgatatcagcagaacggaagcggaacgttttatcgcgctgtttcacaatgccgctgccgccgatgcggcaaagcataatattaacgcggcacgttatgttatcgtgaatatctgtaaactgtag

SEQ ID NO: 273904 - DNA, 1569 bp, Morganella morganii
atgtccgtacaatgccatttttctcacttatcagtgacatttaacgatattccgctgtttgataacatcagcggtacattaacccgtcaggttcaggggctgaccggtcataacgggcgcggtaaatccgtactgatgtcgctgctcgcacagcagcggcaaccggcctccggcacgatcagctggcaggtaccgttttattatgtgccgcagctgacccgcctttccggtatcacactggcggatgcactcggaaccgcagaaattctggccgcactgcgccgcacagaggacggcaccgccaccgcggaggattatgattttctggcggataaatgggatatgccgcgacaacagcaatccctgctggaaagtgcgcagctggcgcatctcccggcggacaccctctgcacaagtctgagcggtggtgagcaaacccggctggcactctgccgcgcctttttgcagccgcgcgcctttctgttactggacgaacccggaaaccatctggatgccgccggacgctgctggctgagtgagcaactgcggaatcatccggccggcgcactggtgatcagccacgagcgccgtttgctcgacaccatgcagcgaatttttgaactcacgccgtcagcactggaagagtacggcggcaattacacccattatgcggagcagaaagcctttcagctcagcgcattacagagtgaagaaaaacagttacagtcgcagctgaacagagaaaaaacggagttgcagcgcacactggaaaaaaaggcgcagcgccgccgtcagggagagaaagtccgtttatccggctcctcctctgccctgctgctggatatgaaaaagaataaagcagagaaacaacaatcaaaaataaccggccgccatgaccgggttatgactcagcgggacagtcagcgccgggaggtgaatgagaaaatacagcatatcaccccgcagatgctggcctttaattataccggagagcaaaaacgggtgcggatcaatgcccgtgatctgattttaccgtccggcacacaggagccgctgtcgctgactatttccggcggtgaacactggcatattgccgggcgcaacggctgcggaaaatccacattactgaaagtactggcgggcctgctcactgcaaaatccggggattactccctgcacggccgtctgcgatatctggatcagcatctggcgctgctgaataaagccctgccggtcacagaagcactgtgtgagtttgatcctgccattccggcacagacctggcgcacccatctcggggcattgcggatcaggggtgataaggggttaattccgttgtcacagttaagcggcggtgaacagctgaaagttacattgctggcattaacattatccgaacctttgccggatattttattgctggatgagccggataatcatctggatctcgattcccggttattactggaaaatgtgctgcgcagttataaaggggcattattactggtcagtcatgatgaggcatttactgaaaattgtgccattacccatacactggcattatcctga

SEQ ID NO: 273905 - DNA, 444 bp, Morganella morganii
atgagttcagcagaaacggtatatcaggttgatcagaaacaccggattatcacctgtgtgattacattctttgtggttattgtgctttatatcgcactggcatacttatttcagacacggatgccgggtgtggctgccgcactgggtctgacggtgtatgtctatatcgcgcagttcccggtgattaaagtgtacggcgataaactgacatccaaaatcgctgtcggtaaagtggtggcaatgccgtttgacggcgggcatttctccttacaggaagtgaaggggctgaaagcgttaatggtctcgttttccacggactcttatattctgagctatcatccggcaaacagccgccgtgtccgtattgtcggaccgacactgaaaaaggcacagttaaaagcgatttttgacgccatcccggaacagtcaaaacgcgcgttataa

SEQ ID NO: 273906 - DNA, 1221 bp, Morganella morganii
atgactgaaaccctgtcacgaaatcaggcctggctgcgggtaatggtacttgcggtggcggcatttgtatttaataccactgaatttattccggttgcactgctgagtgatatctcggcgggtttttcgatgcaacccgcagagacaggactgatgatcaccatttatgcctgggtggtggcgctgacgtcgctgccgctgatgctgctgacggcgcgtattgagcggcgcaaattactgctctggctgtttaccgtatttgttataagtcacattgtgtccgggctggcacagcgttttgatgtgctggtggtcagccggatcggtgtcgcactggcacatgcggtattctggtcgatcaccgcgtctctggccgtcagggtggcaccgcccggtaaaaaatcccaggcactggggttgctggcgaccggcacggcgctggcaaccgtactggggctgccgattggccgtgttatcgggcagtgggttggctggcggatgacgttcttctgtatcggcggcctggcgttgatcaccatggcggcgatggcgcgttttcttccgctgttgccgagtgagcattccggctccctgaaaagtattccggttctgttcagacgaccggcgttagtgggaatttttgtactgaccgcgattgtggtaaccggacatttcaccgcttataactatattgagccgtttgtgcagaccgttgccgggaagtcacaggatttcgccacgctgtttctgctggttttcggggcggcggggattatcggcagtgttattttcagtcgttacaacacccggctgccgctgctgtttctgcctgcggcgataacattactgacggtatgcctgatgctgctgatgaccagccgcgtgactgataccgcgctgattatcctcggtgttgtctggggtatcggtatgatgtgtaccgcgctgggattacaggtcaaagtgatcgatttgtcaccggatgccaccgatctggcgatgtctgtttattcgggcatttttaatatcggtatcggcggcggggcgctgctgggtaatcaggtgattattcatatgggaatggaagagataggctatgcaggggcggtgtttgccgtggcgggtgtgcttatttcactgtttgttttcagtcgttaccgggccttgtttatacaaaggccgaaagcggaaagccgtattacctctcataatccgacataa

SEQ ID NO: 273907 - DNA, 333 bp, Morganella morganii
atgaatggtttattgtggctgacactggccgtgggtgcggaagtggtggcgacctcaatgttacgggcggcggacggttttacccggctgataccgtcggtcgtggtggtgatcggctattgtgtgtcgttctgggcgctgtctcaggtggtgcggatgatgccgctggggatagcgtatgctatctggtccggaatggggatcgtgattgtctctgccgccgcttattttatctatcaccagaaactggatttacccgcagttatcgggatggctctcattattgcgggtgtattagtgataaatttattctcgaaaagcagtgttcactga

SEQ ID NO: 273908 - DNA, 306 bp, Morganella morganii
atgatatcagttccatttttccgccgcccggggcgggtattgtgcagtgttattgttgcggcagcggcttttgctgcgggttgcagcagttcaccggatacggtgcagcagaaacagatcccgcgctatcagcagccgttaattgatttaaccgaagatgcccgtgccagctgcagctatgcaggcggaacgccgtcacttatccgcgagctgaacggtgcacagacaccgggatgtcagtttgccaacggcaaacgctgcagccagcagtcactgctttccggaagttgcgggtcggtattgtga

SEQ ID NO: 273909 - DNA, 531 bp, Morganella morganii
atgctgacttatctttatgagtgttcgcggggccgcagtgcatggtttttactgatgatctccgcactggcactcgacggtatcgccctgttctttcagcacggaatgggattacagccgtgtgtgatgtgtatttatgaacgtattgctgttctgggcattgcctttgccggattcctcggctggatagcaccacgcagcgttatcatccgctggctggctgttgccctgtggatttacagtgggattgccggattacagctgtcatgggaacacaccatgatccagctctacccgtctccgttcaatacctgtgatttctttgtgaatttcccggaatggctgccgctcaatacctggctgccgtcagtgtttgaagcatccggtgactgtgcggttcagcaatgggtgttcctgaaactggatatgccgcagtggcttatcggtatctttgctgtgtatctgctgatcagtgcgctggtattattatcccagttcattcaccgcaaacagccgcgtcgcctgttctga

SEQ ID NO: 273910 - DNA, 1548 bp, Morganella morganii
atggaaatatcaatgcggcaggccttcctgaagaacttcatgggccactctcctgactggtataagcttgctattattctttttttaattataaatccggttgtttacttctttattgacccttttacagccggctggctgctggtcattgagtttattttcacccttgcgatggcactgaagtgctatccgctgcaacccggcggcctgctggcgattgaggcagtactgatcggtatgacatcgccggcgcaaatcagccatgagattgtgaataaccttgaggttatcctgctgctgatctttatggttgcaggtatttactttatgaagcagctgctgctgtttctgtttaccaaactactcctgtctatccgttccaaacgcgcgctttctcttgctttctgtctggcgagtgcatttttatccgcatttctggatgcactgacggtgattgccgtggtgatcagtgtgtctgtcgggttttatgcgatttatcatcagtatgcctcttccggaaaagaaacggtgacgctcagtgacgatgaatttatcgacagcaccgaaaagcgtcagacactggatcagttccgggccttcctgcgcagccttatgatgcatgccggtatcggtaccgcactgggcggcgtgatgaccatggtcggtgaaccgcagaacctgattattgccaaacatgccggatgggatttcgtgaatttcttcctgcgcatggcgccggtaacaattccggtatttgtctgtggtctgctggtctgctacctggtggaacggtttaaactgttcggttacggtgcggaactgccggagcgggtcagagccgtactggaggataatgcacaaaaatctgcagcacgccggacaaaacaggaaaaaatgcagttaattgttcagggccttatcggtatctggcttatcactgcactggccttccatctggccgaagtcgggctgatcggtttatctgtcattattctggcgacagcattctgcgggatcacggaagaacatgctctcggtgaggctttcgaagaagcactgccgtttaccgctctgctgactgtgtttttctccgttgttgcggtaattgttgaccagaaattattcacaccgtttatccagtttgtcctcagctcagatccgtcgtcgcagttgtcgctgttctatctgttcaacggcctgctttcggcggtctctgataacgtctttgtcggcacggtctatatcaatgaggcaatgacggcgatgaaagccggactggtatcctatacacagtatgaatatctggccgttgctatcaataccgggacaaacctaccgtcggtggcaacaccaaacggtcaggcggcattcctgttcctgctgacgtccgcactggcaccgctgatccggctttcctacggaaaaatggtgataatggcgctgccttacaccatcgtgatgacactggtcggtttcttcggtgttgaattatggctggtaccggtttcagaatggatggctgctaatggtgtgattacactgccgtaa

SEQ ID NO: 273911 - DNA, 714 bp, Morganella morganii
atggtaatcaaggcgcagagccctgcggggtttgcagaagaatatattattgaaagtatctggaataaccgctttccgccgggatctatcttacccgcagagcgtgagttatctgaactgatcggagtgacccggacaaccctgcgtgaagtgttacagcgtcttgccagagatggctggctgacgattcagcacggtaaaccgacaaaaattaataatttctgggaaacatccggactgaacatcctggaaaccattgcccgtctcgatcacgaaagcgcgccgaaactgattgagaacctgctggcagccaggactaacattgcttctatttttatccgtactgcgtttcgcaataatccggaaaaatcactggaaattctcagtcaggaaaatgaaccggatgataattccgatgcgttcagccagtatgattatgacgtgttccgcggcctggcgtttgcctccggtaacccgatttacggcctgatcctcaacgggctgaaagggttgtacacccgtgtaggccggttctatttcgcaagcccggaagcccgtaaactggcacggaatttttatcagcaactgaccggcctgtgccgtgaaaaagcctatgataaagtgctggattgtgtccgcagctacggcaaagagagcggaactatctggcagaccatgcagagcggtattgcacaggatctgaatccgcagtaa

SEQ ID NO: 273912 - DNA, 861 bp, Morganella morganii
atgaatattaaaaaccaacgtaaaaacattaccctcttacccgatggccgccgcttcagctggtatgattccggcccggaaaccggtacaccggttgtgttctgtactggtgcaggcatgagtggctccgccgggttcggtattccttacctggcagacaataatatccggctgataaccccggatcgtcccgggctcggggattcttctcccgatgccggaaaatccctgaaatcctttgccgcagatgccacttttctgatgcagtcgctgggttacacccggttcagggcggccggattctctcagggtgcggtttatgccatggcactggcgtattatgcgcaagtttccgctctggcactgatttcgggacaggatcagttagattacccgccaacccgggcgctgttatctgcggatgttattgatatgcagaataacgcgcggactcagcctgacgggtttatcgcatgggtacgggaaaatatcaccgcagactggctgatgaatttcattctgaattacagcggggaaacagacctggcggtttatcaggcggctgattttttaccggtttaccggcagtgtatggcagaggcattttctcagggaaatgaaggctatacacaggatttgctgattgccatgcaggaatggggatttaccccggaacaaattacctgtccggtatcattgtggtacggggagaaggacaccagtaccgtgcattcccctgatagcggcaagattctggccggacgctttccccgcgcggaacatcatctgtttgcggaagaaggcggttccctgctctggacacagtcacaggcgatattacaggcactggcctgtgcataa

SEQ ID NO: 273913 - DNA, 1299 bp, Morganella morganii
atgaacattgtcatcctgggaagtggtgttatcggtgtcacaacagcctggtatctcgcgcagaaagggcacgatgtgactgttatcgacaggcagccggcggcggcggaagaaaccagcttcggtaatgccgggcaaatctctcccggttatgccacgccgtggggtgctccgggtattccgctgaaagccgtgaaatggatgtttgaaaaacatgccccgctggccatcagaccggatggttcgctgttccagttacgctggatgtggcagatgctgcgcaattgcggtgctgattattacgtcatgaataaaagccgtatggtacggattgcggaatacagccgtgactgcatgaaagcattacgcgccgaaaccggaatacagtatgaggggcgtcagggcggtacactgcaactgttccgcacacaaaaacagctggataacgcagccaatgatattgcagttctgaaacaggaaggtgtggcgtaccgcctgctgagtgccggtgaactgcatgaggcagaaccggcgctggcccatgcggaacataaactggcgggtggcctgcaactgccgaatgatgaaaccggggactgcaatctctttactaaacggctggcggaaatggcggagcaggccggggtgaaattccgtttcggtgtcaatattcaccgtctgcaattcagcggtgatcgcgtcagcggggtgatttgtgatgaagaagtgatcaccggtgatcagtatgtggtggcgctggggtcatactcgacaaaattgctgcacgaccatatcgctatcccggtgtatccgctgaaaggttattctctgaccatgcctattattgatgaaagtcgtgctcctgcatccacggtactggatgaaacctacaaaattgcggtgacccgttttgatcagcgtatccgtgtcggcggcatggcagaagtggtcggttttaaccttgatattgtcaaacggcgctgtgaaacactgaaaatggtggtgcaggatctttacggtggcggcggggatatcagcaaagccacgttctggaccggtctgcgcccgatgacaccggacggcacaccgattgtcgggccgacggcatacagtaacctgttcctcaataccggccacggcaccctcgggtggacaatggcctgcggcagcgggcagttgcttgccgatattatgtccggtgataaaccggctatccgggcggatgatctcgcggtatcccgttatctgaacgggttcagaacccggctggtgatcccgcagcagttacataccgcataa

SEQ ID NO: 273914 - DNA, 1071 bp, Morganella morganii
atgcctcgtccgatacaggctgtgattgacagtgaagctgtccgctataatctggccagggtaaaagagcgggtcagcccgtcccgggtatgggcagtggtaaaagcggatgcatacggacatggcattgaacggatttttccggcactggcgcaagcggagggcattgcgctgctggatttcagtgaggcagtgaaggttcgcgaactgggctggcaaaagccggttctgttgctggagggattttttcagccagaagatctgtcactgattgaccgttatcagctgtcaacatctgtacacagcgagtggcagattaaagcgatagaggaagcttcatttattcatccactgaatgtgtatctgaaactgaacagtggtatgaaccgattgggtttttctccggcggcgtacctgaatgcactccagcgtctgacagtattaccgcaggtcggcactatcacactgatgagccattttgcggatgcggatttaaccgccggtattcataaacagatgtcgcgcattgcgctgttcagttctctgaatttaccgcagtgtctggcaaattccgcagcggccatgtgggaaccggacacccgcgcggatgaagtgcgctgcggtatcatcctctatggtgtttcacccagcggcaacagtgcggatattgcagagttcagcctgaaaccggcgatgactctccgcagtgaaattattgctgttcatgatattgaagccggtgaaaccgtgggttacggcagccgttttaccgccgcggcgccgatgcggattgccaccattgcctgtggttatgccgatggttatccgcgccatgcaccggacggcacaccggtctggattgccggtcagcgctgcccgctggcgggacggatctccatggatatgctgacagttgatatcacccgctgcccggaggcggatatcggtacaccggttgaattgtggggcgcgaatcttccggcggatgatgtcgcacaatatgccgggactatcggctacgaactgctgacagcactggcacggcgggtaccggtgatcactgccgggtaa

SEQ ID NO: 273915 - DNA, 2295 bp, Morganella morganii
atgcaggcgggtgtggaaatccgggtgaagggaaaagttcagggagtcgggtttcgtccggctgtctggcagatagcacatcagatgggattgtgcggggatgtcagcaatgacagtgaaggggtacttatccaccttccggcagatgcggatatagccggttttatcagtcagttacaggcacaatgcccgccgctggcgcgaatcgaccatatcgggcagcagcattatatctttgaacagtgtccggcggcatttaccatcaccgccagcggacagggggaaatggataccgaaattatcccggacgcagcaacctgtgatgtttgtctgagtgaattgtttgaccccggcaaccgccgttaccgttatccttttattaactgcacacactgcgggcctcgttttaccattatcaggggaatgccgtatgatcgcccgaacacagcgatgtcggtttttccgttttgtccggtgtgtcagcatgaataccgtgacccggcagatcgccgcttccatgcgcagccgaatgcctgtccggattgcgggccgcatatctggctgacggatccgcagcagcagattaccgcccgctttgatgatgctctgtcagccgcagtccgtttgctgaaagatggcaaaattctggcgatgcagggactgggtggctttcacctggtggcggatgcacaaaacaatgaagctgtggctgcactgagagcccgcaaacaccggcctgccaagccatttgcggtgatgataccatccgttgactggctggcggaatgcacggggcgggagccggatcccggcctgattaccctgctgaaaagccctgccgcaccgattgtgctgacagatgaaccggaagtgatcgccgcattatcaccgctggtcgcgccgggattgtgtgaaaccggtattatgctgccgtctaatccgctacagcacctgttgctgcatgatattcagcgtccgctgattatgacctccgggaatgcatcgggccatactccggcgctggatcacgcagcagcatttgagcagctcagttccattgccgatggttttctgctgcataaccgtgaaattattcagcgggcggatgattctcttgtccgttatcaggccggagatattcaggtgttgcggcgtgcccgtggttatgtgccggatgctatcgatgtcagcgcagtgaccggcaaaaatccgccggcagttctggcgctgggcggtgatctgaaaaacaccttctgcctgctgcatcatcagcaattgattaccgggccgcatctcggggatttggctgatctctccgtacaggggcaattggaggcttcgctgaaactgtttgagcagatttatcagatgaaaccacaggttatcgccggggatgcgcatcccggctatatcagtcatcagatggggatggcactggcacaggcgcatcaggtgccgtttataccggtttaccatcatcacgcgcatattgcagcctgtctggcagaacacggctggcgtcaggaagatggcgaagtcgtcgggattgcactcgacggcctcggatacggggcagataacacattgtggggcggtgaaatcctggcgggtgattaccgtcatatgacccgtaccggcgggttaccggccgtgagtctgcccggcggggacaaagcggcggtacagccgtggcgtaacctgctggctcatctgcatcacgccggtttatggctgtcttcaccattggcatcacggcttgccgggaagaatgtatcattgctgattaaagccattgagcagggtatcaatgccccgaaagcatcatcctgcgggcgtttgtttgatgcagtggcctgtgcgctcggattaaccgcagatcagataagctgggaaggggaagccgcctgtgcgctggaaaattgcgcgttacagtgtcacaatcaggaagagcttatcaccggtgaaacactgccgctgatgacgggtaatatcattgatttacgtccgctctggcagatgctggcggatgatactctgacaataccggaaagagcattccgttttcatgtgctgctggcaaatacagttgccgggctggcagatgagacagcgacccggcgaaatacggataccatcgtgctctccggcggggtgtttaataaccggttattgcgtcgcttgattaaggacagattaagccacagacaggtgcgggaaccccgtcagttgccatgcggtgatggcggaatagcggcaggtgaggcacttatcgctgcaatgacattacttcactga

SEQ ID NO: 273916 - DNA, 759 bp, Morganella morganii
atgcataagaaattaaccggcctgctcagtctcagtatgttaactgtcatgtcagcctctgcctttgcagacgacggaaaatggtctgtcggtgcttccgtactctatcaggagcaggcataccgcggcacaaaaacatctgataaatttatgccggttccgatggttaactatgaaggtaaaaacttttattttcataccttagcgaccggttattatctgtggaatgacaaaaaagatcagctgtccgttgacctgttctactatccgcaggcataccgtgccaaagataataaagattcccgtatgcgcaagctcgataaccgccgcgatactgccatggccgggctgagctaccgccatcatgaagagtggggaacactgcgtaccaacttctccggggatatcctgggtaaaagtgacggtatgcgttttgatgccgcttacctttacgggtttgagggcgacaaatggtctgtccagccgggcgtgggtgtgatctggtccagcgaaaaacagaaccgttatgaatacgggatcactgctgctgaatcccgccgcagcggtctggatgaataccgtccgggcagcagctggacaccgtatgttgaggtgtccggtcattatcagtttgatgaaaactggtctgcattcgcgatgggccgtatcgacctgttaccaagtgaggccaaagacagcccgatggtggataaaaaacacacctctatcctgtggactggtgtgacttatactttctga

SEQ ID NO: 273917 - DNA, 603 bp, Morganella morganii
gtgatcagtgtgttgcgtcattgtctgctgttgctctgtttttttgcctccgccgtgtacgcgtggcagccgcagcagggcgatattattttccatacctcgcgctcctctcagagcctcgctatacaaaaagcgacagggtcggtctacagccatatggggattattctgctgcgtgacggtaagccgtatgtgtatgaggcggcaaaaacagtccgctttacaccgctgaaacagtggattgcgcgcagcaccggtaaccattacgtggtgaaacgcctgaaaaatcaactgagtgcatcacagcagcaggcattgtaccgtgaagcgatccggtatcagtcccagccttatgacctgacattttcatgggatgatgagcggatttattgttcggaactggtctggaaaatctataaaaatgccctgaatacagaggtcggtcagttacagacattacgggaatttgatttatcctcgccggaagtacaggcaaagatgaaagaacggtacggaaaggcagttccgctggatgaaacggtgatttcgccggtggctatgtttgattcgccgctgctgacaacggtatatgaaagccggtaa

SEQ ID NO: 273918 - DNA, 882 bp, Morganella morganii
atgattgagcgccttcttgcgttaccggttaccagtccgatcaccccttcactgtcccagcgtcagatgggggatttgccggttattgtgatcgaccatccgaaagtccgtgctgcggtcagttttcagggagcacaggtgctggcatggcaaccgggcggttcagaacagccgggattatggctcagtgaaaacagtgcatttaccccgggtgtggccatccgcggcgggatcccgatctgctggccgtggttcggcccggtgcaggcgccttcccacggttttgcccgtattatgcagtgggagttcacggctcataatgaaaatgaagagggtgtatttctgacctttaccctgcgtgacagtgctgaaacccgcaaattgtggccgcacgagttcacactgatcgcccgcatccgcctgggagacacttgtgaggtcgagctggaagcttacgggcagtatcaggcaaccgcggcactgcatacctattttactgtcggggatattgcacaggtcagtatcagcgggctggggcagcatctgctggataatctgtcacagcgtgaagaatatacggaagagacaaagctggttttcaacggccgtaccgaccgcatctataccgagccggaacaatccacctatatccacgataagaaattaaaacgtcatattgaagtggtgcacttccatcacagcgacgtggtgtgctggaacccgggtgcagcattgtctgcttcaatggcagatatgccggatgacggttataaaacgatggtgtgtgccgaaagtgcgcggattaaccgccctatggctccgcagggcgataaaccgtcccatctctctgtccgtatccgcctgaacccgaaaatcggctga

SEQ ID NO: 273919 - DNA, 996 bp, Morganella morganii
atgactatcaaagtaggtattaatggttttggtcgtatcggccgtatcgtattccgtgctgcacaagagcgttcagatatcgaaatcgttgcaatcaacgacctgctcgatgcagattacatggcatacatgctgaagtacgactcaactcacggccgttttaacggtaccgttgaagtgaaagatggccatctggttgttaatggtaaaactatccgcgttacctccgaacgtgaccctgcgaacctgaagtggaacgaagccggtgttgatgttgttgctgaagcaaccggtctgttcctgactgacgaaactgcacgcaaacacatccaggcaggcgcgaagaaagtcgttctgaccggtccttccaaagatgcaaccccgatgtttgttatgggtgttaaccacaaagattacgcgggccaggaaatcgtctctaacgcatcctgtaccactaactgcctggcaccactggcaaaagtcatcaacgacaaattcggtatcgttgaaggcctgatgaccactgttcacgccaccactgccacccagaaaactgttgacggtccttcacacaaagactggcgcggcggccgcggtgcatcccagaacatcatcccgtcttctaccggcgcagcaaaagcagtgggtaaagttatccctgcactgaacggtaaactgaccggtatgtctttccgtgttcctactcctaacgtctctgttgttgacctgactgtccgtctggaaaaagccgcaacttacgctgaaatctgtgaagcaatcaaagcggcagcagcaggcgaactgaaaggcgtgatgggttacaccgaagatgacgtagtttccactgacttcaacggcgaagtactgacttctgtgttcgatgccaaagccggtatcgccctgaacgacaactttgtgaaactggtttcctggtatgacaacgaaaccggttattctcataaagtactggatctgattgcacacatctccaaataa

SEQ ID NO: 273920 - DNA, 414 bp, Morganella morganii
atgtccgggactgataaaaagcgggatacacccgctgagctgacagagattcagcgctatgtcacacaggaagcgggaactgagcacccgtttaccggccgcctgctctataatgagaaacagggggtataccgttgtatttgttgtggttctccgcttttttattcggataccaagtttgatgccggctgcggttggccgagtttttatgagccggtcagcaaaagtgcagtccggtatattgacgatacctctcatggcatgcatcgtattgagacccgttgtggtcattgtgatgcgcatctggggcatgtttttcctgacgggcctgcgccgacagggcagcgttattgtattaactcagcatcactgagttttgaagatgaaaaaacaaaagcaataacaaacggttag

SEQ ID NO: 273921 - DNA, 276 bp, Morganella morganii
atggaaattgatgatttattgtccgccatgacgccggaagtctacgggcgtctggtgacagccgtcgaactgggtaaatgggccgatggtgtaccactgacggaatctcagaaaagcagcagcctgcagctggtgatgttatggcagtcccgccataatgaggatccggcgcatatgacggtgggtactgacggggaaatcagcctgaaaagtaagcaggaactgaaagcgctgttcaccgatacgcatctggccacactgaaaccgcaggactga

SEQ ID NO: 273922 - DNA, 639 bp, Morganella morganii
atgaaaccggcactgcttctggtggatattcagaatgatttttgtcagggcggcagcctggctgtccgcgacagtgatgcggtgatccgcacagcgaaccggatgatagcccgttgtcagcaacagaatatcccggtgatcgccagtcaggactggcatccggctgagcatctgagctttgcggtcaactccgggacagtgattggtgaatgcggcgaactgaacgggctgccgcaggtctggtggccggtgcattgtgtgcagaacacaccgggggcggattttcatcctgagctcaataaacaggctatcactcatattatttataagggtgaaaaccccgcggtggacagttacagcgcgttttatgataacgaccaccgcgagccgaccaccctgctgcaactgctggcagaactgcagatcacacaccttgtggtactgggaattgccaccgattactgtgttaaatttacggtgctggatgccctggcggaaggatttgccgtcactgtgatcacggacggctgccggggtgttaatttacggccggatgacagcctctccgcatttgcagagatggagaacgccggagcgcgtttgcagacagctgctcagttctgcggcgaaaaagagtag

SEQ ID NO: 273923 - DNA, 1020 bp, Morganella morganii
atgcaaaagaaatccatttatgtggtctataccggcgggactatcggtatgcagcactcggcgcagggctatatccctgtttccggccaccttcagcgccaggttgccaaaatgccggagttcttccgtccggagatgccggatttcaccatcaccgagcaccagccgctgattgattcttccgatatgacaccggatgactggcagtgtatcgcggatgatatcaaagcccagtatgaccactatgatggtttcgttatcctgcatggtacggataccatggcgttcaccgcatcagcgctctcctttatgtttgagaacctgaccaagccggtaattgtgacagggtcacaaattccgcttgaggcactgcgctcagatggccagatcaatctgcttaatgccctttatctggcggcgaattatccggtcaatgaagtgggattattcttcaataaccgtttataccgaggcaaccgcaccgtcaaagcgcatgctgacggctttgcggcctttacctccccgaactacccgccgctgatggaagccgggattaatatccgtaatctcaatacgcacccgctgccgcaaagcaccgcacctttcacgctgcataacatcaccccgcagcccatcggcgtggtaaccgtgtatccgggcttatcagtggatgtggtaaacaatattctgcagcaaccggtcaaggcactgattatccgctcttacggtgtcggtaatgcaccgcagcagccgaaactactcaccgcattacgggaggccacagagcgcggcatcattgtgatcaatctgacacagtgtatttcaggacgcgtcaatatgggcggctatgccaccggtcatgcactggcagaagccggcgtgatcagcggctttgatatgaccttcgaggcggcgctgaccaaactgcattatctgctcagccaggattacaccagcgatgaaatccgcattctgatgcagcaggatctgcgcggcgaactgagctataacgacaactga

SEQ ID NO: 273924 - DNA, 1863 bp, Morganella morganii
atgcatactttatggactatcattgccggaatatttaaatggagctggcgtatactgaattttgtacgtcagcttgtcgccaatgtcctttttatcatcatactgctgttagccgccggggcctatgcactgctgagtgagcaggatactcagaccagtcgtgaacccggagcattatatgtaaatctttccggtgttgtcgtcgatcagctgacccgtaacagtccgctggaaagcctctcgctccagctgcttggcgcatcttccggtcagttacaggaaaactccctgtttgatgtggtggaaactatccgtactgccgccaccgacccggatattaccggaatgatcctgaagctggatgatttcgttggtgccgaccagccgtcacttcagtatatcggtaaaaccatcacagaattccgcaaacagggcaaacgggtctatgctgtcagcggaaactataaccaggctcagtattacctggcatcctatgcagacaagatatacatgccgccgcagggcagcgtcggtatctacggcttcgccaccaatacgctgtattataacgaattgctggaaatgctgaaggtgaaaacccatatcttccgcgtcggtacctataaatcggcggttgagccgatgctgcgcaacgatatgtcaccggaagcccgcgaatccacacagcgttttatcagtgtgctgtgggataactatctcaccagtctcgcggaaaaccgtaaaaccggtaagaacaccattttcccgggcgcacagcagatgctggctctgatgaaaacggcaaaaggtgataatgccgcttatgccgtcacgcaaaaactggttgatgaaatcatgccggctaacgtgtttgaatcagaaatggccaaaactttcggctgggataagaaaaacaacacaatcaatgcgattccgtttgccgaatatgccaaaaacctgaatatcggcgtgccgcagggcaagaccaccggtaacatcgccgtggttgtggttcagggtgctatcgttgacggcccggatgcccccggcatggccggcagtgatactatcgccgcacagctccgcgaagcccgtctggatccggaagtgaaagcgctggtactgcgggtgaacagcccgggcggcagtgtgacggcatcggagcagatccgtgcggaagtcgcagcactgaaacagagcggcaaagccgtggtggtttccatgggcggagtagcagcttccggcggttactgggtctcaacaccggcaaactacattgttgcctcaccgagcaccattaccggctccatcggtattttcggcgtggtcaccacgtttgaggactctctgagcgaaatcggtgtacacactgacggcgtgtccacctcgccgctggccgatgccaccgtaaccaaagcactgacaccggaattctcagagctgatgcagctctatattgaaagcggctacagcaattttattaatctcgttgccaagtcccgtcacaagacgccggaggaagtggataaaattgcgcagggtcgtgtctgggtcggttcagatgccaaagctaacggtctggtcgacaaacttggtgattttgatgacgcagttgccaaagccgcagagctggcctctgttgagcatccggtactgaactggatgcagccggaaatgacattcattgacagactgctcgcggaaacggccggcaatgtgaaggtgacactgccgtcatcattgcagggactgatcccggcgccggtcggcgcacaactgacacaacaggcatcctttatgaaaatgctgacggatccgcagtaccgctatgcgttctgtctgaattgtaccaatattcagtaa

SEQ ID NO: 273925 - DNA, 552 bp, Morganella morganii
atggatgcactgacattactactcaatcgccgttctgcttctcgtctgaccacacctgcgcccgaaggcgaagcattaaaaaatattctcaatgccgggatgcgtgcgccggatcatggcgcgttacagccctggcattttatcgtgatgcaggatgacggcatcaccaaattcagtcagttgctcgaaaaagcggcaaaaacagccggactcgggccggaagtggaagagaaagcccgcaatgcgccattacgcgcaccgctgattatcacggttatcgcgaaagtgaagccggaacataaagttcctgaatgggagcaggttgcagcggcaggttgttcggttcatgcgatgcagatggctgctgtggctcagggcttcggcgggatctggcgcaccggctcgtggacaaaggatccggtggtacgggaaggtctgggatgtgaggagcacgataaaattgtcggctttctgtatctcggcactccggcactgaaagcgcctgccaaagtggcggcaccggatctgacaccgtttgtcacgtatttctga

SEQ ID NO: 273926 - DNA, 1044 bp, Morganella morganii
atgtcagaagcggtgcgtttaacgcaatacagtcacggcgcgggttgcggctgtaaaatttccccgaaagtgctcgataccatcctgcacagtgagcaggcaaaatttatcgaccctaatctgctggtcggtaatgaatcccgtgatgatgcggcagtgtatgatatcggcaacggtaccggcatcatcagcaccaccgatttctttatgccgattgtggatgacccgtatgatttcggccgtatcgcggccaccaacgccatcagtgatatttatgccatgggcggcaagccgattatggcgattgcgatcctcggctggccggtagacaaactggccccggaaattgcacagcaggtgattgagggcggacgggctgtctgccgtgatgccggtatttctctggctggcggtcactccattgatgcgcctgagccgattttcggcctggcggtcaccggtatcgtcccgacagataaaatcaaacaaaataaccgtgcgaaagccggttgccagctgctgctgaccaaaccgctgggtatcggcattctgactacggctgaaaaacagagcaaactgcgtccggaacataaaaatctggcacgtgacaccatgtgtcagctcaacaagcccggtgcagatttctctgaaatcgacggtgtaaaagccatgacagacgtgaccggttttggtctgctcggccatctgagtgaaatctgtcagggttccgggttacaagccgtaatccacactgattctgttccggtactgcctggtgtgtatgactatattgcacagggctgctgcccgggcggcactcagcgtaactttgacagctacggccaccttatcggtgaaatgaccgaagttcagcgcaaactgctgtgtgacccgcagacatccggcgggctgctgctggcggttgatcctgcggcgcgtgaggaagtggaggcggttgcccgcaaatacggcctgacattaagcccggtcggtgaactgactgagccggacgcatcccgtgcactgattgaagtcaccgcataa

SEQ ID NO: 273927 - DNA, 1965 bp, Morganella morganii
atgcgtttgtttattgccgaaaagcccagcctcgcccgtgcgattgcggatgtattacccaaaccgcaccagcggggggacggctttatccgctgcggtcagaatgactgtgtgacctggtgtgtcggccacctgctggagcaggcagagccggatgcgtatgatccgcgttatgcccgctggaacctggctgatctgccgattatcccgcaaaaatggatcctcagaccccgcgacgcggtggcgaaacagctgcgcaccatcggtacgctgctcagttccgcaactgaagttatccacgccggagaccctgatcgcgaagggcagttgctggtggatgaggtactggatttcctggagctcgcgccggaaaagcgtcagcaggtgcagcgctgcctggtcaatgaccttaacccgcaggcggtaacccgggcagtggataaaatgcgtcttaaccgtgattttatcccgctgtgtgtttcggcactggcacgggcacgggcagactggctctacggcatcaatatgacacgcgcctacactattctcggccgtaatgccgggtataacggagtgctttcggtcggccgtgtgcagaccccggtgctcgggctggtggtgcggcgtgatgaggaaattgaaaactttgtgccgcgcgatttctttgaggtacgggcacatattgttaccccggcggacgaacgttttacggcaatgtgggtgccgagcgaggcgtgccaggattatcaggatgacgaaggacgcctgactcaccggccgctggcggagcatgtggtcagccgcatcaccggtaaaccggccttcgtgactgattttcaggataaaacggaaaatgaaatcgcgccgctgccgttttcactgtctgcgttacagattgaggctgccaaacgctacgggctgagcgcccagtcagtgctggatatctgtcagcgtctgtatgaaacccacaaactgatcacctatccccgttcggacagtcgtcatctgccggaagagcattttgccgggcgtcacagtgtgctcaatgcgatttctgtgcataccccgcatctgctgccgcaggataacctcgatgattcgctgcgtaaccgctgctgggacgacaaaaaggtcgatgcgcaccatgccatcattccgaccgccaaatcggtctctgtgtcgctcagtgagaatgaagctaatatctacgagctgattgcgcgtcagtatctgatgcagtttatgccggatgcacaataccgcaaatgcgtgattgaactggatatcgccaacggtaaatttgtggcaaaggcgcgttttctctctcaggcaggctggcggaccatgctgggtgccaaagagcgtgacgaggaaaacgaaggtacaccgctgccggtgctgaccaaaggggatgaactcctgtgtgagcgcggtgaggtggtggagcgccagacgcagccgccgagaccgtttaccgatgccacgctgctgtcagctatgaccgggattgcccggtttgtgaaagataaggcgctgaaaaaagtactgcgcgaaactgacggactgggtactgaagcaacccgtgccgggattatcgaactgctgttccgccgcgagtttttgtacaaaaaagggcgcaatattcattcatccccggcaggacgcgcactgattcatgttctgcccgaaatggccaccttgccggatatgacggcgcactgggaatcaaccctgacacaaatcagtgaaaaacagtatcgttatcaggatttcatggtgccgttgtctgaaaccctgaccggactgataaaccaggcccggcagaaccggaatgtccgcgctttccgtgatttaccaccgccgccgcaggcgaagaaggccggcgcgaaaggcaaaggtaaaaccgccgcgaagggcaaagggaagaccggcggaaaaaaagcgccgccacaggaagaagaataa

SEQ ID NO: 273928 - DNA, 810 bp, Morganella morganii
atgaagtttgtctcttttaacattaacgggttaagagcccggcctcaccagctggaagcgattatcgcacagcatcagcctgatgttatcggcctccaggaaaccaaagtccatgacgagatgttcccgctcgatgacctgaaacacctcggctaccacattttttatcacggccagaaatcccattacggtgtcgccctgctgaccaaagcagagccggttgccgtgcgcaaaggcttcgcaggggatgatgaagatgcccagcgccgtctgattatggcggatattgataccccggccggggtactgacagtgattaacggttatttcccccagggagaaagccgcgaccatccgctgaaattcccggcgaaaaccaaattctatcaggatttacaggactatctgtccgggcgctccaaccaggatccgattgttattatgggtgatatgaatatcagcccgcaggatattgatatcggaattggtgacgccaaccgcaagcgctggctgaagaccggcaagtgctctttcctgccggaagagcgcgagtggatggatcgcctgctcagctggggactgactgacacttaccgcgctatgtatccggatgcagacgaccgtttttcgtggttcgattaccgttcacgcggctttgatgacaaccgtggactgcggattgacctgattctggcaagcaaagcgctggcaccacgctgtaccgccaccggcattgattatgaaatccgtggtatggaaaaaccctctgaccacgcgccaatctgggctgagtttgatttaacccgctga

SEQ ID NO: 273929 - DNA, 864 bp, Morganella morganii
atgtttttttcaaggaagttagaagcctttatggctgttgttgaatacggctcgctcagtaaagcagcaaaagtgatgaacaggacaactccgccggtggccaagtctatcaaggattttgagatctcgctgggtaagcgtttatttaaacgtgaaaaatttggtatgagcctgacacgggaagggatggagttatacaatgatcttaaagatctctatatgcaggaaaaagaaattacaaaaaaacatatcagcggaacgatatgtaataaggtgaatatattttatgactgggggaaaagtaaatatattgcggcactgtaccggacggcattcaaagcgggtatacaaattaatatatttcgtttccactatgattgtattgatgaaataaatgattttgagggcaatacgctgatactgtcgtcagagcaggttatcagcgaacgttttacgctgctgcgccatttaccgcaggggcaaatcggaatctgctgccgtcgttcactgtttcaggactgtgataacaatttacagacattattatcctcctgtgtctggttatgtgagccgttattatatgaaagcccgttactcaaaacattattgctgcagctcggtgagcagagcaaacatgaacatgtgcatctgatcgacaatgtgaacagttatctgcatctgctgattgacggggattatctctgctttattgatgagcacccgaaaacgctgccgtacagcgatgaactgatttttctgccgttatcgcagagtgaggcggaaaatcattgttatctgtacaagtcaaaatcacacgcgagtgtgctgaacaaaataatggattgtattgagaatatgaaataa

SEQ ID NO: 273930 - DNA, 849 bp, Morganella morganii
atgcaacaccagacgagccagaaaaaaattctgcgaaccatttgccctgacgcaaaaggtcttatcgccaagatcaccaatatttgttacaagcatcagctgaatattgtccagaacaatgaattcgttgatcaccgtaccggccgcttttttatgcgcaccgagctggaagggatttttaacgatgaaaccctgctggccgacctggatgatgccctgccgaaaggctccacgcgcgaattaaccaccgccggacgccgccgtattgtcattatggtgaccaaagaagcacactgcctcggcgatattctgatgaaaagcgcctacggcggtctggatgtcgaaatcgcagcggttatcggcaaccacgacctgttgtctcatctggtcacacagtttggtattccgttccatcatatcagccacgacggactgacccgtgagcagcatgatatgcagatcattcagcagattgaccagtatcagccggattacgtcgtgctggcgaaatacatgcgtgtgctgaccccggcatttgtgcagcactatccgaaccagattatcaacatccaccactccttcctgccggcctttatcggcgcacggccttatcatcaggcatatgagcgcggcgtgaagattatcggtgccaccgcgcactatgtgaatgataacctcgatgaaggtccgatcattcaccagagcgtgattaacgtcgaccacacttacagcgccgatgatatggtcatggccggtcgtgacgtggaaaaaaatgtgctcagccatgccctggggcgtgttctgacacaacgggtattcgtttacggtaaccgcactgtcattttataa

SEQ ID NO: 273931 - DNA, 477 bp, Morganella morganii
atgtctcattttacagataccgatccctgcccgtgcggcagcggggatacttttgcacagtgttgccagccttatctttccggtgcgcagtccgcccccgatgcgcgggcactgatgtgttcgcgttacagtgcgtttgtcacccataatgctgatcatctgatccggacatggtatccgccggcatgcgcggaagcactgcggacagaactgaccgccggattcggtgaaacggaatggctgggactgaatgtcattgattttcagcccggcaccgcgccggacgaggctttcgttgaattttgtgcttgctttattgataaaaagtccgaagataaacaattcattcacgaacgttcccgttttcgcctgactgacggtgcctggatgtacctcgacggcgtaaaaccacagatcggccgtaatgacccctgcccctgcggctccggaaaaaaatataaaaaatgctgtgcctga

SEQ ID NO: 273932 - DNA, 1029 bp, Morganella morganii
atgaagcaggcactggacggaaaacgattgttagtcatcgatgacgacccggcattcaatatggcgctgtcatcctatctgcgccttctcggtgccacggtgttatctgccggtgacggtgcacgcgcatgggaatgcatagaacagggctttcagccggaactgattttctgtgacctcaatatgccggtgatgaccggcgcggaatttattgcccggtcacagtcggatttaccggccattccggtgattgttatctctgcgacacaaaaaatgtcggatatcgatgaagtgctgcgtctcggggcaaaagatgtgttgttaaagcccctgaacaggctggaagaaataaaaaaattatgtctgtcccacctgtacccgtcatttttctcaccgggggtgctggaaaataatgatctctccgggatctgggcccagttacagcataatgtggatgatgttttacgtttattaaaacagctgaacccgccgccgagccaggtgctggccaattatcagatccgctatgcgcaattatccgatagctgccgggcggggctggtatttgatgtggcagaattttctgataatgaagtggcgttttattgtctcgatatcagtcagaataccggcaacggcccgctgatggcgatgttaatccgcgtcatctttaacgatctgctaaaacgctatattcataatcaccaccggaaattaccgagcatgaccgccatcttaaataagctgaaccggttattacaggacgcaggtattccgggacagctgccgctgctgctggggtattatcacacccggcgtaagtcggtgttattgtccagcgccggtatcagtgcggaattacgctctgataatcatgtgatccgtgttaaccggggtattccgctggggacactctcttccgtttattccagtcagataagtgaattcagccgccatctgcaatgccggatctggaacagcagcagtcagattaaattaagcctgacccccggaccgcatcagggataa

SEQ ID NO: 273933 - DNA, 906 bp, Morganella morganii
atgtcagtgcagaaaaataaagtacacaaggctgtgatcccggttgcaggattaggaacacgtatgttgccggccacaaaagcgattccgaaagaaatgctgccgctggtggataaaccgcttattcagtatgtggtgaatgaatgtatcgcggcggggatcactgaaattattttagtgacccactcatcaaaaaactccattgaaaaccatttcgataccagctttgaactggaagccatcctggaaaaacgtgtaaaacgtcagttgctggatgaagtccagtcaatctgcccgcgtcacgttactatcatgcagacccgtcaggggatcgccaaagggcttggtcacgccgtattatgcgccagaccaatgattggtgatgagcctttcgccgtggtattgccggatgtgattattgacgaatacagtactgacctggcgaaattcaacctcagagaaatgattgcgcgttatgaagaacacggtgcaagccaggtaatggttgatccggttccgcaggaaatggtggcaaattacggtgtggtggattgccacggtgagaatctggccgccggtgaaagcaaaccgatgtttgccgtggtggaaaaaccggaaccggccaaagcaccgtcgaatatgtctattgtcggccgttatgtgctttcccaggatatctggccgctgctggggaaaactgccccgggagccggtgatgagatccagctgactgacgctatcgctatgctgattgaaaaaaatccggtggaggcgtaccgtctggtaggccgcagccatgactgcggcgacaaaatgggctatatgaaagcctttgtcgaatacagcatgcgtcataagcacctgggccgtgaattctcagattggctgaaaacattacagaattaa

SEQ ID NO: 273934 - DNA, 1344 bp, Morganella morganii
atgaaagtaaccgtatttggaatcggatatgtcggtcttgtgcaggcgactgtactggcggaagtcggccatgatgttatgtgtgtcgatgttgatgcaaaaaaagtggaaaacctgaaaaacggtgtgatccctatttttgaaccgggcctgaccccgctggtgaagaaaaactatgaagaaggtcgtttaagcttcactacggatgcggcactgggtgtggcacacggcacactgcaattcatcgcggtcggtacaccgccggatgaagacggctctgcggatctgcaatatgtcaccgcggttgcccgtactattgcacagcatatgcaggactacaaagtggttatcgataaatccaccgttccggtcggtaccgcggataaagttaacgccacgattaaagccacactggctgaacgcggcgcggatattgcctatgacgtggtgtccaaccctgaattcctgaaggaaggggcggcggttgctgactgcatgcgtcctgagcgcattgttatcggctgtgataatgatcgtgttatcgatattatccgcgaactgtatgagccgtttaaccgtaatcacgaccgcatgattgtgatggatatccgcagtgcggagctgaccaaatacgcggcaaactgcatgctggcgacaaaaatcagctttatgaatgagatctccaacctggcggaaatgctgggcgcggatattgagaatgtgcgccagggtatcggttctgactcccgtatcggttatcactttatttatccgggctgcggctacggtggttcctgcttcccgaaagacgtgcaggcgctgatccgcaccgcggaacatatcggctttaccccgcgcattctgcgtgcggtggaagaagtgaacgaacagcagaaatacaaactgccgtcctttatcaaacgtcatttcggtgaaaacctggaaggtaaaaccttcgcggtctggggcctgtcttttaaaccgaataccgatgatatgcgtgaagcctccagccgtatcctgttacaggaattatgggccgccggtgccaaagttcaggcgtatgacccggaagcgatgcaggaagcgcagcgtattttcgggctgcgtgatgacctggcgctgatgggtaccaaagaagcggcactgcataatgcggatgcactggttatctgtactgagtggcagagtttccgtgcgccggacttcgatgctatcaaagcaggactgaaaaccccggttatttttgacggacgtaacctttatgacccggaacgtttagaaaatcgcggctttatctattatggtataggccgtggtgcttccattaatccggtaatctga

SEQ ID NO: 273935 - DNA, 1017 bp, Morganella morganii
atgaaaatacttgtaaccggcgcggctggttttattggttatcatgtctcgcagcgcctgcttgagcaggggcacgaggttgtcggtgctgacaacctgaatgactattatgatgtgaatctcaaacaggcccgtcttgatctgttattaccgcatccgcaatttcagttttttaaaatggatttgtcggagaaagcggctgtcagtgagctgttcgccgcacagaaatttgagcgggtgatccacctggcggcacagccgggcgtgcgttactccatccagaacccgatggcgtatattgacgcgaatattctggggcatatgaatattctggaagggtgccgtcatcataacgtcgggcatctgatctactcctcctcaagttcagtatacggtctgaaccgcaaacagccgttctctgttgaggatgatgtggaccatccggtgtcgttgtatgcggcaacgaaaaaagccaatgaattaatgtcacacagttattcacatctttatcagttgccgacaaccggtctgcggttcttcaccgtctacggcccgtggggtcgtccggatatggcgttatttaagtttgtgaaagccatgctggacggaaaaccgatcgatgtatataaccacggcaatatggtgcgtgatttcacctatgtcggtgatattgcggaagcggtggtgcgtctggtggatgtgattccggcggtgaataatgactggacggtggaagaggggctgaagtcagccagctctgcgccgtacaaaatttataatgtcggtaacggtcagccgacccggctgggtgattttattcaggcgattgaaacggcgctggatattaaagccaataaacactatatggatatgcaggatggtgacgtgttatccacctgtgcagactcctccgaattgtataaaacgattggtttctcaccggatacgccggttaattacggcgtgcagcagtttgttgactggtatatgtcgttttatcacggaaaaaataaataa

SEQ ID NO: 273936 - DNA, 411 bp, Morganella morganii
atgagtgaatctttgaagccatttaataatatccgtactcttcgcgctcaggcgagagaatccagcttagaagttttagaagaaattctggaaaagctgacttctgttgttgaagaacgccgtctggaagaatcccaggctcaggctaaagaagaagagcgcacccgtaaattagaagaattccgtcagctgcttgaaaagcagaatatcaacccggaagaattaattcagtctatgggtacaggcaaaacagcccgcaaatccaagcgtgctcagcgccctgccaaatacgaatatatcgatgaaaacggtgaaagcaaaacctggaccggccagggtcgtacaccagctgtgatcaaacaagctatcgataacgaaggtaaatctctgaacgatttcttaatcaagtaa

SEQ ID NO: 273937 - DNA, 624 bp, Morganella morganii
atgtgtaaggggagagagccggtggctcagctttatttttattactccgcaatgaatgcgggaaaatcgacagcgttactgcagtcatcctataactacaatgaacgcggcatgcgcacgctgatatttaccgcagagatagacaaccgctatgagcagagcaaagttacctcacgtatcggcctgagcgccgatgcgcgggtctttggccctgagacggacgtaagctcggttattatccgtgaacatcagcagacacccgtacactgcgtattaatcgatgaatgccagttcctgaccaaagcgcaggtggaacagctctgctgtatcgtcgacgatattgatatcccggttctgtgttacgggttacgcacagactttaaaggtgagttattcagcggcagtcattatttattagcctgggcggataaattagttgaattaaaaactatttgttattgcggacgaaaagccagccgtgttttacgttacgacggacaggggcgggttatgtcagatggtgcacaaattgacatcggcggtaatgaaaaatatgtatccgtctgccgcaaacattacaatgaagcgatacgcgaagtaaaagcagcagaatatcggtcataa

SEQ ID NO: 273938 - DNA, 2661 bp, Morganella morganii
atggccgtaacgaacgttaccgaactcaatgaattagttgtccgcgtgaagaaagctcagcgcgagtttgccggtttctcccaggaacaggtggatgctatcttccgggcggcggcactcgccgcagcagatgcccgtatcccgctggcaaaactggcagttgaagagtccggcatgggtattattgaagataaagtgatcaaaaaccattttgcttctgaatatatctataacgcctaccgcgatgagaaaacctgcggcatcttatcggaagacccgaccttcggcaccatcaccatcgcagagcctatcggtattatctgcggtatcgtcccgaccactaacccgacctccaccgcaatttttaaagcactgatcagcctgaaaacccgtaacgggatcattttctccccgcatccgcgtgcaaaaaaagccactaacagagcggctgaaattgtcctcaacgcggctgttgccgccggtgccccgaaagatattatcggctggatcgacgagccgtcagtggaattgtccaatgccctgatgcatcacgctgatactaacctgatcctcgccaccggcgggccgggcatggtgaaagcagcctacagttccggtaaaccggccattggtgtgggcgcgggtaacacccctgtcgtgattgatgaaaccgctgatatcaaacgcgcggtggcctctattctgatgtcaaaaaccttcgataacggcgtgatttgtgcctctgagcaatcggttatcgtggtggatgatgtgtatgaacaggttaaagaacgttttgaaacccacggtggttatattctgaaaggcaaagaactgaaagccgttcaggacattattctgctcaacggcggactgaatgcgaaaattgtcggtcagtctgcggtgaaaattgctgaaatggccggcatcgaagtacctgcatggaccaaaattcttatcggtgcggtctccgtggtggatgaatccgagccgtttgcacacgaaaaactctccccgctgttagccatgtaccgcggcaaagattttgaagatgcggtgatcaaagcggaaaaactggtggaaatgggcgggatcggccacacctcctgcttatataccgatcaggataaccagccggagcgcgtaaaattcttcggtgagaagatgaaaaccgcacgtatcctgattaacacccctgcatcacagggcgggatcggcgacctgtataacttcaaactgtctccgtcactgacactgggttgcggctcctgggggggtaactccatctccgaaaacgtcgggccgaaacacctgatcaacaccaaaaccgtggcaaaacgagctgaaaatatgttgtggcataaacttccgaaatctatctatttccgccgtggttctctgccggttgccctggaagagatcgccggtgacggtgcaaaacgcgcctttatcgtgactgacggctatctgttcaataacggctatgtggatgaagtcacccgtgtgctgaaatcctacggtatggaagtggagattttctttgaagtggaagctgacccgacactttctgtggtccgcaaaggtgcggagcagatgaacagcttcaaacctgacgtgattattgccctcggcggcggctccccgatggatgcagccaaaattatgtgggtgatgtatgaacatccggaaacacattttgaggaactggcactgcgctttatggatatccgcaaacgtatctataagttcccgaaaatgggcgtgaaagcgaaaatggttgctatcaccaccacatccggtaccggttctgaagtgactccgttcgcggttgtgacagatgataccaccggccagaaatacccgctggcggactatgccctgaccccggatatggcaattgttgatgccaacctggtgatgaacatgccgaaatccctcaccgctttcggcgggctggatgccgtcactcacgcactggaagcgtatgtatccgtgctggcaaacgaattctctgacggccaggcattacaggcactgaaactgctgaaagagtttttaccggccagctatcacgaaggtgcgaagaacccggttgcccgtgaacgtgtacacaatgccgcgactatcgccggtatcgcgtttgccaacgccttcctcggggtatgtcactccatggcgcacaaactgggctctgagttccatattccgcatggtctggctaatgccctgcttatctgtaacgtcatccgttataacgctaccgataacccgaccaaacagactgcgttcagccagtatgaccgtcctcaggcacgccgccgttacgcggagattgctgaccatctgcaactgagtgctgccggtgaccgtaccgcgcagaaaattgaaaaactgctgatctggctggacgaaatcaaagcctctctggggatcccgaaatccatccgtgaagccggtgtgccggaagcggaattcctggcaaaactggataaactgtccgaagatgcctttgatgaccagtgtaccggtgcaaacccgcgctatccgctgattgcagaattaaaacaaattatgctggatacctattacggacgcacctatgacgaatctgttcctgtagcggcaccaaaaccggttgccaaacggaatgctaagaaataa

SEQ ID NO: 273939 - DNA, 648 bp, Morganella morganii
gtgggcaacactttgctggatttttccggttatttaaaattttttgtcggcttatttgccttagtcaacccggtcggtattctgccggtctttatgagcatgacaaattatcagactgccgcagtgcgcaataagaccaacatgattgcgaacttttcggtggccgtgattttgtgcacatcacttctggtcggcgataagatcctcattatgttcggtatttccatcgaatctttccggatagcaggggggacactgattgtcctcatcgccatgtccatgatcagcggtaagctgggggaagataagcagaacaaacaggaacagtcggaaacggctatccgcgacaatatcggtgtggtgccgctggcactgccgctgatggcggggccgggggctatcagttcctgtgtggtctggagtgcccgctggcagggctggcagaactttttcggactggcgctgaccagcatcgtgttcgcgttctgttgctggctgttgttccgctctgcaggactgtgggtgaaatacctcggacaaaccggtatcaacgttgtgacccgtattatgggtctgatgctgatgtcattaggtattgagctgatcattaccggcatgaaaatgagtttcccgggattattgtcataa

SEQ ID NO: 273940 - DNA, 726 bp, Morganella morganii
atgccggaaaataattcagcaccgattattgaagttaataatctttccgtcagcttcgggcagcggcaggttgtttgtcaggccggttttcatcttaatgccggagagacgttcagtcttatcggtgagtccggctgcggaaaatccactattttgcgggtgattgccgggttgcagcgggaatggctgggcggcgtacagctgctgtcacaacatatccaccccggtcagcgttatcagggggctttgcgccgcaatgtgcagatggtctttcaggatccttatgcgtctctgcatcctttccatactattcaccgggcactttcagaaccgttacgcattcaccgcgaaaatgacatcggcaaccgggtggcagaggccattgtatctgtcgggctgccgccggatgtggcacagcgttatccgcatcagctctccggcgggcagcgccagcgcattgctattgcccgtgccctgatgctgcacccgcagatcctgttactcgatgaaccaacatccgcgcttgatatgtctgtgcaggcggaaattctcaatctgcttaatcatctgaaaaccgcccacggcatgacctatctgctggtcagtcacgatgcggatgtggtggcgcatatgtcagaccgggcggcatttatggcgaacgggaaaattgaacgggaatttgatcgcgccgccctgctgcgcggcgaccaccggatggataactga

SEQ ID NO: 273941 - DNA, 849 bp, Morganella morganii
atgactgagccgcttatttttgtccgtaatttgtgtgtggattacccccgcgcacaggtggtgaaaaatgtctcctttaccctgggacaggaacggctggcgctggtcggggagtccggttccggcaaatccatgaccgccagggcgctgatggggctggtgcgcaaacccgggattgtcagtgcggatacactgacattcggtcagacctccctgctgtctctgcgggaaaaacagtgggcggcactgcgcggcaatgacattgccatgatcatgcaggatccgcgctatgcgctgaatccggtcagaaatctgtatcagcagattgaggaatccctgctgcgccaccagacactgaacaaatcagaccgccgcgaccgtgtttttgaaatggcccgtgccgccgggttatcagaacaggcgctctcccgctatccggggcagctttccggcggtatgggacagcgagccatgattgcgattgctctgatcaacaacccgtcagtcttaattgccgacgaaccaacttccgccctggatgcccggctgcgccaccagattctggagctgattgtcagccaatgtgaggagcgccgcatggggttgctgctgataagtcatgatttgccgctggtggcagctcattgtcagcgcgtaatggtgatgtatcagggtcagcaggtggatgaactgcccgccgcacaactgccgcaggcaacgcatccttacacccgcacattgtggacctgccgcccggatgcacagacgtacggcaccgatttgccggtattggatcgcaccgccctgcaggcgttactgactcaggagatacatcatgccggaaaataa

SEQ ID NO: 273942 - DNA, 825 bp, Morganella morganii
atgacattactgccgaaaatccgccgttccccgtccgcgctgacgggcaccctgattattctgtttctgctgctggtggcgttgtttgcgccgtggctcgccccttatgacccggtactgcaaaacccggcacagcgcctgctggcaccggatgctcaacactggctcggaaccgacagctacgggcgtgatgtgctctcccgcctgatctacggcacccgcccgatgtttggtctggttgcactggtcgcagcaatcaccctgcccgccgggttattgatcggcattctggccggattttacggtcgctgggtggaaacgattctgatgcgctttaccgatattgtcatgtcgatgccgcgcctgatcctcgcatttgcctttgttgccattctcgggccggggctgattaacggcgcactggcactcgccctgacctcgtggccggcctatgcccgccaggcacgcagtgaaatccgccatctgcgcaacagtgattatctggccagtgcggaaatgctggggatccgtggtctgcgtctgctgtggggacacattctgccgctctgtctgccgtcagctattgtccggctggcgctggatctcgccaccattatcctggcagccgccggtctgggtttcctcgggctgggcgcacaaccgccgatggcggaatggggagccatgattgccgatggtatgcaggttattttcgaccagtggtggatagccgccgttcccggcgcggccattctgattgccggtatggcattcaatcttctgggtgatggtttacgggatattatggagccgcaacatgactga

SEQ ID NO: 273943 - DNA, 1047 bp, Morganella morganii
atgtccgatatttcccctgccggaacactgtttcgccatacgctgcgtgtgacgcttcagggtatttttacccttgcgctgacactgctcgggttactggtgatcacctttgcattgtcggcactctcaccggttgaccgggtattacagattgtcggcgatcacgccagccatgagacctatgagcaggtccggctggagctggggctcgatcagcccgtctatattcagttctggcattatgcagagcgtctgctgcacggcgatctcggcatggcctcctctatgggacaaccggtgctcgacggcgtgctgaccaccctgcccgcgaccattgaactagcgacgctctcactgttgatcggcgcttcgctcggcattctctgcggcgtgttatgcgcccgttatgccggaacaccatttgattttatcatccgcaccctgacactcctcggcaactcagtaccggttttctggctgggactgctgatgctgctgctgttctacgccacgcttcagtggagccccggcccggggcggctggatgatatctatcagtataccgtcgaggcaaagaccggttttgtgctgatcgatacctggttgtccgatgatcccggtgcatttaccaatgcggtcgcacacctgatcctgccggtgtcgctgctggcctatttttgcctggcggggatcacccggctgacgcgcgccgcctgtctgagcgaaatgaataaagagtatgtcacgctggcacgcgccaaaggcaataccgacatgcaggtgctgttccgccatgtgctgccgaatatccgggggacgctgatcaccgtgattgcccttgcctacaccggaatgctggaaggtgcggtactgaccgaaacggtcttttcctggcccggcatcggccgttacctgaccgccgccctgtttgccggagataccaccgccgtgatgggcgggaccctggtgatcggtatctgctttatctttattaataacgtgaccgatatgattgtgcgtttaacggatccgcgggtgaaatcatga

SEQ ID NO: 273944 - DNA, 1569 bp, Morganella morganii
atgaaaaaaacatatccggcagcgtcactggctctgctcttttccgtctccgcatttgccgccacaccaccgaataccttaattgttgtccagagtctggatgatattgtcagtctggatccggctgaaagtaatgaactgtccagtatccagaccgttcccagcttatatcagcgcctggtacagccgaaccgtgataatccggagcagcttgacgctatcctgctggaagactggcaggccgatgccgccaataaaaccctgaccgtccggattaaagagaatgcaaaatttgcctccggcaacccggtacgcccggaagatattatcttctcctaccagcgcgctgtggtcatgaataaatcgcctgcgtttattctcaatattcttggctggaataaagagaatatcgcgcagcagtttgaaaaaaccggcgaccgcaccctgaaaataaaatggagtgcggatatcagcccggatgtggcactgaatctgttgtccaccccgatagcctcagtggtggacgaaaaactggtgacaccgaatattaaaaataatgacttcggtaatgcctggctgaaaatgcattctgccggcagcggtgcttattccctgaaggtctatcagccaaaccaggcgattgtgatggccgctaacccgcatgtctccaccggcgaggcgaaaatcccgtccattattattaaaaacgtgccggatccggcttcccgccgtctgctgattcagcagggtgatgcggatattgcccgtgaactgggtgctgaccagactgcggcactgaaaaacagcgccggggtacgggtggaaaatattccgtccgccgagcaggattatatggcgttcaacaccggcaacagcgccaatccgctgctgaaaaacccggcattgtgggaagcggcccgttatctggtggattatgaaggcattacccgcgatctactgaaaggccagtattttattcatcagagcttccttccggtcggtttaccgggcgcgctggaaaataacccgtataaatttgatccggccaaagccaaagagattctggcaaacgccgggattaaagatgcccatttcaccctcgatgtggaaaacaagccgccgtatatcactatagctcaatcacttcaggccagttttgcgcaaggcggtatcaaagtggaattattaccggcggcgggcagccaggtctattcccgcgtacgggcacgccagcatcaggcggccatccgtttctggatcccggactattttgatgcccattccaacgccagcgccttcgcctttaatgacggcaagagcagcaccgttgcgtggctgaacggctgggatattcctcagttatcacaaaccactctcaaagccgtggcagagccggataaagccaaacgtgcgcagatgtataccgccatgcaggaagaattacagcgcagttctccgtatgtgtttatggcacagggacaaaaccaggtggtactgcgtgacaatgttaaaggctatcagcagggactgaacgcagacatggtgtattacgacagagtcaccaaataa

SEQ ID NO: 273945 - DNA, 1632 bp, Morganella morganii
atgaaaaaacacactattgctgtttccctcacgcaggcgctgctgctgagtgcactctcttattccgcatgggcggcacaggttccgccgggaaccaaactggcggaaaaacaggttattgttatcaataacggcactgaaccggtatcactcgatccgcataaagtggaaggggtgccggaatccaatattattcttaatctgctggaaggtctggtctccactgacggtgatggtcatatcgtgcccggagtggcagagagctggtcttccccggataaccgcatctggacattcacactgcggccggatgcaaaatggagtgacggctcgccggtgaccgcacaggattttgtctacagctggcggcggctggctgacccgaaaaccgcatcaccttacggcagctatctgcattatgcttatgtcgaaaatgtggatgatattatcagcggtaaaaaaccaccggaaagtctcggcgtcaaagcggttgatgacaaaacctttcaggttcagctgactcagccggtaccgtatttcccggatatgctgagccataccgcactgaagccggtaccgaaaggggcgattgaacaatttggtgataaatggacatctgccggaaaatttgttggtaacggcgcatataccctgtctgcctggaatgtgaatgagcggctggtgcttaaacgcaatccgaaatactggaatgataaagaaactgtgattgaacaggtgactttcctgccgctccagtcagaaaccagtgatattaaccgctaccgcgccggtgaaatagatgtcaccaacagttcggttccgccggttctgtttgccaaaatgaaaaaagatattccggcacaggttcagatttccccgtatttatgcacgttctactatgaaataaataataccgcagcaccgtttaccgacccgaaagttcgcgaagccgttaaactggggctggatcgcgatattatcacccataaaatcatgggacagggacaaattcccgcttacggttttaccccgcattatattaacggcgggcatttcaccacaccggaatgggcatccctgacgcaggaacagcgcaatgaaaaagggcgcaaactgctggaagaagccggttacagcgaaaaaaatccgctgacctttgaattgctctataacacgtccgatcagaataaacagcaggcgattgccgccgcctccatgtggcagaaaaatatcggtgcgaaagtggtgctgaaaaaccaggaatggaaaacctccaatcagaaccgccatgaagggaattatcaggtggcccgggcgacctggtgcgcggattacaatgagccatcctcgtttctgaacatttttctgtcggacagcagtaataacaccagtttctaccgaaataccgcgtttgacagtgcaatgcagcgcgctttgctggcaacagatgaaaaaacacgtcaatccgcttaccaggaagcagaaactcagttagatcaggactctgcattaattcctgtttattatcgcgtgagtgtccggctgataaaaccatcagtcggcggaattaccggtaatgacccgcttgattatatggatattaagcgcttatatatggtagaaacacattaa

SEQ ID NO: 273946 - DNA, 1641 bp, Morganella morganii
atggttaattcaacgaaaaaaacactgctggcactcagtgtggtagcagcaatggggatgggtattggtacacaggcgtttgctgcggatgtaccggccggtgttcagctggcagataagcaggatttaatccgcaataacggctctgagccgcagtcactggatccgcataaagtggaaggggtaccggaagcgaatattatccgcgacctgatggaaggtattaccctggaagggccaagtggtgaaattctgccgggttcggccatctcctgggaaaataaagattttaaagtctggacgtttaaaatccgcgaagatgcaaaatggtccaacggcgacccggtcaccgcacaggacttcgtttacagctggcgccgcctggctgatccgaataccgcatcaccgtatgccagttatctccagtatgctcacgtggtgaatattgatgatgttatcgccgggaaaaaaaagccggaagagctgggcatcaaagcgctggatgataaaacccttgaactgacactctctgaagaagtgccgtatattccgaaactgctggcgcataactccatgtctccggtgcatccggccactgtcgagaagttcggtgataagtggactcagccgggcaattatgtcagcaacggcgcatacaccctgaaagactgggtggttaacgaaaaaatcgaactgacccgcaacccgaaatactgggataacgaaaaaactgttatcaataacgtccgtttcctgccgatttcttccgaagttactgatgttaaccgctaccgcagcggcgaaatcgacatgacctataacaacctgccgattgaactgttccagaaactgaaaaaagaaattcctgacgaactgcgcatttcgccgtatatgtgtacttattactacgaaatcaataacgaaaaagcgccgtttgataacccgaaagtccgtgaagccctgaaactgagccttgaccgcgacattatggtcaataaagtcaaagcacagggtgatactccggcatttggtttcacaccaccgtttgcggatggtatgtcagccaaagagcctgagtggttcgccaatatgacgcaggaccagcgtaacgaaaaagcacgcaaactgctggaagaagcgggctttaccaaagataaaccactgaaatttaacctgctgtataacacatctgatctgcacaagaaaatggcgatcgccgcatcgtctatctggaagaaaaacctcggtgcggaagttcagctggttaaccaggaatggaaaaccttcctcgatacccgccatcaggggacttatgatgttgcccgcgccgcatggtgtgcggattataacgaaccgtcttcattcctgaacatggttctctcttacagcagcaccaacaccccgcattataagagtgcggagtttgataagctgatgaaacaatcccttcaggtgaaaaccgatgcggaacgtgcgcagatctatcagcaggcggaagcccagctggataaagactctgccattgtaccggtctattactatgtcagtacccgtttagtgaaaccgtatgtgggtggctataccggaaaagatccgctggatcacttccacaccaaaaacttatatatgattaaaaaataa

SEQ ID NO: 273947 - DNA, 921 bp, Morganella morganii
atgtttaagtttattcttcgccgtatactcgaggcgatcccgacgctttttgtgttaattactatctctttctttatgatgcgtctggctccgggcagtccatttaccggtgagcgtaaattaccgccggaagtgatggcgaatattgaagccaagtaccatcttaatgatccgattcatgttcagtattttgattatttagttcagttatcaaagggggacttcgggccttcctttaaatataaagattactcggtgaatgacctggtcgcctccgcgtttccggtctccgcaaaactcgggctggcggcgtttgtgctggcactgattgtcggggtgagtgccggtgtgatagcggcactgaatcagaataccaaatgggactataccgtcatgggctttgccatgaccggggtggttatccccagctttgtggtggcgccgctgctggtacttatctttgccatccatctgcactggctgccgggcggcggctggaacggcgggcagctcagcaatatcattctgccgatgattgcgctgtcactggcctatatcgccagtatctcccgtattatgcgcagctctatgattgaggtgatgcactccaactttatccgtaccgcacgggcgaaaggcctgccgatgcgtaagattgtctggcggcatgcgctgcgcccggcactgttaccggtggtctcttatatgggaccggcatttgtggggattatcacgggttcaatggtgattgagacgattttcggtttaccgggcgtggggcagttatttgtcaacggcgcactgaaccgcgattactctctggtgctgagtctgaccatcctggtcggcacactgaccatcgcctttaactgtatcgttgacgtgctgtatgccgttatcgatccgaaaatccgttattag

SEQ ID NO: 273948 - DNA, 909 bp, Morganella morganii
atgttaccgaatgaaaaaaaccgcgaagctctggaaaattttacggagcagcttgatgtcgaaggacgcagcctgtgggcggatgcccgccgccgctttatgcataacaaagccgcgatcaccagtttgtgtctgttgtttttaattaccctgtttgtgatttttatgccgatgctgtcggagttcgcgtatgacgataccgactggggcatgatgtccgcagcgccggatacggagagcggccactattttggtaccgactcctccggccgtgatctgctggtgcgagtggctatcggcgggcgtatctcgctgatggtgggactggcggcagcactggtcgcggtgctggtgggaacactgtacggcgcgatgtccggctatgtcggcggcaaaaccgactcagttatgatgcgcgtgctggaaatcctcaactccttcccgtttatgttctttgttatcctgctggtgaccttctttggtcagaatatttttctgatcttcgtggctatcggtatggtttcctggctggatatggcgcgtattgtgcgcggccagacactgagcctgaagagcaaagaatttattgaggcggcgaaggtctgtggtgtgccgacccgcaatatcattctgcgtcatattgtcccgaacgtgctgggtgtggtggtggtttacgcctcactgctggtgccgagtatgatcctgtttgaatccttcctcagcttcctcgggctgggcacacaggagccgttaagcagctggggcgcgctgctcaatgacggtgctaactcaatggaagtttcgccctggttactgatgttcccggcagcattcctggtggtgactctgttttgttttaactttatcggtgacgggctgcgcgatgcccttgacccgaaagatcgctga

SEQ ID NO: 273949 - DNA, 975 bp, Morganella morganii
atgactcagttattacaggttaacgacctgaacgtgacattcaaaacgccggacggcgatgtcaccgccgtgaacaaacttaatttttcgctggcggcgggtgagacactcgggattgtcggtgaatccggctccgggaaatcacagacggcgtttgcgctgatgggactgctggcccgcaatggtgtggtcagcggctctgcggtgttcaacgggcgtgaaattctcaatctgaaagagaaagcgctgaacaaaatgcgggcggaagagatttcgatgatcttccaggatccgatgacctcgctcaatccgtacatgaaagtcagcaaacagctgacggaagtgctgatgctgcataaaggtctgagttctcacgatgcttttgaggaatctgtccggatgctggacgcggtgaaaatgccggaagcccgcaaacggatgaatatgtatcctcatgagttctccggcgggatgcgccagcgcgttatgattgcgatggcgctgctgtgcaagccgaagctgctgattgcggatgaaccgaccacggcgctggatgtgacggtgcaggcacaaatcatgacgctgctcaatgagctgaagaatgaattcaacacggcgattattatgatcacccatgacctgggtgtggtcgccggtatctgcgataaggtgttggtgatgtatgccggacgtaccatggaatacggcacggcccgtgatgtgttctaccatccgtcgcatccgtactctatcgggctgcttaaagcggttccgcgccttgacgggcaggaagacagtgagctcgccacgattcccggcaacccgccgaacctgctgcgtctcccggcaggctgtccgttccgcccgcgctgccagtatgcgacagacgagtgcgcacggcatgagccgccgttacaggcattttctcagggccgtttgcgtgcctgcttcagaactgcagaggagttggcataa

SEQ ID NO: 273950 - DNA, 999 bp, Morganella morganii
atgacacattcagaacgtccggttctgctggaaattgaagatttaaaagtccatttttccatcagagataacaaacaatggttctggcagccggcgaaaagcctgaaagcggtggatggtgtgactgtccgtctgtatgaaggggaaacactcggggtggtcggggagtccggctgcgggaaatccacgtttgcccgtgcgattatcggcctggtgaaatccacggccggccgggtaacctggctgggcaaagacctgtgcggtatgagtgaaaaagactggcacaatgtccgcaatgacatccagatgattttccaggatccgctggcatcacttaacccgcgtatgactatcggcgatattattgcggagccgctgcgcacctattatccgtcaatgagtaagacggaagtgacagacaaagtcaaagccatgatgatgaaagtcgggctgctgccaaacctggtgaaccgctatccgcatgagttttccggcggacagtgtcagcgtatcggtatcgcccgcgcgcttatcctcgagccgaaactggttatctgtgatgagccggtttcagcgctggatgtgtctattcaggctcaggtggtgaacctgctgaaggaattacagcgggagatgggattgtcccttatttttatcgctcatgacctggcggtggtgaaacacatttctgaccgtgtgctggtgatgtatctcggccacgcagtggaactcggtacgtatgacgaggtgtatcataacccgttgcatccgtacaccaaagcgctgatgtctgcggtgccggtgccggatccggacaaagagcagaataaaacaattcagctgctggaaggggaactgccgtcaccgattaatccgccgtccggttgtgttttccgcacccgctgcccgctggcggacagtgaatgcgcaagaacccggccgctgctggaaggcagtttccgccatgcagtttcctgcctgaaggttgatccgctgtaa

SEQ ID NO: 273951 - DNA, 225 bp, Morganella morganii
atgaagaaacatccggataaacatattcagtccgcgattgaatatgcactgttacagggatgggtatggattgcgccggggaattcctcgcatgcattctgccggttacggtgcgggtcaccgtatgatgagcaccggcagcatcagataagtgtctggtcaacaccacggaatccggaaaaccatgcaaagcagatcagacgaaaagtggatgcctgtcagtga

SEQ ID NO: 273952 - DNA, 558 bp, Morganella morganii
atggcactgtataattttacgctgacgctgtccggtgtgacagcagatacagagaacctggaggatgtcttatttgcaggcggttgtgatgatgcattactctgtttttacggtaaatcagtctatctggaatttgaccgggaagcaccgtctctggattgtgcaatccgcacggcggtggaagacgtggaatcagctggtgtgaatgcccgggtggaatcggtggattccgctcttgtcggcctgagtgatattgcggaactgacgggtatgtcacgtcaggcaatcgcgttgctcaaagacggtgcgcgcggcccgggcacctttccggggccggtgcagcggttacgcgggcaatccccgctgtgggactgggctgcggtcgcgtcctggctgatggcacagggacggctggctgcacattctgagctggcagaaaacgcaaaaattatcagcaaatggaatcttgcattacgggcaggggttgcagaggatcccgctgaaattgacattatcacaaggtcattaatcgcccggcgtgaaaaatgccgctgctga

SEQ ID NO: 273953 - DNA, 285 bp, Morganella morganii
atggcctatgacctgtttctggaacaggcaatggataaccttgacccggcagacgtcctgctgtttaaccttcagtttgaagagatcggcggtgctgaaattgtaccaaccggcagtgactggtcagaatttgcaccttttctggcacaaaacccggcatgtgccgaagtggttatcggcctggctccggatgaaaatgcagatatcgatcagatttttgcccgtgtactgatttcccggcattttaccggctcaccggaatacgccgtccgctggcgggaataa

SEQ ID NO: 273954 - DNA, 1461 bp, Morganella morganii
atgtcgacattttatacgctgttatattggctgagtattcttttctactggctgctggtggccggtatctctgtccgcgtaatgtacaaacgccgcccggtgacatctaccatgacctggttactgatcatctatattctgccttttatcggaattattgcgtatctcgccttcggtgaactccatctcggccgccgccgggttgagcaggcaaaaggaatgtggctgtctgtttccggctgggttgaaaatctgcgtcagtcaaaacacattttcgccacggaaaacagtacccaggctgctccgctgtttcagctgattgagcaccgccagggaattcccggggtaaaaggtaaccagattcagttatttaccacctgcgaagattcattacgtcagattgtcaaagatatcgataatgcaaaacacagcattgatatggtgttttatatctggaaaccgggcggtgatgtggacaatgtcaccaatgccctgctcgccgccgccaaacggggcgtaaagtgccggattatggtggactccgccggcagctggcacttcttccgccatgattatccggagatgatgcggaatgccgggatcgagtttgtcgaagccctgccggtcaatattctgcgtttcgccctgcgccggatggatttgcgccagcaccggaaaatcatcactatcgataactatatttcctacaccggcagtatgaatatggtggatccgcgctactttaaacaggacgccggtgtcggtgaatgggtcgatattcttgttcgtatggaaggccctgtcaccaccctgttcggtatcatctatgcactggactgggaaatggagcgcggggagcgcctgttaccgccgccgccggacgatattgaaatgccgtttgaaaaagacagcggccataccgtcaatattgtggcttccggtccgggttaccctgaagagctgatccagcaatccctgatgacggctatttttgccgcacaggagcgtctgaccttcaccacgccgtattttgtcccgagcgatgacctgatgcatgccatctgtaccgctgccatgcgtggcgtgcgtgttgcgattgtgatgccgcgcctcaatgactcattcctcgtccgctgggcaagccgtgcgttttataccgaattgctggaagccggtgtggaaatctatctgttcgaggatggtctgctgcacacgaaaagtgtcctcgtggatgaccagctcagtatggtcggttccgtaaacctggatatgcgcagcctgtggctcaactttgaaatcaccgccgttatcgatgatgaaagttttgccggtgacctgaatattgtccagaatgactatatttcacgcgcaacccgtctcgattacactgagtgggagaaacgtccgctgaccaaccgggttcttgagcggttatgttatttcttcagtcctctgctgtga

SEQ ID NO: 273955 - DNA, 180 bp, Morganella morganii
atgagacacagcagaccggaagttgcacgttggcgtatgttacggcaggcaacccgtcgtcgtcgtcgctggctggaaagtcagtctcggcggaatatccggatttttgctctgcgcaagctggatatcgcgagacaacgccgttcgctgctgtttgctcaggctgaattaagccactaa

SEQ ID NO: 273956 - DNA, 729 bp, Morganella morganii
atgcctatttttcgctggatcagctggccaattctcatttctctttgtctgcatgcctctgtggccgcagcgatttactacaacatgaataaggaggttgaggacgaacctaaagtgctgatggtggagatggcggcgtttgcgccggcaccggcagctgctgtggctgaacctcagcctgaaccggaacccgaaacagagccggaacccgaacctgaacctgaaccggtcgtgaagccggttattgaaaaaccggtggaaaagaaaccggttgagaaaaaaccaaaaccgaaaaaagagaaaagagttgagaaaccggccgtaaaaccggttgaaaccaaagcaccggtctccgataaaccgctgttcactggtacgccggaaggtcagcagaacgtgcagaaagcccctgcaggcccggtcggaaatgtggcctctgccggacaaagtgatgtcggcggcggtgacccgaaagccctgaaccgtgctgatccggtctatccggcacgggcacgcagcctcggcaaagaagggaaggtgcgggtcagatttgatgtcgataccgatggccgtattcagaatatcgatattatcgaagcatcaccgaaaaatatgtttgaacgtgaagtccgtaatgcgatgcgtaaatggcgttacgagaaaaagccgaagaaaggtatgaccacaaccattattttccggatcgacggtaaaacctctattcagtaa

SEQ ID NO: 273957 - DNA, 783 bp, Morganella morganii
atggcagcgctgtttaatgctttagtctctgattcagttattttatttgtcgttatctttattttatctgtcggctcggcctatgccggaaaatacctgttcaaaaaacgtcacggtaaaaccgaattagcggatgatgaaaccaaaattgttctcggtgccgtattatccctgctcggtttattaatcggctttttactgaccatttctatcggcggctataataaccgcgaacagatggaagaaaacgaagctattgctatcggtaatgcattccagcgggcacaattactgtctccggaaaataacctgcgggcaaatactctgcttaacacgtatattgacgcacgtattgatttttttaacggcggctcacaggcaaaaaatgaaaaatggcgggatatctcccttgaggctcagtcttctctctggcagatcgctgcatctgaagcccgtacggccccgaatccggtgattgcctccgtcctgaccgcattcagtgatctctatgtgtccgaagaaaaaaccatggccagctggcgctatcagatcccgggagccgcctgggtattactgattttatttgccgtcagtgccaatgtgctgatcgggtataatatccgcggactgcgcggcagcaatatcatgattttaattctgccgctgctgacaaccatggctctgtttatgattgcggaaattgatattccgggtgaaggggttattcatgtggtaccggataatctggtgaatttacgcgctgatcttttcccggcaaaataa

SEQ ID NO: 273958 - DNA, 1374 bp, Morganella morganii
gtgacctcatttgctgaacttaatgcacttcccgcagaacaaattaccaacctgaatgaactgggttatctgaccatgaccccggttcaggccgccgcattaccggccattctcgcgggtaaagatgtccgtgcgcaggccaaaaccggcagcgggaaaaccgccgcattcggcctggggctgttacagcatatcgatgccggacactttatgacccaggcactggttctgtgcccgacccgggaactggcggatcaggttgccggtgaattgcgccgtctggcgcgttatctgccgaatatcaaaattctgaccttatgcggcggtgtgccgttcggtgcccagcgcgattccctgatccacccgccgcacattattgtggccaccccgggccgcctgattgaccatctgaacaaagacacgctgcaccttgatgctatccgcactctggtgctggatgaagctgaccgtatgctggatatgggttttgctgacgatattactgaaatcctctcccgtaccccggaagaacgtcagaccctgctgttttccgccacctggccggatgagattgcggccgtcagccgccgttttcagcgcgatccgcaaaccattgaaatcaacagcaccgacgaacttccggcggttgagcagcagttttatgaagtttcacggcgcggcaaaactgaactgttacagaaattactgagccgcgaacaaccggcatcctgtgtggtgttctgcaacaccaagaaagattgccaggatgtgtatgaagccctggagagcagcggacagagtgttttagtgctgcacggcgatatggaacagcgcgagcgtgaccagaccctgatccgctttgccaacggcagcagccgtgtgctggttgccaccgatgtggcgtcacgcgggctcgatatcaaagcccttgagctggtgatcaactatgaactggcgtgggatccggaagtgcatgttcaccgcatcggccgtaccgcccgtgccggtgaaagcggactggcgatcagcctgtgtgcaccggaagaagcggtccgggcaaacgcactggaagagatgctgcatatgaaactgaactggcagccaatccctgccgggctgcgcatcaccccgctggatgcggcaatggcgacactgtgtattgacggcggcaaaaaagccaaaatccgtccgggggacattctcggcgccatgaccggtgatatggggctgaacggcgaagatatcggcaaaatcgtgatccatccgatgcatgcttatgtcgcggtgcgccagggtatcgcgcagcaggcgcgtaaactgcttcagcagggtaaaatcaaaggaaaacctgtcagagtacgattgctgaaatag

SEQ ID NO: 273959 - DNA, 129 bp, Morganella morganii
atgatactattaccggacgccggtgtcgcggggaacctgtggtttattccggcagacaaaacggccactcagaagagtggccggtatgaaacgcattattttaaatcactgttactgctgtctaactga

SEQ ID NO: 273960 - DNA, 441 bp, Morganella morganii
atgactcaacaacaatgtttacctaacggggaactggtgctgcgcaccttaaccatgccgacagacaccaatgccaacggggatatcttcggcggctggctgatgtcgcagatggatatcggcggcgctattctggcaaaggagattgcactcggccgcgtggtgacagtccgcgtggacggcatcacctttctgcgctctgtcgcggtcggtgatgtggtctgctgttatgcacgatgcctgaaaaccgggaattcatccatgaccgtcaaagtcgaagtctgggtgaaaaaagtggctaccgaccctatcggtgaccgttaccgggcaacagaagctgtcttcagctatgttgcggtggatgcggataaccgtccccgcccgctgcctgacggaaaacgtcattttcagttagacagcagtaacagtgatttaaaataa

SEQ ID NO: 273961 - DNA, 540 bp, Morganella morganii
atgaagcaactactcgactttatccccctggttatcttttttgccatatataaaaccgtggatatctattacgcctccggtgccttaattgccgcgtctgcggtggcgctggctgtccgctggttcatgtataaacatctggagaaatctgccgttatcacctttgtgattgtggccatcttcggcaccctgaccatcgttttccatgatccgcagtttatcaaatggaaagtgaccattatttatgcgctgtttgctctcgtgttactgggcggccagtttatcttcggtaagccgctgattcagaaaatgctgggcaaagagctgactctgccgccacaggtctggcagcgtctgaatctcgcctgggctcttttctttatcgtctgcgcggccgtgaacgtgtatgtcgcgttctggttatccatggatacctggatgaacttcaaagtgtttggtctgaccgctgtaacactggtatttaccgttgccagtgtggtatatatttaccgtcatctgccacgggaagaagaaaaataa

SEQ ID NO: 273962 - DNA, 1758 bp, Morganella morganii
atgcagtcgaaccgactattgcgctggatgccgggactttctgtttttctgcactatgaacgcaaaaacctgcgctttgatatccgcgcagggctttctgttgctgccgtggcattgccggtggctatcgcttacacaggactgatgggcattaatgcgattgtcggtctctatgcctgtatcctgccgatggtgacttatgcgctgttcggctcctcccgtcagctgattgtcgggccggatgcggcaacctgtgcggtgattgcggcggcgattattccgctggctaaaggtgacccggatacgctgtggcagctggcgattatcatgacgctgatgacgggtgtctggtgtctgatcgccggacatttcaaactcgccgcattcgcggattttttatcacagccgattttacaggggctgctcaacggcgtggcggtgacgattattgtcggccagataggtaatgtgctcgggctggatgaactgccgtcccagctgattgagtgcctggtggcgctgccggagcatctgcatcttatgcatatgccgacactgatcctctccgctgccagcctggcggcgctgtttttattacgggctgtccgccgcacctggccggggccgctgattgtgatgacgattgccacactggtcagtgcgcagctggatttctcctcaatggggattgctgtggtcggtaatctcggtaacgggctgccgcatatcaaaatgccggcatttgaccccggtttgctgcgtgaactggtgatcccgtcactgaaccttgcggtgatcagtattgtcagctttatgatgacggtgcgcagttttgccgagaaaaacggctatgccatcgatgtggatcaggagctgcgggcacaggggtatatcaacattgcttccgggttatcccaggggttcgcggtcagtgccgcgaccagccgtaccgccgtcaacgatgccactggtggtaaaacacagatggtgtctctgattgccgccgggctgatcgcactggtgctgtttttcctgaccggtttcctcggacacattccgctggcgacactcggggtggtgctgatttactcctcctggtcgatgttcagcattcgtcagattttctctttccgtaaacggaataaatcggcattcaccctggcgctgtttaccctggtggctgtgctggtggtggggctgatcaacggtatcgggtttgcggttctgctgggactggtacagttcctgcgcacggttttccgtccgacagaccagttactgggtgtggatgagcaggggatgatccattccatcaacaacagtaacgtggatattaatcaggttgacggattattgatgtaccgctttaattcgccgctgacctatttcaacgtcgcgtattttaaaaagcgggtgttacaggtggtgaataccgcaccgaaacggcccggatgggtggcggtggatgcgactgtcagctttatcaataatgacatgagtgtgttcagcacactgaatgagctggtgactgagctgaaaatcaagggtgtcactctgatcctggcgggacggcgcaccgaactgacacgctgggtgtcggaaaataaaatcaaacgcaatgatgatgatttgattattgtgccggatctctatttcgccatcaggctgattcagagtaaacagcaaagccgtgtcaaagcgatagaagaggcgatggagcaggcagctgagggagcggaaaaaccgctcaccacctga

SEQ ID NO: 273963 - DNA, 1347 bp, Morganella morganii
atgaagacgtatagtctgcgcctgcggctgggcgggttattgctgctgctcaccctgctgacctggggtgtcgccagtgtgttcgcctggatgcagaccacaaaatccatcaatgaattattcgatacacaacaaatggcctttgccaaacgtctgtcagttttgccgtccgggctcgagttcccgccgtcggcgatacagaaaaccaaaaaaatgctctccggcaaccggggaaagcaggatgacgatgcattcgcttttgctatttttagtccgtcgggcgagcgggtgctggatgacggcgaaaacggccggaaaattccgttctctgacaagaaaaacgggttccgtgacggttcactgacggatgataacgaccgctggcgctttgtacagctgccttccgccgatggccgctacatcatcgtggtcggccaggagtgggaataccgcgaggatatggggctgaccattatcaccgctcaggcgatcccgtggctggtggctctgccgctgatgctgcttctgttcctgtggctgctgacccgcgcactgaccccgctgcgcctgctggcccggcagttacagcgccgtaatccggcagagctgacgccgcttgccccgccggtgctgccgaaagaagtcagcccgatgctggacgctctgaacggattatttctgcgtatccgcgatctgcgcgaacgggaaagccgctttacctctgatgccgcccatgaactgcgcagcccgctggccgcgctgaaagtacagactgaagtaatgcagattgccggggatgaccccgccacccgtgaacacgtgaccgcgaatctgatcaccgggattgaccgcgccacccgtctggtggatcagttactgaccctctcacggctggaatcacagtctcacccgcaggaatgtacagagctgcgctggtcagccattattaatgatgccattgcacaaacagctccggatgcggctgtacatcaggtcagtgtgatacctgacctcaccgcgcctgaactgacggtccgcggcgaacaactgctgctgaccgtcatgctgcgcaatctgctgcataatgctatccgctacggcaaaaccggcggcaccgttcatctgacgctgacaccgcagcagttagtgattgaggatgatggtccgggcgtcagtgatacgatactggcccggctgggagaacgtttttaccggccgccgggacaggaaaaaaccggcagcggtctgggattgtctatcgtgaaacggattgcggaactgcatcatatgaccatacagttccgtcgcagcccgcagggcgggtttattgctgagatcaggtggtga

SEQ ID NO: 273964 - DNA, 672 bp, Morganella morganii
atgcggatattattaattgaagatgaccggctgattggcgacgggctgaaaatcggcctgagcaggctcggctttacgcctgactggtttaccgatgggcacaccggccgggaggcgctttatgctgctccttatgatgccgtaatcctcgatctctccctgcccggcatggacgggctggatatcctgaaacaatggcggtctgaggggcgcgacgagccggtactgatcctgaccgcccgtgatgctcttgagcagcgtgtcagcggcttacaacagggcgcggatgattatctgtgcaaaccgtttgccctggctgaagtggcggcacggttacaggcactgatccgccgccgctacggtcagctctctgaaaaactggtgctcggcgacgtggagatggatccggtggcgatgaccgtcacccgcaacggcgtaccggtatcactgaaaggtaaagaactggcactgctggcactgtttctgcgcaatccgcagaaagtactgtcccgcgcgatgattgaagaaaaattgtataactgggatgaagatgtctccagtaatgccgttgaagtgcatattcaccatctgcgccgcaaactgggacgcggatttatcaaaactattcatggtgtcggttatgtcgcgggaaaaaatgatgaagacgtatag

SEQ ID NO: 273965 - DNA, 414 bp, Morganella morganii
atgaaaaaattacctgcactcgcattgcttgccactttactggcaggatcagccggttccgtttttgcagccaacggcggttttgaaggtcccggcgcgacagccgtgacaaccaccacagcggcacaaaacggcggtttcagcggccctgatgcccgtaaaatgaccgttgcggatgcactgaaattatccgatgatgcaccggttgtgctgcgcggtacgattgtccgccagctggataacaaacattatgaatttaaagacagcaccgggactatccgtgctgaaatttccccgaaacgctgggacggactgaaagtcacgccgcaggatgaaattgaggtcgaaggggaaatcgacaaagagtggaataaaaccgaactggatgtaaaagcggtacgcaaagtacagtaa

SEQ ID NO: 273966 - DNA, 777 bp, Morganella morganii
atgtccatgccggtgccggttcttgcccgcgacagtcttaattttttccgtaatcagctgttgtctgtcctgatcatttcgctgctcaccgccgctgtgaccgtcgggctcaatgtcctcctgacttacaattccaacgggctggcacttatccgtgctctggagaccacttacgccactgaaggctccggcggctttcagcgggcggtcgccgcactgacatccgatgaccagtggcagatgctgaaaaccggtctcggaactatcttcagctccctgctgggcaatgccgtctttgtgacgtccatgattttcctgattttcagtgcctcacagggacagccggtatccgcgctgcaggccatcaccggctctgccggacgcattccgcgcatgctggtgctgctgttaatctgctcgctggtgattgccctcgggctcgtcgccatgtatctgccgggattaattctggctatgttactggcgctggcaccgatcattatgttcaccgaaaagaacagcgtatttaccgctattaaaatcagcggaaatattgccctgaaaaatatcagaacacttctgcctgctattttaatatggtttgccctgaaacaggcatccgtagtgtttcttagtaaactaccgatagaaaatgagcatattctgatgactgttattctgtttattaataatgtcatcagcggactggtaattatttatctgttccggttctatcagttatttacacaatcgcaatctgtcagcgactatcagtaa

SEQ ID NO: 273967 - DNA, 636 bp, Morganella morganii
atgaaaaagctttctgcagtgtgtttagcactggcaacggttttaccgtcagtttcaatggcacaccaggccggtgattttatcgttcgtggtggtactgcgactgtgcgtccgaacgtcagctctgataacgttctgggcttcggttcttttgaagcgaacaataatactcagttaggtttaactttcagttatatgatcactgataatatcggtgtggaattactggcagcgacaccgtttgagcataaaatctctgttccggctgcgggtgaaattgcctctgccaaacatttaccgccaaccttaatggcacagtactatttccgtactccggaagataaactgcgtccgtatttaggtgtgggtgttaactataccttcttctttgatgaaggatttaacgataccggtaaaggcgcaggcttaagcgatctgagcatgagcagctcatggggtgtggcagcacaggcaggtctggattatgaattagaccagaactggatgctgaacgcctccctttggtggatgaacatcaaaactgatgttgatttcaaagccggtggtgccagccagtcttacaaaactaacctggatccatgggtattcatgtttggtgtcggttacaaattctga

SEQ ID NO: 273968 - DNA, 315 bp, Morganella morganii
atgaagtatatgaaactggtcacctcattttttgttgtcatgtttatggctttcaccctgtccgcctgtgccccgactgccaccagtgaaggtaccgggggttattttgatgattccgtcattaccactaaagtgaaaacagcgttactgggtgagaaaggcattaaatccactcaaatcagcgtggaaacatttaaaggtaaagttcagctgagcggatttgtctcttcagaaaaagaagcgaacctggcggtaaataccgcgcgtaaagttccgggtgtgaaggttgttattaactcaatgaagttgcggtga

SEQ ID NO: 273969 - DNA, 807 bp, Morganella morganii
atgagccggtatgaacaactttttcagcatttgcagtcccgcaaccagggtgcgtttatcccgtttgtcaccctcggtgatccgtccgctgaggtttccctgcaaattattgatgctctggtggccggtggtgctgatgccctggaaatcggtattccgttttctgacccgctggcagacggcccggtaattcaggacgctaacctccgtgcctttgcggccggtatgaccccggcacgctgctttgagctgattgcacaaatccgtgcaaaatacccggaactgccggtaggactgctgatgtatgccaatctggttttccataacggtatcagtcagttttatgaaacagcggcaaaagccggggtggattcggtgctgattgccgatgtgccgcttcatgagtctcagccgttccgggatgctgcgctggccagtaatatcgcaccggtctttatctgtccgccggatgcggatgataaattactggaaacactggccgccgccggaaaaggctatacctacctgctctcccgtgccggggtgacaggaacagaaaagcgggctgaaaagtccctggctgatctgacggcaaaactgaccgcgctgaatgccgcaccgccggttcagggattcgggatttccgaaccggaacaggtacaggaatcactgcgaaatggtgcagcaggggcaatctccggctcggctgtggtaaaaatcatcgccgcaaatctggataatgtaccggtgatgtgtcagaaactgcgggaatttacgcagaaaatgaaaaacgcaacgcaattataa

SEQ ID NO: 273970 - DNA, 1191 bp, Morganella morganii
atgagtaaattaaatccctattttggtgaattcggcgggcagtttgtgccgcagattttaatcccggcactcgaccagctcgaagatgcctttattgccgctcaggaagacccggaatttcagcgtgaatttaccgatctgctgcaaaactatgccggacgcccgacagccctgacactgtgcaaaaacctgactgcgggcagcaaaaccaaactgtatctgaaacgcgaagatttactgcacggcggtgcacataaaaccaaccaggtgctcggccaggcactgctggcaaaacggatgggaaaaacggaaattattgccgaaaccggagccggtcagcacggcgtggcggcagcactggccagtgcgctgctcggcctgaaatgccgggtatatatgggggcaaaagacgtggaacgtcagtctccgaatgtgttccgcatgcggctgatgggcgcggaagtcattccggtgcacagcggctccgccacgctgaaagatgcctgtaatgaggcgctgcgcgactggagcggcaattatgaccgcgcccactatttattaggtaccgcagcaggtccgcatccgtacccgacgattgtccgcgagttccagcgcatgatcggtgatgaggcccgcgcccagatcctcgcccgtgaaggacgtcttcctgatgcggtgatcgcctgtatcggtggcggttccaacgctatcggcgcatttgccgggtttattcccgatgaatccgtcgctctgatcggcgtcgagccggccgggcacggtattgaaaccggcgagcacggtgcaccactcaaacatggccgcatcggtatctatttcggtatgaaatcaccgatgatgcagacagaagacggtcagatcgaggaatcttactccatctctgccggtctggatttcccgtctgtcgggccgcagcacgcgtatctgaatgctatcggccgggcggattatgtttccgccaccgatgacgaggcacttgacgcctttaaaaccctgagccgtcaggaagggattatcccggcactggaatcctcccatgccctggcacacgcactgaaaatgatccgtgaaaatccggagaaagaacaaattcttatcgtcaatatttccggtcgcggagacaaagacattttcactgtttatgacatttttaaagcaagaggtgatttctga

SEQ ID NO: 273971 - DNA, 1368 bp, Morganella morganii
atgaaaggcaccgtattagaacagattgtgaatgataaacgtatctccctggttgcgcggaagaagcaggagccgctgctgagttttgcggataatctgccgctgagtgaccgcgatttttatcaggcactgcgcagcgcggaaaccgcatttattctggagtgcaaaaaagcctctccgtcgaaagggcttatccgtcaggattttaatctcagtgaaatcgccgcggcctatgcgccgtatgccacagcagtatctgtactgaccgacgagaaatattttcagggacaacatgactatctgcggcaggtgcgcgcgctgatcacgcagccggtgttgtgcaaagatttcattattgatgcttatcaggtgtatctcgcccgccactatggagcagacgcgattctgctgatgctctccgtcctgaatgatgcggattatcactcactggcgaccctggctcattccctcaatatgggtgtactgacggaagtcagtacggaagaggaactgagccgcgctattgcccttgatgcacaggttatcggcatcaataaccgcgacctgcgcgacctctctattgaccgccgccggacagcggattttgcaccgcatattccggctgaccgcattattatcagtgaatccggcattaccacccatcagcacatccgcgaattgcgtccccatgctgacggattcctgatcggcagtgccattatggcgcagcctgatctggacacagctatccgccgcctgatttacggcgaacacaaagtctgcggactgacccgtgcggacgatgcccgcgccgcttatgacgccggtgccaccttcggcggcctgatttttgtcagcaaatcgccgcgttatgtggatgaagtacaggcagctgaggtgatgcgcggtgcaccgctggcgtacgtcggtgtgttccgtaaccacgatcccgcagatatcgctgccattgcccgccgcctgaaactgcatgcgattcagttacatggtgatgaaaacgagcacgatatcgcgctgctgcgtctgcaccttccggcaaaatgtgagatatggaaagcgctggatatgtcgcacggtgcggatatcaccgtgcctgacggcgtggtgcggctggtcctggataacggcaaaggcggcaccggccagactttcgactggcagacactgcccccttcattgccggtgccctttaccctcgcgggcgggctgaatgcggaaaactgtgtctccgccgccgcttccggtgctgccgggctggattttaactccggcgccgagtccgcccccggtattaaagatgcagaaaagcttcgtcagatatttaatcaattacatcagcaagttgcctga

SEQ ID NO: 273972 - DNA, 999 bp, Morganella morganii
atgcaaacattatttgaaaaactttaccggggtgaaacactgaccctggcggaaagccgggagttattttccgcgattatccggggagaactgagtgaaacccagctggcggcagcgctgatcagcatgaaaatgcgcggtgaacagccggatgaaattgccggtgccgcccaggcctgtctgaataacgcgcgcgccttcccgcgtccggactatcgtttcagtgatattgtcggcaccggcggcgatgcttccgacagcatcaatatctccacggccagcgcctttgtggcagcggcctgcgggataaaagtcgccaaacacggcagccgcagtgtttcgagcaaaaccggctcttctgatttactgaacgccttcgggattgcgctggacaccccggcagatgtatcccgcagcgcactggatgatgtcggcgtctgtttcctgttcgccccgcactatcacgacggcttccgttttgccgcaccggtgcgtcagcaactgaaaacccgtaccttatttaatgtcctcgggccgctgatcaacccggcccgtccgccggttgccctgatcggcgtatacagcccggcgctgatccgccctgttgctgagacgctgaaagtgctcggctatcagcgtgccgctgtggtgcacagcggcggaatggatgaggtttccctccatgcgccgacacaggttgccgaactgcataacggggagatccgcgaataccgcctgaccacagacgatttcggcctgcccggttatgacatgcaggaactgcgcggcggtaccccggaagaaaaccgtcagttgctgacccggttattacagggagaaggcaccgcagcacaaagccacgccgtggcagccaatgtcgccctgctgatgaaactcaatgataacgaaaacttacaggataatgcgcagcacgcgctggcaatgatccgcagtggtaacgcctttgagcgcgtcaccgccctggccgcaagaggataa

SEQ ID NO: 273973 - DNA, 579 bp, Morganella morganii
atggctgatattttactgctcgataatgtcgattcctttacttataacctggccgaccagttccgtgctcagggccatcaggtggtgatttaccgcaaccgggttccggcggaggtcattctgtccgcgctggaaaccatgaaaaacccggtgctggtgctatctccgggtcccgggaaaccagcggatgccggatgccagccggaagtgctgagccgtgtcagaggacgttacccggtgattggtatttgcctcggccatcaggcgattgtcgaagcctacggcggcaaagtcagccacgccggtgctgtgctccacggtaaagccagccagctgcaccacgatgagcaatctatgttttccggtctgcctaacccgatgaaagtggcacgctatcactcactggcagcggaaatcatcccggaagcgctgaccgtgtgtgccaccagcgacaacattgtgatggccgtccgccatgaacaggacaaagtctgcggcttacagtttcaccccgaatccgttctgacaccggacggtgcagccctgctggcgaagacccttgcgtgggcacaggcataa

SEQ ID NO: 273974 - DNA, 1551 bp, Morganella morganii
atggacagcacgattttcacacaacacatccggacagattatccggcttatcagcccgacccggcggcggtattcaccgcgctttgcgcacagcgtcctgcaacgctgttattagaatccgccgaaatcgcgtccagagcaaatttaaaaagcatgctggtactgcacagcgcactgcgcatccgctgcaccggacacaccgtcaccgcagaagcactgaccgccaacggtgcggcattactgccggtattgcaggcaagtctgtccgccgggactatcagcggtaacacactgacactgcaattcactgcaccggccgcccatgcggatgaagatacccgcctgcgcgccgcatcggtctttgatgtgctccgcactctgatgaacctgccgtcacaggcagatgaccgtcacgcgctgttctgcggcgggctgttcagctacgacctggtcgcagcctttgaggcactgccgccggttgaacgcaccaacagctgcccggattactgtttttatctggcggaaaccctgctcaccatcgaccaccagcagcagaccagtgaactggttaccctgacatttacagcggatgccgcagaacaaacccgcctgacagcacagcatcagcaggtattaacggcgctggcacagccggtaaccggttctgcggatgttacgcccgcagatatcagcgtgacaacgtcacattcagatactgatttctgcactattgttaatcagttaaaacaatccattgttcagggtgatattttccaggtcgtgccgtcacgccgttttcagttaccgtgcccgtccccgatggccgcttaccgcgaactgaaaacccgtaacccaagcccttacctgttctttatgcaggatgcggatttcactctgttcggcgcatcaccggaaagtgccctgaaatatgacccggcaacccgtcagattgaaatctacccgattgcgggcacccgtccgcgcggcctgtcagcagacggttcggtggatgcggataaagacagccgtctggagcttgacctgcgtacggatcagaaagagctggccgaacacttcatgctggtcgatctggcccgtaatgacctcgcccgtatctgccgtcccggcagccgcagtgtggcggaactgaccaaagtggatcgttatgcgtttgtgatgcacctggtgtcccgcgtcaccggtgaattacgcggtgacctcgatattttccatgcttatcaggcttgtatgaatatgggcaccctgaccggcgcaccgaaagtccgtgcaatggaactgattgcacaggccgagaaagtccgtcgcggcagctacggcggtgcggtcggctatttccgcggtgataccaccttcgatacctgcattgtgatccgctctgcctatgtcgaaaacggcatagccactgtgcaggccggcggcggcgtggtactggattccgacccgcaggcggaagccgacgaaaaccgcaacaaagcccgcgcggtgatccgcgctatcacccgcgcccatcatgcagaggagacattctga

SEQ ID NO: 273975 - DNA, 870 bp, Morganella morganii
atggagccggaaaatacaggtattgacctgtcgtgctatgatttacacagccataccactgcgtcagacggcatgctgacaccggagcagttactggacagagccgttgagatgaaggtgactgtgctggcaattaccgatcacgacaccacggatgcacttccggcggcacatcattatcagcaggcaaataatttaccgctgacggtgattaatggtgttgaaatatcaacgctttgggaacatcatgagattcatattgtcgggctgaatattgatattacccatccggcaatgacagaattactggcgcagcagtcagaacggcgccgggcacgcgggatgcttatcagtgaacggctggcaaaggccggaattgaaggcacctgggaagaggcgaatgcgctggcgcagggcggtgaagtcacgcgcggacacttcgcccgggtgttgatcgcccgtggtgtggaaccgacgattccgaaagtgttcaaacgctatctcgcccgtaacaaaaccggctatgtgccgccgcagtggtgtgatatccctgacgcggtgcaagccattcatgccgccggcggacaggccgtactggcacatcccggccgctatggcttatccgccaagtggcttaaacgcctgtgtgatttctttaaacaggccggcggggatggcatggaagtggcacagtgtcagcaggctccggatgagcgccggactctggcacagtacgcaataacatacggattaaaagcctcccagggatccgattttcatcagccgtgttcgtggatagaactgggccgtaaattgtggttaccgggtgatgtaataccaatctggcaggattggtcactgaaggattaa

SEQ ID NO: 273976 - DNA, 621 bp, Morganella morganii
atgggccagatgttttatatccatccggataacccgcaggcacgcctgatcaatcagagcgtggagatttttaacaaaggcggtgtggtggtttacccgactgattccggctatgccatcggctgccgcctggaagataaagatgcgttacagcggatctgtcgtctgcgtcagatagacagtaatcataactttaccctgatgtgccgcgatttatcggatatctccacctatgcacatgtggataacacggtattccgtttaatcaaaaataatacaccgggtaattacacctttattctgcgggcaaccaaagaagtaccgcgccgtctgatgagtgaaaaacgtaaaaccattggtctgcgtattccggcaaacccgattgccatggatttgctcgctgctatgggcgaaccgctgatgtcagccagtctgatcctgccgggcaatgattttgcggaatctgatccggaagaaattaacgataccctgggcaagcaggtggatctggtgatccacggcggttatatcggccagcagccgaccacggttatcgatctgactgacgacgtgccggttgtggtgcgtgaaggaaccggagatgtaacaccgttcctgtga

SEQ ID NO: 273977 - DNA, 933 bp, Morganella morganii
atgagccagaaaacagaaaagttacaaaaggtgttggcgcatgcagggcatggctcacgccgcgaaattgaaagttacatcgaagcgggtcgtatctccgttgacggcaaaactgccacactgggtgaccgtatcgatgttaatacgaatgctaaaatccgcctcgacggccggattttaggtatcaaagatgcacagaaaaacccgtgtcgtgtactggcttattacaagccggaaggggaattatgtacccgccatgacccggacggccgtccgacagtctttgatcgtctgccgcgtattcagggagcccgctggattgctgtcggccgcctggatgtgaataccagcggattactgctgttcaccaccgacggggaactggcaaaccgcctgatgcacccgagccgtgaagtggaacgtgaatatgcggtccgtgtcttcggtgaggtggatgatgccaaacgcaatcagctgctcaaaggtgttcagctggaagatggtccggcctcattccgttcgctgaaattcaaaggcggggaaggtatcaaccagtggtttaatgtctccctgaccgaaggccgtaaccgtgaagtccgccggatgtgggaagcggtcggtgtgcaggtcagccgcctgatccgtgtccgttacggcgatatcgatctgccgaaagcgctgccgcgcggcggatgggtggaactgaacctggaaaaaaccaactatctgcgtgcactggtgggactgcctgcggaaaccaccaccaaggtttctgtggaaagtgataaacgccggatcaaagccaatcagatccgccgtgcggtaaaacgtcactcacaagtcggcaccaccgcatcaaaacgtaattccgggcgtccgtcatcaacccgtcagggtaccggaaatacacagaaacgccgtaccggtaaataa

SEQ ID NO: 273978 - DNA, 981 bp, Morganella morganii
atgaccgggaaacagagatatatctgcgaggagatgattattgcgataaccagatgcggtctgttaacgctcatctttctgctccccggatgtggtgacgaaacacagcccgatgcacctgaactgagccggtattactacagtaatattaccggggatgatctgttttttacggtaaacggaaaaagttatcaccttgcacatgatgcggagggcatcgtttatctgccgtccggcctgaataagctggaaaccccgcagggacaacaggtttcctttatggcctatcccgggaacaacggcgggatcctcaatccgtcccgtgcccgttattattcctataccattcatgacggcgatacactgtattcaccgcaatttaatgccatggtgaagatatttaaatttgacggccattattatcagggaccgttgcggaccagtaatgccgacgttatcgataataacctgtttaaatgccggtatccttccgatgtgccggatataaaagccgtgctggacagatttgttgccggggaaaaaggaatgatgacaatctgtatgaatgaaaatgaattccgccggttcctggaatacaacccgcgcggtgtcagtttattaccggataatacagtgatcacaccggaacaggatgcggataccggcaatactctccgtccgcatgatattcagtttcaggatgcggaattacgtgaggatgctgagaaaatcactgatattgtgacggagttccggcatcagacggatgtgacaaaaaaatatgaaatatacagccgttatcacacggtactgatgcggatggctaatcgttaccgtcagataatgctgcaaagcgataaagagaataagacagataaagaagagagcctgaaattcagtgaatttgtgcaggaaaccggcgaaattttcggtgccggggttttaccgctgcaaacggatgaaacgcccccggcacactga

SEQ ID NO: 273979 - DNA, 783 bp, Morganella morganii
atgcataataatgatgtatcccgcttttccccgtcctcccctgatgcactgaagaataaaatcatcctgataaccggtgccggtgacgggatcggccgcgaagccgccctgacctatgcccgctacggtgcggaactgatcctgaccggccggacagaatccaaattacaggccgtccgtgatgaaatcacgcagcgttacgggtcagtgccgcgtatttatcatcaggacttactgacactgacagaagcgcaaagccgtcagttcgctgccgcactggaacaggaaattccgcgtctggacggcgtgctgcacaacgccggtattctcggcgtggtcgcaccggtcactgagcagccggtgcagttatggcaggatgtgatgcaggtgaatgttaacggcacctttatactgacacaggcactgttacccctgctgctgaaatccccgcagagctcgctggtattcacatcatcaagtgtcggccgcgaaggtcgtgccggatggggtgcctatgccgtctcaaaatttgccactgaaggtatgatgcaggttctggctgaggaatataaaggtacgggtctgcgcgtcagctgcattaatccgggtggtacccgcacggccatgcgcgccggcgcatttccggatgaggcatcagaaaaactgaaaaccccggcggatattatgccgacctatttatatgtgatgtgtgatgacagtgccggtaaaaacgggataagctatgatgcacagcccggacgcaaagccggaccggcggaataa

SEQ ID NO: 273980 - DNA, 1053 bp, Morganella morganii
gtggagtttctctcacaatacggtttgtttcttgctgaaaccgtaactattgttctggcaatcattgccattgtcgtgttctttgtcatgctcagcatccgtaaagggcagtctctgggtaaattacgtctgacggatctgggtgaaaactaccgcgacagacagcgtgaaatgcaacatgcccgcatgagcgaagcagagcagaaagtctggaataaagcgtttaaaaaacaacaaaaaaacgaagataaaaaagacaaaaataacgccaaaaacgggcagacccgtctgcgcaaatcctgtatttatgtgatcgactttaaaggcagcctggatgcgcacgaggtggaatcactgcgtgaagaaatcaccattattttgtccgtggccgagccgggtctggatgaagtgctggtgcgtctggaaagcccgggcgggctggttcatgcctatggtctggcagccgctcagctgacccgtctgcgtgagaaaaatatccgtattaccattgcggttgataaagtcgcggcgagcggtggttatatgatggcgtgtgtggcggataaaattgtggccgcgccgtttgcgatcgtcggctcgattggcgtggtggcgcaggtgcctaatatccatcgtctgctgaagaaaaatgatattgatgtggaaatgcatactgccggtcaatataaacgcacgctgacattcatcgggcagaataccgatgaaggccgtgagaaatttcagcaggagctggatgaaacgcacgttctgttcaaaagctttgtttctcagaaccgtccgtctctggacattgataaagtggcgacaggtgaacactggtacggcacccaggcaaaagagctgggactggttgatgagctggcagtgagtgatgatttaattgtcgcggcaattcctgaccacgaagtgattcaggtgcgttatttccgccgtaagcgtcttatcgataaaatcacccagagtgtgatgatgagtgctgaccgccttattctccgctggtggcagcgcgggaatggcccggtcgggaaataa

SEQ ID NO: 273981 - DNA, 252 bp, Morganella morganii
atgcaaaaagaaaccatcgccatcagcaaacaagagctgttagaaaaagccaataaaatcatacaggaacatgacgattttctggagggtatgcaggctgatgatgttgaacagaaatccggcgtattggtttttaaaggtgaatactttttagacgaccagggcctgccgacactcaaaagtgcggccgtctttaatatgtttaaacatctcgctcacgttctgtcagaacaatatcatctggcggattaa

SEQ ID NO: 273982 - DNA, 2589 bp, Morganella morganii
atgggtaaagctcttgtcatcgtggagtccccggcaaaagccaaaacgattaacaagtatctcggcaaagactacgtggtgaaatccagcgtcggtcatatccgggatctgccgacgagtggttcagcgagccgtaaacccgctgctgcaggcgataaaacgaaaaaagttaaaaaagacgaacgcacagcgctggtcagccggatgggtgttgacccgtaccacggctgggaagcggattatcagattctgccgggcaaagaaaaggttgtttctgaattacagcacctggctgccgatgcgtcacacatttacctcgcaacggaccttgaccgcgaaggggaagccattgcatggcacctgcgggaagtgatcggcggtgatgacagccgcttcagccgggttgtgtttaatgaaatcaccaaaaatgcgataagccaggcgtttgaacagccgggcgaactgaatattgaccgtgtgaatgcccagcaggcgcgccgctttatggatcgcgtggtgggttacatggtgtctccgctgctgtggaagaaaattgcccgtggtttatccgccggtcgtgtacagtctgtcgcggtgcgtctgattgttgagcgcgagcgcgaaatcaaagcgtttgtgccggaagagtactggcagatccacgcactgctgtctgataaaaaagatcagctgcgcatggaagtggtgcaggaaaacggcaaaacctttaaagcggtcaatgagaaacaggcacatgctgctgtcagcaagttacaggctgccacctttaaaattactgaccgcgaagatcgtccgacctccagcaagccgggcgcgccgtttattacctccacactccagcaggccgcgagcacgcgcctgagctttggtgtgaagaaaaccatgatgatggcacagcgtctttatgaagccggtcacatcacctatatgcgtaccgattccaccaacctgagccaggatgccattacaatggcgcgtgactatatcaccgagaatttcggtgataagtatctgcctgcctcgccgaatctgtacagcaacaaagagaattcccaggaagcgcacgaagctatccgtccgtctgacatcaccgtcacggaagagatgctcaaggatatggagccggatgcgcgccgcctgtatcagttaatctggcgtcagtttgtcgcgtgtcagatgactccggcaaaatacgattccaccacactgaccgcagaagcgggtgatttcacactgaaagccaaagggcgcacactgcgtttcgacggctggaccaaagtgatgcctgcactgcgtaagaatgatgaagataatacgctgcctgcgattgcgccgggcacagttatgacgcgcgaagcgattgatccggtacagcacttcaccaaaccgcctgcacgtttcagtgaggcgtcgctggttaaagagctggaaaaacgcggtatcggtcgtccgtccacctatgcgtcaattatttccaccattcaggatcgcggttatgtgaaagtggaaaaccgccgtttctatgccgagaaaatgggtgaaattgtcaccgatcgtctcgaagaaacctttgcggaactgatgaactacgattttaccgcacggatggaaaatcagctcgaccatatcgccaacaatgaagcgaaatggaaatcggtgctggatgaattctttgcggatttcagcaaacagctggataacgcgggcaaagagccggaagaaggcggcatgcggacgaatccgatggttattacctcgatcatctgtccgacctgttcccgcccgatggggatccgcaccgcatccaccggggtattcctgggttgttccggttatgctctgccgccgaaagagcgctgcaagcagaccatcaacctgatcccggaacatgaaatcctcaatatcctcgaaggggatgatgcggaaaccaatgcactgcgtgcccgccgccgttgcccgaaatgcggcactgcgatggacagctacctgatcgacaccggccgtaaactgcatgtctgcggtaacaacccggaatgtgaagggtacgaagtcgaagaaggtgagttccgcattaaagggtatgatggcccggtcgttgaatgtgagaaatgcggctctgagatgcacctgaaaatggggcgtttcggtaagtacatgggctgtaccaacgacgagtgtaaaaacacccgtaaaattctgcgtaacggtgaagtcgctccgccgaaagaagatccggttccgttaccggaactgccgtgcgaaaaatcagatgcgtactttgtactgcgtgatggtgctgccggtattttcctggcggcgcacaatttccctaaatcacgggaaacccgtgcaccgcaggttgcagaactggttcgctttaaagatcgtctgtctgagaaaatgcgttatctggcggaggcgccggtggcggattcggacggtaatccgacgactgtccgctggagccgcaaaaccaaacagcagtatgtggcatccgataaagacggcaaagccaccggctggtctgcattctatatcgacggcaaatgggttgagaaagccaaataa

SEQ ID NO: 273983 - DNA, 975 bp, Morganella morganii
atgaaattacagcagctgcgctatattgtggaagtggttaatcacaatctgaatgtctcctcgactgccgaggggctgtacacatcacaacccggtatcagtaagcagatccggatgctggaagatgagctgggaatgcagatttttgcccgcagcggtaaacatctgacccatgtgacaccggccggggaatccgttatccggatctcacgtgaagtgctggcgaaaattgatgccatcaaggctgtcgccagtgagcatacttatccggagcagggaaccctgagcatcgccacaacccatacccaggcacgttatgcactgccgccggtgattaaaggctttattgagcgttatccgcacgtttccctgcatatgcaccagggcacaccgacacagatagccgaagatgtctgcaaaggcaacagcgatttcgctatcgcgacagaagccctgcatttgtataacgatttgattatgctgccgtgctatcagtggaaccgggccgtggtggtccgccgtgatcacccgctggcgcagcggcgcgacctgactatcgcggatatcgcggagtatgagattgtcacctatacccacggtttcaccggccgttccgagctggatagcacctttgaaaaacaggggctgaaaccgaaagtggtctttaccgcgacggatgcggatgtgattaaaacctatgtccgcctcgggctcgggattgggattattgccagcatggccgttgatccggaaacggataaagacctcgtcagtatcgatatgcgggataaattcagctacagcaccacaaaaatcggtttccggcgcggcagtttcctgagaacctatatgtatgattttatgtggcgtttcgcaccgcatctgactcgcgatgtggtggataaagcgattgcgctgcgcaataatgaagacatcgaagccatgtttaaagacattccgctgccgattgtctga

SEQ ID NO: 273984 - DNA, 405 bp, Morganella morganii
atgagtaaattatccgcactgacaggcgctgtcctgcttgccgccgggctgtttccggcggttgtatctgcatccgtaccggcggcaccggtctgtaaagagaccgtgcgtgacccggaaagctatgattcaacggatgaatgctactacaaaggcagcaatctggtacaaacttacgggctctaccgcagtacaaccggggagccgaaaaatctgacggaaaaattgacacccggcacggatcagtctttcaccggttatggtgatacggtcagcctggaatacaaatggcagggtaataatcacctgacggtaacacagttgtttaatggtggtcaggataccatctcatttgagactgacgggcagggaacccgggttattacagaatacagtccggattaa

SEQ ID NO: 273985 - DNA, 2673 bp, Morganella morganii
atgtcgttaaccttaaagcaacagtgtgaaaccctgctgacagcgggcggaaaacactaccatatctatcatctctcccgcctggcggaacagctcggcaatcttgataaattacccaaatccctgaaagtgctggccgaaaacctgttgcgtaatctcgacggcgacagcgttcaggtacgcgatttacaggcgctgatcgactggcagaaaaccggcacggctgaccatgaaattgccttccggcccgcccgtgtgctgatgcaggattttaccggtgtgccggcggtggtggatctggcggcgatgcgccaggctatccgcgtgctgggcggagaagagagtaaggtcaatccgttgtcgccggtcgatctggttatcgaccactcggtgatggtggatgaatatgccagtgagcaggcttttgctgataacgtggccattgaaatgtcacgtaataacgaacgttaccgctttctgcgctggggacaacaggcctttgaccgcttccgtgtggtgccgccgggaacggggatttgccaccaggttaacctcgagtacctcggtaaatccgtctggtatgaaacccgtgacggcaaaatctatgcgtatccggataccctggtcgggacagactcccacaccaccatgattaacggcctcggcgtgctgggctggggcgtgggcggtattgaagcggaagccgcgatgctcggacagccggtgtcaatgctgatcccggatgtggtcgggtttaagctgaccggtcgtctgcgcgaagggatcaccgccactgacctggtgctgactgtgacacaaatgctgcgcaaacacggcgtggtgggcaaatttgttgaattctggggtgacggcctggcgcagctgccgctggctgaccgcgctacaattgccaatatggcgccggagtacggagcaacctgtggtttcttcccggcggatgaggtcacactcagttatatgcgtctgaccgggcgtagtgatgatgaaatcgcgctggtggaaacgtactgcaaagagcagggattgtggcgatacgagggggacgagccgcgctttacctccgggctggcgctggatctggcggatgtgcagaccagcctggccgggccgaaacgtccgcaggacagagtggtgctggcgcaggtaccgggcgcgtttcaggcggcggttgatctggaactgaacaaaaagtccccggcggagaaagtccctgtttctctgcatggcgacgattttacccttgaggatggtgccgtggtgattgccgccatcacatcctgtaccaacacctccaaccccggtgtgctgatgactgccggtctgctggcaaaaaatgctgctgaaaaagggctgacccgcaaaccgtgggtgaaaacctccctggcccccggttcgaaagtggtgacagattatctgaatgccgccggattcacgccgtatctggatcagctgggatttaatcttgtcggttatggttgtactacctgtatcggcaactccgggccgctggatgcggaaatcgaaacagccatcaaagggaatgacctgacagtcggtgccgtgctgtccggtaaccgtaactttgaagggcgcatccatccgctggtgaaaaccaactggctggcttctccgccgctggtggtggcttatgcactggccggcaatctgcactgtaatctggaaaccgatccgctgggctatgataaacagggcaaaccggtgctgttaaaagatatctggccggataatgccgcgattgctgctgcggtggaaaaagtgaaaacagagatgttccgcaaagaatactcagcagtctttgacggggatgaacaatggcagtcactgccggtggaaaatacgccgacctaccagtggcagccggattccacctatatccgccatccgccgtattttgagggaatgccggtttccccggcgccggtaaaagatgtaaaacaggcacggattttggcgatcctcggtgactctgtcaccactgaccatatctctccggcggggaacattaaagcagacagcccggcggggcgctatttacaggcgcacggcgtgaaaccggcggattttaactcctacggctcacggcgcggtaaccatgaagtgatggtacgcggcacgtttgctaatatccgtatccgcaatgaaatggtgccgggcacggaaggcggatttacccgccatattccgtccggggaaacactggctatctttgatgccgcgatgcgttatcaggagtccgggacaccgctggtggtgatagccgggaaagagtacggctccggctccagtcgtgactgggcagcgaaaggcactaatctgctgggtgtgagagtggtgctgacggaatcctatgagcggattcaccgttctaacctgattggtatgggtatcctgccgctggagtttccggcgggaactgatcgccgtacgctggggctgaccggggatgaactgattgatgtcggcggcctgaacagtatcataccaaaacagattgtaccggtgaaaatcacacatgcggacggacgggtgactgaactgaatgccctgtgccgtatcgatacacagacggagctggaatattaccgtcacggtggcatcctctgctatgtgatccggcagatgctggcgtaa

SEQ ID NO: 273986 - DNA, 621 bp, Morganella morganii
atgaataaagagttgcagttaaaacgtgtcgcacaggcaaaattacctaccccgttcggggaatttttgatggtcggatttgaagaaattgccaccggtcacgatcacgtggctctggtgttcggggacatcagcggtgatgagccggtgttatcccgcgtccattcagaatgtctgaccggtgacgcgctgttcagcctgcgctgtgactgtggttttcagctggaagctgccttaaaacagatttcggaagaaggccgtggtgtattactgtatcaccgtcaggaaggccgtaatattggcctgctgaataaaatccgtgcctatgcattacaggataccggactggataccgttgaagccaaccagaagctgggtttcgccccggatgagcgcgatttcacgttgtgcgccgatatgtacaaactgctggatgtgcacgccatccgcctgctgaccaataacccggaaaaagtcgagattctgacccaggccgggattaacattactgaacgcgtgccgctgattgtcggccgtaatccggctaatgcccattatctggataccaaagcggagaaaatgggacacatgctgtgccagtctccgggctgtaatcactga

SEQ ID NO: 273987 - DNA, 735 bp, Morganella morganii
atgaaaaacctgacaaaaccctttatcgccggtgtcatcctgctgatgctggtaccgctggtgacattactgaccggctggcgctggcagccatcaggtgatgatgatctgctgcgcggcctgtggcacctgacggatactgctgcgtatccgctggcgattatcgtatcactcattttttgtattctgtttgtccgtttgtttcgcggcagcagaaagcaggcactgcgcgcggcggcgctgatccttgtggtggtggctgcgggacagggcatcaaagtggcgatgaaaaacaccattaaagaaccgcgcccgtatgtggtctggctggcacagcaaaatattgtgtcagaagaagggttctatgacctttcccggaaagcgcgggtacaactgctggaaaataccgtgaaaaatcattatcaggtgcccgtctggctgctgaaacactggaaaagtgaaaccggttatgcgtttccgtccggccatgcactgtttgcaagtgcatgggcgctgattctctttgtgtttttcaccgcacagggccgccgcgggctggcgggcgtgattctgctgtggggcattctggcggaatacagccgcctggcgctgggaatgcactggccgtcagatatcattatgtctgtgattattaacgcaatcctggccggaatattctttatctggcttaacaggcagaaggaaaatggtgtgcaactgccgccgctggcctga

SEQ ID NO: 273988 - DNA, 306 bp, Morganella morganii
gtgaaatattttctgatttttatccttgtactggtggttttcatcatttcggtgacactgggcgcaaataacgatcaggtagtcacatttaattatctgattgcgcagggacagtattctgtatccaccttgctggccgtactgttcggtatcggttttgtgctgggctggattgtctgcggtctgttttatttacgtctgcggttgtcgctggcacgtgcccggcaccggatcaaacgtctggaagctgatcagacggtgcagtcttccggttcggttgcactgcgggacaccactaaggaataa

SEQ ID NO: 273989 - DNA, 1170 bp, Morganella morganii
atgcttgagctgttgtttcttctgttgcccattgctgccgcatacggctggtatatggggcggcgcagcgcgcagcagaatcaacaacaacatgcggatcgcctgtcacgtgactatgtggcaggcgtaaactttttgctgtccgatcagcaggataaagcggttgatttgttcctcgacatgctgaaagaagacagttctgcatttgaagctcacctgacactcggtaacctgttccgttcgcgcggcgaagtggaacgcgccatccgcatccatcagtcactgatggaaagcgcctctctctcctatgatcagcgtctcctcgccacacaacagctgggtcgcgattatgtggccgccggggtttatgaccgggcggaagccctgtttttacagctgattgatgaggcggatttcagacaaagcgcgcttcagtcgttgttatcgatttatcagtccaccagtgactggagcaaagccatcgatatcggtgaaaaactgctgaaacagggtgactccggacagcgtgagaatatcgctaacttctattgtgaactggcattgcaggcgctgggcagcgataacactgacggtgcatttgcgtatctcgccaaagctgcgggggcggataaaaactgtgcccgggtgtcgattatgcaggggcgtattcatattgaacgggcggaatacagcaaagccgtcaccgtgctcaagcgggtgtttgagcaggataaagagatggtcagtgaaacgctgccgatgctggaaacctgctacacacaccttgatcagccggcagaatgggcagagtacctgctgcattgctcggatgaaaatattggtgctattgccgaactctatcttgcggatattattgaacagcaggaagggccggaaatggcgatcacctatgttaaccgccagttgcagcgccatccgaccatgcgtctgttttgccgtctgatggaatattatctgtcagaggcagaggaaggccgtgccaaggagagtctcggcctgctgcgtaacatggtcggcgagcaaatccggacaaaaccggattaccgctgcggcaaatgcggatttacatcacacgccctgtactggcactgcccgtcctgccggtcatgggatactatcaagcctatcagagggctggacggacagtga

SEQ ID NO: 273990 - DNA, 735 bp, Morganella morganii
atgacatctctttcttcgcatacaggccgtgcagatatcgcatcgcctgttattgttgcgctcgattacgacaacccggatgacgcgctggcttttgccgatcgtatcgatccggcacagtgccgtctgaaagtcggtaaagagctgttcaccttctgcgggccggaatgtgtccgtgcattgcagcagcgcgggtttgaggtttttcttgacctgaaattccatgatattccgaataccgcagcgcatgcggtgcgggcagcggctgagctgggtgtgtggatggttaacgtccatgcggcaggcggtgagcgtatgatgacagcggcaaaagagatcctgttaccatacggcaacgatgcaccgctgctgattgctgtgaccgtgctgaccagcatggagcagtccgacctggccggaaccggtattgatgccacaccggcagagcacgcgctgcgtctggcaaaattaacacagaactgcgggctggatggtgtggtctgttccgctcatgaagcgaaactgatgaaagagaccctgggccgggaatttaaactggtcacgccggggatccgccctgaaggcagtgatgccggtgaccagcgccgtatcatgacaccaccgcaggcagtcagtgccggggtggattacatggttatcgggcggccaatcacccgcagtgataacccgcaggcggcattacaggcgattaatgcttcagtgggagtattataa

SEQ ID NO: 273991 - DNA, 324 bp, Morganella morganii
atggacaataattcacggctggtttattccaccgatgccggccgtattgatgagccggaagtcaaagcggaacgcccgaaaggtgacggtattgtccgtattcagcgtcagaccagcggccgcaaaggtaagggcgtgtgtctgatcaccggtattgatttggatgatgctgcactgagcaagctggcggcagatctgaaaaaacgctgtggctgcggcggggcgctgaaagacggtgtaattgaaattcagggtgataaacgcgatttactgaagcaactgctggaagataaaggctttaaagtcaaactggcgggtggctga

SEQ ID NO: 273992 - DNA, 207 bp, Morganella morganii
atgaagaaaatagtaacggcattgcttgtcgccggtggcctgctggcactcagcggctgtaaaaatctgtcagagcaggagaaagataccgcgattggtgctgaattaggggctatcagcggcgcgatcctgacggacggctccggcctgggtacagtcggtggtgctgccgtcggcgggattatcggccacgaagccggtcagtga

SEQ ID NO: 273993 - DNA, 1938 bp, Morganella morganii
atgtttcaagataacccgctgttagctcagctaaaacaacagctccacgataaaacattgcgtgtcgaagggatcgtaaaaagtaccgataaaggctacggtttcctggaagttgacggacaaaaatcctattttattccgccgccgcagatgaaaaaagtcatgcacggcgaccgcgtcaccgcagctattcacacggtgaataataaagatgtggctgagcctgaagcgctgatcaccccgtttctggaccggtttgtcggccgtgtgcagcgcaaggaaaatgatgaccgtctctggatcattcctgatcacccgctgttaaaagattccattccctgtcgtccggcaaaaggcgttgatcacgagtttcgtcagggtgactgggcagttgcggaaatgcgccgccacccgctgaagggtgatcgcagtttccacgcggaaatcaccggctttatcaccgatgcggacgaccattacgcgccgtggtgggtgacactgacccgccaccagcacgcactgaaagagccggaaccggttgaggtgaccatggcggatgataatctgccgcgcactgatctgacccatctggatttcgtcactatcgacagtgcatccaccgaagatatggatgatgcactttacatcaccaccggtgataacaatcagcttcagctgactatcgcgattgctgacccgaccagctacatcccggccggcagcgagctggacgccattgctcataaacgcgcatttaccaactatctcccgggctttaatatcccgatgctgccgcgtaacctgtctgatgacctgtgctcgctgcatccgcatgtgcgccgcccggcactggtgtgtcgggtctccgttaatgaggatggctctctggctgatgatgccgtattcttcgccgcctgggttgaatccaaagccaagctggcttacgacgatgtttccgacctgctggaaggtgtggctgaccgcgtgacgacggatgaaacaatccgccgtcagatttccctgttgcaggatatgtatcagcgccgccatcactggcgtgaaactcacgcgctggtctttaaagatcgtcctgattaccgctttatccttgatgaaaacggcgtggtgacagatatcgtggccgaacagcgccgcagtgccaaccgcattgtggaagaagcgatgatcaccgccaatatctgtgctgctcaggtgctggataaaaaactcggctttggtgtctataacgtacacaccggactggatccgctgactatcggccaggctgttgccctgctcgccgaaaacggtattaatttcagtgcggaagagttgctgaccctcgacggtttctgtcgtctgcgccgtgaactggataaccagccgacgcagttcctcgacagccgtatccgccgcttccagacctttgccgaagtccgcatggaaaaaggcccgcactttggtctgggactggacgggtatgcgacctggacatcccctatccgtaaatacagcgatattgtgaaccaccgtctgctgaaagcgattatcgccggtcagtctgcggaaaaaccggctgaagccctggccgagcacctggcagagcgccgccgtgccaaccgcatggcagagcgcgatgtcggtgactggttatatgcccgttacctgcagccgtatgccggtaccgataccccgttcccggcggagatcattgatatcacccgcggcggtgtgcgtgtccgtctgacagacaacggcgctgtcgccttcatcccgggcgcctttatccacccggttaaagatgaactccagtgcagccaggaaaccggctcagtgctgattaaaggtgaagtccgttaccgcctcaatgacatcattccggtgaaaattgaggaagttaagatggaaacccgcagtattctggcccgtccgctctga

SEQ ID NO: 273994 - DNA, 642 bp, Morganella morganii
atgaataaagaaaaacgtattgaaatcctgacccgcctgcgggacaacaacccgcaacccaccaccgaactgctgtttgattctccgtttgaattactgatctccgtcttattatccgcccaggcgacagatgtcagtgtcaataaagccacccgtccgctgtatgccgttgccaatacgccgcaggccattctggatctgggtgtggacggtgtgaaatcctatattaaaaccatcgggttatttaataccaaagcagagaatgtgattaaaacctgccggatgctggttgagctgcataacggcgaagtgccggaagacagagctgctcttgaggcgctgccgggtgtggggcgcaaaactgctaatgtggtactcaataccgcgttcggctggccgaccattgctgttgatacccatattttccgtgtctgtaaccgcacaaaatttgcccccggtaaaaatgtggatgaggtggaacaaaaattattgcgggttgttccggcagaatttaaagtcgattgccaccattggtttatactgcacgggcgttatacctgtgttgcccgcaaaccccgctgcggttcatgcatcattgaggatttgtgtgaattcagcgaaaaagtgtatccggaagattaa

SEQ ID NO: 273995 - DNA, 705 bp, Morganella morganii
atgagtcagattaaagagttattcgccgacggattatggaaaaacaactccgccctggttcaggttctggggctgtgtccgctgctggcggtctcctccacggtcaccaatgcgctgggtctgggactggccaccacgctggtgctgatttgtactaacgtggcagtttccgcgctgcgccgctggatcccgtcagaaatccgcattcctatctatgtgatgctgattgcttctgtggtgaccgcagtgcagttgctgatcaatgcctatgctttcggcttatatcagtcactcggtatattcatcccactgattgtgaccaactgtattgttattggccgtgctgaggcattcgccgccaaaaatgcggtttatccttctgcgattgacggcctggcgatggggcttggtgccaccgccgcgctgtttgtgctcggtgccatgcgtgaaattctcggcaacggtactctgtttgacggtgcggatctgctgctcggtgactgggccaaagtgctgcgcgtcgatgtgctgcatcttgacaccccgttcctgctggctatgctgccaccgggtgcctttatcgggcttggcttaatgctggcaggcaagtatcttattgatgagaaaatgaaaaaacgcaaaaatgcacctgctgctccgcaatatgaaacagaaaaaggatgcggaagccatctggtcaaataa

SEQ ID NO: 273996 - DNA, 627 bp, Morganella morganii
atgattgccacattacgccgttacggcctgatcctcgccctgtttgccgccggtaccaccggactgagcgggtttgtctacaccctgacaaaaccggaaattgataagcaggccgccgcacagcaaaaggcactgtttgccgaaatcctgccggaatcggtttataataatgatgtgattgcagagtgttatctggtcaccgatcctgccctgggtaatgaactgccgcaccggctgtatgttgcccgcaaagacggcacacctgtcgccgcagtgctggagtccaccgcaccggacggctattccggtaatattcagctgctggttgcggctgattttaaccgtaccgtgctcggctcccgcgtgaccgaacacaaagagacaccggggctgggtgataaaattgatacccggatttcagactggatcacatctctgagcggcaaacatattgaatccgctgatgacccgcattgggcggtgaaaaaagacggcggggattttgatcagttcaccggtgccaccatcacgccgcgcgcggttgtcaatgctgtccgtgcaacagcggattatatgcagacactgccgccgctgctgaacaccttacctcaatgcggagcagaataa

SEQ ID NO: 273997 - DNA, 1095 bp, Morganella morganii
atgaaatttaggcccgtttcctcaaacgccccgcaccggctgaaaattgcgggatcaccgtttacgcataaccgtgacaacacctccgccatcatgctgtgggtggtgattgccatgatcccaggaattgccgcgcagctctggtttttcggcgccggtaccctgtttcagattctgattgcagttgtaactgcgctggtcaccgaaagtattgctgtccggctgcgcaatcagcctgtgatgccgtatctgaaagataactccgcgctggtcactgcagtgctgctggctgtcagtattccgccgctggcgccgtggtggatgattgttatcggtacattctttgccgtgattattgccaagcacatatatggcggtctcggacaaaacccgtttaacccggcaatggtcggttatgtggtgctgctgatctccttcccggtacagatgaccagttggctgccgccggagagtctgcaaatcaccccggtttcgctcagtgacagtctgcatgtgattttcaccgggttatcagacggtggccagacactggagcagttacgcgccggagcggatggtatgagccaggcgactccgctcgacagtttcaaaaccggtctgctgacccgcgatatgtccgaaatcctgacacaacccgttttacagggctctgtcgccggtatcggctggcagtgggtgaatatcggttacctgatcggcggttgtattctgcttaaccgtaaagtgatttcatggcagatcccggccgccatgctgggaacactcgcggtattgtcagtgatcggatacctgattgattcatcacactttacatccccggttatacagctgttttccggtgccaccatgctcggggcattctttatcgctaccgacccggtcaccgcttccaccacaccacgcggccgcctgatatacgggatactgatcggccttctgctgtggattatccgtgtttacggcggttatccggatgcggtggcatttgccgtcctgctggccaatatcaccgtgccgctgatcgatacctacacacaaccgcgtgtttacgggcacaaacgggggaataaatga

SEQ ID NO: 273998 - DNA, 2115 bp, Morganella morganii
atgttcaatttgctcaactttctgaaaaaagaccgggtatgggattttgacggcggcattcatccgccggaaatgaaattacagtccagccggacaccgatgcgggtgtgcccggtaccggaagaactgattattccgctccagcagcatatcgggaacgaaggcgatgtgctggtcagccccggcgaccatgtcctgaaaggtcagccgctgacacgcggaaccggccgcagcctgccggtgcacgcctcatcatccggcacggtgactgccgtggagccttgtgtgaccgcgcatccgtccgggctgaccgcaccgtgcatccgtatccggactgacgggctggataccccgtatccggcggaaaaaacagcggatttcacctctctctccaaaacagaactgactgaccgcattcatcaggccgggattgccggtctcggcggtgcaggcttcccgaccgccagcaagctgaaaggcggcggtgatcttatccgcaccctgattatcaatgcggcggaatgtgagccctatatcacggcagatgaccgtctgatgcaggagcatgccggggaaattctcaccggcatccgtattctgatgcaccttcttgagccggaacaggtgcttatcggcattgaagataataaaccggaggcgattgccgcactgcgtaacgttactgccggtgaaaaacagattttcgtgcgggtgatcccgaccaaatacccgtccggcggcgcaaaacagctgaccaaaattctcaccggccgcgaagtaccgtccggcggacgctcttctgatatcggcgtgctgatgcagaacgtcggaaccgtggttgccatcaagcgcgccattaccgacggcgaaccgctgatccagcgcgtggtaacagtaaccggcgaagcggttgagtcaccgggtaacttctggacacggctgggtacgccggtccgtttcctgctgcaacaggccggtttccgtccgcagcatgaacaaatggttgtgatgggcggcccgctgatgggctttacactgcctgatctcgatgtgccggtagtgaaaatctgtaactgtattcttgcaccgaccacaaacgagatggaacctgctgcaccggaagaagcctgtatccgctgcagtcactgtgcggatgcctgtccggccggattactgccgcaacagctttactggttcagtaaaggtaacgaacacgaaaaagcggtacagcaccatctgtttgactgcatcgaatgcggtgcctgtgcctgggtctgcccaagcaatattccgctggtgcagtattaccgtcaggaaaaagcacaggtcattgagatccgcgaagaggcccaacgcgccgcagatgccaaaatccgctttgaagccaaacaggcacgaatggcacgggaaaaagaagcccgtgaagcccgccataaaagtgcagctgtccaggtggatgagaaagacagtgcagctatcagcgccgcccttgcccgcgtgaaagccaaagacagcagcgcgggaatgacgatttctgttaatccgtccgtcttaccggataacagcgccgtgattgctgcccgtgaagcccgtaaagcacaggcacgcgcacgtcaggcagagaaagcggctctcgcggctgaaacaacacaaccggcaacagaggcagatgccgagccgcgtaaagccgcagtggctgccgcccttgcccgcgccaaagcgaaaaaagccgctcaggctgcggaagctccggcggaagcggcacaatcggccgcagagactgaagccgatccgcgtaaagccgctgtcgctgcagccattgcccgcgccaaagcgaagaaagccgctcaggctgcggaagctccggcggaagcggcacaaccggccgcagagacagaaatcgatccgcgtaaagccgctgtcgctgcagccattgcccgcgccaaagcgaaaaaagccgctcaggccgcagaagcgccggcggaagcggcacaaccggccgcagagacagaaatcgatccgcgcaaagccgctgtcgctgccgcgattgcccgcgccaaagcgaagaaagccgctcaggccgctgcacaacattctgaagaaaccactgattaa

SEQ ID NO: 273999 - DNA, 609 bp, Morganella morganii
atgacaatgatttggattgccgttgccgtactcagcctgctgggtctggcattcggtctgatacttggttacgcctcccgccgcttcaaagtggaggaagatcccattgtggataagattgatgacattctgccgcagagtcagtgcggtcagtgtggttttccgggctgccgcccgtatgcggaatctgttgccaacggcggtgcaataaaccgctgtgcccccggcggcgagcaggtgatgctgaaactggctgatatgctgggtgtggatccgcagccgctcgacggtgacgaatccgtgctcaatccggtgcgcaaagtggcctttattcatgaagatcagtgcatcggctgcaccaaatgtattcaggcgtgtccggtggatgcgattatcggtgccacccgcgccatgcataccgtggttgaagatctctgcaccggatgtgatttgtgtgtcgcgccctgcccgacagattgcattgagatgatcccggtcgccgtcaccccgcgtaactggaagtgggatttaaacaccattccggtcagaaatattccggcggataccggcggtactcctgtcaaacctgttcagattgaggcgtcgtaa

SEQ ID NO: 274000 - DNA, 582 bp, Morganella morganii
atggctgactacttattactttttgtcgggacggtgctggttaacaacttcgtactcgtcaaattcttaggattatgcccctttatgggggtctccaaaaagctggaaactgctataggcatggggtttgccaccacatttgtgatgacactcgcctccgtctgctcgtggctgatggatacctttatcctgatcccgctggatattctctatctgcgcacactgagctttatcctggtgatcgccgtggtggtgcagttcaccgaaatggtggtgcggaaaaccagcccggcgctctaccggctgctcgggatcttcctgccgctgatcaccaccaactgtgcggtactcggcgtcgcgctgctgaacatcaacctgtcgcataatttcctccaatccgccgtttacggctttggtgcggcagccggtttctccctggtgatggtgctgtttgccgctatccgtgtgcggctggcaacggcagatgtgccggcgcctttccgcggggcgtctgtcgggctggtcactgccggtctgatgtctctggcctttatgggcttcagtggtctggtgaaattctga

SEQ ID NO: 274001 - DNA, 1041 bp, Morganella morganii
atgacgaaaatactgaaagtgggcctgatcggatacggttttgccggaaaaacattccatgcgccgtttattgtcaataatgccaatatggaactggccaaagttgcgagcagtgatgccgccaaagtgcatgcggactatccggatgtgcaggttgtcgccacgccggaagatatttttgctgatccggccattgacctcgtcgtgatcccgaccccgaatgacacccatttcccgctggcgcggatggcgctggctgcgggtaaacatgtggtggtggataaaccctttaccctgacatctgaagaggcatttaccctggcaaaacaggcggatgacgccgggctggtgctgtctgtttatcataaccgccgttttgactccgggtatctgacgctcaaatccctgtttgacagtaaaaaactcggggatatcaaatattttgaagtccactttgaccgttaccgcccgcagccgcaaaagcgctggcgcgaagctgctgcattaggcagcggtatctggtatgacctgggttctcatctgattgaccaggcattgcagtttttcggcaaaccaacggcgatcactgccgatctgggtatgatccgtccgggttctgaggcggtggattatttccatgcgcaactgcactatccggatgtcaaagtcgtgctgcatgccaccacggtcgcggcagcggaatccccggtgtatatcgttcacggcatgaaaggcagctatgtgaagtacgggctggatccgcaggaaaatgcactgaaagcagggcagatgccggtcggtgtcaactggggtcatgacagccgtgacggggaactgagcctgtcaccggacggtatcgaagtgattacagaaacgtatccgaacaaagccgggcactatggccgctattacgcggaagtggcagaggcgattatcaataacggtccgaacccggtgacggcgcaggaaggagcggaagttatccgtattattgaggccggcatggaatctcataaaaccggacgaactgtgacgctgtaa

SEQ ID NO: 274002 - DNA, 990 bp, Morganella morganii
atgacaaactggtggcagaaactgcggttagatccgttcctggtcataatgatcacggttgttattttggcgtcactctttccggcaaccggcagtgtagcgaccggattccgctatctgaccaccgccgcgattgcgttattattcttcttccacggcgcaaaactctcgcgggaagcgattgttacgggaatgggacactggcgtctgcatctgatggtgttctccagtacttttatcctcttcccgctgctggggctgggtttgcagtttctggtaccggaatggatgtctccggccatttacatgggtttcttatacttatgcgccttaccggcgacagtacaatcggctatcgcctttacctctgtcgcgggcggaaatgtggcggcggcaatttgcagtgcatccgcctccagtatccttggtgtgttcttatcaccggtcattatcggttttatgatggaaacgcagggcgcgcatgaactggataccctgggtgcgatccggtctattttactgcagctgatgctgccgtttgtggtcgggcacctttcccgtccgctgattggcaggtgggtggaccgcaataaaaaaatcattaataaaacggaccgcacttctattctgctggtggtgtatgtcgctttcagcgaagcggttgccgaggggatctggcagaagattgatgcaatgtctattctgcagattgccgtggtgtcgtgcgggttgctggcgattgtgctggtgatcaacgtgtacggctcacgggcactcggctttaataaggccgatgaaattaccattgtgttctgtggttcgaagaaaagcctggcaaacggcgtgccgatggcaaacgtaatgtttccgccggccgtggtggggattctggtgctgccgctgatgctgtttcatcagatccagctgatggtgtgtgcggtgatggcggcgcgctatgcgcggcagggaaaagaacattcacaggagtaa

SEQ ID NO: 274003 - DNA, 1143 bp, Morganella morganii
atgagcaaagttatggcaggatgccttgtgcttctttttgtcagtttctttgcccgtgcggatgtgcaggctctgccggaactgaaacgggaccgggttattgacagcgccggtcttctgaccggcccgcaatttacacagcttaaccggcaactcattgagtatgaactgagccgcaatgacggcagtcagttcgtggtgtttattgtgtcgtcaaccggcggggaaagtattgagacatttgcgcaccgtgcgtttaatacatggaagatcggccgcaaaggtcagaataacggactgttgctggtcgtggcggtgaatgaccgtaatctgcgttttgaggtcggctatggactggaaggtattctgccggatgtctccgcaggccgtattatccgtcagcgcatcacccctgaatttaaaaaaggcaattattttaccggaattgaaacgggtgtgaccgatgccattgatattatcagcggaaatgagccggaatatatcaaatcagagacatccggaacagaagcattaaaactcaaacgactgacggttatttatcttctgacctttattgcggtgtatctctggtcattatttattggttctccccgccgtaagaaaaggatagaaaagcaggtttttaacgatattgaatatctgagagaagaatacgcgaaatccaaaaataagaaaaaacgtcaacctgaacggataatccgccttgcgcagaaacgcctgacagcatttttgcagtataagtatatttatccgacgccgctcggccatactgtgaacgtattattttattcagttctgatttttataatgacacgggttctgatagacggagatcctgatcctgatgcgttgttcatcagtataatgatgctcatttttcttaatgtatttggctcactatttatttgttatttgttatatacattaattccggaatatcttactcaggaagcggaaatacggaaattaaccggtgtcatagcaggtacaggaggcgggtattcatccggttctgacggcggcagttacagcagcagttccggcggtagctccgggagcagcggatcgtccggcggcggaggcggcagcagtggtggtggcggtgcttccgggagctggtga

SEQ ID NO: 274004 - DNA, 219 bp, Morganella morganii
atgggagataccgggcggcgctgtctgaccgcccggtataaggaaaacagccttgtttatcacgctgtcatcctggcggattttaacgacaatacagtctgtataaacaatatgatagcctgcatagtgttaatcaatgacactcacctccagcgcggactcgcgataagagacggcgaaccgggtttgaacatttttttctgcccggcaaagtcatga

SEQ ID NO: 274005 - DNA, 2805 bp, Morganella morganii
atgagcacatcactattcagtaagaccccgacggtcacggttttcgacaactacggcctgaccattctcgacgtttcataccaccgccaccctgagtcaccggacatcaccactgagcgtatcacccgccaccagtacgatacgcggggctttctgactaagagcgccgacccgcgcctggctgaagccgggctggcgaacttcacgtaccggacggatctgcgcggaggtgtcctgcgtacacagggggcagataacggtatcaccgtcagccttaacgacgttgccggacgcccctttattacagtcagcaacatcggtaccacagacaacggtacggatgacaggagtcaggcagtaacccgcacctggcagtatgaggatgcatcccgggccggacgtccgttaagtattacggagcaggtaaacggcggagccgcccgtatcacggagcgtttcgtctatgccggtaatacagatgcagagaaggcccggaacctcgccggtcagcttgtcagtcactacgataccgccggactggtgcagacggacagcattgccctgaccggcgtgccgctctccgtcacccggcggctgctgaagaatgcggacaatgctgacacggtggctgactggcagggagaaaatacaccgttctggaacaaactgctggataatgacgcccggaccactctgaccactgcggacgccaccggctccgtgctgaccaccaccgatgcacagggtaatacgcagcggatggcgtacgatgtggcaggccggctgtcgggcagttggctgacgctcaagggaggtactgagaagattatcttggcttccctgacgtactcggccgccggacaaaaactgcgtgaagaacacggcaacggcgtggtaaccacgtactcgtacgagccggaaacgcagcgcctgaacggcattaaaacggaacgcccgtccggacatgccgccggactgaagatactgcaggatctgcgctatgaatatgaccctgtgggtaacgttctcaaagtaaccaatgacgccgaagagacccgtttctggcgaaatcagaaagtggtgccggagaacacatacgcctacgacagtctgcaccagctggtcagcgccaccggacgtgaaatggcaaatgccggtcagcagggctgcggattaccaccgctgaccgctcccttccccgcagacagcagtgcttatacgaactatacccgcacatatacctatgacacctccggtaatctgacgcagataagccaccacgcaccggcgacaaacaacaattacacaacaaaaatcaccataagcaaccgaagcaaccggggcgtactgagcactctgacggaaaacccggcagccgtggatgcactgttcaccacaggcggccagcagaaacaactgcaaccgggacagagcctgacctggacaccgcgcaacaagctgctgaaggtgacaccgatcgtgcggagcggagacgcagatgacagcgaaatctaccgctatgatgcgggcagcctgcgcatcctgaaagtcagcaggcagaaaaccggcggcagtatgcagacacaacgggtgcaatatctgccgggtctggagctgcgcacgacaaaaaccggcaatacgcaaacggagagtctgcaggtgattatcgcaggggatgcggggcaggtacgccttctgcaccgggagaatggcgatgaccagatgcgctggagctacgacaacctgatcggcagcagcggtctggagctggatgatgagggaaatattatcagcatggaggagtactatccgtatggcggcaccgccgtgtggactgcccgcagcgtcgcggaggcggagtacaaaactgtgcgctactcaggcagggagcgggatgccaccggactgtactactatggttaccggtactaccagccgtgggcgggaagatggctgagcgcggatcctgcaggaataatggatgggctgaatctgttcagaatggtacggaataatcctgttcgattttttgatacgaacggacttgcgccaagtgatgacaaatctcagcaggcgcccggcagaacctatattaaagaagctaaatacttagcggcggaacaattatcagctgctgagaaatttttgaataacacatctaatagtgacgttgcattagatatctataagacatttttcgggcagcatatgggagaagaaaaactgggtatatggaagacacaaataaaaaatgtgtcagagggaataaacaaactggatacgaaaagaaatgtccggtattcaccactgaagataaccgcatccggagagaaatcagagacggtggcagccgaagccgatatgcaggcatttcagcgcggggaaaaaatttatataaatgcttatactgatgtactggaaaacatcaaaaaaaataaaacactcggtgttgatcatttagcgcatattttaattcatgaaatgtctcacctccgcctggatacggaagatatcgcgtatatcggggtgatggaatatcagggatctcatgatttaaatgcgatgctcgcccttcttgaaccaaaaaaactacagaccggcagaggagagcctgaagaaacgctcaaacaacgacgtgcgcggggaagtctggacgctgtgagaaatgcagactcttttacaacagcaacccgttatcttgcttatactgcaaaaaatgctggtttctatcatgactttgccgggcagaaaaaaatgttcaaacccggttcgccgtctcttatcgcgagtccgcgctggaggtga

SEQ ID NO: 274006 - DNA, 1008 bp, Morganella morganii
atgattaatcgctcacttcccctgaccgacctgcaccgccatctcgatggtaatatccgcctgtccaccattctggatctggcccgtcagcacaatttgccgctgcccgcttatgagactgaaaccctgcgcccgcatgtgcaggtgatgagcaatgaaccggatctggtgcagtttctgagcaaactggactggggcgtttccgtgctggcagaccttgatgcctgccgccgtgtggccgctgaaaacgtgcaggatgccgttattgccggactggattacgccgaactgcgcttttccccttattatatggcgatgaaacaccatctgcccgttgaaggcgtggtggaagcggtactggatggtgtggcatctgaagtccgcaacagcccggtacggattaatatgattggtattctgagccggacattcggcacagatgcctgtcatgaagagctgaatgccctgctcgctcatcatgagcggattgtggcgctggatattgccggtgacgaatccggttatccgggcgacttattcaccgatcacttccgcaaagcccgtgatgtgaactgggctattaccgcccatgcaggggaagctgccggtgctgccagcatctggcaggcgatccgcgacctgggtgcacagcgtatcggtcacggcgtgatggcgattgaagacccggcgctgatggattacctggcagagtaccgcatcggtatggaatcctgcctgacctcgaatattcagaccagcaccgtgccgtcactggctgcgcatccgctgaaacagttcctggcacacggtattgccgctactatcaacaccgatgaccctgcggttgaaggtattgagattgcccatgaatacaatgttgctgcgccggcagccggtctgacacaggcagaaattgaacaggcgcagattaatggactggaaattgcctttttatccgcagaggaaaaagcggcactgagagatatggcagcaaaacgcggccggtaa

SEQ ID NO: 274007 - DNA, 1590 bp, Morganella morganii
atgaaaaagtcgttagttgctgttggcgttattgtcgcattaggcgccgcatggggtgtggcttcatggcagacaggtaagaaaattgaagcaaaccttgatgagtatatcgccaaagcgaataaagcaatcaaggataactaccctgatgcacctgtcacgctgaccgccaaagatttttcacgcggtattttcagctctgatgtcaaactgatcatcaaagaaacgaaaaaaagcggtgatacctccggcgaagaactcgtgatcctcaatactatcgatcacggcccgttcccgttatctcagcttaagagcatggtgttttcgccaaatatggctgctgtccactctgagctggaaaacaatgacatcaccaaacaagccttcgaaatcaccggcggtaaatcccctgttgcaacggatacccgtatcagttacgaccagagtttcgatattgatcttgctgtcagcaaaatcaactataagaaagacggtgaagagctggcattctccggcgctgatctgaacgttaaattcgacaaagaattcaaaaacgtcaaaggtaaaggcagcagcaatgaactgacttaccgtaaaggcgatcgcgaaagtatcgtgatgaaaggtctgtcatttgacagcgatgttgccaaatcaggtgacagctacttctacctgggtgaccagaatctgagcctgaaagagttagcggttgttaattacagcgataccgtttctctgaaagatctgaaactgaacggcacctccggcagtaaagataacaaactgactgcagatgttgattacagcctgggttcactgagctaccgtgatatcgatctcggcgctatcagcctgaaaggttctctgaaagatctggacgccacttccgctaatacgctgatggcgtctgttgaagagtacaccaaactgtctgaatctatgtacaccgaagatttcgacgatgcgaaaatggaagcactggatgagaaaatgaaatccaatgcactgggtctgttcaaatacagcccgtccttcgctatcgcacctctgagctggaaaaacagcggcggtgagtcaaaagttaacctgaacgtaacgttcaacgcactgaatgaagagagctttaaagcgctggaacacgcaggcagctttgagaaagctctgccggttctggtgaaagagttcgggttcaatatggatctgtccaagccgatgctgactgatttcgttgcagttgccatgcagtcacagggtatgggcgcgaaagaagccaaagaacagggtgaacagggtgttgctcagatggccagcatgggtgccatgatggaaatcgtgaaagtgaccgataaagcgatcaccatggatctgaaatacagcaacaacaacatcgatttcaacggtaagaaattcaccgttgctgaattcctggaaaaatatgaccagtacggcgcactgagcgataacagcggtgacgacgaaggttacgaggaagaagcaatcgaaatggatcctaacggtgatgttactgaagaagtcactatcggtgaagaaccggctgctgacgttgcagctcctgctgctcagtaa

SEQ ID NO: 274008 - DNA, 1176 bp, Morganella morganii
atgttaaaaatgcagaatcaggtgcaattctatgattggggaagccgtaccgcgatgacagaaatgtacggttacccgaaccctgacaagcagccgatggccgaattatggatgggggcccatccgaaagccagttcggtggtgactgacacccgcggcaacacctgctctttgtatgattttatcgccggtgacccgcagtccgcactcggggatgaaattaaccgccgttttcaccggctgccgtttctgtttaaagtactgagtgctgctcagccgctgtcggtacaggttcatccggataaagccgcagcagaggaaggatttgcccgcgaaaacaacgccgggatcccgctggattcaccggttcgtaattataaggatgataaccataagccagagctggtttatgccctcaccccgttccgcgcaatgaatgcgttccgtccgctggccgatattgccggactgctcagtgaggtcgctccggcacatcctgccattgaacgttttattgcctcgccgtcagaggagcatctgtctgttctgtttacccgtctgctctccatgagcggggataccaaagagcgggcagtcgctgtgctgaaatccgcactgaacagccgtcagggtgaaccgtgggataccatccgtaagatgacagaattttatcctgacgataatggccttttcaccccgcttctgctcaatgttgttgaattgaaacccggagaggcaatgttcctgtatgcccgcacacctcatgcgtatcttgaaggaactgcactggaagtgatggctaactcggataatgtgttacgcgccggtttgacacaaaaacatattgatgtcggtgaattgctgaataaccttgattttgtaccgaaacacgcaaaaagtttatttatgcaaccggaacatattaacaacactgaaattttcccgattccggttgatgatttttctttttcggtgatgaaattgcataatcaggaaatgattcttgataataacagtgctaatattcttttttgtgtggaaggtcatgcagttatcactacagaaacagaacaattaagagttatctcaggtgaatctgtttttctttctgctatagaaagaaagtttaaaatagatggtgaaggaatcattgcccgcgtttataatgctgtgtaa

SEQ ID NO: 274009 - DNA, 1395 bp, Morganella morganii
atggcagccacgcgtattgaaaaagactcaatgggccctatcgatgttcctgcggacaaattatggggcgctcagacccagcgctctctggagcatttccgtatttcagttgaaaaaatgcctgcggatctgattgctgcgctggccattacaaaaaaagcggcggcagctgtcaattgtgatctgggattgctggcgaaagagcgggcggatgcggtgatcgctgcagcggatgaagtgcttgccggtaaacatacggaagagtttccgctggcaatctggcagaccggctccggtacacaaagtaatatgaatatgaatgaggtgctggcaaaccgtgccagtgaaatcctcggcgggcagcgtggcggcgaacgtattgttcatccgaatgatgatgtgaacaaaagccagagctctaacgacgtgttcccgacagcgatgcatgtcgctgcagtgattgcgatcagcacacaactgatcccggaactgaaatctctgcacagtgttctggccgcgaaagcggaagcgtaccgtgatatcgtgaaaatcggccgtacccacttacaggatgcgacaccgttgacactgggccaggagatttccggctgggcggcaatgctgcaatataacctgaaacatctggaaaacagcctgccgcatctgagtgagctggcactgggcggcaccgcagtcggtaccggcctcaatactcatccggaatatgctgttcgcgtggcgaagaaaattgctgaattatccggtcagccgtttgtgacggcaccgaataagtttgaggcgctggccacctgtgatgcactggttcatgcccacggcgcactgaaagggctggcagcctcactgatgaaaatcgccaatgatgtccgctggctggcatccggtccgcgttgcggcatcggtgaaattgccattccggaaaacgagccgggcagttctatcatgccgggtaaagtgaacccgacacaatgtgaagccatgacgatgctgtgtgctcaggtgatgggtaatgatgtggcggttaatatcggcggggcatcgggtaattttgaactgaacgtgttccgtccgatggtgatccacaacttcctgcaatctgtccgcctgctggccgatggtatgcgcagctttaatgagcactgtgcggtcgggattgagccaaaccgcgagcggatcagccaactgctgaacgaatcattgatgctggtaacggcgctgaatacgcatatcggttacgacaaagccgctgaaattgcgaaaaaagcccataaagaaggtctgaccctgaaagcctctgccatgaagttaggttatctgacagaagctgagtttgatgcatgggtgcgtccggaagatatggtcggcagcatgaagtaa

SEQ ID NO: 274010 - DNA, 924 bp, Morganella morganii
atgcgttatgatgcaggcttgtcatttaatgaatgttttaaccggctggaatctttgcttatttctttctgccaaaatatccggcaactatccggagtacagacgcatgtatttcaattacctgaccgattaaagggcgaagaaaatgaggaaatcaaaactatccgtgttattcctgtttccggtgaatccgcgacaaatatagcactggtacattatcagcgcctgtttatttacgataatggccctgatatcagcagcaaatcagccattcgcctgcccggcgtgatgtttctgcccctttcccggtccggacagagggaaatgcagaaacaactgaatgatatcaatatgatgaaagaacagttgatgaaaatcgtcacagaaacctccggtgtggacaaaacacagcgttttgaattcgtacacaatcagataaaaggattgattacactcaatgcttaccggcagatccagtcagtcacctccccttcatcagtccggtttggctgggctaataaacatattattcagaaggtggatcgcgatacattgttatctcagttggatgaacaatatcagaatccgcgagccattcagtctctgacacgggaagagcggcaggcttatctggcgaaagagatttccgccttaaaacaagtgccggaagacgccatactgaaaatcaaacgcccggtaaaagtacagccaatcgccagagtctggtacagcgaagcgcaaaagcaggtgcagtatgcctgtgcatcaccgctgattgtattttgtgatgagaatgaggaaaaaccggtaacgggcgtactaccggattatgatgcggaaaacatcaaaatccgtcacagaccgaaagcaaagaaattaattccggtgatatcacgactgcatttatatatggaagtgatgtaa

SEQ ID NO: 274011 - DNA, 150 bp, Morganella morganii
atgttaacactattacttagcagccagattttcataaatacacatttctcgcagagtgaaattgacaaagaaccatttgttataccaccacatattgttgttctgcacaataatgatttatgccgtaaagattccccgccttgctggtaa

SEQ ID NO: 274012 - DNA, 153 bp, Morganella morganii
atgattgcattaattttaagcggctcactggcgattggtaatttttatcatactgatatatcacctgtcatatttccagacattaaacctgttataatggatcataatgtaattccatggtgtgtgttcgaccgtaaatattgcttacaataa

SEQ ID NO: 274013 - DNA, 1251 bp, Morganella morganii
atgacagacgagaataaactgataactgacaaccgtgtggcctcaccggtgcagaatgatcaggcaaagcagcactatatccagcgcgacgacaaactgtatctgcgtgtcaccctctctttctttatggttggtctggcgacatttgctctgctctattttgtacagcctatcctgccgttgttatcagacgatttttcggtatcaccggcgcaggccagtttgtccctttctctggcgaccggattcatggccgtcgggctgctgatcaccggcccgctgtcagatgcggtcggacgtaaaaatgtgatggtgatatccctgacctgcgcggcaatctttaccctgctcagtgctttcaccaccagctgggcggggatcctggttgtccgttccctggtcggattatctctcagtggtgtcgccgccgtggccatgacctatctgagtgaggaaattcatcccagttatgttgctctgtctatggggctgtatatcagcggtaattctatcggcgggatgagcggacgcctgatcaccggcgttattgcggattatgccagctggcggattgccgttctggtgctgggaacattttctctgttcggtgctttcctgttctggcggttactgccgccgtcacgccatttcagagccagttcactgaaaccgaaaagtttgtggaaatacctgatcctgcactgccgtgatgatggtctgccgtggctgtttgccatcggttttatcattatgggcagctttgtcactctgtttaactatatcggctaccggctgatggaaccgccgtatcacttcagccaggcagttgtcggtatgttatcgatagtttatctgtcaggaacttacagtgcctctaaagcaggtgcactgacacggaaatacggctacggcagagtactgattggtgcagtcacattaatgctgaccgggattctcattactctcggcagttcactggcagcagttctgatcggtatgctgatactgacgacaggattctttgccgcccattccgtcaccagcagctgggtcgggcgccgcgccaggcgtgccagggcacaggcatcctcactgtatctgttttgctattactgcggttccagcattgccggtacattgggtggtgttttctggtcttactggcactggaacggaatcggctggtttattgccgctatgctggcaaccggtgtgctgattgctctgtatctgaataaacaaacccggtaa

SEQ ID NO: 274014 - DNA, 900 bp, Morganella morganii
atgatcgaattccgccatctgcgttattttatcgcggtcgctgaagagctgcatttcggacgggcagcggagcgtctcaatatctcccaacctccgctcagtcagcagattcaggcacttgagaatgcgattccggctaaattactggcacggaacaaccggaatgtcagcctgacaccagcgggcgaaatgtttctgcgggaagcttaccaaatccgtactcaggtcgaggctgcggttgaaaaagcagccagaatggatcgcggggaactgggggaagtttctgtcgggttcacctccacaacgccatttatgcgtcatattacagcgacattccgccagtaccgtgaaatatacccggatgtggctattcacatgcatcagatgaataccaaacagcagattaacccgctgctgagcggccggattgacttcggtgtcatgcgcaacacgcaactgccggataatctggttcacgaattgctgtttaaagaacgatttatgctggcagtctatgatgatcatccgctgatgaaatacctcaaaacgggtattcccctggagatgctcactggcgtaccattggttttctttgagcgggatgtgggaacggcgctgtatgatgaaattatcaatctgctgaaaaaagcgggtgttacgccggttatcgcccaggaagcaggggaagctatgactattctggggctggtctctgccgggttaggtgtttcactggtaacagaatcttttacccgcatgaaagtggatggtgtccgttacattcatttagctgaaaatcaggcattttctgaggtctggctggtgtatcataaacacaatacgctctctccggccggtcagcggctgattgagatgctgaaaaataacgtgttccgctga

SEQ ID NO: 274015 - DNA, 771 bp, Morganella morganii
atgttccggcgataccggttttctgttattaccgcatttctttttcttttatatacaagcgctgcgggagcaggggtatcgctcagccatttctatcagccggatggctcacgcaaaattgcgcctgacaatattactgcactgaccgggcagtttctcggcgtaccttaccgcgccggtcagctggtaggctctcccggatcaccggaaattctggtggctgacctgaacgcgctcgactgcttcacttttctggattacaccgaagcactgaaacgcagcccgcagcagcaggatttccgcgacaggctgatgcacatccgttataaaaacggtgaggtgaattactatcagcgccgtcattttttgtcggattgggtcagcggcccgcagcctgtggcacaggatatcacccggcaactgtcgccggattaccgggtgacacacaagatgctgaatcagaaaaaaaacggctcccgttatatccctgatattccggttacggcgcgggatattgcctggctgccggtttccgtgctgacacccgctgtgctttcacaattgcagaccggtgattatatcggtatctattctgaccgtcccggcctggatgtctcgcatgccggggttattatccgtaccccggacgggctgtttttacgtaatgcctcatcaaaacggaatgaacaacgggtcattgattcaccattacggacatatctgcaaaataaaacaggaattgtggtttatcgttcggcttttgccccctga

SEQ ID NO: 274016 - DNA, 1200 bp, Morganella morganii
gtgaaaccttcagcacagcccggacatattgaccatataaagcaaaccaatatgggggttgtgtaccgttatattgatcgtgaaggtcctatttcccgcatttcactctcgaaaaaagcgcagctggcaccggcgagtatcaccaaaatcacccgtgagctgatggatgcgcatctggtccgggaaactgagtttccgggattaggctttcgcggccgcccggcagtgggcctgaaaacagattgtgacggctggcattttttatgtatccgcattaaccgggggcaactggtttttgcgctgcgggaactgagcggaaagttactggccgaagatattattgcatttccggcggatagccgggattttgtcaccctgtttctggcacaggttgatgctttcttttcccgcaatcaccggataaccgagcgcctgacggctattgccatcaccactgatgccattgttgaccctgcaaacggtattatccgccattccccgtactatcagctgaccgatttaccggtagcagagattctttatcagcataccgggatgccggtatttctccagcatggtatttcagcctggtctctggcggaatatttttttggtgcggcgaaagagtgtaagaatattatccaactggtgattgatgaaaatgtcggtgctgccattattaccgacggcgcactgctgcatgccggcagtcacagtacggcggaaatcggtcacacacagataaacccgcagggcaaaccctgctactgcggtaatcacggctgtctggaaactgaaataggtctgcatcatgtactggaaatggcagctcagttcctggtcgttccggaggggcaaccgctgaccgctgaaatgctgtgccgcgcggcactggacggtaatcctgctgcccgtgagctgatagagcaggtggggcagcatatcggggatattgccgccgtgatggtcaatatctttaatccggagattatcctgattggctcaccattaaaccctgcatcctctgttctgtttcccgccatccgcgcccggattacgcagcgtgccttgccggcattcacccgggagctgacaatgacttcatgcgaatttactaattgcggtacattacccggcgcggcgttaattaaagaggctctgtataacggctcacttcttatcagactgatggatggttaa

SEQ ID NO: 274017 - DNA, 690 bp, Morganella morganii
atgttaaggcgcttgtttataaccggcacagatacgaatatcggcaaaactgttgcgacgcgggctttaatgcaagccatcaaccgcctgggtaaatctgtcgttggctataaaccaatcgcgacagaataccacgacacacttaacggtaaacgtaaccgtgacgcgatgatcctgcatgattcatcatcagttgatgtttcttatcaggatatcaacccggtcatgctggaaagtaattacggtcagacgaccaccgacgttcagtttcctgcattatcgcagggtctggaaaaattaagtcatctggcggatcaggtcgtggtggaagggaacggcggatggcgttatttactgaataacgagacttttttatccgactgggtgaaaaaggaaaaactgccggtgatcctggtggtcgggatccagtccggttgtgtgaaccatgcattattaaccgccgaagccattaaaaatgatggactggaaattatcggctggattgcaaaccggataaacccggggttatcacactacgcacaggttatggatcgcttactgacgcatttaccggcaccactgctgggcgagatcccgtatctgctgcgcccggaagagcgggagttgtcgcactatctcaatgaagagcagattgagatactctggggtgaggcgttagcagcgtcctga

SEQ ID NO: 274018 - DNA, 234 bp, Morganella morganii
atgaaaaaactgattgcgctcagtgctgttctctttgccgtttcgcctgttatggcgcaggcatcctgtgaaagtgtgactgaggaaatttcgcagaaaatcatcagcaatggtgttcctgctgacggctttacactgactgtggttccggctgaagaagcagcacaggcagaaggtcaggttgtgggtaactgcaacaacgaaactcagaatattatttatctgcgtaaataa

SEQ ID NO: 274019 - DNA, 366 bp, Morganella morganii
atgactaactccatgctcaaaaagtggtttatcgcgaccgcctttgctgcacccttcatgtttgcagctcatgcaggcgcagccaccaccaattgcagccccggcagcacttgtgtgatcagcggcggcgatactgcgcttgaaaaagagagagcacgccaggaaaaagagcaatgggatgatacccgttccctgcgtcagaagatcaaccgccgtgctgaaaaagagttcgataaagttgaccgtgctattgatgctgaagatgcatgtttaaaaagttcggttgttaccgcgtattgggaacctaatacgctgcgctgccttgatgcaaatacagggcgtgaagtttccactggctggaaataa

SEQ ID NO: 274020 - DNA, 750 bp, Morganella morganii
atgattgttttaattacaggtgcaacagcaggttttggtgaggcatttgcccgcaaatttattgagaatggccataccgttatcggcaccggccgccgtattgagcgactggcgaaactgcaaaaagagttcggaaacaaatttttcccgctggctctggatatgacagacagtccggcggtcgacaatgtgattaattcactgcctgaatccctgcgtgaaattgatgttctggtcaataacgccggactggcgctgggtatggaaaccgttgataaaggcaatccggcagaatgggatgtggtggtggacaccaacatcaaagggctgctgcatatgacccgcgctatcctgccggggatggtggaaagaaaccgtggccatatcattaacctgggctcaaccgccgggtcatggccgtatgccggtggtaacgtttactgcggaaccaaggcgtttgtccgtcagttcagcctggctttgcgcgcagatctggccggtaaaaaaatccgtgtgactgacattgaaccgggcatggtcggtggcaccgagttctccggtatccgctatcgcggggatgaggaaaaagccgcaaatacctataaaaatactgatccgctgatgccggatgatatcgcggaagcggttttctgggttgcaacattgccgtcgcacgtaaatattaatactatggaaatgatgccggtctgtcagtcattcgccgggctgagtgtgcaccgcgaaggctga

SEQ ID NO: 274021 - DNA, 408 bp, Morganella morganii
atggttcagggtcaatgtttgtgcggtaaagtaacagtatctgtgccaaaaccggtgcacgatgtctctgtctgccattgcggcatgtgcagaaaatggaatggtgcaccgtttatgtctgtggattgcggcagtgatgttacgctcagtggtgaggaatatatcacccgttatcactcctcagagtggggcgaccgctgtttctgccgagagtgcgggacacacctgttttattatctgaaaccggcaaatcagtattatgtctctgcggcattgctgggagagacaacagaatcccggctctcaatgcagatttacaccgacagtaaaccggcatattacaattttgcggaaaaaacgccgatgctgactgagcaggatattctggcgatgtttcaggctgaataa

SEQ ID NO: 274022 - DNA, 1452 bp, Morganella morganii
atgtcagcatcttttaccccgcagcatcaagagtacgacaaggtcattcaggacatcactgattatgttctgaatatggacatcagcagtgatcgcgcttatgacaccgcatattactgcttcctggataccctgggttgcggtctggaagccctggaatatccggcgtgcaaaaaaatgctcggccctgtcgtgccgggaaccattgtcccgaacggcgccaaagtaccgggcacccaatttcagctggatccggttcaggcggccttcaatatcggtgccatgatccgctggctcgattttaacgatacctggctggcggcggaatggggtcatccgtccgataacctcggcggtattctggccgttgcagactggttatcccgtgaagcgattgccaaaggcaaggcaccactgccgctgaaacgtgtactgaccgctatgatcaaagcccatgaaattcagggctgcctggcactggaaaactcatttaacaaagtcggccttgaccatgttgtactggtgaaagttgcgtctacggcagttgtcggcgaaatgctggggctggatcgtgagcagttattaagcgcggtttctcatgcgtgggtagacggacagtctctgcggacctaccgccatgcgccgaataccggttcacgtaaatcctgggctgccggtgatgccacttcccgtgcggtacgtctggcactgttcgcgcagaaaggtgaaatgggctatccgaccgttctgaccgccaaaacctggggcttctatgacgtgctgtttgacggcaaaccgtttaaattccagcgcgattacggctcttatgtgatggaaaacgtgctgttcaaaatttcattcccggcagagttccactcacagaccgccgttgaagcagcaatgacactgcatcacaaactggcggcactgggtaaaactgcagatgatattgagaaagtcactatccgcacccatgaggcctgtatccgtattatcgataaacacggcccgttgaataacccggctgaccgtgaccactgtatccagtatatggtggcggttccgctgctcttcggtcgcctgaccgcggcagattatgaagacgggatcgcgtcagacagccgcatcgatgccctgcgtgcccgcattcactgtgaggaagataccgcgttcacccgtgattatcatgatccggaaaaacgctctatcgccaacgccctgaccgtgaccctgaaagacggtactgttctggatgaagtcgtggtcgaatatccggtcgggcatgcccgtcgccgtgaggaaggtattccgctgctgctggcgaaattccgcaccaacctggcgcgtatgttcccggaaacacagcagcagcgcattctgaatgctgcccgtgaccgtaaaacactcgaatccatgtcagtcagcgagtttatggatctgtttgttatttaa

SEQ ID NO: 274023 - DNA, 1164 bp, Morganella morganii
atgaatgaacaacttagcaaacctgaacctgcactgaagaaaggcaaaaaatccgtcgcactgtccggcgttgctgccggcaatactgcactctgtactgtgggaattaacgggaacgacctgcattaccgcggttatgacattctggatttagccacacaatgtgattttgaagaagtcgctcatcttctgatccatgaaaaactgccgaacgccgcagaactggccgcttacaaggcaaaactgaaatcactgcgcggcctgccgcacagtgtgaagaaagctctggaagcgctgccggcttctgcccacccgatggatgtgctgcgtaccggcgtgtccattatgggctgcgtcctgcccgaaaaagagggtcatccgttatccggtgcccgtgatatcgccgatcgcctgctctcttccctgacctccatgctgctttactggtatcactatgcgtttaatgatcgccgcattgataccgaaactgatgacgatacctgcggcggccatttcctgcatctgctgcacggcaaaaaaccgtctgaaaactgggtgcgttttatgaactcctcgttcattctctatgcagaacatgagtttaacgcctccacctttgctgcccgtgttatcgccggaaccggaacggatttctactcctccgtcaccggggcgattgccgcactgcgcggaccaaaacacggcggcgccaatgaagtgtctctggagatccagaaacgttacagctcaccggatgaagctcaggcggatattctcgcccgcctcacccgcagtgaagtcgtgatgggcttcggtcatccggtgtataccattgctgacccgcgtcaccaggttatcaaagcgatttcccgtgagttatccgaagaagcgaaagatttccgcctgtttgatattgcggatcgcattgaatccgtgatgtctcagcacaagaagatgttcccgaacctcgactggttctcagcggtggcgtatcacctgatgggtgtgccgaccgccatgtttaccccgatttttgttattgcccgttccgcaggctgggctgcacacatcattgaacagcgtctggataataaaattattcgtccgtccgccaattacaccggaccggaaaaccagaccttcgtaccccttaaagcgcgctaa

SEQ ID NO: 274024 - DNA, 885 bp, Morganella morganii
atggcactttattccgcaggacgcgcattccgcgacgctgtacagtctgaatccccgctgcagctggtcggtgctattaatgccaaccatgcactgctggcaaagcgtgcgggttacaaagcgatttatctctccggcggcggtgttgccgcaggctctctggggatccctgacctggggatttccacgctggatgatgtactgacggatgtccgccgtattacagatgtgtgtgatctgccgctgctggtggatgcggatattggtttcggcccgtcggcctttaacgtggtgcgtaccgtgaagtccctgatcaaagccggggctgccgggatgcacattgaagaccaggtcggcgcaaagcgctgtggtcaccgcccgaacaaagaaatcgtctcaaaacaggaaatggttgatcgcattaaagctgcggttgatgcacggactgatgagaatttcgtggtgatggcgcgtactgatgcgctggcagtggaaggtctggaatccgcgctcgaccgcgcacaggcttatatcgatgccggtgcggatatgctgttcccggaagcgattacagagctggcgatgtatcgtctgttcaccgacaaaatcagcgttccggtactggcaaacattaccgagttcggtaaaacgccgctgtttaccctggatgagctgcgcagtgtgaatatcgctatcgccctgtatccgctcaccgccttccgcgccatgaacaaggccgctgaaaatgtctataacaccctgcgccgtgaaggcacgcaacagagcctgatttcacagatgcagacccgtgatgaattataccaaagcattaactactacgattatgaagataagctcgacgcactgttttcgcagaaaaaataa

SEQ ID NO: 274025 - DNA, 1614 bp, Morganella morganii
atggctcagagtgacaaaccggtgatctggacggtctccatttcacgcctttttaccctgttccgtgatatcagcccggaattcagtgcccgtgccagtatcagtgcgattaatctggggttcgatgcagcagtggaggcgattcgtgaacggctgaaaacagaacgctgtgatgcgattgtcagtgcaggctctaacggtgcgtatctgaaacagcatctgccggtgccggtgattgtcgccgcgccgggcgggttcgatatcatgcaggctttggcacgggcacggcagctcagtcagcgcatcggcctcatttattaccgtaatacttttccggcactggactcgctggcacagagtttcggtatgcagattgaacaacgcagttatgtgaccgccgaggatgcacgggctgcctgtcttgccctgaaagcggacggtatttctgtggtggtgggcgccggattaatcaccgatatcgccgcagagtgcggcatgacctgcattttcatttattccaatgatgccgtccgccgggcattcaccgatgcaatagaactgacgcgcatccgcgaccagccgcagaacatgcctttgccggtggcgggctctctgaatgtccgccatacactgaatgatattctcggcacctcgccggtgatggaacaggtgcgtgaaaccatcacgctgttcgggcgctcgaaagcgacagtgatgatccagggggaaagcggtaccggtaaagagatggcggcacaagctattcatcatgaatatacgttgtttcataaacataagcggacgaaacgcgctgcaccctttgtggcggtgaactgcggggctatcccggagagcctgctggaagcggaactctttggttatgaggaaggcgcatttaccggttcgcggcgcggcggccgtgctgggttatttgaggcagcggacggcggcacactgtttctggatgaaatcggtgaaatgccggtatcgctgcaaacccgcctgctgcgggtgctggaagaccgcgccattgtgcgtatcggcggctataaaccgattactgtggatgtgcgggtgatttgtgcaactcacaatgatctggataaccgggtggtggcgggtacattccgcgcggatctgttttaccggctgggggtattgcgtttacagcttccggcactgcgcgaccggggggcggatatcctgttactgacagaaaaactgctcaaactggcgtttgctgagctggatctgccgctgcatcgtggccatctgcagcagattctggcatgcagtgactttttctatcactaccgctggccgggaaatgcccgcgagctgcgtaatctgatggaacgggtggcgctgtattgcagtgcttatccggataaaattattacagaatcattattactgaaactctctcctgaacggcgcatggtgattgctcccgcccctgtgaccgatctcccgccggagccggtgaataccgccacggcaacagaagcggtagcccgtttccggggggatcgccgcgctgccgccgactggctggggatcagccgcaccaccttatggcgccgtctgaaacaggaacagaacacttcatcctga

SEQ ID NO: 274026 - DNA, 636 bp, Morganella morganii
atgtcagatctctttgctcacgatgaaccgcttgcagtggcacccgatgcgtatctgcttaaaggttttctcagtgatgaggatgagatgctgctggcagaaatccgtcgcctgactgccatttcaccgttccgccacatgcagacgcccggcggataccggatgtctgcggccatgagcagctgcggcacatacggctggatctccgatgccagaggttaccgctactcacaaacagatccgctgaccggcaatccgtggccgccgctgccggatgcgtttttgtcactgtcgcagcaggcggcggagcgggcgggctttcacggattttcgccggacagctgtctgattaactgttacgcgccgggcgccggtatgtctctgcatcaggacagggatgagccggatcgccgccagccgattgtgtcattttcactcggtctgccggtgcagtttcagttcggcggcagtgagcggcatcatcccctgaaaacctttgcgcttgagcacggtgatgtactggtgtggggcggccgttcccgtctgaattaccatgctgtccgtccggtaagggccggagtgcatccgcttgcgggtgcccggcggtttaatctgaccttccgctgcgcgcggtaa

SEQ ID NO: 274027 - DNA, 1083 bp, Morganella morganii
atgacaaaacagacaatactctcagacgatgcgtgctgggcagcgctggccgccagagataaaacagccgatacgctgtttgtgtatgcggtgaaaaccacacagacatggggatttccgtctactgttgtgcggctgccgaaacgggaaaatactgaattttttgccacgccggaagaggcggaggctcacggctatcgcgccggaaaacgccgtcagcgcagcggtgaggctatgacgcagcgccatgcggaacaggtggtgctggcctgccgggagctggaaacgcggatcgataacggtgagccgttgccgtcactggcagagctggccacattgtgcggcgtgagtcagtttcattttcaccgtattttccgctcacataccggactgacaccggcggcatgggcaaaagcctatcgcggggataaactgcgggaacaactgacaaaacagacgacaatcaccggcgcaatcgctgaatccggcttcagttccggcagccggttttatgaatcgtcggatacactgcttggtatgacgccaaaaagctggcgggcaggcggcaaaggggcgcggattttctttgctctggcgatatgtgcgctgggagacattctggtggcgcagagtgaaaaaggtatttgtgccatcctgctgggggatgatgcggaagcgctgttacgggatttgcaggatcagtttcccaatgcggaactggtcggcggtgacgcacagtttgaacaggtcgtttcccgggtgatcgggtttgtggaagtaccatcttccgggcttgatctgccgctggatatccggggcactgcattccagcgccgggtctggcaggcattgcagtccatcccggcggggacgactgtcagttaccgggagattgcggaacggatcggctccccgaaagcggtcagagcggtggccggtgcctgtgcggcaaactgcctggctgtggctatcccgtgtcaccgggtggtgagaaccggcggggaactcgcgggttaccgctgggggatcgaacggaaaaaacgtctgttgcagcgcgaggcattgcagcaggaaatcggttaa

SEQ ID NO: 274028 - DNA, 1014 bp, Morganella morganii
atgcgttttcgcacaacaatgttactgagcagtttattttttgtcattctgccggtgatggcagtcgccgcgcctgcaacggctgaggtcattatggataatgacgcaacaattcctgcgacagcggccggcccgttgtttgattgtgacagtgagctgataaaactgattgcaggcagtaatcatgggctcgtccgcacagaaaaagtcactgcggacaggctggggatttatattgaaaaccgggatattaatgagctggctattcagctttctgatacacggcaaaagccctcgccggaatcgccgggagcagggcaactgggctgggtgacttacaatatcaaagaaaataccctggcagcgacaggggcggatgcggagcatcccgtcccgctgaccttcagcgcagcgcagggtgaacggctgcaatcctgtctgaaaaaagagaaaacgtgtcagcagatcctcagtacgctccgctacgaaccctttattgcaatgtcgccggagtggcgcgtcaccggcaaaggccgggcttatttttatgcggcaccggcggaacagtgccgtaatgataatgtctttgtggttccgggggatgtccttcaggtggtcggattgcggactacggaaccggtgaaaggggaaaaagagggctggctgctggtggcttacggcaatgtgcagggctggattaatgttaaccggctggcgtcacaggacgcgctgtgcgatgcggcaaccgggaacgcggacaaacagtatcaggcgggcctgaaaaacagtaagccttcctcatacaaatacagtgtgacacaaaatcgcctgcgtttttatgatgctccggataagggttgtattactgatgctgcggattttgtggtgaaagatgatgcgatctgggtggatcgtcctcagccgtatcagggatttgttcatggccgttatatacatccggctaccggtaaagtcacagaaggatggctggaagcagacggacttaaaagatga

SEQ ID NO: 274029 - DNA, 1740 bp, Morganella morganii
atgagcacattattatcaacccgtaatctgtcattccatcccggtcacacaccactgttaaccgatatttctgtcgccctgaatcagggggaaaaaatcggcctgatcgggcataacggctgcggaaaaagtaccctgatgaagctgttgtccggccaactgacaccggatgagggcacgattaccccggcgaaccgcgtcattatggcgtatatcgaacagcacctgccggaatctctgaataccctgtcactggcggatgccgtactggataaattaccggcggaacagcatctgtccgaaatgtggcgggcagaaatgctgctgacagagatggggtttgacccgctacagtggcagttaccggtcaccgcgctgagcggcggccagcatacccggctgttactggcgcgggcgctgatcagccggccggatttattattactggatgaaccgagcaaccatctggatctgccgactattttgtggctcgaacagttcctgaaaaactggcgcggcagctttatcctggtttctcacgataacgccctgctggatcacgtcaccaactgtacctgggtgctgcgggacggtaacgtttcagcgttccgtctgccctgcacacaggcgcgggaagcgctggcgcaacaggatgagagcgatgagcaccgccacaatgcacagcagaaagagatcgaccgcattgcggtaagtgccaaacggctggcgatatggggaaaagtgtatgataacgaagccctttcccgcaaagccaaacagatggaaaaacagatagaccggttgcaggatgaccaggttgagctggcgatcggcagtcagtggcagcttaagctgaccggggatgctctgcgggcagaccggctgtgtgcctttaatcagctgtccgtgatcccggcagacaattgtccgccgctgtatgtgacagacaatgtgtctgtgaaatccggcgaccgcattgcggtgatgggcgcaaacggcaccggaaaatcctcactgctgcggatgatctggtcacagtcgcagaaaccggaggtaacactgccggacagcccgctggtgctgcatccacgtgtacatttggggtattacgaccagaaactggcgcaactgaatgacagtgattcactgatggatgcgctgaaaccatttgcgccactgattgatgagcagcggaaaatggcactgatcagcgccggtttcccgtatctgcgtcatcagcagacagtatctgccctgagcggcggcgaacgggcgcggttgttgtttgtcgggctgagcctggccaattattccctgctgatgctggatgagccgaccaaccacctggatatggacggaaaactggcgctggcggaggagatcagccggtttgagggcgggctgattctggtcagtcacgaccgggaactgatcgaaaaaagctgtaaccgcttctggtatatcgacggtaaccgactgacggaatatcacgatctggatcaggtctatgatgctatccgtgccctgaatgcagattccggcaccggcaacagcatgttaccggcggtcccggagccatccgttccggtcagtgacgaagaggattcgctggcggcactgattacgctggaggaaaaactggcagcggatttgcagcgcaaacccgctcatcagaaaccggtacttcaacagcagtggcgcgaacagattgcgcaactgcggaatgaactggggctgtaa

SEQ ID NO: 274030 - DNA, 732 bp, Morganella morganii
atgccattaaagcgaaccggattaaaactggatttttcacttcttaacctgccggagaaagatgataaaaaaacacacttgccgacagatgattatttgaaacagcatattgatgccttattgatacagatgaaacaaatgccggtttcattcataaaagaggcagagaatgcgccggattatccgatgctgcaacaatgtggttattcctcacgatataacggatttcatttatctaatgattgcggtgatgtatttatccgcgcccgcagagagaaacctcactgcgctggtgggtttgaaggtgataaatttcatttgagtgtgcatgaatcacagattgcacaagcggtcactatgctgtcaggagcgctgttttcagataacaatccctgtgacagatggaaaataacggatatttcacaggcagagcctgacagcagagttaaacgcggagcccagataactttatatgttcgtcctgttccgggtgaacatccttatagcgcagagctgctcagtgaaatccgcagatttatcaccgggcttgaataccgcctgacagaaggggggattgtaccgggagaataccctttatcagatatccgtccgccacactggcaatttaccagctaccgtaatgaaattatcagcgggcgggagggctgtgaggcggaccatcagcggttagcggaatccgcattttaccggctgatgacagatcgggattaa

SEQ ID NO: 274031 - DNA, 681 bp, Morganella morganii
atgtttattctgccttccggacatttaccgcacaccgccacccggatggcgttcggcgcggacccgtgcatgggccgtcagcggacagagcaattattgtcgtactatttcgggctgaaaaccattatccggctgaatgggatccgtaatcatgatattactgatgcacatattgatttttatgcccggtgcataattctcttactaccgacggacagacacatgacaccgattaactggcagactgccgccctgcacgacctcccaccccagacactctatcgcctgctggcgctgcgcagcgcggtatttgtggttgaacagacctgctgttatctcgatccggacggtgccgacctcacggcacggcacgtttgggcggaacaggacggtgaaattatggcctgctgccgtatcctgccgccggaaaacggtacggcaccggcagccatcggccgggtggtgatcaatccgcaattccgcgggcaaaaactgggctatccgctgatggcggccgctgtacaggcggtataccggcatttcgggacacggcgcattgttatcagtgcacaggcgcatctgacggctttctatgaaaaatgtggctttactgtctgttctgacgtttatgatgaggacggtattccgcattgtgatatgttccgccccgctgccgattaa

SEQ ID NO: 274032 - DNA, 663 bp, Morganella morganii
atgacaaacataataaaaaacagtacctctgacgctgataacggcagattaatcaccgaatgtctggatgaaaccgggcttgagcctgccaccgccctgttttatcaggcattttcatccaagttcaaaaccgtgagcactatgccggatgcacagcgtcaggccgtgctggcgatgttctggcagcgcggactcagtgacccgtatgaccgtcactttcaggtaaaacgtaacggtaaactggtcgccgtatatggcctgacttacggggttaaacacccgccgcagcacgccccggcaccggtttcttctctggctatcctgcgcagggccggttttattccttttctgagaatccgtcggatttttcagatgtttgtctatattccggcagcggatacggcttatctgtcctacctgtgtgtggatgaatcactgcgcggtaccgggataggcaatcagattcttgatgagatcaccgcacaattacgggcggacccggccattaacaggttatcactgtatgtctctgacttaaatataaaagccagagaactgtatctgcgccggggttttcaggatgtgaaatacgaaacctcacgcaccaccgaacgctatatggatatttacggctggtattacatggccctacccacactataa

SEQ ID NO: 274033 - DNA, 591 bp, Morganella morganii
atggaaaaattaacggaaaagcagcagcgcaaacgtcgtcagatccttgacgctgcaatgcattgttttatcgaaaaaggttttcactccacctcgacggcagagatttgtaaagccgccgggatgagccccgggaatctgtttcattactatccgactaaatacgccatcattgaagcgattgcggaactggacgaggatgaccacaaggcgattctgagtatcggtgatgcgccgggacatacggcagatattattgaaaaaatgataacggcgttgattatgttgtatagcgaaccgggttatacccgcctcagtctggaaattatcaccgaggcaagccgtaaccctgagctgaatgcagcttttgttgttaatgagcagcggctgcacaaaaaattctgtgatgtgctcagacgcggcatggccgccggagagattgacccgcagctggatccggcacagaccgcgtcctggctgctggtgatgacggacggcacgctggggcgtgaactgacggaaccgcaattcagccgggaggcgtttctctgcgggttacgtgtgttgctgagaaaggcgctgaagccctga

SEQ ID NO: 274034 - DNA, 486 bp, Morganella morganii
atgaatatccgccctgttaccggtttacccggcgatttaccgctgccggaaagtattgctcaggttttacatcaggaatggcaggaactgccgcagtggcagacaccggaaattatcctggcacgtctgataaaacggatgaacggtgataacggcgaaatgctgtttgtcgccacggataaaaacggcgcactatcggggacggccagcctgatctggcgggagctgaaaacctgccgtatggcaaatgcggactggtggaccggcgagatttacaccctgcccgccgcccgcggacaaggtctcggcagcgcactggcacgggcggtttttgccgccgccggagagcgccgcctggcagcactgaatctctacacgccggataaacaggccatgtatgcacggatgggctggcaggctatgtatgatgatgtgatcaatgacgagctggtcacggtgatgcagcggactgtcagcgaagcgtaa

SEQ ID NO: 274035 - DNA, 579 bp, Morganella morganii
atgacatcatcccgaataccgccctgcggacgccctgctcaccggggcagtaagctgaccgcagaaaatattctgtccgaagccggaaaactgttacaggaacagggaaaagtcccatcgatccgcgcccttgccgcacagttgcaggtcgatccgatggcgatttattattacttccgcaataaacaggcattgctggaagccctcgccaccgctctggtggatgatatttatcagccatcggcacaggctccggtacaacaggagcttcagcggctggcagaaagttatctgcatctgctctatatttacagtgatctgctggatattctgttatcactgaacagtgacggcccgtccggctgtttccgtcagcgctatctgcgcattattgcgccctgcgggctgaatgagccacggcagaccgctattctgcatctgctggcagatgccctgcacggccatacggtggcgatccgccggactgattacacctttgaacagagccgggcgctgtttcagccggtactggcattaattaccgaacttattgaacgcccgagagcatcattatcatga

SEQ ID NO: 274036 - DNA, 393 bp, Morganella morganii
atgggcagccaaaataagtttgacggggaatggccatatgacaaaccggtttttgtgctgtcccgcacagtgacggaattaccggaaaaactggcgggtaaggtggtatatcctgttcagggagagattggtgatgtgctggcagatattcaccgtgccggatatcacaacctgtatattgatggcggaacggcggcaaaacagtgtctggccgccgatctgatcgacgaaatggtgatcaccacggtaccgctgttgctgggtggcggcacgccgttatttggctcgctgccgtcaccgctgcagtttgttcacatcagtacagaacggtattttgattatatggtgaaaaacacctggtaccgtcagcgggctcaggctgcacacgcctga

SEQ ID NO: 274037 - DNA, 258 bp, Morganella morganii
atgcagcgtcatttaagcccggacggcattgtccgttatcagaccttttatcagatcggagaaaacggcccggtttaccgtgcagaatcggatattgcgttcccttccgcttcggaaatcacggaagccgtgacattcagcgggctgatggttcgtcatatttacggcgaccatcagtccggctcgttcaggccggattcacgggaaatggtatttgaactgagtcacccgcagtgcagtcaggcgtgtgcagcctga

SEQ ID NO: 274038 - DNA, 1269 bp, Morganella morganii
atgaaaaaagtctgtttttttgatttaccgtttgtccgccaggacagcaaggcaccgccggagcacaactaccgccggatcattgcgggtgataaggtgttctatacctttacctctcagttcagcgatgatgcagtgctgaaaaaactgaaagaaggtgacaggatatatatcggtgcccggccgctggccggcggcagttactggctgcactggctggtatcaccggaacacggcaatctggagcaggaaatgaagagctccggtaatctgcgggggctgagaaatctggtcattgcactggtactgatgattttctctgtcagcacgttttttcagccgttaaacaatgcgtttatcggtgtattgatgatctttgtctttaccggcgggatctggatgctggccatcgcggttcaggggttgatggtcgcaaacagccgcgcaatgaatcatcttctgaaagggctgacacaggtgaaggccgggaatacggctgtctgccgtcaggcggaatatctgctgacggacgcatccgtgaatatgaaacataagcggcgctggcctgcagatgatcgttttaatgagctggattctgtgcagccggaagattaccgctatgcggaagaactgacgctgaccggtgttcagggaaaaatagcaaaccttggttctgtccgcggtttcaccggcagcggtaaaagccggcgggattatattgattatcatttttcatgccggggtcttccgtttgtgctgcgcagttattacaacagcctcactgaagatatgaacccgttgtttttccgccaacacccgctctttattgcggataatgatccggtggcgctgaccgtgaatcagcagaaaggaacgattaccgggatgtacaatgagcgcgaccacagtgcttacctcaaaccggaaggaatggtggtgtcatcacggcaactgaaaatgatttataaagtgtttgccggtacttttctgctgatgatgctgattgttttatctttttcaatcaatgatctgatgagtatcagcggcacaccggataaatgggactggttacatgcggcaaaattgcagggtggcatcatgctgatgtttatcatgattttcagcggcatcatgctgataaccgaagtgattgcgttgctgacacgaaaatactcagcagcttcggcccgttttgtgtttacccgccagatactggttcaggccagacaacggaacggaaaagatccgtttgtacaggaagttaactga

SEQ ID NO: 274039 - DNA, 1314 bp, Morganella morganii
atgtttgccgacggacgtacccggatcacgttgctggcggttgtgtttatcacctcaatgatgctgacgttttctgattcatttttttcagcgccggaaagaatacggacccgcagctatctgccggaaaaagaagcgataaaattaacgtcactggccatcagcagtttccgcgatggtgtgatgataaccggtgccagagacgctatgcgggttgatctcgtcacctgtgatcagaaaacccgcagttgcagccacagtaaaaatattgactttaacccggtggatgaacctgatattccgctgctgaacctgaaaatatccccggataaaaaagccatcggcgattacctacacaaacaaacttataatctgaggcgcagtgaagtctacggtgacaggccgctggtgccggtcacctatattatgactgagcagaaaggggatttacgggtcagcgcgatgtttatggggcgggtacaaagccagctgtgtgatatgcagggacgctgtctgattattttcagtgattatgccacctacggcaaagaatatgtcttttactcccgggacggtggtcagcagtggcaatggttatcacaatggacaatgccggaacccgccggagagactcagcttctcgctatcacagaacccggcagtgtgctgatggtgcagagggacacactgtatcagacccgtgattccggaaagcactggcggcctttattcagtatggataaccggaaaaagcggtatcaggatgacgggcgctggtataccagcctgagcaccactaaatggcactataacggagacgggcgggtgattgcatggatgaaggatgagcaaaatgatccggaaaacaccatactggcctgttttaatacccaaacctcagaaacggaatctgatcaggttgtccccggggagattgacgcgctcgacagtaccaccggcggagatatttattttgcgctgacggaaaaaacccgtaaacggccggaggttaaccactttaactgtaacggtgattattcacagcggctggaaaccggcggatcttatattaacggactgcagggcggcagtgatgatttactgatagcggggtcaggttcagaaacccgcatatcggatgatggcgggctgaactggaacactgcagcaccattggcgaaagagtacggggaaaccgttttatttgataagtggcgcaatcgtctgttctattttcaggagagtcactacagtaataacccgacaggaaaccgtgacggcattgagtataaaacctcggcagtacagcaatga

SEQ ID NO: 274040 - DNA, 1191 bp, Morganella morganii
atgccgcgttctgtttactggctctcagccgccttagccttatttaccaccgggaatgccctggtgctctctgttgccgttcttatcggctcacaactggcggacgatccggcacatgccacgatcccgctgctggcacaatatatcggcctgatttccgcctcggtgccgatggctcactttatgatgcgtttcggccgccgcgccgggtttattctcggtaatatcggcgggctggccgaggcattactggctatcgccggtatttatacacacaatatgctgctgttttccgccggaacgttctttaccggtattgccatcggtaccgcccagcaataccgctttgccgcactggaggaagcccctgccgcgctgcgggcaaaagctatcggcgtggtgatgagcggcgggattatcgccgtgctgatcgggccgtctctggcgatgtccacccggacactggtggcggcttatccgttcctcggtacgttcggcgcgctgacggctatctatctgatggcttttgttctgctgacatttttaccgctgaaagctcagcttcccgctcagatcagcgataccgtaaaaaaccgcccataccggcagttatattcccagccgctgctgattctgatcgccgtagtcagtgctaccggatatgcgctggtagtctatatggtcggctcgttcccgctggcgatgaaagcgcagggatttgaattcccggcaattgcctttgtgtttcagtgtcatattctgggaatgtttgcgccctctttctttaccgggcagttaatcagccgggccggggtaaaatgctttgtctggctgggggtgatttgcctgttaatcagcaatgcggtcagtctgaccggcagcagttacacgtactttctcattgccatgacttcgctgggactggcgtggaactttattctgatcagcaccacacatctgttgccgcgcacttataccggcaatgaacgggctaaaatccagggtgcgaccgattttcttatcttcagtttcggggcactcggcagtctgctggccggattcgccttctattatgcgggctggtattccgtaaatatcgccgggctggcaaccggcattgtgattctgatagtgatgtttttactgcgccgcagtatggatgaatccccggcagaaaaggccgccgcctga

SEQ ID NO: 274041 - DNA, 423 bp, Morganella morganii
atgaaaatgattgatatcggccgtgtcgcagagctgaccggcctgacaaccgccaccatccgctattatgaaagcaaaggcctgatcacgcctgccgggcgccggggcctgacccgcatttatgatgaagaggtgctgacacggctgtccctgatcattctcgccaaacagggacatttttcactggatgaaatcgcggtaatgctcagcgaactgccgtcaaaagggattgaacggacggcaattcaggcaaaaatcacagaaattgaccagaaaatccgcgaactgcaaaatctgaaacagggattgctgcatattgagcagtgcccggcagaaaaccatctggcgtgcccgaagttccgcaaaatcctgagtgtcagtctgaaaaaaaacagaagcaaaacggtgaaaaatcccgcttga

SEQ ID NO: 274042 - DNA, 708 bp, Morganella morganii
atgagtcagataaatgcattcggacaaactgtcggtgatatcgttccggactggaccgcccgcccttaccctgcccgcatcagtgcggaaggccgtcactgccggatagatccgctgagtccggctcatacggatgacctgtaccgggcgttttcactcgcccctgacgggcgttactggacctggctgccggatgaaccaccggccgatctgaatgaataccgcgaccgtaccgaaaaaaatgcgcaatcgtcggatccgctgtttttcacgattacggataagcacaccggcaaagccgttggtctgttttccctgatgcggactgatgagaaaaacggtgttaccgaagtcggacatgtgcatttttccccgctgctcagcggcaccgtaatgtcaacggaagcccactggctgctgatgaaatatgtatttgatactctcggttaccgccgttatgaatggaaatgcgacagcctcaatgcaccgtcccgcaatgcggcactgcgcctgggttttcagtatgaaggctgtttccgtcaggcgcgggtggtcaaaggccgcacccgtgacaccgaatggttttccattactgaccgtgaatggccgctggttaaccgcgccctggaacagtggctgtcagcggataatttcaccccggacggcaaacagatccgctctctggcatccctgcgtgatgcagtatga

SEQ ID NO: 274043 - DNA, 1065 bp, Morganella morganii
atgagtgaagcagtaagagaaacacccgtacgacgtaaaaagaaactgaatggccggaatttttcacaattttttatctgcctgtctgtgttacttgctgccatgtttttttcactgttttacggcagcgtcaatatggaatttcatcagaagctggatacagtaatcaaaattattaccgggggcatcaatggtgatgatctcctgccgtatgaaaccatcatttataatatccgtctgccccggattatcctggtggcaattaccggcgcatccctgtcactggtggggatcctgatgcagaccataacccgcaatgaactggccgacccgtatattctcggcgtttcctccggagccagtgcgggggctgtatccgccattgtgttcgggttatttgcttttatgtcaccgtataatgtctatatcggtgcatttgccggcgggctgatttccacggctattattgttctgtttaattttaaaaagagtaatatgaccaaccttgtgctgattggtatcggtatttccagtctgttttctgctattaccaccgctattatttatctgtccaagaatgaaagtcaggttaaaagtgctatgttctggatgctgggcagtttctccggcattaaatggtcttatattccgctgccgctggtggcattaattgcagtattgattttttgtctgttattcagtaatgttcttgatacgttattattaggtgcggatgcgtctgcacaattaggtgtgaatgtcggtgctatcaagctggcggtaattattttatcatcctttgtggtatctattattgtggctaatgttggtgtgattgcatttatcggtcttattattccgcatattgtccgtaatacgatttcggtgaaacactttaagttatcgctctattcctgcctggtcggtggtgcatttctggtgattattgatacgatttcccgcagctggtttaaaccggaggagattccggttggtattcttacctcactgataggcgcaccgctgtttgtttatatcattattaaagcgaacaggagccggtaa

SEQ ID NO: 274044 - DNA, 741 bp, Morganella morganii
atgagtaccgttgatattactgatctgaattataacgggatactgaaagacattaatctgtcattttccggcaaaagagtgatcggtattgtcgggcctaacggctccggcaaaacaaccttattacggcatatttaccgggatatcaaaacccggggcaccgttttctttgataatacggatgtggctcagttctccgtcaaatcactcgcccgcaatatctcggtactgacgcagtttaatgaccaggtggagggcaaactgaccattgaggaaatcgtggtgatggggcggatgccatataaaaaacactacgtggattacagcgaccgggattttgtgattgcagataattacatgacattgtttggtctgcaaaaaatgaaaaataaagagtatcacgcactgtccggtggtgagaaacaacgggtgatgctggcgaaatgtttttcccaggaaaccgatattatgatcctggatgaaccgaccaaccacctggatatccgctataaagtggaagtaatgaaagcgctggccgcatcagaatctactgtgattatgaccattcacgatattaatttatccgcaaaatactgtcagcatctgatcctgatgaatgacggacaaatttatgcgcagggcacaccggcggaagtactaacccggaagtgcctgtttgatgtatttggtgtggaatttacggtattaccggtcgaagaccgtgttgctatatttttataa

SEQ ID NO: 274045 - DNA, 969 bp, Morganella morganii
atgaaaaaattattattgagtactctggttatctccgcattgttttccgtgacagccattgcggaaaataaaacagcaccggcttatgttccggttgaattcagtgcaaagctggatggcaacgaatatcactttaaaccggaaacatccccgcagcgtattgtctctctcagtcagatcaccaccgaaatgctgctggcgctggatttgggggaccgtatggtcggtaccgcctttctggaagagccgatttatccgccggttaaagcggcgtatgacaaaatccccgtgctggcagaaaaatggccgtcttacgaagtctttatgtctgtcaaacccgatttcgccaccggctgggcaaactcattctcaaaactggcactggaagccaataaaattgtgccggaaggggttgccgtttatgtgccggaatccatgacatcaccgaaagcagatgtgaatacttattttaacgacatgctgaaatttggagagatcttcggtgtacaagagacagctgaaaaatacgtggcggcagaaaaagaaaaactgaataccgttatcagccagattcaggcgtatccggaaaaaactgcctttatttttgattctcaggacggtaaaccctataccttctttgatggttatacctcagagatgctgaaactgatttctgttaaaaatatttttgccggcaaaaataccggaaaaacctgggcggtcggtaactgggaagatgtgattatgtctgatccggaagtgatcattattcctgtctataaaggcttccgtaatgatgatgattatgaccagaaagtggcatttattgaatccatgccggaaatgcagggtgtaaaagccgtgaaaaataaaaattatattaaagtgaatttgtctgaattagtgccgggaccgcgctcgattgatattttgccggtgctggcaaaagaaattcacgaaaaaccgtaa

SEQ ID NO: 274046 - DNA, 312 bp, Morganella morganii
atgagctggggattaatactcgcactgacactgatgctgttttcgctgcgctttatttttctgatcccgggattaccgttgcggctgccggtttttattcagcaggcgctgacctattccgcgccctgtctgctggtggctatttgcgcgccgattgtattactggaggaacagcagttccgtgatatcagtgataatccatatttatggggtacgctgttctgcattatcgccgcacggctgattaaaaataccctgctgaccgtggtcctgacgctggtatttttctacactctgatttatctgttctga

SEQ ID NO: 274047 - DNA, 708 bp, Morganella morganii
atgacaacaaccacagatttacccgcctctccgctgaaagattttttcaccggcgcactgcatatgaccccgctcaacctggccgtggtgccgtgggcgatcctcgccggatcgatggcggtggacagcggcctgacctttgcacaaagtgttgcgatgtccgcgatggtctttgccggtgccgcccagctggtgacactcggcctgcttaacagcggtgccggggtgatcactattattgtgtccgtcttttttatcacctcacaacacctgctgtacgggctgacgctgcgcccgcatgtgcgtcctttttccccgctgcaacgggccggtatcggctttctgctgacggatgaactgtttgcggtcagtgtcgccgggcggcagcgcctgagttttgcttatctgttcggtgccggactgagtttttatctggtctgggtgctggtcagtattctcggcattgtgctggcacacagcatcagcgacctgagccagctccggctcgacttttcggtggtggcgacattgctggcgattgtggtgccgctgatcaaatcaaaaagtgcactcgccggggccctgttttcctttgtggtcacgattattctgacacgtgccggtattcagggcagcgcggtaattgccggcgtcagcgccatgctgctggccgttctgctggggcgtaaatggggggatgtaaaatga

SEQ ID NO: 274048 - DNA, 837 bp, Morganella morganii
atgcagagtgacgggcattgccgtgaacaggctgactattttcatctggacgatttttatggtctggggatgatctctgcccgttactatcagcaaaaattcagccgtcatactcacgaaggtttttgtatcggcgtgattgacgaaggtgttcagcagtttttccgtaccggcagtaaccattatgccccgaccggcgatatcattctggtgaattccgatgaaatccacaccggttcctccgcactggaaaccggctgggcctaccgtgcgatttatccgacaccggaaatgctggatgcgctgatgcaggatctcaaatcggccgatcagggctttgtcccctggttttctcacgcggtggtgcatgatcccagccttgccgcgcagttacgcctgctgttcgatatgttgctgaagcccgataaccggctgctgaaaggttccctgttgctctcaaccctggcctggcttatcacccgccacaataaaaaaggctttcgcccggcggagatcaccccggccggtcagcgcctgcagcatattgcagaaatgatgaacagccacccggaaacggattattccctggatgagctggccgcaatggcgaatctcagcccgtggtattttctgcgccagttccgtctgcgttacggcatgccgccccacgcgtggctgattcaggcacgcctgcgcaaagcgcgccagctgttacaaaacggcggccgcccggcggatgtctctttacagtgcggatttaccgaccaaagccactttacccgccattttaaacgggcaatgggtgtctcaccgggcaaatttatgcagcgccgctga

SEQ ID NO: 274049 - DNA, 405 bp, Morganella morganii
atgacggcaaaaatgatcgataaactggcactgatcacgctgaaagacggcaaagtggccatggtccgctcccataacaaaaccctgttctacgccccgggcggcaaacgtgaagccggtgaaactgacgaacaggcactgtgccgcgaaattgacgaagaactgacggtaacactgaaaccggataccatcacgttttacggggaattcaccggtcaggcggacggtaaacaggacggcacacaggtgcgtatccgctgttatcaggcggaatttaccggcgtactgcaaccggccgcggaaattgctgagctggactggctggacagccgtgatctgccccgctgttctctggtcgcggcactgattgtgaaagacctggcagcacggaaactgatcggctga

SEQ ID NO: 274050 - DNA, 549 bp, Morganella morganii
atgatttttatcacagaaaacgattatgatgaaatcattaaccatcactgtgataaatcgctcatgcagaaaacggattctttttccgggattaccgcctttgtcgccgccgcacagcacggcagtttcactgcagcagcggacaaactggggatcaccaaatcagcggccggtaaacggataagtcagctggaggctgcactgggtgtcagcttgtttcagcgcggcaaccggcgtattaccctgacccctgccggggaaaaatatctcgcccgctgcctctctgcccttgccattctcggtgaggcggaagatgaaatcagtgagcagcaaaccaccctgagcggccggttacgtattgatttacctgcggcattcggccgcctccgggtgatgccggtgctggaaaagctgatggttcagcatccgcagctgatgatgagtatctctttccgcgaacggtttattgacctggctgaagaaggcgggatctggcgatccgcatcggtgaaccacctgacagcagtcacctggtcgcccggcaactga

SEQ ID NO: 274051 - DNA, 843 bp, Morganella morganii
ttgaatacccgcacttatcagttttaccaggtcgatgttttttctgatgtaccactgctcggcaatgcgctggcggtggtggttgatgcggatgatctgaccgatgaagagatgcatcgttttgcccgctggacaaacctcagcgaaaccacatttttgctgaaaccgcaggatccgcaggcggattaccgggtccgtattttcacccctgacggtgaactgccgtttgccggacacccgaccctgggcacctgttatgtctggcgcgaaacacagcagtttaatgataagcgcgatatcattcaggagtgcggggtcggtatggtaactatccgtcagcaggataaccggctggcatttgcggccccggcactgttacgcggcggggatactgatccgcagcaggtggcatatattgtgaaagcactggggctgcgtgatgaagatgtggtgcgctccgcatgggtggataacgggccgggatggattggactgcagctgacttctgttgagaaggtgctggcggcgaagccggattattccctgctggacggatacgatatcggcctctgtgcactgtatgacgatcagaacggaccggttcagctggaagtccgcgctctgtgctgttctctgggggaagaagacccggtgaccggcagcctgaatgcgtcgcttgcccagtggctgaccggcgaaggtattttaccggaatgctatgtggccgggcagggacaggttatcagccgtgacggcaaaatttttgtcactaaggaagcgggtcaggtatgggttgccggggatgtaacctgtgtgatcaccggacaggcagcgctgcgctga

SEQ ID NO: 274052 - DNA, 858 bp, Morganella morganii
gtgaacaataaaacccattccttttatcaggttgatgtgttttctgatgtaccgctgctgggcaatgcactggcggtggtggttgatgcggatgatctgactgatgaagagatgcatcgctttgcccgctggacaaacctcagtgaaaccacctttttgctgaaaccgcaggatccgcaggcggattaccgtgtccgtattttcaccccggacggtgaactgccgtttgccggacatccgacactgggcagttgccatgtctggaagcagcataccggtttcagtgagacgcgggatatcattcaggaatgtgccgccgggcttattacgctgcgtcagtctgaacagggaaccgcctttgccgcaccaccgatgattaacgagcgggatctgacagaagacgagtgcaatacagttgcgtcggcatacggcatcccccgcagtgctattttgcaggcaaaatatattgataacggcccggcctggacaggggttgaggtggattccgttgcccgcctgctggcaatcaccccggattatgcggtactcagccagtcagggaataacgtgctgtataaaatcggcgtgtgtgcacggtatcctgcgggcagtgatgccgcacttgcggtaagggcatttattaaccgcagaggcgcggaagacccggtaaccggcagtctgaatgcagcgctggcacaatggcttatcagcaacggcacattgccgtcgcactatctggcgcggcagggtgaaagtgtgaaacgtgacggctggctgagtgtccggcaggatgccgacgggatctgggtcggtggtgcggtgacagactgtatcaggggtcaggtttcactgcgctga

SEQ ID NO: 274053 - DNA, 615 bp, Morganella morganii
atggcacaaaaaggcagaccccggaattacgacagtgccgccgcactggataaaatcatggcgcagttctggcgcaaagggtataccgcaacgtctctcgatgaactggccgcagaaacagatatgaggaaacccagcctgtacgccgctttcggtaataaagaacggctttaccaactggcaatggacaggttcggtgaaatcgctcaggcgcattattccgccgcactggcaccgcagacacccggtgagccgctggccgcccgcctgatccgctggttacaggcaaccgtcaccctttataccggagagcatggcccggccggatgcatggtgttatcaacagccgccgccgaagtgtacgaccctgccatccgcaaacgtctgcaggaagtcattgcggcacaggagatgatggtgctggattgtctgaatgaagagaaaactgcgctgtgcgatccggattccgcgccgctgctggcgaaaacactgaccgcgttcctgcacagtatttccctgcgcgcccgggccggtgaaagtgcggatcaactggcagagatggttcgtgccggtcagctggtattgcagtctgcactgacatcaccggaggcataa

SEQ ID NO: 274054 - DNA, 795 bp, Morganella morganii
atgtctgatcatgattatgcagttgaaactatttacgggctgagcacgccttccattcaggcgctggttgctgcggggcgcgcatcacagcccgcattgctgaaagtcgggatttttgtctgtccgggttatatgccgatggatatcaacggcgcgcagtctgtttttacgattgcaggggcggaaatctattttatctggaaacgccgggagctggtggagggctatatcggctggccgacaatgccgacaatgccgacaatgacctttgatgagtgtccggatgatctggatgtgctggtgaccggcatggtaccgccggaggtgattgaagatccggaggtgatccgctttttcgcgcaggcagggcaaaaagcgaaatatgtgattggcacctgttacggttcgctgatgctgggtacagccggattactgaaaggcagaagggcaaccagtaacagtaatgtggtgccgatgctgccggacgtcggtgctgttgccgtcggcggcagtgaagtggtgatcgacgatactatctacacctccggcccggcgaccggctcgtttgatgcctcattactggtgctgaaagccctgcggggtgaggaactggccgcactggttgaactggcgattgaatatgacccgcgcccgccgttccgcaccggttccccgcaacttgcagggccggaaatgaccgccatatcacaaagtatgaccgcgccgctgaaccggcaatatcacgaagcggcgaaacggggctatgcccgttatcagcagatgattcaggactga

SEQ ID NO: 274055 - DNA, 1068 bp, Morganella morganii
atgatagcgcgttatttccgccggacacttaccgggcttgctctgctgttactgattgccggactggtgctgttttttaccagccatcttgatgattttgatttcgacaatgcagtggcgaaagaactgaccttcacctcacagggaaacaggctttccggtacctttctgctgcccggcaacggacacccggcagcggttgccgtgattatccatggtgacggcccgcaggacagatattcagacaacggatataacccactgttcaatactctgctggatgccggtattgcagtattttcctgggataaagccggcaccggtaacagtcagggaaactggctgcatcaatcaatggatgatcgcgcagaggaagccgtggccgcactgacattgctgcaatccctttatcagaataccccggtgcagattggctttcttggtttctcccaggcgggatgggtgatcccggcagcggcggcacaatcacagcctgatttttccgtgattatcggcggtgcggtgaactggcgggatcagggacaattttatcaggggctgcgctacgcacagcagggaaaatcgccggaagacattaaacaattgctggtagcagaacaggcagagaatgaccggatatttggccgcaatggctcaaaagacccggcacaacgtagtgatatgacacccgaccgctttgaatttgtggtcaaaaattatctcagtgatgccaccccggcaatccctcagatgaacgggcgtgtgctggcggtatggggtgcggaagatctgaatgtcgatgcccggcggaatgcctgccgttatcagtcacttttgaaagataatccaaagacaaaagtcattgtctttccgcaggccgggcacggtttattacaggcacccgcctataattatcagctcagcagcgactggccggtactgcgccagtggcagtttctgtatgccggacgggaagcctatcatccgggagcattgtctcttatcactgactggataaaaaacaaaatcccggatttgacagcctattacccggtttgtcagtcctga

SEQ ID NO: 274056 - DNA, 1050 bp, Morganella morganii
atgcaaacggcactgaatgcgctgacagcgggcttttcgccggatgagcccggcgttatcgtcatggtacataccgataacggcgcaacatggtacagctgccggggcatggcggatgtggcaacccgcacgccggtaacaccggacaccattttcaacttagcctccgtttccaaacaattcactgcattttcgctgctgttactggtgcaggaaggcaaaatttcactcagtgattctgttttgtccgttttaccggagctgggcgaatatgcccgtccggtgacattacgccacctgctgcaccacaccggcgggctgaaggattatatggatctggcttttgcccgtaaaaccggcttttatgatccgctgacaccacaggaaaccctggcggacctggtcagtcagacagaagcggattttccgcccggtacccgccatgattacagtaataccggttattttctgctgtcacaggttattgaacgggtcagcggacagtcatttgctgattttgcccgcgaacggatttttacaccgccggaaatgaaccatacttttattgttgagcaatatccggcaccgcagaccattgccaccggctacggcaaagctgccggtcagtggcggatttccgaaagcccgtggacacacaccggcgacggcgcggtacattccagtgccgctgacctgatgaaatggggcgaaaactaccgcaccgcccgcatcggtggtactgcgctgatacaacagatggcagaaatcctctccccgctgacagaaaacggcacgcctgttacggattatgagccttatgctgcggggttacatacccttcatcatttcggtgagctgagtctggaacatgccggaggctggatgggaaccagtacttactttatccggctgacaaaatcagacaccactatcgtcgcgttatccaaccgcgaagagtgcgataccgaaacgctggcccgtgtcgccgctgacgcctttctccgccctggattccctgcaatgatcactgttcgcggggacgaagaatag

SEQ ID NO: 274057 - DNA, 903 bp, Morganella morganii
atgaaaatcactctggaagaaatgcgggcatttattgccgtcgttgacagcggctccgtcacagcggcggccgcacaaaacgggctgaccgtttccgccatcagccgtgccctgctgcgtcttgaagaaaagatgaacactactcttctgtaccgcaccacgcgacggcttaaattgagtgaagaaggcgcattgtttttacaaaaagcccgtgatgtggtgcaactggcacaggaagcggaagatgtgctgatgaaccacaaagagatcccttccggcacactgcgtattgatgcctcaacgcctgttcagctccatgtgatagcaccgctggtgacacaattccatgaacgttatccgcaaatccgccttgaactgaccaactatgaaggtattaccaatttactggaaaaacagactgatattgcattccgcttcggtccgctggcagattcttccctgcatgccacgctgatgggctacacccggcagcggattctggccagcccgcgttatcttcagcagcatggcgagccgaaaacaccggaagagttggcgcagcatactctgctgggatttatcacgccggaaagcctgaatacctggccgctgtataacggcaacaaaaagggactgaaaattaccccgtcactggctgcgggcagcggagaaattatctgcaatctggcacgttccggcgcgggaattgcctgtatttccgattttgtgacacacgaaatgcgcgaaaacggggaatttcgtcaggttctgacgtcatacacttatgaaaacaaactgccgattaatgcggtgtattaccgcagtcaggcactttctccccggctgcgctgttttatcgattttgtcctgcaacacagccagtgttttaaacgccccggttaa

SEQ ID NO: 274058 - DNA, 1188 bp, Morganella morganii
atgcgaacaaatactgctctgttatccctgtctgtcggcgcatttgctatcggggcaacggaattttccccgatgggtatgctgccggaaatcgccgggtcactggcggtttccattcctgccgccgggatgctggttgtggtgtatgcgctgggcgttatgctgggtgcaccggtaatgacattactgctgatccggcgttcgcccaaagcggcactgattttcctgatgagcatctttacggcaggtaatgtgctgtcggcactggctccggattacaatacactgctgttcgcccgctttatcaccagtctgaatcacggcgcatttttcggtatcggcgctatggtggcgacacgggtggtggccaaaggcaaagaagccggggcgattgcgggcatgtttatggggctgactattgccaatatcggcggcgttccggcgatcaccaaactgtcccagatgctgggctggcgtgaatccttctttgtagtcagtcttctcggcctgctgacaatggcggcattgctgcgatcactgccgcgtaatatgcagggacaagaacttaatctgcgccgcgaattacaggtgctgacccgtccggcggtattactggcaatgctgtgtactgtgctgggtgccagtgccatgtttacgttttatacctatattgcccccgcgctgacctttatctcgtctgtgccggaaacgcagatcagcattatgctggttctggtcgggctgggcttcacactggggaattatctgggcggagtatgggcaaaccgttctgtttcccgcacattgtacggattatttgcactgctggcgctgacgatggttctgtttccgcttatggcccgtgacactgtcactgcggggatcatgctggttatctggggagcggccagttttggtatcgttccgccgcttcaggtaaaagtgatgcaggtagcctcagaagcgcaggcgctggcctcatcggtcaatatcggtgcctttaatctcggcaatgcagtcggtgccgcactgggggcatcagtgctggcaaacggtggtgattatgccggtgtcagttatgcaggtgcggcagtagccgctgccggattagtggtgctgcggataaccttacgccggacaaaatcgcagaagtctgtttcagatgcagagcaatgcactactatctag

SEQ ID NO: 274059 - DNA, 975 bp, Morganella morganii
atgacaacctcttctgacacaacattccgcactttgtatccggctattgagccttatgagaccgggtttctcgatgttggtcatggtcaccggatctattacgaacgcaccggtacacccggcgcgaaaccggctgttttcctgcacggcgggcccggcggcggtatcagcccggaataccggcgctattttgatcctgcccgttatgatgtgctgctgtttgaccagcgcggttgcgggcgttcaacaccgcatgcggaaattgcccataacaccacatgggatctggtgaaggacattgagcggctgagaaagcatatcggtgtcagtaaatggctggtattcggcggctcctggggctcgagcctcgcactggcatacagtgaaacgcacccgcagcaggtcagtgaaatcattttgcgcggtgtgtataccgtgacagaggcagaactgaactggtattaccaatttggcgtttcacagatgttcccggaagagtgggaagccttcctggcaccggttccggtgcaggaacggcacaatatgattgccgcttatcataaactgctgaccggtgatgatgttcaggttcagctggcggcagccaaagcctggactctgtgggaagggaaaaccaccacactgttaccggatgcagaacatctggatgaatttaccggtgaccatttcgccatcgcttttgcccggctggaaaatcactatttttatcaccggtgctggctggaggaagggcagttattgcgtgatattcaccggctgcagggtataccggggattattgttcacggccgttatgatatgccgtgtccggcaacctttgcgtggcatctgcataaagcctggccggggtctgtgctgcatctgattgaaggtgcagggcacgcgatgtctgaaccggggatccgggatcagttgctgcgggccacagactattttgccggtcaggggtcatga

SEQ ID NO: 274060 - DNA, 636 bp, Morganella morganii
atgaccagtaatttacagggtattttggggctggtgatcaccagctctgtgctgattgccattccggggccgagtattttgtttctggtcggccaggcgttatctgccgggaagaaaaatgccctgaaaggcgttgccggaaatatcattggtatgtacagcattgcggtattgcttgctttcggaattggcgcggtgctgatgtcttctccgcagatcctgatgataatccgtctgatcggggcattcgtcctgttgctgattggctggcagtatgtccgggcatcccgtatcagtatggcgatggatgttccggctgacaaaggccatcagtcattttttgccggtattattgtcggtgccgcgaacccgaaatccgtgattatgttcggtacgattgtccccggatttaccggtgaaattccgccggagatgtccgcaaccaccgtcttactgctgatgtcgctgatcccgatagccccgggcattgttatcgatattatctgggtttatgccgcacatgctgttaagtccgcatcatttttccgggggaacagtctgcgctggtttaatctgtgcggcggtatcctgatgatccttatggcattactgctggcggtggcatcggtgatttaa

SEQ ID NO: 274061 - DNA, 798 bp, Morganella morganii
atgagtgaaaacccgcgcacacggccggaactggctgattttttacgcacaaaacgtgaaagcctgaccccggaatgtgtggggctgccgcacacttcacgccgccgtactccgggtctgcgccgtgaagaagtcgccgcacttgccggagtgggtctgacctggtacacctggctggaacaagggcgtgaaatcggggtatccacccgctttctggacaacctggcacggacactgcgtctgaatgaggcagaacgccagcacctgtatctgctggcccaccagcgggctccggaagcctccggtgatacagagcatcatgtgccaccggttatcacccggatgctggatgattttccggataattatctctgctatgtgctgaatctgcactgggatgtgctggcgtacaatgaaaaagcagatcgttacctgcacttctctgaagcacagcccgggatgtgtaactttctctatttactgtttaccgatacccgctatcagacccggtttacagactgggaaaccgatgctcagcgtctgcttgccagtttccgccgggattatgccagaacaaaacatgaccccaatattcagcggatgataacgacgttatgtcagaaatctgcggcttttgacacgttgtggaataaacacgaaatatatcagccctgtaacggcatccgtgaaattgaatttaacggcagacgggaaacctacgagtatgcgtccctgacatttgatatcgataaatccaaccggttactggtgtatacgccggttaccggtgaggattaa

SEQ ID NO: 274062 - DNA, 1284 bp, Morganella morganii
atgaatcagcaacaacgtattgcactgtttgtattagtcctcgccgggtttgtcactattttcgatctgtttgtcgtcaatgtggcgatagtcagtatcgaacgtggtttacaggccagtttcactgaactgacactgattattgccgggtatgaactggctttcggccttctgctgattaccggcgggcggctgggagatatttacggacgccgccggttatatcaggccggaatggcctttttcacactggcgtcactgttgtgtgctgccgcaccgacagcattattactggtgattgcccgttttatccagggactggctgccgcattattgttcccgcaggggtatgccggaatacgcctgaattttgatgaaacacaggcaagaaaagcattcggctggctgggtatgacgctggggctggccgcaattgccggtcaggcactgggaggctggcttattaccctgaatctgtttgatatgagctggcggctgatttttctggttaatctccctgttggtattctggctctggtattatcccgccatttacaggagggatgcgctgcggacggactcaccactgactggccgggcgtactgttatccgccgcaggtattaccgcatttctgttaccgcttctgatgttgccggtttgggacctgacacttttcagtaccggattgctgcttacgggtatggttctgttgttctgttttgtccgttatcagcagcatttatcacgcaccgggcggacaccgctgtttgatattgccgtactgagcaaccggccatttgttaccggcaccggcgttgtgctgtgtgtctataccacctcatccgcatttccgctgatactttccctgttactgcaaaacggtatgggggctacaccgctggaagccgggctgaatttcctgccgcaaagcaccacaaatacgatactcagtctgtttctgtttttggtcgggttcacacagggcatgatcatgaccccgatgctgaacattgtgctgtcccaggttacaccggtacaggccgggatggcatccggactgacggccacattacaacagattggtgcagcaaccggtgcaaccgcagtatcggttattttacagttttcactgcggcacagcggagatactgtaatgttatctgctcctgccgcaatttacagtgtcagtctcgggttcaatgtgctgatggcactgtgtgccgcatatctgatttaccgcataacacgcgcccggcagccggaaatagtttcctgtctgtag

SEQ ID NO: 274063 - DNA, 399 bp, Morganella morganii
atgattacaatttcacaccttgaccatctggttctgacggtggccgatgttgaaaaaacctgcgatttttaccaccgcgtactgggtttttcggtcattacatttcgcggggatcgcaaggctttagtgtttggccgtcagaaaattaatttacatcaggcaggaaatgaatttctgccgaatgcggataaaccggtacccggttcagcagatctctgttttctcaccggaaccccggttgaacagacgctggcgcatctggcaaaagaaaaaattgttgtggaagaagggccggtggaacgcacaggggcaaccggcccgataatatcggtctattttcgtgacccggatttaaacctgatcgagattggcctgccggtcacatcccgggcggtataa

SEQ ID NO: 274064 - DNA, 1221 bp, Morganella morganii
atgtcagacagtcattgtttatcaccttcattgccgccagcccgccggggatggttttctgttgttgcactgactctcgcaacgtttgctgtggtgactacggaaatgctgccggtcgggttactgacaccggttgcggtagcgttccgggtgccgcaggcgtatgtcagcctgatgctaaccataccggctctggtcgctgcgctttgttcccccctgattattctgttcatcggccgcctgaaccgtcgttatctgctgatgatactgatgctgttattaatggtggccaatatctgtgcggcaacagccacccacttctctgttctgatcgcggccaggattattgtcgggctgagcatcggcgggatctgggcaatcgccggcggaatagctgtcaggctggtcgattcccggcatgtggcacttgccacatctctgatatttgccggtgttgctgccgcatccgtactgggaatccccgccggggtgatcctcggtgaatgggtcggctggcgtggcgtgtttggtatcatgagcctgttttccctggccgtgttgctgctgatgctgaatcttccctctctgccgccggttcagacaccggctgtccgcgattttctgacccaactccgccgcccggttatccggacagacttgctgatcacattactgctggtgactgcccactttatggcatttacctttgtccgcccgattctgcaacgggatcctcagttgcaggcatatgaactcagcgggttactggcactgtacggtattgcaggtattgccggtaattttgttctggggttattgtccggtcgtcatctgttccgtgccgtattctgcattaccggcggtattgccctgagcctggcagggttactcctgctgcctgccgtccctgtatcacataccatcattctcacgctctggggaatagcatacggcggcgtatctgtgacgctgatgaactggatgatccgctacagcgcacaagcgattgaaataaccgggtcactttatatcgcctttttcaacaccggtattgctgccggctctgctgccgggggcatgatggtgtctgcgttctccttacagggaaatgtcattgcagcactcatctgtgctgcaatagtgctgatactgatttccggttttgttatccgcttataccgcccgggatgtgaccggcaggccaatctcgatcaggtttaa

SEQ ID NO: 274065 - DNA, 942 bp, Morganella morganii
gtggcagataaaaatggtttactgctggataacttattcgatgtgctggtttttgtacgggtcagtgaaaccggtaatttcacatcggcagctgaaaaattacagatttcacgttccgctgccggaaagtgccttcagcgcctggaaaatcgtgtcagtacccgtctgcttcaccggaccacacggcggttgcgtctcacggaagagggcgaacgtttttatctgcatgccaaacggatattatccgaggtggatgatgcggaaaatgcgttatatgaaggcagacaaaaaccttccggcacattgcgggttgctgtccctgtagtctttggccgcaattatgtgatgccggtaatactacagtatgccgcacaatggcccgatgttgatattgatgtcagtttttcggatgattactgtgatctggttcaggaaggtattgatgtggccgtgcgtatcggcggtaatgatgacagccgcctggtgcgcaaagttctggcgccgcatcgcctggtgacctgtgcgtcaccgggttatctggaacggcacggtataccggaagcaccggaacagttagcagcacatgagtgtcttatcttccgccaccggggacgaagtgttccctggcagtttatgcgggataaaaacgttcagttgtatccggtcagtggccggttcagtctgggagataccggcgcggttcttgatgctgcactggctgatggcggaatttgccagttgggcgcttttctggccgggcctcaggtagcgaaaggggtattgcagccggtactgactgcatttacaccgccgggcgaacctgtatgtgcggtatatccgtcaaaacaatttctggcgccgaaagtccgcgaatttctcaatacactggaaacacaatggcagggaaaagcggtatgggaatcccccgttaatcaatcataa

SEQ ID NO: 274066 - DNA, 459 bp, Morganella morganii
atgacagatagtgaatttctggctcaggcgatagcactggcccgccggaatgccgaaaaaggcggacgcccgtttggggtcgttgtggtcagagacggaaaaattgtcggtgaaggggttaatcagatgtctgagctgcatgacccaaccgctcatgcggaattgctggctctgcgtcatgccggtaaccacctccggcagacccggctggaagattgtgtggtgtatgccagcggacagccatgcccgatgtgcctggctgcaatgcggatggcgggtgtgccccgtgctgtctatgcttattccaatgcagatgcggagccttacggtttatcaacagcatccatcgcattggcattacgggcagatccgcatgaacagccgggcttctcttttacacagcaaaaaccggaaggtgagacgtcactgtatgatttctggcagcaaaaacagaactga

SEQ ID NO: 274067 - DNA, 267 bp, Morganella morganii
atgatgttgtggatgttattgcagggatgcgccctggggattgccgctcccgtcagtacagccatcattgctgagcatgccggaacacgcaaagaagaggctctggcattgtcagaaagcatgaataatctgagcatctttattttattaccggtggcagcggcacatcaggatagtcagatattattacctgcagttaccgcgttattgttttgcgctacggcactgacggggtgcattctcagcccgatatatagcaaaaagtaa

SEQ ID NO: 274068 - DNA, 2160 bp, Morganella morganii
atgacgactaaatatatttcgcgggcactgctgccagcgctgatttctgttgccctttttccggcgcagcaggcactggcagataccataattgtgacggacaagccttctcatatcaccccgcaaacacaagccggtgccggttttgtggcgaccgatattgatatggggccgctcggtacccgccagtggctggatattccctacagcagcaatacggtcagcgaagcgatgatccgcaatcagcaaagtaaaagtgtcagtgaaatgctgaaatatctgccgtcttctcagatgcaggcccgcggcggtatggatgtgggtcgtccgcagagccggggtatgcagggcagcgtggtggagaacagcaggctgaacggcctgaatattgtctccaccaccgcgtttccggtggaaatgctggagcggctggatgcagtgaacagcctgaccggcgcaatttacggcccggcgagcccttccggtcagtttaattttatctctaaacggccgacacaggatccgctgcaccgggtgacggtaggatatcagaaccgtaatgcttacagtgcgcatctggatcttggcggtcaggcggatgaagagaagactttcggctaccgcctgaatttactggatgaagagggtgaaggctatgtccggaacagtaaaatacgccgtcagctggccgcagttgccctcgactggcagatccggccgggaacacagatacagctggatgccagtcactatcattttgtgaccaaaggatttcccggcagctttggttacggcccggatattgatttaccgaatgcgccggacagctccaaccctgaccttgcactgaataccgccggtaatgacctgacgacagattccgtcagtacccgtttcacccactatatgaatgataactggtcactgagcggcggtatcggctatcagcaggcagatcgggcaatgcgctctgtttcgtcgcaaattctggacagcaaagggactatcagccgctcgatcacggattctccggcagccggtcgtttccgcgtgctgagtaataatcttaccctgaacggtcagtttgataccggttcggtaaaccatgatgttgctctcgccaccaccggttatacctggtcaatttacagtgccaaagagcggggtaaaacctttcagctcggcaataccaatatgtatgacccgtcttccatgaccgaaccttccgatggacgcatcagaaccggcggggaacgttacaaagccagtgaaaaccagcagcagagcattattattggtgacactgtcacttttaacccgcaatggtctgccatggtgtatgtcagtcagagctggatcacgacccgtaacttcgataaacagggacacaaaactgaccgcgatcagcagaccggtaccagcccgaatatggcgctgatgtacaaaatcacccccgatgtgatgacttatatcagttatgccgattctctccagccgggggataccgcgccggatgatgataaagtcaaaaaccggggtgaaacactcagcccgtaccgcagtacacaatatgaatggggtattaaagccaataccggcaatatgaacctgagtgccgcggttttccgtctgaaacggccgtttgcctataccgacagcgaccagatctttaaaaaacagggcgaacaggtaaatgacgggctggaactgaccgccaccggcaatgtctggcaggggctgaatatctacagtggtgtcacgttcctgaaagcagagctgacggatacgggtaataacaaaactgaggataaacgggttgtcggggtaccgaaagtacaggcaaacctgctgatggaatacagtctgccatctgttccgcagtgggtatacagtgccaacattcattacaccggcaaacgggcggcaaatgataccaacaccagctgggcggacagctataccacactggatctcggtgcccgctataccactcagatagaaaatgtgccggtcacactgcggatctctgcggataacgttaccaatgagcattactgggcttctatcttcccgggcaacagtaacggcaaaaatggcggcgccaatgcttttaccggtgcaggccgtgaattccgggccaccgtatcatttgatttttaa

SEQ ID NO: 274069 - DNA, 993 bp, Morganella morganii
atgcggcactatttatcagcgttatgcctgttatttgtcagtacctgtgtcttcagtgccccggcagaagtgccgccggaaccggcactgcggatagcaacaccgtggccggcgcagaatgcgattattatgatgctgggttacggcggtaatatcaccggaacctcgcgggttgccaaacagatcccgctgttccgtcagatgctgccgcagattgacaatgtaccggtcatcggtaccaccggcggaaatgagctgaatatcgaacaaattctgagcctgcgaacagatattttatttattcatgacgggatccgcgttccgcagcaggcggtgctggcacaggccggtgtccgtgtgctggcctttaaagccaacagtatggatgcactgcgggagcgggtaaaactgaccggcgaggcgcttggcccggatgcggcagagaaggcggcgcaatatgagcgctatttccgtgacaatatcctccgggtgcaggaacgactgaaaaatgttccggcgtctgcccgtctgcgggtgtatcacagcatgggaaacccgctgtatacctccgggcggccgtcgctcaatcaggactggatggatctggccggcgcggtcaatgtggcagaaaactggtttccggcacacagcagtgctaacggagaggtatcatcagagcagattatcgcggctgatccgcaggtgattattgcgatgaaccggcgggatgcggaatttattcagcaatcaccgcaatggcagtcaattgatgccgtgcgtaacgggcgggtatataccaatccgcgcggtatgttctggtggtgccgcgaaacgtcagaggaggcattgcagttcctctggctggccacggtgctgtatccggatgcctttgcggatattgatatgagaaatgaaacagccgcgttttatcagacgttttatgggattacgctgacgccgcagcagatcacggacattctgcaaccggagtga

SEQ ID NO: 274070 - DNA, 1218 bp, Morganella morganii
atgactcagacttctgcctttcaccttgccgcagaaagtacccagccacaactacatatgctgacgttacaggcactgaatatgatcccgcccgcctctttcgctgtaccagccacttcaccgcagggaattgccaccaccattctcagcatggtgctgaaactggtttataaaaaaatgacagagccaaaggaagtggatgttattggtattattcaggaaacactgatgaaaaatacctctgaatggctggaatcagaatatcaggccgtccgcaaagatgccgaaagtctgcaggatgctatcagttcctggcagaattcaccgacagaagaggcgcgccagctgattgtggtacgcaataagattgccatcgcaagtatgagccgcttatgcattctcagcatcgataccgcaaaaagaataggtattgtccggctgtgcggcgtgtgtgccctgtcctgcctgctctatttctttacactgcgcgataccctggtattcggcaagagctggggctattcctctgatatgctggaaaaatacagcaaaaccctgacggaacaggcggatattatgtttaaagacgtgctgactgcagaaatcaataattacaccgaaaacgatgatttttatgatccggaaagccaggccaaacgctccgttatttactggacatccgggtacaccaatattcaggatcatctgacttacggcgcgcagcaaaaatccaccagggtctgttctgaacgcagcgatatcgctgccaatccggttaatgctgaaaaccatatggtttatctcggcaatctgttcctgaccgccggaaattcttctgctaacggcagctacaattatttatccgccgccgaaccccgcagttatgacagagtcggagacccggtcacactgccggtcagaagcgccgggcagtaccatatccgcctgtactatgcctatatgaccaattcccttagtttcgattatgaaactcagttgcggattgaacaggccggaaaaattgttaccgatacccatctgacagatttaaccaaaacggtgctgacaccgtataaatccggctcaaattacggcccggtcatttaccgggagacccgggtgaaccttgaggaaggcgatattgtgctgacattacatgaggaccgttccctttccggcggcgggttgctgcagcatattgaatttgtgaaagtataa

SEQ ID NO: 274071 - DNA, 591 bp, Morganella morganii
atgatgtttatcgacagggttattcacctggtgcttagtggtattattatcgtaggtgtctatcagttttatttctttacgcaacgtcatatggtcaggccggttaaaacatttaactttgcactggatgaaaaaattcctttctggccctggtggtcctggatctacagctttctttattatccggcgattctctatctgaactggattattcaggattcacgtcagtttatcatcatcgtattcagctatgttatcctgttactgatgcagatgtttttctttgtggtgtatccggttgccacgccgccgcactggcgtgaaatgaataccgggaagaaagcgtccgaaaaattcctgctgtttgtgcagaaattcgacgatacatccaactgtttcccgagcatgcacgtctctgttgccacattaaccgcgctgctggcctatgccacactcggaccatgggtattcatgttcccgctgttaatcgccttatcctgcatgttcaccaaacagcattatattattgatttaccggcaggtgccgtactcggctggctggcttatcaatgttatgtagtattaatataa

SEQ ID NO: 274072 - DNA, 153 bp, Morganella morganii
atgcccttaatcagaacttaccttaccgatatttccggacttatcatctatatagtcctcacctggctcagtctgaattttttcagtatcagtgaatataaccagaatccgggcaaaaaaaatgccgcactgaatgcggcaattaagtcatga

SEQ ID NO: 274073 - DNA, 1176 bp, Morganella morganii
atgactaaaaaaaccgtttcagattttcatattgatacacagataacgcagctgggacgcgacccggcgtctcagtccggttttgttaatgctccggtttaccggggatctaccgtggttttcccgactatggatgccctgctcaataaccgggctgagtttaactacggcactgcgggcacgccgaccattaagaacctcgagcaatcctggagcgcccttgcgggcgccgaaggaaccgtgctgtcaccgtccgggctgggcgccattgtgctggcgctgctgaccacactgaaaagcggcgataacctgctgatgccggacagtgtttatcgtccgacccgcaatttctgccgtggtctgctggaaaaaatggggatcaccatcacctattacgacccgatgatcggcggtgacattgaatctctgataaaaagcaacaccagcacgattttcctggagtccccgggatcgcaaagctttgaggttcaggatgtgccggccatcacggcggtggctaaaaaatacaatatcgcgacgattattgataacacctgggcaaccccgctgtttttccgggcgcatgatatgggctgcgacctctcccttgaggccggtaccaaatatctgggcggtcattccgatctgctgatgggaattgtctccgccaacgcggaatggtggccgaaactgcgggaaacctatgatctgatggcaatgctgccgggggcggaagattgtttcctggcactacgcggactgcgaaccctgtcaatccgcctgaaagaagcgcagtcacgggcgctggatattgcacactggctgaaatcacgtccggaagtgatccgcgtgctgcatccggcctttgaggactgcccggggcacgagatctggaaacgtgacttcaccggctcttccggcctgttctctgtggtgttggatccgaaatttacacaggatgatgtcggcagattgctggacggcctttccatcttcggcatgggttattcctggggcggttttgaaagcctgatcacgccgtttgattgcgcggaataccgtaccgtcacacagtggaatccgggcggacggacactgcgcctgcaaatcgggctggaagatgttgatgacctgaagcgtgatttggcggatggatttgcgcgtatggcgcattga

SEQ ID NO: 274074 - DNA, 1287 bp, Morganella morganii
atgcaagacagcattcagacaggtgcaaatgcaaatagtgatttaaaaaagataccctttaccaaatatgatgccggatgggttgtattatgtatcgggatggcgatcggttccgggattgtttttatgccggttcagatcggtattaaaggtatctgggtatttattgccgccacattattgtcatatccggcgatttactggctgcagaatttatatctgcggacattatcggaatcggaagaatgtgaagattatgccagcgttatcacgcagtatctggggaaaaactggggagtagcccttggtatcgcctacttcctgatgctgctgcacggcatgttctcctattcgctcgccgtgacctttgacagtgcctcctacatcaaaacattcggtttaacagaaggtttgttatcagattcggtgtggtacgggctgattatcctgacggttctggtggctatcgccgcacagggggagcgcctgttatttaaggtctccggcccgatggtaatagtgaaattcgggattatcgtattactcgggattgtaatggtgccttactggaactttgccaatatcagcgcgttcccggatttcctgccgttcctgcgggatgtgttcctgacattgccgtttaccctgttctccattctgttcgtgcagattttaagcccgatgaatattgcttaccgcagactggaaaaagacaagcgtatcgcaacttaccgcgcggtacgggcaaaccgggtggcgtatattatcctggccgttgctgttctgttctttgccttctcgtttacgttctcgataagccatgaccaggctgtctccgcgtttgagcagaacatttcagcactggcgattgccgcacaggtaattccgggggcggttgttaaagtgatgaccgcaatgctgaatattttcgccattctgaccgcgtttctcggcatttatctgggtttccaggaagcaatcaaaggcatcgtggtgaatatcctgacccgctttatgccgcaggagcgtattaatcagaccgtgctgcattacggtgtgtgtatcggggtgattctgtccctgtggttctgggtctccacccgcttctcgattctgttctttatgcagctcggcgggccgttattcggtgtggtttcctgcctgatcccgtgctatctggtttaccgcgtgccggtcttacataaattcaaaggtgcaacagtctggtttattatcttcttcggcgtgctgttgtgtctctctccgttctttaagtttttcgaatga

SEQ ID NO: 274075 - DNA, 990 bp, Morganella morganii
atgctaataaataaaaacacttttgcgtttaaagcaaaaattgacagctacgcgatttttcgccatctggagctgtttatcaaaattgtggagtgcaacagtttcagcggtgcggcacgaaaactcaatgtaacgccgtcgtctgtcagccgtggcttacagcagctggaagagcagctcggtgtggttctgctgaaacgaaccacccgcaattttatcctgactgaagccggacgttatttattgcagagggcgcaacagttactgacagatctcgatgattcattagtgaatacagcgagtttttatcagcacgcacagggacagctaaaaataacctgttcaattgctttcggcgtctgccatttaatgcggctttacagcgaataccgggaaataaatccgcaggtcagcttatcagttgatctgaacgatgcattaattaatttaaatgaaactgactttgatattgcactgcgtattaccagtcatcccccggaaaattttgcattacggaaattgtgcaatataaattggatctattgcggcagccgtcattattttgaacaaaacgggatcccgcagtcaccggcggatattgcccggcacaattgtttaattaatccgaatattccggacacctggcggatgaatgataaagacggcgtggcttatccgctggcgatcaacaatatgattgaggtcaacagcagcctgggattactggaggcggcgcgctgtcatcaggggattgtctgtctgccgacctatatgctgggaaattatattgataacggtgaattactgccggtattactggattacaatccgaaaaccacgccgttcgcgctctatgcactttacagcccggcgcatacccatgccccgaaaatccgcacctttattgattttctggcggataagctgccgcttgatccgccgtgggacagctggatgcatcaggacagagcagggagttccccggcataa

SEQ ID NO: 274076 - DNA, 651 bp, Morganella morganii
atgagtgacactcaggcactgagttacagcgaattacatacaatatccgatgcagatatcgcacaaattaatgaattaattatcaccacctgggattaccgcagctggatcccgaaagagaaagtgctgccgatggcggaatttttgctggatgatgtcattctgacctcatcacggatttttgtggtgcgggatggcggtaccatcgccggtattatggcggtcacggcatctgccgatttgcgggagaaagtccgcgccaaaacccgtcagtattctgccctgaaaaatattattgcccgcgacctgcaggaagaaaccttgtttgatatgtatctgaatacgctgattatcaacggaaatctgctggcttcctgtgacgggaatttcgatgcctctctgaatttgtttatgatagatgcccgcttccggggacacggtatcggtaaccggctctggcagctggcgatggagtatctgcggggaaaacagtccgcccgctatttcctctggacagacagtgattccgatttcggtttttatgagcacaaaggattacagcgtatcgccgcacaagcctatgactggggcggtcatgacgtgactgaaacctattatgtttatgccggggaactccctgctctgtcctga

SEQ ID NO: 274077 - DNA, 597 bp, Morganella morganii
atgacttccgaacagagcactgtccgtattattgataccatcacgctttccgataactggtatatcctcaaaaaatatgttgttgattatctgcgccgcgacggcacccgccagcgtctggagcgggaagtctatgaccgtggtaacggcgcggttattctgctgtataaccgtcagaaaaacagcgtcattctgatccgtcagtttcgtctgccggtatatgtcaacggccatgacggctttctgattgaagcggctgccggtctgctggaagagcaggatccggtatcccgcatcaaagcggaagcagaggaagagactggttttcgcattaccgatgttgaaaaagtctttgaagcctttatgagtccgggatccgtcaccgaaaaactttacttttttattgccgaatatgaagacaataaccggcagacagccggcggcggcctgccggaagagggcgaagatgtggaagtgctggaaatgccgttcccgcaggctctcgccgcgatcaaaagcggtgaaataaatgatggcaaaacgattatgctgttacagcatctggcgctgtcggggagaatggaaaatcaatcatga

SEQ ID NO: 274078 - DNA, 516 bp, Morganella morganii
atgaaaacaacaaaataccacccgctgtttttgtccctgctattaccgttatcagcggttgccgcacaattatcaccggaaaatgtggtatcggatttctaccgtctcaatttgcaggatccgccttctgatggttacgtaaaaagccaggatttgtatgtcagcccggcgttgcaggaaagcatcagtgaatccctcagttgtaattttgatggcccgggcactgatcaggcgttctgcgaccagccgcggccctgcaaagaaaccgcacatagttatatctgtctgtggggagagcactgggtggaaaatgatgtcaattattacaccaagtcacaggattatcctgattcatggatgacagagcgcgcggcacatactgaatcacaaacccgggatacagctactgtgcgcatcacactgggtaaagcaccggagccgctgcggtcattccgggtaaaactgattcagcagaaaggactgtggaaaattgatagtattgtgatgcttgagtga

SEQ ID NO: 274079 - DNA, 906 bp, Morganella morganii
atggctttacgggaaaaagacaatgccatcgccattgccggcctggtcattttaacactgatctggagttacagctggatcgcaatgaagcaggtcacgcactatattggtgcgtttgactttacggcgatgcgctgtgtgttcagcgccattatgttattactggtgctgtatatccgcgaacgtgcgatggggcggaaaatccgctttacaccattccgctacactctggggatagccgttcttcagacctgcggtatggtcgggctggcacaatgggcgctggtcagcggcggtgcggggaaagtagcgatcctcagttataccatgccgttctgggtggtgattatggcggcagtactgctcggtgagcggatgcgccgcctccagtatgcggctatttcagttgccggtgccggattgttgtgtgtgatccagccctggacgctcgatttcgcctctatgaaaagtgcctttctggccgtggcatccggtatcagctggggggcgagcgcgattgtggcgaaaaaactctacagccgctatccgcaggtggatttactctctctcaccacctggcagatggtgtatgccgcaattattatgaccctggtggcgctgctggtaccgcagcgcacgattgactggcagccctatgtcttctgggcactgagttacagcgctattctggcgaccgccgttgcctggagtttatggctgtttgtcctgagaaaattaccggcggggattgccagcctgagcacactggcggtgccggtctgcggtgtgctgttctcatggtggttgctgggtgaggagccgggcagcacagaaaccgccgggattgtgatgattgtgctggcactggcggtgataagtattaagcgtccgaaaaaaactgcctga

SEQ ID NO: 274080 - DNA, 492 bp, Morganella morganii
atgtcagaaacacaatccgccgcctcactgcatttcctctgcggcaaaatcgcctcagggaaatcgacactggcacaacaattagtccgcgagcaacaggcggttctgttgtcagaagatacctggctggcggcgctgtatccgggacaaatcacacagctggctgattatattgaaaaaagtcgtctgctgaaatccgccctggagctgcatctggtgacattattacgacagggagtaacactggttctggattttccggcgaataccccggtacaacgccggtggctgaaagggctggcagagcaggccggatgcagctattgctgccatgtgctggatgtgagtgatgaagagtgtaaacggcggctggccgcaaggaatctgaacggggaaaacccgtttgccacctcagcggagcagtttgatctgattactgcacacttcagttatccgtcagaagaagaagggctggtcatcagcggccggtga

SEQ ID NO: 274081 - DNA, 597 bp, Morganella morganii
ttgtccggacgtttacagcgcgacgagcgccagatacagctgctcaatgttgccaacagcattatcctggcggaaggcaccgatgccctgaccctcattacccttgcggaaaaggcgggcgtgaccaagccggtgacctacaaacatttcggcaaccgcaagtctctgctgcatgcgctgtttaaatacagtgatgatgttctgactgaacgaatgaataccgggatggaacagccgatagcagatctcgatcaggcagtttctgtctttatcacaacctactttgatgtgatggcggatgacggggaagccttcaatgccaccgtggcggcactgaaagcctatcctgaatatgcggggatcagccgcgaagtgcaggattttttctgccagatcctgcaacgggcattgcagcgctggctgccggagaatttccggatcccggaatggacttctgtgatgattttcggtgcaaccgagtcactgtgcctgatgatgtttgctgacccggcgctgaaagcaaaaatcagtgaagaagccatctggctggtcaaaaccctgctggccgaccagcttaagcggttcaccggccgctga

SEQ ID NO: 274082 - DNA, 321 bp, Morganella morganii
atgccgtggattttattaattactgccggattatttgaagtcgtctgggcatttaccatgaaacaatcagaaggtttcaccaaagtggggccgtcagtgatcaccattattgccatgctgataagcttcgggctgctggcaatggccatgcgggcactgccgctggggacggcttacaccatctggaccgggatcggcgctatcggtgcctttattgtcgggatcatagtgctgggtgaaccggcaaatatgatgcggattatcgcaggggtattaattatctccgggctggtgatgatgaaattagccagcccggcataa

SEQ ID NO: 274083 - DNA, 456 bp, Morganella morganii
atggacagctttgacaggaagattctttctgaattacaactcgacgggcgattaactgtcactgaactggcagatcgcgtgggtcttagtttgtccccctgccaccggcggctgaaagcactggagcaatccggggctatctgtgattaccgcgcacagcttgatccgcgcgtgctggggctgaatttctccgcactggtgtttgtcaccatgaaagacggcaaccaggaaagtatgagcaaatttgagacagctgtagcggatattccgcaaattatcgaagccaaacggctgttcggcgatccggactatatgctgaccgttgtggtcaaagatatcgatgcctttcagaaattatatgacagccgcctggccgccatgccgggggttcagcgcctgacctccaccctggtaatgaaagatgtaatcccggcgcgggaactgcccctgctgtaa

SEQ ID NO: 274084 - DNA, 1608 bp, Morganella morganii
ttgttaatcagcaacaatattacgatgcagttcggcgccaagccgctgtttgaaaatatctctgtcaaattcggcggcggtaaccgctatggcctgatcggcgcaaacggcagcggtaaatccacgtttatgaaaattctcggcggtgatctggcgccaagcagcggcaacgtgtttctcgacccgaacgagcgtctgggtaaactgaaacaggatcagttcgcctatgaagaattttctgtgctcgacactgtcattatgggtcacaccgaattgtgggaagtcaaacaggagcgtgaccgcatctacaacctgccggacatgagcgaagaagacggtatgcgcgtggcggatctcgaagtgcagtttgctgaaatggacggctacaccgttgaatcccgcgccggtgaattactgctgggtgtggggatcccgctggaacagcataacggcccgatgagtgaaatcgcacccggctggaaactgcgtgtgctgctggcacaggcgctgtttgcagacccggatattctgctgctcgacgaaccgaccaacaacctggatatcgacaccatccgctggctggagcagacgctgaatgcgcgtaacagcaccatgattatcatttcccatgaccgtcacttcctgaatatggtgtgcacgcacatggccgatctggactacggcagcctgaatgtgcatccgggcaactacgatgaatatatgtttgccgccactcaggcgcgcgaacgtctgttagcggataacgcgaagaagaaagcacaaatcagtgagttgcagtcatttgtcagccgtttcagcgcaaatgcctccaagtcccgtcaggcaacgtcccgcgccaaacagattgaaaaaattcagctgaccgaaattaaagcgtccagccgtcagaacccgtttatccgctttgagcaggataagaaactattccgtaatgcattagaagtggaaaacctgtccaaaggttatgacggtaacgccccgctgttcaaaaacgtcaatatgatgatggaagtgggtgaaaaagttgcggttctggggatgaacggtgtgggtaaatccaccttcctgaaaaccctggtcggtgaactgacaccggataccggtcgttataagtggtctgaaaacgccaatatcggttattacgcgcaggatcacgccaccgattttgaagttgatatgacggttttcgactggatgagcctgtggatgcagccgggtgatgatgagcagtcggtccgcagtgtgctgggccgcctgctgttctcccaggatgacattaaaaaatccgtacaggtgttatccgggggtgaaaaaggccggatgttatttggtaagttaatgatgaccaaaccaaacattctgattatggatgagccgaccaaccacctcgacatggaatccattgaatccctgaatatggcgctggagttatatcagggaacgttggtgtttgtttcccatgaccgtgagttcgtcagctccctggcgacccgtatcatcgaaatcacaccggaaaaagtcactgactttaccggcagttacgatgagtacctacgcagccgcggtattgaatcagaaaacaactga

SEQ ID NO: 274085 - DNA, 453 bp, Morganella morganii
atgaaaaagtatcttatcggaatggtagtgaccgggctgttatcagcccccgcgctggctcaggagtttacctgtcagctggaaaataataaatatgtcagtgtggtggtggaaaaaggtaaaacgccggcataccgctacgggacgctggcaaaaccggaaattaccctgccggtaaaaggcaatgcgaaaaatggtgtttatgtcggacaaaccatgtttagcggcggtggttcggcgtatatccgctttgaaaacggcccgtttaactatgtggtatacagcggaatgggccgcggctgggaatttaccggcctggcagtctataaaggcgataaagtcatcaataaaaaggtctgtaaaaccgatttggggatctatgatgttctgaattacggcctgccggaagatgaatccggtgaaatctatgccatggatccgaactcacaataa

SEQ ID NO: 274086 - DNA, 744 bp, Morganella morganii
atgccatggacttttgcacatccggcgattgtttttcccctgaaacaatcccgttacgggcggtggctgaatctgcccgcgcttattacgggcagtgtatcgccggatttgctgtactcttccgggatgtaccgcgccgcggatgaggcacatcattttaccggctggttttataccggactgccggtgtgtctggcggttctgctgatttttcactggttatccgtgccgctgaaaactgtattaccgtttccggtgactgacccgctgacccgttctctgagaaaaaatagtgtcattttgttgtctctgtttatcggagcggccacacatattatctgggatgcatttacccatgaaaccggcacgatggtgcgggcgctgtccgttttacaggtatcgttgttgcaaggtatggcggacggacaggagattgcggtatataaagtgttgcagcatttggggtcactgcttggtaccggttatctctgcctgaagtttgcacagtatcagcgggcactgccggaagcagagaagcgcgggaatcttatccggcttatccgtctgattgcgctggcagttctgggtgcactgtgtacggcgccgctggcgtacggtctggcgcagacagaaaccggtgttcatataaatcgttttgtcttttatgaattgtcgctttctgtctctttttttaccggatttgttgttctggcggcactttttcaggttatcagaaagcgttaa

SEQ ID NO: 274087 - DNA, 465 bp, Morganella morganii
gtggcgatttgggtggatgcggacgcctgtccgaaagttatcaaagaaatcctttaccgggcagctgatcgggaaaaaacggaagtcacctttgtggccaatcagcggctggtggtaccgccgtcaccgtttttaaaaacattgcaggtctctgccgggtttgatgtggccgataatgaaattgtccgccgtgtgcagaaagatgatcttgtcgtcaccgctgatattccgctggccgctgaagtgctggagaagggcgcggtggcactgaacccgcgcggcgaacgttataccccggcgactatccgtgagcgcctgaccatgcgtgattttatggacaccatgcgggcttccggcatccagaccggcggtccggcagcgctgaaccagcgtgatcgccagctgtttgccaatgaactggataaatggtttctgcagtgtaaaaaacgcacgccatccgcctga

SEQ ID NO: 274088 - DNA, 1425 bp, Morganella morganii
atgaaaatctcacgcagaaagttaattttaggggttggtgctgccggcgtactggcaggtggtgcttcagtattagttcctatggttcgccgcgacggcaaatttgtggaatcgacttcacgcgcaaaacatgttgacggcaccgaaggtgcattaccgaaagagtccgatgcagttattatcggcggcggcatgatggggatcatgacagcgattaacctggcggaaagaggcatgagcgtcaccgtcctggaaaaaggtgaaatcgccggtgagcagtccggacgtgcttacagccagatcatcagctacaaaacatcaaaagaaattttcccgctgcaccattacggcaaaatgttatggcgcggtatgaatgaaaaaatcggagcggataccagctatcgtacccagggccgtgttgaggtaccgtcaagtgcggaagatctcgcaaactcacaggcctgggttgagagtgccaaagagtgggccgctgatttcgaagcaccgctcaacacccgtttcattcagggcgacgaactgaagaaacgcctggttgatgccaaaacagactggccgattgccggttttgaagaagattcaggcagtgttgacccggaaaccggtgtaccggttctggctcagtatgccaagtctctgggtgttaaaatctacactaactgcgcggtccgtggtatcgaaactgccggtggtaaagtctctgatgtggtcacagagaagggtgcaatcaaaacctctcatgtggtcctgaccggcggtatctggtcacgcctgtttatgggtaacctgggcattgatatcccgacactgaacgtctatctgtcacaacagcgtgtttccggcgttccgggtgcaccacgcggtaacgttcatctgccgagcggcattcacttccgcgagcaggcagacggcacatatgctgtggcaccgcgtatcttcaccagctctgtggtgaaagacagcttcctgctggggccgaaattcctgcatctgctgggcggcggtgagctgccgctggaattctccatcggtgaagatctgttcaactccttcaaaatggcaacatcctggaacctcgatgaagtcacgccgttcgagacttaccgtatcgcaaccgccacacagaataccgaacacctggatgcggtatttgcccgtatgaaagcggaattccctgtatttgaacaatcgaaagtcgttgaacgctggggcgcggttgtcgcaccaacctacgacgaactgccgattatttctgaagtgaaagagtatccgggtctggtgatcaacaccgcgactgtctggggtatgacagaaggtccggcatccggtgaaatcactgcggatatcgtgaccggtaaaaaaccggttattgacccggctccgtttagtctttcacgttttagttaa

SEQ ID NO: 274089 - DNA, 489 bp, Morganella morganii
atgcgttacaaaagtttactgttagctcttccgctggtctggggcacggctcacgcgtcagaaggtgttgttcatcataaactgaacggtatgcctatctctgaatctgtggaaatcagcagcagcaaaaatattattttcctcagcggcaaagtaccgaccaaaatttccaaagacgccccggaaggtgttctggcgtcatacggcaataccgaagcacagaccatcaatatcatggaacagataaaagcgcacctggctggcttaggtctggaaatgaaggatgtggtgaaaatgcaggtattcctggtcggcggcgaagagactaacggtaatatggatttcgcgggctttatggccggttactccaaatattacaacgacaaagattccggtaacatattaccggcgcgtaccactgttcaggtttctaaattagcaaacccggcatggcgtgtagagatcgaagtgacagctgttcgtccgtaa

SEQ ID NO: 274090 - DNA, 204 bp, Morganella morganii
atgccaactccatgctatatctccatcgaagggaaaactcagggcaatatcactgccggtgcgtttaccgctgaatctgtcggtaacatctatgattacacgcagctgatcgaggtgtcactctcttaccgcaagatcgaccgggaacataccgtcgcgggtacttccggttctgacgactggcgtgcaccaatcgaagcgtaa

SEQ ID NO: 274091 - DNA, 2388 bp, Morganella morganii
atgacaactaaaataacaacaggtgacagcggggtgctgcctgtcagccgccgccgttttatgcaggcaggtgcagcactggttacactgccgtttatgacaacgggtgccggggcggcagcggatgatagtctgccgcaggtgtcatccggtgatgccggtgcggatgttatcgcgacctgcagcacctttgactgcggcggaaaatgcgatatccgtgctcatgtgaaagaaggtatcgtcacgcggatcaccacacggccggatgcagatttggatgaagatatgccggtgatgcgggcgtgtgtccgtggtcgtggttaccggaaatttgtctaccatgctgaccggctgaaatacccgatgaagcgggttgggaagcggggcgaaggaaaatttgaacggatcagctgggatgaagccaccacactgattgcagataatattacccgtctgactcaaaaatacggcgcggccagccgttttctgaccgtcaatacagccgtgaccggagggattttctccggtgacaccatgctgaaaaaactgtttaatctgaccggcggctatctgccgtattatcactccgtcagcctcggcaataccgttaaagtcaccccgtatacgtatggcgttgccaaaaccggcagctcgatggacacgctggcacatacgccgctggtgatcctgtggggacataacccgaatgaaacgattttcgggcactccaatcactattatcagaagatgaagcagaacggcaccaaatttattgtggtcgacccgcgctattcagataccgcacagtcactggctgatcagtggatcccgctgttaccgaccaccgataacgcgctgatggatgccatgatgtatgtgattatcacggaaaatcttcaggatcaggcgtttatcgataaatatgttatcggttttgatgaacaccatatgccggaaggtgtgccgccgggagaatccctggtgtcttatctgaccgggcggaaagacggggttgaaaaaacgccggaatgggcggaaaaaatcacccgtgttccggccaataccatccgtcagctggcgcgggaatatgcgatgaccaaaccggcagcgctgatccagggctgggggccgcagcgccatatctgcggcgagcgcagtgcgcgcggctccacactgctggcggcaatcaccggcaatgtcgggaaagagggcgcgtgggcggcgggttacggcggtatcggtaaccgtgtttccatgcacgggccggataccggggaaaacccggtcaaagcacagatctccattatgaactggatgcaggccgttgaggatgcgggcaaagtgcgtccggaagacgggctgctcggtgcggataagctcgataccaatattaaaatgattttttcactggcgggtaactatctggtgaaccagaacccggatgtgaatgcggcggcaaaattactggccgatgaatcgaaagcagagtttatcgtggtcagcgatttatatatgtcgccgtccgcgaaatatgctgatttactgctgccggaaaccagctttatggagcgctggaatatcggtgatacctggggcaccggcagctactttattttatctgaaaagctgattgaaccggcttttgagcgccgctcagattatgaatggatcagcgaagtcgctgggaaaatgggcgttaaagaggcactgacagaagggcgcagcgagaaagaatggattgcgtatctggtcggaatgaacaaagcccgtttccctgaacggccggatttcccggattttgaggaattgcagaaaacccgccgttatctgtttaaagataaaccgtttattgcctttgaggataatatccgcgatccggacaataatccgttcccgaccccgtccggcaaaatcgaaattttttccaaacgcctgtatgacatgcaaaatccggatatcccggcactttcccattatgttccggccattgaagggccgcaggatgcgctgacggaaaaatacccgctgcagatgctgacctggaaagggcgtaaccgtgccaactccacccagtttgccaatccgtggttacaggaagtgcagggacaggcactgtggatcaacccggctgacgcggagaaacgcggtattaacgcaggggatatggttcggatccacaacgatcgcggtatttctcagataccggcgctgatcactcagcggattatccccggtgtggtcggtatgcaggccggagcctggtgggatccggatgaaaacggcgttgaccacggcggatgcccgaatgtgctgacatccacgcggatgaccccgctggcacacggtaactcgcatcttactgttctggtggaggtgaccaaagcatga

SEQ ID NO: 274092 - DNA, 630 bp, Morganella morganii
atgagtgattttaacgattatccgccggtcagtgatgaacagctcgggttttttattgactcttcccgttgttccggttgtaaagcctgccaggtggcgtgcaaagataaaaataatctggaagtgggtcgtaagttccgtcgtgtgtatgaaattcggggcggcggatttgcaccaaatggacagggcggttatgaaaacaatgtattttcttatacgctgacgatttcctgtaaccactgcgcggatcctgtctgtgtgaaaaactgcccgaccaccgcgatgcacaaacgttccggggacggcattgtgcgggtggataccggtaagtgtgtcggctgcggctattgtgcctggtcctgtccgtacggcgcgccgcagatgaataaagaggctggccagatgtcaaaatgcgatttctgtgtcgacctgctggtggaaggaaaaaatccgatctgtgtcgatacctgcccgctgaatgccataaaattcggtaaaatccgcgaactccgcgaaaaatacggccatatcagtcaggttcagggattaccggatttcaccattaccaacccgagcctggttatcagaccacataaaggtgcgcagaacaaagaggaggcaaaatcatga

SEQ ID NO: 274093 - DNA, 873 bp, Morganella morganii
atgagtgaatggccgttagtggcgtttaccctgctggtgcagagttctgcggggatggtgatttttattgccctgtttctctgttatctggaaaaagcgcccggtaatccgcgtgccgtccgggcaatgaagccggttctgctgatcgctgccattctcgggtgcttcgggttgctggcatcaacgctgcatatgggatatccgtggaatgcgtttcacgcgctgcgccatatcagcacctcatggctgagccgtgaagtggtgtttgccgcactctatctgggggcattgtgcctgtacacgttatatgtgctgataaccgggcggatgaacagaacaatcacggcattgattggtttgctgggattaattgatatctactgtatggcatcgctgtattacaacaccgcaatgatgacatggatgcatatcaatacctatatcctgtttttctgtgctgtttttgctgccggcggggcactggcgctggggctgacggctgtacgggtaaaatctctgatcgacggaacaaccgctgtcaggatcaccggtgcagctctggtactgatttttgttgcggtggcggtcagaatgacggcacagccattctttaccgaatggttatacgcagctgcacaaaacagtgacagcatcacatacccgcactcaccgctggtggcgtacggcagtacatacacactgcggattatcgccggtgcgctgtctgtcagcggtatcctgttcaccgggctgagcctgctgcggatgcgcagtgccatcctgagcaatggtatgccgctgatcctgctgggttcgctgctgattttcagcggtgaaattctcagccggtttgcgttttttattgtcggataa

SEQ ID NO: 274094 - DNA, 300 bp, Morganella morganii
atgaaaacattacaggaagtgatagccgctcaaccaccggagagccgtgagcggataaaacgactgactgatgagttggttcttgaaaccgggctgcaacttctcagagaagaacttcatatctctcagaaaatgctggcaactaatcttggtatatcacaaccggctgttactcagattgagcagcgcggtaatgatatcaaactggcaacactgaaacgctatattgaggcaatgggcggaacactccgtctgacgatcgaactgccgaccggtgataaccgggtttttcgcgtctga

SEQ ID NO: 274095 - DNA, 513 bp, Morganella morganii
atgaaattacaattttcctcccgggctatcacccgtccggttccggtcattgttatttttctggcgctgaccattgccgggttattttcttttgcgcaattgccggtaacagccaatccggtgattaactttccgattgtgacagtgacggtcactcaggatggctcctcgccgtcagagctggaaaatgcggtgaccaaacaggtcgaacgggcgatttccggtattcccggcatccgtcatatttcgtcttccgtaacagaaggtatttcctcaactacggtggaatttaacctcgatgttgatccgtatattgccactaatgatgtccgcgagcagatctcacaaatccggggagaactgccgcaaagcattgatgaaccgctgattaaccggatagacgtcgaaggcggagccatactgcgctatgccgtatcatccgataccgttccatatgaaggaattgagaatctggcatgcaggtcgtgcgatacgtgcattttttgcctttga

SEQ ID NO: 274096 - DNA, 1089 bp, Morganella morganii
atgaaaaaccgtattttgatagtgaccacactctttttatcttttgtatcatctgccggcctggcagatgatgtgcgggtcagtgtgacgcatccgcaaataatccgctctgcaccggtcattaccttgccgggaaaatttgtggccagaaatgaaattactatcggctcgccgctgcagcaacaaacggtaacggcggtatttgctgaggaaggtcagcaggtggagaaaaatcagttgctggcaaccctggaatctccgttgcaaagtgccgctgtccggcagttacaggcagaaacggaaaaagcagcggcgtatatccggcagcaaagtgtgctggcggcgcaatctcagcgtgatctgatccggatgacaaaactcgcccgcagcggcgtaatttccgcaagtgaatttgaaaaagccaaatcagacactcaggcccggcgggcactggttgatgccgggcaggcagaactgcgtcagttacaggcgcaactggcacgggaaaaaagtcaggaagataaatcaaaaatctatgctccggccgccgggattatcagtgagcgccacgcggtacagggcatgctgtctgataacagcctgctgtttaagctgatcgaaaacggtgagatcgaatttgaggccactgcgggggctgatgaactggcgcaaatgcaggaaacttcggcagtcacgatgaaaacggcgaataaccggcaactgaacggcactgtccggtttatttcaccggtactttcctctctgacacagtccggccgtgtgcggatcacggttacggacggcactgatttacgacagggacagaccggcgtactgacatacaccgccgcgccccgtgaataccagagtctgccttacagtgcggtgcgcaccggcgcaaaaggtgaacgtacggtgtttatcgtgaaaaataacaaagtgatgcagcagccggtgcagaccggtgctatcgataacgggcagattgcggttctcagcccgcttccgccggatgcggatgtggtagtcaatgcacaggcatttttaactgataatgacaccgtcacaccggtgaaggccgcacaatga

SEQ ID NO: 274097 - DNA, 645 bp, Morganella morganii
atggatccgctgcacagcattgccgtcacgctttttttgtttatcctgacttttttcaatcccggagcaaatctgtttattgttgtgcagaccacactgggttccggacaaaaagcggggctgacctgcggttgcggcgtggtgctgggcaatgcgatttactcggggctgggattattcgggctggtcacgctgatgcatgagttcggggcttttttctcgctgattaaagtggcgggcggtgcttatctgttgtggtatgcggtaacggttttccgtaaccggacacagctgaatctcaataccgacagtacattacctgctcagcatgcgctgcgttatttccggcgcgggttgatttctgatctttccaatccgcagactatcctgttttttatcagtattttctcggtcacactgacaccgcaaacgccgttgtgggcaaaaatcaccctgtggttcggtattatcacggtatcacttatctggcggattattctctgccgcacattttccctgacctccgtacgccgcacctattcccgcattcatcgtgtggtcggtaaagtggtaggcgtgttactcggctcactcgcgacccgtctgatttatcagggtgctgcggagttactcaaccgccgctga

SEQ ID NO: 274098 - DNA, 1086 bp, Morganella morganii
atgacaacgattttttcacccgatgcactgcggatcaaaacagagaaagagagtcagggacggcggaccgtgatttattccgccaaaggtcagccgaattttatgtatcagatttgccgtgatgatcttcctgctctgtatccggcattttgtgtgaacgggcagataattgatgcttttttctatgcctgctacccgggcagcctgcatgacggagagcttatcagtcagccgggaaaagcaccggcctgtcatctgaatctgccggaattccggaagctggcacaacaaaccgggcccggatttcatctcagcagtaatgcagaatggaccgcgctgatgcactgtattgatcagcagaataatattcctgacggtaataccgattatggccgcagcctgcgtcatccggagcaaagcgcggtgcggattgacggcaaacccgccggtgatctcagcggggaagccaatacgctgaccggatcaccccacccggactggtatcataatcagcaactgaccgggatcagtgacctgtgcgggaatctgtgggaatggcagaccggtgtccggctgatggcaggtgaaattcagctgatccgcgataatgatatcagtgcgttaccggcagatgcaccgctgttatggcaggcagtggatatgcagagcggacaatattgtgcacccggtatgcccgggacggcaaaatatgactcaccgtccgcctgtctgaccggcaacggcggcacaccattgctgtcagaaaatattacacattataacggcgacccggctgacaacagctatccgccgggactgctcgacggctcgttcttcagtatgaaaacggcggataatctgcccgtaccgcatctgttacaactgcacggactcgcgccgtacggggaaaaaccacagactgagcagatttacctgcgtaattacggagaacgggcactgatgcgcggcggtgcctggtattctcaggaatttgcaggggtcagtgctttttgtctgagtcacaccgcactgcaccgcagtgccactgtcggcggacgcacagcgtggatagtgccgcgcagctga

SEQ ID NO: 274099 - DNA, 1149 bp, Morganella morganii
atggatcatctgaaacgcagcctgctgaaacacagcctgctattttccgcgctggccacactgccgggcagattatacgcggcacaggaaacacagaccatccgcgatatacgcggacgacagattgattaccggatacctccgcagcggatctatgtggccgatgcatctctgatgtttctgtatgcctcactaaccggaaaacagctgacagaaaaactggcagctattccggcggctttccgccatgcggatgaactgagctatcagcaatacagccgggcgtttccgtcactggctgccctgccgcaccttgcaccactggccggggcacaggcaaacacagaaaccattattgaactgcatcctgacattatttttgtcaccaccggtacattttccgccatggaaaccggcgggatcaccgcattactggaacgcgcagggatacagattgttgtactggatatgagtatcagcccgctgaaaaacacgccgcgcagtatcgccgttatgggcgctgttcttggtgtgccggacagagccgctgagatgattgcctttattcattcacatcttactctcgtgacgtcacggctggctgccgcaccttaccgcccggttccggttctgctggaacgcgccgccggattcagtgcggaatgctgttatgcctatggcaacggcaatttcgcggaatttctgacctgtgcgggtggtaaaaatatcggcgctgattatattgacggcacctacggaacgctcaatcaggaaaccatcatccatacccggccggagaaagtgattgtcaccggcgggcaatggcagagctataaccccggcggtgactgggtggggctcggcccggggacagatcttacggtagcggaaaaacagctggctgtactgatgaaacgtcccgcctttaaaaccctcgccgccgtacagcagcgggagtgttatgccatctggcacaccttctatgacagccctttcggctttatcgcagtcctgaaattcgctgcctggctgcatccggcactgtttgcggatattgatgctgatgcggtatttcgttcattttatcagcagtttctgccggtgccgtggcagccgggttactgggtatcactgcgcccagaatcataa

SEQ ID NO: 274100 - DNA, 2196 bp, Morganella morganii
atgtatatgcttcagctgttccgatcaactgagaaaatcctcatgcgccgattactgagttcttaccctgttgttattaaatctgttattacatctgctttctctgtctcatttctgtctgttccggttgtttatgccgaagcggaagatgtcgtctatgtcacggcggcggatgatgaacattatgaaccgcgcggttatggtgctctccgtcagtctgcggcaacaaaaggctctgcctcactggctgaaacgccgcagtttgtatcagtgatccgccgtgatcagcttgataccctgccggctgaatccctcagcaaagcgctgcgctacagcgccggggtggccagtgaaaaattcgggggcttcggcaatagcattgatttttcgaaaatgcgcggctttgatgcggattattatctcgacggcctgcgggtcgcgggtaacagcgggatctggggcgcacaggtggattcctggctgctcgaaagtatcgaagccgttcacggcccctcatctgcgttgtatggtcagggcggtgccggtggcgttatcaatatgcagtcccggctgccgcagacggaggagtctcatcaaattcagtttcagggcggcaattatgataacaatgcgctgcggtttgatagcaccggtgcactgaatgaggatgaaacctggctttaccggatgatcggttcagcggcctcttccggttcacagattgaaaatacaaaacagtcccgttatctgatcgccccttcagtcacctggcgtcctctggacaatctccggtggacagtagccggtgtatatcagcatgacccctataccggttattacaacacacttcccgctgccgctctcggtctgttaccgaacccttacggtgaactggacagacatcataactacagtaatccggatcacgaaaaatcgggccgcacacaacaatctatcacgtcactggttaactggcaggtttcagattcgctgacgctgaaacagaatctccgttatgccgatgtgaaatcccgtgtccgccgtgattttacccgcggatttgtgcaggataaccacctgctgacagcggtgtatcaggattccccgtcccgggccagaaccctggcagcagataaccaactgatttacaaaaccctcaccggcccggtatcccatgaaattctgaccggctttgatcttcagaccggtaagctggataaggactggtcaggctcgcaaacggtaacatttgatccgtacggttctcactaccgcccgcagtttgcgccgcacatgacatcgtcgacttccaccggacaaacttaccagcgctatggtgtttatatgcaggatcatctgcgctggcagcaatggagcctgattttaagcggccgttatgatgattcctcgctgaaaaccaccaacaagctcagcggaacaacacaaaacactgatacctcagcttacagccaccgtgcggggctgacctataccttcagcaatggtttttctccctgggtaagtatctccgacagctttgacccggtactgggaacagacgcggacggcaaagcatttgtgccgacagaatctgaccagacagaagccggggtaaaatacctgagtgataacggcgatattatggcgagcctcgcagtctatgagctgacccagaaaaatgtcaccactcataacccgaaaaacccggattactataaccagaccggcaaagtccgttcccgcgggctggagtttgagagccgcatggccgtgacaccgtcacttaatcttatgctgggttatgcttttaccgataatgtaatcacggaatcggatgacaaatccgtactgaataaacgccctgttcaggtgccgcgccacagtggttcactctgggcggattaccgctttcagggccgttatcttgacggcgcactgatcggcgccggtgtccgctatctcggtgcgactcagggggataacaccaacagctttacggtacctgccgtctggctgggggatgtcagcctgcgttatcagatggacgcgctgacaccggaactgagcggaatggaactgggtgtcaccatcagcaatatcgccaatacatcttatgttgcgggctgcaccagctccacttattgcagcattggtaatgaccgtgccgttgtcgccacccttaactatttcttctga

SEQ ID NO: 274101 - DNA, 606 bp, Morganella morganii
atgacaaaaaacactatcgataacacagaacagcctgcgcagagcggtataaaaatctatctgagaaacgggctgtattttgtgctgtttttaatggcggtacagttactgaccacactgaccggcgggggattaactgcgctgggtattgagccgcgtacggttaacgggctgttcggtatttttcttgcaccttttattcacagcagctgggggcatttattcagtaatttgccgccgctgttaattctcagtgtgttactgatgatcccgtcagtgaaacattatattaaggcgtccctgtttattattattgtcggcggattgctggtctggttattcgggcggacggcggtgcatgtcggggcgagcggctggatattcggcttgtgggcattactgatttatcagggaattttccgccgtaaaccactggatattattattggtattgtggtgctgatttattacggcggcatgatcagcggactgtttccgggacagcaattcgtctctgttgaatcccatctgagcggcgccgccgccggggttttattcggctggctgcaataccgcaagcggaaacagaataacaaaccgacataa

SEQ ID NO: 274102 - DNA, 462 bp, Morganella morganii
atgctgaataactatgttctgcgcagtgtccgctacatgctggatctgagtgacgcaaaaatggccgaaatcaccggacttgccggattaactgtcaccaaagcgcagatgagcgactggctgaaaaaagaagatgaagcggattatcagctttgtgatgataatgtaaccggtcattttctcaacggactgattattttccggcgcggcaaagatgaaagccgtccggtaccggcggtggatgcccgtctgaccaacaatattatcctgaaaaaattgcgcgttgcgtttgaactgaaggatacggatatggcggatatttttcagcgtgccgacttccgtgtgtcaaaaccggaaatcagcgccctgttccgcaatccggatcacaagaattaccgcgactgcggtgaccaactgctgcgctatttcctgaaaggtctgacatcccgcatccgcagctga

SEQ ID NO: 274103 - DNA, 1398 bp, Morganella morganii
atgtcattgtcccgcgcgtttgccaccacactgcttgctgctgcctgctccgcttatgctgccgacccggcagatctgatgataacggacggcaccgtgctgaccatgaacccggaaaataccgtatttgagcacggtaccgtggtggtcagtgacggaaaaattgtcgccgtcggcggccctgagctgacagcgaaatatcaggcaaaaaaagtgctggatgtaaaaggcgatattgtcatgccggggctgataaacacccacactcacggctcgatgacggttttccgctctctcggggatgatgtgccggatcgcctgcaccgctatattttcccgctggaaaataaactggtttcccgcgatatggtgcgcaccggcgctaatctggccaatatcgaaatgattaaaggcggcgtgaccacctatgccgatatgtattatttcgaagatgaggttgcgaagaccgtagataaagcaggtttacgcgccgtgctgggtgagaccatcattaatttcccggttgcggatgcacagacgccggaagaagggatcgcgtatgcggtgcgctttattaataaatacaaagatcatccgcgcatcacaccggcatttgccccgcatgccccgtataccaataccactgaaaacttacagaaaatcgcggcactgtctgaagaactgaatgtaccggtgatgatccatctggcggaaacagatcgtgaaaaagaagagatcgccaaacgcaccggcgggaaaagcccggtgcagtatatggcggatatcggcgtgctgaataaccgcctgctggcggcgcatgtgattatggccgatgaaaatgacctgaatctgctgaaaaaatatgatgtcggggtggcacacaatatcagcgccaacactaaatccgccaaaggcgtggcaccggtcacgcaaatgctggaaaaagggatccgcaccggtctcggtaccgacgggccgatgtcctccaatacattaaccaccatgaatgagctcaacctggtcggtaaaatccataagctggaaaccaaaaaccgcgcggccatgccgccgctgaccgtggttgaaatggcgaccatgggatcggcccgtgcactgcatatggatgataaaatcggctcactggaaaccgggaaactggcagatatcattgtggtggataccaaagcgccgaatatggtgccggtgtacagcccgtatgccgccctggtttatggcgcaaacggtgccaatgtccgccataccattgtcgacggtgtgatcctgatggaagaccggcagttactgaccgtcaatgaaaatgaaattattcaggatgcacagcgttttgcggaaaaagtccgtgaaaccgtgcgcgcttcaggggaagaggtgaaatga

SEQ ID NO: 274104 - DNA, 831 bp, Morganella morganii
atgacagaaaaactcaaatgtgcgctgatttatgattttgacggcaccctggcagaaggtgactgtccggagcacggactgatgcctgcactgggtatcagtgacacgaaagcattctggcgggaagtgaagcggtttgccaaagcagatgacggcgacgaaatcctctcctatatgggattactggccgccaaggctgcgaataaaaagtcagaggaactgagcattgaaaacctgaagaaacacggtgcgacgattccgttgtttcccggggtgacagagtggttcagccggatcaatacctgggctcatgagcaggggctggacccggaacactatattctgtccagcggactggacggtatgatccgcggcacggctatcggccatgaattccgcgatatttttgcctgtaaatatcactattccgctgacggaaaaacagcacagtggcctgctcaggctatcaattacaccaccaaaacacagtttttattccggataaacaagggaatacataactcatgggataatgtggctgttaatcattttatcgagcaggaagaacgcgctgtgcagttccgccatatgatctatttcggtgatggtgataccgatatcccggccatgaagatggtgcgttatcagggcggtttctcgctggcggtgtttgatcagaaaaaatggggcaatccggaaacacagaacaaggtcggcaagctgattgcggaagagcgggcaaactatgtggtacccgcaaactatgaggaaggcagccagctggatgtgaccgtaaaagggctgttacagctgttccgccgtaagcgctga

SEQ ID NO: 274105 - DNA, 930 bp, Morganella morganii
atgaaataccaaaatgtgactgacacgcccggtgagaattcctatttcctcgtttttaatctgacagataccccgcaaacgcgggagacggttgttacgctgtgtaataatctgtccggtattctgcgcagcatccgtaaccgctttccgaaactggaggtcagttgtgtgatgggcttcggggcggatgcgtggcaaaaactgtttccggatgcgggcaaaccccgtgaactgaatacctttgaagcaattaagggaccgcgctttaccgccgtatccacccccggtgatatcttctttcatatccgcgccctgaatgtgtccgcctgttacgagctgggttccattatcagccgtgctctgagcggtgcagtgacctgtgaggatgaagttcacggcttccgttatatggacggacgcgcgattatcggctttgtcgacgggacagaaaacccggaatttgaggatgagcgcaaagaatatgcggttatcggcgacgaagatccggaatttgccggcggcagttatgcttttgtgcagaaatatattcacgatatggatgcctggcagaacctgagcaccgaagatcaggaaaaagtcatcggtcgtcataaattcaatgatgtcgaactgaccgatgagcagaaaatcccgggctcccacaatgtggtgaccaatattcaggacgaagagggcaatgacctgaaaattgtccgcgccaatatgccgttctccaacccggccaaaaatgagcacggtacctattttatcggctacgcccgttatttctccaccacccgcagaatgctggaaaacatgttcgccggaaaagaaaccggtgccaccgatgaattactgaaattcagtactgctgtgaccggcacactgttctttattccgtcaccggccatgctggatgatgttgaataa

SEQ ID NO: 274106 - DNA, 1353 bp, Morganella morganii
atgtttattggttttgattacggaacatccaactgctcagtggcagtgatgaaagagggcactccggtgttattaccgctggagggtgataatgtctatattccgtccaccctgtgtgcaccgacgcgtgaatccgtttccgaacacttattccgtcaccgcgatattctgccgtcggataataccggcgaacagttattacgccgctctatcgcctttaaccgcgaagaaagtattgagctggtgccggaggatattctgttcggccaggccgcgctggaactctatcttaatgatccgcgtgacgtgtattacgtcaaatccccgaaatcctttctcggcgcctccgggctgcatgatgtgcaaatcagcttctttgaggatctggtctgtgccatgatggcgaatatcaaatctcaggcagagcgttcaacacaggaaatcatcaccgaaacggtgataggcagaccggttaacttccacggactgggcggcgaaaccgccaatcagcaggcggaggccattcttctgcgggcggcaaaacgtgccggttttcagcaaattacctttcagtttgaaccggtggccgccgggctggaatatgaatcggtactgaatacggatcagacggtgctggtggtggatatcggcggcggtaccaccgactgctcgcttatccgcatgggaccgggttaccggggacaggctgatcgcaccggtagtctgctggcacacagcgggcagcgggtcggcggaaacgatcttgatatctatctggcctttaaacagctgatgccgctgttcgggatgaacagccgcgcggcttccggtatcgaaatgccgctgatgcaattctggaacccgatcgccattaataatgtggaagcacagaaagagttctactcccgccagaatctcacactgttacagcaactgaagcgggatgcggcagagccggaaaaactgctgcgtctgctggaagtgtataaccagagcctgggttacagcattgtccgccgggcggaagaggcaaaaatcgcgctttcagcctcaccggagtaccgtgcggcgatccgcctgctcagtgaaacgctggaaacagacatcagcgcggcagaaatggaagaatcgatttcctccccgaaagataaaatgatttccctggtgaatgatgcagtgcaacagggcggcgcaacaccggatactatctttatcaccggcgggtcaggccgttcgccggtgttatgccgtgcgattgaggcacaattaccgggaataccggtggtcagaggaaacgatttcggatcggtaaccgccggtctggcacgctggggcgaaatttgttttaaataa

SEQ ID NO: 274107 - DNA, 597 bp, Morganella morganii
atgaacaaacacactgaacatgatacccgcgaacatcttctggctaccggcgaacgcctgtgtcttcagcgcggctttaccggcatggggctgagtgaactgctgaaaacggccggggtgccgaagggctcgttttatcactatttccgttccaaggaattattcggcgtagctctgctggaacgctactacgaagattacctggaacgcctgaccggtcattttgagcacggcccggggaattaccgtgatcgctttctcgcgtattacggcgatattctgaaaaatgcctgtcagcacagccgtattcagggctgtctgacggtcaaattatccgccgaagtgtgtgatttatcggaagatatgaatgccgcgatggataagggcgtcagtaaagtgatcgcgctgctggcgcaaaccctggaaaacggaaggaaagaaaattcactgacgtttcagggcgatgcacagcacgccgcacaggtattttattcattatggctgggggcaaatttgcaggcaaaaatttcccgcagtaccgcgccgctggaaagtgcactggcgcatgttgaaacactgatttccgcgcctgagtaa

SEQ ID NO: 274108 - DNA, 1116 bp, Morganella morganii
atgtcacaacaaccattgtcacagaaaaaactgttcaccccgctgaaagtgggcgcctttaccgcaccgaaccgcgtatttatggcgccgctgacccggctgcgcagtatcgaacccggcgatatcccgaccccgctgatgggtgaatattaccgccagcgtgccggtgcagggctgattatctcggaagccactcaaatttcggcacaggctaaaggttatgccggtgcgccggggctgcacagtccggaacagattgcagcctggaaaaaaatcacggccggtgtgcatgaggcaggcggccacattgctgtccagttgtggcatacagggcggatttcccataacagcattcagccgggccaacaggcaccggtagcaccgtctgcgatcagtgccggtacccgcacctcactgcgtgatgaaaacggtcacgctatccgtgttgatacctccatgccgcgtgcgctggaaaccagtgaaatcccggggattgtgaatgatttccgtcaggcggtagctaatgcacgggaggccggatttgatatggcagaactgcactccgctcacggctatctgctgcaccagttcttatcaccggatgccaaccaccgcaccgatcagtacggcggcagccgcgaaaaccgtgctcgtctggtgctggaagtggtggatgccgtttgtgcagagtggggaccggaatacatcgggatccgtgtatcgccaatcggttcattccagaatatgagcaacggcccggatgaagaggcggatgcgctgtatctgattgaggaactgaataaacgcaatattgcctatctgcatatgtccgagccggactgggcaggcggcaagccgtacagcgaaaatttccgtcgtaaggttcgttctctgttccgtggtgtgattatcggtgccggggcctataccccggaaaaagcggaagatctgattgaaaaagggctgattgatgcggtggcatttggccgcgattatatcgccaacccggatctggccgcgcgtctggcgaaaaaagtaccgctgaacccgcagcgtccggaatccttctacggcggtggtgccgaagggtataccgattatccgtttatgtcataa

SEQ ID NO: 274109 - DNA, 747 bp, Morganella morganii
atgatcacagtgaataaactgaacgtccgtaaacaggataaaacaatactgacagttgattccctgcatttacccgccagaggcagcattgctcttatcggcccgaacggctccggtaaatccaccctgataaaggccttatccgggcttgaccgggaggtattcagcgccgttaccctggacgggaaaaatatcagccgttataaaggcgctgcgcggatgcagaaaatcggtcttattccgcagagttttaatccctgctgggatcagcgcacagaggaattaatttcgctggccgcagagcgggcatctgacccgaaagccgcaaaagaagccgcctgccgcaaatatgaattacagccgttactggataaacactggcatatattatcaggcggggaaaaaagccgggtactgaccgcaatggcactgatgtgtgatccgccggtgatatttgctgatgaacccggtgcggcactggatataaaacaccggatgcagctgattgaggatttaacggcacagggaaaagaaaaactggtggtggtgtgtctgcacgagctggatatggtattccgctattttgaatcagttattgtgctatcacagggacaactgcgctatttcggttcatctgccgcactgctggaatcctctttattaaatgaggtctttgatgtggaattccgcaaaatagaaatggatggttacagcacggtgtatgcacatacgattatccgcccgtaa

SEQ ID NO: 274110 - DNA, 984 bp, Morganella morganii
gtgaaaatagtcagtctgttactcattctcttcgctgcatttattttctccgcctgtgcgggacatacatgggagagtccgctgaaggtggtaagcgccctgttttacagtgatgatttaacatcccgcctattaaccgaatggcgtttaccgcgtgtaattaccgccggatttaccggggcattactgggattaagcggtgccatttttcagggggtattccgcaatccgctggcagagccgtggttattaggatcctccggcggggccgcgatcggcggaacagtggcattattggtgccgctcggattaccgctggcggtatcgctgccgttatttgccttcagcggcgcactggcggcgatatttattgtgttatccgtctcccggattgcggggtcactggataccgccacgctgttattaaccggggtggccgtcagcgcggtattaaatgccgcccgttcgtttatgatgatggcattatccgatgaaagtaccagcctccaggtggtattaagctggattctgggcggaatacaaactccgtccggagaaggtctgatcatcagcctgatattaaccctggccgccattttattatccgtttatctgttatctgacgggctggatttaatgggactggacagaacaatggctatgagtttcggtttatctgttgaacggtttaccgtgctggccttaattgccgggtctgccattgtcgcgattgccgtttcactcggcggcgttgttggttttatcgggctgattgctccgcatattgcccgctggcaggtcggtgcccgtcataaatatgtactgcccgcctcagctgttattggtgccgcactggtaatgttctccgatgcattatcgcgcagcctgctgccgccgggggaaataccgctcgggctgatcaccgcctttatcggcggccctttctttatttatctgctggcgaaacgggtgagaaaatcatga

SEQ ID NO: 274111 - DNA, 912 bp, Morganella morganii
atgaaagtcctgactcttattatcacactgagcatggccctgtgccatgctctgcctgctttcagtatgatggcgcaattatctgcgccggtcacactgaacgaaaaaccgcagcgtattgtgactatcttttcatcaaataccgaaattgtggctatcctcggactggctgacaatatcgccggtattgatgcctatacctattttcccgatgaaatcaaaaataaaccgttaatcggcggccgcctcgggttttctcttgagcggatcattgaactgaaaccggatctggtgattatgacccctgcccgccaggccacgcatcagttattaacaccgctgcgtaaattcggcattcctgtgctggtactggagggaaacagtattgaggaaattatccgtaatatccgtctggtggctcaggtcaccaaaacaacggaaaaaggcgaacaggtggcggcggagatggaacagcggttgcacaatgttcagcaaaagcccgccggttaccgcgcaccaagggtcattatgatcaccggtcaggttagtaacgggttattactggttgccaggccgcaggcgtataaaaaaacaccgggatacaccgccgattccattttaaaagcgggcggaaccctggcgctggaggaatataaacaggccggaccggcgctgaaacaggtatccccggaagcggttatcgccgccgacccggatattattttgtacaccatttccggagacaaaatccgggatttactgacacttcccggctggtcacaaatgaaagctgttaaaaataatgatatttatccggtcaaaagtgcatatgtgcttattcccggcccgcggattattgatggcattgaatatatgtctgacatctttgagcaatggagcctgagacagtga

SEQ ID NO: 274112 - DNA, 2148 bp, Morganella morganii
atgaaaataaacagcaggaaactggtactggtttcactgatcctgtcatattcacaattctccgccggggcggaaaataccgcaaaacaggatccggacagtgacacattaattgtcaccgcttcagggcgtgaggaacagcagcgaaaatccaccgtcaccacccaggttatcgacagcgaccagattgaacgctcacgggcggaaagtctgaccgaattactggcacagaacagtgtcggctttttcagtgaatggagtcccgggcagacatccattaatatccgcggtgctgcaacggatggtcagggaaaagattttgccggacaggtgctggtattagttaacggccgccgggcaggaaccgcgaacttatccaaattatcaccgaaagatgtcagccggattgaagttatccgcggcccctcttcggttatttacggctcccaggcgatgggcggtgtgattaatattttcctgaaaaacggattaaccgacgaaggcgggaaaatctcagcagaaaccggatcctggggactggcacagacttacggcggctatggttttcagaatgatgaaggcgatatttacggctatgtcgggtttgaagccggacgccgtgatgattaccattcagggaaaggcggccacaaacaggaaaataccaactgggaacgctttggtttaagcggtaatttaggctggcagatcaacgaaagtaacctgctcgatgtgtcactgcggactgacggtatttatgacggcggtttccgtggatcaaccgggaatatttacgccaaagatacccgttataaccgttccgcggatgtggtctggaaaaacggcactgacgacagtattttcagaatgaacagccacgcctattttgtgcaggatgtggataatttccgctgggcatcaccgttaaccgcaaaaacccgcagtgatcataaccgccgtcagctggatatttacggcgtgaaattccagccggtgattaaactccatgagcagaacgatctgttattaggggtggattacgaatacagtcgtctgcgttcagaacgggatcaggtcagtgtcagcggcaacccgctgaaacaatccgcaccgtatgataataaccagactgaaaaccagtatgccgtttatttcgatgaccggcagagtttatttgacgacagctggataatccgcggcggtatgcgttatacctacgggaaaaccaatttcgataaaacaccgaacctggataatcagttcaccggcagtgcctcatataatcagttaacctggagtctcggtaccaactatcaggtcaatgactggctgaatctgaagtcctctgtcgccaccggttaccgtgcaccgaccgccacacagctgggcgcggattatattacgctgtccggtacgcaatatctgggcaacagttccctgaaagcggaaagtaaccgtcagtttgaagtgggcgcgacactcggtgattccctgaattccgtcgatattgccctctttcagaatacgattcagaacagaatacagaccaacgttctggcaccgaatgtctatcagtacgccaacagcgacgatgatattgtggtacgcgggctggaagttaacagccgtgccaccgttaaccgtgtatttgactggcagacagactgggattgggtgatgcgtttaaacggcagctggaatttcgatatggaagataaaggcgccaaaataaccgcaaccaataacagtaataaagttcagcgcatgtatcagtatcaggcggcgtttattaacgagctctattttaccaatgcccgttatccgtggagtcttcagttacagggaattctgcgcgggccgatgtggtataaaacagaggaaggaattatcccggatgtccgcccttattcttcttatgtgatgcgcaaagcgccgtttatggtctggaatcttcaggcggatgtggatatcagccagtcactgacgctgtacggacggatagacaatattctggataaaaacgagcatccggtattttttgccctggatgaagacccgtatattatgctgccgtcaaaatccaacggtagtctgggaacctcaatgccgggccggtcatttattgccggtgtgacataccgtttttaa

SEQ ID NO: 274113 - DNA, 993 bp, Morganella morganii
atggtcagtggtttatttatcggcatcctgttcggcgggttgctccagtcaggtcagttctgttttgtttccggattcagaaacattctttaccagcgaaatacccggtttctcaccgcgctgctgatcgcagtcactattcagtccgttggcttctttgctctggaatctgccggattattacatataccggaaggaaatctgccaatcaccgcaacactggccggtggatttttatttggtgcaggcatggtactggccggttgttgcggcagtggtgcgtggttccgttccggtgaaggattaaccggcacctggattgccttatttgcctttgttgtcaccatggccaccgctcagaaaggcagcctgaaacattggtttgaacccttattacagcatcccgcacagccggatacgatttataaaacactggatatttccccttggtttctggtcgcgtttttaattattatcaccgccggattactgatttatcagcattatcatccccgttatacaccaccttcacagggacgctttaattatctgccgctgaatattaccggtatgctgatcggtattctcgggattattgcctgggttttcagtgctgaggccggacgtaattttggctatggcgttgctgttccttccggcaatgttattcagtatctgatcaccggacagcagcgttattttaactggggaaccttatttgttatcggtattttcgccggttcaatgataagtgcggttatccgcaaagaattcagattaagacttccgcctgatggtattaccgtcgttaaacgcctgatcggcgggattgtgatgggagcaggggcaacactggcaggcggctgtaccgtcacgaattcccttgtggcaaccgcttatttctcctggcagggatggatttccacattcatgattatggctggtgtttggatcaccagttattttttccgttcagggcaatgtcgtttatag

SEQ ID NO: 274114 - DNA, 1371 bp, Morganella morganii
atgaaaacaaaatcactctttcttctgataccgttattactgtccggttgtgaccagacggtggtaaaagagatcggcattgaagaattgtcggagaacctgaacaatccggaatacattattatcgatactcggccggacagtttatatttcggttttaaagataaaggcgcggcccgcggcggccatattaaaggtgcgatgcagtttactaccggttggctggattttatcgatgagaataaatttgatacgtttgtcgaagaaaaggggatttccaaagaaaaaaccctggtattttacgacagtgacccggattcactggaacgtattaccgccgaatttgctgccaaaggttttcaggtcagagcatttaaatcctttatccagtacagcaattctgatctgccgatggataaatacccgaattattttctgagtgtttctcccgcctgggttcaggccgcactgaacggtgaaaaaccggaaagttataccagtgatcaaaaaccggtgatatttgaagtgtcgtggggggatgcggagcaatcaaaatcctatgcaacgcatattaaaggtgctttccattttaataccgactggatagaaaatgcgccggtctggaatttatccgaacctgacgttatcaaaaataatctgctgaaaaacgggatccgcaaagataccccggttgtcgtctattctgaaaatcagatggcagcattgcgggtattatgggcactgaaatgggcgggtgttgaagatgtccgtttcctgaacggtggtttaaatgtctgggcggatgcggaattaccaacggaaaccacactgaatattccggtaccggttgcggatttcggtgcggaaattccggttaatccgcaggtcactattgccatgccggcggaagccatacagggtcagaaatccggccttaaacttatcagcaaccggacatgggatgaatataccggcaaaatctccggttatgactatattccgcgtaagggtgaaccggccggggcaatatggggattcggcggtaaaaattcgaatgatatgtccgattactatgacccggatggcacattgcgtaatccggaagagatttttgctttatggaaaacgcagggtattgaaccgaccgatcaggtcgcattttattgcggtaccgggtggcgggcaagcgtttcctggtttatgacccaactggcgggctgggaaaacagccggatttatgacggcggctggaatgcctggcagatggatccgacattaccggtattaaataatattcagagccaaaaaccggcagcactgaatgattatggtgaaataatcaaaaaaccgggacaatcctgtaaaagctga

SEQ ID NO: 274115 - DNA, 264 bp, Morganella morganii
atgacagcccacaaatccaacgatccgctgcatggcgttactctcgaaatgcaggttaatgcactggttgcaaaatatggctgggcaaagctgggtaagttaatcaatattaactgctttaagaatgaccccagcgtaaaatcaagtctgaaatttctccgccgcactccctgggcccgtaccgaggttgagaacttatatctcgattcgctggatgatgctgctgaaaaaacagacagcatctggccggaaggcccatggtaa

SEQ ID NO: 274116 - DNA, 1122 bp, Morganella morganii
atggttaacaaactgaatcttaactggcctgaatttttagaaaaatactggcagaaaaaacccgttgtactgaaaaatgcatttcctgattttgccgaccctatcacaccggatgagctggccggtctggctatggagccggaagttgacagccgactggtcagcttcattgataacaaatgggaagcaagtcacggcccgtttgaggactacagccaattaggcgaaaaaggatggtcactgctggtacaggctgtcaaccattggcatatgccggctgcagaattggtgaaaccgttccgcgtgctgcctgagtggcgtcttgatgacctgatgatttcctactcagtgcccggcggtggtgtcgggccgcatattgataactatgatgttttcattatccagggcatgggccgccgccgctggcgtgtgggtgacgcccttcccatgcgtcagttctgcgctcacccggcattactgcatgtcgatccgtttgagccgattattgatgtggaaatggcgccgggcgatattctgtatattccgccgggattccctcacgatggtttcaccttcgaagataccatgaactattctgtcggttttcgcggaccgaccggacgtgatctgctgagcagctttgctgactatgcactggaacaggatctgggtggcgtcaattatggcgaccctgacctgacagtacgtgaaaactcaggctcaatggaatcttatgaggttgaacgcctgcgtgaaatgatgattgaaatgatcaacaagcccggtgatttcgaacagtggctaggccgttttgcaactaccccgcgtcatgagctggatattgcgccttcggaaccaccgtatgagccggaagaagtgctgagtgctctgaatgccggtgaaaaactgatacgactgagcggactgcgtgttctgcgtatcggggaacatttcttcgttaataccgaaggctggatgaccaccgaaataaaaggtgcggatacattgtgccggttaaccgaagtcggcgtgaatgagctcggtgaagcactggagaacccggtttttgttgcggaattaaccgaatttatcaatcagggatattggtatttcgaagaataa

SEQ ID NO: 274117 - DNA, 408 bp, Morganella morganii
atgagtaagagtggaagaaactatacaaaagaaaaaataagacagcgccatatagcaaataaaaaaagaaaacaccctattcgtctttttatcagaagttgggatttttggggtaaatcctgccttggcctttttgtttttggtatgtttatttattcattaaatgataatgcaaccattcatttcttatggataatctatgcctgcatttgcttacctttatttccgtttgctaaaaaatgcagtgatgatgtccttcgtcattatttttcagaatcaacatttgaggatgttattaatggtagtagcccccgggggcttggcggattgtatctgatactcattattccgtttatcatcccgctggcagcgggatactttgtatatcagattataaattacaaatga

SEQ ID NO: 274118 - DNA, 486 bp, Morganella morganii
atgcacttagaatttaaacggctaactcagatagaaccggccgatatcacggcactgaataatcacccgaaagtgttacagcaaatgccgctgggcagcccggattttgatgatgaaaaaagccgcagttgggcagaagaaaaagacgctcagtgggaaataaacggatatggcccttgggcatttgtgatcgacgatatatttgcaggctggggagggtttcagaaagaaggtgatgatgctgacctggcgctggtacttcatcctgatttctggggaacgggaaaaatcatctgtgatgaaattatccgccacgcatttgatgaaatgcacttaaccagtatcaccattttattaccgttatcccggaaagtttcccggtttataacacgttacggatttcagccggatggttctgttaactatgatggtgtggatttccggcgattccggttattttcagatcatacagatggacatgattaa

SEQ ID NO: 274119 - DNA, 2697 bp, Morganella morganii
atgactgtcaacgttaaccgcaccgtcacgccggctgtgcgcgataataatactttccctgcggcggtatatgccgcaaaaacaccagacgaaacattagcagaattacattctgatatgctggggctggatgaaattgatgcccttgaccgcctgatagaacatcaggaaaacgtggtggcacatgacaaagcacctcccgcatttattcagtttatttccgcatttcataatccatttatttatgtgttgctggcgctggccgttatcagttttatgacggattacctgatccccctgcagcagggcgaggaaacagatctcaccggtgtactgatcatcggaacaatggtttttctgagtgtggtactacgtttctggcaggagtacagaactaacaaagccgcagaagccctgaaatcactggtaaaaactaccgccacggtactccggcgtaaaaaagggcgatctgcccgggccgagctgccggtaaaatgtctggttccgggggatatcgtggttctgagcgccggggatatgataccggcggacttgcggctgctccgttcccgtgatctttttgtcagccaggccattctgaccggggaatcggttccggtggaaaaatatgatactcagggagatatccatgagaaagatgccgcaacgataacggaaaacggacaatcactcacggaatcgggcaacatctgcctgatgggcaccaatgtggccagcggcacggcgctgggtgttgtggtggcaaccggggacaaaacctattttggctcactggcgaaatccattgtcggaacacgctcacagacgtcattcgatcgcggggtgaatagtgtcagtatcctgctgatccgctttatgttagtgatggtgccggttgtcctgctgattaacggatttaccaaaggcgactggtttgatgccacactcttcgcacttgccgtcgcagtcgggttaaccccggaaatgctgccgatgattgtcagttcgaacctggcgaaaggcgcaattgcaatgtcgcggcggaaagttatcgttaagcggctgaatgcaatacagaactttggcgcaatggatatcctgtgcacggataaaacaggaacactgacacaggataatattatcctcgagcatcatcttgatacggagggtaataccgatgaagccatactgggactggcgtggctgaacagttttcaccagagtggtacacgtaacctgatggatcaggcgatcattcgtttcgggcgcggcaaagctgaaacagaatctctgcacagttatcagaaaatcgatgaactgccgtttgattttgtccgcagacgtctgtctgtgtcagtaagaaaaccggatggtaccgccttgcttatctgtaaaggtgcggcggaagagatgctggcgtgctgttctctgatccggaccggcaatcatatttctccggcggatgatgagaaaaaacaggccattatggcactggttaatcattataatgagaccggattcagagtactgctgctcgcagagcgggttcttgacagcaaagagcagggattgccgctctccgcagacagtgaacaaaatatgattttatgcggaattctgaccttcctggatccgccgaaagacagtgcggcaaaagcccttaacgcactgaagcataacggggtaacggtaaaagtactgaccggggataatgccgttgtcacggcaaaaatctgtcgtgaagtcgggctggatgcctcgatgagtatcagtggtgatcagttggcgctcctcagtgatgaggaactgaaacaggtcgcacaaacacacactattttctgcaaactgacgccgctgcaaaaatcagccctggtcaggattttacaatcagccggccatactgttggtttcctcggggacggaattaatgacgcaccggcactgcgggatgcggacgtcggaatttctgtggacagcggaacggatatcgccaaagaatccgcagatattatcctgctggaaaaagatctgatggttctggaggagggtgtcattaaagggcgcgagacattcggtaatatcattaaatacctgaatatgaccgccagctctaactttggtaatgtattttctgttcttatcgccagtgcctttattccgttcctgccgatgctggctattcagttactgattcagaacctgctttatgatatgtctcagcttgcgctgccgtgggataaaatggataaagaattcctgcgcaaaccccgtaaatgggatgcaggcaatatccggcgctttatgatctggattggcccgacgtcgtctgtatttgatatcacaacctttgcattattatggtttgttttcggggcaaacagtccggacagccaggttttattccattccggctggtttgttgagggattattatcacaaacgctggttgtgcatatgctgagaacacaacggatcccgtttattcagagcacagcaacactgccggtattattggttaccgggattgttatggccatcggtatctggctgccgttttcaccaataggaagttatatcgggcttgagccgttaccgtgggaatatttcccgtggcttgctgctacgctggtcagctattgcggtctggcacaaataatgaagggcatttatatccgccgtttcggaatgtggctgtaa

SEQ ID NO: 274120 - DNA, 1338 bp, Morganella morganii
atggcaacaccgcgttataaacaatacgtcgatacccttgctgcccgtatccgaaacggtgaactggcggccggaacacaactgccgactcaccgtgcttttgcggctcaggaaggggtatcgttagtgacggcgtcacgtatttatcaggagctgatcaatcagggactggtcagcggtgaaaccggacggggaacatttgtcagagatatcagcttattaccggttaccggtattgaatgtgatgtcactccggcaatgtatgaccttaactttatctatccggaagtcacggaacagaccgcattactgcgtcacacgctgcgccggttatccatgagcggcgatctggaaagtctgctgcattatctgcctcacgccgggcggcatcaggagagggttgttgttgctgatcacctgaagttgcgcggtttttctgccgttgacccggatactgttgtcatggtcagcggagcccagcacggtctggcctccattgttctgagcatgttcagccccggtgatgtgattgcggcggatgcactgacttatcccggctttaaagcactggcacaaacctgtcatatcgaattagttccggtgccggttaccccggagggccctgatttggcggcactggcacaattatgccgtcagcggaaaatccgcggctatttcaccatgccgacactgcataatccgctcggctgggtgatggatctgacatcccgcaggaagctgataagtctggcccgggaaaaccgtttttttctgatagaagacggctcctatgcttttctgcagaaaccggcgccggctccgctggcagaactggcgccggatatcacattttatgtcaccggattttccaaaaatatcgctaccggcctgcgggttggattaattgttgcacctccggaatatattgctgagctggaaaaaatcatccgcatcactacctggaatacaccggcactgatgaccggtattgtccgtgagtggctggagcagggagaagccgaaaaactggagcagaaaaagcgccgcgatgccaaagcccggcaaaaaatagtcagccggatttttgctgatttaccccatatcgcacatccggccggttattttttgtggatcccgttaccggaaaatgtacgctgcgatgcggttatcagtcgtttgagagccgccaacattgccgtcagcccggcggaatcttatgccgtaacccgcgatatcccgcaggctatccgtgtggcagtcagtacgctgccgtatgacgacctggaatccgcactgatggcggtcagaaacaccattacctatctgatggatttatga

SEQ ID NO: 274121 - DNA, 885 bp, Morganella morganii
atggataatgcaatgacaacggtttcccgttcaacacgcggctggctcaacgggtttatcggcgtgctgattttcagcggctccctgcccgccaccaaggctggtatcaccggattcgcgccggattttctgacaaccgcccgcgcggcgattgccggcattgccgctctgctcattctggccgttctgcgccagcgtttgcctgcagcgaagtatctgttgtcgctgatcgttgtggcggcaggtgtcgtcgtcgggtttccgctgctgacagcccttgctcttcagtatgtcagttcggcacactcgattgtgtatctgggattgttgccgctggcgacagcactgtttggtgtgctgcgcagcaatgagcgtccgcgcccggcgttctggcttttttctgtcctcggcagcttgtttgtgatggggtttgccttatttcagggcggtgaaagtactctgacaggtgacttgtatatggtagcggccgtgttgctgtgcggattgggttacgcggaaggtgcccgcctttcccgtccactcggctgctggcaggtgatctgctgggcattggtactttctctgccactgatgctgattctcagcattgttttcctgccggtgacattcagcggtataccggcacaggcctggggcgggctgatttacgtttcgttattcagcatgctgattggttttttcttctggtaccgcggcctggcagaaggcggtattaccggtgtcagccagttacagctgttacaaccgttttttgggctggtgctttccgcgtggttactgaatgaaaccgtcagctccgtaatggttgcgtcaacctgtggtgtgattgcctgtgttgccggttcaaaacggtttgcccggtaa

SEQ ID NO: 274122 - DNA, 1143 bp, Morganella morganii
atgctgatctaccgggtgatttttgaacggaaaagcagggcgattaatatctgctttttctttaatgcgctgggctccgggttactgatgccgctggcattactttactttgccgggaaaacactcagtgaaaaagaaatcctgtatctcggcacgataaagttctggtcattttcactggcctatttttttattattccgctgataagccggtttgacagtaaaaaaaccattgttttttcactattacttaaattactgtcactatcgtttttgtttatcggacaaacattttatctgtgtcttgtggtgatgctggcaaacggtattgccacctccgtattttcagtagcagcaaaatactatattaaagccacctcggaaaatatcagcgaaagcttttcagtacggatgacgctgaataataccggtgctgcggttgcaccagtactcattacactgtgtgtctttttttcactgccttttacgtacgcattactgattctgactacgatttttatgattggcattctcttttcagtaaagctgcattcttgtcccggtgaaacgaaaaaccacttttattaccttcatttttctgatcttaccggcagagataccattcttgtctccgtggtcagcattatttttgccatgctgtattacagttttgaggtcattgtaccgctggaacttatccggtccggctctgagtatctgatagggccggttttgctgtttaatacgttggttattatcgccgggcaaatcccggtataccgctacttcacggagatgtggggtattattaccgcacttatggcggcaaccggtttatgcatttttctgtttattccgtggttctccggtattgcagaacttcccggtctgttactgatagtgctgggtgtcacactgctggaaatgttttacggtgcgggtatcgataccttgatcacactggcggattcgccccggaaaattgcagtactcgatggtatctccggtatttcactggcaattggtgcggcaatgacagcggcggtttacagcgattcgatactgtttttgccgctggttattgcgctgtatctggttgtcgccggtatactggcatcgcgaaagggagtgggttaccagtga

SEQ ID NO: 274123 - DNA, 924 bp, Morganella morganii
atgataaatctgactttccctgactataaacatcagcaggcttatcagtatttttctgatgaagtctatgaatcacttaattacttattatcctattatcgtttacccggaataagctccgaagttccgttgtcatggcaaaattgcgctattcattatatcgctggtaaatatgcggaagatgatgaacatgctgatgcggtaacttacctcaatcagttgatgcgaaaaagaacaccgttatcactgactatctcgccactgacatctgccggccactcattggcagaaaagatgatcctgaaaattatccgtgacgataaacaacttggtttcggctattgtgatgatccggtactggcagcagcggaaacgaagaaaataacacaggcattatctgttattcgtcgctgtgcgccggaaaccggcaatgaaattgaccggtttatccatcagatatacctgactcaggaaaccgcagacggctcccgctttatgcgttccggtaccaatttctatatgtggggaatgatgtttgcctatgttcactcgtcacattcggtcgcttattatattgatattctggcacatgaatgcggccatacggcactgaatatcctcaatgcggaggatccgctggtacttaaccctgctgatgaggtctttgccgcgccactgcgtgatgacgaccggccgatgatcggtatttttcatgccttgtttgtattatcccggatatgttatgtattttctgaaattatccgtaacagtgacggtatcccggagccggaatattatgaccggctgagcagtaatctggaaaaacttcgtaatacagccgatattgtcaggcagcatgccatactgacggataccggaaagcatatttttatggctgtctgtcagcgctggaatctcagctga

SEQ ID NO: 274124 - DNA, 1026 bp, Morganella morganii
atgtaccgttttcagaatgattataatgaagttgcacatccggctgttttaaaagccattactgacacagcaggtcaccgtcacaacgggtacggcacggatactttatgcggtgatgccgcagcgctgattaaacagcggattggtcagccgcaggctgatatccacttttttaacggcggtacaatcaccaacctgacggcgatttcccattttctgcgtccgcatcaggcggtgatctccgtcagtaccggtcatattgcgacccatgaaaccggggcaattgaagcgaccggacacaaagtcatcactgtattttcccctgacggcaaactgacacccgatcatcttaaaccggtcattgccgaacataatgatgagcactgggtacaaccgaagctggtctatatcaccaattccacggagatcggcacggtttaccgcaaagcagaattgcaggcactgcgtcgtttctgtgatgagcacgggttatggctctatcttgacggcgcccgcctggcatccggattaatgtccgcacaaagtgatctgacgattgaagatatcgcggcactgacagacgctttctatatcggcggtaccaaaatcggtgcgattgcggcggaagctctggtgatcaataacccggcgctgaaagatgatttccggttcagtatcaaacagaagggcgcgcttcaggcaaaaggctggctgctgggtgcccagttcctggcgctgtttacagacgacctctatttctcattaggcaaacacctcaacagcatggccggacaactggcggcattctttacggagcaggattttaccttcctggcaccgccggaatccaaccaggtctttgttattctgccttccgcactggcagaaaagctgaaaaaacagtttgttttccatgaaacgctgctgcaggaaccgggaaaatcctgtctgcgtctgtgcacctcgtgggcaaccacacagcatgatatcgatgactttaaaaagacatttttgtcactgatctga

SEQ ID NO: 274125 - DNA, 657 bp, Morganella morganii
atgcaaaatacaaccccgtttcgtgagttatggctgaaattcagcgaagaagagctgctgccggaggcagacagcctgctccgtgatgcaccggatgttgtcagaaacagtgtcaccacactgcatatttataacggacaaaatctgatttgccagggcgacccggctcaggcggtctatatcattctggatggcgagtttattgttaataagcaggcggagaatggtaaacaggtcgggctgacattctgctaccgtggtgaattcctcggggagatggaggcgatttgccggcaggcataccgttatgatgtgattgcgctgtcagactgctgtgtactgcggatgccggcggcaacatttttgtcctggttgtcacaggatcaccgcctgtctctgctgcttaaccgccagctggcaaaacgctgtcttatcaacggtgaacagcggctgatgaatgcagttgattccatcgaaaacaatctgctctatatgctgacacaaatcagcggccatcagatccatcttccccgtgacatgctggccagcattctcggcacatcgcggcgtcatactgacaaagttctgctgcgcctgaaaacacagggaaaaattaccctcagtgaaggtgtgatcgggctggtaaaaccggactga

SEQ ID NO: 274126 - DNA, 1248 bp, Morganella morganii
atggttaccagtatttataaagatctctctttagcaccacagggggagcaaaaaatcgcctgggttcgcgcccatatgccactgctgcgtgcactggaacagcgtttcacacaagagcagccgtttgcaggaaaacgtattgcgctctctattcacctggaagccaaaactgcctatctggcacgggttctggccgcaggcggggcggaagtgtccgtcaccggcagcaatccgatgtccaccaaagacgatattgtggcggccctggttgtcagcggtattcatacgtttgccatccacggcgcggatgcggaagcttaccgcaactttgtaaaacagactctggcctgtgaaccgcacattgttattgatgacggcggtgacctggtacatgagctgcacagcctgtatccggaatatgcaaagcacacgatcggtgcctgcgaagagaccaccaccggtgttctgcgtgcagttgcccgtgaaaaaaacggtgcactgaatttcccggtgctgtcgattaacggtgcacaatccaaacacctgtttgataaccgctacggtaccggacaatccacttttgacggcattatgcgcaccaccaacctggttattgccgggaaaaccgtggtcgtcgccggttacggctggtgcggaaaaggctgtgccatgcgggcgaaaggactgggcgcggaagtgattgtcacggaagtggatccgataaaagccctggaagcgaaaatggacggctttgcggtcatgaccatgtctgccgcagcaccactgggtgatatctttatcaccgccaccggttgctgtgatgtactgacatcggcccatttcagtctgatgaaagagggtgccatcatcagtaacaccgggcactttgaggatgaaatcaatctgacgggtcttcagcagttaagtgacagtgtcacaattgcccgcgagaatatcgaaggttataccctgaaaaatggccgcacactctatctgctgggccgtggtgcactggttaatattgcctgtgcggacgggcatccggcagaaattatggacatgagttttgccctccaggcactcagcgccgagtatctgctcagccatgatccggaagcgaaagtctatgatgtcagcgatgaaatcgaccgtgaagtggcggcactgaaattacaggatatgggcgtttcacttgataatctgaccaccagacagcagcagtatctgaacggctacgagctgaagtaa

SEQ ID NO: 274127 - DNA, 906 bp, Morganella morganii
atgttcgcaattctgatgacattatggccgctgtttgcgctgattttgctcggctgcattctgaagcggcggccggtttttgatgccgggttctggaacggcgcggaaaagctgaactactatatcttatttccggcgctgcttatcaacagcctcgccgttgctccgctggataacccgcaactgccgaaactggcaatcgcactggtaattatgctcgggctggccactgcggcatttgcgatggtaaagcgtctgcgcggaataccaacggcggaattcggcgtactgctgcagggcgcgatccgctttaatacttatctcgggctatccatcgtcaatgatttttacggcccgtccggtgtggcggtagcggcggtgatcctcgcggtgctggttccgctgtgtaatatcatttcggtggttgcattatccgaatttcagcagttatcgctgcgccgcctgttgttgcccattctgacaaacccgctgattatctcctgtattatcgggatgctcctgaatgtcaccggtactgggctgccgtataacaccggtcagtttgccagactgctggccggtgccagtctgccgctgggactgctctgtgtcggggcggcattgcaggtggcgaccatccgctattccgcactgaaaatcagccttaacagccttgtccgcctgtgtgttatgccattgctggcgattgcggtagcgaccgtgatgggattaacccaactggaatatcagctgtttgtgatcttttttgctattccgaccgcaccgaccgcctatattttgtcgcgtcagctcggcggtgacagccaactgatggccgggattatcacgtttcagaccatggtggcggtgctgactctgccggtggttctgaccatgatcacctga

SEQ ID NO: 274128 - DNA, 570 bp, Morganella morganii
atgcaaaagatactctccggactgctgttcctgacgctgcctgcgttttccgtgccggcggaagatttggatctgctgctggttcaggatcgcagtcaattatttgcggacgcggggaaccgtaccggtgttgcccgtaaaaccagagacgtactcgcccgtccggcggtgcccggtgaaatcgtagtaacccttatccggggtgaaggggaagaaacccgttcaaaaccggcagaagccggggattgggtggtacagaacatctgtgacgctaccggcaatgaagaaattctggtgaaaaaaacgacgtttacccgccgttacggcagtgcactgacaccacctgacagcgggaaccggcagcgtttccggccgcagggagagccgatggattatctggtgataacgcaggaaaaaccgtttgttattattgcgccgtggggtgaaaaacagcgggttatgaaaggggatgtgctgctccgctcacgacaggatccgcaggacagttaccgtattcagaaagcagcatttgactgcacttatcaggtgattacacctgccgggggctaa

SEQ ID NO: 274129 - DNA, 1029 bp, Morganella morganii
atgaatctcagaaaagtcacgatagtcgatgtggcgcagcaggcaggtgtctccgtaaccacggtgtcactggtgctcagcggaaaagggcggatctcgcggaaaaccgcggataaagtcaacgcggcgattgaagaactggggtatgtccgcaatcagcaggctgccacattgcgggacaatatctctaatgtaatcggcctgattgtcaaagatattactgaaccgttttatgcggaagtcgccgccggtgtcagtgaatatgcggaaacacagggcaaacaggtctttctgactcagtgcggcaattcttctgccggatttgcccgctcgctggacagtctgatccgttacggcgtggacggagtgattgtcggcggtggtaaatttctcaccaatgacgtggttgagcggataaatcattaccagatcccgatggtgtgtgcggcccgggccagtgagttctccggtattgatgttgtccgcccggacaatgcctctgccgccagaatggcaacggaatacctgatcaaaaacggtcaccgccagattgcctatttcggcggtgaaagtgactctctcacccgcgctgagcgggtcggcggttattgctcgacactggtgcagtacgggttaccgttccgtaccgaatggatagtggaaacagataacaaacagcaaaatatcatccgccgggtatctgaatttatgtatcagtatcccaaagtcagtgcgattgtctgccacaacaccggtacggcgctgggcgcgtattttgctgcactaagcaccggtaatacggtcagacagggggataacgaaagttatttcactcaggaaatcgccctggtggggtttgatgatatcggcagtgaagcactgtatgacatcccggtggcctttatcacccagccgtcgcgggatgtgggacgcagcgctgcgacacgtctgctgcggcgtattggcggtgataactctccgcctgcaagcgtgacactgtcacccggattttcacagcttaacggataa

SEQ ID NO: 274130 - DNA, 1617 bp, Morganella morganii
atgagtagccaaccaaaacaaaaagtcacgctctgggagtttttccagggacttggcaaaacctttatgctgcctgtcgcgctgctctcgttctgcgggatcatcctcggcatcggcagttccctcagcagccgggatgtactgacactgctgccgtttctggatcacaccgtcttccagttactgttcacctggatgagcaaaatcggctcatttgccttcagtttcctgccggtgatgtttgctatcgccattccgctggggctggcgcgtgaaaacaagggcgtggctgcatttgccgggtttgtcggctttgcggtatttaacctcgccactaacttctacctcactgccgctgatattttaccgactaccgaccctgctattctgaaagcccataacatccgtgatgtgctgggtattcagtcaatcgacagcgggatcctcggtgcggttattgtcggtattattgtgtatatgctgcatgaacgcttcaataccatccgtctgccggatgccctggcgttcttcggtggtacccgttttgtgccgattatcaccaccctggtactcggcctgtgcggcctgctggttccgctgatctggccgtggtttgctatggggatcaacggattgggcaagctgattcagagcgcaggcgcattcggtccgatgattttcggctccggtgaacggctgttactgccgtttggtctgcatcacatactggtggcgctgatccgctttactgaagcgggcggcaccatggaagtgtgcggtaataccgttaacggcgcactgaccattttccaggcgcagctctcctgcccggaaacccagggctttgcggccagcgccacacagttcctgtctcagggtaaaatgccggcgttcctcggcggtctgccgggtgcggcattagcgatgtatcactgtgctcaccccgaaaatcgtcataaaattaagggattactgatttccggtgtggttgcctgtgttatcggcggcacaactgagccgctggaattcctgttcctgtttgtcgcgccgttcctgtatctgatccacgcaattctgaccggactgggctttaccgtaatggcgattaccggtgtcactatcggtaacaccgacggtaacctgattgactttgtggtcttcgggatcctccacggtatccagaccaagtggtatatggtgccggtggtggcctttatctggttcgcttcttactatgcgattttccgtttcgccattacccgcttcaatatcaaaaccccgggccgcgatacggacaccaaagaaagcgcaccggcaaccggcagttccgcaggaaaatccggctatgatgttccggccattctggcagcgctgggcggtaaagagaacattatctcactggataattgtatcacccgtctgcggatgtccgtgcaggatatgagcaaagtggatgacgcgcagctcaaggcattacgggcgatcggagttgtccatctgaatgagcataacttacaggtggttatcggcccgcaggttcagtctgtcaaagatgaactggaaaagctgatgaaatctgcgcctgattccgctcagccggaaccgcaaaacgcctga

SEQ ID NO: 274131 - DNA, 1173 bp, Morganella morganii
atgtcctctctcttttctgtcccggttgaccgccacggcacttactgcacgcaatgggattttgtgcaggatcgctttggtcaggcggacttactgccttttactatctcagatatggacttcgtcaccgcaccggtgatcctgaaagccatttcagaacgcacagcacacggcgtattcggctacagccgctggcagcacaatgattttctcagcgctgttgcacactggttttcatcccgtttccaggcgcagattaatactcaggcgctggtgtacgggccgtcggtgatttacatggtcagtcagatgatccgtctgtggtcacagcccggtgacggtgtggtggtgcataccccggcgtatgatgcattttataagacgatcaccggtaatcagcgcaccgtcgttccctgcccgctgcaaagaacggcagagggctggtggtgcgatatggatgcgctgggatccctgcttgcgaaaccggagacgcggattctgctgctgtgcagcccgcataacccgaccgggaaagtctggacccgtgaagaactgaccaccatggcagaattgtgcgaacggcataatgtgcgggtgatcagtgatgaaattcatatggatctgtgccgggcgccacatcagcacacgccgtggtctgaaaccggacgcggggagtgggcgttattcacttcagcgtccaaatccttcaatatcccggcactgaccggcgcttacgggctgatttcagatactgcctcccgcgaagcctattttcatcagctgaaagcctgtgacgggctctcttcacctgcggtactggcggttatcgcccatatcgccgcctaccgcgaaggtgcgccgtggctggatgagctgcgtgattatctctttgctaatctggattatataaagcagcggctggatgctgaatttccgcagctgaactggcaggtgccggaatctacctatctggcgtggatagatctgaacccgctgaatgttgatgataatgccctgcaacatgctctgataacacaggaaaaagtggcgatcatgccgggatatacctacggagaggaaggacgcggatttttgcgtctcaatgccggatgcccgcgtgataaactcgccgcaggcatggataaattaattcacgcgctgaaatcacgctga

SEQ ID NO: 274132 - DNA, 165 bp, Morganella morganii
atggcggaaaacaccacctccggaaaaatcccgccggaaaagccggttcaggatgaaaaacaggaagcggtgaacaccggcagacccgcagataagtcgtgtcccagcttaccgttttcctatttacgccgcgccttgcgcaataaggtcggcaaacacgaataa

SEQ ID NO: 274133 - DNA, 798 bp, Morganella morganii
atgtttcttcatgctttacgccaccgcgcctgtgattcacaggaagggcgtcagcgccgcgggggtcatggcggccgtcacggggaacaccacggacaagacgggcaccgttgccacggcgaacatcacggtcacgatgaacaccgcagccattgctgtcatggtgatcatcacggacatgacggacaacacgaacatggttgccacggcgatcatcatgagcaccacgaaggccacagttgtcacgaaggccacggttgtcacgaagggcgcgaacatggtcgtcaccgcggtcgcggaaaagggcttcgccgtctgcttgatcatggtgatctgcgtattatgatgctggccaatcttaaccagaaaccgagtcacggttatgagttaatcaaatctatcggtcagctgacttccggcctctatacaccgagtccgggcgtgatttacccgacactgaccctgcttgaagatcagcagctgattgtcgcggaaaacaccggtaacggccgtaaaagctacagcctgacaccggaaggcaaaatgcatctggaagagaacaccaatgttctggaacagattgcacagcgcctgcaggagaccaaatctttccgccgtggttctctgttatcggatgaaatcgagcaggctctggggaatttacgggcactgctgcgccataaactggtcaccagtgaactggatgaaaccaagctcgggcagattgccgatattcttaatgatgcagtacggaaaatagaagcggttaacgacgctctgagtaaagaaggggaataa

SEQ ID NO: 274134 - DNA, 1011 bp, Morganella morganii
atgatgtcatatgcattacctgaatcgatgatggcaattgatataacccggcacggtggcccggacgtattacaggcgattgagatgccgttgccgaaggtacagggagaatacctgctggttaaagtcgccgccgccggtgtcaaccggcctgacgtcttccagcgtcagggcagttacccgccgccgccggatgcttccccgattccgggactggaaatcgcgggtgacgttgtggctgtcggggaagactgcaaacgccgtcaggtcggtgataaagtgtgtgcgctggttgcgggcggaggatatgcggaatattgcctggttcatgacagtatcgcgctgccgctggaaaacctgagttacacggaagcggcggccattccggaaaattttttcaccgtgtgggcgaacgtctttcagaccggcaaactgcagagtgaagagagtgtgcttatccacggcggcacctccggtatcggcagtgtggcgatcatgctggcgaaagcctttggtgccacggtttacaccaccgtcggcagcagtgaaaaagcagaacttgcccggcaactgggggccgatcacgtcattaattaccgtgaagaggattttgcacaggtcattccggaactgaccggcggtcagggtgtaaatatggttgttgaccttatcggtggtgattatgtcggcaaaaactatgaagttgcagccaaaggcgggcggattatccagatcggcctgatgcgaggtaacccgcagaacctgaatctgatgccgctgatggtaaaacgcctgctgcataccggctcgacactgcgcgcgcggacaccggaagagaaggctgtgattgcccgggatcttgcccataaagtctggccgctgctgcggtcaggaaaggtcaagccactggtcaattatacctttaacctctcggatgcggcacaggcccaccagctgatggagtccggcgatttaaccggaaaaattgttctgattaatcctgacttctga

SEQ ID NO: 274135 - DNA, 759 bp, Morganella morganii
atgatcccggaaaaacgtgtagtacgtagaattcaatcaggtggctgcgcgatccactgccaggattgcagcatcagccagctttgcatcccgttcacgctcaatgagcatgagctggatcagctcgataatatcatcgagcgcaaaaagcctatccagaaaggccaggcactctttaaagccggagatgagctgaaatcactgtatgcaatccgctccgggaccatcaagagctacaccatcaccgaagaaggtgatgagcagatcacaggtttccatcttgccggtgacctcgtcggctttgatgccattatcaataccgagcatccgagtttcgcccaggcgctggaaacgtctatggtctgtgagattccgtatgaaaccctggatgacctgtccggcaaaatgcctaacctgcgccagcaaatgatgcgcctgatgagcggcgaaatcaaaggcgaccaggaaatgatcctgctgctctccaaaaagaatgcggaagagcgcctcgcggcctttatttataacctgtcccgccgttttgcccagcgcggtttctccccgcgcgaattccgcctgaccatgacccgtggcgacatcggtaattatctgggtctgacggtcgaaaccatcagccgtctgctgggccgtttccagaaaagcggaatgctggcggtaaaaggtaaatatatcaccatcgaagatatggaacagctggcggcactggccggtaaagtacctgcactgccacaggattag

SEQ ID NO: 274136 - DNA, 948 bp, Morganella morganii
atgtctgaatatcagaacctcttagttgcaatagaccccaatcaggatgatcagccggcattacggcgtgcggtatatatcgtgcaacgcaatggcggacgcatcaaagctttcttacctatctatgatctgtcatacgatatgaccaccctgttgtcccccgaagaacgggatgccatgcgtaaaggcgtgattgcccagcgttgcgcgtggatcaaacagcaggcgcgttattatctggaagccggcatcgatatcgaagtaaaagtggtatggcataaccggccttatgaggcgattatcagggaagttgtcagcggtggtcatgatctgctgctgaaaatggcgcatcagaatgataagtttgagtctctgattttcaccccgctggactggcagctcctgcgcaaatgtccgtgtccggtctggatggttaaggataaagtctggccggaacagggttctgtggtggtcggtgtgaacctgtccaatgaagaatcctaccatgatgcgctgaatctcaagctggtgtcgctgacacaggatctcgcaaaacggattgtgaaagacccggcaatccatctggtcagtgcttatccggtagcgcctatcaatatcgctatcgaattaccggattttgacccgaatacttataacaacgcgctgcgcggccagcatcttatcgccatgaaagagctgcgccagcaattctccatcggcgaggagtacacccacgtttatgagggattaccggagaaagtgatcccggaagtgtgtggtgagctgaatgccggggtagtggtactgggtattatcggccggaccggtatttctgccgcgttcctcggtaataccgcagaacatgttatcgaccatctgaagtgtgatttgctggcggtgaaaccggacggctttgtttgtccgatcgataccagtgatgatgattaa

SEQ ID NO: 274137 - DNA, 444 bp, Morganella morganii
atgaaaaaaatgatggccgtttcactctttctcttttctgcctccgcattagccattccgaatatctggacatccggtttcggccaggggtttatcgagtacgggatcagtaatgacaccggcgtgaccgttgtcgttgcctgtaacgtcggggcggacccggaggattatgaaaattcaatcgatcacagtattgatatttcggccggtgatcatgaagtggaagggcagattgaatttctgattgacgacgaagcatattttgtaccggacagcaccaagaaccgcgccggtgctgcggcctggatcaatctgactgaagcgctcagtaaagctgctgaatttaaggtttattccgataataaagtagtcggtgaatttaaaccgaataagaagaacgtgaagaaagtgctcggtgacgggatgtgtgcgccattgttctga

SEQ ID NO: 274138 - DNA, 1392 bp, Morganella morganii
atgtcgggcggagtcgttacagcggcatatattgttgccgcaatcttatttattttcagtctggccgggttatcccgccatgaaacctcacaacggggtaacctgctgggtattaccggtatggctatcgcgctggttgccaccatcttcgggccttattccgccaatatcggctggattattgttgccatggtgattggtgcggtgatcggtattcgtctggcacgtaaagtcgaaatgaccgaaatgccggagctggttgctgttctgcacagctttgtgggcctggcggcggtactggtcggtttcaacagctatatggatcacaaccaggcactgacctcggcagtgatgaacaatattcacctgacagaagtgttcctcggcatctttatcggtgcggtgaccttcaccggttctattgttgcttacggcaaattatgcgggaaattatcctccaaaccgctgatgctgcctaaccgccacaaactgaacctggcagcactggtggtatccttcctgctgttatggacctttgtcaaaactgacagcactggcttacaggtcttcaccctgatcctgatgaccgtgattgcactggccttcggctggcatctcgtcgcttctatcggcggtgcggacatgccggtagtggtttccatgctgaactcctattccggatgggcggcggcggcggcgggctttatgctcagcaacgacctgctgattgtcactggtgcgctggtcggttcttccggtgcgatcctgtcttacattatgtgtaaggcgatgaaccgctcctttatcagtgtgattgccggcggtttcggtactgacggtacggcatcatccggcgatgaagagcagggcgaacaccgtgaaatcagtgcggaagatgtggcggaaatgctcaaaggggcaagttccgttattatcaccccgggctacggtatggcggttgcccaggctcagtatccggttcacgatatcactcagaaactgcgtgataagggcattgaagtccgttttggtatccatcctgttgccggtcgtctgccgggacacatgaacgtcctgctggctgaagcaaaagtgccttacgatatcgtgctggaaatggatgaaatcaatgatgatttcaaagacaccgacgtggtgctggtgatcggcgcgaacgacaccgttaaccctgcggcactggaagatccgaacagcccgattgccgggatgccggttctggaagtgtggaaagcgcagaacgtgattgtcttcaaacgttcgatgaataccggttatgccggggttcagaacccgctgttcttcaaagaaaacacccagatgctgtttggcgatgccaaagcgagctgtgacgctattctgcgcgcactgtaa

SEQ ID NO: 274139 - DNA, 1530 bp, Morganella morganii
atgcgtattggtgtaccaaaagagcgacagtccagtgaaacccgggtcgccgccacgccggcaacagtaatacaactgaaaaaactcggatttgatgtggctgttgaaacaggagccggtcatcttgccagttttgatgacaacgcttaccgtgaagccggtgctgatattgtcagcacacaggaagcctggcagtctgaccttatttttaaagtgaatgcccctcaggatgatgaaattccgctgatgaaggcgggcagctcactggtcagctttatctggcctgcccagaacccgcagctgctggaaaaactgtcagcacagggtgttaacgtcttcgcgatggattctgtaccgcgtatctcacgcgcccagtcgctggatgcactgagttcgatggccaatatcgccggttaccgtgcgattgtggaagccgccaacgccttcggccgtttcttcaccgggcagatcaccgctgccggtaaagtaccgcctgccaaagtgctggttatcggtgccggtgttgccggtctggccgctatcggtgcggcaggcagcctgggggccattgtccgtgcctttgatacccgtcctgaggtaaaagatcaggttaaaagtatgggtgccgaattcctcgaacttgatttcgaagaaactgcgggcagcggtgacggttacgcgaaagtcatgtcggaagcctttattaaagctgagatggcgctgttcgcggatcaggcgaaagaagtggatattattgtcaccaccgcactgattccgggtaaaccggcaccgaaactcatcaccagagaaatggttgagtcgatgaaatcaggcagcgtgattgttgacctggcggctcagaacggcggtaactgtgaactgaccgttccgggggaaatccataccacggaaaacggcgtgaaaatcatcggttacaccgacctggcagcgcgtcttgccacacagtcttcccagctttacggcaccaacctggtgaacctgatgaagctgatgtgcaaagagaaagacgggcagatcaacattgattttgatgatgtggtgatccgcggtctgacggtagtgaaagccggtgaaatcacctggcctgcgccgccgattcaggtatctgcacagccgcaggcaaaaccggccgctgtgaaagcagagaaaaaaccggaaaaaccgatgtcaccgtggctgaaatacggcctgatggcactggcatttatcctgttctcctggctggccaacgtggctccgccggagtttttatcccactttaccgtgttcgcactctcctgtgtggtcggctattacgtggtctggaatgtcagtcatgcgctgcataccccgctgatggcggtgaccaacgcaatttcggggattatcgttgtcggcgcactgctgcaaatcggcagcggcggctgggtgacattcttctcctttattgcggtactgattgccagtatcaatattttcggcggattcaccgtcacacagcgtatgcttaaaatgtttcgtaaggggtaa

SEQ ID NO: 274140 - DNA, 957 bp, Morganella morganii
atgaagctgaaaacaacggtcatcgcatctgcgatgtttttttcatttaccagtctgctccccgctcaggcggcacaggaattaacaccggaacaggccgctcagtaccagcctttcgagcggattgcagttacagggcgttttaatgctatttatgaagccgcagctgccgtttcgcgtaaagcagacaaaatgggtgccgatgctttctatatccagagcctcgatgatctgaacaacaacggcaatatgcgtgttgttgcggatgtttaccaccgcgatgcaccaccggccgaggaaaaaggctaccgccagttccgtggcgttaatgaattacctgagaaagatgctatcggccttcagccgtttgataccgtcactgtcagcggcttttttgccaacagtcctgatctgaacgatgctatcgccaaagaagcagtgaaaaaagatgcggcctctttctttatcgtccgtaatattttcaccaacgatggcggtaaccagctggtcactgcatatgtctataaagcggatgcaccaaaacgtgtactgcagacagaagaagcgctgatccctgcggattctgatgccggtcgtgccgcactggctgccggtggtgaagccgccaaacaggtcgaaatccctggtgtggcctcttccactgatatggccggtaacaatgtcggtcgtttctttgaaacccagtcctcccgcagcggccgttataccgtgactctgccggacggcacccaggttcaggaactgaacaaggcgtcagccgctgttatggctccgtttgacagcgtaacctttaccggttactacaccacgtcaccggaagtctcttatcaggtcgccaaacgtgcggcagccaaaggggcgaaatattatcatatcacccgtcagtggcagtccagcggcggtaacgtgactatcagcgccgatttatttaaataa

SEQ ID NO: 274141 - DNA, 1392 bp, Morganella morganii
ttggataagaaactcagtttaaccgcgctcaccgcattagtgctcagttctatggttggtgccggtgtatttagtcttccgcagaatatggccgaggttgccagtccggctgcacttattatcggctggtcaattaccggtgtcggtatcctctttctggctttcgccctgctgctgctttcccggctgcgtccggatctcgacggcggcatctttacctatgccaaagacggtttcggcgaactgattggtttctgctccgcctggggatactggttatgtgcggtgatcgccaacgtctcctatctggtgattgtgtttgcagcattcagtttttttacggataccccggacaatattgttttcggcgacggaaatacctggcaggccctgattggtgaatccgttctgctgtggtttgtgcattgtctggtactgcgcggagtacaaaccgctgccggtatcaataagctggcaacgttcgccaaactggtgccgctcggcctgtttatcgtactggccgtgatcgctttccgctgggataccttccatcttgatttcaccggtgtggatctcggagtacctgtgtggcagcaggtgaaagataccatgctgatcaccctgtgggtgtttatcgggattgaaggtgctgttgtggtttccgcccgtgcccgccgccgcaaagatgtcggcctggccacaatgatggcagtgatttccgcactgacgatttatatcctggttaccctgctgtcaatgggggttgttgcccgtccggaactggcagaaatgcgcaacccgtcaatggcgacactgatggtgaacctgattggcggcagcggtgagattattatcgcagcgggtctgattatttctgtctgtggtgcatacctgagctggacaattatggctgccgaagtgccgtttatcgccgcactgcatggctctttcccgtcaccgtttaaaaaacagaatgcgaataatgccccatcctcctctttatggatgactaacggtgcggtacagctggcactggtactgatctggctcagcggcagtaattacaatacgctgctgaccattgcttctgaaatgattctggtgccctatttcctggtcggtgcattcctggtaaaaaccgccctgagaatgaaaaaaccggcactgctcggcgtgggtatgattgcggcaatgtatggcttatggctgatttatgcatccggcattatcaatctgatgctgtcagttgtgctctatgcaccgggtattctggtatttctctatgccctgaaaaaccgcgagataaaaaccacactgcattttatcgagtggagcattattgcagccctgctgatagcggcagttcccgcactctggtatctggtgcgctga

SEQ ID NO: 274142 - DNA, 3972 bp, Morganella morganii
atgacagaggggagacccgccgcacaaaaagccaaaccgtacagacggcacgatattacctatcagaaggacagcaaggtgaattcccttcttaatgaattaaaacagttaatcccccatttatcgctgcgggagcagcaccagttccgcaaacggctggcgggtgtggcgaagatccgcaaccccgaatctcagcagaaggtactggcagggttacaggatgagatgctgcgcggtattacccgcacagaactgcgcattgccaaccggccggagattacctatccggataatctgcctgtctcgcagaagcgcgaagcgatttataacgcgatccgcgataatcaggtggtgatcatcgcgggtgaaaccggatccgggaaaaccacacagatcccgaaaatctgtctggagctgggacgcggtatcaccgggtttatcggtcacacccagccgcgccgtctggctgcgcggaccgtggcttcccgtatcgcggatgaactgaaagtcccgcttggcggcgccgtcggttataaagtccgcttcagtgatcaggtcagtgataattcgctggttaagctgatgacggacgggatcctgctggcagaattacagcaggacaagctgctgctgcaatatgacaccattatcatcgatgaagcccacgaacgcagtctgaatatcgattttatcctcggctatctgcgccagctgctgccaaaacgtccggatctgaaagtgattatcacctccgcgaccattgatccggagcggttttcccgtcattttggtaatgcaccgattattgaagtctccggacgtacctatccggtggaagtccgttatcgtcctgtcatgggggaagagaatgattcggatcgtgacctgactcagggcattctggatgccgttcatgaactgggacgggaaagcgccggggatatccttatctttatgagcggggagcgggagatccgtgaaaccgccgatgccctgaataaagcagatttgcgccataccgaagtgctgccgctgtttgcccgtctttccaacagcgaacagaaccggatttttcagccgcacaccggccggcgtatcgtactggccactaacgtggcggaaacctcactgaccgtgcccggtatcaaatatgtgattgataccggatttgcccgtgtcagccgctacagctaccggacaaaagtccagcgtctgccgatagaaccgatttcgcaggcctcggcaaaccagcgcaaagggcgttgcggtcgtgtttctgacgggatctgcatccgcctctattctgaggatgatttcctgtcacggccggaatttaccgacccggaaattctgcgtaccaatctggcctccgttattctgcagatgaccgcgatcgggctgggggatatcgccgccttcccgtttgtggaagcgccggataaacgcaacatccaggatggcgtcaaactgctggaagaactgggagctatcgacggtaaaacctccgccgaagggcattatcatctgacacaaaccggccgtcagctggcgaaactgccgattgacccgcgtctggcgcggatggtgctggaagcccgtaaccacggcgcggtgcgggaaaccatggtgatcgccgccgcactctccatccaggatccccgtgagcgtccgctggagaaacagcaggcgtccgatgaaaaacaccgccgctttgcggataaagaatctgactttattgcctttgtgaatctgtggaactatctgaaagagcagcagaaggtgttatccaactcgcagttgcgcaaacagtgtcgtcaggagtttcttaactatctgcggatccgcgaatggcaggatgtgtatacccagctgcgtcaggtggtgaaagagcagggaattccggtgaacagcgaaccggcggattataaaagtgtgcatctgtcgctcctgagcggtctgctgtcccatgtcgggcagaaagacacggaaaaacaggagttcaccggtgcacgtaatgcgcggttctctgtcttcccgggctccggcttatttaagaagccgccgaaatgggtaatggtggcggagctggtggaaaccagccggttatgggggcgtattgccgctaaaatcgaaccggaatggatagagccgctggcaccgcatctggtgaaatatcactacagcgagccgcactgggagaaatcacagggtgcggtgatggcgacggaaaaagtcacgctctacgggctgccggttgtggcgggacgtccggtgaactacggtaatatcgatccggcgctgtgtcgtgaactctttatccgtcatgcgctggtggaaggtgactggctgacccgtcatgcgttcttccgggaaaaccagaaactgcgtaacgaagtggaagaactggaacacaaatcccggcgccgcgatatccttgtggatgatgaaactctgttcagtttctacgatacccgcctgccgccggatattatctcgtcacaccactttgataactggtggaaacgggaacggctgcagaaaccggattttctcaattatgagaaaaacatgctgatccgctccgatgctaatcaggtaactgcacaggattatccgaactactggtatcagggggatctgaaattccgcctgagctatcagtttgaacccggaaccgaagcggacggtgtgaccgtacatattccgctgccggtactgaatcaggtcagtccggaagggtttgactggcaaatcccggggctgcgtgaagagctggttattgcgctgattaaatcactgccgaaaccggtacgccgtaattttgtgcctgcgccaaactatgcgggcgcatttatggagcgggtaccggagccgcagggcgcgttgctggatgcactggagcgggaactgcgccgtatgaccggcgtcacggttgatcgcgaatcctggcagttggatcaaattccgtcacatctgaaaatcaccttccgtatcacgggggataaacagaaaaaactggcggaaggttacgatctggaagccctgaaactgagcctgaaagagcaggtgcagcagacactgtcagatgtggtcgatgacggtatcgagcaaagtggtgcgcatatctggcgtttcggcgacattcccggctgctatgagcaaaagcgcggtggttatgcggtgaaagcttatcctgcactggtggatgaaaaacagagtgtcgggattaaggtctttgaaacggaatttgagcagcaactggcgatgcaggcgggaacgcggcgtttgctgctgctgaatattccgtcgccaatcaaatacctgcatgaaaaactgccgaacaaagccaaactggggctgtattttaacccgtacggcaaagtgctggatctgattgatgactgtatcgcctgtggtgtcgacaagctgatcgcacaatacggcggcgtggtctggcaggaagacaaattcgcgcagttacaggagtttgtccgggctgagctgaatgaaaccgttgtcggtatcgcgaagctggtggagcagatcctgaccaccacatttgccatcagtaaacgcctgaaagggcggattgatatgcagatggcgtttgcgctctcagacatcaaagcacagatgagcgggctggtcttcccgggctttgtaacggctcacggctggcagcgtctgccggatatcctgcgctatttacaggggatagagcggcgcatcgaaaaactggtatctgacgttaaccgcgacagggcgaacatgagtaaaattgagcatgttcagaacctgtggaagcagtggcagggtaagttatcaccggtggagaaacgcagaccggaagcggaggctgtgcgctggatgatagaagagctgcgtatcagtctgttcgcccagcaactgggaacgccgtatccggtttctgataaacggattattcaggcaatggaacaaatcagcgggtaa

SEQ ID NO: 274143 - DNA, 606 bp, Morganella morganii
atgcaaaaagttctcgttctgaaatccagtattcttgcggactactcacacaccaacaaaatggcggattattttatcggacaatggcggaaaaatcatgcagatgatgcgatcactgtccgcgacctgagtgctgacccggtcccggtgctggataacgaaattgtttccggtatgcatgcgtccgcaggcggaaccttaacacagcgtcagcagtccgcaaatgcattacagactgaactgattgatgagctttttgcacacgatgttatcgtattcaccgcaccaatgtataacttcaccataccgacacagttgaaaacctatctggatttcattgcggccgccggtaagaccttccgctataccgaaaacggtgccgaagggctggtgaccggcaaacgtgcgattgttctgaccgcacgcggcggtttccaccgcgatcagacatctgacctgattgtgccgtttatgacacagttcctgggttttatcgggatcagcgatattgagtttatttatgccgaaggtgtctcgatgggtgaggattttgctgaaaaagcacagcagaatgcccgtcagtgcgttgaagcgctttccgcataa

SEQ ID NO: 274144 - DNA, 336 bp, Morganella morganii
atgcgtaaattcattaacagcgggctggccgcgctgacattactgatcagcagctctgcgtttgcactgaccctggatgaggccaaacagcaggggctggtgggcgaaaccttcagcggttatatcgcggccgtggataaagcatcgtcacggcaggatgtcagcggtctggtgaaagagattaatacagcacggacacaaaagtacagcgaactggcacaaaccaaccggatgaaaacggatgaagtggctaaaatcgccggacagaaactggtgacccgcgcgccgcagggagaatatgtgctcggcatcaacggtaaatggctgaagaaatag

SEQ ID NO: 274145 - DNA, 192 bp, Morganella morganii
atgaaaaaatggatagcaggtgcggtattaccgctgatgattatcgcgcttaacggttgtctgcgggtggaagtggccacaccggataaacccattgatatcaatatgaatgtcaaaattgaacatgaaattaatgtcaaaattgaccgccaggttgaagatttgctgaaaaataactcagcgatattttga

SEQ ID NO: 274146 - DNA, 2610 bp, Morganella morganii
atgaaaaaattactgaaagtgctggtggtactgcttgttctgctgatgattatcctcccggcagcctggctgacaattccgcgctggctgcctgcggtggtgaaatcctctctgcctgatggtgttacactgtcactttctcagccaaaaatccgtgcgggcggcctctatatagaagaagcggctctccgcagtaatgaatgtcagctggcgggcggggaaaagctgtcacttcactatcagcgcggcggccgctggattattgatgccggttcactgaccggtgatgcggactgctttcagaaattaccttccggctctgaagaaacagacactacaccggttgatatcggcgcactgttatcgcagctgccgccggtgacgctgaccgcggataacgttatccccgcgccctggcagatgtatcagggaaaactgagcctgacaaccgcacccggccgggaacagcaactgagttatcagggagagaacattcaggcggagctggcggttgatccggcactgaacctgacgttgtcacaactggatgccactatcggtgatgaaaaatttgcgctcagcggcgcactgacactgccgctgaatacagcggagctgccggataaaggcagattacaggctgaaatcacaaccacataccggccacagccgctgatggctgcctttgactggcaggggcggcagggcgttctgacgctgagtgaaactgatccgcggaccgtgctgctgaatattccctgggaagccacggcggaaagtatcctgattaaaagcggggaatggcgctgggatgagtgggaacagccactgcggggaactatcagcgcggaactgaaaaactggctctcttcaccggcggatatgcttttgggggcacggatctccgtgaccacgcagggtgtgcgcggtaaaggcacggtggtattgcagttaccggaaacacccctttcgctgactgagtttgatattccttttgagctggccgggcaggttaatcacaatgatatgtgggcagccgggcgggtaccggcggtactgaccggcacgtttgccgacccggtgatccggttacgttccggggcactggtgcgggctcgcggacagctcagtccggattttctggtggaggaactgcgtctgccgctggcgggaacttcgctgtcacagcagggaatttccgggccgctggatgcgattgtgacggtgaataatccggagctggggcgttaccgttttcagatgaaaggccaggcgcgggaattcctgccggataatggccgctggtactggcaaatctggggaaaaggccggatgaaaccgctgaatgcggactggacattctccggtgccggttcctggctggatgaggaaatccgtatccgtaaactgaacaccggattcaacggtatccgctacggtatgatgtcgatggatgccccggcgctgacactgttatccccgctgatctggacgcgggttgacgggcaggagaaactgtccgggaaagtgcagctgaccacccggaaaatccggctggataacagctatctgccgtccgcgacctttgatatgacgctggatggccgtgacccccgcgatttttctgttaaaggcacactgtcagccggaaaaaatatcgggccgatacattactggagccgctgggacggtgtccgtctgcgtggtgaggcccgctggccggagcaggatatgcgggcatttcagacgctgatcccggccgacctggggatcacactgcgtaacggcgttttctatgcccaggcggcgtattccgctgcaccgggtcagggatttgtcgccggtggtcactgggtggtcaaacaggcgggcatgtggctgaaagacggcgaagtgagcggtgtggattttgtgctgccgtggcggctcgcggacagccgctggcagctcggcagtaaaacgcctgtgatgctgcggattgcgcgcgttgagaatctgtttgaagtgacggatattaaagccgatttgcagggctattatccgtacgatgagacgtatccgctggaactgtccggtgtcagtctggatattctgggcggacaggtcaccatgccgtcactgaccattccgcagaaaaccgcagcggtgataaaactggataaactgaataccggcccgctgatcaatacgctgaaagtgacacagtttgcccttgaaggcagtatcagcggggaattaccgttttatattgataatccgcagtggattgtgcataacggttgggtggaaaacgacgaaccgctgaccctcaatctggataatcagtttgttgaatcggtcagtgaaaataatatttcagcgggtacggcgattaactggctggattatctggtgatgaagcgggtgcggacggatgttaatctgaccaacctgggtgtcctgacgatgtcatcagtggtttccggctataatccggtactggatgcacggcgggcggtaaatctgaattaccggcatgaggaaaatgtgtttcagttatggcgcagtctgcgtttcggcagcaatctggaagcctggctggaaaagagtatttcacagaatcaggagtaa

SEQ ID NO: 274147 - DNA, 1002 bp, Morganella morganii
atgaaaatcgtcagttacagtaccaaacattacgacagcaaacatatggatttgattaatcaggatcctcgctttcagtatgatatcgaatattttgatttcccgctgacacaacaaaccgcaaaaaacgccgtgggtgccgatgctgtctgtatttttgttaatgatgatgcgaaccgggaagtattgcaggaactggcggatctcaatatcagaatcctcgcactgcgctgtgcgggttttaacaatgtggatttagccgccgctgaagagctgggtatacaggttgtccgtgttccggcctattccccggaagcggtggctgaacatgccgtcggcatgatgctgagcctgaaccgccgtattcaccgtgcttaccagcgcacccgcgatgccaacttttctctcgagggtctgaccggctttaatatgcataaccgcacagccggggttgtcggaacaggtaaaatcggcctggccgtactgcggatattaaagggattcgggatgcggctgctggtgtctgatccttaccctaaccagacagcactggatctgggtgcggaatatgtcgatctgaacacactgtttgcgcaatctgatgtgatttctcttcactgcccgctgacgccggaaaaccatcacctgctgaatgaaaccgcatttgccaaaatgaaagacggtgtgatgattatcaacaccagccgtggtgcattaattgattccgcagccgccattaatgccctaaaacagcagaaaattggcgcactgggtatggatgtatatgaaaatgaaagagatttattctttgaagataaatcgaatgatgtgattcaggatgatgtgttccgccgcctctcctcctgccataacgtactgtttaccggccatcaggcgtttctgacagaagaagcattgctgagtatcagcgaaaccacgctggaaaacatcactaagctctataacggtgaaacatcctgtaatattgtgttacaaaattag

SEQ ID NO: 274148 - DNA, 321 bp, Morganella morganii
atgtctatgttaaaccgtttagttttagttgcaggtattgcattatcttttgttgcacacagcgcatcattccagggccagcaaggcggcgtcatcaatttctacgggtcactgacagaagcaccctgcacctataaggtatccggcaataacgtcaatgccgaatgttaccgttccggtgaaaccgccaaatataacagcagtattcaggcggataataaacctaacggtacattaataccggataacattggtgaagtaaatatcactccggtttcatctgattcagaaaaacatattgtcaccataagctatcgctga

SEQ ID NO: 274149 - DNA, 663 bp, Morganella morganii
atgacattacgtgaaaaaacgctgggtgaactggcactgtctgtgaatggcgcatcggcacttttccgccgttatgatctggatttctgctgtggcggaaaacggacgctggcaaaagcggcagagaaaaaatccctgaatatcgatgagattgaacaggcattactcgccctgaaagatgaggcaccggcgcaagactggcggaaagccccgttgggtgacattatcgcttttattattacgcgttatcacgatcgccaccgcgcacaattaccggaactgattttacaggcggaaaaagtggagcgggtgcatgctgccaaagccagtgttccgaaagggctggcccggcagctgacagcactgcatgaagagctgacctcccatatgatgaaagaggaacaggtgctgtttccgatgatctgcaacggcatgggaccacaggcggcggggccggtacaggttatggaagcagagcatgatgatgcgggggatattgtggaggtgattaaatttatcactaataatgtcacagcaccggaagaggcctgtacaacctggcgggtgctgtataacggtatcaataccttcattgatgatttaatggaacacatcagcctggagaataacttgctgttcccgcgcgccctggccggggaatag

SEQ ID NO: 274150 - DNA, 1137 bp, Morganella morganii
atgagcgcaggtattgtaattatcggcgggggctttgctgcccgccagctggtgaaaaatatccgtaaaaccgatacacaggtgccgctgacggtgattgcggcagacagtatcgatgaatataacaaaccggatttaagccatgtgataagtctgaatcagcgtgccgatgatcttatccggcagtcagcacaggaatttgcacagcaatataatgtggcgctgttcccgcatacccggatcagcggcattgatgcacaacagcatcttatcagcagtgatcagcagcaatggcactatgacaaactggtactggcgaccggggcaacaccgtgccgcccgccggtgcccggcaatgaactgatgctgacactcaacagccgcgaggattttcagcagcacgaaatacagctgcgtaatgcacagcgggtactgatcctcggcagcggccttatcggcacggaactggcaatggatttctgccgggccggaaaaatcgttaccctggcggatatggcggccagtattttatcgtcactgatgcccgcagagctcagcagccgtctgcggcataacctgtccgcatccggtgtgcgggtgctgaccggcacacagttgcagtcactgaagaaaacagaaaatgagactgaagcgcggtttgatcatgattgtgtgacccgcacggatgtggtgattgccgccaccggactgaaaccggatacctcgctggctgagctggccggtctgactgtccggcgcggtattgtgacggacagttcattacagacatccgacccggatatttatgccctcggcgattgtgcggaaattgacggcaaagtgatgcagtatctgcagccgattatgctcagtgcagtttgtctggcaaaaaatctgaccggcggagagggaaaactgacactgccgccgatgcttatccgggtgaaaacaccggatctgccggtacagctcgccggggattttcatcacccggatttacaatggagcattgatatcagccacaacggtatgacggccaaaggccatgacagcgccggaaatctgcatgcttttgcggtgacggaagacaaactcagtgatgcttttacgctgctgcgtcagctgtcgcagcactga

SEQ ID NO: 274151 - DNA, 1515 bp, Morganella morganii
atggctattcatgtaaaaaataatgtgtattgggtcggacagcgtgactgggaagtccgcgatttccacggaacagaatacaaaaccctgctcggcagcagctataacagctatctgatccgtgaagagaaaaatgtcctgattgatacggttgatcacaaattcagccgtgagtttgtgcagcatctgcagacacaaatcgacctgaacgatattgattacattgtgattaaccatgcggaagaagatcacgccggggcattaaccgaactgatggcggcgatcccggacacgccaatctactgtactgaaaatgccattgattctattaacggacatcatcatcacccggaatggcattttaatgtggtgaaaaccggggataccctggatatcggtaacggcaaacagctgatttttgtcgaaaccccgatgctgcactggccggacagtatgatgacctatctgaccggagatgccattctgttcagtaatgatgcctttggtcagcactattgcgacgagcgcctgtttaacgatgaagtggatcagacggagctgtttgagcagtgccagcgttactatgccaacatcctgacaccgttcagccgtctggtgaccccgaaaattactgaaatcctcggtttcgggctgccggtggatatgatcgcgacctcacacggtgtggtctggcgtgataatccgacccaaatcgtggagtggtatctgaaatgggcggcggattatcaggaagaccgtatcactattttctatgacaccatgtccaataatacccgcatgatggccgatgcaatcgcacaggggattaatgaagcggacccggatgtggcggtgaaaatctttaacgtcgcccgcagcgataagaatgacattatcaccagtgtgttccgttcaaaagggacgctggtgggttcatccactatgaataatgtcatgatgccgaaaattgccggcatgctggaggaattaaccggtctgcggttccgcaataaaaaagcagcggctttcggcagttacggctggaacggcggagcggttgaccgtgtgcagacccggctgatggatgccggttttgaaaccacgatgtcactgaaagcaaaatggcgtcctgacctgaatacccttgaagagtgccgtcagtacggacgtgacctggcgcgtcagtgggcgaccggggtattaccggcggtcagcagaccggcagcagcggcaccaaaagcgcttacgccgcaaccggtggccaccccggcagctgcggtcaatgataccggaaaagcaaaatcatgtgacagtgtcactaatgtatcatctcaggatttggggccgtgtatgcagtgcggtgtgtgccagtggatttatgatccggagaaaggcgagccgatgcagggtgtggagccgggaacgccgtggtcctgtgtaccggataatttcctgtgccctgaatgctctctcggtaaagatgtatttgatgtcctggcgacggaggccgcatga

SEQ ID NO: 274152 - DNA, 1524 bp, Morganella morganii
atgggattttcagttgatgtacttaccggcattgctattgccttacagcgggatatcggtcatcaggatcgttttcagcgtctggtctccacactgcgccgggtacttaattgtgatgcggccgcactgctgcgttatgaatcacatcagtttattccgctggcgattgacgggctgtcgccggatgttctcggccgccgcttccggctggatgcgcatcccagactggaagctatcgcccgagccggggatgtcgtccgttttcccgcagacagtcagttgcccgatccttatgacgggctgatcccggatcatgttcatctgaaagtgcacgcctgcgccggtctgccgctgtttgccggacaaaatcttatcggtgcgctgacactcgacagccttgcaccggaccagtttgatgcattcagtgatgaagaattacgcctgattgctgctctggccgccggagcactcaataatgccctgcttatcggtcagctcgagaaccagcaactggcattcagcgcctccgccgggctggcggcagggcaatccggcggacaaaccgatattatcggcctttcaccctgcatgatgcagttaaagaaagagatagccattgtggccggtgctgatatgaatgtgctggtcagcggcgaaaccggtaccggtaaagagctggtggtacagtccattcacgaactatccgcccgccgtgatcacccgctggtgtatcttaactgcgcggcgctgccggaaactgttgcggaaagtgaattattcgggcatgtcaaaggcgcatttaccggtgctatcagcaaccgcagcggcaaatttgaaatggcggataacggcacgctgtttctggatgagattggtgagctgtcgccggcgttacaggccaaactgctgcgggtcttacagtatggcgatatccagcggatcggtgatgacaggccgctgcgggtgaatgtccgcgtgctggctgccaccaaccgggatctgcgggcggaagttgccgcaggccacttccgggccgacctgttccaccggctcagtatcttcccgttacaggtgccgccgctgcgggaacgccatgaagatatactgctgctgaccggctatttctgcgaacgctaccgtcagacatttggtttgccgcaggtggtgataagtcccgcgttacgcctggcgctgctgcactatcactggccgggtaatgtgcgggagcttgaacatgccgtgcaccgcgccattgtgctggcgcgagctaccggcaacagtgaagaactgctgttacagcctcatcacttctcgccggaagaaatccctgaaccggttgtcagcccagaaacacatcctgcagaggccgatcaggatctgcgcacggctaccgatgcttttcagacggagcttatccgcaccgcccttacccgcagtgacggcagctgggcagcggcggcccgccgtctcgggattgatgccggaaatctgcaccgtctggcaaaacgtctggggctgaaataa

SEQ ID NO: 274153 - DNA, 2040 bp, Morganella morganii
atgcagaacaaaatcacccgccgcaggctgacacactgcctcgcgctctcacttactgccggtgtctccgctgcggcagcggaacccgcaccggacacccttattgtcaccgccgcaaaacaaagccgtctcacaccggatgctgcgcaggaaaaagagaaactggagaatgtcgcgggcggcaccaacctgattatggttgaaaaggatacccggctggcgacgctgcatgatgcactggattatcagcccggcgtgctggttcagaatttcttcggcggtattgatcagccacggctgaatatccgcggctccggtgtgcagagtgccccgctggcacgcggcattctgctgatgcaggacggactgccggtcaccgatgcagacggaagtttccatatcagcaccctggaaatgcgggatgcgcggatgatcagtgtccggcgcggcgccaacagtctgaatccgcagagtaacagtctgggcggtgagctggatctgatttcctataccggacgtgacgaaggcggacgcctgcgctatgaatacggttctcacggccgcgaaggtttacagacggcattcggcggcgtatcggatgacggccgtttcgacggacgcatcaatttcacttatgaccatttcgacggctaccgcaaacactcctcatcacagcgcaaaaccgtacgcggtaattttggctataccggggataattttgaaaaccgcacctccctcaactggaccgacctgcgttttgatgtcgccgggccggtctctgaagccgtgctcgacagtgacccgacagaggtttacccgatggtctggctgcgggatccgcaccgcaatgtggagcagttccgtgccgctaaccgttcggactggcagatcgataatcagcgcatcagtgccggtgtctggtatatccgcacccatgataatttcaccaccccggcctattaccgtttcagtcagagccacagtgaaggtatgcagctgggctggcagatggaaaccgagccggtctcctggcgggcggcactggccgcggatcatatgagtctggaaaccgatctgatgcagaaccggcgcggcacgaagatggacaaaacaccgatcggtaagtttgacggcaaagcagataatatttatgcctctgctggtgccggtattcatctgaccccggatctgaccctgaatctggatctcaaagccacccatgcgcggcgtgatacggaaaagcgcaacagttccgtttcactggatcagaactggaccttctggacccccaaagccggcgtgatctggcgtcctgcggataatcagcgctggtttgccaacgtcagcgccagtcaggaaccggcgaccttccatgaaatcattaattcctccgacggccgcctgacaaaactggagccgcagaaaggcgtgacgtttgaaatcggcggtgacggtgatattaccgaacaactgaaatggaatgtggcgctctaccgcagctttatcaaagatgaatacatcacaacttatgattcagagggaaatatcaccggcgtctttaattatgccgccaaaacccgccatcaggggctggaagtcggtgttaacggcgtgatcccggccggtcccggggatgtggaatataagctggcctggacgtggaatgatttccgctttatgggcggcgagtataacggcaattatatcgccgggatcccgcgtaatattgtttcggcggaagtgctgtaccggatcggcgactggcgtttcggcccgaatattcactgggcaccgaccgatatggctgtcgatcatgaaaaccatctcgatattcagaaacgcaaacactatgcggtgctcgggctgagaggcacttatcagccagcggagaactggtcgctctatatgtcgatggataacctgaccaacgagcactatgccaccacctcagtggcaaaccgctcagttaccgacaaagacagcactctgttcccgggaatgggattcagtgtcaacggcggtatcacctataatttctga

SEQ ID NO: 274154 - DNA, 717 bp, Morganella morganii
atgacatttgtcaaaaagacccttgtccccgcacagcaaatggcgatcctccggtcgtgcccgttgtttcaggcggcagaggatgatgatctggcgctggtactggcagacagcacacatcgtcagtttgcggcgggggaattgatcagtcgtgaaggggagacagtaaaagcctgtccgctgatgatcagcgggcagattgatgttttccgtcatacctggtcgggtgaagagaaagtattcggtatgtttaccgccggtgagctggtggcgatcgccgctgtctttatgccgcacaaccgtttcccgatgagcctgcgggcgagaacagacagcagtgcgctgatgctggataaacaggcgattttacggctgtgtcatgcctgtccggcaattatggcgcagttactggcgcggttcagtctgaagctgtatgagaatatcaaccatatcgactggctgacctccagctctgcagagcagcggctggcagcttatctgctggatctgaaacggtgtcagcaatcggattgtgtggtgctgccgttatcgcgcgggcagttagccgcaaaactgggtgtccgctatgaaaccctcagccgcctgttttccggctggcggcagaaagcgtttatcggaattgataaagacgcggtgcggatcaccaatgaatcctatctggcggaactggctatcccggcgcagcgtcccttctga

SEQ ID NO: 274155 - DNA, 1083 bp, Morganella morganii
atgattagtaatggatttacattattgccggtactgttttttacctgcacaacagcagcttatgccgcaaaaggcgccgtgcatttcaccgatatgtcacagcagaatattgaactcgccgcacctgcacagcggattgtggtgatcccgattcctgccgcctccatgctggtcagtgttgatgaaagcagcaaaagactcgccgggatgcatccctttgccggtgttgccgcccgcgacggcatgctcagtgtgatgtttccggatgtgctctctgtgcgcagtaatgtggtggggaatgatttcgcaccgaatattgaagctctgctctcggttaacccggatctggtctggcagtggggacaccggggcgatgacattatcacgccgatgcgcaatgccggtctgacggtcgccacgctggattacggcaaagaagcctatacacaggaatggctgaccctgatggggaaaaccctcggcaaagaaaccaaaacggacgggctgattgcctggcgcaaacaggtgatcaaccagctggaaaacagtgttgctgcgattccggaagaaaaacaaccgcgtgtgctctacctctctcattttaaacagagtatccagactttcggatccacatctcataacaatgcggattttgcactcgccgggggggtcagcctcaaccgtgacctgaccgggccgcgcaccctgaatatcgaacagattctggtgtgggatccggatattatcctgctgggcaattttgagaccggactggcacccgctgatatttataacaatccgatgctcagtgatgtgaccgcggtaaagaataaacgggtctataaactgccgatcggcggttttatctgggatgcgccaaatcaggaaacaccgctctactggcagtggctggctcagatttttcatccggagagtgcggcatttccgctgcgggaagagatccgcaaacgctatcttcaactgtacggctattctctcactgatgaagaaacagaccgcattttacaactcgatctgaaccgggaaggtcgtgattacctgacactgatggggcggccgtga

SEQ ID NO: 274156 - DNA, 1020 bp, Morganella morganii
atgcgaaaatcccgtctgcaatggtgcctgttatccgccctgctattactgaccatcgtgctcgcgctgtgtgccgggcgctatgcggtctctgtgacaacggttctgcaaattatggcggataccctgaccggacgcagcccgtctgcggaatacagccgcaccgccgaaaatgtggtgttgtatgtccgtctgccgcgcattctgatcgccggactggccggtgccgggctggcggttgccggtgccgcattacagggcatcttccgcaacccgctggtgggaccgcagattatcggtgtttcatccggcgcagcgctgggcggcgcactggccctgctgcttttctcctctttatttatcactatcagttttgcctttctcggtggtctgctggctattgtgctggtctttttgctggggcttaaccggcacggcagcagtcttctgatgctgatccttgcgggcgtgattattaatgctttttttgccgccctgatttcgctgatcacctattttgcggatccgaataataccctgcaaaccatcgtgttctggctgatggggagttttgccaccgcaacctacctgaaagtgagcgtgttactgccggttgtcatcatcgcaggcgggattatttttgctctgcgtttccgcatcaatgtgctgtccctcggcgaggaaaacgcacaggcgctggggctgcccgtcaccgcaacccgctggactatcctggtctgcgtcacgctgatcaccagcgccaccgtagccgtttccggcaccatcggctgggtcgggctgattattccgcatatcgcacgactgatcagcggacatgaccaccgcgtcctgctccccgccagtgccctgaccggtgcgatttatctgatcgccgtcgataccctggcgcgcagtatgaccagcgcggagatcccgctgagtgtcatcaccgcactgatcggggcaccgattttcgccctgctcattcactccatgaataaaaaggtggcagacctgtga

SEQ ID NO: 274157 - DNA, 741 bp, Morganella morganii
gtgatccgtgttaatcagctcagttaccacaccggcaaacgtccgttatttgacgggctgacattccgccagccgccgggcactatcgccgctattctcggcccgaacggacgcggaaaaaccacgctgctgcgcctgctgctcaaactgcaaaaaggggcaaccggtactgtgcagctcagcgcaccggcagcctatgtgccgcaactcagcggtgcgttgtttaattactctgtccgcaccatggtcagcctcggccgggttcgccatcttccctggtatgcatccccgtcccggcgtgatcatgacatcaccgaacaggcaatggctgacctcggattaacgccgtttgcggacaccccatttaacctgctcagcggcggtgaaaaacagatggtgatgatagcccgcgcactggccggtgaaccggacattctgatcctggatgaacccacttctgcgctggatctggcaaatcaggacacagttctttccgttctgaaaatgctggctgcagagcgcggcaaaaccatcctgtttaccagtcattatccgcagcatgccctgcatattgcggatcactcattgttactgtttgacggcacacaggcgcagtttggtcagacacccgcactgctgactgaagagaatctgggaaagctgtatcagcttccggttgctgtcgtgccggttaaccacccgcaccggcagacctgtggcgtgatcccgttgttccgctga

SEQ ID NO: 274158 - DNA, 348 bp, Morganella morganii
atgagcaataacacgattaccccggcagaagcattagtgattgccgacctggtgaactacaccgagcaaggtatttccagccgcgttctcgccaaaaacggcggcggcaatatcaccctgtttgcctttgataaaggccaggcgctctctgagcacagcgccccgtttgatgccattgtgatgattgccgaaggttcactgatcctgaccatcgccggaaaaccggtgacggcaaaacccggggatattgtccgtatgccggccaatattcctcatgctgtggacgcaccggagcgggcaaaaatgctgctggtgatgttacgtgaaccggaaaacaaacaggactga

SEQ ID NO: 274159 - DNA, 771 bp, Morganella morganii
atggaaagcacacataccggccatgaagccggacacaaatttctggcgcgtctgggtaaaaaacgcctgcgcccgggtggccgcaccgccacagaatggctgctgacacacagcgggttgcagaccgacagccgggtgctggaaattgcctgcaatatgggcaccaccgcgattgaaatcgcacagcgttttcagtgtcatattaccggcattgatatggataaacaggcacttgccaatgcgcggaaaaatatcctcgctaacgggctgtcgcaccttatcaccgtgcaggaagcggatgcctcaaaactgccgttcccggataaccattttgatgtggttatcaatgaagccatgctgaccatgtatgcggataaagccaaagcccgtctgttacaggaatatttccgtgtgctgaagcccggcggccgtctgctgacccacgatattgcgctgacagaacggcgtgaggatgagtgtgtcacacaggaaatgcaggcagccattcatgttaaagcacaaccaatgctgagtgatgactggctggcactgttccgtgacgcaggtttccgtgatgtgatccgctcggagggtgcgatgacactgatgaccccaaaaggcatgctgcacgatgagggactttccggcacactgaaaatcatccgcaacgccctgaaaaaagagaaccgcccgcagtttttacaaatgttccgccattttcggcagaaccgtgatcgcctgcggtatattgccgttgtcagtacaaaataa

SEQ ID NO: 274160 - DNA, 783 bp, Morganella morganii
atgcaaattatttatccgggataccacaccggcaactatcagcctgacgacacctttgctgaggaatattactgtgcacagcaacagggggtttcctgtctgttacttgaccaggaagcggtatctgacggtaactaccgcttttccggcaatatttcagctgacagcccggtaatctggcgcgggtggatgctgaccagcgaagaataccgtcacttacatcatgcggttacgtcctgtggcggtaatatgctggagtccccggaggaatatttgcaaaatcatcatattaccggctggtatgatatttgccgtcattatacagcagaaacaatcttcacaaccgaagatgctgatttcgataccctgacctcacaattaaagtggccgggatattttattaaagactatgttaaatcactgaccacatcacgcggatcacttgctgcaaacgctgatgagatccgcgaaattatccggctgattcttcgttaccggggacaaattgaaggaggtatcagcctcaggcactgtgagtattataaaactgacagcgaacgccgctattttgtgctaaatgatcaaattttctctgctgatgataatatcccgcctgttgtccgggaaattgcagatatcattaccacgcctttcttctctgtggatattacggaaaatacagccggtgaattacgtctgatagaaatcggcgacggtcaggtctccgatataaaagaatgggatactgaaaaatttgttactctgttttctggtgctgactga

SEQ ID NO: 274161 - DNA, 447 bp, Morganella morganii
atgtctcaaccattctggacggtgaaaaccctcgatgaaatgagtgacgaagagtgggaatcactgtgtgatggctgcgggcaatgctgtttgcagaaactgatggacgcagacaccgatgaaatttatttcaccgatgtggcctgcaaccagctggatattaaaagctgccagtgccgtcattatgaagaccgtttccgctatgaaccggactgcatcaaactgacgcgggaaaacctgccgacatttgacgcctggctgccgatgacctgtgcttaccgcctggtcatggaaggcaaaccgttattaccctggcacccgctaatcagcggatccaaatccctgatgcaccagaaaggcattaccgtccgccatatagccgtcaccgaaagcgtggtacagaactgggaagaccatatcctgaataagccggaaggcgggttttaa

SEQ ID NO: 274162 - DNA, 657 bp, Morganella morganii
atgtatcagcatcgtgactggcagggcgctctcctggattttccggtcgggaaagtggtatgtgtggggctgaattatgcaaagcatgttgcggagatgaaatcacaggcatccgcagaaccccttctttttattaaacctgaaacagcactgtgcgacctgcgtcagccggtcgccattccgaaagagttcggtgaagtgcatcacgaaaccgaactggcggttctgatcggtgcaccgctgaaacaggccaatgaagatcgctgtgcccgggcgattgccggttttggtgtcgcgctggacttaacactgcgcgatgtgcagatgaaattaaaggcggcagggcagccgtgggaaaaaagtaaggcatttgacggctctgcgccggtgtccgggtttattccggtcaatgaattcccagatccgcagaatgtcacgctgagcctgaccgttaataatgaattgcgccagcagggaaacacccgcgaaatgctgacgccggtgataccgctgattagctatatgtcccgctatttcacgctgcgtccgggggatattatcctgaccggcacaccggaaggtgtcgggccgctggtatcgggcgatatgctgaaaatctctgtaaatgatcacatgctgaccacgcggattatctga

SEQ ID NO: 274163 - DNA, 1095 bp, Morganella morganii
atgcgcctgacattattaagcgccgtgattattacggcatcgctgacggcatgcagtgcatctcagactccggtatcaccggccaaattaacggctgatgctccggcagtgcagcagccggccgctgcacggttgtccgtggcggatttacagcgggaatttccggctgactcacggacagcagaacaatttccggcctatgctgagcagctgaaagtgatggcgcgtcaggagggtattaaagaatccacactgacccgcgcttttgagaattttcattttatcgaacgtgttataacgtctgataaaaaccagcctgagaaaaaagtcacactggatgattacctggcccgccgtgtgaccaaaggcgcagtcagcgctgcagttaaacagcatgatgccaatgcggcgctgttatccggtatcagtcagcgttacggcgtgccgcaggaatatattgtctccctgtggggactggaaagcggtttcggtcgttatcagggtaaagaagatgtgatttccgccctggcaaccctggcctatgaaggccgccgcgaagagatgtttattaaacagtttatcgcagcactgcagattatcgaccagggccatatcccggcggatcagcagctgaaaggctcctgggccggtgcgatgggacagaaccagtttatgccgaccagctatctgacttatgccgtggacggtgatggtgacggcgtggtggatatctggaataacaaagcggatgtgtttgcttccacggcgaattatctggctactgaaggctgggtaaaagggctgccgtggggatatgaagtgactgttcctgcaggctttgaccgcagcattgagggaacaaagaaaaaccagagtaaaacactggcgcagtggaaggccctgggtgtgacactccctgcacaggcaaatctgccggaatcgacccctatgtggttagtcgtaccggaagataagcaggagcgggtgtatctggtcacacagaactttatcaccatcatgcactggaaccgctcgtacttctttgctctcagcgtttcgctgatggcagataatgtcggtgcggaaatccgctga

SEQ ID NO: 274164 - DNA, 285 bp, Morganella morganii
atgttgtgtgcaatttacagaagtccgaaccgcgatcaaacctatttgttcatcgaaaagaaagatgatttttcccgtgtcccggaagagttgctgaaaagtttcggcaagcccgtcttcagcatgctgatcaaccttgcaaaccgcgataaactggccaatgcggatattgagaaagtgaaacaggaactgacagatgccggttattatctgcagttcccgccaccggtggaagatctgttatcagaataccgggatacactgaatattcaggataaatcctaa

SEQ ID NO: 274165 - DNA, 711 bp, Morganella morganii
atgtcaccatcgccaattgatcttaaaggcagtaacttcacactttcggttcttcatctgaataatgaggatcctcagattattgaacaggctgtgcgcgaaaaagtcagccaggcgccggcctttttccaaaatgctcctgttgtgcttaatgtcagccagatttcatccggcgcgaacctgaaaattatctgccgtgccgtcactgacgccggtttacggattgtcgggatcagcggctgtcaggatgagaaaatgcgccgggccgcaacccgcagcgggcttccgctgcttaatgagggcaagagtgcccgtgttgctgaaccggaagcgccggagcctgaaacaccggcagcatcatccgccgcagattcatcctgccggaagacccggctgattaatgtgcctgtccgttccggtcagcgcatttatgccccgaacagtgaccttatcgtgaccgccaatgtcagcgcgggcgcggaactcattgcggatggtaatattcatatttacgggctgatgcgcggacgtgtgttagccggtgcggcaggtgatacggaaagccagattttctgcacccacctgcatgcggaactgatttctatcgccggacaatattggctgagtgatcaaatcccgagcgaattcgcagggaaagcggccaaactcagtctggttaataatgaactcactatcaacaatctaatatag

SEQ ID NO: 274166 - DNA, 813 bp, Morganella morganii
atggcacgcattttagttgttacttcaggtaaaggtggcgtaggcaaaaccacttccagcgcggccatagcgaccggccttgcccagaaaggaaagaaaaccgttgtgatcgattttgatatcggtctgcgtaaccttgacttaatcatggggtgtgagcgtcgcgtcgtgtatgacttcgtgaacgttattcagggcgatgccacactgaatcaggctcttatcaaagataagcggactgaaaatttatttatcctgcctgcttcgcagacccgcgataaagatgcactgacccgcgaaggcgtggagaaagtgctgaacgaattaggtgagatggactttgatttcatcatctgtgactccccggcagggattgagagcggcgcactgatggcgctctattttgctgatgaagccattattaccaccaaccctgaagtttcatctgtccgtgactctgaccgtattctcgggatcctgtcctccaaatcccgtcgtgcggaacagggacaggagccgattaaagagcatctgctgcttacccgttacaacccgggccgtgtcagccgcggtgatatgctgagtatggaagatgtgctggaaatcctgtgcatcccgcttatcggtgtgattccggaagatcagtctgttctgcgttcatccaaccagggtgagccggtgattctggatcaggaatcagatgcaggcaaagcttatgacgataccgtcgcccgtattctgggtgaagatcgtcctttccgtttcattgaggaagagaaaaaaggtttcttaaaacgcttattcggggggtaa

SEQ ID NO: 274167 - DNA, 288 bp, Morganella morganii
atggcgctgttagacttcttcctgtcgagaaaaaaaccgacagctaatattgcaaaagaacgtttgcaaatcattgttgcagagcgtcgccgcggtgaatctgaaccgaattaccttccggatctgaaacgcgatttactggcagttatctgcaagtatgttcaggttgatccggagatgctgtctgtccagtttgagcagaaaggtgatgatatatccgttcttgaactgaacgtcacgctgcctgaaggcgatgaaggcacgaagaaagacgagacggtaaaatag

SEQ ID NO: 274168 - DNA, 1146 bp, Morganella morganii
ttgaattatcagttgattaccagcgatacacaccttgccgcctattgcggacaggttaccggcaaaccttatcttgctctggacaccgagtttgtccggatacgaacctattatccgcatctcggtctggttcagctttatgacggggagcatctcgcactggtcgatccgctggggatcactgattggacaccgctgaaaaccttactgactgcaccggatatgatcaaatatctccatgcgggtagtgaggatatcgaagtctttttcaactgcatgggatgtgtgccgcagccgctggtggatacccaggtgctggccgcctttaccgggcatccgctctcctgcggatttgccacgctggtggaaacctacctcggcgttaccctggataaaagtgaatcccgcactgactggctggcacgtccgctgacagaaaaacagtgtgaatatgcagcggcggatgtgtattacctgctgccgctggcggaaaaactgactgaaaaagttcgtgcggccggttacctggcttctgcggaagaagagtgtgccatgatggcgcagcgccgtattacccagactgacccggctgaagcctaccgcgatttcagcggtgccgcacaactgcgcccgcagcaactggcctgtttacagaaactggcacaatggcggctggaacaggcgcgtcagcgtgatatggcggtcaattttgtggtacgtgaagaacatctgtggaaagtggcgcgctatatgccgacgtcactgggcgaactggacggactggggctgaccggacaggaaatccgctgtcacggcagacgtctgctggcgttaacggaagaaagccgtgcactgaatgaggctgattatccggcaccggtggaaaatgtgtccgatcatccgttataccgcaaaacgttcaaggcgattaaagcacgcattactgagctgagcgaagcggaacaattcagtccggagctgctggcatcacgccgtcagattaaccagtatctgaataaagtgtggggattcaaaatatcatccgaagagccggaactgctgagcggctggcgtaagccgttgctggaatctgtactggcagaggtggttaccggtattgaggccggtgctgtctgcggggaataa

SEQ ID NO: 274169 - DNA, 1692 bp, Morganella morganii
ttggaaagagtctggcttaaacactatccggaagatgtcccggcagatatcaatcctgacacctatgcctcaatggcagagatgctggagaatgcggtatcacgctttgcggaccagcccgcctttatcaatatgggcgaggtgatgacctaccggaaactggaagagcgaagccgcgcatttgccgcttacctgcaaaacggactggggctgaaaaaaggggatcgcatcgcgctgatgatgccgaacttactgcagtacccgatagccttgttcgggatcctgcgggcagggatggtggtggtgaacgtcaaccccctctatacaccaagagagttagaacatcagttaaatgacagcggctgtgccgctattgtgattgtttccaattttgcacacaccctcgaaaaaatcgtttataacacgccaatccgccatgtgatcctgacccgtatgggggatcagctttcccgtccgaaagccacgttggtggattttgtggtcaaatatatcaagcgtctggtgccgaaatataatctgccggatgctatctcattccgccgcgttatccatcagggttaccgcatgcagtatgtcaaaccggaaattcaccgtgaagacctggcatttctgcaatacaccggcggtaccaccggggtggccaaaggtgcgatgctgactcaccgcaatatgctggcaaatctcgagcaggcgcgggcggcctatattccggagctgaatgtcggcaaggaactaattgtcaccgcactgccgctgtatcacgtctttgccctgacggtaaactgtctgctgtttattgaaatcggcggccgtaatctgcttatcactaacccgcgagatgtcagcgggacgattaaagagctgagcaaatacccgttcacggctattaccggggtaaataccctgtttaatgcctggatcaacaatccggaatttcacaaactcgatttctccaccctgaatctttcagtcggcggcggtatgccggtgcagaaagcggtggcggaaaactgggaaaaactgaccggcaaacatctgctggaaggctacgggctgacagaatgctccccgctggtcgccggtaacccgcataacctgaaaagttacagcgggagtatcggattcccggtaccgtccacagagatccgcctgctggatgatgacggcacggatgtacaggaagggctgccgggtgaaatgtgggtccgtggtccgcaggtgatgaaagggtactggaaccgcccggatgccaccgctgaagtgctgaaagatggctgggttgccaccggggatattgcacagtttgatgaaaacggttttctgcacatcgtggaccgcaaaaaagacatgattctggtgtccggtttcaacgtctatccgaatgaagttgaggatgcggtcatgctgcatccggcagtactggagtgtgccgctatcggtgtggagagtgaaagctccggtgagaccgtgaagatttttgtggtccgcaaagataaatcactgacagaagatgatttacgtctgcactgccgccgttatctgacaggttataaagtcccgaaaatcattgagttccgtgatgaattgccgaaatctaatgtcggtaaaattctgcgccgcgaactgcgcgatgaggaaaagcacaaaacggatgttcagccggttgcatga

SEQ ID NO: 274170 - DNA, 591 bp, Morganella morganii
atgatgaatcgcttacggggcagtctgaagtatggtgttgtgattttatcactggcgctggccggctgcgccacagtaccagaatccattaagggcagcggcaccacgatgctgacggattttcaggccgttcagaaagcgccgcaggcttacaaagggatggaagcgcgtttcggcgggcgggtactcagcgtgcagaatcagccggatatgacacagctggaaatcgcggtgatgccgctgaacagcaccggtgcgccattcctgggttcaacgatcaccggccggatgtatgcccggatcaacagttttatggagccggataacttccgcgaccagtatgtcacggtggtcgggctgatgaacggcacacaagccggtaagataggcgatgttccttatactttcccggtgattgatgtcactggtttccagcgctggcaccaggcacggcaggtgattatgccgccgccggtgtatggtccggatccgtggcgctggcataacgggtactacggtggcggctattatggcggcggctggtactatccgccgggaccggcagtggtgcaggattatttagtgccttaa

SEQ ID NO: 274171 - DNA, 702 bp, Morganella morganii
atgtccagccgaattttagccttagatacagcaacagaagcctgttccgttgcactttacaacaatggtgagatcaccgccgattttgccgtcaccccccgcgaacacacacagcgcattctgccgatggtgcaggccgtactggcacagcagaatctctctctccgtgatcttgatgcactggcctttggtcaggggccgggcagctttaccggcgtgcggattggtgtcgggattgcgcagggtctggcactgggcgctgaactgccgatgatcggtgtctcatcgctggaaaccatggcggaaggggttttccgtactaccgggctcgcccgtgtgctggttgccattgatgcccgcatggatgaagtgtactgcgcggcgtatgtccgtgatgagcagggcattttccggcaggaactggcggaagcggtgctgaaaccggctgattttgtcacgcgctgtgccgcactcaccggcgaatggagactggccggcaccggctgggcggcgtatccgcagatgcaggaaacgctgactctcagtactcagatgacagagattacgctgccgcatgcacaggatatgctgccgccggcactgaatgcactgcgccgcggggaaacgtctgtacctgagtcagcggagccggtatatctgcgtaacgaagtgacctggaagaaattaccgggccgggaatga

SEQ ID NO: 274172 - DNA, 1848 bp, Morganella morganii
atgtcggcggcgatcagccggataattgaaacgcaggggcaactggtggcggaagccggaaccgggaccggcaaaacttttgcttatctggtgcccgcgctgcgtgccggaaagaaaactattatttccaccggctccaaagcgttgcaggatcagctctataaccgcgatctccccaccattattcaggcgctggattatgacggcagggtggcgctgctcaaagggcgctcgaactatctctgtctggagcggctggagcagcagactctcggcgatattaatatggagccggaaaccctcacgcagatagtggcggcgcgacgctgggcaacggcgacggagctgggggatatcaccacctgtcacgatattccggaaaacagcccggtctggccgctgatcaccagtaccaacgataactgcctcggcagcgactgcccgcaatataaagaatgctttgtgctgaaggcccggcgcaaggcgctggaagcggatgtggtggtggtcaaccatcacctgtttatggctgaccgcgtggtgaaagacaccggtttcggggagcttatccctgaggcggatgtgattattttcgatgaggcgcatcagatcccggatatcgccagtcagtatttcggccagcagctcagcagccgtcagttatttgatctcacccgcgatatcacattagcttaccgcagtgagctgcgtgaccaggcacagttacagaaatgtgcggatcgcctgaccatgagtgtgcaggatttccggctggcactcggtgataccggttttcgcggtaatctgcgggaattgctggcacagccgcagtttcagcgggcactcaccttgctcgatgatgctctggaactctgttatgacgtgatgaagctctccctcggtcgttccgccatgctggatgcggcgtttgaacgggcgaccctgtaccgcaatcgcctcaaacggctgaaagatgtctcgattcccggttacagttactggtttgaaagctatggccgtcatttcctgctggcactgacaccgctgaccgtggaagacaaattccgcgaaatgatgagtaatcagaaaatggcgtgggtatttacatccgcgacactgtcggtgaatgatgatctgcaccattttacccgccgcctcgggctggataacgccgaaaccctgatcctgccgagcccgtttaattatcaggaacagactctgctctgtgtgccgcgttttctgccgtcgccgaatcagtacggtgcggcaaaacagctggcggaacaactgcgcccgctgatcaaccataaccgtggccgctgtttctttttatgcacctcacaccagatgatgcgtgatcttgccgctgaattccgccagtcactgaccctgccggttctggtgcagggggaaaccagtaaaacacagctgctccgtgattttatctcttccggtaatgccttgctggtggccaccgccagtttctgggaaggggtggatgtgcgcggtgatgcactgacctgtgtcatcatcgacaagctgccgtttaccgcgccggatgacccgctgctgaaagcccgcatggaagattgtcaggtacacggtggcgatccgttccgtgatgtccagatcccggatgcggtgatcagcctcaaacagggggtcgggcggcttatccgtgatacggaggattacggcgtgattgttatctgcgataaccggattgtgatgcgcccttacggggaaatcttcctgaaaagtctgccgccgtcgccacggacccgttcgctgaccaaagctgcggaatttctggcagcacggcagtcacagcgtcgcacagcggaataa

SEQ ID NO: 274173 - DNA, 345 bp, Morganella morganii
atgacaattcagcgaattgatccggaagaccgctggtctgaagcggttgtacacaacaacaccgtttattacaccagtgttccggaagatctgagcggcgatattacggcccagaccaccagtgccctgcacgcgatcgataaaattctggcccgcgccggttcagataaaagcaaaatcctcgatgcgaccattttcctggcagacaaagctgattttgccggtatgaataccgcctgggatgcatgggtcgctaaaggcagtgcaccggtacgctgcaccgtggaagctgcactgatgcacccggattataaagttgaaatcaaagtgatcgcagcagtctga

SEQ ID NO: 274174 - DNA, 1596 bp, Morganella morganii
atgaatcagattacgggcagcggctcatcagaaaaatacctgatggcgctggatgcgggaacaggcagtatcagagccgttatttttgatcttcacggcaatcaggtggcggtcggacaggcggagtggcgtcacaatgagctgccggatgtaccgggctcgatggaatttgatctgccggtgaactggcagctggcgtgtcactgtattgcgctggcactgaaaaatgccggtctgcctgcttcggctattgccggggtggcggcctgttcaatgcgtgaaggcattgtactgtatgaccgcaacggcgaaccgatctgggcatgtgccaacgtggatgcgcgctcaagccatgaagtcagtgaattaaaagagctgtacgataacacttttgaatatgatgtttatcagtgctccggccagaccttagccctcggcgcaatgccgcgtctgctgtggctggcacatcaccggcctgatatttaccggcaggcgggcacactcaccatgatcagcgactggctggcctgtaaactgaccggcgagctggcagttgatccttccaatgccggcaccaccgggatgctggatctgaaaacccgtgactggcggccgggcctgctggaaatggccgggctgcgcgcggatattctctcaccggtcaaagaaaccggtaccgtgctgggctatatcacagcgaatgccgcgaaagagtcgggtctggcagaaggcacgccggtggtgatgggcggcggggatgttcagctgggctgcctcgggttgggcgtggtcagagcgggacaaactgcggtgctcggcggcacgttctggcagcaggtggtgaatttacctgcaccggtcactgatccggatatgaatacccgcatcaacccgcatgtgatcccggggatggtacaggcggaatccatcagtttctttaccggcctgacgatgcgctggttccgtgatgcgttctgcgcggaagaaaaaatcatcgctgaacgtctcggcgtggatacttactcattactggaagatatggccgcccgggtgcctgccggctctcacggcatcatgccgattttctccgatgtgatgcggtttaaatcctggtatcacgcggcgccttcctttattaacctctccattgatgcggaaaagagtaacaaagcctcgctgttccgcgcactggaggagaacgctgcgattgtttcatccctcaatcttgatctgattgctaaattcagtggtgtgaaggctgattcactggtgttcgccggtggtggttcgaaaggcaagttgtggagccagatcctggcggatgttaccggggtaccggtgcgggtaccggtcgtaaaagaagccacggcgctggggtgtgcgatcgccgccggagcgggtgtcgggttatatgatgatatggtgacggcgggtgagcgtctggtgcagtggcagcatgagtatcagccaaatccggcacaccgtgaagtttatgacaaagccaaacagaactggcagaaggtgtatgcggaccagctttcgctggtggattccggcctgacgacatcgatgtggaaggcgccgggattaaaataa

SEQ ID NO: 274175 - DNA, 924 bp, Morganella morganii
atgaatgaagaagagttattggcccgtattgcctggttttattaccacgatggtctcacgcagggggatatcggggatctgctcggtctgacacggctgaaagtttcgcgtttgctcgaaaaaggacgtcagtccggcgtcatccgggtgcagataaactcccggtttgaaggctgtcttgaacttgaagatattctgaaaaaaagattttcgttaaaacaaattcgcatactcccggcactgaacggtccggaaatccatacccgcctcggcgtggccggtgcacatctgctgatgtcacagctttcgcccggccagttgctggcagtcgggttcggggaggcggcaatggcgacattgcagcatctgagcgggtttgtctcttcgcagcagatccgtctggtgactctctccggcggcgtcgggcagtacatgaccggtatcggccagcttgatgccaactgcccggtcagcattattcctgcaccattacgggcatcaagtgctgcagtggcggcgacattccgtcaggaacgcagcgtgcaggatgtgctgatggcagccagtgcagcggatattgccgttgtcggcctgggtgcggtaaatcagaaacaggatgcgaccattatgcgttccggctatatcagcagtggtgagcaactgatgctggcacggcgcggagcggtcggggatatccttggctactttatcgggcgcgaaggggaactgacagaagaagtggagatgcaccgcgaacttatcggcatcacccccgcagaactgaaaaatattccgacggtggtcggagtggcgggcggtgaggaaaaagccgaggtgattgtggcggcactgctggggggctatatcaactccctggtgacagacgagcagacagcgcgggtgatgctgacattattaacctga

SEQ ID NO: 274176 - DNA, 1563 bp, Morganella morganii
atgtcagagaagcaacacccgattcagccgctgctcaccgcccgcggaatagccaaacagttctccggtgtggttgtcctcaaacacatcgatttcacactgttgccgggacaggttcatgcgctgctgggcggcaacggcgcgggaaaatccacgctgatgaaaattattgcagggattgaacagccggatgcaggcaccctgacgctggaaggtcaggagatatcgcacctgaccccggcgaaagcccatcagctggggctgtatctggttccgcaggagccgctgctgttcccgaatctgtctgtgcaggaaaacattctgttccgtctgccgaaacatcaggcaggcaaagccaaattacagcagatgctgacatcactgcgctgcaattttgatctcagcgcacgggcgggcagcctgaatgtggcggatcagcagctggtggagatcatgcgcggtctgatgcgtgattcgcgcatccttattcttgatgaaccgaccgcatccctgacccccgccgaaaccgaacgcctgtttgagcgggtgcgggaattacagcagcagggtgtcgggattgtctttatctctcataaactaccggaaatacatgccattgccgattatctgagcgtgatgcgtgacggcaatatcgcgctggccggtccggcaaaacagttttccactgatgaaatcattcaggccatcacacctgaagcgaagaaaaagccgctgtcagagacgcagaagctctggctggatctgtccgccacccgtaacagtccgcaggatgatacgccggtgctggatgtccgtaatgcgtgcggcgaaggattccgtaacatcagttttgttgtcaacccgggggaagtggtcgggctggccggtgtcgtcggcgccggccggaccgaactcgcagaaacattgtacgggctgcgcccgctgatcgccggagaggttttcctcaacggtgacaatctgcgcggtgtcagcagtgaaaaacgcctcacccgggggctggtctgtttacctgaagaccgtcaggcctccggactttttcttgatgccccgctcacctggaatatcggtgcgctggtgcataaccaccaggggctgctggtcaaccgctcgcgggatgatgcattgctcgagcgttaccgccgcgccctcaatattaaattcagtgacggacaacagaccgtgcgtacgctgtccggcggtaatcagcaaaagatcctgatcgccaaatgtctcgaagccaatccgtcactgctgattattgatgaaccgacacgcggcgtggatgtcggcgcccgtaatgacatttatcagctgatacaaagtatcgcgcaacagaatgtggcgattttactgatctcatctgacctcgatgaagtggtggcactggctgaccgtgtgctggtgatgcatcagggggaattatccggggaattgcagcacaacgagctgaacaccgacaccattatgcacatggcgttcggcgagcaccgcccgcagacagaaacagaaagcagcccgttacaggaggccgcatcatgctga

SEQ ID NO: 274177 - DNA, 1005 bp, Morganella morganii
atgctgaaatatatccagaataaccgtgaagtaacggcactgcttgctattctctgcctgtttgttctgctcggcggcatggaaacccgttatttcagtctgcagactgtcaccatgattttcggcagtgctcaaatccagatgctgctggccatcggtgccaccctggtgatgctgacccgcaatattgatgtgtctgtcggatcaaccaccgggttgtgtgccgtgattgtcggtatcgcactgaatgcgggactgccgctgacggtggcgatcctgctgaccatcgccgccggtctgctggccggattcttcaacggcatactggtcacctggctgcggatccccgccattgttgccactcttggtaccctcgggctgtatcgcggcattatgctgctgctcaccggcggaaaatggattgaaggtttaccggcggaactgaaagatctgtcaaaaccggtcttcctcgggctgtcgccaatcggctggtttattatcctgctgattattctgatgaccctgttcctgtcccgcaccaccgccggacgcggtttctacgccaccggtgataacttacagggcgcgcgccagttgggtgtgccggttgatcgcacccgcatcattgccttctctgtaaacggcatgatggcggcactcgccggaattgtgtttgcctcacaaatcggttttatcccgaatcagaccggtaacggccttgaaatgaaagccatcgccgcctgtgtgctgggcgggatcagcctgctcggtggcaccggtaccatcgtcggcgccatcctcggtgcctattttatgactcagattgacagtgtgctggtgctgctcagactgccggcctggtggaatgactttatcgccgggtttgttttactcgcggttctggtctttgacggccgtctgcgtgtagcactggagaaaaacctccgcgcccagcgctatgcccggttccttaatccttccgcaccgcaggaggctaaaaaatga

SEQ ID NO: 274178 - DNA, 1005 bp, Morganella morganii
atgagcatcaccaaacgttacggctgggaaattgccctggcgctgctgattgtcctcgaaattctgttattcggtatgggcaacccgcgcctgctggatgtcaatgtgctgctgttcagtaccagtgactttatctgtatcggtctggtggcgctgccgctgacgctggtgattgtcagcggcgggatggatatctccttcggctccaccatcgggctgaccgccattgtgctcgggatcctcaatcaggccggcgtaccgatgattgccgccattccgctcactctgctgaccggcgcactgtgcggcctgattaacgccctgctgatcctgtttaccggtgttaacccgctggtgattacgctcggcaccatgtacctgttcggcggctgtgccctgctgctctcaggattatccggcgcgaccggttttgaggggatcggcggcttcccggcagcctttactgattttgctaatcttgatttactcggtattccgctgccgctgatcatttttgtcctgtgtgtgctggtattctggttttatctgcaccgcacccatccgggccgtaatgtctttttaatcggacagaatgcccgcgtcgcccgttacagtgctttcccggtgacacgcactatctgtctgctgtatgcgatggtcggtgtcagtgccgcactcgcctctgtcattttagtgtcctatttcggctctgcccgtgcggatctcggggcatcgttcctgatgcctgctatcaccgctgtcgtgctgggtggtgccaatatttacggcggttccggctctgtattaggcaccgcactggctgttttgctgatcggctttttacagcagggattgcagatgatcggcgtaccaaatcaggtctccagtgcactttcgggtgcgctgcttattgttgccgttgttggtcgttccgtttctttacaccgacatcacatccttggctggtgggcgcgtaaacgcaacaggcaattcgtatcagagtaa

SEQ ID NO: 274179 - DNA, 1017 bp, Morganella morganii
atgaaacccatcatgaaaaaactggcgctcgccactgcattaagtctcgcatgtgtttcctgggcgaatgcagcagaaaaagtcgcctttattcctaaacttgtcggtgtcggcttctttaccagcggcggccagggtgctgtggaagccgggaaaaaactcggtatcgatgtcacctacgacggcccgaccgagccgagtgtgtccggtcaggtacagcttatcaacaacttcgttaaccggggctatgacgcgattattgtttctgccgtttcgccggacgggttatgtccgtcactgaaacgcgctatgcagcgcggtgtgaaagtcctgacctgggattccgataccaacccggaatgccgctccatttatatcgaccagggcacaccgaaacagctcggcggcatcctggtggatatggctgcggatcaggtgaagaaagagaaagccaaagtcgccttcttctattccagcccgaccgtaactgaccagaaccagtgggtaaaagaagcgaaagcgaaaatcgaagctgagcatccgggctgggaagtcgtcaccacccagtatggttataacgatgccaccaaatccttacagactgccgaaggtattcttaatgcctggagtgatctggatgtgattatcgcgccggatgccaacgccctgcctgcggcggctcaggccaaagagaacctgaaacgtaacgatgtggcggttgtcggcttcagtaccccgaacgtgatgcgtccgtatgtggagcgcggcacagttaatcagttcgcgttatgggatgttgtcaaacagggcgaaatttctgtcgccgtggctgatgcactgatgaaaaaaggcgaactgaatgtcggcgataagattaccgtcgccggtgtcggtgaagttgaagtctccccgaacagtgttcagggctatgactacgaagcaaaaggcaacgggattgtggtgctgcctgagcgcgttatcttcaccaaagagaacattaacaactatgatttctga

SEQ ID NO: 274180 - DNA, 882 bp, Morganella morganii
atggctgatttagatgatatccgtgacggcaaagacttcgggcttaatacgccgcaaaaaaacaccctttataccctcaaaggctgcggttcgctggattggggtatgcagtcgcgtctggcccgtatttttaatccgcaggataataaaacggtcatgctggcttttgaccacggctatttccaggggccgaccaccggccttgagcggattgatattaatatcgccccgctttttgagcataccgatgtcctgatgtgtacacgcgggatcctgcgcgcacaagtaccggtcacgaccaacaaaccggttgtgctgcgggcatccggtgctaactccatcctgaccgaactctccaacgaagcagttgcggtggcgatggatgatgcggttcgcctgaatgtggcagcggttgcagcccaggtctatatcggtaccgtgcatgaacaccagtccatcaaaaacatcatcaaaatggtggatgcggggatgcgtgtgggcatgccggtaatggcagtgaccggggtgggtaaagatatggcgcgtgatcagcgttatttctcactcgccagccgtattgctgccgaaatgggcgctaatatcatcaaaacctactttgttgaggaaggttttgagcgcatcaccgccggttgtccggtaccgattgtcattgcaggcggtaaaaaactgccggaaaacgaagcactcgatatgtgtttccgcgctattgaccagggcgcatccggggtggatatgggccggaatattttccagtccgaaaacccggtagccatgatgaaagcgatccgtgccgttgtgcatggcggtgagagtgcagcacaggcttatcagctgttcctgagcgaaaagaacaaggggtaa

SEQ ID NO: 274181 - DNA, 300 bp, Morganella morganii
ttgaacgtaacattagtggaaattaatgtgaaacccggcaaagtggacgaatttattgccgttttccgtgaaaatcatctgggatcggtaaaagagcccggtaacctgcgttttgatgtattacaggacccggaagtggaaacccgcttttatatctatgaagcctatgccgatgatgcggctgtggctgcacataagaaaaccccgcactatttacagtgtgtggaaaagctggaagacctgatgaccggcccgcgtaagaaaacagtctttatcgggctgatgccggaagtgaaataa

SEQ ID NO: 274182 - DNA, 858 bp, Morganella morganii
gtgaaaaaactcacagcaacctgctcagttctgcctttggcgctgttttccgctgttttcgccctgccgtcctatgccgcagaaactgactgccagccgatgtctgaacagacgcggctcaatcatatgaggatgatggggctttcttacctgaacggcccggtaaaatcatcctccatggtcaccgacagcgatcagcaggacagcgatgtcaggatattttccgccagtaatgtgacactgtcaccctgcgggcagatcactcactatgatttcacccgcaaaagtatgcaatacggtatgatctttgatttactggtgaccggggcggaaactgctgatgagatcagtatggaataccgcttttctgccgattatgttggtaagaaaaaaacgcgcccgactatcagccggatttttctgctcaaagatgcgcaacaggttatcaccggctaccggacggaaaattttatcgagggtaacagcaccatcatgaccgaaaacggcaccgtggaataccgtgacaacaatatacattcggttctgataaacagtgaaattctcgccaaatcctacaatctgaattttgattatgataaagctgaccggctaacccgtatttacaccacaccaattcctctcagtaactttaatttcacctacaatgagaaaggtggcctggataaagggacagaaagaacggaatccaccggaatcgtaaccggtaatgatattcagtgtacggaatgggatacctatcagaactgcaccgcagggctctggctccggcatattaacggtgaacctgccggtgaagtgccttttcataccacttatgaatattacggcgataagtaa

SEQ ID NO: 274183 - DNA, 615 bp, Morganella morganii
atgatgaaattattccgttatccggttgttaatctcttttttcacctgacagccatattgccactgatatggcttatttatgctgttaattccggggggctgggggcagatcccgcaaaagatattcagcatttcaccggtattacggcacttcgtttagttattattatcgcagtgataccggttatcgctttttattttaagctgaacagtttataccaggtgagaaaattactcggattatggtgttttttctgggcaacgctgcatctggccagctatttttttcttgaaataggtgcagaaaatacggcactcttttttagtgagatactttcccgtttttatcttaatctcggtgtggctggctggttaattttgtgcctgatggcggtcacttcgtctgaccggatacgcaacttatcaggccggtggtggaaacggatccataatctgttgtatccgttgttgtttattgttattacgcattatattttagcagcgaagacagatacaccggaaccggccatttatctggtactggttattctggcatattgtcatcgccggcagcagcgaagcaaaaatcagatgttacccgataaaatcaggtaa

SEQ ID NO: 274184 - DNA, 1005 bp, Morganella morganii
atgaagaaaataatacgatcgtctgagattactccggaatctgtttttatgatgaagcgcaggaatctgcttaaattattaggtgccggtacggccggattaatggtcagcccgtcagtcagcgccggtctgttttcgtggttttccggcgatgataagcccggaattccggagacaatcttaaaagacctcagttatacaaaacctgaaaagtatcagtccgatctggtattaacgccggaggataaggtgacaggttacaataatttttatgaattcggcctgaataaatcggacccggctgaaaacgcacataccctgaaaacggatgaatggacactgacggttgagggagaagttaaccggcctctggtattaaatgccgatgagatccgtcataaatttcaggccgaagagcgtatttaccggatgcgctgtgtggaagcatggtcaatggttattccgtgggttggttttcctctgagagatttattgttatcagcggaaccgaacagcaaagcgaaatatgttgcttttgaaacggtgtacgccccggaacaaatgcccggtcaaaagagccgttttaccggaggcgggcttcagtatccgtatattgaggggttgcgcctggatgaagcacttcaccctctgacactgatggcaaccggtgtttacggaaaagaactgccgaaacaaaatggtgcgcctgtccggctggtggttccgtggaaatatggttttaaaggcataaaatccattgttaaaattcgtctgacagaatctgagccgccgaccacatggaatctttcagcaccccgtgaatatgggttttatgccaatgtaaacccgcaggttgatcatccgcgctggtcacaggccacagaacgttttatcggctccggagggttaggccggacaacacggcagccgacattgctgtttaacggttatgcagaagacgtggcagaactatataaagggatggatctgaggaggtatttctga

SEQ ID NO: 274185 - DNA, 1374 bp, Morganella morganii
atgaaaatacgctcactgagatttaaaattgtatcattatttatgttgctgatggtggcaaacgcaggttttgtcacactgatcctttatcactctctgaaaaatgaacttgcctcaaaagatgatgacattctgattaaccgtgccgaccaactggctaaactgattgtcagtggtattgatattaaatcgctacctgtttatttccggcggatgatggatatgcggcaggatgttattaagatagcagatactgataatcacgttattgtggataccaacccggagataaccctgaatacccgggacaaacttaattatccggataatcaggaaacgcctttaatctcataccagaatacggacgataacatgccggtttccgtggttaattttgagactcaggctcctgaaggtaaattatatgtcactctggcaaagcgttcggttgatcgcagcagtgttttacgcggatatttacagcaaagtctgattgtttccgttattgctattcttctgatggccgtcttcagtatatggcttatccgccggggattgcaggatattacgcatctcagccggatcaccgcgaaaacagatctgcactctctgggacagacggtggatatcagccgcttaccggatgaactgaaaagtttgggtgattcattgaatatcatgcgctcacggctgaaaaatgattttgtccggctgacacaacttgcggatgatttagcgcatgaattaagaacacccattaatgccattaaaattcagaatgaaatcacattacaaaaaacgcgcactgcggatgagtatgaagcgattatcgccagcaatacagaagagctggataaactggcaaaaataatacaaaacattctgtttatcgccagagcagagaataaaaatattaatctgaagcgggaaaccatcgttgtttctgagctggttgaggatatttatgagttactggcattttatgccgatgagagaaatatccggctggttaataaaatatcggatgtgacggtatcagccgacagagtattgctgatgcagattatggttaatgttgtgtcaaatgcggttaaatattcatatgaaaatacggaggttattgcctgtgcaaaaaataatcatggcagcaccgtcatttcagtgatgaacaaaggtgatgttgttgcaaacagtgaacaggtctttacccgcttctggcgcggagataatgcgagaacgtcagaaggaagcgggctgggcttatcgattgttcaggcaataacagaattgcattcaggtgaggtcagatttgaacgtaccgggtcatataacacggtaaccttaatttttccggatactcatcccctttcatga

SEQ ID NO: 274186 - DNA, 669 bp, Morganella morganii
atgaaaatattactgattgaagatcatgaaaagaccggcagctgggttaaaaagggattagaggaagccggatttattgttgatatcacggcagatggcagagacgggttgtatcttgctctggagaacaattaccggctggttattcttgatattatgttgcccggtatggatggctgggaagtgctgagaatattgagaaccgccaaaatggtaccggttatttgtctgacagccagggatgcagttgctgaccgggtaaaaggactggaactgggcgcgaatgattatctggttaaaccgttttcattttccgaattactggcaagagtccggaatcagctgcgtacttctcagccggcttccaaagtgattaatatcgccgatctcagcattgatctgacccgtcatgatgtacagcggggaggcgtgaaaatatcgctgacacgtcaggaatattcactgttgcttttttttgcgctgcattccggagagatcctgcccagaacactgattgcctgtgaggtgtggggaatggattttgagagtgataccaatattgtcgatgtggctgtccggcggctcagaaaaaaaatagatgacgatcatgatcgtaaattaattgaaactgtccgtggtatgggataccgcctgaacggatcggactga

SEQ ID NO: 274187 - DNA, 933 bp, Morganella morganii
atgacgaaaattattatggattgtgacccgggtgtggatgatgctgttgcgattctgctggcactggcttctcctgaaattgagctgctgggggtcacaactgttgccgggaatgttgagctggataaagttcatgaaaatgcccgcaggatccttgcgctggcatcgcgcccggatataccgctggccagaggctgcgggcgtcctctgctgacccgccggggaaacaaaacagccgtgcacggcagtgacggcctggcgggggtggaaataccgcaatccccttaccgttattcagaaaaacatgcggtggattttattattgataccgtgatgtccaaccccggcgaagtcactctgtgcccgacagcaccactgaccaatattgcaatggcgatgctgaaagagccaaggctcagagataatgtgaaagatattgtcctgatggggggcgcggcatttcgccggggaaatatcacaccagccgctgaatttaatttctatgttgacccgcatgcggcacatatcgtttttgacagcgcagcacatatcactatgctggggctggatgtgacccataaggcggatatccgggcgggattatgcggggtactggagcagggaaatgccattgccgttgccgccgcacagatggcgcgcggctatgcggaatcggatccgttcctgcacgatccctgtgtgattgcgtatttagtccgccctgatattttttcaggcaccgacggacacgttgaaattgagtatgagtcacacaagcttttcggcttcagccatgccgttgtgccggatgtgcagaaaggtgctgaaaaccagtgccgtatcgatgaaccacatatcaacaccaccatcatcaccgatgtacaggcggacgtgttaatgtcgctgatagcagaacggattctgtcattataa

SEQ ID NO: 274188 - DNA, 1194 bp, Morganella morganii
atgaagtattttattttcatcatcagccttttcgtgatttttattgcagcggcctcaatcagttttaaggctggtgatatcaaacgaaagtgtgttccgataatcgtattattattgctggaaggagtagtggcttatgcacttctgcatacctctgccgggctggcaatacttcatactgcctccggggggattgaatatcttatctatcatgctaacaaggggatcgattttgtattcggggatatcactgctaaaaaacccgtaatatttgttattgccgcactgatgccgctggtatttatttgtgctgttatcgggatcttaaaatattttggtattctcaggctgattatcatcactatcggctatctgattaataaaatagcgaaagtcggcaaacttgaatctttttctgctgtcagctctgttgcagtaggtatgatggcagtttatgtatcgataaaagaatatatacccaatctgacaaaaccgcagatgtatacgattgcggcatgttctttatcaacagtcgatatcgctatattgggtgcgtatacacaaatgatatcaccacagtttgttattatcggtgtatgcctgaattttttcagtacgtttgttatcgtttctattattaatcccggtgatccggttgagattccggagaacttttccggtgttaacagtgaacgacacagtttcttcgaggttatcaccgaacatatgcaggatggttttaaacttatcctggcgatagttcctattattcttggctttattgcattaatcagtttactgaatgatgtgtttttacacattgcagggataacgtttcagggtattctcgggtatattttttcaccgcttgcttttatattgggtgtgccgtgggaagacagtgtccggttcggacaaattattgccacaaaagtactggctaatgagttcgtggcaatgattgattatataaaaatacaggatatcagtccgagaacagaaacgattatatcggtatttctgatttcatttgcgaacttcggctctgtgggaatgattatcggctgtgtgtccgcgatcagtaaaaaacacggaaaaatgatagccgcaaatacgttccggctggttgccggttcaacgctggtcagttgtctgtctgcaacaatggccggtattttttccgggcagagttaa

SEQ ID NO: 274189 - DNA, 1200 bp, Morganella morganii
atgaagaaaaaaaacagtcttgcatttatcagagagcgattaattaaaaataacgttatttatgtaaaagaactcagtgcactgctgcatgtatccgaaagaacaataagacgctatatcgatgaattacaattatcaggtgtggcagttaaatttcacggcggtgttaaattacagaaaattgaggcaggagatgtaataaaacggacaattaacgaaaccagggcttttaatattgaagatgtaaaaaaaaccagagaaaaaagacacgaagataaatgtttattatacatcctcggatcatttaatctggatgtggtgactgaagttgaacggtttccgtctgtcggagagacaatcagagcaatatcaacgggtttttatcctggaggaaagggggcaaatcaggctgctgctgcatcagaaataaacagccgtgtgcatctttttgttaaggtcggtgatgattcattcggtgccgatgcggaaaaatatttcagtaccaccaaaacaggctcatataccctgattaaggatattagtgtaaaaaccggcagtgcactggtgatggttgaaagtcttacaggaaataatagtattattatcgatcagggggccaatgccacgataacgaaagcagaaatactatcagatattaataatatcaagtctgcgaaggtgtttcttactcagctggagaataatattgatattacccgttttactattgatatagcaaagatgtgcggatgctatgtgattcttaatccggcaccttactcagaaaatattatgtctcatttgtcttcagtagatttattaacacccaacggaacagaagcggagcttatttcagatattaaaatcagtgatcttcattctgcagaacaggctatcagagtaatacaccgcctgggtgtgaaagaaatcgtcatgacactcggtgacaacggagcgctttattttaacggcacaacgatgaagcattacagcgccattaatgcatcagtggtagataccagcggggccggtgatgcttttacgggctcactggcggccgggctggtggaaggcagaagtatggatgaagccattaaatttgcggttgcctatgcatcactggcggttgagaaaaaaggggcatcatccatgccatccgcaaacagcgtcgggatcagactgaaaaaggattgtatgtaa

SEQ ID NO: 274190 - DNA, 333 bp, Morganella morganii
atgttatcgacatttgaatggtggcacggtgcatttttactgctggccgtggtactggagattctggcgaatatcctgctgaaaatgtcaaacggctttaaacgtctgtggctgggtattttatcgctgctggcggtattgggggcgttcagttgtctggcactggcagtccgcggtatcgagctttccgttgcgtatgcattgtggggagcattcggtattgtggcaacagttgccgcaggctggatcctgtttaaccagcgcctcaattataaaggctggagcgggattattctgcttctgctgggtatggtgatgattaagtttgcctga

SEQ ID NO: 274191 - DNA, 390 bp, Morganella morganii
atgatttactggatgtttttaggcttagccattattaccgaggtgatcggtacattgtcgatgaaatacgcgagtgtctccggtgacagtgcggggatgattgtgatgtatatcatgattgcctcttcttatattttattatccatggcagtgaaaaaagtggccctcggggtggcttatgcgctgtgggaagggatcgggatcctgatcatcaccacgtttagtgtgatgtggttccatgaatcgctgtcaccgctgaaactgggcggtctggcactgttaatcgcgggtatcaccctgattaaatacggcaccaaaaaagtgcagaaaaagcagcctgctgccaaaccggttcgtgcgccactgaatgagatgctgaaaggggcgtaa

SEQ ID NO: 274192 - DNA, 1476 bp, Morganella morganii
atggcgctgacagcaacggttcccgcctgtgatttagtcattttcggtaccaaaggcgacctcgcacgccgcaagttactcccgtctttatatcagctggaaaaagccggtaatattcatccggaaacgcggattatcggggcaggccgtgcggactggtcccgtgaggagtatcagaaatttgttgaggatgcgttcaatacgttcctcaacgagcaactggatccggtgctctgggaacgatttagtgcccgtctgctgttttgtaacctcgatgtgaatgagacctctcatttcaaaagtctcgccaatattattgcggaaaacaaaaataccgctgtttactatttcgcgatgccgccgggtacattcagcgccatgtgcaaagggctgggcgaagcgcatctgaataaagagccgagccgtgtggtgatggaaaaaccactgggtaatgatctggcctcatcacaggcgatcaataccgaagtggcgaaatattttaaagagagccagatttaccgcatcgaccattatctcggcaaagaaacggtactgaacctgctggcgctgcgttttgccaattccctgtttgtgaataactgggataaccgtaccatcgaccacgtccagatcacggtggcggaagaggtggggattgaagggcgctggggttactttgataaggccgggcagatgcgggatatggtgcagagtcatctgctgcaaatcctgaccatgattgcgatgtcaccaccggatgacctgaccagtgaccgtatccgtgatgagaaagtaaaagtactgcgctcactgcggaccattgatatcacgaatgtccgtgaaaaaaccgtacgcgggcaatataccgccgggtttgttcacggcgaaaaagtgccgggttatctggatgaagagggtgcgaataccgtcagtcagaccgaaacctttgtcgctatccgtgcggatatcgacgactggcgctggtctggtgtgccgttctatctgcgtaccgggaaacggatgccgtcgaaatgttcggaagtggtggtctatttcaaacagccgtccctgaatatcttcaatgaaacctatcagcatctgccgccgaataaactgactatccgtctgcagccggacgaaggtattgatattgaagtgctgaacaaagcgccggggctggatcataaacaccgtctgcaaaccaccaagctggatctgagtttctcggaaacgttcaaccagacacatattgcggatgcgtatgaacgtctgctgctggaagccatgcgcggtattcaggcactgtttgtccgccgtgatgaagtggaggaagcctggaaatgggtggattcaattatgcacgcctgggcaatggataatgaaccgccaaaaccgtatcaggcaggcagctgggggccgatagcttctatcgccatgatggcccgtgacggtcatgcctggaacgaagtggaatag

SEQ ID NO: 274193 - DNA, 849 bp, Morganella morganii
atgaatattttagaccgtctccgtaacagtctggattacctgagtaaatcggaaaaaaaagttgcagagacgatcctcggtgcaccgcagatagccattcattccagtatcgccacactcgccaaaatggcggatgtcagcgaaccaaccgttaaccggttctgccgccgtctggacaccaaaggttttccggatttcaaactgctgctggcgcaaagcctggcaaacggcaccccgtatgtcagccgcaatgtggatgaaaatgattccgttgaggcatacaccggcaaaatctttgagtctgccatggctggactggacgcagtcagaagcaccctcgatatgctgaccatcaaccgcgccgtggattgcctgacacaagcccggaaaatcgcctttttcggcctgggtgcttctgcggcggtcgcccatgacgcgatgaataaattcttccgtttcaatatcccggtgatttattccgacgatgtggtgatgcagcgcatgagttgtatcaacagcaccgaaggtgatgtggtggttttaatttcccacaccggccggacaaaaaacctggttgaaatcgcccgtatcgcccgtgaaaatgatgccacagtgctcgccatcacctccgagaactcgccgctcgcggcggaagcctctctcaccatcattcttaatgtgccggaagacaccgatatttatatgccgatgatctcccgtctggcacagctgacgattatcgatgtcctcgccaccggttttaccctgcgccgcggccccaaattccgcgataacctgcgccgggtaaaagaagccctgaaagactcccgaatcgataaactccgttga

SEQ ID NO: 274194 - DNA, 1443 bp, Morganella morganii
atgtcaatacgcctcagaagaacgaaaatcgtaacgaccctgggccccgccaccgatcgcgataacaaccttgaaaaaatcatccgtgccggtgccaatgtggttcgtatgaacttttctcacggcagcccggacgatcacgttgaacgtgcgaataaagttcgtgaaatcgctgcccgcctcggcgtgcaggtggctatcctgggtgatctccaggggccgaaaatccgtgtgtccacctttaaagacaataaagttctgctgaatgtcggcgataaatttattctggatgcggaactgggcaaaggcgaaggcaccagtgagcacgtcgggatcgactataaaaaactgccggaagatgtggtgacggatgacattctgttactcgatgatggccgtgtgcagttgaaagtgctggatgtcaaaggcactaaaatcatgaccgaagtgactgtcggtggtttgctttctaataataaaggtatcaacaaactcggcggcgggttatctgctgatgcgctgacagaaaaagataaagaagatatcaaaaccgcagcccgtattaatgttgattaccttgctgtctccttcccgcgcagcgcggaagatctgcactatgcccgccgtctcgcccgtgacgccggttgtgaggcaatgattgtctccaaagtcgaacgcgccgaagcggtcgccactgatcaggtgatggatgaaatcattctcgcatccgatgtggtaatggtcgcacgtggtgacctcggtgttgaaatcggcgatccggagctggtcggcgtccagaaaaagctgattcgtcgcagccgtcaactgaatcgtgtcgtgatcacagcaacccagatgatggaatccatgatcactaacccgatgccgacccgtgcggaagtgatggacgtggcaaacgccgtgcttgatggtaccgatgcagtaatgctctctgcagaaaccgctgctggccagtatccggcggaaaccgtggaagcaatggcgcgggtttgcctgggtgcggagaaaatgccgaatgtgaatatctccaaacaccgtctggatatgaccttcgacaatcctgaagaagcaatcgcgatgtccaccatgtacgcggcaaaccacctcaacggcgtgaaagcgattattgccatgaccgaatccggtcgtaccgcgcgtatgatgtcccgcatcagctccggcctgccgatcttcgccatgtcccgccatgaaaaaaccctgaatcagtgctcactgtaccgtggtgtcaccccggtattctgcagcacccacaccgatggcctggccgcagtcaccgaagctatcagccgcctgaaagaaaaaggctatctgtgcaccggcgacctggtcatggtcacccagggcgaccagatgggcctggtcggcagcaccaataccagccgtattcttgaagtgaagtga

SEQ ID NO: 274195 - DNA, 981 bp, Morganella morganii
gtgtataaagaaaacgatacagacagcaaagcgggctatatcccgacatttcaccgccattacctgcacccgaaatactggggcatgtgggttgcggcaggcgcactggccggtctgagctacctgccggttaaattacgtgacccgatgctggccggtgcgggccggattgccgggcgttttgccaaaggcggacgccgccgggcgttaatcaatctgtattactgtttcccggatatgccgaaagcggagcgggaaaggatcacagatgaaatgtttgccagtgcaccgcacgcctttgtgatgctggcggaattgtgccttcgcaatccgcagcgggtgatttcccgcacgcaggttcacgggcaggacattattgacgcgttacaggcagaagggcgcaatatcatctttatggtgccgcacggctgggcgattgatttaccggcgatgttgtttgccgcgcagggaaataaagtggcgggcatgttccatcaccagaaaaacccggtggcggattacctgtggaataaagcccgggttcacttcggcggacgtctgcactcccgcgaggccggtatcaaaccgttcattgccagtgtgcgtaatggtttcagtggatattatctgccggaccaggatcacggcgaagagcacagtgagtttgtgccgtttttcagcacctataaagccacactccctgctatcgggcggctgatgaaagtgtgcaaagcggcgattgtcccgctgtttccggtgtacgatcataaaaatcaccagttccatattcacgtccgcccgccgatggatgacattgacggtcaggatgacccgtatatcgcccgccgcatgaacgaagaagtggaagccctggtgcggccgaatatcgaacaatacacctggattctgaaactgctgaaaacccgcaaagacggcgaagaagagccgtataaaatctataaacacaaagaattgccctga

SEQ ID NO: 274196 - DNA, 1383 bp, Morganella morganii
gtgcaattgcagcaactggcaaaatccgccgttctggtatacaaccagttacccaaagcgcatcgcatgatgctggggatgttaactgccgcaacactgggtgtcgctgtctggcacccgtttgctgtatatcatgagcggaatgctgataacgaacaatatattgaaactgattttgcgccacctgctgacacctccggcacgcaggcaggaaccggcacggatactgataccaacactgacgatattatcaccgacagcagtgaccaactgccggatgaaggccttgccaaagagtctgatgatatcgacgaagcctccccgactgacaccgttatcccgacatcacttgaatacactgttgccagtggcgacagcctatctgctatcctgacacagtacgggatagattcctctgatgtggctttattatccaatcagtacaaagggttgcgtaacctgcaaatcggccagaccctcgcctgggaactgaatgacgacggcgaactgaaatccctgagctgggcggtgaaccgccgtgaaacccgtacctatgtccgcagcggcaacggattcaaagaaaccaaagagatgcgcgaaggtgaatggcagactaaacgcctgaccggcaaagtcagcggcagcctgaatgccagtgcatcaaaagcgggactgacccgcagcgaagtgcgtgatatttccaaagcgttacagtggcaggtggatgtccgtaaagtgaaaaacggcgatcgcttcactgtactgacctcccgtgaaatgctggacggcaaacaggaacagagccagatgctggcggtgcgtctgcatactaacggacgtgattattatgcattccgcgccgaagacggccgtttttatgatgccaaaggcgacggactggagcgcggtttcctgcgtttcccgaccaccagacaattccgtgtttcctcacactttaacccgcgccgtgtaaacccggtcaccgggcgtgttgccccgcataaaggggtggatttcgcgatgccggtcggcacaccggtgctggcagtcggcgacggggaagtggttgtggcgaaattcagtggtgcggcgggcaactttgtggcaatccgtcacggtcgtcagttcaccacccgttatatgcacatgcgtaaactgctggttaaaccgggccagaaagtcaaacgcggtgataaagtcgggttatccggtaataccgggcgctctaccggtccgcatctgcactttgaagtctggaacggacaacaggcggtgaacccgctgacagcaaaactgccgcgttccggcgggctgaccggcaaagaccgtaccggctatctggcactggtcaaacagtaccggccacagctgacacttgattaa

SEQ ID NO: 274197 - DNA, 915 bp, Morganella morganii
atgcagcaccagtcacggcacggaataaaaacagcgtttattgccacatttttgagtctgaccgcacaaaccgccagcgcagatgtgttaacatcagtacgtcctgtcgggttaatcgccgctgcggttgcagatggcgtcacggacacacagattttactgccggatggtgcttcgccgcatgattatgcactcaaaccgtctgatctgaaaaaaatccgttcagcggatttggtcgtctgggtcgggccggagctggaaaccttcctgcaaaagccgctttcagctgttccggagcaaaaacagatcgttatcagcgaacttgagtctgttaaaccttttctgctgaaaaatgatgaagatgatgaccatgatgaggacgggcatcaccaccacggtgagtacaatatgcacctgtggatgtcgccggatattgcccggcagaccgctcaggcagtgtataataaacttctggtgagttatccggataaaaaatctgtgctggacgtaaacctgcgtaaattcaatggacaacttactgaaactgagaagaatattgctcagcagctggcaccggtaaaaacacgcgggtattttgtttttcatgacgcctatggttattttgaaaaacgttttgacctttcgccttccgggcattttacggtcaaccctgaaattcagccgggtgcgcagacactcaataacatcaaattaaagctggctgagcaaaacgccttgtgtgtgtttgctgagccgcagttcaggccggcagtcattaaagcggtggccaaagggacgaacgcgaagatgggcgtccttgacccgctgggcagcggaattgcagtggatcgggacggttataccaacttcctgtcacggttatcagcacagtacgcatcctgcctggagcaataa

SEQ ID NO: 274198 - DNA, 810 bp, Morganella morganii
atgtcaacacttatcgcggtaaatgatgtttctgtcgcttttggtgccaatacggtactcgaggacatttcatttacattatcccccgggaaaatcatcacccttctcgggccgaacggcgcggggaaatcgaccattgtccgcgtggtactcggccttaccgaaccgacgtccggcaccgtcacccgcacaccgggtctgactgtcggctatgttccgcaaaaactctatctcgacccgacaatgccgctgacggtggcccgttttctgcgtctgaagcgcggtgtcagcaagggcgagtgtctcgcggcactggagcgcgtcaatgccgcacatctgaccggaaaaccgatgcaacggctttccggcggggagatgcagcgggtgctgctggcccgtgccctgctcgcccggccgcagctgctggtgctggatgagccgactcagggtgtggatgtcaacggccaggttgcgctgtatgacctgattacccggctgcgcgatgaactgaactgcgcggtactgatggtttctcacgacctgcatctggtaatggcaaaaaccgatactgtgctgtgtatcaaccggcatatctgctgctccggcgagccggatgtggtggccgcccatcctgagtttaccgccatgttcggtacccgggccgccacacagatcggcgtgtaccgtcatcatcataatcacagccatgaaaacggcagtgcagtgttatccccttctgccccctgctgcgggaatcacgccccggcagatgcctctgtaaaatccgccccggagtgccgccatgattga

SEQ ID NO: 274199 - DNA, 786 bp, Morganella morganii
atgattgaattattgttaccgggctggctcgccggaattttactggcgatcgcggccggtccgctcggctcctttgtggtctggcggcggatgtcctatttcggagatacgctggcgcatgcttcactgctcggggtcgcctttggcctgctgctgaatgtcagtccgttttatgccgtgattgccgtgacactgattctggctatgctgctggtctggcttgaacgccgtccgcaactggcggtagatactctgctgggtattatggcgcacagtgcgctgtctctcggtctggtggtggtcagtctgatgtcgaatgtgcgggtggatctgatggcgtatctgttcggtgacctgctctcagtgacctatgaagatttgctgccgattgccgtgggtgtgactatcgtgaccggcttgctgatgtggcagtggcgtaatctgctctctctgaccatcagcccggaactggcgtttgttgacggtatcaatccgggcagactgcggatgatgctgatgctggtcaccgcactgaccatcggccttgccatgaaatttgtcggagcgctgattatcacctctctgctgattattcctgccgccgctgcccgccgttttgcgcggacaccggaacagatggctgcgggtgctgttgtcaccgggatgatttccatcaccggcggattaaccttctccgctttttatgacactccggcgggtccgtctgttgtgctgtgcgccgcctgctgctttattctcagcctgctggtaaaaccacgcaattaa

SEQ ID NO: 274200 - DNA, 753 bp, Morganella morganii
atgcgtgttcattttatcattcatgactattttgaagcaccgggcgcttacgaatattgggcaaggaagaacaattacgatgtcacgttcacccgtctgtatgaaggtgacaagttacctgacagcatcagcggaattgatttcctgattgtgatgggcgggccgcaaaacccggaaaccaccacggcgcaatgcccttattttgattccaaaaaagagcaggcgtttatcgccgatgccatcaattcaaataaagttgtcatcggggtctgcctcggggcacagcttatcggtgaagcattaggcgcgccgtatacacaaagtccggagaaagagttcggcaaattcaccattcatatgaccaacgccggaaaacgcagccggctgttttctcatttcggcgattcgctgggtgtgggccactggcattacgatatgccgggattaaccgaaggtgcgcagattatcgctttcagcgccggttgtccgcgtcagattattgaatacaccaaacgcgtttacggcttccagtgccatatggaactgacccgcgatgtggtggaatacctgatcctcaacggcgaaaatgatctgaaatctgccgccggattccgttttgttgatacaccaggtgctatccgcagacacagctacagtgaaatgaatgaaaaactgatcacatttctcgacaagctggtgctgagtgtgaatccggtgaaaccgaaagtgcggacaaaatcagaaacagcgtaa

SEQ ID NO: 274201 - DNA, 1011 bp, Morganella morganii
atgattgaagctgacagactgattacggcggaaacgctgccggatgatgaggtggtggatcgcgctatccggccgaaattactggcggaatatgtgggtcagccgcaggtctgttcacagatggaaatctttatcgaggctgcccgtcagcgcggggatgcacttgaccatctgctgattttcggcccgccggggctcgggaaaaccacactggcgaatattgtcgccaatgaaatgggtgttaatctgcgcactacctccgggccggtgctggaaaaagccggtgatctggcggccatgctgaccaacctcgaaccccacgatgtgctgtttatcgatgaaatccaccgcctttctccggtagtggaagaaattctctatccggcgatggaagattaccaactggatatcatgatcggggaagggccggctgcccgttccattaaaatcgacctgccgccgtttaccctgatcggtgccaccacccgtgcaggctctctgacatcaccgctgcgggaccgtttcgggatcgtacagcggctggaattttataatacggacgacttgcagcatattgtcagccgcagtgcccgctatatggggctggatatctcggatgacggtgcccggcagattgccatgcgctcacgcggcacaccacgtatcaccaaccgtttgctgcgccgtgtgcgggattttgcccaggtgaaaggtgacggcggtattgacgggctgattgccggtcaggctctggatatgctgaatgtggattccgccgggtttgattacctggatcgtaagttgctggtcaccattattgataaatttatgggcggcccggtcgggctggataacctggctgccgccatcggcgaagagcgggaaaccattgaggatgttatcgagcctttcttaatccagcagggctttattcagcggacaccgcgcggacgccttgctaccgcacatgcctatcgtcactttggtattgatcacagcggaaacgattaa

SEQ ID NO: 274202 - DNA, 615 bp, Morganella morganii
gtgatcggtcgcttaagaggtattgtgctggaaaaacagccgcctgtcgtattactggaaaccaatggtgtgggctatgaagttcatatgccgatgacctgtttctatgaattgccggatgccggtcaggaagccattctgttcacccagtttattgtgcgggaagatgcacagttactgtacggctttaatgataagcaggaacgcgcactgttccgtgaattaatcaaagtgaacggtgtcgggccgaaactggcactggcgatcctttcaggtatgtctgcgcagcagtttgtggcggcgattgagcagggtgcagtggcacagctaatcaaactgccgggcgtgggcaagaaaactgccgagcgtctggtcgtggaaatgaaagaccgcttcaaagggcttaacggcgacctgttccgtgatgcggaaatgtcgctcccggccagtcagcagtcgggtaacagccaggctgatgcggaatctgaagccattgaggcactgatttccctgggctataaaccgcaggaagccagccgcatgatagcgaaagtctccaaagccggttcagacagcgaaacactgatccgcgaagcactgcgcgccgcgctgtaa

SEQ ID NO: 274203 - DNA, 525 bp, Morganella morganii
atggcaattattctcggtattgaccccggctcgcgggtgaccggatatggtgttatccgccagcagggacggcgtttgctgtatatcggcagcggctgtatccgtacacaggtggatgatctcccgtcccgtctgggcaaaatttacgccggtgtcagtgaaatcatcacccagtatcagccggattgttttgctatcgaacaggtctttatggccaaaaatgctgattctgccctgaagctgggacaggcccgtggggtggcgattctggcagcggtgaataataatctgccggtatttgaatacgcggcgcgccaggtgaaacaaacggtcaccggtaccggggcggcggaaaaagcccaggtacagcatatggtgcgctcgatactgaaactctcggcggcaccgcaggcagatgcggcggatgcgctggcgattgctatcactcactgtcactttaaccagaatctggtgcagatggggcaaccacgcttggtgatggcacgcggacggctgaaagagtaa

SEQ ID NO: 274204 - DNA, 744 bp, Morganella morganii
atggcaggtcatagtaaatgggccaacaccaaacaccgcaaggccgcgcaagatgcgaagcgcggtaaaattttcacgaaaatcattcgtgaattagtcacggcgtcgcgcattggtggtcctgatcctgcatctaacccacgtctgcgtgcggcagtggataaagcgttagcaaacaacatgacccgcgataccctgaaccgtgcgattgcacgcggggcgggtaatgatgaaaacgataacatggaatccatcgtatacgaaggttacggcccgggcggtactgctgtgatggtggaatgtctgacggataaccgtaaacgtacggtttctgatgtgcgccacgcgttcaccaaaaccggcggcaatctgggaaccgatggctccgtcgcttatctgtttacccgcaaaggtatcatttcctatgcaccgggtctggatgaggatgcggtgatggatgcggcgctcgaagccggtgctgaagacgttgaaacctttgacgacggcgctatcgacgtttacaccgcctgggaaattctgggtgatgtcaaagacgcgatggatgcagccggtttcaaagctgaatctgccgaagtatcgatgatcccgtccaccaaagcggatctggatgcggaaaccgcaccaaaactgatgcgccttatcgatatgctggaagactctgacgatgtgcaggaagtctaccacaacggcgatatctcagacgaagttgcagcgctgctgtaa

SEQ ID NO: 274205 - DNA, 453 bp, Morganella morganii
atggcttttaaacgccctgaatctgtgctggtggttatctgtgagcaggaaacggggcgtgttctgatgttacagcgccgtgacgatcctgctttctggcagtccgtcaccggcagtctggaaccgggagaaactccccgcgatgccgcattgcgggaagtaaaagaagaaaccggtattgatatccttgcggagggactgcggctgacggattgtcagcgcaccgtccgctataccatttttccgcatttccgtcaccggtatgcaccggacgtgacgcacaatacggaacactggtttgtgttatgcttacccgcgctgaaagcggttcccttaacggagcatctggcgtatgagtggttaccggcagcggatgccgccgcgaaaactatctcacccagtaacggggaagcaattgaagaattcgttcgtcagtgtgttcttccgcagtga

SEQ ID NO: 274206 - DNA, 1770 bp, Morganella morganii
atgcgtactaattattgtgggcagctcaacagtgctcacatcgatcaaaaagtaacccttagtggttgggtaaaccgtcgtcgtgatctcgggggtttgatttttatcgatatgcgtgaccgtgaaggcatcgttcaggttttcttcgatcccgaccaaaaagaagcatttgccaaagcctctgaattacggaatgaattctgtattcagattaccggaactgtccgcgcgcgacctgaaaatcaaattaataaagagatggcgaccggcagtgtggaagtgcatgcagatggcctgaccatttttaaccgctccgagccgttaccgcttgacagcaaccacgaaaacaccgaagagatgcgtctgaaataccgctatcttgacctgcgccgcagcgaaatggcgaaccgcctgaaaacccgcgcacgcatcaccgggtttgtccgccgctttatggataccgaagggttcctcgatatcgaaaccccgatgctgaccaaagccacaccggaaggtgcccgtgactacctggtgccgagccgtgtccacaaaggcaaattctacgcactgccgcagtctccgcagctgttcaaacagcttctgatgatgtccggttttgaccgttactatcagattgtcaaatgtttccgtgatgaagatttacgtgctgaccgtcagccggaattcactcagatcgatgtggaaacctctttcatgactgcggaccaggtccgtgcgaccatggagcgtatgatccgctcactgtggaatgaaatcatcaatgttgaactgggtgatttcccggtgatgacatttgcggaagcaatgcgccgcttcggttctgataaaccggatttacgtaacccgctggaactgacagatatcgccgacctggtgaaagattctgagttctctgtatttgctgatgcggcaaatgatccgaaaggccgtgttgtggcactgtgtgtcaccggcggcgcggaaatgacccgtaaacagattgatgaatacggcaaatttgtcggcatctacggcgcgaaaggcctggcatggatgaaagtgaacgaccgctctgccggtattgagggtgttcagtctcctgtcgccaaattcctgaccgcagaaaccgttgaagccattctggagcgcactgacgcacagaccggcgacattattttcttcggcgcgggcgcgaaaggcaccgtaaccgatgcaatgggcgcgctgcgtctgaaaaccggccgtgacctgaacctgaccgacctgaacagctggcgtccgctgtgggtgatcgacttcccgatgtttgaagacgacggtgaaggtggtctgaccgcgatgcaccatccgttcacctctccgcgtgatatgtcaccggaagagctgaaaaacgcgccggaagacgcgatcgcaaatgcctacgatatggttatcaacggctacgaagtgggcggcggctctgtccgtatccaccgtaatgaaatgcagcagacagtattcggcatcctcgggatcaccccggaagaacagcgccgcaaattcggcttcctgctcgatgcgttacaatacggcacaccacctcatgcgggtctggcctttggtcttgaccgtctggtgatgctgctgaccggtaccgaaaacatccgtgacgttatagcgttcccgaaaaccacggctgccgcctgtctgatgacagatgcaccgagcttcgcgaatgacgatgctctgaaagagctggcgattgcagtaactcagaaagagagtgactga

SEQ ID NO: 274207 - DNA, 399 bp, Morganella morganii
atggttagttccctttatattgtactgggtgcgctgttaatcattaaactgtcactcgatgtgattaaactgcggacactttaccgcgtcgcttatggtgacggcggattttacgagttacagacggcgattcgtgtgcagggcaatgcggttgagtatatccccgttgcactcctgctgttactggtgatggagcagaacggcgcccaggtgtggatggtccatgtctgcggggttattctgattgccggccggctgtttcactcttacggattaaaacaccgcgagaaccgctggcggcgtaccgggatggcggccactttcaccgccatgatcctgatggtgctggcgaatatctggtatctgccgtggcagcagattttttcaccgtacatgtaa

SEQ ID NO: 274208 - DNA, 765 bp, Morganella morganii
atgtccaaagaaattccgaatccgccgcaggatactctgttcgcggcaccgattgcccgtcttggtgactggacgtttgatgagaaagtcgcggatgtgtttcccgatatgatcaaacgctcaattccgggctactccaatattattgccatgattggcatgctggccggccgttttgtcacgcccggcagtcaggtttatgatctcggctgttcccgtgccgccgccaccctgtccatccgcccgaatatcgcggataaacccggctgccggatcatcgcggtggataattccgcgccaatggtggaacacgcccgccgccatgtggaaagttataaatccccggtaccggttgaagtcaccgaaggcgatatccgccatattgcgattgagaatgcctcgatggtggttctcaattttaccctgcaatttctggcaccggatgaccgcaccgcactgctgaaaaaaatctatcagggcctgctgccgggcggcgtgctggtgttatcggaaaaattcagttttgaggatgagcagatcggcgatttgctgttcagcatgcaccacgatttcaaacgcgccaacggctacagcgagctggaaatcagccagaaacgcaccatgctggaagatgtcatgctgaccgacagtgtggaaacccacaaatcacggctgaaagcggtcggttttgaacattgcgaagtctggttccagtgctttaacttcgggtcattactggcagtgaaagagaataaccatgattga

SEQ ID NO: 274209 - DNA, 975 bp, Morganella morganii
atgattgatttcggcaatttttatcagttaattgcaaaaaatgagcgtctgagtcactggctggaaacactgcccgcgcagattgcgaaatggaataaagagtccctgcacggctactatccgggctgggtaaaaaccattgaaaatctgccggacatgaccccggacattctcgatctgaaaaccggggttaccgcacagcgcacacaaccgctgacggacggggaaacccgccgtatcaataacattctgcgcaacctgatgccgtggcgtaaaggcccgttctctctctatggcgtggagattgataccgaatggcgctccgatctgaagtgggatcgcgttctgccgcatctgtccccgcttgccgggcgcaccattctggatgtcggctgcggcagcggttatcacatgtggcgcatggcaggtgaaggcgcagaactggtagtcggtgtcgatccgacccagcttttcctctgccagtttgaagccgtacgcaagctgctcggcaatgaccagcgcgtgcacctgctgccgctgggtattcaggaactgcctgcacttcaggcttttgataccgtgttctccatgggtgtgctttatcaccgccgctccccgctcgaccacctctggcagctgaaagatcagttggtctccggcggcgaactggtactggaaagtattgttgttgagggtgatgaacatcagtgcctgatccccggcgaacgctacgcgcagatgagtaacatttactttattccgtcagccaaaatgctggcagtctggctggaaaaatgcggattcaccaatatccggatcgcagatgaatctgttaccaccacagatgagcagcgccgtacggagtggatgatcaatgaatctctcgcggatttcctcaatcctgacgacccgtcactgacagttgaaggctatccggcaccgcgccgtgcggtgctgatcgccgaaaaaccatag

SEQ ID NO: 274210 - DNA, 2187 bp, Morganella morganii
atgaaatatcgcctgtccgcactgtatcttccgcttctgttgtctgcctctgcggcttctgccgctgtgttaacggataataatcatcaggtttttatcgacccggaaacactgcgcatagcagtggcggataccactgtcagccggggaacagaaaaacagccgatcagtgatttaacagaatatccccgccgtgtcagctggttctggccggacagggatatgaatgtcaccgctgtcctgaatggtaccgacctgaccctgacattcaccaccaatcagccgcagaattttcagtggttcaccctgccggataacaccgtttccgccctctatatgccgctgggcgaaggtcgtcatattccgctgaataatgaacagtggcgtcactatatggtcactgaacaggacaatatcgataccaatcaggatttgcagttaccgctctggagtcagcagcagggtcgggtctacagctgggtattactcagtccgttccataaccgtctgcactttgaggagaaacagcagcgcctgcagatgagcgcggtacatcagtttaaccgctttaatcagcagcagccgtttaccgttcttctgcacaccggtgataccccgctggacggcgcactgcgctaccgccgctggttacaggataataagcagttcacatcactggaagaaaaattcgcacagattccggacggcaaaaaactgatcggtgccacccatatctatttatggggaaaaagtatcatagatcagcaggatatcaccgactggccggggctggtgcgttatctgcaatcccctgccggtaacggattatggcaggcaatggagcctcagagccgtgatgcttttgctgctctgaacggcaaaacgccggaaaaatggcaacagccgtttctggccgatgctctcaaccaggcgctgaagaaagtcacaccactgagccgcaccccggatgacagtgactttatggctgcacagcaaacacaggcacaggcgatccgttctgccgtaaaacagcagctgagcccgttcctggcaccggaagccaattggggtcaggggttatcgcttcctcttttaaccgaactgaccggggcaaaactggataaactctggctgagcaccgataactggacagccacctggtaccagccgcaggcggtcagctacgccaaagagcacggttatcttatcgccagctatgattcctacgacaccgccattccggcaggcaaaaatacggaatggctgacggcacagatcccgtcagaattacgcaaaaaatgcgcgattgtgaccggaacaggcagaaaactgccgggatttggcggggatggttattacctgaatccgggctgcatgcaggatttttcagaaaaacgcatgactgaactggtacagctgaccggcatcaacagtctgtttcttgacgtggacggcaccggcatggtgtctgatgattataatccggcatcaccaacaagtgcggatgctatggcggcagcgagaaacaagcgcttacgttcggtagcggaaaacatccgtatcccgctgggttcggaagacggtaatgccgtgaccgcgcaatatctgatgtttgcccacggtaccgaaacccgcggcttcggctggagtgatgcggatattcaccgcaacaaacagtccccttactatctgggagcctggtggccggaaaatgaactggcgatcttttttaaaccggggaaactgaaagatatctacctgaccacggaatttgatccgcgctggcggctgccgctgtatcaggctgtatttcatgatgcggtgatcaccactcatcactggacgctggataatctgaaattcccggaagctgccaccacacgggaactgctgagccagttgtataacacaccgccgctctataacctcagccgtaatacggtacagaagcgtcttccggtgatgataaagtcggacagtattttccgcccgctgcatcagcagttatggaataaagccctgaccggcttccgctggctggacagtgacggcctggtacaacagacacagttcagtgacggctctgtcatcgccgtaaattttgctgaccatgccattgccggttatccgccgcgctcactccgtgcacaaccggcagaaggaaagcccgttaacgctgctttctga

SEQ ID NO: 274211 - DNA, 753 bp, Morganella morganii
atggcgaaactggaaatttgttgttacagcgtggaatgtgccctcactgcggaaaaagccggcgctgaccggattgaactgtgtgccgcgccgtcagagggcgggctgaccccgagctggggcatgctgaaacagactatcgaccggctgcggatcccggttcacccgatcctccgtccgcgcagcggtgacttttgctatacagcctcggaatttgcggtcatgaagaatgatatcgccaaaatccgcgacctgggttttcccggggtggtcaccggtattctggatgaggacgggcatgttgatctgccgcggatgaagatgctgtgtaaactgtcgggcgacatggcggtcactttccacagagcctttgatatgtgtgcgaatccgatgctggcattacagcagctgaccgacctggatgtgagccgtattctgacatccggccagcagctgagtgcggagctggggctgccgctgctcaaagagttacaggaagccagcagagggccggtgattatggccggtgccggtgtgcggctggcgaatattcagaagttcctcgatatcggtcttcaggaagtgcacagctcagcatccaaaaccaagccgtccaccatgcgctaccgcaaagtcggagtggcgatgggcagtgacagtgaagccgatgagttttcccatacctgtgtggacggggacaccgtcgaggcgatgaaaggggttctggatctgcacagtatggtcgtgcactga

SEQ ID NO: 274212 - DNA, 555 bp, Morganella morganii
atggaaaacagagtacagacagcatcccttgccggtctgatggcagagctgccggtgtttgccggaaaaatacagcagtttgcggcggatttgcagcttgatctcacgcactatcaggcagatcacatctcactgcgggctcacgatacggcactggcggaacagtggctggccggattccgcgaatgcggcaccgtgttatcggataatcagattaacggccgcccgatttatctgtttttactgcatgagccgctgacactgctgcactggcagattccggtggtggaactgccgttcccgaaaggtaaacagtatgcacaccagggctgggaacatatcgaactggtgttaccgggtgacccgcagaccctgacagagcgggctgccgcattgctgccgtcgccgttaccggccggggtagtgacaaaagccagccatccgcgcggcgaacaggagcggttgctgaacccgacactggctgtcagccgggaaaatatcaccatcaagtttcatccgtttacattgcaggagattgtcgaaagtgagcggtaa

SEQ ID NO: 274213 - DNA, 1731 bp, Morganella morganii
gtgaatattcaggcaattctttcagataagatccaacaggctcttatcagcgcaggggcaccacttgattgtgatgctatcgttaagcagtccgccaaagcgcagtttggtgattaccaggccaatggtgtgatggctgccgcgaaaaaaatgggtatgccgccccgacagctcgctgagaaagtgattgaactgctggatcttgacggaattgcggaaaaaacggaaatcgccggtcccggttttatcaatattttcctctcccctgactggctgaccgctcagctggaaaccgcgctggctgacgacaaactgggcctgaccccggttgagccgatgaccatcgccatcgactattccgccccgaacgtggccaaacagatgcacgtcggccatctgcgctccaccatcatcggtgatgcggcagcacgtacccaggaatatctgggccataaagtgatccgctgtaaccacgtcggtgactggggaacacagttcggcatgcttatcgcatatcttgaaaaaatgcagaatgaagatgccggggatatggcactggccgacctggaagccttctaccgcgaagcgaaaaagcattacgatgaagacgaagtatttgctgagcgcgcacgcggctatgtggtcaaattacagggtggtgatgaatactgccgtaccatgtggcgtaagctggtggatatcaccatgcagcagaaccaggaaacctataaccgtctgaatgtcaccctgaccgaagatgatgtcatgggtgaaagcctgtacaacgacatgctgccgggcattgtcagtgatctgctgaaccgcggtatcgccgaagagagcgaaggcgcgattgtcgtctatcttgatgaattcaaaaacaaagaaggtgagccgatgggggttattatccgcaagaaagatggcggatatctctacaccaccaccgatatcgcctgtgcgaaataccgtcatgacgtactgcatgccgaccgcgttctttattacattgattcccgtcagcaccagcatctgatgcaggcatggacgattgtccgcaaagccggttatatcccggagagcatgacactggaacaccacatgttcggtatgatgctcggcaaagacggaaaaccgttcaaaacccgcgcaggcggcactatccgcctgtccgatctgctggatgaagccgttgaacgcgcggagaaactgatccgcgagaaaaacagcgatatgccggaagatgagctgaaacagctggcggaagtcgtcggtatcggcgcagtgaaatacgcggatctgtcaaaaagccgtaccaccgactatatcttcgactgggacaacatgctggcctttgaaggtaacaccgcaccgtatatgcagtatgcctatacccgtgtggcatccgtcttcaaacgtgcggatattgatgcggacagcctgacacaacctattatcctgactgacgaccgcgaacgccagctggcagcacgtctgttacagtttgaagaaaccattactgctgttgcccgtgaaggtctgccgcatatgatgtgcagctacctgtacgacctggcgggtctgttctccggtttctacgagcattgcccgattctggcagcggaaagcgaagaactgcgccagagccgtctgaaactggcacttctgacacagaaaaccctgaaagccggtctggataccctgggtatcggtactgtcgagaaaatgtaa

SEQ ID NO: 274214 - DNA, 876 bp, Morganella morganii
atgctgcaccaacacactgtttctgatactgaactgaacctggataatagcgggtatgcgtcaattgacgcgtttatcacaccgccgtatacccggcaggttatcagtgcctataacaatcagctcacggaatatccggctgcactgcgtcactgtacgtcattgcgcgtactgaacctttcctgtaatcagatggcttatattccgccggatattgcacagctgactgcctgtgaaatgctggatttggggcataaccgtatcgcggatgttgcgccggaaatcggtgaactgcatcagctgcactatctttatctcagtgagaacggatacagcagattgccgtcgtcattttccgggctgaaaaacctgcgttattttaatgcaacggataatcacctgacggtgataccggcatggttttctgaaatggaaaagatggaagaaatccgcctttataataaccggataacggaactgtcttctgctgtcagcgggctgaaaaatacccgcgaaatgcatctgatgaataataaaataaccactgttccggatgagattgcggcggtgacagcgctggagattcttgatctgaataataaccgggtggcgtttatttcaccggaaataagccggttaaagcagctcaatacactgagtctgcgtttcaattccctgaaaaccctgccggaaaataccggtgaattatcatccctgttatatctggatttacgtgcgaatcagctgagtacactgccggacagtctggcagcattaacacagctgcgcaaactggatctgcgctggaataatttttccgtcattccgccggtggcagaaaaattacaggcagcagggtgccgggtattgctgtaa

SEQ ID NO: 274215 - DNA, 705 bp, Morganella morganii
atgacagagaacaaaatctgtttttctgatgtgaaaatggccggtaatatggaaataatcactgctgcggataaatccgtatatggttttaccggtgataatgatgctgataacagtgaattattaaccgcactatttcagctgcgttatttttccaacagtattatttatcatcagcaacgtgaaaatgatattcacctgatattccggcattgcacagaatacacaccagctgtccggacattgctcactgataattatattgttcctgccggtgatattgctgatcgtttccggtcgtttgttcataaccatccggtggtgtttcttgacccgccggtaaccactgcggatatccggacggatgtcactctgccgttattagtgcggaccgggaatatatccggtcaggcattttcatccatgatggtattaattcagcgtattatcaccggatacggtgaatttaccaccacggaaaaaccggaagagattaatggtatcgtgtatatcactatgccggaagatcatctgaatgtattgtggcatgaacattgtgtttcactgctgaaagctgcctttccgcagacagttttttatcttgcaacacagtctccggtaatattgtcacaactgaatgacggtgaggcataccgtttattccgggacaacgatgatattatccgtacacagaaataccgctga

SEQ ID NO: 274216 - DNA, 1536 bp, Morganella morganii
atgaatttattgaaatctctcgccgccgtcagctcgatgacgatgttctcgcgtgtactcggctttatccgtgatgccattatcgcccggattttcggggcatcgatggctgccgatgccttctttgtcgcctttaaactgccgaatctgctgcggcgtatttttgccgaaggggcattttcccaggcctttgtgccgattttatcggaatataaaactcagcagggcgaggaagcgacccgcacctttatcgcttatgtttccgggatgctgacactgattctggcggtggtcaccgtgctcgggatgctggctgcgccgtggattatctatgtcactgcaccggggtttaccggtgacccggataaattcacgctgaccgccaatctgctgaaagtcacctttccgtatatctttctgatctccatcgcttcactggcgggggggatcctcaatacctggaaccgtttttccgtcccggcgtttgcaccgaccctgctgaatgtcagtatgatcggttttgcactgtttgccgccccgtattttgatccgccgattatggcgctggcgtgggctgtgctggcagggggggtattacagattgcctatcagctgccgcacctgaaaaaaatcggcatgctggtgctgccgagagtttctttccgtaacagcggggtctggcgggtaatgaaactgatggggccggcgatcctcggggtatcggtcagccagatttcactgattatcaacaccatttttgcctcattcctggtgtccggctcggtctcctggatgtattacgctgaccgtctgatggaactgccgtccggtgtgctcggggtggcactggggacgattctgctgccgtcgctggcaaaaagcttctccaaaggggataccacagaataccgcaaactgatggactggggattgcgtctctgtttcctgctggctctgccgtgtgcggtggcgctcgcgattctggcggaagcactgacggtcagcctgttccagtacaaaaatttcaccgcctttgatgccctgatgacacaacaggcactgattgcctactgcgtcggtctgatggggatgattgtgattaaagtactggcaccgggattctattcccgccagaacatcaaaacaccggtgaaaatcgcgattgccacgctgatcctgacacagctgatgaacctggcctttatcgggccgtttaaacatgccggtctggcgctgtcgattggtattgcggcctgtttcaacgcctcgctgctttactggcaactgcgtaaacagaatatcttcacaccgctgccgggctggggaaaattcttcctcaaactggtgatcgcaatgctgtttatggccgcggtactggtgggtatgatgtatctgatgccggaatggtcacagggcaatatgctgatgcgcatgctgcgcctgatgggtgtggtgattgccggtgccggtgcctattttgctgcactgtatgcgcttggtttccgcctgcgggactttgcacagcgcagcttataa

SEQ ID NO: 274217 - DNA, 588 bp, Morganella morganii
atgttgttcggctaccgcgcgaatacgccgcagctgcgttttaacacggacagaatggtggtccggctggcgcacgagcgggacgcgtaccgcatcagtgaatattactgtgaaaacgaagcatttctgaaaccctgggagcctctccgcgatcgcagccactatcatccttccggctggtcatcccgcttacagctgatgacggatatgcaccgtcagggcaccgctttccattttctgctgctggatcaggctgaaaatgaggtgatgggggtggcgaactacagtaatgtcatccgcggcgtgttttacgcctgttttctcggctattcactgggagaaaaatggcaggggcagcattatatgcaggaagccctggagccgacactgcgctatatgcagcgtcagcagggcatgcaccgcattatggcaaactatatgccgcataatcagcgcagcggacaactccttgcccggctcgggtttgaaaaagagggctacgcaaaagattatctgatgattaacggccggtggcgtgaccatgttctgaccgcactgaccaccccggactgggttaagccacgataa

SEQ ID NO: 274218 - DNA, 1200 bp, Morganella morganii
atgtcacttgtcagacaagcccggatgctgggtaagtactggttgctggtggataacctgctggttgttctcggcttctttgtggtcttcccgctgatctccatccgttttgttgaacaactcggctgggcggggattgtggtcgggtttgctctggggctgcgccagcttgtccagcaggggctgggaatattcggcggtgcgattgctgaccgcttcggcgccaagccgatgatcgtcatcggtatgtttctccgtgccggcggttttgccctgatggccatggcggatgagccgtggatcctctggctctcctgtattctctcggctgtcggcggcacgctgtttgacccgccgcgcactgcactggtgatcaaactgacccgcccgtatgaacgtggccgtttctattccctgctgctgatgcaggacagcgcaggggcggtactcggggcactgctcggcagctggctgcttatctatgactttcatctggtctgctgggtgggcgcggcaatctttattatcaccgccttgtgtaatgcctggctgctgcccgcttaccgcatttccaccacccgcaccccggtcaaagaggggctgacccgcgtactgagtgacaaacgcttctcccgctatgtgctgacactgaccggttatttcattctctccgtgcaggtgatgctgatgttcccgatcatcgtcaacgaactggcgggcacaccggcggcggtgaaatggatgtatgccattgaggccgcgttatcactgactctgctctatccgctggcccgctggagtgaaaaacacttccggctggaaacccgcctgatggccggattgttcctgatgagcctgagtatgttcccggtcgcactgactcattcactgcatgtattgttcgcgattatctgtttgttctatttaggttcggtgattgccgaaccggcgcgggaaactctcagcgcgtcactggcggatccgcgcgcacgcggcagttacatgggcttcagccgcctggggctggcattcggcggtgccatcggttataccggcggcggctggctgtatgatctgggtaaagaaatgcaattacctgaacttccctggtttttactcggtacaatcgggctgattacgctgatagcactttaccgccagtttaacccgaagaagataagccctgccgtattaaattga

SEQ ID NO: 274219 - DNA, 558 bp, Morganella morganii
atgagattattcctttttaccgcggcactggtcgcagcaacggttttaaccggctgcgataaattaaccgaaatcagtgtcagtgaagagaccattaacagtgcggtggcagagaatatccatctgaataaacagattggtatggatggtgtggcagatgcggattttaccctggaaaaactgctcactgaaattggccgtgaagagccgggcaaagtaaaactgacagcaatcggctcgctgaagctggtttcgctgttcggttcacgggatttcaccatctcgatgtccctcagcgccgcaccgtattttgatgcctccagcgggtcaatctatatgcgggatgttgaaattaccaattacacgctggatccggacaaatgggataccctgatttccgcgctgatcccttatctcaaccatacactgagcacctttttcaatatcaccccggtgtatgtgctgaatggcgataataccgccgaagcggctgcgaagaagtttgccaagggcattgaaatccgtccgggccggatcgttatcccgctaaccgaataa

SEQ ID NO: 274220 - DNA, 1314 bp, Morganella morganii
atgctgacactgattggactgctgatcatcatttctattgtcgttctgctgatgacaggaaaaaccagccctgtaattgccatgtctgttattcccctgctcggcgccctgctggccggctattccctgcctgaaatcacggcattttttgattacggcatcaagaaagttgccagtgtcgcagtgatgttcctgtttgccattctgtttttcagcattatgaaagatctgcatatcttcaatccgtttatccgcctgatgatcgggctgacacggggaaatgtggtaattgtggcgatggtcactgcgctggtggcagctgttgtgcatctcgacggttccggtgcggcaacctttctgattattatcccggcatttctgcctatctaccggcgtctgggtatgagcccgtatctgatgctgctgctgatgtgtatgagtatgggggtgatgaatatggtgccgtggggcggaccgctcggccgcgcttctgctgtgaccggtatttccgcttcagtcctgtggcagccgctgatcccggtacaaatcatcggtattaccgcatccgtgctggttgccgcactgtttggtctgcgggaaaaacgccgtatcgcccgggcggcacaatacggcaccacaccgtatgagcaggattcgcttcttgaattgtatgatgaggcggataacgaacacggtacggaaaaaccacagcgctttctgattaatatctcgctgatcctgctggcgattctgagtctggcactggggtggctcgcggcaccctatatctttatgctggcgctctccgccgcgctcattgtcaattacccgaaaccgaaagatcaggttgcggtgattaaccatcatgccccgcaggcattatccatggcagcaattattctttccgccggggtattcctggggattatggataaaggcggaatgctggagtccgtggctaaggatctgctgctgattattccgggacatatggcggaacagttccacattattatcgggatgattggtgtgccgctggatatattcaccagtaccgatgcctattactttgccctgctgccgattgtccgtgacgtggtggcatccgccggtattccgcctgcggatgtggtgtatgccatggctatcggtaataatgccggaacctttgtcagcccgttctcaccggctgtctggctggcagtggggattgccggggttgatatgggccggcacctgcgctactccttcttctggatctggctgttcagctttatcacgctggcggcaggctggttcctggggttgttctga

SEQ ID NO: 274221 - DNA, 561 bp, Morganella morganii
atgaatgaattttcactggtctgccgcctgctcggaacgctgtttaaccgcgctccggttgatcctgtactggcaccggttctgacgatgattaagcaggggcaactgaaagcccactggccgctggagcaggatgcactgctgacacggctggctgagcattgcgacagtgcggaactggcagcggattatcagcagctgtttgctgacggggcggtggctcagcaccggtcggactataccggtgagccggaaagtgaagttcgtcagtttctcagtgagcgcgggatgccgctgactgatgcggtaaccgacagtttcgggtctctgctgctggcggcatcctggctggaagatcaggcacaggaagatgaagtcagtgcacagacggcgctgtttgcggactatctgctgccgtggagtgatacatttctcgggaaagtcgaatctcatgcacagcacggcttttaccgtacgctggctatcctgacccgtgaagcactgtccgctttgtatgaagagctgacagaaaacacagaagaagacgaaaacgatgattag

SEQ ID NO: 274222 - DNA, 942 bp, Morganella morganii
atgaatattattttctaccatcctttttttgattctgagctgtggatcaacggcatgaaaaaacacctgccgcaggcaaatatccgcaaatggggtccgggtgataaccagccggcggattatgccctggtgtggttaccgccgcgtgagtgtctggccgggcggaccaccatgaaaggggtctttgcgctgggtgccggggtggatgccattctgaaacaggaacaggcaaaccccggcacactgcctgccggggtgccggtgatccgccttgaagataccgggatgggggcgcagatgcaggagtacgcggttgccaaggcgctgtggtacttccgcaagatggatatttataaacgccagcaggagcagcgtatctggaaggctcagcctgctttcacatttgatgaattcgaaatcggcgtgctgggaaccggggttctcggccgttccgtggcagaaaagctggcagagttcggatttaaagtccatggctggagccggacaccaaaacagatccccggcgtgacaagtttccacggtaacgaccagctggatgaattcttaagccacagccgcctgctgatcaacctgctgccggacacaccgcagaccagggggatcctcaaccagtcactgttcagtaagctgccgcagagttcttacctgattaacctggcgcgcggttcgcatctggttgataacgatttactggaagccatcgatgacgggcagattgccggtgccagcctggatgtttttgctactgaaccgctgccggaaatgcacccgttctggacccacccgcgggtggatgtcacgccgcacattgctgcatttaccattccgtcagaggcaatgaaagccattgttgccaatattgagcggattgagcggggtgaagcaccgcagggcgtggtgaatatggaactggggtattaa

SEQ ID NO: 274223 - DNA, 1722 bp, Morganella morganii
atgaaaatttcaacatttaaaggattatctcttttttctgcattaattgactcgtgctggaaacagccttactccgtttcccgtctgataaaagataccattgcaggtatcaccgtcgggattattgctatcccgctggccatggcactggctatcggcagtggcgtggctccgcaatatggtctgtatacggcggctattgccggtattgtgattgcggtgaccggcggctcccgtttcagtgtctccgggccgaccgccgcatttgtggtaattctctaccccgtatcccagcagttcgggctcggtgggttactgatagccaccctgatgtccgggattatcctgctggcaatgggtctggcgcgtttcggtaaactcattgaatatattccgatttccgtggtgctcggcttcacctcagggattgcgatcaccatcgccaccatgcaggtgaaagactttttcggtctgaccatggcgcatgtaccggaaaactatgttgataaggtgattgcccttgtcagagccatgccgaccatcaatctgtcggataccctgattggcgtaaccacactgctggtgctgatctactggccgaaactgaaattacgcctgccgggacaccttcccgctgtgattgccgggatgctggtgatgctggtgctgtcgctgttcggcatggaagctgccaccatcggctcccgcttcagttatactctggcggacggtacacagggtgcggggatcccgccgattctgccgcagtttatcctgccgtggaatttaccgaccccggacggcaaagaatttgtgttcagctgggccaccattaccgccctgatgccggcagcgttttcgatggcaatgctcggcgcgattgaatcgctgctctgtgcagtggtgctcgacggaatgaccggcaaaaaacataactccaacggcgaattactgggtcaggggttgggtaatatcaccgcaccgttcttcggtggcattaccgccactgctgctatcgcccgttcggcggccaacgtacgtgccggtgccacatcgccggtctctgcgattattcactccctgctggtactgctgactctgctgatcctggcaccgctgctttcttatctgccgctggccgcgatgtccgccctgctgctgatggtggcatggaatatgagtgaagcagctaaagtcattgaacttatccgccgcgcgccgaaagacgatattatcgtgctgctgctgtgcctgagcctcactgtgctgtttgatatggtcattgctatcagtgtcgggattgtgctggcctcactgctttttatgcgccgtatcgccaatatgacgcgcctgagtgagtcttcctataccgatcatgacaaagggcttctggttgtccgggttaacggcccgctgttctttgccgctgctgaacggatttttgatgatctgaaagtcaaaagcgcgggatatcacaccattgtgatgcagtgggatgcggtaccggtactggatgcgggcggattaaaagccttccgacgttttatcgacgaagccggtgtggatacacacatcgtggtcaccgatattccgttccagccgctgaaaaccctggcgcgggcacggattgtaccgattgagaataaaatcagcttttacccgtcagtcagtaaagctctgattgaactgggactaatggatggtgtgacatcggaggcatga

SEQ ID NO: 274224 - DNA, 450 bp, Morganella morganii
atggctgtgtttcgtcttcccttccttaactggctgattatcaacgccattgcagctgcctggctgtatgccaaagatgcactggtgattcagttcagcggctggagcggtattttagccatattgatcgggctggaaagtctcggctgggttggcgcgtcactggtgtatttccgccgccataacaccacaccgaacccgctcggcgaggccactcatctcatcaccggcggaccgttccgtctgtcacgtaatccggtttatctcgcactgacctccgcctgtatcggttttgccctgctgacccactcttactattttctcatcggcggccttattttctggctgatcaccgatctgttcagcatcccgcaggaagaaaaattccttgccggaaaatttaaacaggaatggacggcctattgtcagcagacacggcgctggctgtga

SEQ ID NO: 274225 - DNA, 903 bp, Morganella morganii
atgcagcttcacacagtcgttaacatgttcggcgctgatcttcagcgccgttatggcgaaaaaatccataaaatcaccctccacggcggcttcagctgccctaaccgtgacggcaccctcgggcgcggcggttgtactttctgtaatgtggcatcttttgcggatgaaaatgcacagtatgattccattgaggagcaactgagtcagcagtccggcaaaatcacccgtgccaaacgttatcttgcctatttccaggcctataccagcacctacgcggaagttgaactgctgcgtgagatgtatgaatccgcactgactcaggccgatgtggtgggattgtgtgtcggtacgcggccggactgtgtgccggaggcggtgctggagctgctgcaaagctatcagcagcagggctatgaggtatggctggaactgggattacagaccgcccatgataaaaccctgaaacgtatcaaccgcggtcatgattttgcctgttatcaggccaccacccgggccgcccgtgaacgcgggctgaaagtgtgttgtcatctgatcaccggtctgccgggagaaaccgcagccgataatctcatcacacttgagcgtgtgctggagaccggcgttgaaggcatcaaactgcatccgctgcatattgtggaaggcagcaccatggcaaaagcctggcgcgcagggcgattacccaccatttccctcgaagagtatgtcgccaccgccggggagatgatccgccacacaccgccggacgttatttatcaccgcatctgcgccagcgcgcggcgtccgaccttactggcaccggactggtgcagcaaccgctggctcggcatgaacggcctgtggcagtatctgctggcaaacggtggccagggcagcgcaatctga

SEQ ID NO: 274226 - DNA, 852 bp, Morganella morganii
atgcaacagaaagtcgtatctatcggggatattcgtgtcggcaacgcgctgccgtttgttctgttcggcggcatgaacgtccttgaatcccgcgatctggcgatgaaaatctgcgaacattacgtgactgtcacgcagaagctgaatattccttacgtcttcaaagcctcttttgacaaggcaaaccgctcttccatcaattcttaccgtggtccgggccttgaggaagggatgaagatttttgaagagctgaaaaaaaccttcggtgtgaaaattattaccgacgttcacgaatcctggcaggcacagccggtggcggacgtggtggacgtgatccagttaccggccttcctggcgcgtcagactgacctggtggaagccatggcgaaaaccggcgcggtcattaacatcaaaaaaccgcagtttatcagcccggggcaggttggtaatatcgcggaaaaattccgtgaaggcggcaatgaccagatcattttatgtgatcgcggtgcaaacttcggttatgacaacctggttgtggatatgctgggctttaaagtgatggaaaaagcctccggcggttgcccggtgattttcgatgtcacacactccctgcaatgccgcgacccgtttggtgccgcatccggcggtcgccgtggtcaggtggctgaactggcccgcgccgggatggcagtcggcctggccggtctgttcctggaagcacatccggacccggataatgcccgttgtgatggtccttccgcgctgccgctggcaaaactggagccgttcctgcagcaggttaaagctatcgacgatctggtgaaaagcttccctgagctggataccgaataa

SEQ ID NO: 274227 - DNA, 807 bp, Morganella morganii
atgaaaagcattgccgattttgaattcaatggtgcgccgttactgagcggcattatgttagtgttaaaaactgtccgtccggattttgaccgggaaaaggcagaagcacacatcaatgaacttatccgtcagacccgtaaacgcctcccgccgtattccgacgaacatacctgtttacagaccctgatcacgctcttttaccacaaatggcagttcagcggtgccagcggcgtttattcgctgtctgataccctgtggctggataatgtactgcgcacgcagcgcggctcgccggtatcactcggcatcctgttcctgcatattgcacaggctatcggtttgccggttgtgccggtggttttcccgacccagctgattctgcgggcggatctcgatgacgaaaccctgtttatcaacccgattaacggcgatctgctggatcagcacacgctggatgtctggattaaaggcacggtcagcccggcgcatcatctgaccggggatgacctcgaagaagccgaaaacagccatgtggtgcgcaaatacctcgacagtattaaagtcgcgctgatggaagagaaaaaaatggagcaggctctgaaagtcagcgaaaccattttattatttgatccggatgacccgtatgaaatccgtgatcgcgggctgatttatgcccagctggactgcagccatattgcagtttccgatctgaattattttattgagcaatgtccgcaggatccggtatcggaaatgataaaaatgcagatccacacttacgaacagcagcatatcgttctgcactga

SEQ ID NO: 274228 - DNA, 837 bp, Morganella morganii
atgacgttccggacctggctggcggaggctgtcagccgtttaagttacagcgacagcccgaaacgggatgcggaaatcctgctgacgtttgtcaccggccgcacccgcagctacattattgcttttgatgaaaccccgctcagcggggatgaacagcagcgtcttgaggcgctgcttgtccgccgggaacagggcgagccggtggcgtatatcaccggtgtgcgtgagttctggtcactgccgctggaagtgtctcccgccacacttattccgcgtccggataccgaatgtctggtggaggcggcgctggaattgttaccggcagcatcctgcgatattctggatctcggtaccggcaccggtgcgattgcgctggcactggcctctgagcggccggactgtcatgtgaccggggcggatattcagccggatgcggtggcgctggcacagcgcaatgccacccgtctggggctgacgaatacaacctttaaagaaagtcgctggtttgcttcactgccgattcatcaatttgctatgatagtgagtaacccgccatatatcgatgagaatgatgagcatctggtgcagggggatgtccgtttcgagccgcgcagtgcgctggtcgccccgcagaacggcctggccgatctggcggaaatcgctgcgcagtccgctcattatctgacacccggcgggtggctgattgtggaacatggctggcggcagggagacgctgtccgcgaactgttccgggaaaacggattttaccgggtggaaacccgccgcgattatggcggaaatgatcgggttactttaggtcaacgggaagagaaatga

SEQ ID NO: 274229 - DNA, 1083 bp, Morganella morganii
atgaagccttctattgtcgcaaaactggaagcattgaaagaacgttatgaagaaattcaggcgcaccttgcggacgccgatgttatcgctgatcagaataaatttcgtgccttgtcgaaagaatatgcgcagctgactgacgttgcgaaatgttttgaagcctggcagaccattcaggatgatatcgacaccgctcaaatgcttcttgatgatcctgaaatgaaggaaatggcacaggaagagctgaaagacgcaaaactgcggaatgaaaccttagaacaggaattacaggtcttattactgccgaaagatccggatgatgaacgcaactgcttcctggaagtccgtgcgggcaccggcggtgatgaagcggcgctgtttgccggtgatctgttccgtatgtacagtcgttatgcggaatcacgccgctggcggattgagatcatgaacagtaacgacggcgagcacggcggatataaagaaatcattttcagagtcaccggcgagaatgcctacggtaacctgaaatttgaatccggcggccaccgcgtgcagcgggtgccggaaaccgaatcccagggccgtattcacacctccgcctgtactgtcgcggtgctggcggaagtcccggaagcggaactgccggatatcaacccggcggatctgcgcattgatactttccgctcatccggggccggtggtcagcacgttaacaccacggattccgctatccgtatcacccatattccgaccgggattgtggtggagtgccaggacgagcgttcacagcacaaaaacaaagccaaagcactctcggtactggccgcgcgtatcaaagcggcggaagagtcccgccgtcatgaggcggaagcctctgagcgccgtaacctgctgggttccggtgaccgttcggatcggatccgtacctataacttcccgcagggacgggtgacagatcaccgtatcaacctgacactgtaccgcctggatgaggtaatggaaggtaagctggatgcgctgatccagccgctggtgaacgaatatcaggcagatcagctcgccgcgctgtctgagcaggactga

SEQ ID NO: 274230 - DNA, 1263 bp, Morganella morganii
atgactctattagctctcggcattaaccataaaaccgcacctgttgccttacgtgagaaagtgactttctcaccggacagcatggaagcggcattaaccaatctgctcgaacaaccgtccgtgagcggtggcgttgtgctgtctacctgcaaccggacagaaatctatctcagtgtggatgaacagaataatcagcgcgatcagctgatcggctggctgtgccgctatcacaacatcaacccgcaggaactgatgtccagcctttactggcatcaggataatgaggctgtcagtcatctgatgcgggtggccagcgggctggattccctggtgctcggcgagccgcagatcctggggcaggtcaaaaaagcctttgcacagtcacagacataccgttcactctcccgtgaactggaacgcctgttccagaaatctttctctgtcgccaaacgggtgcgcactgaaaccgatatcggtgccaatgcggtatcggtggcgtttgctgcctgtactctggcgcgtcagattttcgaatccttatccagactgaatattctgctggtcggggctggggaaaccatcgaactggtggcccgtcacctgaacgagcacggcgtaaaacacatgatgatcgccaaccgtacccgcgagcgggcccgcgtgctggcgcaggaagtcaatgcagaggtgatcacactgccggaaatcgacagccggctggcggaggcggatattgttatcagctccacggccagcccgttgccgattatcggtaaaggtatggtggaacgcgccctgaaagcgcgccgtaaccgcccgatgctgctggtggatattgcggttccccgtgatatcgaagccgatgtggaaaaactcagtaacgtctatctctacactgtggatgatcttgaggcgattattgagcataacctggcgcagcgccaggtggcggcacaacaggcggaatccattgtggtgcaggaaagcgggcactttatggaatggctgcgcgcccagagcgcggtcaatacgatccgcgaataccgtgaacaggccgaagagatccgcgccgccatggccgcaaaagccgtggcactgattcagcaggggcatgacccggaagaggttatcaaccagatgtctcagcagttgactaaccgcctgatccacgcaccaaccaaatcacttcagcaggccgccggtgacggtgataccggtcgtctgactctgttacgcgacagcctcgggctggagcatcattaa

SEQ ID NO: 274231 - DNA, 630 bp, Morganella morganii
gtggcctctattcaattaccgcgctttatccggcttctgcccctgtgcagcctgatacttgccgcctgtaccctgcccgacaatacagagaaaggcgatgtttccgccacctctgccggctggaaagcacagacagaacagataaatcagttacagcgttatcagacgcgcggctcgtttgcctacatcggtgccacccagaaaacctatgcccgtttcttctggcagcagtattccccggacaactacaaactgctgctcaccaacccggtcggcagcaccgagctggaactgattgtcaaagacggccagacccagctgaccgacaacaaaggccagaaatattacagtgatgatccggacagcatgatttaccagctgaccggtatgactatcccgatggaaaatctgcgtcagtggattgtcggcctgccgggtgacgcgcagtcctatgccatcagcaatcagtatcacctgaaagcgctgagctggactcagggcatggaaaagtggaaagtcacttatcagtcctatgatgaaaaagtctccccgcaactgccgaaccgcctggatatcgaacagggtgataaccgcatcaagctgaaaatggattcatggacactcaactga

SEQ ID NO: 274232 - DNA, 876 bp, Morganella morganii
atggacactcaactgacatcactgatctggccgtcccccgccaagctgaacctgtttttatatatcacaggccgccgcgcggacggctatcacacgctgcaaaccctgtttcagtttctggattatggtgacagtgtcacaattacaccacgtactgacggtgaaattcgtctgctgactccgcttgccggcgtaccggatgagcaaaacctggtgatccgcgccgcccggctgttacagaattatgcacgggagcatcacctgacagcggatttacccggtgcggatattgccgttgaaaaaattctgccgatgggcggtggtatcggtggcggttcctccaatgctgccacagtgcttatcgctctcaactatcactggaagttacagttacccgacgaaacgcttgcagagctgggtgtgatgctcggtgcggatgtcccggtatttgtccggggccacgcggcaattgctgaaggaataggcgaaattctgcaccctgcgtctccgccggaacgctggtatctggttgcacaccccggaatttcggttccgacaccgcttatcttcacagatccgcaattaattcgcgacacgccgatccgctctctggccgcattattacaggctccgtacgcaaatgactgtgaaccgattgcaagaaaacgttttcgtgaggttgattgccttctttcctggctgctacaatatactccgtcacgcctgaccggtacgggtgcatgtgtgttcggagagttcgaaaaccaggcagccgcccgacaggtgttaattaacgcgccggcgtgggtgaagggctttgtggcacgtggtgtcaacatttcgccgcttcatcagttccgcgctggtctactgtaa

SEQ ID NO: 274233 - DNA, 948 bp, Morganella morganii
gtgcctgatatgaagctttttgctggtaacgccatcccggaactagcacaacgtgttgccaaccgcctgtacactaacctcggagacgctgcgatcggtcgtttcagcgacggtgaagtcagtgttcaaatcaatgaaaacgtgcgtggtggtgatgttttcatcatccagtccacctgtgcgccaactaacgataacctgatggaactggttgtcatggttgatgcactgcgccgtgcttctgcgggtcgtatcactgctgttatcccgtatttcggctatgcccgtcaggatcgccgcgtccgctcaacgcgtgtgccaatcaccgcgaaagtggtcgctgacttcctctcaagtgtgggtgttgaccgtgtgctgacagtggatcttcacgctgagcagattcagggcttcttcgatgttccggttgataacgtcttcggcagcccaatcctgctggaagatatgctgcagaaagatctggacaacccgattgtggtttctccggatatcggtggtgtggtccgcgcccgtgcgatcgccaaactgctgaacgacactgatatggctatcatcgacaaacgccgcccgcgtgcgaacgtttctcaggtgatgcatatcatcggtgatgttgccggtcgtgactgtgtactggttgacgatatgatcgataccgggggcacgctgtgcaaagctgcggaagcactgaaagaacgtggtgcgaaacgtgtgtttgcatacgcaactcaccctatcttctccggcaacgcggtcaacaatatccgtgattctgtgattgatgaagtgattgtctgtgacaccattccgttatcagcggaaatcaaagcactgaataaagtccgttctctgaccttatccggaatgctggcagaagccatccgccgtatcagtaatgaagagtctatctccgcgatgttcgaacactga

SEQ ID NO: 274234 - DNA, 270 bp, Morganella morganii
atgaaacgtaaattatccttattgctcggtaacctgctgatggttgtcggtatgctgttgatggtcggcagtatggcctttactgtcggtgtccttatttttgcacttcctttaccggatatctattccgaagcctccctgatggggatctttatcggtgccctagtgtggctgggcggagccggtctgagcgggcgccgtgaatccattgcggataaatattactggctgcgtcatttccacagccgctaccgccgccggatgccgtaa

SEQ ID NO: 274235 - DNA, 591 bp, Morganella morganii
gtgagtcagataaaattaattgtggggctggccaaccccggtgcggaatacgcccaaacccgccacaatgccggtgcctggtatgtggatgaactggcccgccgttataatcagtcattaaaatcagaaagtaagttttacggttataccgcgcgtctgaatattcaggggaatgatgtccgcctgctggtaccgaccacctttatgaacctgagcggcaaagcagtcggtgccctcgccggtttttaccagattgccccggatgaaattctggtggcacatgatgagctggatctcccgcccggcgtggcaaaaatgaagctcggcggcggcaacggcggtcataacggcctgaaagatatccagagcaaattgggtaacaacccgaactttcatcgtctgcgtatcggtatcggccatccgggtgataaaagcaaagttgtcggctttgtgctgggcaagccccctgcctccgaacaacaactgattgatgaaaccatcgatgaagctgtgcgctgcaccgatgtgctgatgaaagacggcatggcaaaagccatttcacgtctgcatacatttaaagccggtcagtga

SEQ ID NO: 274236 - DNA, 1092 bp, Morganella morganii
atgggtttcaaatgtggtatcgtcggtctgccgaacgtcgggaaatcaacgctgtttaacgcgctgaccaaagcaggtattgaagcggcgaactttccgttctgtacaattgagccgaacaccggcgtggtgccgatgccggatgcccgtctggatgcactggcggaaatcgtaaaaccacagcgtattctgccgaccaccatggaattcgtcgatatcgccggtctggtgaaaggcgcctccaaaggtgaaggactgggtaaccagttcctgaccaacatccgcgaaacagaagctatcggccacgttgtccgctgctttgacgatgataacattgttcacgtttccggccgtgttaacccggcagaagatattgataccatcaataccgaactggcgctggctgatctcgacacctgtgaacgtgctattcatcgtgtgcagaagcgcgccaaaggcggtgataaagacgcgaaactggagctggaagtgctggaaaaatgcctgccgctgctggaaaacgcacagatgctgcgcacactgaacctgaataaagaagaaatgggggcgatccgctacctgagcttcctgactctgaaaccaaccatgtacattgccaacgtcaatgaagatggctttgagaacaacccgtatctggatcaggtgcgtgaaatcgcagagaaagaaggttcagtagtggtaccggtatgtgcggcaattgaatccgacatcgctgagctggaagatggtgaccgcgaagagtttatggctgacctcggtatcgaagaaccgggcctgaatcgtgtgatccgcgccggttacgccctgctcaacctgcagacctacttcaccgccggtgtgaaagaagtccgtgcatggaccatccctgtcggcgcaaccgccccgcaggcagccggtaaaatccacaccgactttgaaaaaggctttatccgcgcccagaccatcgcatttgaggatttcatccggtacaaaggcgaacaaggtgcaaaagaagccggtaaaatgcgcgcagaaggtaaagattacatagtgaaagacggcgacgtgctgaatttcctgtttaatgtgtaa

SEQ ID NO: 274237 - DNA, 558 bp, Morganella morganii
atgaatgacgataaaaaagttaatgttgtcacagggatactcctgtttattattttttcttcagggagtgcatcatccggaaaccgggaactatccggtgactgggggatatatgacagtaagcctgaatccgtatttaagccgcttgatgataaacgctataaggcgcattttgaggatgcagccaagtattttattgctatctataatatgaataatgaggttaacgatttttgtttgattggctataaatggcgtaataaagatcgtgaaaataatgtcaatgttatctggaaaaatcattacttaatcaactgggaaatgccgtaccggccggttgataacgctgactatgtccgctcactgatattatcaaaacctgcaataaatctgaaagacgatgtggttccgtacagtgaaattggtttccgcacagcactctggcaggaagaaggaattaagcagataacggatgattgtatgaaaaatggtaatcaggtacagattcagccatttcagccggatccgaaatggaatattgaaaataaaccagaatga

SEQ ID NO: 274238 - DNA, 864 bp, Morganella morganii
ttgagaaaattattgctgttaagcctgatgtgcgccttttcttataatgtgtatgccggtgaaaatacctgttcagaagaaacggctgccattaacgcatttaataactttattttcactcaggaacagccttttaacgattccgtgaaagaaatgaagatgcatataaaaagcaatgatgactatattgagagtaatgcgtatgtaaaatttgatgattgcggcaggttgctgatactggaaaacagcaaggtcgttaaatcccgcataaaagagaatgttatcgtcaatgtctttgacatcaggataaataaaaaggatgaaggctggcgctataatatgacatttaaactgtctggtattgatcagcatggtgtcgataacacatttatgctgcagagaatgcacggaaaatttctgaccggcaataacggaaaaataacaaaatcggaagatacgtcttatgccacgctaggtgatgaacgtatgaaattcaaagcggagacccgctttttaagtgacgataagggacgactgtcagaatccggcagagtcagtacacaacccaatgacagttcagatacacggtatttttatgatgacaaagaccgattaatacgggctcagtcagacactacaacggaagaatatacctatacggatgatggtaaggtatcaggcagtacaatgattcagaaattttccacaacagaaacaaccgtgacgacatgcaaagagtggaataaattcggcagatgcacgcgtgcagaacgggatataacggtgttaattgaaagtgagaatggcgaaaaggacagtatctataagcatcatgcggaaattgattatgagtatgtttattaa

SEQ ID NO: 274239 - DNA, 1080 bp, Morganella morganii
atgtccgcaacaaaaataattatcatcatttccggtattattatagggatcagtgctgtaatccttggtatatacggaaacccgccaaatatgggtgtttgtgtcgcttgttttatccgggatagtgcaggcagtatgggattgcataataccgaaaccgttcagtatcttcgtcctgaaatttttggttttattctcggttcattcggggctgcggttatttttaaagagtttcagtccaaggccggttctgcaccggtgatccgctttacactcggttttctgatgatggccggttgtctggtttttttaggatgtccgctgcggatgatcctgcggattggtgccggtgatttaaatgcggttgtcgggttattcggcctggtcgccggtattggtatcggtagtctgtttattaagaaaggattttcattaccacgtaattatcagcagtctgccgctgaaggcttaatattaccggcggtgtgtctggtcttatttgtgctgtttattatcgacagttccattttcaaatccagtgtcaaagggccgggggccgctcatgctccggtctggatggcaataacagccgggctgattatcggggtgattattcagcgtacccgtttctgttttatcggtatggctaaaaatatcttcctgtcccgcaattacacgatggcaatcggcgttctcgccctgctgctggttgttattgccggtaatatgctcaccggaaaaatcaatatcgggtttgataatcagccgattgcccataatgacgggctgtggaatttcctctccatgtcactggtcggattatgtggtgtctttattaccggctgcccgctgcggcaattagccaatgccggacagggtaataccgatgcggctgtcagtgtactgggaatgctgaccggcgcggcctttgcgcataatttttcctatgcatcaagccctgccggtgtgactgaaaacggcaaactggttgttattattggcctggtactgaccatcgccatcggtattatttatacccggcttgccaataaaaaatccggagctgagaatgccgcataa

SEQ ID NO: 274240 - DNA, 255 bp, Morganella morganii
atgccgcataactatctgtttctgttccatgtgcagcacggattaaaaaaactgaaagtccgtttgcaggaagattccgtggcatcatccgttattgatgcgccgcgcaggatcaccacggaatgtgaaacagcgctggctgcgcaattttccgctgaaaatgattatctgaagtatgccggtgaaaatgtccgtgaaatctggcggacggacggtccggattatcagcgggtgtgggctgacgaaacgatgtaa

SEQ ID NO: 274241 - DNA, 1467 bp, Morganella morganii
gtgatatcaacccgttcccgagtcattatccatctgagcagttttctgatagtgatttacagcctgacattattattaccgatgctggttgcgcttattgcgcaggagcagagttttttcgcgtttgccggtagtttcctgattttctttccggccgggttagtgtgctggtaccgcagtaaaaccaccggcctgcaattgcagacacgggatggctttctggttattgcggtattctggctgttattttctgttatcagcgccatgccgttctggctggatgatcatctgaatatggcttttgaagatgccttatttgaaggtgtttccggtattaccaccaccggcgcctcggtatttcacaatgtcaccggtttgccccgctccgttttatattaccgcgcccagcttaactttatcggcggtctgggggttattgtcctggcagtggcgatatttccgctgctgggtatcgggggaatgcgtttatatcagtccgaaatgccggggccgtttaaagatgagaaattaacaccccgcttagccagctccgcccgcaatttgtggttcacctatttattactgggattttgctgcacggttgcttttaaactggccggaatgacatggtttgatgccttatgccacgggctgtcgaccgtctctctaggcgggttttccacttacagcgaaagtatcggctattttaacagctccgcgattgaattagtggcgggggctttttcattattatccgccgtcaactttaccctttattttgtggcgctggcaaaacgcagcctgaagcccttattcagtaatacggaattgcgtttctattttgccgtggcggcattgattatcgggctggtcttttttgaagtgtggcgggcaaatatgtattcgtctgccgaagaatcctttgtccatgcttttttcctcaccagctccatgctgacggataacggtcttgccaccggtgattatgcacagtggccgtctcatattattgttctcttattatttgccagttttttcgggggttgtgtcggttccacctgcggcggaataaaagcggtccggtttttaattctttccaaacagagctggcgggaggtctattccctgatccacccgaaagcccaaaccctgatcaaagtcggtgataccgttgtgcagcaccggctgattaattccgtcctgagctttttcttcctttatgttatttgtacctgcttttttatctggtgtcttaatctgatggggtacgatttaatgacctcatttgccagtgtcgccgcctgtattaataatatggggctgggattcgggttaacagcacccgggttcggggagatctctccggcggcaaaatacctgctctgttttgccatgttattaggccgcctggagatatataccctgctggtgctgttatcggtcagtttctggcgtaactggccgtag

SEQ ID NO: 274242 - DNA, 975 bp, Morganella morganii
atgaagaaatcattttttaaagttgcggcattatctgttgcactcttttccgccagcgtcatggcaaaagaatacgaaatcgtcaacgtcgtcaaagtctccgggattccgtggtttaaccagatggataaaggggttcagcaggcggcaaaagatctgggcgtaaatgcgtatcaggtcggtccttccacgccggatccggctcagcaggtaaaaatcattgaagacctgattgccaagaaagtcgatgctatcaccgtggtgccgaatgacgtaactgttcttgagccggtctttaagaaagcccgcgaacagggaattattgtgctgactcacgaagcaccggacggccataacgctgactgggatatcgaaactatcgataacgatgcttatgccaaagcaaccatggatgaactggcgaaaaacatgggcggcaaaggcggctatgtgatttatgtcggctccctgacagttcctctgcacaacaactgggcaaacctggcggttgagtatcagaagaaaacctatccggaaatgtttgaagtgaccagccgtatgccggttgcggaaagcattgatgcctctttcgcggcgaccaatgacctgatgaaagcccatcctgaaatgaaagggattgtttcttacggttcactgggcctgattggtgccggtgaggccatcaagaaaaaacgtgcgaaaaacaaaatcagcaccgcgggtatcctgatgcctgcacaggctgcaccgtatctgaaaggcggcgaaatcaagaaaggtttcctgtggaacccggctgatgcgggttacgcgctggtgtctgtctccaaagatatgctggacggcaaaaaagtgaccgacggtgtggaagtcaaagatctgggtaaagctgaaatcgatactcagaaacaggtgattaaattcaataaaatcctggaagttgacagcaataacgccacctcgctcggtttctga

SEQ ID NO: 274243 - DNA, 1506 bp, Morganella morganii
atgggctggtatatgtcaaaagacgcactgattaccttaaaacaggtttccaaacacttcggctccgtcattgcactcgataatataaatctgacgtttaaccggggtgaggttcattgtctcgccggcaagaatggctgcggcaaaagtaccttattcaaggtgatctccggggtccatccgccggaaaagggcgcagaaattattattaacgggcagagctacaacaggttaaccccgcagcaatctattgagcagggtatccaggtgatttaccaggatctctcgctctttcctaacctgactgttgctgaaaacattgtgattcaggaacatgttaagtggtacaaagggctggccaaccgccgccgccagatgaaacaggcgcaggaaattatcagccgtattggcttgtccctgcccctgcataaacgtgttgaacaactttccattgctgaatgtcagctggtcgctatctgccgcgcgatggcaaatgatgcccggctggtgattatggatgaaccgacagcctcactgacgcgcagtgaagtcaatcagctgatccgcgtggtcgctgatctgaaagccaacggcgtcaccgtggtgtttgtcagccataagctggatgaagtgatggaaatttccgaccggatctccgtgatccgcgacgggaaactgatcggaacgtatgatgcggataagatgaacagtgatgagctggcgtatcttatgaccggtcagcgtttcgagttcacaccgctttctgcgtacaacaccgggggactcttacgtctcagcgcagagaaactgacaaaacaacatcaattttatgatattgacctgaagctgcatgccggtgaagtggtcagcattaccgggctgctcggttccggacgcacagagttgtgtctgtcactgttcggcatgacgaaaccggacagcggcaccctgctgatcaacggttcaccggttaagctgaactccaaccgggatgcgattaaccacggcatcggctatgtgtcggaagaccgcatgagcaccgggctggtgatggcgcaatccatccacgacaacaccacctcggtggtgctgccgcgtctgacccgcaaaggcgggctgctcgaccatacccgggcgcatgacctggtcagtaagctgattgaggcactgcagataaaagtgtccgacccggcgctgccggtcaccagcctgtccggcgggaatgcccagcgtattgctatcgccaaatggattgcggcgaaaccggatattctgatcctcgattccccgacagtcggcgtggatgtcgccaataaagagagtatttatcagatcatcagaatgctggccgccgaaggcatggcgattttaatgatcagtgatgaaattcctgaagtattctataacagtcaccgggtcattgtgatgaaagaaggtcgttttacccatgagttcaatccgttaaccacaacggagcaggcaatcacggaggcggttaatgcttaa

SEQ ID NO: 274244 - DNA, 996 bp, Morganella morganii
atgcttaagtcatgtcgtcatctgtttgcacatcatgagttctggctggcagtattaattgtgctgctcagtgtgtttctcagcatcaccaatgaagattttatgacattgggcaatgtgtttgatatgaccaccagcaccgccattctggcgattatggcctgtggtctgtttgtggtgctggtctccggcgggattgatatctccttcccggccacggcggccaccgcgcagtatgtgatggctacttatgtgctgtcacagggtggtaacttctttatcgcctttgctatcgcggcggttgttggtttactgctggggctgatcaacgccctgctgatttaccgcctgaaagtgccgtctattattatcaccatttccaccctgaacatctttttcggcctgctgatctatttcaccaacggcgaatggctgtacggtttcccggagtggtttatggatggggttgaggtgatgtcatttaccggtagcgacggttatgactacggcctgtccctgccgatcctgaccctgattaccgtgattattttcaccggttttctgatgagcaaaacccgtatcggccgtcagatttatgcggtcggcggtaatgcggatgccgcgaagcgtgtcggtatcagtattctcggcgtgatgctgtttgtttacggctatatgggcgcgctggcggggattgcttctgtggtgcagacgcagatcacccagtctgttgcaccgaatgccctgatgggctttgaactgacggtgctggcagccgtggtattaggtggtgtcagtatgaccggcggcaaaggctcccttaccggggtgatcctcggggttgccctgctggcaattgtcaaaaacggcctgaccctggccggtgtaccgtcttactggcacaccgtactgaccgggcttatcattgttatcagtatcagtttcaccgcgtataacgaaaaacgccgtgccgctgcgggaggtcatctgtcatga

SEQ ID NO: 274245 - DNA, 951 bp, Morganella morganii
atgatgtcaatgctgaatctgcggagtgaccgcaacattatttacctgctggtgatcatggccgcaatcctgctgttgcaggggatgtttaatgcaggcgcgtttttctctgtttccaacttccagtcaatgacgtcccagatgccgctgctcggtatgctggcgctggcaatgtctgtctgtatgctgaccggcgggatcaacctgtccattatcgccaccaccaatgcctgcgggctggtgatggcgagtgtgatggccatgagcccgggtgatggcgccatgttactgcctgccctgctggccggactggtcaccgccgtgattatcgggctgatcaacggttttctgattgcgtttgtcggagtgtctccgatcctcgctaccctcgggatgatgaccttaatcaacggcctgaatgtgctgatttccggcggtaccgtgatctccggcttcccgccgtcactgctgtggctgggcaacggtacccttctcggtattccgatgccgctgatcctgttcctgctgtttgcgttcctgctgtggggattgctggaatacacgccgctcggccgtaccgtttatctgatgggttctaatgaaaaagcaacgcgcttttccggcctgaatacacagaaaaccattatggcggtgtatgtgatttcatctgttctgtgctgggtggccgcgattattatgatggctaagtttaactccgccaaagcaggatacggagaatcttacctgctgatcgctattctcgcctctgtgctcggcggcgtgaacccggacggcggtttcggacgcattatcggcattgtgctggctctgtttgtcttacagatgctggaaagcggcctgaacctgctgggtgtcagcagttacctcatcatggcgctgtggggcggtattcttatcttatttattgcattgcagaaagcccggtcataa

SEQ ID NO: 274246 - DNA, 1635 bp, Morganella morganii
atgagtgtctattttattggtgtggatgtcgggagcggcagcgcccgggccggggtttttgatgctgccggacgcaaaaaaggcgaagcgaagcgggatatccgtcagttcaaaccacaggcggattatgttgaacaatcctccgatgatatctggcgcagtgtgtgcctcgcggtaaaagatgcggtggcacaggcacgtatcgacccgattcaggtcaaaggcctcggttttgatgccacctgctccctggtggtactggataaacagggtcagccgctgacggtcagcccgaccggccgcagcgagcagaacattattatgtggatggatcaccgggctatcagccaggcgcagcggatcaatgacaccaaacatccggtgctggcgtatgtcggcaaccgcatctcgccggagatggaaacgccgaaactgttatggctgaagcaaaacatgccgaccacctgggcgaaagcgggctatttctttgatctgccggattttctgacctggaaagcgacttataccaacagccggtcactctgctccaccgtgtgtaaatggacctatctcggccatgaagatcgctgggatacccatttcttccgccagattggcctggaagatctgctggaaaacgatgcgcagattatcggccgcgaaatccgcccgatgggtgaaccggtcggtaacggcctgaccccgaatgcagcggcagatttagggctgattccgggcaccccggttgccacctcgattattgatgcacacgccggcgggatcggcgtgctgggtgctgcggatgccaccggcgcacaaccggatttcaacacccggctggcgctgatcggcggtacctcgtcctgtcatatggcggtatccaaaaatgcccgctttatcgacgggatctggggtgcctattacagcgccatgattccgggttactggctcaatgaaggcggacaatccgcaaccggcgcgctgatcgaccatatgatcacatcgcacccgcagtacagtgatgcgaaaaaactggctgaacaaaaccagcagacggtgtatcagctcctcaacgaccgcctgctggcactggcgggttcaaaagaggatatcgccctgctgacacggtatatccatgtgctgccttatttccacggcaaccgctcgccgcgtgcaaacccgaatctgcgcggtgtattgaccggtctgcgtatgacccaaactcttgatgatctcgcgctgatttatctggcgaccatccaggcgattgcgctgggtacccgtcatatcattgaagagatgaataaagccggatatgccattgataccatcatgggttgcggcggcggcaccaagaacccgatctttattcaggaacacgctaatgccaccggatgcgccatgctgctgccggaagagagcgaagcggttctgctgggttcggccatgctcggctcggtagcagcgggcttctatgcctcgattccggaagcgatgcaggccatgagtcggatcagcaaaaccgtgacaccgcagactgagagcatcaaacagttttatgatgccaaataccgcgtattccatcagatgtatcatgatgatcagcgttaccggcaactgatgtcggaagtataa

SEQ ID NO: 274247 - DNA, 465 bp, Morganella morganii
atgtcaattgaactggataagatggatcggcggatcctggaccagctgcaacgtaacggcagaatgcagaatgtggagctggcacgtgaagtggggctctctccgtcaccctgcctgagacgggtacggcggctggaggaaacgggcgttatcaggcgctatgcggcgattctggacggcagcaagataggcgcggggctgatgctctatgcccgtatctggtttaaagggcaggacgcacagactatcaatgattttgtcgcggccattaatgaaatgccggagatagtggagtgtcatctgatggccggtgaatgcgatgcgatgatccgcattgtgaccaaagacctgacctcataccgtcggtttcatgccgatcatctgacacaaattacaagtattcaaagtgttaagacggaagttccgatggaaaccctgaaggcgacacacgcgttacccttgtaa

SEQ ID NO: 274248 - DNA, 609 bp, Morganella morganii
atggtcataaatacattgatggtgtttggcgcaaccgtgttacccattgtatttgctcccggacccgatattttattcgtttcatcacaaggtctcgccagcggttcccgcgcagcgctgaaagccaacatgggtgtgctgctgggttacggtatgcactccattctggcggcattcgggctggcagccgttgtggtggcatccccggttctgtttaacggcatgcgctggttcggcgtggcctatattgcgtatctggctttccgtatggtgatgtccgccatgcacaagagcgaaatgccgccgatgcagccggcagccaaatcagttatcaccaaaggcttttttaccagcttcctgaacccgaaaggcctgctggtctactttgctatcctgccgaacttcatttccggcagtgagagtgtcgcaatgcagtccctgctgttatccggtgtgtatatcgccagctgtgccattgtttacagcggtgtggcactgattttcggccagatgagcaaaggggaatataacgacaaacgccgccgtatcggtgaaggcgttgccgggggattactggccaccgctgcaatgagcctggcattcagttaa

SEQ ID NO: 274249 - DNA, 1422 bp, Morganella morganii
atgacacgctacgaacagttagcagagcagataaaacagcagatcgaagatgatatctggcaggttggtgaccggctgccgtcattgcgggaaagtgccagacagtcgggactgagcctgatgactgtcgtacagtcgtatcagttactggagagccagggatgggtggtggcccgtccgcagtccgggtattttgtcgccaaacgcgccccggcgtttgcccaggccaggggcggtctgggtatgcacctgagtgaaaatgtggagatcaacgcttcgctgtttgatgtgctccaggcctgcaaagatccggccattattccgttcgggtcggcatttcccgatccttcgctgctggtacaaccgaagctctccaaagcgctgggtgcagtggcccgccgcatcgcaccgcagagcgcagtggtcaatatgccgcccggcaatgaaaaactgcggcgtaatatctcccggcgctatgccgcacagggtatccatgtctcaccggatgatattgtcatcaccgccggggcaatggaatccctgtcactcagcctgcaggcggtcacggaaccgggggactgggtggtgattgaatccccggcattttacggcgcattgcaggcaattgaacgtctgcgcctgaaagcggtggcgatcaaaaccgatccgcagaccgggattgaccttgatgcgctggaagaagtcgccgggcgctatgatatcaaagcctgctggctgatgacgcacttccagaacccgctcggcggcaccatgccgccggaaaataagcggcggctggtggagatcctgacgcggcatgaaatcgcgctgatagaggatgatgtctacagtgagctctggtttggcagcaatgcgccgcaaccggcgaaaagcctggataaagataacaatttcttccactgctcctcgttttccaaatgtctggcgccgggcttccgcgtcggctgggtggcggccggaaagcatgcccgtaaagtgcagcagttacagatgatgagtaccgtatccgccagtatgccgacacagcaggcgattgcggaatatctcggtcagggcggttatgatgcgcatctgaaaaaactgcgtcagcagctggagcagcgtcagcaccggatgctgtatgctatcagcgaatatttcccgtcagatgtgaagatcaactgcccgcagggaggctattttctctggctggaatttgaaccgccgtttgatgccgtcaaactgtaccgtatggcactcaatgagcagatcagcatcgcgcccggctcgatgttttccaccagtgaccagtttaatcatgctttccgcctgaactgctcttttgaatggaatgaccggctggataatgcgatgaaagtgctgggtcagctgtgtcatgtgctgaagaaaacacaagggtga

SEQ ID NO: 274250 - DNA, 1341 bp, Morganella morganii
atgtttgggttaagtgcccttgagcttgcgcgaattcagttcgccttcactgtgtcgtttcatatcattttccctgcaatcaccatcggcctggcgtcattcctggcggtgcttgaagggatgtggctgaaaacccgcaatgaggattacaaaaagctctttcatttctggtcagccatctttgccgtgaacttcggcatgggtgtggtttccggtctggtgatggcctatcagttcggtaccaactggagtttcttttctgagtttgcgggatcaatcaccggtccgctgctcacttatgaagtactgactgcgttcttcctggaagccggtttcctcggcgtgatgctgttcggctggaaccgtgtcggtgaaaaactgcactatttcgccacctgcatggttgcgctcggcacactgatgtccaccttctggatcctggcttccaacagctggatgcagacccctcaggggcatgaggtgatcaacggtgttgtggtaccggtggactggttcgcggtgattttcaatccgtccttcccgtaccgcctgctgcacatgacaaccgccgcatttctggcatccgccttctttatcgctgcttctgccgcctggcacctgttgcgcggcaacaaatccggtgccatgaaaaagatgttttccatgtcattgtggctgattgtggttctcgcaccgctccaggcactgattggtgatgcgcacgggctgaacacactgaaacatcagccggttaaggtagcggcaatggaaggtcactgggagaacaaacccggggaggccacaccgctgatcctgtttggtattccggataatgcacaggaaaaaacccgctatgccgtggaaattcccgggctggccagcctgatcctgacacacagccttgataaacaggtgcccgcactgaccgagttcccgccggaagacagaccggacaacgtgttcgccgtgttctggtcattccgcgtgatggtcggcctcggcatgctgatgctgctggctgccgcactgagcctgtggctgcgttaccgggggcgtttatatgattcccggcctttccagcgctttatgttatggatggcaccgtccgggcttatcgcgattctcgcgggctggtttgtgactgaaatcggccgccagccgtgggtggtttacggattacagcgcacgacagatgccgtttcagcacacggtgagatgcatatgagcatcagcctgctgatcttctttattgtttatggttctgtgtttggtatcggctacatctatatgatgaaactgatccgcaaaggtatcacgccggaggtgtctcatgggcattga

SEQ ID NO: 274251 - DNA, 1008 bp, Morganella morganii
atgggcattgatttacccctgatttggttcgtcattattatattcagtacgttgatgtatatcgtaatggacggatttgacctcggcatcggcatcctctatcccttcgtgaaaagcaatgctgaccgcgatttgatgatgaacagtgttgccccggtctgggacggtaacgaaacctggctggtgctgggcggagccgcgttgttcggcgctttcccgctcgcctatgccgtgattctggatgcgctcgccattccgctgacactgatgctggtcgcgttaatcttccgtggcgtggcttttgagttccgctttaaagcggatgaacatcaccgttatttctgggatcgcgcgtttctgatcagctcagttatcgccacttttgtgcagggcgtggtcgttggcagcgtaattgaaggttttccggttgcaaaccgcgcctttaccggcggtgcctttgactggctggcgccgttcccgctgttctgcggtttcggtctggtgatcgcctatgccctgctaggctgcggctggctggtgatgaaaacggaaggtcatttacaacagcaaatgtataaggtactgaaacctctgaccctggtgatgctggcggtgctggccgtgatcagcctgtggaccccgctggcgcatgacgccattgcggcacgctggttcagcttcccgaatattctgttcttcctgccggtaccgctgctggtgcttgtctgtgccgttgcgctgttccgcagtgtcagccgtcatctgcactatacgccgttttttgcagcgctcggtctggtttttctgggcttcaccggactcggtatcagtatctggccgatgattattccgccggtgattaactacaaaatggccgccgcccccggcgaaagtctgagctttatgctggttggcgctttattcatcataccggtcatcctggtatatacctggtggagttattatgtcttcagaggaaaaatcacccatgaccagggctaccactga

SEQ ID NO: 274252 - DNA, 180 bp, Morganella morganii
atgtcttcagaggaaaaatcacccatgaccagggctaccactgagcctgccgcagcggccccctggtggaaaaaagccgcctggatggtcgctatctgggcaggcagtgttctggcactgtttgctgtctcatcacttttccgcttattaatgacggcggcgggaatgaaagtaagatag

SEQ ID NO: 274253 - DNA, 825 bp, Morganella morganii
atgagccgggaaaaaaatatctaccgccctgcacccccgcgtctgattcaggtgaaatcctttaccgacgttacccccaatctgcgccgcatcacctttacggcagattcgctggatacctatccggcagattgcgaaggtggtcacctgaagctgtttattgccaaagatgcgccgaacccgcctgctctgccggtgctgtccgataaaggacctgtctggccggaagacaagccgcgtccgatcgcccgtacctataccgtgcgtgcgatccgccctgagctgaaagaaatcgatatagaattcgctatgcataatgatgccggtccggcggtggatttcgccagaaatgccaaaccgggtgattatatcggtattactaatcccggcgggccggatccgttgctgccggtggcaaaacactactatatggccgccgatttaacagcacttcccgctgttgccgcgctgctggaaaaaatgcctgcagaagctcagggcaatgtggttatccgcatcgatcacgcggatgatcagcaggtgctgaacaaacccgcgggtatcaccctgcactgggtgaccggcggcacagagaaaaccactgaggtcaccgcactgtttaaaagctggccggtcgccgatgtgacagagtgtacgttctggattgccggagaggatgcgatggtcagggatctgcgccgctatgtgcgccgtgagctgaacggggaacacagtcagatgtatgcgatcccgtactggcgtttcggttacaatgaggaaggttatcaccgcctgcgccatgatgtgatggatgctgacgactga

SEQ ID NO: 274254 - DNA, 786 bp, Morganella morganii
atgggcagacaaaaagcggtagtcagagcacgcaaagaggcaaaacgaatgagccggaaagagtcgcgcagggcacgttttaatgatgataatgtggcggtttttatcccggcgggcggggtggaagctatcggcatggcgcgggaaaaacgcgacaacagtgctgttttaccgcgaaatgatgcacaggataaatacatcagggcgatagcccataaacaactgattattgccaacggcgaggccgggtgcggcaaaacctttatcagtaccgcactggcagcagatgcactgatcaataaggaaatcgagcggattattgtcacccgtccggtattacaggcggaagaggatctggggtttctgcccggggatatcagtgaaaaattcgcgccgtatttccggccggtgtatgacgttctggtgaaacggatgggggcttcatttttacagtattgtctgcgtccggagatcggtaaggtggaaattgcgccgtttgcctatatgcgcgggcgaacctttgagaatgcggtggtgatcctcgatgaggcgcaaaacgtgactgtcacacaaatgaaaatgtttctgaccaggatgggggaaaatgtgacagtgattgtcaacggtgatgtcagccagtgtgatttaccgggcaatgtcccgtccgggctggatgatgtactgcgtcgtttccgggatgacgatatggtgtcagtggtgtccttcacacaggatgactgtgtgcgttcatcactctgtctgcgggcactacaggcctataactga

SEQ ID NO: 274255 - DNA, 999 bp, Morganella morganii
atgatttatatgcgtatttttcaatcatttcgtgtttcattatttttgttgtgtgttattacgcctgcggtatttgcggctgcgccggaacggtttgatgaggccaaaatagtggcccgtgaaaaaatttattacgatcagaaccgtaacccacagggggaagggacactgtattgcggctgtcagtgggagtgggccggaaaatccggcggccgggttgatctgaacagctgcggttaccgggtacggtcacagctgacccgcgcagagcggattgagtgggagcatattgttcctgcctgggtgttcgggcatcagcgccagtgctggcagaacggcgggcgcaaaaactgtgtcagtgaggacccggtcttccgtgcaatggaagctgatctccacaacctggcgccgtctgtcggcgaagtcaacggggatcgcagtaattttcgttacgggatcgcacgcggcgccggttcacagagctacgggcagtgcaccagccgggtggattttaagcagcgggttttcgagccgcgcgatgaagtcaaaggcgaggtggcacgggtctggttctatatgcatgaccgctacgatctggcaatgtcagaacagcagcaaaaattactgatggtgtgggacagcgaatttccgccatccgccgccgagcgggagcgggatcgccgtatccgtgcggttaccgggcagtcaaacccgtttgtgaccggtgaacgccgctgggagccggggcatatcaacagtgccgatggtatttttacccgcctgccatccgcgccggtgacaccggtaaacgtaccgccgaaagcagaaaagaaagcaacggatcagcgtatccgcggtaaccgcaacagtaagatttaccattttccggattgcccgggctataaccggatcagcagtaaaaatgttgaaatgttctctgatgccgcctctgcacaggccgcagggtacagcatggcgaagaactgcaaagcacgctga

SEQ ID NO: 274256 - DNA, 174 bp, Morganella morganii
atgcatccgctggtcgatgagatgatagaagaaatagtcggcaccgcctgtgcctatgatgacgatgaggttgatgtccgtgtgcaggaaagccgcaaccgggtgcagattcagattagtgtgaccgataaaccggtcatggacattatcctgaatctgacccgcatcagctaa

SEQ ID NO: 274257 - DNA, 477 bp, Morganella morganii
atgatgacggtactctcttttctggctgcactggcgcaggatatgctgctggcagctattccggcggccgggtttgctatggtatttaacgtgccgaaacgggcactgaaatattgcgcacttttgggggcgataggtcacggcagccggtttatgctgattgccgccggttttgacatcgttgccgccacattctgggcatcggtgctggtggggatcatcggtattcagtggtcccgctggtggctggcgcacccgaaagtctttaccgtagcggccataatcccgatgtttccgggtattaatgcctatatggcaatgctggcggtgatcaaactgtcacagtccggttttaccccggaactgctggagatgctggtgagcaatttcctgcgggcgggctttgtggtcggcgcgttgtctatcgggctgtctgttcccggtttgtggctgtaccgcaagcgtccgcgcgtttag

SEQ ID NO: 274258 - DNA, 789 bp, Morganella morganii
atgggacaggggaaagagattacacaggatatgcagcggactatcacccgcctgtgtatcgagtgcgggctgctgctgttacagcacggtgcggaaagtatgctggtggaggagctggcgggacggacagggaaggcgctcggagctgaccaggtggattgcgccatctcggcgaatgccattgtgctcaccacgatcattaacgggcattgcctgacatccacccgcaaggtggtcgatcgcggtattaatatgcatatcgtcacagaagtgcagcatgtggtgatccttgcggagcacggtcatcttgactgcaaaggggtgcagaaaaaattcgcccatatgaaaccgctgcgctatccgcgctgggtgatggtgctgatggtggcgctgtcctgcgcctgtttctgtaagctgaataacggcggctgggacggggcggtgattacctttgccgccagcggttgtgcgatgtatgttcgtcaggttttgaccgcacggcatatgaacccgctgattaacttctgttttacggcgtttgttgccacgatggtggccggaatgatgctgaaaattccgctgttttcggcaacgtccggcattgctatggcggcgagtgtgctgctgctggtgccgggttttccgctgatcaacgcggttgcggacatgttcaaagggcatgttaacaccggccttgcccgctgggcgatggcaagcctgctcaccctggcaacctgtatcggtatttttaccgcgatcacactcggcagcctgagggactggatatga

SEQ ID NO: 274259 - DNA, 639 bp, Morganella morganii
atgtcatccaccccgtcaccattaaccccgaaagggcagcgccgccgtcatgccattctcaccgccgctgcggatgtttttatccttcatggttacgaaggcacgactctggatatgataattgaacaatccggcgggtcacgttccacgctgtatacctcttttggcgggaaagaagcattgtttctggccgtcatagaccatcttatcagcgggatttttgaggataatgaagaggaagaaccggaaacggcgcccgatgcggaaacactgttatataccagcggcagacgttacctgcacagcattgttcacccgcagtcactcggtttatatcagctgattctggcggaatcacagcgcttcccgcaaatcagtgaacaattttaccgcgccggcccgctgcgcaccgcacaaaaactggcggccgggctgaaagcactgcccggtatcgccgcatcagaggaaacattactggccgttgccgcccgttttctggaaatgctgaaagccgacctgtatctgccggttttcggtcatcgtcataagaagccaacggcggaatttattgaaaaacagctgccgttatctgtggagataacggcctgttacctccgccacacattaacatcccaatga

SEQ ID NO: 274260 - DNA, 411 bp, Morganella morganii
atgtcagcagttaattttgttcatatggatacaggcgccttcccggtggtgataatgcagtcattcccggaaaatatggcacaaacagaacagtgggtgaaagagctggatgcactgctggacaagcagacaccgttcgcattaatttacccgccgaaagacgggccggaaaagccggatacacaggaagatatggatgcgcgtaagtatgtccgccgctggctgaaaaccggaaaagagaaaatggcggcatattgcagtgtgatgatcctgaccgccaatcaggaaaccggtgataaagcggagctggcgaaattcgcgcctatggctggtgcggtctacggtgtgccggtgtttgttgctgatgatatggcagcggcacgggcaaaggcggcagaagtgaccgcctga

SEQ ID NO: 274261 - DNA, 294 bp, Morganella morganii
atgaaaaagctgacactaattaccctgggatgcctgttctctgttactgcttttgctgccaatgccagcaaagtctgtgatgaatatttcactgaaatcgacgaaatggtcaaactggcagagcaggaagccaaaggtgatgctgatgcaactgcacagatcactgccatgaaacagcagctggaaaccgcaaaaacacagattaaatctgtaccggaagagactcaggacatggcgtgtcagcagggtcttgatgcactgaaggaattcaaagcatcgatggcaaaacagtaa

SEQ ID NO: 274262 - DNA, 438 bp, Morganella morganii
atgtataaaacgatattagttcctattgatgtgacagaagatgtactgacgagtaatgccctgaaacacgcgatttatctggcgaagatgtcacaggcgaaactgatgttgtttcactctgtaccggatatttcgaaattctcaataagctataactaccactatgaattactgaactcatttgcggaaaaagccgttgcccgttcaaaagatgagttaaaagcgattgccgaaaaagtggatttaccggcagagcaggtcagttattttgtggattacggcacgccgagagataaagtgctggcaaaagcaaaagagatccatgctgatttgattgttgtcggttcgcgcctgccgggtatttcaacccatctgctggggtcaaccgcctccgggattgtggcacatgcgcaggtttccgtactggttgtccgctga

SEQ ID NO: 274263 - DNA, 429 bp, Morganella morganii
atgtataatacaattttggttcctatcgatatttcagaagaagaactgaccagtaaagctgtccgccatgcactctatctggcgaaagaaacaggggctaagctgcatattgtccatgtcctgccgatctcatccgcgattattaatgcgtatgcgctgggttatatggagataaaagataaagcgaccattaaagcggaagaagatcttcatatgctgatggattctattgatctgccgccggagcgactcgcttacacgattacgttcggttcgccgcgtgatgaaattatccaggcagcggaagaggtaaaagccgatattattgttatcggttcccgccgtccgaatatctccacccatctgctgggctcgaccgccggtggtgttgtccgttatgcgccggtctcggtgatggttgtccgctga

SEQ ID NO: 274264 - DNA, 864 bp, Morganella morganii
atgaatattattgatatcaatgccataacccgcgattacccggcattaaaaacaccgggcccggaagacagtcataaaggcacattcggtaccctcgggatcaccggcggggctgccggaatgaccggtgcggttattctggccggatgtgctgccctgaaaaccgggtgcggcaaagtaatcctggggtttaatcagccgcagttgccggtgccgtttgttgagaatgcaccggagctgatgctgcgtactgcccgcgcccttgcggatgatccggcgctgaccgcacaggttaccggtcccggactggggcagagtacagagagccgcgtactggcggaagcggcgtttatgcagaccggcaaaccacaggtgctggatgcggatgcactgaatattctggccgccacgccgggtatcgcgctggatgataactgtgtgataaccccgcatccgcaggaagccgcccgtctgctgcataccaccgtggcggatattcaggcggatcgcccggcggcggcgctggcgctggcagctcagtatcactgctgggcggtgctgaaagggcaccgcagcctgattgcctcaccggacggtgagttatggtgtaatcacagcggtaaccgcgggctggccactgccggcagcggggatgtgctatccggtattatcggtagtctgctggcacaacggctgccggtgcaggaagcggtttgtggcggagtctggctgcacggcgcggcggcagatgaatgtgtggccgccggtatcggccctgccggattaactgctcatgaaattattgattatgtgcggttaatccgtaaccgcctgataacagaaatgccgggtaataagagttaa

SEQ ID NO: 274265 - DNA, 222 bp, Morganella morganii
atgaataacgcatttaaaacagaaaacgatactgaaacactggctgcagaagtgacctgcttaaaagcactggtaacatatttactgaaggcggtgggtcaggcggatgccggccgtattatcgtcaatatggaacgccagatcagcgaaattgatgatgagcatctgtccggtacctttaaaaataccattgcccagattaaaactgagtaccggaaataa

SEQ ID NO: 274266 - DNA, 1452 bp, Morganella morganii
atgatcacaggtaaaaaggcggcactgcgccgcaaatggcatacgggggctgtgctcctggcggcggtgctgacatcggtgacgaccctttcgcgggcggacaccccggcgaagacactgaatgattttaatcagggggcggaattacagctccgggcggagaatgcaccattttaccggctgacagtaccggataatgtctggctcaacagtgcctggccggatctgcgggatatccgtatttttgacagctccggtacgccggtgccgatgtcactgacggcggcgaagcaggtaaaagatgaaagcgcgcgtgtccgcttcgttatctatccgctgtcacaaagccggacggaagagcaggacggcaaccgcaaaatccgcctgaaagcggataacggtacagaactgacgatttataatgataaggcggacagcctggcgcgtccgtccaccgcgacttacctgctggtgccggataacaagcagcagctcccgctgccgctgcgggaagtcacactgaactggccgcagcagaccggtaatatgcaggccaaagcctcactgttcagcagcgatgacaaacagaactggtcgccggtgatcctcgatgtgccgctgatggatctgaaatccagtgaggatacgctgctggcacagcagataaaaattccgggctatatcagcggtgatgaaagcagggcgaaatactggctgctttccgttaccggagataacaatcaggcaccaccgcagatcaccaccgcagaagggatgagttcccggactgtggagcgccgtgaggtgaaccgttttgattttgtgcctgcggaggacactgacggcagtatgatttacagcctgccgaatacccagagtctcagccgtctggatttccatattgaccgggaaaatacggtgctgccggtacggatagaataccggagtggtacagaagggaactggctgccgctggataataaagtgctttattcactggtgtcggatgatgcggaaaaccgcaacagtaacatccggttgaatgatctgccggtccgccaggtcagactgaccgcgattaacagcagctggcgtgaaacaccaccgaaggttaccggggttaaatatgcacaatatctgaccttcaacgcccaaggctccgcgccgtatctgctggtgtggggggcgcatgatgctgatggggcatttttaccgctgtctcagcttctgccgggcaataatctgaataatcaggatgcaattccgcgggctgatgtgtcagaaaaagtggccacactgggcggggaagcgaagttactgcctgaaccggaagctccgccgccgtttgcctggaaaacctggctgttatggggtgtgctggtggctggtgtggtaatactcggattatttgctgtccgcctgctgaaagaaatgaaaacggaacagaaataa

SEQ ID NO: 274267 - DNA, 2703 bp, Morganella morganii
atggattcattactcttctggggttttgtgttagtggcgctcattgttgtgacgccgtttattgctgttgcggcgctgcggcgcacaacgctgctgaagctgcaggtcagtgttctgacggaggaaacggaatcactgcgccgggaactggatgccctgaccggcggtcagccggtggcggagactacagttcaggctgctgcgctgtctgaagcgatcccgctgcaaccggagccggaagtgcagtatgaaccggtgccggtgccggtgccggagcctgatcctgttcctgaaccggaacctgttatcgcggcggcaataccgttcccggcggatattgcagcggcggagcgcaaaagcccggcggtcaatattctcgaatggctgcttaacggcaacctcccggctaaaatcggtattctgctgctgtttatcggcctttcctatctgctgaaattcagtatcgaaaataatatcctgacaccggaagtccgtctgatcggtgcggcaatcctgtcagtgacactctttattgtcggctggtgtgtccgccataaaaaccggttgtacagcctgattgttcagggcggcagcctcggtgcgttttatatcacgatatttgccgcctataagctttatgagttcctgccgctggcctttgcactggtgctgatggtggttatctgcctggcatcggttttctttgcggtgatacaaaacgcggtcagcctggcggttctggctgtgatcggtggttatgcggcgccggtgctgctctccaccggcagcggtaattatgttgcgctgttctcctattatctgatgctttccgtctccattctgatcataaactactggcagggctggcgggtgctgaatatcgccggtttcacctttacctttgtggtcggtgtgatctggggcgtggataactaccagccggagtattacctgaactgtcagatcttcattattctgaatctggtggtctacgggctgctgacgcagcaatatgcacggcatcatgtccggacagatgacgggcgaaaacagctgatggtggactcggtactgctgtttgcaccgccggtgctggcgttttccctgcaatatgccattacggagccgttctatctcggtaccgcaatatcatcgctggtcttcgggctgatttatctgctgctggcggtggtcagtctgcgccgcttccgtgctgacgggcaacggctgtcactcggcttcctgctgctcagtatcggctttatctcgctggcagtaccgctggcactgtcgccgcagtggacatccgtggcctggacgattgaagggctggcgatactgtggttcgcctgtctgcaaaaacagcggattgtcggctggagcgccaccggactggtgctgctcgggtttgcgtctctgctctacagtatggactttatttactggtcagaacaaagcatctggatgtatatcttccagtggggcgggttgctggttgccggggcgcttcatcaccatttccgcctgatgaaccgcagcaaactgatttccggactgctgattatcccggccatggtcacctggctctcctggctgtggatgctgccgtggttatcaccggccggtgaattgttgtccggtgaggagtacatcctgaccgggcttgtgatctcggtctggagctggttcttcctggcgcgcaaagtacggtggactcagctgtattactgcatcagtgcgctgtggatagtgagcctgctgatactgtgtgactatattcttaccggaacacatgcggccggttcgctgtacggcggctttatctggctgctggttatcggcagtatgattacctttatccggctgctgccggaacaggcaccgcgcattgtcagcaacctgatgcacggtgcgtcactctggaccgtcatcggcctggtcgccgccgaagtgatgtgggcggaaatgcagctgccgtggggcacggaagagtggggttactttattgccatgctgtcggcgtgcggtgtgattttcgtgctttacgccatgcagcgcctgcgccggccgccgatggacaatcatgccgcgctgtactggcagagtgcctatccgctggctgtgttgctgggactggcactgtttaccggaaatatgcaggatggtcagctgtcgctctggcagtacgtgccgctgctgaacccactggatgaagcggggctgttcggacttgctgcactgtggtgtctgcgtgatgcgctgatacggaccacaccggcagtgcatttccgggcagatgtggtgcgcggcctgggtattaccattgccgtgcttgggatctggtgggcgaacggtattctgatccgcgcactggcctttgcggacggcactgcatggacaaccaccgggctgctgcagtcccgtcttattcagaccacgctggcgattgtctgggcactgaccgccgtgatcctgatgacctccgcaacccgccggcataaacgccatctgtggctggccggggcggctgtctttgccgtggtgattattaaactctttgtagttgatatgaaccagagcagcgggcttgccagagccggtgcatttatcggggtggctctgctgatactggttgtgggatatttctcgccgttaccgccgaagacaggcactgacatacagaataataaggaagataactga

SEQ ID NO: 274268 - DNA, 975 bp, Morganella morganii
atgcaacatgacatccagcgtctcagaagaattcgtcagaccccgcagatgcgtgatctgttccgggaaacctcattaagcctcaatgatctcgcgttaccgatttttgtcgaagaaggcgccgatgactataaagccatcgacagcatgcccggcgttatgcgtataccggaaaagcgtctggcttacgaaatcgagcggatcgccaaagccggtatcaaatccgtcatgacattcggtgtttcgcatcatctggatgcaaccggcagtgatgcctgggcggaagatggtctggttgcgcggatgtcccgtatctgcaaagagaccgtgcctgagatggtggtgatgtccgatacctgtttctgtgaatacaccagccacggacactgtggtgtggtgcatgacggcgtggtggataacgacgaaaccctgcataacctcgggttacaggcggtggttgccgcacaggcgggtgctgattttatcgcgccttccgctgcccaggacggccaggtgcgggctatccgtctggcactggatgccgccgggttccatcagaccgggattgtgtcctactccaccaaattcgcctctgccctttacggcccgttccgtgacgcagccggttcctgcctgaaaggcgaccgcaaaacctatcagatggatccgatgaaccgccgtgaagccatccgtgaatccctgatcgatgagcaggaaggtgcagatatgctgatggtgaaaccggccggtgcttatctggatattctgcgcgatgtgcgcgagcgttcaaatctgccgctggcggcctatcaggtgagcggtgaatacgcgatgatcaaactggccgcacaggccggtgccattgatgaaacccgcgttgcactggagactctcggcgccatcaaacgtgccggggcagatttaattttcagttatttcgccctgagcctggcagagaataagatcctgagctga

SEQ ID NO: 274269 - DNA, 351 bp, Morganella morganii
atgattttctgcaaacgggtttatgatgaggtcgcggaaagtgacggttaccgggtactggttgaccggttgtggccgcgcggaattaaaaaaaccgatctgaattacgatgaatggaataaggatgttgcgccggatacggaattacgcaagtggttccacgctaacagtgatcagtttccggagtttgaacggcgctaccgtgaagagctggagagcagcccgcaaagctggcaaccgctggtggccagagcggtgcagggcaatctgacactgttgtttgcggcaaaagataaagagcataaccaggcaaaagtgctgaaggcatttctggaagaaaaattatcctga

SEQ ID NO: 274270 - DNA, 516 bp, Morganella morganii
atgatatttcgtacacaattcagcacggtactgggtgagatgtcggcagcggcaacggagcagggggtttgttttctggaatttactgaagacaaccgccgcgaagataccttacagctggtttctgcccggctgaaaatggcggtaacagacggaaatcatcctcacctggcgctgctggaatcacaactgcaggactatttcgccggtaaacggatgatatttaccgttccgctggtgctgccgggaacgccttttcagcaaaaagtctgggatgcattattgtctgtgccgtttggcagtaccattacttacagtatgctggcggaatcattatcctcaccgcgcgctgtccgggctgtcgggcgggccaacgggatgaatccggtttccgtgctggtgccgtgtcaccgcgttaccggcaaaaacggtgaactgaccggctatgccggaggaacggaccgcaaagcctggttactggctcatgaaaaacaggttaaaggagcagcagtatga

SEQ ID NO: 274271 - DNA, 2046 bp, Morganella morganii
atgaacaaatttttacccctggcgttgctcatcggatttagtttaaccggcaatacgatggcaaaaaccggcacctctgcgctgccggatgtcaaaatcagccaactgccggatactcagcaggcaccggagcactccacggtcagtgagcgtgtgacgtcccggtttctgcattcccattaccgtcagtttcagctggacggcgaattttcagcgaaaattctggagcgttatctgaatctgctggattacagccataacgtctttttggcgtctgatgtggcgaaattcagtaagaacaaggcagatgtcggcaattatctccgcaaaggggaattacagccgttatacgatctgtttaacctgtcacaaaaacgccgttttgagcgctttcagtatgcactgaaccgcctgaaacagccgatgaattttgacggcgacgatgtcattgatgtggaccggagcaaagcaccgtggccgcagacagaagccgagctggataaactgtgggacgccaaagtcaagtatgactggctgactctgaaactgtccggcaaagatgataatgaaatcaaagaaaccctcaccaagcgctatacctacgcccttaaacgtctgacacagacgaaaagtgaggatgttttccagctgatcatgaccgcgtttgcccgcgagatcgatccgcataccagttatctctccccgcgcaataccgagcagtttaactcagaaatgagcctgtctctggaaggcatcggtgccgtgctgcggatggatgatgattacactgtgattaattcactggtcgccggtggtcctgcgctgaagagcaaggaactggcggtcggagataaaattctggccgtcggccaggccggtaagccgatggtggatgtggtcggctggcgcctggatgatgtggtatcacaaatcaaaggtgccaaaggcagtaaagtccgcctggaagtgctgggtgataccaaaggggccaaaccacgtattgtgaccctgacccgtgagcagatccgcctggaagacagagcggtgaaaatgaccatcaaacaggtcggcgaccagaaagttgcggtgctcaatattccgggtttctatgtgggtctgaccaatgacaccaaaacccaactgcagaaactggccaaagagaaagtggatgcggtgattatcgacctgcgcggtaacggcggcggtgcactgacagaagcggttgatttgtccggtctgtttatcaccagtggtccggtggtgcaggtacgggataacaacggccgtgtccgtgaagatgcggacagcgatgatgtcatctactacaaaggtccgctggtggtgatggttgaccgcctgagcgcatccgcgtctgagattttcgcggcagccatgcaggattacggccgtgcgctgattgtcggtgaaccgaccttcggtaaaggtaccgtgcagcagcaccgtcctgtcagccgtatttatgaccagatgctgcgccctgaatggccggatttaggctctgtgcaatatactatccagaaattctaccgtattaacggcggcagcacccagcgcaaaggggtaacgccggatatcattatgccgaccggctttgataacgacgatatcggtgaaagttttgaggataatgcattaccgtgggacagcattgccccggcgcagtattcacagacggatattatccgtaaagcagtacctgaactggcacagaaataccaggaacgttcaaaaaccgatccggaattcgcttatatttacgaagacctggcacggtttaaagctaataagccgactcagtatattatttccctgaattacgcgaagcgtgataaagaagataaagagctggaagggattaagctgaaacggattaatgaacgttatgcccgtgaaggcaagaaaccgctggcaaatctcgaggctctgccgaaagattatgaagggccggatgcgtatcttgatgaaaccgttaagattgcagcagatctggcaaaagtgccggatattagtaagagtgcgcaataa

SEQ ID NO: 274272 - DNA, 693 bp, Morganella morganii
atggaaaatcaacccaagttgaatagcagtaaagaaattatttcatttttggctcagcgcttcccgcaatgctttgtggcagaaggcgaagcccgtccgctgaaaatcggcatcttccgcgatatcgtcagtcgtatcactgaagaagatggtatcagtaaaacacagttacgtaccgcactgcggatgtacacctccagctggcgctatctgtacggcgtcaaagaaggggccaaacgtgttgacctggatggtaacgattgcggcgatctggaagcggaacatgttgaacatgcccgtacccagttagcggaagcgaaagccagagtccaggcgcagcgcgcgcagaaacgtgagcaggacggtgagaaaaaaccgcgtccggcagataaagccgccgctgactcccgccgcagccgtacggataagcctaaagcgccgcgtaccggtaaagctccgtcgccgaaatccgctgatgcaccacgtaaaccacgtgcaccacgtcccgaatctcagtctgaactgacaccaatcactgatattcaggcactgaaggtggggcagcaactgaaggtgacagtcggttccggcgttatggatgcgcaggttctcgagatcaccaaagacggtgtacgtgttcagctgccttcagggttggcaatgatcgtgcgtgcggaacacttaaaattctga

SEQ ID NO: 274273 - DNA, 498 bp, Morganella morganii
atgaataaactcgcgttttatcaggatttaacccgccgtttaacatcgcttatcagtgatgagaaagatgtcatcgcgacactgtccaatgtcagtgccgtcctttttgatgagctggaacagataaactgggccggattctatctccttcagggggataccctcgtgctggggccgttccaggggaaagtggcctgtgtccgcattccggttggtcgtggtgtctgcggaactgcggttgctcaggggcaggttatccgtgtggatgatgtgcatgatttcgccggacatattgcctgtgattcggccagtaactcagaaatagtgttgccgctcgtggtaaatggtcagattatcggcgtactggatatcgacagcccggtttttaatcgttttgataataatgatgaaattggtctcaaagccttgaatgacgcgctctgcgcacatctggcaacgtgctttatgccgaaatatcgtgaaatgatcgcaagttag

SEQ ID NO: 274274 - DNA, 339 bp, Morganella morganii
atgaagaaagctctggcattaattcctcttttactggcaggtgcggcacaggctgcgccgctgaaaaccatcagcaagtttgagtttggtgaaaagtggccgtttacccgtgaggaagtgatgatcaactgccgggacggaaatgcactgtgggtgattaatccgtccacactgatgtcgtatccgctgaatgatgtggcggcacaacaggcaaaagagcagaaaataaaggtgactgacctctcagttatcacattaaaacaaaccggagacgcggaaaaaggcatggatcttaccccgatcattgaggctgccggtgcgctgtgtggtgataaataa

SEQ ID NO: 274275 - DNA, 900 bp, Morganella morganii
atggaactgacaccggaagcgctgctgattatctgccgcttcattcattttacggccgtgatgctccttgcgggttgcggcctgttctctgttctgctgcccggcgaccgggtggcactgctgctgcgggcccgcctgcgttctaccgcctgcagtgcagctgtgtttacggtcctgacaacgttcctctggctgctgttacaggcggcactgatgggggacggctgggcagatatgcaggatccggatattatcctcgcggtgctttccacttctttcggggagatctggcgctggcagctggtgcttgccgttattctctgcggcggactgctgctgccgtccggacgggtgcaaagcagtctgtttctgatctgtgccgcggcgatgctggcgctgcacgcctttaccggccacggcatgctgtacagcggctggacagggcggctctatcagtttaatcaggttgttcacctgctcagtgccgcttactggttcggcgggttgtggccgttcctggtttgtctgctgatcctgctgcggcgtgacacactcgcgcaggggctgccgaaagaagtggtggccaccctgatccgtttttcaaacctggggcattttgctgtctttctggtactggcaaccggccttatcagcactatgctgctgttgccggactggccgcagtggagcggcagtgattatcaggcactgttatggctgaaaacagggctggtgctgacgatggtgctgctggcggtgataaaccgttatgcggtggtaccgaaaatcgcacaatcaggccgcttccgcctgttgatgattaacagctgggttgagataattctcggcacactggccattttaatggtggcgatttttgcaacttatcagcctgtataa

SEQ ID NO: 274276 - DNA, 384 bp, Morganella morganii
atgttaaccaacctgaccgcgcactggcgcaaattatctgctgttgttgttttatttgtcggtttatccggccagcaggcgttcgctcacgctcatgtcaaaacgctggttccggcggcagatgcggcagtgaccggttcaccggaaaatatctctctggatttttcggaagggattgaactgaaattcagtaaaatcagcgtgaaagatgcacagaataaacctgttgcagccggaaaaccggaactggcggaaggaaatgatacccgtctgatcctgccgctgacagaaacgctgccagccggtatctatcacgttgaatggaaagtggtttctgtcgacgggcacaaaaccaatggtgactatcagtttacggtaaaataa

SEQ ID NO: 274277 - DNA, 507 bp, Morganella morganii
atgttaaagccggatatggtcaaacaactgaatgcccagctgaatcttgaattttattcctcaaatttatatctgcagatgagcgcatggtgtgctgataaaggctacgaaggtgctgccgcatttctgaaagcgcacgcagcggaagaaatggagcatatgcagcgcctgtttaattacctcagcgataccggcgcgatgccgttgctcggggccattgatgcaccgccgtcagaattcagttcagtgagtgatattttcaccctgacgctggaacatgaaaaattaattactgatgaaattaataagctggttcatgctgcgctgacctcacaggattattccacctttaacttcctgcagtggtatgtggctgagcagcacgaagaagaaaaactgtttaaatctgtgctggataaattcgcaatggtgggtgacagcggcaaatcgttgttcctgctggataaagatctgggccgtatggcaagcgaaccatccgcaagctga

SEQ ID NO: 274278 - DNA, 234 bp, Morganella morganii
gtgagttataatcttgccgaactcagccaggaagagatggataaaatcaatgcggacttagccgcatccggtgtcgcctttaaagagcgctataacatgccggtgatcgccgagcaggtgcagcagacactgcctgaatccctgcgcgcctattttgccgaacgtctggtgttttaccgccagcgcagtgccgggctttcccgcctgccgtatgagccgaacgccaaacgctga

SEQ ID NO: 274279 - DNA, 384 bp, Morganella morganii
atgaaggcaatgaatctgttcacccgtaccggattggcaggtgcaggtattctgctggcattcaccgtcagcgcacaggctccggccacggcggaagtcaaaaatgagcgtatggtgactttcccggcgtgtgaatcgctgaacaaagatcagatagcggcacaggtaaaatatgactttgtgcagagccgttacccgcgctggcaggatgacaaagcgctgctgggcagcaagccggttgcctgggtgaatgtggcggaagtgactgagaaagacggtaattacagcgtgccgctggttgtgcgcggctcgaaaaagcaggtcagttacaccgttgatataaattgtgcggcgaagaccatgacatacagtctgccgcagtaa

SEQ ID NO: 274280 - DNA, 195 bp, Morganella morganii
atgtttaccggaatgcccgcgttaagtcatgaagaacagcaggccgcagttgagcggatccacaccctgatgcaggaaggtatgagcagtggtgaggccatcgcacaggtcgcggcggagttacgcgaacggcatcacggcggtgagcagatccgcgcgctgtttgatgaggaagatgacgacagcgaagaatag

SEQ ID NO: 274281 - DNA, 1380 bp, Morganella morganii
atgacatcacattccgtacctgtactgacaccacttgactatcatcccggtctcgccctgaccctgtttgccccgctgtcacatcagccgtgggccatgctgctgcactccggcagtgctcagcatcagcataaccgctttgatattctgaccgccgatcccctgatgacactgactaccagaggcgatgagaccttaactgaagatagtcgggggcagcgcgtccgtcaaaatgatgacccgtttcagttactggatgcggcgctggcacagtgcgggctgaatccgctgccgcacgatgactatccgtttgcgggcggcgcgatgggattatggagctatgatctcgggcggcgaaccgagtctctgccgtcactggcacgaaatgagctgtccgtgccggatatggccgttggtatttacgactgggcggtgattgttgaccaccagcgccgctgcgccacattaatcacgtatagcgatccagcctcgcgtctgcactggctggagaatcaaaaggcaccggagagtctgcctttcgccctgaccggccactggcagtccgatatgaccgaagcggaatatcacgaaaaaattgcccgtattcatgactatctgcaggccggtgattgttatcaggtcaatctgtcacagggtttttccgccccgtatgaaggggatgaatggcaggcatttctgcggctgaatgacgaaaaccgggcaccgttttccgcgtttctccgtctgccggaagccgccattctgtcggtttcaccggagcgctttctgtggctgaaagacggcaccgcagaaacccgcccgattaaaggtacccgtccgcgtcatttggatgatccgcaggcagacgaagcagaaaaacaggcgctggccgcgtcagagaaagatcgctcggaaaacctgatgattgtggatctgatgcgcaatgatatcggccgggtggcacttcccggctcggtcagtgtgccgtcgctgtttgcggttgagccgttcccggcggtctggcatctggtcagcaccatcaccgcgcagttaccggcggcatgccgggcagcacagttgctgcgtgcctgcttcccgggcggttcgattaccggtgcgccgaaaatccgcgcgatggaaattattgaagagctcgaacctgtccgccgccacgcctattgcggctccgtcggttatatcagtgcctgcggcaccatggacaccaatatcgcgatcagaaccctgatcgcggaaaataatcacctctgttgccgggctggcggcgggattgtcgcagacagccgtgccgcagatgaataccaggaaacgttcgataaactgggccgcatactgacggtactgccggagaaaacatcatga

SEQ ID NO: 274282 - DNA, 567 bp, Morganella morganii
atgagtccgcttgagcgctttattccccggtttcagttaacccgcccttccgaagcggaaattgccggtgagcgggatcgccgggccgccgttttgctgcctattaccaataaagcccggcccgggatcctgctgacacaacgggcggcatcactgcgctcccatccgggacagattgccctgcccggcggcgcggcggatccgggcgaaatttcccccatcgccaccgcactgcgcgaagcgcgtgaggaagtcggtattccgccgcaggccgtgcaggtgctgggacaaatggcaccggtggacagtgtgaccggcttccgggtcaccccggtggtcgggattattccgccatatctgccgctggccggcaacccgcaggaagtgtcggatatttttgagctgccgctggatgccgccctcgacctgagccgctaccgctacattgatatgacccgcaatactgtggagcgccgcctctatttttacctatatgagggacggatgatttgggggttaacagcgggtattttatatcgtctcgcaacgcaagtgaaaaatgattga

SEQ ID NO: 274283 - DNA, 1365 bp, Morganella morganii
gtgattagcgtttttgacatgtttaaagtggggattggtccttccagctcccacaccgtagggccgatgaaagccgggaagcagtttgctgatgagttggttgaaaaaggtctgatttcccgcgtgacccgcgtttctgttgatgtctacggatcactctccttaaccgggaaaggtcaccataccgatatcgctattattatgggtctggccggtaacttaccggcaactgtcgatatcgatggtatcgccggttttatccgcgatgtcgaagagactgagcgtctgtcactggccaatggtcagcagacagtggatttcccgcgtgaaggcggcatgaatttccacaccggtaacctgccgctgcacgaaaacggcatgagcatcaccgcatttgccggtgatgaagagctgtacaccaaaacctattactccatcggcggcgggtttatcgtcgatgccgagcatttcggtcaggataacgccaacgaaacaccggtgtcctacccgtatgcctcagcggaagagctgctgaatcactgccatcagaccgggctttccgtctcctccctgatgctgaaaaatgagctggatatgcacagccgtgaagagatcgacgcgtatttcgccgatgtctacaaaaccatgactgactgtatcgctcacggtctggaaaccgaaggcattctgccggggccgctgcgtgtgccgcgccgtgccgctgcactgaaccgcctgatcaactccgccggtaaactctccaaagacccgatgaacgtggttgacctggtcaatatgtttgctctggctgtcaacgaagaaaacgcagcgggcggccgtgtggttaccgcaccgacaaacggtgcctgcgggatcgtccctgcggtactggcgtattatgatcactgcatcgagaaagtcactccggaaacctatctccgctacttcctcgcctgcggcgcggtcggtattctgtacaaaatgaacgcgtctatctccggtgcggaagtcggttgccagggcgaagtcggcgtggcctgctcaatggcggcagccggtctgactgaaatcctcggcggcagcccggaacaggtctgtgtggccgctgaaatcggtatggaacacaacctgggcttaacctgtgacccggttgccggtcaggttcaggtaccgtgcatcgaacgtaacgccattgcctctgtgaaagcgatcaacgctgcccgtatggctatgcgccgtaccagcgcaccgcgcgtttctctcgataaagtcatcgaaaccatgtatgaaaccgggaaagacatgaacgccaaataccgtgaaacatcacgcggcggtcttgcaatcaaggttcagtgcgactga

SEQ ID NO: 274284 - DNA, 969 bp, Morganella morganii
atgattggcacccacggcaaagccgctgagcagttactgcgcacgacggaaatgctgatcggtgaacaggagaacgtctccttcatcgatttcgtaccgggggaaaatgccgacacactatatgcgaagtacaatgagaagctgcccggtttatcaaccgctgacggggtgttattcctcgttgatacctggggcggcagcccgttcaacgcagcaaaccgtattgtgactgagcaggatcaggccgcaggcggcaacagcaattatgagatagtcacaggcgttaacgtgccgatgctggtcgaaacctttatgtgccgtgatgataatccgtcattgcaggaactggttgcggtggcgctggaaaccggccgtgaagggatccgcgccctgaaagcacaggacgaaccggcaccgaaagcggcacctgcaccaaaaccggccacacagccggcggcaccggcaggcccgggcggacacatgactatcgccctcgcccgtatcgatgaccgtctgatccacggccaggtcgccacccgctggaccaaagaaaccaacgtcaaacgcattattgtcgtcagtgacgaggttgccaaagacaccgtccgctcaacactgctcaagcaggtcgctcctccgggtgtaaccgcgcacgtggtggatgtggcgaaaatggtgcgtgtctggaataacccgaaatacgccaatgaccgctgcatgctcctgtttaccaacccggcagatgttctgcgcctggtggaagacggcgtggagattaaatcggtcaacatcggcgggatggctttccacgaaggtaaaaaacaggttaacaatgcggtttctatcgatgaaaacgatatcgtggcattcaaagcgctgaatgaccgcaacatcgagctggaagtccgcaaagtctccaccgattcaaaaataaaaatgatggatttaatcagcaaagctgaaagttaa

SEQ ID NO: 274285 - DNA, 798 bp, Morganella morganii
atggaactttccgttgtacaaatcgtcctggtcttcatcgttgcctgtgttgcaggtatggggtcaatcctcgatgaattccagttccaccgcccgctggtcgcctgtacgctgatggggatcgtactgggtgatatgaaaaccgggatcatgatcggcggtacgctggaaatgatcgcgctcggctggatgaacatcggtgcggcagtggcaccggatgcggcgctggcatccatcatttccaccatcctggttatcgccgggggccagaacatcggtgccggtatcgcgctggccattccgctggcggctgccggtcaggtgctgaccattatcgtccgtaccatcaccgtggccttccagcacatgggtgaccgtgcggctgataaggggaatctcaccgcgctggggatgatccacgtcggtgccctgctgttacaggcaatgcgtatcgctatcccggctgtcattgtggccgtgtctgtcggtactgatgttgtccgtgaaatgcttgactcgattcctgactgggtcaccaacggtctgaatatcgccgggggcatgattgttgtggtcggttacgcgatggttatcaacatgatgcgtgccggctacctgatgccattcttctatctgggtttcgttaccgcggcatttactgatttcaacctggttgcgctgggtgtcatcggtgcggttatggctgtgctgtatattcagctcagtccgaaatacaacaaatcggaagtcgttgtcgctgccggcagcaaaaacgacctggataacgagttagactaa

SEQ ID NO: 274286 - DNA, 858 bp, Morganella morganii
atggttgatactacaagcaacgtaaccggcagaaaacagttaagaaagagcgacatccggggtgtcttcatccgctcaaacctgtttcagggttcatggaactttgaacgtatgcaggcaatgggctacgccttctccatggtaccggtgatccgccgtctttatccggaaaataatgaagaacgcagacaggctatcaaacgccatatggagttctttaacacccacccgtatatggctgcaccaatcctcggtgtaacctgtgcgatggaagagcagcgtgctaatggtgcggctatcgacgatggtgccatcaacggtatcaaagtcggcctgatggggccgctggccggtgtcggtgacccgattttctggggtaccgtgcgtccggtcttcgccgccctcggtgcggggattgccatgaccggcagcctgctcgggccattactgttcttcttcctgtttaacctggtccgcctggcaacccgttactacggcgtggcttacggctacaaaaaaggcctggatattgttcaggatatgggcggcggcttcctgcagaaactgacagagggggcgtcaatcctcggtctgtttgtcatgggtgcgctggtgaacaaatggacaaaagtgaatatcccgctggtggtgtcggaaattaaaaacccaaccaccggcgagatggaaattaccactgtccagaccatcctcaaccagctgatgccgggcctgatgccgctgctgctgacattcggctgtatgtggctgctgcgtcataaagtgaatgccctgctgattattatcggcttctttgtgctgggtattctgggttatgtctttggtttcctgggactgtaa

SEQ ID NO: 274287 - DNA, 459 bp, Morganella morganii
atgagtgtaaatgatattgttctgctggctgtgattgtgctgatgctgctgtttgccgtctacgacgaatttattgttaacacactgaaaggcaaaacacagctgcggataaaactgcgccgtaatcaccgcgctgacgctgtgatctttatccttcttatcggtattgttatttataataatataaccggacacggcagtccgttaacaacttatttactttccggctgtattatcattgctatttatctggcttttattcgttcaccgaagttatattttaagcaggacggatttttttacgccaatgcatatattaaatatgacagaataaaaacaatgaatttatcagaagacggcattcttcttgtgggtttggaaaatcgtaaaatttacatcaaagtcacgcatcttgatgatttacaaaaaatttataattttatgattaataataaataa

SEQ ID NO: 274288 - DNA, 570 bp, Morganella morganii
atgagtttttacgccaccctcgtccttgccctggccctgtctatggatgccttcgccgttgctgtctgcaaaggcgctaccctgcacaaaccacctttgcgtgaagcactgcgcaccggatttatctttggtgtgattgaagccctgacgccgctgatcggctgggctatcggtatttacgccagccgctacgtgatggaatgggatcactggattgccttcgcactgctgtttatcctcggcgcccgcatgatttacaacagcgtcaccgccggtgatgactgctgcgcccgtcatgaaaagccacagcgccacagcgcattacaccttgccaccaccgccgttgccacgagcctggatgcgatggcaattggtgtcggccttgcgtttctggaagtcaatattgtccataccgcgatgactatcgggctgatgaccatgattatggctaccaccgggatgatcctcgggcgttatatcggcccgatgctgggcaagcgggcagaaattgtcggcgggattgtactgatcctgatcggatttaccattctgtatgaacatattggttaa

SEQ ID NO: 274289 - DNA, 816 bp, Morganella morganii
atgtcttaccaatgtccgctttgccagcacccgctgacgcaccgctccggcagttacagctgcgaaaaccaccatcagtttgatctcgcgaaagaggggtatatcaatctcctgcctgtccagttcaaacgctcgaaagaaccgggtgacagtaaagagatgatgcaggcgcgccgggcatttctggataatcaccattaccgcccgatgcgggatcaggtaatcgcggcatttgagcagtatttaccggcacaggcggagcaggtactggatatcggctgcggtgaggggtactacaccggcgcactggcggaaagccttgcggtacggcaggtgacggtgtacgggctggatgtggcgaaggttgctgtccgctacggcgcaaaacgctatccgcaggtcagcttcagtgtggcatccagccagcggctgccgtttgaggataacagtctggatggagtgctgcggatctatgcgccgtgtaatccggatgagttaacccgtgtggtgaaaccgggcggcattgtgattaccgtgaccccggggccgcgtcatctgtatcagctgaaatcccttatttatgatgaagttcatctgcacccgctgaaggaagagcatttcccgggattcggtccggcacaagagcagcaggtggcttacccgatgctgctgaatggcgcggatgcgctcgcactgctttcgatgaccccgtttgcctggaaagcgacagaggctgtgaaacatcagctggcagcagaaaccgccttttcctgcgaaacggattttctgatccggatataccgccgggaagcctga

SEQ ID NO: 274290 - DNA, 141 bp, Morganella morganii
atgaaaacctactggtggcaggataaaattgatgattatcagcaatggcacagcctgcttgtcagggttaatgcacctcacagctattttgcagcggacggaagagacagcgtgaccgctaatcagataaatctgctgtga

SEQ ID NO: 274291 - DNA, 723 bp, Morganella morganii
atgttcagactctcccgcacctttattgcaccactcctgctgttattttccgcctcgctgtttgcggcagccgaaaccaaacctgcggcaccggcagatttggatctggtttttgttctggacaaaagcggctccatgtccggttttgaacaggacaccatcggcggttataactccgttcttgccaaataccgtaaaaaagaaggcaatatttacgtcactaccgttttattcaaccacgaaaacagtacgctgcataaccgcgagcctatcagcaaagtcaaaaacctgaccccggatgattactctgccggtggtaataccgcgttactggacgctgttggtattactattgataaaatccgcgaaaaccgcaaaattaccaaaaacaataatgtgttatttgtcattattactgacggtgcagaaaacagcagccatgaatatagtcgtgataagattaaatcaatgattaattctgcggaaaaagaagataagtgggactttattttcctcggtgccaatattgatgctatcgcagaagccggaaatataggaattaaaagcgataatgccaccggttatgtgcaggataaagccggttacggcaaagcgtatgacgccgtaaataaagcagttgaagtaaaacagcaatcaaaaccaattacttccgaatggaaatctgaagtcgaaaaagataacaacgaacgcagtaaaaaataa

SEQ ID NO: 274292 - DNA, 264 bp, Morganella morganii
atgtttaaaaaatcttgtcttttattagcattaattccgtttatttctgttgctgcgccgggtattgatgaaagtgatgatgtcacaacctcaatgcctgattttgccaccggtaaaattgaacaatctgccggtgttaaattaggttcgggatttatcagtaacgaggctaataacacaattatcatcggtaactctgcggttgccaaaggtgaaggctctgttgccctcggcagcaaagcggtttctgacggaatgaggtga

SEQ ID NO: 274293 - DNA, 456 bp, Morganella morganii
gtggccggtggctcagaagataccgatgcagcgaatattgcccggctgaatgtggtcaataataccgccactgcggcagaaaacaccgccaaagccgctgatacaaaagcaacggatgccaaaaaagcggcagatgccgcagacggtaaagccactgaagcacaaaaaacagcggtaacagcaaataccaatgcgattgatgcccgtaatacagcttataccgtcaataccacagcgcagaaagccaataataatgcgtataatgcgtataatctggcaacacacaactcagcccgtattgataaactggagctgcgttatgatgagctgaatgacaagatgcagcgcggctttgcaatgtcagcggctaccgtttcaatgaaaatgtggctgttaaagcaagcctggcgacctcaacatcaaacggtggtgatgtcatgtacggtgccggtatga

SEQ ID NO: 274294 - DNA, 543 bp, Morganella morganii
atggcttacgcacataaaaagcactttaataaagcattattggcattattactgacttcacaaagcacaccatcattttccgcaatggattacgaagtctcaaagataaaagatattggtcagtcatccgccatgtctgctgatggtaaagtaattgccggaacttatgaaatctcaaatgataattaccgcccttttattattattgatggtaatgcagctgatctgagcaaatatacagccggaaataacagtatttatatctcaggcctttcagcggacggtaatatccctgagcagcaggcatttgccagtgtcgcttccctgggtatttccggtgacggcaagaccgttatcggcattgctgacgaaaaagctttccgctttagcggacaggacagtattacattattagatccgtcagaaaccgcaacatccaccgcaaacggcgttaattatgacggcagtgtaattgtcggccgatttatcagcggcagcggtcaggctccggtgataaaggcatggtttcactgggcacactga

SEQ ID NO: 274295 - DNA, 1596 bp, Morganella morganii
atgactaatccgcaatcatcagcctggtcgccgctgcgtaaccgtatattttttgtgttatggatggcgacattattttctaacatcggaacatggatgaatgatgtcggtgcgggatggctgatgacaaatctgagtcctgatcctgtcatgattgccaccattcaggcgatgaccacactgccggtctttttattggccttaccggccggggcgattgccgatattttcgataagcgcaagctgcttatttttgtcaatatcatgatgttctttgccgctgcattactggctgttctggtttatttcaatgtggtcagtatcggctggttattgttaattacctttattctcggatccggggcggcttttttaggcccggcatggcaggcgattgtcccgggaattgtggcaccgcatgaattaaaagcggggatcgcactgaacagtatggggattaatatcagccgcgccatcggcccggcactggccggtgtgctgatttcgcaggtggggctttatcttccttttatgcttaatgcactcagctttattgccattattgtggcggtatggtggtggaaaggggagaaacacaaagaaaataccttaccggcggaatccgttgtcgccgcgatgatttccgggctgcgctatgcccgttacagtccggcattgattaaaactattatcagagccgccgccttctttgtgttcgccagtgcgtactgggcgatgctgccgctggttgccagagtatcgcttcagggggatgcaacgttatacgggattttaaccaccagtatcggtatcggggcggttgccggggcattcagtttatctgcgctgcgggcccggttcagtaccggaatattagtgaccgccgggaccgccggaacggttattgtgctggtgatttttgccgtgaccacatcaaaatatctggcaatcgccggcagtattatcgccgggttcagttggctgatcacgctgtccacactgatggtgtcagcgcagacagcactgccggactgggtcagagcaagagggctggcgctgtatctgacagtattctcagggtcaatggcgctggggtcattaatctggggacagattgcctcacacacatcaataacaatcgcgctgcttgcggcggcggccggtattcttgttgtctggttatgtgtgctgaaagtgaaaattgaccacgacaacatcaacttatcaccatctgaacatctgacaatgccggaggaattaccgttttattctgaggaagataaaaaaccggtgatggtgtgtattcagtataaagtggatgcggaacatcaggcgcagttttttgcgctgatggaacaattaaaacggatccggttacgggatggcggttattccagagggctgttttcagttcccggcacacaggatgaatttatggagacatttatggtgtcatccccggcagaacatcaccgtcagcataaacgggcaaccgcggatgatcgcaggattgacagtcagttaaatgccattatccggagcaaaacggttgtgcattatctctcatattctgcggatacggaaaaacagaaataa

SEQ ID NO: 274296 - DNA, 1869 bp, Morganella morganii
atgaataaacgcttcgcatcaaaaatatttatcaacggtgatattcatacactcgatcgtgaaaatcccgttgctcaggccgttgctgtccgtgacggcaaatttattgctgtcggaaccaacgatgaagttatgcagttccggaatgaagaaacagagattattgatcttaaagggcaggtaattattcccggcctgaatgactcgcaccttcatcttatccgcggcggactgaattataacctcgaattgcgctgggaaggggtgccgtcattatcggatgccctggcgatgttaaaagcacaggctgatgtgacgccggtgccgcagtgggtccgcgttgtgggtggctggagtgaatttcagtttgccgaaagacggatgccgacattagacgaaattaatgcggtttcacctgataccccggtttttgtgctgcatctttatgacagtgcgctgctgaataaagcggcactgcgtgtgatcggttataccagagataccccgaacccgccgggcggtgaaattcagcgggatgagcacggtaatccgaccgggatgctgattgcaaaacccaatgccatgctgctgtattccgcgctggcgaaaggcccgaagctgccgctggattatcaggttaactccacccgtcagtttatgcgcgaacttaaccgtctcggggtaaccagtgcgattgatgccgggggcggattccagaactatccggaagattatgaggtgatcgcggagctggcaaaacagaatcagctgactatccgtatcgcctataacttatttacccagcgcccgaaacaggagctggaggacttccgcgaatggacatcgatggtgtcgccgggagagggaaccgattttttccgtcacaatggtgcgggggagatgctggtattctctgcggctgattttgaggatttcctgcaaccgagaccggatctgccggacaatatggatgcagagctggaagcggtgatccgccacctggttgagcaccgctggccgttccgtctgcatgccacttatgatcaatccatcagccgtatgctggatgtgtttgaaaaagtaaataaagagatcccgtttaacggcctgcactggtttttcgatcatgcggaaaccatcagtgaacgaaatattgaacgggtaaaagcgctgggcggcggattggcaattcagcatcgtatggcattccagggtgaatactttgcggaccgctatggtcatgaagcggtgaaacacacaccgccggtggcaaaaatgctgaacacagaggtgccggtcggtctgggaacggatgcgacgcgcgtggccagttataacccgtggacagcgctttactggctggtgtcgggccggacagtcggcggcatgaagatgtatgacgacaataaccggttagacagagataccgcattggcgttatggactatcggcagctcctggttctctgatgaacagggtaaaaaagggcagattaaatcaggacagtttgcggattttattgccttatctgacgattatttccgtgtaccggaagcggaaattaaagcgattgaatccctgctgacggtggtaaacggcgaggttgtttacggcaacggtattttcgggccgctggcaccgccgtcaattccggtattacctgactggtcaccggttattaaagtgcccggacactactcttatttacagcaggaaaataaagccgcgatcctgaatcagttacatcagtgctgcggttcgtgtcatgttcacggacaccagcatgatatcgcccgtaaatcgtctgtgccggttgcggatgataatgccttctggggcgcgctgggctgttcctgttttgcattttaa

SEQ ID NO: 274297 - DNA, 645 bp, Morganella morganii
atgtctaaattagaactgttaaatccgcaaaattctgccgttattcttattgatcatcagccgcaaatggcctttggtgtggcaaatattgaccgccagcaactgaaaaataatactgttggcctggcaaaagcagcaaaaattttcaatgtgccgacaatttatacctccgttgaaacagaaagtttcagcggatatatctggcctgaattactcgccgtccaccctgaatcaaaacctatcgaacgtacctccatgaactcatgggaagacccgaaatttgtcgaagccgttaaagccaccggacgtaaaaaattagtgatggcggcattatggacagaagtctgcctgaatttcccgaccttaatggcgattgaagcaggctatgaagtttatattgtgactgatgcatccggcggtacgtcagttgatgcacatgaacgttccattgaccgtatggtgcaggccggggcgattcctgtgacctggcagcaggtattgctggagtaccagcgcgactggtcccgcaaagaaacctatgatgcagtgatggggctggttcaggagcacagcggtgcttacggtatgggtgtcgattacgcctatactatggttcataaagcacctcagcgcgttattaagtaa

SEQ ID NO: 274298 - DNA, 240 bp, Morganella morganii
atgcaaatgatttttgggtatgttacagccctgatggccaggcccatttgctgggctatgaatcacaagcacgggcagaagcctctgccgataatactcatacagcacaatggttacttaatgcgtctgtatctgcaaccggcgaacaaatttggtatttatggcaatcggaaaacgacgataattgcagttttgaagaaaaaagtgcgcacacaaacgcgactgctcagcgttacttaa

SEQ ID NO: 274299 - DNA, 297 bp, Morganella morganii
atgagccgtcgcggtaactgtcacgataatgcggttgcagaaagctttttccagttgctgaaacgcgaacggataaagaaaaagatctacggaacgcgggaagaagcccgcagcgatatttttgattacatcgaaatgttttataacagtaagcgtcggcatggttcgagcaatcagatgtcaccgacagaatatgaaaaccagtattatcaacggctcagaagtgtctggattatccgtggcgattcaatcagaatttggcggcatagtcgccgggtacgaagatcggaaccataa

SEQ ID NO: 274300 - DNA, 282 bp, Morganella morganii
atgaatcgtgtcgggataaaggctcaggtcgggtaccggagcccgcgggcacacaaaggcgaggtcagtatcgtatcgcccaacaggctccagcgacagttcaatccggatgctccggatgagcgttgggtaacggacataacttacatcaggacccacgaaggctggctgtatcttgccgtggttgttgatctgttctcacgcaaaattatcggctggtcaatgcaatcccggatgataaaggacattgtcttgaatgcgcttctgatggccatatggtga

SEQ ID NO: 274301 - DNA, 279 bp, Morganella morganii
atgagcggtaaacgttatcccgaagagtttaaaattgaagcagtcaagcaggttattgatcgcggtcattctgtttccagcgttgcaacacgtctcgatatcaccacccacagcctttacgcctggataaagaagtacggtccggactcatccactaataaagagcagtcagatgctcagaccgagatccgccggctccagaaggagctgaagcgggttactgacgaacgtgacatattaaaaaaagccgcggcgtacttcgcaaagctgtccgactga

SEQ ID NO: 274302 - DNA, 327 bp, Morganella morganii
atgttgactgacaccaggctgcgtcaccttaagccgaaggaggaactctataaagttaatgaccgtgatggtctgtatgttgcggtcactccggctggaacgatctcatttcgttataactattcaataaacggaagacaggagaccgttacttttggccgctatggtgtgggagggatcacgcttgcagaagcgcgtgaacggctcaatgaagccaaaaaaatggttgccggtggaagatcgccagcgagggaaaaagccagagataaagcgcgtatcaaagatgtgaatcgccacgggtttaacagacacctcagagtcatttaa

SEQ ID NO: 274303 - DNA, 1578 bp, Morganella morganii
atgacaacgaatattcatcagcaccgcattcttatcctcgactttggatcgcagtacactcagctgatcgcgcgccgtatccgtgaaatcggcgtttattgtgaactgtgggcatgggatgtcactgaagaacagatccgtaatttcaatccgaacggtattattctctccggcggcccggaaagcaccactgaacacaacagcccgcgcgcacctgaatatgtcttcagcgccggtgtgcctgtcctcggcatctgctacggcatgcagaccatgtctatgcagctcggcggcgcagtggaaacctctgacgaacgcgagtttggttatgcacaggttgaaatccgcgaaacctgcgaactgttccgcggtattcaggatatgctggatgacaacggcaagccgctgctggatgtgtggatgagtcacggtgataaagtcactgctatcccgtctgatttcgtgactgtcgccagcaccgaaacctgtccgtttgcgatcatggcaaacgacgaaaaacgtttctacggcgtgcagttccacccggaagtgacccatactcaccagggccaggaaatcctcaaacgtttcgtgctggatatctgccagtgtgaagcgctgtggaccccggaagccattatcgaagacaccgttatccgtctgcgcgagcagattggtgatgaccatgtcatcctggcactctccggcggcgtggattcatccgtgactgccatgctgttaaaccgcgctatcggcaagcgcctgacctgtgtattcgtggataacggcttactgcgcctgaacgaagcagagcaggttatggagatgtttgcgggcaaatttgacctcaatatcatccacgccaaagcggaagaccgtttcctgaatgccctgaaaggcattgcggatccggaagccaaacgtaaagctatcggccatacattcattgaaatttttgatgaagaagcatcaaaacagaagcaggtcaaatggctggcacagggcaccatctatccggatgtgattgaatctgctgcatctgaaaccggtaaagctcatgtgatcaaatctcaccataacgtcggcggcctgccggaagatatggaactgggtctggttgagccgctgcgcgaactgtttaaagacgaagtccgccgtatcggtctgcagctgggtctgccgtacgatatgctgtaccgtcatcctttcccgggcccgggtctgggtgtccgcgtgctgggcgaagtgaaaaaagagtactgcgacatcctgcgccgcgctgatgctatctttatcgaagaactgcacaaagcggatctgtaccacaaagtcagccaggcattcactgtcttcctgccggtacgttctgtcggcgttatgggcgacggccgtaaatacgactgggttgtctcactgcgcgcagtcgaaaccatcgactttatgactgctcactgggcacatctgccatacgacctgttaggccgcgtctccaaccgcatcatcaatgaagtcgacggcatttcccgtgtcgtgtacgacgtcagcggcaagccaccggcgacgattgagtgggaatga

SEQ ID NO: 274304 - DNA, 1467 bp, Morganella morganii
atgttacgtattaaaaaagaagctttaacctttgatgatgttctcttagttcctgcacactccacagttctgcccaacactgccgatttatcgacacaactcaccgcgaaaatccgtctgaacgtcccgatgatctcggcggcgatggataccgtaacggaagcccgtctggcgattgctcttgctcaggaaggcggcatcggttttattcacaaaaatatgtccattgagcgtcaggctgatgaagtccgccgtgtgaaaaaacatgaaagcggcgtggtttctgatccgcagactgttactccgtgcaccacactgcgcgaagttcagaccctgactgagcagaacggctttgccggttacccggtggtcactaccgataacgaattagtcggtatcatcaccggccgtgatgtgcgtttcgtgactgacctggatcagccggtgactgccgttatgaccccgaaagagcgtctggtgaccgtccgtgaaggcgaagcccgcgaagtggttctgaaaaaaatgcacgagcgccgagtggaaaaagcgctggtggtggatgattccttccatctgctcggcatgatcaccgtaaaagatttccagaaagcagagcgcaaaccaaacgcctgtaaagatgagcacggtcgtctgcgtgtcggtgcggcagtcggtgccggtgccggtaacgaagagcgtgttgatgcgctggtggctgccggtgtggacgttctgttaatcgactcctctcacggtcattccgaaggcgtgttacagcgcatccgtgaaacccgtgaaaaataccctgatctcgaaatcatcggcggtaacgtcgccacagccgaaggtgcgaaagctctggcggcagccggtgtcagcgcagtaaaagtgggtatcggccccggttctatctgtaccacccgtatcgtaaccggcgtgggtgtaccacagttaaccgctatttctgatgctgttgaggcactggaaggcaccggcattccggtgatcgctgatggcggtatccgtttctccggtgatatcgcgaaagcgctggcagccggtgcggcatgtgtgatggtcggttcgatgttcgccggtactgaggaatctccgggtgaagtggaactctatcagggtcgtgcttacaaatcttaccgtggtatgggttcgctcggtgcgatgtccaaaggttcttctgaccgttacttccagaccgataacgccgctgacaaactggtgccggaaggtatcgaaggccgtgtggcttacaaaggtgtgctgaaaaccatcgttcatcagcaaatgggcggcctgcgctcttgcatgggactgaccggttgtgcaactattcatgaactgaatactaaagcagagtttgtccgtatcagtggtgccgggattcaggaaagtcacgttcatgatgtgactatcaccaaagaagcaccaaactaccgttcaggtctctga

SEQ ID NO: 274305 - DNA, 1377 bp, Morganella morganii
atgttgctacctgaaaataccgcaatttttactgttacccggttaaatacgactgtccggcagttactcgagctggaaatgggccggatttggatcagcgcggagatctccaacttttcgcgtccgtcttccggtcactggtattttaccctgaaagatgaaaaatcccaggtgcgggcagctatgttccgcggcaacaacagccgtgtgacatttgcgccgcagaacgggcagcaggtgctggtacgtgccgcgatcacgctgtatgaaccgcgcggggattatcagctgattgttgaatccatgcaacctgccggtgaaggtctgcttcagcagcagtttgagctgctgaaagagaaactgaaagccgaaggactgtttgatactcatctgaaaaaaccgctgccggtacctgccacctgtgtgggcgtggtgacatccgccaccggggccgctcttcacgatattctgaatattctgcgccgccgtgacccgtcactgccggtgattatctaccccgctcaggttcagggtactgatgcaccagcacagattgtccgtgcaattgaaaccgctaaccgccgtaatgagtgtgatgtgctgattgtcgggcgcggcggcggttcactggaagatttgtggagtttcaatgatgagcgggtagcgcgggcgatttttgccagccgcctgccagtgatcagtgctgtcggccatgaaacggatatcactattgccgattttgtcgcggatttacgggcaccaacgccgtctgcggcggcagaactggtcagccgggacctgacagagcgcctgcggcagatccagtcagtacaacaacggctggaaatggcgatggattattttattgcccgaaaacagcggttgttcagccagttacatcaccggttacagcagcagcatccgcaattgcgtctggcgcgccagcaacagctgattcagcgcctggaacaacggctgattcaggccggacagcttatgctgactcaaaagtcccgtcagctgacacagacagaacagcgtctgatgcgccgggatccgcgcccgcaactgcaacagcagcagcgccatattcagcagttgcagtaccgtctctcctctgccatgcgtgaacagctcagtcagcagcgcgaacggtttgcccgtctctgctcaaccctcgagggtgtcagcccgctggcaacactcagccggggcttcagtatcagccagacagacagcggtgaagtgctgaacaaaacccatcaggtaaaagtcgggcaaaaaatcaccacgctgttacaggatggcagtgtggagagtgaaattatcgccgtgcacaaaaaagcggctgcccgtaaacggaaagccgctgagtaa

SEQ ID NO: 274306 - DNA, 2037 bp, Morganella morganii
atgactatcccgcaagccccggaacgcccggtacagttcactgcacatggtgaaacccggacggataactattactggctgcgggatgatacccgcagtgatccgcaggtgattcagtatctgacggatgaaaaccgctatacacagcagaaattgcagtccgcagagccgctgcgcgaagcgctgtatgaggagatggtcgcccgcatgccgcaggcggatgaatccgcgccatacagttacaacggttatgtttaccgcacccggtttgaggcgggcaaagagtatccgctgtatgagcggcgtaaaataaacagcagccagtgggaagtgctggcggacggcaatgaacgggcacaggggctggcctattatgagctggtgtctctggcggtcagtgcggataaccgccgtattgcgattgcggaggataaagtcggccgccgtgaatatcaggtggcttaccgtgatctgaccaatgaccactggcaggaatccgtactgacaaaagtggccgacgatctggtctggtcagccgacggttcggttctgttttatgtccgtcaggatccgcagacattgctgccgttcgaggtatatcgccaccgtttcggcacagataccacacaggatgaactggtataccgcgaggacgatgaccgtttttatactgggttatccctgtcatcctcccgtgaatggatttttatcggctgccacagcccggtaacttccgaagttcagcttatcaatgccaatgcaccgttacagccgccggtctgtttctcgccgcgtcaggacgggcgtgagtatcacgtcgatcatctggatggtcagttttatatccgctctgaccatgaaaacgaactgtttggcctctaccagacggaggcgccggaaaatccgtggcaaactctgattgcaccgcagccggataccgatctggaagatttcacgctgttccgtgactggctggtattacaggaacggcacgccgcgctgccgcagatccgcattattcaccggcagagcgggaaagaaacacaggttgcgtttgatgatggcgcttactgcgcgtggctcgggctgaatccggagccggacagtcagttgctgcgctacggttatacctcgatgaccacaccggcatcggtgtatgagctgaatatggtcagcggggaacggacactgctgaaacaggcacaggtaaacggttttcagcgggataattatcacagtgaacgaatttggatcaccgcccgtgacggcgtgcaggtgccggtttcgctggtctggcataaagatcactatcagcagggatttaatcctctgctgattgaaggttatggcgcgtatggtgccagtatggatccggatttcgacaccaaccggctgagcctgctggatcgcggttttgtttatgctcaggcgcatatccgcggcggtggtgagctgggtaaacgctggtacaatgccggaaagatgcagcataaaatcaacagttttaatgattttgtggatgtgacacgcgaactgattgcccggcgttatggtgctgaaaaccggatctacgctaccggcggcagtgcaggcgggttgctgatgggggcggtgattaatcaggcaccggaactgtatcgcggtatcgtgacacaggtgccgtttgtggatgcactgactaccatgtcggatccgtccattccgctgaccaccggcgaatatgacgagtggggcaacccggaaaatgaatccgcttaccgggatatccgtgcctacagcccgtatgacaacattgaggcgaaagcctacccgaatatgctggtgaccagtggcctgcatgattctcaggtccagtactgggaaccggcaaaatgggtggcaaaactgcggaaactgaagacggatgataatctgctgctgctctataccgatatggaagcgggacacggcggtaagtcagggcggttcaactatttgtgggatgtggcgctcggttatgtgttcctgctgatggtggatgaacaacaggaatcgtga

SEQ ID NO: 274307 - DNA, 549 bp, Morganella morganii
atgaaacagtaccgcgttgctgttgttgtcggttcactgcgtgagcagagttacaaccgtcagctggcgcatgctctggtctctcttttccccacacacattcagtgcgaatttgtcagtatcggctcactgccgctctataatcaggactgtgatgcacagccgcctgctgaggtgctggcattcaaacagcagatttcacaggctgacggcgtgatttttgttacgccggagtataaccgttctattcccggtgtgctgaaaaacgcactggatcagggctcccgtccgtggggacaaaacagctgggacagcaaaccggccgccgtgatcggtacctccgccggggcgatgggtaccgctatggcacagcagcatctgcgcaatgtgctggcatttctgaatatgccgacactcaatcagccggaaatgtacctgcaatggtatgacggcatgttcggcgaaaacggtaaattcagtgaaaaaaccggtgcgtttgtgcagaaatgggcagatgcatatgtccgtttcctggaagcgcacggctga

SEQ ID NO: 274308 - DNA, 807 bp, Morganella morganii
atgttacgcatcaccgcactactggaaaatacgaatactgacccgaaactggattctcacgccggtctcagcctgttgctggaggacggggaaacttcgttgttgtttgacacgggcgcggatgatacttatatccgcaatgcacaggcactggggatttcactggaaaatattgatgcggtggtgttgtcgcacggtcattatgaccatttcggcggattaacccgtacagaacggcataatctgccgtcggcgctgaaggtgattgcacacccgcatattttcgagccgcgccgggccgcattgtggctgggcagttacccgctgaaattcaggcggttatctccgttattttgtgaagaaacactacgccgtgactatcagttcgtgctgacggaaaaaccgtatgccatctcatcccgctttctgttcgccggagaaataatgcagcgggccgtggtgcgccgttacggggtactgctcagtaacggggaggcggactatgtccgtgacgacagttttctgatctggcacggggaggaggggattgtgattatcaccggatgcagccattcaggcattgagtcagtgatacagcatgcgcgtgccctgacagataatgcaccggtgcaggcggtggtcggcgggctgcatctgcgccgggcaacaccggcagcactgcgccgcgcacaggaggctgtggatccgcaaacccgggtgtacggctgtcactgtaccggtgccagagggcgtcaggccctgaatgcggacgattttaataccgggcagcagctgacattccgctga

SEQ ID NO: 274309 - DNA, 459 bp, Morganella morganii
atgggaattattaccgcttttgcaaaaagcatcgataacagtcagcttttacgtcttttgcatcagcaaatagagaaacagaatgcgccggtagcctgccgtgacgatctggacgatcagctcaccgatatcgccgcctatatgcacgatgaagattatcccgccctggcaaaacgccgcaaaaaggtgaatatgctgaccgggttactcgccctgccggtattactcttctccctgctgctgttttcacagaagattattgatgccctgtcactgaatatcgacatcagctatttatccctgaccctgctggactacagcctgacctatatctgggccgtatttatttatgccgccgtgttgttcggcaccattttttatttttatttcctgcaaaaacagacagaaaaatatgccggtcacctgattgatgattttataaaccggatatcacattaa

SEQ ID NO: 274310 - DNA, 666 bp, Morganella morganii
gtgcaaattctattagtcgaagacgatttacaattaggcaaagcactgtgccggggactggaactggccggttttcgtgtgtgctggctgcgtttactggccgatgcccgtaagcggctgacagaacagcattttgacctgatgctgttggatctggggttaccggacggtgacgggtttgactctctggtggagtggcgcaacagcggggaacaaatcccgattattattatgaccgcccgcaatcagcgtgatcatctggtcaattccctcgattcaggggcggatgactttatttccaaaccggttgagctgccggaattaatttcccgcgttaaagcggtttcccgccgtattgccggtttttcctcacagttatggaaagtggataatatcacccttaacccgatgaaccatcaggtgacactgaatgacgagttattactgctctccggcaaagagtatcagctgttatatgaattaatgcgcaataccggtaatgtggtgcgcaagcatgagctggagcagcgtttattcggactggacgataaaatcgaaagtaattccctggaagtgcatatccataatctgcgccgcaaaatcggtaaagagaaagtgattaccgtccgcggaatcggctatctgctgaaaaaggacagcgaataa

SEQ ID NO: 274311 - DNA, 1419 bp, Morganella morganii
gtgagaatccgctcattctttgtttataccgttctccttcagaccttctcaatgctcctgctgtggggcgtctggatcgcctggctgaaatacgcctatctgcccggtttaagtgaagattttaatgcccagcagatggtgattgcccgtggtgtctctgacacgctgcgggaaacccccacggattccgctaccttcccgcagattgcccgcgccctggagagtatgtacgccaatgcgatgaaaagcggcctggaagaggaaaattatgatccgctggtcgccattctgcacagtacaacaggtgaagtgctgtacagtaataaaccggatgttcatattccgctgaaaccggacggaatcgagcgtttcaccgaggacggcgaaacctggtatcttgcttataataccgaccccgatatgcagcgcaccgcggttatcggggaatccggcactgaccgtcatatgctgatcggcgacccggcaaccggcaccgccgtcccgctgctgtttattctcggcaccatgctctcatccacgattatcaccacctatctcagcctgcgcccgctgcgtgaaaccacccgcagtatcgccacccgtaaccccggcaacctgacacccatcagcatgaaatatcagtacaatgaaatgcgtccggtactgcatgccattaaccagctgatgcagcgggtggatgccgccaatctgcgggaaaaacagtttatggcagatgccgctcatgaactgcgtacgccgattgccgccgtactggcacaaattcatctgctcaaacagattgatgacccggcggagcgcaacgaaataaccgctgatatggaaatcagtctggatcgcgcggtatcactgtcacggcagctgattgatctggcccggctggaaacggaagattatccgctgaaaatggaagagatcgacctgacccaggcgctgagtcataccattgccatgctggtgccctacgccctgcgcaaaaatattgagttttccttcgacggcccggaaagctgcattgttgtcagcgataaacaggcactgttctccatcatcaacaatattctgaataatgctgtgaaatactgcccgccggacagtcaggcagaagtctcgctggacacaggcaacccggaggaagtgcagattattatccgtgataacggcaacggcatcagtgagcagtacaggcaccgcctgttctcgcgctttttccgtgtgccgggctgcagtgagaacggcagcggtctcggtcttgccattgcacagaatctggcggaaaaaaacggcggttatctctccgtcaccgacggattgcagcagcgcggtatcgggtttgtgatccacattccggcaaaaaaccgtgaaatttccgctgcttcccatgacagttctgaaacataa

SEQ ID NO: 274312 - DNA, 573 bp, Morganella morganii
atgaaacaggcactgattattatcgaccttattaatgacattaccggcaaacacgggctttccaacgcctgccatgagcagactgccgcccgtaacctgattgcggccacacgggaaaccgcccgtcaggcgcggcagcgggatattcccgtggtgtgggtgcgggtcgggtttgcggatgactggcatgatatccccgccggatcaccgatgtttcagcgggcaaaagagattggtgccctgaaactgagcggcagcggttgtgactgggcagacggtacggatgtacagaaagaggatatctgttttgtgaagaaaggcgtcagtgcctttgcgggaaatgatttgctgatctggctgcgcaaagccgggattgaacatcttgttctggccggtgtcagcacggtgatggcgattcagagtaccgcgcgttatgcccacgacagcgggttttatgtctcggtagcggaggatttgtgtgccgcaccgacagcggagctgcaccagataagtctggagatgctccgcccgatggcagctatcaccacatctgctgcctggctggcacaataa

SEQ ID NO: 274313 - DNA, 327 bp, Morganella morganii
atgccggatacattatccattctgacggggatcgcgctgctggcggtcggtacgtatgccatgcgggcgtccggggcgctgctcagcgggcgtttctcggtgtcgtcacacgttaaaaatctgctttccacgggggcgattgtcattctgtttgctgtggcggtaacgatgacgattttcagcggacaggaattatcagactggccgaaaatggccggggtggcggttgcgggaatactgacgtggtataaaaagccgtttctggtgattgtgctggctgccgcgattgtgactgcgctgctgcgttatctgctgtcgctgtggtaa

SEQ ID NO: 274314 - DNA, 663 bp, Morganella morganii
atgaaactcgctattccactcgataatgccatgatccgcaatattttgctggtttgtgtggcggatttaattgtcggcgtttcctacggggcgctggcgcatgccaacggttttccgctctgggtaccgctgacattgtccctggttgtgctggcaggggcgtcagagtttctgtttatcggcgttgtggcggccggtggcagtccggtgtctgcggcgctggccgggttgctggtgaatgcccgtcatgtgccgttcagccttgcggtgcacgaccttgccggtaaaggcccgaaaaagctgctgggtttccatattcttaatgatgagagtgtggtgttcggtctggcggaaaaacagaaagacaaacagaaagccgcattctggctgtgcgggctggggatttttctgtgctggccgctggggacgatcatcggtgagtttctcggtacctttattgtggataccaaagcgctggggctggatgccatgttcccggcgattatcctggcattgtgcctgcctgcactgcgtgaggcgaaaacacgccgcgctgcgctgctgggagcggtgattgccctggcggcaacgccatttttaccgccggggatcccggtgttgttatcactgctggggctggtggtcagcctgaggagagcgtaa

SEQ ID NO: 274315 - DNA, 558 bp, Morganella morganii
atggattcacctatcaccccgcccctgcagatcatggctgtcaggctgaccgaagagcgtcagcgccagggacgttctatcgctgatgtcgcacgctgtgccggtattgcaaaatccacactgtcgcagctggaatcggcacagggaaatccgggaatcgaaacactgtggtcgctctgtgtggcgctgaatatcccgtttgccagtctgtttgaaaccccgaaaagccgggtaaccgtgctgcggcgcggggaaggcattcaggtcagtgctgagaatgcgtattaccacgcttttctgctctcttccgcttctgcggttaaccgccgtgacctgtacaccatcaccgcccagcccggcaaagaccgcgtgtctgagccgcatatggcacaggttaccgaacatatcctgctgatgaccggcagtgccgtcgtcggtacccttgatgagcccgccacacttttgcccggcgactatatttcctaccccggcgatgtcccgcatatttttaaggcgctggagcccgataccacggcagtcatgattattgagcactga

SEQ ID NO: 274316 - DNA, 573 bp, Morganella morganii
atgcttgattttaaccgtcagaatttaactcatatgacagccgatgccctgaaaaaacaacggggctacctgtggatcatcgccattcttctgctggccggtggtgtggcctgtctgatgaatccgctgatatccggtgtgactctcagctatattatcggggggcttctcctgataaacgggatctccatgttatttgtgacactcagcagccggctctacagcggcggcagtaagctgttttccgttctggttgcggtcgcctatctccttctgggttatgtgttcctgaccgaaccgctcaccgggatgctcagcctcgcaattctgctcgccattctgtttattgccggcgggatcctgcgtctgggttctggtctgcgtcagatgtctcaggctcgcggctggctgaacattatcatcggcctgctggatctgtttatcgcttacctgctggtcggtaacggcccgattgtatctgtcaccctgattgcgaccctggtcggtattgaactgctgttcagctcttttggtctgatcgccgccgcctctgtcctgaaaaagaataattaa

SEQ ID NO: 274317 - DNA, 1284 bp, Morganella morganii
atggagcaacaactgcggttatggctgcaacaacaatttgaactcagtaatgactacgcctcatgggcggccattaccggggttattgtccttattctggctatcgctgttattctgcatcttaccctgcacaaaggccttctgccgtatattgaacgccgcaccggtggtactcagcgtccgtggggcgcgttaattacccgcacccggctgtttaaccggtttgcctttctgattcaggggatagtgtttaatattcaggcgctgatctggctgggacgcggctctgccgcacaggagatcctcacgaccggcgcacaggcatggtgtctgttgttcggcatgctgctgctgttttccgtgatggacattcttcagaacctctcccgccataccccgtctctgagccgccttccgctgcgcggcgtgatgcagagcctgaaactgattatcgcggtgctcttcagtatcctgattatttcgctgctgataggaaaatccccgctgattttactgagcggactcggtgccatgaccgccgtgctgatgctggtctttaaagacccgatcatgggactggtagccggtattcagttatcggtcaatgacatgcttaatgtcggggactggctggagatgccgaaatacggcgcggacggtgctgtgacggatatcgggctgacgacggtcaaagtgcagaactgggataataccattaccactatcccgacttacgccctgatttccgactccttcaaaaactggcagggaatgacggcatccggcggacggcgcatcaaacgcagtatgaacctggataccaccagcatccgttttctgaccgatgaagagatcagccggctgcggcaatcaaacctgatagccgggtatatcgatgccaaattacaggaaatcgcagaatacaatgcgcaggaacccggagataccctgctcaaccagcggcggctgaccaatatcgggacattccgtgcgtatgcggaggcgtacatcaaagccagtccgcatattcacaagaagatgaccaccatggtgcgccagctggcacccacaccggacgggctgccggtggaaatctacgccttcaccaatgtgacggcgtggataagctatgagcaaatccagtccgatatttttgatcacctgttcgcgatcctgccgcaattctggctgcgggtacatcagacaccaacgggctttgatatgcgcggtattgcagcccatttcgcccgtgaatgtgaatcagaacgccgagccgggctgtaa

SEQ ID NO: 274318 - DNA, 564 bp, Morganella morganii
atggccggactgaaaaggagactgacaatggaagcacaacagattctggatttttggtttaatgaagccacaccggaacaatggtttaagaaagacacacagtttgatgacctgatccgccgccgttttcttaaggtatgggagcaggcagctgccggagaatgtttcagttggcgggcacacatcggcggacgtctggcggagatcctcgtgctggatcagttttcccgtaatctctggcgtggtgacgcgcggtcatttgcacaggacccgatggcactggtgctggcgcaggaagcggtgaaaacaccggattatctgcaattgcctccggttcagcgcaagtttgtgctgatgccgtatatgcattcagaatccgcactgatccatcagcaggcggaactgttgtttaaagggctcgatgagagcacagaggattttgagcggcggcacaaagcgatcattgaccgcttcggccgttacccgcaccgcaatgagattctggggcggcactccaccccggaagaggcggagttcctgttacagcccggctcggcgttctga

SEQ ID NO: 274319 - DNA, 894 bp, Morganella morganii
atgggaaaactgtccgcacacaccgccacattttacggcgttctggccattctgttctggagcactattgtcggattaatcaaacgggtcagtgaggatttcgggcctgctttcggtgcggcgctgatatacaccctcgggtcagtgatgttactgctggtgaccggatttccggccatccgccgctggccgcgccgctatcttatctggggcacgctgttgtttgtcagttatgagatctgctttattctggcgctcggtttttctcagaaccgtcaacaggcaattgagctgggtatggtgaactacctgtggccttccctgactgtcgggctggctgtactcatgggcgggcagcgtctgcgcctgtcgctgatagccggcctggtgctggcggtgctcggtatcagccgggtgattggcggagagaacggattatccctcagttctgtcgccgccaatgtcgcacttaatccgctgagttacggcctggcgtttgccggtgcggtgatctgggccttctacagtaatttgtcccgcaggctggcggacggtaataacggcattaccctgttttttatcatcaccgccctgatgctgtgggtggtaaccgcctttaacggcatcacactgcccgctgagttttccgtttccaccgttggttttctgattgccgctgcggcactgtcctgtgccgcaaacgcactctggaccattgcagtactgcgaggtaatgttgccctgataggcacactctcttatttcaccccggtactttccaccgcattttccgcattattactcagcaccgccctctcctttgcattctggcagggggtactgatggtcacctgtggttccttattatgctggctcgccacccgccggaaataa

SEQ ID NO: 274320 - DNA, 1134 bp, Morganella morganii
atgtccaaaaaacttaaacataaactggttaatttattcttgcagctttatacgcgccgccgtgatttttcgcactccgtcgctgcctttaaacagctggagactatcgacttccggaatattgttatttattcgacaacggcactcggggattttctgatgaataccccggcgattcatgaagtcagaaaacgttttcctgatgccagaattaccgttgtttccggcaataaaatggcaccttatatccgcaccggtatcggtaaggactgggatgatgtggtgtgctggaacagcaaagtccatactgtactgaaactggtcagggatttaaaagcgcacggaacgccggatctgattctgattatgcactcacataacccgtatgattatctgagcgcggtcatgaccggagcaccgtttgtttttcgctgtaatcattcggcatcaccttgtgcgcttattgaaccctggctgaccaatttcagcggctatggtcaccggcattcggtacaggcccgccttgatctgattacgccgctcggctgccgctttactgataaaagtgttgagatgcatgttccgtgcgatgtgacaaaagtaccatcctccgtaaaacgggttggttttcagatgggcgcatccagtgaagaacgtcgctggccggtagcgaactttgtggcacttacacgctatttgcttacccgctactctgacctcaatattgttctggtcggcgcaccgaatgaaattcatttgtctgatgaatttttcagcctgcttgaacctgaatttcacaaccggattgagccgctgatcggcaaaaccaccatcgaagaattaactcaggtcaccaataacctggacctgctggtcacaaatgataccggaaccatgcacctggcatttgcgttaaaaatccccagcatcagcttgcatgtcagtacttatccgcaatttaccggcccttatcagaactatgaactgcatgaggttgtttccgggttcgcctcaaaattattacgaaatgagggagagcatgaaatgtcagcaatttctgtggatagtgtaattgaggcaacaattaaatcattatctgcgcagggaataatgccgcagaataatcctgagtaa

SEQ ID NO: 274321 - DNA, 201 bp, Morganella morganii
atgtcagagaatatgcagaagccgaaaataacacaggaagaagaggacgaaattgagtccctgacaaaaagccttgtcatacgggataagatgaaactgccgggaattgacagagaagtcgggcagcagcgccctgaacgtttacgcccctggttccgggaacgtcttaaattccaccgcgatgcagccataaacagttaa

SEQ ID NO: 274322 - DNA, 279 bp, Morganella morganii
atgaaaaaattactggcagttatcgcgctctcttttgcacttaccgcttgtggtgatgcaacactggatatgtcttctcagcaggcagcgcaggaatccattgcaaaaatggaaaaagatctgagcccggagcaatcccgtgagctgaaaggtgctattactaaaatcagcttccaggtcgcttttgccagcggtggcgatgaagaaaaaatgatggcgttgctgaaagaaaaattacagggtaaaacagcaaaagaaattattgaaatggcaaaataa

SEQ ID NO: 274323 - DNA, 900 bp, Morganella morganii
atgtttaacgaacgcgttgttgatgaaattttaaactggatagaaaacaatcttgagtctgatctttcattagaggccgttgccgggaaagccggatattccaaatggcattttcagcgtattttcaaacaacagaccggctataccctggcaaattatgtccgtgcacggcgtttatcctgtgcggccatcgccctgcgcctgctgccgctcaacctgatgcatttatccatgaaataccgctttgattcacaacagacattctgccgtgctttcaaacagcattttggtattaccccgtcaggataccgtaaaaaaagcggctggcagccgggaggctttgtactgccgaaacgctatgccggaaagctgcactcctcggttgagatgacgacactgccggaaaaagtgctgaccgggacttcgaatgtgtatcaggcggcatcggatacctggaatatgaacctgccaaagctgcgcaaatattactggcagccttttttacagcggctgaccgctttaccggaggcggtttatgccatacacggtgtcagtaaatctgccggggacactttctcaatgtattatgccaccctggccgaagcacactgcctgaaaaatacgatgccgcaggatattatttatacgcccggacatgcccattacttaaaaattatttttaccggtgatttttcagatattgattttcaggatattacttatgatatctataataatattctgccggaactgaatattatccgccatccggagcatcctgatacggaagagtacatatttcaggaaaacatcacggaattaaacccggaaaacccgaaaccggcagtccgggtgattaattattacattcctgttatgactgatgcatcaggctggtga

SEQ ID NO: 274324 - DNA, 228 bp, Morganella morganii
atgtcatcatatgcagaacatatcaccacggcgcatattcagtgcgatgcggaagaaacgctgctgccgacacatcctttcgctgctgtttctgtcgcggatgccgctattgcggatgaggccgaaatcacggcgcataatgaccggattgaacatctcagtaatgccatcaactccacttacggtattttatattgtcatctgtcgtttaaggcattggcggtatag

SEQ ID NO: 274325 - DNA, 219 bp, Morganella morganii
atgaaagtgaatattaagagagtaagcacagtgactttatctgcagtcctgctgcttgctgtagccggttgttcaaatatgtcgaaacgtgaccggaatactgctatcggagccggtgtcggtgctgttggtggtgcagtcctgaccgacggcagcgcactcggaaccgtcggtggtgcagcaatcggcggccttatcggacaccaggtgaaaaaataa

SEQ ID NO: 274326 - DNA, 594 bp, Morganella morganii
atgcgtcattatattgccggaatatgtgctgctttgctgtctgtcgccataatacccgccggttacggtgcgggatcgctgaatcaggcggctcagcagcttgacaggctggtgttgtatgatccgtcctatgaaaaaatcgcttatcccggcggggatgtttcaccccggaaaggggtatgttcggatgtggtgatccgcagttaccggaaaataggtatcgatctgcaaaaagaggtacatgaagatatcaaaacggcgttttctctctacccgggccgtaaattgtggggacagacacggccggatacaaatattgatcaccgcagggtgcccaatctgatggtttttttcagccggaaaggggaaaccaaaccgatcacacaaaacgcggcggattatgtggccggagatattgtgacctggcagctggataacggtcgtccgcatatcggtattgtgatcggtaaaaccgcgctgttcagcggaaatccgctggtcatgcataatatcggcggcgggcaggtcagtgaggatgtgctgttcagctggaaaattaccggacattaccggtataaagccgggaaagaatga

SEQ ID NO: 274327 - DNA, 438 bp, Morganella morganii
atgatttatatgagtaatacagaagatcgaaaagtactgctgcagcaaacaccggatgaaatgatactgcaatatgcagaaaaccggctggcattgtttaacagcgcgatggataaagatccttccggattgctttgtttcagtttcatttacccggcagagccggataacggagctgtcatgacatttttacccgcaaaagaaacagtgcccggtttatctcaggcagaaactgacgcattatataccggcatctttctccggttgcgccatacctatggtgatttgcttgatgaagaggaagccgaaaccctggaaaaggatgccatactggcctgtgaaataaaatcagcgctgtatcaggatatattacagctcagtccgcgggatgctgccggggtattacgttacatctggggcagggacgggattttctga

SEQ ID NO: 274328 - DNA, 288 bp, Morganella morganii
atgactgacaatgacgatatgcgggcgtattcagaattcgattttgaagctattgcgcactgtaatcaaatcagagatatactgatggcggcgctggaaaggcgaaataaagaaatgcagcacctgcggataaaaacacagaaaattcagcgggaatttcccggtgatttgaaaaagcttcaggcgcatatgcgggaaatgaaagattccaataataaagtcatgacgctggtcagagaatataatgtctgggctgaacgggccgggcaggataagctggtactgtaa

SEQ ID NO: 274329 - DNA, 309 bp, Morganella morganii
atggagcaggatttttataaaggccggctgacggaaaagtttggtctggatgttattattccggatacagcggacagaaaaattgttcatgatattatctatcaggaactggtctccggtattattaatgaagcatcccgtgaacagtataaaacgattatccgtaaaatgattaatgaaggtgctgaaggtattattctgggttgtacggaaataatgctgctgatttctcagagtgattgtgcagtaccggtgtttgataccaccgaaattcatgccctggctgcagttgattacgctctgggttaa

SEQ ID NO: 274330 - DNA, 231 bp, Morganella morganii
atgaatgataaagacattgaattaattatttataaccagctggttactgagctgaaaaatcacggtatcactaagggggttaaggccgggctctttcctgaaaatcatatttccggggaggattttattgccttttatcccgccggtgctatccggggggattacagacaggcaccttcttttgttttcccgccggtgacttcctgcatcgttaagtgttgccatctctga

SEQ ID NO: 274331 - DNA, 597 bp, Morganella morganii
atggtatccgccatataccataaaaccggaaccggcatcatggataacgattacaacagtaaatcaacacaggaactggctgatggtttagcactgtacctgacacagggttatattaatccgttatatatcaactgcgactgcgaagacgagggtgcagaagaagcgggtttttatttggatgctctttctttacgcaatcctgatttatcctgtgatttccggaaaagaataatggaatcgcctgtaatcagtaatgattattttaaatcccagtgtatggaatatttactgctttcatcagataaataccgcgaatatgttattcagtatttatccggccattacgatgtattaccggtttctgtgctgcaaaaagcgatgttttatttttattgtgcaaagcgtgatcctgatgacaatgatgttgtccaggattcattgattgtaaaactcaaatcccgctatcatgccgttaaagataataaagacgttatggcttacgaactgactgaactgaaagaaacctgcgacgacttttgcgccgcatatccatatccggttgcacagccagcattcccggacaacctaaaataa

SEQ ID NO: 274332 - DNA, 687 bp, Morganella morganii
atgaaaaaagtggtggttatatcctgtttgttgttttcatctgcgtcttttgcggtcagttttgattgcagcaaagcacagagtaaaacagaaaaactggtgtgcgatagtccgtcattatctcaggcagatgatgaattatatgcagattatctgcaggcaaaaaaaatcaccggaaacagtgatgagtttagaaaaactgtcagagaaaaccggaaactgagattacagagttgtgatacagaagcatgccagctggaatggtataaaaaatcatcggtgttgttccggaatattgctgacagtaaaaatccggcgtcagcgcagatatgctatgaggacgggcagcaggtgacattaaccggtacgctgaaacgtgttgtatttccggggccgccaaattatgaaagcgtggaagagggcgatgaacctgaaccgtattgggttctttttaccaaagcaccattaacctgtataaaagacagtccggactggggcagtaatgatcagtttcagctgattgtaagaggtgatttttacagcaaaaaccagcgttatcttaatcagcagatctctgttaccggcgaaatattttatgccgaaaccggacatcaccatacaccggtattaatcgatgtgacggcaataaaaggcgtgaaagttatttcaccgtcagataaccactaa

SEQ ID NO: 274333 - DNA, 1149 bp, Morganella morganii
atggaatccaatatatttatgaaaaagaaaaaattcgcaaaattaagaacattgaacagaaagcgaaactatatgatgaaaaacatccgctactattcaagactttttatcgaaaaaattctctgggataagaaaagtaaatcagccattgactttactgctgtaaaatcaatactcatcttacgaaatgaagggaaaataggtgatgttattgttgactccggcttaatcaaagtcttatcgcagcatgggtatgacgtggatattatagttacgcctgataactgttccattatgcaacatgacaaacacattagatcaatttatatcgcagataaaatatctcttaatgattttatgaaaaagcgtaaccataatgtcagtagtgatatcatccatcagttaaataaaaataaatatgatttaattatagatccatctataattaataccccaacacaccggcctaaacttttaaaggaaatttctgcaaagaatgccataggatttaataaaaacaaatggattaatcattatggcaaatcaatcagttttgactacgataaaaatcacataaaagagtcatacaaacttttactgtcggaattcggcatcactgatatttcgccagattatgaaataaattacccggatgaaacgggttgtgatacggataattatatatcttcacttccgccaaaaaatataaatattgtaattaatatgtttgctggcactgatgaacgcagtctttctttatcacaagcaaaagagttagatgacagattaaattcactctacgataacattactgttattgtattagattacagaaatgagctgtctgagaaaaatttcacatacgctcatgtttataatccaatctcattacagcattctatcgctttgatctcaaagtcagatcttataatatctcctgacacatcaattgtacatatttctgccgctttcagaaaaaacctaatcgcaatatataagaatgatattcacaacaatgaattatggggtcccggatacgaaaatgccgtccagctttttacatcaacatcaagaatatatgatgatagtaacataattaatgaaattatctcctctgcagaaaaaaaactgaaagcatataataaataa

SEQ ID NO: 274334 - DNA, 642 bp, Morganella morganii
atgtggaatgcaataattggtaatttagatgtaatcaagtctgctattggaatattaagtgttgttatgggggcttttttaactgcatttaaacttggatacagatatctgaatgtgaggaaagataagaaaataaagaaaaataaagagtatcttgatgagtacagtcaatttctaagtgaagatgataagaaatatataaagaaggatataagtgatatggttatgtcaaacgtctcacaggagaaaagcaggtcattcagagagttaaaaattctgctgtcaaaatatgatttaatgccggacatcagtatctggcttgtattaaaaagactaaagagatatatttgtattaaaaatgaagtattatcggttaacattgataattcatattatattaacagctggtttgaaaaaatattctcaattacattaattttgtggatctttatatttgttctggctgttttcctgagtgatggtgttgtttttgagacgtggaaatattattttttattagctatagtttttgttgccttagtcgtttccattagtctttttataaactcaccgggaaagaaaaaaataaaaaaaattgtcaaaacaattaatgatatgatttcagaaaaaataacacagtag

SEQ ID NO: 274335 - DNA, 1215 bp, Morganella morganii
atgtttgcgctggtggatgtaaacagcttttacaccagctgtgaaagagtattccggcccgatctgacaggtaagccggttatcgtcctgagcaataatgatggctgcgtgatcgccgggtcagcagaggcgaaagccctcggcatcaaaatgggggcgctgtattatgagtgtcgcgatttttgttataaaaacaatgtgacagtattcagctcaaattatgcgttgtacggcgatatgagcagccgtgtgatgacattgctctcatctttcgcacccgccacagaaatctattctatagacgaagcctttctcgattttaccggcatgaccaggatattcagcccggaagattacggccgtgagatacaggcttccattctgcagaaaacacaccttccggtcggtgttggcattgcaccgacaaagacactcgcaaaacttgccaaccatgcagcaaagacatggaaaaaaaccggcggagtggtcgacctttctgatccgctgcgccagcgtaaattactggcactgataccggtcagtgaagtgtggggtatcggtcggcgaatatcggccagactgaacaccatggggattcgcacggcattagatttggcgaacgccgcaccggcgactatccgtaaaacttttggtgttattaccgagcgcacgctgcgggaactgaacggagaaccctgtatcgagctggaagaagtcagaaaagtgaaacagcagatcctctgctcccgatccttcggtaccaaagtgacggacattgttaccatgagaaaggcagtgtgtgaatatgccgaacggtcagcggaaaaactccgggaagaaaaacagcgctgccggatgatcgggttgtttgtgcagaccagcagacacactaacgggccggactatgcgaacagtgcaaacatttcactcgagtatcccagctgtgacacgcgggacatcatcaatgctgccatgagagcactggatagtatctggtgtgacgggtaccggtattataaggcgggcatcatcctgtcagacttcactgattcaaccgtcacccagttcgatatgttcgccacccggcagccattcaaaaacagcgacgagctgatgaagactatggacacaataaacaactccggtagccggcaccatattaaaacccgtgatatctttgatatcacgggtttttcttttctggctaaaatatag

SEQ ID NO: 274336 - DNA, 243 bp, Morganella morganii
atgaaacttgtcaagatcaacgatgatacaattctgacattgcctcttttcctggagcatgtccccgcggggtttccgtcaccggcggcggactatatcgaagagtgcataaacctgaacagtgaactgatccgacacccggaaagtacctatttactcagggttgaaggtagttcgatgattgatgccaatatctttgacggtgatgtggttatcgtggacagcgcggtaactgcggcgtag

SEQ ID NO: 274337 - DNA, 258 bp, Morganella morganii
atgaatttatcccgtcaggaacaacgtaccttacacgttctcgctaaaggtggtcgtatcgcgcaagtccgagatacgtctggccgcctcatcgccgttgaatgctacacccgcgaagggctgttgcttaccgactgcacccttgccaccttcaaaaaactcaaaaccaaaaaacttatcaagtccgttaacggtcagccgtaccgcatcaacactaccgggctgaataacgttcgcgcacagcttgataaccgctaa

SEQ ID NO: 274338 - DNA, 1638 bp, Morganella morganii
atggatattaatacccttatttacgcatcccgatatgaccggctttcagcggatgaaagcaaaattccctgggatgaaccagcattcagccagcgcatgctggcgaaccacttgtcgcaggatcacgactgggccagccgcaggcaggagatcattgagcagcaggtagagtggatcgccagccagttatcccctggcgcacacatcctcgatctcggctgcggtcccggcttttatacccaccgcttagcggagcgcggatttcgctgcaccggcgtggatttctcaccagcatctgtgagctgggcccgccagcaggcgcaaaatgccaatttgaacatcaactatattcagcaggatatccgcgcatactggccggataggtcgttcaatttcatcatgatgacgttcggggaactgaatgtgttcagcactgcggatgcacgcttactagtcagccgctgcgcgctgtggctggagttgggtggcaggctgctcactgaagtccatactttcgaagaagttaagcgtcagggaatggctgaagcgagctggcaacgctgtccggatggactttttctgggcgtccctcatctgctgctgacggaacatagctgggataaagaagaacagaccagctcaacgcagttctgggccatagaggcaaacggtcacaccactcgtttcggcagccaaatgacggcctggcgcgatgaagagtacgtcagcctgctcaataataccggatttaccctgcttcctccccctgcaggtcacgactggcctgtcagcgagacatttgaagggaagctgtttgctctgttggctgaaaaagcaaaaacctcaggggagcttcctcttaatactcaacgcaataaaaggaattcagcattggatatcccacgtatttttaccatcagtgaaagcgaacaccgcatccacaacccgttcaccgaagagaagtacaccacactgggccgtgtgctacgcatgaagccggagacccgcattcttgacctcggcagcggctcgggggaaatgctctgtacctgggcgcgggatcatgcgattaccggagtcggtatcgacatgagccagttgttcagcaagcaggccagacggcgcgcggaagaacttggtgtcagtgatcgggtccagttcatacataacgatgccgctgggtatgtggcagaagagaaatttgatgtggccgcctgcgtaggtgcgacatggattgccggtggatttgccgggatgatggagctgctggcgcagagccttaagctgggcgggatcatgcttatcggggaaccctactggcgtcagctaccctcaacagaagagatagcgcaggcatgcggcgtcagcgcaatagctgatctcctgatgttgcctgaacttatcagcgcgttcgactacctcggctacgacgtggtggaaatggtgctggcagaccaagaaggctgggacaggtatgaagccgcgaaatggctgaccatgcgccactggctggaggccaaccctaacgacgacttcgcggcagaagtcagggctgagctaacggtctcgccaaaacgtcacgtgacctacgcgcgtgaatactttggctggggcgtgttcgcgctgatcgccaggtaa

SEQ ID NO: 274339 - DNA, 747 bp, Morganella morganii
atgcttcttcacgttgaaggtatatgtaaaacttatccgcggcctaaaggttggcgacatcaacggcaaactatactggataatgtcagttttacgttagcaaaaggagagagcgtagggcttgttggtgaaagtggaagtggaaaaagcacattagcacgggtgataagtggtattgaaaaacctgatagtggaacagtattgcttaatggtaaatcaatatattaccgacagaatcgttaccaacagttaagtattgtttttcaggattatactacctcagttaatcctgctatgactgtatttgcaatgatcagtgagccattgtcactgcaaaattgtttgctacctttgcaactgcgtgaattagttgccggtcttttagaaactgttggattatcgccggatcttatgaacaggtatccccatgaattatcaggaggacaagctcaacgggtatgtattgcaagagcactggcaacgcatccttccctcattattttggatgaagcagtgagttcattagatatacctgcacaggtacagatattggatttacttgaaaaactgaaacaagagtttgaattgagctatttttttattactcatgatatacaaacactatgttatttttgtcagcgagttttattttttgatcagcatacgattgtagcgcagagttctattaaggatttaagtactataaagcatccgtatgcccaaaaattacttaatgctgtgatttaa

SEQ ID NO: 274340 - DNA, 828 bp, Morganella morganii
atgatatctgagttattatcaattaaagatttatctgtaactgatgaatccggaaacatattacttcatcctgtttccctaactatttcatcttacagaacattaggtattgtcggagaaagtggtagtggtaaaagcctcatggcaaaagcaatcatgggtttattgccaaatacgtttcaggtaaagggtgatattttattttgtggtcgaaatttaattgagaataataaagtgcaatggcaacagacccggggcaaagagattagtcttattattcaaaatgcaatgggggcatttgaccctttaatgacgctgaaaaatcagtttacagaaacattaaaatatcatacaaatctgaataatgatgcctgttttcggcttgcgtgtgagtgtctggagaaggttaatataaaatttccggaacaaaaattagcttgcctgcctcatcagttgagtggcgggcaattacaacgaatgatgattgctattacacttgcattaaaacccgcattgctgattgcagatgagccaacgactgcattggataccatcacgcagtccgatatcctgcagcaattcaaacaactggcagatgaaaaacagagcactttggtttttatcagtcatgacctgggtcttgttcgcaaaatagctgatgatattgctgttatgtatcaggggaagattgtggaataccaggatacagagtccttatggcgattaccacagcactggtatacccgtttccttctcgataccagaaaacgtttatcttcgagattcaaagcggttatggaaggaacatgtcatgcttcttcacgttga

SEQ ID NO: 274341 - DNA, 870 bp, Morganella morganii
atgataccatttttttttcaacaattacggcgggatggatttgcgcagatctgtttggcaattgttattattgtaatcgtcgctggtattctcgcaccgtgggttgcacctcatgatccaacagaaacagctgtacgcctgaaatatcagggtagtagttttctgtatcctctgggtaccgataatctggggcgttgtattctatcccgtttgttgtttggtatccgtactacggtattttactctttatttgctatggctttgacattatcgttcggatgtattattggaatgatttcaggtatttcaggtggaaaaatagatgaagtattgatgaggctatgtgatattatgctctcatttcctggggaggttatgatccttgctcttgtcggagttttgggacccggaattgaaaatattttattggctgttgttgtggttaaatggtcttggtatgccagaatgattcgcggagctgttattcaatacactcatcgcaattatgtacgttatgcagaggttattggtacccctcctgtacatatattacgaaaacatattctacctgtaacaatggcggaaataattatactggctacttctgatatcggtagtgttattctgatgatctcagctttgtctttccttggattgggggttcaggcaccaacccctgaatggggaaatatgctcagtgaggctaaaaatgttatgatactacatcctgaattaatgttacctgcgggattagctattgtgatagttgttgctgcatttaatggtttaggtgattttttacgggatgtcactgatcctgcaaacaggcgcagccatattgtatatcaggaaaagaacaatgatatctga

SEQ ID NO: 274342 - DNA, 927 bp, Morganella morganii
atgcaacgctatttttttctgcgtttattaatgatacttcctttagcgctgattatctcatttattgcctttttgttattaaatatggcaccatcagatcccgctgaggttgcgctgcgtattaatgaaatcgtacctacagatcaggcgattgcattgatgaaacaggaactgggtctggataaaccttttttggttcgttactttgcctggttatggaatgctgtacacctcaatttcgggaaatcgtttcttacccgtgcccctgtcttaaatgaaatagttacagctttacctgcaacactttggctagcagctgttagtttattttttattattgttatctctttgatactctcatttttatgtgtaatcactcataataccctggttgataaatcaattcggggaattatttttatttttacagctattccaaattattggctgggattactactaatatgggctctggcagtacagcttgatttatttcctgtcagtggaatgttaacgcatgagtctgttatattaccagcgttaactctttctctgggatatattggtacttatattcgcctgattcgtggtacgatgcttaatcaattacagcaaccttatgttttttatgccagagcaagagggcttccggacagtattattcttcgaaagcatgttttacctaattcattacatacttcgctgattgcgataggaatgagtatccccaagttgattgcaggaacggtagttattgaaaatatctttgcctggccgggaataggtcgtttatgtataaacgctatatttggccgtgattatccgatgatacaggcttatatacttcttatggctttactctttcttttatctaattttattgttgatctattgcagcaatacctcgacccgcgtttaacgaggtga

SEQ ID NO: 274343 - DNA, 1572 bp, Morganella morganii
atgaaaaaaatgttattttcacttatcactatatctgtatttacatttagcgcaccaatttttgctaatgtagaaaataatgaattggactacgcgagtacaaaagatattcgtgatattaatcctcatttatattcaggggagatggcagctcaaaatatggtttttgaatctctggtattaaatactaatgagggtgtgaaaccatttttagccaaaagctgggatatttcatctgacggaaaaagttatatatttcatctcagggaagatgttaaatttactgatggggagccatttaatgcacaggcagtgaagctaaacattgatgctgtaactgaaaatttttcccgtcatgcctggctggagcttgttcgccaaatagagagcgtcaatattattgatgattacaccattgaattaaagctaaaaaatccatactacccaacattgactgagctgggtcttacgcgtcctttccgttttatttcacctaaagcgtttattgatggtaaaacactaaatggtgtaagtacctatgcaggtacaggaccgtggattcttacagaacataaaaaaaatcaatatgcacgctttgaagcgaaccctcattactggggagagaaaccattgttaaatgcagtggtatggaaagtgattccagaccgccaaaccttactactttcattacaaaaagatgatatccagttaatttttggtgctgacggggatatgcttgatatggactctttcgaggcattacaagcatcaggtaaactgaaaacaataatgagtgaccctgttgcttcgcgtgcaattgtccttaacagcagccgaccgattaccagtgataaaaaagtacgtcaggctttggaatatgcagtagataaggacggaattgccagtggtattttagataatagtgaaacagttgcagagacactgatggcgaagactgttccatacagtaatatagacttacctgtttaccattttgatcaggatgaagcacggaaactattagatgaatcaggttggattttaacagaaggtaaaaccatccgggaaaaaaatggaaaaaaaatggaattaatattgtcatataatattaataatgcagctgaaaaagatatagctgagcttatgcaggatgattttaagaaaattggtgtaaaattaactattttgggagaggaaaagcaagcttttctggatcggcagaaaagtggtgattttgatctccaatattcattatcctggggtactccatacgatcctgcttcatttgtttcctctttcagaatccctgcacatgcagattatcagggacaaaaggggttgaagaataaagctgaaatcgatgaaatgatcagtgaattactgatcacgctgaatgaaaacagacgtcaacaactttataaagaattgtttacaacattagcagatgaagctgtttatattccattgacctattcccgaactaaagcaatctacagtagtgatcttaaaagtgtaggttttaatccttcacaatatgagatcccgtttgaaaaaatgtcattcactcgttaa

SEQ ID NO: 274344 - DNA, 774 bp, Morganella morganii
atgtctttatcattaaaaaattctgatgatttattggaggcggtcacaaactattgggataacagagcatccagctatagttgtgccaatcaggaagaattaaataacaaaaaaaggattatctggcaaaatttgttactttctcatgctcctgaggaaaaaaaactcaaagtattagatataggtacaggacctggattttttgcgattatcatggcccaggcgggccattcagttactgccgttgatgcaacgaaagcgatgctgaaacaagctaaaaataatgctaagcattatgaggtgaatattgattttgtagaatcggatgtacatacactaccatttgatgaatgttcatttgatctgattataactcgtaatgtaacatggaatttaaaaaaaccgcatgaagcatatctggaatggtatcgtcttttaacaaagggtggaagattaattaactttgatgctaattggtatcttcatttgtttgatgatgttttcaaagaaggattcgagcaggatcgcagaaatactgttaatcttggaattcccgatcattatgcaaatacagatacagtcgctatgaaaaaaattgcagaagtacttcctctcagtcgcaaactcaggccacaatgggacgttgtaaaattattagatattggtttttcccaatgtttggttgacacgacaataagtgaaaaaatctgggatgatgaggaaaaggttaattatagatcaacgccaatgttcatgattattgctgagaaataa

SEQ ID NO: 274345 - DNA, 795 bp, Morganella morganii
atgattgttgagtggcaggtgagcggttcaggaagggtcacatcaacggttcagcaggtgacacgtctggaaagtcaggtcggggcggattcggcaaaaattgaacaaacctcaaaggttcttactgacttaaacggcaggatttctgcatcgtggacaatgaaagtccagctggacagcaaagggaataaggtcattacaggtatcggactggggtttaatgctcagggaaacagtcagtttcttgttaatgctcaaaattttgcagtgatatcgtcactgaacgggaaagtagtaaccccttttgtcattcagaacgggcaggcattttttaacgatgcgctaatcagccaggcaacgattgataagttactggtcggggatgttgcagtggctgcttcatatcctcacgcctcggcacaaaatatccatagtggtcgtggcgggtggacaacggcaacgtctgtaattacgtatgcaggcggaatgccttatgacatgacgttggtactcccttcgataactgccattattgaggatgatacgggggggcgtccacgtccggttgagggagaactgcggttcagtatacgtgtggacggggtcggtcagcaggcaacttctcagtggtcagaattgagtgttatggggtcagcacatgcggttattcctcgtggacgaaagaatgtgaaaatagaaattgaagtgggagtcaggcatagaggcagggcacatgtggttctgaaggaaggggtagtgatggccttcaaacgcagttccgcatcattcagatag

SEQ ID NO: 274346 - DNA, 894 bp, Morganella morganii
atgactgaaaaatacgaagtcacagccaccaaaaaggacggtacgacatatcacggactgaccactacagtagaagctaaaggacaagctgatgataataccgaagccatcctcgatgaattatcagggcagactgggcgagaccaattagctcaagacttattgggtgagattaacagtaaagctgaacaatcagctgttatggcgctaaataatcaaattaaagctaaccacgatgcaattttagcggagaaaatagaacgaggtacggcgattgaacaaagtgaaaggaaactggatgaaacgggtaagttattatccgaacggcttaatcaggtttcaactgcgacggaagcacaagtggctgctattaaacaagaggaacaatcacgtattgagggggataaaaccgaggcgcaacaacgacaatctttagccatacaacttcgtggtgattataccggtaatgatttatcccaattaactgctggtctcatctcagcagagaagcaagctcgtattacgggtgaccaggcggaggcaaaagccaggcaatcactggaaacccggatgaatgggaatgtttcagtaattaataaatcattagaagcgctcacgtcaaaacagcaggcgcaaacgcaagagctttcaatcctcaattcaaatcttaaagggaaagcggatagtaactcggtaaatgaattaaatacgcgcgtatctgatattgatggcaaagtgacgtcagcaacttctcgggtgcaaacgttatccagcaaattagacaaagtaaaggccgatttatcagagtcagttgttgatctggatctgtcagcattagatgaaagtacttattacccggttatgcaactcacggctccggcggttttgccatga

SEQ ID NO: 274347 - DNA, 516 bp, Morganella morganii
atgcagataaagtcagtttttatgtttttgggtatgtttctgcttaatggatgcagtgtcaaagtgcccaaagatataaccccggttaaaccttttgatttatctcattatttaggtgactggtatgaaattgccaggatagataatcgttttgaaaaaggcttaagcaaagttacagctaactattctcttcgtgatgatggtggtgtgaaggttatcaacaggggctgggatgcgagtaacaataaatggaaagagagtaccggaaaggcctattttgttaactcagccgatacaggcgcgttaaaggtatctttcttcggacctttctatggaggttacaatattattaagcttgatgataactatcagtactcattggttgttggccccgataaagattacctgtgggtgttatcacgtacgccagctatgccgccagagctgttaaatgagtatctcagctttgctggtgaacatggttttgacagagaaagaatacttatatttcaataa

SEQ ID NO: 274348 - DNA, 273 bp, Morganella morganii
atgaaagatattaattttattgtaggccagaacatccgcgatttaagacaccgtaatggcttgactacaaagatgttagccagaatgctgggagtgtcacagcaacagttgtcaaggtatgaacggggtgttaataaaatagatgtcagtgttgtatttaagataataaatatatttcatgtgtcttatgaatatctgtttcctgaaactcagaatgattatacagaatcagtaaaaagctcctttgtatatatggagcctttagcaatctaa

SEQ ID NO: 274349 - DNA, 237 bp, Morganella morganii
atgccggatgatctgacgttcggtggtgcagttgagctgctggctgatgctatgaaatatattgctaactgtaatcacgataagcaggcaatacgggagattgaagcggggaggataaaaaatagcccggctattgccgggcaaatgattaatagaagggatacttacgactcctgcaatcgaatatacctgctaaaagttaaacgaaacataaacaagtataattacttggtgtga

SEQ ID NO: 274350 - DNA, 378 bp, Morganella morganii
atgaaccggaaagaagcggtaattgccgcgctgtttattgctgctgtctggtgggtatatgacatttaccgggataaccagcaactgaaggtgaataacacaaggttgtcaggacaactgtcagcccggcaggtgataaacaccaccacactttcagccatagccaccaatcaccgcatatcactcgacaacatcaaagctaaacagactgagggtacagagcatgtcaaagttaagacagttatcaaaacagtatttaagggcagtgaatgcgctgttactcctgttcccgctgatgctgtcagtgagttgcgcagatacgcgaccggaattaatacccgcatcggtgataccgattccgccacaactgaccgctga

SEQ ID NO: 274351 - DNA, 150 bp, Morganella morganii
atgacaaaacaggacgtttttgcagcactgaatctgacggcgatcacgatttatccgatttctgcttacatactgcgctcgggtggtgataatcagaacagggtgactaaaattacaacgaacgatcattttctttcgaaaaagcgttga

SEQ ID NO: 274352 - DNA, 1416 bp, Morganella morganii
atgagtaaagtaaaaacccgtttcgcacccagccctaccggctacctgcatgtgggcggcgcacgtaccgctctgtactcctggctgtacagccgtcacaaccacggtgaatttgtcctgcgtatagaagatactgatcttgaacgctcaactcaggaagctatcgacgccattatggacgggatgaactggctgaatctcggctgggatgaaggtccgtattaccagaccaaacgctttgaccgctacaatcaggtgatcgacaccatgattgaaaacggtacggcttaccgctgctactgttccaaagagcgcctggaagccctgcgtgaaaaacagatggcaaataatgagaagccgcgttacgacggttgctgccgcgatcacgctcataaccatactgcggatgagccgcatgtggtgcgtttccgtaacccgcaggaaggatctgttatttttgatgacaaaatccgcgggccgatcgaattcagcaaccaggaactggatgacttaatcatccgtcgtactgatggttctcctacctataacttctgtgtggttgtcgatgactgggatatggaaatcacccatgttatccgtggtgaagaccatatcaacaacacaccgcgccagatcaacatcctgaaagccctcggtgcgccggtaccggaatatgcccacgtctccatgatcaacggtgacgacggcaagaaattatccaaacgccatggtgcagtaggtgtgatgcagtaccgcgatgacggctatctgccgcaggcactgctgaactacctggtgcgtctgggctggtctcacggcgatcaggaaatcttcagcattgaggaaatgacggagctgttcaccctggaagccgtcagcaaatccgccagtgcattcaatactgagaaattacagtggctcaaccaccactacattaacagcatgcctgcggaagaagtggctgtttacctgcaatggcatattgagaacgccgggattgatacccgcaacggccctgaactggcagacctggtccgcctgctgggcgaacgctgcaagacactgaaagaaatggcggaaacctgccgttacttctatgaagactttgacagcttcgatgccgatgccgcgaaaaaacacctgcgccctgttgcccgtcagccgctggaagtggttaaagccaaactggctgcactgaccacctggacaccggaagctgtacacgaagccattcagacaaccgctgatgaactggaaatcgggatgggtaaagtcggtatgccgttacgtgttgccgtgaccggtgccggccagtctccgggcctggatgtgaccgtacatgcgattggtcagtcccgctctctggcgcgtatcgatatggcgctggcctttattgctgagcgcgaagcacagtaa

SEQ ID NO: 274353 - DNA, 753 bp, Morganella morganii
atgacagactttaaacagaagattatcctggttaccggagcatcaaccggaataggtgaaggaattgcccgtgaattactgaaaaggggggctaaagttgcgattaccgggcggaatccggaacatctgcaaaaggccataaatgagtgggatcctacgggagatagcgtgctggcaattgaagcagatgtacgtaaactgagcgattgtgagcggatggtgagcacagtgtcagataaattcggtgctttacacgggttggtaaacaatgccgggatcaccggaccgcatggcgtgaagattgaggattacgattttgaagcctggcaggatgtgatggctacggatgtgaccggcacatttctcgggatgaaattcggtattccggccattatcaaaagcggcggcggggcggtggtgaatttatcagcctgtaacggagtcaccggtattgcgggaattgcgccttataccgccgccaagcacgcagtgctcgggctgacccgcgcagcggcactggaatatgcagaacagggcgtgcggattaatgcggtcggccccggctatgtggcgacacccaatattctggcgttaccgcaggatgtgcaggcaatgatggcggagagtcatccgatgaaacggatggcaacacgagaagaggtggcaaaaatggtggcatttctgttatcagatgacagtcgtttttgtaccggaggtttttatccggtggatggcgggtataccgcacaatga

SEQ ID NO: 274354 - DNA, 423 bp, Morganella morganii
atgtcattcaaggaactggaaaatacactgtcattgttacagtgcacattagtagcgcaacggaccatctgctcacctgaaaaggtgacgtgggcacagtatgacgtaatggaaatgttgcgccttcagggggatttaaccccgtcggatttaagccagaaactcgggatttcgcgccagaatgtctcgaaatcattacgggcgctgaaaaaacaccagtttgtttcccagtatcagtcggagaccgataaacgggaactggtgacccagctgacaccggaaggtgaagagtttctgtcccgcgcggcgacaggacgcacccgcaatgcagaaaaagtatttgcaagtctggatgacgatgaacagcgccagtttcgtatactgagccggaaagtcatcgatgcactgacccgggatcagtga

SEQ ID NO: 274355 - DNA, 222 bp, Morganella morganii
atggagaaagaagatttagtggctgtcgctaacactgctatgccatttggtaaatacaaaggttgccgtttaattgaccttcccgaggaatacctgctctggtttgcccgtaaagacagtttcccggaagggcgtctggggcagctgatgcaactcacccttgcaattaaaaccgaaggtttaagtggcctgataaaaccgcttaaacgtcccgctcactga

SEQ ID NO: 274356 - DNA, 2022 bp, Morganella morganii
atgatgccaaaaaataacgaaaacgacattgaacagctgcgcaccacactgcgccatcatgaatactgttatcacgtgctggataacccggaagtgccggatgcggaatatgaccgcctgatgcagcgtctgaaagcgctggaagcggagcatccggaacttatcacaccggactccccgacacagcgggtcggggcatcaccgctgagtgcatttgaacaggtgcgccatgagattccgatgctgtcactcgataacgtgtttgatgaggagagctatcttgcctttgacaaacgtgtacgtgaccgtctgaaagacacgcaggatctgacattttgctgtgagttaaaactcgacggcctggcggtcagtctgttgtatgaaaacggtagtctggtgcaggcagccacccggggtgacggtaccaccggggaaaacattaccgccaatgtgcggaccatccgcgctattccgctgaaactgcgcggggaaaatatcccgcagcgtattgagatccgcggcgaagtctttatgccgcagaaaggctttgaggcgatgaatgaggaagcgcgccgcaccggaggcaaagtgtttgccaacccgcgcaacgccgcagccggttcattgcgccagctggatccggcggtgacagccaaacgcccgctgactttcttctgttacggcgtgggcgtgctggaaggcggcacactgccgggcagtcactatgatcgcctgcagcaatttaaagcctggggcttaccggtcagtgatcgtgtgatgcgctgcaccggcagtcaggcggtgctggatttctatcacaaggtggaagagagccgtccggtgctgggttttgatattgacggcgtggtgattaaagtggattccattgcactccaggaggcgctgggctttgtgtcccgcgccccgcgctgggcgactgcctttaaattcccggcccaggaacagatgaccgttgtccgtgatgtggaattccaggtcggccgtaccggtgcaattaccccggttgcccgtctggagccggtgctggtggccggtgtgacggtcagtaatgccacactgcataatgcggatgaaatcagccgtctcggcctgaaaatcggcgataccgtggttatccgccgtgccggggatgtgatcccgcaggtggtgggcgtggtggaatcagagcgtccggcggatgcgcgggatattgaatttccgctcagttgcccggtgtgcgggtcagatattgagcgggtggaaggcgaggcggttgcccgctgtaccggcggtctgatttgcggggcacagcgcaaagaagcactcaaacattttgtgtcccgccgtgccatggatgtggacgggctgggggataaaattatcgaccagctggtggatgcggagtatgtgaagactccggcggatctgtggcgtctgacccccggcaagctgaccgggctggatcgcatggggccgaagtccgcacagaaactgactgacgcgctggctgcatcaaaacagaccacgtttgcccgttttctttatgccctggggatccgcgaagtcggcgaagccacggcggccaacctggcagagcatttcggaaccctggatgccttacagcaggcggatacagaagcactgaaagccgttcctgatgtcggggaggttgtcgcgaagcatgtggtcaatttcttccgcgagcagcacaaccgcgaggttatcactgacctgaccggggatgtcggtatcagctggccggatgtggtggtagtggatgcatcggcactggataacccgtttgccggtaaagtggttgtgctgaccggctcactgcagatcctgacccgtgatgaggcgaaagatcgcctgacggcactgggggcgaaagtcaccggcagtgtttcgaagaaaaccgatctggtggttgccggggaagccgcaggctccaagctggctaaagcggaagagctgggcattaaagtgatcaatgaagatgagtttattgcactgctgaactga

SEQ ID NO: 274357 - DNA, 972 bp, Morganella morganii
atgcaagatttgcgtctgatattaatcgttgtgggtgcggtagcaatcatcgcattgttacttcacggactgtggacgagccgtaaagagcgttcttccctgtttcgcgcgcgccccatgaagcgtcgtaaatacgagtcgcaggatgaagccgctgatgatatgtcagaggcacacggctcccgtcactctgctgtattaccggaggatccggctccgcaggtctctccgtattcagaagcgcagaatgagcaggatccgttattatctgccggcagaatgtatccgtcatcagagccggaagaaccgcctgtgatgccgaaagcccagagcccgcgccgtcagccggtaaaagcaccggaaacagagccgcaaatcggattatttgatgcccttgagcaggaagcacaggcaccggcagctccggctccggaggtcatgacaacagccgcggtgatcactgccgctgaaactgacatgcctcacacagaagagccggtaactgaaccggaaccggttcaggaagcgccgcgcagcagtgcagagaacaatgagattgtgctggcactgtttgtgtccgcccatccgggacagatggtcgcaggtgatattctgcgcaccgctatcgagcaggccgggttccgtttcggggcgatgaacatttatcaccgccatgtcgatccggcaggcagtggtccggtgttattcagtctggccaatatggtgaatccgggcacgtttgtaccggagcagatggaagagatcgaaaccccgggcgtggctatgtttatgatggtgccgtcctatggtgatgcaagccagaacttcaagctgatgttacaggctgctcagcgtatcgcctctgatgtcggcggggtggtactggatgaggagcgcaaaatgctgacaccgcagaaaatcgaggtgtacaaggcgcgcatccgcaaagttctcgtcgccaaacagagctga

SEQ ID NO: 274358 - DNA, 753 bp, Morganella morganii
atgacaaatcctgtcaggccgctcagcggctttgcatatgttgcacagggatggcggctgatgatgcgtccgggtctccgggccttcgtgattctgccgttgctggccaatatcgtggttatgggtggtgcactctggtggttgttcagtcagttcggcgggtggatagcctggctgatggataaagtgccgggctggctgcagtggctggattatcttatctggccggtggcggtgatttctgtgctgctgattttcagctattttttcagcacgatcgccaatatcatcgcctcaccgtttaacggctggctgtcggagaaactggaagcggaactcaccgggcgtcccgcgccggatcagggctgggcggatctgataaaagatatcccgcgtatcctgaaacgggagatggtcaaactgctctattacatcccgcgcgccgttattctgctgatcctgtttttcattccggggatcggacagaccctcgcgccggtgctctggtttattttcggtgcctggatgatgtccgtgcagtacggggatttcccgtttgataaccacaaggtcagttttccggaaatgaaaagcacactgcgccgcgataatatgaccaatctccagtttggttcgctggtcagtgtgctgaccatgatcccgtttgtgaacctgttcattatgcctgcggcggtctgcggtgccaccgcgctgtgggtggatcgctaccgcgcacagtttgtccgcgactga

SEQ ID NO: 274359 - DNA, 957 bp, Morganella morganii
atgagtaagatatatgaagataattcgctaaccattggtcacacaccgctggtgcgcctcaaacatttcggtcacggcaatatcctggcgaaagtggaatcccgcaacccgagtttcagcgtcaagtgccgtatcggcgccaatatgatctgggacgcggaaaaacgcggtatcctgaaaccgggtgtggaactggtcgagccgaccagcggtaacaccgggattgcactggcgtatgttgccgccgcccgtggttacaaactcaccctgaccatgccggataccatgagtatcgaacgccgcaaactgctgaaagccctgggtgctaacctggtactgaccgaaggcgcgaaaggcatgaaaggcgcgattgaaaaagccgatgaaatcagcgcgtctgatccgtcccgctatatcgtgttacaacagttcagcaacccggccaacccggcaatccatgagaaaaccaccggcccggaaatctgggaagacactgacggcaacgtggatgttgtggttgccggtgtcggtaccggcggcaccatcagcggtatcgcccgttacctgaaaaacatcaaagggaaaaaagacgtcactatcgtggctgtcgaaccggaaggctccccggtgatcactcaggcgctggccggggaagagatcaaaccgggcccgcacaaaattcagggtatcggtgccggttttatcccgggtaacctggatctgagcctgattgaccgcgtcgagctggtcagcaacgaagatgctttcgccaccgcccgtaaactgatggagcgcgaaggtattctcgccggcatttcatccggtgcggctgtgattgcggctgaacgtctcgcgaaagaagataaattcaagggcaaaaatatcgtggtgatcctgccgtcttccggtgaacgttatctgagtactgcgctgttcgctgatatcagtgaaaactga

SEQ ID NO: 274360 - DNA, 258 bp, Morganella morganii
atgtatcagcaagaagtcaccattactgcacctaacggcctgcatacccgtcctgcggctcagtttgtcaaagaagccaaaaccttcgcttctgacatcaccctgacttccggcggcaaaagcgccagcgccaaaagcctgttcaagttacagactctgggtctgacacagggcaccgtggtgactatcgccgcagaaggtgaagatgagcagaaagcggtagagcacctcgtcaaactgatgggtgaactggagtaa

SEQ ID NO: 274361 - DNA, 1725 bp, Morganella morganii
atggtttcaggaatctctgtttcaccgggtatcgcttttggtaaagcgttgttactcaaagaagaacctatcattatcagccagaagtcgatttctgctgagcagattgatgctgaaatccggcgtttcactgaaggccgcgccaaagcgtccgcacagctgaatgccatcaaagaaaccgctgaaaaaaatctcggtgcggagaaagccgaaatttttgaaggtcatatcatgctgctcgaagacgaggagcttgaaaatgaaatcactgacatcatcaaaagcaaaaaaaccgctgattacgcggtacaccaggtgattgaagaacaggccaccgccctggaaggtcttgatgatgagtatctgaaagaacgcgcggccgatgtccgcgatatcggtaaccgtctgctgaaaaatattctcggcatgccgattatcgacctcagcgccatcgctgatgaagtgattctggtttccaaagacctgacaccgtccgaaaccgcacagctgaacctgaaaaaagtgctgggttttatcaccgatatcggcggccggacctcccacacttccatcatggcccgctctctggaaatccccgccgtggtcggtaccgggaatgccactgaaaatatcaaaagtgatgattacctgatcctggatgcggtcaacaacaccatttatctcaatccgtcagaagaagacattgagcgcatgaaagaagtgcgcgatgactatctggcggaaaaagccgaactggcaaaactcaaagatctgcctgctgtcaccctcgatggtcaccaggtggaagtctgtgccaacatcggtaccgtgcgcgatatgccgggtgccgagcgtaacggtgcggaaggtgtcggtttataccgcaccgaattcctgtttatggatcgtgactcgctgccgacggaagaagaacagttccgcgcttacaaagaagtcgctcaggcgatgccggatgaagccattattgtccgcaccatggacatcggcggtgacaaagacctgccgtatatgaatctgccgaaagaggaaaacccgttcctcggctggcgcgccatccgtatctgtctggatcgtcgtgaaattctcgacactcagctgcgcgcaattttacgtgcctctgttttcggaaagctgcgcattatgttcccgatggtcatttccgtcgaagaagtccgcgaactcaataagatagtggacgaaatgaaacagcagctgcgggatgaacagaaaccttttgatgaaactattgaagttggtatcatggtggaaaccccggcggcagcagttaatgcacgtcacattgcaaaagaagtcgattttttcagtattggaaccaacgacctgacgcagtatactctggctgtggatcgcggaaatgagctgatttcccatctctacaacccgatgtctcctgcggtgctgaaccttatcaaacaagtcattgacgcttcccacgcggaagggaaatggaccggaatgtgtggtgagctggcgggtgatgaacgtgcaactttattgttgctgggcatgggtttagatgaatttagtatgagttctattgctatcccgcgtatcaagaaactgatccgcaatacgcattatgaagatgcgaaagcactggctgaacaggcactcgctcagccgacggcaacagaactgatggcactggtggaaaccttcaccaaagaaaaaaccctgtgctga

SEQ ID NO: 274362 - DNA, 510 bp, Morganella morganii
atgggtctgtttgacaaactgaagtcgctggtttcggatgataaaaaagacagcggcacgattgacatcgtggcgccgctgtccggtgagattgtgaatatcgaagatgtgcctgacgttgttttcgctgaaaaaattgtcggcgatggtattgccatcaaaccggcagggaacacaatcgttgcccctgttgatggtacaatcggtaaaatttttgaaactaatcacgcgttctccattgaatcggacagcgggattgaactgtttgttcacttcgggatcgacactgtcgaactgaaaggtgaaggcttcaaacgtattgcggaagaaggccagcgcgtacaaaaaggcgacctggtacttgaattcgatctggcgcttctcgaagagaaagccaaatccaccctgaccccggtggttatctctaacatggacgaaatcaaagagatgaccaaaatgaccggccctgtcactgtcggcgaaaccgttgtcatcaaaatcaaaaaataa

SEQ ID NO: 274363 - DNA, 348 bp, Morganella morganii
atggaatttaattcagttcagacacagcaaataaagcagaacatgcgcctgttcactgagcgcctgtatccgaatggtcatatccccgatgagttcgatgttcagtaccgtacggacaataacaacatactgatttatcagaaacaaatcgtctgcccgtgcggcaccccgcaaaccattgaaaaacaaattgccagactgacctggtcagaagctgatgataactggcagcttttttatgtggataacaacaaatggcagccttatccggactgccctgccggtacactgagtgcactgctgaaacaggttctggatgataaatctgaccgttttattttcagttag

SEQ ID NO: 274364 - DNA, 435 bp, Morganella morganii
atgtataaaacgattatagttccaatcgatatttccgaaaccgggctgacccgcgaggtgatcccgacgattcagacattagccaaatttgaaaatgccaaaattcactttattgcggtgatcccgtcattctctcactttgcttctttcggtattgcctatgccgcaaccctgccggaaaaagatgagatactggacagcgccaaagagcagttggcgaaaatggtcagtgattttaatctgcctgcagagcagtttgaactgcatgtggtttccggctcaccgaaagatcagatactgaaactggcggataccctggaaagcgacctgattgtcatcagctcacgccgtccggatatgtccacctatctgctcggctccaacgccgcagcagttgtgcgttacgcccatacctcggttctggttgtccgctga

SEQ ID NO: 274365 - DNA, 936 bp, Morganella morganii
atgcgtaaggctgctgtctgtgcactgctgagctgtttactgatggctcctgcaatggcatcagaaacacaaaataccgggaaagagacggtccggacagaaaaccttgcccgtcaggatggcagtgctgttcattactacctgctgcaccggcaggcggaacccacccgtaaattgctggtgctgattcagggctcggactgtaacagtgccagaaacaaccgttttatggtggataccttcggcggcgcgttcccggatcatgacattctgctggtggagaaatacggtattacagatgcgctgccttttaatgaccgtgatggcgagcgggcagactgcccggcggaaaccatgctcaatgattctctgtcggtgcgggtcagcgactatgctgcggtgctcgaccgtctgaaaggggagtatgacaccgtgctgctgctgggcggcagtgaaggggcgactgttgctgaacatactgcgctggcatcaccggcggttgacgcagtggtggctgttaatggcggagggcgctttttcctggatgatgtcacggacagcttccgcaatagtcctcagcaacttgaggagtctcagttagccggttttctggcatttactgatgcggtaaaacgcaatgaggtggagaacgatgtgctggtcagccagcacgggatgcgctggtggcgcgaatttctggcggcggatgcgcagcaggtactgaacgggcagacaaaaccggtgctggttattcagacgctgaatgataccaatgtcagtgtcacatcgtttaagcagatgcagaaagcggtggggaaccagatggtgacattcagaacctttgataatctggatcattattttaaagatacagacggaaaccggcataccgcgcagatccttgcggttatccgtgactggtacgcccggcagtga

SEQ ID NO: 274366 - DNA, 771 bp, Morganella morganii
atgagtttacagaattaccgcgcgacagagcgccatttctggcgcagtatcgcgcaggatgtcatcaccgtcagtgatcgtgctgagtgctatctgacaccgctgccggtgcctgtctttaactatatctatctgcaggccggtgcggataataatgagttctcactggcacagcagcctttcacgccacatcacaaacctcattgcctggtggcggagaaatccgcggcagaagcactgcacccgcagattatggccgcgggttatgaggcggacggtgaaaccagtgctatgtatctgtctgttgaggagtggcagccgtcttctgttcttccggccggatgtgaaatccgtgaggtaaatgaccagctttcgttgtgggctgagccactggaagccgcttttccggcgggagaagatgacgaagaagcaccggatttcagtatcgtcagtgactatatcagctatcatcagcgggcaatggcaaacggtactgagctgcaccatgctgttctgctgtgtcaggggaaaccggtcagctgcatcacgctgtcactgtcagaatacggtgcgcggattgatgatctcggaactgttcctgcatatcagggcaacggctgcgccacactgttgctggattatgcgctgacattgtgcagaacgcggggtgtccgggattgttatctggaagcatcgtccgaagggttgagtctgtatcagaagctcggtttccgcacactgtttaattatctgttttatgtgaagggatga

SEQ ID NO: 274367 - DNA, 1137 bp, Morganella morganii
atgatgatgacaggcctggttgcggtgctggtcggctatgccagttcagtggcgattattctgcaggcgctggatgtggcggggcttgatgccgcacaaaccggcggctggctgatgatgctggggatcgggatgggagtgacaacgatcgggttgtcgctctggtataaaatgccggtgctgactgcctggtccacaccggggatcgcgctgctggtaaccagtttgtccggcgtgaccatcaatgaagccgtcggcgtgtttatttttgcctccgggctgatgtttctgtgcggcgtgaccggtatttttgcccggctgatgaattatatcccgcgcgcactggcctcggcgatgctggccggtattctgctgcgtttcgggctgacggcgttcggtgcgctgaataccagctttgtgctgtgtgccgcgatgattgccgcgtatgtggtgatgcggcggatttttccgctgtacgccattattgctgccctgatcaccggcatcaccgtgaccggactgagcggcgatctgcattttgtccgggccggcaatgtgtttgcgctgccggaatttgtgatgccgtcatttaccctgacgtccctgatcagtgtcggcattccgttttttattgtgtcgctggcctcgcagaatgcgccgggcattgcgattttacaggctaacggttatccgccgcacacttctgtgctgctgacctgctcgtcgctggcggcgatcctgcttgccccgtggggcgggttcagtatctgtattgcggcaatcaccgccgcgatttgtatggcgcccgatgtgcaccctgatccggcgcggcgttataccgcagctgtctgggcggggatattttatctgctggcggggattttcggcggcgcggtctttatgctgttcaatgcctttccggcggttctgatacagatcctggccgggcttgctctgctgaccacgctgatgaacagtctgcatcagtcactggcagatgaaaaagggcgggatgcggcgattatctgttttctgctgacggcatccggtatcacgctgctgggtatcagttcggctttctggggattactggcgggcattgtggtgcatcagattatggcaatacgcaggcgctga

SEQ ID NO: 274368 - DNA, 573 bp, Morganella morganii
atgcacgatatcacacccgctgttgcagagacctttaaacaactgcgtgccgaacgcgggctgagcctcagccaggcagcacaactgacgggcgtcagcaaagccatgctcggccagattgaacgcggccaatccagcccgacggtatccacgctgtggaaaatcgccaccggcttcaatgtcgctttctctgtttttctggaaggcgcacagccgcagctgcaggcagggcttcattcgtttgcgacgctgccggtctttgaacagacccgctcagggatgcgtgtcacgccgctgatcccgtttgatgatgaactgaaaacggatttactgaagattgacctgctgccgggggcgctcagtgaatccggccctcatgaacccggagttatcgaacatgtcattgtactggaaggtgcattacaactgcggctgggggatgagtggcacaccgtttctgccggggaatccctgcgcttccatgcggatatcccgcacgcttacgccaaccccggtaagaccatcgtgacactgcataatctgatccattatccgcgtccggcggacaaataa

SEQ ID NO: 274369 - DNA, 807 bp, Morganella morganii
atgtccgtttattttgtgatttctgttctgattatttttttgattatcctgctgattgtattaaccatcaccaacaaaattgtgatcagccggaagaaaacggtttatctgtcactgattgcgctgttttttgcattttttattaaaagtgcggtggtggaaaaaaatgaacagataaaaactcaggttcttgagatggtaccgacactgaaagccatcaataaggttgatcccgttatgttcgaggccttttttgccgatttcagaaatgccggtaagggttcgaaaaaacgggaagagtactatatacgcctgcagcagtgggccaccgaaaatattaaaaaactgctttatctcgcgggggatgacgcggtgattaattacgggaaaatgcggctggaatttttgcagaaagcactggcgcaggatacctccggtgacttctgctttcgtgtgctgcatccggaagtgtctggcccgccggatatgaaaaaggcttccgccgggtaccgtgactttattatcggtaacagagcgttgctggatctggtgaattcagccggtgaaggggctccggttgcgcattattccgctgatgagattcagtcattattttcggtacaaatacaggggtcggtgaataaatacggcgagagtttcctgactgatgatccgtatgtgctggcggaagacaagctgcaaacctgtcagatggaaattgatttaatggcggatgtgctgagagcaccgccccgtgaatccgcagaactgatccgctatgtgtttgcggatgattggccggaataa

SEQ ID NO: 274370 - DNA, 609 bp, Morganella morganii
atgaaaaaaataacgataatttctgcattggttgcagcgtcactattactgggtgcctgtgataaaacagaagcagcggataccggacacagtgagcgttatgcagctcctttcggtctgacctggggaatgacggaagaggcgttgtcaccacggctcggtagtcagtctgaaacggataacagtgaatatgtctgcccgctgactaaagtgacgtccaaaacattttccggtggattaaatgaagcgggtgaatacgaattccgctttttaccgcactacggacagccggatttcagcgggctggtgggtattggttatttttattccactgatgatgaaacggcatatcagacactgctgaaaacattgcagcacaatcttgaagcggaatatgggaaaccctcaatactggaaagcaaaaaagcagacgaagaacatttcatttataaatctgaagaaaacgaaatcagtttatttgttatgatgcgtaacgcccgtttttatatttctctggattacagttattttcccaaagaacatcaggtctccctgaaaaataatatacaaaaaataaaagagacctgcattaagcagcgggaggagtaa

SEQ ID NO: 274371 - DNA, 174 bp, Morganella morganii
atgccggttctggtcatcggtgccgatcacgcgacccgtgatgccccgcagctgacaatgcagggaagagcggtgaatttgcagggcgcgatactcagtgaatgcggtcattttgtgacggaagagtgtcctgaacaactgatggacgtattattgccgtttttacgccaataa

SEQ ID NO: 274372 - DNA, 234 bp, Morganella morganii
atgaatacattattcagtaaggtattactggcagcggtgatgactttcgtcatccacgggagtgtgcttgcggagaatacaccgaaaccgccggtaacagcacaggtgaatgaggttgattttcagcatcactataaggatgtggcggggcagcggatacattatgtgacggcgggaaaaggcgagccggtattgctgatcccgggctattccgcagaccatcgcgcagaataa

SEQ ID NO: 274373 - DNA, 612 bp, Morganella morganii
atgatggccggcagaccacgggaatttgatcgcgaagttgcattacgcaaggctgaacaggtgttctggcagcgcggttatgaaggaacatccatgtctgatctggttgcggcgctgggtattgcgtccgcccggatctatgcggccttcgggtcgaaagaaaatctgttccgtgaggcgatagccctttatctggcggaagaaggtgcatttgcggatgcggcgctgaaagagccggatacccgcagtgctatcaaaaaactgcttaccggtgccgttgatacctacacccgggatgaccggccgcacggctgtatggtggtattgtcactgaccaattattccgctgataatgaggccattatgcactggctggcagagcaccgccgggaacggacaaacggaatcatacagcgtctgcgccggggaactgagtcaggtgatttaccggaacataccgatacacaggctctcggggactatgtggcaacactgctgcacggaatttctgtccaggctcgggatggtgtcagccgtgaccgcctgctggccatgacagagattgccatgcacacgtttgatctcatgaccgcctcaccggccacacgctga

SEQ ID NO: 274374 - DNA, 1155 bp, Morganella morganii
atgtcctcttccgtccgccctatctgcacatggctttccgcctcccagcccgcatctggtgaggcatttccgtttccgccggatgttccggccatcaccggcaaccagaccctccggcagtcattgcgtatcagcacaggcggacagaaactgcagctggtgttttccaaccgctacggcacacagccactggtgacaggtgaaagttatctctccgtctccggccagtaccgtgcaatacccgtcacttttaacggacagcagggtgcggtgatccctgccggagatattctgtgcagtgatgaaattgcactgcatattccgtcattatcggagctcacgctgagaacctttctgccggagccggtaccgcttaataccttccactgggatgcccgtcatttctccttactggaaccgggtaaccggacgttacaggaagagtccggaaacagtgaggctgtcagttcccgtcttttacttgaaagcattcttattcagccggaatcagaagcccgcacactcgtggtgatcggtgattcaatggttgacggcaacggcgtgggcatgaacacatacggccgctggactgattatctggcagagcgttttattgacgaaaatattgccgtggtgaatgccggacaatcgggttcgcgcctgctgaaagacggtatcggtatcagtacattatcgcggtttgagcgtgatgtgctgatgcaacccggcgttaccgcctgtatcgtgcaggtcggattaaatgatatcggcctggcgggaaccgatttggacccggcagcgccggtaccttcagcagcggatgtggttacgggataccggcaattgctcaccatggcgcgggaaaaaaatatccgtatgaccggcgtcaccctggtaccgctgcggggaaccggtgagtatggtatgaccggtttttattcgccggaaaaagaggctgtacggcaggatataaaccactggatgcgcacaagcggtgaatttgatgctgttattgacagcgaccggctggtacgcaacccggcctgccctcagcagctcagtgcggactatgattcaggagaccatcttcatcttaataatcaaggacaccggctggttgcgcagtccgtccctctgacggttatccggccctga

SEQ ID NO: 274375 - DNA, 1371 bp, Morganella morganii
atgatgtatccagcagaaccgtatcgtattaaaagtgttgaaaccgtatccatgatccctcgcgaagagcgtatcaaaagaatgaaagaggccgggtacaacactttcttgttgaattccaaagacgtttatgtcgatttactgaccgatagcggcaccaacgccatgtccgataaacaatgggccggcatgatgatgggtgacgaagcgtacgcgggcagcgaaaacttcttccatctggaaagaactgttcaggaattattcggctttaaacacatcgttcctactcaccagggccgcggtgcagagaacttactctcttcattagctatcaaaccgggtcaatatgttgctggtaacatgtacttcaccaccacccgttatcaccaggaaaaaaatggtgcgacattcatcgatatcgtccgcgatgaagctcacgatgcgggcctggatgtgaaattcaaaggcaacatcgacattaaaaaactggaaaaactgattgctgagaaaggcgcggaaaatatcgcttatatctgtctggcggtaaccgtaaacctggcaggtggtcagccggtctctatggcaaacatgcgtgaagtccgccagttatgtgataaacacggcatcaaagtgttctacgatgcgacccgctgtgtggaaaacgcctacttcatcaaagagcaggaagaaggcttcgaagatgtctccattaaagacatcgttcacgaaatgttcagctacgctgacggttgtaccatgagtggtaagaaagactgtctggtgaacatcggtggtttcctgtgtatgaacgacgacgacatgttctctgctgcacgtgaactggttgtggtttatgaagggatgccttcttacggtggtctggccggtcgtgatatggaagcgatggctatcggtttacgcgaagcgatgcagttcgaatatatcgagcaccgcgtcaagcaggttcgttacctgggcgaaaaactgaaagcagccggtgtaccgattgttgagccggtcggcggccacgcagtattcctcgatgcacgccgtttctgcccacatctgacccaggatgagttcccggcacagagcctggcagccagcatctacatggaaaccggtgtacgttctatggagcgcggtattatctccgcaggccgtaacaaagaaaccggcgaccatcaccgtccgaagctggaaaccgttcgtctgactattcctcgtcgtgtatacacctatgcacacatggatctggttgctgacggtattatcaaactgttcaaacacaaagaagacattaaagggctgaagttcgtatacgagccgaagcagttacgtttcttcactgcacgctttgattacgtgtaa

SEQ ID NO: 274376 - DNA, 1269 bp, Morganella morganii
atgagtattcatagtgccgatacaaataaatcacccggactgaccagcggaaccatgcttgttatagcaacagtcgttggcggcggtatgttttctttgccgattgcgatggccggtgtctggttttccggtgccaccgttattttgattttagttgcaattatgatgttactgaccggtctgatgttagttgaagttaacctgcattttgaaccgggcgccagctttaataccttcaccaccgagttactgggcaaaaaatggaatattgtcgtgggtattgccttcgggtttgtactctatattctgacgtatgcctatatctccgggtcatccgctgttctgactcagacgatattgaaatataccggtgtcgccctgccgataaaagccgcggtcgtgattgtcgcctgtctggtggctgcgattgtctggtacagctcattatgggtcggacgtattaccaccattttaattttcggtaagtttatcgcgttctttgccaccttctccggactggttgcacacgtggaaattgctaatctgctggattccgcatcagtggcaatacccggaacgaaatacctgccttatgttctgatgacactgccgttctgtattatttcgttcggcttccacggtaacgtgccgagcctggtgaagttgtacggcaaaaccaaattccgctttattacccgttcaatcattatcgggacaatatttgcggtactgctgtatatcttctggctgggtgtcacgatgggcaacatcagccgcgccaacttctccccgattattgccaaaggcgggaacattgatgtgttcgttgaggctatcggcggagtgatggcagggaaaacgatggatcttatcctgacattcttcggtaactttgcggtagccagttccctgctggcagcaacactcggcctgtttgactatattgccgacctgctgaactttaaaaatgacagcgccggtcgtttcaaaacagcggtagtgacgtatctgccaccggctgtggtgtgtttcttcttcccgaacggattcgtttatgccatcggttatgccggtctggcctttactatctggagtgtgattttaccgccgttcctggtaaaagcctcccgcaaacgctacagcgacagcgataccatttaccgttcgccgtgtaacagcgcggtactgaatctggtgattgtctgcggtgcgattgtgtatctgacggtcattctggatgtgttcggctggctgccggcatttaaataa

SEQ ID NO: 274377 - DNA, 210 bp, Morganella morganii
atgctccggccgcttgtgcagcggttctctctgatctgccgggaggcaaatcatgtatttcaccctgttacactggcaacatccgctgtttacccgccgggaagctctgcggttgcttattcaggtacagcgcgccgttcatatgacgcgcagggagagacgggaacgccggatcagaaaaaacgcatcgggataagagcggaaaactga

SEQ ID NO: 274378 - DNA, 1008 bp, Morganella morganii
atgcaaaaatcgttatttatcggtacgttgttatctgcattttttttcagtggtttacaccctgctctggcgctgacctcacaacaggccgccgaaaagctctctctgaccgaactggcagagacctacagcccggcacagatttccgcgctgacacagcagccggaagcaaaccggttcgatgcgctgatgatcaccatcggtgccctgacggcggatgacctgaaaaatccggcagcagagagtgataagcttcaggcttttgttgatgcacagcagcaggatcacacccgctatctcggcaatgtgtcggataaaaatattgtgccgcgcctgcataccgcctggaaaaccgcggtgttcccgaacgatccgaagacgctgaaaactctgaataactttattgataaaggctataccagtggctataacctggtggatacccgcgaagaatccgcctttgataaaacacggatgatccgctacggccataatgatatcgatcacgccgcacagctgatttacctgctgcgccgcgaagggtttgatccgaaagtgcagctgacgccgaaatcatccgcgtttctttatctggacgaatggggtgaggcggattatccggttaccacactgaaaagcggcaaaaaagtggcgatcgccagtgaatataatctcgacctggaatttccgtcagctgaagaacgtaaccgtttccagaacctgattgaccagtacgccaagaaaaatactgctgaccagaaagggctgatccgcgccgcctggtggcagccgttttaccgcagttatgtgcctgtgaacggttatgatgtggtggccgaaacccgtgtgaccggcggccattatcaggctgatttgatggcactgccggaaaacgcggaaaaacaggcggaaaatatccgcaaagcgaaaagcgggatgcaggtaacgagcgaaaaagtgtgggtaaacccgtctttttaccgttatctgcagggggattataagtaa

SEQ ID NO: 274379 - DNA, 1269 bp, Morganella morganii
atgaatacagcaatcggcattctcgggatcgtggtactgctgggaataggttatttactgtctgaaaaccgccgcgctattaatctgcgcacggtggtactggcttttaccattgaactggcgctgggcggattaattctctattccccggccggacagcacgttttatttgtgatggcagaagcagtcaccacagtaatcaacttcaataatgccggaacatcctttattttcggcggtctggtctctgacaaaatgtttgagattttcggcagcggcgggtttgttatcgcgctgagggtattgccgattattgtctttttctccgccttgtcagcggtactttattatctggggattatgcagatcctcgtgcgctgggtcggcggggcgttacagcgtctgctgaaaaccagccgtgcggaatcgatgaactcagcggccaatatttttcttggtgtgacagaagcgcctttgctggttaaaccgtatctcggcagcatgacccgctctgaactgtttgctgtactgtgcggcgggctggcatctatcgccggtactatgctggtgagctatgcttcgctgggcgtaaaaatggaatacctgctggccgcttcctttatggcggcaccgggcgggttgctgtttgctaaactgatgatcccggaaacacagcagacggccgatgaatccggcgccaaaccagtgcaggaaaaccgcccggcgaatattattgacgcggcggcagaaggggcgattaacggcctgaatatggcgctggcggtcggcgcaatgctgctggcgtttgtcagcctggtggcactgttaaacggattgctcggcggtgtcggcggctggttcggtctgccggatctgagcatggagctgatcctgggctatctgctgtcaccgatggcgtggctgatgggtattccgtggaatgaagcgctgacatccggtgccattatcgggcagaaaattgttatcaacgaattttttgcctatgccaatctggcggaatatctgaagggcaatgaagtcgtggctgccaccggtctgccgatgactgagcggacacaaatcatcctctcgtttgccctgtgcggttttgctaacttcggtactgtggcaattgctatcggcggtatcggtagtctgatcccgaaccggcgcaaagagattgccactctcgggatgaaagcactggtcgccggggtgttatccaacctgatggcggccacgattgcggggttgtttatcggcggataa

SEQ ID NO: 274380 - DNA, 708 bp, Morganella morganii
atggcagttgcaattcaggcaagcgcaaacgatttcgcggaaaccatcattatgcccggagatcccctgcgcgccaagtttattgctgaacattatttatcgcaggcgcgggaagtaaacagcgtccgcaatatgctgggttataccggagaatacaaaggcaaacggatttcggtgatggcccacggcatgggtatcccctcaatttcaatgtattcgtatgagttgattcaggattttggtgtgaaaaacctcatccgtatcggcacctgcggcgcggtgcgggatgatgtgtcactgatggatgtggtgatcgccatgggcgcaagtaccgattccaaagtgaaccgtgaccgtttttacggtaacgacctggcagcactggcggactggcacctgctggcatctgcggtgaaaaccgctgaacgtctgcagttaccggtgaaaaccggtaatgtgtttactgcggatctgttttacaccacccgcccggaactgtttgccgtgatggagcagtacggcattctcggggtggatatggaagtcgccgggctgtacaccgtcgcggcagagctgggggcgcgggcactggcgatcctcaccacctctgatcatattaaaaacggcggtaaactgaccatcgatcagcgccagaacgcgatgcacaatatgattgaactggcactggaaaccgcgctgactctctga

SEQ ID NO: 274381 - DNA, 510 bp, Morganella morganii
atgaaaaaaatcattgcaggtgttatcggtctgagtttattaggtgcgggtatgaccgcgttcgcagcaccggctccggttaatcagccgcagcagaatggtcagtatatgaatggctacggtaactgcgacggaaacggcggtcgtcatatgatgcgcggcaaccatgacgggcgcggctatcataataaccgcggataccacaacggtggttacaaccgtgcaccggtctttcagtcagcactgaccaccgccaccccgggtgaagccctgaaaaaaatgagcgcagatgccccggcagtcagtaaagacggcaaacagtattttgtccgcgccagcgtccgtgatatgaacggcaacacgctgtatcagtcttcattatccaccgcaacgccgaaagaagcgctggcgaaaatggcgggtgatgcaccggctgccgcatccggccagcagtattatgtccgcgcaggtattatggaaattctgccggttaacaacgccgcacagtaa

SEQ ID NO: 274382 - DNA, 486 bp, Morganella morganii
atgaaaaaaacaacaatgattgccggtatcatcgcagcggcgtattccttttcagcgctggcggccacagcggatgctcaggtaaaacccctgacagccacggcacagaaagccgcaaataccgctgattatctgattggaaaaacctgggtaacgacagaggctctggatcaggacggtaaagccattccggccaccgatgagagtgtggcgggcttctttggtctggccaactatgaaaaagacggttccgttaagatgtacaccccggaaggaaagctgaaattacagggcgactggtccttcagcgcggacggtaaaacccggacgctgaccggtaagaatgataaaggggaagtgctgtttacccgggtggtcgaaaatatcaaagtgacgccggatgaatatatttaccgcgtctatccgaaaccggatgataaaagtcattatgcggatattgtccacaaaccaaaaaccgcagaataa

SEQ ID NO: 274383 - DNA, 1161 bp, Morganella morganii
gtgagtcacagcatccgcacgccgcgtcctgacagtgtgttaatccctgtcgccggtctgacgttatttgcgattgcatccggttatctgatgagcctgatcccgttatcgctgggtcattttgccatcggtaccgattacgcaggctggttagccagtgcttactatattggtttattgctcggttcgatgctgattgagccggtaattgcccgtatcggtcaccgccgttcctttattctctttgtgctggcgctggcggcaaccgtggcggttctgccgttttataccgatctcagcgcatggctggcatcccgtatgctggccggggtggcggttgccggtatttttgtggtgattgaatcctggttactgattggcgataacccggctgtccgtgccaaacgtctgagcttctacatgactgcactgtacggcggcaccacactgggtcagctggcgatcggcgtgttcggaaccgcaggtgtcgtgccgtttgcggtggtgatggtgctgctgtttgccgctgtgctgccgccgctgttctccaaagcacaaccggtgtgtcacggcggacataaaagcctatccctgaaacagatcctgcgtctgagcaaaccggcgatggtcggctgtatgacttccggcattgtgatgggcaccatttacggactgatgccgctggcattgcaggaaaagcattacaataccgaacaggtcggcggcctgatggcggccattatcctcggcgggatgattatccagccggtgatcagcaaattatcttcccgcatgagcaaagtattattgctggcgatggtctcactcgccggggtatttgcgatgggaatgatttatctctccggtcactatctggtgatggtggtggcgctgacactgctggggatgtcttcctttgccctgtatccggtggcaatcacactggcgtgtgacacactcaccgcgaatgtgattgtggcggcaacacaggtgatgctgttctgctacagcgtgggttcggcggcgggcccgctggtggccggacagtttatgaaacagccggacggtattatgagtttcttctttattgtgctgctctccaccgcgatttatatgctgctttctgcggtgcgccgcaaatcccggattctggcaagctga

SEQ ID NO: 274384 - DNA, 861 bp, Morganella morganii
atgtggaaaaaaataatggtgatttgttgcatgatggcggtatcgcccctgatggcacggccttcacaagagatcactccgctcactgaagcggcacaacaacagttcacgataacgcatcatgagatgcagcagggtgatcgtcactaccgcctctttatcgcgcagccgaaacagccgcaaacggcgtacactgtactctatatgctcgacggtaacggtcagtttccgatgatgattaaccggctcagcgccggtaaaacccggccgctgccgctggtggtggggataggttatccctcagatcaggcttacccgaaaacccgtacttttgattacacaccacccgcaaccggtgaacagtttgccgcaggcggcggcgaactgcctttccggcagtttatccgcgaacaggttattccgtgggtgggcagtcactattctgttaacgaccaccgctacttctttggccacagcctcggcggattgtttgtgctgagaacggccacggatgaacctggtttatttaccgattacatcagtgccagcccgtccctctggtggggcaatggcacttatatgacagcagaacgttttgatcgcctcccggcggatatccggctgaccatcactcagggcggactggaagaaaaacccgatctgagcaaaatgagcgaagaacaaaaacacaatctgtccgtccgttacagtgacattaccgcacgggaagtgtgtgagcagttacaactgcgcggcaaacattgtcagttcctgatcttccccggaaagtcccacggcagtgttatccccgatgcactggagacggtgatttccttattaccggcggataaggaaaaataa

SEQ ID NO: 274385 - DNA, 2040 bp, Morganella morganii
atgaacgcctcattcaaacgctcactgcttgctgttgctgttatgtcagcggccaccgccgcttatgctgaaaataaagatgacaccatcgtggttaccgcttccggttttgcgcaggaaatgcgcgatgcaccggcgagtattaccgttatcaccaaggagcagttacaaaataaaccggctgccaacctgattgacatggtgaaagatgtggaaggtgtcagtgtgatcggcggcagtctgaagccggatatcagcatccgtggtctgtccggggattacaccctgattatggtggatggtcgtcgtcagaacagccgtgaatcccgcccgaacggcagcggtggttacgaagccgggtttatcccgccggtggaagccattgaacgcattgaagtgatccgcggaccgatgtcctccctgtatggttccgatgcgatgggtggtgtgattaacatcatcactaaagcagtggcagacgaatggcacggctcaatgggtatgggcggtatcattcaggaaagtaaagattacggtaactccgcaaacacggatttttatgtctccgggccgctgattaaagacaagctggggttacaggtttacggcgggatgaactatcgtcgtgaagataaactcctggaaggtacaccgcgcaaagacgacaaaaatatcaccgccaaactggcctttactccgatcgaagggcagaaattccttgcggaagtcggccgcagcacacaggaacacacatctaccccggggaaatcgattgatgagacaactacccgtggcggtatcgttcagaagaacaacaaatccgaagtacacaacaatcgtaaccactgggcgctgacctggaaaggtgactgggacgaaattaacagtgaagtgagtgtgtatcaggaaaataccatccgtaaaaccaataccggcaaatggaataaagtcagtgaagactgggtcatggcatatgaagcccgccagccggaagtcaccaatactgtggttgacggaaaggtcactgcattcctgccgtctaacgtcctgactgtcggcggacaatatcagtatgccaaactgaaagatgattccgtgattaaaaacaaacagaccgtcactgaaaaaatgactgctgagcagaaagcgctgtttgtggaagatgaattcagtgtaaccgacgacctgacgctgaccggcggtctgcgtatggacgaccacgaattctacggtaaacactggaacccgcgtgcctatgccgtctataagctgacagatgaaatcaccatcaaaggtggcgtggcgaaagccttccgtgccccgacactgcgagagttaagcccgaatttcggaacgtccacacaaggcggtgcggctatcatgtacggtaaccgtgacctgaaaccggaaaccagcgttaccgaagaactgggtattgcttatgaccacgaatccggtttctctgccagtgcaaccctgtttaacaccgaattcaaaaacaagctgaccagctaccaggtcgccggtcaaaccgatccgctgaccggcctgaatatgtttatctacgacaacgtgggtaaagcgaatatccgtggtgtggaaatggcttcccgtattccggtggcagaaaaatggaatctgaacctgaactacaccttcactgattcagaacgtaagagtgacgacgaaaaacttaacggcaagtccctgaaaggacaaccgctggaaatgacaccgcgtcatatggcgaatgccagacttgactggcagtaccgcccggatatgaacttctacactcaggcaaattacaccggcaaacaagtctgggcagcacagcgtaacggggcaaaacagccgcgtgaacgcagcgggatcaccaccctcgacctggggatgacctaccaggtcatgtcaaatgctctgctgaacttcgcagtactgaatatcgccaacgagaaaggggatgatatcgagactaacgggaactggcagatcgatgaagggcgccggtattgggctaatctgaaactgaatttctga

SEQ ID NO: 274386 - DNA, 1005 bp, Morganella morganii
atggcaacgattaaagatgttgcgaaactggcgggagtctcagtggcaacggtctcgcgggttatcaatcagtcaccaaaagcgggggcggaatccatccgtgcggttcaggcggccatgaaggagctggcttaccgcccgaatgcggcggcgcgggcgctggtcagccagagcagtgatattgtcggcgtgctggtgggggatgtgtccgatccgtttttcggttcactggtcaaagccgcagatgaggtggcgcatcagcacggaaaacatcttttaatcggcaatggctaccaccggcaggaggatgagcggcgcggtatcgaattactgatgaacagccgctgtgatgcctgtgtgatccatgccaaggcactgagtgatgaagagctgcgcggttatgcagcggagatgccgtcgatggtatttatcaaccgtatgatcccggggctggaaaaccgctgtgttgccctggataaccggcgcggtactcagcttgccacacaatatctgctgaaacaggggcaccgccatattgcctgcttatcgtcatcacacacgatcgaagacagcgcacagaggctggcgggctacagagatgccctgacagaagcaggctgtgagctgccggaagcctatattgccgttggtgaaccggtggcagaaggcggagaggcggcaatgagcgctgttttgtccctttcactgccggtgacggcggtcgtggcatacaacgattttatggcggcgggggcgctgtcggtgattgaagcgaacgggctgcgcgcgccggaagatatttctgttatcggctttgatgacagcatgatcgcacgatatatccaacctcgtctgaccacaatacgttatcctgttgacatgatggctcagacagcaacacagctggcactggcgctggcgtcctcgcaggcgctgccgttttgtccgccgtgttacacaccgactctggttctccgccactcggtgatgagcagattttcctga

SEQ ID NO: 274387 - DNA, 333 bp, Morganella morganii
atggaaactgtcgcttaccctgatttcgctaaactggagatccgcaccggccggatcacggatgtcaaacgtcacgaaaatgccgataaactctatattgttcagataaatgtaggtgaccgctcacttcagaccgtcaccagtctcgtgccgtattatacagaggaagagttgctgcataagcaggtcgtggtgctgtgcaatctgcagaaagccaaaatgcgcggcgaaacctctgaatgtatgctgctgtgcgccgaaaccgatgacggctcagaaagcgtcctgctgaccccggaacgtgtaatgcctgccggtgtccgtattgtctga

SEQ ID NO: 274388 - DNA, 1071 bp, Morganella morganii
atgacacatatgcagcagcgcccttatgaacgggcgctggcaacagagcctgccgcagacggcagaccggcggaggtagtggttctgatcaaccgcaacggcatgcgcatcagtattgccgataccggcgcgacctggctcagctgtgagctgccgctggcagacgggatgcgggatgtggtgtgcggtgtggcggacagcgacggatttgcccgtcagaccgcttatttcggcgcgacggtcgggcgttttgctaaccgcattgcgggcggcggtttcaccctgaaagggcagttttatccgctcgcctgtaatgaaggctctacttgcttgcacggcggaacggataacttcagccaccggcgctggcaaatccgccgccgctcagcggattccgtaacattctccctgcaatccccggatggcgaccagggctttccgggcaatctcagcgcagaagtgacttatcagctgaccccggaaaacgaagtccgcctgacttaccggacacaaacagacaaagcctgtccggtcagcctgaccaatcacgcttactttaaccttgccggtgaaagcagcggcgtgaaggtgacagaaggggaaatgcagatccgggcggacaaacgtctggggctgaatgcagataacttaccggacggcacactctgccctgtggccggcactgtgtttgatttgcgtacccgcagggcgctgtctcaggattttatgtctgaggcggcacaacagcagacaaaaggctttgatcacgcctttgtgccggatccggcattgtgtgatggtaaacagactgtcgcggcatactggtcaccggcgggggatgtgtgtctggaagtggcgaccaccatgccctgcatacagctttataccggcaattatctcggcggtcagccgggaaaacacggcgattatcaggattatgccgggctggcgctggaaacccagtatttcccggacgggccgaatcacccgcactggccggatgcggtcagaggcatttcagcagcgggggaacagcgggagagtgtgacagtataccggtttgtgttttaa

SEQ ID NO: 274389 - DNA, 1155 bp, Morganella morganii
atgaaaacagttatcagcaaggtacaacatgcctttgaacagtgcttcggcgcatcccctgacatgctgatccgggcaccgggccgcgtgaatctgattggcgaacacacagattataacgacggttttgttctgccgtgtgccattgatttcggcaccgtggcagccgcctcgcggcgtgatgatcagaaggtctgcgtggtggctgcggattatgataatgatcgcgatgagtttgatctctcacagccgatcgaataccgtgacaataaattgtgggcgaattatatccgcggcgtgatcaaatacctggcggagcgcggttttgtgttcggcgggatgaatattgctgtcagcggcaatgtgccgcagggcgcgggtctgagcagttccgcctcgctggaggtggtgatcggccagactgtcaaagccctgtatgatttacccgtcagccgtgaagtcattgccctgaacgggcagcaggcggagaaccagtttgtcggctgtaactgcggcattatggatcagctgatttcagcctgtggtgaagacgggcacgcattgctgatcgactgccgcagcctggaaacccgcgcggttgccatgccggaaaacagtgtggtgatgattattaactccaacaaaaaacgcgggctggtggacagcgaatacaacacccggcggcgtcagtgtgaggcggcagcggagtttttcggcgttccggcgctgcgggatgtgacaatggagcagttcaccgccctggctcatgagctggatacggtgaccgcgaaacgggcccgtcatgtgatcagcgaaaatatccgtacccttgcggcagcggaagccctgaaagacggggatttaccgcgcctcagccagctgatggcggaatcccatcactctatgcgtgatgactttgaaatcacggcccctgaaattgatgcgctggttacgattatcggtgatgttatcggcgcggaaggcggtgtccgcatgaccggcggcggcttcggcggttgtgtggttgcgttggtgaaaccggaacatgtcgcaccggttacagatgcgattaacgcacactatacggcgatctccgggctgactgcggatatttatgtctgccgtgccagtgacggcgccggtgtgatccgctga

SEQ ID NO: 274390 - DNA, 1053 bp, Morganella morganii
atgatgacttttgatccgtctgattgccctcaccgccgctataacccgttaacgggacagtggattttagtctcgcctcaccgggcaaaacgcccgtggcaggggagagatgaagtcgctgatgtggcggatttaccggcttatgacccggactgttttttgtgtccgggaaatacccgggtaagcggcgatattaatcctgcttacaccggcacttatgtttttcagaatgacttctccgcgctgagaccgcagccctgcacacagccggaaaacaccagtccgttatttcagactcaggccgtcagcgggctgagccgcgtgctctgtttttctcccgaccacagcaaaaccctgccggaactgccggtggtacaaatccgtgctgtcattgatacctggcaggcgcaggcacaggaactcggggaaaaatacctctgggtgcagctgtttgagaataaaggggaactgatgggctgctcacagccgcatccgcacggtcagatctgggccggtgattttctgcctgatgccctgagccgcaaagacggattgctgcgcgactattcccgtcagcacggcagtaacctgctgctggattacgcacaggcggagctgaaagacggcagccgtactgtgacggaaacggagcactggctggcggtagtaccgtactgggcggcgtggccgtttgaaaccatgctgctgccgaaacaccgcgtgatcacccggatggaagccatgacagatgcggagcgggatgacctcgcactggcactgaaaaaactcaccagccgctacgataacctgttccgctgcgccttcccgtactcgatgggctggcattttgcgccgtatttccggcagtgcgaaccggtggatcactggcagttacatgcactctattatccgccgctgctgcgttccgcgacagtgcgcaaatttatggtcggctatgaaatgctggcggaaagccagcgtgacctgacaccggagcaggccgcagagaggctgcgtgcagtcagcgaccatcactttaaaacccctttataa

SEQ ID NO: 274391 - DNA, 1017 bp, Morganella morganii
gtggaaattcttgtcaccggcggtatgggctatatcggcagccatacctgcgtacagctgatgaatgcaggcatgacaccggttattgtggataatctgtgtaacgccaatgccaaagttctggcgcggatcactgcaattaccggaaaagaacctgtgttttatcagggggatatccgtgatgaagcctttcttgacagcgtatttgccaaacaccgtatcgatgcggtgattcactttgcgggcctgaaagccgtgggtgaatccgtggaaaaaccggttgaatattatgataacaatatcaacggcacgctggttctgctgcgcagcatgaagcgggcgcaggtaaaacggattattttcagctcttccgcgacagtgtacggcgatccggccagtgtgccgatcaccgaagaatccgctatcggcaacaccacaaacccttacggcaccagtaaatatatggttgagcgcattctgaatgatgtgctgatcgcggataatgactggtctgtgtcactgctgcgttatttcaacccggtcggggcgcatccgacaggcacgatgggtgaggatccgaaaggtatcccgaataacctgacgccatatatcactcaggttgctatcggccgccgtgaaaaagtcagtatctatggaaacgattaccctacacctgatggtaccggggtgcgtgattacatccatgtgatggatctggcggacggccatgttgcggcactgaaaaccgtggcacagtcctccgggctgcatatctataacctgggcaccggcaaaggcaccagtgtgctggaaatgattgcggcgttcagtaaagctgccggtaaaccgatcccgtatgcggtctgtgaccgccgtccgggggatatcgccgagtgctggtcaagcccggataaagcggcccgcgatatgcagtggcgtgccgtccgtactgttgatgatatggcgcaggatgcctggcgctggcagcagcagaacccggaaggttacgcagactga

SEQ ID NO: 274392 - DNA, 990 bp, Morganella morganii
atggccacgctaaaagatatcgcccggcaagccggtgtctcactcgccaccgtgtcgcgggtgctgaatgacgacccgacactcagtgtgaaagaagaaaccaagctgcgtattctggaaatcgccgagaaactggaatacaccgtttccgcgcagcgccgtcacaccccgggcaaacgtcaggcacagcggctgcattttctggcggtttacagctatccgaaaacagcggaaattaatgatccttattatctctccatccgccacggcattgaattacagagtgagcggctgggtattgagctgacacacgcttatgaaaacaaccttccggagacagtttcccgcccggacggcgtgctgctgatcggacacggtgcccgcgcggtactgacagaagtgcaggcgctctgctctgccgtctgttttgtcgatttcagcgatcgccagagtgattatgacgcggtggatattgacctcgcgtacattgcgcaatccgtaaccgatttctttattgcgcagggttatgaccggataggttttatcggcgggcaggattccccggcggcggcggatatccgcgaagtcgcgtttacggaatacggctcactgcgcggtgtggtgcgcggggaagatatctatcgcggggatttctccagcgcgtccggttatgctctggcaaaacagatgctggccggagagagctacccgaaggccctgtttgtcgcttctgactccattgctatcggcgtgctgcgcgccctgcatgaacagcatatcgctatcccggaggatatcgccctcatcagcgtcaatgatatcccgaccgccaaatttaccattccgtcactgtcgaccgtccgcatccactctgaggtgatgggcagccagggcgtcaatctgctgtttgaacgtctgcgtgacgaacggcaggagccgcttcaggtctttgccgcctcccgccttattctgcgcggcaccacgaagtaa

SEQ ID NO: 274393 - DNA, 3063 bp, Morganella morganii
gtgaataactgggaaaactacaccctgctgcatgaaaaccgcctgccgccgcgtgcctatttctttgcctatgataacgatgccgccgcccgcacttatcagcgtgagctgagtcagggctttaaactgctcagcgggcaatggcagttccgctattttgatcatccgctgcgcgtaccggaggcgttttatcacacaccaatgacagaatggtcatccatcactgtcccgaatatgtggcagatggaaggtcacgggcagcttcagtataccgatgagggctggccgtttccgattgatgtgccgtttgtcccgtcagataacccgaccggtgcctatcagcgcacgtttacgctggacgaaaactggtcacaacaacaggttattattaaatttgacggcgttgaaacctattttgaagtctatgtgaacggccactatgccggattcagcaaaggcagtcgcctgaccgctgaatttgatatcaccgcctttgtcagcgccggggaaaatctgttatctgtccgcgtcatgcagtgggcagacagcacctatattgaagaccaggatatgtggtggatggcggggattttccgcgatgtgtatctgattgcacagccgccggtacatgtccgtgatctgactgtccgcaccgattttgcgccggattaccgcagcgccctgctgaccgcctctgcggaaattgccggttctgcagaagggatgcagattgaggccgttttatatgacggcagcaccgtctgtttttcacagaaaaaagcactgactgctgacgatcataccattacattcaccgcagatatcgcttccccgcgctgctggagtgcggaagatccgtatctgtatcacctgctgatccgcctgtcggacagcaacggcaacctgctcagtgtgatcccgcagcgggtgggattccgcgatattaaagtccgcaacggcctgttttatatcaacaatcattatgtcaaattacacggcgttaaccgtcacgataatgatgagcacaaaggccgtgctgtcggtatccgccggatggagcaggatctgcggctgatgaagcagcacaatatcaatgctgtccgtaccgcgcactacccgaacgatccgcgcttttacgagctgtgcgatatttacggcctgtttgtgatggcggaaaccgatgtggaaacccacggttttgccaacgtcggcaatctcagtcagatcaccggtgatccgtcctgggagccggtgtatgtcgaccgcatccgccgccaggtacatgcacagaaaaaccatccgtccgtgattatgtggtcgctcggtaatgaatccggttacggctgtaatatccgtgccatgtatgatgccgcaaaagccattgatgacacccgcctgatccactatgaagaagaccgtgatgccgatgtggcggatatcatcagcaccatgtattcccgcgtgcagatgatgaatgagttcggtgaatatccgcacccgaaaccgcgcattatctgtgaatatgcccacgccatgggcaacgggccgggcggactgagtgaatatcaggcggtgtttgaccgtcatgatgcgattcagggacattttgtctgggaatggtgtgaccacggtattctggcacaggatgaacagggtcgtccgttctataaatacggcggtgactacggcgattaccctaacaactataacttctgcatggatggcctgattttcccggatcaaaccccgtccgccggactgaaagagtacaaacaggtgattgcaccggtgaaagtgcgcgattttgatgcgaacagcggcgaaatcaccattgaaaaccgcttctggttcagtacgctggcagaatgtcagatccgcgctgaatatattgctgacggcgacattattcacagtgaaatgttatcactgcctgaactcgcctcccgcgaaagcgcccgcattgccctgaacttaccggctgccgatggccgcgaaatgtttgtcaatatcatcgttacccgcctgaatgccacccgctacagtgctgccggacatgaaatcgcggtttatcagttcccgctggcggcggcatccgcgccggtgctgccgtttatccgccatgatgccacgccgctgacggtctgtgacgagcgcctggaaatgcatattcgcggttgtgatttcaccctcaccttctcaaaaactgacggtaaattaatccgctgggaaaacagagggcaatccctgctcgccgccgcaccacggatgcgtttctttaagccgatgattgataaccataaacaggaatatgaaggtttatggcatccggcacacctgcaaatcatgcaggaacatttccgtggcatggaaacagcacaggaaaacggccatgtgattgtcacggtgaactccgtggttgccccgccggtgtttgatttcggcatgcgctgcacttaccgctacaccattgcgccggacggccatgttgcggtgactctcagtggtgagccgtacggcgattatccgcatgtgatcccgtgcatcggcatggatatgggcatcgatgcccgctttgaccacgcggaatactacggccgcgggccgggcgagaactacgccgacagctgcaaagccaatcttatcggccgctatcagtcaccggtcagtgacctgtttgtcaattatccgttcccgcagaacaacggcaaccatcaggacacccgctggctggcgctgacggacaatcacggcagcggcctgtttgtgcgtcctgatcagccgatcaatttcagctgctggccgtgccggggggaagaactccaccgcgcccggcatcagcatgaatggcagccggacggccatatcactctgaaccttgatcacgccctgaccgggctgggctctaactcctggggcagtgaagtcctcgacagttaccgtgtctatttccggccgttccgtttcggattcacactgctgccgtttaccgaaggcgactgccgtgcggaaacactggcaacactccatttttcaggcgaaacacactcaggaggccgggcatga

SEQ ID NO: 274394 - DNA, 450 bp, Morganella morganii
atgatcctgtttactgatttaacggattttcagcgttttttccgtcagggaaaaaaatggcagcgttgtattgaggccatcaataacctgccatccattcatcctgatgtgacctattctgtcggtgattcactgatataccgccttcagactaaagcagagccgcagccggatttcctcggtaaacgccgctattttcaggtgcattactggctggagggggaggagcgcgtggagtatgccgccaaatccgccctgaccccggtaaatgcttacagtgatgaaactgaccgggaaatcctgcgcggtaaaggggaaaccctgctctgcaaacccggcaatgtgctggtgtgtgaaaatcacgaggcataccggttcacctgctcaggcgatgtccgcaaagtggtgcttaccgtgaccattgaagacggttatttcctgaataaatag

SEQ ID NO: 274395 - DNA, 1467 bp, Morganella morganii
atgtccacatccgcgcgtaataccatcggcaagttcggactgctgtccatgacctttgccgctgtatacagttttaacaacgtcattaataataatatcgagctcggactggcttccgcaccgatgttctttatcgccacgattttctattttattccgttctgtctgattatcgcggagttcgtctccctgaataaaaactccgaagccggtgtttacgcctgggtgcgcagtgccctcggcggccgctgggctttcctcgctgcttatacctactggtttgtgaacctgtttttcttcacctcgctgctgccacgtgttatcgcctatgcttcttacgctttcctcggctatgaatatatcttcacgccggtcaccactgcgctgctcagtaccgtgctgtttgccttctccacctatgtttccaccaacggggcaaaactgctgggaccgatgacctctgtcacttcctcgatgatgctgctgctgaccttctcgtatatcgcgctggccggcgttgcgctgatggggggaattcagcctgcggatccgatcactgtggaagccatgacgccgaactttaactgggcattcctcgggatcaccgcgtggatctttatggcggccggaggtgcggaatcagttgccgtgtatgtgaatgacgtcaaaggcggcagtaaagcattcgtgaaggtgattattattgccggattattcatcggcctgctctattccgtctcctccgtggtgatcaacgtgtttgtaccgcgtgaagcactgaagtttaccggcggctctgtccaggtctttgaagggttatccacctatttcggtctgccggagatcctgatgaaccgctttgtcggcgtggtctctttcaccgccatgttcggctccctgctgatgtggaccgcggcaccggttaaaatcttcttcgcggagatcccgaaaggtgtctttggtgccaaaacagtcgagctgaacaaacacggcgttccggcacgtgccgcctggatccagttcctgattgtgatcccgctgatgtttatcccgaccctcggttccgataccgttcaggatctgatgaacaccgtcatcaacatgactgccgccgcttctatgctgccgccgctgtttattatgctggcgtacctgaatctgcgccgcaaactggatcatatcccgcgtgacttccgcatgggttcacgcaccacggggattgcggtggtctccctgctgattgtgattttcactatcggcttcctggcctccactttcccgaccggtgccaacattgcgaccattctgttctataacgtcagcgggatcctgattttcctgggctacgcctggtggaaatacagccgttatgagaaaaccctgaccgcagaagagcggaaaatcgccgatgccccgaccgcgcaaaccgcgctggcccgcggcgaagaatccgtcgataatatctga

SEQ ID NO: 274396 - DNA, 501 bp, Morganella morganii
atgacgcacaaactctggctggcaaccgcactgctcccgattttgctcagcggttgtgccgcgcctctgccaccggcgcagacgcaggaaaactgcccggatttcaccggtgtttatcagctgccgctgcagggggaatcacagagtattgctctgacgctgctggataaatccaccaatcagtatggtgtgggcgtgaaggacaaaaacggcgttgaccacttcacctcacgtccgtatcagggcgatatggtgcggatggataaaaaagagatgaacggtcagctggcatgcagtgtgatgattgaccaggtggggctgattaagcaggttgaaaaaggcggcccgatgccgggcttcccggggattgcccgcaacgatgatattaaaatggccaccggctatgcgttgtttattttcagcccgcagggaatcgattttattaatctgatcaaaacttccgacacagtaccgatggagttgcagccgccgcgttactga

SEQ ID NO: 274397 - DNA, 1305 bp, Morganella morganii
atgataaaaatgcaaaaaagccactggctgtccggctttcagtggtatttctttattttctgcaatacggtattgatcccgccgacactgcaatctgcgtttcatctttctgacgccgccacactgactatcacacaatacagttttatcgccaccgcgctcggcagtctggtacaagtgtttaccggccaccagcgtgcgattatggaagggccgaccggcctgtggtgggccacgattttggggatcgcggtggcagaagcctctttcggcacttctgcgggcgtgaccggcgcaaacctggctatcgggattgcctgtgcggggcttatcacactggtgattggttttaccggcgcaggagcccgtatcgcccggatttttaacccggcggtgatggcggtgtttatgtttatgataggcgcacaactggtttccattttcctgaaagggatgctgggactgccgttcggtattatgccgccggatgccaccgtgaattatccggtctttttcctcgcgctggcaacgctgatcctggtgctgggcgtgattgtgtatgccccggtatccgtggccaaatatgcgctgctgataggtgtgttgctgggctggggagcttacgtactgctgttttccccgccgggacgggatgtggcatccgcatcatgggaatttttgccgctcggcagcactgacgggtttgaattccgctggggcgtgattattacctgtatcctgaccgggcttctgaatatcagtaataccttcggtgccatccgttcgacggatgtgttttacatggataaattacaggaaaataacgtcctgttccggcgcagttttattgtcaccggctcggtaacgctgcttaccgcgccgctggcggtggtgccgtttgcaccgtttgtctcctcggtgggattaatcacccagaccaatgacagcagccggacatccctggtggtcggcagtgtgctgtttctgctgatggggctgatcccgccggtgacacttttcttcagcggattgccgctcgccatcggcagtgccgtgatgctggcgacctatctgccgctgatgttttcctcactggctttcgtggataaaatttccctgaatgcccgtaatatttaccggctggcgatcccgctgtttgtcggtattttcctgatcaatccgcctgccgtttttatcagcgacctgccggtgctgctgcgcccgatgctggggaacggcatgctggtggcaattttgctggcggtgttgtcagaaagtctggtgcgctgggataaggtaaagtag

SEQ ID NO: 274398 - DNA, 978 bp, Morganella morganii
atgaaaccatccgttcttgtttaccgcgatattcctgacgatatcctcacccgcctgtccgctgaatgtgatgttcaccgcgtggctgaaattgatccggacattgacccgtcagtaaaaccgctgctggccggggcggatgctatcctcggctccggcgggaaaattgatgcccgttttctggcgatggccccgaaactgcgggtggcttccaccattaccgtcggttatgacaattttgatgtctctgccctcagtgcacggaatgtggtactgatgcataccccggatgtcctgaccgaaaccgttgccgatgccacgatggcactggtgctggcgaccgcacgaaaaatgatcatcagttcagagcgggtgaaacgcggcgagtggacagaaagtatcacgccggactggtacggctgtgacgtccaccataaaacaatgggtattgccggaatgggccgcatcggtgatgcactggcacgccgggcacactgcggattcggcatgaaagtgctctacaatgcccgctcccgccatgaaaaaaccgaaaaagcgtatcaggcggaataccgttccccggatgctctgctggcagagtcagattttgtctgtatcactctgccgctgacggcggaaacccgccatttattcggccgcgaacagtttgaaaaaatgaaacgcagtgccattctggtcaatatcgggcgcggcgccgtgatcgacgaagccgcactggcacaggcactgaaagataaaacgattctcgccgccggtctggatgtttttgaacaggagccgctgccgccggattcaccgctgctgtcactggataatgtggtgctgatgccgcatatcggctccgccacccatgaaacccgctatgcgatggccgcctgcgccgcggataatgttctgcgtgccctgaaaggggatgtcagtcagaattgcgtcaacccgcaggctcagcaacagtaa

SEQ ID NO: 274399 - DNA, 873 bp, Morganella morganii
atgatgaaattccggggatgggaaaaatgcagcttcagtgactatgaagcctgctgtgaaaagttcggttataatgcggaaacctcaccgcactatattaagttcgccatggagcagggtgttgaaccggatttttatgcctatacaaaaaaaggcgttattgaaggtgccgtctgcacagataacggctggctggcaaatgacgataaaaacccggaaaacagtctgaaatggatgtatttcccccgttattccatcctgctgccatttaataaaaacgttaaatgttttctgccgtttaaaaccaaatccctgagtacggaatgccgtcagttttataacagctcattttcactgttttcccggcgtcatgtggccgtttcaaaagatctttctgctttttcttccaaaaccagagccacccggaaaaaagagatccgtaaatttatggccgacggcgggacatttgaaaatgtcagtaccgtcgggccggattttttatttgaaacctacttccggttatatgctgaccggcgggggtatgtggtggagaataatccggttatccgcgcactttttcatcatttctataataactttttcggggaaattgcgttttttgacggtaaagctgtgggtattcagttattgctttccacaccgtcaaagcggggaacatttattgattttctgaacatcggctacgatatgaatttacgcaaatattccatcggcacgatgctgatgtggcgcaatctctgcctgacagcagaactgcctgcaccggtgacctattcttacggcatgatgtccggggagtataaagcccgctggtgtgacccggtcagcattggtcgttccgttacattctga

SEQ ID NO: 274400 - DNA, 948 bp, Morganella morganii
atgtccaatatacctgcacaggcggatgaaaccgcagaaaacagcgcggatatcagccgtgagataaaattcgcggccgcgaaaaaaagtacctgggtcagtgtctgggtgaataccctgttgtctgcatggcagatagtggcgggtattttctcgcactcacaaggtctgattgctgacgggattcatacattgtctgaccttatcgctgattttgtggtgctgattgccaatcgcggcagccgtaaagcgccggatgaggaacacccctacggccatttccgctatgagaatgtggcctcgctggttcttggcgtgctgctgctggtggtcagttgcggtatgctgtggaccgccggttcacggattatgtcgccggaaacgattcccgaagtgcactcgctggcgctgtatgtcgcgctgctggcactgctggcgaaagagggcctgttccgctatatgctgcatgtggcgcgcaaagtgaaatccaatatgctggaggccaatgcctggcatgcccgttcggatgcggcatcatcactggtggtggccatcggtattaccggcagtctgatgggatataaaatcctggacccgattgcggcattggtggtcgggctgtttattctgcgcatgggggtgaaatttaccctgcaatcacttcaggatttaatggatcgcggtgcggatgaagaaaccatcgccaaaatcacgcagtctgtgatggataccccgggggtggaaggggttcatgatctgaaaacccgtaagtccggcgattatctgctggtggatgtccatattgaaattgatgaaaatctgacggtcaaagaagggcatgatatcgctattgcagcggaaatgaatatccgccgtgacccgcaggtgctgagtgtgatgacgcatattgatcccgcccagtccgtccgggccgggctgacaacctga

SEQ ID NO: 274401 - DNA, 438 bp, Morganella morganii
atgtacaacacgattctggttccgattgatattcttgaagatgacctgacagacaaaatgctgccccatgtggaagcactggcgaaaattgataatccgaagatccacttctttactgttatccctaacgtggaaatgttctttggagtggaatacgcctcaatgccggtcagtatgcgggaatccggagagcgcattgaactggcgcttgccgcactgaaagaaattattaaaggaattgccgtgccggaaagtcagtacaccctgcacgcggctatcggatcagccaaaaacgaaattctctcctatgccaaagatattaacgccgacctgatcctgatgggctctcaccgcccgggtgcggcaacattcctgctcggctctaccgcagcaacgattgtccgtcacgccaaaacctcggtgatggttatccgctga

SEQ ID NO: 274402 - DNA, 402 bp, Morganella morganii
atggaatttcagccatcccgccagatagcaaccgttctgcaatggattctgaatattgcgctgctgattttaggtgtgctgctgattgtgtttatgggaaaagaaacactgacactgattaatctgctcttttccggacaggagaaaacgacctatctgttattagacagtatcgtgacttatttcctctattttgaatttattgccttaattgtgaaatatttttcgtcgggctatcatttcccgctgcgctattttatctacatcggcattacggcgatggtgcgcttaattattgtcgatcattcagatgctaatgcgacatttctgcataccctgtcaatactggcgctgactgtggcgttatatctggcaaataccgataagcttaaacgcagctga

SEQ ID NO: 274403 - DNA, 567 bp, Morganella morganii
atgaaaaaattgatccttcctgttatggctatgttcgccgccgcaggcgcttatgctgaagaagcaaaaaccgttgctgcgacaccactcacggtggtaaaaacagcagaggctgttaaagcagaacctctgaagattatgaaaactgataatggtatgagtgagctgaaacacttcccgcaggctgcgtcagatcaggttcgtcatgtgattgctgtagagccgaaagccgatgaagggcagtacaaaattgaactggtgatcggtaaaaaacaggtggtggactgtaaccaccagtggttcggcggtaagctgacacagaaaactgttgatggtttcggttatgactattatgaggccggtgacttaaccgggccgatgtccacgatgatgggctgcctcaataatgaaaaacacgaagcgtttgtcagcgctaacctgggtgacgaagcattcgtccgttacaacagccgcctgccggttgtggtgtacgccccgaaagacgtggaagtaaaataccgtatctggagtacggataatcaactgctggatgcaccggcaaaataa

SEQ ID NO: 274404 - DNA, 213 bp, Morganella morganii
atgccacttgatcagcaagcccttatagcacagcttaaagattcaaatcctcgttttgccgcactgtatctgaaacatcatcagttaaataatgaaattgccgagcttgaaggcccgaacggcgcaggctataacgacaatgtcgtccggctgaaaaaagaaaaactgcacgtaaaagatgagatgcagcgcattttagcggagtgtcagtaa

SEQ ID NO: 274405 - DNA, 249 bp, Morganella morganii
atgtcagagaaagcctctgtccatggccacgaggtcatgaatatgattattgaaagcgggaaaaattacaccacagaatcacttatcgcggatattcacgccacgttcggcgaagatacccgtttccatacctgctcggcagagaatatggatgcaaaagcgctggtcagttttctggcggctcgcgggaagtttaccggtactgaagagggattcagcacatcggctgaaaaaatctgcaatcactga

SEQ ID NO: 274406 - DNA, 252 bp, Morganella morganii
atgcgtattgaaattctgttagataaacgaaatgcagtgcctgcgcatcttattcagtcccttgaagtccagttaaaacgccggatcctgccgttatatccggatatgcagttccgtattgcgcaaagcagccagaccacgattaatatttccggcgtgaaatcccccgacgataaacagtcgctgatggataccattcagaccatctgggaagatgacagctggatggatgatgactacgcgcaatcatga

SEQ ID NO: 274407 - DNA, 357 bp, Morganella morganii
atggccggcaaacgtattttacgggaaatcaaaaccgttacccgtatggtggaattgtatgaacagcgccatccggcaccggcagatgctccggaacattaccgcgatctgctggcgtatgcagtgaaacggctggaaaaatgccgttacggtgaagacaaaccggcctgcaaacagtgcccggtgcactgttatcagccaaaaccacgggaagagatgaaagtgattatgcgctgggccgggccgcgtatgctgtggcatcatccgatcctggctgtccgtcaccttattgatgacaaaaagccggtgccacctctgcctcagcgccgccgcacaccccgcaataatcaggactga

SEQ ID NO: 274408 - DNA, 555 bp, Morganella morganii
atgcttactcttgataccccgcgtctgcacctgcgtccctggacaccggatgattatgcaccgttccgcacgctgaatgcggatccggatgttatgcgcttttttccggcctgcctgagcgcggcagaaagtgatgcgatggcggatgaaattatccgtcgttttgaacggcagaaagcattcggattgtgggtggcagaagaaaaaagcagcggggaatttaccggatttgttggtcttaatatcccgtccgcaccgtttgatttcagtccgtgtactgaaatcggctggcgtctggcgaaacgcttccacggtaaaggttatgcaaccgaagcggcaaatgcggtgctgcaccatgcctttatgacgctgaatatgccggagattgtcgcgtttaccgcgaaggtgaatctgccttctgaacgagtgatggtgaaaacgggaatgcagtatcagcgggagtttttgcatccgtcactggaacaggggcatccgttacagacgcatgtgctgtataagatcacacaggcagattaccgcgcgcgtcagtcctga

SEQ ID NO: 274409 - DNA, 714 bp, Morganella morganii
atgttcggtaagaaaaaacaagcagatatccctgaaacggagccggttgcggcaccgttgcaaaaaaccagagaagaaagagaagaagaggaacgaaaagcggctgaactcagtgctcaggcaaatgaaattacccagttgctgtcagcacgcggtgaagagaaacagcgaccgctggcatctcttgaatcccgccagccgacggtgatcagcaaagagacccgcctgaccggtgatgttgaaatcagcggtaatctgcaaatctggggtaaaataaagggacaaatcaaagcccgttccggctcggtcagcattatgcagtccggtgtggtggaaggggatatttttgccgaaaccctgctgattgacggcgtactgaccggcacctgtaccaccgaacagctggaaattcttgagcacggcgagcttaacggcgtctgccgtgcctctaatttctctatccgcaaaggcggtacctttatcggccagtcagagccgcatgcccctgccggtaaagcggctgccgcagcacaggcaccgcagtcccgcccggaaaataataaaccggcagcggtgactgagctgaaacagtctgaaaaagcagacgcagcggcggagaagtcacaggaatccgcgccgaaatcgtcgtcacagaatggtaacggaaaaaacaaagagccgcagaaagtcccgtctgtctttaagcgcgtgtaa

SEQ ID NO: 274410 - DNA, 624 bp, Morganella morganii
atgctgcacgttgaacatctgagtgcggggatcctgcaggatctctcgctgacactgccgcgcgcacaatgtaccgcgatctgcggcccttccggcagcggaaaaaccacattactgaactgcattgccggttatctgccttatcagggcaccatacggctcggagatgtccctctggatccgttgccggtctggaaacgtccctgccgttatcttaaccagcggttgtggctgtttccgtggctgacggttctgggcaatttacggctggcacagtatgccgccgggttaaagcgcgataaatcacaggcgctggcactgctggataaaatgcaggtggcacatctggcggcacgttttccgcatcagatttccggcggggaacaacagcgggtggcactggcccgcgcactgatctcaccaccggcactgctgttgctcgacgaaccgttttccgggctggattgggcgacccgcaggcagttatggccgcagattaatctgctgaaagaagaagggatcaccacgattctggtcacgcatgaacctgaagaggcagaagcgctggcacaataccgcttagcggcagaaggcggaaaaatccgggggacgacaggggcttga

SEQ ID NO: 274411 - DNA, 789 bp, Morganella morganii
atgtatccggtgatgaaatgggcgctggtgcccctgttactgttgttgtgtctgattaccgggtctctgctggcgttactgtttcaggtaacgccggcattgctgactcagctgattaccgaccctgaatttcattttgcggtgctgatgtcgctggcgacctcactgacatcgctggtgctggcatttctgatcgcggtaccggcagcctgggtgatggtgcggggggatttccccggcaagcgggtgacggatgcgctgtttgatatcccgctggtcacgccgccgctggtgattggtatcgggttgttgctgctgcttggcagtcagggcccgctggccggaattttcccgcagttggggcgctggctgttttccccggtgggtgtgattatcgcccagacctatgtcgcgtcagcggtcctgtaccgttcggcgcagggggcgtttgcctcggtggatccggcatatgtccgcacagcaatgaatctcgggctgccccccggaaaaaccctgctgctggcggaaattccgttgtgtctgcagggattgctgagcggcgggatcctcgcctactcccgggcgctgggggagttcggtgccacactgatgctggccggtgccacccgctttaaaaccgaaaccctgccaatggcgatttatcttaatattgccagcggtgatttttcactcgcgctcggctgcgcactgatcctgatggctctggcgattgttctgctggtcgcattgcaccggctgaaaaggcaaccttcacatgctgcacgttga

SEQ ID NO: 274412 - DNA, 762 bp, Morganella morganii
atgtcgtcccgtcgtctgatgctctccgcattactgttctgttgttccgtaccggccgcggtggccgctgagttacatatgtatgccggcgccggtctgcgcccgccgatcgaaaaggtgatcagtcagtttgaaaaagagaccggtaatacggtaacggtggaatatggtggttccggacagatcctgacccggtttgaactgacaaagcagggcgatctgtttttcccgggatcggcggattatgtggaaaagctgcagaaagaaaaacaggtgacagacagttatccgatcgtccggcatattccggtgattgcggtacgcaaagataaagcagacggaattaacagcattgcagatcttgccgcaagcaatctgcgtatcggcatgggggacccgaaagccattgcgctgggccgcagcggtgaagttttactggatgccagcggttacggtgatgcactgcgggaaaaagttattgtccgggcggcaacgattaaacacctgtcgatgtatctgcttaacggtgaggtggatgctgcggttatcggccgcgccgatgccatgaaaaaccgcgataaactgattattctgccgtcaccggaaggcagcccggaagaggtggctacgctggcggtactcagcaccagtgcatccccggcagaagcaaaacaactggcggagtatttttcctctccggaagggatcaaagccttcaccgattatggttttctgccggtcagaccggctgatgcacactga

SEQ ID NO: 274413 - DNA, 825 bp, Morganella morganii
atgaactcatgtactttgacatctgacaataataaagagatacagtctgttattgttgagcccgatatttttaatattaccgaacaacaggaaaaaggtctttaccttctgatgtccggaaaaatgaaatggcaggattgcataaactcatacacacttaatgataatgaagttattttctctaatcagggaagctatgcataccagcatatttccggtgaaattaatttattatgggttccgctgaacaaccattttctgcgtgattttcttcaccgtttctcagatactctcagccatcttcaccgcgttgctgatccgacatccggactcatttatttcccgcagtccgccatgctgaaaaacagtatcagcgggttttatgatgcttactgtaataatgcgccatcaccgctgataaagctgaagctggaggagttattactaattatcatcctgagtgaagaaggcacacgtctgatgtcggtattacgtcagctgagtaaccgccaggcagaacgtttgcagagcttcatggaaaagcactatctgaaggactggaagttaaatgaattttccagagaatttggtatgggcctgacaacattcaaagagctgttcggttcggtatacggaacatctccgcgggcatggataagcgaacggcggttattattctcccaccagcttctgcttaatacccagatgagtatcgttgatgtctcaatggaagcagggttctcaagtcagtcgtattttacccagagctaccgtaagcgtttcggatttacgcccagtaaagcccggggtaatcatataaactga

SEQ ID NO: 274414 - DNA, 726 bp, Morganella morganii
atgcttaataaaacaacttatcatctttatctgtcagatgatcgaatatataactcagaagacacctgtaaagagaatgatttattatctgaatatcttacacgtcagcagacagataatttaaaaacaactgattggttcctccgcagaaagaaatggaatattccttttcagtaccgtgacctgaccatgatcagacagacaatacaggcttaccctgataactgggatgcccgtttatctgacaccattatattatccgcatcccgttactggattgacgggttattaaatgaaacgtatgaatactggataaaagatacacaccgtgagctgtgggatctggaagaagaatataatcagagcagaataataaaccgtcagctggctgccctgtatacactgtacagtgcatattatccgcaggcggagctgtcagatatcaaaaacagtctcgcggggtccgcacaggatctttcccggacagagcataatattcacactctccggagggaaattccgttcacgctgcgtcattttgttaacctgttccgtgatgtgatttatcatcataagtccttgcaggacaaccacattccggactatttccgcactgccgtacagctgattttgcagctgaaaaacaacaatgatgacgaccggctgtatcagtggctgaacagccgcaatatctgtctgacgacagataaaatacactggtgctga

SEQ ID NO: 274415 - DNA, 375 bp, Morganella morganii
atgtaccgtcacactgaaactattactgccacacctgtatttaccggtaagcgccggttgttatggcagacactggagacattccctgcagaaagtcaggaataccgggatatctgcgggagcttactggcgccggtaatttgtgacctgaaaaaaataaaatataccgggcagataaccagagactcactattacagaccctgtcgcactatgatgaatacggcgaacagcaggaatttattttatcccggctgtggcagtcactgccggagtcattatctgacagtgacctgaaatcactgattgccgccgaactcaatcagttgctctatgtgaataaccagctgactttctctcagtttaatctccgctga

SEQ ID NO: 274416 - DNA, 741 bp, Morganella morganii
atgtcattatcattaactgaagcggtgaatctgttgaaatccaaaaaatggattgacctgacacacgcatttaatgcggattcaccgcacttttttatgtttgaaccggcggagtttaaaacactgtttgattaccgcgatggcttttttgcccagcagtttacgtttcccggccagtacggcacccatattgatgcgccgtgccattttgtacaggggcggcgctttgtgcatgagctggaactgaaagagctggtgttgccgctggtggtgattgatcagtccgccagagcacagcaggatgcggattttgcgttatccgcagaagatgtgctggcttttgaacagattcacggacgtattgaaagcggcagtttcgtggcattgcgcacggactggagcaaacgctggccgtcacaggcactgatggataataaagatgcggaaggcaacaaccatattccgggctggggaatggatgctctggaatttctgtttcgtgagcgcgggatcagcgccgtgggacatgaaacctttgataccgattcggcgcaggatttccgcaaaaacagtgcattgctggcggaatattttgtactggatcaggatgcataccagatagagctgctgaccaatctcgataaagtcccggccaaaggcgcggtaatttttaatatcgtggcaaagccggacaatgcgggcggattccctgtccggtcatttgctattttgccggattaa

SEQ ID NO: 274417 - DNA, 291 bp, Morganella morganii
atgttaaaagtgattgctgaagattttatgcagccggatgccgttgagatcctgatgccgatgtatgaagaactggttgccgccacccgccgtgagccgctgtgtatcagttatgatctgtttgtcgatcagaaagacccggggcattttgtttttatcgaaacctggccggatcaggccgcgctggatgctcattgtgccagtgagcacttccgccgcctggtacccgccattaataaatatcagcgtgccgaaccgcgttttatcctgatggacagcgccgttaagtaa

SEQ ID NO: 274418 - DNA, 636 bp, Morganella morganii
atgtctctgcaattatggatcgccaataaaaattactcttcctggtcgctgagaccctggtttttactgaaagccctgaatattccgttcgatgaacagcttgccacctttgtgccgggtggcagcagttatgagaaatttctccgcttttccccgtccgggctggtgccgtgcctggtgacagcggataccacggtctgggattctctggcaatctgtgaatatattgcggaggattatccgcatgtctggccgcaggaaaaaatcgcccgtgcctgggcgcgctctgccgcggcagaaatgcattccggatttaccacgctgcgccgtgagtgcccgctgaactgcacggaaagccgcccggccgcagagatgacgccggaattacagaaagagtgtcagcgtctggataagatctggtgtgagggattaaccgggtttggcggcccgtggctggcagggaaaaatatcagtgcggcggatgctttttatgtgccggtggctctgcgggcacggacttatcagctgccgttttcagcggcggcacaggcatggattgaccggatcctggcgcatcctgccattattgagtggtgtgaggcggcagcgaaagaagcgaaaatcgaccacgactga

SEQ ID NO: 274419 - DNA, 939 bp, Morganella morganii
atggatttttcgcttttaccggtgtttattgctatcaccgagcaggggagcctgacaaaagcagcagagtatctgcacatgaccaaatcggcggtcagcaaaaaactgtcggcgctggaaacccaaaccggcatccggctggtcacccgttccacgcgccatctgcagctgactgaagccggacagctttattacacctatctgaaaaaagcccatcaggctgtgctggacgggcaggatgcgttgtcatattacagccgtgaggttgacggcacactgaaaatcagtgccccggcggtgttcggcagtctgcatctggccaaattaatgcctgaatttttacagcgctggccgtcattacaggcggaaatggtatttgatgacaaactgacggatctggtcggtgaagggtttgatctggctgtcaggatcggtgaattgcaggattcctcactgattgcccgcgtgttatctccctgccgcagtgtgctctgtgcgtctcccgcctatctggcacaacatggtacacctcagaatctgactgacctgaaatctcataattgcctgttttacagctattttcaggccggtcagtcatggacatttctgcaccggggagacgtggtgcgttttaccccgcagggcactctgcgtgccaacaacagtctggcgctgcatcaggctgttttacagggaacggggatctgtcagctgccgcagtttatcgcggcaccggatatccgcgccgggcggctgatccctctgctgccggaatacctgctgccattgcatcatatctatgcggtttatccggatcgtgaatatctgccgaaaaaagtctccgcatttttacattttttgcaggatgcgctgggcacggaagggcactatcagaaagaatatgaacaggatttatccttttttaaggcagcggaataa

SEQ ID NO: 274420 - DNA, 453 bp, Morganella morganii
atgaaaaaagagatcctgttaccgctgatagccttactttccggggtattactcaccctgatgattatgagcaacagctatttatccacctttacttctccgctgcacgcctcctggctgacacacggtatcggtgccattgttgccctgattatctggctgacagtgaaaaagcacctgccgccacgccacgccggtacaaaaatgccgctgtggtgctatctcggcgggatacccggtgcgtttaccgtactgctggcggcgatcaccgttaacagcccgctgtcactctccggctcgattgtactgatgcttgcggggcagatagtgaccgggctgattatcgaccattttggtctgatgggactgacacggcgcaaagtgacaagccgcgacgggctgacactgctgctgttattcagcggctgtattttgatcattgcaggaaaataa

SEQ ID NO: 274421 - DNA, 429 bp, Morganella morganii
atgatgttactgttttatattactatcgcgctgacaaatggcatttgtattattttcagccgcagtattaacggcagattatctcagagcagcaatgcgttttatgcctcgctggttaatcatattgccggttttatctttctgagcgtggttgtactgttttacctgccgccgttccccgtcacactgaacagtattccgctgattgcattcaccggcggcattatcggtgcctgtttcgtggtgataaacagttatattctgccgctgctcggcgccacactgaccaccattctggctatctgcggccaggtattatccggctttattatcgatatcatacagcacggcatgccgtcacatctgctgatgcagataaccggtgtcatcttaatcctgctggctatcgctgtccgctaccggaagtaa

SEQ ID NO: 274422 - DNA, 309 bp, Morganella morganii
atgtttgctgtaatttttgaagtgactatgccggaagacaagcaatcccgttacctggatattgccgccgggttacgcccgctgctcagtgatgctgaaggctttatctccattgaacgttttgccagcctgagcacaccgggtaaattattgtcgctctcattatgggaagacgaagcctctctgctgaaatggaaacaaaacctgcagcaccggcaggctcaggaagaaggtaaagcggatattttctctttttaccgcatccgtattgctgaaatcacccgtgagtatgacttcgggcaggaataa

SEQ ID NO: 274423 - DNA, 651 bp, Morganella morganii
gtggctgccgcactggctgacccgtcccgtatccgcatactctgcgccctgatggacggcagagcctggacagcaactgaactgagcattgccgcggatattagtgcctccaccgccagcgcccatctggcaaaactggtcgccggaaagctgattatctgtattccgcaggggcgtcaccgctattatcagctggccggattaaacgtggccgaaatcatcgaaaaaatgatgaatctcaccggtattccggtaacagccgccatccgcaaatcctccgccccgccgcatttacggcaggccagaacctgttatgaccatctggccggggaaacggcggtggctgtgtatgatgcgatgcaggaaaaaggctggataaccgctgacggcaccacgctgacaacggcgggagaatctgcgctgaccgcactcgggctgcctgccgctcacacggtaaaacgggttttctgctgcggctgtctggactggagtgaacgccggtttcatctcggcggctatctgggtgccgccctcttcactcactgtgagcaacagggctggctgacccgcacacccgggtaccgtgaagtgacaattaccggaaaagggaaaaaacaattccggcaatggttagggattcagatcccgtaa

SEQ ID NO: 274424 - DNA, 267 bp, Morganella morganii
atgtcttttcaggacaaaaattatattttaggttttccgaagctgcctcagcgcgcgttaatcttcctggtgccttttttcttatcgctggttatgagtggtattgtttcgtttatcagtaccgtcaaagcgctgggattctcctggctgctggtttccccgtggctgtcatcatggggcatatcctgggccattgcattcccgaccgtcttatttgttctgccgtttgcccgtaaattatcgttattactggtcagaagttcataa

SEQ ID NO: 274425 - DNA, 1422 bp, Morganella morganii
atgaaagcccgcaaacgccttgttcttatcattatgtccggcattatgctggtctccgtcctgtttatatccggggtcattctggccatggataaaacaccgtattacgatattgaccggaacgggaaatcattcgggcactccgtttttacattgtatgacggccgggtgtatgccgctgttccgtctgacgggtattttttaatccccggcgcggacccggatagtttcagattattgcctgacaataacaaccacaatggccggcaatttgcagccgataaatatcacgcctggtgcggtaatcttcccgttgcggattttaatcctcagacggcggttactatcgggaatggctattttaccgatggtaaaaatacggttttctgtgccccttatacgcggataaataatgaactgaccggcctgcaaaagctgtatcagcaatggcgttacggctggggactgagtgataagcctctgacttactattatccgcagcaacagttgccaccgtctgccacaccttaccggatatcagcggattccgggcttgtcagtaacggagaacaggttttctttgacggtaaattaatgccggcggcaaacccggagacattgcgtcctgtggctgtccggcagaatgataaatcagtgcgtgagagcagggtgttttatcacgacggggaacatgtttattatcagcaccatttattaccgctgaaagatacagaatcactgtatggtttttacctcggtaatttatttcaggaagcctatttatttgatccgcaaaccggtcaggcggccatgaataatgtcatgttcccgccggaatatgcgccttaccgcgtgatcagttactatggtcagcatgtaaatcagggattgtttttatcccggaatggcgtttacttttatgaccggaaaaaagaaaaaatccgccgcgccggtgataatccgccattgcaggatagttgccgggaaatatcaccgctgattttcacctgcggcaatgaaacccggtatttgcggggttcagaatcatggggcggccggaaatcaccgggtcttatttcccgcagtacggtactttatcgtctcggtgatgatacaacggataactgggaaaaaatcggcgatattacttctcaccattacggggaggtctggcagaaaggcggacaatattattattttgaccggctgggcgcatcacagcttatgcgcggaccgatctatttaattccggataatacgacggtacgcgcgttactgagtgatgacctacgggtggatgacctcagtaaaatggcgcatgacgggagtttacaggaggtttccggtacagaaatgctgaaggccaccacccgttataaagagagcatgttcagtttcctcaatttttctgatgatgactga

SEQ ID NO: 274426 - DNA, 633 bp, Morganella morganii
atgacagtaataatgacaaagccgaaacggggacgaccgccgaaaaaccatgacgcaggtaccgatgtaaaagaaatattgatccgcagcggtacggaggtatttaccgaaacaggatatatgacgtcggatatcagcggaatattaacaaaagcaggtattccgaagggatctttttattattactttggcagtaaagaaaattttggtgtgaaagtgatacgtcattatgacagctgtttttctcatctgctggataaatgtctgtctgataccacattgccgccaccggaaagattactgacattttgcaggattaccaaatccggaatggaaaaataccactggcagcgcgggtgtctggtcggtaatctcgggcaggaagttgtcagtctgccggcagggtattgcgaattacttaatgacattattaccggctggcaaaagaaagtggagaattgtcttctggaagcacaggcgcaaaatcttatttccggaaatactgactgcaggcagatggcggcttttttctgggcgggctgggaaggggcggtcatgcgtgccaaactgacccgtaacggtgaaccgctggatctgtttattacaatttttatgaagcagatactggtataa

SEQ ID NO: 274427 - DNA, 1362 bp, Morganella morganii
atgagcgtgctccgtcagccggggagaaatatgatgagtgcttcaaaaaataaaatgagcgtattacagctcactatattaaccgcagtgaatatgatgggatccggcatcattatgctgccgacaaaactggcggaagtggggacggtttctattctgtcctgggttgtgaccgctgtcggctctatggcactggcttatgcatttgccaagtgcggtatgtacagccgccgcagcggcgggatgggaggttacgcggaatacgcattcggtaaatccggtaactttatggcgaattatacctatggtgtttctctgctgattgcaaacgttgcgatcgcgatttcagccgtcggttatggtgctgaactgatggatgcggcgatgacgccgctgggtatctgtattgccacaattgttgtgttgtggatttgtacggtggcaaacttcggcggtgcacggatcaccggacggatcagcagtgtgactgtctggggggtcattattccggttgtcggtatttcggttatcggttggtggtggttcagccctgaactgtatgttaattcctggaacccgcataattttccgctttttgaggcggtcggttcctctattgcgatgacattatgggcatttttaggaatggagtcagcctgtgctaacagtgaggcggttgataatcctgagaaaaatgtgccgatagcagtattgggcggaacattaggcgcagcggttatttatatcgtatcaacaaacgtcattgccggtattgtaccgaatatggatctggcaaactctactgcaccgtttggcctggcattctcacaaatgtttacgccgggtgtgggtaaggttgttatggcgctgatgattatgtcttgctgcggttcattgttaggctggcagttcaccattgcgcaggtatttaaatcatcatctgattccggttatttcccgaaaatcttttctgccgttaccaaagcggatgccccggtaaaaggtatgctggttattgttattattcagtctgcactgtcgctgatgaccatcagcccgtcactgaataaacagttcaatgtgctggttaacctggcggttgttaccaatattatcccttatatcctttccatggctgccatgattattctgcagaaagtcgccaatgtggatcctaagaaagcacggacaggcaatgtgattgcatttatcggttctgtttatagcttctatgcgctgtattcatccggtgaagatgctgtgatgtggggggcgcttgccaccttcctcggctggacactgtatggttttgtttccccgcggtttgaaatgaaacaaaaccaggacgtaatgatgaaataa

SEQ ID NO: 274428 - DNA, 2163 bp, Morganella morganii
atgaaaagttataaaatcgctgtcagctatgatatgtctgactatatttcaacacaccgggaatgtgtggatatcctgaatacagattttactgatgttgctgtcatcgttatttcacttgatgatatccgcgacggaaagctggattttattgagcagcacagttttgaacagccggtttttgctgtaatcagtgatcacgaagtcattccggcagatgtcattacacggttaaccggcgtgattgatttaaataaaaagaacggtgaattatacagtaagcaactggaaacagcggcgctgaaatatgaagaaagtctgttaccgccatttttcggcagtatgaaaaaatatgttgagcagggcaattcagcttttgattgtcccggacatcagggcggggagtttttccgccgtcacccgctgggtaaccagtttgctgaatatttcggcgaaaatttattccgttctgatttatgtaacgcggatgtctccatgggggatctgctgattcatgaaggggctccgtgcgcggcacagcagcatgcggcgaaagtctttaatgcggataaaacctattttgtccttaatggtacgtcgtcttcaaataaagtggtgctcaatgccttactggcaccgggcgacctggtattattcgatcgtaacaaccacaaatcaaaccatcacggcgcattaatacaggcgggggcaacaccggtttatctggaagcggcgcgcaacccgttcggatttatcggcgggattgatgctcactgttttgaggaaaattatcttcgcggtttaattaaagaagtcgcacctgaacggacaggcgaaaaacgtccgttccgcctggccgttattcagctgggcacatatgacggaacaatttataacgcacgccaggttgtcgataaaatcggtcatttatgtgactacattttatttgattctgcctgggttggttatgaacagtttattccgatgatgaaagattgttctccgcttttgctggagctgaatgaaaatgatcccggaattctggtcacacaatcagtccataaacaacaggccggtttctctcagacatcccagatccataaaaaagacagccatattaaaggccagagccgttatgtgaatcataagcgtctgaacaatgcctttatgatgcatgcctccaccagcccgttctatccgctgtttgccgctctggatgtgaacgccaaaatgcatgaagggaaatcaggtaagcgtttatggatggattgcgtgaaaaccgggattgaaacccgtaagttgctgctgaaatcctgtcagcatatccgcccgttcattccggaaactattgatggccgttcatggggtgattttgagactgatgtgattgccaatgatctccggttcttcaattttgtgccgggtgagcgctggcatgcctttgagggatatgaagaaaatcagtattttgttgacccgtgcaaattactgctgacaacgccgggtattgatgccaaaaccggtaattatgaagcgttcggtgtgccggcaacgattctggctaactatctgcgtgaaaataatatcattcctgaaaaatgcgatctcaactccattctgttcctgctgacacctgctgaaagcatggcaaaaatgcagcatctggtggctcagattgcccgttttgagcaattactggaacaggatgctccgctgaaagaggtactgccgtctgtatatcatgcgcatgaagcccgttatcaggggtataccatccgtcagttatgtcaggaaatgcatgatatgtatgtgaaatttaatgtgaaacaactccagaaagagatgttccgcaaatcacattttccgcaggtcagcatgttaccgcaggccgcgaatattgcgtttgtacgcggtaatgcggaactggttgcggtggatcagattgaaggtcgtattgcggctgaaggtgctctgccttatccgccgggggttctgtgtgtggttccgggggaaatctggggcggctccgtgcagcaatattttctggcgctcgaggaggggattaacctcttcccgggattctcaccggaattacagggtgtgtatatccgctgtgatgaagatggccgtcagcgggcatacggctatgtaattaaacactga

SEQ ID NO: 274429 - DNA, 1518 bp, Morganella morganii
atgtcacaagatcaacacagtgctgagcaggcacctgatttaaataacgaattaaaaacacgccgtgaaaaactggcacagttgcgtgagaaagaagccgttgcattcccgaatgatttccgccgtgacgcggtatccggtgagctgcatgaaaaatatggcgaaaaaagcgcggaagagctggaagccctgaatatcgaagtggcgattgccggccgtatgatgacccgccgtatcatgggtaaagcctcttttgccaccttacaggacactgcgggccgtattcagatttacgtttcccgtgatgacctggctgaaggcgtgtacaacgaatcctttaaaaaatgggatctgggcgatatcctcgcggcgcgcggtaagttatttaaaaccaaaaccggcgaactgactgtccactgtactgaagtccgtctgctgaccaaagcactgcgtccgttaccggataaattccacggtctgagtgaccaggaaacccgctaccgccagcgttatctggatctgatcgccaacgatgaatcccgtcatacctttgcggtgcgttcacgtattctggctgaaatccgtaagttcatggtgaacaaagggtttatggaagtagaaaccccgatgatgcaggtgatcccgggcggggcaagcgcgcgtccgtttgttacccatcataatgcgctggatatcgatatgtatctgcgtattgcgccggagctgtatctgaagcgtctggtggtcggtggttttgagcgcgtgtttgaaatcaaccgcaacttccgtaacgaaggggtttccccgcgtcacaacccggaattcactatgatggaactttatatggcatatgccgattataaagacctgattgtactgaccgaagagctgttccgcaccatcgcgcaggatgtgctgggtaacccggtcgtgaaatacggtgaccaggaattcgatttcggcaaaccgtttgccaaactcaccatgaaagaagctatctgcaaatatcgtccggaaaccaatatggcggatctggatgatatggataaagcagttgctatcgcgaaatccctgaatatcaaaattgaaaaatcatggggtctgggtcgcgtacagtgtgaaatcttcgaggaagtggcagaaagccatctgatccagccgacattcatcattgaatatccggcagaagtctctccgctggcgcgtcgtaatgacgacaatccgtttattactgaccgctttgaattctttatcggcgggcgcgaaatcggtaacggtttctccgagctgaacgatgcggaagatcaggcagagcgttttgccgagcaggtccgccagaaagatgccggtgacgacgaagcgatgttctatgacgaagactatgttgtcgcgctggagcacggtctgccgccgacagcgggtctgggtatcgggatcgaccgcatggttatgctgtttactgacagccacaccatccgtgacgttatcctgttccctgcgatgcgtccgggcaaataa

SEQ ID NO: 274430 - DNA, 900 bp, Morganella morganii
gtggaaaccattgatgaccttgaccaggggcttgaggatgtcagcggtctgctggaactcgccgtcgaagccgatgacgaagagacctttaacgaagcggttgaagagctgaagggactggaagataaactcggtcagctggaattccgccggatgttctccggtgaatatgacagcgctgactgctaccttgatctccaggccggttccggtggtacagaagctcaggactgggcaagcatgctgctgcgtatgtatctgcgctgggcagaaagccgcggctttaaaaccgaaattattgaagaatctgacggcgacgtggccggtctgaaatcggcaacggttaagatcatgggcgaatacgcctacggctggctgcgcaccgaaaccggcgttcaccgcctggtgcgcaagagcccgtttgactccggcggccgccgccatacctcgttcagttccgcgtttatctatccggaagtggacgatgacattgatattgaaatcaatccggcggatatccgtattgacgtttaccgcgcctccggtgccggtggtcagcacgtgaacaaaacggaatctgcggtgcgtcttacccatattccgaccggtatcgtcacacaatgtcagaatgaccgctcgcagcataagaataaagatcaggctttccgtcagatgaaagcaaaactttatgaatatgaaatgcagaagaaaaacgccgataaacaagaaatggaagataacaaatccgacatcggctggggcagtcagatccgttcttatgtacttgatgattcccgtattaaagatctccgtaccggtgtggaaacccgcaatacgcaggctgtattagacggcgatctggataaatttattgaggccagcttaaaagcgggtttataa

SEQ ID NO: 274431 - DNA, 1734 bp, Morganella morganii
atgataaaaacagaactccgccgccgtgatgcggcggattacacagcactgctttctcccgatcgccccgaactgttatgccgtctgtatgctgccagaggaattacctctgcggagcaactggagcgcggtgcacgcgggctgcttaattacggtcagcttaatggcattgaccaggccgttgtactgctgaaagaagcactgcaccagaatcagcggattgtgattgtcggcgattttgatgctgacggcgcgaccagtacggcattgtctgtccgcgcactgcgccggatgggattccggcaggtggatttccttgtccccaaccgttttgaggacggctacgggctcagcgctcaggtgacagagcaggcccgccgcaaaggggcggagctgattatgacagtggataacggcatttcctcccatgacggcgtggctgccgctcatgctgccgggatccgtgtgattgtgactgaccaccatctgccgggggagattctgccgccggcggaagcgattattaaccctaacctggcagactgcggatttctctccaaatccctggccggtgtcggcgtaaccttttatctgatgtccgcgctgcgggcatcactgcgggcggatgactggttcgcgcaacagaatattgccgagccgaacctggctgaaatgctcgacctggtcgcactgggtacggtggcggacgtggtgccgcttgaccagaacaaccgcatcctggtgcatcaggggctgaaccgcatccgtgccggacgctgctgtgccgggatcaccgcgctgctggaaatctccaaacggcaggctcccgcactggtggcgagtgacctgggttttgctctcgggccgcgtctgaatgcggcgggcagacttgatgatatgtcagtcggtgttgaactgctgctgacggatgatatggcgaaagcacgcatgctggcgcatgaactggacggcctgaaccagacccggcgcgaaatcgagcaggggatgcagcaggaagccctgacgctgttcagcaaaattgagcacagcaccacggaaatgccgtcagggatagctctgtatcaccctgagtggcatcagggcgtggtaggtattctcgcctcacgcatcaaagagcgttatcaccgtccggtgattgcctttgccccctgcggcgatggtctgctgaaaggctccggacgctcggtgagcggcctgcatctgcgggatgtgctcgagcgcctcgatacgctcaatccgggaatgatggccgcattcggcgggcatgccatggccgccgggctttctctgcctgagtcgtattttcctgattttcagcataaatttgccgcgctggtggacgatatgatcgaccccgggctgctgcacggcgttatctggagtgacggcgtgctgtcaccgcaggatatgacactggaaaccgctggcttgctgcgcgaaggcgggccgtggggacagggattcccggagccgttgtttgacggcacattccggctgctgcaacagcgtatcgtcggtgaaaagcacctgaaagtgatgattgaaccggaaggcggcggtccgctgctcgatggtatcgcctttaatgttgatgtgaattactggccggacaacagtgtgcagcgggttcgtctcgcctataaactggatgtgaatgagttccgcggacagcgcagtgtgcagttactgatagaacatatctggccggattaa

SEQ ID NO: 274432 - DNA, 693 bp, Morganella morganii
atgctgaaaattgtatcatccgcactggcgcttctgctggtgttcagccacggtgcagtcgccggggaaagcgaaattaaagcggcactgggcaaaatggatatgaccgctaccatgatccgcccgtcaccggtgccgggtgtctcggcggtagccaccccgcagggtgttttttatatcagcgatgacggccgttatctgttacaggggccgatgtttgatatgagcggcaaaaccccgaaaaatatcaccaataatgtgctgctggatgagctgaacagcctggaaaatgagatgatcatttataaatctcagcgcggcagccacgttattacggtctttacggatatcacctgtccgtactgcctgaaattacataatgaaaataaagcgctgaatgataaaggcattacggtccgttatctggcgtttccgcgcaaagggccggagtctgcggtaggccgggaaatgcagtcagtctggtgtaacgcgttcaaaaccaaagcgctggacaatgcattccgtaatgagccgatcccgcagatagacagctgtaacattgatatcagtaaacactataatctcggcctgaaattcggcatcaccggcaccccggcgattgtccttgaggacggaacgctgattgccggttacttatctgcagataaaattgctgaattagtaaataaataa

SEQ ID NO: 274433 - DNA, 915 bp, Morganella morganii
gtgaaggacgccgtacaacacagcgaaagtgatgcactgacagagcagtttcttgatactatctggctggaacagaatttatcggaaaacaccctggcatcctaccgcctggatttacaggcactggcggactggctggcaccgcaggatttggactggttatcactgaccacccttgatttgcaggcttttctggccggcagattggatcgcggttacaaagccaccagttcggcgcggatgctcagctcgctgcgccggtttttccagtattgctaccgtgaaaaactgcggacggatgacccgaccattcagctggcggcacccaaactgccagcccggctgccgaaagatttgagcgaaagccaggtggatgatctgctggcggctccggatgttaccgatccgctcgaactgcgcgataaagccatgctggaagtgctttatgcctgcggactgcgcgtgacagagctggtgtcactgtcgctgccggatgtcagtctgcgccagggcgtgatccgcgtgatcggcaaaggtaataaagagcgcctggtgccgatgggggaagaagcggtgtactggctggaggtttatctggcacaggccaggccgtcactgctgaacggacaggccgcggacgtactgtttccgagtaaactcgggcggcagatgacacggcagacattctggcaccgcatcaaacactatgcggtcgccgccgggattgcgacagaaaaactctcgccccatgtgctgcgccatgcctttgccacgcatctgcttaatcacggggcggatctgcgggtggtgcagatgctgctggggcacagtgatttatccaccacacaaatttatacccatgtcgcgacggagcggttacgcacgctgcaccagcagcaccatccgcgcggctga

SEQ ID NO: 274434 - DNA, 519 bp, Morganella morganii
atgaaaattggtcttttttatggttccagcacctgctataccgaaatggcagctgaaaaaatccgtgatattttaggtgatgatctcgttgaactccatgatgtgaaagagacagatctgcaactgatggaaagctacccggtgctgatcctcggtattccgacctgggatttcggtgaaatccaggaagactggctagcggtgtgggagcaactgccgcagcttgatttatcgggaaaaattgtcgccatgtacggcatgggtgatcaggtggattacagtgactggttcctggacgccctgggctatctgcatcagcagttgcaatcatccggggtgaaatttaccggttactggccggtggacggttataccttcaccagcccgaaagctctgaccccagatggcaaacattttgtcggtctggcacttgatgacgtcaatcagtatgacgaaagcgaagagcgcatcgccacatggtgcatgcaggtacttgaggaagttcaggaactgctgtag

SEQ ID NO: 274435 - DNA, 408 bp, Morganella morganii
gtggttttatggaaatcagtattacgtgtctcatttaagactcaggtcttctcaacactgatttacggtgtgctggcgctgagtgtgttatttgcgccctggcccggcagaacctcatttatctggctgccgctgacactgctgctgatagcgggctggggacggacacagtataaaatcagcaaacgcgccggtcctgccagtttgcaaaaccataaccggattttgtggcgcaaaagtgaatgggagatcaccaaaccgccgtatattacacggcttggtatccgtctgcatctgcgctcactgacatccgggcggcagaaatacctgtggatagcctctgacagtgtcccggccgaggcatggagcagccttaatcagctgcttttgcagtacccggatatctga

SEQ ID NO: 274436 - DNA, 288 bp, Morganella morganii
gtgttagatattgaaaataaagcccgcatccactgggcctgccgtcgcggcatgcgggagctggatattgcgattatgccgttctttcagcatgaatatgatacgctgaccgatgctcagaaacaggactttgtacagttgctgaactgcccggatccggatctgtttaactggctgatgaataaaggccgtccggatgatgaggcactgtatcagataatccgcctgattcaggaacgtaatcaggcacggatggcagcacagaacgcagcgtattatccggactga

SEQ ID NO: 274437 - DNA, 984 bp, Morganella morganii
atgaacacagaaacaaatacattactcccgcaactgagtgattctctccctctgacacgcatttccctcagcgatctggcgctggtgaccatcaccggcccggacagtcagaagtatcttcagggacaggtcaccgctgatatagacgctatggctgatgatcagcatgtgctgtgtgcccattgtgatgccaaagggaagatgtggagtgatctgcgtctgtttcattataaagacggttacgcctaccttatccgccgcagtgcgctcgatacccagctcgcggaactgaaaaaatacgcggtattttccaaagtgacgattgccgctgatgatagtgctgtcctgaccgggatcgccggtcacggtgcggcagaagccttacaggcgcatttcagcacagttccggatgcggacactcaggttgtcagcagcaatgacaccacactgctgtacctgccgctgccgcaggggcgttttattctgatccagagcgctgagcaggccgctgccttatctgatgccctgtctctgccggatgcgtctgacactcagtggacggcactggatattgaagccggttacgccgtgattgatgcggcaaccgtcagtgaatttctgccacaggcaacaaatctgcaatcccttcccctgggtatctgctttaagaaaggctgttataccggccaggaaatggtggcccgtgccaaattccgcggtgccaacaaacgcgcgatgttcacgcttatcggccacagccgccatgtgccggtcgccggtgatgatgccgagcgtcagctgggtgaaaactggcgccgcaccggtaccatcctcgcggctgtccgcctgagcgatgagcgcgttctggtgcagattgtgatgaataatgatacggaggaagatgctgtcttccgtatccgtgaagacgaagaaagccgcctgagccttttcccgctgccgtactcctttactgaagaagcctga

SEQ ID NO: 274438 - DNA, 606 bp, Morganella morganii
atgtcatcagctgttcccgcacaggaagtcattcctttttctcagttaatcacctttgttatggagctggataagctcaaaagtgtttaccgcaaaacccgcctgctgaacaatgaacgtcaggaaaactccgctgaacacagctggcattttgccatgacagcaatggcttttgcgccgtatgttgaggatgcggatatgctgcggatcctgaaaatggcactgctgcatgatgtggtggaaattgacgccggggacgtgctggtctttgatctggccgcccgtgaagccattgcggaaaaagaagtggctgccgcaaaacggattttcggtctgctgccgcagccgcaggcggatgagtttctggcactgtggaatgagtatgacgccgcagagacccgcgaagcccgtatcgccaatatggtcgaccgcgtgatgccggtgctgatgaatctgcacaacaacggtcagagctgggtggaaaataacatctcactggaacaggtgattgaccgcacgaaatttatcgcggatgtgcatccggcattctgggcgtggttacgcgccgaactggataccgcgaagcagaaaggctggctgcgctga

SEQ ID NO: 274439 - DNA, 2877 bp, Morganella morganii
atgactcaaactttaacgcagcttgaaaaccggggtgaatttgtccgccgtcatatcggcgcgtcccctgagcaacagcagcatatgctgaaaacggtcggtgcggcatcacttgaagagctcacccgccatattgtcccggatgatattcagctggatatcccgcctgccgtgggcgaaggggcaaccgaacaggatgcgctggcagaactgaaaaccattgccgggctgaatcagcaatttacctcttacatcggccagggctatacaccgaccattctgccgccggtaattttacgcaatctgctggaaaatccgggctggtataccgcgtacacgccgtatcagccggaaatctcccagggccgcctggaagcactgctgaatttccagcaggtgactatcgacctgaccggtctggagctggcatctgcctcactgctggatgaagcgaccgcagcggcggaagcgatggcgatggcaaaacgcgtcagcaaaaagaaaaatgctaaccgctttttcattgcggatgacgtgcatccgcaaaccctggatgtgatccgcacccgcgctgaatatttcggttttgaactgataatcgacagtgcggaaaaagcccttgattacgatgatgtgtttggtgtgctgttgcagcagaccggcaccggcgggcagatccatgattaccgtgacttactggcacagttacatcagcgtcaggtgatcaccagtgtggcagccgatattatggcgctggtcctgctggaagcaccgggtaaacagggcgcggatatcgtcttcggttctgcccagcgttttggtgtgccgatgggctacggcggcccgcatgctgccttctttgcctgccgtgatgcttacaaacgtgcgatgccgggccgccttatcggggtatccattgatgccgccggtaaccgtgctctgcgtctggcgctgcaaacccgcgaacagcatatccgccgtgaaaaagcgaactccaacatctgtacttctcaggttctgctggcaaatatcgccgggatgtatgcggtctaccacgggccggaaggtctgaaacggattgccggccgcattcaccgcctgaccgatattctggcgaaagcgctgacagatgcgggtctgcgtctgcgtaacaccacctggtttgataccctgacgattgaagtgcaggacaaacaggccgttctggcccgggccaaagcagcgcgtatcaacctgcgtaccgatctgccgggtgccgttgcggtcaccctgagcgaaaccacgcagcgtgaatgcctggaaaatctgtacgcggtactgaccggacaggaagcacagtgggatatcgatgcactcgatgcacaggttgccgcttcttctgaatccattcctgccgcgctgcgccgcgaaggggagattctgaagcatccgaacttccgcagctatcacagcgaaacggatatgatgcgctatctgcacagtctggcccgcaaagacctggcgctggatcaggcgatgatcccgctcggctcctgcaccatgaaactgaatgcggcagcggagatgatcccgatcacctggccggaattcggtaatatgcatccgttctgcccgccggagcaggctcagggctatcatgtgatgatagaacagctctcccgctggctggtgctgctgaccggttatgacgccatgtgtatgcagccgaactccggcgcacaaggtgaatatgccgggctggtgactatccgccgctatcaggaaagtaaaggcgaagggcaccgcactatctgtctgatcccgcagtctgctcacggcactaacccggcctcagccaatatggcggggatggaagtcgtggtggtggcctgtgatgaagacggtaacattgatctggcggatttacgggcgaaagcagaacagcacagtgaaaatctgtcctgtgtgatgatcacctatccgtccacccacggggtgtatgaagagggtgtgcgtgaagtctgtgatatcattcatgaattcggcggccaggtgtatctggacggcgcgaacatgaatgcacaggtcggtgtgaccacgccgggctttatcggcgcggatgtttctcaccttaacctgcacaagaccttcagtattccgcacggcggcggcggaccgggcatggggccgattggtgtgaaaaaacacctcgcaccgtttgtgccgggacacaccatcgttacctctgagctgctgacttctcagggcgcggtatccgccgcaccgttcggcagtgcctccattctgccgatcagctggatgtatatccgcatgatgggtgcgcaggggctgcgtcaggccagtcaggtcgcgatccttaatgccaactatatcgcagcacggctgaaatccgcttacgatgtgctttataccggtcgtaacggctatgtggcgcatgaatgtattctggatatccgtccgctgaaagcgaagtttggtattacggagatggatattgccaagcgtctgattgactacggtttccatgcaccgactatgtctttcccggtcggcggcacactgatggttgagccgacagagtccgaaagccagacggagctggatcgctttattgatgcgatgctgggtatccgtgcggaaatggagcgggtcggcagcggcgagtggacagcggaagataacccgctggtgaatgccccgcatatccagactgaactggcagcggagtggtcacacccgtacagccgtgaagtggcggtattcccgactcagtccacccgtgacaataaatactggccgacagttaaacggctggatgatgtttacggtgaccgtcaccttcagtgctcctgtgcaccgatgagtgattacgagtaa

SEQ ID NO: 274440 - DNA, 396 bp, Morganella morganii
atgagtaatatacctgagaatctgaaatatacagaagatcacgagtgggttcgccatgagagtggtgatgagtatgtggcagggatcactgactacgcgcaggaactgctgggcgatgtggtttttgtggaattaccggaagtgggtgatgaaatcacgtttggtgaggcattcggtactgttgagtcggtaaaagcggcatctgacctgtatgcgccggtgaccggcaccgttatcgccgtgaacgaagcactggaagacagcccggaactggtaaacagcgagccgtatgaaggcggctggatgatccgcattaaaatcacggatccggatgagtttgccggtctgatggatgcagccaaatatgcagaactgcaggctgaagaagaagactga

SEQ ID NO: 274441 - DNA, 1095 bp, Morganella morganii
atggcacaacacacaccactgtccggtgagcacgttgcctgcggggcaaaaatggtggattttcacggctggatgatgccgctgcactacggctcccagatcgaagagcaccacaatgtccgcaatgacgccggtatgttcgatgtttcccatatgacaatcgtggactttcatggtccggaatgtcagcagttcctccgttatcttctcgccaatgatgtggcaaaactcaccgaaaaaggcaaagcactgtataccgggatgctcaatgcgtccggcggtgtgatcgacgatcttatcgtttattattttgcggatgacttttaccggctggtggtgaactccgccacccgtgaaaaagatctggcgtggattgacgaacatcgcaaaaactttgcggctgagatgacagtccgtgatgatttggcgatgattgctgttcaggggccgcatgccaaagaaaaagtcgcgacactgctgagtgcggaacaaaaagccgccgttgccgggatgaaaccgttttacggcgtgcagagcggtgattatttcattgccaccaccgggtacaccggcgaggaaggttatgaaatcgcgctgcccgcagagcaggccgctgacctgtggaaaaaactgctggccgccggagtgaaacctgccgggttaggggcgcgggataccttacgcctcgaagctggcatgaatctttacagccaggagatggacgaaaccgtcaatccgctggcggcgaatatgggctggactattgcctggcagccggaagaccggaaatttatcggccgtgaggcactggaaaaattccgccgcgacggcactgaaaaacaggtcggtctggtgatgcgcgaaaaaggcgtactgcgggccggaatggaagtccgctttactgatgagctcggcaaattacagaccggcgttatcaccagcggaaccttctccccgtcactgggattcagtatcgcgctggcccgcgtcccgcaggggatcggcaatactgctattgtacaggtgcgtaaccgtgaagtgcctgttgaggtcgtgaaaccggggtttgtccgtaacggcaaagcactggtctga

SEQ ID NO: 274442 - DNA, 1236 bp, Morganella morganii
atgcagtcatatgatgtggtaattgccggtggcggcatggtcgggctggcactggcctgtggtctgcatggctgcgggctgcgcattgccgtgattgaaaagcaggctccggatacccgttttgatccgcaggcgccgtttgctgtccgggtctccgccatcaacagtgccagtgagcgtttgctggggcggttgggtgtctggcaggatattctggcaaaacgcgcggcaccgtatcagggcatggaagtgtgggataacgacagctttggtcgtatcgcgttcagcgcggcggaagctcattgtgaacacctcggccatatcattgagaacgatgtgatccgcaacgcgctctgggagcgggtgcagatactgtctgatgtgacgctgctcaccggtacgcaaatccgtcaggtggtgtggggcgaaaacgatgcctttatcaccctggaaaatgacgacatgctcacgacccgcctggtggcggggacagacggagcaaattcctggctgcgtcagcatgcggatatcccggtttcgttttgggattatgaacaccacgcgctggtcgccactatccgcacagaactgccgcatgagaatgtggcgcgtcaggttttccacggcgacggcattctggcatttctgccgctgccggacgcacatcactgctcgattgtctggtctctgcccggactgacagcacagcactgtctggatctggatgaggctgcgttcaaccataaactggcagcggcgtttgatctgcgcctcgggctgtgtgaagtggtcagtgagcggcgggcgatcccgctgaccggccgctatgcccgtcagttcgctgcgtcgcgtctggcgctgctgggcgatgcggctcacaccattcatccgctggccggacagggggttaacctcggttttatggatgtggcggagctgattggcgaaatccgccgtctgactgctgaaggcaaagatatcggcaactatttctggctgcgtcgttttgagcgccgccgcaagcagagtgccgcaatgatgctggccgggatgcagggtttccgtgaactgttcgacggcagcaatccggtgaaaaaactggtccgtggtgtcggtctggtgctggcagacacactgccgggcgtaaaaccggtgctgctgcgccatgcccgcggactgagtgatatgccggactggctgcgtgaaccgaagccggcatcagctgaaaaaatctaa

SEQ ID NO: 274443 - DNA, 1203 bp, Morganella morganii
atgagtgtgataatcaccgggggcggaatgaccggcgcaacactggcgctggcactttcccgcctcagtcacggcaggcttcccgttgcactggcggaagccagattaccggatgaccatcatccggggtttgatgcgcgggcgattgccctggcgtacggtacctgtcagcggctggagaaaatcgggctgtggtccgccctgaaagcgcatgctgcgccgattacccgggtgcatgtgtctgatcaggggcataccggctgtgtgaatattaccgccggtgattatgatattgatgcgctcggacaggtgattgagctgtatgatgccgggcaaaccctgtttgccgaactggcaaaagccgaaaatgttactctgtattgtccggacagtgtaaaaagcattacccgcacgatggattcagtcagtgttcagctggagagcggcaaaacactgaacggccaggctctgattgcggcggacggcagtcactctgcggttgcgcaacaatgcggtatgcagtggagtgacaccccgtatgagcaggtggcggtgatcgccaatgtgatgacagaactggatccgcaggggcgggcgtttgagcgtttcaccccgcaggggccgctggccatgctgccgatgacagaagggcgcagctcgctggtctggtgtcacagtgcagagcatgcggaagccgtgcgtgaatgggatgatgagactttctgccgcgaattgcagaaagccttcggctggcagctgggcaaaattgtcactgccggtgcccgtcactgttatccgctgaccctgagtgccgcgcactctcagatttcccaccgcctggcgctggtgggtaacgcctcgcagacactccatccgatcgccggtcagggttttaacctgggaatgcgtgatgtgatggcattagcggaggttatcagtcaggcgtttttatcacaggaggatattggtcagtatcgtgtgctgatgcagtatcaggccgcccgtgaggctgaccggcaggcgacaatgaccctgaccgacagcctggtgcgccttttctccaacagttgcttcccgctggccgccggacggaatgccggtctgatggcaatggaaatgctgccgtttctgcgcaaccggctggcaaaacagactctcggctgggtcgcacagccgcttaacaccgccacggaaagaggataa

SEQ ID NO: 274444 - DNA, 1320 bp, Morganella morganii
atgaataaacaagaatttatctcacgccgtcaggcattgctggaaaaaatggcaccggccagcgcggcggttttctttgcggcacctccggcgcagcgcaatgcggacagtgagtatccctaccgccagcacagtgattttctctacctgaccggtttcagtgagccggaagccgtactggtactgattaaaagtgatgaaactcataaccacagtgtgttgtttaaccgggttcgtgatctgacggcggaaatctggttcggccgccgtctcggccaggatgccgcgccggaaaaactgggtgttgaccgcgcactgccgtttgatgaaatcaacgagcagctctgccagttgcttaacggtcttgacaccctttatttcgctcagggcgaaatggcgtatgccgataccattgtctttaatgccctcgatacactgcgccgcggcagccgccgtaacctttccgcgccgggcacgattattgactggcggccgattgtccatgaaatgcgtctgtttaaatccccggcggagctggacatcatgcgccgtgccgggaaagtcagtgcactggcacacacccgtgcgatggaaaaatgccgtccgggtatgtacgaatatcagttacagggcgagattgaacacgagtttgtcagtaacggtgcgcgtttcccgtcctataacacgattgtcggcagcggtgagaacggctgcattctgcactacaccgaaaacgaatgccggatgaaagacggcgatttggtgctgatcgatgccggatgtgaaattgagggttatgccggggatattacccgtaccttcccggtgaacggcaaattcagcaaagagcagcgtgaaatctatgatctggtgctggaaaccctggatgtctcccttgaactctaccgcccggggacttctattgcagaagtgacagatcgcgtggtggaaatcatgacggaagggctggtaaaactcggcttactgaccggggatgtgccgcatttgatcgagaccaaagcataccgtgcatttttcatgcatagtctcagccactggttaggactggatgtgcatgatgtcggccattacggcacagaacgtgaccgcatcctggagccgggtatggtactgaccatcgaaccggggctgtatattgcgccggatgcggatgtgccggaggcatatcgcggcattggtgtccgtattgaggacgatattgtcatcacggcggacggcaacgaaaacctgaccgcgtcagtggtcaaaaccgcagatgaaattgaagcgctgatggcgcaggcaaaacaggctgaataa

SEQ ID NO: 274445 - DNA, 582 bp, Morganella morganii
atgaccccggataaaacactgcccgattttaaaacacttgatgaacttttgcgtcagcaggccgtcgccatgaccgcgtcagagatgcacggcctgatcacgggtctgctctgcggcggtaacacagatgacagctggctggcactgatccacgacctgaccaacgaaggcatggcgttttcgcaggttctggcacagccgctgcgtgctctctttaataccacatttgaactgcttgatgataccgaatgtcagtttaatttactgctgccggatgatgaagcgggggtgtttgcccgggctgatgagctggccggctgggtcaatcacttcttattaggtctgggtgtggcggatccgaaattcagtgatcgcaaggaagtaaaagaaattgttactgatctgcgggaaatcggcatgctgggctatgatgaggcagaagatgccgaagagctggatgacgcgctggaagaggtgatcgagtatgtccgagttgcggtacagctgtgctatatctcgctggcgaagccgcgcagcgcacaaaaggctgatgcgccggaacagaaaccgacattacactga

SEQ ID NO: 274446 - DNA, 330 bp, Morganella morganii
atgtctgcacaacccgttgatatccagatattcgggcgttccatgcgcgttaattgtccaccggaacaaagagaagctctgctcgcttctgctgcggagcttgaacaacggttacaggacctgaaagaacgcagccgggtgtccaacacagaacagctcgtttttatcgtcgcgttaaacatctgtcacgaactggcacaagaaaaattgaaaacgcgcgattatgcctataacatggaacagaagataaaactgttacagcagactatcgagcaggcgctgcatgaccaaacccgaatcactgagcgccaggtaacacctattgaataa

SEQ ID NO: 274447 - DNA, 606 bp, Morganella morganii
atgactcatgacccgttgttacaagcgcggcatcatctgcgtcagttaatccgcaataagcgccgtgcgctgacacctcagcagcaaaacactgccgcacaagaccttgttcagcaaatcatttatcaccctgatatacaccgcgccaataatattgccctgtttctctcttttgatggtgagattgatacccgtccgctgacagagtggctgtggtcacagggaaaacaggtatttttacccgttcttcacccgttcagcctccatcatctgttatttctcgcttatcgccctgatacaccgctgattaaaaacaagttttcaatttcagaaccggcgttggatgtcacacaggtattaccgccgcaggaactggatattatgtttattccgctggtcgcgtttgatgaaaaaggagagcgtctcgggatgggcggcggtttttatgaccgcacactggcgggctggcagaagaaagggttttacccggtagggctggcacatgattgtcagcaggttgatgaacttcctgccgcacagtgggatgtcccgctgccggaagtgatcacgccatcacgtcgctggttgtggccggaacataaataa

SEQ ID NO: 274448 - DNA, 1251 bp, Morganella morganii
atggtaaaagtatcactggaaaaagataaaattaaatttctgctattggaaggcgtacaccaaagtgcggtagacagtctgaaagcagcgggttattcaaatattgaatatcataaaggcgcattatccacggaagaattaaaagaagcgatccgtgatgcacgctttatcggtatccgatcccgtacccaactgacggaagagatttttgcctgtgcggaaaaactggtcgccgtcggttgtttctgtatcgggactaaccaggttgatcttgatgcagcggcaaaacgcggtattccggtctttaacgcgccattctcaaacacccgttccgtggctgagatggtgctgggccagttattactgctgctgcgccgtattccggaggcgaatgccaaagcgcatcgcggtatctgggataaacaggcgaaaggctgctacgaggcacgcggtaaaaagctggggattatcggttacggtcatatcgggacgcaattggggatcctggcagaatccatcggtatggatgtctatttttacgatatcgaaaacaaactgccgctcggtaatgccactcaggtgcgccatctgtctgagctgctgaatatgagtgatgtggtcagcctgcatgtgccggaaacggaatccaccaaaaatatgattggtaaacatgagtttgagctgatgaaaccgggggcgatttttattaacgcctcacgcggcacagtagtggatatcccggctctgagtcaggcgctggcatcaaaacacctgtccggcgcggcagtggatgtgttcccgtctgaaccggcagccaacaatgacccggcggatccgtttatttctgagctgattgggtttgataatgtcattctcactccgcatatcggcggctccactcaggaagctcaggaaaatatcgggtttgaggtcggcggtaagctggcgaaatattctgataacggctcgacgctctctgcggtcaacttcccggaagtgtcactgccggtgcatggccagaatgccaaccgtctgctgcatatccacgaaaaccgcccgggactgctgaccagcatcaaccaggtctttactgatcgcggtattaatatcgcggcgcagtatctgcggacggcgggtgatctgggttatgtggttatcgacattgtggcgaataacaaagatgaagctgacgacgttctgctgcagctgaaagcgctgccgggaacggtaagggcgcgtctgttgttctga

SEQ ID NO: 274449 - DNA, 657 bp, Morganella morganii
atgactcaggatgaattaaaaaaagcggttggctgggcggcattagaattcgtgaagccgggcaccattgtcggtgtgggcaccggttccaccgcatctcactttattgatgcactggcaaccatgaaaggccagattgacggcgcggtatccagctctgtggtctcaaccgaaaaactgaaaagctacggcattcctgtgctggactgcaatgatgtggacagcctggacgtgtatgtcgacggcgcggatgaaattgaccaccatatgaatatgatcaaaggcggtggcgcagcattgacccgcgagaaaatcgtggcggctatcgcgaagaaattcatttgtatcgtggatgaaagcaagcgtgttgatattctgggtaaattcccgcttccggtggaggtgatcccgatggcgcgttcttatgtggcgcgtgaactggtcaaactcggcggtcagccggaataccgtcagaatgtggtaacagataacggcaacgtgattctggatgtctacaacctggaaatcctgaatccggttgagctggaaaataaaatcaacggtatcgccggagtggtgactgtcggtttatttgccaaccgtggtgccgacgtggtgctgatgggtactcaggatggcgtaaaaaccattaaataa

SEQ ID NO: 274450 - DNA, 909 bp, Morganella morganii
atgagacgaccggattatcgtgccctgcaggcgctggacgctgttatccgtgaacgtggttttgagcgggctgcacagaaactctgtattacccagtctgccgtttcgcagcgtatcaaacaactggaaaatctgttcggacagccgctgctggtgcgtaccgtgccgccgcgtccgactgaagaaggccagaagctgctcggcctgctgcatcaggtggaattactcgaagcggaatggctgggggatgatgccgggaatattgagccgccgctgatctcactggcggtcaacgccgacagcctcgcgacctggctgctcccggcactgcgtcatgttctggcggatctctctatccgtctgaatattcaggtggaagatgaatcgcggacacatgaacgcctgcggcgcggggaagtggtcggtgcggtcagtattcagccgcgtccgctgcccggttgtctggcggatcagcttggcgcgctggattacctctttgtcgcctcaccggaatttgccgcccgttattttcctgacggtgtcagccgcagtgccctgctgaaagccccggctgtggcgtttgattatctcgatgatatgcacatggcctttttgcagaccaattttgacctcgcccccggcagtgtgccgagccacgtactcaattcctcggaagcctttgtgcagctggcaaaacagagttcagcctgttgtatgatcccgcatttgcagattgcggatgaactggagcggggagagttgctggatctgacaccggggctgtttcagcgccggatgctgtactggcaccggtttgcaccggaaagtgccaccatgcgccgggtgactgacgccctgctgaaacacgggcgtcagaccttacggcaggagcagcctgaaacggcttaa

SEQ ID NO: 274451 - DNA, 726 bp, Morganella morganii
gtgaaactgaaatctcttgctcttgccgctatggttgccctgggtggttacgcggcagctgctcaggcagcggaaacgccggcaggcccgcatatttcaacctccggcagcgccgtgatccaggctgagcctgatatggcgacactgtccatcaatgtgacagtaaaggaaaaagatgcgtcagccgccaaagcacaggcagataaacgtgtggcgcaatattttgatttcctgaaagcacagggaattgaaaagaaagacattaatgcggccaatatcagcaccagcccggactatgtctatgacaaagagaaagaagagtccgttatccgtggttataacgcatcccgttctgtgacggtgaaagtgcatgacctgaacaaactgaacacactgctcgacggtgcgctgaaaagcggcctgaatgatatcagtgccgttgagttcggggtgaataatccggagaaataccgcgaagaagtacgccagaaagcgatttctgatgcgatttcacaagctaaatcggtggcaaaaggctttggtactgagctgggggccgtttacagcatcggttacaatgcaccacagccggttccggtaatggcgcgtaataaaatgatgctggccgccggcgcaccggcagcagtctctgcggatgaaacctatgaacagcagactatcgatttccgcgaccaggtggatgtcgtgtttgaactgaaacgttaa

SEQ ID NO: 274452 - DNA, 624 bp, Morganella morganii
atgttatcgacttattttcaggggttattactcggcgcggcaatgatactgccgctcgggccgcaaaacgtatttgtattacagcagggaagccgtaaacagtatcatctgatgagtgcatttttatgcacactgagtgatgttttactgatcacggccggggtcttcggcggcagtgcgctgctgagccagtcagtgtggctgatggcactggttacctggggcggcgtggcgtttttgctgtggtacggctggggggcactgcgggcggtctttaccgctgataccgcgctgaccatgcaggagcaggtggtccgcagccgctggcgggtgattatgacgctggtggccgtcacctggctgaatccgcatgtttatctggatacctttgtggtgctgggcagcatcggcggacagctcggttccgatatgcggatctggttcacagccggtgcggtctgtgcatcaatattgtggttcttcggcctggcgctgctggcagcctggttctccccggtgctgcaaaaaccggtatcacagcggattatcaatctgtttgtcggttcggtgatgtggtatatcgcggtacaattagctttaaaaggattgaatatttcttattaa

SEQ ID NO: 274453 - DNA, 486 bp, Morganella morganii
atgatgagcgagcatttacttcattttattcctgagacactgagttatatcccggatgcggagcagcaacaggctgcggagcagtatctgagcgagtggatggcggctgacgatattatgcataaggcggatccggatgttatgttctggtccggcagtgaaaattttcgttatccgctgtgtcctgtctgccgtaagccggtttccggcgtctggtggggcgctcagatgaatgcgatttttgcggtcaccggacaggcgcgaatttctgcggcgctgacaccacgcaataccccctgctgcggggcgccggtcgttattccggagatggattacgatgaaaccggtggtttcgcgtgttacgggctgacagtccgttataacaacagttttattgtctgcatggataacgggcgtgacgaaattatccatcgtgtgagtgaatgtctcggcacgccggtgcgtctggtctgggagtggatctga

SEQ ID NO: 274454 - DNA, 861 bp, Morganella morganii
atgaatgaacaaatcctgacggacagcctgaatcaggcaaccggctggctggcaaataatcaggcattactgctggattatgcggtgaatattgtggctgccgtactgaccctgattattggtctgtttgtggcaaaaatggccgctaaagcggtctcccgcctgctggcaatgcgcggtgtggatgtgacagtctctgattttctgtccgcgatggttcgctatgcggttattgccttcacactgattgcagtgctgggacgtctcggcgtgcagactgcgtccgtaatcgcggtgctcggtgcggcaggtctggccgttggtctggcattgcagggctcactctctaacctcgcggctggcgtattgctggtggttttccgtcctatccgtgccggagaatatgtggttatcggtgcgtcagaagggacggttcagaatgtgcagattttttccaccacactgcgcagcgcggatgacaaaatcattgtgatcccgaacggcaaagtaattgctggcgatattattaacgtgacccgtgaaccggatcgccgccgtgacattattgtcggtgtggcgtacaacgcggatattgatcaggtcaaagaaattctgacagagattgtcgccgatgaccctcgagtgcagaaagaaaaaggtatcgtggtgcgtctcaatgaaatggcgccatcttctctgaatttcgttgttcgctactggacaaaaaacggcgatttcatggatgtatactgggatctgctggaaaacttcaagcgcgcactcgataagcataatatcggcattccgttcccgcagcttgatgtgcatatgcatcagaatagtcagcaaacacaggcataa

SEQ ID NO: 274455 - DNA, 372 bp, Morganella morganii
atggattatgaattttccctcgggatcgacgggaacgtgatagttaagctgtcaatggatcacgaagcgatcggtcactggctgaatgaagaggtgaaaggggatctctcggtgattgatgagataaccgtggcatttgacagtattaaagggcgggaacagcagtggcagcgagtggggcatgaatacactttgctgatggatgatgaggaaatcatgattaacgcgaatcagattacctttgaaactgatgagccggacgaaggtatgagttattacgataatgaaagtattgcgttctgcggcacagctgactttatgattttactggaaaattatcgtaaatttattgtgaccggcggacagggctga

SEQ ID NO: 274456 - DNA, 2598 bp, Morganella morganii
gtgctggaaaattaccgcaggcacgttgccgaacgtgcagcacaagggatcgcccctaagccattggaagccgctcaggttgctgagttagtcgaattactgaaatctccgccggcaggcgaagaagcgtttcttgttgatctgattaccaaccgtgtaccgccgggtgttgatgaagccgcgtatgtgaaagccggttttctggccgctctggcaaagggtgaagcgcattcaccgctgatcaccgctgaaaaagccgttgaattactgggaaccatgcagggtggttacaatattcacgccctgattgaatccctcgataacgaaaaactggcccctgtggccgccaaagcactctctcataccttactgatgtttgataatttctatgatgtggaagaaaaggcgaaagccggtaattcctatgcacagaaaattattcagtcctgggctgatgcagactggttcctggagcgtccgcaactggcagaaaaactgactgtcaccgtctttaaagtctccggtgaaaccaataccgatgatctgtcaccggcaccggatgcctggtcgcgtccggatatcccgctgcatgcactcgcaatgctgaaaaacccgcgtgacggaattgatccggatgagccgggcaatatcggtccggttaatcagattgatctgctcagcaaaaaagggttcccgctggcctatgtcggtgatgtggtcggtaccggctcttcccgtaaatccgcgactaactccgtgctgtggtttatgggggatgatatcccgtatgtgccgaacaagcgcggcggcggtatcgtgctgggcggtaaaattgccccgattttcttcaacacgatggaagatgcgggcgcgctgccggtggaagtggatgtcagcaacctgaatatgggggatgtgatcgacgtttacccgtataaaggtgagatccgcaatcatgacaccaatgaactgctggcgacatttgaactgaaaaccgatgtgctgctggatgaggtccgcgccggtggccgtatcccgctgattatcggccgtggtctgactgccaaagcacgcgagtctctcggtctgccgcatacggatattttccgtcaggcgaaaccggttgagaaaagcagccgtggtttctcgctggctcagaagatggtcggccgtgcctgcggcgtggcaggcgttcgtccgggcgagtactgtgagcctaagatgacctctgtcggctctcaggataccaccgggccgatgacccgtgatgaactgaaagacctggcgtgtcttggtttctcagcggatctggtgatgcagtctttctgccacacagccgcttatcctaaaccggtggatgtaaacactcaccacacgctgcctgatttcattatgaaccgtggtggtgtgtcgctgcgtccgggggacggtattatccactcctggctgaaccgtatgctgctgccggataccgtgggtaccggtggtgactcacacacccgtttccctatcgggatttccttcccggccggttccggtctggttgcttttgcagcagcgaccggcgtgatgccgctggatatgccggaatctgtgctggtgcgctttaaaggaaaaatgcagccggggatcacactgcgtgatctggtgcatgccatcccgtattacgctattcagcagggcctgctgacggtggagaaaaaagggaagaaaaatattttctccgggcgtatcctggaaattgaagggctgccgacactgaaagtggaacaggcgtttgagctggctgatgcctctgccgagcgttctgccgcgggttgtaccatcaaactggataaagcgccgatcaccgaatacctcaattccaacatcgttctgctgaagtggatgattgcggaaggttacggtgatcgccgtaccattgagcgccgtattcagagcatggaaaaatggctggcggatccgcaattgctggaaggtgatgcggatgcggattacgcagcagtgatcgaaatcgacctcaatgacatcaaagagccgattctctgtgcgccgaatgacccggatgatgcacgtctgctgtctgacgtggcgggcagtaaaattgatgaagtctttatcggctcctgcatgaccaacatcggacacttccgcgctgcgggtaaactgctcgacagtcataaaggccagctgccgacccgcctgtgggtggcaccgccgaccaagatggatgccgcacagctgacagaagagggctattacagcatcttcggtaagagcggtgcccgtgttgagatcccgggctgttcactgtgcatgggtaaccaggcgcgtgtggcggataactcaaccgtcgtgtccacctccacccgtaacttcccgaaccgtctgggtaccggtgccgatgtgtacctggcttctgcggaactggcagcggtggcttccctgctggggcgtttaccgacaccggcggagtatcagacctttatggataaagtggatgagacagcggaagatacctaccgttacctcaactttgaccagttgaatgagtataccaaagtcgcggatggcgtgattttccagactcaggtgtga

SEQ ID NO: 274457 - DNA, 1428 bp, Morganella morganii
atgagtactgaaattaaagcccaggtcgttgtacttggtgcgggccctgcagggtattcagcggctttccgctgtgctgacttaggtctggaaactgtcctgattgaacgctattcaaccttaggtggtgtctgcctgaacgtgggttgtatcccgtctaaagcattactgcatgttgctaaagtgatcgaagaagcgaaagcgctggcttctcacggcatcgtgttcggcgaaccgcagaccgatatcgataaagtccgtctgtggaaagagaaagttatttctcagttaaccggcggtctggccggtatggcgaaaggccgtaaagtgactgttgtgaatggtctcggccagttcaccggcgcaaatactatcgaagtcaacggtgagaagggtaaaaccactatcacgtttgacaacgcgattattgctgcgggctcacgcccgatccagctgccgtttatcccgcacgaagatccgcgtgtctgggattcaacggatgcactgcagctgaaaaccgtcccgggccgtctgctggtcatgggtggtggtattatcggtctggaaatgggtaccgtataccacgcgctgggttcacagattgatgttgttgaaatgtttgaccaggtcattcctgcggcagacaaagatatcgttaaactgttcaccaaacgtatcagctctaagtttaacctgatgctggaaaccaaagtgactgccgttgaagccaaagaagacggtatctatgtcacaatggaaggcaagaaaggccctgcagaaccacagcgttacgacgcagttctggtggctatcggccgtacccctaatggtaaactgctggcggctgataaagcaggtgttgaagttgacgaccgtggtttcatccacgttgacaaacaaatgcgcaccaacgtgccgcacatctttgctatcggcgatatcgtcggtcagccgatgctggcgcacaaaggtgttcacgaaggtcacgtggcagccgaagttatctccggcctgaaacactacttcgatccgaaagtgatcccatctattgcctacaccgaaccggaagtggcatgggttggtctgaccgagaaagaagcgaaagagaagggtatcagctacgaaacagcaaccttcccgtgggcagcttccggccgtgcaatcgcgtctgactgcgctgaaggtatgaccaaactgattttcgacaaagaatctcaccgtgttatcggtggtgcgattgtcggtactaacggcggcgagctgttaggtgaaatcggtctggctatcgaaatgggttgtgatgcggaagatctggcactgaccatccacgctcacccgacgctgtacgaatcaatcggtatggcggctgagatttacgaaggcagcatcaccgaccttccgaatccgaaagcgaaaaagaaaaagtaa

SEQ ID NO: 274458 - DNA, 1884 bp, Morganella morganii
atgtctattgaaatccatgtgcccgatatcggttcagatgaagttgatgtaacagaaattctggtcagtgtcggcgataaagtagaagcagaacaatcactcatcaccgttgaaggtgacaaggcgtcgatggaagttccgtctccgcaggcaggggttgttaaagaaattaaagtggctgtgggcgacaaagtcagcaccggctctttcatcatggtatttgaagcagaggccgcagcagcggctcctgctccggcagctcaggctgccgcaccggctgctccggcggcggctgccgcatccgcgctgaaagaagttcatgtgccggatatcggcggtgacgaagttgacgtgactgaaatcatggtcagcgtcggcgataccgtgactgaagaacagtctctgatcaccgttgaaggcgacaaagcctcaatggaagttccgtctccgatggcgggcgtggttaaagagattaaagttgctgtcggcgataaagtcagcaccggttccctgatcatggtctttgaagttgcgggcgcagcaccggcggcacagcctgccgcagccgctccggctcctgcagcagcggcacctgccgtggcagcagacaaagaaatccatgtaccggatatcggcggtgatgaagttgacgtgactgaaatcatggtcagcgtcggcgataccgtaactgaagaacagtctctgatcaccgttgaaggcgacaaagcctcaatggaagtcccgtctccgatggccggtaaagttaaagaaatcaaagtagccgtcggcgataaagtcaaaaccggctctctgatcatggtattcgaagtggcgggtgcagcacctgctccggcagcacagccagccgccgcacctgcggcagcagcaccggcatctgcaccggcagcgaaagccgctccggcagcagcgccggctgcgggtaatgacttcgttgagaacgatgcttacgttcacgcaagtccggttatccgccgtctggcccgtgaattcggtgtgaacctggcgaaagtcaaaggcacaggccgcaaaggccgtatcctgcgcgaagacgttcaggcttatgtgaaagatgcggtgaaacgcgctgaagcggctccggctgcagcaggcggcggtttacctggcatgctgccatggccgaaagtggacttcagcaaattcggtgaagtggaagaagttgaactgagccgtattcagaaactgtccggcgctaacctgagccgtaactgggtgatgatcccgcatgttacgctgatggacgaagcggatatcactgatgttgaagaattccgcaaacagcagaacaaagaagctgagaagaaacagctgggcgtgaaaatcactccgctggtctttgtgatgaaagccgctgccaaagcgctggtcgaaatgccgcgtttcaacagctctatcaccgaagatgcacagcgtctgattctgaaaaaatatgtcaatatcggtatcgcggtagacaccccgaacggcctggttgttcctgtcattaaagacgtgaacaaaaaaggtattctggaactgtcttacgaactggctgaaatctccaaaaaagcccgtaacggtaagctgacttcttctgatatgcagggcggatgtttcaccatctccagcctgggcggtatcgggacaaccggtttcgctccgattgttaacgcaccggaagtggctatcatgggtctgtcacgttcatccatgaaaccggtatgggacggcaaacagtttgttccgcgtctcattctgccaatgtcactctccttcgaccaccgagtgatcgatggtgctgacggcgcccgcttcatcacgctgattaatcagtacatgagcgatttacgccgcctggcgatgtaa

SEQ ID NO: 274459 - DNA, 2664 bp, Morganella morganii
atgtcagacattttgaacaatgacgtggatccgatcgaaacccgcgactggctacaggcgatcgaatcggtcatccgtgaagaaggtgttgagcgtgcacagttcctgattgatcaggttctgaatactgcccgtcagggtggtgtgagtgttgcagcaggtgctgcggcccgtaattacatcaacaccattcctgttgaggatgaacctgcctacccgggcaacctggagctggaacgtcgtatccgttctgctatccgctggaacgctgtcatgatggttctgcgcgcatccaagaaagatctggatctgggcggtcacatggcatcttaccagtctgcggctaccatgtatgaagtgtgcttcaaccacttcttccgtgcgcagaacgaaaaagacggcggtgatgttatttatttccagggccacttaagcccgggctactacgcacgcgcattcatggaaggtcgtctgaccgaagagcagctgaacaatttccgtcaggaaatcggcggcaaaggtctgccttcttatccgcaccctaaactgatgcctaacttctggcagttcccgaccgtttctatgggtctggggccgctggcagctatctatcaggctaagttcctgaaatatctggaacaccgtggtctgaaagatacttccgagcaaaccgtttatgccttcctgggtgatggcgagatggatgagccggaatctaaaggtgcaatcaatatcgctgtccgcgaaagcctggacaacctgatcttcgttatcaactgtaacctgcagcgtcttgacggccctgtaaacggtaacggtaaaatcgttaacgaaatggaaggtatgttcgcaggcgccggctggcaggtaatcaaagtcatgtggggcggccgctgggatgaactgctgaagaaagataccagcggtaaactgatccagctgatgaacgaaaccgttgacggcgactatcagacattcaaatccaaagacggtgcttacgtccgtgaacacttcttcaaccgctatccggaaactgctgcattagtcaaagactggactgatgagcagatcttcgcactgaaccgcggtggtcacgatccgaagaaaatgttcgctgcactgaaaaaagcgcatgacaccaaaggcaaaccaactctgatcctggcccagaccgttaaaggttatggtatgggtgataccgctgaaggtaaaaacatcgctcaccaggttaagaaaatgaacatggaaggcgtgcgccatctccgtgatcgtttcaatatcgatgtggctgatgatcaactggaaaaactgccgttcatcaagtttgacgaaaactctgaagagcagaaatacatgatggaacgccgtgcggcactgcatggtccggttccttcacgccgttctcatttcgatgagaaactggatattcctgcactgagcgatttcagccagttactggaagagcagagcaaagaaatctccaccactatcgcgtttgtgcgtgcactgaacgtgatgctgaaaaacaaatccatcaaagaacgcatcgtgccaatcattgctgacgaagcgcgtacattcggtatggaaggtctgttccgtcagatcggtatctacaactccaaaggtcagctgtataccccgcaggaccgtgagcaggttgcttactaccgtgaagatgtgaaaggtcagatcctgcaggaaggtatcaacgaactgggtgcaggcgcatcctggctggcagctgcgacctcttacagcaccaacaacctgccgatgattccgttctacatctactactcaatgttcggtttccagcgtatcggtgacctgatgtggatggcaggcgaccagcaggcacgcggcttcctgatcggcggtacttcaggccgtaccaccctgaacggtgaaggtctgcagcacgaagacggccacagccacattcagtctctgactatccctaactgcctgtcttatgacccgtcattcgcgtacgaagttgcggtcatcatgcaggatggtctggagcgtatgtatggtgaagctcaggaaaacatttactactacatcaccacgctgaacgaaaactaccacatgcctgcaatgccggaaggtgttgaggaaggtatccgtaaaggtatctacaagctcgaaaccctgaccggtgataaaggcaaggtacagttactgggttcaggtgcgattctgcgtcatgtgcgtgaagcaggtcagattctgtcttctgagtacggtatcagctctgatatctacagcgtaacctcgttcaccgaactggcccgtgaaggtcaggattgtgaccgctggaacatgctgcatccgtcagaaaccccgcgtgtgccttacatcactcaggtgatgaacgatgcacctgctgtggcgtccactgactggatgaaactgtttgcagaacaggttcgcggttatgttcctgctgaccagtaccgcgtactgggtactgacggttacggccgttcagacagccgtgataacctgcgtcatcacttcgaaatcgatgccggttatgttgtggttgctgctctgggtgagctggctaaacgtggtgaagttgacgtgaaagtggttgaagaagccattaagaaattcagcatcaaccctgaaaaagttaacccgcgtgtggcataa

SEQ ID NO: 274460 - DNA, 765 bp, Morganella morganii
atggcttacagcaaaatccgccaaccaaaattagccgacgtgatcgagcagcggctggaacacttaatcctcgacggcactctgagcccgggggagaagctgccgcctgaacgcgagctggccaaacagttcgacgtctcacgtccctcactgcgcgaagcaattcaaaaacttgaagcgaaaggctttctgctgcgcagacaaggtggcggcacatttgtacagagcaatctctggcaaagcttcagtgacccgctggcccagctgctggaagggcatcccgaatctcagtttgatctgctggaaacccgtcatgccctcgagggtattgctgcctattatgccgctctgcggggaaccgaagcggattttgtccgtatcaccaacagccatcaggcgattgccgatgcccgcgacgccggggatgtggaatccgaatctcaggctgtcctgcaatatcagctgattgtcacagaagccgcacataatgtggtgctgttgcatctgctgcgctgtatggtgccgatgctggaaaaaaatatccggcagaactttgaattcttatatacccggaaagagatgctggcgatggtcagcgagcaccgggaacaggtattccgggccatcatgagccggtcgccggaggttgcgcgggaagcatcccaccgccatctggcattcctggaagacgtattgctggatatgagccgtgaacacacccgccgggaacgttcactgcgccgtctccagcagtatacagaataa

SEQ ID NO: 274461 - DNA, 561 bp, Morganella morganii
atggatattcaggatggctggctgaccacagcgcaccgggtgatttcaccgcatcacgatacccggccggaacaggtgactccccgtttactggtgatccacaatatcagtctgccgccgggacagttcggtggcccgtatattgaccagctttttcagggtacgctggacccggatgcgcatccgttttttgctgaaatacaggcgctgcgggtttccgcacattgcctgatccgccggaccggggaaattgtgcagtatgtgccttttgatgcacgggcctggcatgcaggggtttcctgttatcagggcaccgaaaagtgtaatgatttttccgtcggtattgagctggaaggcacggatacccgaccttttacggatgaacagtatcatgcactgactgcggtgacacaggtgcttctggcgcactatccgcaaatgaacgggcatatcaccggacacagtgatattgcgccggggcgcaaaacggatcccggtccctgtttcgactggaaccgatacaggaattcactgaatccggcagacattccggctgaataa

SEQ ID NO: 274462 - DNA, 420 bp, Morganella morganii
atgaaccagcgcggattcacattaatcgaggtgatggtggtggttgccattgtggccgttctcagtgccatcgcggttcccggctatcagaactatatccgtaaggcagcactgattgacgtgctgcgcacggttaccgcgtttaaaaccggcgtggaactgtgcagttttgataatccctcttttgcaggatgcaacagcgggtcgggcaccattccggctgattcaccgggacgctatatcaaatctgtcaaagcggaaaacggtgttgtgactgtgcaggggaacagttcactggctgcgctgacggtcagcacgaccccggtaagaaacccgcttaacggtattactgtctggacaaccgactgcaacagcaaagaagacgcactgaaaaaaatctgtcttgacgtcatcaagtaa

SEQ ID NO: 274463 - DNA, 1524 bp, Morganella morganii
atgcaaacaactgcacccgcccctgtcgcccgtaccggcggggaggaacaactcttactggctgaagttcatgcactttgtgagcgcaatgaactaatgctgattgactataaccccgatgccgtcagagttgctgccgcacagcagccgcgcagagatgttgtgtctgctatccgttttctggccggtaagcgggtggacattgaattgtggcacagtgaaaaactggcctactgccgccgcaataccccgctgccggagccggttcttttccccggtgtaacaccggagacaaacacgccggtctctgcggataccggcaataactgtacaggcaccggttccccactgccaccgcctgctccgcctccggcacaggatccccgccgggcacctgagaccgatacctggccggcagaacagcaatccgccgctgtccggtttgttaaccagatgattacgggagccattgccaagcgggcctccgatattcacattgagccagcacaacagggttaccggatccgtgccagaatcgacgggcaactgcatacgctgaattcaccgccaccagaaatcagtagtgagataattatccgcatcaaaatcatttccggcctcgatattgccgaaaaacggttaccccaggacgggcaatttgagtggctggaaaataacacccgctatgctgtccgtgttgccactctgccgacaatttatggtgagaaagtcgtgctgcgcctgctgagcaccactcagaatctggcgctggaaaaatccggtctgacggcccggcagctggaaactctgcatacagggctcggcagtgccaccggcattattttactcaccggtcccaccggcagcggaaaaaccgccacactctacggctgcctgcagtatctgaatcagaataaccggaatatctgcagtgttgaggatccggtggaaatcccgctgcgggggatcacccagactcagataaacccgaagattgagctgggcttcgccgccatcctgcgggccctgctgcgtcaggatccggatgtcattatggtgggggaaatccgggataaacccaccgccgagatggcaatcaaagcggctcataccggtcacctggtgctgtccactctgcatacaaactctgcggaggatacatattcacggctgaggcaactgggtattgatgaatatttcatgaaaacctgcatcaaactgattattgcgcagcgtctggtccgcctgttgtgtccgcgctgcaaaacgcagaaacagaagacagaaaccgtgatactgagcagcgggaaaacacatcagttcatcccgtggcaggcaaacggctgtgatcactgcttttcaggctattacgggcgtaccgcctgctttgcattcctcacaccgcagcacattcagcctcccgctgccggtgagttacccggttcactgtttgatgccggtatcgcgctggcggaatcaggggtaaccacactcagtgagatttaccatatgcaggatatttaa

SEQ ID NO: 274464 - DNA, 1200 bp, Morganella morganii
atgcaaatttaccggttgtatgactggtccggtctgacacccgctgacaaggtggtgaccggaacgcttatttcaccttcagagaataatgctgtcagtcagctgatttcgcagagcatcacacctgtatcactgttttgccgcaaacggctggtctgctcacagaaagaaaaacagtatctgctgcactttacccggcagctgacaacattactgacgtcggggttgccgttactgaaagcgctcacactgctggcgggtgaatgcagtcacccgctctgggaagaagtaatccgtgctcttatcaggcaattgcagcagggaaaaacatttactcagggaataatgcagtatcccggtttatttgattccttttattgtcagatggccacagtcggagaggaaaccggcaaattaccggagtgtcttcacacgattgcacagcatattgagagtaaccgggatcaccgggctgcattaattaaatcaatccgctatcccgttgcattgttagttatctgctttctgatgaccacattaatgtttctgtttgttatccctgaatttgcaaaaatatatacctcattcggtgcagaacttcccgctctgacacaatggctgatccgggtttccggtgttattaccggttacacaatcccgtcaatgggtataatgactgcaattatatttatttatcatgtatttcggcgaagacatccggatattaaaaaaacagaatcgacctgtattctgcgtattccttttatcggaaacattattatcttcagctgtgtctctcatattttccggatactggcaataacacaacaatcaggcattacacttatttcgggtattaatacacttattatgacaacaacacatccgttatataaagaggcattaactgtgatacgggaggacttgcttcacggaaaaacattcagtgaatcaattaaacaatctggattattcccatctctgtgccatgagctgattgccaccggtgaagccaccggacaattcggacacttttttctctataccgcagactggtttaaatctctcgccttaaaccaaattcagacattttttaaaatactccagccggtactgtttatcctgctggcaattcttgttgctgttttattaattgcaatgtatttacctttattccggctcggtgaagttttagtctga

SEQ ID NO: 274465 - DNA, 618 bp, Morganella morganii
atggcttatattgttgcgttaaccggaggtatcggcagcggaaaaagtaccgttgcggatatgtttgcccgtctcggggttcctgtgacagatgcggatattattgcccgtcaggtggttgaaccgggaacgcccgcattgcaggctattgccgatcacttcggtacccggattctgactgcagacggcacactggacagagcagcactgcgccgggagatctttgcagacccggcggaaaaaacctggctcaatcagttactgcatccgcttatccatcaggaaacccggcgccagctgaacaatatcactgccccttatgccctttgggtggttcctcttctggtcgaaaataaccttgcttcccttgcggatcgcgtgctggttgtggatgtttatccacacgaacaggtcgcccggacaatgcgccgtgacggcgtatccgctgagcatgccgaaaatattctgcgggcgcaggcatcccgtgaacaacgtctggccgttgccgatgatatcctgacaaatcatgataacgatgagccactgatgccccgcgtccttgcactgcacgaactttatacagcattggcccgtcagccaaaacaggaacacccatga

SEQ ID NO: 274466 - DNA, 753 bp, Morganella morganii
atgagcgaaatccgtcagtctgtaatttttgaacaccctttaaacgaacgaacccgttcatggctgcgcattgaaacatcacttcagcaaatgagtacgctgtccccgctggactctctgccatcaagcctggcattcttcagggctgtcgcggaatttattgaagtgattgatcgcggtgaagtccgttcggaaattttaaaagagctggaaaagcagcaaaagaaactggccatgtgggcagaagcccccaatgctgaccaggcactgatccgggggttttctgacgaactgaaacaaaaagccgcagaactgagcaaagcaccccgcatcgcccagcacctgaaagaagataaaataatcgctatcgtccgtcagcggctgagtattccgggcggatgctgcgggtttgatctgccctaccttcatctgtggctgaatctgccgcagagtgtccgtgataccacacaggccgcctggattgaaggtttgcagccgctgcaaaatgcactcggcagcctgctgactctgctgcgtcagtccgcgccgtttgtcgcagctgaaagccacaacggtttttatcaggataacgcggaaggtgcggatttactgcgcctgcgtctgccggttgattttcagatttacccgcaggtctccggccataaaacacgttttgccatacgcttcctgcatactgacagcgaacacggtataataccggctactttaccgtttgaaattgcctgttgctaa

SEQ ID NO: 274467 - DNA, 207 bp, Morganella morganii
atgtcagaagctattatcgttaactgtccgaattgcaaaaaagaggttgtctgggggccggaaagtccgtaccgcccgttttgcagtaaacgttgtcagttgattgatctcggggaatgggctgcggaagaaaaacggattgccagccagagtgacctttctgacagtgaagcctggagtgaaccggaagacagttcaccgtactga

SEQ ID NO: 274468 - DNA, 393 bp, Morganella morganii
atggaaaaaaaacacttacgtattgccgccggcgttatccgtaatgcagaaggtgagatatttattgctcagcgtccgctgaaatcacatatgggcggttactgggagtttcccggcggtaagctggaagccggagagtcaccggagcaggcgctggtgcgggagctggaagaagagctgggtattgtggcggttccgggcgaactgttgcagacggcagaacatgaatttccggatcgcctgatcaccatttatttcttcctggtcgaagagtggcagaatgcgccatatggccgcgaaggtcagccatcccgctgggtaaaacaaacggcactgattgctgaggagttcccgccggtcaaccggggaattgtggcattgctgaccgaataa

SEQ ID NO: 274469 - DNA, 2712 bp, Morganella morganii
atgctggtaaaattactgaccaaaatcttcggcagccggaatgaccgtactttacgccgcctgcgtaaatctgtggaagctatcaaccggatggaacctgagttcgaaaaactcagtgatgatgaattaaaagccaaaacacaggaattccgtgatcgcctggcaaaaggcgaatccgagcaggatatcttaccggaagcgttcgccacggtacgtgaagccagtaaacgtgtatttggtatgcgccactttgatgtccagctgatcggcggcatggtgctgaacgaacgctgcatcgctgagatgcgtacaggtgaaggtaaaaccctgaccgcgacactgcctgcttacctcaacgccctgtccggcaaaggggttcacgtggtgacagtgaacgactacctcgcccagcgtgacgccgaaaacaaccgcccgctgtttgaattcctcggtatgaccgttggtatcaacctgccgggcatgcctgcaccggccaaacgcgaagcgtacgctgcggatataacttacggtaccaacaacgaatacggttttgactatctgcgtgacaacatggcgttcagcccggaagagcgtgtacagcgcaaactgcactacgcgctggtggatgaggttgactccatcttaatcgatgaagcccgtaccccgctgattatctccggtccggcagaagacagctctgagctgtacatgaaagtggataaactgatcccgcgtctggtccgccaggaaaaagaagattccgacactttcaaaggtgaaggtcacttctctgtggatgagaaaacccgccaggtcacactgaccgagcgtggtctggtgctggtggaagagctgctgtctgaagcgggtctgatgaatgaaggtgaatcactgtactcaccatccaatatcatgctgatgcaccacgttatggcgggtctgcgcgcgcactccctgtttgtccgtgatgtggattatatcgtcagcgaaggtgaggttatcatcgtcgatgagcacaccggccgtaccatgcagggccgccgctggtctgatggtctgcatcaggcagtggaagccaaagaaggtgtggaaatccagaatgaaaaccagactctggcctccatcactttccagaactacttccgtttatacaccaaactggccgggatgaccggtacagcggacacggaagcgtttgaattcagttcaatttataaactcgataccattgttatcccgactaaccgtccgatgatccgtaaagatttaccggatctggtttatatgacagaagctgataaattcaatgccatcattgaagatatccgcgagcgtaccgcagccggacagccggtgctggtggggactatctctatcgagaaatcagagcttatctccaacgcactgaaaaaagccaaaattgaacacagcgtactgaacgccaaattccacgccatggaagcggatatcgttgaacaggcgggtcgttccggtcacgtaactatcgccaccaacatggcgggtcgtggtacggatatcgtgctgggcggcagcttacaggctgatctggcggcgctggacgagccgacagaagagaatatcgctgcggcgaaagctgcatggcaggagcgtcacgatgccgttctggcggcaggcggtctgcatatcatcggtactgagcgtcatgaatcccgccgtatcgataaccagttacgcggtcgttcaggtcgtcagggtgatgctggttcttcccgcttctacctgtctatggaagatgcactgatgcgtattttcgcctctgaccgtgttaccggcatgatgcgcaaactgggtatgaaagaaggtgaggcgattgagcatccgtgggtaaccaaagcgattgccaacgcacagcgtaaagtcgaaagccgtaactttgatatccgtaaacagctgctggaatacgatgatgtggcaaacgaccagcgccgtgctatctacacccagcgtaatgatctgctggataacggggatatcagcgaaactatcgacagcatccgtggtgacgtattcacaacagttatcgatgcacatattccgccgcagtctctggaagaaatgtgggatatcccggggctggaaaaacgtctggaacaggatttcgacttacatctgccaatcaaagagtggctggataaagagcctgaactgcacgaagaaaccctgcgtgagcgcatccttgacaaagcggtggaagtttacaaagccaaagaagagattgtcggcgctgaaatgatgcgtcacttcgagaaaggcgtgatgctgcaaactctggataccctgtggaaagagcacctggcggcaatggattatctgcgtcaggggatccatctgcgcggttatgcacagaaagatccgaagcaggaatacaagcgtgaatctttctccatgtttgctaacatgctggaaggcctgaaatatgaagtggtcagcaccatttccaaagttcaggtccgcatgccggaagaagtggaagcactggagcagcgtcgtcgtgaggaagctgaacgtctggcacagcgccagcagctcagccatgaaaatgacaatgccgcactgatgaccaaaacagaagcggaaatggcatccggtgtccgcaaagtcggccgtaacgatccgtgcccttgcggatccggtaagaaatacaagcagtgccacggtgcactgaaataa

SEQ ID NO: 274470 - DNA, 450 bp, Morganella morganii
gtggcgaccggttttggcctgcctgcggtactgaatagtggtgatgttaccacagccggtgccgggacaacacaaaaccgccagagtcaggcattatccgcctttgacagcctgttcctgcaaagcagccagccggcgagaacctcacagaacgttaattactggcagcagcatgcggtccgtaatgttatccgccagatttcctttgcattttcctgtccggaagatgcctcaaaagataataccccggcagaagaccggcatgatgcctccgcgcaaaatatgctggcggcgctgtatgccattctgaccgactccccggctctgcctgtttatcatccggcagttctgccgcagcgtattgctgcagttaacccgtctccgtctttttcggttcagtggattgcccgcaccggcggcatccgtgccggtcccgtaaaatcagcgtag

SEQ ID NO: 274471 - DNA, 525 bp, Morganella morganii
atgcgcgacagtcagccagtttcccttgaaagcctgctggaaagcgggactaaggataataatacccttaaaagtattcagcagcgtgctgtcgtgttacttaaactcaaccgcgccgttctggcgctgctgcccgcgatgctcaaaccacactgccgcgtggctaattatcgcaaacaactgttaattctggaagtctctaatgcggcacagatgacccggctgcgttacgaacttcccgcactgcgttctgcactgcgccgggagattttaccatcattatcggccatcgacatcaaaatcaatccgtcattgatgaaatcatcagcaaccgggttaccgggtggtgataaaagcagcaactcagatagcagagggcaaaaaacagcagagccgggacggaaattaagtgctgaaagtgccaattcactgaaagcgctggcgcagagaagcccggagaaactgaggaagaagctggagaaattggctgcactggccggagagagtaccagtgcagcagattaa

SEQ ID NO: 274472 - DNA, 918 bp, Morganella morganii
atgatcaaacaaagaacattaaagcgtattgttcaggctacgggtgtaggtttacacaccggcaaaaaagttacgctgacaatgcgtccggcaccggccaataccgggatcatctatcgccgtactgatcttaatccgcctgtcgattttccggcagatgcgaaatccgtgcgtgatacgatgttatgtacttgtctggtaaatgaagacaacgtacgtatttccacggttgagcatttgaacgcagcactggccggactcggcattgataacctggttatcgaagtcgatgccgctgaaatcccgattatggatggcagcgcaagcccgttcgtattcctgttactggatgccggtattgaagaactgagcagcgcgaagaaattcctgcgtctgaaagagaccgtccgtgttgaagatggtgataagtgggctgaactctctccgtttaacggtttcagcttagatttcactatcgatttcaatcatccggcgatcgattccagtactcagcgctacgcgatgaacttctctgcggaaaactttgtccgggatatcagccgtgcacgtaccttcgggttcatgcgggatattgaatatctccagtccaaaggcttatgtttaggcggaagttttgactgtgccatcgtggtggatgattaccgcgtgctgaatgaagatggcctgcgttttgaagacgaatttgtccgtcacaaaatgctggatgctatcggtgacctgtttatgtgcggccacaatatcattggtgcctttaccgcattcaaatccggtcacgcactgaataacaagttacttcaggctgttctggctaaagagggcgcctgggaactcgtgacattcgagaacgaagcacagatgccggttgcattccgtgcaccgtcaaccgtactggcgtaa

SEQ ID NO: 274473 - DNA, 1158 bp, Morganella morganii
atgtttgaaccgatggaattgaccaacgacgcggtgattaaagtcatcggcgtcggcgggggcggcggtaacgctgttgagcatatggtccgtgaacgcatcgaaggcgttgagttcttcgctgtgaatacggacgctcaggcgcttcgtaaaaccgccgtcggccagactattcagattggtaacggaatcaccaaaggcctgggtgcgggtgcaaacccggaagtgggccgtaacgcggcggaagaagatcgcgaagctctgcgcaatgcactcgacggtgcggacatggtctttatcgcagccggtatgggcggcggtacagggaccggtgcggcacctgttgttgctgaagttgccaaagagctgggcatcctgactgttgctgtggtgaccaagccgttcaactttgaaggcaaaaagcgcatggcattcgccgagcaggggattactgagttatccaagcatgttgactcactgatcaccatcccgaatgacaaactgctgaaagtattaggccgcggaatctcactgctggatgccttcggtgctgccaatgacgtgttacgcggcgcggtccagggtatcgcagaactgatcacccgtccgggcctgatgaacgttgacttcgcggacgtccgtaccgtgatgtcagaaatgggttacgcgatgatgggttccggcgtggcgcgcggtgaagaccgtgcggaagaagctgccgaaatggcgatttccagcccgctgctggaagatatcgacctgtcaggtgcgcgtggtgtgctggttaacatcacggcgggctttgacctgcgtctggatgagttcgaaaccgtgggtaacactatccgtgcatttgcatcggataatgcgaccgtggttatcggtacttccttagaccctgaaatgaacgatgagctgcgtgtgactgtggtcgcgaccggtatcggcatggacaaacgtcctgaaatcacgctggtaaccaataaagcggtgcagaccaacaacatggaacatcgttatgcacaaatgcaaaacagcatgaccagcatggatgaaagcaaatcagtggcacaggttgtcaacgattcttcagcccagagcaataaagaaccggattatttagatatcccggcgttcttgcgcaaacaggctgattaa

SEQ ID NO: 274474 - DNA, 1257 bp, Morganella morganii
atgatcaaagcaacggatagaaaattagtcgtcggcctcgaaataggcaccgccaaagtatctgcgcttgttggtgaaattctgccggacggtgtggtgaacattattggtgcgggtaactgcccgtcacgcggaatggacaaaggcggcgtcaatgatctggagtcggtggtaaaatgcgttcagcgtgccatcgaccaggcggaactgatggcggactgccagatttcatcagtctatctggcgttatccggcaaacacatcagttgccagaatgaaatcggtatggtgccgatttcagaagaagaagtgacccaggaagatgtggaaaatgtggtgcatacggcgaaatctgtccgtgtccgcgacgagcaccgcgttctgcatgtgatcccgcaggaatatgccatcgattaccaggaaggcattaaaaatccggtgggattatccggtgtgcggatgcaggcgaaagtgcatctgatcacctgtcataacgacatggcaaagaatattgtcaaagccgttgagcgctgcgggctgaaagtggaccagctgatttttgccggtctggcatcaagcttcgcggtactgacggaagatgagcgtgagctgggtgtctgtgtcgtggatatcggcggcggcaccatggatatggcgatttataccggcggcgcactgcgtcacacccgtgttatcccgtatgcagggaatgtggtgaccggtgatatcgcgtacgccttcggcactccgccgaatgatgcggaagcgattaaagtccgtcacggctgcgcgctggggtctctggtcagcaaagacgaaaccctggaagtgccgagtgtcggcgggcgtccgccgcgcagtttacagcgccagacattagccgaagtgattgagccgcgttacaccgaattactcaatctggttaatgacgaaattttgaaagtgcaggaacaattacgtcagcagggtgtcaaacaccatttggccgctggtatcgtgctgacaggtggtgcggctcagatcaacggactggttgagtgcgcccagcgtgttttccatacacaggttcgtatcggacaaccgcttaatataaccggcttaacggattatgcgcaggaaccgtattactctacagcggtagggttgctgcattacggaaaagaatctcacctggtcggcgataccgagacagaaaaacgtgcctcggtgggcagttggtttaaaaaattaactggctggctcagaaaagaattttaa

SEQ ID NO: 274475 - DNA, 804 bp, Morganella morganii
atgtcacaggctgcactgaatatgcgcggaccggatccggatacggattatgaaggttcacgtcccagtaacggcacataccttgccggactgctgtttttcctgatggtgctgggaacgctggtctggggggggctgatggtgctgaactggatgaaagatgcagaccgcctgccgatgtcaaaactggtattaaccggtgagcgtcattacacgacaaacgataatgtacgcaaagcggtgttatccctcgggacacccggtacgtttatgacactggatgtcaatgaagtgcagcagcagctggaacggatcccgtggttacgtcaggtcactgtgcgcaagcagtggccggacgaattaaaaattcatctggtcgagtatgtgccgtatgcacgctggaatgactcacagatggttgatgacgccgggcgggttttcagtctgccggcggaactgacagaaaaagattctttcccgatgctctacggggcgcagggcagtgaacaggatgtactgagcgggtatcgtgaaatggcgcagcagctcagcggggcgggactgaaaatcaaatcagcctcaatgtcaccgcgtcatgcctggcagctggtgctggataatgatgtccgggttgaactcggacggctggataccaaaggccggttacagcgttttatcgaactgtatccgaccctgacgcaggaacaggacaaacgggttgattatgtcgatctccgctatgacagcggtgctgcggtcggctgggcgccattgcagatcgatcctttcgcaaacggacattaa

SEQ ID NO: 274476 - DNA, 918 bp, Morganella morganii
atgactgaaaaagtcgcggtactgatgggcggtacatccgcagaacgtgaagtctccctggcttcaggtgcggcggtgctcgccggtttaaaagaagccggtattaatgcattcggtgtggataccaaagagtatccggttacccgtctgaaggaagacggttttaccaaagtctttatcgcgctgcacggccgcggcggggaagacggcacactgcagggctgcctggagcagatgggactgccgtacaccggaagtggtgtcatggcctccgcactctctatggacaagctgcgcaccaaacagctgtgggcgggcgcaggtctgccgattgcgccgtatttcgccatcagtgcgacccgtttcgcgcacatcagtgatgaagaattacagcagggtgtggcatcgctgggttatccggtgattgtcaaaccaagcctggaaggctcaagtgtcggtatgtccaaagtggataacgcacaggcactgcgtccggcactggaagaagcgtttaaacacgacaaagacgtgctggtggaaaaatggctgagcggcccggaattcaccgtgggcttcctcggtgagcagatgctgccgtctatccgtattcagccggcggcggtgttctacgactacgaagccaaatatgtttctgacgacacacaatatttctgcccgggccttgaaggggcacgtgagacagaaatccgtgagctggcaaaagccgcttacaaagccgtgggctgtgaaggctggggccgtgtggatgtgatgctcgacagtgacgggcagttctacctgctggaagtgaacacctccccgggtatgaccaaccacagtctggtgccgcaggcggcgcgtcaggcaggcatgagcttctccgcttttgtggcggacgttctggcactggcggactga

SEQ ID NO: 274477 - DNA, 1422 bp, Morganella morganii
atgaaacgtgtccggcacattcactttgtcggtatcggcggtgccggtatgggcgggatagcggaagtgctggcgaacgaaggttatgagatcagcgggtctgatctggcgccgaatgcagtaacaaaacagctgactaacctgggcgcgacgatttatttcaatcaccgtccggaaaatgtggcagacgccagcgtggtggtggtatccaccgccatttcagcggataacccggaaatcgttgcggcgcgtgaagcccgtattccggtgatccgccgcgcggaaatgctcgcggaactgatgcgcttccgccacggtgtggcgattgccggtactcacggcaaaaccaccaccacggcgatgatttccggtatctacggccgcggcggtctggatccgaccttcgtcaacggcgggctggtcaaagctgccggtgtgcatgcgcgtctcggctcaagccgttacctgattgcggaagcggatgaaagtgacgcctctttcctgcacttacagccgatggtggccgtggtcaccaatatcgagccggaccacatggatacttatcacggtgattttgaaaccctgaaagatacctttgtgaacttcctgcacaacctgccgttctatggcctggctgtggtatgtatggatgatgcggtgatccgcgaaatcgtgccgcgtatcggccgttatgtaattacttatggttttcatgaagatgcagatgtccgcatcaccgattttgaacagcgcggctcacagtgcttcttcaccgttcaccgggagaatctgccggatctgactgtggaactgaatgcaccgggccgtcacaacgtcctgaatgccaccgcggcgattgcggtcgcgacagaagaaggtattccggatgaggatatcctggcctctctgcatgaattccagggcaccgggcgccgttttgatttcctcggcaacttcccgctggagcacgtcaaccagaaagagggcagtgtgatgctggtggacgattacggccatcacccgaccgaagtggatgcgactatcaaagcggcaagagcaggctggccggataagcggattgtgatggtgtttcagccgcaccgttacacccgtacccgtgacctgtatgatgattttgccaacacgctggatcaggtcgatatcctgctgatgctggatgtgtatgctgccggtgaaccggtcattccgggggcggacagccgttcgctgtgccgtacaatccgccagcgcggcaaactggatccgattctggtcactgaacccggcaaaattgcagcggttctggcacaggttcttgaagataatgatttaatactggttcaaggcgccggaaatatcggtaaaatagcgcgtacattggctgacacaaaattacggccggttttgagtgaggataattaa

SEQ ID NO: 274478 - DNA, 1074 bp, Morganella morganii
atgagtaataaagccccccgtctgatggtgatggccggtggtagtggcggacatgtctttccggggcttgcggttgcgcactatttacagagtcagggctgggaaatccgctggctgggtacccgtgaccggatggaagctcagctcgtgccgaaacacggcattgatatcgactttattgaaattaccggtctgcgcggcaaaggcgtgaaagcgctgctcaccgcgccgttccgtatcgcgaaagcggtaaaacaggcgaaaaaaattatgcgtgactaccagcctgatgccgtgctcggcatgggcgggtttgtttccggtcccggcggcgtggctgcctggcgctgcggtattccggtgatcctgcatgagcagaacggtgttgccgggctgaccaacggttggttgtcgaaaatcgccaccacggtattacagggattcccgggcgcgttcccgcaggctccggtggtcggtaacccggtgcgggaggatatcctcaatctgccgtccccggcagaacgctttgccggacgtgaagggccaatccgcattctggtgatcggcggcagtcagggcgcgcgtatcctgaaccagaccctgccggaagtggctgggattatgggggatgctgtctgtatccgccatcaggccggcaaaggcagtgcggaaagcacacaggcgctgtataacgcgcagaatgcgtcagacagtgtgactgtcacagaatttattgatgacatggttgaagcttatacctgggcggatgtggttatctgccgctccggggcgctgaccgtcagtgagatcgcggtggtcgggctgggcgcgatttttgtgccgttccggcataaagaccgccagcaatactggaatgcgctgccgctggaacaggcgggcgctgctgttatcatggaacagccgtcctttaacgcacaggcagtggcagagcagctgcgcgagtgggacagaccacgcctgctgaccatggcggaaaaagcacggagtgtcgcaattaccgatgccaccaagcgggtggcggatgcaattattgcggcagcgaagaaacactaa

SEQ ID NO: 274479 - DNA, 1194 bp, Morganella morganii
atgagattccccggatcacagcgttttaaaaactggatgatcggcgagcgtaacggcgagttcagtacggtcgtgatgtatgaccggacactgctgtggtttgcactgggactggccgcgattggttttgtgatggtgacttccgcctcaatgcctgtcgggcagcgtctggcggatgatcctttctattttgccaagcgtgacggcggcttcttaatttttgcttttattatcgctgcggtaattatgcgtttcccgctggaaatgtggcagcgctacagcacattactgctgattggtacgatcggcgggctgattgtggtactcggtgtgggcagctcggttaacggggcatcgcgctggatagctatcgggccgatgcgtattcagcctgcggaagtgtcgaaactggcactgtttgtttatctcgcgagctatctggtgcgcaaggtggatgaagtcagaaataacttctggggattctgcaagccgatgggcgtgatgtttgtgctggcggtgttactgctgttacagccggacctcggtaccgtggtggtgctgtttgtcaccacactggcgctgctttttctcgccggtgccaaaatgtggcagtttatcgcgattatcggcggcggtgtcgcggcagtggtgctgctgattatcgccgagccttaccgtatgcggcgtgtcacctccttccttgacccgtgggaagatccgttcggcagcggttaccagttaacacagtcactgatggctttcgggcgcggtgattatctcggtcaggggctgggcaactccattcagaaaatggaatacctgccggaagcccacaccgactttatttttgccatcctcggcgaggaactggggtatttcggtgtgatcctggtgctgctgatggtcttttttgtcgctttccgcgccatggttatcggccgccgcgcactgatgatcgaccagcgttttgccggttttctggcctgtgccatcggcatctggttcagcttccaggctctggttaacgtcggcgcagcctccggtatgctgccgaccaaagggctgacactgccgctgatcagttacggcggttcgagtttagtgattatgaccgtagccattgctttgctgctgcggattgattttgaaacacgcctggcaaaagcccaggcattctcaaggagagcgcgatga

SEQ ID NO: 274480 - DNA, 1317 bp, Morganella morganii
atgacgaattatcaggggaaagacattgtgattgtcgggctcggtttaaccgggctttcctgtgtggatttttttctgtcacgcggcgttacgccgaaggtgatggatacccgcacctccccgcccggcatcgataagctgccggacagcgttcagtgtcattgcggtggttttgaagcgcaatggctgctggatgcagacctgattatcgcaagcccgggagtggcggtcagtactccgcaattgcaggcagcggcgcaggctggtgcggaaattatcggcgatatcgaattatttgcccgcgaagtgactgtcccggttgtggcgatcaccggctcaaacggcaaaagcaccgtgacctccctggtgggggaaatggggcgctgtgccggtctgcgtaccggggtcggcggtaatatcggcctgccggcgctggaactgctgaaagatgattatgacctttgcgtactcgagttatccagttttcagctggaaaccacattcagcctgaaaccggcggcggccactattctgaatgtcactgaagatcatatggatcgctatccgcaggggctggaacagtaccgtgcggcaaaactgcgtgtttatcacgatgcggccgtctgtgtgtataacgcggaagatgcactgacacagcccggctgtgattgtgaccgctctgaatatgtcagcttcggcgttgaaaccggggattactggctggataccgatgagcaggcactctgcttctgcggtgaaaaaattattaactgcagtgagatgatcctgcacggtcagcacaactactgtaatgccctggcagccctggcactggcagatgcggtcaatatcccgcgtgaaggcgcactgaaagcactgcgcacttacagcggtctgccgcaccgttttcagctggtgcatgaatctgccgggatccgctggattgatgattccaaagccaccaacgtcggcagtactgaagcggcgctgaatggcctgcaggtggacggttgtctgcatctgctgctcggcggtgacggtaaatcagcggatttctctccgctgctgccgtacctgagcggcgaaaaaatccgtctttactgcttcgggcgtgatggcgaacaactggcgcaactgcgtccggatgtctctctgctgacagacaccatggagcaggcaatgcgggcgctggcaccgtcactggccgccggggatatggtgctgttatcaccggcctgtgcgagcctggatcagttccgtaattttgaagagcgcgggcgtgagtttgcccgtctggcacgggagttagcagcatga

SEQ ID NO: 274481 - DNA, 1083 bp, Morganella morganii
atgctgatttggctggctgagtatctggtgcagtttcataccgcgtttaacgtcttctcttacctgacgttccgcgccatcgtcggcctgctgacctcgctgattatcgcattatggatggggccgcatgtgattgcgtatctccagagaatgcagattggccaggttgtccgcagcgaagggccggaatcgcacttcagcaagcgcggtaccccgaccatgggcggcatgatgatcctgttctccatcgccatttctgttctgctgtgggcgcgtctggacaacccatatgtctggtgtgtgctgctggtgctgatcggctacggtattgtcggctttatcgatgactaccgcaaagtggtgcgcaaagataccaaagggctgattgcccgctggaaatatttctggcagtccgtgctggcgctgactgtggcattcagtatgtatgctatcggcaaagacaccccggcgacacagctggtggtgccgttctttaaagatgtgatgccgcagctgggggtgctgtatatcctgctggcgtatttcgtgattgtcggcaccagtaacgcggtgaacctgactgacggcctcgatggtctcgcgattatgccgaccgtctttgtggctgccgggtttgcgctggtggcgtgggcgaccggtaacgtgaatttcgcccattatctgcatatcccgtatctgccgcatgccggggagctggtgattgtctgcaccgcgattgtcggggcagggctgggcttcctgtggtttaacacctatccggcacaggtctttatgggcgatgtcggttcgctggcactcggcggcgcgctgggtaccattgcggttctgctgcgccaggaattcctgctgctgattatgggcggtgtgttcgtggtggaaactctgtcggtgattttacaggtcggatccttcaaattacgcggtcagcgtattttccggatggcacctattcatcaccattatgaattaaaaggctggcctgagccgcgggtgattgtccgcttctggattatctccctgatgttagtgctgatcggtctggcgacactcaaggtacgttaa

SEQ ID NO: 274482 - DNA, 1374 bp, Morganella morganii
atgatcccgttctccctcgctgatatcgcacaactgaccgccggggaacttatcctcagcggccatgcggcatcagaacggattgagagtgtcaccacggacagccgcactatcggcgaacgtgcgttatttatcgccctggccggtgaacgttttgatgctcatgattttattgcggatgtggcagcgaaaggtgtcgctgccgtcgtggtgaaccgccggatggacgtgaactgtccgcagattattgttaaagatacccgccttgcgctgggtgcagtggcgaaaggcaaccgtgagcgcagtcaggcgaaagtggtggcgctgaccggttcatccggcaaaacgtctgtcaaagagatgacggcggcgattttacagcaggcaggcgaaaccctgtttaccgccggtaactttaataatgatatcggcgtaccgctgacattgctgcgcctgacagaaaaacatcagtttgcggtgattgagctgggtgccaaccacaccggcgaaatcgcctataccgccgccatgacacacccgcagaccgcactggtcaataatctgtttgctgcccatatcggcgagttcggttccgcagaagctatcgcgcaggcaaaaggggaaattttcaccggcctgactgacgaaggcaccgccatcatcaatctggaaagcaatgatgtcactcactggcaggcacatctgaccccgcgtcagacccgctggagtttctccgttgatccgcacccgcaggccgatttttacgcggctgatgtggtgatgaacccgctgaccactgactttaccctgcacacaccggcaggcagcaccgctgtcaccctgccgctgccgggccgtcacaatattgccaatgctctcgcggcggcggcactggcactgtctgccggggcgacactggcggatatccgcagcggcctggcacaaaccagcgctgtaccgggacggttatacccggttgagctggcaccgggtaagctggtgattgacgacacttacaacgccaatgacggttcgatgattgcggcaatccgtgtgctggcacaactgccgggttaccgcgtgctggtagccggggatatcggcgagcagggcggttacgccgaagagagtcaccgcagagtcgggcaggctgcccgtgatgccgggctggatgcggtgtttaccgcaggtcagttcagtcattttatcagtgatgagtgtcagggacaccatttcgctgacaaaacaaccctcattgctgcgctggcacctctggtggcacagcattcatcaatttcaattttagttaaaggttcacgcagctccgcaatggaagaagttgtgcacgccttgcaggagaatgtcccatgctga

SEQ ID NO: 274483 - DNA, 1488 bp, Morganella morganii
gtggcagatcgtaatttgcgcgatttactcgcgccgctcggtgttgatgcaccggctaaggcgttacgtgatatgaccctggacagccgtaaagcggctgccggtgatctgttcctggcggttaaaggccaccagtccgacggacgtcactacattcctcaggccattgcccagggtgtggctgccgtggtcgcggaagcggatggtgcggcggaagacggcagtgtgcaggttctgcatggtgtaccggtggtgtatctcagccacctgaatgaaaaattatcccgtctggccggtgagttttatcaccacccggcggaacgcctgaaactgatcggcgtcaccggcactaacggtaaaaccaccaccacccaactgctggcgcagtggactcaggcgatgggcgaaaccagtgccgtgatgggaacagtgggtaacgggctgctcgggcatgtgatcccgactgaaaacaccaccggttcagccgttgatatccagctcgagctggacaaactggcgaagaaaggtgccacagtggcggcgatggaagtctcctctcacggactggtacagagccgtgtggcggcactgccgttccgggctgcggtctttactaacttaagccgtgatcacctcgattaccacggtgatatggctaattatgaagccgccaaatggctgctgttctcaacccatcacagcgaacaaaaaattattaatgcggatgatgagacagggctgaaatggctggcaaaactgccggaagcggtcgcggtcacgatggatgacaatctgccggccggctggcaggggcgtttcctgaaagccgtttctgtggattaccacgacagcggcgcccacatcacctttacctcaagctggggcaacggtgaactggacagcccgctgatgggcgcctttaacgtcagtaacctgctggtggctgcggcaaccctgctggcactgggttatgacctgaatacactgctgcgcgctgcaaccgcgttaacaccggtctgcggccggatggaagtcttcacggcggataaccgcccgacggttgttgtcgattacgctcacaccccggatgcgctggaaaaagcactgagtgcggcgcgtctgcataccaaaggtaaactgtggtgtgtcttcggctgcggtggtgatcgcgacaaaggcaaacgtccgctgatgggcgcaattgccgagcaggaatccgatgtggtggtgatcaccgacgataacccgcgcagcgaagagccgcaggcgattatcaatgatattatggccgggctggttgatacctcccgtgcactgccgatcccgggccgtgcggaagccgtcacctttgcggtgatgcaggcaaaaccggatgacgtggtgctggtggccggaaaagggcatgaggattatcagctggtcggcaaccgccgtctggactattccgaccgcctgaccgtcgcccgcctgctgggagtaatggcatga

SEQ ID NO: 274484 - DNA, 1794 bp, Morganella morganii
atgaaaagcagaaaagcagcagccaaaacgcagggcggtgcccgtatcaaacgtccggaagaaaaagccagttttatcagctggcgttttgcgttgttatgcggcggtatcgggcttgccctggccgccctgctgatccgggtcgcgtatttacagattatcaacccggacatgctggtcaaagagggcgacatgcgctcgctgcgcgtccaggagatcccgaccgcgcgcggtatgatcagcgaccgtatggggcgtccgctggcggtcagtgtgccggtaaacgccgtctgggctgatccgaaagagttagccggcaaaggcggggtaggggatgacacccgctggcgtgcactgtccgaagcgctgaatatcccgctcgaacaggtgaaaagcaaagtcacggcgaacccgaaaggccgctttgtctatctggcgcgtcaggtgaacccgaccatcggcgattatgtgaaaaaactgaatctgccggggatttatttacaggcggaatcaaaacggtattacccgtccggctctgtgactgctcacattattggtgtcaccaatattgatgatgaagggattgaaggggtcgagaaaagctttgaccgctggctgaccggggttccggggcagcggacagtccgtaaagatcgcggcggccgcgttattgaagatactatcgcccgcgaaagtcaggccggacacaacctgactctcagtattgatgagcgtttacaggcgctggtataccgcgaaatcagcagtgcggtggcactgaacaaagcggaatccggcacggcgattctggtggatgtgaacaccggggaaattctggcgatggcgaacagcccgtcctataacccgaacaacctccagggcacgccgaaagatgccatgcgtaaccgcgctatcaccgatatttttgaaccgggctcgacggtaaaaccgttggtggtgatgacagcactgcacaacaacatcattaaaccgaacagcgtggtgaatacgtatccgtaccggatcagtggtcatgaaatcaaagacgtggcgcgttatgccgaactgaccatcaccggtattttacagaagtcgagtaacgtaggtgtctcaagacttgcgttagcgatgcccgctcaggaactcgtggacgtctattcgcgtttcgggctgggaaaaccgaccaatctggggctggtcggagaaagcagtggcatatacccaagtaaaaaaacacggtggtctgagcttgaaagggccaccttttcttttggctacgggctgatggtaacaccgttacagttagcgcgggcctatgcaacaatcggcagtttcgggatttaccgcccgctgtccatcacaaaagtggatccgccggtgccgggcacccgcgtcttccctgagccggtgatgaaaaccgtggttcagatgatggaaagtgttgcgttaccgggcggcggcggaacgcgcgctgcgatcaaagggtaccgtgtggcgattaaaaccgggaccgcgaaaaaagtgggcgatgacgggaaatacgtgaaccgttatatcgcttacaccgccggggttgcaccggcaagccgtccgcgttttgcactggttgtgattatcaacgacccgcagggcggcaagtattacgggggtgcgatctccgcaccggtattcggtgccatcatgggcggtgttctgcggacaatgaacgtggaacccgatgcgctgacaccggaagaacaaactaatgaagtggttattaataaaccaaaagagggtacaagtggcagatcgtaa

SEQ ID NO: 274485 - DNA, 318 bp, Morganella morganii
atgaccacagaacggcacaatttagcccgcgttatttgtcgtgacctgctgcgccacggatttatccctgcgattttatttattgcagtgatcgtcagcgcgatttttgtggtcatcacggcacataaaacacgtctgctgaccgcagagcgggaacatcttgtgctggagcgtaactcgctggatatcgaatggcgtaacctgattctggaagagaacgccctgggggatcacagccgtgtcgagcgcctgtccgttgagcgtctcagtatgcagcatgtggatccggcaaacgaaaaaattgtcgtaacaaaatga

SEQ ID NO: 274486 - DNA, 942 bp, Morganella morganii
atggcagagagtcagtttcagcataccagtgttttactggatgaagccgtcaacggattacagatccgcgaagacggcatttatatcgacggcacattcggccgcggcgggcactcccgcctgattttatcaaaactcggtccgcaggggcgtctgattgccattgaccgcgatccgcaggcgattgccgctgcggcacagattgacgacccgcgtttttccattattcacggcccgttttccggtatcgccggttatgtgaataatctggagctgggcggacagattaacggtgttctgctggatctgggtgtgtcctccccgcagctggacgacgcggagcgcggattctcctttatgcgtgacgggccgctggatatgcggatggatccgacacgcgggatctccgctgcacaatggctgaccgaagccaaagaagaagatattgcgtgggtgctgaaaaatttcggcgaagagcgtttttcgaaacggattgcccgcgcgattgttgaacgcaataaaaccgaagagccgctgacgcggacaaaacagctggcggatttaattgccgctgtgtctccggtgaaagaaaaacacaagcatccggcgacccgcagcttccaggcgatccgcatctatgtcaacagcgagctggatgaaatccgccaggcgctgaccggcgcactgggcattctggctcagggcggccgtttatcggttatcagcttccactcgctggaagaccggattgtgaagcagtttatgcgtgacgaaagccgcggaccacaggtaccgcacggattaccgctgacggaagaacaactgaaagcgcacggcacaccggcactgaaactggccggaaaaatgaaaccgtcagagcaggaaatcagtgttaacccgcgtgcccgcagttcagtactgcgctttgcggagaaagcatga

SEQ ID NO: 274487 - DNA, 459 bp, Morganella morganii
atgtttcgcggggcaacactggttaatcttgacagcaaagggcgcataaccgtaccggcacggtaccggtcgctgcttgctgaaaagtcggaaggtcagatggtctgcactatcgatctccaccagccgtgcctgctgctttacaccttaccggagtgggaactgatcgaactgaaactggcacaattgtccaccatggatcccacggagcgccgtgttcagcgcctgttgctgggccatgccacggaatgtcagatggacagtgcgggacgtcttttgttagccggtacactgcgcacacatgcgcggttaaccaaagaagtcatgctggtcgggcagttcaacaagtttgagctgtgggatgagcagacgtggtatcagcaggtacaggatgatattgctgccgggcagacggcatccggacctttatccgcccggttacaggatttatcactttaa

SEQ ID NO: 274488 - DNA, 1005 bp, Morganella morganii
gtgaaactggatgaaatcgcccgccttgccggtgtgtcgcgcacgacggccagttatgtcatcaacggaaaagcaaaacaatatcgtgtgagtgacaaaactgtcgaaaaagtgatggcggtggttcgtgaacataattaccatccgaatgcggtggctgccggtctgcgtgcaggccgtacccgctcaatcggactggtgatcccggatttggagaacaccagctacacccgcatcgcaaattatctggagcgtcaggcgcgcagccgtggttatcagttgctgattgcctgctccgaagaccagcctgacaacgaaatccgttgtgtggaacacctgttacagcgtcaggtggatgcgattatcgtttccaccgcactgccgccggagcatccgttctatcagcgctgggcaaaccgctccctgccgattgtcgcgcttgaccgcgcactggaaaatgagcactttatcagtgtggtcggggatgactttgaggacgccaaaatgctggcatccgaattgcgtcagttcccggcagaatcggtggtatatctcggcgcgttaccggaactttccgtcagtttcctgcgtgaacagggattccgtgaagcctgggaaggggatgcacgtaacgtgaatttcctctatgccgacagctatgagcgtgatgccgccgccaaagcgtttgatacctggctggaaagcaatccgatgccggatgcgctgtttaccacctcatttgccctgttacagggtgtgatggatgccacgctggcccgcagcggccgtctgccggggcaactggtgatcgcgaccttcggtgatcatgaactgcttgattttcttgagtgtccggtactgtccgtggcgcagcgtcaccgtgatattgcggagcgtgtgctggagctggtactggccagtctggatgaaaaacagaaaccggctgcgggtatcacccggatccgtcgtgatctgtgccgtcgcggaagtctgagccgccggtaa

SEQ ID NO: 274489 - DNA, 492 bp, Morganella morganii
atgcgccggattctgtcaattttattagaaaacgaaacaggggcgctgtcccgtgtggctgggcttttttcccagcgcgggtataatatcgaaagtatcaccgccgccccgaccgatgacccgtcactgttccgcctgaccatccagaccaaaggcgatgcgcgggtgctggagcagattgagaagcaactcaataagctggtggatgtgttccgtgtcacagaactgacctctgccactcatattgagcgcgaggtgatgctggtgaaattacaggccagcggttacgggcgggatgaggtcaaacgcagtaccgatatcttccgcggacagattgtcgatgtgaccgcgacgctctataccgtgcaactgaccggcaccagcgaaaagctggacgccttcctggatgcggtgcgcggctttgcggaaattgtggagattgcccgttccggcatcgtcgggatgtcgcgcggcgataaaataatgcggtga

SEQ ID NO: 274490 - DNA, 1722 bp, Morganella morganii
atggagaggttgacaggggcagaaatgatcgtgcgctccttaattgatgagggcgtgtcacacgtattcggctatccgggcggcgctgttctggatatttatgatgcactgcataccgtgggcggtgtggggcacattctggtgcgccacgagcaggccgccgtgcatatggcggacggctatgcccgcgcgaccggtaaaaccggcgtggtgctggtcacttccggaccgggggcgactaacgccattaccggtatcgccaccgcgtatatggattcagtgccgctggtggtgctgtccggccaggtggcgagtgcgctgatcggcaacgatgctttccaggaagtggatatggtgggtatttcccgcccggtcgtgaaacacagttacctggtacacgatgtcgcagacattcccgccaccatcaaaaaagcattctatctggcacagagcggccgtccggggcctgtggttatcgattttccgaaagatattgtccagcagcagcacgaatacagctacccgtcacgggtcagcctgcgctcctataacccgaccggagccggtcataaagggcagatcaaacgcgcgctgatcacgctgatgcaggcgaaacgcccggtaatgtatatcgggggcggtgctgtcagtgccggatgcagtccggagattttcaccctcgcggataaactgcgtctgccggtggcgctttccctgatggggctgggcgcgtttccgggcactcatccgcagtgtgtcggtatgctgggtatgcacgggacgtatgaagcaaacaataccatgcatcacagtgatgtgatttttgccgtcggcgtccgtttcgatgaccggaccaccaataacctggcgaaatactgcccgcaggcaaccatcattcatatcgatgtcgacccggcgtctatctccaaaaccgtggcggcggatattccgattgtcggtgatgcgaaactgtgtctcgcgcagatgctgttacagcttgaatccctgaccgatgaacaggatccggatgcattatgcgactggtggcggcgcattgatcagtggaaagcgaaacagtgtctggctattgatgagagcggggagaaaatcaaaccgcagaccgtgatccgcaccctgtgggaactgacggaagggaaggcgtatgtcacctcggatgtcggtcagcatcagatgtttgccgcactctattacccgtttgatgaaccgcgccgctggatcaactccggcgggctcggcacgatgggcttcgggttaccggcggcactgggtgtccggctggctaaaccggatgatatggtggtgtgtgtcaccggggacggcagtatccagatgaatattcaggagctttccacggcattacagttcgggctgccggtgctggtgctcaatctgaataaccggttcctcggtatggtgaagcagtggcaggatatggtttatcacggccgtcactcacattcctatatggaatcgctgcctgattttgtccgcctggcagaggcttacgggcatatcggaatcagtatcagtgataaagccacgctgcgtgaacagctcgcggaggcactgcgcattgtccgcgaagagaaacgactggtattcgccgatgtaatggtggatgagaaagagcatgtttatccgatgcagatccgcaacggcggaatggatgaaatgtggctgagcaaaacggagaggacctga

SEQ ID NO: 274491 - DNA, 1809 bp, Morganella morganii
gtgacaacaacaaatttgcatcactatcatttagtgacgcggctgcaacagcaaaaacagcgccggggtgacaaaatcgcactgcgacagtggtgtgaacaaggccagcatatcgattttacctggcagcaggccggggcgttcagtgaaaatctggcggaagccctgctggcagaaggggttgaagtgcaggaaaatgtcgccattttctcgcataacagcgctctgtggacattaaccgacctggcgattcttcagtgccgcgccattgtggtaccgctctatgccaccagcagtgatgaccaggcggcctatattcttaatgatgcgcaggtgcgcattctgtttgtggacggtcagaagcaggcggaaattgccctgtcactgctctctctctgcccgtcgctgcaaaaaatcatcataatgaacccggaaaacacggcaatcccgtcgcatcctgcggtctgcacactgcgtcagtttatgaacggccacgatggcagttacgccgcagagctgcgtcagcgcatcgctgattgttcccttgatgatcttttcaccctgatttacacctccgggaccaccggcgagccgaaaggcgtgatgctggattaccgcaacatggccgcccagctttatctgcatgatgagcggctgacactgactgaagatgatgtctcactctgcttcctgccgctgacgcacgtttttgagcgcgcctggagtttctatgtgatgcacaccggcgcactgaatgtctatctcagtgataccaacctggtgcgcaaagcgatggtatcggtgaaaccgaccgtgatgtgtgcggtgccgcgtttctatgaaaaagtattcagcggtatttacgaaaaagtggcacaggcgccgtggtataaacgggcgttattccactgggcggtacggaccggtaaaaagactctcgatgcacaacagcgcggtgaaaaacagtcatggctggccgcgcggtgtgatcagttcgcacagaaaaaagtgctcggtaaactgcgtgatgtgctcggcggcaatgtccgtttcttaccggcggcgggggcgcggctggatgatgaaattatccgctttttcctcgccatcggcattaacatcaaatacggctacggcatgacagaaacctgtgccacggtatcctgctgggaaaacagcggttatcagctcggctctatcggtgtgccgctgccggatgtggaagtgcgtatcggtgaggaaaatgagattcaggtacgcgggccggtggtgatgcgcggctattacaataagccggaagagacccgtcaggcctttacggctgatggctggctgcggaccggcgacgccggtgcgctggatgagcagggcaatctgtttatcaccgaacgcctgaaagatctgatgaaaacctcgaacggcaaatatattgcgccgcagatgctggaaggcacactgggtcaggatcgctttatcgaacatatcgccgtggtggcggatgcgcgtaagtttgtctccgcactgattgtgccgtgttttgacactctggaagagcacgcgcgggcactgaatctgaaataccatgaccggatggaactgctgaaaaacagccagattgtggcgttgtttgaaagccgtctgaaagagttgcagaaaaatatcgcggcctttcatcaggttaagcgtttcacactgctgccgcagaatttctccatggagctcggcgaactgacaccgaccctgaaactgcgccgtaaagtgatcgcccagcgctatcagcgcgaaattgagtcgatgtatacggactga

SEQ ID NO: 274492 - DNA, 948 bp, Morganella morganii
atgactgaatacacctcagtggcagatgtaaaaaaagaatccggtgaaacacagctgcgcaatgtggatcttaatctgctgaccgtttttgatgcggttatgcagatgcagaatgtgacccgcgctgctgaacttttaggtatgtcgcaaccggctgtcagcaatgcggtgtcaagacttaaggttatgtttaatgatgaattatttgtccgtttcggacgggggattcagccgacagcacgcgccaaacagctgttcggaccggtcaggcaggcattgcagctggtgcataatgagctgccgggtgccggttttgaaccgggcagcagcgagcggacatttaatctggctatctccagtccgctggatatccgcctgacagacaaaataatcgaacaggttaaacttcacagtgaaaatatcgatgtcaatattcagtcttatatgaattcacatatcgagaataacctgaaatatcaggaaactgattttgctgtcagttataatcgtttcgataaaccggattacagtcatcacttattatttaatgatcagttatcactggtcgccgcccgtaaccatccgcgtatacaatatacggtaacagagaaacaaatatttaccgaacagcatgctgtcgtgtcactggatttaattgattcattcagttcaccgtattatgaaaataatgaattactccgggctattgtttatcagggaaccaatttagtcagtgtactgaatattgtctctaaaacagagctggtggcgattgcaccgaaatggctgattcagctctattctcatgtgctgccgattcaggaagtgcagctgccgtgggataaagtcagccgtccggcgtttctgatctggcacgaggcgtgtacccgcgataaagggcatcagtggatgaaggcactgctgtcgcagttcacacatcatatgtaa

SEQ ID NO: 274493 - DNA, 1614 bp, Morganella morganii
atgagcgataacgtcatcatttttgataccacactgcgtgacggggagcaggcattacaggccagtctcagtgtcaaagagaagttacagattgctttccagctcgaacgcatgggggttgatattattgaggccggtttccctgtctcctctcccggtgattttcagtcggtgcagactatcgcccgcgaaatcaaaaacagccgtatcgcagcattatcccgctgcgtgatcggcgatattgatgccgcagcggaatccctgaaagtcgcggaggccttccggttacatatggtgctcgctacctccggtattcacgttaaaaccaagttgcgcaagacctttgctgacatcatcgatatggcggtcggctcgattaaacatgcccgccgctttaccgatgacgttgagttttcctgcgaagatgcagggcgcaccgatatcgatgatttatgccgcatagtggaagccgcgatcaacgccggtgccaccacggtcaatattccggacaccgtcggttacaccacaccgtaccagttcggcggcattatcagcgaattattcaaccgtgtgccgaatatcgacaaaaccatcatttctgtccactgccatgacgatctgggcatgtccgttgccaactccatcaccgccgtacaggccggtgcccgccagattgaaggtacgatcaacgggttaggcgaacgcgccgggaactgtgcgctggaagaagtgattatggcgattaaagtgcgggaaaaaatgctgggtgtgcgcaccgggatcaatcacaaagagatttaccgcaccagccagctggtcagtcagttatgcaacactcccgtgccgccgaacaaggccgtggtcggcagcaatgccttctcccactcctccggtattcaccaggacggcgtgattaaaaaccgcgaaacctacgaaatcatgacgccggacagcatcggcctgaaagataacttaatcaacctgacctcccgttccggccgcgcggcggtgaaacaccggatggcggaaatgggttatcaggaaggtgactataacctggatgaattatacgccgacttcctgcaactggcggacaaaaaaggtcaggtcttcgattacgacctggaagcactggtgtttatgaagcagcagcaccaggagccggagcacttctcgctggcattcctcaatacgcagtccggtaccggcgtcaaagcctccgcgatggtcagaatgcaggccggggatgacattatctcggaatccgcccaggggaacggcccggtggatgcggcttatgaggccatccgccgtatcgcgggttacccgctgaccctcgccgcctatcagctgaccgccaaaggtcagggaacggatgcactgggtcaggtgaatatcgtggtggagtatgaaggccgcaaattccacggcatggggctggcgaccgatattgttgaatcctccgcccaggccatgatccacgctatcaacagcatctggcgcgcaggacaggtaaaagaagaaaaacggcgtatgcagtcagataacaacatgcacaacgacactcataacgatactcataacaacaatacagatacaaaggaagcggtgtaa

SEQ ID NO: 274494 - DNA, 1092 bp, Morganella morganii
atgtcggaacaatttcatattgcagttttaccgggcgacggaatcggccctgaaattatggcgcaggcgattaaagtgctggatgcagtgcgcacccgctttaacctgaccatcaccaccagtgaatatgatgtcggcggcattgccatcgacaaccacggccacccgctgccgcctgccacactgaaaggctgcgggcaggccgatgcggtgctgttcggctctgtcggcggcccgaaatgggaaaaactgccgccggactcccaaccggagcgcggcgccctgctcccgctgcgggcacatttcaaattattcagtaacctgcgcccggcacggctctatccggcactggaagcgctctgtccgctgcgcagtgatatcgccgcacgcggattcgatatcctgtgtgtccgcgagctgaccggcgggatctatttcgggcagccaaaaggccgtgaaggcgaaggtaaatatgagcgtgcttatgataccgaggtgtatcaccgctttgaaatcgagcgtattgcccgtatcgcctttacctccgcccaaaaacgccgtggtcaggtaacatcgattgataaggccaacgtgctgcaaagttccgtattatggcgcgaagtggtaacagaaatcgccaaagagtatccggatgtcgcgctgtcgcacatgtatatagacaacgccgccatgcagatggtcaaagatccgtcgcagtttgatgtgatcctctgctccaacctgttcggcgacattatttctgacgaatgcgccatgatcaccggttccatgggcatgctgccgtccgccagcctgaatgagaaaaaatttggtctgtatgaaccggcaggcggttccgcaccggatatcgccggacaaaatattgccaatccggtggctcagattttatccgctgccatgatgctgcgcttcagctgcgggcaggatgcagcggcggacagcatcgaaaatgcggtcaatcaggcactgaatgccggataccgcacccgggatgtggccggaaacagcaagagtgtgaccacagatgagatgggcgacattatcgcgcgtttgattacagaaggggcttaa

SEQ ID NO: 274495 - DNA, 1413 bp, Morganella morganii
atgagcacaggaaaaactttatatcagaaattatatgatgcccatgtggttcgtgaagaagcaaacgaaacgccgatcctgtatatcgaccgccacctggtgcatgaggtgacctcgccgcaggcgtttgacggattacgggcaaaaaaccgcccggtacgccgaccggagaaaaccttcgccaccatggatcacaacgtttccacgcagaccaaagatatcaatgcctgtggtgaaatggcccgtaaccagatgcaggagctgatcaaaaattgtgaggcttttggtgtccgtctctatgatctgaaccatccgtttcagggcattgtgcatgtgatggggccggaacagggcatcaccctgccgggtatgaccattgtctgcggtgactcccacaccgccacccacggtgcattcggctcgctggcttttggtatcggcacctccgaggtggaacatgtgttagccacccagacactgaaacaggcgcgtgccaaaaccctgaaaattgaagtgcgcggcaaagtggctcccggtatcaccgccaaagatattgtgctggcgattatcggccataccggcagcgcgggcggcaccggttacatcgcggaattctgcggggacgccattgaggcactctccatggaaggccggatgaccgtctgtaatatggcgatcgaaatgggtgccaaaggcggaatgattgcgccggatcagaccacctttgattatctgaaaggccgtcagttctccccgcagggagcggactgggatgcagctgtggcttactggcagaccctgaaaagcgatccggatgcaaaatatgacgcggaaattattatcaatgccgccgatatcgccccgcaggtcacctggggcaccaatcccggtcaggtgattgatatcagccgtgccattcccgcaccggagagctttaccgacccggtggaaagagcctcggcagaaaaagcactggcgtatatggatttaacgccgggcaaaaaattaaccgatgtgaaaatcgacaaggtgtttatcggctcctgcaccaactcacggattgaggatttacgtgcagctgctgcggtcgccaaagggcgcaaagtcgcgccgggtgtgcaggcaatagtggttccgggctccgggccggtgaaatctcaggcggaagcggaaggtctggataaaatcttcaccgatgccgggtttgaatggcgtttaccgggctgctcgatgtgtctggcgatgaacaatgaccgtctggcaccgggggagcgctgtgcctccaccagtaaccgcaactttgaaggacgccaggggcgcggcggacgcacacatctggtcagcccggccatggccgctgcggccgctgtcaccggcagtttcgccgatatccgtaccattgagatgcgctga

SEQ ID NO: 274496 - DNA, 603 bp, Morganella morganii
atggaaaaatttattgtacatcagggcattgccgcaccgctggatgccgccaacgtggataccgatgccattatcccgaaacagtttttgcagaaagtgacccgcaccggtttcgggcagcatttattcaatgactggcgttttctcgatgatgacggacaagtgccgaccccggattttgtcctcaacgccccgcgttatcagggtgcgtctattctgctggcccgtgaaaacttcggctgcggctcctcccgtgagcacgcgccgtgggccttaacagattacggcttcagagtggtgattgcgccaagctttgcggatattttttacggcaactcattcaacaaccaattattgccagtgaaattacccgaagacgcgattgatgcgctctttgactgggtacagaaaacagaaggtgcacagattattgttgatctggagaaccagaaagtgatcgccggtgagctggaatatccgttcagtgttgataccttccgccgtcactgcatgatgaacggcctcgacagtattggcctcaccttacagcacaatgacatgatttcccgttatgaggaaaaactgcctgcatttatgaactga

SEQ ID NO: 274497 - DNA, 1665 bp, Morganella morganii
atgagcacaccacgcctccagcaccagtttatccgcctgtggcagcatcatcagggacaggagaccgataccacgcttcaggagatcgctgatatcctgcactgctcgcgccgtcatgtccgctctctgctcagcagtatgcagacggcaggctggctcagctggcaggcggaaaccggacggggtaagcgctcacgtctctgtttcctgcagagcggacgagatttacagcacgcccgtgccgaacagctgatcgagcaggacaatatcgaaaaactggtggcgatggtcaatgataaggacgcgatgcgccaaatggtattatcccagctggagcgcagcttccggcagggaaaaagcctgctgcgtattgtctattaccgccctttttataatctgctgcccggttcgccgctgcgccgctcggaagtccatctgctgagccagatttttaacggactgacggcaataaatgaggaaaacggggaagcggtcccggcgctggcgcatcactggcagcagaccggcgacaaacagtggcgtttctggctgcgtccggcgatatttttccatcacggccgtgaattgcagatggtggatatcatttcctcttttgagcgcctgcgtgacacacacccgctgttcagccatatccgcactgtccgttccgatatgccttacattattgatatcacactgaatgaagccgacagctggttcccggtactgaccggcagcccgcacgccgccattctgccccatgagtggcaggaactgccggatttcgcccgccgccctgtcggcaccggcccctatcaggtgatctgtaataatgaccgtaaactgacaatccgtgcctttgaccattattacggcttccgcgctctgctggacgaagtttctgtgctggtggtgccggagctggaagaaaaaatggtctgcaccaccctgcatatcggcgcggacgggccggagcgggattctctcgacagccggatggaggaaggctgctatttcctgctgcatgacacccgttcggcaaaaggagagcgggaagatatccgccgctggctcaacagcctgatgaccccggtcaatctgctctatcactgcgaacccctgtatcagcgccactggtggcccgcttacgggctgttgctgcgctggcatcacagcaaacttatcccgccctgtgaaaaaccggctgacctgacagaactgacactgacctattatcaggatcatcacgaataccatgctatcggcaaattattgcagcagttactggcagaacagggcgtaaaactgacgattaacatcactgattatgacacctggtttaacggcgattgtgacagtgatttctggctggcgaccgccaacttttataagccgctggatttttcggttttcgccaccctgtacgagctgccgctgctgcgccgctgtctgggcaatgatctgcgtgcaccgctgaagcaatggcggcagcgttctctgtctctggcggcatggtgtgagcagatcattgacaggcagatgctgttcccgctgttccatcactggcttgaattacaggggcagcgcagtatgcggggagtcaaaatgaataccttcggctggtttgattttaaatccgcctggtttatccccccggaaagttaa

SEQ ID NO: 274498 - DNA, 687 bp, Morganella morganii
atgacacaactttttcagccgccgttacccccggccagcgagtctgagctgctcagccgcgcccaatcccttgccggtgccactttcggtgagctggcgggctgtgccggtataccggtgccgccggatctgcgccgtgataaaggctgggtcggcatgctgctggaatactggctgggcgcggacgcgggcagcaaggctgaacaggattttgctcacctcggggtggagctgaaaaccattccggtggatgaatccggcgtgccgctggaaaccacctttgtctgtgtcgccccgctggccggcaacagcggcgttacctgggcggagtgtcatgtgcgtcataagctctcccgcgtgctgtgggtgccggtggaaggtgcacgtcatatcccgctggcagagcgccgtgtcggttcaccgctgctgtggtcgccgtcggaggaggaggaacgcctgctgcgcgcggactgggaagagctgatggatatgattgtgctggggaaagtggagcagatcaccgcccgtcatggtcaggtgatgcagatccgcccgaaagcggccaacagccgggcactcacagaagctatcggtccgcacgggcaaccgatacaaacactgcccagaggcttttatctgaagaaaaatttcaccgcacctctgcttaagcgctatttccggtgctga

SEQ ID NO: 274499 - DNA, 1251 bp, Morganella morganii
atgaaaaaaaccttactgacgctttcacttgcagccgcattactgactcccgccctgcccgcttttgctgatacatcctccgctgatatgacactggaacaggttttggtgatgagccgccacaacctgcgcacgccgattgtgaataccggtattctgaccgaaatcaccgataaaacctggcctgcgtgggatgcgcagagcggttatctgaccaccaaaggcggcgcactggaagtttatatggggcactatttccgcgagtggctggatgagaacaaactgctgccggacaccctgtgcccgaccggtgaaaaagagctgaatgtctacgcaaacagccttcagcgcacgattgccaccgcgcagttctttaccgccggtgctttccccggctgtaccgtcaccgtgaaccaccagccggaaatcggtactatggatccggtgtttaacccgatcattaccaatgacagcgcagagtttaaacagactgccctcgctgcaatggagagtcattataaagggctggatctgacaccgggttaccaggcactgaataaggtgctgaatatcaaagactcagaacagtgcaaaaccaataaactctgttcactggccgacggtaaaaacagctttattattgaagccggcaaagagccgggcgtgaaaggtccgctgaaaatggcaaactctgccgtagatgccatcgatctgcaatattatgaaggtttcccggcagaccaggtcgcctggggcgaagtcaccacaccggagcagtggacagcgctgaataccctgaaaaacggctatcaggaatctctgtttaccccgcgtattatcgcgaaaaacgtggcacatccgctgctgaactacattaatcagcactttgccgctgccgcgccgggcagtgaagcgaaatttaccttcctggccggacatgattccaatatcgcctccctgctctccgccctggaatttaaaccgtatcagttgccggaacagtatgaacatacgccaatcggcggcaaattagtgttccagcgctggacaaataaagcagataataaatcctatgtgaagattgattatatttaccagtcatctgatcagctgcggaataacagttatctgtccttaaaaacaccgccgcaaaaagtcacactggaactgaaaaattgtccggttgataaaaacggctattgcggatgggaaactttccaaaaagtaatgaaagacagtttatccgaataa

SEQ ID NO: 274500 - DNA, 531 bp, Morganella morganii
atgggaaactttccaaaaagtaatgaaagacagtttatccgaataaacattttatgttcatattcctgcccggcgcacctttgccgggctttttatttctatccctgtcacgcttcggataacactaatagattaaggcactgtaagccgtacctgctgagccgcgaaagtgtcgcgcaacggcagccgcacagtgacccggggatggtttccggtgcaccgtctgacggcacaatggtgaataaagagaccggtgcggaacagttcaggccggataacggtcagatgcgcagaccggatgcacaaccggtcgccgggggacagagcggacaaaccgccccgcagggacaacaaagcacaccggtttcctctgatcgtaacgggaaagtgcctccggcacgcccgcaggctgaaaacagccggatgtcatccgtgaaaaaagagataacgtcaacggcagatatcaaagccccggcagtcagtttaccgggagcggaagtcccggtccctgcactgaaaaatccgttctga

SEQ ID NO: 274501 - DNA, 459 bp, Morganella morganii
gtggcatttgacattttccggaatatcctgcattacggctgccattttctggtaccggttctgtttgcccggctgttctggcggcagcactggaaagcggcggcgatgattatgattgccactatggtgatggatgcggatcacctgctggcagatcctgtctttgacccggacaggtgcagtgtcggttttcatccgctgcataccgtatgggcggcgattgtgtatcttattctgctgctgatcccgtcatggaaagtgcgggcggtgacagttggttgcctgtttcatctgtttaccgacgggatggattgttacatgggcagcctgaaacagggcacagaatatgcggcggttcaggcattaaaaaatccgccgggggcgggtttttgtgcggctgagatcatcagaacggatttttcagtgcagggaccgggacttccgctcccggtaaactga

SEQ ID NO: 274502 - DNA, 1200 bp, Morganella morganii
atgattatcaaacctaaaattcgtggttttatctgcactaccgctcacccggcgggctgtgaagcccatgttcgtgagcaaatcgcccgtgtgaaatcctgcggcgaactgaaaaacgggcctaaaaaggttctggtgattggtgcatccaccggttacggtctggcttcccgtatcaatgccgctttcggcagcggtgcagcgactatcggtgtattttttgaaaagccgggcagtgaaaacaaaaccggttctgccggctggtacaacgcagccgcttttgataaagccgccaaagaagaaggcctgtatgcaaaaagcattaacggtgacgccttctctgatgaatgccgtcagaacgttattgatttaattaaacaggatctgggtcagatcgatctggttgtttattctctggcatctccggtccgcaaaatgccggaaaccggtgaaattgtccgttctgccctgaaacctatcggcgaaccgtacaaatctgtcgcgctcgataccaacaaagacgtactgatcgaagccgttgttgaaccggccaatgagcaggaaatcgcagacaccgttaaagtcatgggcggccaggactgggaactgtggatgaatgcattagaggaagccggtgttctggcggataatgcacagtctgttgcctactcctatatcggtaccgatttaacctggccgatttactggcacggtacgttaggtaaagcaaaagaagatttggatcgcgcagcagcagcgattaatcagaaactgcaggccaaaggcggcgcagcgtatgttgccgttctgaaatctgtcgttactcaggcgtcttccgccattccggtaatgccgttatatatctctatcgtgtttaagatcatgaaagagaaaggtattcacgaaggttgtattgaacagactcagcgcttatttgctactaaactgtttaacggttccgcgccggaaaccgatgaaaaacagcgtctgcgcctggatgactgggaattacgcgatgatgtgcagaacacctgccgtgaaatctggcagcagctgacagatgataacatcaacgatttaaccgactatcagggctataaagcggaattcctccgtttattcggctttggtctggacggtgttgattatgatgctgatttaagcggtgaagttaacttcgacgtgaaagaattagtgtaa

SEQ ID NO: 274503 - DNA, 549 bp, Morganella morganii
atggaatattgtgttgctgaactgacggatatggatcaggtaaaagccttattaaagcgttatcatctgaccaccatcagtgatgaagacaagccggacggttttgtcaccacgcagatgagtgatgaacagatggttgatctgattgaaaacgagcagggattatttgtcgccaaacaggacggaaaggtggtggcgtttgtgatggcggcatcctggcagtactggtcaccgtggccgttgtttgcccatatgattgataaactgggtgattatgagtttgccggtcagacgctgaccacagaaaactcgtatcagtacggcccggtctgtattgatgcatcactgcgcgggcagggcgtgctggaagggctgtttgcttttgcgctggaaaaaatgtcgcagcggtttgatatcctggtgacctttatcaacaaggttaacccgcgctcttatgccgcgcacacccgtaagctcgggctgacggtgctggatgagttcggattcaataataaccattattactggctggtctgcgaaacccgctga

SEQ ID NO: 274504 - DNA, 495 bp, Morganella morganii
atgacaacatttgacaaaatcacccgtttactggattcacgggcggtttcctttgaggtgatcgaacatccggcggaaggccgttctgatgcgataagcaaaatccggggaaataaactgagccaggcggcgaaagccatggtgttgcaggtcaccggcagcacaccggacatccgctatgtgctggcgattatccctggcgattgcaaagtcaattttaaaaatgccgcgaaactggcgggcgggaaaaaagcctcatttgccgcgccggaaacggcacaggcgctgaccggctgcccgatgggggcggtcccgccgttcagctttaatgacgaactgacgctgtatgctgataagcgcctgaccggtgccgggcgggtattttttaacgccggtgaactggtgagatcggtgtctctggcagcggatgactatttcagtgtgatcggtcatgatcgcattgcggatattgcggtacctcccgccgcagaataa

SEQ ID NO: 274505 - DNA, 1422 bp, Morganella morganii
atggtacagcttccgcgctaccggcagatggccgatcagataaaacaggctgtccgcgagggcgttttaccgccggacagccgtctgccgtcagtccgtgttctggccgcacagtacaatgtcagcctgaccaccgccctgaaagtgctgcgcacgctggaagatgagcatgttgccgtggcgcggccgaaatccggcttttttgtcgccccggttcagcccgccgctgctgaaagccgcagtacagagacacacaccgccgattttgccccgctggatgaacagacggaactgcatatgtcgatggtcggcgaagagtgccgtgtccggctcgatctggctaacgggcggcgggaactttatccggtcagaaagctgagtcttatcatgcgtcagctcagttacagcaagccgttcctgctgggggattcggtcaaaggcaccggatatgccccgctgaaagaagaaatagcccgccgcgcagtcagttacggttgccatatcacaccggaaaccctgcttatcaccaacggctgtattgaagccttatcactggcactgcgcgccacgctcagccccggggatgcggtggcagtggaatccccctgttactttgtactgttacaaatgctgcgtaatctcaatctgcggctgaccgaagtggatgcctgtgaagacggttatgtggattgcgataaactcaccgccctgttccgccgcaaagcagtgaaagcctttgtgacactcgccaacgtcaataatccgctgggcaaaacgattccggatgaagtcaaagcggagataacccgtcaggcggatgaaaacggcgtgatcattattgaagatgatactttcggtgacgcagcgttcggcgggcagcgcccgttcccgatgcgggcattcagtcacaatgtcattctgtgcagcggattttccaaaaccatcgcgcccggcgtgcgtatcggctgggttcacagtcagcattacatgcgcaaaatcacctccctcaaatacacctcctcgatgggctctcaggtactgccgcaggcagctatcagcgaactgctgagcaacggcggctatgacgcccatctgcgccgcctgcgcagggaactggcggcacaggtgcaaaacatccgccgtgttgtgctgcgggagttcccgccgggcaccacagtgaccgaaccggaaggcggctatgttctgtgggtcaccatgccggaaggcagcctgaatgtgcgggaactgtttctcaatgcccgcgcggaggggatcggcattgcgccgggacatatctttgccaccgacagccgctatgaccgctgcttccggctcaacgccgggttcggctgtgataaggacgtggaggatgcgatcgcccggctggctcagtggtgcagggaatcactgcataccggataa

SEQ ID NO: 274506 - DNA, 873 bp, Morganella morganii
atgagaaacattatcggcacctaccgcgcaccgaaaggccattgggtcggcgacggatttccggtcagccagatgttttcctacagcaatcacggcaaacatctgaacccgtttatcctgctcgaccgtgccggtccggcggatttcccgccatcagagggcgccaaccggggagttggtgagcacccgcaccgcggctttgaaaccgtaactatcgtctatgacggcgaggtggctcaccatgactccaccggtcagggcggtgtgatcggtaaaggggatgtgcagtggatgaccgcagcatccggtattctgcatcaggaataccattctgaccgttttatgcgggaaggcggcacactggatatggtgcagttgtgggtgaatctgcctgcttccgcaaaatccgccgcaccgggttatcagttactgggaaataacgccattccggcagtggcactgccgaatgacgccgggtcattacgggtgatcgccggggaatatgccggggcacgcggtccggcccggaccttcacggaaatggatgtgtgggatctgcgtctgaaagccggaaaagttaccggactggcggcaaaagccagccgcaacgccggactgatcgttctgcacggcagtatttatgttgacagccgtgcaccgctgcacaccggcgagctgatgattctggacggcactgacggcactattctgctggaagccaccgaagatgcggttgttctgttcctcagtggcgagccgattgatgagccggttgtcggttacggcccgtttgtgatgaacagcgagcgggaaatccgcgaagcgattgaggatttcaacagcggccgtttcgggcatatccccgctgagtaa

SEQ ID NO: 274507 - DNA, 978 bp, Morganella morganii
atgcggcggatttttttatgtatactgatccgcaggataacgctgcgggtgacaggcatgaaatacgatctgaatgacctttattattttgtgaaagtggtagaatacggcggattttccccggcgggtgaggcgctgggtattccgaaatcccggctcagccgccgcattgctgacctggagcagaagctgaatatttcactgatctaccgctccacccggcagtttcatgtcactgagatcggccagaccttctaccagcagtgtaaaaatgtgattgatgaggcggagatcgccgaagagattatctgctcggtacaggggcatccgcgcggcagcgtgaagttttcctgtccggtcgcgctgttacaggcttatcttcaggatctgctgacagattttatggtgaaataccccgatattgatgtgcagatcctggcagttaaccgtccggtggatgtgatcagcgaagggtttgatctcgcactgcgggtgcgctccctcccgctggatgattccggcctgaccatgaaagtgctggggtattcgcggcgtatcctggttgcttcgccgctgttatttaccggaaaagcggcaccgcagcatccggatgaactgacagaattcccgatcctcgccaacagcgaacaaaaacagaactacacgctgacactgaccggcgaagacggcagcagtatcaccaaacacctcacggcacgcctcgccaccactgatgtcatgacactgcaccgcgcggcatgcaaagggctgggcattgcccgtctgccggaaggtgtggttctcaatgatttgactgccggacggcttgtccgtgttctgccgggctggcagttcccgcaggatgtgatccacgcagttttcccgtcccgcaaagggctgttacccgccgtgcaggcactgctgaattatctggcggaacatgtgccgcagacggcggcgttttcggggcaggagtaa

SEQ ID NO: 274508 - DNA, 780 bp, Morganella morganii
atggcactaacgggtaaagtggttctggttaccggcgctgcacaggggattggtcgtggtattgcactgcgcttagccaaagaaggggcggatatcgcgctggtggatctgaaagaagaagggctggcgaaagtcaaaaaagaagtggaagccctgggccgcaaagcggcggtattcaccgcagatatcagtcagcgcgataaggtttttgcggttgttgataaagcagaacaagcattgggcggttttgatgttatcgtcaataacgccggtattgcacaggttaaagccattgaagatgtgctgccggaggatatggagcgtattttccgcattaacgtcgatggcacgatgtggggaattcaggccgcagcggccaaattcaaagcacgcggacagaaagggaaaatcattaacgcctcatccattgccggacatgatggttttgccttactcggcgtctattccgccactaaatttgcggtccgcgcactgacacaggcggcggccaaagaatttgccagcagcgggatcaccgtgaatgcttactgtccggggattgtcggcacggatatgtgggtggaaattgatgagcgtttctctgaaatcaccggcgcaccgaaaggggaaacctacaaaaaatatgtcgatggtattgcgctgggccgcgcccagactccggatgacgtggcggcactggttgccttcctggcaagcgatgactcggattacatcaccggccaggcgattctgaccgacggcggtattgtttaccgctaa

SEQ ID NO: 274509 - DNA, 1014 bp, Morganella morganii
atgacatctatacaccccgtaactatccgtgatgttgcaaaacgcgccggtgtctccgttgccacggtatcccgtgtgctgaacaatacggcggccacccgctcagagacccgggaactggtgatgaacgccgtgactgagctggattaccggccaaacgccaatgcacaggcactggccagccagagcagtgatattctcggcgtggtggtgatggatgtggccgacccgtttttcggcgcgctggtcaaagcagtggatactgtcgcccagcagcacagcaagcatgtgctgatcggcaacggctaccatcaggccgggcaggagcgccatgcaatagaggttctgatccgccagcgctgcaacgccctggtggtgcattccaaagcgctcagtgacgcggagctgagtgattttctccgtcaggtgcccggcatgaccgttattaaccgcgttattcccggttttgagcaccgctgtgtcgggctggataacctttccggcggggaaatggcgacccgtctgctgatctctcaggggcatcagcgcatcggttatctcggttccacccatgaaatagaagataataccctgcgttatcagggttatacccgcgccatgaaagccgccggactgaccgccggtgcagcctggtatgccgccggctcgccggattctgacggcggcgaagctgccatgatagagctgctgggccgtaatcaggcactctccgccgtatttgcctacaacgatgccatggcagccggagctatgtcagtgctgaatgaaaacggtatccgtgtgccgcagcagttttccctgatcgggtttgatgatattcccgccgcccgtttcaccacaccgaagctgaccacagtacgctatccggtggtctccatggccatgctggcgacagaactcgccttagcgggtgccgccggaacgttacccccgccggagccgcatgtgtttatgccaaccctggttatccgtcactcttctgcctaccggtga

SEQ ID NO: 274510 - DNA, 996 bp, Morganella morganii
atgaagaagcattttgtcctggcaggcgttgccgccgccatgctgtttggtgctgcggcacaagcacaggctgatacccgtattggtgtgaccatctacaaatacgatgacaactttatgtctatcgtccgtaaagcccttgaaaaagatgcaaaaaattcaccggaaatcacccttctgatgaatgattcacaaaacgaccagtccaaacagaatgatcagattgatgtgctgctggccaaaggcgttaaagcactggcgatcaacctggttgaccctgccgccgccccggtgatcatcgacaaagcaaaatccaatgatattccggtcgtattcttcaacaaagagccttcccgcaaagccctcgacagctacgataaggcctggtttgtcggtactgactctaaagaatccggggttatccagggtgaactgattgccaaacactgggcggctaacccggcgtgggatctgaacaaagacggcaaaattcagtatgtgctgatcaaaggcgagccgggtcacccggatgcggaagcccgcaccacctattcggtcaaaaccctgaatgagaaaggcatcccgacagagcagcttcagctcgataccgcgatgtgggataccgcacaggccaaagataaaatggatgcatggctctccggcccgaatgcagacaaaatcgaagtggtcattgccaacaatgacgcgatggcaatgggtgcggttgaagccctgaaagcacacaacaagaccaatatcccggtctttggtgtggatgcgctgccggaagctctctcaatggtgaaatccggggcaatggccggtacggtgctgaatgacgcggaaaaccaggcgaaagccaccatggctatcaccaaaaacctggcggaaggcaaaccggcagccgaaggaaccagctacaaaattgagaacaatgttatccgtgtgccgtatgtcggcgtggataaagagaacctgtcacagtttataaaataa

SEQ ID NO: 274511 - DNA, 1509 bp, Morganella morganii
atggccgacagctcaggcgaatatctgctggaaatgacgcatatcaataagtcatttcccggcgttaaggcactcgataatgtcaatttacgggtacgaccacactccgttcatgccctgatgggcgaaaacggtgccggtaaatccacattattaaaatgccttttcggaatttataaaaaagacagcggcagcatcctgtttcagggacaggaaatcgattttaaaggctcaaaagaggcgctggaacacggcgtatccatggtgcatcaggagctgaacctggtgcttcagcgctcagtgatggacaacatgtggctgggacgctatcccgccaaagggttttttgtcgatcagaacaagatgctgaaagacacacaggccatctttgatgagctggatatcgatatcgatccgcgggaaaaagtccgcaatttatctgtttcacaaatgcagatgatcgaaatcgccaaggcgttttcctataacgccaaaattgtgatcatggatgagccgacctcctccctgaccgaaaaagaagtcaatcatctgtttaccattatccgcaagctgaaagatcgcggctgcggcatcgtctatatctcccacaaaatggaagaaattttccgtctctgtgatgagataaccattctgcgtgacggccagtggatctccacacagcccctcgaagggctgacgatggataacattattgccgccatggtcgggcgcacactcagccagcgtttcccggaaaaacagagcacaccgggggatgtcatgctggaagtcagaaacctgacgtctctgcgccagccgtctatccgcgatatcagtttcgatctgcatcagggggaaatcctcggtatcgccggtctggtcggtgcaaaacggacggatattctcgaaaccctgttcgggatccgcgagaaatcctccggcaccatcacactgagagggaaaaccattaagaacaacagtgcgaatgaagccattaatcacggtttcgcactggtcaccgaagagcgccgcgccacgggaatctatgcctggctgaatatcagctttaactcgctgatttcaaacatgggcaaatataaaaataaactgggtctgctggataacagcaaaatgaaaagtgatacccagtgggtaattgatgccatgcgggtgaaaacccccggccatcacacccagataggctcgctgtccggcgggaatcagcagaaggtgattatcggccgctggctgctgacacaaccggaagtgttaatgctggatgaaccgacacggggtattgatgtcggggcaaaatttgaaatttatcagctaattactgaactggccaaaaaaggaaaagggatcattatcgtttcctccgaaatgccggaactgctggggatcacagaccggattctggtgatgagcaacggtgaggtcgccggtatcgtcaacacccgtgacacttcgcagagtgagattttacgtctcgcctcccttcacctttaa

SEQ ID NO: 274512 - DNA, 1014 bp, Morganella morganii
atgagcgcagcattaaataaaaaaagcttcctgtcctatctgaaagacggggggatttatgtggttctgctggtcttactggcgatcattattattcaggatccgacattcctcagcctgatgaacctgagtaatatcctcacccaatcctcggtgcggattattatcgcgctgggtgtcgcagggctgattgtcacccagggtacggatttatccgccggccgtcaggtcgggctggcggcggtaattgcagcaacattgctgcaatctatggaaaacgtgaacaaagttttcccgcagatggaaacctggtctatcccgatggtgatcctgctggtgtgcgcggtcggagcagttatcggtctggttaacggcctgattattgcctatctcaacgtcacgccgtttattaccacactcggtaccatgatcatcgtctacggaatcaactccctgtattacgactctgtcggtgcctcaccggtggcggggtttgatccgaaattctctgaatttgcccagggatttatccgtttcggtgattttaagctgtcatatattacgttctatgccgcaatagccgttttctttgtctggatcctgtggaataaaacccgcttcggcaaaaacatttttgccatcggcggtaacccggaagcggctaaagtgtccggtgtgaatgtcggcctgaacctgattatgatttacgccttatccggcgtgttctatgccttcggcggcctgctggaagccggacgtatcggcagtgcgaccaacaacctcggctttatgtatgagctggatgccatcgcggcctgtgtggtgggcggcgtgtccttctccggcggggtcggcaccgtgctgggcgtggtgaccggggtgctgatttttactctgataaactacggcctgacctatatcggcatcaacccgtactggcagtacattatcaagggcagcatcattatttttgccgtcgcgctggattcactgaaatacgcgaagaaaaaataa

SEQ ID NO: 274513 - DNA, 924 bp, Morganella morganii
atgattaacagcacattaggcaatcagaccgataactcactggtctctaatgcgtttggttttctccgcctgccgctgaatttccagccgtacaccagtgacgctgactgggtgatcaccggtgttccgtttgatatggcgacctccggccgtgccggttcccgtcacggaccggcagccatccgccagatttcaaccaatctggcctgggaaggtaaccgctggccgtggacattcgatatgcgcgagcgcctgaatgtggtggattgcggtgatctggtgttcgcgttcggtgatgcacaggatatgagtgataagttacaggcgcacacagaaaaagtgctggcgtccggtaaaaaatgtctctctttcgggggcgatcactttgtgactctgccgctgctgcgcgcgcatgccaaacatttcggtaagatggcgctggtgcatttcgatgctcataccgacacttacggcaacggcagcaaatttgaccacggcaccatgttctatcacgccccgaatgagggactgattgacccggcgcattccgtgcagattggtatccgtaccgagcatgaaacagataacggtttcaccgtgattgatgccgcgcaggtcaatgaccgcaccgtggatgatgtgattgctcaggtgaaagcgattgtcggtgatatgccggtttatctgaccttcgatatcgactgtctggacccggcatttgccccggggaccggcacaccggttatcggcgggctgacaacagatcgtgcgctgaaactgctgcgcggccttcagccgctcaatatcgtcggcatggatctggtggaagtggcaccggcgtatgatcagtccgatattacggcactggccggcgcaaccatcgcactggaaatgctctatctccaggccgcgaagaaaggctga

SEQ ID NO: 274514 - DNA, 1905 bp, Morganella morganii
atgaatgataatatcgcgctgaagatgcagcagacctataacatcgcatactggggcggcagctattacggtgtgaatgacctcggtcatgtcaccgtctgcccgaatccggagatgccgcaggccgccgttgatctggctgagctggtcaaccgtgtgcagaaagagcgggaacacatccgtctgcctgcattattctgctttccgcagattttgcagcatcgtctgcgttcgattaatgccgcgttccgccgtgcccgcgaatcctatggttacaaaggtgattattttctggtttacccgattaaggtcaaccagcagcggcgcgtgattgaaaccctggtcaatgccggggagccgctgggactggaagccggttccaaagcagagttgatggcggtactggcgcacgccggtatgacccgcagtgtaatcgtctgcaacggctataaagaccgcgagtatatccgtcttgccctgatgggcgagaaactcggtcacaaagtgtatcttgtgattgaaaaaatgtctgaaatcgcggtggtgctcgaagaagcaaaaaatctggatgtggtaccgcgcctgggagtgcgggcgcgtctggcgtctcagggctccggtaaatggcaggccagcggcggcgagaaatccaagtttggtctggcagccacccaggtactgcagctgattgatatgctgcgtcaggcagacagcctggagagcctgcagctgctgcacttccacctcggttcgcagatggcgaatatccgcgatatcgcgaccggtgtccgtgaatccgcccgtttctatgtcgaactgcatcagttgggtgtcaatattcagtgttttgatgtcggcggcggcctcggggtggattatgaaggcacccgttcgcaatctgactgctccgtgaactacggactgaatgagtatgccaataatgtgatctgggctatcggcgacgcctgtgaagagcacggtctgccgcacccgacagtcattaccgaatccggccgcgccctgacggcgcatcataccgtgctggtttccaatgtgatcggtgtggagcgtaacgagttctccccggtggaagcgcctgctgaagacgcaccgcgtccggttgccagcctgtgggaaacctgggaagagatgcagaccaaaggcaatgcccgctctctgcgcgaatggctgcacgacagccagctcgacctgcatgatatccacacccagtacgcgcagggcatgctatccctgaccgaacgcgcctgggcggaagggctgtatctgaatatctgccgccgtatccagcaggatctggatccgggtaaccgcgcacaccgcccgattatcgatgaactgcaggaacgtatggcggataaattctatgtgaatttctcgttgttccagtcactgccggatgcgtgggggatcgatcagctgttcccggtactgccgattgaagggctggataagccgctggatcgccgcgcggtactgctggatatcacctgtgactctgacggtattatcgaccactatgtggacggcgacggggtggcgaccaccatgccgatgccgtcttatgatccggaaaatccgccgatgatgggctttttcatgattggtgcctatcaggagattctcggcaatatgcataacctgttcggtgataccgcagcactggatgtgtatgtcggcgaaaacggtcaggtgcgctatctggaaagtgaagagggcgattccgtggcggatatgcttcagtatgtgaagctggatccgaaaattctgctcgaacgcttccgtgatcaggtgaaaatctctgatctggatgaagaggagcaaaaggcctttaccgaagagttcgagagcggcctgtacggttacacctatttagaagatgaataa

SEQ ID NO: 274515 - DNA, 1155 bp, Morganella morganii
atgactacacatcttttcacttctgagtccgtatctgaaggacacccggataaaattgccgaccaaatttcggatgcagtccttgatgcgattttagaacaagatcccaaagcgcgtgttgcctgcgaaacctatgtcaaaaccggtatggttctggtcggcggtgaaatcaccaccagggcatgggttgatattgaggaaatcacgcgccgtactgtccgtgagattggctataccagctcatccatgggctttgatgctgattcctgtgcggtaatcagtgctatcggcaaacaatctgccgacatcaaccagggcgttgaccgcgctgacccgcttgagcagggtgccggtgaccagggtctgatgtttggttatgcctcaaacgaaactgacgtgctgatgccggcaccaatcacctatgctcaccgtctggtcgaacgtcaggctcaggtgcgtaaaagcggtacgctgccgtggctgcgtccggatgcgaaaagccagatcaccttccgttacgatgacaacaaaatcgccgggattgatgcggttgtgctgtcaacccagcactctgaagacatctcacagaaagatctgcatgaagcggtgatggaagagatcatcaaaccggttctgccggttgagtggctggatccgaccaccaaatatttcatcaacccgaccggccgttttgttatcggcggaccaatgggtgactgcggtctgaccggccgtaaaatcatcgtcgatacctacggcggcatggcacgtcacggcggcggcgcattctccggtaaggatccgtcaaaagttgaccgttccgcagcctatgcggcccgttatgtggcaaaaaatattgtcgctgccggtcttgctgaccgctgtgaaatccaggtctcctacgcgattggcgtggcagagccgacgtccattatggtggaaaccttcggtaccggtaaagtctccaaccagcaactgacgctgctggtgcgcgagttcttcgacctgcgtccgtacggtctgattcagatgctggatctgctgcacccgatttatcaggaaaccgcagcatacggtcacttcgggcgtcctcagttcccgtgggaaaaaaccgacaaagcagagcagctgcgcgaagccgctggtctgaaataa

SEQ ID NO: 274516 - DNA, 426 bp, Morganella morganii
atgcctgttatcactgcattaatcagcgggattttgttcggccttggtttgctggtggccgggatgggtaatccgcagaaaattctggcgtttctggatattaccggcaactgggatccttcactgctgatcaccatggcggtagcgatggcggtcagtatggttgcctttacggtggctaaaaaacgtaaaaagaccgtatgcggcacgtcgcttgagttaccggtgaacagtaaaattgataaacggctgctgaccggcgcactgctgtttggtatcggctgggggctggcggggatctgtcccggaccggctattgtgttatccgggatgctcagtatcaaagggctggtatttactgcgtcaatgattgccgggatggtgatttttgcactgtattcatcacggcagtgcagtaaatcataa

SEQ ID NO: 274517 - DNA, 411 bp, Morganella morganii
atggttattgatagcgcggcctttacgccggtcagtgcggcactgggcggactgatgatcggcatcgcggttgctgtgctgctgctgtttaacgggcggattgccgggatcagcgggattttcgccaatatgttcacaaagcagagcggctggcggatagcgtttattgccgggctggcaggggcaccgtggatttacaggttgtttgccggtcagccggatgtggtgatcgctgcggattatccgctgctgatcgcggccggtctgctggccggtttcggcacgcggctgggtaacggctgtaccagcggacacggtatctgcggtatggcgcggttatcaaaacgatcatttgctgccgtggcggtgtttatggtcagtgcttttctgactgtctggctgatgaaataa

SEQ ID NO: 274518 - DNA, 318 bp, Morganella morganii
atgacaccaacacagcttaccgatatgcaggaagccgccaccggcgttgctgccctgctgaaaacactggggaatccggatcgtctgctgctgctctgtcagctgagtcagggggagtgcaatgtcagtgaactggaggagcggactggtatcaatcagccaacgctgtcacagcaactgacggttttgcgcaatgaaggactggtgaatacccggcgtgagggaaaacgcatctattattccgtggcagatgaaaaagtcctgatattgctcaccacgttatatcagctttattgtcctgaaaaacaaggaaaataa

SEQ ID NO: 274519 - DNA, 510 bp, Morganella morganii
atgcagaccctgcgtgattatctggcccgcgcctgccgggtgctgaagacggattatccggagcctgaactgaactatcgtcagcgcggcaccactgccggcagcgcctgcctgcaaacatgggaaatccgcctcaatccggtgttactgacagaaaacggccccggatttatacaggatgtggttcctcacgagctggcgcatctgctggtttaccgccgtttcggacgcgtggcgccgcacgggcgggaatggcagtggatgatgacagaggtgctgggtgttccggccgtccgcacacaccgctttgatgtgacgtctgtccgctcccggacattcacctaccgctgccaatgcaaaacggcacatgaactgactgtccgccgccataacaaagtattgcgcggggaaagtcagtacctgtgccgtcactgtaaaagtacgctggtgtgggataacagtgcggctgcaatatcatccccctgcgaccttacaccagatcagtcataa

SEQ ID NO: 274520 - DNA, 1062 bp, Morganella morganii
atgaagttaaccaactacgaaaaagcggacgcgctggtcatttccgcgccatccgttaatccgccacaccataccgatcgtccgcagcgtaatgatgaagacgcagtcagtgcttacatgagtcaggcgtatatccgcgtgaccgtgtcagacacgattgctgccgtcaaactcaccctgcgtgaggaactggaaggtgagcagatccccacttatttatatgtactggatgaggataattacctgaatggtatcctgccggtcaaagccctgctgaccgcagcggaagatatgtttgtcgccgatgtgatgcgccagacgtatttctcggtgtcaccggagcagtcccggcacgaggtgtacgagcttatcaacaacagcgggattgatactgtgccggtggtgcagttcggcaagctggcaggtatcctgcgtccgcaggatatcgcggagctgattgaggatgaaaacacccaggatgcggcattacagggcggctcccagccgctggatgagccttatctgagcaccagcccgttcacgctgtggcgcaagcgcgcagtctggctgctgatgctgtttgtggcggaagcctataccggtacggtactcaaggcatttgaggagcaactggaagcggctatctcgctggctttctttatcccgttgctgatcggcaccggcggtaacagcggtactcagatcacctcaaccctcgtccgtgccatggcactcggggaagtgagtctgcgcaatatcggtgcggtgctgcgcaaagagctgtccacgtcactgctggtcgcctttaccatgggatgtgcggggatgatccgcgcatggttcctgggggtcgggccggaagtgatgatggtggtcagtctgacactggtgtgtatcacagtctggagtgcggtggtgtcttccattatcccgatggtgctcaagcgtctgaaagtggatccggcagtggtttccgcgccgtttattgccacactgattgacggtaccgggctgattatctacttcgagatggccaaactgattatgactgatctggtgtaa

SEQ ID NO: 274521 - DNA, 390 bp, Morganella morganii
atgaataagacagagtttgtaacccgcgccctgactgacgttctcggtgaacatatcggtgatgaatccctggttgaacagtatttttcccgtgattatgttcaggtggtgaatggtcagacaattgagtttcccgcatttcttgctcatcttaatgccctgaaaatggcaacccgcagtattaccatagagattaaatccatcgcagaaggcggatcctgtgtgcacactcagcatatcgctaaggcagaaaaagtcagtggtgagcatgccgcctttgaggttttcgcctgtttccgtctggcagacggtaaaattgtccgctgtgaggaagtgacacggcagctgaccggtgatgagagcgataatgatctgggttcccggacctga

SEQ ID NO: 274522 - DNA, 1008 bp, Morganella morganii
atgacaatgccgacgtctttatgtccgaaccgcatgcaggtccattctgtcaggcaggaaaccccggatgtgtggactatcaatctgattaaccacgatttttatcagtatcacgcagggcagtacgcgctggtgagtatccgcaacagtgatgagacactgcgtgcttataccttatcctccacaccgggactgagcccgttcctgagcctgacggtgcgccgtctggatgacggacagggttccggctggctgaccggcgaggtgaaaccgggtgattacctgtggctgtctgatgcacagggcgagtttacctgtgatgcccgtccggcggagcgctatctgatgctggccgccggttgcggtgtgacaccggtgatgtcgatgacccgctggatcctgcaccgtcagccggaaagtcaggtgacggtgattttcaacgtgcgtgataaacaacaggtgatttttgctcaggaatggcagcagttgctgactgcattcccggcccgtctgcgcctgatcctgatggtggaaaacagtgatgagacggatgaattgttatccggccgcctgtcagaggaaaaactgaaggtgctgatcccggatatcgcgcagcataccgtgatgacctgtggtccggcgccatatatgaagaatgtgcagacattctgtcaggcactgaatgtggatccgggtaacttctttatggagcgtttcgggccggagccggaagcagaagccggagagcagatggtcaccatgaccattcagtccccgctgcgtcaggtgaaagtgcctgtcggtatgaccctgctggcggcgatggaagctaacagtgtgccggtgatggcggcatgccgcgccggtgtctgcggcagctgtaaaacccgcgtccgcagcggtgaatacaccaccaccagcaccatgacgctgaccccggaagagattgaacagggttatgttctggcgtgcagctgtcagattcagggcaatgttgaattagcctga

SEQ ID NO: 274523 - DNA, 1653 bp, Morganella morganii
atgtactgtgtgcaatgtgaacaaacgatgcgtacaccggtgggtaatggctgtgcctatgcccagggcatgtgcggtaaaactgcagaaacatctgacttacaggatctgctggtggcagtactggaaagtctttcagcgtgggcggttgctgcgcgtgaatcaggtatcatcgatcacgacacagacagctttgcgccgcgtgcatttttctccacattaaccaacgttaacttcgattctgagcgcatcatcggttatgcgcaggaagcgattgtgatgcgtgacagcctgatgaaacgctgcctggcgaagaatccggcactggttctgaatcacccgttagcaaacctgcaactgaagggcacggatattgcgtcactggtgaaacaggcggaagaatttgccctgaataaagataagcaggctatcggtgatgatattcatggtctgcgtatgctctgcctgtacggcctgaaaggggcggcggcatatatggagcacgcccatgtgctgggcaaatacagtgatgagatttacggtcagtaccatgaaatcatggcgtggctcggtactgatccgtctgatatgggtgagctgctcaatcagtccatggcgattggtatgatgaattttaaaatcatggaaatgctggatgccggtgaaaccgaagcttacggtcacccgacgccatcttccgtgaacgtccgtccggtggcaggtaaagcgattctgatctccggtcatgacctcaaagatctgcatatgctgctgcaacagacagaaggcaccggtgtgaatgtttacacccacggtgaaatgctgcctgcacacggctatccggaactgaaaaaatacaagcatctggtcggtaactacggcagcggctggcagaaccagcagactgagtttgccaaattcccgggcccgattctgatgacctccaactgtattctggatccgaatccgggcagttataccgaccgtatctggacccgcagcatcgtcggctggccgggcgcgaaacacctgaacggtgatgatttcagcgatattatcgcgcaggctcaggcgatggacggcttcccgtacagcgaaatcgagcacctgatcaccgtcggtttcggccgtgaaacgctgctcaatgccgccgatacagtgattgacctggtggcgaccggcaaactgcgtcatgtgttcctcgtcggcggatgcgacggcagccgcggtgagcgcagctactacaccgattttgcccgtcaggtgcctcaggactgcctgattatgactctggcctgcggtaaataccgtttcaacaaactggatttcggtaccctggaaggattaccgcgcctgcttgatgtcggtcagtgcaacgatgcgtactccgcgattatgctggcggtgaaactggctgagaaactgggctgcggcgtcaatgatctgccgctgacactggtgctctcctggtttgaacagaaagcgattgtgattctgctgactctgctggcgctgggtgtgaaggatatcttcaccggcccgaccgctccggcattcctgactgacaatctgctgaatgtactgaatgaaaaatttggtatgcgtccgattaccactgttgaaaatgatttacacgctgtgttaggcgcgtaa

SEQ ID NO: 274524 - DNA, 2142 bp, Morganella morganii
atgactgattcctgtaacgcatcctgccgacctgcccgcctcacgccgctggcactggcgctcgctgttatcagcggcggcagtatcgccgccaccgcagataccgaagacccggttgtggttgtcggcaactggctggataacactgataacagcgatacgctgctgaaccacggcggcgcacggaccatcaaaaccaaaaaacaaatcgatgagtcaggggcagaaaccatagcggacgccctgcgtggtattccgggtgttcaggtgcgggacagtaacggtaccggcggcagtgacgtttcactcaatgtcggtatccgcgggcttccggcacggttgtccccgcgctctaccattctgctcgacggtattccgctggccgctgccccctacgggcagccgcagttatcgatgtcaccactctcattaggctcaatcagcagcattgatgtgatgcgtggtgccacctctgtccgctacgggccgcaaaacgtcggcggcgtgattaactttgtcactaaacctattccggaaaccttcggcggttccgcgtccgtcaaaacacagggtgcacgcaccggcggactgaaaaccctgaccgatgcctctgtcggcggctcaaaagaagacgggtcagcgggtgcgctgctgctctattccggcctgcacggccagggctaccgcaaaaacaatgacaataccgatattgatgacattatcctgaaaacccgctacgctttcagtgacactgatgagctgctggcaaacttccactattatcatgcgcaatccgggatgccgggcggcctgtcggaagcacagtacaaagccgatccttaccagtcagtccgtccgtttgaccgctttgaaggcaaccgtcaggatatgtcctttaaataccgccatcaggaagatgataaacaatttgaattactgacctggttcagcaaaagctaccggggcagttatattgaaagcgagggaacaaatgcgagtgccggtaagagccgcctcgtttcctatccgcgtcactacaccgcttacgccattgagccaagctattcacagctgttccgttttgataaccagtcccacgaaatcaccctgggttaccgctatctgaatgaaacggccgatgaaaaagcctaccgttccggctggtatccgacaggttcacaaagctcacgccctcagaccgacagctattatcagcacacctccggcggcacagaagctcatgccatctatatcgatgacaccatcaatttcggtaactggacggttattcccggcctgcgttatgaaaatataaaaattcatctggatgacggtttccgcaaccagtaccgcagcaagagttacagcgagccgttaccggcactgtcggtgatttatcatattgatgatcagtggaaactgttcgccaacgccggcagctcattcggcagcctgcaatatttccagctcaataccggcggtgcgggtaatgatccggcaaacggtctgagtgcggaaaaagcccataactatgaagccggtacacggtttgatgatggtctgctttctgcggaaatgaccctgttctatatcgatttcaatgatcagctgcaatatattgaaaactcgaccggctggaccaaccttggtgcaaccactcatcagggtgtggaactggcactgaactatgatctgagtgaaaccgcgaaatggctcgacggcgccagtatctacagcacttatacctacacaaaagcagtcagcaaacgcggtaactttgcggataaagatctgccattctactcccgtcagctctttactgccggtgcccgctatgaaaccggaaactgggtgtggaatctcaacacctatgcgcagtcaaaacagcagtcaccgggaaccgggaaaaattacattaccgaaggcagtgcagacggacgttacggcattattccgggctatatgatgtgggatgcgcgtgcggagtatcatttcggcccgcaatggtcagatctgacacttgccgccggggtgaaaaacctgtttgatcaggccagctttacccgttcaacagataataactacggcatttacgccgggcagccgcgcaccttctttgcgcaggcttccgtgaagttttaa

SEQ ID NO: 274525 - DNA, 1158 bp, Morganella morganii
atgaaacgtatattccacgccgccggacgttttccggcccttatcatcaccctttgtgccgcactcgcggcactgttgccgttcagttcagcggcagcaccggttacagtgacggatatcgccgggcggacagtcaccgtcaatgccccggtatcccgtatcatgctggcagacagccgggtactggttgcgctgaatattctgcatccgtctgaaccgctgaaaggtattgcggcatgggatgatgcactgaccaaaaaagcaccggatctgcgcattgcttatgaaaaacaatttccgcagctgaaagatattccggtatttcctaatccctacacatcggatttcagtgtcgaaaaagcgctgacttatcagccggatttggtgatttttgataccggactgcaaagtaaactgaccgaaagcggcaccctggatttgctggagaaaagcggtattccggtgatatttatcgatttccgtcagtatccgctgcaaaacaccatgccaagcatgacgcttttggggcaggtcttcgggcaggaaaaacaggcagcggcatttaatgatttttaccgccagcgtctggatcttatccgctcccgggttgcaaatattccggaagacaaaaagcccacagtctttattgaacgagcggcgggtcttgccggggaaaacagctgttgtaaaacctttggtaacggtaacttcggggagtttgttgccgctgcgggaggtcataacctcggtgcagactggtttaaaaacggtatgggcggtgaggtgagtgaagaacagattattgccgctgacccgcagttttatctgatgaccgtcgccgactgggaaaatacccgcaaaggcagtgcttcagtaccgctcggctataccggctctgaggagcgggctgtaccggcactggaaaaactgatggcacggccgaaactgcagtatctcacggcgtatcagcagaaacaggtactggcactgtatcagcaatactatgacaccccgttcaatattattgcggtggaagctatcgccaaaatgctgcatccggcactgtttcccgggctcgatccgcaggcggacagcctgatgctgcataaaacctttaccgctctggacggcagcggcctgttctggctgcaaccctga

SEQ ID NO: 274526 - DNA, 1380 bp, Morganella morganii
atggatttgataacagagtggctgggcgcgctgaacggcgtggtatggggtgtgccgatgctggtgggaatactgggtgtcggcttatatatgcagattcggctgggttttttgccgattcgtaaactgggaaccgggttcagattattatttcagcgcaatgaatcacgcggggaagggcagatctccccgtttaacgcgctgatgacggcattatccgccactatcggcaccggcaatattgccggtgtggcaacagcagtggtgatgggcgggccgggggcgctgttctggatgtggatgacggcactggtgggtatggcgacaaaatactcagaagccgtgctggcggtccgttatcgtgaagtggataaatacgggcagtatgtcggtggcccgatgtattacatcaaaaacggccttggcccgaaatgggtctggctgggaacactgtttgcggtattcggtgcctgtgccgggttcggtatcgggaacacggttcaggccaactcggtggctgatgtgctggagagtaacttcggcatcaacaaatgggtgaccagcgtggcgctggtgctgctggtcggtgcggtactgattggcgggatccgccgtatctcagacgtggccggtaaactggtaccgtttatgaccgtcggctactttggtgccggtcttgtggtgctcgcgctgaatatcagtgaaattccggcggcgttctccctcattattacgtctgcctttacaccggtggcggcacagggcgggtttgccggggcaacagtctgggcggctatccgtttcggggtggcgcgcggcgtattctccaacgaggcgggtctgggcagtgcgccgatagcgcatgctgccgcgaaaacccagaacccgatccgtcagggactgatcgccatgctcggtacctttattgacaccattattgtctgctcggtgaccgggctgaccattgtcattatgggcggctggctgacagcggaaaccggtgccacactgaccgcttcctctttcaaagcggcgattccgggcggaaactatattgtggcgattgcactgacaatttttgccttcaccacaatcctcggctggagtttttacggtgagaagtgtgttcagtatctgttcggcgtgaaggcgattaaggttttccgtgtgctgtggctgatagcactaccgattggtgccacacagtcgctggagtttgtctggctgctggcggataccctgaatgccatgatggcgatccctaacctgatcgcactgatcttattaagcccggtggtgtatcgtctgacgcgtgaccacatccgggatgttaatgcggacagtattgatatggcgaatgagttatatcagaagaaataa

SEQ ID NO: 274527 - DNA, 1401 bp, Morganella morganii
atgtcagatgctttaccgcatacgacagccacgcttaaacgccgttatcgtgtgctcaaacgccttaaagaacgcaacctcgcccctgttaccgtcctgctgctggcggctgccgtcggcgcactcgccggttttaccggtgtgctgtttgaacgcggggtcaattgggttggtgaataccgggtcagctctctgtcttcactgacagataataaagaaatacttatccctctgatgtttattgtttccgccctgctggccatgtcaggctactggctggtgcggcgtttttcgccggaatccggtggatcggggatcccggaaattgaaggggcattacaggatgtccgcccggtacgctggtggcgggtgctgccggtgaaatttatcggcgggctgggtactctcggctccggtatggtgctgggacgtgaaggcccgaccgtgcagttaggggcaaatatcagcgggctggtcagtgcgctggccggggtgaaaaaccaggaatcgcgccacacattgctggccaccggtgccgccgccggtctgaccgccgcctttaacgcgccgctcgcagggatcctgtttatcatcgaggaaatgcgtccgcagttccgttacagcctgatttccatcaaagccgtttttatcggcgtgatcatgtcgagcattgtttttcagacctttaacagcggcgcgccgattctggatatcggcaaataccatgccgccccgctgaatactctctggctctatctggtgctgggaatggttttcggtgtgattggtgtgatgtttaaccgctttctgctcaccatgcagacacaattccaccgtttttatcaggataaaacatcccgttttgttgctaccggcggtctgattggcggactatgcggtattgccgggctgtactggccgcaggtaaccggcggcggattcgcggtgatcccggatgtcgccgcactgcactactccctgaccggtattctgatgatcttcctgttccgtgtgctcaccacggttatctgcttcagttccggtgcgccgggcgggatcttcgcaccgacactcgcactcggcacactattcggcagtttcttcggctatgccgccatgctgctgtttccgcagtatcagattgaaccggcgaccttcgccattgcggggatgggagctctctttgccgccaccgtccgtgcgccgctgaccggtattgtgctggtgctggagatgacagataactatcagctgatcctgccgatgattatcacatgtctgggggcaacactgctggcgcagtatctgggcgggcgtccgctgtattcggtactgctggagcggatcctgatgcagaacggcacaccgccggaaaaaaccagtgacgcgccgcgagggtaa

SEQ ID NO: 274528 - DNA, 864 bp, Morganella morganii
atggaaaacttagtctgttataaaaccctgccggtctggcaaaaaaccactatcccgatggcgtttatggatcgccataatacggcggaaggtacgtgggcgcagctgacggttctggcgggggagatggattttgttgttttcggtgaaaacggcgaagagacccgctaccactttgataccgcgcatcagccaccgcgtcttgacccgcaggtatggcacaaaattgaatccgtcagtgatgatatttcctgtcagcttgccttctggtgtcagcctgaagatgaattctataaaatccacggactgacccgtccgcactccgaagtccgtgaactggtaacaatgacaaaaccgggtaaaacactcgatttaggatccgggcgcgggcgtaacagctttttcctggcgcagcgcggttatgatgtgacggccgtggatatcaatccgcagcatattcaggcgattgaggatgtgaaagccgctgcggggatcagcaatatccgtacgcaggtgtatgacatcaaccagcatgcgttgcaggatgattacgacatcattatctccactgtagtgctgatgttcctgaaaagagagaatattgccgcgatcatcgccgatatgcaggcgcatacccgcccggacgggtataacctgattgtctgcccggtggaaactgagaatatgccgtatgatgaactgccgtttgactgcttcctgaaaccgggcgagttatccggctattatgcggactgggacattctgaaatacaacgaaaatccgggacatctgcaccgcactgatgcggcaggtaaccggatccgattgaatttcgccaccctgattgcccgcaaaaaagcctga

SEQ ID NO: 274529 - DNA, 1080 bp, Morganella morganii
atgacatttaagcgaattatacttgccggtgcggtcgcgtcggccacattactggctgcccagattgcttccgcctgcacccggctggtgtatctcggggatgatgctcaggtgatcaccgcccggtcaatggactggaaaagtgatgtcggtaccaatttatggatcttcccgcaggggatggaacgcgatggtgccgccgggccgaactccgtgaaatgggtgtccaaatatggcagcgtggtagcttccggctatgatgtttccaccaccgacggcattaatgaaaagggattgtccgcaaacctgctgtggctggtcgaatctgtgtatccgacaccggaaagcaacaaaccgaccctgagtatttcggcctgggcacagtatgtgctggataactacgcgaccgttgaagaagcggttaccgcgctggaaaaagagccgtttgcggtgatcaccgataaagtcccgggtgaagagcgcctggcgacactgcacctttcattgtccgatgcctccggtgacagcgccattattgaatatattgatggtaagcaggtgattcatcacagccgtaaatatcaggtaatgaccaactctccggtgttcagcgagcagctggcactggacagctactggcagcaaatcaacggcaccgtgatgctgccgggcaccaaccgctccgctgatcgttttgcccgcgggtctttctatattaatgcgattccgaaagcgaccacgccgaataaagcggtggcgtctgtgttcagcgtgatccgcaatgtgtctgtgccgttcgggctgaataccgaagaagagccgaatatctcctccacccgctggcgtacggtggtggatcacaaacgtcagatttatttctttgaatcggcgctgacacctaatatcttctgggttgacctgaagaaagtggatttcagcaaagaaaacggcaaagtgaagaaactggatttgggtcctgaacagcaaaacatttattccggtgatgtggcaaaggatttcaccgatgctaaaccgtttgtctttcaggggataaacgaagttatcgcccgtcagaaataa

SEQ ID NO: 274530 - DNA, 1494 bp, Morganella morganii
atgaaactggtctgggcgaccatcgcgctgtcgatggccacctttatgcaggtgctggactccactattgccaacgtggcgatcccgactatttccggtgatctcggtgcctctgtctctcagggcacctgggttattacctcgttcggggtatccaacgcgatttccatcgcgattaccgggtttctggccaagcgcttcggggaagtgcgggtatttatctggtccaccgggctgtttaccctgacgtcactgctgtgcgggttatcagaaagcctggaaatgctgattttcttccgcgtgttacagggcggggtagccggtccgataattccgctctcacaaagcctgctgctgaaaagttatccgcccgccaaacagaataccgcgctggcactctggtcgatgaccatcattctggcgccggtgttcgggccgattatgggcggctatatcagtgataacttccactggggctggattttctttatcaacgtgcctatcggcattgcggtggtgctggtcagtctgattctgctgcgcggtatggaatcgaaggtgacaaaggttccgctcaatgtgattgggttgtcgctgctggtggtcgggatcggctgtctgcaaatcctgctggataaagggaaagatctcggctggctggagtcagatgaaattgtcgcactggccattattgccgccgttgcactggtcttcctggtgatctgggaactgacggacaaaaacccgattgtcgagctgtcgctgtttaagtcgcgcaactttaccatcggcacactgtcggtcagtctggcgtatatggtctatttcggcgcgattgtactgttgccgcagctgctccaggaggtgtacggctatacggctgaatgggcggggctggcgctggcgcctatcgggctggtgccgatactgatctccgcgtttgtcggtaaaatttccaatgtggtggatttgcgctggattgtaacctttagtttcgtggtgtattccgtctgcttctactggcgcgcttatacttttgagccgcagatggggttctatgcctcggtctggccgcagctggtgcagggttttgcagtggcctgtttctttatgccgctcaccaccatcacgctttccggtctgccgccggagaaactggcctcggcctccgcgctggctaacttcttccggacactggcgggatctatcggtacatcgatcaccaccacgctgtggagccgtcgcgaatcgttacatcattctcagctgacagaatccatcaccgcgtataatccggaatctgtacagatgtatcaggagatggcgcagcacgggttatcagaagcgcagacctccgcctatctggcgaaggaaattaccgcccaggggctgattatcagtgccaatgagattttctggctctccggcggcatctttatcggattgattgttcttatctggtttgcccggccgccgtttgccacaaaatcctga

SEQ ID NO: 274531 - DNA, 1191 bp, Morganella morganii
atggacaacacatcagcgcagtcttctgctgcccagccttctgacaaaaaaacatcgtcatccaatcctgccagacgaaaaatctggcttgcgggaacgtcactcctctttattgtgctgctcgccggttatcttatttactggttcatggtgctgcgttatcaggaatataccgatgacgcctacgtggtgggccttcaggtaccgatcgtcgcacaaaccaccggtaatgtgacacaggtgaattttgagaataccgatctggtgcatgccggggatgtgctggtggtgctggataaaaccaatgctgaactggcttacgcgcaggcccgtcatgatctcgcggctacggtgcggcagactcaggagctctattttaaccgcgaccagctcggtgcggttatcgctcagaaacaagtgatgctgaatcaggctcagaatgactatgcccgccgcagtgtgttaggacagcgcggaactatctccaaagaagatttacagcattcacgggaagcggttgaagaggcacaggcatctctgaatgcgtctgtgcagcaactgaatgccaccaaagcattactgaaaaataccgcgctggcggatcagcctgcggtgttgcaggcggcggataaagtccgtgatgcctggattaacttacagcgcacggaaatccgcagtccgtttaccgggtatgtctcccgccgcaatgtgcaggtaggggctcaggtcagcccgaatgcctcgctgatggcaattgtgccggtcgagccggtctggattgacgccaactttaaggaaacgcagctcagcagtgtgcgcatcgggcagccggtcaccattaccagtgatttttacggcgacaaagtgacctttaacggcacggtagccgggctggatatgggtaccggcagtgccttctctctgctgcctgcgcagaacgccaccgggaactggatcaaagtggtgcagcgtctgccggtccgggtagagctggatccgcagcaggttgccagatatccgctgcgtatcggtctgtcgatgaacgtgactatcgaaaccaaaaataccgatggcccggtactggccaatgtccagcgtgataccccggcctttaagagtgatgtgctgatcccggatctggcaccggtcaatgcggtgattgcacaaatcattaccgataacgccagttaa

SEQ ID NO: 274532 - DNA, 771 bp, Morganella morganii
gtgaataaaaaactcagcttattattggttcttattgttgccgtggtctttgccggtgccggttattatatgggtaagcgggataatgttttttctgtcaccgccgtcagtaaagacggagcggcaacacaaaaatcacttgaagcggagatgatgtctgaatcgatgcagtttgttgaagtggtcggcaaaatttccccggaaaaatataagggcctgaagagtaatatcaggaactatgacaccatgacccgcgatcagaaagtggcatggatgaatgatatcgccgggatgacggcagtgttattaattgaccggatcccgtatgcctctgatgatgccctgaatgccttcgccggggcagtaaaagagcaggcggaaggttatctggtaaaagatccgtccggacagcagtgctttaataacttttttccggcgctgaataaattcccgcagaataaagcgcagtttacctataatgaagctgatatccggatgctgaaaacggtgaatctgatcctgacatcatcactggaagaccggaataccggtaatgtcccggcacaggaagcttataaggtattaggggatgtttatcagaaactgtcagaaaaatacggtgataaagtgatgttgctgagtgacctgaataaaggcgcggaagacccggtcaccacctgtctgattgtcggcgatttttatgacttattcacgaaagaaccgaataaagcggctaccgctgaggcactgcgtctgattttgtcccagtaa

SEQ ID NO: 274533 - DNA, 579 bp, Morganella morganii
atgatgctgaagaaagcactggttggtttaagcgcaggtatgatgctgctgggttccggtgcggcaatggccgacacctataagatagacaaagaagggcagcacgcctttgtgcagttccgtattcagcacctgggttacagctggctgtacgggacatttaaggattttgacggtacatttacctttgataaggccgacccggcaaaggatagcgtggatgtgaccatcaaaaccggcagcctggataccaaccatgctgagcgtgacaaacatctgcgcggcggggattttctgaatacagagaaaaatccggaagcaaaatttgtttcaaccaaagtagaaaagaaaggcgatgactttattatcaccggtgatctgacgctgaacggcgtgaccaatccggttactctggatgcaaaactgaccggtgaaggcaaagatccgtggggtggttaccgcgccggttttgaggcaacggggaaagtttcactgaaaagctttaatatcaaagccgatctgggtccgaagtctcaggatgctgaactgattatttccgttgaaggcgtaaaaatctga

SEQ ID NO: 274534 - DNA, 552 bp, Morganella morganii
atgcaatggaaaaatagtgcgcaacggtacggacacctctccgttctgcttcactggggcgtggcaatcaccgtttacgggatgtttgcactggggctgtggatggtttcgctgggttactatgatgtctggtatcaccgcgcaccggagatccataagagtatcgggatcctgctgtttattgtgctggctgtccgcatgatctggcgctggttttccccgccgccgccggcattatccacttacagccggtttacccgcatcagtgctgcgctggcacactggctgctgtacggtattttgtttgccattctgatcaccggctattttatctcaacggcaaatggtcaggcgatatcggttttcggctggtttgatgtaccggccacagtgacagacggcgcagagcaggcggataccgccggtacggttcacctgtaccttgcctggtcggttgttgtgttatcggtgctgcacgcgctggcggcactgaaacatcatttctttgataaagacgccacattaaaacgcatgctgggcatgaaaccctga

SEQ ID NO: 274535 - DNA, 849 bp, Morganella morganii
atgtcacgcgaattcttccgaaaagttgcggataagcaacatataaaacttacttacatcactcatttctattgcaatcagcaagatatttctgaagttatcaatctgcttcgtgaatatgaaagcatgccggcatccgtgctggactatgttcagtttgtcattgttgatgattgctctccgcttgagtatgaaattcctgaatttgatttaaatctgacatggctgcggataacaaccgatattccgtggaaccagggcggttcccgtaatctgggtgtgacctatgcggcgtcagacaaaattctgatgaccgacctggatcatatcctgccggtttcgacgttcacttatctgattaatgcggcaaacccgggccggacattctataaactctaccgccggggtgagcaggggaatctccgtaaagggcactccaatctgttctttatgtcccgcgcccgctttttccgtttttacggttatgatgaagagttttgcggccattacggcgcggaagattaccgttttgtgaaactgcagaaatatcacggctcccgccagcgttatctgccgaaatcggtgtatgccatagagcggattgtggatcgtgataagtcttatcatacgctggacagaagtctggaatacaacacaccggttgataaacgcaagcatgaggaagtctgcacgtatggtgcggaatccggtcattcccggttgttcctggattttgaatggaaaattctgcggtcggtctgccgtacatcaccggtagtcagggagaaaaatccgggctggaaaatccgctggtggttgcgctggttatttgcgccgctggcaaaataa

SEQ ID NO: 274536 - DNA, 219 bp, Morganella morganii
atggagacggaatctatatattcctgtgtcggaacacgtattaaagaaaagcgaaaatacttaggattaagtgtcgtgcggttagcggaagatatgggaataacgcagcagcaatttaaccgttatgaacgtggaataagccggattagtatacattatctgatgtatctggcagaaatgttccatgttccggtggattactttttcgatcgggaatag

SEQ ID NO: 274537 - DNA, 1266 bp, Morganella morganii
atgacgcaacacccccctgccggatataccccgctaacctgtggcacccttcccgcttacctgtccgcacatttaccggatgatattctacccggcggtacgccggaatcctggcagacagaggaagtcggtgacggtaatctcaatctggtatttattgtcagaggcagtcaacggatcctggtggtcaagcaatcactgccgtatgtccgtgcggccggtgaatcctggaaactctctttgcagcgtaattatttcgaataccatgcgttatcacaggaaaagcgcttcgcacctgacagtgtgccggatgtctatttctatgacgaaaccatggcgctgtttgccatggaatacctcgctgatcatgtcattctgcgtaaagcgctgatcgcaggagaatatgtccctcagctggcggaaaaaatcggccggtttatggcgcagacactgttccatacctcggatatcggcatggcggcacaggagaaaaaagctttgaccgcacagttctccgccaaccatgaattgtgcaaaattaccgaagatctgatttttaccgagccttacttcccggcgccgcgcaataatcacacctctccgcagctcgatcgcgatgcaaaagccgtgatgctggacagggaaatggtgcaggtcgcgatgcgctataaatacaaatttatgacacagtcacaggcgctgctgcacggggatttgcactccggctccgtgatgatcggcactgactctgttcaggtcattgatcctgagttcagttttatggggccgatggcgtttgataccggcaactacgccggtaacttatatatggcctggttttcccagcccggacaccgggagacagaggaagagaccgcacgctatcagcaatggctgctgtcgcagataagccagacctggaatacatttgagactgcattccgccgtctgtggacagaaaaatcacagggcgatgcctggccgcgtgagctgtatcaggacggcatgtttgatgacaaattcctgaaagccgcacaggacagtttctttgcagagctgtttcaggacactctggtcaatgcggggctggagatcaaccgccgcctgctcgggtttgccggtgttgctgatttcaaaaccattgctgatgcagacaaacgcgcggcacttgagcgcaaagcactgaaactggcgcgggaactgattgtcaacgcgcgccattatcacagctttgccgatgtcgaagcctttctttcttattgttaa

SEQ ID NO: 274538 - DNA, 1110 bp, Morganella morganii
atgaaaattaacggaaaacattaccgttccgtctggcccgcagataatggtattcatgtctgtatttttgatcagacaaaactgccttttgaagtcagtatcatcacactgacgacgatggaggaagccgcaacctccatcaaagatatgtgggtacgcggtgcaccgctgattggtgccgtggccgcttacggcgtggcgctggcgatgcaccgcgacagcaatgacgctgccctgaaaaaagcgtatgacgtgctggttgccacccgcccgactgccatcaacctgaaatgggcgctggacagaatctgcggtgccctgacaccacttcccgcagctgagcgccgtgacgccgcttaccgtattgccgcagaaatcgctgatgaagatgcggaaatctgtcaccgcatcggcgaacatggcctgacgattatccgcgacatcgccgcccgcaagaaaccgggcgagccggtgaatatcctgacccattgtaatgcaggctggctggctaccgttgactggggcactgcgctgtcaccgatttaccaggcttatgatgaaggcattaatattcacgtctgggtggatgaaacccgtccgcgcaaccagggcggactgactgcctttgagctgggctcgcacggtgtgccgcataccctgattgccgataacgccggggggcacctgatgcagcacggtgaagtggatatgtgtattgtcggcactgaccgcaccaccgcacgcggggatgtctgcaataaaatcggtacttacctgaaagcactggcggccaaagcgaacaatgtgccgttctatgtggcgctgccgtcaccgaccctcgattttactgtgtgggatggcgtaaaagagattccgattgaacagcgtgccggtgaagaacagtcacatgttttcggcatcacaccggaaggcacccgcagttgggttaacacggctccggccggaacacgctgcggcaactatgcctttgatgtcaccccggcggagtacgtcaccgggcttatcaccgagcgcggtatttgtgatgcctccccggccgggctgaaagccatgttcccggagatgtggccgtctgagtatgaggtgtga

SEQ ID NO: 274539 - DNA, 648 bp, Morganella morganii
atgacccgtactgaactggcacaacagattatcgatacctgtctgaagatgaacgcaagcgggctcaaccaggggacctccggcaacgtcagcgcccgctggcaggacggaatgctgatcaccccgagcggtgtgccctatgaaaaactgaccccggacagcattgtgtatatggacagtaccggacaggccgaggcggataagatcccgtcgagtgaatggcactttcacctgagctgctatcaggcacgccctgagctgaatgcagtagtacataatcacgccctgaatacggcggcggtatccattctcaatgaatccattccggcgatccactatatggtcgccgtcaccggaaccgaccatgtcccctgtgtaccgtatgccactttcggtacgcatgaactggccggtatcgttgcggaaggaattaaaaccagtaaggccctgattatgcagcatcacggtatgctggcaatggaaataaacctggaaaaagcgctgtggctggcgcatgaggttgaagtgctctccgcgctgtatctgaaagtccgcgccatcacgccggatgtgccggtactgagcacagaagagatgcagcgggttctgggaaaattcaaaacttacggactgaaaaccagaaaatag

SEQ ID NO: 274540 - DNA, 357 bp, Morganella morganii
atgaaaaaagtcatttgttacgctgcgtttgcttctgccgctcttctcctgtccggatgtgccgccacaaaaaaatccccgcaattcagcgaaaaaagcattgaagagtgcggccgctatctgccggacggcattgcttactatgtaacgattgaaggcgaagtggatttaaacaagcagtttaacggtgatattaatgtgaccgcattacaggacagcgcacccgctgttgcatttaaccacgagctgattcaggccggtgcggataaatatatggactgtgctattcagttgctgaataacggtaagggagatacccgcacaccggaagaaaaagcggcggcagaaaaacagtaa

SEQ ID NO: 274541 - DNA, 987 bp, Morganella morganii
atgacaaacagtgacaaccgcctgaccggacgcctgatgttcggtaatgacccggttctgcaggccgcatggctctattatcagtccggtctcagtcagacggaagtggctgatgtgatggggatttcccgcgtgacagtggtgaaatacctgcagatggcccgggaaaacggtgtggtgcatatcagcctggatatggcgcgttacagccgcatcgatatggcgttgtcactgaaaaaaaagttcaatctgaccaatgtgctggtggtgccggacagcccggttgcggaggcggcggcagattccgcccgccgccgggaaaacatggcacaggcggccggggtgtatctcagtcaggtgattgaagacggggatgtgctcggcgtggcctggggacggacaattcaccatatggcgaagtgtctgacaccgaaaatcatccgcaatatgacggtattacagatgctcggctccgtgccgtcgcagccggatttcaccaccgtggaatcgtcttcgctgatcgccggaaagttcggcggtgagtgtgcgtatctgcatgtgcctgcgatcgtcagctcggcggaactggctgatgcactgcgccgtgagcctatcattcaggcaaactttgctcagctggatcgctgcaccaaagcgctgttcgtggccggaaatgtcacggaagagaacccgctgatccgtgccggcgtgattacggcggaggaaatgacagactttcaccgcaaaggcgctgtcggggttatctgcgggcgcttttatgatcaggcgggtgagccgctggatacgcatacggatgcccgcattctgggtatccgtctgccgcagctgcgcaacattgcgcggcggatttttatcgcaaccggtgaacaaaatatcgccgccaccctcggggcactgcgtggcggatatgtttctgatttaattgttgattcgctgattgcggcacatttgttgtcagataaataa

SEQ ID NO: 274542 - DNA, 1341 bp, Morganella morganii
atgtcgcaaaataccaacacagtgccgaaagtcggtttcgtttctttaggctgcccgaaaaacctggtggattccgagcggattctgactgaactgcgcacggacggctatcaggttgtgccgagctatgatgatgccgatgtggtgatcgtcaatacctgcggtttcattgacagtgctgtgcaggagtccctggaagctatcggcgaggcactggcggaaaacggtaaagtgatcgtgaccgggtgtctgggtgcgaaagaagaccagatccgtgaagtgcacccgaaggtgctggaaatcaccggtccgcacagctatgagcaggtgctggcgaatgtccgcaaatatgtgccgaaaccggcgcatgatccgttcaccagcctggtgccggagcagggcgtgaaactgacaccgcgccattacgcgtatctgaaaatttctgaaggttgtaatcaccgctgcacattctgcattattccgtccatgcgcggcgatctggacagccgtcctgtcggtgaggtgctgagtgaagcgcagcgcctggttgaagccggtgtgaaagagctgctggtgatctcccaggatacctctgcctatggcgcggatatcaaacaccgcaccggtttccgcgatggtttgccggtgaaaaccagcatgatcggtctgtgtgagcagttatctcagctcggtgtgtgggtacgtctgcattacgtgtatccgtatccgcatgtggatgatgtgatcccgctgatggcggaaggcaaaatcctgccgtatctggatattccgttacagcatgccagcccgcgtattctgaaactgatgaaacgcccgggtgccgttgagcgcacactggagcgcatcaaacgctggcgcgaaatctgtccggaactgacactgcgttccacctttattgtcggcttcccgggtgaaaccgaagaagactttcagatgctgctggacttcctgacagaagcccgtctggatcgcgtcggctgctttaaatacagtccggtggaaggggcgcatgccaacgaattaccggatcaggtgccggaagagatcaaagaagagcgctatcaccgctttatgcagttacagcagcagatctccgcagagcgtctggctgaaaaaatcggccgcacactgccggtgatcattgatgaagttgatgacgaagagggcgctgtcggccgcagtatggcggatgcgccggaaatcgacggtatggtatatctcaacggtgaatttgatgtgcagccgggggatattgtgatggtgaatattgaacatgccgatgagtatgatctctggggcagcgtggtgcgcgaagcatga

SEQ ID NO: 274543 - DNA, 1074 bp, Morganella morganii
atgcaaaaatcaaaacgtaaaacgtggattttttatctcatcctgatcattgtccttgccggcggcggctatctgtaccacatgctgcaaagccccgggctgcctgagggctttgctcagagcaacggacggatcgaggcaacggaaattgatatctcaaccaaaaccgccggacgtatcagtaccatcaatgtcagagagggggattttgtccgcgccggggatgtgctggcgcagatggatacccggacactggaggcacagctgagtgaagctcaggcacagtaccgccaggcggacagtaatgtgatttcctcgcgctcggcactggctcagcggaaaagtgagaaagccgccgcagaggcgatggtacgtcagcgcaccgcagaactgactgccgcgcagaagcgtctgacgcgttcacaggctctggtgagaaccaacgcggtatctgttcagcaggtggatgatgaccttgctgttgtccagggtgcccgtgctgccgtggaagcggcgaaagctcaggtggcagcggcttctgcggcgattgatgccgcacagtccggtattatccaggcacagaccaaagtggatgccgctctagcgacacagcaccggattgaagcggatctggatgacagtcagctgaaagccccgcgcaacggccgtgttcagtatcgcgttgccgaaccgggtgaagtgctcggtgccggtggccgcgtggtgaatatggtcgatctcagcgatgtttatatgactttcttcctgccgaccgaacaggccggacaggcgggcatcggcagtgatgtgcatattattcttgatgccgccccggacctggtgatcccggcgaaaacctcgtatgtcgccagtgtcgcgcagtttaccccgaaaacggtggaaacggataatgagcgccagaaactgatgttccgcgttcgtgcgcgtatcgcccccgaactgctggaaaaacatctggaatatgtgaaaaccggtctgccgggacgcgcttatatccggcttgacccgaagcaggactggccggctgacctggaggtgaaattacctcaatga

SEQ ID NO: 274544 - DNA, 2760 bp, Morganella morganii
atgacatcatcaaaacagcattccgacaccgcaatcgtcaccctggaacaggttacgcatcattacggtgatgtgtgcgcccttgatgatatcacgctgaacatccccgcccggcagatggtggggctgatcgggccggacggtgtcgggaaatccaccctgatttccctgattgccggtgcccgtaaagtgcagcagggtaatgtgattgtgctgagcggtgatatccgcgaagaagagcaccgtcgcgcggtgtgtccgcgtattgcttatatgccgcagggactggggaaaaacctgtatcacaccctgtcggtgtttgaaaacgtggattttttcgggcggctgttcggccagtctgaggaagaacgccgtctgcggattgacgacctcctcgccagcaccgggctcgccccgttccgcgaccgcccggcgggaaaactctccggcgggatgaagcagaaactcggattatgctgtgccctgatccatgacccggaactattgatcctcgacgaaccaaccaccggcgttgaccccctctcccgcgcccagttctgggagcttatcgaccgcatccgcgaacgccagcaaaatatgagcgtgctggtggcgacagcctatatggaagaggcggaacgatttgatcacctggtcgcaatggacgacggcaaagtcctggcgacaggacacgcccgtgaactgaaagcgcagacacagactaatgagctggaagccgcctttatcgctctgctgccggaagaaaaacgcaaagatcacaaagcggtggtgatcccgccgcgcaaggcgcaggacaatgaagagattgctatcgaggcacaggatctgaccatgcgcttcggcagtttcaccgccgttgaccacgtcagtttccgcatcccgaaaggagagatctttggtttcctcggctccaacggctgcggtaaatccaccaccatgaaaatgctcaccgggctgttgcaggccacggaaggcaaggcgtggctgtttggtcaggaggtcgatccgaaagatttgaatacgcggatgcgggtcggttatatgtcgcaggcgttctccctctacagtgagctgacggttttacagaacctggtgctgcacgccaaattattccatgtgccggaaaacgaaattgatgaccgcgttgatgaaatgatgacgcgctttaaactgacggatgttgccgatgccatgccggaggggttaccgctcgggatacgccagcgtttatcgctggccgtggcggttattcaccgtccggaaatgctgatcctcgatgagccgacatccggcgttgacccgattgcccgcgatatgttctgggatctgatggtggatttatcacgcaaagacggcgtgacgatttttatatccacccactttatgaatgaggccgcccgctgcgaccgcatgtcgctgatgcacgccgggaaagtactggtgacggataccccggagaatctggtcgccaacagccaatttgacaccctcgaagccgtctttattgattatctgaaaaaagcctcggggattgaggatgatgccccgccgccggaagcaccggagctgactgccgacagcggcgaagctgccgccaccgcgctgaagcgccgtttcagtctgcgccgtctgttcagttacagtctgcgtgaaggactggagctgcgccgtgacccggtgcggctgacactggcgcttctcggcaccgtgattctgatgtttattatgggctacggtatcagtatggatgtggaaaatctgcgttttgccgtgctcgaccgcgaccagaccaccaccagccagaactatgtgcaggatctctccggttcgcgctactttatcgaacagccgccgctgcaaaattatgacgatatggagcgccggatgcgtgccggagaaatcgcggtggcgattgaaattccgccggattttgcccgtgatatcgccaaaggccatgatgtgaaactgggtgtctgggtggacggtgcgatgccgaaccgggcagaaacagtgcgcggttatgttcaggctatgcatctcaactggctgacccgcatggcgtcaaaacagccggtggcaaacccgctgcactctgccatcgatatcgaaacccgttaccgttataacccggatgtgaaaagtctgcctgctatcgttccggcggtgatcccgctgctgctgatgatgataccggcaatgctcagcgccctgagtgtggtgcgggagaaagaactggggtcgattatcaatctttatgtcacgccggtaaccaaaacggagtttttaatcggcaaacaggtaccttatatcgtgctggggatgtttaactttttcctgctctgcgccctctccgtctgggtattcggagtgccgttcaagggcagtctgctgacggtgacactcgccgcattctgctatatcaccattgccaccagcatggggctgctgatttcctgctttatgaaaagccagattgccgcaattttcggaaccgcgattatcactctgatcccggccacccaattttccggcatgattgacccggtttcatcactggaaggtatgggttactggataggacacatctacccgaccgctcatttcctgaccatcacccggggaactttctccaaagggctggggcttatcgatctgtatcaggcctttattccgctgctgatcactattccggttgttctcgggtgcagcatctttttcctgaaaaagcaggagggataa

SEQ ID NO: 274545 - DNA, 1125 bp, Morganella morganii
atgcggacactgaagaatattatctatctcggcatgaaagagctgcgcagcctgatgcgggataaagcaatgctggcactgatcgtgtttgcattcacggtatcaatctattcctcggcgacggtgacatccggttcgctgcatctggcaccgattgccattgcggaccaggatcgctcccagctcagtgagcgtattatcaacagcttttacgagccctatttcctggccccggcggatattgatatcagtcagatggacggcctgatggacagcggcacctacactttcaccatggatattccgccaaattttcagcgtgatgtgctggccggacgccgccccgccattcagctgaacgttgatgccacccgcatgagtcaggcgtttctcggcaacagttatattcagaatattgtcaccggggaggtgaatacttttctggctaaaaaccggcaaaacacggtgctgccggtggatctggatatccgcgcccgttttaacccgaacctgaatcagatgtggttcgggtcggtgatggcaattatcaacaatatcacgatgctgtcgattgtcctgaccggggcggcactgatccgcgagcgggagcacggcacaattgagcatctgctggtgatgccggtgacgccgtttgagatcatgatgtccaaagtctggtcaatgggactggtggtactgctcgcctcgctcggctcgctgctgctgattgtccgctttctgctgcaggtgccgatagagggttcaattacgctgtttatgtgcggggtggcgctgagtctgtttgccaccacctccatcggaatttttatggggacgctcgcccgttcgatgccgcagttcgggctgctgatgattatggtgctgctgccgctgaatatgttatcaggcgggatgacctcgcgggaaagtatgccgcagtttgtgcaggatattatgcagaccatgccgacgacacactttgtcagcctggcacaggctattctctaccggggcgcggatttcctgatagtctggccgcagtttatttatctgatcattatcggcggggcattttttggtgcggctttgctgcgcttccgcaaaaccatcagtgcgatggcatag

SEQ ID NO: 274546 - DNA, 1002 bp, Morganella morganii
ttggcggaaccccggacacagaaagtcacactggaaaatgtggccgctattgcgaatgtcagtaagatcaccgcatcccgcgcattttcgcagccggataaggttcacccggaaactctcaggcgtattctcgatgccgcagataaaatcggttatgtggtgaatgcggcggcacgcagcctgcgcgcgaaatcctcccgtaccatcggtattgtcagtcctgacatgagcaacccgtttttcggcgggctggccaagcgcatcaccctggaagcctataacgccgggtatgacacgctgatgtttgactcttatgaatcacgtgaaaatgaagcgcgtatcattgataagctgattggttacaacgtggatgccatcattctgtccgttgtctccgccgaacgggtttaccgcccggcgtatatgaaacagctggaactgctcaatattccggtgatcctggttgaccgcgagttggatgccaaggcatgcagcggcgtttacatcgataacctcgactgcggattgcaggcagggcgctatctgctgtcacaaaaagcggataacgtggtgattgtatccggcccggaagattccaatgtggcccaggatcgcgtaaccggcatggtggccggtctgcacggccaggtcagcagcgtcaatgtgctgcatgcggacttcctgatggatgaagcctttaaagtcaccgaccattacctgaaataccatcccgcgccggattattttgtcggctgcaataaccagatctcactcgggattatcaaagcctgtatccgccacaatctgatcccgcaaaaagatgtctcgctgttcagcatcgatgaagtctctcatgccgatatttacggattcaatttcccgtgcatttctcatgatttacaggaaattgcctggcaggccattaacatggcagtacggcgggcgacggatcgcagcgccccggcgagcaaggtggttgtgcgcggtctcctcaaatcttaa

SEQ ID NO: 274547 - DNA, 546 bp, Morganella morganii
atgaataaacagccgtatatcgcggaatcactggcggttctggaacaggcacatatcattctgacagaagcggaacagcagcatattgaaattgctcactttaatctgccggattatccccgctcgggcctgcaactgctcacgtactgcaacagcccgctgtactgcgccaaagagctggttctctttgctgaccagacctgtccggagcaccgtcatccgccgtacaaagaccggccgggtaagcaggaaactttccgctgccgctggggcgaggtgtatctgtttgtggatgatccggcgctgacactgaatcaggatgctcagggcaatccggtttgccgtccgccgcagggggatgaggaatggtacacctgtgaccgctttattctgctgcgcccgggagagcagtacaccatcatgccggacacccgtcactggtttaaagccgggccgcagggcgcggtggtgtcggagttctccacagaaaataccgatgaatacgacatttttaccgatccgcggataaaaagactcgagtgttaa

SEQ ID NO: 274548 - DNA, 1038 bp, Morganella morganii
atgaaggcattagtattagagaaagcagggaaaatcgccattcaggattggcagagtaatgaagtacttggcgacgacgatgttgagattaaaatccacaccgtcggtatctgcggcagcgatgttcactattatcagcatggccgtatcgggccgttcgtggttgaggcaccgatggtgctgggtcacgaagcgtccggtgtgatcaccgcagccggtaaaaatgtgaagcacctgaaagtcggcgatcgcgtgtgcatggaaccgggcattccggatctgcagtccccgcaatcccgtgccggtatctataaccttgatcctgctgttcgtttctgggcgaccccgccaatcgacggctgcctgcgtgaaagcgtgatccaccctgccgccttcacctttaaacttcctgataacgtttcctttgcccagggcgcaatggttgagccgctggcaatcggtatgcagtccgcgaccaaagccgggatcaaaccgggcgatatcggtctggttatcggtgccgggacaatcggtatcattaccgcgctgtgcgcactggccggcggctgttccgatgtcatcatctgtgatgtgtttgatgaaaaactgaaggtggctgagaaatatcagggtctgcacgcagtaaacagcaaagaccagcaggcactggcggataaagtccgtgagctgaccggcggcgaaggcgtgaacgtcctgtttgagtgcagcggcgcgaaaccggttattgcctccatctctgatcatatcgccccgggcggcaccgcagtcctcgtcggcatgccaatcgacccggcaccgctggatatcgtggcggcacaggcgaaagaagtgaccttcaaaactattttccgctacgccaatatgtatccgcgcaccatccgtctgctgagctccggcaaactgaatgtggcaccgctgctgtccgcaacctacaagttcaaagacagtgtcgaagcctatgagcgtgcagccgaaggccgtgcgactgatgtgaaaattgtgctggaaatggagtaa

SEQ ID NO: 274549 - DNA, 1512 bp, Morganella morganii
atgacgctctatgccggtattgactgcggaacacaaagcaccaaggtcattattgccgataaccggaccgcgcgtattctgggtgagggctcagcccctcacccgatgatcagcgaatcagacggaagccgtgaacaggaagctgtctggtggactgatgcgctgcaaaccgcgtttgctcaggcgattaaaaacgccggaattgacgggcgggatatccgcgccctcgctgtttccggccagcagcacggttttgtgccggtcagtcatgacggtacggtacttgcgcctgccaaactgtggtgtgatacctcgaccagtgcggagaatcagtggtttattgatgcactgggcggtgaacaggccgcacttgaccgtctgggtgtgttaccgcagaccggctataccgtgtcaaaaattatccgctttaaacagcagcacccggaactgtggaaacagctgcgttatgtgctgctgccgcacgattacctgaatttctggctcaccgggcaggcctgtgccgagtacggcgatgcctccgggaccgggctgctcaatatccgcagccgtgagtgggatcaggccgctgctgatcttatcgatccggaaggtcgtttatggcaggcgctgccgccgctggtgcgcgcagagcaaatcatcggcacggttcgtccggaaatcgcagataagctcggcatttctccggacacccgtgtggcatccggcggcggcgataacatgatggccgccatcggcaccggaaatatccgtccgggcatcaccaccatgagcctgggtacctccggtacgctgtttacctttgcggaacaaccggttgtggcggattccgcgatgatcgccgggttctgctcctccagcaatggctggctgccactaatttgcaccatgaatgtcacctccgccaccaccacggttcagtcattattaggtatggatattcaggcatttaatgatgctctgaacagcagtcagcccggtgcgggcggtcttattatgctgccgttctttaatggtgagcgcgtacctcagttacccgaagcccgcgccagccttcacaatatggacggcagcaacctgactccgcagaacctgagcctggccgtggtggaaagtgccacttacgggctgcgcttcggtattgatctgttccgtcagcagggaattaccaccagtgagatccgtctgaccggcggcggtgcccgcagcgtgaaatggcggcagattgttgcggatatcatggcggcaccagtggtgtgcgtcaccaaccaggaagcggcagcactgggtgcggcggttcaggctatctggtgtgacaccctcagcgcagacagcgcaccggaagcacagctggccgctctctgcgaccgctttgtgcaactggatgacagcagccgtacacagccggatccggcgaacgtggcggtttatgagtccctgtatcagaactaccttgctttactgacatcagaatacccggaggtcaccgtatga

SEQ ID NO: 274550 - DNA, 1500 bp, Morganella morganii
atgacagccactgtcgctgacaatgaggaattactgcgggttgaaggggtacgcaaagcctttggtcaggttgttgcactgaagaacgcgcagttttcactgaagagaggttccattcacgccctgtgcggcgggaatggtgccggtaaatccacgttcctgagcatcctgatgggttttatccgtccggatgccggtgaaatctatgtcaaaggcaaacgctgtgagtttcatcagccgatcgaagccctgcacgccggtatcgccattgttcagcaggagctgagttccattcctgacctgaccgtggcggaaaatatctggctggggcgtgagccgcgccgtttcgggtttgtcgattttaaacagctcaaccggcagactactgaattgctgaccgacctgcattttgatatatccccgtcagaaaaaatgcgcaacctgagtgtggcggaacagcaactggtcgaaatcgccaaagccctctctcacgcggatgcggatatcatcattatggatgaaccgacctccgccatcggcgaggaagatgcgcagaagattttcgatgtcatcacccgcctgacggaaaaaggtaaaggcattatttatgtctcacaccgcctgtccgagatttttcagatagccgataccttcaccattttccgtgacggtacctttatcaccgacggcccgctggcggatatcacccgcgagaagctgattgagctgattatcggccgtgaaatcaaagatgagttcgccaaatttaacgagccgacagatgaaaccattatggaagtccgggaactgtcccgtgatgaccaggtgcaggacatcagcctgacgctgaaaaaaggcgaaatcctgggaatttacgggctggtcggttccggccgttctgagttcctcgacctgattttcggcatcgaacacgccgataaaggcaccataaaaattggtgaccgcttcctcgacaaacacacaccgaaagattccattaatgccgggatcgcctatgtcactgaagaccgcaaagataccgggctgatgctgggccgctccatcaatgaaaatatcaatatcgcctcatttggtgccatcagtaccggcggctttattcatgaccgcaaagagcgtgcccgtgcagacgacatgatcacactgttcaatgtcaaaaccccggatgcggatcagctggtcgggaacctcagcggcggtaaccagcagaaagtggttctcgggcgctgggcgctaatcgagccggatgtgatgctgctcgatgagccgacacgcggcgtggatgtcggtgccaagaaagaaatttataagtttatgtctgagttcgccttacagggcaaaggcattgtgatggtctcttctgagctgtcggagattatcgggatgagtgacaggattattgttttccgtgacggacggatcgccggagagctgaccgccgccactgccacccagactgatttaatgaaacttgcggtgtga

SEQ ID NO: 274551 - DNA, 1041 bp, Morganella morganii
atgactacaacaaatactgcacccgcaccaggggtctcatttatcgcccgtaacaagaaaaacatgcacaaatacggcatcattctggcgttctttgtgctgtgtctgattgtggcggttgtcggtgaagttcaggtcgcccgcggcgaatggaccaataactattttctgagtcaggacaacatgctgattatcctgcgtcagatttccatcaacggtattctcgccatcgggatgaccttcgtcatcatcaccgccggtgttgacctctctgtcggttcggtgctggcactgagcgggattgtggcggcgcggtttgccaccagcaacaccggcctggctatcggtgataccgcgaatgccgtgatgatcccgatgattatcgcactcggcatcggtatcatttgtggtctgctcaacgggactatcctggcgaaattcaaccttcagccgtttatcgtcaccatggggatgttgtctgcggcacgcggtctgactctgctgaccactgacggtaacccggtttcccagctcaacagtgatttccgctggctgggtaacggctatatcctggatatcccggtaccggtggtgatcctggcggttatctttattctggcctggattttactcaataaaaccaccttcggccgttatgtgtatgccgtcggcggcaacccgaaaagcgccagaacctccggtatcagcgtgattaaaattaaagtgctggtttataccctgtgtggcgcgttagccggtattgccgggctgattctgactgcccgtaccgggtcagcacagaccagtgcaggcagcgcctacgagctggatgcaatcgctgcggtggttatcggcggtaccagtatggccggtggtgtggggacgttagtcggcaccctgttcggcgtgttaattatcggtgtgatgaataacggtctcgacctgctgggcgtgcagtcgtattaccagcagattatcaaaggcgcattaattgttatcgccgtacttttggatccgtcacgtaagcaacgccgtgactga

SEQ ID NO: 274552 - DNA, 1002 bp, Morganella morganii
atgaaaaaactgaccaaaatcgctgcactgacagccctgatgatgggcggacaggcatttgcggcacaggacaatccggtgaaaattgccgttctgatgtacggcatgaaagctgaatttgtccagttaatggaaaaatccgcaaaagagcatccggctgtgaaaaacggtgaagcgatcatcacagtttatgatggccgttatgatccgatggttcagaacaaccaggcggaaaccgcaatccagaccaaagccgacgctatcatcatcaacccgatggattatgaagcgaatatcgacgtggtcaccatggcaaatgacgccaaaatcccggttatcgtcaccaacgcccgtctgaacaccgacaaaatgaccgcagaagtggtgtctgatgacgtcctcggcggttatatggaagccaaagcggttctggaaaaaatgaactgcgaaggtaacgtggttattatcgaagggccgaaaggcggcagcggtgaaattcagcgcggcgaaggtaatgacaaagcgatcgcggaatgtggtccgggtaaagtgaaagtgctggagcgcaaaacggctaactggtcacgcgcggaagcgatgccgctgatggaaaactggttacagaaacaccgtggtaaaatcggtggtgttattgcacagaacgacgaaatggcactgggtgcgattgaagcaatcaaatctgccggtctgaatgtgaatgatttctccattgccggtgttgatggcgtgtctgatgctatccgctctgttcaggaaggcgaaatggtctccatcctccaggacgcaaatgcacagatgcagggttctatcgacctggcgatgaaagcggtcaaaggtgacaaatatgagccgcagtccaaaatctgggttcagtatgctgaccagctgaaatggaatgacggtaaagacaaacgttacgcgattccgtggactcaggtcaccaaagaaaacgcgcagcagttactggatgcccgtaaataa

SEQ ID NO: 274553 - DNA, 915 bp, Morganella morganii
atggatatacgcgcactccgctactttacagaggtggttcagtacaaaggattcagccgggcggcagaggcgttgtttgtcacgcaacccgccatcagccgcagtattcagaagctggagcatgaactgggatttccgttactggtccgtgataccggcggggtgacgctgaccgatgaaggggcgattctgtatgagcacgcgcgacggattctggtgcagtttcagtgtatgaacaaagcattacaggataaatccggcccgctgaccggcacactgaatgtgggattaccgccggttatcgcctcgacctggtttgccgggattatcatggcgtttacgtcccgccatccgcaggtggaactgaagatttttgaactgggcacgaaacagatggccgaagcgatgaccgacggtacggtggaaaccgctgcggtgatgctgccgtttgatgagcaactgtttgatctgcaccgctttgccaccgaccggctgatgctgctggtgaatcatcagcacccgctggcggcaaaaaaacaggtaagctttgcggatattatccgtgagccgtttgtgtttttctccgaagcattccggataaacgacctggtgcgcagtgcgtgcgggatttacagcacggaaccggtggtggcaggacggagcaatcacctcgatctgatcctggcgatggtcagggcaggggtggggatcacactgctgccggacagcatgtggcgtgaacgcacggctgatggtctggtgctgctcccggtaaccgatccggtgctctcctacgatctggcgctggccggtgtgcgcggcgggtatcagagccgcagctgccgtgcgtggaatgcactggcgatggaaatactcggtattccgtatgtaaccggagccggccatttactgtaa

SEQ ID NO: 274554 - DNA, 1650 bp, Morganella morganii
atgacaaaaagcgtaattgagcatgttttaagccgtctggcagatttaggcatcaccgatattttcggtgtcgcgggggattttgcattccccattgaagatgcggtctgcgacggtaacacacagcgctggattggtaactgtaacgaactgaacgccgcctatgccgcagatggctacgcgcgtatcaagggcgccgcggcgctttccaccacgttcggcgtgggtgaattaagcgcgatcaacggtattgccggttcgtatgcggaaaacctgccggtttttcatctggtcggcatgcctgccagtggtgtgcagaagagtggccgcctggtgcatcacaccctgggcgatggtaatttcagcctgttctgtgaactggggcagcgcctttcctgtgcctacgccataatgaccccggagaactgtgtggcggagacggaacgcctgattgctgccgcgctgcgcgagcgccgtccggtctatatgggcttcccgtttgattacgcgacacagccggttcagatgccggaacaccttaccgcaccggcacaaccggtcagtgacaaaaccgcgctcactgaagcggttgccgcgatcagagcaaaactcgcggacagcccgtccgtctgtatcctgccgggcatgctggccgcacgttccggactgattgatgacgtacaggcgctgatccaccggaccgggctgccttacgccaccatgtttatggataaagccatcatcagtgagtccgacccgcattacgccgggatgtataacggtcagctgatgaatccgcaggtcagggaatttgttgaaaacagtgactgcgtgctgggtatcggagcggtgatgacggactttaacaccggcagttttaccgctgatatcgccccggaaaagctgatcagcattatggcggatcatgtccgggtcggcgcaaaaacctggcagaatgtgtatatgcgggatctgctgcctgccctggccgccggacttccgcaccgggaatgccatattccggcagccaccgggctcggtaaaccggtggctgacgcttccggtaatattaccccgccgtatctgtatccgcgttttgagcaattgttcagaaaagacgacattatcatcgccgaaaccggcaccgtttctatgggacttggctttgcactgctgccggatggggcgcaattccataaccagacgttatggggatcaatcggctgggcaacacctgcggccgttggagccgccatcgccgcgcctgatcgcagagtgattctgattaccggggaaggctcacaccagctgaccgcccaggaaatcagtcagtttggccgttttggtctgaaaccgcttattttcgtgctgaataatgacggctatctcattgagcgcctgctgtgcaaagacccggaagccgtttataacgatctggcgcagtggcgttacgcgcaactgccgcaggcgctgggatgcgataactggtattgccgccgcgtcaccacctgcacagagctggatgaggcaatccgggaagcggaaaccggtgaccgtgccgcgtatattgaaatcatcacagagcgctatgccgcatccgatctggcaaaaaaactcggtgaatcagtggcaacactgtactcgttttaa

SEQ ID NO: 274555 - DNA, 594 bp, Morganella morganii
ttgcagtaccgcaaacagggtgatttcgcctatgtgaattatattaacagcaaaaacagagtggttgagggctggataaaactgtcactgctggaaaaatcggatgaacaaaataatgaccttaattatcaggatttcatttggtcatcggatgacggcgaggcggatttactgggaaaaccactgagtgataatacggtttcccgctggctggaacagcagaagaaaaaggtctctgtagcaccgctgcatgattttatccgtgagtttgaattatggcgttatgataccggtgatacgataattaccgtcgccggtaccaatgtgattattgaaaaacggaccgggggacgggataagtatatttcggaaataaccttcaaaaacaatcgttataaaaccagacggggaattgcggcaggggattcatatcaggatatgattaaagcctacggaaaccgttatcagatatccccgggcgacaattgttactattattcctggttcgatcgccggctcggtttttgttttgacggagaccgggaaattaaagaagttatgtacagaaactatccggaatcagatatccgctga

SEQ ID NO: 274556 - DNA, 294 bp, Morganella morganii
atgaccggtaagatgatactccgtcccggagagccggtaagtcagctgcgcagtgatatcctgaaatattattctcaggagcctgaaacagtatttatcggttatagtaaaaacggacggacactgggggtagactacccggatccggcggtttctgtttatatatcagacggtgtaaatgataagattgatgaagaggttatcagccggacgagcaatgtaaaacagatcgctttattatccgtggtgaccatgttttgcagtaccgcaaacagggtgatttcgcctatgtga

SEQ ID NO: 274557 - DNA, 810 bp, Morganella morganii
atgaacagtccggatgccgggacggataaccgggtgatgggaacgagcgggcggcgtgagcatatcatccagcttttgcgcacccacggcagtgttcaggtgaatgagctgtcgcagcagtttcatgtttccacagtgactatccgcaatgacctcgctttcctcgaaaaacaggggatcgcggtgcgtgcctatggcggcgcactgatttgtgagggggtttcaccggtcagcgagccgtcactggaagataaaagtacccgccacaccactatcaaacgcaatattgcggcggtagccgccgaccttatccggccggggctgcgtgtgatcctggactccggtaccacgacgtatgagattgcccgccagctgcgtcaccatcaggatacgattgtgatgaccaacggcatgaatgtggcgaatgccctcctggaagcaccgggcgtggagctgctgatgaccggtggtcagctgcggcgccagtcgctctctttttacggcgatcaggcggagcagtcattgcagaattatcactttgatatgctgtttctcggggtggatgcgattgatctggagcgcggcatcagcacacataatgaagatgaggcgcggcttaaccggcggatgtgtgaagtggccggacatattgtggtggtgacggattccagtaaatttaacagttccagtctgcacaaaataatcgatactcagcgtattgataccattattactgatgacggtattcctgaagcgagcctgaccgggctgcgccggattggcacagaagtgattctggtgaagggataa

SEQ ID NO: 274558 - DNA, 1323 bp, Morganella morganii
gtgaaacttttaactgatatcgttgcccgtcacaaacggggtgagaaaacagggatttatgctgtctgttccgcccatccgtatgttctgaaagcagcggtatgttttgcccgtgaacaacaaacgccgttactggttgaagcaacctccaatcaggtggatcagttcggcggttataccggcatgaccccggcggacttccgtgattttatgtggaagctggccgatgaacatcactttccccgtgaaaatctgatcctcggcggcgaccacctcgggccgaaccgctggcagaatgaaccggctgaagacgccatgacaaaagccgatgagctgatccgcacttatgttgccgccgggttcaaaaagattcaccttgactgcagtatgtcctgtgccggtgatccggtgccgctgacggatgaaatcgtcgcacagcgcgctgcccgcctggcggtgattgccgaggaaacctgtgagaaacatttcggcatccgcgacctggtgtatgtgattggtacagaagtgccggtgccgggtggcgctcacgaagagctgaatgagctggcggtcaccacaccgcaggccgcatctgccactatcgccgcacatcaggacgcatttgcgcggcatcagctcacggatatctggccgcgcattaccgggctggtggtacagccgggggtggaatttgatcataataatgttattgattaccgtccggaaaaagcccgtgccctgagtgagatggtcacacatcatgaccatctggtgtacgaggcgcactccacggattaccagaccccgcatgcactcagtcaattagttgacgatcactttgcgattctgaaagtcggtcccggtctgaccttcgccctgcgtgaagcgctgtatgccctcgccgggattgaagatgagctggttgctccggcggcacgttccgggctgcgtcaggtgctggaagatgtcatgctgaaacaaccgggctactggcagagttattacaccggtgatgagcagacccgccgccttgcccgcagctacagctattccgatcgcatccgctattactggccggatgagaccatcagcgcggcagtgacccgtctgctggaaaacctgacagaaacggcgatcccgctgccgctgatcagccagtatctgccgttacagtatccgctggtacgtgccggaacgatttccgctgcaccggaagaattaatcatcgcacacattcagactgtgctgcgtcactatcacgatgcctgtaaaaccatgcctgccgataagagcgagaaacagccatgccaaatattgtgttaa

SEQ ID NO: 274559 - DNA, 474 bp, Morganella morganii
atgccaaatattgtgttaagtcgtattgatgaacggttaatccacggacaggttggtgtccagtgggtgggatttgccggtgccaatctggtgctggtcgccaatgatgaggtggcggaagatccgctgcagcagaacctgatggaaatggtgctgacggaagggattgccgtgcgtttctggccgctgcagaaggtgatcgacaatattcataaagctgctgaccgccagaaaattctgctggtctgcaaaaccccggcagattttctgactctggtgaaaggcggcgttccggtggaacgcattaacgtcggcaatattcactataccgaaggcaagcgtcagattgccaaaactgtgtctgtggatgaggcggatatcgccgcattccgcggacttaacgaggccggtgtcgcctgttatatccagggcgtaccgacagaaccggcgcaggatctgtttaaactgctctga

SEQ ID NO: 274560 - DNA, 780 bp, Morganella morganii
atggaaatcagtctgttacaagctatcgctctcgggctggtagcctttattgccggattggatctgtttaacgggctcacccacattcaccgtccggtggtgctggggccggtggttggtctgatcctcggtgatctcaataccgggatcctgaccggcgggacactggaactggtctggatgggactcgcgccgctggccggggcccagccgccgaacgtgattatcggtaccattgtcgggactgcctttgctatctccaccggggtcaaaccggaagtggcggtcggcgttgcggtgccgtttgccgtggcagtgcagatggggatcaccttcctgttctcggtcatgtccggtgtgatgtcgcgctgtgacaaaatggctgccaatgcggatacccgggggattgagcgcatcaactacctcgcactgctggcgctcggtacgttctattttctctgtgccttcctgccgatctatttcggggcggatcacgccaaaaccctgattgatgtactccctgcccgcttaattgacggactgggtgtcgcgggcggcattatgcctgccatcgggtttgccgttctgctgaaaatcatgatgaaaaatgcctacattccttatttcattctgggatttgtcggcgccgcctggcttcagctgccggttctggcaatcgccgccgccgcactggcgatggcaatgatcgattttgtccgcaaaccggcagaaagcgaaccggcacaaccgttacacgaggaatttgaagatggcatctga

SEQ ID NO: 274561 - DNA, 876 bp, Morganella morganii
atggcatctgaaaaaaatcattcatctgccgcagaagcggaaaccttactgccggcagactgtaaccagaacgtgtatgaagatcagagcaccggcgcggaactgacccgcaaagatatcaaccgggtcgcgtggcgctccctgctgttacaggcatcctttaactatgaacggatgcaggcggcgggctggctgtacggtctgctgcccgcactgaaaaaaatccacaccaatccgcgtgatctggcgcgctccatgaaaggccatatgggattcttcaatacccaccctttcctggtgacctttgttatcggcatcatcctggcaatggaacgctccaaacaggatgtaaacagcatccagagcaccaaaattgcggtgggtgcgccgctgggcgggatcggcgacgccatgttctggctgaccctgctgcctatctgcggcggtatcggtgccagcctcgcattgcagggctcaattctcggtgctgtggtgttcctggtgatgtttaacgttgtccatttcggactgcgtttcggcctggcgcactatgcttaccggatgggggttgccgccattccgcttatcaaagccaataccaaaaaagtcggccatgcggcctcgattgtcgggatgaccgtgatcggcgcgctggtggccacttatgtacggctctcaaccacactggaaatcaccgccggtgatgcggtggtgaaattacagagtgatgtgattgataagctgatgcctgctttcctgccgctggtatacaccctgtcaatgttctggctggtacgacgtggctggagcccgctgcgcctgattgtactgaccgtggcgctgggtattatcggtaaattcgcccatttcctgtga

SEQ ID NO: 274562 - DNA, 435 bp, Morganella morganii
atgccgggaattattttatgtggtcatgggggctttgcctccggactggaaaaagccatgttacagattatcggggagcaggaggatttcgcggccgttgattttccggcggaatccaccaccgcccgcctgacacaggaactggaagccgcactggcgctgatgtcacactgcgacagtgtgatttttctgaccgatattctcggcggtacgccgttccgcgtggcggctacgctgtcacagggccgggaagaccgcgaagtgatcaccggtaccaatctgcagttgctgctggaaatggcactggagcgggattcgctctcaccggctgatttccgccgcgaagcactggcctgcggtcaccgcggattaaccagcctgacagacgagttacagcgcgaacgctgctgtgaaactgaggacgaaggcatatga

SEQ ID NO: 274563 - DNA, 1140 bp, Morganella morganii
atgattcagcaaatccgcgcccgccgtgtgctgacagaatacggctggcgggaaaatcaggcggtgacggtatcagacggtatcattaccgccatcacgccgctggcggcaaaagaaacacagtttgatgcggagcaactctgcccggcttacattgacacccatgttcacggcggacagggtatggatgtgatggatgataatctgcaggcgctgaaaaccattgccgctttcaaagcacaacaaggggtcgccgcgtggctcgccaccacggtgaccgccccgctgccggatctgcgcagcaccctcgggcggatcgcccgttactgtcagcagcagaccaccacagagccggtggcggaagtgctcggcagttatctggaagggccgtatttcacgccgcagaacaaaggagcacactcaccggagctgttccgtgaattacaaatcagtgagctggacacgctgattgccgatgcggaaggcacactgaaagtggtcgcactggcaccggaaaaaccggaggcgctgaatgccatccgccacctgaaacggcgcgggctgaatgtgatgctcggccacagtgccgccacctatgagcagactctggcggctctcgatgccggagctgacgggctggttcactgtttcaacggcatgaccggcctgcatcaccgcgagccgggcatggcgggagcaggattatccgatccgcgtgcctggctggaacttatcgctgacgggcatcatgtccacccggctgtgatgcggattgtctgtcagtgcgccgcacaccgcacggtgctgatcaccgatgccatgcgggcagccgggcagccggacggcatttatgatatctgcggccatgatgtcacgatgaaagcaggtattgtccggaccgcctccggtggcctcgcgggcagcaccctggcactggatgacgccgtcagccggatgattagtgataccggcacgctgccggaaaccgccatccgcatggcttccctgcaaccggcacaactgctggggatcaccgcgacacacggcagtatctctgcgggaaaacgggcacatttcaatgacctgaacagtgactggcgggtaacacaaacctggatccacgggcagccggtacgctga

SEQ ID NO: 274564 - DNA, 1167 bp, Morganella morganii
atgcacgaccctctttctgccacaccccgctattccacctggacggaaacggagatccgccagcaacctgattgctggatgagtgcattacactcaatcgactcacaacgcgcacagctggatgcctttctcgcgccgctgctggctcaggataacctgcgcatcattctgaccggtgccgggacttccgcctttatcggtgagatgatttctcccgtactgcgccgcctgaccggcaaaagcgtcactgcgatcccgacaaccgatatcgtcaccaatccggcggattatctgcctgaacaacagccggtgctgctggtctcctttgcccgctccggtaacagcccggaaagcgtggccgcgtttgatcttgccaaccagtgtgttgcccgctgctctcatctggtgatcacctgtaataaagagggacatctgtatcagcgtgtacagggcagtgataatggttttgctctgctgatgccgccgcagaccaatgacaaagcctttgccatgaccagcagcatcacttcaatgatgtgcagctgtctcgccgccctcgccccgcagacgttcagcacagaacgctttgccgttgtggcacagcggacgcgggatattctcgccacccatggaagcagcggacaaattctgccgggtaatgattcgtttaaacgcgtggtttacctcggcagcggcagctttcagggactggcgcgggaatccgctctcaaactgctggaactgaccgccgggcaaatcgccgccttttatgacacgccaaccggcttccgccacggcccgaaatctctggtcgacggcgacaccctggtggttttgtacatctcaaaccagccttacacccgtcagtatgatttggatttgctggccgaactgcgccgcgaccggatcgccaaacaggtggtcgcaatagccgatctgccggatgacgccatcagcgccgggacacactgctatctgcctgccggtgacgccctcagcgacacagaactgctgttctgtttcctgccgtatgctcaattatttgccctcagtcagtctgtcagaaccgggatcacaccggataccccgtctgccagcggcaccgttaaccgcgttgttcagggcgtgattattcaccccttcaataaccagaacacaggagcgtaa

SEQ ID NO: 274565 - DNA, 858 bp, Morganella morganii
atggggatcatctcaaccaaatatctgctcacacatgcacaggccaatggctatgcggttccggcgtttaatatccataacgccgaaactattcaggccattctggaagcctgtgcggaactgcgcgcaccggtgattctggcgggcacgccgggcacctttaaacacatcagcttcccggaaatttatgcactgtgtgacgcctattcccgctcgttttccatgccggtcgcgctgcatcttgaccaccacgaaactcttgacgatatccgcaccaaagtcggtcagggtgtgcgcagtgccatgatcgacggcagtcattttccgtttgaggagaatgtcgcgctggtcaaatctgtagtggatttctgccacagtcaggattgcagcgtggaagcggaactcggccgtctcggcggcgttgaggatgatatggatgtggatgcggaaagtgcctttctgacctccccggatgaagcgcgccgttttgcacaactgaccggcatcgacagcctggcggtggctatcggtaccgctcacggcctgtataccagccgcccgaaaattgattttgcccggctggaaaaaatccgcagcattacggatatcccgctggtactgcacggcgctagtgatgtgccggatgcggatgtccgccgcactattgagctgggggtgtgtaaagtcaatgtcgccaccgagctgaaaatcgcgtttgccggggcagtccgtacctggtttgcagagaatccggacggcaatgatccgcgctattacatgcgggtcggtatggatgccatgaaagcggttgtccgcgataaaatcagggtctgtggtgcggaaggtcagcttctgtaa

SEQ ID NO: 274566 - DNA, 1572 bp, Morganella morganii
atgtcgcaggaaaagtcgtttaaatccaaactctgggaattttttcaaagtctcgggaaaacctttatgtttcccgtctcgttactggcattcatggggttattactcgggataggcagttcggtcaccagtccttccgctatcagcagttttccgtttctcggcaatgaatttgtccagctgacctttggttttatggcgatggtcggcggctttgcctttacctatctgccggtgatgtttgccatggctattccgttcggactggcaaaccgtaacaaagcggtcggcgcctttgccgggtttgtcggctatatgctgatgaacatgagcatcaactattatctgaccgtcacccaccagcttgccgacccggcgatgatgaaacaggtcgggcagtccgtggtgctggggatccagaccctcgaaatgggcgtgctgggcgggattgtggtcggtgttatcacctatttcctgcatgagcggttccaggatacggtgctgcatgatgctttcgcatttttcggcggcatccgttttgtgccgattatcaccgcactgacgctgtcactggtcggcctcgcgatcccgttcctgtggaaatatgtcgctatgggcattgccgggatcggccatattattcagagcacagatgttttcggcccgttcctgtacggcgtcggcgtgctgctgctcaagccgttcgggctgcatcatattctgctggcaatggtgcgttttaccccggccgggggcacggaatttgttgatggttatgaagtcgccggggcgctgaatattttctatgccgaactgaaagccggcctgccgttcagcccgcatgtcaccgcgttcctgtcacagggctttatgccgacctttatctttggtctgcctgcggtcgcttatgctatctaccgcaccgcgaaaccggagaaccgtccggtgatcaaagggttattactgtccggggtactggtttccgtcgtgaccgggatttccgagccgattgagttcctgttcctgtttatcgcgccggtgctctatatcttccacattattatgtccggtcttgccctgctggtgatggcactgctcggcgtgactatcggtaacactgacggtgggattctcgatctgctgatcttcggcatcatgcagggaacagccaccaagtggtatctggtgttcccggtcgggattatctggttcgctatctacttctttgtcttccgctggtacattctgaagcatgatgtcaaaacgccgggccgtgaagatgctgctgacggtgccgaacaggcagtgaaagccaatacaaaagcacgcggcaaagccaaatacgatcacaacctgatcctcaccgcactcggcggcaaagagaatattgattcgctggataactgtatcacccgtctgcgtctggtggtgaaggatatggacaaggtggatcagaagaccctgaaagaggccggtgccctctctgtggtggtactggatgcccacagtgtgcaggtgattatcggcccgcaggtgcagagtgtgaaatccggcattgaagctttaatttaa

SEQ ID NO: 274567 - DNA, 1173 bp, Morganella morganii
atgtacgattttgatgaaataattgagcgcaaaagtgaccgctgccggaaatgggatcatcagtatgtctgttcccgcttcggggatgtcccgcaggatttcattccgctgtggatagcggatatggatttcaaatccccgccggcggtgattgagcggttcacgcaggtggcacagcacggtaccttcggctacacctggtgctttgatgaattttacgatgcggtggtccgcttccaggcagagcgccatcaggtcacggttcagcgggagtgggtgacactcagttacggtacggtttccaccctgcactatctggtacaggcattctgtcagccgggcgactgtgtgatgatgaatacaccggtgtatgatccgtttgcccatgcagtgacccggcaaaatgttactgtgctgaccaatccgttggtggcgcgggataaccgctatcaccttgattttgatcatattgaggcgcagatgcgcgaacaccggccgaaagtctggctgttctgctcgccgcacaatccgtccggccgtatctggacggcggcggaaataaaacaggtctcggatttgtgtctgcaatacggtgtgctgctggtgattgatgaagtgcatgcggaacatgtgctgtacggcagcttcaccggctgtctgcgcccgggatgtgcagcgccggagaatctgatcctcctgacctcaccgaacaaagcctttaacctcggcgggctgaaaacctcttacagcatcattcccgaccccgcactgcgggcacaattccgccgtcagctggagaaaaactccattacctcacctaatctgttcggggtatggggcattattgaggcttacaacaacagcactgactggctggatgagctgaacctctacctgagaggcaatgcggattatctgacacaggccgtggcggagcatttcccggactggcggatgatgcaaccggaatcctcttacctcgcctgggtgaatatcagcgccaccggacgcacagcgacagaactgacactggattatgcccggcagaccggcgtggtggttgaggacggcagtcattatgtggcggatggtgaacagtatctgcggattaacttcggtacgccgcgcgcactgctggcggaagcggtaaatcgtctgaaaaacgcccggtaa

SEQ ID NO: 274568 - DNA, 1482 bp, Morganella morganii
atgtcagatctcaatcatccaacctctgatctaatctatcagctggacgacaagcccccgtttttccaggcccttcttggtgcggtaacccatttattggccctgtttgttccgatggtgatgcctgccctgattgtgggcaaagccctggatttatccgccgataccacagcttatctggtttctatggttatgattgcctccggcatcggtacctggatacaggttaaccgctacgggccgatgggctccggcctgttgtctattcagtccgtcaacttctcattcgtgactgccatgattgccatcggcaccgccatgcgcagtgacgggctccatgaagaactgattttgtcctctctgctcggcgtctctttcgccggtgctttcctggttgtcggttcctcttttgtgctgccttatctgcgccggataatcaccccgactgtcagcggcgtggtggtgctgatgatcggcctgagccttatcaaggtcggaattatcgacttcggcggcggtttctctgccaaatcagccggcacatacggcaactatgaaaatatcggtgtgggattactggtcctgctggtggtgatcggctttaactgctgcaaaagcccgctgctgcggatgggcgggatcgccattgccctggtggcaggctatattgcctcgctgttcctcgggctggtggatttcagcacctatcagaacaccgcgtttattacggtaccggtgccgtttaaattcggcttctcatttaatttcacccacttcctggtggtcgccattatttatatcctcagcgtgctggaagcggtcggcaacctgacggcgacagctatggtgtccaatcagccgattaaaggtgaagtgtaccagaaccggctgaaaggcggtgtaatggcggatggtgtggtatccgttattgcgtcagctctcggctcgctgccgctgaccacctttgcccagaacaacggtgtgatccagatgaccggtgtggcttccagttatatcgggcgtttcattgctgtgatcctggtgttcctcggcctgttcccgggtatcggctggttctttaccaccattccggcaccggtactgggcggggcaatgacactgatgttctccatgattgccattgccgggctgcgcattattatctccaacggcctgcgccgccgcgaaaccctgattgtggcaacatccctgggtctcggactgggtgtttcttatgacccgcagatcttcagtatcctgccaccgtctttatatattcttgccgagaacccgatttgtgtcggcggtctgacggcgattatcctgaatctgctgatccctgtcggacaaccgcgtggtgcggccaatgaggaagagccggatgtgctggctgacgagctggaagccatgctggatatcccggatgcagagcgtgacctgccggatatggccatgagtgcggagaacaaacgcgttatctga

SEQ ID NO: 274569 - DNA, 1965 bp, Morganella morganii
atgaacaaatgtatagttgcggacagccagaaatgcatcggatgtcacgcctgcgaaattgcctgcgttgtcgcgcataatgatcaccactggccacatgacagccgtgattacgccccccgtatccgtgtcatgttcaaagagagtgacagcctcgctgtcacctgccgccagtgcgaagactccccctgtgccgctgcctgcccggtggatgccctgtatgtggcggacaatatagtcaaactggatcaggaaaaatgtatcggctgtaaaagctgtgtgctggtctgcccgttcggggcgatggaaatggtgatgacgttcgatcactcgcacgaactggcgcagaaatgcgatttatgtgataccaccggcgggtcacccgcgtgcgtggctaactgcccgaccagcgcactcagcatcctggatgaacacaaactggtgatcctgcgcaatgaccgcctgatgcgggcagccaccggtgcatacaaccaggcgcgtcagtcggaaatccgttttgagatcctcaaacgtccgccgcgtgaaggaacaaagaaacagagtgcagctctgcggaaaaatcatttcggcgaaatttatatcgggctgaatgaacagtgtgccggttatgaaagtgagcgctgcctgtactgctcacaaaaagcgatgtgtaacctgtcatgcccgctgcataacgccattccggatttcgtccgtctggtgcgcgaaggcaaaattattgaggcggcggagctgagtaactccaccagttcactgccggaaatctgcggccgtgtctgcccgcaggacagattgtgcgaaagccgctgtacgctgcgtaaccacggcggcgcggtcactgtcgggaacatcgaacgctatatcacagataccgcctttgagatgggctggcgtccgtctgtggcggaggatgtggttccgcgtccggaacgtgtcgcgattatcggtgccggaccggccgggctgggctgtgcggatgtgctgacccgtgcaggggtgaaagctgaggtgtttgagcgccatccggaaatcggcggactgctgaccttcgggatcccgccgttcaagctggacaaacagctgatggcacagcggcggcagattttcacggatatggggatcaccttccatctgaactgtgaagtcggcaaagatatcccgttcagccgcctgatgagcgagtatgatgcagtactgctgggtgtcggcacctacggcatgatgaaagccgggctggaacatgaggattccccgggcgtggtgcaggcactgccgttcctgatcgccagtacccgcgaggtgatggggctgccggtggcggatgaatacccgtggattgatgtggaagggaaaaaagtggtggtgctcggcggcggtgatactgcgatggactgtgtccgtaccgctgtccgccgtggtgctgagagtgttatctgcgcctaccgccgtgacgaggccagtatgccgggctcgaagaaagaggtgatcaacgcccgtgaagagggtgtggaattcctctataacgtgcagccgcagtttattgaccgcactgagctgggagccgtcagcggtatcgggcttatccgcacacaactcggtgaaccggggccggatggtcgccgtcgtccgaaaccggtggaagggtctgaatttatccttgatgcggatgtgctgattatggcgttcggcttccagtctcatccgatgccgtggctcagcggttacaatgtccagctggataaatggggacagattaaaaccggcggcaacggccgcatgagcaaccagaccaccaacccgaaaatctttgcctccggtgatgcggtgcatggtgcagatctggtggtcaccgctatggctgccggtcgtcaggccgcccgcgagatgctgagcatgttcgatgaacaggcacagtcactgcaggcgatggtcagtaacgcataa

SEQ ID NO: 274570 - DNA, 1263 bp, Morganella morganii
atggatttattacggagtttggcggggatcggcgttttattactgatagcatttctcttttcggtgaataagcggaaaatcagtctgcgcactgtcggcgcggcactgctgttacaggtggcgcttggtgccatcatgctgtatatcccggcggggaaatggtttattcagaccatcgcgtcgggtgtgaacaacgttattgcctacagtgacgcgggcagttcctttattttcggcagcctggtcggcccgaaaatggatgtgttatttgacggagccgggtttatcttcgcattccgcgtcttaccggccattatctttatcacgtctctgatcgcgattttgtattacctcggcattatgcgctgggtgatcaacgttctggcgtatgtcttccagaaaaccatgaaaatcagcaagatcgaatcttttgcggcagtaactaccattttcctcggtcagaatgagttaccggcggtactgaaaccctttgtcagccggatgaataacaatgaattattcaccgtaatatgcagcggtatggcctccattgccgggtcaatgctggtgggttacgccggactgggcgtgccgattgaatatctgctggcggcgtctctgatggcgattccgggcgggatcctgtttgcgcggatgttaagcccggcgacacaggaatcgaccgtggaattcaccgaaatctccttcagtgaaaaacgcccggccagcattattgaggcggcggcaggcggtgcgatgctggggctgaagattgccgttggtgtggcaacggtagtgctggcgtttgtggcactgattgccctgattaacggcctgattggcggcctcggcggcgttatgggttttgagggcgtcagtctgcaaagcctgttcggctatattttctcaccactggcatatctgatgggcgtgagcagtgagcacattgcgctggcaggcagcctgatcggtgaaaaactggcgatcaacgagttcgtggcctatgtggatttctctccgcatttacacgacggcacactggatgccaaaacgattgctgtgatctcctttgccttatgcggttttgccaacttcggctcgattgcggtagtggtcggggcgttcagtgcggttgcgccggagcgggcatcggatatcgcccgtgtcgggatccgtgcactgctggcagcgaccttatccaacctgatgagtgccaccattgccggattgtttatcggcctggccgtggcaccgggtgtctga

SEQ ID NO: 274571 - DNA, 933 bp, Morganella morganii
atgaaaactcaacaactgaacgcagaatatctggacatttcccctgaggttgcacaggcgctcgcggagaaaaagccggttgtggcactggaatccaccattatttctcacggcatgccgtatccggacaacgtgaaaatggcactggaagttgaacagcgtatccgtgataacggtgcgatcccggcaacgattgccgtgattaacggccgcatgaaagcgggtctgtctcatgatgagattgagatgctcggcaaagaaggccacaaggtgatgaaagtgagccgccgcgacctgccgtttgtgattgcacaggggattcacggtgcgacgactgttgcctccaccatgattatcgcggaaatggccgggattgctgtttttgccaccggcgggatcggcggtgtacaccgtggtgcggaacacacctttgatatctcagcagatttacaggaactggcacaaaccaatgtggcggttgtctgcgcgggtgccaaatctatcctggatctgggactgaccacagaatatctggaaacctacggcgtaccggttgtcggctatcagacggataaattaccggcattcttctgccgtgaaagcgaattcccggtcaccatccgcatggaaaccccggaaaccgtggcaaaagcactgcatgccaagtgggcgaccggtctgaacggcggcatggtaattgccaacccgatcccgcatgagtttgcgatgccggaagaaaccatcaacagcgcgatcgcacaggctgtgcgcgaagcggatgagcagggcattaacggcaaagcaagcacgccgttcctgctggcccgtgtggcagagctgaccggcggtaacagtgttaactccaacattgaactggtgttcaacaacgcgaaactggctgcccgtatcgcctccgcttatcagcaactgtaa

SEQ ID NO: 274572 - DNA, 1092 bp, Morganella morganii
atgaccagtcgagaaaaacaaatccttcagatcctccggcgtgacccgctcattccgcagcaggaactggccggcgtattaggtatcagccgctctgcggtggccggacatataatgaatctgatgaataaaggctacatcaagggtaagggatacatcctctccgagcaccgctatgtggtgactgtcggttcagccaatatggatgtttgtggttattctgacctgaatctggtgtatgaagattctaatcccggtcacattaaatgttcacccggcggggtcgggcgcaatatcgcccagaatattgccctgctgggctgtgagtctcattttatctccgttatcggtgatgatttctacggtaacaccctgtatgagcaggcaaaactggccggtgtgaatgtcagcaatctgcaccgcctgcacggggaaaccacctctacctatctgtcactgctggatccgcagggtgaaatgatcaccgccatcaatgacatgcgcatcctggaaaaactgaccccggcgctgctggcgacctcccgcgacctgatccggcacgccggtgtgctggtggcggactgcaatctgtcagaaggcgcgctggagtggctgtttaccaatgcgggcaatgtaccggtctttgtcgataccgtttccgcgttcaaagcaaacaaaatcaagccgtggctcagccatatacacaccctgaaaccgaaccgctttgaggcggaaattctcaccggtatcaaagtggagaataaacaggatgtggtgcgtgccgccaatgccctgcatgagcagggtgtacagcgcattgccctgagtatgggcggcgaaggcgtttattacagcgaggcgggcggcgaaaacggctggtcgaagccgttcagtgtccacattgtcaatgtgaccggtgccggtgacgccatgatggcaggtcttgcccgctgctggctcgaaggcgagccgctgtcacagagtatccgtttttcccagggctgttccgccctgacgctcgccagcgagctgacaaataatcccggtctgtcaaaagacagtgttcacaaactaatggaatcacaagcatga

SEQ ID NO: 274573 - DNA, 645 bp, Morganella morganii
atgacagctaaatcagttctcccgttactgttactggcgggattattcagcggtgcggcggtggcacacggacaccatcacgacaaaccgcagacagaagcacagcgcaaggcagcagaaggaatttttgctgacaaggatgtcaaagaccggcagttgagcgactgggatggcgtctggcagtctgttgagccttacctggccagcggcgagctggacccggtgatgcaggcgaaggctgcgaagaacggcgataaaacggcagaagagtatcgtgcttattatacaaagggatataaaaccgatgtggatatgattggtattgaaaataatatcatcgaattccatcgcggggataaggtggatcagtgtgagtatcagtatgccggttaccggatcctgaattacacctccggcaagaaaggggcacgttatctgtttgagtgcaaagataaaaacagtcatgcaccgaaatatatccagttcagtgaccatatcattgcaccggaaaaagcgggtcatttccatctgtatatgggtaatgagtctcaggaggcactcctgactcagctggacaactggccgacctattatccttatacgatgagcggaaaagatatcgttcacgaaatgctgcatcactga

SEQ ID NO: 274574 - DNA, 126 bp, Morganella morganii
atgcaggtattaagttcactgaaaagtgcgaaacagcgtcatccggactgtaaaattgtccgtcgtcgcggccgtatctatgtgatttgtaagtccaacccgcgttttaaagccgtacaggggtga

SEQ ID NO: 274575 - DNA, 249 bp, Morganella morganii
atgaaacctgatattcatccggattaccggacagtcatcttccacgacaccgcagcagacgtgtatttcaaagtcggatccactatcagaacggaaagaaccattgagtttgaagggcagacttatccttatgtcactctggatgtttcatcccactctcacccgttctataccggcaaacagaaaacacactctcaggaagggaatgtggcccgttttaccaagcgcttcgggcgttttgtacattaa

SEQ ID NO: 274576 - DNA, 1893 bp, Morganella morganii
atgagtggaatcatcacggagcatgaacctttcggcacattactgggctatgcgcccggcggtgtggctatctattcctctgactacgataccatcacggacgcagagaaagaggatgatatttccttccgcagttatatcgggaatgaatatatgggatacaaatggcagtgtgtggaatttgcccgccgcttcctgtatctcaattacggtgtggtgtttaccgatgtcggtatggcgtatgagattttttccctgcgttttctgcgtcatgtggtggatgacagcattctgccgctgcgtgcgtttaaaaacggctgccagcaggcaccggtagccgggtcattgcttatctggcaggaagggggcgagtttaaacgcaccggccatgtggcggtgataactcaggtgtgtgcggataaagtccggattgtggagcagaacgtcattcaccataaactgccgcgcggtcagcaatggacccgcgagctgccgatgcatgtcaaagacggttattacactctgtcagatacgtttccggatacacagatcctcggttggatgatccagacaattgatgatgagtatgcctggacagaaccggcggtggatcctgcgctgatggcactgcatgctgcccgtctggatgagaaagccgatttcaccggtaaatggctggatgagtcggatccgatggaaaaagcctatgtcaaagctaatcacggccacaatctgaatgcggatccgcatgaatatttcaccatttcagagactgccgaaaatgcactgatgcaggcaaccaacgaagtccatctgatgtacctgcacgccacggagaaagtgctgaaagatgacaatctgcttaaattattcaatatcccggaaatcctctggccgagactgcggctctcctggcagaaccggcgtcacgatatggtgaccggcagactggatttctgcatggatgagcgcggtctgaaattgtatgaatacaatgcggattctgcctcctgtcatgcagaaaccggggtgattattaataaatgggcgaaacagggcgggctgaccgaaggctgggatccgggggaacgcctgtcagaaatgctggcggatatctggaaacacacctcggccaagccgtttatccatattatgcaggataaagacagcgaggaagattatcacgccctcaatatggcgcgggccatcacggcggcagggtacggataccgggtcattcacgggctggatgaactgagctggaacgaaagcggacaggtcatcgacggtgaagggcgcgtgcttaaatgtgtctggaaaacctgggcgtgggaaacggcgctggaacaactgcgtcaggaaagtgaaagcgaccggacatactccgcactgcctatccgtaccggccatccgcgtcatggagatgatgtgcggctgattgatgtgctgctgcgcccggaaatccgtgtatttgagccactgtggacggtgatcccgggcaacaaagcgattctgccgatcctgtggtcgctgttcccgcatcatccttatctgctggatacagaatttgaactcagcgacgaactgcgccggaccggttatgcggttaaaccgatcgccggacgctgcggcagcaatatcgggctggtggatcaccgcgacgaagtgctggatgaaacctgcggccgtttcggtgagcaggaaaacgtctatcagcagctctggtgtttaccgaaagtggcaggccgctatatccagatgtgcgcctttactgtcggcggccactacggcggtgtctgtctgcgttcggatccgtctctggttatcaaaaaagagagtgatattgagccgctgcgggttctggaggataaggactttctggcggagaattga

SEQ ID NO: 274577 - DNA, 1362 bp, Morganella morganii
atgagcaatcatagtgtggatcaagcacaggaaccggttaagcccgttattgacgaagttgaagaaatattacctgcgggaaaactgatgatgctgggattacagcacgtgctggtgatgtatgccggtgcagtagcggtaccgctggttatcggtgaccggctggggctgagcaaggaagtggtgacactgcttatcagttcggatctgttttgctgtggtatcgtgacactgttgcagtgtatcggtatcgggaaatttgccggtatccgtctgccggtgattatgtctgtgacgttcgcggcggtgacgccgatgctggctatcggtgccaacccggatatcggcctgatggggattttcggcgccaccattgcagcgggggtactgacaacgctgatagtcccgctgatgggaaaactgatgccgcttttccccaatatggtcaccggtattgtgatcacctctatcggactgagtatcatgcaggtggggattgactgggcagccggcggcaaaggtaacccggaatatggtcacccgctctacctcggtatctcatttgcggttctgctgtctatcctgtttatcaccaaattctgtaagggttttctctgtaatatctcggtattactggggattatctttggttttgtgttgtcgctgatgtgcaatgaggtcagtttcgacggctatgcggatgcgccctggtttaaactggttaccccgatggcgctgggaacaccaacgtttgagccgatctccattattaccctcagcgtggtgctgctgattgtctttattgaatcgatggggatgttcctggcgctcggggaaatcgtcggccgtccggtcggaaaagatgacattgtgcgcggactgcgggtggacgggatcgggacagttatcggcggtctgttcaatagtttcccgcatacctcattttcccagaacgtcgggctggtgggcgtgacaaaagtccacagccgctgggtgtgtgtggtctccggatttatcctgatcatctttggtctgctgccgaaaatggcggtggtgattgcctctattccgcagtttgtgctcggcggggcagggctggtgatgttcggcatggtactggcgacagggatccgcattctgtcccgtgttgattacagcggcaataattacaatctctatattgtggcgataagcctgggggtcgggctgacgccgacactctccggtaatttctttgccaaactgccgatgttcttacagccgttgctgcacagcgggatcctgctggcgacggtcagcgcagtgatcctgaacctgttctttaacggttatcatccgaaaaaggaaagcacagcaacgtga

SEQ ID NO: 274578 - DNA, 1017 bp, Morganella morganii
atgaaagcagctgttgtcgcaaaaaataagaccgtagaaatcaaagagaaaacattacgcccactgaaatatggagaagccctgctgaaaatggaatgctgcggcgtgtgtcacactgacctgcatgtaaaaaatgctgattttggtgatgtctccggtgtgatcctcgggcatgaaggtattggtgtggtgacggaaatcgcggaaggggtcacctcactgaaagtcggcgatcgtgccagtgttgcatggtttttccgtggctgcggccattgtgaatactgtaacagcggcaaagaaactttctgccgtgaagttaaaaatgccggttataccgtggacggcggtatggcggaagagtgcattgtgactgcggattatgcggtaaaagtgccggatggcctggattcagccgctgcgagcagtattacctgtgccggtgtcacaacttataaagcaattaaagtttccggcatcaaaccgggccagtggctggcgatttacggtctcggcggattaggtaacctggcgctgcaatatgccaaaaacgtctttaatgccaaagtgatcgctattgatgtcaatgataaacaactggcactggcaaaagagatgggcgccgatctgatcctgaatccgaaaaccgataatgtcgatgaaatcattcagaaagaccttggcggcgcgcatgcagcggtcgttaccgcagtagccaaatccgcatttaactcggcggtcggcagtgtccgtgccgcagggcgtgttgtggcggtcggtctgccggtggaaaccatggatctgagtattccgcgtctggtactggacggtatcgaggttgtcggttcgctggtgggaacccgtgaagatctgaaagaagcattccgctttggtgccgaaggcaaagtagtaccgaaagtggcaatgcgcccgcttgaagacattaatgccatctttgaagagatggagcagggcaaatttaccggccgtatggtcattgattttaaaaataaaaaataa

SEQ ID NO: 274579 - DNA, 894 bp, Morganella morganii
atgacagacagacaagaggtcttaccccagcgtatcagcgcgcggattaaagatgtcggcggcgtgccggtatcccgtgcattaccggtaaaagagcgccgtcagataggtgcctggtgttttctggatcatgccggtccggcggttttcaaaggggatgacggcatgaaagtcgggccgcatccgcacatcggcttacagacgttcacctggatgctggaaggtgaggtactgcaccgagacagcctcgggtcagagcagattatccgcccgggacaggtgaatctgatgacggccggatgcggaatcacacataccgaagattccgccggcagaaatgcccgtctgcatgccgcccagctctggattgccttacctccggcggacagcactatcacgccgcgctttgaccactatcctgatttatctgtctggcatcatgaccaggtgagtttcacattactgaccggcgaatatggtgatcaccgttcgccggttctgcatttttccccgctgatcggcatggatttgctggcacagcaggcaacacaaaccacactcgatacccggccggactttgaatacggcttctttgtgctggagggccagctgacataccgcggtgaagtttataccgccaatgagctggtgtatgtcggtgaagggttgtcttctgtcacactgacactgatgaaaggctcgcggttactgctgctgggcggcactccggtgcaggaacggataatgatgtggtggaattttgtcggctacgacgtacagacactgcagcaggctgtcagtgactggaacaatggtgatgtccggttcggtactgttgaaaatgacccccgcgagccgctgcctgctccactgtatcccgcatcccgcctgtaa

SEQ ID NO: 274580 - DNA, 2115 bp, Morganella morganii
atgcgccgtttatccctgaaaaatttgctggaaaaactcgatctcagtctgcgtcagcgcattcctgtgatccaccagaccgaatcctctgagtgcggcctcgccagcctggcgatgatttccgcccactacggcaaaagtatcgatctgatttccctgcgccagcagttcaatctctccgcacggggcgcgaccctggctgggctgaccggcatggccgccgaactggggatgactacccgtgccctgtcgctggatatggacgacctgcagaacctgcggctgccgtgcattttacactgggatttcaatcactttctggtgctggtgaaaatcagcggtaacaaatttatcctgcatgacccggcctatggccggcgggtggtcggtattgaggagatgtcgtgcaattttaccggcgtggcgctggaagcctggcccggcagcaccttcacaaagcaggaggtggtgaaaaaactcagcttgcgcaagcttatcggcaatattcacgggctgaaaaaagcgctgctgaaaatcttcgcgttctccgtggtgattgaggccatcggcctgattatgccggtcggtacacagctggtgatggatcacgctattcctgccggagatcaggggttattgtccctgatttgtgtcggattactgttctttattctgctgaaagcggtggtcagtatgtgccgcgcctgggccagcgtgattatggaaacgctgatcaacgtccagtggcagtccggattattcactcatctgttgcgcctgccgctcagctattttgagcggcgcaaactcggggatattcagtcccgtttcggatcgctggatatcctgcgcaccacctttaccaccagcgtggtcggggcgatcatggacggtatcatgctgatcggcgtgtttatcatgatgatcctctacggcggccatctcacctggattgtgctcgggtttaccgccgtatatatcgggctgcggctggcgacctaccgttattaccgccagctgtcggaggagtcgctgatcaaagaggcgcgcgccgggtcgtattttatggaatccctctacggcatcaccacggtgaaaacccagggcatgagcgatcgccgggggaatcactggctgaatctgaaagtcgattccatcaataccggcatccgcctgaccaagatgaacctgatgttcggtggggtgaatacttttattatggcctgtgaccagatagccatcctgtggatcggcgcaggtctggtgatcgacaacgccatgaccctcgggatgtttgttgcgttcagcgcctatcgcgagcagttttccggccgcgctgcctccatcattgagttcctgctgcagctgcgcatcatgagcctgcacaacgagcgtatttctgatatcgcgctgaatgagcaggaaaataaaaagccggatgtgccgtacgagccgcagatgcaggctgccgggctggaaacccgcaacctggtgtacagttacgatagccagtccgcaccgatcttccgcgatattaatctgtcggttgcccccggtgaaagtgtggcgataacagggccgtccggctcgggaaaaaccacgctgatgaaagtgctgtgcggcctgtttgaaccgtcagacggcaaggtattcattgataacattgagatccgccagctcggcgtcaataactaccacaaaatgatcgcctgcgtgatgcaggacgacaaactgttttccggctcgatccgcgaaaatatctgcggtttcaccgaaaatcccgacgagcagctgatgattgcctgtgcacaggccagttatattcatgacgtgattatctcaatgccgatgggctatgaaacactgataggagaactgggtgaaggactgtccggcgggcagaaacaacggatatttatcgcccgcgccctgtaccgaaaaccccgcatcctgtttatggacgaggccaccagcgcactggataaagagagtgaatcttacgtcaatcaggcgatccgccaactgccgatcacgcggattattattgcgcaccgcgagtcgacgattgagtcagcggaccgcattatttctcttggcgggaaaaacaataaataa

SEQ ID NO: 274581 - DNA, 1287 bp, Morganella morganii
gtgttccgcaaagccgcactcgataaccgaaaaatgaaatggcggggtaaggccttattattacccggtattccgctgtggctgataattgcatgcagttttctgtttttaatggtttttctgacctttatcttgtccggcagctatacgaggcgggtcagtgtgaccggagaaattaccaccaatccccgggcggtcattgtatcagccggtgtacagggctttattaccgggcaatatgtgaatgaagggcagattatccgccaaggggatccggtttaccgtattgataccagcagggctacagccggtggtgtggtcagtgaaaatcagcgtcgtgaaattgaaaatcagttacagcatatccgtgatatgaccgcccgtctcagagataacaaacacaccactctggcctcgctcgaaaaacaaaaatctctttatgcacaggcacagttgcgatcagccgggattgttgagcgggcgcaggaagggatccgtattatgaaacagaatatggataattatcatcactaccgggaaagcgggctgataaataaagatcagtggctgaatcaggctgcgctttattattcccagcaaaacagcctgctgggattaagcggacagaatgaacagaatattttgcaggttacatctctggaaagccagattctcactcaggccgcggaatttgataaccggatttatcaactggaattacagcagtccgagctgatgaaagagcaggtgaataatgatgcgggcggcgaaattattgtccgcgccctgacagacggccgtgtggattccctcggcgtgaccgtcggccagatggtcaatcccggcgataccctgctgcagatcctgccggaaaatatccgtcagtactggctggtgctctgggtgcccaatgacgcgctgccctatctgaatgtcggggatgcggtgaatatccgttatgaagctttccctgcagagaaattcggccagtttgccgccaccattcaggtgctctccaaaacccccgcctccgcgcaggaaatgatgacctacgcgggagcgccgaaagtcagtcagatgccgcagtccatcccctattacaaagtgattgtgcgccccgggaaacagatgatcgcctatgacggccgcgaactcagcctgcaaaacggcatgaaagccaataccacgctgtttctggagaaacgcaaaatctatcagtggatggtatcgccgttctatgacatgaaacagagcgcctccgggccaacaggagcagacacaccatga

SEQ ID NO: 274582 - DNA, 276 bp, Morganella morganii
atgaaagaattaaattgtgctgaaattgaactggtttccggtgccggatgtgttcaggactctatcaccgatctcggaaaaaaactcggtgactggggttttgaacagctcgggccttatctgacggtagatctgccggtgatcggtaaagtcagcctcaaagatgcatatccggggctgggcagggaagtcggcggaaaagtgggttcagctgtcggcggttttattgaaggtaaattaggcggcattgtggatctcggtggtatttgtaaataa

SEQ ID NO: 274583 - DNA, 972 bp, Morganella morganii
atgcaaatgatgcaggcagtaaatccggtcaaactgaagtcagttataaaattgattattgttgccgttattctcctcgtcgcgggagtggttacttttaattcgtatactattgtgcaggatggttcggtaaaagtcggaacctttttaggtaaggttaacccggtcgcttatgatgccgggctgcatttcccgattaacccgtttatgacatttgatacctattcaacaaaagatatccgggtgtcactgaaagagttacgcgtaccgtcacaggacaaactgaaatccatcgtggatattacggtgatgctccagtttgatggcgctaaagctcccattctccgtattaacggcggtacggaaagtgaagcgctggataaatatgtccgccagaaactgatttccacgattctggaattcgggaaagatgttgccaacgcacaggatctgtataccgcagatacccagcggaaattacaggaatctatccgtgatgccattcagggttatgcttcaccttacggctatacgatcaaagagattatgatccaggatattacgctgccggaagtggttcaggagcaggtcgtgaataccaagatgcgtcaggagcagataaaccaggcaaaagcggaagcagagaaagagcgtgaactggctcagaaaaaagtggttatcgcacaggcagagcgtgagtctgcagaacagcaggcacttgcccgtgagcgtaatgctcaggccagctcttatgcaatgcgtcaggaagccgatgcccgtttatataccgctcagaaggaatcagaagcgaacgccgtgttacagcagacaatcacccgcgaaatgattaactggaagcagcttgaaatagaacaaattaaagcagagaaatataaaggtgaagtgcctaacattgttgttggtgcagactatgacggaaaaatgatcatggatatgcgttcacagcagtaa

SEQ ID NO: 274584 - DNA, 555 bp, Morganella morganii
atgaagaaaacacttactgcatttattgctgcctcatgtgctattactacttttacagcacacagtgcggcagataataccgttcgttttattggtgaagttgcaaatcagacatgctcactcgatattaacggcacagataaaagtccggttgtattattgccgacagtacctgtgaaagattttaaaagtactgtcggtaccactaccggcgatactgaattcactatcaatatcagcggatgtaccgctacgactgaagcaggtatggaaaaaacactgagtattgcgtttgtcggtaactcagtcaccacctctaaaaacctcggaaataccggtgatgcggatggtgtctctattcagttagtggataacaacgccgttaatcttgaattcaccccgggggatttaattaaatcatcacagaaaatcaatattgctgatgatggttctgttgcccctgttaatttcgttgcccgttattatgcagagaaaagtgcagtaactgccggtagtgttatcgccagcgcgcaatatgccattacgtataaataa

SEQ ID NO: 274585 - DNA, 708 bp, Morganella morganii
atgaaaaaatatttattatttattatattaagctttctcactgcttttcatgccaccgccagtgtcactatgctgggaaaccggattatttataatgaaaatagccgggataaaactctgatattttcaaatgataatgaaacaccggcactggttcagatctggacagatgtcaataatccgaaatcttctccggacaatgctgatggcccgtttgttgcggtgcccgctatttttaatattaccgataacagcaagcagaatgtcagactgacctataccggcgggaaattacccggtgatcgcgagagtatcttttattttaattatctgagtattccttcagtcaaaaaagaagatgcggataaaaataaactgatgattgttgtcactaaccgcatgaaattattttaccgtccggcaaaaatcgggaatgacaccgctgatgtaattaacaaactcgaaatcagccgtcagggcaatatgcttgatgtccgcaacccgtcgcctttttatgccagcgtttcctccgctgcgttatctgccggaaataagcagggacaaattgaaaacaccaccatgatagcaccgtattcctcagcaaaatggtctttgcctgtcggttatcagagcggaaatgtcactctgctcctgggggttattaatgattacggtgttgaaaaaacacgctcaattaccctgaactga

SEQ ID NO: 274586 - DNA, 2529 bp, Morganella morganii
atgaaacacgttatcccttttcttacccgtaacagaatcactctggtacttctgagctgctgcctctgcgatctgaataccgtgcgggcagaggataataatgattattatttcgacccttcactgatacgcgggaataccctgacaaacagtgcattgcagacatttaatacccgtaatgccattccgccgggggtatataaagttgaccttctggtcaatgatcagtttattgctcagacaagcgttccgtttaaagaagataaaaacgggaaaatttcagcctgcctgacaccggaacaaatccgcctgaccggactgaaagaggaaccggaactctccgggaatactgaatgttattttccggatgagatcggggaaaatatcaccagccggtttaataacgcagaactgaaactgaatctgaccatacctcaggccatgctttccggtcaccggcagaagcggatcccgcaggaaagtctggaaagcggcgaaaccatgttattcgccaactacaatgctaatcaatatcatgtcagttacagcgacagccgcacccgtgatatgaattccacctacctgagcctgaatggcggatttaatctgggattgtggagtttccgtcaggaaagtcagtataactggtcagacagtaccggcggaaaatggaataccagccgccgttatattcagcgcgcactttatgagatcggcagtaaattattaatcggtgaaggcttcacttccggtaattttttatccggtatgggatttaaagggatccgcctgagcactgatgaacggatgctgccggacaatgaacgcggatatgccccgcgtattcaggggatcgccaacagtaacgccaaagtcaccgtctggcagggaaatcagcagatttattctgtcacagttgcccccggcccgttcgaaataaacgatttgtattccacaaactacgccggtgaccttcgggtggaagtgacagaggcggacggcagtgtaaacagctttattgtgcccttttccgcagtaccggagtccgtccggcccggcagcacaaaatactctgtgacagcggggaaaacccggtttaccggcaacaatgacaatttcagtgaagtggtgattcagcacggcctgacaaaccagatcactctgaatgccgccggtcaggtggcgaaagggtatcaggccatgctgctgggcggtgtgcataccaaccgtttcggggcattcagcttcaacgccacgctgtccaatgcaaaattacccggcacaacggaaaccggctggcgttttcatgcctcctacagcaagacatttcagccgacggatacctcggtaaccctgtccagttatcattactccacgaatggtttccggacactgaatgacaaactgagcgcggactatttcgccggtaaccagatatcagacacagactaccgtattctgcgccagcgttcccgttttgatatcacactgagccagaatcttaatcagtacggaaacctgggattgtccgcatcacgggagaattaccataattccggcgaaaagaatgaccagctgcaactctcctggagcaaaatttttgataaccgggtggcggttaacctttctgtcgcgcggatgaccaatgccgcagccgctgacggtttacagccggacagcagtgtacgcagcgggaaaaaccagaatttcgtctcactcgggatcagcatgccactgggggatcagcgctattcgccgaatctttcattctctgccagccacagcccgggacggaatgattatcagactaacctgtccggcctgaccggaacagaatctcagccggtcagctacgggctgagctatatttcagatgaccggctgagccagggaacgatttccggatctttacaaacacagctgccggtgaccaatctgcgcgtcagtgctgccaaagcacccgactaccggcaggcctccgccggtgctcagggttctctggtattacaccgcggcggacttaccgccgggccttacctcagtgatacctttgccattgtcgaggcaaaaggggcacagggagcaaaagtggtcagtggcggaacggtcagcagcagcggctatgcgctggtgccgtcgctgatcccgtatcagtacaatgcggtgatgctgagcagcgaaggcattgatacacaggctgaaatcagccgtccggagcaaaaagtcgcgccttacagcggcgcaatgctgcggataaaatatgaaaccaatgcaggccagccggtgctgatcaccctgctgtatgccggaggaaaaaccatcccgatgggcagtcaggtgcttgatgataatgatcaggtaaccgggatgaccggccaggccaatcaactctatttccgggcagacaaaccggagggacaactgcggatagtctggggtgacggccccggcaattcctgtaccaccacttaccggctgccggatgacaaaccggttcctctggtttcaatggcactgccgtgtcagtaa

SEQ ID NO: 274587 - DNA, 1335 bp, Morganella morganii
atgacaagaataatcaaaacgttacttatttccttcatcacattaacggcattttacagtatcagcgcggatgcaaaatgtgtgcggatcaccaaaaaacagaccggtgcggatgtctccggtctgggcaccgggctcgggaatatcaacatgaccagcgcgtatctccagccggtcgggacggttctcgcctcctccgtcaccagctggacgcagtccccgctgtttcccgacccggatgaagtgctgtacgaatgtgacgcagcagataaaggcagtatctttgaattattcgccaccaacggtgatgaccgccacggcggattctttgatatcggcaaaactgacggctacgaaaactattacgccacctggtttccgtatactgccatccgctttacccatatgaattccggtcaggtgtttacccgttactggcagagaacgccgatcaccacctatgcaaccaccgcaaacggaaaaattcagatccgcgtacgggatatcagtgccatgaaagtggatttaatcaaagtcagcacacttccgccccgctccggtgcagccagtgcatactgcggcagcggcatggcgcctgtgaccggtacctccacttaccgctgcacccagccgaacgcctatgtcattttcgagggaccgaccggctatgtctatccgaaagaaggtactgattccgcctatcattatgagggattcaattatgtctggtggatgtcaatagggatgaacggctcaccggtttcctcgtattcccatgatgccacctgtgctgcccgaaatgtcacgccgctggtgcagctgccgcgcatttctgccgggcaacttaatgccgggcagaccgtcagcagcgcctttgatatcaccgtggagtgcgataatgcagtggtgtcaggcgttggtacagcccagacttccgtcggattacagacatcacaggaagcttaccgcaaagcacagcaactcgggctgataaacagtgccggtggcgtggaatatttactgtcagatggttatggtacagtatcgtcagtggccaccggtgttgggatccggctcagtaatgccgtcaccggacagcaaatgccgtttgtcggctggagcgggtgcaacggttccacgccgtgttcagcgaataccgctaatcaggccgggtggtttcctgtgttgtcaggcgcatcgtccgccggttcatccgccacaggctacaccagctatctgatccggctgacagcaacacttacccgcctgccgggacagcaggcacagcccggtaatgttgatgccaaagcctatgtgctgattaaagtccagtaa

SEQ ID NO: 274588 - DNA, 750 bp, Morganella morganii
atgaaacgatactcagctctctcctgtcgtcccctgattctggcggctatgctgctgttcacaacctctgcggcggtagccggtatgctggcatcatcaacccgtgtggtttttcaggagggtcaggcgcggaaaaccctgctgctcgccaataccaatgattatccggtactggtccaggtctgggtggatgacggtgagaacagcggcgtaccgggagaggataaatacccgtttgtggcacttccggcgatttttaccgctgatccgcagtcacgcagcaatcttgagataatctataacggtacaccgctgccgtctgatcgtgagtccgtcttctggctgaatttatatgaaaatccggccgtcaaaacaacggacagtgataaaaataaagtgctgatggcaatgaatacccaaatgaagattttttaccgtcccgccggattaaccgcccctctgagcaaacggcttgaaacactgacattctcttaccgggagaaggacggccggatcaccgtaactgcccgcaatccgtcaccttattatctgtcattatcctcgttgtcactgaccgacaataaccggcgctacacggcggctgccatgccggacatgatgattgcaccatacggggaaaaaacctatgtcattgatgccgcttccggcataacagcagggaattataaggctgaggcggtattcattgatgacagcgggcaatccctgacattatcccgggagctatag

SEQ ID NO: 274589 - DNA, 984 bp, Morganella morganii
atgtttaactgcattctgattgaaaatactgacggctataccgcaaagctggctcagctcgatgaatcacaactgccggatcacaatgtgactgtgcagattgactactccacgctgaactataaagatggcctggcgattaccggcaaaagcccggttgtgcgcagttttccgatggttccggggattgattttgccggtaccgtgaccgaaagcagctctgaacactataaagttggcgacaaagtactgctcaacggctggagtgtcggcgaaaaatactggggcgggctgtctcaggtggcaaaagtgaaagacagctggctgacaccgttaccggccgggatgagcacaaagcaggctatgatgattggtaccgccggttacacggcaatgctggcggttcaggcactgctgaaacaggggatcaccaaagaatccggtaaagtactggtgaccggtgccagcggcggcgtgggcagcttcgctgtttctctgctgtcaaaattaggttttgaggttatcgcttccaccggccgtacggctgataccgcgtatctgatagataccctgggcgcatctgaaatcatggatcgcaacgagttatccgtaccgggtaaaccactgaccaaagagcgctgggcggcggcgattgacagtgtgggcagccacacactggccggtgtctgcgccggtactcagtatggtggcgttgtggcggcctgcggcctggcacagggcatggattttaacgggactgttgcaccgtttatcctcagaggcgtgagcctgatcggtatcgacagtgtgatgcgcccgcaggcagatcgtgtggcggcatggaaacaactggctgaactgactgatccggcacagctggaaactatcagccgtgtgatcccgttaaatgaagcgattcctgcagcacacagcctgctgaacggcgaaatccgcggccgtgtggttgttgatgtaaacaattaa

SEQ ID NO: 274590 - DNA, 642 bp, Morganella morganii
atgacatcagtaatcacaaaaccgaaacggggacggccgccgaagaatcatgatgcgggtgcggatgtaaaaaaaatgctgatccgcagcggcatggagatgtttaccgaaaaagggtatatgacatcggatatcaacgggatcctgaaaaaggttggtgtgccgaagggctctttttactattactttgacagtaaagagcagtttggcctggaaatcatgcgtaattacgacagctatttttcccgtctgctggataaatgtttgtctgataccacgctgccgccaccggaacgattacgggcattttatctgaccgccaaagccgggatggaaaaataccactggcagcgcgggtgcctggtggggaatctcggccaggaagtgaccagtctgccggcagggtattgtgaaatactcgatgagattattaccggctggcagaagaaagtggaaatctgccttctggaagcacagaaacagcagcttatttccgctaaaacagattgcaggcaaatggcggcttttttctggacgggctgggaaggggcggtaatgcgtgccaaattaacccgtaacagtgaaccgctggatctgtttatcactgtttttatgacacagatactggctgataaagcctga

SEQ ID NO: 274591 - DNA, 216 bp, Morganella morganii
atgttttttatccgggtaatttccggcaccggtttagtagataaaggtaaaatcgactttgccgtcagcgctgccttctgtgacaaaatcattgctgtaacggatatagcggacaaagaaagggaaaatttacatttttacatcgtggctaccaatcactatctggccatcttccttgataaattcactttgttgctgattaggcaatatatctaa

SEQ ID NO: 274592 - DNA, 423 bp, Morganella morganii
atgaatgagctcactatctaccataaccccaattgtggcacttcgcgtaacacccttgcaatgattcgcaatagtggtgttgagccaacgattatttattacctggaaacacctccggctaaggatgtgttagtgcaacttattgcagatatgaaaatcacagcgagggagctattacgaaaaaatgttgagccgtataagcaattaaatttagaaaataacctttattccgatgagcaattgatcgattttatgttgcagtacccgatactgattaataggccgattgtcatcactccgctgggtgtaaagttgtgtaggccttcagaggtagtgttagatatattgcctaatcagcaacaaagtgaatttatcaaggaagatggccagatagtgattggtagccacgatgtaaaaatgtaa

SEQ ID NO: 274593 - DNA, 1290 bp, Morganella morganii
atgtttattgccgcattcatttttattttaacgatcatctttgttatttggcaacccaaaggacttggtattggctggagtgctacagcaggggctgtattggcactgatctttggtgtgatcagtttccaggacatcccgattgtctggaacattgtttggaatgctacggcgacatttgttgccgtaattatcattagcctacttttagatgaaagtggtttctttgaatgggctgcattacatgttgccaagtggggcgggggtaaaggaaaactgttattcagttatatcgtgttacttggtgcaacggttgcagccttatttgccaatgatggcgccgcattgatattaacgcccattgtgattgcgatgttattggctcttggtttcaacaaaggcacgacattagcatttgtcatggctgccgggtttattgcagatacggcgagcttgccgctgatcgtttcgaacctcgtgaatatcgtttctgcggacttctttgatattggatttactgaatatgcatcgattatggtgccagtggatattgcagcaattattgcaacattagcgatgctgcattggtttttccgcaaagatattcctaaacaatatgatgttaccaaactgagtgaaccgactttagccattaaggatatgacaacgtttaaaacaggttggctggtattgatactgctgcttattggtttctttgtcttagaaccattaggtattccaatcagtgcaattgcggctattggcgctttaattctttggatgattgcagccagaggccatacgattaataccaaaaaagtattacgcggagcaccgtggcaaatcgtcattttctctttaggtatgtacttggttgtttatggtttaagaaatgcagggttaaccgattatctttctgaaacgctcaattaccttgcagacaaagggttatgggtggcaacaattggtacgggatttataactgcatttttatcctcaataatgaataacatgccaacggtattaattggtgccctgtccattgaaggaagtgaagcatcaggggtaattcagcaagcaatggtttatgctaacgtgattggtgccgatttgggtccgaaaatcacaccaataggtagtttggctacattgctgtggctgcatgttttatcgcaaaaaaacatgaccattacatggggatattatttcaaaacagggattatcatgactatccctgtgctcattgtcacactcgttgctttagtacttcgactttcactgttaaattaa

SEQ ID NO: 274594 - DNA, 1752 bp, Morganella morganii
atgaaatttttagataacacacctaattatttattttttactggaaaaggtggtgtgggtaaaacctctgtttcctgtgcgacagcaattaagttggctgaaaaagggaaaaaagttttactggtgagcactgatccagcttctaacgttgggcaagtattctctcaatcgataggcaacaatattaagccaataacattggttccaaatctatttgctattgaaatagatcctcaagccgcagccgaagaatatcgaaacaaaattattaatccaatcaaagaaagtttacctgaagcggtaattcaaggtattacggaacagctatcaggtgcctgtaccacagagattgcagctttcgatgaatttaccgggttgttaaccaataccgaaattacagagcaatttgaccatatcatttttgataccgcaccaacggggcataccatccgtttattacaactcccgagtgcatggagtgactttattagtaataatcctgatggcgcgtcatgtttagggccaatatctggtcttgataaacaacgtgagcagtacagcatggcggtggaagcgctgagtgataaatcactgacaaggctggtcttggttgcacgacctcagtctgccgcattgagggaagtcgcaagaacctatagtgagttatcatctctgggtatcaaaaatcagcaattgatagtcaatggtgtttttcctgaaactgcggtgacggaaaatgataagttatcccatgcgctctactctcgtgaacaagcggcattagagtctatgcctgaagcactacgctcgttacctgtcgatattctttatttacaaaagatcaatatggtgggtgtcgatgcactgaagcagttgttatctaatgacatgccacaaattccaactattaccccgacaaaacaacctatttctttacctaccttgtcagaactggttggcgaaatatctcagcaacagcatgggctgattatgttaatgggcaaaggtggtgtagggaaaacaacgattgcggcatcaatcgcagttaaattggcagaaaaagggcttgatgtacatctgaccacatctgatccggccgcgcatattgaatcaaccctcgatggtgttttacccaatcttcaggttagccgaattgaccctgtcgctgaaactgagtgttatcgtaattatgtcttagaaaccaaagggaaagatttagatgaagaggggcgtgcattacttgaggaagatttacgctctccatgcacagaagaaattgcggtatttcaggctttctctcgcatcattagagacgcgggtaaacgttttgtcgtcatggatactgcgccgaccggacatacattattacttctggatgcaacaggggcataccataaagaaattgctaaaaaaatgggcgaaaaaggccactatttaacgccgatgatgcaattacaagatcctgaacgcactaaagttattattacgacactcgctgaaactacgcctgtgcttgaggcggagaacttacaaaatgatttaatacgggcagatatatatccgtgggcgtgggtgatcaataacagtttatctatcacggaaacaacatcaccattgttactttcaagagcagaacaggaagtcgctcagattgaaaaggtgacatcaacattggcaaaacgtgttgctattgttcctttgcttgaaacagagcctgtggggatatctgcattaagtcagctcgcagaataa

SEQ ID NO: 274595 - DNA, 366 bp, Morganella morganii
atgaaaaaactagaagtatttgatccagcgttatgctgtagcaccggtgtttgcggaaccgaagtcgatcaagcattggtagacttcgcaacagatgtggattggttaaagaaacaaggggcaagtataaggcgttttaatttagcgcaagagcctatggagttcgttaacaacacaaaagcaaaaacatttttggaaaccgcaggtgccgggtcacttccgctattgattcttgacggtgagattgtgctgactggtcgatacccaaaacgacatgagctagccagatggtttggtattcgaccgaatattgaaaaagctgaaattgttaaatcgtgttgtggtaatggtaaaacgtgttgttaa

SEQ ID NO: 274596 - DNA, 336 bp, Morganella morganii
atggaaccattacaactgtttaaaattttaggtgaccaaaccagactggatatcgtgctattgctaaaagcatccggggagttatgtgtctgtgatatctatacggccttgaatttatcgcaaccaaagacatcccggcatctggcaatgctaagagaatcaggtcttttgctcgattcaaaacatggcaaatgggttcattatcgtttatctcctgcattactaccgtgggtgaaaagtatcattgatgtcacttacgccacagagaaaaatagagttgcagatttgcttaagagtctggagacaaaagaacctgcgagtcgctgttctatataa

SEQ ID NO: 274597 - DNA, 864 bp, Morganella morganii
atgtcagcaaaaattatagacgggaaaacgattgcgtcgaccatacgtgccgaagttgccgcaaaagttcagcaacggattgccagcgggaaacgggctcccggtcttgccgttatcctggtcggtgagaaccctgcgtcgcagatttatgtcgccagcaaacgccgttcctgtgaagaagtcggatttatttcacgctcttatgacctccccgatactaccagcgaagccgaactcctccatctcattgatgaactgaataatgataatactatcgacgggatcctcgttcagcttccgctgcctgccggcattgataatgtcaaagtgattgaacgcattcatcccgataaagacgtcgacggttttcatccttataatatcggccgcctgtgccagcgtgcgccgaatctgcgcccgtgcacaccgcgtggtattgtgacgctgcttgagcgctgcaatatcaatacatttggtctgaatgccgtgattatcggcgcatccaatattgtcggccgcccgatgagcctggagctgctgctggccggttgcaccacaacagtcactcaccgctttaccaccaatctgcgtcaccatgttgaacatgcggatttgctgattgtggcggtcgggaaacccaattttatcccgggtgagtggatcaaacccggcgcaattgtgattgatgtgggcattaaccgtctggaaaacggcaaagtggtcggtgatgtgaattttgccgaagccgctgaacgcgctgagtggataaccccggtgccgggcggtgtcgggccgatgacggtcgccacactgattcagaatacattacaggcctgcgaagaatttcacgataaggacgaataa

SEQ ID NO: 274598 - DNA, 213 bp, Morganella morganii
atggatatttttaatcttgacggccatccgcatgttgaattgtgcgacctgctcaaaattcagggctgggccgacagcggtgccgccgccaaacaatttatcgctgatggtcaggtgactgttgacggtgagactgagacccgcaagcgctgcaaaatcaccgccggtaaagtggtggaatttgccggtgagcaggtaaaagtggctgaataa

SEQ ID NO: 274599 - DNA, 534 bp, Morganella morganii
atgaaaacacaaaaatttcagccggtgcagattgccctgcactggtttattttcctgcttgtgattgtcgtttatatcagcgccctgttacgggataatgctgacgaaccactgagaagtattttggccgggctgcattacagttgcggtattgctgtcggtatactgatgattgtccgtctggccgtcagaataaagcaccgcgcaccggctatcattccaaaaccgtctccgatgataaccggattatcccatctggtgcatctgatgatctttgtgatatttattctgttaccggtgctcggtttcagtattaaatatctgaacggttatgactggtcgttattcggtatcccgatgccggtttccgccgagccggatgaagatctcgcgtacagcatacagaatattcatgagatcattgccaataccggttattttattatcggcctgcatgctgccgccgcactggcacatcactacttctggaaagataataccctgctgcgcatgatgccgcgcaaacgggactga

SEQ ID NO: 274600 - DNA, 390 bp, Morganella morganii
atgagtaaaaatatgttagctatgctggtggcgtctgtctgtgcattcggcgcaatgacggcatctgccgccggattgtcagataatatgaaaacgctgaacgcgaatctgcagatcgttgaaaaaaccgatgatgcggcagcactgaaaacagcactgaccgacatgcgcgctgcggcacagagtgccagagaagaattaccggccaaactgaaaggtaaagcggcggacagcacagaagtgaaggattaccatcacggttatgatgttctgaccggacaaattgatgaagcactgaaactgacggaagaaggtaaaattccggaagcgaaagcgatgactgaacaatttaaagctacccgtggtgaataccacaagaaataccgttaa

SEQ ID NO: 274601 - DNA, 1389 bp, Morganella morganii
atgctgaaaatttataacaccttatcaagacaaaaagaggaatttaagcccattaaccccggtaaaatcgggatgtacgtgtgtggtatcactgtttacgacctgtgtcatatcggacacgggcggacatttgtcgcgtttgacaccatcgtgcgctatctgcgtcacgccgggtatgatgtgaactatatccgcaacatcacggatgtggacgataaaatcatcaaacgggcgaatgaaaataacgaaacctgtgatcagctggtggatcgcatggtggcggagatgcaccgcgatttcgatgccatgaacctgatgcgcccggattcagagccgcgtgccacacatcacatcaaagagattattgagatcacgcagttactgctcgatcgcggtcatgcctatgtggcggacaacggggatgtgatgtttgatatcagcagcgacccggaatacggcctgctgtcacgtcaggatctggagcagctccaggccggtgcccgtgtcgaggtggcggatgtgaaacgcaatccgatggatttcgtgctgtggaaaatgtccaaaccgggtgaaccgtcatgggaatccccgtggggcgcggggcgtccgggctggcatatcgaatgttccgcgatgaacagcaaacagctgggcacccattttgatattcacggcggcggttctgacctgatgttcccgcaccatgaaaacgaaatcgcgcagtccacctgtgcccacgacggcccgtatgtcaattactggatgcactccggtatggtgatggttgataaagagaagatgtcaaaatccctcaataacttcttcaccatccgcgatgtgctgggctattacgacccggagacggtgcgttacttcctgctgtccgcacattaccgcagccagctcaattacacggaagagaacctgaaacaggcgcgtactgctctggaacgtttctataccgcactgcgcggtacagataaaaacgctgcggtagtggtgaatgaggaattcgcaaatcgtttccgcgatgcgatggatgatgatttcaacacgccggaagcttactccgtgctgtttgatatggcgcgtgaactgaaccgcctgaaacaggaagatatgacagcggcaaacggcctggcggcacaactgcgccagctggccggtgtgcttggtctgctgactcaggatcctgagcagttcctgcaaagcggtgcacagagcgaaagtgatgaagatgcagcgaaaatcgaagcactgatcaaacagcgcaatgatgcccgcgcgtcaaaagagtgggcgctggcggatgccgcccgtgatgcattaaccgacatgggtattgtgctggaagatggtccgcagggcaccacctggcgccgtaagtaa

SEQ ID NO: 274602 - DNA, 495 bp, Morganella morganii
atggtaacttttcatacaaatcatggtgatatcgtcattaagacgttcgcggataaagcaccggaaacggtcgcaaacttcctgaaatattgtgaagacggcttctacaataacaccattttccatcgtgttatcaatgatttcatggtccagggcggcggttttgaaccgggcatgaagcagaaaccgactctcggtatgatcaaaaacgaagccaacaacggtctgaaaaacaaccgcggcactctggcgatggcccgtaccaacgatccgcattccgccactgcacagtttttcatcaacgtggttgacaacgactacctgaacttccgttcagaaacaccaagtggctggggctactgcgtgtttgctgaagtggttgaaggtatggatgttgtggacaaaatcaaagcggtcaaaaccggcaacagcggtatgcaccaggatgtgccgcgcgaagatgtaatcatcgaaagcgtgactgtttctgagtaa

SEQ ID NO: 274603 - DNA, 723 bp, Morganella morganii
atgaccacgcttattattgcagatttgcatttaaatgagcaggagccggcgatcaccgccggctttcttcgtttcctgcgggaacaggcggttcacgcatcacagctctatatcctcggcgatttttttgattactggattggtgatgatgacccgaacccgctgcataaaaccgtggctgatgcactgaaatccctcagtgacagcggcgtgaagatcttctttatctgcggtaaccgtgatttcctgctgggtgagcgctatgcccgtcagtgcggcatgaccctgctgcctgacacgcaggtaattgaagccgaagggcatcagatcctgatcctgcacggcgataccctctgcacggatgatacggactaccagcattatcgtcagcgcgttcacactccgtggatccagcgcctgtttctgtggctgccgctgtcgctgcgcctgaaaatcgcgaagaaaatgcgcgcgggcagtcagtctgccaatcagcgcaaaagcgaagcgattatggatgtgaatcagaacgaggtgatgaaggcattccgtcagtaccggacccgctggatgatccacggccacactcaccgtcctgcggtgcatgatgtctccgctgacggcgaaacgcactttcgcggtgtcctcggcgcgtggcactcacagggttctgcctttaaaatcaccccggacagcatttcactgatcttctttccgttctga

SEQ ID NO: 274604 - DNA, 525 bp, Morganella morganii
atgaacgccgcctcttcgcaacaacactcaccggcagccaaagtggctattgttatgggatccaaaagtgactggagcaccatggaacacgccgcagcgatcctcgatatgcttcaggtgccttatcacacagaagtggtttccgcgcaccgcacgccggacaaactgttttcctttgctgaaaccgcaaaacagaacgggtttgatgtgatcattgccggtgccggtggtgccgcgcatctgccggggatgctggcggcgaaaaccctcgtaccggtgctgggtgtgccggtgcagagtgccgcgctcagcggtgtcgacagtctctattccattgtgcagatgccgaaaggcattccggtcggtacgctggccatcggcaaagccggtgccgccaatgccgccctgctcgccgcacagatcctcgccctgcatgatgaggcgctgcttacccgcctgacagcatggcgtaatgcacagaccgatgatgtcctcagccacccggatccgcgggaggccaactga

SEQ ID NO: 274605 - DNA, 1071 bp, Morganella morganii
atgaaaccggtgtgtgttctgggaaacggccagctgggccggatgctgcgccaggccggtgagccgctggggatttcggtttatccggtcgggttagatgccgagccggaagccgtcccttatcagcacagcgtgatcaccgctgaaattgagcagtggccgcagaccgcgctgacacaggtgctggagcagcaccctgcctttatcaaccgcgatatttttccgcgcctggccgaccgcctgccgcaaaaaacgctaatggacgatctgcatctcgccacctcaccgtggcagccgctctcctctccggatgaatggccggacatttttgcccgtctcggggactttatcatcgtcaaacgccgtaccggcggttatgacggacgtggtcagtggcgggtgcgtcccggtgatgaagctgctctgccgccggagatttacggcgaatgtattgccgagaaaggcattctgttttccggtgaagtgtcgctggtcggtgcccgtaaccgcgccggggaatgtgtgttttacccgctgacccgtaaccatcacgaagagggcattctgcgtatgagcgtggccttcccgcagacacaaaacccgcttcagacacaggctgagcagatgctgggggcgatcctcactgagctggattataccggtgtgatggctatggagtgttttgtcacagaggacggcctgctgatcaacgaactggcaccgcgagtgcataacagcggccactggacacaaaacggtgcgtctgtcagccagtttgagctgcatctgcgggcgattctggatctgccgctgccgcagccggttgtcaccgccccggcggtcatggtgaatattatcggcacagaactgaatacacagtggctggcacagccgctggcgcatctgcactggtatgacaaagaagtgcgcccggcgcgtaaggtcggtcacattaacctgtcgcatccggatccggcacagcttatcgcggcactcagcgggctggcacaggatttaccgccggaatatcaatcctctgcggactgggcgaaaacaatattaagctggtag

SEQ ID NO: 274606 - DNA, 1266 bp, Morganella morganii
atgttttcgtcagatcgccgcttaggtcctgtttatcaatggactatactcaccctgctggggctggtttatttcctcaccactgccaccacctttacctcattaggcgtggtcttacccggcatgctcagagagctgaactggagctggacagacgccggtttcggattcaccctgctcgggctgacctgcgggctatccagctttctgccaagtcttctcatccgtaaaaccaatgtccgcctgacgctgctggccgggctgctgctgtttctggccgggttttacagcctgtacaccacacagtcaattcagcgctattttatcggtaccgcctttctcgggattggttttacctttatggccaccgttccgggcacttatgtgatttcgcggctgttcagccgtcagtcgctggcgtttggtttttactttacccttggcgggctgggcggcgtagtcgggccgtggatctattttctcgctgcgcatgtgttcggctcctggcggatccactggctgatctccgctctgacgctggccgttgtcactctgatcaccctgctggtgatgcgggaaggccgccgtgaaattactcacgcccgtgctgtcatgtggcagcagaaaaaacagagttcccgcatctaccgcagtcaggcgcgctggagtgcccgtcaggcgctgagaacctggcagttttatgtcatcgccgcctcttataccgcgtttttatggtgcggattcaccgtaaacagctttgccgtgccgcatattatggataaggggttcagtgaaaccgttgccgccacgctgctcagtaccatggcctttattaacgccttttcccggctggccggcggcgctatcggggagtggctggagccgaaaaaactgctgattatcagcctcgccactatcacattcggtgtgctgacactgagtatcgcgaccagctggccgctgctgatcctgtttaccgtgctggtggggattggttacggcatgacattcctggcctcgagtgtgctgctggcaaactatttcggccgtggtccgtatctggagctgttctctgtggtgaacctgatttccacctttgcctgtctggctccgttctttgccggtgccgtcaaggattacagcggcagctttacccctgcgtttctgctgattgccctgccggtgattgtgattctggcggccacattctttatgcggccaccacaacacaaaccggtcagagcatacacatcatcgccggactaa

SEQ ID NO: 274607 - DNA, 2433 bp, Morganella morganii
atgatctggcgctggttctggcgggagtggcgtacgccgtctctgctggtggtctggctgtcactgacgctggcggtggcctgtgtgctggcactgggacgtgccggtgatcgtattaatcaaagtgtgaactatcagagccgtgactatctggctggtgatctggtactgcgcggctcgcatcccgcggatgaaacctggctgaaaaaggcacaggaaagcggtctggcgctcagtcagcagatgagtttcaacaccatggtatttgccaatgatgtgccgcaactggtgtatgtcaaagcggcggatgacgcttatccgctgtacggcgagctggaaaccgacccgcccggcctgaaacctgcacggggggagattctgatcgcgccgcgtctggctgagctgctctcggtaaaaccgggacagatgctggaagtgggggataccgatctgaaaattgccggttttcttattcaggagccggacagcggttttaacccgtttcagatggcgccccgtgtgctgatcaatttacaggatgtggaagccaccggtgccgtacagccgggcagccgcctgacctaccgcgatatgtttgccggtgcgccggatgcggtggcggtgtttaaacagcagtatgaagatgcgctgcggattgaccagcgctgggtcaccctgaaacaggaaggcggggcgctggcgaagtcgatcgatcgcgctcagcagttcctggtgctctctgcgctgctgacattgttgctggcgatcgccgcagtggcggttgctatgtcgcattactgccgcagccgtcacaccctgattgccgtactgaaaacactcggagccgggcggcgcgagctgcgttactgggtggtcggccagtgggcggtgctgatggcggcagcaatggttgccggatctctgctgggactgatttttgatgcaatcctgatgagcctgctggcaccgctgctgccgaaggcgctgccggatccgggattatggccgtgggcatgggcactgctgacactgcttgccatcacgttgctggtgggcgcacggccttaccgccagctgatgctgacacaaccgacccgcgtactgcgtgatgatgtggtggcgccggtctggccgctgcgctggtatctgccgctggcggtgctgattgtggcaggcgggctggcggtgctgaccaatgcctcgtttctgctctgggcggtgctggccggggtggtattgatcgccgcactgctggcggtggccggttacggcgggttatggctgctggcaaaaatcccgttccgtgcgctgagtctgcgcctggctgtccgccgtctgctgcgccagcccggccagacactggtacagaccggggcgttcgcgctctcttttatgctgctgggattgctggtgatggtccgcggtgatctgatcgggcgctggcagcagcaactgccgccggatacgccgaactatttcctcgtgaatatgactgaagaacagataacgccggtcaatcagctgctggcctcacataatgtgacgccgtcagaatattacccggtggtgctggcgcggctgtccggcattaacggcgaaactgcgctggcgtgggcggatgcgcgtgatccgggcaataatacagtccgccgcgaactgagcctcacctggcaggaatcgctgccgccgctcaatgagctggtggacggtacctggccgccgaaacccggggaagtctcaattgagatggaagtggtcaaagaactcgggctgaaagtcggggataccctgacctttaccggtgatacccgtccgtttaccgtgactgtcagcagtgtgcggcaggtggactgggaaagtatgcggcctaatttctttttcatctttaatcacgcctcgctggaaaaccagagcgccatgtggctgaccagctttcactatgacggcaatgacgggttaatcactcagatgaaccgcaagtatccgtccatcagtatttttgataccggctcgatgctgaaacagatccagactattctcgcgcaggtcagccgtgcgctggaagcgatggtggtactggtgctgatttgcggcgtgctgttactgctggcacagattcaggtggggatgaaccagcgccggaccgagctggtggtataccgcacgctcggagccggtaaacgcctgctgcggcgcacgctgtggagtgagtttgccttgctgggcgcgatggccggagtggtcgcggcgctcggagcggagacagccctgtggctgttgcagacccgcgtgtttgattttccgtggcagccgcagtggccgctgtgggtcgggctgccgctggccggtggtttcctgctgtcactctgcggcagcgtgctggggatccgcctgctcggggactctcagcaataccgccgcctgcagagttag

SEQ ID NO: 274608 - DNA, 687 bp, Morganella morganii
atggcagcggagcctattcttgaaattgatcatcttattaagcgcgtcggtcagggtgataatgagatcactatattgcagggtgccgggttggttgtcgagtctgaagagacaatcgcgctggtgggggaatccggatccggaaaatcaaccctgctcggcattatcgccggtctggatgacgcgacctccggtgaggtgaaactgctcgggcagtcactgccgcagctggatgaggaagcgcgggcaaaactgcgggcgcgggatgtcggctttgtgtttcaatcctttatgctgatcccgacccttaatgccctggaaaatgtccagcttcctgcgctgctgcgcggtgagtccgaatccgtcagccgggagaatgcagagcagttgctgatccagctagggctggaaaaacgcctgaagcatatgcctgcccagctttccggcggggaacagcagcgcgtggctatcgcccgtgcattctcgacccggccgaaaattctgtttgccgatgagccgaccggcaacctcgaccgccgcaccggcgacaaaattgccgatttgctgttttcgctcaaccgcgactatggcaccaccctgattctggtcacgcatgatctgaccctcgctgcccgctgtcagcggcggctgaaactgtcagacggtaagctggaggaactggcatga

SEQ ID NO: 274609 - DNA, 558 bp, Morganella morganii
ttgtatgccgccggaacattactgatactgggggacagcctgagtgccggttaccgccttccggccggagaggcgtgggcggcacagctgggacaacgctggcaacaggccggtaacggtatcacactgataaacggcagtatcagcgggaatacggcggctcagggacttgcccgtctgcccgcactgctggagcagcaccggccgcaatgggtactgattgaactgggtgccaacgacggcctgcgcggtctgccgctgacacaaacccgcactgaccttcaggctgcaattgatgcagtgaaggccgccggggcgaaaccgctgctgatgcagatccgtatcccgccgaattacggcaaacgctataccgatcggttctccgcgctctatccggcgctggcacaggaaaatgccgttccgctgatcccgttttatatggaagcggtcgtcaccaatccgcaatggattcaggatgacggcatacacccgaacgcggcagcacagccttatgtgactgactggatggataaaacactgctgccttacttacagtaa

SEQ ID NO: 274610 - DNA, 786 bp, Morganella morganii
atgcaaaaagcagttttgatcaccggcagctccagcggtatcgggctatgcgcggctaaaacactgaaacagcggggctaccgtgtgctggccgcctgccgcaaaccggcagacctggccgaaatggcgcgcctcgggtttgaaccggtggagctggatctggactgcccgcagagtgttgcccgcgccgcagagctggtgctggcactgacagataaccgcctgtacggcttattcaataatgccggttttggtctgtacggcccgctggacagcgtcagccgcgaagatctggaaaagcagttttccgccaatctgttcggcacacaccagctgaccaccctgctgctgcccgccatgaaacagaccggtgaaggccggatcatccagaccagctcggtaatggggctgatttccacgcccgggcgcggtgcctatgccgccagcaaatacgcgctggaagcctggtccgatgccctgcggatggaattgtccggcagcgggatccgcgtcagcctgattgaaccggggccgatcaccacccgctttacggaaaatgtcacacaaacgatgcaggataaaccagtaaaaaatccgggaattgcccggctgtttaccggtaaaccggaggatgtggtgaaaaaagtcatccacgccctggaacacccgcacccgaaaatacgctatcctgttacgggccttaccgtaatagtgatgtggctcagacgcctgctgccgctgtggctgatggataaaatactgaacaaaaaatcctctgccgcttga

SEQ ID NO: 274611 - DNA, 858 bp, Morganella morganii
atgttatcaaacgcacatatcacagacgttaacgaaaccaatttacgccaggttattgaatcttcaatgcaggtgccggtggtctttttcttccattccgcacagtccccgcagtgtcaggaactgggcactattctggaaaaagtggctgctgattacgccggaatgatgatcctcgccagagtgaactgcgataccgagcagatgatcgcctcacaattcggcctgcgtgcggtgccaaccacctatctgttccatcaggggcagccggtcgacggttttgaggggccacagaatgaagagactgtccgtaacttcctggccaaattcctgccgtctgaatctgaaatcaaaaccggtcaggccattgaactgattgaagccggcgattttcaggctgccctgccgctgctgcgtgaagcacaccaggctgagagtaataacagcgaaatcaccctgctgctggcacagacgctgatggaagtgaagctgtcagaagaagctgaaaaagtattgaagtccgtcccgattcaggatcaggatacacgctatcatggtctcttatctcaaattgagttacaaaagcaggccgcagacaccccggaaatccaggaactgcaaaatacctttgcggcggatccggagaatgcggaactcgcggtacagctggcgctgaaactgcatgaagtgcaccgcaatgatgaagcactggccctgttattcagcttcctgaagaaagatctggcggctgcggaaggtcaggtgcgcaaaaccatgatggatattatggcggcaatgggaaccgcagacagtactgccgcatcttatcgtcgtaagctatactcgttactgtactaa

SEQ ID NO: 274612 - DNA, 939 bp, Morganella morganii
atggatttgttctcactgggttttgtcccgattattattctcatcgccgtcattattgtcgcgaccggtgtcaaaactgtaccgcagggctttcagtggactgttgagcgttttggccgctatacccggacactgcagccgggcctgcatatcatcgtgccgtttatggatcgcatcggccgtaaaattaatatgatggaacaggttctcgatattccgtcacaggaagttatctcccgcgataacgccaacgtcaccatcgacgccgtctgctttattcaggtcattgacccggtgcgtgccgcgtatgaagtcagtaatctgaatttagccattatcaatctgacgatgaccaacttccgtaccgttctcggttcaatggaactggatgaaatgttgtctcagcgcgattccattaactcccgcctgctgcatattgtggatgaagccaccaacccgtgggggattaaaatcacccgtgttgaaatccgtgacgtgcgtccgccgaaagaactggtgtctgcgatgaacgcacagatgaaagcagaacgtaccaaacgtgcggatatcctcgaggcggaaggtatacgtcaggccgcaattctgaaagcagaaggtgaaaaacagtctcagatcctgaaagcagaaggtctgcgtcagtccgccttcctggaagcggaagcccgtgaacgtgcggcagaggcggaagcccgcgccacacagatggtatctgatgctatcgctgacggtaatatgcaggctattaactacttcgtggcacaaaaatataccgatgcactgaccaaaatcggtgcggcagaaaacagcaaagtcattatgatgccgctggaagcaagcaatctgatgggcgctatcggcggtgtggctgaaatgttcaatgtgtcaaaagacactaaaggtcagggtaaatccgcatga

SEQ ID NO: 274613 - DNA, 453 bp, Morganella morganii
atgattgagatgatcgcatcacaggcggtctggttctggctctgtttcggcggcatcctgctgattctggagatgctcggtaccggcggttatctgctctggagcggcgtggcggcattggttgtcgcgctgctgacgtggattataccggggctgaatcttgaatggcagggcattatcttcgcggtgatgacggtgatctgtgcggtgttgtggcgtaattttcagcgccgccgccagcgtgatgacagcagttcaccaaatcaggccaatcacaaactgatcggcctgcgtgccgccctgctgacagatacagaagaaggttacagccgtatccgtctggcagacggcagctggcgtgtctacagccagtcagcgctgcctgccggtacggaagtggaagtgattgccgttgacggcattacactgactgtccgggctgtcagccggtaa

SEQ ID NO: 274614 - DNA, 1485 bp, Morganella morganii
atgaaacgtagtgttttatctcttgctgtgggtgctgcactggtgatttctgatgcaacggcgtgtaccactatttttgtcggtgaaaatgcatcttcagatggtgcgcaatatattgcccgcaatgaagatatgaatccggcaaacccgaaagttttgcaggtgaatcaggaaaaagtaaataaagacactgagtttaaaaccaacttaaataaattcacctatacccttccggaaaaggcaatgcgttataccactatcccggaatggaatgataaaggtcagttccgtttcagttccaacggctttaatgacgccggtgtcgggatcagcgccacagaaacgattttcgccaatgaagcttcattaaaaattgacccgtatgtcgaagataccgggattattgaagatgcgattacggatgtggtattaccgtatgtatcttccgcaaaagaaggggtgatgcggttagggaaaatcattgaggaaaaaggggccggtgaaggtttcggcgtggcctttattgataaagacgggatctggtatctggaaaccggcagcggccaccagtggatggccgcaaaaatcccggccaatacctattatgtcaccgcaaaccagggccgcctggaaaaatttgatatgaatgacaaagaaaattacctgtcatccccgacactgatttcctttgccgagaaaaatggtttatatgatccgaagaaagacggtgagtttaatttcaaaaaagcctataccaaagatgacgcgaaaagtgacggttattacaactacccgcgtgtgttagtcctgcagaaaatgtataacccggaaattaagacagactttaaggatgtgaaatccaatgatttccctgtcttcttaaaaccggcgaaaaaactggggctggaggatattaaagccgggctgcgcaaccattatgaaaatgtcggcacatccccgtatgcaaccacctatccggataccactaaacgaccaatctcggtgttcagaacccagcactcccatattttacaggtgcgcaaagatttaccgaaagaaatcgggaatgtccgttatattgccttcggtatgccgacattatccgtttatgtcccggtatattacggcccggacagctacgtggaagcttataccatcggttcaccacaggcggataatgcctccgcgcactggaaattccgtaaattacagacactggcaatgatcgactttaataaatattcgaaaattgtgcaggcggaatacagcaaacaggaagctgagtttgccaaagaacagcaggcaatggaaaaagagtatctgagtatttataaaacagacccggcgaaagccaaacagctgttacaggacttccagaataaagtcatgcaggatgcattaaataccacggataaactgaccaatattattatgcaggatctgaccaattccgtgaacgaacgctaccgctttaaaggcgcatga

SEQ ID NO: 274615 - DNA, 645 bp, Morganella morganii
atgaatgataaaaagttacaacgacgacaggttcacgccgacatgccgaaattgatccccgcagcgggttttaaccggaaattaaatctgccctctgaaaacagcgaactgacagcactgtttctggccgccggtacgcatcagtttttattgccgggctatgaggtcaaagagggctatcaatttattaaatcaggtaaaaagcagcagtacaggctggtgactaccggggatttacccgaaaccgtttatctggttgagctttgcttccgcaatgacatcgttgccggtcagacaagttgcacacaaattaaggtatggcggacaaccaatgacaaacatcagtctgctgttgcagacctgccgcggcactttttccgctggctgctggatacctatcatattgtggttaccgatgaagaacaaaccggtgacggaaggcgtttttgggaagtgatgatttcatgggcattggccgccggtttttatgtttatgcttcagatggcggagagccggaaaggccactgtttgttattcaggatatggaatccttttttgaatattggagtgatttttgttgggggaatgattccgatacccacacacaccgcttaattgtcatcagtaaaaaagaaataaaataa

SEQ ID NO: 274616 - DNA, 4635 bp, Morganella morganii
atgaaaaaagaacgctttaaactctcttcttcaggtaaggtggccgcgtggatggcgctggcctttgtcacgctgaacagtgcagccgcagggattgtggcggacggcggcccggacggccccggggtttcgcaggtaaacggaacggatattgtcaatattacaacgccgaacagtaacgggttgtctcataaccagtatcttgattttaatgtggataaccggggcgcggtctttaataacagcatgaccgccgggcagtcgcagctggcgggtatgctggaggccaacaaaaacctgaacgggcaggccgccggggtgatcctcaatgaagtggtcagccgtaacccctctctgctgctgggtcagcaggaagtgttcggcatggcggcggatctgatcctcgccaacccgaacgggatcagctgtcagggctgtggttttatcaacaccaataatgccgggctgatcgtggggaatccgctgattgagaacgggatgatcagtgcgtacagtacgctggacaacacgaactcactgacgatcggaaataacgggatcacgaccggtaaggtgctggatctggtcgcgcctgcgattaatgccgacggggagatccgcgcggcggcactgaatgtgatcaccgggaacaataccgtttccgctgatatgcagactatttccgccgggaaaaacgcggttccgctggacagctattatctgggcggcatgcgcgccgggaaaatccgtctggtgaataccgcgcagggcagcggcgtgaaactggccggtaatattgatgctgtaaatggtttcgatgctcagtctcagggcgcgctgacactcaccggcgcacaggtcaccggcggggatatccgcctgagcggcgatacactgcgtaccgaaggacagctgcgtaatgaacatcagcggacagaagacaaacgcagcgggcagtccgtcaccggcgaaacccggcaggggcgttacacccgtacctcactggacggtaaaaacatcaccctggtagcacagcaggaagcccggctgaccggtactgatctgaacgggattgagatcgccgttcaggcaggaaccatcacgctcgacagcgaccaggttgcacagtcagacacccgcaccacaaatcagcggaagatgtcgtgggaaaataatgaaacccgcaaagacgaaagcatccggcaggaaaccagcaatctccgtgctgacggtgatatccgcctgatggctaaaaccggtgatattaccctgaaaggggcaacactggcggccggaacgcatctcagtgcggatgccggaggggatatccggcttgagagtgtgaccaactcccgcactcagacggtgtccggcaataaacgcaatgagacggcaaaactgctcagcggcacacacggcgatgtcacgtcaaaagagcaactggtgaaaacggaactgaccgcaggcggcaatctgggactgaatgccggtcatgacatccgggctcaggcggcacaggtacacgccggacaggatatgatcatcaacaccggtaataatctcaccatcggtacgcaaaccacgacacagcatcaggggcatacggagaatatcacctcctggggcggtatcggcggtggttcccgtgagaaccgggccaccacggaagagacggcgcacggctctgacgttaccgcaggcggtaagctctggctttccggcggtaacggcgtcactgttaccggcagcaaggtaaaaggcacacaggacagtctggtgcaggccgggcagggcgcgctggtgattgaaaacggcatcagccggacggcgaaacacattgataaccgtgatggcggtgcgtttaacatcacccgcagtactcttcgcgaaaacagtgaagatacccgtgttgaacgcagtgagctgaaatcagaggctgacctgcggctggccgggaaaaatgatatcaccattgccggaagcctgattgaaagtgcgggcacactgaaaattgatacccttggcgatatcaatgtccgtgcggcacaggcacaaaaacagtctgacaaaacagaaaccacactcaaaatcagcggctatgccaaagaggatgaggacaaacagtaccgcgccggtctggacatcaaccatacccgcgacacacaaaagcaggattctgtcacgcatcagggcagtgaactcaaaggcggcagtgtctctgtcaccgccggaaacgatctcacgcttaccggctcctctctgaccaccacgcagggggatgcggcactttccgctgaaaatatcaccctgaacgcagcggataaccgtgagacccggacacagcagaaaggggaatcacacggcggtatttatctgaccggcggcatggataaactcggcggcgggctgagcggtggtcatactgaaactggcaagacacaggagcagcatcaggcggtcacctccggcacacaggtgcagggcaatctcaccctgaccgccggtaaaacgctctcgcaggaaggcgcatcacatacggtgggcggcgcttatacggaaactgcgcaaaactcggagcaccgggcggctcataacagtgatcgcaccacggaaacccgtaaaggcggtgaaggcagccttggtgtttcgctggattacagcaaagtctcccgtccgctggccaaagccggtgaaaatattgcggaaggcaatattgccggggtggctgacagtaccgctgccaccggactgccggatatcggcgttgatctgagcggtaaaggggaaaaccggcagaccatcagcgaaaacacacaggcgaaaaccacgtctgttaatgcaggattggttgccgtgaacaccacggatcgtgttcttgatgaaggaacgcagtaccgggcggataacggcggtattgcgatcagcaccggcgattatcagtcagtggccgcagcggatacacatcatcactctgaatccgtgactgagggcaaaggaagtctgcgtgtggcgacatccaccggacaggatgtttcagtcagcgcagaaggcagcggcggtcatcgtctggcgacagagagcagcagtaaagcggtgaccggttcgctgtcggcgaaaggggatatcaccgtgcaggctgggcgtgatgcggcattgcagggtgatacactgcgcagtgaggaaggacacgtttctgtccgtgccggtgataatctgacgctggatcaggcgggtgatacccacagcaaaactgtcagtggttatgatgccggggcgaaggtaaatgtggaatcgctcaacctgaaaaatgccggtggtggtctcagcggcggacgtgaagtgtacaacgaaagcggcacaacggcgaaaaccggcgtgactgagggcaaaaccggcgtggtattacaggccggaaacgacctgaccgctaacggtactaatgtcagcagtgacggggatgtgacggtgaaaggcggacacaacaccctgcttaacagcgcggagagcacgaataccatctccggccatcagtggcacggcggtgttcaggctaatggcggtaaaacagagatcggcagcaaacccggcggcggtgcggatttcagtatcagcaaacaatctgaaaacgtgactgaccagcgcggcggcagtctgcgcagcggtggtaccgtttctgtttctgcggatggtatgcgggatgatgcgctgcatctgaaagggacgcagattgatgcaaaaaacaccgcgctgaccgcccgtgacggcggtattgtgattgaatcggcacagaaaaccacggacaaagccaactggaatgcgggcggaaacctgaatatcggcacctcgcgcagtacagaaaatccggaaaccggttcgcggcataatatcagtgccggtctgaagggcgggatcgacaatcagcagacgataacacagaaaaatgcccttgctgacagcggaaatctcactctgaacagccgcaatgacacgcggattcagggcggaaaactgacggcggatactgtcagcgggcgtgtcggcggtgatctgatcgtggaaagccggactaacaccgaatctgttctgaaagttgacgcggatctgtcggcggcacataccaatgatgagggcagcagtatcacctcaaaactggccaatgccggtaccccgaagtttgcagatgacatcaaggcgggtctggaaaacggactggataaagcggcagattctgtacggaaaaatgccggagccggtgccggtaccgtggcggacaaggtgaaatccggactgacatccccggccgggatgaacggcaatgttaaagcatcctttgaaacccgctccgtggaacaggtgggacagcaatccggtctgaccgcccgtgcgcagggcaaactgcgcaccggcggcagcactattctgaccggtgcggtgctggacgggctgccggatacggggaatacggaaatgcactctgtggcggtcaaagagaccggcacccgcattcacggcgaactcccgctcaatgccgggcaggctgtcagtgcggttaaagacgggatcgtcaacggaaaatccccggtcggtatttctgtcactaatgatcacagcagtgtgaacagtaaagtgaagtaa

SEQ ID NO: 274617 - DNA, 1689 bp, Morganella morganii
atgacgaaactgctgacattattccgctgcatattattatcagggctgtttttttgcccgccattatctgccgcacctttccccgcagcggcggaaaaccccggcgctgatgcttctcgccgggcgatgcaggatgccggacagcaggtcagtgatctgctggaacagcagacttaccggcaactgagcaagccgcagacaacgatcacccccgcagagccgttactgcgtgcggcagagaatgaacactgtctgccggtcagcggcgtgtatctctccggtatcacactgttatctcagaacgatctccgctcactttcaccactgcccgcagactgtatccgcagccgtgacattaatgtgctggtggcggaactgatggagcggtatctggagaaaggctatatcaccgcacggatccgttttctgccggtcaacagctatcacgagctggggatcggcgtgacggaaggaacggtggagcagatcgacggcgcggacagcggcattaatacgtcattactgtttccttctctgaccggtaaaccactgaaaataaccgaactggagcaggggctggatcaggcaaaccgcctgaaatccaatcatgtcacgatggatattctgcccggcagcgaaccgggagggtcggtgatccggctggttaatcagcgcggtaccccggccggtttttctctcagcgcggataattacgggcagaaaagtaccggacgcaacgttatccgcgccgcagtcaccgcagacagcccggccggattatctgattttgtcagcctgagcggctccgccacaaccgataatccggcggcgcgttacagccgctccggcatgctgttttactccgtgccttacggcgcgctgacggtcagcacttacggcagcctttcccgttaccgcatcagtcaggcgctgcgttataaccacgtcattctgcgcggggacagcgctcaggcagcgctgcgggcggattatgtcatcttccgtaaccgctcacgaattgattcactgatggcgcagatgacacacaaacgcagccgcaactacctcaatgacacactgattgacgtcagcagcccgaccctgagtatcgccgaagccggttataccggactgattctggttccgggcggcgttatcagcacctctttatcagtggaaaagggcaccacactgttcggggcggatacccggaacaccttgcccggctcagatccgcagtacaccaaaggcaaattctcactcagctatgttcagcagttttcgctgtcggaagacacatatctgttcagcagtcatctggccggtcagtacacacaggatcacctccccggggtggagtggctgacactgtcggataacagcgcgatcagagggtttcacgacggctcgttatcggcggataagggatggtactggcaaaacaccctttcccgccgttttgtccggcaggggattacggtaacgccccgtgccggtgcggactacggacgggttatggctcagaccgggcaggcgggatggcagtctgccgcgggtatcgccgcaggggttaatgtcagttacggcggcgcacagctggatgcgcaaatcagccgcgcccggacctctgtgacggcactgccagcacaggacaccctgttttcactgcgcctgggatatcagttctga

SEQ ID NO: 274618 - DNA, 423 bp, Morganella morganii
atgaatatcagcgatattgcacaaaaaacgggtttaacaccaaaagcaatccgtttttacgaagataaatctttgatcacgccaccggaacggggtgagaacggataccggtatttcagtgaacggcatgtggatgaactgactctgctgcgccaggcaaaagaggtcgggttcacgctggatgagtgccgcgagctgttatcgctgttccgtaatccgaaccgccacgcggcggatgtgaaatcggcgacactgggcaaagtgaagcagattgaaaaaaccattacggagctcacggctatccgtgaccgcctgctggcactggctgattcctgtcccggggatgacagcgcggagtgtccgatcatcgatcatctctccggatgccgccacagcaaacctaaacctgcctgtcataaataa

SEQ ID NO: 274619 - DNA, 2739 bp, Morganella morganii
atggctaataccactattcttgcgttacaggggctgtcctgcggacattgcaccggcagtgtgaaaaaagctctcgacgcccgcccggatgttgaatctgcggtggtcacccttgatttcgccaaagtgaccggcgatgcggatgcgcaatccctcatcagtactatcgaagaagcgggttatgaagctcagattgcagacaaacccggtacaattttacagctttccgggctgaattgtatgaaatgtgcagcgaaaacgcaaagtgcattagaagcggttgacggtgttgcggctgcggtcgttgataccaaagaagcaaaagtgtacggcagcgccgatgcgcagaccttaatcagcgcagtggaagccgccggttttcaggcggcggtggcaggagaaaacgcctccccaaaatctgaaccgctgacgccgtctcagactgaggctgcggcagcggagcactgcgacattccggccacccctgacaatacccctgccatgccggtgattgaagaggatgacgacagtctctccttcctgctcgacggcatgacctgtgcaagctgtgtcagcaaagtacacaaagcgctgctcagtgtggacggcgtggaaaatgcccgcgttaacctcgcggaacgcagtgcactggtcaccgggcacgcctctgcagaggcgctgatcgccgctgtggagaaagccggttacggcgcggagctgattcaggatgacgccaaacgccgtgagcgccagcaggaagtggctgtcgccaatatgaagcggttccgctggcaggctgctctggcactggcggtcggtatcccggtgatgatctgggggatgatcggcgacaatatgatgctgaccccggcgaacaacgggatctggctgaccatcgggatcgtcaccctggcggtgatgattctggcgggcgggcatttctaccgcagcgcctggcaatccctgaaaaacggcagtgcaacgatggataccctggtggctctcggcaccggtgccgcatggctctattccatcactgtaaacctctggccggatgtattcccgccgcaggcgcgtcacctctattacgaggccagcgccatgattatcggtctgataaacctggggcatatgctggagcagcgtgcccgccagcgttcgtcaaaagcactggagcgcctgctggatctgactccgccgaccgcccgtgtggtgacaccggaaggtgagaaagatgtaccgctggcagatgtgcagcccgggatgatcctgcgcctgaccaccggtgaccgcgtgccggtcgatggtgagatcacggaaggcgaagtgtggatggatgaggcgatgctgaccggggagccaatcccgcagcagaaaaccaccggtgataccgtttctgccggaaccaccgtgcaggacggcaccgtactgtttcgtgccgccgctgtcggcagcaaaaccacactggcacgcatcattaaactggtgcgtcaggctcagagcagtaaaccggaaatcggtcaactggcagataaaatctcagccgtttttgtaccggttgtggtggttatcgccctgatcgccggtgctgtctggtacttcttcggtcctgcgccgcagataacctatgcactggtcattattaccacggtactgattatcgcctgtccgtgtgcgctggggctggcaacaccgatgtcaattatctccggggtcggccgcgccgctgagtttggtgtgctggtgcgggatgccgatgctttacagcaggcaagcaccctcgacaccattgttttcgacaaaaccgggaccctgaccgaaggcatgccgcaggtaacggagatccatacctttaatggtttcagtgacgatgatgtcctgtgtctcgcggcggcgctggaaagcggttctaatcacccgctggcccgcgctatcactgaacgtgcgaaagagctgacactgccgtctgttactcagttccgtaccctggcgggtatggggatcagcggggagtctgaaggccggacactgctgctgggtaaccatgcactgatgcaggcacagaatatcagcactgccggtgaggcggatgcactggtgcaatcccaggccggtaaaggtgtgaccccggtgatgctggcagttgacggcaacatcgcggcaatactttccgtccgtgacccgctgcgtgaggacagtgtcagtgcgctggcgcgtctgcacaaacagggataccgactggtgatgctgaccggggacaacgaagtgaccgcccgggctatcgccaaagaggcgggcattgatgaagtgatcgccggtgtgctgccggacggcaaagccgctgccattgaaaaattacagcaggccggacgccgtgtcgccatggtcggtgacggtattaatgacgcaccggcactggcacgggccgatgtggggatcgctatgggcggcggcagtgatatcgccatcgaaacggcagcaatcactctgatgcgccacagcctgcacggtgtggccgatgccgtggctatctcgaaagggacactgcgcaatatgaaacagaacctgctgggtgcctttatttataacaccctcgggatcccgatcgcagccggggtactgttcccgttcaccggcacactgctgaatccggtagtggcaggggcggccatggcgctgtcatccattaccgtggtcagtaacgccaaccggttgttacgttttaaaccaaaagattaa

SEQ ID NO: 274620 - DNA, 810 bp, Morganella morganii
atgaaaacactgttccgccggctgaaagattaccttatcccgcctgatccgcagggtggctgtacctggccctctatcgacctcacattgcccggggatatctcactgcatctggtcggcagtattcatatgggatcggaagccatgtatccgctgcccggcccgctgctggaaagaatcaatcgggctgatggcctgattgtggaagcggatatcacccgtccggcaccgccgttcccggggcaggacccggaatctccccgtctgccggtaagtgagcgcttaccggagcacctgagagatgactaccgccggtattgtgaggaacagcgccagccggtacagaccctggataccctgcccgcctggcaggtggctctgatcctgcagtccgcccaggcacaaagccttggattgcggccgcattacggcattgattatcagatgctcaatgccgctcacggacagaatatccccgtttttgaactggaaggtacacaggcacagttacagatgctgctggatttcccggacgaaggactgagtctgctggaagataccctggcctactggcatgacaatgcccgcgcactgcagattatgctcagttggtggctggattaccggccggaaaaaattgcgcagccgctgcccgccaccttcagcgagcagacgtatcagcatctgatgataagtcgcaacgacgcctggaaaacccggctgatacagctgccgcccggcaattatgtggtggcagtcggcgcactgcatctttacggcgaccataatctgccgtccattttgtgttaa

SEQ ID NO: 274621 - DNA, 480 bp, Morganella morganii
atgacaccggctgtaaaacttctggaaaaaaacaggatttcattcaccctccatccttatgaacatgatccgaatgatcataatttcggtgatgaagcggtccgcaaacttaatctcgatgcccgtcaggtatataaaaccctgctggtggcgcttaacggtgataataaacacctcgccgtggcagtcaccccggtatcagaacagcttgatttaaaagcggtggccaaagccctcggcgtgaaaaaagcggaaatggctgacccggtgaatgcacagaaagtcaccggttatctggtgggcgggatcagcccgctgggacagaaaaaacgcctgccgaccctgattgatgagggcgcacaggaatttgccactatttttgtttccggcggcaagcgcggcctggatatcgaactggcaccgcaggatctggcgaaagtgctggacgggaaatttgccccggtggcgaaacgggactga

SEQ ID NO: 274622 - DNA, 2856 bp, Morganella morganii
atgaacaaaacagaaaacaccttacataaaaaaacgccgtcggtgacggtactgagcaaccgggggcaggtagtacgcgatatcgtgtatcaccgccatccggatacgccggagaaaaccgatgagcgcattacccgtcatcagtttgattcacgggggtttttaaaggagagtgccgatccgcgcatgcaggcatccgggctgagcaatttccggtatatcacctcactctccggacgggtactgcgcacagaaagtgcggatgcgggcacatcactggcactgaacgatgcggccgggcgaccggcgaccagtgttcatcagattggtactgaaaacgggcaggatgacagcagccgggccgtgacacagactttccggtatgaaggtgcggattcagccgggcgtccgctgagtatcgcggaacagaccgccgggcagagcactcaggtaaccgaacgctttgtgtatgcaggcagcagtgaggcggagaaagcaaaaaatctggcgggtatctgtacacaccattatgatccggccggtctggtgcagacggacagtattgcgctgaccggtgtgccgctgtcagtgacccgtcagttgctgaaagatgcggataacccggttaactggccggaaagcaatccgcaaacattattatctactgaaaaatacaccatacaaaccattgcagataccaccggtgcggtgctgaataccacggatgcggcgggtcaccggcagaaaatgacttatgatattgccggattactgagcaccagccgggtgacggtgaaaggcggcgcggaaaaaatcatcatcaaatctgtgacgtattccgctgccggacagaagctgcgcgaggagcacggtaacggcgtagtgactacttacacttatgaaccgcagacccagcgcctgattgccgtcaaaacggaacatccggcacggaaaaaaatatttcaggatctgcgctatgaatatgatccggtcggtaatgtgctgtgtgtgacgaatgacgccgaggagacgcgcttctggcgtaatcagaaagtggtgccggaaaaccgatatacctatgacacgctgtatcagctggtcagcgccaccggccgcgagatggctaatgccggacagcaaagcagttccctccctgatatttccccgtttgataaagccacttacaccagttacacccgcaactatatctatgactgtaccgggaatatgacgcagatccgccactcatcccctgcgaccaataataactacaccacggatatcacggtcagtcagcgcagcaaccgcgcggtactgaaaaccctggcggacacgccggagaaagccgaagccctgtttaccccgggcggacagcagacacagttacagcccggacaaactctgtcatggactgcgcgcggcgaactgcaacaggttacgccggtggtgcgtaacggtgccgccggtgactgcgaaagctaccgttatgatgcgggcagccggcgtatcctgaaaactgccgtgcagaaaaccggtaacagcacacagacacagcaggtcatctatctgccggggctggagctgcgaagcggaaaagaaaactatcaggtgatctgcgccggtgttgccgggcgggcacaggtacggctgctgcactggcaggacggtaagaaagatcaccagcggttcagttacgacaatctgatcggcagcagcggcctggaaacagacggtgacggtaacctgctgagtcaggaggaatactatccgttcggcggtacggcggtgctggtggcggatgcggacagcggcattgactacaaaactcaccgttattccggcaaagagcgggatgcgaccgggctgtattactacggctaccgctattatcagccgtgggcaggccgctggctgagttcagacccggcagggaccgttgacgggctgaatctgttccggatggtgaggaataatccggtaacactttatgataatgacgggcgtgcgcctgtccgtgccgcgttatcagccggcagcttccgggatatgttgcccgaaccggctgttcaatatcagcgggggctgggatatcaactgacaaaaagtgtcagtcagccaaacttatatacggcatcacagcaaacaggagaaggcggaacatttatcggataccatggtacaaatgaacagtcagcaaaaaatatacttggtaaaggtcttgatattgatatgcttcctcacggacagattggtcagggattctatgttgcgaaagaccggtatcttgctgaaggttctgcaaatccggatggcggaagaagaaaggctgaattagaccgtaatattccatttttccggaagattcaaaattcgttacttggtctgttcggatcatattttaatgcatataaattcagtccggattatcctgataatattacccctgctttactgaaagtatataaaaaacagcctttggtgaattctcagtggaatagcatgctaagagatgatttatcaggtattcagtttgcgaaaccagatgaaagacaagctgtttcagacacaataatgaaatcgatgggaaaaaatctccagatggttatcccttcggatgaattcagtaaattgtcgctaaccagagataatggtataaccgaaacaggtatctggcacccggcaaatgaaagtcattcacctgaggggtatcagatcatctctgccacagccggaaaaaatcatatcctgagaagtccggatgaaagtattaatactgaaatggttgatcaaaatagccagataagaaaacgatttaataacaacaaagccggatatatgagaaagcgggctgcatag

SEQ ID NO: 274623 - DNA, 1668 bp, Morganella morganii
atgacatttacactgaaaaccacagcctgtgcgctggcggtatccgcaatgctttttccggcgctggcgaatgcctgggaaaaagataaaacctacgacatcaccattttgcataccaatgaccaccacggccatttctggcagaacgatcacggcgaatacggcttatcagcccagaaaacccttgtggacggtatccgtaaggaagtggaagagaaggggggctcactgctgctgctctccggcggggatatcaataccggcgtgccggaatccgatttacagaatgccgaaccggatttcaaagggatgaatctggtcggttatgatgcgatggcgctgggcaaccacgagtttgataatccgctggaaacgctgcgcattcaggaaaaatgggccacattcccgttcctgtccgccaatatctataagaaaagtaccggtgaacgcctgtttaagccgtatgccatgtttgataagcagggtgtaaaaattgcggtaatcggcctgacaacggatgacacagcgaaaatcggtaatccgggcaacttcccggacactgaattccgtgtcccggcagaagaagccaaaaaagtggttgaagccctgcgcgaaacggaaaaaccggacatcattatcgccgccacccacatggggcactacgatgacagcaaccacggctccaacgcccccggagatgtggaaatggcgcgcagcctgccggccggttatctggatatgattgtcggcggtcactcgcaggatccggtctgtatgcagccggagaacaagaattataaaattgctgattacgtaccgggcactccgtgtgcaccggacaaccagaacggtacctggattgtacaggcacatgaatggggtaaatatgtcggacgcgcggactttcagttccgcaacggcgaattcacgctgaaacactatcagcttatcccggtgaatctgaagaaaaaaatcaccaaagaggatggcacatcagagcgggtgtattacaccagtgaaatcagcgaaagcccggacatgcttaaactgctgacaccgtaccaggaaaaaggcaatgagcaactgaatatcaaagtcggttcggttgacagcaaactggaaggtgatcgcagcaaagtccgttttgaacagaccagcatggggcacctgctgctggctgcacaaaaagaacgggcaaatgccgatttcgccatcatgagcggcggcggtgtgcgtgattctatcgaaccgggcgatatcacctataaaaatgtgctgaaagtgcagccgtttgccaacgaactggtgtatatcgatttcaaaggaagcgaagtgctgccgtatctgaccgctgtggcaaatatgaaaactgattcaggggcttacgcacagttttataatgtcggcctgacgctgaataaagatggctccgtaagtgatgtgaccattgacggtaaaccactggacccggcaaaaacctaccgtatggcgacactgaacttcaatgcgatcggcggggatggttatccgaaaattgactctcacccgggctatgtcaataccggctttgttgatgcagaagtgctgaaaggctatatcgaagcccattctccgctgaaagcggcagattatgagccgaaaggtgaaattgtatataaaaataaatag

SEQ ID NO: 274624 - DNA, 1797 bp, Morganella morganii
gtgcattcaacgcctcttatcacaactattgttggcggtctcgttctcgcttatttactcggtatgttagcgcaacggttaaagatttccccgttagtgggttatctggcggcgggtgtgttagcaggcccttttaccccgggattcgttgccgatacatcactggcaccggaactggcggaaatcggggttattctgctgatgttcggggtcgggctccatttttcactgaaagatttgctggcggttaaaaatatcgccattccgggggctatctgtcagatagccgttgccacgattctgggtctcggcctttccgctctgttcggctggggattatttgccgggatcgtatttggtctgagcttatccaccgcgagtaccgtggtgctgctgcgcgccctggaagagcggcaactgatagaaagccagcgcggtcagatagctatcggctggctgattgtcgaagatctcgccatggtgttaaccctggtgctgttaccggctgccgcctctatcattaataacccagaggccagtgccagtacatcagatctgctgataagcctgagcattactatcggtaaggtcgtggcattcatcctgattatgatttttatcggccgccgcgtgatcccgtggttactcgccagaacagccgctaccggctcccgcgagctgtttaccctggcagtactggtgctggcgctgggtattgcctatgccgctgtcgcactgtttgatgcctcgtttgccctcggcgcgttctttgccggtatggtgctcaatgagtcagaactgagccaccgcgccgcacaggataccctgccgctgcgtgatgccttcgcggtactgttctttgtctctgtcgggatgctgtttgatccgatggtgctgattaaccatccgctgggtgtgctcggtgtgctggcgattattatcatcggtaaatccgccgccgccctgctgctggtgaggatgttcggccataaccggcggacagccctgacagtcgccgtcagcctcgcgcaaatcggggaattcgcctttatcctcgcgggaatgggggtcacgctggaagtcctcaaccgccaggccaatgacctgatcctggccggtgcgattgtctctatcatgctcaacccggtgctgttcacgctgctggaccgctatctggaaaaaaccgaaacaccggaagagcagcaggaagaagaaacgctggaagaaatcacccaggtgccggtcaatatctgcggacataccattattgtcggttatggccgtgtcggtgcgatgctggctgataagctgcataataaaggatatccggttgtggtggtggaagatacccgcgcccgctttgaagagcttgcagaacgcggcttcccttccgtgatggggaatgcggtggcacaggatgtgctggagcttgcccgtgccgattgcgccagtgcgctgctgctgactattccgaacggctatgaggccggagagattgtcgccaaagcccgtgccatgaacacacatatgacgattattgtccgcgcgcattatgatgacgagcgcacttatattatggagcgcggtgcaaaccgtgtggtgattggtgagtttgaaattgcccgggcgatgagcacactgctggtggaaaaccagactgatcatgagttcggttgtccggtcaatatcaatccggcggcggaaacagagacggaaggccgctcactgcatgacatgctgcgcaaacctgaagcagatgccgccccggagaaccagaatccgcatccgtcggcataa

SEQ ID NO: 274625 - DNA, 378 bp, Morganella morganii
atgaaattattagccaagcatatgatggaaagtgtttcaggtgcaggtaatcaggataacattgataatattaaatttataaatgacctggtattaacggctgcaataggtgcatcaatgacacctgcagcaccagtggccggggccggaactgcggtggtaggtagtttaattcacagcactaatcatcagatacaagcccggaaaatccgggcttgtatttcacagcagattaaaacaaattatgccgacggatgcggattctggttctccggggcggcatctgcttcaggtttgcgcagcatgtcatgcagtgagcggccttccgtctctgtttccgccgccggattgatattgaccggacaaccgaactcatga

SEQ ID NO: 274626 - DNA, 1311 bp, Morganella morganii
atgaaattccccggcagacgcaaatccaaacactatttcccggtcagcctgcgtgacccgttattacagcctgtccagctgatgaaagatgatgaaaatacccgcgcgtatatcgttggtattgatcagacgctggtggatatcgaagccaatgtagatgatgattttatctgccgttatcagctcagccgcgggcattcgctggtgattgaggatgatgtggctgaagaactgtatcgtgagctgattgagcgttcactgatcacccatgaatttgccggtggtactatcggtaatacccttcacaattattctgttctggcggacgaccgttctgtgctgctgggcaccatgtgcaataatattcagattggcagctatgcctattattatctgtgcaacacctccagccgtatggatctcaactatttacagggtgtcgacggcccgattggccgctgctttaccctgatcagtgaaaacggtgagcggacatttgccatcagccccgggctgatgaaccagctgcgtccggatagtattccggaagcgattattgcggaagcctccgcactggtactgaccgcctatctggtgcgctgcaaaccgggcgaaccgatgccggatgccaccatgaaagctatcgaatatgcccggaaacatgatattccggtagttctgactctgggcaccaaacatgtgattgcggaagatccgcagtggtggcgtgatttccttgcggaaaatgtctctgtgctggcaatgaatgaagaagaagcactggcactgacgggcattgccgacccgctgctggcgtcagataaagccctggactgggtggatctggtgttgtgtaccgcaggtcctgccgggttatatatggccggttattcagaaaaagaatttatgcgcgaaaccacccacccgctgttgccgggcgcgctggcggagtttaaccgttatgaattcagccgcgcaatgcgtcagaaagattgtcaggacgcggcgcgggtctattcccatatcgaaccttatatgggcggcccggataagataatgaataccaacggtgccggcgacggggcattatccgcattactgcatgatattacggccaacagctatcaccggatgaatatcccgaactccagtaagcatcagcgccgttatctgacatactcttcactggcgcaggtctgcaaatatgccaaccgtgtcagctatcaggtactgattcagcactcaccgcgtctgaccaaagggttaccggaccgggaagacagcctggaagagtcatactgggaacgctga

SEQ ID NO: 274627 - DNA, 990 bp, Morganella morganii
atggtgaatgagaagggttcagtgaacctgaataatgacgagatcgatattattgatctgctgaaactgttataccgccataaggtttttatcgtcattgtgaccgtattattcgctgccgccgggttcggtgtttccaaaatactgccgcagaaatggaccagtaccgccgaagtgacagcaacagagctccgcgatatgccggagctggataaagtccgtcagcagatgaatgcactcaatgtgactgcggtatctgatctgccggctgcatttaacgtgttcggtactgtctggcagtcgccgtcagtacaggaatcattccgcctctcacagggcgatactgctgtttccggctcttttggttttcagaaaacggacggcgatatactgaaaccggctactgccaaagtgaccttcactgcggcagatccgcagacagcacagcaaatattgtcggattacctcgattacaccgcacaatacagtcagaatgtaatgcagacgcagttacaggaaaacctggccactgcgctgagtgccggtcagagtcagtataatgtggcgctggtgagagcggaacatcagcgggagcaaacgctggcttacctggctgcggctgaacgggttgcaccggcggcggcatctgtcccgcctcagaatccggaagctgacccggttgcctcttacagtgccatggggcgtccggctgtgatgcagatgagagactccctgaaagcactggatttaccggacgtggatgcggaacttctggacagagcctatgcgctgaaagctatcaaaagtatcgcgcctttctctctgaacattgttccgttcaccgtgaccgaatccccggatctgccggtggtgaaagacggccccggcactaaaatgtatctcatcgcatccgcctttttagggtttattctgtcagttatggcggttttcgcatggaatatgtttgttaacagaaaaaaatcagcataa

SEQ ID NO: 274628 - DNA, 957 bp, Morganella morganii
atgacaaatcaacacaaacgcggcgttttactggttaacttaggcactccggatgcgccggaaaccccggcggtaaaacgctatctgaagcagttcctgagtgacccgcgtgtggtggatgtctctccgctgctctggcagtgtattctgcgcggtattgtactgccattccgctcgccgcgtgtggcgaagctttatcagtctgtctggatggaagagggttctccgctgctggtatacagccgccgtcagcaggcggcactggcggcacagatgccgggtacaccggtggagctggggatgagctatggttcaccgtcactggaatccgccgttgatgcccttctggcacagggggtgacgcatctggatgttctgccgctgtacccgcagtattcctgctcaaccactgctgcggtgtttgacgggctggcggatatctttaaacgccgccggacattcccgtcactgcattttatccgcagttacgcgacacatccgctctatattgaggcgctggcgcagtcagcggaggccgcgtttgcggagcacggggtacctgaccggctgattttgtcctatcacggtattcctgtccgttatgcgaaagagggcgatgtttacccggcagaatgtgaagcaacaacggcattgctgcgggaaaggctcaatttcccgtctgaacatatcatgcacacttatcagtcccgttttggccgtgagccgtggcttacgccttatactgatgaaacaatgaagttattaccctcaaaaggtgtgaaatctgttcaggtgatgtgcccgggattttcggctgactgcctggaaacgttagaggaaattaaggaacagaataaagcattctttttgtcttccggcggggaggaatatcattacattcagtcccttaatgacgctgatattcatataaagctgttgcaagagttggttggctag

SEQ ID NO: 274629 - DNA, 645 bp, Morganella morganii
atgcgtattattctgctcggcgctccgggcgccggtaaagggactcaggctcagtttatcatggaaaaatacgggatccctcagatctcgacgggtgacatgctgcgtgcagcagtgaaatccggcagtgaattgggtctccaggcaaaagaactgatggacaacggcaaattagtgactgacgcattagttatcgcactggttaaagagcgcatcaaacaggatgactgccgtaacggtttcctgctggacgggttcccgcgtaccattccgcaggcagatgcaatgaaagaagccggtatcaccgttgatttcgttctggaatttgatgttccggatgagattatcgttgaccgtattatcggccgtcgcgtacatgcgggctcaggccgtgtgtatcatgtaaaatacaatccgccgaagacagaaaataaagacgacgtgaccggtgaagaactgaccatccgtaaagatgatcaggaagagaccgtccgtaagcgtctggtggaataccatcagctgactgcaccactgatccagtactatcagaaagaagctcagatgagtgacgtgaaatacaaccgtattgacggcacccgtccggtaagcgaagtcagtcaggaattagcccgtatcctgggttaa

SEQ ID NO: 274630 - DNA, 1875 bp, Morganella morganii
atgagtctgcaagaacaagaaacccgtggttttcagtcagaagtaaaacaacttctgcagttaatgatccactcactttattccaacaaagaaattttcctgcgtgagcttatctccaacgcctctgatgcggccgataagctgcgtttccgtgccttatccgacagttcactgtatgaaaatgacggtgatctgcatgtccgtctgtccgcggataaagaaaagcgcacgctgaccatcagtgataacggtatcgggatgacccgcgatgaggttatcgacaacctgggtaccattgccaaatccggcaccaaagccttcctcgaatcactcggctctgacgcggccaaagacagccagctgatcggccagttcggggtgggtttctattccgcctttatcgtggcggacaaagtcactgtggtcacccgtgcggcgggtgtgccgtctgatcaggcggtgttctgggaatctgaaggggaaggggattactccatcgccaaaacccataaggattcacgcggtaccgaaatcaccctgcatttccgtgaaggggaagatgagttcctcgatgactggcgcctgcgctcggttatcggcaaatattccgaccatattgcgctgccggtggaaatcgaaagcaaaaatgaagaagacggcactgttatctgggaaaaaatcaacaaagctcaggcactgtggacgcgcaataaaaacgacatcagtgatgaagaatataatgagttttacaagcatctctcccatgactttgctgatccgctgacatgggcgcataaccgcgtggaagggaagcaggagtacaccagcctgctctatatcccgtccgtggctccgtttgacctgtggcaccgtgaccagcgccgtggcctgagcctgtatgtccagcgcgtgtttatcatggatgacgcggaacagtttatgccgaactatctgcgctttgtgcgcggcctgatagattccaatgatctgccgctcaacgtttcccgtgagattttacaggacagcgccatcacccgcagcctgcgcagcgcactgaccaaacgtgttctgcagatgctggaaaaactggccaataatgatgctgaaaaataccagacattctggcagcagttcggcctggttctgaaagaaggtccgggcgaggacagcactaatgcggaactgatcgccaaactgctgcgttttgccagcacgaaggaagacacctccgcgcagaccgtttccctggcggattatgtatcccgcatggcggaaggtcaggagaaaatttactacatcaccgcagacagctatgcggctgcgaaaaacagcccgcacctggaactgttccgtaagaaaggcattgaagtgttgttgctctccgatcgcatcgatgagtggatgatgaattacctcaatgaatttgatggtaaaaccttccagtctgtcagcaaagcggatgaatcgctggaaaaactggcggatgaagatccggcagcgaaggaagaagcggacaaagagctggcaccgtttgttgagcgtgtgaaaactctgctcggcgaccgtgtgaaagaggtgaaactgacccatcgtctgacctccactccggcgattgtcaccactgacgccgatgatatgagcacacagatggcgaaactgtttgccgccgccggccagcaggcaccggaagtgaaatacaacttcgagctgaatccggagcatccgctggtgaaactggccgcagaacagcaggacgaaagccgctttgccgactggatcaatctgctgctcgaccaggcactgtttgttgaacgcggaaccctggaagatccgaacgaatttgtttcccggatgaatagtctgttattaggctaa

SEQ ID NO: 274631 - DNA, 618 bp, Morganella morganii
atgcaaaccagtccgcttcttgaagcactgatggacgccctgcgctgcctgccgggcgttgggccgaaatcggcacagcgtatggcgtttcagctgttacagcgcgaccgcagcggcggaatgcgcctggcacaggcactgacccgcgccatgtcggaaatcggccactgccgggactgccggacctttaccgagcaggaacagtgcactatctgcgccaacccgcgccgtcagcagaccggtcttatctgtgtggtggaaagcccggcggatatccacgcgattgagcagaccgggcagttctccggccgctactttgtgctgatgggacacctgtcaccgctggacggcatcggtccgatggatatcgggctggataaactggaggagcggctgtctcaggaaaccatcactgaggtgatcctggctaccaatccgacagtggaaggggaagccaccgccaactatattgcggaaatgtgcgcgcagtatgatgtctccgccagccgtatcgcccacggcgtaccggtcggcggtgagctggaaatggtggatggcacgaccttgtcccactccatcgcaggacgtcagaaaatccgttacaacagcgattactga

SEQ ID NO: 274632 - DNA, 330 bp, Morganella morganii
atgttcggtaaaggcggtttgggcaatctcatgaaacaagcccagcaaatgcaggataaaatgcagcagatgcaggaagagattgcaaatacggaagtcaccggtgaatccggtgcaggcctggttaaagtgactatcaacggcgcacataactgccgccgcgtggaaatcgatccaagcctgatggaagacgacaaagagatgctcgaagatctgattgctgccgcattcaatgatgccgcgcgtcgtatcgatgaaacccagaaagaaaaaatggcgtcagtctccagcggaatgcagctgccgccgggctttaagatgccgttctga

SEQ ID NO: 274633 - DNA, 1932 bp, Morganella morganii
atgagctatcaagtccttgcccgtaagtggcgaccacaaacattttcacaggttatcggtcagcagcatgttctgacagcgctcgcaaacgggctggaacatcagcggctgcatcatgcctatctcttttccggtacccgcggggtcggaaaaaccaccctggcacgcctgtttgccaaaggtcttaactgtgaacagggcatcacggctacgccgtgtggtaaatgccagaactgccttgaaattgagcaggggcggtttgttgatctgattgagatcgatgccgcatcgcgcaccaaggtggaagatacccgtgaactgctggataacgtccagtacgccccgtcacgcggacgtttcaaagtttatcttatcgacgaagttcacatgctctcccgtcacagctttaatgcgctgctgaaaaccctggaagagccgccggagcacgtcaaattcctgctggcaaccaccgatccgcaaaaactgccggtgacgattttatcccgctgcttacagttccatctcaaagcgctggatgtggatcagatcagtcagcagctcgataccattctgaccgcagaacagattgaaaacgatgcccgtgcacggctgttactgtcccgtgccgcagacggcagtatgcgtgacgcgctgagtctggcggatcaggcgattgccctgggcgccggaaaagtgaccactgaggtggtgacgcagatgctcggcaccctggacgacgaacagccgctgactatcctggaagccctggtgaaaggggatggcgttcaggtgatgaacggcgtgaatgatgccgcatcacggggcgcggactgggataatctgctgacagaaatgctggctgcgctgcataaaatcgccatgcttcaactgctgccggtacaggataacagtgccggggtgacagaagaacgtctgcgcatcctggcaagagctattgccccggcggatctgcaactctattaccagacactgctggtcggccgcaaagagctgccgtatgcccctgacagacgcatgggcgccgaaatggcgctgctgcgcgcactggcatttcatccgcgtaatgtgattgatgaagtgatcaccgcgccgtccgtggcaccggtctctctgccgtcacaaccgcagacagcggctccggctgcaccggtacgcagtacgccgccgccggtgatgccgcaggaaacggaaaacaacccgacagcccagttgctgaaagcccgtgacgcactgaaccggcaggagactccgccgtcaaaaaagtctgagccggttaccttaactgagaagggtaaaccggcgaactcagcactggagcgactcgctgccgtgactgaaaaccgccggggccgtgctgtgtctgcaccgcagccgaaagcatccggtaaaccgcagccgtatcagtggcgtccgcagaagcaggatgaaccggaagagaaaacaccggttgcgcggccgaaagatatcaaaaaagcccttgagcacgaaaaaacgccggaagtggctgaaaaactggctgttgccgcccgggaacgggatccgtgggcggcggatattgataaaatgcagctgccgaaactggtgcagcaattggcgctgaatgcggtgaaagagcagaccggggaagacagtatctgtctgcacctgcgcacctcacagcgccacctgaattcaaaatcagcacacagcgtgctgagtgatgcactgagtgaactttatggtaaagttatcagtctcacaatttgtgaagacgatgatgtcagcatgaaaacgccgctggaatggcggcaggctatctatgaagagatgctggcgcaggcgcgtcagtccattgtgacggataaaaccattcagactctgctgaccttttttgatgcggaactggatgaagagagtatccggcctgtttaa

SEQ ID NO: 274634 - DNA, 564 bp, Morganella morganii
atggcacccattatgagcgcaactgctgaacaactgcaatttattaaagaaagtatccggactatccctgactatcctaaggaaggggtactgtttcgcgacatcaccacattactggccaatccggaagcctatcgtctgacgattgatatgctggtggagcatttcgcagacaaagggatcaccaaagtcgtgggcactgaagcccgtggattcttattcggcgcaccggttgcgttacgtctgggtgtcggctttgtgccggtccgcaaaaaagggaaattaccgtgtgataccctcagcgagacctatgatctggaatacggcactgataccctggagatgcataaagacagcatcagcagcggtgacaacgtgctggttgtcgatgatctgctggccaccggcggtaccgtcaatgcgaccatccgtctgatccgccgtctgggcggtgaagtgcatgaagcggcctttattatcggcctgcctgatctcggcggcgcggaacgccttgaagcggaaggtgtgcacagcttctgcctgctggaatatgccggcggctga

SEQ ID NO: 274635 - DNA, 546 bp, Morganella morganii
atgaacaccagacaattgttacaggcgctgcggcagaaaatcagcgcgctggaagagcagattgccccgatagcagaccgggaactgagccagcgccgcttcgatgataccctgttcgccgcccgtaataaaaccctgcgcctgtgcatggatgaactactgcaccatactgaccagcttgagcagtgcgcggatgaaaaccgggctgaacaggtacgctttctggcagaaaaaattgtcgcccagattgcggcactcaaccgtgaggccgccactcaggcgctgcggcagaaagagcaaagctatgtgaaacgggacagccaggtggatctgtatcagcgtctggcgcagcatcaggattatgagcgccgcctggctcagatgaccgatgaccgcgaactggcactcggccgcgcacagacctttgccgaacagcaaaagctgcagaaagagctggcggcactggccgggcgccttgtccgctgccgtcaggcactgcggcggatagagcggcagattgaacgccacgacggcaccgaattttaa

SEQ ID NO: 274636 - DNA, 165 bp, Morganella morganii
atgagtcttgaaaatgcccccgatgaggtaaaactggcggtcgatcttatctgtctgctggaagagaaccgcatcccggccgcaaccgtgctcgcggcgttacagattgtccgccgcgattatgaaaacaaactgcgcgataccggagatgatcaggccggctga

SEQ ID NO: 274637 - DNA, 3417 bp, Morganella morganii
atgaagcgaatcagccgtgtcccggcttccggtctgctgaggcagattttcctccgtctttttacctgtttcatatttctgctgccggtgctggttcagaacagcgcggtggcggccgtacaggatattcctgaccgcaacaccattcagaccgaactcaatgccctgaataaccgcaaagaacagactgccgctgataagctgtcagtgcaggatctggagcgggcgctggtgttttatgacaatctcgatgccctgaaagaaaaatcacaggcactgaaaaaacgggtggatgaagccccgaaactgtcagatcaggtcacacaaaaattaacgcagataaaatcattaactgatgaaggactggcggaataccgggcctccattgagaatctgccgctctcacaactggagctgaaacttaacagcactcttgaggcgttgcagaccgcacagaataacctctcttcttataacagtgatctgattgctctccagactcagcctgagcgtgcgcagaatattatgtacggtaatgtgcagcgtctgcagcagatccgcgtcctgctgaatgattcgatggcggcccagaaagtgctgcggccgacagaaattgaagcccttcaggtggagcagtattacttacagcagcagattgattatcagaaacgggcattacagtcgaacacccagttacagaatctgctgcaggtgcagcgtgactatgtggtggagcgcatcaaacagctggaaagcaatattgatgtgattcaggaaacggtcagcggcaagcggctggattattcggaagaggcggccaaagaggcgcagagttcggatgatacccagcgcaatatgcaggatgatccgctggtgcagcgtgaaatcgcgctcaaccatgatttaagtgaaaaactggtcgccgccacccgggataataaccagctggtgcagcgcactattaaggtacgcagtattctggatcgcgcactgcaatccgagcgcaacctcaaagagcagatcaccgtgctgcgcggcagcctgctgctctcccgtatcctgtttaaagagcagatctacctgccgccggatttgctgattaaagatttgccggaccggattgcggatatgcgtctggcgcagtttgaaatcaaccagcagcgcgacaagctttatcagccggacaattttgtcagcaccatgattgacgagtacgccaaaactcatgatatgccggcgaccgcagcagagctgcgggctcagaaacatgcgctgatgcaggtggtgtctgtccgtcaggatttactggatcagctgaatacccagatgggtaaccagatttcccaggcgattaatctgcagctcgatcagacccaactggtcaccgtggtggcttcgctggagaaaaccctcgcgcagcagattttctgggtcaacagtaacaaaccggttaacctggcctggttccagtccttcccgggcgcggccaaacaggagctgacgtcactggatctgaactggtcgctgcaaagcctgatcaacggttttgtcgattccctctttattaccattcctctgctgattattgcgctgctgctgcgtttcggcaccaagaatattgataccaaactggctgaaattaatgctgatgtcgggcggctgaaaaaagaccgccagatctacacaccaatggcgctgggactgatgctgatcaaaaccctgccgtcctcactgtttgtgattgccttcggctatttctgcctgaaaaccggaagtgcggattccgcactgatgtggactatctcccgccagctggctctcttctgggtgctgttcgagtggagttaccggattatgaagccggaggggattgctgtcacacacttcgggatcgatcctgaagtctgccgtaccggccgccgcagactggtgcgcctggcactgccgctgctgccgattatgctgtgggcggcttacgggatggaatacccgctgcgtctggtggatgatgtgattggtcagctggtggtgccggtggccctggtgtttgtctttgcattcacactgccgttctgcattgagatctggcgcgagaagggctctcacctggtgcgggcgttcctgctgaccttactgacattctccccgctggtactggtggtgctggtcgggctgggctattactacacggcactgcgcctgagcagccgctggatagacagcctctatctgctgctgctgtggtatatcgtctatcataccagtctgcgcggcctggcactggcagcacggcgtctgacctatcagcgcgcgctggcccgccgtcagaaacagcaggttcagcataaagagcagcatgagggggatgatgtcccggatgtgattgtggaagagccgccgatgtcgatggagctgattaaccagcagtcactgcgtctgacctcgatggtgctgtttattgtctttgcagcggcgttctacggtatatggtctgattttattactattttctccttctttgacagtatcacgctgtggcattacaacgtcgataccgcgctggggaatgtggtggaagcgatcacgctcggggatctgatcctgtctgtcctgattgtggtggtgtcctggataatgatgcgcaacctgcccggtctgcttgaagtccttgtgctctcgcggctctcgctgcgccagggcacctcgtacgctatcaccaccattctgacttatctgattgtcgggatcgggacgattgccgcgtttggcaccctcggggtgtcgtggggtaaattacagtggctggcagcagccttaaccttcggtctcagcttcgggttacaggaaatcttcgctaactttgtttcgggtatcattattctgtttgaacgcccgatccgcatcggcgataccgtcactatcggtactttctccggtacggttaacaagatccgcatccgtgcgaccacggtgattgattttgaccgcaaagaagtcattatcccgaacaaagcctttatgaccgagcgcctgaccaactggtcactctctgatacggtaacgcggattgtgattaatgtcggtgtggcttacggctcggatctggcgaaggtgaaagaggtcttgctgaaagcggctactgataacccgaaagtaatgaccgacccggcgccgggtgtgtatttcaccgagtttggtgccagcagcctcgatcaccagctgcgtttctatgtgcgcactatcggcgaccgcagtgccaccacggatgaagtgaaccgcgcgattgaccggatggcgcgcgaaaacgatattaatatcgccttcaatcagctggaagtgtatctccacgatcagaacagcggcaaagaagtacaggtgcagggaaaagagaaggatgacggcgctcagccggcctga

SEQ ID NO: 274638 - DNA, 354 bp, Morganella morganii
atgaagcctgtattaattattgccaatggcgctgcgtatggcagtgaatctttatttaacgcactgcgtctggcaattgcgattaaagagcaggacagtcaggtgccgatgaatgtttttctgatgtcagatgcggtggtcgccgggttacgcggtcagcagccgaaagagggctataacctgaaacagatgctggagatcctggtggcacagaaaacagacatcaggctgtgtaaaacctgtaccgatgcccgcggtatcactgagcttccgctggtggacggcgtgcaggtcgggacactggccgagctggcgcagtggtcacttgatgcagaaaaaatcattaccttttaa

SEQ ID NO: 274639 - DNA, 648 bp, Morganella morganii
atggcacgaaaaactaaacaacaggccggagaaacccgccggcagattattgatgccgcgttaaccgccttcagtgagcagggcgtgtctgcgacgtcattagtggatattgcaaagcaagcaggtgtgacccgtggtgcgatctattggcacttcaaaaataaagttgatctgtttactgaagtctgttcgataaccgatacgaaaattggctttattgaacaagagtatcgggcaaaatacccggataatccacttttagtgtttaagaaaatattaatttacattctgacgtctgtggcttctgatcccaaaatgcgggctattctgagcatttcatttcataaatgtgaatttaccggtgaaatgagcgaattaattaccatcagacaaaatttatatgctgcggaatactcaagaatagagtcgttcctgattgaaagcgttacactggggctgctgccgtcaaccctcgatctgcgccgtgcggctatcatgctgcgcggaatgataaccgggctgttagaaaactggctcttttccagcgagagttttaatatcagcgggcaggctgaatatttggttgacggttatctggatatgttaatgctcagtaaaaatatgcagctaccgccggcagacgcctga

SEQ ID NO: 274640 - DNA, 1197 bp, Morganella morganii
atgcgaaaaaacagaggcgttctacctctggcgatgctcgttctgtccgggagctttctgctgtccggatgtggtgaagagcagaagcaagggggcgaaatgccaccgccggatgttaaagtcgtcacactgaaagctgcaccactgacagtgagcacggaactgccgggacgaacttctgcttaccgcatcgcggaagtgcgccctcaggtcggcggcattattttaaaacgcaactacaaagaaggaagtgacgtcaaagaaggcgaatcgctctatcaaattgatccggctccttttcaggccacgctgaacagcgcgcaggctgaactggcaaaagccagagcgaatgccgaactggcccgcctgacagtgaaccgctataaaccgttgctgggaacaaactatatcagccgccaggattatgatgaggctgtctccacacatgcacaggctcaggctgcggtccgggctgcacaggcagctgttcagacagcacaaatcaacctgaactacaccaaagtcacttcaccgatttccggtctgtccggtaaatcaaacgtgactgaaggtgcattagtggcaacaggtcagagccagccgctgacactggttcagcagattgaccctatctatgtggatgtaactcagtccagcgatgattatctgcgtctgaaacacgaaatcgccagcggtgccgtggataaagaacagggcaaagttgcggtcaccctggtgacagctgaaaacaaagattatacccataaaggttatctggaattctccgatgtgactgtcgacgaaaccaccggctccatcaccatgcgtgctgtgttccctaacccgcaggaatccctgctgccgggcatgtttgtccgcgcccgtgtggatgaaggtgtgcgtcctgacgccatcctggttccgcagcaaggggttatccgtacagcaaaaggcggtgcggtggttaacgtggttaacgccaaaaacgaaatcgaagtccgtccggtcactgtcggccaggcatatggtaacaaatggctggttaccgccggtgtgaataacggcgaacgtgttgttgtcgaaggcttccagaaaatcaagcagggtgctgtcgttaaggcaacagaggtggatttaaatgcacagccggcaacagctgcgccgaaagaaactgaatctgccaggaagtcccaataa

SEQ ID NO: 274641 - DNA, 3177 bp, Morganella morganii
atgccaaagttttttattgaaagaccgatatttgcatgggtaatcgccattattaccatgcttgcaggtctgttggcgatcatgaaactgccggtggcacagtatccgactgttgccccgccggcgatttcgatttccgcaacctatccgggtgcggatgccgagacggttcagaatacggtaacccaggttatcgaacagaacatgaacggtatcgacaaaatggtgtacatgtcttcaaccagtgactcagcaggtaacatgagtatctcgctgacctttgaagctgacgccgatccggatattgcccaggttcaggtacagaacaaactgcagctggctatgccgttactgccgcaggaagtgcagcagcaggggattacggttcagaaatcaaccagctccttcctgttggttgccgcgtttatttccgatgataaagacatgacgcaggatgatattgcggactatgtcggttcaaacgtgaaagacccgctcagccgtgtaaccggtgtgggggaaacccagctcttcggtacccagtacgccatgcgtatctggctcgatcccgataaactggtgaagtacaacctgaccactatcgatgttattaatgagattaaaattcagaacaaccaggttgctgccggtcagctcgggggaacgccctctgttaaagatcagcgtctgaacgcatcgatcattgcacagacccggctgaatacccctgagcagttccaggaaatcatgctgcgcgtgaatactgacggttctgttgtccgtctgaaagacgttgcttatgtggaactcggtgcagagaactacgggattatcgcgcgttataacggtaaaccatctgccggtatcggggttaaacttgccacaggggccaacgccctggatacagcaaacgcagttcgtgaaaaactggctgaaatgcagccgtatttcccggacggaatgcaggttgtttatccttacgatacaactccattcgttaaaatctccattttcgaagtggtgaaaacactggtcgaagcaatcatgctggtgtttgtggtgatgtatctgttcctgcaaaatttccgcgcaacattgatcccgactatcgctgttccggtcgtgttattaggtacattcgccgttcttgccgccttcgggtattcgataaataccctgacgatgttcgcgatggtgctggccatcggcctgctggtggatgacgccatcgtggtggtggaaaacgttgaacgtgttatgcaggaaaccggcctgccgccgaaagaagccacaaaagtatctatggggcagattcagggtgccctgatgggtatcgccatggtgctttctgcggtatttattccgatggccttcttcgggggttcaaccggggcaatttaccgtcagttctctgtaactatcgtatcagccatgattctgtcagtattagtggcattaattctgacaccggccctgtgttccaccatgctgaagcctatcaaacagggcagccacggtgctcagaccggattcttcggctggttcaaccggatctttgagaaacagactcaccactatactgacagcgtgggccgtatgctgcgcggtaccggtcgttatctgctgctgtatgttgtgctggttgcagccatgattgtgatgtttgtccgcctgccgtcttccttcttaccggaagaagaccagggggtattccttgccatggttcagttacctccgggctccacacaggaacagactcaggttgtccttaatgaagtcagcgattacttcattaatactgagaaaaatgtggtggaatctgcctttaccgttaacggcttcggtttcgccggtcagggacagaacatgggtctggctttcgttgtcctgaaaaactgggatgaacgtaaagcgaaagaagataaagtggaagctattgtcggccgtgccaacgcgaaattcagccagaattcaggcgcaattatttatgcgttcaacattccggcaattgttgagctcggcacatccagcggctttgaccttgaactgatggacaatgccaaccacgggcatgaagctctgactcaggcccgtaaccagttactgggacttgcaggcaaacatccggatatgctggttcaggttcgtccgaacgggatggaagatacatctcagtatcatctctatgttgatcagcagaaagctgaagcattaggtgtggacatcagcactatcaatgcgacaatgagcaccatgttcggcggaacatacgtcaacgactttatcgatcgcggacgtgtcaaaaaagtctatattcagagtgatgcacaattccgtatgcttcctcagaatatttctgaacagtatgtccgcaataacaacggtcagatggttccgttctccgcctttgttgatacgaagaaagatccgtggtcatttggttcaccacgtctggagcgttacaacggtttaccggctatgcagattcaggggagtgccgcaccgggtaaaagtagtggtgatgcgatgaacctgatggaagacctggcaaaagagttgccgccgggcttcggcgttgagtggacaggtatgtcttatcaggaaaaaatgtccggtaaccaggcgcctgcactgtataccatctcactcattatcgttttcctttgtctggcagcgttatatgaaagctggtcggttccgttctctgttatgctggtcgttccgctcggggttatcggcgcgctgttgctgacccatgcacgcgggctggaaaacgacgtgtacttcaaggtcggcctgctgacaaccattggtctgtcggcgaagaacgccatcctgattgtggaattcgccaaagacctgatggagaaagaaggtaaagggctgattgaagcaacactggaagcggttaagatgcgtctgcgtcctatcctgatgacatcgctggcctttatgctcggggttattccgttagtcctgagtaacggtgccggttccggtgcacagaacgccgtaggtacaggtgtgttcggtggtatgatcgccgcaacctcactggctatcttcttcgtaccggtcttctatgtggttatccgccgccgcttcagtaagaagaatgaggacattgagcatgctcatgcggtaacgcaaaagagcgatagtcctgacggattttaa

SEQ ID NO: 274642 - DNA, 360 bp, Morganella morganii
atggacgagtattctccacgaaattacgatattgcggtactgaagtatctgtgtgatgaactttgccgtgaaggcacacaaaccctcatcagaagcaataattattgggttaatgatttagcctcagattcaaacttaaaacttaacgaattattaggttacattgctgacgtggcctggagttttaagataaaacatacacaaaataaggatctcatctcatttgtcgatgaatacatcgatgaaacttacgcgctgtttggtcagatggaagtttcgtttaatgacgttgaggaatggaagaagatggcatcactggtaagcagcatgctgaccagcgaggggcatctcgtccactaa

SEQ ID NO: 274643 - DNA, 207 bp, Morganella morganii
atgatgactaaactggactatctcatgcgcttacgtaagtgcacttctattgaaacactggaacgtgtcattgagaagaacaaatatgaactgactgatgatgagctggaggttttttattcagcagccgatcatcgtctggccgaattaaccatgaataaactgtatgacaaaatcccggcatctgtctggaaatttgtccgttaa

SEQ ID NO: 274644 - DNA, 864 bp, Morganella morganii
atgagcctggcattagaaaacctgataaacctgatggcactcgaaaaactcgaagacgggttattccgggggcaaagtgaagatctcggcctgccgcaggtctttggcggacaagttgccggacaggcactgtatgcagcgggacagaccgttccggctgatcgccgcgttcattcattccacagctattttctgcgcccgggcgacagccataaaccgattatttatgatgtggaaaatctgcgtgacggcaaaagtttcagtgcccgccgtgtcagcgcgattcagaacggaaaaccgattttctatatgaccgcctctttccagggggaagagagcagttttgagcatcagaatgccatgccggaagttccgggccctgacggactcgcctctgaaactgatattgcccgcaagatcgccgcgaatctgccaccaaaaatgcaggcactgttcctgcgtgagcaggcgattgaatggcggccggtgcgtttttacagcccgtttcagaacccggagaatccgccggtgcgttatacctggctgaaaaccaacggtacaatgccggatgatcaggctctgcatcagtatctgctcagctatgcttctgactacaatttcctgccgaccgctctccagccacacggctacggctttatgcagccggaaattcagattgccacgattgatcattccatgtggtatcaccgcccgttccggctggatgaatggctgctgtatgccgtggaaagcccgacagcgtccggcggacgcggttttgtccgtggtcacttctataatcaggctggtgcgctggttgcatctactgtgcaggaaggcgttctgcgcttacgggatatttaa

SEQ ID NO: 274645 - DNA, 1290 bp, Morganella morganii
atgatgaaacgaaaaatggtcttgcctgttgtgatgtccgcggtgctgccgcttccggcattcagtgcaacggaaggaatggagcgtgcggataatggttttatgctgatttgtgccgcactggtgtattttatgacacttcccggtatcgcgctgttttacggcggactggtacgacgtgagaatgtgttatcagtcatgacacaggtgattgtcagcttcgcgctggtgctgctgttatgggttttttatggctacagcatggcgttttctgacggaaatggggtgattggcggtctgtctcatgcatttctcagcgggatcacgcctgtcagtaacagcggcagtatcagccaactgacacacgttattttccagggctcttttgcggcaattactgttgcacttatcaccggtgcgctggcagaacggatcaaattcacggcctttctgttgttcaccgttatctggttctctctggcttatgtacctatggcgcatatggtttggggtggcggctggctggcggaagatggcgcactggattttgccgggggaaccgttgtacatattaacgcggcggttgccgggttagttggtgcttacatattgggaccgcgcctgttaccggggaaaaccgcgaccaaaccgcacagtctgccgatggtctttaccggcacggcgatcctttatatcggctggttcgggtttaatgccggatcggccggaaaaccggatggtattgcagcactggcttttctgaataccgtgattgcggtggcggcgggcgtgctggcgtgggtgattgcagagtggtgcatgcggggtaagccctcacttctcggtgcgtgttccggctgtatcggcggcctggtcgggatcaccccggcggccgggacggtgggcgtcgcgggggcgatagttatcggccttatcagcggtattgccggctattggggcgtcactgcactgaagcgccgcctgaaagtggatgatgtctgcgatgtcttcgggatccacggcgtctgcggtattgcgggctgtctgctgactggcgtgtttaccgcgtctgctctcggcggtaccggctacgcagaaggtgtcactatgctgcatcaggtatggattcaggcggaaagcatcctggttactgtgctctggagcggagtgattacttacatcgcattcaaatgcgcggcactgacaaccggtgtacgctgcacagaagaagatgagatcagcgggctggatatcagcacgcatggcgagcaggcctataaccgctcatag

SEQ ID NO: 274646 - DNA, 339 bp, Morganella morganii
atgaaaatgataatggccatcatcaagccttttaaacttaatgacgtcagagatgcgctgaacgaagagggtattcagggattaactgtactggaagtacggggtgcgggcagacagaaggggcacactgagctgtaccggggggaagagtacagcacggattttctgccgaagacgcagcttacgattgttgtgcctgatgattctcttgatcgcattattgaggcaatttgccgctcggcatataccggcagtatcggtgacgggaaaatatttgtttcagacattactcaggcggtacggattcgtaccggtgaacaaaatgatgaagctatttaa

SEQ ID NO: 274647 - DNA, 1797 bp, Morganella morganii
atgagtgaacagacccgcccggaagcggcaaaaaacctgtggccgtcgctgaaacgtctgctcggctatggccgtaactaccgccgtccgatggccgttgccattgtgatgctgtggctgacagccattgctgaagtcgccgcaccggttctggtgagctattttatcgacaatatggtggcgaaaaatcagattgtcctgtcggtgacattattgctggtggccgggtttgtcgccttacagattgccgcatcgctgctgcattattttcagctgatttatttcaaccaggccgctgtcggcgtggtccagacactgcgcgccgatgtgatggatgccgcgctgcgccagccgctgagtgcatttgacacccagccggtcggacagctgatctcccgtgttaccaacgacacggagatgatcaaagacctgtttgttaacgtgctgccgacgctgttccgcagcgtggcgctgattgtggtgatgctgattgccatgtactccctggagtggcggatggcgctggtggcaactgctatgttcccggcagtgatgctggtgatgtggatctaccagcggctgagcacgccgattgtgcgccgggtgcgcagttatctggctgatattaacgatggtttccatgaaattatcagcggcatgacagtgattcagcagtttcgccagcaggcgcgtttcggagagcggatgtttgccgccaaccgccgtcattatgaggtcagaatggcggcactgcggctggacggcattttgctgcgtccgctgctgagcctgttttcggcggcgatcctctgtggtctgatgttattgttcggggttgagggcaccggcgttatcggcgtcggggtgttatatgcgtttatcacctacctcggtcggctgaatgaaccgcttatcacgctgacatcccagcagtctgttttacagcaggcggtgatttccggtgagcgtgtttttgaactgatggacagcccgcagcagaaatacggggcggatgatcagccgctgaccggcggcagtatccgtgtatcacacctgacatttgcctatcagccgggaaaaccggtactgcgtgatatcagtatcgatgtggcggagcacagttttgtcgcctttgtcgggcataccggcagcgggaaaagcacactggcaaacctgctgatgggctactatccgtggcaggccggggaaatcagcctcggcgggcgtccgctggaacaattctcacataaagcactgcggcagggcatcgcgatggtgcagcaggatccggtcattatggccgcttctttccgtgacaacatcaccctcggacgggatattgatgatgagcgcattcacagggtgctggagatggttcaactgagtgagcatgtctcacagcttgaatacgggctggataccgaactgggtgagcagggtaacaccttgtctgacgggcagaaacagttgctggccatggcacgggtgctggtgcagaccccgaaaatcctgatcctggatgaggcaaccgccaatatcgattccggtactgagcaggctatccagaaagccttacagctgatccgccgtgaaaccacactggtggtgattgcacaccgattgtccacgattgtcgatgcggacaccatttatgtgctcaaccgcggcgaaatggcggaatccggctctcaccgggcgttactggcagagaagggccgctattaccagatgtatcagctgcagcaggtcggggaatcactcaacgccccggaagagaactatacccctgcactataa

SEQ ID NO: 274648 - DNA, 1740 bp, Morganella morganii
gtgagattatttgcccaattaaaatggtatttcctcagtgaatggcggcgctataccggtgcggtcacttttctgatcattatcgcggtgttacagatcctgccgccgcgctttgtcggcatcattgttgacggcgtgaccaaagagacgatgaccaccaccacgctgtggggctgggtcggcgtgatgctgcttatcgcactggtgatttatattctgcgctatatctggcgggtctggttattcggtgcctcctacaagctggcggtacgtctgcgtcaggatttttatcagcagttcagccgccagtctccggccttttatcaccgttaccggaccggtgacctgatcgcccgcagtaccaatgatgtggacaaagtggtgtttgccgccggagagggggtgctgacgctggtggattcttttgtcatgggactggtggtcctgctgacgatgagtattgagatcagctggcaactgacactgctttccctgctgccgatgccgctgatggctctggctatcaaacgttacggtcagcagctgcatcagcgctttaaaacagcgcagggcgcattttcctccctgaataaccacgcgcaggaaagcctcagcagtatccggatgattaaagcttttggcctggaagatcaccagtcttccaggtttgaatccgttgcggcagaagccggacgcaaaaatatgcatgtggcacagatagatgcccgtttcgacccgaccattattatggcgatcgggatgtcaaacctgctcgcggttgccggcggcagctggatggtgatgcagggcacactgacgctcggcgggctgaccagctttattatgtatctcgggctgatgatctggccgatgctggcattagcctggatgtttaacattgtggagcgcggcagtgcggcctacagccggatccaatcccttcttgaaaccccgccggtactggcggatggtacagaatccctgcaaccggggcgtggtgaactgtccgttgctgtggatgagttctgctacccggaaagccgccggacagttctgcacgatattcgttttaccctcagacctggccagctgctcgggttgtgcggcccgaccggctgcggcaaatccacgctgctggcattaatccagcgtcattatgatgtgacagcaggaaatatctgttttcagggcagaccgctgccggaactgaccttcgccggctggcatgcccggctggcggtggtgaatcagacgccgtttctgttctccgatactatcgccaataatattgcgctggggcggcccggggcgacacaggaagaaattgaacacgcggcccggctggccagtgttcatgatgatattgaacgattgccgctcggttatgagactcaggccggtgagcggggcgtgatgctgtccggcgggcagaaacagcggatctccattgcccgggctttgctgatggatgctgagatcctgatcctcgatgatgcactttctgcagtggacgggcagacggaataccggatcctgcagaatctgcggcgctggggggaaggccgtacggtgattatcagtgcgcaccggctctcagcgctgactgaagccgacaatattctggtgctgcaacagggcggtatcagtgctcaggggcgtcatcaggagctgattaatcagaacggatggtatcgcgaaatgtatcattatcagcagttagaggccgcgctcgatgagtga

SEQ ID NO: 274649 - DNA, 516 bp, Morganella morganii
atgcatgatatggagaaatttattctctctggtggtgatatgttagataaaacagaccgtaaattgttacaacttttgcaggaagatgctgcattatcactgaacacactgtccgaagcggtgaacctgacatccactccctgctggaaacggctgaaacggctggaagatgaaggatacatccgcaaacgtgtggcactactggacccggaaaaactcgggctggggctgacggtgatcgtcatgatcaagacacagcaccacagcagtgagtggtatactcagtttgtggaatttgttcagcagatgcctgatgtggtggagttttaccggatggccggggaatttgactacatgctgcaggtcgaagtggtggatatgaaatgcttcgatcatttttacaaaaaactggttaacggtgtgcccggtttaattgatgtgacttccaattttgcgatggagcgcataaagtacaccaccgcattgccgattccggagaaatgcaaagcggactga

SEQ ID NO: 274650 - DNA, 1041 bp, Morganella morganii
atgacaacccaatggaccacatccgccattaatgccattcaggccgattatcagcgcagtgctgacacacacctgatcccgctggaattacccgtttacccgggggtttcattatatctcaaagatgaaagcactcacccgaccggcagcctgaaacaccgcctggcgcgttcgcttttcctgtacggcctgtgtaacggctggatccgcgaaggtacaccggtgattgaagcatcctccggcagcaccgctgtctcggaagcatacttcgcccgtctgctcggcctgccgtttatcgccgtgatgccgcgctgcaccgcacgccgtaaaattgaacagattgagttctacggcggccggtgccactttgtggacagcagtgcgcagatttatgcggaatccgagcgtctggcccgcgaaaccggcggccactatatggatcagttcacctatgccgagcgtgccactgactggcgcggcaacaacaatatcgccgaaagtatttaccgtcagatgtcacgggaagcccatccggtgccgcgttacattgtgatgagcgcaggtaccggcggtacctctgccacgctcggccggtttatccgctatcagggacatgacacaaaactggttgtcgtcgatcctgaaaactctgttttttatgactgttaccatcagaaatgctcacatctgcgctgcgataccggcagtaagattgagggcatcggccgtccgcgtgcggaaccgtcttttatcccgggcgtgattgatgatgtgatcaaagtcagtgaccagtgcagtatcgccactctttactggctggaaaaactgctcggccgccgcaccggtgcctctaccggcaccaatgtctggggcgcactgcaactggcaaaacagatgcatgaacagaaacagaccggctcgattgtgacactgatttgcgacagcggcgaacgctatccggacacctattacaacccgcagtgggtggcagacaacatcggtgatctgactgacgcacaggcaacactacccaaatggtga

SEQ ID NO: 274651 - DNA, 699 bp, Morganella morganii
atgaaacgtgctgtggtcgtattcagtggcgggcaggattccacaacctgcctgattcaggcactccgcaactatgatgaagtgcattgtgtgacgtttgattacggacagcgccacagtcaggaaatagacgttgcccgtaaactcagcctgaaactgggtgcggcagcacataaggtgctggatgtctctctgctgaatgaactggcggtcagcagcctgacccgtgataacatcccggtgcccgggttcagtgaaagtgaacaaagtgatattccgaatacctttgtcccgggccgtaatatcctgtttctcaccctgacggcgatttatgcttatcaggtcaatgcggaagcgattatcaccggtgtctgtgaaaccgatttttccggttatccggattgccgggacgagtttgtcaaagcactgaacaaagccgtcaacgccggtcttgcccgtgatatccgctttgaaaccccgctgatgtggctggataaagcacagacctgggcgctggctgactattacggacaactggataccgtccgcacagaaacactgacctgctataacggtattcagggggatggctgcggggaatgcgccgcctgtcatctgcgccgcaacggactggacagctatcttgctgatcgcagtgctgttatggccgctatgaaaaaaatcaccggcctgcaataa

SEQ ID NO: 274652 - DNA, 411 bp, Morganella morganii
atgagcaccacaattaaagtgattggctaccatattgatgccttcggacatgttaacaatgcgcgttatctggagtttctggaggccgcccgctgggactggctggaaagctacgatgcttaccgctggtttaaacagatggatatcgccgtggtggtggtgaatatcaatattaactaccggctgccggtgtatgtgggagagcggctggtgatagacagctatttacagcacgcggggcagaaaagcggtgttctcaaacagataattacccgtcaggaggataagcaggttgtggcggatgcggaagtgacctttgtctttattaatatgaaaaccggcaaagcgatcccgattgaaggggaaatccgcgataaatttgaattgctgacagcaccaaaagagagctga

SEQ ID NO: 274653 - DNA, 333 bp, Morganella morganii
atgaaaacaaaatggacatctgcattattattaacatcagcactgttaaccggcggttttttcagtacttccgcactggctcaggctgcaccaccggcagacagtgcgcaggttcagcagtctgttgcacaggaaacaaaccgcatcagcattaataccgcgactgcggaagaactggcccgggaactcagtggcatcgggccgaaaaaagcccagcggattgtggagtaccgcacggaaaacggaccatttacttctgcggaacaactgaaggatgtatatggtattggtgagcgtatttttacgatgaacagcgataagatagagttgtaa

SEQ ID NO: 274654 - DNA, 1869 bp, Morganella morganii
atgatggaaaacctgcgcacagcggcgaacaaccctgtgattaaaattatcttcgccatcattatcctgtcatttattctgacaggtgtgggtggttacctcgtcagcggttctaactatgctgccaaagtgaacgatactgaaatatcggtccagcagttagagcgcgccttccaggaagagcgtaaccgccagcaggctcagctgggtgatctgttctcgcagttagtcagcaccgaagagggcgttaaacaaatccgttctcaggcgctgaaccagatgattgacaccattctgctggaacagtatgcacggaaattaggtatcactgtcagtgatgaccagattatcagcgcgattcgtcaggagcctgactttcaggttaacggccagttcagccagcaggcgtacgaaacattcctgtcccgtaacggtatcaccggtgacaactacgcaacttacctgcgcaagcagatgattcaggcacagctggttcagccgtttgtgcgtgactcatttgtgcttgattccgaagtgaccaatgcggcagcggttttactccagtcacgtaccatccgtaccgcgacgctggatctggcttccgctcaggcaaaacagaccaccaccgatgaagagctgcaggcttattacgcgaagaataaaaacagcttcatcgcgccgcagtccttaaaaatcagttttgttgagctggatgccgcgaatatccaggacaacacatcagtcactgaagaacagattcaggactactacgacaaaaatatcccgcgtttcaccgtaccggcaaaaggcgagtacagtcagatcactctggcgacggaagatgatgccaaagcggtactgaatgagctgaaaaacggggcggatttcaaaaccctggcgaaagaaaaatccaccgataaactgactgcccgtaacggcggggggatcggctggatggaagacgccgcgctgatccctgaaattaaaggtgccgggctgacaaccgccggccagctttcagaggttatgaaagtggataacggctacgcgattttccgcctggatgtgtacgagccggaaaccgtcagaccgctggcggatgtgaaagatgaagccacccgtctggccaaaggcgaagcggcaagcaaagccttctttgacctccagcagaaagccagtgaagccgctgcgaacgataacgaatctctgatgggcgttgagcaggcaaccggcgttaaagctgtacagactgactggtttgctctgaacagcctgccggatgcggtgaactatccggaagtgttaaaagcattaacggaaaacaaactgtttgatgagaaaggaccgtccggtgctaactctgacatcatcactgtttccggtgaccgtgcctttgtgatccgtgttgatgagtatcgtccggaagcagtggaatccttcgaaaaagtgaagtcagacattgacgcgctggtgaaacgcagcaaagcggaagccgcgctgaatgcggaagcggataaactgctgacggcactgaaagaaggtaaaggcgacgccgcgttaacagaagccggtgtgaaattcggtgcagagcagactgttcagcgcctgaatccgtcagacccggttatcaatgctgcctttacccagccgcatcctgcggacggtaaaccgacctacagccgcaccattgacggcaagggcaacattgttctggtacagctggataaagtcacagccggtacggcaacggatcaggaaaaaactgagctgcgtacagtgctgcgtcagcaaatggcgtccactgagctggaatcattactgctgaacctgcgtgctaacgcagatattgatgtgagaaatatgaactaa

SEQ ID NO: 274655 - DNA, 285 bp, Morganella morganii
atgataatagtgaataagtcacaattggtcgataaaattgctgcagacgctaatatttctaaagctgcggctggtcgcgcgttagatgcaattattggttcagtaaccgattctctgaaaggcggggatgacgtggctctggttggtttcggtactttcactgttcgtgagcgtgcagcacgtacaggccgtaacccgcagaccggaaaagagatcaaaatcgccgctgcgaaagtcccggctttccgtgcaggtaaaggtcttaaagacgcagtaaacggctga

SEQ ID NO: 274656 - DNA, 2358 bp, Morganella morganii
atgaatcctgagcgtgctgaacgcattgaaatcccggtactgcctttgcgcgatgtggtggtctacccccacatggttattcctttatttgtcgggcgcgaaaaatctatccactgtctggaaacagcgatggatatggataaaaaagtgctgctggtagcacaaaaagaagcgtcaacggatgagccgggcgtcaatgatttattttccgtcgggacagtcgcgtctgtattacagatgctgaaactgccggacggcaccgtcaaagtgctggtcgaaggcctgcaacgtgcgcatatcaaaacattaagtgacaacggcgatttcttctctgcccaggcagagttgatggaatcccctgtcgtggacgagcgcgagcaggaagtattgctgcgcacggcgatcaaccagtttgaaggctatatcaagctgaataaaaagatcccgccggaagtcctgacatctctgcacagtatcgacgatgtcgccaaactggctgacactatcgcttcccatatgacactgaaattacaggacaaacagtctgttctggaaatgtcagatgtggttgagcgtctcgaatatctgatggcgatgatggaatcggaaatcgacctgttacaggttgaaaaacgcatccgtaaccgcgtcaaaaagcagatggaaaaaagccagcgcgagtactatctcaatgagcagatgaaagctatccagaaagaactgggtgagatggacgacgcgccggatgaagctgaagcgctgaaacgcaaaatcgaagaagcgcagatgccgaaagaggcaaaagagaaagctgaagcggaattacagaaactgaaaatgatgtcgccgatgtcagcggaagcgacggttgtccgcagctatatcgactggatgattcaggttccgtgggtcaagcgcagtaaagtgaaaaaagacctgcttaaagcgcaggaaatcctcgacagtgaccattacggcctggagcgggtgaaagagcgcatccttgaatatctggcggtacaaagccgtatcagcaaaatcaaggggcctatcctgtgcctcgtcggaccgccgggggtgggtaaaacctctctggggcagtccattgcccgtgcaaccggccgtaaatatgtccgtatggcgctgggcggcgtgcgtgatgaagcggaaattcgcggtcaccgccgtacctacatcggttctatgccgggtaaacttattcagaaaatggcaaaagtcggtgtgaaaaacccgctgttcctgctggatgaaatcgacaaaatgtcatcggatatgcgcggtgatccggcttccgcactgcttgaggtgctggatccggaacagaatatcgcgtttaacgatcactacctggaagtggattacgatctgtccgacgtcatgtttgtcgcgacatccaactccatgaatattccggcaccgctgctggatcgtatggaagtgatccgtctgtccggttatacggaagatgagaaactcaacattgccaagcgtcacctgctgccgaagcagattgagcgtaacgcactgaagaaaaccgagctgcatattgatgacagcgcgatcctcggcattatccgttattacacccgtgaagcgggcgtgcgcggactggagcgtgaaatctccaaactgtgccgtaaagcggtgaaacagctgctgatggataagacactgaaacacatcgagattaatcaggataacctgaaagattacctgggtgtgcagaaagtggattacggccgtgctgatactgaaaaccgcgtgggccaggttaccggtctggcgtggacagaagtcggtggtgacctgctgaccatcgaaaccgcagcggttccgggtaaagggaaactttcctacaccggttcactgggtgaagtgatgcaggaatctatccaggcagcgttaaccgtggtacgtgcccgtgcggataaattggggatcaacaatgatttctatgaaaaacgcgatattcacgtccacgtaccggaaggtgcaacaccaaaagacggcccgagtgccggtactgcaatgtgtaccgcactggtttccgcgctgaccggtaatccggtgcgtgcggatgtggcgatgaccggggaaattaccctgcgtggtctggtgctgccaatcggtggtctgaaagaaaaactgctggcagcacaccgcggcggcattaagactgttctgattccggacgaaaaccgccgtgatctggaagaaattccggataacgtaaaagcggatctggatattcatccggttaaaacaatagatgaagttctttcacttgccttagtgaatcctgctttcggtatggaagtggtaagtaaaaaggcgtag

SEQ ID NO: 274657 - DNA, 1281 bp, Morganella morganii
atgacagacaaacgcaaagacggttcaggaaagctgctgtactgctctttctgcggaaaaagtcagcatgaggttaagaaactgattgccggcccgtcagtgtatatctgtgatgaatgcgttgatttatgcaacgatattatccgtgaagaaattaaagatctgatcccggcccgtggcagtgagcgcagtgaactgccgacgcctcatgaaattcgtcagcacctcgatgactatgtcattggtcaggaactggctaaaaaagtgctggcagtcgcggtatacaaccactacaaacgtctgcgcaacggcgataaaaccgctgacggcgtggaactgggtaaaagtaacattctgctgatcggcccgaccggcagcggtaaaaccctgctggctgaaactctggcccgctacctggatgtgccgttcactatggccgatgccaccacactgaccgaagccggttatgtgggtgaggatgtggaaaacatcattcagaagcttttacagaaatgcgactatgatgtggagaaagcacagcgcggtatcgtctatattgatgaaatcgataaaatctcccgtaaatcagataacccgtcgattacccgtgatgtttccggtgaaggcgttcagcaggcactgctgaaactggttgaagggactatcgctgctgttccgccgcagggcgggcgcaaacatccgcagcaggagtttttgcaggttgatacctcgaaaattctgtttatctgcggcggggcgtttgccggtctggataaagttgtcggccagcgtctgaacacccgttccggtatcggtttcggtgcggaagtgcgcggcgagaaagacaaagcgacagaaggcgaattactgtctcaggtcgagccggaggatctgatcaaatttggtctgatcccggaatttatcggccgtctgcctgtcgtggcaacgctcggtgaactgagtgaggatgcgctgattcagatccttcaggagccgaaaaacgcactgacaaaacaatatcaggcactgttcagcattgaagatgttgaactcgagttccgccgtgaagcactgattgccattgcgaaaaaagccatgaagcgtaaaaccggtgcccgtggtctgcgttccatcgttgaggctgcgttgctcaacacgatgtatgatttaccgtcgatggaaaatgttgaaaaagtggttatcgatgaaaacgtgataaccaaccagaccgaaccgatgctgatttaccgcaaaccggaagctcaggtttccggcgagtaa

SEQ ID NO: 274658 - DNA, 621 bp, Morganella morganii
atgtcatatcacgacaatcaggatactttcgcacccaacatggcgctggtgccgatggttatcgagcagacttcacgcggtgaacgctcctacgatatctattcccgtttattaaaagaccgtattatctttttaaccggccaggttgaagatcatatggcaaacctgatcgtggcacagttactcttcctggaagctgagaatccggaaaaagacatcagtctttatatcaactcgccgggcggcgtgatcaccgcggggatgtccatttatgacaccatgcagtttatcaaaccgcaggtcagtactatctgtgtaggccaggcctgctcaatgggggctttcttactgacagcaggtgcgccgggcaaacgttattgtctgcctaactcccgggtgatgattcaccagccgctgggcggctatcagggccaagccactgatattgaaattcatgctcaggaaattctgaaagtgaaagcacgcatgaatgatttattagctcaccataccggtaaatccgttgaggaaattcagcgtgataccgagcgtgaccgcttcctgtccgcgaaagaagcgcaggaatacggtctggttgaccatatttacacacaccggtaa

SEQ ID NO: 274659 - DNA, 1311 bp, Morganella morganii
atgcaagtttctgttgaaacgactgaaggccttgggcgtcgtgtattaatcaccgttcctgcagccgatattgacaaagaagtaactaaacaattagctgaaatcgccaagaaagcacgtatcgacggtttccgtaaaggtaaagtgccgcacaacatcatcaaacagcgttacggcgatgtggcggttcaggatgcactgagcgacctgatgtcacgtaactttgtcagcgctatcatcgaaaacaaaatcaaccctgtcggcgcgcctgactacaaagttgatgagccgtacaaagaaggtcaggatttcacttacactgttgagttcgaagtcttccctgaaattgagctgaaaggtctggaaacaatcgaagttgaaaaaccggttgttgaagttaaagacgaagacatcgacggcatggttgagactctgcgtaaacagcaggctgagtggaaagtgactgaaggcgcagctaaagctgacgatcgcatcactatcgacttcaccggttctgttgacggcgaagagttcgaaggcggcaaatcttctgatttcgtcctggtcatgggccagaaccgtatgatcccgggctttgaagacggtatcgtgggtcacaaagccggtgaagaattcgacatcgaagtgacattcccggaagattaccacgctgaaaacctgaaagggaaagcagcgaaattcgctatcagcctgaaaaaagtggaagagcgcgaactgccggaaatgactgaagagttcatcaaacgtttcggtatcggcgacggttccctggaaggtctgaaagcggaaatccgcaaaaatatggaacgcgaactgaaaaacgcagtgcgcaaccgtatcaaaactcaggttatcgacggtctgctgaaagcaaacgaaatcgatgtaccgaaagcagctgttgacagcgaaatcgaagaactgcgccgtcaggcggcacagcgtttcggcggctctgaaaaacaggcgatggaactgccacgcgaactgtttgaaggccaggctaagcgccgtgtaatggttggtctgctgttaggcgaagtgatttcttctaacgaactgaaagccgaagacgatcgcgttaatgcgctgatcgaagaaatggcatcagcgtacgaagatccggctgaagttgtggaatactacaacaaaaacaaacagatgatggatggtatccgtaatctggcactggaagagcaggctgttgaaactgttctggcgaaagcaaaagtgacagataaagaaaccggcttcactgatctgatgaaccaggttcaggcagcaggttaa

SEQ ID NO: 274660 - DNA, 330 bp, Morganella morganii
atgtcggcatcatttcctgctgtaatgcagcagcgtattgaagaaaaactgaatcacgcgcttgcccctcattatattgatgtggtgaatgagagcagccagcacaatgttccggcgggatcggaaacccattttaaggtggtggtggtcagtgagacctttgcgggcatgcgcccggtggcacgtcaccgtcatatgtacacgctgctggctgatgagctggccggcggggttcacgctctggcgctccatacttataccccggatgagtggaatcacagtcagggcggagtgaatccgtccccgcgttgtcacggcggcggaaagtaa

SEQ ID NO: 274661 - DNA, 582 bp, Morganella morganii
atgttgaaaaaatacctcctcccgctgttcgcaatgctcttactggccgggtgtcaggcaccgtccaacaccctgtccattgaaccggtgatgaaattaccgtctgcggatccgacgctcggtgccgccactatctcgatcaccggtgtggataaacgcccgtcacagaccctggctgaattcagccgtaacggccagctggcacagctgcgcccgtcccgtgacctgcgtttcctgatgcaggaaaccctggaaaaacagatgaccgcacgcggttttatgattggctcaccggcaaatgccaatgtgcagatttccatcaatacctttaaggcggatgttcaggaaggcagcctgcgccataatatcaccgtcaatattgatattactgttctcgccaccgcgcagaataacagcacaaagagccggactttccgcaccagctataatgtgcagggcccgttaagcgccagcaatgaaaaaatcactgacgcctttaaccgcgcactcagcgatatcgtcgcggacatggctcaggatacccaaatcagccagttcattaaacagaacacccgctactaa

SEQ ID NO: 274662 - DNA, 1488 bp, Morganella morganii
atgctccggagtatttgggcgacttacagcgagcgtaatgcccgtattcttttactgctcggtttcgcatccggattaccgctggcactgaccagcggcacactccaggcctggatcaccgtcgaaaacgtggatatcaggaccatcgggtttttcacccttgtcagccaggcctatgtgtttaaattcctgtgggcaccgtttatggatcgctaccagttgccgttcctcggacgccgccgcggctggatgatcaccacacagcttctgctggttgtcagtatcgctggtatggggatgctcaaacccacggaacacctctggtggctggctgcggccgccgcgattgttgctttctgctctgcctcacaggacatcatttttgatgcctataaaacggatctgctgtccgcgaaagatcgcggcaccggggctgcgatatcaaccttaggttaccggctggcaatgctgctctccggcggcctggcgctgtttatcgctcaccgttataccggctggcagaacatgtacctgctgatggcgggaatgatgctgatcggtgtgtttgccacgctgagggcgaaagagccggaaaccgatgccccgccgccgcgcacgctgcgtgaggctgtccgggagccgctggcggaatttttctcccgtaacaacacctggctgctgttactgctgattgtcctttataagatgggggacgccttcgccctgacgctgagcacgccgtttctgatccgcggagccgggttcggtccggacgaagttgggcttatcaataaaaccctggggctggccgccacgattgtcggggcactgtacggcggttatctgatgcagcgctggagcctgtttaaatccctgatgttcttcgggatcctgcagggattttccaacctcggctactgggtgttgtccgtcacaccacaaaatatctatatgatgggcggcgtggtatttatcgagaacatctgcggcgggatgggcacagccgcctttgtcgctctgctgatgacactctgtaaccggtccttctccgccacacagtttgccctgctgtcggcactgtctgctatcggccgcgtctataccggcccgtttgccggctggatggtggaagcctacggctggagctggttctatctgtttaccgtgtttgccgcaattccgggattactgctgctgatgttgtgccgcaaaacactgctctacacccagaaaacggagcagtttctgccgaggcggcatttccgcaacggctaccggacggcgatgtcactgctcggtatcaccgcagtactgttcgcggccagcctgatcctgctgctgaccggggtatttgaactgacaccgggctttattcctgacacgctgaaaggcgacctgtttatttacggcctgaatatcggtattgccgggttgttcctgggcggactgctcgattattgtgcactccgccgcgataaactggcctga

SEQ ID NO: 274663 - DNA, 759 bp, Morganella morganii
atgaaaaaaacgactattgcagccctgatcgctgcaaccgccgcgttttctgcgcaggctgaatatcagtggggatttgctaacgtcagcatgaactatctggactggaccccgcataccactcacaaaagcggcaacagcacgcacaaagatgactttgcgtatctggagcttgagggcggtgccggtttcagctggggtgagctttatggtttcttcgacctcgagaacgcgtttaacagtaaaaacgattccgatgccggtgataaccagcgttacaccttcaaaaccacggcgcgtatctacctcggtgataccggtttcaacgcctacggccatgtctacggtacttactctctgccgggtaacggcggtaacttccatgaagtgaacaccctgtatggtatcggttataacaccgaattcaacggcttatggttcaaaccatttgctgccctgcactatgttgatcaaacgttttacagcggcaacaacggctatgtcctcggctgggttgccggttatgactttaacctgtggaatgaaaaattcagcgtcaccaactggaacgaaatcgagcttaaccgcaacgatcgttacggcaacggcgggcgtgacggcgtcaacggcgcgctggccttatggtggacaccggttccgtcagtgacaaccggcattcagtaccgctatgcggataacaaactgggtgaggacttttaccagcaggctgtggtttacagcataaaatataacttctag

SEQ ID NO: 274664 - DNA, 951 bp, Morganella morganii
atgaactacaaaaagagtattggggtaatctcgctgctcgcatctgcacttttgctgggcggatgcgatatggcactgatgaacccgaaaggcactatcggtgctgagcaaaaaacactgattttaaccgccattggtctgatgctcattgtggttattccggtcattatcatggcaatcgtttttgccctgcgttaccgggaaaccagaaaagcaacttaccgtcctgactgggcgcattccaataaaatcgagctggtcgtctggactgttccgatcattatcattctgatcctgggtaccattacatggaaaaccacccatgagctggatccgtacaagccgctggtcagtgaccaggagcctgtcaccatccaggttatctcaatggactggaaatggttatttatctatccggatcaaggcattgccactgtcaatgagatcgcattccctgtcggtgttcctgtcaatttcaaaatcacctctgattctgtgatgaactcgtttttcatcccgcagttaggcggccagatttatgcgatggcaggtatgcagaccaaactgcatctgattgcggaagaaccgggcgtgtacaaaggcatttctgccagctacagcggccacggtttctctgacatgaaatttaccgccactgccaccccgacacgcgaagccttcgatgaatgggttgcgaaggtgaaagcctcaccggacaccctgaccaccaccgaagcgtttgacgcactggcaaaaccgagtgtgaacaacccggttgtctatttctccgctgtcaaaccaaacctgtttgtggacaccattaacaaatttggtcacagcggccacggtgccgggaagacacacgaaggcgaaagccattcaatgatgaacatgagcgcagatgaacacagcagccatatgcctgcagctcatgccgggaatgaggggtaa

SEQ ID NO: 274665 - DNA, 1992 bp, Morganella morganii
atgttcggaaaattaacactggatgccatccccctgcatgagcctatcgttgtaattacggtactgggtatcattctgggtggtgctgcacttgtcggtcttatcacctacttccgcaaatggacgtggttatggactgaatggttgaccaccgttgaccataaaaaaatcggtattatgtacatcatcgtttcaatggtgatgcttatccgtggttttgctgacgccataatgatgcgcgcccagcaggccctttcgtctgccggtgaagccggattcctgccgcctgaacactacgaccagatctttaccgcccacggcgttattatgatcttcttcgtcgcgacaccgtttgttgtcggcctgatgaacctggttgtgccgttacagatcggcgcccgtgacgtcgccttcccgttcctgaactccctgagcttctggttctttgtagtcggcgtgatgctggtgaatatctctctgggtatcggggaatttgcacagaccggctggctggcctatccgccgctgtcgggactggaatataacccgggcgtcggggtcgattactggctgtggagtctccagatatccggtatcggtacattgctgaccggggtgaacttcttcgccaccgtactgcgtatgcgcgcgccgggcatgtcgatgatgaaaatgccggtcttcacctgggcggcattctgtaccaatatcctgattatcgccgcgttcccgattctgactgtcaccttaaccggcctgacattagaccgctacctgggcacccatttcttcaccaatgatatgggcggcaacatgatgatgtacatcaacctggtgtgggcatggggccacccggaagtgtatatcctggttctgccggtcttcggggtcttctctgaagtcactgcaacattctcgaaaaagcgcctgttcggctatacctcactggtatgggcaactatcgcgattaccgtactgtcctttatcgtctggctgcaccacttctttaccatgggctccggtgcgaacgtcaacgccttcttcggtatcgccacgatgatcatctccattccgaccggggtgaagatattcaactggctgtttaccatgtatcagggtcgtatcgaattcaaaaccccgatgctctggacggtcggctttattatcaccttctccgtcggtggtatgaccggggttctgctggccgtgccgggggcaaactttgtcctgcataacagcctgttcctgattgcacacttccataacgtcatcatcggcggtgtggtcttcggttgcttcgccggtaccgcttactggttcccgaaagccttcggtttcaccctgaacgaaaaatggggtgtccgcgcattctggtgctggttcatcggtttctttgttgcctttatgccggtttacgtgctgggcttcatgggaatgacccgccgtatcagccagaacattgacccgaccttccacaccatgctgttaatcgcagccgtcggcgtggcgattatcggtgtcggtattctgtgccaggttattcagttctacgtcagtatccgtgaccgtgaccagaaccgcgaccttaccggggatccgtggggcggccgcacgctggagtgggcaacctcttcaccacctccgttctataactttgctgaagtaccggatgttcagtcccgtgatgaatggtgggatatgaaagaaaaaggcaccgcgcataaacgtcctgcaaaatatgaagaaattcatatgccgaaaaacacggcagcaggtgtgattatcgccggtttcagcctgatctttggtttcgccatgatctggcatatctggtggctcgcgattgtcggtttcgccggcatgatcgtcacctggattgcaaaaagcttcgacgaagatgtggattactatgttcctgtggctgaagtcgaaaaaatcgaaaacgcccactacgaacaactgagcaaggcaggtgtggataatgtcaactaa

SEQ ID NO: 274666 - DNA, 615 bp, Morganella morganii
atgtcaactaataccctgactcaacataataacgcccatgataatcatgggcatcacgatgcaggtgcgaccaaggtcttcggattctgggtctacctgatgagtgacctgattctgtttgcgagtctgttcgccatttatgtggtgctgaaagacggcaccgccggcggcccgaccggcaaagagatctttaacttacagtttgtactggtggaaaccttcctgctgttattcagcagtatcacctacggctttgccatgctggcaatgaaccgcaatcaggtgggtcaggttaatctgtggttatttgtgactttcctgttcggcctcggcttcgtagcgatggaaatctatgaattccatgaattaatcagcgaaggttacggccctgaccacagcggcttcctgtccggtttcttcaccctggtggcaacacacggtcttcacgtcacagccggtcttatctggatcatcatcatgatcatccagaccagccgccgcggcctgaccgaagtgaataaaacccgcctgaactgcttaagcctgttctggcacttcctggacgtggtctggatttgtgtgttcaccgttgtttatctgttgggggcactgtaa

SEQ ID NO: 274667 - DNA, 333 bp, Morganella morganii
atgagtcattcaaatacagccggtaccggggcaagccacggtagtgtgaaaacctatctgatcggctttatattgtcggtcattctgacagtcatcccgttttatatggtgattgagggaaccgcctcaacatctgttctgctggcgactgttgtgattactgctgttgttcagattcttgttcacctggtgtgcttcctgcacatgaataccgcgtctgaagagcgctggaacctgattgcgttcctgttcacgctcctcattatcggtatcgtggtcgtgggttcactgtggattatgtacaacctgaacatcaatatgatggttgattaa

SEQ ID NO: 274668 - DNA, 885 bp, Morganella morganii
atgatgaagcaatacctgcaagtgaccaaaccgggaattattttcggaaatttaatttctgtggtcgggggattcctgctcgcctccaaaggtgacattgattaccccctgttcattgcgacattgctcggtgtctcgctggtcgtggcctccggttgtgtttttaacaattacatcgaccgcgacatcgactccgtcatggaacgcacgaaaaaccgccctctggtaagagggcttattgacccgaaaatcagtctggtttatgcctctgtgctgggtattgccggcatggtgctgctgttagtggcagccaatgcggtggcaatgctgattgctgttgtcggctttgtggtttatgtcggggtttacagcctgtacatgaaacgcaaatcggtctacggcacactggtcggcagtctgtccggtgccgcaccgccggttatcggctactgcgcggtgacaggccagtttgataccggcgcactgatcctgctgttaatcttcagtttatggcagatgccgcactcctatgcgattgccatcttccgtttcaaagattaccaggcggccaatatccctgtactgccggtgattaaaggtatttctgtggcgaaaaaccacattatcctgtacatcatcgcctttatgtttgccacactgatgctcgccatcagcgggtatgcgggatataagtacctgattgtcgccgcagcggtcagtgtctggtggctgggcatggcgttatcgggctataagacaaccaatgatcgtgtctgggcgcgtaaattgttcgtgttctccattgtcgctatcacgtcactcagtgtgatgatgtctgttgaccccagcgtctccggtgatgttctgctggcctacagtcgttaa

SEQ ID NO: 274669 - DNA, 1362 bp, Morganella morganii
atgaacgataataaaatgaccccgcttgagcgtcgcgcgacctggggtttaggctcggtattttctctgcgcatgctcggcatgttcatggtattgcctgttatcaccacgttcggactcgattttaaagacgccaccagcaccctgataggctttgccattggtgtctacggcctgacccaggccatcttccagatccccttcggcctgctttctgacaaaatcggccgcaagccgctgattgtcggcgggctgattatttttatggcgggcagtattgttgccgcactcagccactctatctacggtgtgattgccggacgggcgctccagggcgcaggagcgatatctgctgccgtcatggcattactgtccgataccacccgcgaacaaaaccgcaccaaagcgatggcgtttatcggcatcagtatcgggatcacctttgcagttgctctggtactcggcccggtactggcggatatcgtcggtctgtccggcctgttctggggtattgccctgctcgccttcctcgggatcctcgtcaccctgtatgtggtgccggacaacaaagagcaccgtcagaacagagaaaccgccgtggtaaaaggcgcgattaagcaggtgctgatggataagcagctcgcccggctgaatttcgggatcctcgccctgcacaccctgctgatggccacctttgtcgcgcttcctctggtaatgagtgatgccgggctggcgcgggaatctcactggaagacgtatctgtacacgatgctgatcgcctttgtgtctgttctgccgtttattatttatgcggaaaagtaccgcaaaatgaagcaggtttttgtcagttgcgtaatcatgatggcgctggcagaaatcgtgtttctgctggcagacaaaaacctgtggctgctttacggcggattacagattttctttatcgccttcaatgtgatggaagcgattctgccgtcactgatcagcaaagaagcgccggcgggctacaaagggacggcgatggggatttactccaccagccagtttatcggcgtggcactgggcggcagcctcggcggcctgctctacggcatcaatggtgcggtaacggttttcggcggtggtctgatactgacactcatctggctggctgttagtctgacactgcgtcagccgccgtatgtcagcagtctgcgtctggagttaccggaaaatgacgtaaataatccggatattgctgtgaaattacgcgaacagccgggtgtgagtgatgtagtgattattgcgcaggaacgggcggtgtatgtgaaaacagataccagactgtcaaaccgcaaacaacttgaggccgttttacagggctga

SEQ ID NO: 274670 - DNA, 492 bp, Morganella morganii
atgccatcatttgatattgtttctgaagttgaattacatgaagtgcgcaatgccgtggaaaacgcacagcgtgaagtgaccagtcgctgggatttccgcaacattaccgccacgattgagctcaatgagaaaaataacagtgttaaaatgaccagtgaatctgatttccaggtcaatcagctggttgatattatgcgggaaaaactggcgaaacgcggaattgacggtgcgtctctgactgtaccggatgagattgttcacagcggtaagctgtacagtgttgaggcaaccctgttacaggggatcgatgctgcactggcgaaaaagatcgtcaagctgatcaaagacagcaaactgaaagtgcaggcgcaaatccagggagaagaagtccgggtgaccggcaaatcccgtgatgatttacagtctgtaatggcactggtacgcgaaggaaaactggggcagcctttccagttcaaaaacttccgcgactga

SEQ ID NO: 274671 - DNA, 903 bp, Morganella morganii
atgaaaataacagtactgggttgcggcgcaatcgggaaactctggctcgctgcactgtcaggcaatcatgaggtgcagggatggatgcgtattccccagccctacctgaatgtgaatattgactctctgaacggggagccgttttacgggcaatttaccacaaacgatccggaattcctcgcacaaaccgaattattactggtttgcctgaaagcctggcaaacctccgaagcggtcaatcagttgctgccgcagataccggaatcctgcccggtgttactgctgcacaatggcatgggcgtggcgcgtgagttatccccctgcccgaatccgctgctgaccggcatcacctcccacggcgcatatgaagaaaacggcctgctgcatcacagccgccggggactgacccatattggccctgtgaatgaacgcgcccgtcattacggccatctggcggatattctgcatgatgcactgccggatgtggcctggcatgatgaaatcgatgcggccagctggcaaaaactcgccgtgaactgcgttatttctccgctcaccgttatctatgactgcaaaaacggcggactgttggcgcacctgccgcaaatccgcgtactgtgtgatgaagctgctgaagtgatgctgcgcgaagggatccacactgacggtgataatatctatgaatatattcttcatgtgattgaaaaaactgcggatcacagctcatccatgcgccgggatattctttacggccgttataccgaaattgattacatcaccggctatctgctgcaacgtgcccgttatcacgggatcctgctgccggaacatattcacgtttacagcctcgtcaaacaaaaagaggaacaaaatgcccccttcagttctcatttgtctcgctga

SEQ ID NO: 274672 - DNA, 621 bp, Morganella morganii
atgcccccttcagttctcatttgtctcgctgacggctgcgaagaaaccgaaaccgtcaccaccgctgatttgctggtgcgtgccggtgtaacggtcacactcgccagtgccaatgatgacggcagttgcctgatcaccggctcacgcgggatccgcattatggccgatgtgccgctggtgcgggtagcggacaccccgtttgatgccattgtgctgccgggtggcctgaaaggcgcggagaatctgcgtgacagcccgctggtgattgaaaaaatccgccgcatgcattgtgacgggcacattgttgccgctatctgcgcagcgccgtctgtcattctggtgacccacaatctgtttccgctcggcaatatgaccggttatccggcgctggaagataaaataccggcaaaacagtgggtcaatcagcgggtctattttgatgagcgcgttaatctgctgaccagccagggcccggccaccgccatcgattttgccctgcgtctgacagagcgcctgtgcggacaggaaaccgcagcaaaagtggcggcagaattagtactgccgccggggatatgggattatcaggattccccttaccgcacgctggctgatcagggctga

SEQ ID NO: 274673 - DNA, 1776 bp, Morganella morganii
atgaaaaacgatacgccccgcgaatcggttagtcgttactcttatctttttgtgattattatggctgttcttcaggggggaattctgtacgggagttcagattacagtatccgtaatatgttcggcctgtctgcaccagcggcttatttacctgtattgctggctattgtcgttccctctgtctgcagttatcttatctccgggctgaaatcagcccgtttttatatttgcctggttttggctgcattactggtttgctggatgtattactggtatttactgaatgcgggagtaaccagcagttcagcgcagtttatgaacagcgttatagtgacctccctgttttttttactgctgccctggatgcagttttgtctcaccaccggacgctataatcccggctatacatttctgatgagccattatgtcagaaatacggtgctgggagctgttgcctgtgtaatcggtctgatagtcatcggaattattaaaattgcggtctatcttttttctatcgtcaattttgagtatctcagccacttactggataatgagctgttttactggcttgggttttgtatcgggctgaacatcagcctggtgtttatgcggggaacgcttacattcccggtgtacaaaattaccgccggtgccgcccgtgctttattaccggtgctcaatattattgctgttatttttgttgcaggcctgctgatttccgcggtttcttctgtcacagtcagcggcctcgggtcgtcagctatgctattattcatagcattgaatgtgattctgctgaacctggtttatgacaatgaacgcgggctgttttctctccgctcagggtttaaatacctgttgttgtgcggtattttgatactgaatattctgacggtgatgtccctttacggtatccttatccgcgtcagtcagtacagctggaccgttgaacgactgtatgctttttctgcggcattattttttactctgcttattctggcttatagcatggcgattattttccgccgcattcatctgacgggaatcatcagcaaagccgggttattaatactgattaccgggttaattctgattaattctccggttgcggattttaaccgtattgctgccggcagtattctggcgggtgtggataacggcaggctgaaagttgattcggagctgaattatactctcgggtatatgggtaaagagggtgaaaaggtactcgccacgctgaatgaaaatccggaataccgcaaagcactgaaacaatcccgtcatgaccggggagagcggcagttgctgcgtgatgtgatactcgcggtaccgggcagcccggcgttgccggagtcctggtgggaaggaaatcctgatgtcacgcgcagctggttctgtaccgaatcctctgcaggcggggagtgcatcggctttatggcggatgcggacggcaacggacaggatgatgcggtggtctgtattaccggttcttctgattcatcgttctattgtcagatctggcagcaagccacggaagtcacagacggtcagccggataaacaggtctgggaagatcgggattaccaggatattcagtatgcctctgaagaagagaagcaggcggcctgggcggcactgaaagcgggacattattcactgaaacccaaagtctggatgatggtggttccggagcctgaaaagggtgcagaaccggaacaggctcctgaggtaatacagacgcccgcaacaccggctccgcttgttattcagccctga

SEQ ID NO: 274674 - DNA, 1449 bp, Morganella morganii
atgaagtttatcattaaattatttcctgaaattaccatcaaaagccagagtgtccgcctgcgctttattaaaattctgaccagcaatatccgcaatgtgcttaaagatctggccgaagatgtggcggttgtccgtcactgggactatcttgaagtccgcgtgaagaaagaagagcttggcgaaggtgtggctgatcgcctgacccgcattcccggtatccaccatattttacaggtggaagagcgcgcatttaccgatctgcataatatctatgagcagaccttcgaaatgtatgccgcatcactggaaaacaaaaccttttgtgtccgtgccaagcgccgtggtaagcacccgttcagctccattgagctggagcgctatgtcggcggcggtctgaatcagcatattccgtccgcgaaggtaaaactgacgcatccggatgtgacggtgaatctggaagtggaagatgacaaactgatccttgtggtacgccgtctggaagggatcggcggtttcccgatcgggactcaggaagatgtgttgtctctgatctccggcgggttcgattccggtgtctccagctatatgctgatgcgccgtggttgccgtgttcactactgcttctttaatttaggcggtgcggcacatgaaatcggtgtgaaacaggtagcgcattacctgtggaaccgtttcggcagctcgcacaaagtccgctttgtggcggtgaactttgagccggtggtagcggaaattctggaaaaagtggatgacggccagatgggcgtggtactcaagcggatgatggtccgcgcggcatcccgcgtcgcggaacgctacggcgtacaggcgattgtgaccggcgaggcactgggacaggtttccagccagacgctgactaacctgcgcatgatcgacaacgcgacagacaccctggtgctgcgtccgctgatctcacacgacaaagaaaccattatcaatcttgcccgtcagatcggtactgaagattttgcccgtaccatgccggaattctgcggcgtgatctcgaaaaacccgactgtgaaagcggtgaaagagaaaatcgaagccgaagaagagaaattcgactttgcgattctggatgatgtggtgctcaacgcgcagaacatggatatccgtgtgatcgcgcagcagagtgagcagcaggttactgaagtggagatggtgtctgaactgtctgccacagatgtggttctggatatccgttctccggatgaacaggaagcgcatccgctgaaaattgagggaacggaagtgcgcacactgccgttctacaagctcagcactcagttcggtgatttaccggcggagaccacctggctgctctattgcgatcgcggggtgatgagccgtcttcaggcactttatctggcagagcagggttataccaatgtgaaagtatatcgtccctga

SEQ ID NO: 274675 - DNA, 291 bp, Morganella morganii
ttgcgacataaatgcaacatcactgaaaaacagaccatgaccaaaaaaacatccgcaacgaaaaccgatgcactgagctttgaagcatcactcgatgcccttgaagggatcgtcacccgtctggaagcgggtaacctgccgctggaagaagccctggccgagtttgaacgcggtatcgcactgacccgcaccagccagaaaaccctgatggcagccgaacagcgggttcagatcctgctgaatgatgatgaaaacgccccgctgagcgattttacacctgaaaacgactga

SEQ ID NO: 274676 - DNA, 918 bp, Morganella morganii
atgccagaacaaactcccgaaacattccgcaaccaactgacacaggccagagagcgtgttgatcacgttcttgatgagatcctgaccacgctgccgtttgccgccaccgacatgggtaaagccatgcattacggcgccctgctcggcggaaaacgtctgcgcccgttcctggtgtacgccaccggtgagatgtttggtgtgacggctgaaaacctggatgccccggcggcagcgattgagtgtattcacgcctattccctgatccatgacgatttaccggccatggatgacgacacactgcgccgcggcaaaccgacctgccacgtcgcctttggtgaagcgaatgctattctggcgggggatgccctgcaaacccaggcatttgcaattctcgccgcccggccgatgccggatgtccgcccgcaggaccgtctggcgatgatcgccgaactggcggatgccgccggtcttggcggaatgtgcggcggccaggcacttgatctggcagcagaaggaaaaaacatcggtattcatgcgctggaacaaatacataaccataagaccggtgctttaatccgtgcttccgtccgtatgggcgcgatgagtgccggtgaagcaggctatgccgtattaccggctctcgacacttacgcacaggctatcggcctggcgtttcaggttcaggatgacattctggatgttatcggtcatacggatgtgatcggaaaaagccagggtagtgatgccgctcacgggaagagcacatatccgtcactgctcgggctgaaagcagctcaggataaagcacaggcgctttatcaggaatcactggctgcgctttcacagcttgaagaacatcattacaacacagcaaccctgcgtgaacttgctaattttgtgattgaacgtaacagctaa

SEQ ID NO: 274677 - DNA, 1869 bp, Morganella morganii
atgagtattgatatcgctaaatatccgactttggcactcgttgagacgcctgatgatttgcgtctgttaccgaaagagagtttaccgaaactctgcgatgaactgcggcaatatctgttaaacagcgtcagccgttccagcgggcatttcgcctccggtctgggcacgattgaactgaccgtggcactccattatgtctatcagactccgtttgataacctgatctgggatgtcggccaccaggcctatccgcataaaatcctgaccgggcgccgcgaccgcattgacactatccgccataaaaacgggctgcacgccttcccgtggcgcgaagagagtgaatatgatgtcctcagtgtcggccactcctccacctccatcagtgccggtgtcgggatggcggttgccgctgcccgtgagggacgcaaccgtaaaactgtctgtgtgatcggcgacggcgcgatcaccgccggaatggcctttgaggcaatgaaccacggcggggatatcaaatccgacatgctggtgatcctcaatgacaacgagatgtctatctccgaaaacgtcggtgccctcaataaccacttggcacagctgctttccggcaagctctacaccacactgcgtgaaggcggaaagaaagtgttctccggcctgccgcctatcaaagatctgctgaagaaaaccgaagagcacatcaaaggcatggtggtgccgagcacgttctttgaagagctgggcttcaattacatcggcccggtggacggacacgatgtgcttgcgttaatccagaccctgaaaaatatgcgtgatctgaaaggtcctcagttcctgcatattatgacgaaaaaagggcgcggttatgaaccggctgaaaaagatccgatcagctggcacgccgtcccgcagtttgatccgtcaaccggcacactgccgaaaagtaaatcgtccaaaccgaccttctcaaaaatcttcggtgactggctgtgtgaagaagcagagcacgatccgaaactgatggcgatcacccctgccatgcgcgaaggttccggtatggtgcgcttctccaaatccttcccggatcagtattttgatgtcgcgattgctgaacagcactccgtcacctttgccgccgggctggctatcggcggttacaagccggttgtcgcaatttactccagcttcctgcagcgcgcctacgatcaggtgatccacgatgtcgcgattcagaaactgccggtcctgtttgctatcgaccgcgccgggattgtcggcaacgacggtccgacacaccagggcgcgtttgacctctccttcctgcgcatcctgccgaacatggtgatcatgaccccgagtgatgaaaacgagtgccgccagatgctgcacaccggttatcactacggcaaaggcccggttgcggtgcgttatccgcgcggcggcggctgtggtgccacactccagccactgactcagattgagatcggtaaaggtattgtgcgccgtgaaggggaaaaaaccgcaattctggtcttcggtaccctgctggaggaagtcctgaaagcggcagagaatctgaatgccactgtggtggatatgcgttttgtcaaaccgctggatgaagccctgatcctggagatggcagcgcgccatgacacactggtgactgtcgaggaaaacgccgttatgggcggtgcaggcagtggcgtgaatgaattcctgatggcacagcgcaagccggtgccggtgctcaatatcggtctgccggacagctatgtgccgcagggcgaccaggaagagatccgcagcgatatgggcctggatgcagagcatattcagaaatccatcgaagcgtatctgacaaaagcctga

SEQ ID NO: 274678 - DNA, 990 bp, Morganella morganii
atggcttgtggtgaatttgatctcatccggcgtttttttgaccggcagcactattaccgccgggacgttgaactgggtatcggggatgattgcgctctgatgaccgtagcggaaaaacagcaggttgctgtcagcacggataccctggtgtccggtattcattttctgccttccgtttctgcccgtgatctggcgtggaaatcccttgcggtaaatttaagtgatctggctgctatcggcgcggatccggcctgggtttccctggcgctgacactgccgtccattgatgaagcgtggctgggcgagttcagcgacagcttctttgagcaactgaattattacggcatgcagttaatcggcggcgataccacacgcggcccgatgagcctgacattgacggttcatggtctggtcccggccgggcgggcgatgaaacgcgctggtgcccgtaacggcgactggatctacgtcaccggcacactgggtgacagcgccgccggactggcaatcttgctgggtgaactgcagcctgatgatcctgcgcataaagagtatctgctgaaacgccatctgcggccgcaaccgcgtattttgcagggacaggcactgcgcgatctcgcatcctctgcaatagatatctctgacggtctgatttccgatctcggccatatcctgaaagccagccgctgcggtgccaggattgagctggataacttaccgatgtctgaggcactgaaagcctgttcatcaccggagcaggcgcttgcccgtgcactggcgggcggtgaggattacgaactgtgctttaccgttccggaaatcaaccgtggcgcactggaaatggcactggcacataccggcgcacctttctgctgtatcgggcagatgaaaccggagagtgacggtatccgctatttcagcaaaggtgaggaagtaaaaccggccctgagcgggtttgatcactttgcggtgaaagcggcggcggagtaa

SEQ ID NO: 274679 - DNA, 414 bp, Morganella morganii
gtgaaacctgcagctcgtcgtcgtgctcgtgaatgtgccgttcaggcgctttattcgtggcagttatccggcaataatattgcggatgttgaatcagaatttctgtcagagcaggatgtcaaagacgttgatgtcgcctattttcgtgagctgttcttcggtgcggcaacgaatgcggtgcgccttgatgcactgatggctccgtacctctcccgccagctggaggagttaggtcaggtggaaaaagcggttctgcgtctggcgatgtatgaattaagctaccgtgaggatgtcccttacaaagtggttatcaacgaagcgattgaactggcaaaagtgttcggcgcggaagagagccacaaatttgtcaatggcgtgcttgataaagccgcgccgaatgcccgcagaaagtaa

SEQ ID NO: 274680 - DNA, 471 bp, Morganella morganii
atgaacgtcattaaaggtgttgtcagtgcgccgggtgcgcgtatcgccatcgcaattgcccgctttaacaacttcatcaacgacagcctgttagacggtgcggttgatgcgcttgagcgtattggccaggtctcctctgagaacattacaacggtctgggtgccgggtgcttatgaactgccgctggcagtgaaaacgctggccgataccggaaaatatgacgctattatcgcgctgggtactgttatccgcggcggcaccgcacattttgaatatgtgtccggtgaatgcagctccgggttatctgccgttgcgatgaacagctcgattccggttactttcggggtactgaccaccgaaaatattgaacaggccattgaacgtgcgggaaccaaagccggtaacaaaggggcggaagccgcaatgaccgcgctggaaatgattaatgtaattaaagccatcaaaggctga

SEQ ID NO: 274681 - DNA, 1113 bp, Morganella morganii
atgatgcattctgatgaattttatatggcccgcgcccttgaactggcggcgctgggtcgttttactaccgcaccgaacccgaatgtcggctgtgtgattgtccgtgacggcgaaatcgttggtgaaggttaccatcagcgtgccggtgaaccgcatgcggaagtgcatgcgctgcgcatggccggtgataaagcccgtggcgccaccgcgtatgtcacactggagccgtgcagtcaccacggccgtacaccgccgtgtgccgaagcgctgataaatgccggcgtcagccgggtggtggccgccatgcaggatccgaatccgcaggtggccggacgcggactgtttaaactgcgcgaagccggtattgaggtcagccacggcgtactgatgcaggaagccgaagcgctgaataaaggcttctttaaacggatgcgcaccggtttcccgtatattcagctgaaaatggcggcctcgatcgacggaaaaaccgcattagccaatggtgaaagtcagtggatcacctcaaaagccgcgcggcaggatgtgcagcagttccgggcacaggccggggcgattttatccaccagtgccacggttctggcagatgatccgggcctgactgtccgccatgcggatttcccggcatcgctgcagcagagctacccggaggcggatatccgtcagccggtacggattatcacagacagccgtcagcgggtgaccgctcagcaccgcgtcacacaattgccgggcagttgctggctggcgcggaccgcttctcagccggataactggcagggggatgttgaggaaatgatcctgccggagaacggcagtggtgtcgatttggttctgctgatgatgcagctcggcaaacgcaatattaaccatatctggacagagtgcggctcacatatggcgggcgcactgctgaaagccggactggcggatgaaatcgtgctttatctggcaccgaagattctgggcagtgatgcacaggatctctttacactgccgccgcttgcgcatctgcgtgatgcgccgcagctgcggatcgacgactgcacgatggtcgggccggatctccgcctgcggctgatcccggtttattaa

SEQ ID NO: 274682 - DNA, 450 bp, Morganella morganii
atgcattgcccgttttgctccgccgttgataccaaagtcatcgactcacgcctggtgggtgatggttctcaggtccgccgccgccgccagtgcctggaatgccacgaacgttttaccacgtttgaggtcgccgagctggtgatgccgcgtgtggtcaaaagtgatgacagccgcgaaccgtttgatgaagaaaaactgcgccgcggtatgcagaaggcgctggaaaaacgccccgtcagctctgatgatatcgaaacctccctcagtcacatcaaatcgcagttacgggctaccggcgagcgggaagtctctgctaagtttgtcggcgaactggtgatgagcgagctgaaaaagctggataaagtcgcgtatatccgctttgcctcggtttaccgcagttttgaggatatccgtgaattcggcgaggaaattgcccgcctgcaggactga

SEQ ID NO: 274683 - DNA, 969 bp, Morganella morganii
gtggcacaggattatactgttgaacaattaaaccacggccgcagagtctatgactttatgcgctgggacaacgtggcatttaccatctcggcactgctgctgattgcctctgtggcaatcatcggcgtgaaagggtttaactggggtctggacttcaccggcggtaccgtcattgaagttaacttcagtcagccggctgacctggataaaatccgtgataccgtttcggatgccgggtttaaagatccgctgatccagaacttcggcagcagccgtgacatcatggtacgtctgccgccggcagaaggtactgcgggtcaggaactgggtaaaaccgttatcaatgtgatcaacaaaaacattgatgagagtgcggtggttaagcgtatcgagttcgtcggcccgagtgtgggtgcggaactggctcagaccggcgcaatggcgctgatcgcggcattaatctgtatcctgatctatgtggcgatgcgttttgaatggcgtctggcgttaggtgcggttatcgcgctggcgcacgacgttatcatcaccctcggcgtactgtcgctgttccatattgagattgacctgaccattgtggcatcactgatgtcggttatcggttactcactgaacgacagtatcgtggtatctgaccgtatccgtgagaacttccgcaaaatccgccgtggtacctcgtatgagatcatgaacgtttccctgactcagacgttaagccgtaccattatgacatcggcaaccaccctgttagtggttctgatgctctatatcttcggtggtgcaatgctgaaaggcttctcgctggtcatgctgattggtgtgtctatcggtacgatttcctcaatctacgtggcgtccgcgctggccctgaaactgggtatgaagcgtgagcacctgattgtgcagaaagtggaaaaagaaggcgcggaccaggaatctatcctgccgtaa

SEQ ID NO: 274684 - DNA, 1815 bp, Morganella morganii
atgctgatcgctgcgatcctcatcggtttgctttatgcgcttccaaacctgtatggagaggatccggctgttcaaatcactggcgcgcggggaaccgccgccaatgaacagaccctggatcaggtccggaccattttagaaaaagatcagatcgcgagtaagtcggtcgcactggaaaacggtgtgatacttgcccgtttctcaaatcctgatatccagttacgtgcccgtgaagagctggtgaaaggcttaggtgagcaatatgttgttgccctgaaccttgccccggcgacaccaaaatggctgactgccgtgggtggtgagccgatgaaactgggtctcgacctgcgtggtggtgttcacttcctgatggaagtggatatggaaaccgcgctgggtaaactgcaggagcagaacctcgacggtatccgctcgctgctgcgtgaaaacagcattccgtttgcgtctgtccgcaaatcagcggattacggcgtggaagtccgcttccgtgatgatgcatcacgttccgaagccagctcgctgttatcaaaacgcctgcgcgatttagtcttcaaagacggttcagataatactctgaccgctgtaatgagcgaccagcgcttaagtgaagcgcgcagctatgctgtcatgcagaacatcactatcctgcgtaaccgtgttaaccagctcggtgttgccgagccgctggtgcagcgccagggtgcggaccgcatcgtggtggaattacctggtattcaggacaccgcacgggcgaaagaaatcctcggggcaaccgccactctggaattccgcctggtcaacggtgctgttgaccctgccgctatcgaagcaggccgtatcccgggtgacaccgaagtgaaatacacccgtgatggacgcaaagtcgccctgtacaagcgtgtgattctgaccggtgaccacattactgactccacttcacagagtgatgagtacggtcagccgcaggtcagcatctcgctcgacagcgccggtggtaacaccatgtccgatttcaccaaggataacctgtataagccgatggcgaccctgtttgtcgaatataaagacagcgggcgtaaagatgccgcaggccgctcaatccttgagaaaaacgaagaagttatcaacattgccaatatccagtcccgtttaggatcgaacttccgtatcaccgggattgataacgccaatgaagcacgtcagttatcactgctgctgcgtgccggtgcgctgattgcaccaatccagattgtggaagagcggaccatcgggccgactctgggtctgcagaatatcgagcagggcctggaagcgtgtctgtgggggctgatggcctcaattctgttcatggtgatctactaccgtaaattcggtctgatcgcgagcagcgcgttactggcgaaccttatcctgattgtcggggtgatgtcgctgttaccgggcgctacgctgaccatgccggggattgcggggatcgtgctgacccttgcggttgcggttgatgcgaacgttctgataaacgaacgtatcaaagaggaactgcgcaacgggcgttctgtccagcaggcaatccatgaagggtacaaaggcgccttctcaagtattatcgacgcaaacttaaccacactgattaccgctgtcattctttacgcggtcggtaccggttcgattaaagggtttgcgattacgacagccattggtgtggcaacctccatgtttacagcgattatcggtacacgtgccatcgtgaacctgctgtatggcggtaaacgtattaataagctgtctatttaa

SEQ ID NO: 274685 - DNA, 336 bp, Morganella morganii
atgagttttttcatttctgacgcagtagcatcaactggtgcggccgcttctcagggcagcccgatgtctctgattgttatgctggtcgttttcgtgctgattttctacttcatgatcctgcgcccgcaacagaaacgtgctaaatcacacaagcaattaatggactccatcaccaaaggtgatgaagtgttaactaccggtggtctgatcggtcgtgtggctaaagtgtctgacaccggctacatcgttctggaactgaacgaaacaactgaagtaaccatcaaacgtgatttcgtcgcagcagttttaccgaaaggtacactgaaggcgctgtaa

SEQ ID NO: 274686 - DNA, 1125 bp, Morganella morganii
gtgaaatatgaactgcagacgacagacggccgtgcgcgccgtggtcgcttaatttttgatcgtggcgttgttgaaacccctgcatttatgccggtggggacttatggcacagtgaaaggaatgacaccggaagaagtgaaagagaccggtgcgcaaatcttattaggcaacacgttccatctgtggctgcgtcccggtcaggaaattatgaaactgcacggcgatctgcatgactttatgcagtggaaaggcccgattctgactgactccggcggtttccaggtgttcagcctgggcgcaatgcgcaaaatcaaagaagaaggtgtccatttccgtaacccgatcaacggtgaaaaaatcttcttaagtcctgaaaaatcgatggaaattcagtacgatcttgggtctgatatcgtgatgatttttgacgagtgcacaccgtatccggcggactgggactacgcgaagaaatccatggaaatgtctctgcgctgggctaaacgcagccgtgaccgtttcgatgagctgggtaacccgaatgcgctgttcggtatcatccagggcagtgtttacgaagatttacgcgatgtgtctgtgaaaggactggtggaaatcggatttgatgggtacgctgttggcggtctggctgtcggcgagccgaaagaagatatgcaccggattctggagcatgtctgtccgcagatcccggaagataaaccgcgctatttaatgggcgtgggtaaaccggaagatctggtggaaggtgtgcgccgcggtattgatatgttcgactgcgtgatgccgacccgtaatgcccgtaacggtcatctgtttgtgacggacggcgtggtaaaaatccgtaatgcgaagtataaatcagatacatcgccgctggatgcggaatgtgactgctatacctgccgcaattatacgcgtgcgtatctgcatcatttggatcgctgtaatgaaatccttggcgcgcgcttaaataccattcataatctgcgctactatcagcgtctgatggcgggtatccggcaggcaattgaagaaggccgtctggaagcatttgccgctgaattttatcagcggatcgggaaacccgttccgccgttaagtgagtga

SEQ ID NO: 274687 - DNA, 1077 bp, Morganella morganii
atgcgtgttgccgattttacttttgaactgccggacgaactgattgcccgctacccgcaggcggagcggagcaagtgtcgtctgttatcgcttgatggtatcagtggtgaactgaaccacggtatcttcaccgatgtgctgaataaactcaatcccggagatttgctggtatttaatgatacccgcgtgatccccgccagaatgttcggccgcaaagcctccggcggaaagattgaagtgctggtggagcggatgctggatgagcaccgtgtactggcgcatgtccgcgcatcgaaagcaccgaaagagggtgcggagctgctgctgggcgaagatgagagcgtgaaagccaccatggtggcgcgtcacgatgcgctgtttgaaatccgttttgatgatgagcgcgatgtgctgaccattctgaatcagattggtcatatgccgctgccgccttatattgaccgccctgatgaagagtcagatcgcgagttataccagaccgtgtataatgaccgccccggtgcggtggccgcaccgactgccgggctgcactttgatgagccgctgctggcggcactgcgcgaaaagggcgtggaaatggcctttgtcaccctgcatgtcggggcggggactttccagccggtgcgcgtggataacatcgaagatcacatcatgcactccgaatatgcggaagtgccgcagaatgtggttgatgccgtgctggcgtgtaaagcacggggtaataaagtggttgcggtcggcacaacatccgtgcgctccctggaaagtgcggcgaaagcggcacaggatgcactgatagcgccattttttgatgatacccaaatctttatttatccgggatatgagtatcaggtggtggatgcgctgatcaccaatttccatctgccggaatccacgctgattatgctggtttccgcttttgccggttatcagcacaccatgcaggcgtatgaagcggcggtgcgtgaacgttaccgtttcttcagctacggggatgcgatgtttattacccgcaacccgcaggcgaaatttgaaaaagttggtcacgacgactga

SEQ ID NO: 274688 - DNA, 588 bp, Morganella morganii
atgaattttctcgcacatctccaccttgcctcactggcaaacagcagttttctcggcaatctgatggccgattttgtccgcggtgctccggaacaacagtacagcgcaccggtcgcggcggggatccggctgcaccggcgtattgatacactgaccgattcacacccgctggtacgggaagcccgtcagctgttccgcccggaataccgccgctacgcgccgatcacgctggatgtggtctgggatcattttctttccctgcactggtctcagtttgaaccgaaaacgtcgctgaccgatttcacacaacacgtccgcacagtgattgagccacaactggcgtttacaccggtaaaatttcaggaactgaatgaatttatgtggccgcagcgctggttaatccgttatcaggagatcccctatatcggacaggtgctggcgggaatggcaaaacgacgtccgaaacttgccgcactcagagagacaaatcaggattttacctataattatcagtctcttgaaaatatcttcttccgcttctatccgcagatgatggacagcgtgacaacgccgtttacaggtcagtaa

SEQ ID NO: 274689 - DNA, 603 bp, Morganella morganii
atggttctggtaacccgtcaagcccccgattttacagctgcagccgttatgggtaacggtgaaattgttgataacttcaatctgaaaaaacacctgaacggccgtccggctgttatcttcttctggccgatggacttcactttcgtctgcccttctgagctgatcgcattcgatcaccgctatgaagaattcaaaaaacgcggtgtggaagtgattggtgtgtctatggactctgagtttgttcataacgcatggcgtaacactgctatcgacgatggcggtatcggtccggttcagtatccgatgattgcggatatcaaacatgacatcatgcgagcttacggtgttgaatttccggaagccggtgttgctctgcgcggttctttcctggtggacaaaaacggtgttgttcgtcatcaggtcgtcaacgacctgccgctgggccgtaacgtagacgaaatgctgcgtatggttgacgcactgcaattccacgaagagcacggcgatgtatgccctgcacagtgggaaaaaggtcaggaaggtatgaatgcatctccgaaaggcgttgctgacttcctgaaaaagaactccggcaaactgtaa

SEQ ID NO: 274690 - DNA, 1332 bp, Morganella morganii
atggcgcatcgtttaacttcacgagatattttagccttaggttttatgaccttcgcgctgtttgtcggggcgggaaatattatatttcccccaatggtcggccttcaggccggcgaaatggtctggacggcggcagccgggttcctgatcaccggcgttggtttaccggttctgaccgtgatcgcactggcaaaagtcggcggcggtattgaggcactcagtacaccagtcggtaaatacgccgggctgctgctggctgttgtggcctatctgtccgtcgggccgctgtttgccacgccgcgtacagccaccgtttcttataaaatcgggattgcgccgctggttggcggggaatctgatatttctctgctgatttacagcgtgatctactttgcctgtgtgatcggtatttccctgtatccggggaaattgctggacagcgtcggccatgtgctggcaccggttaaaatgctggctctggctatcctcggggtggctgcggtaatgtggccggccggtgatgctattatggcaacgccggagtataaagaaatggcattctccaacgggtttattaatggttatctgaccatggatacccttggtgcaatggtcttcgggattgtcattgttaatgccgcccgttcgcgcggagtggaaaactcctcactgctgacccgctataccatgtgggccgggctgattgccggtgtgctgctgacactggtttatctggcactgttcaaattaggggaaaacagcgggtcgattatcccgaaccctgctgatggcgcggaaattctgcatgagtatgtccagtataccttcggtaactacggcagcttcttcctggcggtactgatttttgttgcctgtatggtaacggcgatcggcctgacctgcgcctgtgcggaattcttcagccgttatctgccgatttcttaccgtactctggtgtggatcctcggtgcgttctccatggtgatctccaacctggggctgagcaagctgattgcattctccattccggtgctggtatccatttatccgccgtgtattgtgctgatcctgctgagtttcacactgcgtttctggaaaaaaccgggacgggtggttgcgccggcaatgctggtcagcctgatcctcgggacgatgggtgctctgaaagccactaaaatgttcggcccttatatgccgtcatggattgagtcactgccgttcttcaaatatgacctggcatggcttgcgccgtcgctggctgtgctggtggtttctatcgtggttgatcgcctgatgggcgctgagccggaagtgaatcacaaacacgcctga

SEQ ID NO: 274691 - DNA, 1296 bp, Morganella morganii
gtgcttgagcgtctttcgtggaaaaaaattgtactggaattactggttttctgcctgccggcactctttttgtcactttttttcggctataccggctggtttcttgccggtgccctgtttgccgctgctgtctggcacagctataacttactgaaactgtctgactggctgtggctggaccgcagtatgctgccgccgccgggccgcagcagctgggagccgattttttacggtatctaccagcttcagcagcgtaaccgcaagcgccgccgcgaactcgccaccctgatcaaacgctttcgcagcggggcagaatccctgccggatgcggtggtgatgatgacagaagacggcaatattttctggtgtaacaaacatgcccagcaccttcttggttttcgctggccggatgataacgggcagcatatctttaaccttctgcgttacccggatttcagccgttatctgaccgcaggcgattataccctgccgctgacgctggaactgaataacggcagcatgatggaattgcgcatcatgccgtattcagaagggcaattactgatggttgcccgcgatgtgacggaaaagcgccgtcttgaaaactcgcggcgtgatttctttgccaatgtcagtcatgaactgcgcacgccgctgacggttttgcagggctatctggaaatgctcgcggatcaggattttgataatccgatgaataaaaaagcgattctgaccatgcaggagcagacccgccgtatggacggcatggttaaacagcttttgcagctctcaaaaattgaagtggctgttaaaagcgggctggatcaggtcgtggatgtgccggggatgctgataatgcttcagcaggaagccgtgacgctcagccggggcaaccatgacatccgctttgcggtggatgacaaactgaagattttcggggatgaggaagaactgcgcagcgccatgtcgaacctggtgtataacgcagtgaatcacacgccggaaaacaccctgattgaggtcagctgggcgctgcgtaacggtaacgcggtgttcagtgtgaaagataacggtccgggcattccggcggaacatctgtcccgcctgacggagcgtttttaccgtgtggataaatcccgctcgcggcagaccggcggctccggtctggggctggcgatagtgaaacacgctttacagcatcaccacacccatctggatattaccagcaaacccgggcagggaacggagttcagttttaccattcctgcgcggcttatcgctaaatcttctcattaa

SEQ ID NO: 274692 - DNA, 690 bp, Morganella morganii
atggcaagacgaattttagtcgttgaagatgaagcacctatccgtgaaatggtctgttttgtactggagcagaatggctatcagcctatcgaggccgatgattatgatgcagccattgcccggctggtggagcctttccctgatcttgtcctgctggactggatgatcccgggcggttccggtattcaggttatcaaacatatgaaacgggacagtcagttgcgggaaatcccggtgatgatgctgacggcgcgcggtgaagaggaagaccgtgtcaaaggtctggaaaccggcgcggatgattatctgaccaaacccttctcaccgaaagagttagtggcccgtgttaaagcgattctgcggcgcatctccccgatggtggcagatgatcttatcgccatgaacggcctgacactcgacccggcatcccaccgcgtaaccagtaatgagaatccgctggaaatggggccgaccgaattcaaactgctgcacttctttatgactcatccggagcgggtttacagccgtgaacagctgctcaactatgtctggggcgagaacgtctatgttgaggaccgtacggtggatgtgcatatccgccgcctgcgcaaagcgctggaagcggacggacacgataaaatgatacagacagtccggggaacgggttaccgcttctctgtccgttactga

SEQ ID NO: 274693 - DNA, 1293 bp, Morganella morganii
atgaaaatcattcacacatcagactggcatctcggacaatatttttacactaaaaaccggttacaggaacatctgcagttttcagactggctgataaacctgataaaagaacagcaggcagatgccctgattgtcgccggagatgtgtttgataccgcctccccgccgagttacgcccgtgagttgtataaccgttttgttgcacaactgcaacagaccggctgtcatctgattgtgcttgccggtaatcatgatgccgttgccacactgaatgaatcccgcgaactgatggcctgcctgaatgcggatgtgattgcccggccggatccggcgcgggatctgatcgtgctttataataagcagaataagcccggcgcgattgtctgtgctgtgccgtttctgcggccgcgcgatattctggaaagtcaggccggacaatccgaagcagagaaacaactggcgctgctgaccgccatacagacacattatcagtccctttatgacagagcggtggcaaaacggagtgaactgggcgcggaagttccgatcattatgacaggtcacctgacaacagtcggagccaaaacctcagaatctgtccgtgatatttatatcggcacactggatgccttcccggccggtgcgtttccgcctgcggactacattgccctcgggcatattcaccgcgcacagtccatcggtgacagcggcaccatccgttacagcggttcccccgtcccgctcagttttgatgaatccggccaggaaaaaagtgtttttctgctcacactggataacaacagcattacggcgattgatacggtgccggttccctgttttcagccgatggtctgcctgaaaggcgatctggatgccatcagtcaggcgcttgaacagttttcgccccgtgatgaacatacacagccggtctggctggacatcgaaatcgccgggcgggattacctgccggatattcagaaacgcattcaggcactgacagagccgctggccgcagaagtgatcctgctgcggcgtgagcgcaggcagataaccgcagacaacagcgaagccctgcgtgaaaccctgaatgagctgactccggacgatgtttttgcccggcgtctggcactcagtgataccgaagaagaggatattccgcgtctcaccacccttttccgccgcgtttgtgagcaaattcgtgaccggacagagagtgacagcagtgaaaccagtaccggtatcagcagaaaaaacaatacccgtacagacagccggaaaggaaaaagtgaatga

SEQ ID NO: 274694 - DNA, 3687 bp, Morganella morganii
atgaagatcctgacattacggtttaaaaatatcaattcactgcagggcgaatggaaaattgattttacggcagaaccctttgccggaaacggactgtttgccatcaccggcccgaccggcgccggaaaaaccacgttactcgatgccatctgtctcgcgctctaccatgaaactccgcgcgtaaaaacatccgcatcccagaatgatgtgatgacccgccatacagcggaatgtctggccgaagtggaattttccgtcaaaggaaaagcataccgcgcgttctggagccagcggcgcgccagagataaagccgacggtaatcttcagccgccgaaagccgaactggctgagtgcgccaccggaaaaatcctctctgacaaactgactcaggtcagggagagcattattgagatcacaggcctggattttgcccgttttacccgttctgtgctgttatcacaggggaattttgctgcctttctgaatgccgatgataatgaacgggcagatttgctggaagaactgaccggcacggaaatttaccggctgatttcccgccaggtttatgaagactacaaagccgcgcaacaggcgttgtctctgctggaagcgcagaccggcgctatccggctgatgacagatgatgaacggctcgtgtgccaggctgaactgaccacactgcagacagacgagcaggctcagcttatccgccagacacagttacagaccgcactgcaatggtggcagcaccgcgacacactgaatacagaaacagaacagcggcaacagcagcatgccgctgttatgcagcagatacaggatgcccggccgcaaattgaccgccttgcccgcgccaaacctgcggaaaaactgcgtccggccagagaggcggagcagaacagtgtcgccttaagtacacagctgaccgcccgcatgcaggaactggcacaaacaacagagagtaccacccgctcgctgcagccgctgagcagtcagtgtgaggagcagcaacagttactcaccgggctgaaacagcagtatcagcaactggaaacactggcagagaacgaaatcaggccgctggataaccggctgcagttgctcaacagccagtctgatgcactgaaacagcaatatcaggcacagttgcaggaacaacaggcactgcaaaaccagtcagcacaacttcagcaacaactggcgcaaacccgtgacagttatgcgcgcagcacacaattcagacaggaaaatgtgcagaaagcacaacttccgtcagcaattgctcagtggcggcatgagctgcacacccggcaggaataccggactcagatttccgcactgacagaacagcagcaggcgggggaggttcagcaacagtcactgaccgcagcacacacagaaatgacagataaactggctgtccgcaatcagtctgttctgccgctgaaaacagaactgaccgccttacagaccacattacagcaggcacggcagactaaaccggatccgcagttaaccacacaactgcaacagaccggtgaaaagctcggattactgcaaaagctggcatctctggcaccggaaatcaccctgctgacccgtaacagggaaaatcttctgcaacaacagcatgcctctcaggaagaaattaaaacgctgacagactggattgcacatcaggaaccggttctgaccgaccagcagacacatctgcgtgacctgacagcccgttatcagctggagcaaaccattgtccggctggagtcggagcgtcagcgtttacaggccggagagccctgtcctttgtgcggtagtaccgatcatccgtcggtcacagactatcagcaggtagcaccggatgaaaccgcacagcgtctggaagcactgacacatactatcagagaggcggaaaaaacactggcagcgaaacaatctcagctgactttcacccgcacacaatacgaaaaactgagcagtacgctgcaggaaaccggagagaccctcgcggcccataccgcacaatggcagaaaatctgtcttgagggtgaatttgactccctgacagattccccggcatcactgaatgacattactcagcactatgacgggatgtatcagcagcaacagcaggctcaggaagcccgccgcgccctggaaactcaggtattaacactgcaaaaccggttacagacggaagaggcggagtgtgaacggctgtcacaggcattacagcgcaacagtcaggaacagcagttcctgacacagcagcagagtgaacgggcagcccggctgacacagcttcaccagcaacaacaaacactggaaacctcgctgacacaaacagtaaccgcctttggttacactattccttcaccggcagaaaccactgagtggctggcgcagcgtcagcaggaaagtgatcagttcgccgcaaatgaacaactgatacagcaaaatgcacagcaactcgcggaactgaccacacagcagcaaaatctggaggctcagcaggcaaaactgaccacacaactggcagaacagtccgccgcactgactgcactgcaacaacagcacaaagccgtcacggaacaacgccgggcgctgttcggtgataaaaatatcagcacggaattacagaaactgcttcatcagcagcaggaaacggaaagccgcctgaaaactctgacacagcagcgcgacagcctgcaacaaaacctcgccggactccggggggaagaaaaacggctgcagcagcagattctggatgtgcaggaacaacacagccgaaatcagcagatttttcagcagcaactggcagaaagcccgtttaccggtgaggctgatttcctcgccgccctgctcagtgaagaggaacatcagcagctacagacgctggaaaccgcacttaaccaggctcagctgaaagccgccaccagtctcggggatgccaaagccgcgctggatcagcatctttcggcacaaccggagccgttccgtgaacagtcccggcaacagctgacagaattacataccgccgccgcacagcaactgcgggaactgagcagccgtcagggggaactgcgcggacggctgacggcggatgacaatctgcgggtacagcagcgtgatttactggatcagatcacccggcatcagcaggatgtcaccgaccgcagccgcctcaacatgctgataggctctgccgatggtgccaaattcagccgctttgctcagggactgacgctggattatctgatccacctggcgaaccggcggctggagaaactgcatggccgctatgtgttgcagcgcaaaacggcagacagcctggagctgcaaatcaccgatacctggcaggcagacactcagcgtgataccaaaaccctctccggcggggaaacgttcctggtcagtctggcgctcgcactggccttatctgatctcgtcagtcataagacacagattgaatctctgttcctcgatgaaggcttcggcacgctggatcaggagactctcgatatcgcgctggatgcactcgataacctgaatgccaccgggaaaactatcggcgttatcagccatattgaagccatgaaagaacgtatcgcggtacagatctctgtcagaaaaatgaacggactcgggatcagtaaattgtcgccggaatatcgtgttacagcggcgtga

SEQ ID NO: 274695 - DNA, 603 bp, Morganella morganii
atgtctaattcatttatcgagttaattaaaaaacgcagaacaatttacagccttggtaataatctgcctgtttctcaggatcgtatcgccgcgctcatcaaagaagccgtgaaacacagcccgactgcgtttaactcacaatcatcccgcgtcgtggtactgtttggtgagaaccacaaaaaactgtggaatatcgtgaaagatacactgcgcgccattgttccggcagacgcatttgccgcgaccgaaggtaaaattgataatgccttcctgtccggtgccggtactgtgctgttctttgaagaccagtccgttgtcaaaggcttacaggaacaattcgcactgtatgcggataacttcccgatctggtctgaacaggccagcggtatcgcacagtttgccgtctggactgcactgtccgaagagaatatcggcgcatccctgcagcactacaacccggtgattgatgagcaggtcagcaaagcctggaatatcccggctgactggaaactgcgcgcacagttagtgttcggttccattgaacaggaagccggcgaaaaagcctttatggatgatgaaagccgcttcagaatcttcaactaa

SEQ ID NO: 274696 - DNA, 909 bp, Morganella morganii
atgcggatcggtattgatttgggcggcaccaaaattgaagtgatcgcactcagtaatgaggggcaggaattattccgtaaacggacggatacgccgcgttttgactatcagaaaacattacaggcgattgccgggctggtccacgatgcggaaactgccaccggagagaccggcactgtcggagtggggatcccgggaacactgtcgcctgtcaccggacgggtaaaaaatgccaactcggtctggcttaacggccagctgtttgatgcggatctcagtgcattactgcaacgggaagtgcgggtggcaaatgatgcaaactgcctggcggtctccgaagcggttgatggtgcaggcgccgggtttccggtcgttttcgcagtgattatcggtaccggctgcggtgcggggattgccctgaacggacaggttcacagcggtggtaacggtgtggccggggagtggggacataacccgctgccgtggcaggatgaagccgaccggctgtttaaaggaatggcggattgctattgcggcaaacagggctgtaccgaattgtttatctccggcactggtttcatggctgattatacagcgctgaccggtgaggtctgcaaaggtgcggagatcatacgtcgtttgtcacagggcgacttaccggctgaacaggtgatggtaaattatgagcagcggctggcaaaagcgctcggccaggtcgtgaatatgctggacccggatgtgattgtgctgggcggcgggatgagtaacgtcgatcgcctgtatcagacagtaccggcattgatgcgctcccgtgttttcggcggtgagtgcgatacaccgatccgcaaagcggtgcacggcgactccagtggtgtccgtggtgcggcctggttgtggccgaaagcctga

SEQ ID NO: 274697 - DNA, 909 bp, Morganella morganii
atgtggtttaaaaatatactcgtttaccgccttagctcgccgtttccgctgtctgccgatgagctggaaaaacagctggaacacatggcattcacgccgtgcggcagtcaggatatgatgaaaaccggctgggtttcgccgatgggctcccggggtgatgcgctgactcacgctgccggtaaacagatccttatctgtgccaaaaaagaagaaaaaatgctgccatcgccggtgattaaacaggaattacaggcgaaaattgaaaagctggaacatgagcagcaccgcaaactgaagaaaacggaaaaagattccctgaaagatgaagtggttcacgcactgctgccgcgtgctttcagccgtttcagccagaccgctatctggattgatgcggaacgcggcctgattatcgtcgatgcggccagcgccaaacgggcggaagataacctcgccctgctgcgtaaaacactcggctctctgccggtgatcccgctgaccaccaaagatccgattgaactgacgctgaccgaatgggtgcgctccggtgatttaccagccggttttgccctgatggatgaagctgaactgaaagccattctggaagacggtggcgtgatccgctgtaagaaacaggatctggtatcagacgaaatcgccacctgcattgaagccggcaaatgtgtcactaaactggcactggactgggaagaacgtattcagttcctgatgtctgatgacggctcctttaaacgcctgaaatacagtgatgatttaaaagacaaaaatgaagatatcgaccgcgaggattttgctcagcggtttgatgctgattttgtcctgatgaccggcgaactgagtgcgctgatcagcaataccattgccgccctcggcggtgaagcggaacactga

SEQ ID NO: 274698 - DNA, 705 bp, Morganella morganii
atgtcagcgaaaaaacaaaacttaccccgggcaccggatgatattaaccagttattatctcctgaaccactgcgaatggaaatgggcctggaacgcagcgaagaagggctgctgacggtgtctgtcagaaccgacctgcacggttgtaaagggcggatgctggagtggtggttcacgttttttgaaaccacgcagcatatccgctggtggcacccgcatgatcatgtggcacatcacggctgggattccgtctggaaaaaaggggaaaattatatcggggcgacaatccgcgcggttgagtctctcgggccgatcccgccggtcggcgcgacactgaaattcaacgatgcacaggatttctttgatgcggataaactggccgccgcgcggcagactcatcagatttccggtgctgtttgcgcccatatcgggttcggggatgatgtgaaaactgatacgctgggttacccgatcgacggaaaaatgctgcatataacttatgatacagagttcggatgtgtgctgcgcagccggtttttactcggagcgtcactggcggatccgctgacggaactgccggatgagattggtttcgggctgatgaagcactgctataacgagtttacttacttgtcccgttttctgccgtcgctctattacggcgagcacggtaatgatgaaaaagccccgctgccgtgggcataa

SEQ ID NO: 274699 - DNA, 630 bp, Morganella morganii
atggctaataatgaaccagccacagaatcccgcggacgtggccgtccggttgttccggaagaagaactgattgcaaaaatccgggaggcatcacttagccttttgttatcacagggatattcctcgatgacgatggatgcggtggcaaaacaggcgggtgtctccaaaaagacgctgtaccggttcgctgataaccgtgaagatctggcggagcagatagtgcgcggctggacggattcctttgtgccgctgtttatgcaggatgcaaagactaaagatgaattttatcagctgcttgaaaacaacctgaccatcatgagccacaaggtgctcagtgctgaggcggcgggattattttgtctgctgagcagtgagtttcccggccgggagttattgctgatccgctatcaggccggcggtattgagcgcggacgtgcgctgctgacagaatggttgtcccgccatcaggggtttctgtctctgccggatacagcacaaaccagtgatttgctgttatcgatggtaatggcagaaccactgcgccagattgctctgaaactggcaccaccggcaccggattacccggtacaggcacggatccgtgctgcagtggcattactgaaacgatga

SEQ ID NO: 274700 - DNA, 246 bp, Morganella morganii
atgaataccgaaaatactgcaattgtgccggattaccggctggatatggttggtgagccatgcccgtatccggcagtggcgacccttgaagccatgccgtcactgaaacccggggagatcctggaagtggtgagtgactgcccgcaatccatcaacaatatcccgctggatgccaaaaaccacggatataccgtgttatccatccagcaggacgggccgacaatccgctatctgatacagaaataa

SEQ ID NO: 274701 - DNA, 1161 bp, Morganella morganii
ttgcccgcagtgatcgccgccggcatcttatccgcatactacttcggattaacaggcacattctgggcggtcaccggagagtttacgcgctggggcggacacattctgcaactgttcggtgttcatccggaaaactgggggtattttaaggtgatcggtttgcagggctcgcccctggatcgtatcgacggcatgatgattatcggtatgtttgccggttgtatcgccgctgccttatgggctaacaacgtcaaaatccgccttccgcaacacaaaatccgtatctggcaggccgttatcggcggtattatcgccggtttcggggctcgtcttgcaatggggtgtaacctggcggccttctttaccggtatcccgcaattctctctgcatgcctggttctttgcactggcaaccgccgcaggctcttacttcggcgcgaaattcacgctgctgccgatgttccgcattccggtcaaactgcaaaaagtcagcaaagcctcaccgctgacacaggatttgcagcgggcgaaacgccgttttcgtcttggtatgctgatcttcctgctgtgtgtcacctggtctctgttcacgctgttcaaatccccgaaactcggcatggcgatgctgtttggtatcgggtttggtctgctgattgagcgggcgcaaatctgctttacctccgcattccgtgatgtctggatcaccgggcgtacccagatggcgaaagcgattatccttggtatggcggtcagtgccatcggcatctacagctatgtgcaactgggtgcagagccgaaaatcttctgggccggtcctaacgctgtgattggcgggttgttgttcggcttcggtattgtgctggcaggtggttgtgaaaccggctggatgtaccgtgccgtggaaggtcaggtgcatttctggtgggtcggtctgggcaatattatcggcgcgacgatcctggcctattactgggattccgtggcaccgtggctggcgactgactacgacaaagtcaacctgctggataccttcggcccggccggtggtctgctggttacttacggattactcgccttcgcctttatcctgttactgatgtgggagaaacgcttcttccgccggaaaaaccaggctgacgctgtcgccgctgccgcacactga

SEQ ID NO: 274702 - DNA, 1020 bp, Morganella morganii
atgaaacctattactgaaatcaccctggcccagggcaacggcggacaggggatgcagcaactgattgactccctgtttttgcaggcattttccaatccgtatctgaatgaaaaagaagatcaggcacgaataccactggcggaattacaggccgccggtgatcgtctggcgttcagcaccgacagctatgtcattgatccgattatttttcccggcggcaatatcggcaaactggccgtgtgcggcacagcgaatgatctgtctgtcggtggcgcaatcccgcgctacctctcctgcggatttatccttgaggaggggttgtcgtttgacattctctctcagctggtcagcagcatggcggaagccgcaaaagccaatggtattcagattgtgaccggtgacaccaaagtggtgccgcgcggtgcggcagacaaagtgtttatcaataccgccggaatcggcgtgatcccgcatcagctgaattgggcagcagcacaatgccgtccgggggataaaattattgtcagcggcacactgggtgatcacggtgcggcgatcctcaatctgcgcgagaacctcgggctggatgctgatctgcgcagtgactgtgcggttcttgagccgatgcttgcacctttgcgggcgattgacggcatcagagctgtccgtgatgccacccgcggcggtgtcaccgctatcctgcatgaatttgccgatgcttcgcagtgcggtatgaatatcgaagaacagaaactgccgctgaaaaccgcagtacgtggtgtgtgcgagctgctgggactggaggcactcaattttgccaatgaaggtaaggtcgtgattgttacagctccggaagccgaagacgccgtgctggcggccctccgtaacagcccgctgggacaggacgcctgtactatcgggcaggtaacagaggcaaaacaggtgaaagtgcaggggattttcggcgcgaccaggctgctggatcttccgtataacgagccgctgccccgcatctgctga

SEQ ID NO: 274703 - DNA, 1131 bp, Morganella morganii
atgcgttttgttgatgagttccgtgatcctgctctggcagaaaaactgctggcacagatccgggaagagatggtgtcgtggccgcatccgctgaaacagcctttgcagattatggaagtgtgcggcggccatactcacgccatctttaaattcgggctggataaactgctgcctgattcagtggaatttgttcacggaccgggttgcccggtctgtgtgctgccgatggggcgtattgatgcctgtctggaaatcgcggcccgtccgggcgtgattttctgcactttcggggatgccatgcgcgtacccggacgcggcggctcactgctggatgcccgccgtcacggcagcgacatccgcattgtctattccccgctggatgcgctgactattgcccgtgataatccggataaagaggttgttttcttcgggctcggttttgaaaccaccatgccgggcacggcggccaccttacaactggcgaaaaaaaccggactgaaaaacttcaccgttttttgtcagcacatcaccattatcccgaccctgcgcacactgctggagcagaaagatgtgtttatcgacggctttatcgcaccggggcacgtcagtatggtgattggctgcacgccgtatcagccgctgtgtgatgaattttccaaaccgtttgtggtgaccggctttgagccgctggatctgctgacggctattctgatggttgtccgccagctgaaaaaacaggcgcaggacaaacatgcgccgatggtggtggaaaatcagtacagccgcattgtaccggagcagggcaacctgctggcacagaaagcgctggcggaagtctttgaactgaaagccagcagtgaatggcgcgggctcggcaatatcgcggactccggtattcagctgacaccggcttaccatgaatttgatgctgaacgccgcttccggccacagccgcagtctgttgccgataacccgcaggcgcgttgcggggatgtattaacaggccgctgcaaaccggcggactgtccgctgttcggcaacgcatgcactccggaaacggcgctcggtgcactgatggtctcctctgaaggggcatgcgcagcttattatcagtaccggcgcggagaataa

SEQ ID NO: 274704 - DNA, 1044 bp, Morganella morganii
atgtgcagcacatgcggttgcagcgaaggaaacgtgcagattgaaggtcacagccacgaccaccacggccatgatcaccatcatcatgaacatgacaaccattcccgccccgtcatcattcatcaccaccactatcatcataacggcgatgtgaatcattattattatgacggacgtgaagccggtgaagagcatgctcacggacacagtcatgagcacagccattctcatgagcacgaacatcatcattcacatgatcatgaacacgaccatgaccacgcagcggcctttgaaccggtaattgataaagacaatatgcattacgggatgggcgaagcgggcacacacgcgccgggcctgacccagaaacggatggtacagattgagatgggggtgctggataaaaacaaccaaatcgccgtccataaccgcgaacatttacaggagcagggcattctggcgctgaacctggtatccagtcccggctccggcaaaaccacattactgacccgcacactcaattacctgaaagacaaagtcccttgtgccgtgattgaaggcgatcagcaaaccaccaatgatgctgaacggatccgcgcaaccggtgtaccggcgattcaggtcaataccggcaaagggtgtcacctggatgcgcagatggtgcatgacgctatgcatcacctcggactgaaagataacagcctgttatttatcgaaaacgtcggtaacctggtctgcccggccggctttgatctgggtgaacagcataaggtggccattctgtcagtgacagaaggggaagataaaccactgaaatatccgcatatgtttgctgccgcagacctgatgctgattaacaaaatcgacctgctgccgtatgtgaatgtcaatattgaagcctgtgtgaatgcggcacgccgtgtgaatcctgacatcgatgtcattgttctgtcagccactaccggtgaaggaatggatgaatgggttgcctggttacaggagcgcctgagcaaggtgaatcagcagcgtggtgcggcggaataa

SEQ ID NO: 274705 - DNA, 822 bp, Morganella morganii
atgggcgatatcacaagtttactgcatgcattgattctcggggttgttgaaggattaaccgaatttctgccggtgtcatcaaccggtcatatgattattgttgctgagcttatcggctttaccggcgataaagcaaaaacgtttgaagtggttatccagctcggttccattctggcagtggttttcctgttctggcggcggatgtttgcccttatcggcattcacttcggccgggttcctcatgaaggacagactcagggaaaactgaatttactccacattattattgcgatgttaccggcggtggttctcggtttgctgctgcgggatcagattaagtctctgtttaatccggtgaatgtgatgtacgcactggttgcgggcggtatcctgctgattgtggcggaagtctttaagccgaagaaggtgcaggccactggtcttgatgacatcagctaccgtcaggcgtttgccatcggctgtttccagtgcctggcactgtggccgggattctcccgctcgggtgccaccatctccggtggtatgctgatggggattaaccgttacaccgcgtcagagttttcctttattctggccgtaccgatgatgatgggcgcgacagcactggatttatacaaaagctggcatttcctgagcagctcggatattccgatgtttgcggtcggtttcctggcggcgtttattgtggcgctgattgccatgaaaaccttcctgtcactgattaaacgtatctcctttatcccgtttgctatctaccgctttattgtggctgctgccgtttacgtggtgtttgtccactga

SEQ ID NO: 274706 - DNA, 354 bp, Morganella morganii
atggatgttgtttttattaagaaacttgttgtttttacaacgattggtgcttacgactgggaaaagaatattacgcagaaattagtgctcgatatcgaaatgcactgggataacaaacgcgcatctgagagtgacgatgtggaacattgtctcgattatgccagcgtcagcactgcgattctggattatgtgcagacaagacagttcgctctggtggaacgtgtggcggaagaagtggcgtcattactgctgactgagtttgccaccccccgggttcgtatccgcgtggccaaaccgggtgcggtggcacaggcggaagaagtgggtgtcatgattgaacgaagtgcggcctga

SEQ ID NO: 274707 - DNA, 657 bp, Morganella morganii
atgagtggaatcgcgcttggtatgatcatcttcgcttatctgctgggatcaatttccagtgcgatcctgatctgccgtcttgcgggactgccggatccgcggcatcacggctccggaaacccgggggcaaccaacgtgctgcgaatcggcggcaaactggcggctgccggtgtccttatctgcgacgttctcaagggtatgctgccggtctggctcgcctacctcctgcaaataccgtatttttacctcggcattatcgccattgccgcctgtttaggccatatttatccggtatttttccactttaaaggcggaaaaggcgtggcaacggcatttggttcgattgccgccatcggctgggatctgaccggactggtcgccggaacctggctgctgaccgtgctgctgagtggttactcatcattaggcgcgattgtcagtgcgctggtggcaccgttttatgtctggtggttcaaaccggagtttaccttcccggttgccatgctctcctgtctggtgctgatccgccatcatgacaatattcagcggttgtggcgcggacaggaaagccgcatctggcagaagctgaagaaaaagcgtgccaaaacggataaagagataatccaggaagcgaaagagcaggaaaaagaagattaa

SEQ ID NO: 274708 - DNA, 1020 bp, Morganella morganii
atgcgagtgttaggcattgaaacgtcctgcgatgaaaccggaatcgcaatttatgatgatgaagccggtttgctggctaatcagttatacagtcagatcaaagtccacgcggattacggcggtgtggtgccggaactggcatcccgtgaccatatccggaaaacggtgccgctgattcaggcagcactgaaagaagccggtctgacggcacaggatattgatgcggtggcctataccgcaggaccggggctggtcggggcgctgatggtcggggcgacagtcggccgtgcgctggcgttttcctggaatgtcccggcggtgccggttcaccatatggaaggccatctgctggcaccgatgctggaagaacatcagccggaatttccgtttgtcgcgctgctggtctccggcggccacacgcagttaatcagtgtaaccggtatcggtgaatacacgctgctgggtgaatctatcgatgatgcagccggggaagcctttgataaaacagccaaattactgggtctggattatcccggtgggcctgcactgtcacgcatggcagcacagggcacgccgggacgttttaccttcccgcgtccgatgactgaccggccggggctggatttcagcttctccgggctgaaaacctttgccgccaataccattcatcagaatgatgattcagaccagaccaaagcggatatcgcccgtgcttttgaagatgcggtcgtggatacgctggtgatcaaatgcaaacgcgcgctggagcagaccggctttaaacggctggtgatggcaggcggcgtgagtgcaaaccgcacgctgcgcgaacgcatggcgcagacactgcaaaaactgggcggagaagcgttctatgcccgccctgaactgtgcacggataatggcgcgatgattgcgctggccgggatgatccgcttcaaaggcggtatgcgcagtgaattaggtgtgaccgtccgtccgcgctggccgctggctgagttaccgccgctgggcaaataa

SEQ ID NO: 274709 - DNA, 216 bp, Morganella morganii
atgccggtaattaaagtacgtgaaaacgagccatttgacgttgcactgcgtcgtttcaaacgttcctgcgaaaaagcaggcgtattagctgaagtacgtcgtcgtgagttttatgaaaaaccaacgactgtacgtaaacgcgctaaagcatctgctgttaagcgtcacgctaagaaactggctcgcgaaaacgcacgtcgcactcgtctgtactaa

SEQ ID NO: 274710 - DNA, 1800 bp, Morganella morganii
atggccgtgtttccggaaggaagcgcggcttattatcgttatcagacaggcgaaaaaggggttatggccgggcgcattccacgcacatttatcaacgacttattagcgagaaccgatatcatcgatctgatcgatgtcagggtgccgctgaaaaaacacggtaaaaatcaccaggcgtgttgtcctttccacaacgaaaaaactccctcttttacagtcagcagcgataaacagttttaccactgcttcggctgtggtgcccacggcaatgctattgattttttaattaattatgaccggctcgagtttgtcgaggcgatcgaagaattagcagcaatgcacgggctggatgttccttatgaaaccggaagcggcagcagccagatagaaaaacatcagcgtcagaacctgtatcagctgatggaaaaactggacagtttttaccgccacgcattacaggccgataacgccggtcatgcccgtgagtacctgaaccgccggggtctgagtcaggaaattatcagccggtttgcaatcggctatgcccccgccggatgggacaacgtcctcaaacgctttgcccgcagtgaggatgatcgtcagcagttgctggatgccggcatgttagtggtcaatgataacggccgctgctatgaccgcttccgggaacgtgtgatgtttcctatccgtgaccggcgcggccgggtaattgctttcggcggacgtgttcttgatgacgcactgccgaaatacctgaactcaccggaaaccgatatttttcataagggccgccagttattcgggctgtatgaagcccagcagaataaccgcgaactgtcccgcatccttgtggtggaaggttatatggatgtggttgccctggcacagttcggtattgattatgcggtggcctcactcgggacatcgacaacggcagagcacatacagttgctctatcggacatctgataccataatttgttgttatgacggagaccgcgccggacgtgaagccgcctggcgggcactcgaaactgctcttccccatcttaatgacgggcggcagcttcgttttatgtttttaccggacggcgacgatccggattcactggtgcgccgcgaaggccgtgaagccttcgagcagcggcagaatgaggcacacagtctgtctcagtttctgttcgataccctgctgcgccaggtggatatgagcaccccggaggggcgcagcaagctgaatgccctggcgatgcctctgataagccgcgtgccgggtgaagcgcaacaggcgtttttattgcaggatctgggcaatttactcggactaccggatattacacagctcaaacaggcggtccgccagagtgagaacagtcccggttatcaggcaccgaaactgaaaccgaccaccatgcggatcctgattgccctgctggtgcagaatccgcagtttgcacaattagtgccgccgctggaatccattgataccagccgtattgccggtttttcattattcagggagctgattgatacctgtttatcacagcccgggctgaccaccggtcagttactggaacactaccgtgataataaattagcgccacagcttgaaaaactggccggatggaacgatatagagatagatgagatagcagaaaaaaccttcaaagatgccttaaatcatctggtggtatctgctctcaatgacagatttaacttcctgatcgccaaagagcggacagaaggtctgacccctgaagagcgcaatgaagtgagtcttctcgtgcgggtccggcaataa

SEQ ID NO: 274711 - DNA, 1851 bp, Morganella morganii
atggagcaaaacccgcagtcacagctgaaacttcttgtcacccgtggtaaggagcaaggctatctgacctatgctgaagtcaatgaccatctgcctgaagatatcgtcgattctgatcagatcgaagatattatccagatgatcaatgacatgggcattcaggtaatggaagaagcacctgatgctgatgatctgatgctggcagagaattcaacagacaccgatgatgatgcagccgaagctgcagcacaagtcctctcaagtgtagaatcggaaattggccggaccactgaccctgtacgtatgtatatgcgtgaaatggggacggtagaactgttgacccgcgaaggcgaaattgacattgccaagcgcatcgaagatggcatcaatcaggttcagtgttccgttgctgaatatcctgaggcaatcacgtatttactcgatcagtacgaccgcgttgaagcaggcgaagtccgtctttctgacctgattaccggctttgttgacccgaacgcggaagaagatctggcaccaaccgcaaccaacatcggttctgagctgccggccgaagaattaaacaaagatgacgacgacgaagacgaagacgaagaagaagacagtgacagcgatgacgataacagcatcgatcctgaactggctcgtcagaaattcgaagcgctgcgtgtgcagcatgaaaaagcgcgtcagcagattaaaattcacggccgcgaccacccgaataccaatgcggaaattcagcagctctctgaagttttcaaagagttccgtttagttccgaagcagtttgaccatctggtcaacaacatgcgtgaaatgatggatcgtgtccgtcagcaggaacgctatatcatgaaactctgcgttgagcagagcaaaatgccgaagaaaaacttcattaccctgttcaccggcaatgaaaccagtgattcctggtttactgctgctgtcgcgatgaacaaaccgtggtctgaaaaactgcaggatgtcgcggaagaaattgaacgcagcctgcaacgtctgcgtcagattgaagaagaaaccggcctgaccattgaacaggtcaaagatattaaccgccgcatgtctatcggtgaagcgaaagcccgccgtgcgaaaaaagagatggttgaggcgaacttacgtctggttatctctatcgcgaaaaaatacaccaaccgtggcctgcagttcctggatctgattcaggaaggtaacatcggtctgatgaaagcggttgataaatttgaataccgtcgcggttataagttctcgacctatgccacctggtggatccgtcaggcgattacccgctctatcgcggaccaggcacgtactatccgtatcccggtgcatatgattgagactatcaacaaactcaaccgtatctcccgtcagatgcttcaggagatgggccgtgagccgtcaccggaagaactggcagagcggatgctgatgccggaagataagatccgcaaagtgctgaaaatcgccaaagagccaatctcaatggaaacgccgattggtgatgatgaagattcgcacttaggggatttcatcgaggataccaccctcgagctgccgctggattcagccacctcagagagcctgcgttccgcgactcacgaagtgctggccggcctgaccccgcgtgaagcgaaagttctgcgtatgcgtttcggtattgatatgaatactgaccacacgctggaagaagtgggtaaacagtttgacgttacccgcgaacgtatccgtcagattgaagcgaaggcactgcgcaaactgcgccacccgagccgttctgaagtgttacgcagcttcctggacgaataa

SEQ ID NO: 274712 - DNA, 3744 bp, Morganella morganii
atgacaaagcaacgtaaaccggggcttgctctgcttattgctattgcactgtccggcggggcctggctgacgtattctgtgacgtccggcagcacgccagcagataaaggctatgagctgtatttatccggggatactgacggggcattccgttatttttccgcagaagcggaaaaggatccgcaggcagcctatgcattgtctgtgatgtatctcaatagctacgatgcaccggccaatgcgttgctgggttatcagtggctggaacgggccgcgaacgccggtaataaaagtgccttatacaacctcggttattaccgctatcacggtataacacaggataccgcacaggatcagtacggtattacctccctgaaagccgcgtcacaggcaggagtccgtgaggcccaggaattactgggcactatttatcttctcgataaatacggcaatattccgtcagatgcagaacaggcgcggaaatatatgactgcggccgcagatcagggatcgttttttgcaaaattcgcgctgggctatatcgcgtatgaatatgataaagattataaaaaagcggccggtattctgacaccgttgctcagcgagcaatttaccctgcctgctatgctgctttccggaatatatgaaaaaggcggtcacggaatagaagccgatccgggacaggcaaaaaaataccgctatatggcattttcacaaatcagctcactcagtgaagatgatttgatgccgaaagcattatcccttttcggctcagaaacggcagatgaaataaccgcccggctggcaaaactggagaaaatggcggagaacggcaatcagtatgcccgttatgccctctatgacacttatatgcagggagcgggtgttatcgcagataaagaaaaagccctccgctatttacagccgctgattaatcaaaaagatccgaaagccctttatacctggtatcttgataccaaaacaaaccctgaatatctgacagccgcagctgatgccggatatcccgatgccctttatctgctttatcaaatccaccgtaatatccgttttgatgatgccttcggctatgaccgggagcgtgcggagaaatacctgaaacaggctgcgaataccggacatcacgatgcattaatcgatattattgaggatattgtcagcagctatcagtttccggataacgacaccaacgcacaggtatctgcctatttagccaaattactggaaaaatatccggatgacccggaggcgctgatgctggcttccgcacgttacggtgatcaggaagggaatatttatgatcctgttcgtgcctttgaactgaataaaaaatcggctgaattatcccctctgccggattcacaggatcaactggcctataaatacgccagaggtatcggtgttgagcaggatatgaaaaaagcggtcgggatctataaatctctgctgagagatccctattttcaggataaggcttaccggcgtttaacagatctctgtttttcctttgataccggcggtgaaattgatgaaaaagagattatcgcgttcctgaaaaaagatatcgaagaaaatgataactaccgccaggcgtatttttatgccgattatctgttgcaggaagatccggtaaaaaaccgtaaacaggctatggaactgtatctgaaagccggcgaatatacccccagtgccgatgtccacctggcaaaatcgcttatttctctcaataccggcaataatgaacaggctttaaagctggctctggaaataatgaaaagcggatatgcccgctctctgctgacggaaaaagaatggcatgatgtcacgcagattgtattctccgaaggaaaaaacaacctccttgccagacaattctgggtcctgcttgccctgcgggataataacgctgaagcgcagaaactgattgaaccgctgctgggtcaggatccggttgtcacgtattactatgcgaagctgaaactggaagatgcggaagataaaccggatatgaccgatgagatcctgcgtccggatattgaactgatgatgaaagcggcagcgctgggcaacccggatgccggtgaatacatggtgaatcgtctgaagagcgcgacccgctccggtacacaaagtaacctgaatcaggcgtttctgcgggtaaccggactgacggaacgcgatattgtaccgcgcctgacacagtgtgccgatgccggaggatgggcctgtatatatgaattgggcgagatctattatgagggtaaatacggtgtaaaagctgacctgaatacctccgtcgcctggtacgaaaaaattcctgatcgcgattaccgtttcacagaatcacgcctgagcaaagtcaaaaagagccgtgacaccctggcagacctgaatgcccgtgtacagaaaggggatgctgaagccgcctatgaattatcttatgcctggagaaacggcaaccacggcctgactcaggatccgaaaaaatcacggtattacctgaaaatggcagcggaaggcggtaatgaagatgccatcaccacactgattgatgactacaaaagcgcagacacactcagcccggaggataaaaaactgctgctgtcgctgtacgataaactcccgggaaccggcaataacagctatctgcgtgatctgggtacacagtacctgcagggcagcaatcttgtcagcgcagatcgtcagaaagcccgttattatttcagcaaagccggtgattacggtgctcacgagctgaaagcaatggatcagtttgaaataaatgtaaaactggcggatgaaagcccgaatgctgcttatgaaaccggttatgattattttctcgggcgcggcacacaaaaagatctgcagcaagccctgccatacctgcaaaaggcagcagatgccggtcataactatgccacaatcctgctggcagatacctatgaaaagggagagtacgataaagagacacagcgccggattatcacaccggactgggaaaaagccattgtcctgatacgtgcctacaaagggccgcgtgatgtatcagaaaatattgcattctatgagagtacgataaaaccggcactggccggagacagcagcgccatgaacgccgccggggaacactataagagcagcggctattatgataccgcccgctactggtttgaaaaaagcgcggaaagcggttatctgcctgcattctgcgctctggccggggcgactgaaaccaatgacggtaaaatggcggtattacgccgcggtgcggagaaaggtgacagttgctccgataccatgctggccatcatgcaactcagagagaacagcattacacaggattcaccggagtggaccggtattatcacccgggtggaaaacggtctgaaaaacagtgatgaagaggtgtcaaaagccgcgtttgaagcactgactcagctgtatcgcggcactctcagcgatgacaacggcagctgtataaggcagacaacaaaaaatatctcacactgctggaatcggaggcagataaacgggccgatgcacaaatcgacctgttctattattaccggcagaataatgacatggataaagcactgtcttatctgcaaaaaggccatgatagcggcgatatcgctgcgacagaaacactctacgaatactatatgtcgccggaatattgccgccgtgacgatgccgatcccgctaaagcggagcagtatctga

SEQ ID NO: 274713 - DNA, 978 bp, Morganella morganii
atgtcgccggaatattgccgccgtgacgatgccgatcccgctaaagcggagcagtatctgacggaatggctgaaaaaatcggactatccggaaaatactgataaccatatgctgatgccgccggaagaccggaccaaagccatgggtgatgcatggcttgaaggcttctgtcaccgggcaccggatcctgacaaagctatcgcgtggtatacccgctcactgacgtataacaacacacatgccctgaaaggtatgtatgacgcgcagatagcaaagaagaatgctccggaagcctattactacggttcactcgccggtgtcagctcccggaagggggacgaccttatcgccacactgacggatgcagaacgcgaaaccgtgctgcagcgtattaagaaaaaacaggtgtatgagcaggaaattgaagcgaagcggcaaaaagcagaaagcggtgacggcccggcggcattctcgctgggggtaaactatgcccgtggcgaacgcgttccggaagatacggaaaaaatgatctattactatgagctggccggtaaaaacgggtacgcccgtgcttacaacgtgctgggtaatatctaccgtaaaccgaatgagcgcgggatcccggtcgacggtaaaaaagccctcgcgtattttgatgcgggggccaaactgggcgacagcaataccgcacacctcgccggggatatgctctatttcggtcaggccgggctggaaaaagattatccgcaggctgcccgctattatgaaatgacctctcttgaacagggcagtcatcatgaaatggcgaaatacaaagtcgcgtggatgtactatcacaaaatggccggtaccggcagcgatgatgatcagcgaaaagcacgggataacctgatattgtcggcaaaatacggcaataaagatgccgcagaagctttaaaagagtgggatttctcacgtatcagcgataaaaataaataa

SEQ ID NO: 274714 - DNA, 876 bp, Morganella morganii
atgactgaaaaaaagttgctgccaggtatagcattaattattgctctgatatgggggagtaatttccctgtatctaaaatagcaattgaacaagtcggagcatggccattccgcttttattgtaatattatttctgttgctattttgctcattgttgttttattattattccggaagaaaatagtgttcaaagatgttcttctgtgtattcctttgggggtgtttaatctatttttggtgccattgttgaataatatttctctgttttataccgatgcggtaaaagcatcggtgctgatttataccatgccggcttttacgtcattaatttatatagttatctacaggagtataaatataaaatatgtaatgacagcgatcctgggtgttacaggagtactgattttcattgccgtggataaaatcggaactggggagttaattatattaatcagtgcattttgctgggctacaggaacggttctgtcagaaaaaatacctgttaaatcgaatctattgctcagagttttctatcagaacggtatttcattgctgctgatcgtactgacgatgccatttatgtctgatgatatccagctaccattatctgtgataggtcagcctcgtgtgttattgccggtattgtatacaggaataaccagcggtgtttttgtctatattctatggttttatatgatcgaaaagggcggggcggaactgacatcctgtgccattttattatcaccggttatcagtgttcttatttcattgttttttccgggggaatcagtcactttgaatatgctggttggcatgttgtttattatttctggtctttttattgcatttcgggggaaaaaatcatccggcaggtaa

SEQ ID NO: 274715 - DNA, 672 bp, Morganella morganii
atgaaatctgataaactatctataatatttcagaagcaaggttatgtatcatttaatatagaaaagttttttcctgaacttaatatattctctgaagaatttcataatattgacgaggaatattggtcatggattattaagaacaagtatggtgagcatgatttttatttgaaaaaacacgatcaattattgattgagaatgaaaagacatctgcattatctgattatgaatcagggctgttttcattttcattcagaaggataattgacaatgatattggtaagtcggtagcttgctttcatcaaataaagtctattgttaatagtatgcgctttttaaaatttttggaacatattacaggaagagaattaaagaaaaatacggtgatttatctcaacaaatttgattgtggtgattttttaacagtgcacagtgacccggggcaaagtatcggattggtaattaattttacactaaactggaatatgactcatggtggtcttacgatgatattagatcagtcaggtaaaaaaatcattgatactttgataccggataatatgacagctttaatatttgatacaggtaaaaaaaatattccacattttgtttcaatggtaacagcaaaaacacagaataaacgcattgccttagttgcccgctatgactga

SEQ ID NO: 274716 - DNA, 513 bp, Morganella morganii
gtgatagttgagaagtatcctgtttttgccacaactgatgaaaatcagctttcagaattattagatggcgttaatcttgttttattggcttgggctagtcttggttattacagaaaaaatacagtggaagaaagcattcaccgtttagctcgcataaataacattccggtcgttgagcttggtggtgatccatttgatatttctgtcgggcctgtttatctgaataatggtaatggccttaattattctgaggtgaaaaaacaagccagtcagcatttctatggtaacaatgctgatatcaaaaaatttcgtaaagcacgtatgaaacagcaatttctcaatggcaacagggtggtaaatgcctggcaaagtgctccatcattagcagcaatgtcaggactgattaccgatcaggttgtaaaaattcttacaggctatgatgccccggccctggaaggtaaaaaatggcatttgaaccttcgtgattttagtgttagagaggaaactatataa

SEQ ID NO: 274717 - DNA, 477 bp, Morganella morganii
atgataacaaaaccacttattaaacgttctcataatgttgttttgtcagatgacggtgatatttgcattggtgaaattccgggaggatctaagataataaaaaaacctccggaatgggttaaggttgtattgtcaaaacttgatgggttacatactattcccagaattattaaagaagtatccatgaaaggatataaaattaacgataatgatgctatttggttgattaataagcttgataattatggtcttattgatgagaattcctgctattccgatattttaacatctgaagaaatagaattatatgatcgtcagttactccaattttctgttgtagataaaaataataatgcaattaaatatcaggaaaaacttaaaaaaagtcgtgtattagtattgggtatgggaggttgggggaacgtggtgttctcttcagttagctgtatccggtgtcgggatactgagaattgttga

SEQ ID NO: 274718 - DNA, 2361 bp, Morganella morganii
atgagcggcatccggcgcgtagtacagaacctggcggcagtgattatcctgctggcgctgtttctgaccggattccgcctctggccgcatccgccgttgtcagaaggtgtgcctctgtcggttgcctattatgaccgcaacggcacactgctgcgcctgacgctggcaaacgatgaccgctaccggctgtggacaccgctggaagatatgtccccgctgctgacacaggggacgctgcgttatgaggatcgctggttttatctccaccccggttttaacccatacagcctcacgcgcggtttttttgtcagttatatcagcggggagcggcttcagggcggttcaaccatcaccatgcagctggcacggatgcgctggcatctcaacacccgcaccctgcgggggaaaactgaacagatcctgcgggctgtgcagctggaactgagctattccaaacacgacattctggaagcctatcttaactatgccccttatggccgtaatattgagagcgccggggcggcctcactggtctatttcaataaaaaaccggcggatttaacgctgccggaagccctgacgctggcggtactgccgcagtcgccgggatatcgtgtcactccgggaggcacggatatcagccagccgctgatgcaggcacgtaaccggctctggcagcactggcgggaagagcatccggacgatgaaaacatggcggcactgtttgaactgccgctgatgctgcgccagccggaacagatgccttacatcgccccgcatctgattgagcagatagcccggcaaaaccggttcagtgcagaaaaaccgcagacggtggttaccacgctggatgtgaatcttcagcgtatcgccgaaaaacaggtggctgcttttatcgcccgccgtcagcaggcgggattgcacaacgcggcggtacttcttattgatacccgtgatatgggcgtgcgggcgctggtgggatcggcggattattacaacacggagatccacggccaggtgaacggcaccaacgccaagcgttcccccggctcggcactgaaaccctttatttacgccctcgggctcgagcagggcgtactgcatccgctgaccattcttaaagatgtgccgtccactttcggcagctacgcgccggagaactttgatctgcgctttatggggccgctgccggcaacacaggcactgaactacagccgtaatattccggcggtggatatcgcggcaaaactcagcaaaccgaatctctatcagtttctccgtctggccgggctctccgggatggcgggagaaaaacactatgggctgtcgctggtcctgggcggcggtgaagtgaccgcgcaggagctggcaaaactctatgcgatcctcgcaaaccggggcgttctgcgcccgctgcggatgaccgaatccgaacagccggctgcgccggtccgtctgctgagtgaggaagccgcatttatcacactggatatgctggggcagcaccggcgtcccggtaacaccctcgcacaaaaaccgatgacactgccggtgtactggaaaaccgggacttcctggggattccgtgatgcctggagcagcggcatcaccggcccatatgtgctggtggtctggctcgggaactttgacggcaccggaaacagtgcgctgattggcgcagaagcggccgcaccgttgtttttcaatattatcgacaacattatggcggagtacccggcactgcgggagccggactttccgctgccggaaaatctccgtcaggtggaggtttgtctggccagcggcaacctgccgacgcagtggtgtcagcggcggggcaaaacctggtttatcccgggtaaatcgcccattgcggttgataccatctaccgcccggtggcgacggataaaatcaccggcgacgtggtctgcccgccttatgatcctgcgcaggtgaatattgatgtctatgaatactggccgtctgacctggcgcgggtgtttgccatggccggtctgccgaagaaaaccccgccgtctgtcgctcactgcaaaggcggcaacagcctgatcggcggtacaccaccacaaattacctcaccgctgcgcaacaccacttacacactgcggcggacagcaaaccagccatcctccctgttttttacagccaccgccgataatgacagcagtgtgatttactggtttgccggtgatgcatacctcggtaacagcaccagccgccgcccgctggaatggaaaccggaagccgtcggacgctaccgtatccgcgccgtggatgaccacggtcgtgcagattcacggatgattcaggtggatattctgggggtgagggacaggtga

SEQ ID NO: 274719 - DNA, 5916 bp, Morganella morganii
atggacgttctgcgttttatcctccgcttaccttttattctgctgcgtctggcggcacgcggtcttgtttatctttttacgcttctgggttttctgctgcgcccgttcaccggacggatccgctgggcggtaccgggctgggtgacctttgccggtaatcagcttgcccggctggagcggggtgtaaaccgctatccgaaaaccatatctgccttattattgctgactgctgcggtggcggcgggcagttattacacctggcactggtaccagaacaaaccgaagccggtggatgtcgcgccgctggtggtgcaggatatttccgcgtctgtgcagcgcccttcggcggttaattataaccgtgatgataattcagcgcagattgtggtggtgacattctcccgctctgccgcaccggtgacgctgatcggcaaaccggtcacggccggtattaccctgactcctgcaacggaaggtgaatggcagtggcgtaatgaccgcaagctggtattcacggcgaaaaaaaccttcccgatggggaaaacctacaccgtcgatatggatgccaaaacactgctggctccgcaggtggcgttaacagagaaacaaaaaacctttaccacccctgagttttattatcgtggcggccgggcggagttctatcaggatccgcaggatccgatgaaaaaacacgccatcatcggcctgaccttcaatgcccccgctgatgtcaaaaatctggaatcgcgtctgtctatgacccgtgacggcaagccggtgccatataccgtcacttatgatgataaaaaactcaaagcctggatccactccgggcagctggcactcaatgatacagacagcgaagtgctgctgacagtcagagccggtgtcggggcggccgttccggccaataccacggacaaagatgaaaccttccgcgtgattgtgccgaaccgctacagtctggatgtgacgggcatcgacagtcagctggtggaatcagatgacggaaaagatcgccgcgccctgattgtgtcattctctgacccggtgaatgaaaaacagatcacaaaagcggttcgtgcccgtctgctgccggaaaaacacccggattataattctgagggtatttatgacgactggaaatcagatgatatcagcgaaaaagtcatcgcattatcagagccggtcacgctgaccccggatgacagcgagcaagagaatcaggctgcattcagcttcagttataacgccccggccaaccgctggctgctggtggaaatcaccggcggtatgagttcggcgggcggttattacctgaaaacatcacgttatctgccggtacgcatcccggattacccgaaaacactgcgttttatgtctgacggggctttgctgtcgatgaaaggtgaaaaacagatcaccgtcgcggcacgtaacttcccgggcctgcagctggatgtgaaacgggtgatcccgggccagttacagcacatcgtctcctttaaggataaaaactttacctcaacggactttaaccgcctgagtgatgaatactttacggagcactttacttaccagacggcgctgtccgccgctaaccccggcgatattcagtacaaaggtatcgacctgagcaaatacctctcatccgacccgtccgcaaaacgcggtatattcctgctgagcctgcgggcgtgggatccggctaaaccggcggaggccccggaagcggaaagctatgatgaaggggatgaggattacgaagaggacacggttctcgattcgcgctttgtggtggtcactgatatggggatcatcgcgaaatcctcccccgatggctcgcgggatgtgttcgtgcagtccgtgtataccggtgagccggtcagtggcgcgaaagtctcggtggtggccaaaaacggcaccacactgctgagccgtacaaccggcagtgacggccacgccgcattcccgccgctgcatgatttccgcaatgagcagatggcggtaatgttcctggcggaaaaagagggggatgtctccttcctgccggtcaatgcctggtatgaccgccagccggacttctcgcgctttgatatttacggcgacgaaaccccggaagatccgcgcaccctcagcagctatcttttctcagatcgcggtatttaccggccgggggaaacctttcatgcaggtcttatcacccgtacctatgactggaaaactccgctgaccggcatcccgctgcgggcggagatccgcgacccgcgtgacactctgatgcattcacagcagattattctggatgccaccggtttcagcgaactgagctacaccacatcggaaaactccccgaccggcgactggaatatctatctctatctggaaggtaaggatgaaaatgacctgcgcctgctcggtaccaccaccgtagtggtgaaagagtttgagccggacagcatgaaagtggcactgaaactgacgccggatcgtcagcagggctgggtgaaaccggatgaattacaggcggcggttgatgtgcagaacctgttcggcaccccggcgcagaaccgccgtatcgcgacaaaaatgaccatgcggccggtttatccgtcattcacgcagtatccggattatcgtttctatgaaaacagccgcagtacggataactttgaaacgcagcttgaagagcgcaccaccgatgaaaacggtgccgcaccgctggcgttaggactggaaaactacgcggaagcgacctatcagctacagctgttcaccgaagcgtttgagccgggcagcggccgttcagtcacggcagcggcacgggtactggtctccccgcatgattcgctggtgggtatcaaagcggacggcgacacggattacatcagtaaggatgcagtgcggaagctgaatctgattgcggtggatccatcactgacccgtattgaaaagagcaacctgaagctggtgcttctggagcagaaatacatttccgtgctgatgcgtcagccatccggggtcttcaaatatcagtccagactgaaagaaacccggattgatgagcaaccgctgactatcagcagtgccggcactgatatcacactgaacacctcgaaaccgggtcactttatcttacaggcggaagatgcggacggtaatgtgctgaacagaaccgattacaccgtcgccggtaacgcgaatatcacccgctcgctggatcgcaatgcggaactgcagctgacgctgaataaagaggaatacaaaccgggcgaagagattgaaattgccgtcaatgcgccgtataccggcagcggcattatcactattgagcgcgacaaagtgtatcagtgggtgtggttccgtgcggacaccaccaactcggtgcagaaaatccgcgtcccggcagaactgaccggcaacggctatgttaacgtgcagtttgtccgtgatattaactccgacgaaatctttatgagcccgctgagcttcggcgtgcagccgttccgcgtcagccatgaggcgtttaacgcggggatcacactgatatcgccggacgtgataaaaccgggtgaaaacctggcggttcatgtgaaaaccacctcgccgcagaatgtggtggtctttgccattgatgagggcatattgcaggtggcgcgttaccgcctgaaagatccgctcgactatttcttccgcaaacgggcgctggaagtgaaaagcacccaaatccttgatctgatcctgccggaattcagcaaaatgatagcgctgaccgcagcaccgggcggggatgccggagagggcatcgatctgcatcttaatccgttcaaacgcaagcgggatgaaccggtggcgtactggtcggggatcaccgccgttgatggcgacacggtctttaattatcaggtgccggattatttcaacggtaagatccgcgtgatggcagtatcggtttcacctgaccgcatcggccacacacagagcagcaccacggtacgggatgattttgtgctgacaccgaatattccggccatggtctccccgggagatgagtttgatgtctccctcggcatcgccaataacctgaccggcctgaacggcgaagcggtgccgctggatgtcaccgtcagcgccgatccggcactggaaatcaccggcagcagccatgagcagatcactctcggtgagaagaaagaaacggtattgtcgttccgcctgaaagccaatgcgctgccgggtacggcggatatcaccttccgtgtcacttccggggataaatcggcggtccgcacgcagaatctgtcagtccgcccggcctcggcttaccgcactcgctcgtctctcggacggatggacggtaaacagcaacgggtgacggcgctgcggcagatgtttgacaactatgccaaacgggatgcgcgggtctcatactcgccgatggtgatgagtgaggcgctgtcgcagtatctggataactatccgtataactgttcggagcagatcaccagccgcgccattccgctgctgttcagtcagcgtaatccggaaatcagcacactgcagtcacagacggagatccgcaaacagctgcaacagaccatgaccacactgctgacacggcagaacggccagggcggtatcggcgaatggcaggcgatgccggaaaccgatccgtttgtcacgctgtatgtggtgcagttcctgctggaagcacaggatgcgggttatccggtacaggaatctctgctcggctccgctaatatttacctgaagaaagtggcggcgaacccgatgctcaatacgcaggatgatctgcggatgcgtgcctttgctgtctacctgctgacccgtcagggtgaagtcaccaccggactgctggctgaagttcagacacagatgcagagcagttatccggagtcctggcaggatgacccgggcgcactgtatctcgcggcatcctacaaaatgctgaagatggataaacaggcggatatgatgctggcgccgacctggaaagccctgaactcggcttacagcaaagcatggtggacacggagctacctcgatccgctggtgcaggacagcacacggctctacctgattgtccgtcacttcccggaaaaagtgtctgctatcccgccgcaactgctggaaaatatggtgctgcgctttaaagaggagcgttacaccacctattcggcagccatgagcattctggcaatggaatactacagccgtcatatgcagcagagcggggcacaggccggtgaactcactatcagcgttctgaaaggcatagaagcgcctgaagtgatttcagtgatgaaaaatgcctccgcgaccggaaaattcagcgacggtgtcagtgaaatccgctttgataatccgtcggataacccggcctggtatgtggtgaccgaatccggttttgaccgcacaccgccacaggctgcggtggcgaaagggctggaaatcagccgtaattacctgaatgaaaaaggtgaagtgataaccagtgcggcgcagggcgaaaaagtctatgtccgtctgcatatccgtgccaatgccagacaggggctgaataatattgtagtggcggatctgctgccgggcgggtttgaggtggtgcgtcaggatccggaagcagcggacagcctgcaactgtcacagctcccgttcagcagcggccgccgctgggtaccggacttcagtgatgcccgtgaggacagagtgcttatctacggcagtgccgcggcggatagtcaggagtttatctatcagataaaaccggtgaatacagggcgctttatcattccgccggcgtttggcgaagccatgtatgaccgggagattcaggcgcagtctgcggcagccggggtatttacggttctgccgcctgccgcagataaaccctga

SEQ ID NO: 274720 - DNA, 1140 bp, Morganella morganii
atgacaaaatctgtatctgcaacactgatttctgccctgctggcgttttccgccccggggttttctgccgctgataatgtcgcagcggtggtggacagcactattaaaccgctgatggcacagcaggatattcccgggatggcggttgccgtatccgtaaagggcaagccctattatttcaactatggttttgccgatgttcaggcaaaacagccggtcactgaaaatacactatttgagctcggatctgtaagtaaaactttcacaggtgtgctgggtgcggtttctgtggcgaaaaaagagacggcgctgaatgatccggcggcaaaatatcagccggagctggctctgccgcagtggaaggggatcacgctgctggatctggccacctataccgcaggcgggctgccgttacaggtaccggatgcggtgaaaagccgtgcggatctgctgaatttctatcagcagtggcagccatcatggaaaccgggcgatatgcgtctgtatgcaaacagcagtatcggcctgtttggtgctctgaccgccaatgcggcggggatgccgtatgagcagttgctgaccgcgcggatcctggcaccgctgggattatctcacacctttattaccgtgccggaaagtgtgcaaagccggtatgcgtacggctataaaaacaaaaaaccggtccgcgtgtcgccgggacagcttgatgcggaatcttacggcgtgaaatccgcctcaaaagatatgctgcgctgggcggaaatgaatatggagccgtcacgggccggtaatgcggatctggaaatggcaatgtatctcgcccagacccgctactataaaaccgccgcgattaaccaggggctgggctgggaaatgtatgactggccgcagcagaaagatatgatcattaacggtgtgaccaacgaggtcgcattgcagccgcatccggtaacagacaaccaggttcagccgtataaccgtgcttcctgggtgcataaaacgggggcaacaactggtttcggcgcctatgtggcctttattccggaaaaacaggtggcgattgtgattctggcgaataaaaactacccgaataccgaaagagtcaaagctgcacaggctattttgagtgcactggaataa

SEQ ID NO: 274721 - DNA, 876 bp, Morganella morganii
atggtcagacgttatctcccccttaacccgctgcgcgcctttgaggccgccgcccgtcatctcagttttacccgtgcggcgattgagctgaatgtcacccacgccgccgtcagccagcaggtcagggctctggaagaacaactcggctgtgtgctgtttacccgcgtctcgcgcgggctggtgctgacccatgaaggcgagggattactgccggtgctcaatgaggcgtttgaccggattgcggatactctggagtgtttttcgcacgggcagttccgtgagcgggtaaaagtcggtgcggtgggaacatttgccgcaggctggctgctgccgcgtctggccggattctatgacagccatccgcatattgatctgcatatctccacccataacaatcatgtggacccggcggcggaagggcatgattatacgatccgtttcggtaacggcgcatggcatgaatcagatgcggaactgattttcagcgcaccgcacgccccgctgtgctcaccggccattgcagaacagttacagcagccggatgatgttcaccgctttaccctgctgcgctcattccgccgggatgaatggagccgctggctggattgtgcgggtggcacaccgccttccccgtcacagccggtaatggtgtttgatacctcactggccatggcagaagcggcactactgggtgccggggtagcgattgcaccggtatgcatgttcagccgcctgttgcagtcaggcgcactggtacagccgtttgccgcagagatcaccctcggcggctactggctgacgcggttacagtcccgtacggaaaccccggccatgcagcaattcgcccgctggctgctgaatacggcggcggagtaa

SEQ ID NO: 274722 - DNA, 321 bp, Morganella morganii
atgagtgcggcggatattatccgcgaacaggctgaacagcacggcattgcgcgggtaacggatgtctggctggaagtcggtgcactggcggatgttgaggagagtgcactgcatttctgttttgatatcgcctgccgtgataccgtggcgcagggctgcacactgcatattgatgttatcccggcacaggcatggtgctgggattgcagccgtgaggccgaaatcatgcagcacgccggatgctgtccgcactgcggcagtgaacggctgcgcatcagtgaaggtgatgatttgcgggtaaaaagcctggaaggtgagtga

SEQ ID NO: 274723 - DNA, 492 bp, Morganella morganii
atgtctgaggatattcagggctttatgcacagcccggcagaacagatccgcaacgcgtttgaaaaagtagcggcggatactatgcacgatctcaccttcctgcacccgtcaatgccggtttatgtcacggaactgacgctgtttgaagggcagtggacgggttgtgtgatcacaccgtggatgttcagcgctgtgatttttccggggccggagcagctctggccgcagcgtaaagtcagtgaaaaaatcggtctgcggttgccgtacggcataatgacattcaccgtcggtgagctggagggcgtatctcagtatctggcgtgttcgctgctgtcgccgctgccgcacacactttccccgcaggagggaatgaggctggcggatgacagtgcgcgtatgctgctttcactgccggtcacggacccggatgctccggcgatggccgggcgcagggcgctgttcaccggaaaaccggtgccccggcatgcatga

SEQ ID NO: 274724 - DNA, 495 bp, Morganella morganii
atgcggattctggtattaggtgtcggcaatattctgctgactgacgaagccatcggcgtgcatatcgcggaagcgctggcggagcgctatatcctgccggattatgtggaagtgatggacggcggcacggcggggatggaactgctcgacagcatggcagggcgggatcatctgattatcactgacgccattgtgacggcgaaaagcgccccgggcactatccgtattctgtgggatgaggaggttccggcgctgttcaccaataaaatctccccgcatcagctggggttatccgatgtcttgtctgcgctgcggtttaccggggaattccccgcgaaactgacgctggtgggcgtggttcctgcctcgctggagccggatatcggtctgaccccgcaactgcaggccgccgttgaaccggcactgcagcaggtgctggcggtactgcgtgaatcaggtgttgaggcggtgaagaaggagacggcagatgtctga

SEQ ID NO: 274725 - DNA, 1704 bp, Morganella morganii
atgagccagagaattacgattgatccggttacccgtatcgaaggacatttacgcattgactgtgaaatcggcgatggtgtggtcaccaaagcctgggcgtcaggtaccatgtggcgcggaatggaaaaaatcgtcaaaggaaaagatccgcgtgatgcgtggatgatcctccagcgcatctgcggcgtctgtaccaccacacacgcgctggcatcggtgcgtgccgtggaaaatgccctgaacctggatgtgccggttaatgcgcagtatatccgcaatatcattctggcggcgcacaccacccatgaccatattgtccacttttatcagctttccgcgctggactgggtggatatcacctccgctctgaaagcggatccggcaaaagcctctgccatgctgaacggcgtttctgactggccgctcaacagcacgcaggaattcgtcagagtgcaggataaaatcaaagcactggtggagagcgggcagttggggatttttgccaactgctactggggacacccggcgatgcagttgacgccggaagtgaacctgattgctgttgcgcactatttacaggcgctggaatgccagcgcgatgccaaccgtattgtggcgctgctgggtggtaaaacgccgcacattcagaacctggcggtcggcggcgtggcaaacccgattaacctcgacggtatcggtgtgctgaacctggaacgcctgatgtatatcaaatcatttatcgacaagctgaatgatttcgttgagcaggtttataaaattgatactgcggtcattgctgcattttacccgcagtggtttgaaaccgggcagggtgcagtgaactacctgagcaccccggaattcccgaccgacggcaaaaacggcagtttcctgttcccgggcggctacattgaaaacgctgacttagcgactttccgcccgatcgattcccagacggatgctttcctgctggaagggattcaggaaagctctccgcactcctggtatcaggatgaagcgccgcagaaaccgtgggaaggcacaaccgagccgaaatacaccggctgggatccggacggtaaatactcgtgggtgaaatcgccgaccctgtacggcaaaaccgtggaagtcggcccgctggccaatatgttctgcaaactggcagcgaaacaccccggtacagccgaaaaactgaatgaaattattgcggtttatcagaccctgaccggcaataccccggaggtaaaacagctgcattccacactcgggcggattatcggccgtacggtgcactgctgtgaattacaggcggtgctgcagaaccagtatgccgcgctgatcgccaatatcggtaccggggatcacatcacctatgtgaaaccggaattcccggccaccggtgtgataaaaggcgtgggtttcctggaagcaccacgcggcatgttatcgcactgggtagtgatcaaagacggcgtgattgagaactatcaggcggtggtgccgtccacctggaactgcggaccgcgcaatcacgataatgtggcggggccgtatgagcagtcgctggtcgggctgaaaattgctgacccggaaaaaccgctggaagtggtgcgcactatccactcattcgacccgtgtatggcatgtgcggttcatattgttgatgttgatggccgtgaaacggtatcagtgaaggtgctgtga

SEQ ID NO: 274726 - DNA, 1182 bp, Morganella morganii
atgagtcatgatcccaaacccctcggcggcaaattattcagtaagccgatcatcattttcgggccgcttgttatcctctgcgttctgcttatcgtcaaacgtctggtcttcgggctggggtcagtctctgatctgaacggcggttatccgtgggggatctggattgcgtttgacctgctgatcggcaccggttttgcctgcggcggctgggcgctggcgtgggcggtgtatgtgttcaacaaaggggaatatcacccgctggtgcgtccggcgctgctggcgagtctgctggggtattcactgggcggattgtctatcaccattgacctcggccgttactggaatatgccgaacttctttattccgggcattttcaacgtcaactccgtcctgttggaaaccgcggtctgtatgacgatttatatcggcgtgatggcactggaactggcaccggcattctgtgagcgcatgggctggaaagtctcccttaagcggctgaacaaaatcatgttctttgtgatagcgctcggcgcgctgttaccggccatgcaccagtcctcgatgggctccctgatgattgcggcgggctataaagtgcatccgttgtggcagagctatgaaatgctgccgctgttctctctgctcaccgcctttattatgggattctccattgtggtatttgaaggctccctggtacagagcggcctgaaaggcaacggtcccgatgaaaaacgcctgttcggcaagctggcactgaccgtcagtgtgctgatggcgctgtttctggtgctgcgcttcggggaactgatctaccgcggcaagctcggactggctttcgcgggagattattactctgtgctgttctggtgcgagattgtgctgatggcgattgcactggcggtcttcagtatcccggcgttccgccgtgactcccggctgctctacattggcgcactgagcatgatgctcggctgtgcggcatggcgtctcgcctattcattgctggcgtttgaccccggcaatggctatcactacttcccggcgacggaagaactgttaatttccattggtttcgtggctgttgagatctgcgcttaccttttcctgatccgcctgttaccgatactccctgcagtcaataaaaccgcagctcacccttatcatgaggcaagtaagtcatga

SEQ ID NO: 274727 - DNA, 984 bp, Morganella morganii
gtgaacaggcgtgactttattaaagtggcttccggcggggcattactgttaggtaatacatccgtgagccacgcggcggcggagaaccgcccgccgatccccggcgcgtccggcatgctgtatgactccactctgtgtgtcggctgccaggcgtgtgtgaccaaatgccaggatatcaatttccccggccgtaacccggaaggggcgcagacgtggtccaacaatgacaagctgtcgccgtacaccaataacattatccaggtgtggacgagcggtaccggcgaacacaaagatcaggaaaaggacggctatgcctacatcaagaagcaatgtatgcattgtgtggatccgaactgtgtctccgtctgcccggtcggtgcgctgaaaaagcatccggttaccggcattgtgcattatgacaaagacatctgcaccggctgccgctactgcatggtcggctgcccgtatgatgtgccgaaatacgattacgacaacccgttcggtatgatccacaagtgcgaactctgtaaccagaagggtgttgaactgctcgataaaggcggtttgccgggctgtgtggaagtgtgtccgaccggggcgattatcttcggcacccgcgaagatctgatgagtgaagcgaaaaaccgtctcgggctgatagccggagaggaatatgcctatccgcgccagacactgaaaaccggcgataactacaaacatcccgtgccttcctattacccgcatctgtacggtgagaaagagggcggcggaacccaggtgatggtactgaccggcgtgccgtataaaaatctgcagcttccggaactggctgaactctccaccggcgcccgctctgaaaacatccagcacacgctgtacaaagggatgatcctgccgctggcggtactggccgggctcactgtgctggtgcgccgcaacagcaaaaatgacactcacgacggaggtgatgatcatgagtcatga

SEQ ID NO: 274728 - DNA, 1134 bp, Morganella morganii
atgatcgaagataatacctttattacttctgatatcacttctgagggtattgaccggcgaagctttctgaaactctgtgcggccttagcggccaccatgggtctcagtgcaaatgcatctgccgaaatcgcggcgtccgtcagccgtaaggattgtccccccgtcatctggatatctgcacaggagtgtaccggttgcactgagtccctgctccgggcgacgcacccgaccatcgaaaatctcatccttgatatgatttcgctggagtaccacgaggtactctcggcggcattcggtcatcaggcggaagccaataagcacaatgcgattgagaaatacaaaggcaaatatgtgctggtggtggacggctctgtaccgctgaaggataacggcatttactgcatgattgccggcgagccgattgccgatcacatccgccgggcagcggagggcgctgccgcaattattgccatcggctcctgtgccgcctggggcggcgtggctgccgccggtgataacccgaccggcgcggcatcactggaagcggttctgccgggcaaaaccgtgattaatattccgggctgcccgcctaacccgcataacttcctggcaacggttgcccacatcatcacttatggcaaagccccggggctggatgacaaaaaccggccgctgtttgcttacggtcgtctgatccacgaacactgcgagcgccgcgctcactttgacgcaggacgttttgccaaagcattcggcgaccacggtcaccgtgaaggctggtgcctctatcacctcggctgcaaaggaccggaaacgcacggcaactgctccacactgcagttctgtgatgtcggcggcgtgtggccggtggctatcggccatccctgctatggctgtaacgaggacggagtgggcttccacaaagggatccaccagctcgccggggtacagaaccagacaccgcgttctgaaaaaccggatgtggaactgaaagagggcggttcggtatcgggcggcgctatcgggctgctcggcggcgtggtggggctggtggccggtgtcagtgtgatggctgtccgtgagctgggccgccagcagaagaaaaaccggtccggcgatccgcggggagagtaa

SEQ ID NO: 274729 - DNA, 1317 bp, Morganella morganii
atgagtcagcaatggacatcccgttttggtcatatcttagccgctgccgggtctgccatcggcatcggtgccatctggaaattctcgtatgttgccgccaataacggcggtggtgccttcctggttgttttcctcttattcagctttgttatcggtctcgcggtattactggctgaaaatatcctcggcagcagcacccgcagtgaagccgtcaacgccttcaaaaaaatgatgggacgccactgggcgtggatcggggtgatcggtgtattcagctcctggtgtatttacagcttctacagcgtggtcggcggctggactatcggttacaccgtaatggccgccgccggtgagctgaacattactgacagcagccagctgaccggcattttcacccgctttatcagtaacccgtggtggccggtgattgcgcatctggtgtttgcggggatgacctgctttgtggtgctggccggggtgcagcgcggattggaaaaatccgtgaaagtgatgatgccgttactgtttattattatgatcgtgctgattatcgtcgggataagtttacccggctcatccgccggactgaaattgttcctgtatccggatttcagcaaactgaccggcaaaggcgtgctggatgcgctggggctggctttcttctctctctcaatcgggctggggatccacattacatacagcgcgtatttgtctgataacaaaagcattgccaattccagtatgtgggtggtgatcctctcgtgcatggtgtgtgtgctggccggactgatgattttccctgcattagcggctgccggtctggaagcgaatgccggtccgggtctgacctttatgaccatgccggtgtactttgcccatctgccgggcggatctgtgctggcagtgacgttctttgtcctgttgctgatggcagcgctgacatccgctatctcactgctggaacacattgtggcgtatgttcagatgcgttttcagtggacacgccgcagagcgggcctggtggtgacggcgtcgattatgctgatggggatcccggtgtcattatctttcgggccgttaagtgatgtgacgctcggcgggaaaacgatttttgatatcctcgattacctgacatccaatattctgatgccgctgttcggtattgctgtctgcctgattttcggctggtcgcgtaaagcgaatgcgctgattccggaaaatatcaccggactgaaacgtcagagtttattgctggtctggcgttatgtgggaccgatctgtatcggtgtgattctggtacacggcctgatcagttaa

SEQ ID NO: 274730 - DNA, 1710 bp, Morganella morganii
gtgaatcagtcagaacttatcacgctcgcctccgcgaatgcgttaaataaagatttcgaagttaaataccaaaacgtcatcagtgatttcttcagccgggatcccggcaaatggccgatttttaatcacccgcaaattcaggcaattactcggttccgccagaccaccgacgcggatgtgcagcagatcaaccgctatccgcagggtaaggatctttttgctcagctggccggtgagtcgcatgtccgtcagaacgtgatccgtccgggagaagggcaggatgatttactggtgtttgcgtccgcgctgtgcaaaaactgggaaaacccgctggccgtggaaaacgttatcgccatgccgtcagacccggcagtttacggctctatgctgggcttactgggtaacccgaacatggtgtactgtgaatactcgggtgtggcggataacatggaaaaaaccgttatccgtaaagtggccaatctgattggctatgatgcggacaaagcatccggtctgttcacccagggcggaaccatgtgtaacctgtatggttatctgttcgggatccgtaaatcgctgaagcagtcaaaacatctcggaatgtcggtcgatcaggatttccggatcatcaactctcagggcggtcactactccaatatgactaacctgtccctgttaggtgtggatatcacaaacaaaacaatccgtatccgggtggcgtcagataacactattgacctggcggatctggagcagcaaatccgtgcctgctataccgttcactgtaagatcccggtgatcctgctgaccgcagggacaacggatacctttggtgtcgatgaaatcaaacaggtttatgatctgcgcaaccgtctgtgtgaagaatttgaaattacagaaaaaccgcatattcacgtggatgcggcggttggctggccgattattttctttattgattatgattttaacaccaacccgctggcgattaacgatgccaccctgactggtctgcgtcacaatgttgagaaatttaaacagctgaaatacgcggattccatcactatcgatttccacaaatggggttatgtgccgtatacctccagcctggtgatggtgcgtgacggtgatgatttcaaagcactggaaaatgacccggaaaacttcacttattttgagcatgcgctggaaggacagactcacctgcaatccaccattgaatgcagccgcagcggtgtcggtgtgttcggcgcgtatgccggattgcattacctgggagttgagggttatcagaccatcattgcgcactgtctgcaaaatgcgaactacatgcgcaaccagctgttatctatgggtaatgcctgtgtgatggtgccggaaaatcaggggccgagtgtcggtttccgcctctattcaccgaaactggtgaatgatccgcaggcaatgtttgcgcacgaactgacctgtgccggagataaaacggcctatgacatgatggtgcgcaacagccgctggcaccgtgagctgttcctgaaacgcggtaaagcaggactgtttaccaactgggtggattctatcgcctgctcggcctatgcggagcataaccggttcgtgtatattccgggggaaaaggcggtctttatgaacccggtgacgcagcgtcatcacatcgatgcgtttgcaaaaatgcttaaaaccatgagtgcagaataa

SEQ ID NO: 274731 - DNA, 951 bp, Morganella morganii
atgtccggcctcctgctgttcaaacaactactcaccaaagaatgctgtcccggtatgcactgggactccgcccgtaaccgcttaaaattcgcggcccgcagcctgtttatgccgctgtctaccatgaaatacctgtccggcctgacaaacactgcctgctgtgatgctattctgaaaaagcagccgctgctgccgaccaaattacagcgcccgtatctgagcattaattttcaccgcaaaaacaaatcagcggctatctgcgaccattaccggatcaccaaagccgttctgccaccggctgtattcagccgtatctacagcaatgagcagttttatctctgcccggttgaaggaaaagagagcccctgtcacctctggctggatgtgcaggatgcatttaacaaagagggcgagctgacgctggaaatgcgggatgatgccggtgagatcctggcccgcagtgcattcaccctgctgaacctgaatgaaaaacggtcactgtttatcggcgcgctccagggcggcgtcagtgagcaggctcacaatgctatccgggcggcaactaaaaactgccacggtgtattccctaaacgcattctgacggaagttatctgccttatcgcctcactgtttcagtgtcagcagattattgccaccagtaatgagacccatatttaccgcagccgccgttaccgccataaaaaactgacacaatgggtggccgattataattcgttctgggaatctgtcggtggcaccgccaatccgcagcacgaatatgtaataccgctgaccctgccgcgtaaacccattgatgaaatagccagtaaaaaacgcgccgaataccgccgccgttatcagttactggataatgtggcgcaggccgtctgtgaacgcctgcaactgccgcagccggaaaataaaacagatgttcaacataacattatttaa

SEQ ID NO: 274732 - DNA, 681 bp, Morganella morganii
atggaaacaatgcagcaactttttttcgccctctggcatcaggactatgaaaccctgtcaaacccgtccctgctgtgggcgatttacattatgctgtttgccattctcttcctggaaaacggcctgcttcccgctgcgtttttacccggtgacagcctgctgattcttgtcggggttctgatcgccaaagatacactcgatttcccgacaaccctgattgtcctcaccgccggtgccagtctcggctgctgggtgggctatttacaggggcgctggctcagtaataccaaaattgtgaaaggctggttgtctcatctgccgccgcattaccatcagcgggcgcacagtttattccaccgtcacggtctggcggcgctgttagtcggccgtttcctggcgtttgtccgcaccctgctgccgatgctggcggggatcgccggtctgaattcacgccgttttcagttcttcaactggctgagcggcttcctgtgggtcggtattttaacgtctctcggttacggcctcggtatcagcccgattttccgcaaatatgagcatcatctgatgaatattctgatgctgatcccggtggtactgctggtttttggtttactcgccagcctgtgggtggtgtggaagcgcaagcgggcaaaatcgtctgacgacactcacgcacaataa

SEQ ID NO: 274733 - DNA, 303 bp, Morganella morganii
atgtcacatcatacaaatgaagagttacgcgctgaactgaaatcattggctgacaccctggaatctgtgctgaatacggcagaaagtaagtccaaagaagaagtggattcgctgaagaaaaaagcacaggccgcgctggaaaattcccgtacccgcctcgcggaagggaaagagcaggttgtgcagcagacaaaagagatcgcaggcaaagccgataattatgtccgcgaaaatccgtggaccggtgtaggtatcggtgccgctgtcggtgtggtgttaggtgttttactggcccgccgctga

SEQ ID NO: 274734 - DNA, 414 bp, Morganella morganii
atgaccgatcaggagcgtccgcaggggcccggcaaagggctccttgatacactgacacgtatcaccgccatcgtcatcagcatggcagaaacccggctcaggcttgtcgccactgagctggaggaagagaaatccaacctgatccagctgattctgctggccggtgccgctctgctgctgacggcgttcggactgatgagcctgatgattctggtcatgtgggcggttgatcctgtataccgcctgaccgcaatgattatcatgacatccgttctgctcgtcggggcactgattttcgccctgtgggccgtccgcaaagcccgccattcatccctgctgggcgcaacccgcgaacagctggcgatcgacaggcaactgctggaaagaaaaaagcaggagcaggagcatgaataa

SEQ ID NO: 274735 - DNA, 303 bp, Morganella morganii
atgaataagcatcagcgtgctgaacgtgcccgcaaaaagcaggcgctgattgacactatcgctgcccagcgcagcgatttgtcacaggccacgggtcagtggctgaaaaaaaccgaatcattcgaccgcacctggcaaacattgtcacaactgcgtccgctggttgtcgccggtgtcagcctgttttccgtctttgctgtccgccatccgaaaaaacttatccgctggggacaacgcgccctgggactgtggggtgttttccgcacacttcagagcagtttcccccgtaacaggcagaactga

SEQ ID NO: 274736 - DNA, 387 bp, Morganella morganii
atgaacaactacgctattttagtcgcacgtatcatgatgcctgtcttatttattgtggccggatacggcaaattaggggatgcttatgcaggaactcagcaatatatgcaggcaatgggtgttccgggagcattgctgccgttaaccattctgcttgaactgggcggcgggctggctatcctgtttggtttcttaacccgcacaaccgcgattttcacctttggttttactgtgctgaccgccctgctgttccacagtaattttgcagaaggtgccaaccagttaatgtttatgaaaaactttaccattgcaggcggttatttactgctggctgttaccggcccgggtaaattcagtatcgattatttactgaaaaagaaatggtaa

SEQ ID NO: 274737 - DNA, 765 bp, Morganella morganii
gtggatctgaaacggtttatgtcagatgtcagtttcgcatttgaacacgattttatcgaaaaagtgatttacattaatctggaatcccggccggatcgcaaagacgatattctggaagcactgggaaatattgaaatcccttatcagaaaattatccgctttaatgcggttgagaaaacaccgggatttctgggatgtgcgctttctcatgctgctgtgatgaaaatgatcatgaaaaatggctggggacctgtattggttgttgaggatgataataatttttatcatgatgatgagcatatccggcaggcgaatgtgtttttatcttctttgcaggaaaaggactgggatgttgcgttactgggcgggaattactatttcgtttatgaccatcagccggaaatatattctctcagtcttaaattttcatattgtacaaatgcctatattgtgaaccggggttatgccgaaacgctgtatcatgcttttaatgactcagttcgtcagattacagccggtgatgagccggatgaatcaaagagtattgatgttgtctggaacatattaatggaaaaagataactggtttggtctgtatccctgcattgcctatcaggcgagagggttttcggatattcgcggggtatcgctgaattatgaatatctgttcaataaaccattatccgatctgacattttttacccgtgacggcaaagtgaaagaggcggaaacagaaacatccgccggagcggatgtttcacaatag

SEQ ID NO: 274738 - DNA, 897 bp, Morganella morganii
atgagtaaagacaaagcgttaacgctggaatcattgcgcgtgatggatgccatcgaccgccggggaagttttgcggcggcggcggaagaactggggcgtgtaccgtccgccctgagctataccatgcagaaactggaagaagagctggatgttgttctgtttgaccgctcgggtcaccggacaaaattcactaatgtcgggcggatgctgctggagcgcggccgcctgctgctggaagcggcggataaactgaccagtgatgcggaagcactggcaagaggctgggagccgcatctgaccatcgtctgtgaggcgctgatcccgacggcctcgctgttcccgctggtggacaaactggcacagaaatccaccactcagctgacactggccaccgaagtgcttgccggtgcctgggagcggctggaaaccgggcgtgccgatatcgtgattgcgccggatatgcatttccgcacctcttctgaaatcaactcccgcccgctctattctgtggtgaatgtgtatgtggcggcaccggatcacccgatccacaaagagccggagccgttatccgataccacccgggtgaaataccggggaattgccgtggcggataccgcccgcgaacgtccggtgctgacggtgttactgctggacaaacaacagcgcctgacggtcagttctattgatgataaacgtcgtgctctgcttgccggactgggggtggcgagtatgccgtacccgctggtggaaaaagatattcaggaaggccgcctgaaagtgatcggctccgaatacagccatgaaaccaatgtgattatggcatggcgccgcgacagcatgggtgaggccaaagcctggtgtctgcgggaaattccgaaattattcagcggaaaataa

SEQ ID NO: 274739 - DNA, 699 bp, Morganella morganii
atgattatacacagaaccgccggacaggccgggtccgccgactatggctggttacaggcgaaatatgctttctctttcggacactattttgaccccggatttatggggtacggcccgctgaaagcactgaatcaggaggtactggctcccggtgccggtttccagcccaaatcctatcccgatgtggatattgtaaacctgatcctcagagggaagcacgatattcgtgataatgacggactctatctggagagcagacaggatgagtgtctgtttttctcaccgcgcagggatgtcagttacactgaaaccaatccctgtgaggaatcaccgctgacccggattcagatctggctgaaagctgcacgcggcagcctgcgcggcagttcacaaaaactgatgctgacacagcagccggtacagctgattgcctcgccggatggtgaagacggcagtcttgatttacagcagggggtgcggatttcccatatcctgctctctgccggtgagtccctgacactgccgctgtacggcaaacgggcattctatcagtcggttcacggtacagtgacggcggatgacgggcagaaacaggggataattgaatgcggcgacggcgcgtttattcaggacagccgggaagtgacctttcaggcgaaaacgccctgccgggcactgcttattgatattcttgcctga

SEQ ID NO: 274740 - DNA, 873 bp, Morganella morganii
atgaatcaacctaatcaagccgtggttgcggcagcgacactttatgttgtgccgacaccgatcggtaatctgaatgacatcacggcacgtgctcttgaggtgctcacgaatgtcgatctgattgcagcggaagatacccggcataccggcttattactttcgcacttcggtattaataaccggttgtttgcgctgcatgatcataatgaacagtataaagcagatcaattaattaccaaattacagtccgggatcagtatcgcattagtgtccgatgcaggtacacctttaattaacgatcccggttaccatctggtccgccgcgcccgtgatgcggggcttactgtgatcccgctgcccggtgcctgtgcggctgtcaccgcgctgagtgctgccggtctgccctctgatcgtttttgttacgagggatttctgccggccaaaaccaaaagccggcaggacacactgcgggcgctggccgatgagccgcgcacgctgattttttatgaatccacccaccgcattctggatacactggccgatatggtcaccgtctggggggaagaccgttatgtggtgctggcgcgggagctgaccaaaacctgggaatccattcaggggaaaccggtcggggaactgctggcctggattaaggaagacgaaaaccgccgcaaaggggagatggtactgattgcggaaggtgcgaagccggtgcaggatgaggaattcagcccggaaattctgcgtgcgctggcgattgtgcagaaagaactgccgccgaaaaaagcggctgcggtggtggcggaactgtacggtgtgaagaaaaatgccctttaccgttataccctggacggggattctgccgccgagtga

SEQ ID NO: 274741 - DNA, 1755 bp, Morganella morganii
atgttttccttaactttatcgcgttaccgcaggcaattactttgtaccgcactcttttccacgctggttctctcaggctgtacacttgagaaccggcatgcgggcacagccggcaaaggccagccggaaacacaggttcagcaatatcagaagattattgatgctgcggccggaaagccgtccgttgacgcaatccgtgcttatatcgctcaggagccgctgctcactgatccggatgcacatcagcagaatattgatgaaacctggctgatgctaacacgttttacccctgaagagcgcaataacattcaggttaacgctgatgaaagtgtcttacagggctgggttgatctgcttattctgtatcagaacaaccagcaggatctgaaagcgctttccgccgcactgggtgactggcaaatccgttacccggataacccggccgccaaatccctgccgcaggatcttatccagaccctgagcagcacctacggccagaccggtaaaaatgcccgcgttgccctgttcctgccgctgagcggccaggcgaaactgatgggtgatgctatccgtcagggctttactgatgcacaaaacggcgcggtatacagtaccggttaccgggttactgatgttccggccacacagccggtcagcgccgttccggcacagaccaccctcagcccggcggatcctgataaagatatcaccacaccggatgtgacaaacggcgcaccgtcaaatgacagcaccgcagacggcgcaaccgccgccagtccggtatcagccccgcaggcactaccgtacagcggcgagtcccgcactgtcactgacgtgaaaatctatgataccgacagcaaaccgctggcaactctgctggcgcaggcacaggctgacggcatggatctgattgtcggaccgctgctcaaaggggatgtcgccacactggcaaccgcaaacaccccgctgaacattctggcgctcaatgaattagatacaccaatcgcccgtccgaatgtctgctacttttcactttcaccggaagatgaagcccgcaacgccgcacagtttatccgtcaggataataaaactgctcctctggtactgacaccggataacagcttcggccgccggatcgcacaaagctttgccgatgagtggcagaaaaatggtggtggtgtggtactgcatcagaccttctccggcaatccggacagttcgctttcactgaccggcgtaccggtgcagccatcctcatcagcggcagcacagccggatggctcagttgtacagccgcagcctgtcagcggcggtgtggactcggtctatattatcgccacttctgatcagctgatttacatcaaaccggcgctggaatttgccaccagtgcgcgcggtggcccggcgttttatgccagctcccgcagcaataaagccggaaccggcaaagattttcagtttgagatggaagggctgaaactgacggatatcccgctgattgcgggcggtaatccgcagttactgagtcaggcagccgggaaattcggcaacgactatacccgtgtccgcctctatgcgatgggcatggatgcatggcgtctggcgaatcagttcggtgatatgcagcgtcatactctgcgcatgaatggcgccagcggagacattactgtcactgataactgcaccgtttaccgtcacctgccgtggctggagtttaagcagggtaatcttgccccgctgggtgccgcaaactag

SEQ ID NO: 274742 - DNA, 363 bp, Morganella morganii
atgcttacatggctgacaggccgtcgtcatgaacaatttgcccggcgctggctggaacagcagggactgacatttgttgcgcagaatgtccgtttccgccggggcgaaattgatttaattatgcgggacagcggcacctgggtgtttaccgaggttcgctatcgccgcaatgcacactatggcggagcggctgccagtgtcacaaaaaccaaacagcgccgcttactttatgcggcttcctgctggttatctcagcaacagctgagtatgctgacctgtgactgccgttttgacatttgcgccataaccggtgaccatatcgactggctgaaaaatgcctttggtcacgccgacttttgttaa

SEQ ID NO: 274743 - DNA, 591 bp, Morganella morganii
gtgttagacagaattaaacagtgttttactgaaagtattcagacgcagattgcagccgcagaagccctgccggatgccatttcccgggcggccatgatgatggttcagtcgctgctcaacggcaataaaatcctctgctgcggtaacggcgggtcggcggcgacagcttcgcgcttcgccaccagtatgatccaccggtttgaaaccgaacgcccgagcctgcccgcactggcactgaatacggataatgtggtgatgaccgcaatcgccgccaaccggcagcaggatgaaatttatgccaagcaggtccgcgccatcggccagaccggtgatgtgctgctggcgatatccacacacggcaacagccgcaatattatcaaagcggttgaagctgcggtgacccgtgatatgaccattgtggccctgaccggctacgacggcggggagctggctggtctgctgggtccgcgtgatgcggaaatccgcgtaccctcacagcacagtgtccgcatccaggaagtgcatatgctgacggtgaattgtttatgtgatttaatcgacaatacccttttcccccaccaggaagactaa

SEQ ID NO: 274744 - DNA, 573 bp, Morganella morganii
atgagaattgtgcccgtggcagcactaatctgcagcgcgttactgttacagggatgtatcggcgcagcacttgtcggatctgcggcagttgcgaccaaagccgcatcagacccccgttctgtcggcacacaggtcgatgacggcacactggaagcccgtgtcagcggccagctcaataaagataaagatatcaaacagcagcggattattccggtggcttatcaggggaaagtcctgctgattggtcaggcggaagatctctctctggcgcggcgggcaaaagagattgccgccaaagtggacggtaccgaactggtgtataacgaagtccgccagggaacaccgattgatttggggactgcctccaaagacgcctggattacgacaaaagtccgttccaagctgctgaccagtgatgcggtaaaatccgcgaatatcaaggtaatcactgaaaacggtgagattttcctgctaggggtggttacccgtcaggaaggggctgccgcggcgaaagtagccagtgaaacggatggcgcgaaaaaagtcaccaccgcctttacctggctgaattaa

SEQ ID NO: 274745 - DNA, 711 bp, Morganella morganii
atggggaggatattgcggtttctgcgaaaaatagttgtttttgttatgttgttatgggtaacaatgataattttgttcgcgttcctccctgtcccttactctatggtgatgctggaaaggcagctttcggcatggtcaacattcaatttttcttatgtcgctcacagtacatgggcgggtgaagacgctatttccccgcagatgaagctggcggtgattgcgtctgaggatcagaatttcccgcaccaccacggttttgacttcggtgctatctccgacgcactgtcaaaaagcggtaagaaaggctgggcggcacgcggtgcatccacactgagccagcagacggtcaagaacctgtttctgtgggatggccgcagctgggtacgaaaagggctggaaacgctgctgacgcccggtattgagctggtctggtcaaagtcacggatcctgacggtgtatctcaatatcgcggagttcgggccgggaattttcggtgccgaagcagcggcgcagcactttttcggcaaaagcgcgaaaaatctgacggcggccgaggctgcattactggccgccgtgctgccgaatccccaccgcttgcatgcggataaaccttccgcgtatctccgccagcgtcagcaatggatattgcatcagatgcagttgctgggcggaacaacgttcctgaagaaaaataatctggctgataattag

SEQ ID NO: 274746 - DNA, 651 bp, Morganella morganii
atgaaatctgttggtatcgttttaagcggatgcggtgttttcgacggcagtgaaatccatgaatccgttctttcgctgctcagtttaacccaatccggcgcacaggtgtatttttttgcaccggatgaacctcaacgcactgttatcaatcacctttccggtgaggaaaaatcagaaaaacgcaatatgctggaagagtctgcacggatttcccgcggagaaatccgtccgctggctgaagcggatgcgtcacagctggatgcactgattgttccgggcggtttcggcgctgcaaaaaatctgtgcgattttgccgtaaaaggtgctgactgcgaaatagataaatattttttattattaactcgtgaaatgttatctcagggcaaaccgatgggatttatgtgtattgcaccggtgatgatcccgaaaatcgttaattcatcagtacaacttaccattggcaatgattctgatattgcggcggcgatcgcggaaatgggcggcgtacatgtcaattgtacggtggataatatcgtcgtagatgaaacccataaaatcgtgacaaccccagcctatatgctggctgagaatatcgcgcaggcacagatcgggattgataaactcgtgaagaaagtgctcggaatggcctga

SEQ ID NO: 274747 - DNA, 2334 bp, Morganella morganii
atgaaattgctacgcggtttagcacaatattatgttgatttactgatgaaactgggcctggtccggttttcgttattgctggcatcgggactggtggtgctggcgatggtggtgcagattgctgtcaccatgctgctccagggggaagtgcagagcattgacctggtgcgctctgtcttcttcggcctgctgatcacgccttgggcggtctattttatgtctgtggtggttgaacagctggaggaatcccgccagcgcctgtccagactggtcagtaaactggaagtgatgcgcaagcgggatctcgaactcaacgaacagctgaaagagaacattacccaacttaatcaggagattaccgagcgcgaaaaagttgaggatgaacaggttgttctgctggataaactgaagaaagagatcagccgccgcgaacagacccagctcgagtttgaacagcaatctgtcctgctgcgctctttccttgatgcctcgccggacctggtctattaccgcaatgagaaaaatgagttttccggctgtaaccgcgcgatggaactgcttaccggccgcagtgaaaaactgctgcgcggcctgaccccgcgcgatatttatgaaccggaaatcgctgataaagtgatggaaacggatgaaaaagtattccgtcataatgtctcgctcacctatgagcagtggctggtgtatccggacgggcgcaaagcctgctttgagctgcgcaaagtgccgttctatgacagtgtcggcaaacgccacggcctgatgggctttggtcgtgatatcaccgagcgcaagcgttatcaggaagcgattgaaaacgccagccgtgagaaaaccacctttatctccaccatcagtcacgaactgcgtacgccgctgaacgggattgtcgggctgagccgcattctgctggatacggatctcaatccggaacaggaaaattacctgaaaactattcatgtcagcgccgtcaccctcggcaatatcttcaatgacgtgattgagatggacaaactggagcggcgcaacgtccgcctcgatacccagccggtcaatttcaccgaatttatttctgatctggaaaatctgtccggcctgctggtgcagccgaaagggctgcagttcaccctcgacctgatccagccggtaccgtctgtgatcatggcggacggtacccgtctgcgccagatcctgtggaatcttatcggcaacggcgtgaaattcacccgcgaaggcggtatcacggtgaaagtgtggcgtgaagccaatgatatgctctgctttgaggtgcgggattccggtatcggcattccgaaggatgagctggaaaaaatcttcgccatgtattaccaggtaacggacagcgcgggcgggcgccctgccaccggtaccggtatcggcctggcggtctcccgccgtctggcacaggcaatgggcggtgatatcaccgtgaccagtgagccgggcaaaggctcctgcttcacgctgtcggtctgcgcaccggcccgggaggcgccggaggaggaggaagatgacggcctgctgctgccggccctgaatatcctgctggtggaggatatcgagctgaatgtggtggtggcgcgctctgtcctggaaaaactgggtaacacggtggatgtcgcgatgaacggccgtgacgcgctggcgatgttctcgccggaggagtacgaccttgtgctgctggatattcagttgccggatatgagcgggctggatatcgcccgtgagctgcatcagcgttatcaggcggatgatttaccgccgctggtggcactgaccgccaatgtgctgaaggataaaaaagagtatctggatgccggtatggatgaagtactgagcaaacctctcgctgtgggcgctctgacgcagatgatagcgaaattctggggagacggcagtgaggcactgcctgcggaggaaagcggctcagcggcgtctgaggacgtgtatgcgcagtcactggatctcgggatgctgaatcagtacatcgaactggtggggccgaaactgattgaagacagcctggatgtgtttgaaaaaatgatgccgggttacctggcgatcctcaattccaacatggtggcgaaagaccgcaaaggcattgcggaagagggacacaaaatcaaaggcgccgccgggtcagtcgggcttatccatctgcggcaggttgcgcagcagattcagtcaccggaattaccggcatgggatgataacgtgcaggagtgggtcgatgaactgaatcacgattgggaaagtcaggtggggattttaagaaactggctggcaaatcgcaggtaa

SEQ ID NO: 274748 - DNA, 4458 bp, Morganella morganii
atgctttataacccgtcacaggataaggacaactgcggtttcggcctgattgcccacctcgaaggacaacccagccacaaagtcgtgcgtaccgccatcagcgggctggcgcggatgcagcaccgcggtgcgatcctcgccgacggcaaaaccggggacggctgcggtttgttattacaaaaacccgatcgtttctttcagatgattgctgcggagaatgaatggcggctggcgcgtaattatgcagtcgggatgctgtttctcagtcaggacccggtcattgcacaaaactgccgcgatattatcgaagaagagctggcagacgaaacactgtttatcgcaggctggcgtaaagtgccggtcagaccggagatcctcggcgaaatcgccctcgccggtatgccgcagattgagcaggtttttatcaatgcccctgccggctggcgggcacgggatctggaacgccgcctgtttatggcgcgccgccggattgaaaagcgcatcagcgacccggatttttatgtctgcagcctgtccaatctggtgacgatttataaaggtctgtgtatggccgccgatctgccgcatttttatccggatctggccgatttaagaatggaatccgctatctgtctgtttcatcaacgcttttcaaccaatactgttccgcgctggccgctggcacagcccttccgttatctcgcccataacggcgaaatcaacactatcaccggtaaccgcgaatgggcacgtgcccgtgcttacaaattccgcacgccgctgatcccggatctcatcaccgccgccccgtttgttaatgaaaccggttcggattccagctcactggataatatgctggaactgtttcttaacggcggaatggatctggtgcgtgccatgcggctgctggtaccgcctgcctggcagaatcacccggatatggatgatgatctgcgcgccttttttgattttaactccatgcatatggagccgtgggacggcccggcggggattgttatctctgacggacgctatgccgcctgtaacctcgaccgcaacgggctgcgccctgcccgctatgttattaccacagacaaactgattacctgtgcctctgagatcggtatctgggattatcagccggatgaagtcacggaaaaaggccgtgtcgggccgggggaactactggtgattgatacacaggaaggccgcattctgcatacccgcgagaccgataacgatctcaaaacccgtcatccgtacaaggcgtggctggagaaaaatgttgtgcggctcacgccgtatcaggatctgatgaataaaacgccgccgcagcgcgccctcggtgatgcacagctggcggtgtatcagaagcagttcggttataccctggaagagctggagcaggttctgcgggtgctgggggaaaacggccaggaagccgtgggttcaatgggggatgatactccgtttgcggtactctctgcccgcccgcgtctgatttatgactatttccgccagcagtttgcccaggtaaccaacccgccggtcgatccgctgcgggaagcccatgttatgtcgctcgccaccagcatcggccgggagatgaatgtcttctgcgaagcggaaggccaggcacaccggctgagcatggcctcaccggtactgatgcacacagattttgaacaattgctgagccgtgatccggattattaccgcgcggaacatctttcactctgttttgatccgcgggaaaccacactggaacaggcgatccgcaccctgtgtgataatgcggaagccgctgtccgcgccggtgctgtactggtggtactgagtgaccggcagatttcaccggacaccctgccgatcccggcaccgatggcggtaggtgcggtacagcaacgactggtcagccagaacctgcgctgtgacgccaatatcatcgccgaaaccgccggtgcccgtgacccgcaccattttgccgtgctgctcgggttcggcgctaccgccatctatccttatctcgcctgtgaatccctgctgaaactgtgcagcgataacgtcctcacgcactcaccggctcaggtattgctcaactaccgcaacggcatcaacaaaggactgtataaaatcatgtccaaaatggggatctctgccgtctcctcataccgctgtgccaaactgtttgaagcggtcggcctgagtgattctgtggcagaactctgtttccggggtgtgccgaaccggatcggcggcgcggatttcagtgatttccagcaggatctgcataacctgtcccgcctcgcctggctgccgcgcaaaccgctcgatgcaggcggtctgctgaaatacattcataacagtgaatatcacgcctataacccggatgtgatcgccacattgcaaaaagccgttcacagcggaaattatgcggattatcagcactatgctgcccaggtaaacggccgtccggcagccatgctgcgtgatttactggcactgcgcaccgatacacaacccatcagtattgatgaaactgaatcagctgaatccctgttttcccgctttgataccgcagccatgtctatcggcgccctcagcccggaagctcatgaggcactggctgtcgccatgaaccggctcggcggcagctctaactccggcgaaggcggtgaggacccggcgcggtttggtacagaaaaaaactccaaaatcaaacaggtggcctccggtcgctttggtgtgactccgggatatctgcgcagcgcgcgggttattcagattaaagtggcacagggcgcgaaaccgggtgagggtggtcagcttcccggtgataaagtcacgccgtatatcgcctcgctgcgctattctgtgcccggcgtcaccctgatttccccgccgccgcaccatgatatttactctatcgaagacctggctcagctgattttcgatctcaagcaagtcaacccggaagcgctgatttccgtcaaactggtctcggagccgggcgtcggtaccattgccaccggtgtggctaaagcctatgctgatttcatcaccatttcggggtatgacggcggcaccggcgccagtccgctcacctctgtcaaatacgcgggtaccccgtgggagctggggctggcagaagcccagcaggcactggtgagcaacggtctgcgccataaaatccgcttacagacagacggcggactgaaaaccgggctggatatcataaaagccgccattctcggcgcggaaagctttggtttcggtaccggcccgatggttgcgctcggctgcaaatatctgcgcatctgccacctgaataactgtgccaccggcgtggcaacccaggatgaaacgctgcgccgcgatcactatcacggcctgccggagcgggtaatgaactatttccgctttattgcacaggaaacccgtgagctgatggcacaactgggtgtgagaaaactgaccgaccttatcggccgtactgatttgctggtcagaattgaaggcaccacagcccggcagcagaaactggatctgtccgatttactggtctctccggtaccgcatgaaggtgccgcactgttctgctctcaaactaacccgccgtttgataagggggaactgaaccgccgcatcctggaagatacccggacctgtgtgcagacacagcaatcccgtgccttttattatgatatccgcaataccgaccgctcggtgggcgctgcgctctccggctttgtggcggagctgtacggcaacagcgggatcgccgcttcgccgctgaaactgcattttaccggcaccgccgggcagagttttggtgtctggaatgccgcaggtattgaactgacactcacgggcgatgccaacgactatgtcggtaaaggcatggcgggcgggcagattgttctgcatccgcatcccggctctgcctttgccgctcacgacaccacaattgccggaaatacctgtctgtatggtgccaccggcggcaaactctacgccgcaggccgtgccggagagcgctttgctgtccgtaactccggcgcactggcggtggtcgagggcgtcggtgataacggctgtgaatatatgaccggcgggattgtctgtgtgctcggcaaaaccgggattaacttcgcggccgggatgaccggcggattcgcttatctctatgatgaggacggcaccgccgccgggcgtgttaatccggaaatggcggaaacccgcgatatcagcgggctgccggttctgcaggaacatttgcgcggcatgctggaagaccaccgccgcctgaccggctccgccagagcagacgcacttctcagagattggacagaacaggccgggcggtttatcctcgtcaagccgaaatctgcggatattcatgcacttgccggggtaacccgccatgcagacactgaattacggatccgggcacagtaa

SEQ ID NO: 274749 - DNA, 1419 bp, Morganella morganii
atgagccgcaatgtttatcagtttattgaattacagcgtacggatccgcaaaagctcccgctggcgctccgtaaaaccgaatttatcgagatttatgagtcgttttcgccgccgcaggtgaaagagcaggcgacccgctgcctcggctgcggtaatccgtattgtgaatggaaatgcccggtacataactatattcccaactggctgcggctggcggaggaaggccggattattgaggccgcagagctgtcacaccagaccaacagcctgccggaagtgtgcggcagggtgtgtccgcaggatcggttgtgcgaaggtgcctgcaccctgcatgacgagttcggcgcggtcaccatcggcaatattgaacgttatatcaccgataaagcctttgagatgggctggaaaccggatctctccgctgtccgtccgaccggaagaaaggtcgcggtaattggcgccggtcctgccgggctggcctgtgccgatgtgctgatccgcaacggcgtaacccccgtagtatttgataagcacccggaaatcggcgggcttctcaccttcggaattccgtcgtttaagctggaaaaatccattatgaagcgccgccgtgagttgttcacagagatgggcgtggagtttcagcttaataccgagatcggaaaagagatcacgctcagtgagttacagcagaactatgatgccgtctttatcggcgcgggcacctatcagccgatgagcggcgggctgaaaaatgaagatgctgccggggtatacagcgccctgccgtatctgatcggcaatacccgtcaggtgatggggctgccggatgatgattccgctccgtttattgacctgaagaataaacgcgtcgtggtactcggcggcggagatacggcaatggactgtctgcggaccgccatccgccagggggcttcggaagtgacctgcgtataccgccgcgacgaggagaatatgccgggttcgcgccgtgaggtgaaaaatgccaaagaagaaggggttaatttccgttttaactgtcagccatccgccattgaaaccgatgcaacgggtaacgcctgtggtgtccgcgtattaaccacccggttgggtgatgcggacagcagcggccgccgtcagattgaaacggatgataattccgcttttattattgatgccgatgcggtcattattgctttcggtttccggccgcacgcgatgccgtggctggacgctctcagtgtcacacgggatcagcagggcaggatcagcgccccggcacaggcaacttatccgtttgaaacctctgtcagcggtattttcgccggcggggatgtggtacgcggctcggatctggtggttaccgccattgccgaaggccgccgggcggcagaaagtattctcgattatctgcacgtatga

SEQ ID NO: 274750 - DNA, 489 bp, Morganella morganii
atggatattcaggaattaacaccgcgccgcccttatctgctgcgggcgcactatgaatggttactggataacgaactgacaccccatctggtggtggatgtgaacacccccggtgtgaatgtgccgatggagtatgctcaggatggtcagattgtcctgaatattgcaccgcgcgctgtgggtaatctggaaatgaccaacgagtgggtcggttttaatgctcgtttcggcggtgttccgcgccaggtggatgtgccgatggctgccattattgcggtctacgcccgtgaaaacggtgccgggatgatgtttgagccggaagtggcttatgaggctgcggaagaagaagatattctgactccggcagtggataacatcaccctgatccacgacgaaccggtaaaaccggcggaagaaagcaccgacggggatgacccggagccgccgaaaccaccgcgtggccgtccgaacttacgtgtcgtgaagtaa

SEQ ID NO: 274751 - DNA, 651 bp, Morganella morganii
atggctgtcgctgccaacaaacgttcggtaatgactctgttctccggcccgaccgatattttcagccaccaggtacggattgtactggcggaaaaaggggtaagttttgaaattgagcatgtcgaagcaggcaatctgccacaagacctgatcgatctgaacccataccagacggtaccgacactcgtggatcgcgagctgaccttatatgattcacgtattatcatggaataccttgatgagcgtttcccgcatccgccgctgatgcctgtttacccggtgatgcgtgcgcagagccgtgtgatgatgcaccgcatcgagcaggactggtactcgctgatgaataaaattgaaaagggctctgcccaggaagcgaaccaggcccgcaaacagttaacggaagagctggttgctgtttcgccggtattcaaagaatacgcgtatttcatgaatgaagaattcagcctggtggactgctacctgtccccgctgttatggcgtctgccggtactgggtatcgacctgtccgcacgtccgtcttctgataccaaacacctgcagttctacatgcagcgcgtgtttgagcgtgactctttcctggcttccctgacggaagctgagcgtgagatgcgtttacagtcacggggttaa

SEQ ID NO: 274752 - DNA, 393 bp, Morganella morganii
atggctgaaaatcaatactatggcactggtcgccgcaaaagttcatccgctcgtgtctttattaagccgggtagtggtaacatcgtcatcaatcaacgcagcctcgaaaactatttcggccgcgaaacagcacgcatggtagttcgccagccgctggaactggttgaaatgttagaaaaactggacctgtacatcactgttaaaggtggtggtatctctggtcaggcaggcgcaatccgtcacggtatcacccgtgctctgatggcgtacgacgaatctctgcgttctgagctgcgtaaagccggcttcgtaacgcgtgatgcacgtgaagttgaacgtaaaaaagtgggtctgcgcaaagcacgtcgccgtccacagttctccaaacgttaa

SEQ ID NO: 274753 - DNA, 429 bp, Morganella morganii
atgaaaacttttacagctaaaccagaaagcgtacaacgcgactggttcgttgttgatgcaaccggcaaaactttaggccgccttgcaactgaattagcccgccgtctgcgcggtaagcacaaagcggaatatactcctcacgttgacaccggtgattacatcatcgttctgaacgcagaaaaagttgctgtaaccggcaacaagcgtacagacaaagtgtactatcgccacactggctacgttggtggtattaagcaagcgaccttcgaagagatgatcgcacgccatcctgagcgcgttattgaaatcgctgtgaaaggcatgttgccgaaaggccctctgggtcgtgcaatgtaccgtaaactgaaagtttacgcaggtaacgagcacaatcacgcggcacagcaaccgcaagttctggacatttaa

SEQ ID NO: 274754 - DNA, 1128 bp, Morganella morganii
atgagcacaacaccgcgtgagttgtatcagcaggcactgaacggcagcggatttgcgccggacgacgtgcagcggcgtaccgttgaccggctgacagagatgcatcaggcgctcctgatgcgcacaccatgctcccctgagccggaaaaagggctgcgcggcaccctgaaccgctggctgaaaaaagcccccgcgccggtgagttgtccgccggtgcagggtatttatatgtggggcggggtcgggcgcggcaagacctggctgatggatctgttttatgacagtctgcccgggccgcgcaagctgcggctgcatttccaccgcttcatgctgcgggtgcatgaggagctgacggcgcttcagggacatgaaaatccgctggagagcatagcggacggctttgcacaggaaacggatgttctctgtttcgatgagttttttgtctccgatatcacggatgccatgatcctcggtactctgctggaagcgctgtttcagcgcggtatcgcgctggtggcgacctccaatatcccgccggatgacctgtaccgcaacggattacagcgagcccggtttctgccggccattgagcagatcaaaaaatactgtgatgtgctgaatgtggatgcggggattgattaccgtctgcgcacgctgacacaagcccatctgtggctgaccccggcggatgcggaaacgtcagcggcaatggacagcatgttctcccggctgaccggcggacagaaagccggacaggcggcgctgaccatcaatcaccgtcagttgccggtggtgcgggaaacggacggtgtgctggcggtgaccttccggacactgtgcgaagatgcgcgcagccagctcgattatattgcactgtcgaaaatctatcacaccgtgcttttgtatgaggttccggtgctgaccacggaaaatgagaatgcggcacggcgctttctggcgctggtggatgagttttatgaacggaaagtaaaactgattattcaggcgcagagcgggatggattctctctatcaggggcagttattgtcctttgagttcgccagatgcctctcccggctgcaggaaatgcaaagtgaagagtacctgaaactgccgcatctggtataa

SEQ ID NO: 274755 - DNA, 405 bp, Morganella morganii
atgatttgggtatatgcactcatcggattagcagttggtttaatcattggtgcgctggccgttcgtctgggcagttctaagttcagagagcaggaagccatgaaacgggacctggaaaaaaacaaggccgaactggaagagtaccgcaaagagctggtcagccactttgcccgcagtgcagaactgctggataatatggcgaaagattaccgccagttatatcagcacatggcgaaaagttcctcagaactgatgccggaactgtccgcacaggataatccgttcagctaccgcctgacggaagctgaagccgataatgaccaggcgccggtaaaaatgccgccgcgtgattattcagacggctcatccggcctgttccgtcccgtcgaaaacaaagaaagctaa

SEQ ID NO: 274756 - DNA, 1395 bp, Morganella morganii
atgatgaataaaaagaaaaaaaacctgctcagtgctgttgccatcagcctcgggttatccctcgcggcgctgcctgcagtatcaaatgcggccttaccggccaaaatggccaccggtgaatctctgccgagcctggcaccgatgctggaaaaagtgctgcccgctgtagtcagcgtggaagtttccggtaccgccgttgcccgccagcaggtgccggaagagtttaaattcttcttcggcccgaatatgccgtcacaacaggaaagtgtccgcccgttccagggacagggttccggtgtcattattgatgcacagaaaggctatattctgaccaacaaccacgttattcagaatgcggataaaattcagatccagctcaacgacggccgtaaatatgacgcgaccttaatcggccgtgatccgcagaccgatattgccctgttacaggtgaaaaatgccccgaacctgaccgccatcaccctggcggattccgataaactgcgcgtcggtgatttcaccgttgctgtcgggaacccgtttggtctgggtcagaccgcgacctccgggattatctcagcattaggccgcagcggcctgaatgtggaagggctggaaaactttattcagaccgatgcctccatcaaccggggtaactccggcggtgcactggtcaatctcaacggtgaactgatcggtatcaacaccgcgattctggcaccgggcggcggtaatatcggaatcggctttgctatcccgagtaacatggccaaagacctgacctcccagctgattgccaccggtgaagtcaaacgcggctccctcggcatccgcggtgctgaaatgaacgcagatatcgccaaggcaatgagtgtggaagctcagcgcggggcgtttgtcagtgaagtgatcccgaaatccgccgctgccaaagcggggattaaatcgggtgacgtgctggtctccgttgacggtaagcgcgtcagcagctttgcggaactgagagccaaaatcggtaccaccgcaccgggtaaagaagtaaaaatcggtctgctgcgtaaaggcaaaccgctggaagtcagtgtgatactggatgacagcgaaggccagaccaccaaagcggaaaacctgaccactctgcttcagggagcaaccctgagtaacggcagtaataaagagggtaataaaggcgtgaatattgacgcggtacagaaagattctccggcggccatgtccggccttcagccgggagacctgattatcggcgtcaacaaccagcgtgtgatgaccattgttgaactgcgtaaaattatcgacggcaagccaagcgtgctggcactgaatattttacgcggcgacgacaatatttatctgctgctgaataatgccggccgctga

SEQ ID NO: 274757 - DNA, 1728 bp, Morganella morganii
atgagtgataaacacaacgggcctttaatcgtggaaggcaaactgagcgacagcgaaagaatgaagcgcgacagcaactatctgcgcggcacaatcaaagaggatctgagtaatggcctgaccggcggatttgaaggggataacttcctgctgatccgctttcacggtatgtatcagcaggatgacagggatatccgggcggagcgcacagagcagaaactggagccgcgccacgccatgatgctgcgctgccgtctgccgggaggggtgatcacccctgaacagtggctgaaaatagacaagtttgccgcagaacagacgctgtacggcagtatccggatcaccaaccggcagacctttcagttccacggcattctgaaaggggatgtcaaaccggcgcatcagatgctgcatgaggcgggactggattcactggcaaccgctaatgatgtaaaccgcaatgtgctctgtacctcgaacccggttcagtccggcctgcaccgtgaggcgtatgaatgggcgaaaaaaatctctgagcatctgctgccccgtacccgcgcttatgccgaaatctggctggacaaagaaaaagtagcggcaaccgatgaggaacctattttaggtgaaacctatctgccgcgtaaatttaaaacctcagtggtgatcccgccgctgaacgatgttgatttgcacgctaatgatatgaattttgtggcgattgaggaaaacggtaaactgattggttttaatgtgctggtgggcggcggcctggcgatgactcacggtgataccgcgacttttccccgtctcgccagtgagttcggctttatcccgctgaaagataccctggcagtggcagaggcgattgttaccactcagcgtgactggggaaaccggacggaacgtaaaaatgccaaaaccaaatacacgctggagcgggtgggggttgaaacatttaaacaggaaaccgaacggcgtgccggtatcaccttttccccgatccgcccgtatgaatttaccctgcgtggtgatcagataggctggttaaaagggattgatgaccactggcatctgacgttgtttattgaaaacgggcgtctgattgatttgccgggcaaaccgctgaaaaccggcgtggcggaaatcgccagaatccaccggggagacttccggttaaccgctaatcagaacctgattattgccggtattccggaggcggaaaaatcccgtattgaatcccttgcacggacacacggccttatcagagacaacgtcacaccgctgcgggaaaactccatggcttgtgtgtcatttccgacctgtccgctggcaatggcggaagcggagcggtttctgccggagtttgtcacagaggttgagaaaattatgtcctcgcacggcgtgggaaatgaagagattgttctgcgggtcaccggttgcccgaacggctgcggaagggccatgctgtcggaggtgggattggtcggcaaagcgccggatcgctataatctgcatctcggcggcaatcgtaccggcacccgtatcccgcgcatgtaccgcgaaaatatcagctcagcagctattttatcggtgcttgatgagcttatcggacgctggtcacaggagcgggcggacggggaggatttcggcgattatctgatccgcgccggggtggtaaaaccggttctgaattctgccgtggatttttatgaggcaggtgctgcctga

SEQ ID NO: 274758 - DNA, 1797 bp, Morganella morganii
atggcagcacagatattaccggaacaggtatttccggtttctgcggagcagcttgcggctttgcagacggtaacagcagattttacctctcagcaactggcctggttatccggttatttgtggggacggggaaatacgtctgtgcagacagctattatcccggcatcaaatacaacagacagtgacattattaccattatttctgcgtcacaaaccggtaatgcacgtcgcgtatgtgaagaattaaaaacgcgttttctcagtgaaaaattcgcggttaatttggtaaacgccggagaatataaatataaacagctcgcccgggagaagattgtcattattgtgacatccactcagggggacggtgaaccaccggaagaagcggtggcattttataaatatctgcattcatcaaaacgcccggatctcagcggaacagcgtatgccgttttctctctgggggattcgtcatacgaaaaattctgtcaggcgggtattgattttgatactcagctgacaaaggccggggcaagcgcacttgtgccgagagcggatgcggatgtggattatcagcctgcggcagcggcgtggacagacgcactgacacaggtgctgaaagagagaggtattgcagcgggaaatccgccgccggtggttgtacaggcggtcagtgccactgaaaaccgttacagcaaagacgcgcctctgacggcatttctctctgttaatcagaaaattaccggccgcaattcactgaaagatgtgcggcatattgaaatttccgccggggattccggtctgcattatcagcccggggattccctcggcgtctggtttgagaatgatccggtactggcggatgaaattatcagcctgctgcatgcagatgcggcaacggagatcacggtatccggcaggacatacacactgcgcgaggcgctgatccggcatctggagctcacacagaataacggagtgacggtcagcaaatatgcgcagttatcgcagcatgacgcgttatctgctcttatcagtgataagcaggccgcgctgcattatgcgcagaaaacacctgtcgcggaaatgctgcgtcaggcgccttcccggccttccgcgcaggcttttgccggtattctccggccattgaccccgaggctctattccatctcatcatcacaggcggaagcagacgatgaaattcatctgaccgtcggcgtggtgcgttatgacacggatggccgggcgcggaccggcggggcttccggatttctcgccgatcatatacaggagggcgcggatgtgcgggtcttcattgaacctaatgataacttccgcctgccagccgacccggatgtgccggtcattatgatcggtgcgggcaccggtattgcgccgtttcgtgcctttatgcagcagcgggaaaatgacggtgcctcaggtaaaaactggcttttctacggcaatcagcattttaccgaggattttctgtatcagaccgaatggcagcgctatgtccgtgacggcgtgctgacccagatctcgctggcctggtcgcgggataaaccggtgaaaacctatgttcaggacaaactgcgcgagcagggagctgacgtatggcgctggattgaggatggcgcacatatttacgtctgcggtaatgcgggcctgatggcccgtgataccgaagatgcattactggagatcatcagccggtacggtaaccgggatcatgaatcagccgatgagtttttaagtgagctgcgcacagcgcgccggtaccagagggatgtctattaa

SEQ ID NO: 274759 - DNA, 1038 bp, Morganella morganii
atgtcgttatatcaacctcagaaaaaaaataaattaaaggtcattttgtccttactggcggcgctggcggtgataagcgcatttatttacagccagaaagcgcctgcaccacaggcaaccactgaaaaaccggtggtcatcgcttatcaggcgattatcgatcccggtaaaattgcacaggcaaaccatgcctatgaggccgccaccggtaaacagattatctggaaaaaattcgacagcggcgcggatgtgctgacggcactggctgccggtgaggcggatatcgccaatatgggctccgcgccgtttactgttgccgccagccgcggactgccggtggaggttttttatatttccggcattccggacaccgccgaggcaatgattgtccgcaatgaccgtaatccgtcaggcggactggccggtaaaaaaattgccgtaccttttacctccacggcccattacagcctgcttgcgacactggagaacctgaatattgatgaaaaatcagtgcagctggttaacctgcggcctgctgaaattgtcgcggcatgggagagaggtgatattgatgcggcgtatgtctgggaaccggccttaagtcagctgaaagcaaacggacagatcctgatttccggccgcgacgtacgggcatggggtaaaccaacctatgacctgtgggtcgcggacagcaagttcgccgcacagcatcctgatgtgctggcacaatttgccgccgttactgatattgaggttcagtggtatcagcgtaacaaaaatactatcgcggactttcctgacatcaccggcaaaattgcacaactgaccggtgcccgtccggaggatgtgccgggtgtgatggcgggtagtgattatcccgttctgaaagaacagaaacagatcctgacgaccaccctggcggatgatatccgcaataccgcactgtttttacagcagcagggcagtattgattcggttaaagattcctatgccggaaatatcaatacggaggccgtcaccacagcggcggggaaataa

SEQ ID NO: 274760 - DNA, 774 bp, Morganella morganii
atggcggatatcgtactggagaatattgatctggtttatcacggtcagccgcagacaaccttatccggtattaatttaaccattccggataacggtattaccgttattctcggcgcttccggctgcggaaaaacatcgctgctgaatattgttgccgggtttttagcgccctccggcggaaaaataacacggaacggaaacgaaattcagcatcccgcctctgacagagccgtggtatttcagaatgacgcactgatgccctggctgaatgtttatgaaaatgtcgcactgggactgaaaattaaaaagcttggtaagcaggaagaaaaagcgattgtcgaagaaaacctgcaaaaagtcggattactgcatgctatcaccgacaatatctggtcactctccggcggaatgcgtcagcgggtcggtattgcacgggcactggctgtaaagtctgattttattctgatggatgaacccttcggtgcactcgatgccgccaaccgggaacagatgcaatccttaattctgacgctgtggcaaaaacagcagagtgccttttttattattactcatgatattgaagaggcactgttaatggccacaaggctgatattaatggcgccgtatcccggccggataatatccggagaagaacccccgttttataaacaatggtcgcagggacggcgtatccgtgagattaaatcggatccggcgtttattcatcaccgcgacacactatcagacaaaataatggcgtatcagcgcggttaa

SEQ ID NO: 274761 - DNA, 798 bp, Morganella morganii
atggcagatataaccggaaataaacaaccccgccacagtcgtttattactcagcattgtgagtttatccgtgctgattaccggctggtggctgatcaccgcatttcagtgggttaatccgctctatttacccgccccgactcaaataggacaccagtttctggcgttatctgaatccggttacatgaatgccacgctgtggcagcacctggcagccagtcttgaccgcatgctcaaagcgctgcttctggcggttatcaccgggatcccgctgggggtgctgatgggactgagttcacggatacgcggaatactggatccggtggttgaactgtaccgcccggttcccccgctcgcctatctgccgctgattgtcatttggttcgggatcggggaaaccaccaagatcctgctgatctggttagcgattctcgccccggtcctgatttcaacgatgcagggcattatggccgcgccgggaaaccggatccgcgccgtgcagtccctgggggcaaaccggtttcaggtgctgagatatgtgatcctgccgtcagcactgccgcagatgctgaccgggatccggattggcctcggcgtgggctggtccaccctggtggcggcagagctggtcgcggcacagcagggactggggtttatggtgcagtctgccgcgcagtttcttaacaccggtattgtcatcaccggtatcgcagtgattgccgtggtggcactagccatcgaactggcattgcgtcatttgcagcaggcattagtgccgtggtacggcaaagaatcttaa

SEQ ID NO: 274762 - DNA, 828 bp, Morganella morganii
atggatatcagacaattaacacccgctatcggcgcacacgtcagcggtattgatcttaacctgacaccggatgccgccacgctggccctattacaggatgccttactggaacatcaggtgctgtttttccgccagcagtatattaagccggaagctcagcgggactttgccgctgcgctgggtgaactgcatatacatccggtttttccttcccataagaatgtgcgggaactgattgtgctcgacagccacctgctggatctgaaagataacgaactgtggcacaccgacgtgacatttctggagaaaccggccatgggctgtgtgttatccgccgtgcaggttcccccttccggaggcgataccctgtgggccagcctgacccgggcttatgatgatttatcaccgccgttacaggattttttatccggtctgacggcggaacatgatatcagcctctctttcccggacagtcgttttgcgcagaccggggaagccaaagcggcgctggaaaaagcccgccgcgatttcccgccgagacgtcacccgctggtcagaacccatccggtcaccgggaagaagggcttgtttgtgaccgcaggttttaccagccggatctgtgaattaagcccggaagagagtgatacattgctgaccttcctgtttaagcacagcacacagccgaaatattttgtccgctggcactggcaggacggcgatgtggcggtctgggataaccgctgcacccagcatctcgccagttttgattacggcgattttcaccgcattatgcacagagcaaccgtaatgggggataaacccgtttaa

SEQ ID NO: 274763 - DNA, 1059 bp, Morganella morganii
atgggacttctcgtggctgccctgcttctggtcagcgtcccgtctattcgcccgcaatttgtgacccagtggtttacccatctgtttaataatgacgaaccggtcagctacaacaaagcggtacgccgcgctgcgcctgctgtggtcaacgtttacagcagtaatatgggcagcctctcccagcagggtcccgaaatgacctccctcggttccggtgtgatcatgaatgatcagggttatatcctgactaaccagcacgtcattaaaaatgccgatcagatcctgatcgccctgcaatacggtaattacggccgcctgtatgaaggtatgctgatcggcgcggatgatctgaccgacctcgcggtactgaaaatcaataccaccgataaactgccggtgatcccgatcaacccgaaacgtcagtcccatgtgggtgatgtggtgctggcgatcggtaacccgtttaatgtcgggcagacagtcaaccagggtattatcagtgcaatgggccgtgtcggactgagcccgacccgccgccagaattttctccagactgatgcctcgattatggccggtaactccggcggcgcactcgtcaataccgagggcgaactggtcggtatcaataccatgtcttacgacagcaacgatccgtcacggatgagtgacagcatcgggctggcgatccccgcagagcttgccctgcgcattatgaataagctgataaaagacggccgtgtgatccggggctatatcggcatcacctccaaagagctgccgccgatccggactaacaacagtgatattaatcagataaccggtctgcgggtctttcaggttgcccgtaacggcccggccgataaaggcgggattcaggtcggggatatcatcaccagcgtcaataacaaaccgagcacctcaccactcgaaatgatggatcaggtggcggaactgagcccgggcagtgttgtgccggtcaccctgttacgcaatggtcagatgcggtctgtcgatgtgaccatcgaagagttcactccctcccccggcggacaggaataa

SEQ ID NO: 274764 - DNA, 1266 bp, Morganella morganii
atggataaatttcgggtaaaaggtccttccgttcttcagggcgaagtgactatctcaggggcaaaaaacgcagcattgcctatcctgttcgctgcaattctggcggaagaaccggttgaattacacaatgtgccggaactgcgggatatcgacacctctgtgaagctgttaacgcggctgggtgcaaaaattgagcgcaaaggaaccacactgcgtgtggatgcttctgcgattaatgaatattgcgcaccttatgacctggtcaaaactatgcgtgcgtctatctgggcgctggggccgctggtggcccgttttggtcacggtcaggtttctctgccgggcggctgtgctatcggtgcccgtccggttgatttgcatatcaccggtttagagcagttaggggcgaaaatcaccctcgatgaagggtatgtcaaagcggaagtggacggtcgcctgaccggtaacactatcgtgatggacaaagtcagcgtgggtgccaccatcacgattatgtgtgcggcagccctggcgaaaggcaaaaccgttatcgaaaacgcggcccgtgaaccggaaattgaagacaccgctgcattcctgaatgcactgggtgccaaaatcaccggtgcagggactgaccacgtagtgattgaaggtgttgaacgtctcggcggcggctctcacaccgttgtgccggatcgtattgaaaccgggacattcctgatcgcagcggcagtttcacgcggtaaaattctgtgccgtaacgccaagccggatacgctggatgcggtgctggccaagctgcgcgaagccggggctgaaatcgaaaccggtgacgactggataagccttgatatgaaagggcagcgtccgaaagcggtcaccttccgtaccgcaccgcatccgggcttcccgacagacatgcaggcgcagttcagtctgctgaacctggtggcggaaggctccggtatgatcacggaaaccatctttgaaaaccgctttatgcacattccggagctgatccgtatgggcgctcatgcggaaatcgagagtaattctgtgctgtgtcacggcgtggaaaaactgtccggtgctcaggtgatggcgaccgatctgcgtgcatctgcaagcctggtgctggcgggttgtatcgcggaaggcaccacaatcgttgatcgtatttatcatatcgatcgcggttatgagcatattgaagagaaattacgcggtctgggtgcggatatcgaacgcattcattcagcggagtaa

SEQ ID NO: 274765 - DNA, 255 bp, Morganella morganii
atggatacgaatgaaatcaaacaggtgctgatggataagttagcacttactgacgcaattgtgaccggtgacggcagccattttcaggtgatcgcggtcggcgatctttttgacggcatgagccgcgttaaacagcagcaggccgtgtatgcgccgctgatggaatatattgcggataaccgtatccacgcgttgtctatcaaagcctataccccggctcagtgggaacgggatcgtaaactgagcgggctgtaa

SEQ ID NO: 274766 - DNA, 291 bp, Morganella morganii
atgacggctgcgctgacgtgggaaaaacagggtgaaacgctcgccctgaacggggaactggatcgcgatacactgctgtcgttctggaatgcacgtcagcagcagatgagcgccgtgcagacggtggatgtttccggtctcagtcatgtggattccgccggactggctatgctggtccgtctgcggggagagcgcccggaagcgccgtttgtgttatccggagtaagcgctaacttgcagatgctgatgtcactctacggcgttgagtttgaattcagtcagaacgcgtga

SEQ ID NO: 274767 - DNA, 630 bp, Morganella morganii
atgtttaagcgtttactgatagcggcgatgctggtggtgatggccccgtttgccggagctgttgaccagacaaacccgtatacactgatgaacgatgcggcggcgaaaaccttcagccgtctgaaagccgaacaggcgcaaatccggcagaacccggactatctgcgcactattgttcaggaagaattactgccgtacgtgcagatcaaatacgccggtgcactggtgttaggctcttactacaaagatgcgacaccggcacagcgcgatgcctattttaaagcctttgaggcttatctggcccaggcatacggccaggcactggccatgtacaccaaccagacttatcagattgaccctgcacaaccgctgggtgataaaaccatcgtggctatccgtgtgacactgacagagccggcagggcgtccgccaatccgtctggatttccagtggcgtaagaataccaaaaccggtaactggcaggcttatgacatgattgccgaaggcgtgagcatgatcaccaccaaacaaaatgagtgggcatctattctgcgtcagaaaggtgttgatggtctgactgctgaacttgagcgcagcgcgaaaaccccgattaccctggatcagaaataa

SEQ ID NO: 274768 - DNA, 525 bp, Morganella morganii
atgcaaagcaagaaaaatgaagtttgggtcgggcttttcgtcttaattgccattgcggcgattatcttcctggcactgaaagtggcggatatccgctctgtcggcagcgaaaaaacctaccgcgtgtctgccacctttgatgatatcggcggcctgcaggcccgttcaccggtaaaaatcggcggtgtggtgattggccgcgtcaatgacatccgtctggacaaggactataaaccggaagtgacgctggatatctacagtcagtatgatcagattccggacaccagttcgttatctatccgcacctccggtctgctgggtgagcagtatctggcactcagcaaagggtttgagaatacaaccgatccggatctgccgatgactgagatgctgaaagacggcagccgtattcaggacaccaaaccggcgatggtgctggaagatttaatcggtcagttcctgtataagagcggcgacggcgaagggggtaataccccggaagcggcaccggctgcacagcactga

SEQ ID NO: 274769 - DNA, 783 bp, Morganella morganii
atgttgacacaggcacttgctgctttgggacgccgcgcgttagcgacatgcgcgtctttcgggcggtcaggatacatgctgttccgtgcgctgttcggcaaaccgcagtttgcccggcagtggccgctgctgcgcaagcagctgtacagcgtcggtgtgcagtccctgctgattatttcagtatccgggctgtttatcgggatggttctggccttacagggatatctggttctgaaaaccttcagtgcggaagccagcctcggcatgatggtggcgctgtcgctgctgcgtgagctggggccggtggtgaccgctctgctgtttgccggacgcgccggttccgcactgacagcagaaatcgggctgatgaaagccacagaacagttatccagcctggaaatgatggcggtggatccgctgcgccgtgtgatcgcaccgcgtttctgggccggtttgattagtatgccgctgttatccatgatttttgtcaccgttggtattcttggcggggtcatggtcggggtggactggaaagggatcgatgaaggtttctactgggcttccatgcaggccaatgtggactggcagaaagatgtgatgaactgcatttacaagagtgtggttttcgccttcaccgtcacctggattgccctgtacaacgggtatgacgctattccgacgtctgaagggattagtcgggcaacaacacgcacggtcgttcattcatcgcttgccgtgttagggttagattttgtgcttacggcactgatgttcgggaattaa

SEQ ID NO: 274770 - DNA, 804 bp, Morganella morganii
atgaaccgacagacggaaaatattattgagatccggaacatgtgcttccggcgcggttcgcgcatgctgtttaatgatatcagcatggatgtgccgcgcggcaaagtgaccgcgattatggggccgtccgggatcgggaaaaccacactgttacgtctgattggcggacagctgcgcccggacagcggcgaaatctggtttgacggcgacaatatcccggcactttcccgcagcaaactctatcagtcgcgccgcaaaatgagcatgctgtttcagtccggcgcattattcacggatatgacagtctatgacaacgtggcgttcccgctgcgcgaacatacccgtctgccggaatccctgatccggacaaccgtgatgatgaaactggaagcggtcggtttacgcggggcggcaaacctgatgccgtcggaactctccggcgggatggcgcgccgtgcggcactggcgcgggccattgcactggatccggaccttatcctgtttgatgagccgtttgtcggccaggatccgattaccatgggtgtgctggtaaaactgattgatgaactcaatcagtcgctgggtgtaacctgcatcgtggtctctcacgatgtgccggaagtgctcagtatcgcggataaggcttatatcgtcgcggagcagtccgtgattgcacagggcaccgcagaagagttgcaggagaacaccgaaccgcgtgtgcgccagttcctggatggtattgctgacggaccggttcctttccgctatccggcgggtgattaccaatcagatttattaggataa

SEQ ID NO: 274771 - DNA, 960 bp, Morganella morganii
atgttacttaccagcatccttttactgaccgggttgattctgctggtttatgcctctgaccggattgtgtacggtgcggcggttttctcccgttctctcggcatctccccgtttatcaccggtattctggtggccggtcccggtacgtcgctgccggaactgctgacctccgccggtgcggtgcttgaagggcagccggatctggcgctcggtaccattatcggatccaatattaccaatttactgctgattgcaggcctcgccgcccttatccgcccgctgagtgtacagtcggcggtactgcgccgtgagcttccgctgatgctggcggtgatggcgctgttcgggctgtttatctggtccggcggtatcacgcgggttcagggcggatttctggtgcttgcggggctcgccagcctctggctggtggtgaaaattgccgcaatagcgcggcgtgatcagtatgacggcttcactactgaacaaaaccatgaactgccgcaggaaaataatttgccggttgctttattgtggctggtcgccgggttgctgattatgccggtggcggtccggattgtgattgataacgcctctgcattcacccgctatgcggagatcagcgggcgcatcaccggactgactatcctggctatcggtaccagtctgccggaactgtgcaccacgattgcggcggcggtcaaaggtgaaaaagatatcgcgctggggaatcttatcggcgcgacactgtttaataccaccgtcgtggcggggatcccggcgctgttagccaccgcgccgatggcagcagacaattttatggccgatttcgccgtgatgatcgcggccggtgtgatatttattttctttgcggccggccggaaccagcggctgaaccggctgaaaggcattattctgctcagtgcattcaccgcctggctgataagtctttttaccggctga

SEQ ID NO: 274772 - DNA, 969 bp, Morganella morganii
atgtcccgaactgattttcaactaacaggtaaacgtgtcctccggattgaacgtgaaggtctcgcgtcactcgaacagtatattaatgatgatttcgataaagcctgtgaactgatattccgctgtgaaggcaaagtgatcatcatggggatgggaaaatccggtcatatcggccacaaaatagccgcgacatttgccagcaccggcacctcctccttctttgtgcatccgggcgaagccgcacacggcgacctggggatggtcacaaagaaagatgtggttatcgcgatttcaaactccggtgaatcctcagaaattcaggcgctgatccctgttatcaaacgtcagaacatcccgcttatctgcatgaccggcaacccggacagtaccatgggaaaagcggcggatatccatctgtgtattaaagtcccgcaggaagcctgcccgctcggccttgcgccgaccaccagtaccaccgccacactggtgatgggggatgcgctggcgattgccttattacaggcgcgcggctttaccgctgaagattttgccctctctcatccgggcggcgcgctcggccgcaaactgctgttactggtttccgacctgatgaacaccggggatgatatcccgcgtgtgccgaaaaccgcctcactgcgcgaagcactggtggaaatcacccgtaaaaaactgggtatgacggttatctgtgacgatgacatggtcattcagggcattttcactgacggcgacctgcgccggattttcgatgcgggcacagacctcaataactgccagattgccgatgtgatgaccccgggcgggatccgcatcaaagccaataccctggcggttgaggcactgaatttaatgcagtcccgtcacatcacctctttattagtcacagaaggtgataaactgctcggcgtactgcatatgcatgatctgctccaggccggagtggtgtaa

SEQ ID NO: 274773 - DNA, 564 bp, Morganella morganii
atgacacaaattaccactattgacacctgctatggcccgatagcgcaaacagttatggaaaaagccgctaaaatacggcttcttatctgtgatgtggacggcgtgatgtctgacggcctgatttatcagggcaacagcggtgaagaactgaaggcatttaatgtccgtgacggctacggtatccgctgcctgctgacctccggggtggaggtagcgataattaccggccgtaaagccaaattactggaagatcgtgccaatacactcggaattacacatctttaccagggacagagcgataagcttttggcgtatcgcgaactattagataaactggcagttcgccccggcgaagtcgcctatatcggcgatgatctgattgactggccggtcatggcagaggtcggtttatccgccgcagtggcggatgcccacccgttattgttacccaaagcggattatgttacacagattgcaggcggccgcggagctgtccgcgaattgtgtgatctgattctgctggcacaaaataagctggatgcggccagaggcctgtccgtctga

SEQ ID NO: 274774 - DNA, 582 bp, Morganella morganii
atgagtaaatttaagctttggctgatcattattctggcgcttatcgccctcggtctgctcggctggaacctgtcggtcacccgttcaggtgacaccgacggtaagattgtggaagacggtacgccgacgtataaaacccggacatcctcaaccctggcttacgagccgacagggctgctggcgtaccggctgaatgcggatgatgtgcagaactttgctcaggaaaaaataacctggtttactaatccggttctgaccacctacgaccctgataaaaccgccacctggacgattcgtgcaaagcgggccaaattaaccaatgacagaatgttatatttatacggtgatgtgcaggttgacagcctgaccaccgatacgcagctccggcagatcaccacggacaacgccgaagtcaatctgataacccaggatgtgagttctgacgataaagtcaccatcacgggaacaggactgcgttccgtcggattgcagatgcggggtaatttacgcaatcgtaatgcggaactgatcaaagatgtacagacttactatgagatcccaaatgaaagcaaacatccttaa

SEQ ID NO: 274775 - DNA, 537 bp, Morganella morganii
atgaaagcaaacatccttaatactctgattgcaacagcaattctggccgtcagtgtccctgctttggcgttaaaagaagatacacagcagccggtgacggtaacatcattaaaacaagctcttgatttagaaaaaaatatcaccacatttactgataatgtcgtggtaaaacagggaacgattgatgtccgcgctgacaaagtagtggtcacccgtccgggcggcgattccaataaaatggtcatcgaagcattcggtaatccggtgaccttctaccagatgcaggataacggcaagccaatcaaaggacgcggcagcaaactgcgttacgaaatggccaatgagctggtcacgttgaccggtaatgcctatctggaacagctggacagcaatatcaccggtgacaagattacctatgtcgtaccgacacagcagatgcaggcattcagtgacaaaggcaaacaggtgacgaccgtgctgctgccgtcacagcttcaggaaaaaggcccggcggcaaccggccagaaaggtaagtaa

SEQ ID NO: 274776 - DNA, 726 bp, Morganella morganii
atggcaaaattaatcgcaagcaaattagccaaagcctacaaagggcgcaaagtcgtcgaagatgtgacgcttgaagtcagctccggcgaaatcgtcgggctgctcggcccgaacggtgccgggaaaaccacgaccttctatatggtcgtggggattgttccccgtgatgccggtgcgataagcattgatgatgaagatatctccctgctgccgctgcatgaacgtgcccgcaaagggattggctatctgcctcaggaagcctctattttccgtcgtctgacggtatggcagaacctgatggcggtgcttgaaatccgcaaagatctgaacaatgatgaacgccgggacagggcggaagagctgatggaagagttccatatcagtcatctgcgcgataacctggggcagtcactgtccgggggtgaacgccgccgtgtggaaattgcccgcgcgctggccgccaacccgaaattcatcctgctggatgaaccgtttgccggtgttgacccgatttctgttattgatattaaaaagattattcagcacctccgtgattacgggctcggcgtcctgatcactgaccacaacgtccgcgaaacactggatgtctgtgaacgggcttatattgtcagccagggccatatgattgcccacggcagcccggaatccattctgaataatgagcaggttaaacgtgtttatttaggcgaaggtttccgcctgtaa

SEQ ID NO: 274777 - DNA, 1437 bp, Morganella morganii
atgaagcagagtctgcagcttaaactcagccagcaactggcgatgacgccacaactccagcaggctatccgtttgttgcagctttccacgcttgaactccagcaggagatccgcgaggcgctggaatctaacccgttgctggaacttgatgataaccatcaggaaattgacacgccggctgaatctgaaccacagaaagagctggacagcgccgaggctctcgaacagaccgccatgccggatgatctgccgctggatgcacagtgggaagaaatctacaccgccggtacaccgtccggcaccggcaatgattacggcgacgatgaactgccgctctatcagggtgaaaccaccgaaaccttacaggattatctgatctggcaggcccgcctgaccccctttaccgaaaccgatgccgcgattgccttctcaatcattgatgcgattgatgaaaccggctatctgactgtttctgtcgatgatatccgcctgagtatcggtgacgatgaggtcaccaccgaagatgtggaagccgtactcaagcgcatccagcgttttgacccggtgggtgtgggcgcccgcgacctgcgggagtgtctgatggtgcagctgaaaattctgccgccggaaaccccgagcctgaaagaagcccttgctatcgttgatcagcatctggcattgttggggaaccgggatttccggaccctgggccgggtaaccaaactgaaagaagaggcgctgaaatccgctattgatctgatccagtcactggaaccgcgtcccggcctggtagtcaacaccggagaatcagagtatgttattcctgacgtcctcgtgagaaaacacggcgaacgctggacagtggaactcaattccgacagcattccccgtctgcgggtcaataatcactatgccgcaatgggttcgcgggcccgcagtgagagcgacagtcagtttatccgcaacaatttgcaggaagcaaagtggctcattaaaagtctggaaagccggaacgatactctgctcagagtcgcgacctgtattgtggaagagcagcaggcgttctttgaacagggcgaagaatatatgaagcccatggtgcttgctgatatcgcactgcgggttgagatgcatgaatcaaccatttcccgggtgacaacgcagaaattcctgcacagtccgcgggggatctttgaactgaagtactttttctccagccacgtcagtactgacagcgggggcgaggcatcctccacagccatccgtgcactggtgaaaaaactggttgccgccgagaatccggcgaaaccgctcagcgacagcaaactgaccgatatgcttgccgaacagggcattcaggtcgccagacgtactgtcgcgaaatatcgtgagtcgttatccatcccgccctcaaatcagcgtaagcagctgatttga

SEQ ID NO: 274778 - DNA, 288 bp, Morganella morganii
atggaattacaaattaccggccacaacgttgaaattacagacgcattacgtgagactgtgacagccaagtgtaagaaactggagcagtttttcgataaaatcaacagcgttcaggtgatcctgcggattgaaaaggtgagtaaaattgcggaggcaacggctcaggtaaacggtgcggatcttcacgcctcagcggaaaaagaggatatgtacgcggcaattgatgagatggcagaaaaactcggccgtcagttgtccaaacacaaagaaaaactgagaaaccggtaa

SEQ ID NO: 274779 - DNA, 468 bp, Morganella morganii
atgaataacgaagcaaatttgtccctgagcgatgtactgagtatcagctgtacacgcaataatattcactgtaccagtaagaagcgcgcgctggagattatcagtgaactggctgccaccgcgctggcgctgccggaaaacacgttgtttgaggcactccttacacgggaaaaagtcgggacaaccggtattggtggcgggattgccatcccccacggaaaactggacaaaagcgaggcgcaaaccgcctgcggcgtatttttacatctggagcaacctatcgcgtttgatgcgattgacaatcagaatgtggacattctgtttgcgttatttgttccgtctgatcagtgtcagacgcatttacacacactgtcgttagtggccaaaaaactggctgacaaagcgctctgccgccggttgcgtcaggcgcaaagcgatgaagagctgtacagtatcatcactgagtga

SEQ ID NO: 274780 - DNA, 852 bp, Morganella morganii
atggtgctgatgattgtcagcggccgctctggttcgggtaaatctgttgccctgcgggcgctggaagatatgggtttctactgcgttgataacctgccggtcactcttctgccggagcttgccgctaccctggcaacacgcgatacctctgccgcagtgagtattgacgtccgcaatatgccggagtccccggaggtgtttgaggaagccctgaccagattaccggacagtttctcaccccagctgctgttcctggatgcggatcgcaacaccctgatccgccgttacagtgatacccgccgtctgcatcccctttccagtaaaaatctctcgctggaaagcgccattgatgaggaaagcgatctgctggagccgctgcgctcccgtgcagatctgattatcgatacctctgaaatgtcagtgcatgaactggcagaaatgctgagaacccgtctgctcggcaagcgcgaacgcgagctgaccatggtattcgaatcgttcgggtttaaacacggcattccgattgatgcggattatgtgtttgatgtccgcttcctgccgaacccgcactgggatccgaaactgcgtccgatgaccggtctggataaacctgtggcggcgttcctcgaccgccatacggaagtacataactttatttaccagacccgcagttatctggaactgtggctgccgatgctggaaaccaacaaccgcagctacctgaccgttgctatcggctgtaccggcggtaaacaccgttctgtctatgtggcggagcagctggcggattacttccgctcacgcgggaaaaacgtgcagtcgcgccaccggacactggaaaaacggaaataa

SEQ ID NO: 274781 - DNA, 273 bp, Morganella morganii
atgactatccgttgtcaggttgaaatcaaaaaccggctggggctgcatgcccggccggccatgaaactgtttgaactgatccagaccttccggtcagcggtggtattccgtaataagcaaaatgaagaagcccgggcagacagtgtgctcgctatgctgatgctggattccgaacagggcagttttattgaagtggaagcaacagggcctgatgaaaattccgccattgaggcaattatttccctttttgattcaggttttgatgaagattag

SEQ ID NO: 274782 - DNA, 411 bp, Morganella morganii
atgaaaaagcccaatataattattaatgaactggacgcggagcgtctggatatgctgctggaacagccggcttatgctgacagtccggttgctgaagccctgaatgaagagttagatcgcgcggaaatcctgccgccggcagaaatgcctgccacggtcgtgacgatgaacagccgcatccgctttgaagatttatcgagcgggaaagagagtatccgcaccctggtgtacccggcatcgctgaaagacagtgctgaacagctgtctgtgatggcaccgctgggagctgcgttactcgggctttctgtcggtgatgagatctcatgggaactgccgaacggtgaagcaacgcgcgtaaaagtatcagaaattatctatcagcctgaagctgccggtgagttacaccgttaa

SEQ ID NO: 274783 - DNA, 129 bp, Morganella morganii
atgtcaacattcagtatgatgcagatcattgccttatcaccctttacagattccccgctgccactgatcctgaatttcgaaaaccagctatttatgctcacaaagggcctgataatgctgatgatgtag

SEQ ID NO: 274784 - DNA, 1341 bp, Morganella morganii
atgaatatcacttctcagattatggcgcagcgtacgcgcctggaacaagcggtttcgcaggcactgagtattgcacagaaagggtgtgacagcgccgaagttgctgtcagcagaaccaccgggatgagtgtgagcacccgtatgggtgaggtggagaatgtcgagtttaacagtgacggcgcactggggatcacggtgtatcataaccagcgcaaaggcagtgcatcctccacagatttaagcgaagaggcgattgcccgtaccgtacaggcagcgatcgacattgcgaaatatacatctgaagatccttgttcgggcccggcagatcgcgatttactggcttttgaggcaccggatctgcaactgttttatccgtccgaagtgagtgctgaccaggctatcgactatgccgctaatgcggaaaaagccgcactgagtgccgatccgcgcatcaccaacacagaaggcggcagctttaacagccattacggcattcgtgtgtttggtaacacgctgggtatgctgcaaagctactgcagcagccgtcactccatgtccgcctgtgtgatcgcagaagaaaacggcgatatggagcgtgattacgcctataccatagcccgtaagttggatgatctgaaatccgcacagtgggtgggtgaagagtgcgcccgccggacactgtcccgcctcgcaccgcgcaaactggcaacacagaaagcgcctgtgatttttgccccggaagtggcaaccggtttgttcgggcatctggtcggcgcgatcagcggtacctctgtgtaccgcaaatctaccttcctgctcgacagcctcggtaaacagatcctgccggactggctgactatccgcgaactgccgcatgtgatcggcggcctggcctccaccccgtttgacagcgagggggtccgcactgaggatcgcctgattatcgaaaacggtgtgctgaataactggctgatgaccacttatgccgcccgtaaactcgggctgaagagcaccggccatgcaggcgggatccacaactggcacattgccggtcaggggctgggatttgacgacatgctccgcgaaatgggcaccggtctggtggtcaccgaactgatgggacaaggtgtcagcggcatcaccggtgattactcccgcggcgcatccggtttctgggtggaaaacggcgagattcagtatccggtcagtgaaatcaccattgccggaaacctgaaagacatgtgggccagcattatcgccaccggcgacgatattgaaacccgcagcaacattcagtgcggctcagtctggctgccggaaatgagtattgcggggcagtaa

SEQ ID NO: 274785 - DNA, 549 bp, Morganella morganii
atggcaaagcagcctgaagactggtttgaagaacccgatgcacttcctcaggaggaagaggatgacgagataatctgggtcagcaaaagcgaaattaaacgcgatgctgaagtcctgaaaaaactcggcgctgaactggttgcactgagcaaaacccagctggaacgtattccgctggatgaacagctgctcgaagccatcctgcttgcacaaaaaatcaagcgtgaaggtctgcgccgtcagttacagctcatcggtaaactgctgcgagcccgtgacccggagccgattaccacggcactcgacaaactgaaaaaccgccataaccagcaggttgtcctgctgcataaactcgaagatctgcgcgaacgcctggtcaccggtgatgacactgtgacggaagaagccgttgcgctgttcccgcaccttgatcgccagcagctgcgtgcgcttatccgtaacgcgaaaaaagagcgcgaaggcaataaaccgccgaaagcttaccgccagctgttccagtatctgaaagaactggcagaaagcgcttaa

SEQ ID NO: 274786 - DNA, 297 bp, Morganella morganii
atgacacctgatatcagcattgtgcgttttgatttccgcaccatccggacaacagacgatttttatcagcaattcagtgataaatttcagctgccgtacttcggatgtaacacggatgcactatgggacatgctgacaggcgggatagatctgccggtgatactggcgtttgaacatattaccgcacggcagcggcggctgttttcagccattatcggtacctgccgggatgcggaggaagagtggccgggggatattcagctggtgctgacccccctgaccatgacggcggattaa

SEQ ID NO: 274787 - DNA, 468 bp, Morganella morganii
atgatgcagaaatacggcacgctggtgattgttctgattgtggcggtctccgcctggctggcggggttaccggggcagtttatcgaaacccgtccgtcagagccggtaccgcagcatacagaacagccgcagagcattgatgccctgacagcacagtcacgggtggtcagctatgtgcagcagcaccagcgtctgccggattactatgtgacgaaaaaagccgcccgtaatgcgggctggcagccgtcaaaaggtaatctctgtgaggtgatgccgggtaaagctatcggcggcgaccgtttcggtaaccgggaaaaagggctgccggatgcgccatcacgccagtggtttgaagcggacataaactataactgcggccatcgcggcagtgatcgtctgctttattccagtgacgggctgatttatgtcaccactgatcattaccgttcgtttcagcaggccaattaa

SEQ ID NO: 274788 - DNA, 1446 bp, Morganella morganii
atgagtttttcaactgtcagcaatcatctgctgaccgcccatgatcttgatgaacaggatctcttttctgtcctcacacagttagcggatcgccatattgattatggcgatctgtacttccagagcagttttcatgaagcctgggtgctggaagataaaattatcaaaaacggctcttacaatattgaccagggtgtcgggatccgtgccgtcagcggcgagaaaaccggttttgcctatgcggatcagataagcctgaccgcattacagcagagtgcctccgccgcccgcagtattgtccgtgagcagggtaacggtaaggtgcagagcctgcaccgtgtcaataacacagcactgtatgccgcgctcgatccgctgcgtgcaatgccgcgtgaggaaaaaatcgcgctgctgcaccgtcttgaccgtgtggcccgggcggaagatccgcgtgtgcaggaagtgaatgccagcctgaccggtgtctatgaagaagtgctggtagctgccactgacggcacgctggcgacggatatccgtccgctggtgcgcctgtcagtcagtgtgctggtggaagaggacggcaaacgcgagcacggcggcagcggtggcggcggccgtttcggttatgaatatttcctcggtacggaagacggtgagatccgcgcagaccattttgcccgtgaagcggtgcgcatggcgctggtgaatctctctgctgttgcggcaccggccgggtcaatgccggttgtgctgggcgcgggctggccgggcgtgttactgcatgaagcggtcggtcatggcctggaaggagatttcaaccgccgtggtgcttcggtattcagcggaaaaatcggtcagcaggtcacatcatcactctgtaccattgttgatgacggtactatcggcgatcgccgcgggtcactggcaattgatgacgaaggggtgccgggacagtataacgtcctgatcgaaaacggtattctgaaaggttatatgcaggataaacttaacgcccgtctgatgggtgttgacccgaccggcaacggccgccgtgaatcctatgcccatctgccgatgccgcgcatgaccaacacctatatgctggcgggggaatcgtcgccggaagagattatcgccagtgtgaaaaacggtctgtatgccccgaatttcggcggcggtcaggtggatatcacctccggtaagtttgtgttctcgacatccgaagcgtatctcattgaagacggtaaaattaccagaccggtgaaaggcgcgacactgattggctccggtatcgaagccatgcagcaggtatcgatggtcggtaatgacctgaaactggataaaggtgtcggtgtctgcggtaaagaaggccagagcgtgccggtgggtgtcggtcagccgacgctgaaactggacagcattaccgtcggcggaacggcctga

SEQ ID NO: 274789 - DNA, 858 bp, Morganella morganii
atgaaaaacgcaaatgtggctttattgcagctgtgcagcggcacaaatattaaacacaatttggcgcaaatcgaacaacagatcaaacaactgcctgataatatcaagctggtgatgacaccggaaaatgcgctgatttttgcatcaggcaacacctatcagaagtatgcggaagtgcagggcgaaggcccgctgcagtcagcggtggctgatatggcgcgccgctacggggtgtggatcctggtcggctcaatgccgatgatcagccgtgaagacccggcgcgtatcaccagcagcagcctgctgtttgatgataaaggggaaatcaaagcccgttacgacaaaattcacatgtttgacgtgaatatcgatgatgagcagggttcatacaatgaatcaaaaatcttccagcgcggcgagcacatcaccgtggtggataccccggtgggtcgtctcggtatgaccatctgttatgatctgcgtttcccgggcctgtttcaggcactgcgtgagcagggcgctgagattatctctgttccggcggcctttacccggctgaccggcaaatctcactgggagccgctgctgcgcgcccgtgcgattgaaaaccagtgcattattctggcaccggcacaggtcggtgtacacggtacccgccgcacatggggacacaccatggccgttgacggctggggcaaagtgatgaagaaaaatacggatgcggtggccgccatcggcgtggatatccgtccggacagcttaacctcaatgcgtgagcagatccgcgtggtgaaacataaccgtttccgcccgcagctgacttcactgattgagaaaaacaccacaggtaaagagtaa

SEQ ID NO: 274790 - DNA, 3780 bp, Morganella morganii
gtgaggcgactgcccgggattttactgacatgtgtgattgtaatcgtgattgctgcggcactggtgctcggcggtctgcgctatctgttgcctcagattaatgaataccgcccgcagatcgaacaaaaactctcacaaatgaccggtgccacggtcagaatcggtgaaatcagcggccgctggcagggattcggcccggcgctgacactccgtgacctgactgttaccgctccggacgcggacatttcagccgaaaaaatcgacctatccctggatatctggcggacgttattccgttttcaggtcagtttccgtgatctgacattctggcacatgaagctggattacaaacagccgctgagcagtgacggcagcagtattgaaaccgatgatgcgatgtccggtctctggctggagcgctttgataattttgatctgcgcgacagtgaaatccgttttctcacgccgtccggcgatcctgccactttgctggtttcccgtctgtcatggctcaatcagagcaaacgccaccgcgctcagggggagatcagtctctcctcggtgaataacccgcgcggctggctgcaggtgcgtctggatctgcgggatgtgaacggtctgctggatgagggaacggtctacctccaggcggatgatattgatatgacgccgtggttcagccgctggctgcgcgacaacaccgggctgaacaaggccggtttcagcctggccggctggatgacggtggagaaagggatggtcacccggggcctggtcagactgaactccggcgaggcggactggctggtcggtaaggacacgcacaccctggaagttcaggatctgctggtgcagatgcgccgccagggggaaggctggctgtttaatatcccggatctgctgaatctgaaaactgacgggcagcagtggccggaaggcagtctgtcactgctttatatcccgccgtcggccaaatacggcggcaatccgcatctgcgtatccgcgccaatgatattgaactggcgcgtctgagcagcattgtgccgacgttctctttcctcaccaatgatattgtcaaagcctggcaggagcgcgagccgtcaggtcttatccgcgattttgcccttgatatcaccccggccgccccggaaaacctcgaactggatgtttcctggcaggatgtcagctggaaagcacgggaggaattaccgtcggtatctcatttcagcggcgtattacgcggcggacaggcacgcggcattctgcgttttgccctcgatgacagtgtgctggactaccgcccgatgtttaccgcaccgctggcggtatcagaaagccgcggacaggtgcagtggaataatacggacggcaacttcagcctctggagtgataatttagatctgcaatccggcgcgctgcgggcgaacggcaacttccgctatcagcatgataaggaccggccgccgtctctcgggatcctcggcggcgtgaccctgacggatgccggggaagcctggcgctatttcccggtaccgctgatgggggaattcctgagcgaatacctgacacaggcgctgattgccggtaaagcggaaaatgctacggtgatatttcagggtaacccggcagacttcccgttccgcaaaaacgaagggcagttccagatttgggtaccgctacgtgacgctacctttaaatatgatcaggaatggcctgctctgataaacatggacgcggatctgaatttccataaccagggtctgtggatcagtgcacaggaagcaaaactgggcgaggccaccgcccgcaatctgaaagcggatattccggatttcatggttgagcgcctctatattcagtctgatattgaaggcaaaggcgaatcactgggtaaatattttgatcagacaccgatgaaaagctctatcggtaataccctggagcaactgaaaatcggtggtgaggttaagggtgatcttaaactggaaatcccgcttaacttcaatgagatggtgcgggcgaccgggcatgttaatctgaaaaataatgatattgatgtggtgccgctcggcagcacactcaaaggtgtcagcggacaattccgctttgataacggcgacctggaaagtgatcgcatcacggcgcactggttcggtcagccgctgaatatccgctttaccaccaaagaaaatccgtctgattttgccgtcaatatcgatctggacggtaactggcagatgaagggcatcgacggcataccggcggccataaaacagcacgtaaccggttcgttcccgtggacaggggtggtgaacattgccctgccgcagaaaggggaaatgagctacaccgtggatctggaaggtcagaccggcaaactgaccagcagcaccttaccggctgtccggcgctgggcggcggagagcggcacactgaatgtgcatgccaccgggacagaacacaccctgaaagccgggggaaccgtcggcaaatcgttcagcgtcctgacggactggcggctcggcgatattctcacgcttaatggtgcggcaatcgttccgggcacaaaagtgccggagaaagtcacgccggatgttatcagtattgccctgccgccgatcagcggtgaggagtgggtcggtgcgctggccgttgccggtcagaatcaccagcagcctgcctcactgaaactgccgggaaatattgatatttccgccccgtatgcggattttgccggacagcgctggaatcaggtgaaactgcgtattcatccgcaggaaaacggctggctgctcagttcggacagtcaggagctgcgcggggatatccgcattccggcttccggaccgtggcaggcaagtattgattatctctactataatccggagtcgattcagaatgccctgccggaatcgcagcgtagtcaaaccaccaaaacggattaccgcgtcggcagctggcctgcggtcacactgcgctgtgaagcctgctgggtgagcggcctgaatatcggtacggtgaatgcgaaagtctggccggaaaataactctctggtgctggatgcggcaacagtcaaaaacagtgccagtgaactgacactcagcggccgctgggatgccggtccggagccattgtcgcactttaaaggtcagtttaaggggccggtctttgataatatggccgcctatttcggggtactggtgcctatcaccggctcaccgttcaatgtggattttgacctgagctggcgggatgttccctggtcgccggatgtggcaaccctgaacggtattatcagcacgtcgctcggcaaaggggcgattgaacgaatgggcggcggaaatgccggtaaactgctgcggctcgtcagttttgatgcattactgcgcaaattacagctcgatttcacggatactttcagtaatgacttcgtttttgacagcatacgcggtaaaggcgtgataaaagatggtattttaaagacaaccgatacccgcgtggacggattaatggcggatatcagctttagcggttcagtttatcttgtggagcgtcgtattgatatgtcggtggttgtcacaccggaactctctgcgacggtcggggtggcgacagcctttgtggttaacccgatagccggagcggcagtctttgtggccagtaaggtgctcggcccgctctggagtaaaatttcggtgatacggtatcacctgagcggcagtttagaagagccgaagatagatgaagttttgcgtcagttaaaggagacccgggaatga

SEQ ID NO: 274791 - DNA, 1470 bp, Morganella morganii
atgacagccgagcttttagttaacgtgaccccgtctgaaacacgggtcgcttatattaccggcgggatccttcaggaaattcatattgagcgcgaggctaaacgcggtatcgtcggcaatatctataaagggcgtgtgagccgggtgctgcccggtatgcaggcggcctttatcgatattggcctggataaagcagcctttctgcatgcctcggatattattccgcacacggaatgtatttccggggatgaaaaagagaaattccgcacccgcgatatcggggaactggtccatcaggggcaggatattattgtgcaggtggtcaaagatccgctgggcaccaaaggcgcgcgtctgaccaccgatatcacgctgccgtcccgctacctggtgtttatgccgggcgcctctcacgtgggggtttcccagcgcattgagagcgaagaagagcgtgagcgcctgaaaaacattgtggcgggttattgtgatgaggacggcggttttattatccgcacggcagcggaaggggtcggggaagaagaactgacctctgatgccgcgttcctgcgccggttgtggaccaaagttatccagcgcaaaaaacgcaataccacccgtaccaaaatctacggtgagctggcgctggcacaccgcattctgcgggattttgccggtgagtcactcgaccgtatccggattgactcccgcctgagctttaaagagttacaggaatttgtggatgattacatcccggaaatgaccgccaaactggaactgtaccagggcagtcagccgatttttgacctctatgataccgaaaatgaaatccagcgggcgatggagcgcaaggtcgaaatgaaatcaggcggatacctgattatcgaccagactgaggcgatgactaccatcgacatcaacaccggcgcgtttgtcgggcaccgcaatctggaagaaaccattttcaataccaatatcgaggccacccaggcgattgcgcggcagttacgtctgcgcaacctcggtggtatcattatcattgatttcattgatatgaccgatgaagatcaccgccgccgggtgctgagttcgctggagctggcgctggccaaagatcgcgtgaagaccactatcaacggtttttcgcagctcgggctggtggagatgacccgcaaacgcacgcgggagagcctcgaacatgtcctgtgcgagaaatgcccgacctgtcaggggcgcggcagtgtccgctcagtggaaacggtctgctatgaaattctgcgcgagattgtccgcgtgcaccatctgctggatgttgatcgcttcctcgtctatgcctcaccggcagtgactgaggcattgcagggggatgaatcccatgccctggcagaggtggagatttttgtcggtaaacaggttcaggttcgcgccgaaccgctctacagccaggaacattttgatgtcgtcatgatgtaa

SEQ ID NO: 274792 - DNA, 612 bp, Morganella morganii
atgctgccgatttaccttgcttcaacctctccccgccgccgggaacttacccggctgctgaatgttcagtgtgaaacactctccccctgtatcgatgaaatccgccgtgacggtgaacccgctgcggattacgtggtacgtctggcgcgggagaaagcacaggccggggtggcactggcagcggaagaccggccggttatcggctctgataccattgtggtgctcggtggtgatatcctggagaagccccgcgatgcggcacatgcctttgccatgctcagcgcactgtccggctgcacacatcaggtgatgacggcggtcgcggtttctgatcgtttccggacactgagtacattgattgtgacagatgtgacattccgccggttatcagatgacgaaataaacgagtatattcagacaggtgagccgatggacaaagccggtgcttacggcatccagggcctgggcgggcgctatgtccgcaaaattaacggtagctatcatgctgtggtgggattaccgttagtggagaccgaagaattaattaagcggtacacggataccctgaacggggttgtaccggaacatattgacgggaaagaaataccatga

SEQ ID NO: 274793 - DNA, 489 bp, Morganella morganii
atgaatacctaccggggacaaaaccggattattgtctggctttcctttctgatagcactggtactgcaaatcatgccctggccggagcagattcagttttaccgtccgtcgtgggcgatgctgtttcttatctactgggtgatggcgctgccgcaccgggtcagtgtcggctccgctttctttctcggcatgatcattgacctgattgaaggttccacgctcggcgtgcatgccctgagcctgtctatcgtcacctatctggtctcattcagacatcagctgctgcgcaatatggcgctgtggcagcagtcgctggtcattatggtgttgtcagtgctgatgcagttctttgttttctggtcagaatttttattgtccgatattgtgtttcatccggaagtcttctggaacagtctggtcaatggtatcttatggccatggatttttttattactgcgtaagacccgccgtcacttttctgttcattaa

SEQ ID NO: 274794 - DNA, 1122 bp, Morganella morganii
atgaagccgatttttagccgggggccttcccttcagattcgcattattgttgcggttatttttgccatcggactgattgtggttgataaccggattgatgcttttaccaaaatccgtaactatctggatacggcggtcagcccgttctattttttagccaacggcccgcgtcagttactggacggtatctctgataactttgccacccgcgagcagctggaatttgaaaaccgcgctctgcgccaggaattgctggttaaaagcagtcagaatcagctgcttgaacaatttaagcaggaaaatgcccggctgcgggagctgctcggttcaccgctgcgtcaggatgagcacatgatggtcactcaggtgatggcgggagccaacaccccgtaccgtgaccaggtggtgatcgacaaaggcagccgtgacggcgtgtatgacggccagccggtgatcagtgataaaggcgtggtgggacaggtgattgccgtgtctcagttaaccagccgtgttctgctgatctgcgataccactcacgcactgccgattcaggtactgcgtaacgacattcgcgtcattgcatccggcaccggatgtactgatgatttacagcttgaaccactgccgaacaatattgatatccgcgtgggggatgtgctggtcacctccggccttggcggccgtttcccggaaggttacccggtcgggatcgtctcttcggtaaaagtggataatcagcgcgcttataccattatcagtgccaaaccgacggctgaccttcagcgtctgcgttatctgctcttattatggggcggagacagcaacccgcgtgagccttccggcccgtctgaggtgtaccgcgcggccaacgaacgtatcatgcaggttatgccgcaggtgatcccgtctgtccagacgccggaaactgacccggctgcggcagccccggacgcacctgccgctccggcaccttccgccggaacgacaccaccgaaaccggccggacctaaacctgcacagccaaaaccggcagacacgccagccactgccgcaccggccgctcaggatccggctgctgattccgcgccggcccggccgctgaggatgaggccgcaacaatga

SEQ ID NO: 274795 - DNA, 1044 bp, Morganella morganii
atgtttaaaaaaattcgtggcatgttttccaacgacctgtcgattgacctgggtacagccaataccctgatttatgtcaaaggacaaggcattgttctggatgaaccgtctgtcgtggctatccgccaggatcgtccgggttcaaccaaaagtgttgctgctgttggtcatgaggccaaacgcatgctgggtcgtacccccggcaatatcgcagcaatccgtccgatgaaagacggtgttatcgctgacttttttgtgaccgagaaaatgctccagcattttatcaaacaggttcacagtaacagttttatgcgcccgagcccgcgtgttctggtgtgtgtgccggtcggtgcaacccaggttgaacgccgtgccatccgtgaatccgcgctcagcgccggtgcacgtgaagtttatctgattgaagagccggtttcggcagctatcggtgccggtttaccggtatcagaagcgaccggttccatggtggtggatatcggcggcggtactaccgaagtggcggttatctccctgaacggtgtggtttattcctcctctgtccgcatcggcggcgaccgtttcgacgaagctatcattaactatgtgcgccgtaactatggttcactgattggtgaagcaaccgcagaacgcatcaaacacgaaatcggttcggcttacccgactgacgaagtgcttgagattgaagtccgcggccgtaacctggctgaaggggttccgcgcggtttcaccctgaactccaacgaaattctggaagccctccaggagccgctgaccggtattgtcagtgccgtcatgctggcgctggaacagtgcccgccggagctggcatctgatatctccgaacgcggaatggtgctgaccggtggcggcgctctgctgcgtaacctggatcgcctgctgatggaagaaaccgggattccggtgatcgtcgcggaagatccgctgacctgtgtcgcccgcggcggcggcaaagcacttgagatgatcgacatgcacggcagcgatcttctcagtgaagaataa

SEQ ID NO: 274796 - DNA, 459 bp, Morganella morganii
atgaccgaaagttatcatatattgttactgaacggcccgaatcttaacctgctgggcacgcgggaacccgataaatacgggacgctcactctcgcggatatcgttacaacgctgacccgcgatgccggtcagtgtggcgttacactaagccacctgcaatccaacgccgagcacgaactcatcgacagaattcatgctgcacggggaaacaccgattttattctgataaacccggccgcattcactcacaccagtgtggctctgcgtgatgccctgctggccgtcagcatcccgtttatcgagatccatctgtcgaatgtacacgcacgggagccgttccgtcaccactcttatctctctgatatcgccaccggcgttatctgcggactgggtgcggaaggctaccgttatgctttacaggcagcggttcaccgtctgtcacaattaactcaacactaa

SEQ ID NO: 274797 - DNA, 462 bp, Morganella morganii
atggatattcgtaaaataaaaaaactgatcgagctggtcgaagagtccggtatttctgagctggaaatttctgaaggcgaagagtcagtacgcatcagccgcgctttaccggttcaggctatggccgtaccacagcaatacagcgcacctgttcagcagcctgctctggcagccgctgttgcaccatccgcaggtcttgctgatccggcgccggaaaaagagattgccggccatgtggtccgctctccgatggtgggtacgttctaccgttcaccaagcccggatgcgaaagcctttattgaagtcggtaaacaggtcaatgtcggtgacaccctgtgcatcgtcgaagccatgaaaatgatgaaccagatcgaagctgacaaagccggtgtggttaaagcaattctgttaaaagacggcgatgctgtcgaatttgacgagccactggtcgtcatcgaataa

SEQ ID NO: 274798 - DNA, 1350 bp, Morganella morganii
atgctggaaaaaatccttattgccaaccggggtgaaattgcactgcggatcctgcgggcctgtaaagagctcgggatcaaagcggttgctgttcactcttctgcggatcgtgatttaaaacacgttctgctggctgacgagaccatctgtatcggtccggcagcctctgcgaaaagttatctgaatatcccggccattatctctgctgctgaaatttccggcgcgcaggccatccacccggggtacggattcttatctgaaaacgctgattttgccgagcaggttgaacgctccggcttcacttttatcggcccgaaagctgaaaccatccgcctgatgggcgacaaagtttctgctatccgtgcgatgaaagaaaccggcgttccgtgtgtaccgggctctgacggcccgctcagcgacgatatgccgctgaaccacaccattgccaaacgtatcggtttcccggtcatcatcaaagcctccggcggcggcggcggacgcggtatgcgcgttgtccgcaatgatgaagatctggaagaagcgattgcaatgaccaaagccgaagccaaagcggctttcaacaacgacatggtttacatggaaaaattccttgagaacccgcgtcacgttgaaatccaggtcatggcggatggtcagggccatgctgtttatctggcggaacgcgactgctccatgcagcgccgtcaccagaaagtggtggaagaagcccctgcaccgggtatcaccccggcgctgcgcaaaagcatcggcgaacgttgtgccaaagcctgtatcgatatcggctaccgtggtgccggtacctttgagttcctgtttgaaaacggtgagttctatttcatcgaaatgaacacccgtattcaggtagagcacccggtcactgaaatgatcaccggtgttgacctgatcaaagagcagctgcgtgtcgcatccggcctgccgctctctgtgaaacaggaagatatcaaagtaaaaggtcacgcgatcgaatgccgtatcaacgccgaagatccgcacaccttcttaccgagcccgggcaaaattacccgcttccactctccgggtggtttcggtgtccgctgggagtctcatatttacgccggttatactgtaccgccgtattatgattcaatgatcggtaagctcatcacctatggtgaaacccgcgaaattgctatcgcccgtatgaagaatgcgctggcggaactgattatcgacggtatcaaaaccaatatcgagctgcaccagctgattatgaatgatgagaacttctgtaaaggcggcaccaacatccattatctggagaagaaactcggcctgcacgaggtctga

SEQ ID NO: 274799 - DNA, 885 bp, Morganella morganii
atgccctggatccaaatacgattaaattccaccggtgctgatgccgaagttatcggtgatgaactgactgaaaccggtgccgtctccgttacctttcaggacagccacgacaccccgatttttgaaccgctgccgggggaaacccgcctgtggggtgacaccgacgtgatcggcctgtatgacgctgaaacggacatgaaagccgttgttgcgcaattacagcagcatccgctgctcggcgaaaactttgtccgtaaaatcgaacagattgaagacaaagactgggaacgcgagtggatggataacttccacccgatgcgtttcggtcagcgcctgtggatctgcccgagctggcgtgagatccctgaccctgatgcggtcaatgtgatgctcgatccgggccttgcattcggcaccggtacccacccgaccacctctctgtgcctggaatggctcgacgggctggatctgaacggtaaaaccgtgatcgatttcggctgcggctcggggatcctggcgatcgccgccctgaaactgggtgcgaaagatgctatcggtatcgatatcgacccgcaggcgattcaggccagcagggacaacgcagagcgcaacggcgtttcagacaggctgaccctttacctctctgataaaaagcctcagacgctctctgcggacgttgtggtggccaatatcctggccggtccgttgcgtgaactggctccggtgatcggcgcactgcctcaggccggcggattactcgggttatccggtgtgctcgccactcaggcggaaggtgtggcagatgcttaccgtgacgtctttgagattgatgagattgccgaaaaagaagaatggtgccggatcaccgcaacaaaacgcggctga

SEQ ID NO: 274800 - DNA, 972 bp, Morganella morganii
atgcgtatcggacaataccagttgaaaaaccgccttatcgcggcccctatggcaggcatcaccgatcggcctttccggtcgttgtgctatgaaatgggcgcgggtatggccgtctcagagatgctctcttccaaccctcaggtctggaagacggacaaatcgagattacgcatggtacacagtgatgagccaggtatccgttctgtgcagatagccggtaatgatcccggtgaaatggcggccgcggcaaagattaatgttgccggtggtgcgcaggtcatcgatatcaatatggggtgtccggcaaaaaaagtgaaccgtaagctggcaggctccgccctgctgcgttatccggcgctggtggaagagattctgaaagcggtggttaatgcggtggacgtgcccgtcacactgaaaattcgcaccggctggtcaccggaagaacggaactgtgtcacgattgcccaattggccgagcgttgcggtattcaggctcttacgatccatggcaggacccgcgcctgtctgtttaatggtgaagccgaatatgacaacatccggacagttaagcagactgttgccatcccggttattgccaatggcgacattactgacccgcttaaagccagagcagtactggactacaccggcgcagacgcgctgatgattggtcgtgctgctcagggaagaccctggatcttccgggaaatccagcactatctggacacaggcgaactgttgccgcccctgcccggtgcagaggtgaaacgcataatgtgtgagcatgtgcgggaattgcacgacttttacggtcaaagcaagggagcccgcatagcccgcaagcacgtttcctggtatatgcaggaacatgcacctgatgttcagtttcggcgcacattcaacgccattgaggatgccggcgaacagctggaggcgttggaggcatattttgaaaattttttgcgtaaataa

SEQ ID NO: 274801 - DNA, 297 bp, Morganella morganii
atgttcgaacaacgcgtaaattctgacgtactaaccgttgctactgtaaattcacaagatcaggtaactcaaaagccgttacgtgactcagttaagcaagcactgaagaactattttgctcaattaaacggtcaggatgttaatgaactgtatgagctggtactggctgaagttgaacagccattgttggacatggtgatgcaatacacccgtggtaaccagacccgcgctgccctgatgatgggcatcaaccgcggtactctgcgtaaaaaactgaaaaaatacggcatgaactaa

SEQ ID NO: 274802 - DNA, 351 bp, Morganella morganii
atgaacacactgcaacaggcattacatcaatcattacaggcggttcaggcggagaattccccggcattaatacacagcgggaaattactgaattttgcaccatcacaaatttcacagctgcaggatgacctgttgtgcctgtacgggcagccgctgccgcgttttccggatccgcaggtgatcagcggcaagctggcggcagcacagcgcctgcaccggcaaattcccgcacagaacggagtgttgtggcagcatttccggaaagaagcctcaaaactaaacccggcggataatgccgcactgaccgatgtgctgctccgctggctgttcacgcatatcgctgccgcctga

SEQ ID NO: 274803 - DNA, 438 bp, Morganella morganii
gtgaaaattgcattgaatgacctggattttattgaccttatcagtgagcggcacacactgctccgtgagcggattgatgcactctggaatgtccggagcgaaattcacatgagtaattcggagtggtatattttatcgagggtgtatgaccagccggtatccatagccgatatttccgcgacagtgaccatctcccgccaggcgattcataaattcatccggcagatggaagagaagggattaatcaccatctttgatgttcagggcagcaagaagctcaagggggtgaaaatgacaccgcacgggcagcaatgctatgacgcctatgaagccatcaaaaccggattgtgtgctgaaattggcgccgctgtcggacaggacaatctcgcgctgatcatccggttatttcagcagccctggtttgatgaaaaacggtaa

SEQ ID NO: 274804 - DNA, 1416 bp, Morganella morganii
gtgactacagaggcagcaatacaggtacgccatccgaaaatgatgctgagcgtactgatggccgggacatttaccggtctgttcggggaaaccgcattaaatatggcgctcaccaatctgatgagccagttttctctctccgccggtcaggcacagtggctggtgaccggctatctgctgaccctggcggtatttgtgccggtgtcggcgtttctggtgcgctggtttaataccagggtactgatcctcacggcgctgtgtgtatcgctcgccggttgtctgattgccgcactggcacccggttttgcggtactgctgctcggccgggttattcaggctatcggtaccggggtgatattgcctgtgatgatgagtgccgcacttctcattttcccggtctatcagcgcgggatggtgatgggaatggtggggattgccattaccctggcaccggcgctggggccgacaatttccggctttattatcaccctgttcagctggcatgccattttctggctcagtgcactggcctatgcagcgattatagtattcgcactgaaatccatcgcgccgattggtgatatcaccaaaccgcgtattgatattctgtctctcctgctttcctccgccggattcagcggcatcatctacgggctggctatcctggcggaacacagcctgcgtgatcctgctgtctggggttccctgctggcgggggttctctgccttgccgtatttgcccgccgtcagacgcacatggcgatgccgatgatccacccggatgtgttccgtaatccgctgtttattattggcctgatcatgatgatcctgagcatgatgagtgtgctctccgccgcgattattcttccggtattcctgaaagatgtgctgatgctgagcgcggcaatggccgggatcctgctgctgccgggcaatattatcaacgtgctgttctcaccacttatcggttttctctataaccggtttgactcacgcccgtttgtggtctgcggctccctgtttatgctgatgagttctgcgctgtttctgtatgccgtcggggagaatgcaccggtgtggcagattgtcgccgcctttatgctcctgtgcctcggtgtcacctgtgtgattatgcctgcgcagactaccgcaatgagtgcgttgcccgcccggttatatgccgatggctccgccgtctggaataccttttatcaggtggccggcgcagtcggtaccgcatcagctatctccctgatgtctttttaccgtgatgcagcggtagtacagcagacagcaaccgctgcactggcgtcggggatccatgccgtattctggctgagcctgctgctcggcctgttatcactgtttttcgccttcttcatgaaaaaaccgcgcccgcacgcagatgcggcgtaa

SEQ ID NO: 274805 - DNA, 2178 bp, Morganella morganii
atgactgcactatactgcacttccctgttccggttttcgctggcggctttactggttgccggcgtctgccatgctgctgaagatgaaatcgtggtcacagccgcaccgcctgccgtcagtccgctggacagcaacggaacataccgcgccacacacagcgacagcgccaccaaaaccgccacaccgctgaataaagttccttcctcggtttcggtgatcagtgaggaggaaatcaccgcccgcaatcccgccacactgaaacaggcgctgggatacacacccggcgtggtgaccggtacgtccggcagttcatccgttttcgacagtgtgatgatgcgcggcttccataatgtcagccagaatatctatctggacggattaaaggtacagggggatatgtatgcggagagccggatgctgccggagtttatgcagcggattgatgtgctgaaaggcccggcgtctgtactttacgggcaatccaatccgggcggcgtggtcaccatgacctccaaacgtccgcagatgaatccgctgcgggaaatccgcttacaggccgggaatcaccacctgtggcagaccgggtttgatctcagtgatgccctgaatgatgaggaaacacaggcttaccgcctgaccggcacactgcatgaccagcatcagcagcaacagggagaacgggaacggtattatgctttacagggctcttatctctggcagccggatgatgccacctctttactgcttaccgcgcaggccatgaatgccccgcgcaacggctattacggctggctgccgcgtgaaggtactgttgacggcggcgctgccgggaaattgtcaaccggtttcaacgaaggcgagccgggctataaccgctttgaacggcagcagcggctgatcggctggcagtttgatcatacattcaatgataactggtcgctgcatcagggcgtgcgttaccagcagatcagcaccaactggcgcactatttacggcagcggactatgcagcagcaatccggcggcctgttacggtgtgccgcagcaggatctctcatccaccctctcccgcagtcatatccgtaatgacgaacggctgtccggcctggtcactgatacccatgtcatccacaacatcagcggccacggctggcgtaataccctgatgacgggcgtggattactcacaactgcgcaaccggatgactaatgagatgggcgttgccaccccgctggatctgcgatcccctcaatacggtaatctgacaacaatgcccctggcagacagcggcactgttaataagaatcaccagaccgggatctacgctcaggatcagctctttctgaaggactggacattcaccctcggcggccgttatgacgagaacaccagtaaatcgagcagccacgataacctcagcggtgcagacaacgcacatcaccagacagacagggaattcacctggcgcggtggtgtgaattatcagctgccttatggtttcgctccgtatttcagctacagcgaatcctttgagccaagcacggcagccactgtcagcggcaaaccgctggatccgtcgcgcggcaaacagtatgaggccgggctgaaatacctgccggaaaatgccgcgctgtccgccacactcgcggtctacgaactgaccaaagacaataacctgcaccgcgacccgctgaacccgtttttcagtgtacagggcggaaaaatccgttcgcgggggattgagctggaaaccaaagccgcactgacctacaactggaacctgattgccggatatgcttataccgacacccgtttccgtcagcaacaggagaatgccggtaatcaccccgcaatggtaccggtgcataccgcctcactgtggacagattatacctttgacaccacgccgctcagtggtctgactgtcggcggcggtgtgcgttataacggcaaaactcagggggatgatgtcaacagcttcaccgttccggcctataccgtggcggatatgatgctgcgctaccggtttgataatcttccggctcttgaggatgcagaaatcgctttgaatatcaacaatctgttcaataagcattatgtatctgcctgctttacggatgcagcatgcagctggggtaatgaccggcagataaccaccacactgacccttcactggtaa

SEQ ID NO: 274806 - DNA, 1473 bp, Morganella morganii
atggaaaacaataaaaaaatcattcgcggcggcacaatcatcacaatggatgatgccaccggcgatattatcaacggcgcgatactgatcgaaggcaaccggatcagtgcaatcagtgctgatatacaggcatttgatcaccacactgatgcgcaggtgattgatgcacaaggggcgattgtcacccccggtatgatcgatgcgcaccgccataactggatggcgctgttccgtggtgtatcagcggaagagtcattaccggcatttcttatcaataccttccatgcgatcggcgcaatgatgacggcagataatatgtacgccgctattctgaacggcaatatcagcgccctgaatgccggcacaacaaccgtttatgaagtgaatgactgcgttaactcaccggaacatgccgctaacgcggttgcggcgatgaaagccagcggtatccgtggcatctacggctatggtatgcaggtttatgattttaaacccgccggctttgcttccatggatgaacggcgcgattgtgcccgtgagatctcagaaactctgttccgtgaccaggatcgcctggctgccggtatgctgatttccgaccccggtacggtaccgtttgctgaatcggcaaaacaaatccgtctggcggataaactcggtctgaaacacgcctcacacaccggggccgccaaaacctcagttctgctgcgcggtctgcgtgagctggacgaccacggtctgttactgccgggacatatccacgctcacagtaacgggctgaccggtgaagactggaaacttatcgccaaaagcggcggtcatgtggcgagcacaccgtccagcgagttacagatggggatgggttttctgccttatcagccgtgtgcggagttcggtattccgttcgcactggggactgatttcatcggtgtgacaacggatgacctgtttacccagatgaatatggcgctgcagattgaacgggcactggcgaatgaaaaagtacatcagcgcgatactatgccgtttgaaattaccccgaccatccgtgaagccctgcactgggcaaccctcggcgcggcacaggtgctgggcatggaaaacgagatcggttcgctggttgccggtaaaaaagcggacatcattattatccgccacaaagacggttttgtggcaccgatccacgcggccggtagtgtggtgcagatgacgcacgccggtgatgtcgatactgtgctggcagatggtgtgatccgcaaacaaaacggtgtgctgaccggttttgatctcccggaagtggtccgtttatcccataacgctctggcgtcgctggaagtacgcatccgtgaccggaaaatcctcaatacgcaggaagtggaagcgttcttccgcctggctgagcggatggcatccttccatttcgctcaggcgtacagtgatgagttttttgcacaggctatgaaacaatcctga

SEQ ID NO: 274807 - DNA, 1566 bp, Morganella morganii
atgtttctgcgcagcattaaaatcagtacgaaacttttcgtggcttttggcttttccattctgctgatggtcatcagcgccacactgtctgttgtcagtctgaataacgccaatgacggtatccgcgatatcctggatgaggattatccgatcacggtaaaagcaaacttactgattgattattttcatgattttgtcggtattcagcaactcctgctgctggatgataaaaaccctcagattcgtcagctggccgccggtgcttctgaaaccagtaaaaaaatcaccctgatcctggatgaatttaatgagacgctgaaggatgaggcatctcagaacatcctgaaagagatccgctcagtccgtcagcagtacctcacctcacagcgccgtatggttcagttctcacaaaacggagatgaagcctccgcaatcaatgagatggtgaataccaccgccggtattcagagcgcttaccgcgatagtgtgatgcagttaatcgccattcaggatgcgcatatgaaagaggcgggaaatcaggtggaaagtaatttcaaaaccaaccgcctcctgctgatcaccctgaccatcatcagtgccatcgtcagtgccgtactggcgcggattattgtggtcagtatcacccgtccgctggataaagccgtgacacttgcccgtgccattgcacagggagatctgacacagcagatcaacgtcacgcatcatgatgaaaccggggtactgcttaatgccctggctgaaatgcaggtgcatttgcaggatatcgtaacagaggtgaaaaacggtgcagtcagcctgtctgccaccgcagagcagattgttgccggtaaccagaacctggccgcccgcacggaagaacaggccgcgtcagtggaggaaactgccgcctcaatggagcagatcaccgcgaccgtgaaaaacaccgccgccaatacccttaaggcaaccacactgtcggcggataccgccggggtggtgaaacacaatggcgaaatgatggagcaggtgacggataaaatccgtatgatcaacacaactgccacccggatgtcagacattatcaatctgattgattccattgcgttccagaccaatattctggcgctgaatgccgctgtggaagccgccagagccggtgagcacgggcgtggttttgcggtggtggccggtgaagtccgcctgctggcacagcgcagtgcggattcagccggtgagatccgcaccctgattgaaaactctgccggtcagacccgcgaggggctgcaactggtggaggaagccgctgaatcactgcgcggtattgtcagtaacgtcagccagatggatgatttactgcatgagataggccacgccagtcatgaacagactgacgggatcactcagatcaacagtgctatcgggctgattgattccgccacccagcagaatgccaccctggtggaacagtctgttgccgcagcctcctccctgaatgagcaggccggtacactgaatgagatggtcggtgtctttcagcttgccggaacgccgtcctctgtatcctga

SEQ ID NO: 274808 - DNA, 1341 bp, Morganella morganii
atggattttgctatccagcttgtcgtggtattgatctgtctgttttacggggcgcgtaaaggcgggattgccctgggtttgctgggcgggataggcctggtgctgctggtttttgtcttccacttaaagcccggaaagccgccggtggatgtaatgctggtgattatcgcggtcgtggcggcatctgctaccttgcaggcatccggaggactggatgtgatgctgcagatagcagagcgtcttctgcggcgtaacccgaaatatgtctctattgtggcgccgtttgtgacctgtctgctgactattctgtgcggtaccgggcacgtcgtctataccatcttacctatcatctatgatgtcgcgatcaaaaataatatccgcccggaaaggccgatggcggccagtacaatagggtctcagatggggataatcgccagcccggtgtcggttgcggtggtttccctggtcgccatgctgggggatgtgaccattaacggcaaacatctgagctttgttgacctgctggcgatcaccattccgtccaccctgatcgggatactgtgcatcggtatcttcagttggtatcgcggtaaagacctggataaggatccggaatttcagtcgtttatcgcaaaaccggaaaaccggaaatacgtctacggcgataccgccaccctgctcaataaaaaattaccggccagtaactggctggcaatgtggatctttctggcctctatcgcggtcgtggcatcactgggggcattttcgtggctgcggccggtttttgatggcaagccgctgtcgatggttctggtgattcagatctttatgctgctggcaggggcattaattattatctttaccgataccaaaccggcatccatttcgaagaatgaagtattccgctcggggatgatcgcgattgtggcggtttacggtatcgcgtggatggcggaaaccatgttcggtgctcaccttgagcagattgagggtgtgctgggatcgctggtcaaagagtatccgtgggcttacgcagtggtgctgctgctggtgtccaagtttgtcaactcgcaggcggcggctctggcggcagtggttccgctcgcgctgatgatcggggtcaatccggcttatattgtggcatccgcaccggcctgttacggctactatattctgccgacctacccgagtgacctggctgctatccagttcgaccgctcaggtaccaccaaaatcgggcgctttgtgattaaccacagctttattgcgccggggctgatcggtgtcggggtttcctgtgtgtgcggctggttcttttccgccatgtacggttttctctga

SEQ ID NO: 274809 - DNA, 684 bp, Morganella morganii
gtgaccactgtactgattattgaagatgaaaaagggatccgccgccttctgcgcactgcgctggaaggggattctgtgcgtgtgtttgaagcggaagatctggcacgcgggctggtggaagcagcgacccgtaaaccggatctggtgatcctcgacctcggtctgccggatggtgacggcatcacctttgtgcaggaattccgtcagtggagttccgtgccggtgctggtgctttccgcccgtgacagtgagcatgacaaaattgccgccctggatgccggggcggatgactatatgaccaaaccctttggtgtcggcgagttacaggcgcggctgcgggtgctgatgcgccgctatcccggcagcgaaaaaaatgatcctgtttatgaattcggggatatctgtgtggatattgccgggcgtcaggtcaggaaaggcggggaggaagtgcatctcacgccgattgaattccgtctgctgaccattcttatcggccacagcggcaaagtgctgactcagcggcagctgctcaatgaagtgtgggggccgaacgccgtcgaacacgcccactacctgcgtatttacatgggacatctgcgccagaaactggaaacggatccggcccgtcctcagcatttcatcactgaaaccggtatcggttaccggtttgtatccgttccctga

SEQ ID NO: 274810 - DNA, 2688 bp, Morganella morganii
atgtatgaagagccactgcgtcccgatcctgaccagttactggcacaggtcacagagcgcccgcgcggaaaactgaagatcttcttcggcgcctgtgcgggtgtcgggaaaacctacgccatgctgaaggaggcgcagcggctgcgtgaacagggcatcgatgtgctggccggggtggtggaaacccacggccgcagtgaaaccgctgccttgctggaagggctgcgcattctgccgctgaaaaagcacaactaccggggacggcaggtggcggggttcgatctcgaccgcgcgctggcgatccatccggcggtgatcctgatggacgaactggcgcacaccaacatccccggcgcccgccacccgaaacgctggcaggatgtggaagagctgctcaatgccgggatcgatgtcctcaccaccatcaatgtgcagcatctggaaagcctgaacgacattgtcggcggcgtgaccggtgttcgtgtgcgcgaaaccgtaccggacccggtgtttgatgccgccgatgaaatcgtgctggtggatttaacgccggacgacctgctcgacagactgcgcgagggtaaagtgtatctccctgctcaggcggagcgggcgattgagcactttttccgcaaaggtaatctgctggcactgcgtgaactggcgctgcggcggaccaccgaccgtgtcgatgaacagatgcgcgcctggcgggagcggaaagggcaggagaaagtctggcacacccgggatgcgattctggtctgtctgcgtccggacggcggcaatgaaaaactggtgcgtgccgcagcccggctggcggcacggctcggcagtgactggcatgcgatttttgtcgaaactcccgcacggcataaactgccgtcaccgcagcggcgtactatcctcaccaccctgtcgctggcgcagcaactgggggccaccaccgcaaccctggcggagccggaagagagccgcgcggtgatccgctatgcgcgggagaacaacctcggcaaaattatgattgtccgccatgagcggacatcctggtggcggcgcgacaaattacaggaacagctcagccgcagtgccgctgatctggatgtggtgatgatcgctccgcaggaccggcagccggaaaaccgcgaaaaattcagcgacaaccggccgttcctggataaacacaaaaccgatttacagggttgtgttgttgcggcactgatttgtgccgtcactaccctgatggcgcatcactggctgatggcctttgataacgccaacctggtaatgctctatatcctgggcgtggtggtggtggcgcggttttacgggcgctggccatctgtgtttgccaccattattaacgttatcagctttgatatctttcttatcaacccgaaaggcacgctggctgtctcggatatgcagtatctgcttaccttcgcggtgatgatgaccgtcgggctggtgatcggcagcctgactgccggtgtccgttatcaggctcgggtggcgcgttaccgtgagcagcgcacctggcatctgtatgaaatgtcgaaagcgctggcggtggcgcgggaatctgatgatatcgcctctgtcagttgtcactttatcagccacagcctgcatgcccgctgcgaaatgctgctgccggatgagcagggtaacctgatcccggccgggggcggggtggcggataacggccgtgacgatgccatcatccgctggagttatgacaaaggccagcccgccgggttcggcaccggcacactgcccggcgtgccgtatcagattttgccggtctgcacgacagagaaagtgtacggcgtggtgattgtggagccgtataaccgccgtcagttgctgatccccgaacaacagcggctgctggaaactctgatcctgctggcagccggggcgctggaacgccgcacgctgacagagcgtgaggcgcaatcgcggctggtcagtgaacgcgagcaggtgcgtaactcgctgctggcagcgctgtcccatgatctgcgcacaccgctgaccgtgctgtttggtcaggcagaaattctgacactggatctgaccagcgaaggctcgccatatgccgcgcaggccaatgagatccgccagcacatcctcagcaccacgcggctggtcaataacctgctggatatggcgcggatccagtccggcggctttaatctcaataaagagtggctgccgctggaagaggtgatcggcagtgcccttcaaatgctgaaaccgcgctttgacacagattcggtgcagattgacctcaatgacccgatgcagctgatttgcgcggatggcccgctgtttgaacgggtgttgatcaatctgctggaaaacgcgataaaatacgccgggccgcaggcgcagattggcatccgctcgcggttgtcggacaatatgattgatattgaagtctgggataacggcccgggtatcccggccggacaggaagcacagatatttgagaaattttcgcgcggccagaaagaatccgccattccggggattggcctcgggctggctatctgccgggcgattgccgaagtgcacggcggcactattttagccggaaaccgtgacgggggtggcgcaagcttccatatccgtctaccctgtgaagacccgcccgtgattgatgaagatgataacccgttgtga

SEQ ID NO: 274811 - DNA, 591 bp, Morganella morganii
atgagtcagatacgtcccgcaatcataatatttctggttctggcactggtaacaggggtattttatcctctgctgaccacctcgctcggggaatggtggtttgcccgccaggccaacggctcactgattgaagtgaataacgaagtcaaaggctcggcgctgatcggccagcagttcacacagcccggctattttcacggacgcccgtcagaaacagcagagcatccgtataatgccctgagttccggcggcagcaacctgagcaccggtaacccggaactgttacagcgggtggcgcagcgggcagaaacattaagggcggaaaacccggatgcttcccgtttggtgccggttgacctggtgaccgcctctgccagcgggctggatccggatatctctccggaggccgcttactggcaggctgcgcgggtggccaaagcacgtaatatgacacaggcggaggtggaaaaactgatccgtgaacatatcaccactccggtgcctgcgtttaccggtgtgccggtcgtgaatgtgctggcactgaatctggcactggatgcacatgcggcggacaaaaccagcctgaactaa

SEQ ID NO: 274812 - DNA, 2049 bp, Morganella morganii
atgagtcgtcagacacagcgattatttgaacccgcactggtgcgccgcgcactgccggatgcattccgcaagctctcgccggtggtgcagtggcagaacccggtgatgtttattgtctggtgcggcagcctgctgaccacactgctggctgcgggaatgttaagcgggcttatcagcggtaacggcggatttaccctcaccgtcgccctgtggctgtggtttaccgtgctgtttgccaacttcgccgaagcgctggcggaagggcgcagcaaagcgcaggccgacagcctgaaagggatgaaaaaaaccagccgtgcacggcgtctgcatgcggcacagcgcgacagtggttttgatatggtctccgctgataccctgcgcaaaggggacttggtgctggtggaagcaggggatctgatcccgtgtgatggtactgtgctggaaggcggtgcatctgtggatgagagcgccattaccggggaatccgcaccggtgatccgcgaatccggcggcgattttgcctctgttaccggcggtacccggattctgtccgactggctgattattgagtgcagtgccaacccgggcgatagcttccttgaccgcatgatcagcatggtcgaaggtgcgaaacgcagcaaaacgccgaacgagattgccctgaccatcctgctggctgcgctgagtattgtgttcctgctggcggtggcgacactctggccgtttactgcctataccggccatccggttactctgacagtgatgatcgcgctgctggtctgtctgatcccgaccactatcagcggcctgctttcggctattggtgtggcagggatgagccgtatgctggccgccaatgttatcgccaccagcggacgcgcggtggaagccgccggggatgtggacgtgctgctgctggacaaaaccggcaccattacgctgggcaaccgccaggcctctgctttcctggccgcacccggtgtggatgaaagaacgctggcggatgcagctcagttgtcatcactggcggatgaaaccccggaagggcgtagtatcgtggtgctggcaaaacagcgtttcagcctgcgggcgcgggatctggaaagcctgaatgcgacctttattccgtttaccgcccagacccgcatgagcggcatcaatgtggacggacgcactatccgtaaaggttcggtggatgctatccgccgctatattgaggctaatcacggtcatttccctgcacaggtcgacaagctggtggaagaggttgcacgcagcggcggtactccgctggtagtggccgaagagcatcgtgtgctcggggtgatcgccctgaaagacatcgtaaaaggcgggatccgcgaacgctttgcacaactgcgccagatgggtatcaaaaccgtgatgatcacgggggataaccggctgactgctgcggcgattgccgccgaagccggggtggatgatttcctggcggaagccaccccggaagccaaactggcgctgatccgtcagtatcagaaagaagggcggctggtggcaatgaccggcgacggcaccaatgatgcgcctgctctggcgcaggcggatgtcgcggtggcaatgaactcaggcacccaggcggcaaaagaggcggggaatatggtcgatctggactccaacccgaccaagctgattgaagtggtgcatatcggcaaacagatgctgatgacacgcggctcgctgaccacattcagtatctccaatgatatcgccaagtattttgccattatcccggcggcgtttgcggtgacctatccgcaactggatgcgctcaatatcatgcgtctgcattcaccggattccgccatgttaagtgcggttatcttcaacgccctgattattgtctttctgatcccgctggcgctgaaaggggtgccgtaccatgccctgagcgccgcacagatgttacgccgtaatctgtggatctacggtctgggtggcctggttgtgccgtttattggtataaaattgatagatatgttactgaccctgacagggttagtataa

SEQ ID NO: 274813 - DNA, 1683 bp, Morganella morganii
atggccgcgaatgcctttttacttatcgccgggtttctgattgttttgctgattgcggcaaaactgctcagtaacctgctggtctgctttattgacggtacaccgctgccggttctgcgccgtgtggaaggtgtgctgtggcgctttgcggggattggccgcgacgagatgcgctggcagggatatctgacagcactgctgctgtttaatgcgctgggactgattttcctgacggcgatcctgatgctgcaggcggatttaccactcaatccgcgtcacttcccggggatgtcatgggatctggcgctgaacacggcggtcagttttgtcactaataccaactggcagtcttacagcggggaatccgcagtcagctatttcagtcagatggccggactgacagtacagaacttcctgtctgccgccaccggtattgctgtggcgtttgccctgatccgcgctctgtgccgccgttctgtgcagacactcggcaatgcgtgggcggatctgacccgcatcacgctgtggctgctgctgccgctctccgtgattattgcgctgttctttatttcgcagggcgtgattcagaacttccatgactaccagaccattatcaccccggaaggcgtgcagcaggtgctgccgatggggccggtggcctcccaggaagcgattaaactgctcggtaccaacggcggcggcttcttcggtgccaactcagcgcatccgtttgaaaacccgaccgcactgaccaactttgtgcagatgctggcgattttcctgatcccggcggcactctgttttgcattcgggcgctgtgccggtaacccgggccagggccgtgcactgctggccgcgatgaccattgtctttgttgccgccgctgtggcggtgatgtggagcgaaactcacggtaatccggcttttgcggggatgggaatcgacagcaccttcaatatggaagggaaagagagccgcttcggtatccttgccaccgggctgtttgtggcggtgaccactgccgcctcctgtggtgcggtgaacagcatgcatgattccctgactccgctgggcggcctggtaccgctgtggctgatgcagatcggtgaagtgatcttcggcggcgtgggtgccggtttctacggcatgatgctgtttgtcttcctcgccgttttcatcgccggactgatgattggccgcacgccggaatacctcagcaaaaaaatcgaggtgcgggagatgaaactgaccgcgctggcgattctggtcaccccggcgctggttctcggcggcacggcgctggcgatgatgacggaggccggacgcggcgcgatgcttaacccgggcgctcacggcttcagtgaagtgctgtatgccctctcatccgcttcaaataataacggcagtgcctttgccgggctgagcaccaacaccccgttctggaacctgctgctggcattctgcatgctcgcgggccgcttcgtggtgattgcgctggtgatgatgctggcaggttcgctggtcagcaaaactatccggaccgccggagcaggtacactgccgacaaccgggccgctgtttaccgggctgctgatcgtcgcaatattgctgatcggcgcactgacctttgttcctgcactggcactggggccggtggcggaatttcttgatttacttaagtga

SEQ ID NO: 274814 - DNA, 471 bp, Morganella morganii
atgactgaatataattttgtaataaaaacggatgatttatcctcaccgcaaaccggcgcactgattgctctgcatttacaggggatggcacagaatacgccgcaggagcatgtttacgcgctcggtaaaaacggcctgcgggcggataacatccgtgtctggagtgtgtgggacggtgaccgtatcgcggctgtcggggcgctgaaacaaatttctgccgcacagggcgagataaaatcgatgcgggctcacccggattttcgcggcaaaggggcgggtaaactgctattgctgcatattattgcacaggcaaaacagtgcggcatgacccgcctgagcctggagaccggctgccatccggattttgaaccggcactggcactgtaccggcgctgcggttttcagtccggggcggcgtttggtgattatcaggccggtgaacataatcagtttttccatctggatctttga

SEQ ID NO: 274815 - DNA, 864 bp, Morganella morganii
atgaaaaccgccataaccgcaggactcctgtttgccttactgtttgctgccgccccgcttcaggcaaaacaggcagcaatacagcagaccgaagccagagcactgagcggcaatattaccgcgcagataacgctggccgataccttccgcgcaaaacaggatattgtgcaggccaaatactggtaccggaaagcagcggaacagaacaatccttatgccaagaatgagctgggaaaactgatcctgctcagcgatcagtccgtgacatcattacaggaagccaaagtctggtttgaaaaagccgcagtacagaaatacgcgccgggacaggtgaatctggccaatgtgtatcttcatcttactgatttaaataaccgtgacagcaaagagatggtgctggcacattactggtttgaacaggccgccaggcagaatatggcggttgcccagtatcagctggggatgatgtttttatatgccgaaggtgcagagcaggatgtcagcaaagccagaacctggttcgagaaagccgcatcacaggatcagccggatgcgctttatcagccgggggtgatgtattatcgcggaaaaggctgtgaacgcggtgattgcgttattgcccggaatttttatgagagagcggcagcacagtcacacggccccgctcagttttacctcgcgatgatgtatctccggggacacggcgtgccgcaggattatgaaaaaggtgtggcactgatgaaagcctcctgtgacaacgatgagccggaagcctgcccgtgggtaaaaaatctgacagaaaatgaggacaaattccgtcagattttttccggaaaacagtcatccgatcagccgcccagatag

SEQ ID NO: 274816 - DNA, 702 bp, Morganella morganii
atgctggaatttataaatgtctccgcgcagtacggtaaaattcaggcgctgcatgaagtcagcctgtcggtgcgcaaaggggaaatagtcaccctgatcggcgcgaacggtgcggggaaaaccacactgctcagcacgctgtgcggggaaccgcgggcgaccaccggcgagatccgctacctcggggagaacatcacggcactgccgacggcgcagatcatgcgcaaagatattgcactggtgccggaagggcggcgggtgttcgggcggatgacggtggaagaaaatctggccatgggcggattttttgcatccaaaacgcagtatcaggcacggattgctcaggtatatgagcttttcccgaggcttcaggaacgccgccatcagcgggcgggtaccatgtccggcggtgagcagcagatgctggctatcggccgcgcgctgatgagcagccctcagctgttactgctggatgaaccgtctctcgggctggcgccgattatcatcatgcagattttcgataccatccgtgaactgcgcgatgcgggtatgacaatcttcctggtcgaacagaatgccaaccaggcgctgaaactggcagacagaggttatgtgcttgaaaacgggcgggtcgtgctggaggataccggtcaggcgctgctggtgaatgaagcggtcagaagtgcctatctgggcggctga

SEQ ID NO: 274817 - DNA, 771 bp, Morganella morganii
atgaccgataccttattgcaggtctccggcctgaccatgcgtttcggcgggttgctggcggtgaacaatgtgtcgctggaactgaaccggggcgagatagtttctctgatcggccccaacggtgcgggaaaaaccacgatcttcaattgcctgaccggcttctacaaaccggcgggcgggcagatcctgctgcgcggaaaaccggtgcagggattatccggacaggcaatcgcccggctcggtatgatccgcaccttccagcatgtgcgtttattccgggaaatgacggtgattgaaaacctgctggtggcacagcatcagcatcataaaagcggattacttgccggactgctgacgctgccttcattccgccgtgatcagcgcgaagccacggagcgtgcggtgatgtggctggacagaatcgggctgacagcgctggcgaaccgccaggcgggtaacctggcgtatggtcagcagcggcggctggaaattgcccgctgtatggtgacccggccggatattctgatgctggatgaacctgcggccgggctgaacccgaaagaaacggacgatctggatgcactgatcgcggaactgcgggcggagcacggcgtgtctgtcctgctgatcgaacatgatatgaaactggtgatggggatttcagaccggatctatgtggtgaaccagggaacgccgctggcaagcggcaccccggcggcgatccgcaaccatccggatgtgatccgcgcgtatctgggggaggcatactga

SEQ ID NO: 274818 - DNA, 1284 bp, Morganella morganii
atgacaaaatctcactggatcaacgccattgttgccaccgcaacgctgtttgtgctggcctccgtgatgatggggctgcaattgtccctcgacggcacccgtctgattgtccgcaacgccgatgctgtccgctgggagtggatcggcaccggttgtgtgattgtctttatctttcagctggtgcgcccgtcactgaaaaaactgacggcgcgtctgccgaaaagcagctgctcgctgccgggttttgacggctccaccaatacgcagaaaattattgccggactgattattatcgctgccattatctggccgtttatggtgtcacgcggcagtgtggatatcgccaccttaacccttatctatgtgatgctcggactcgggctgaatgtggtggtcgggctgtccggcctgctggtgctgggctacgccggattttacgccatcggggcatacacctacggactgatgaaccactatttcggctggggattctggcagagtctgccgctggccggtattgccgcggcgttgtccggcctgctgctcggcttccctgtgctgcggctgcgcggggactatctggcgattgtgacacttggcttcggggaaattgtccgtattctgctgctgaataatacggagtttaccggcgggccgaacggcatcagccagatcccgaaaccgaccctgttcggactggagttcagccggaccgccaaagagggcggatgggatactttccataatttcttcggtctgtcgtatgacccgggcgatcgcattatcttcctgtatctggttgcgctgctgctggtactgataacactgtttattatcaacaggttactgaggatgccgctgggcagggcctgggaagcgctgcgcgaggatgaaattgcctgccgttcgctggggctcagcccgacgcgtattaaactgacggcattcaccatcagtgcggcctttgccggggtggcgggaaccttatttgccgcccgtcagggctttatcagcccggaatcctttacctttacggaatcggcctttgtgctggccgtggtggtgctggggggtatgggctcacaaacctcggtgattctggccgccgttatcctggtggtttcccgcgaaatgatgcgtgatctgaatgcttacagcatgctgttgctcggggcgctgatggtgctgatgatggtctggcggccgcagggattactgccggtatcgcgcccgcacctgaaagtcagcacaacggatgcggaaaaaaccggaggtgcgcaatga

SEQ ID NO: 274819 - DNA, 927 bp, Morganella morganii
atgtcagaacaattattatattttacgcagcaattgctgaacggattaacgctgggaagcacttatgccctgatcgccatcggttacaccatggtgtacggcattatcggtatgattaactttgcccacggcgaagtgtatatgatcggcagttacgtctcgtttattgtgattgccgggctgatgatgttggggattgatgtcggctggctgttaattactgctgcatttattacagcgataattattgccagtgcctatggctggagtatcgaacgggtcgcttaccggcccgtccgtcactcaaaacggctgattgccctgatttcggcgatcgggatgtccatttttctgcaaaactttgtcagcctttcccagggttcccgcgatctcgcgctgcccgggctgattaacggccgctggaccttcggggagagcggcggtttctccgccacggtttccgctatgcagatcaccatctgggtggtgacggtgctggcaatgctggcgctgaccctctttatccgttactcacggatgggacgcgcttgccgggcctgtgcggaagatctgaaaatggccggtttactcgggatcaacaccgatcgtgtgattgcactgacctttgtgatcggtgcggcgatggcggcggtggccggggtgctgctggggcagttttacggcgtgatcaacccgtacatcggctttatggccgggatgaaagcctttaccgcagcggttctcggcggaatcggcagtattccgggggcgatgatcggcggggtgatcctcggtgtatcagaagctatgacctccgcctatttcagtacggaatataaagatgtggtttcattcggcttgcttatccttgtgttactggtgatgccgaccgggatcctcgggcgtccggaggttgaaaaggtatga

SEQ ID NO: 274820 - DNA, 1113 bp, Morganella morganii
atgaaaaaaacaatgaaaatggcaatcattgccggggctgtatcctgtgcattaagtgcagcggcgtacgctgaagatattaaagtcgcggtggtgggcgctatgtccggaccggtcgcacaatacggtgatatggaatttaccggtgcccgccaggcgattgaggacatcaacgccaaaggcggtattaacggcaataaactggtgatcaccgaatacgatgacgcctgtgacccgaaacaggcggtggcggtcgccaacaaagtgattaatgacggcatgcgttatgtgatcgggcacctctgctcctcctccacacaacccgcgtcagatatttatgaggacgaagggatcctgatgatcaccccggcggcaaccaatgcggacttaaccacgcgcggttacaacctgatcatgcgtaccaccggcctggattctgaccagggtccgaccgccgcaaaatatatcctcgaaaaagtgaaaccgcagcgcattgccgtggtgcatgacaaacagcagtacggtgaaggcctggcgcgttccgtgaaagacaatctgaacaaagccggggtgaaagaagtgctgtttgaaggggtgacggcgggtgataaagatttctccgcgctggtggcgcgcctgaagaaagagaatgtcgattttgtctatttcggcggctactacccggaaatgggacagattttacgccaggcaaaacaggcggggctgaatatccgctttatggggccggaaggcgtgggtaactcctcactctccaacattgccggtgacgcatctgaaggcatgctggtgacactgccgaaacgctatgaccaggttcctgccaacaaaccggtggtggatgccctggcggcgaaaaaactggattccaccgggccgtttgtctggacaacctatgcggcactgcagtccctgactaccgcgatgcagcgcagcggcagcatggagccggcggatctggccgctgacctgaaagctaagccggttgacaccgtaatgggcgaactgagctggacaccaaacggggatctgaaaggtttcgagttcggcgtatttgaatggcacaaagacggaacctcatcaccgctgaactga

SEQ ID NO: 274821 - DNA, 210 bp, Morganella morganii
atggggcttatcctgtgggtgaaagaaaaactgcacttcggtccgtgcagcgatctgacacaatatgattatgaataccgggaaatggcgatagaagaaggtcaggtaccgattacgcaaaccacgcaactcgtgccggaaaaaccggctggtttcgcctacacctgttataaatgggatccgtacggaaactgcgaatacagaccatga

SEQ ID NO: 274822 - DNA, 1137 bp, Morganella morganii
atgaaaatagtgattgcaccggattcatttaaagagagtctgaccgcccttcaggtcgccgatgcggtggaagcgggattcagaaccgttttccctgatgcgcagtacatcaaactgccgatggcggacggcggcgagggcacagtggtctctattattgaagccacacagggaacactgaaagaaaccgaagtcacggctccgctggggaataaagtgaccgggttttacgggctgtccggcgatggtaaaaccgccattattgagatggccgcagcttccgggttacatctggtgcctccggcacagcgggatccgcgtgtgaccaccaccttcggcaccggggaacttatcctggcggcactggatgacggcgcggagaaaattatcctcgggatcggcggcagtgccaccaatgacggtggtgccgggatgatgcaggcgctgggtgtggtattccgtgatgaacaggggaactcactgccgttcggcggcagtgcgctggcaaaactggcttccgtggatctatccgggctggatccgcgtctggcgaaaacagagtttgtggtggcctgtgatgtgaataatccgctgtgcgggccgaaaggggcatctgccaccttcgggccgcagaaaggcgcgacaccggcgattgtcagcgagctggatgcggcgctgcgtcattacggggaggtaattgaatccctgaccggtaagtcactgagtgatgtcgcgggtgccggagcggcaggcggcatgggcgttccgcttatggcatggcttgatacgcggatgcagccgggcatcgaaatggtgatcgaaacactggatctgaactcggtggtgaaagatgccgacctggtgatcaccggggaaggacggatggacagccagacgattcagggaaaaaccccggcgggtgtggcgaacgccgcaaaagcgcggggaattccggttattgcgctggcaggcgggatgagcgaggactatgctgtcgtgcatgagcacggtattgatgctgtgttctcagtgatcccgcggatttgctctctggatgaggcactggcacaggcggcggttaatattgaagtggccgcccgcaatatcgctgcggtactggcgatgaaaataggataa

SEQ ID NO: 274823 - DNA, 1269 bp, Morganella morganii
atggtgactgtttcagctttgggcgcaatggttgcgctggtcgtggcgatagggttaatactgaaaaaagtaccgccggtatacgggatgatggcgggggcgctggccggaggattggtcggcggcgcggatctggtgcagacggtgacactgatggtgaccggtgcccaggggatcactaacgcggtgctgcgtattctggcggcgggtgtgctggccggggtactgattgagtccggtgcggcaaataccattgcggaaactattgtccgcaaagtgggtgagaagcgggcgctgctggcgctggcggtggcaaccctgttactgacagccgtcggtgtgtttatcgacgtggcggttattacggtttcaccgattgcactggcgattgcgcaccgcgcggatctgtccaaaatggcgattctgctggcgatgatcggcggcggtaaagcggggaacgtgatgtcaccgaacccgaacaccattgcggcggcggataactttaacgtgccgctgacatcactgatggcggcggggattatcccgggcattttcgggctgatcgtggcatattttctggcgaaacgtctggttcaccgtggttcaaaagtgacacaggaagagctgattgcggctcaccatgacggcagattgccgggcttctgggcggcgatgagtgcaccgttggtagctatttttctgctgtcactgcgtccgatcgccggtatcagcattgacccgctgattgcgctgccgctcggcggcctggccggtgcgctgattatggggcgtatccgtcagtccaatcactttattacctccggactgagccggatggcaccggtggccattatgctgctgggaaccggaaccctggcggggattatcgccaactccggtctgaaagatgtgttaattaacggcctgacggcatccggtctgccatcctatctgctggcaccgatttccggggcactgatgtccatggcaaccgcgtccaccacagcgggtacggcggtggcctctgcggtattcagctccacgctgcttgatctgggtgtgagtgcgctggccggggcggcgatgatccacgccggtgcggtggtgctcgaccagatgccgcacggcagcttcttccatgcgaccggcggcagtgtcaatatgcaggttcatgagcgtctgaaattactgccttacgaaactatggtggggctggtgatcgcgattgtctccacactgattttcggtgtcttcgggtttggcgggtaa

SEQ ID NO: 274824 - DNA, 126 bp, Morganella morganii
atggcggcagccatcaggttaagcttgagaggttccgacaaaaaagaacgggctgaaaccgcgtattttgtacaaacgcacaaatcacagatcggtcagaataccaaaataaagctgaatcattga

SEQ ID NO: 274825 - DNA, 1122 bp, Morganella morganii
atgacaccggttcagctcgatcagcgcaccgcccggctgattgttcagcgggcgatgcaaatcctcagttactccgtgaatgtgatgaacgcacagggagtgattattgcgtccggtgacccgcagcgggtcaatcagcgtcacgagggcgcggtgctggcgctgacagaaaaccggattgtggaaattgatgaagccaccgctgccacgctgaaaggcgtgaaaccgggtattaatctgccggtgattttccgcgataccatggtgggtgtggtcgggatttccggcaaaccggatgaagtgcgcaactacgccgaactggtgcgcatggcggccgaattagtgctggagcaggccgatctgctggaaaaatcccagtgggatcgtcgttaccgtgatgagctggtcagccagctgataagcccggagcagcagccgcagtcagtaaaatctatcgccgcctatctcgggatctcccccgataaaccccgcattgccctgatcctcgcgctgccagcgccggatcacgagcagtttcaccgtctggtggactatattgataatctgaaaatggatctgctggtcagtatccggggaataaattccctggtggtactgaaacctgtggcctgtgatgcggattttcagccgctctctccggtgcagaagcagttacaggcgctgcgccgccagctgccggatctgctgatgtatgtcggcggtttctttcacggacaaaatggtctgcaccgctcctggcagagtgcctgcgccgtgcagcaactgggacagactccggcgtacagccgccagaaaaccattttttatgatgaagttaaattacccgcgctgttacagggatttcaggagagctggcaggccgctgaactggcttccgcctggcagaaactgaaagcggcggacagccgccgtgtgctgtgtcataccctgaagacctattttgatcagaattgtgatctgtctcaaaccacaaaaacgctgcatattcacacaaataccctccgttaccgccttcagcgtgttgaatcgattacgggattaaatatcaataaattagaatcaatgattcagctttattttggtattctgaccgatctgtga

SEQ ID NO: 274826 - DNA, 246 bp, Morganella morganii
atggctttttcgtctgaagacaaggcagttttactggcggtaaagggcgtgggcacgaaagttatcgaacgccttgagcagatgggtttttctgatcttaaccagcttgccgccgcagatgcccaatccctgctgagtgccggtgcggcactcaccggctccacctgctggcgcaacagtccgctggccagaaaagccattgagtctgccattgcggcagcacgccaggcacagaatccgtcctga

SEQ ID NO: 274827 - DNA, 855 bp, Morganella morganii
atgactaaagatacgcaattccctgttttagttccgcaagggagcattgaggcctatatccgggcagctaaccagtatccgatgctgacagccgaagaagaaaaagagctggctgagcgtctgtattatgacggcgaccttgaggccgcgaaaaaactgatcatgtcgcatctgcggtttgttatccatgtcgcccgcagttattcaggttatggcctgcctcaggcggatcttatccaggaaggcaacatcgggctgatgaaagccgtgcgccgttttaacccggaaatgggtgtgcgcctggtgtcgtttgcggttcactggatcaaagctgaaattcatgagtatgtactgcgtaactggcgcatcgttaaaatcgccaccaccaaagcacagcgcaaactgttttttaatctgcgcaaatccaaaaaacgtctgggctggtttaaccaggacgaagtggaaatggtggcgaaagagttgggggtaaccagcaaagatgtgctggaaatggaatcccgtatggcggcgcaggacatggcatttgatatgtccgatgacgacgacggcgatcaccctgtggtggcaccggcactgttcctggaagataaatcctctgatttcgcggatgaaatcgaggaagataactgggataaccacgccacggacaaactcaccctggcgattgattcactggatgagcgcagtcgtgacattatccgtgcccgctggctggatgatgacagcaaaaccaccctccaggaactggcggataaatacggcgtttctgcagagcgcgtccgtcagctggaaaaaaatgccatgaaaaaactgcgcgaggcgattgagggctga

SEQ ID NO: 274828 - DNA, 972 bp, Morganella morganii
atggctaaacaaccgcgtaaacccgtaaaaaaaatgccgtccaaagccaaagcgctgaaaggcggctggcgggaacagtggcggcatgcgtgggtaaacacgctgggcgatatgctgcgccagccgctgtcaacactgctgacagtgatggtgattgcaatctccctgacactgccgagtgtcttttatatcgtctggaaaaacgtcagccatgcggcggaacagtggtatccgaccccgcaactgaccgtttatctggataaaggtctggatgaacagggcggtcagaaactggcggacgagctgaaagcgctcgacggcgtggagagcgttaattatctctcccgcgaccaggcgataaccgaattccgcgcctggtccggattcagtaccgcgctggatatgctggaagaaaacccgctgccggcagtggctatcgtcacaccgaaagtggatatgcagagcagcgaaacgctctccaccctgcgtgatcgtgtcacggcactgtccgggattgatgaggtgcggatggatgacagctggtttgcccggctggcggcactgaccggcctggtggggcagattgcctcgctgatcggggtgctgatggttgtggccctgttcctggtgatcggcaacagtgtgcggctcaatattttcagccgccgagaaaccatcaatgtgatgaaactgatcggtgcgacagacggttttattctgcgcccgttcctcaacggcggaatgctgctcggggcgttcggcgcaatattgtcactggtgttatcctctctgctggtctggaaactgggggatgttgtgacggatgtgtccaaaattttcggcaccacatttgcactgaccgggctggactgggacgaagcactgctgattgtgctggtgtccggtatgattggctgggttgccgcctggctggcaacggtccgccatttacggaattttatgccgcagtaa

SEQ ID NO: 274829 - DNA, 666 bp, Morganella morganii
atgattcgctttgaacacgtcagtaaagcctatttaggcggccgtcaggcgctccagggggtggatttccatatccgcccggcggagatggtcttcctgaccggccattccggcgcagggaagagtaccctgctgaaactgatttgtgggattgagcgacccagtgacggcaccattttatttgacggccacaacatcagccgtctgaaaaaccgtgaagtgcctttcctgcgccgccaaatcggcatgatttttcaggatcaccatctgctgctggatcgcacggtatatgacaatgtggcgatgccgctgatcattgccggtgccagcccggaagatatccgccgccgcgtcagtgccgcgctggataaagtcggtctgctggataaggcccgtaacttcccggtgcagctctccggcggtgaacagcagcgcgtgggcattgcccgtgcggtggtcaataaaccgatggtgctgctggcggatgaaccgaccggtaacctggacagtgagctgtcagaaggcattttacggctgtttgaagagtttaaccgtgtgggtgtcaccgtactgatggcaacacacgatatcatgctgattgaacggcgtaattaccgcgtgctgacgctgagtcagggacgcatggcgggaggtcatcatggctaa

SEQ ID NO: 274830 - DNA, 1671 bp, Morganella morganii
gtggcaaaagagaagaaaaaaggttttttttcctggctgggttttggccgtaaagaagatgaacaggcgcagcaggaacaggcggctcaggaagaacaggcacgtttagccgaagaacaggtccgccgtgatgcagaggcagcggaacaggcacgtcaggcagaagaaaaacgtcaggcggaagaacaggcggctgagcagcagcgtgctgaggaagaacagcgccgcctgaaagagcaggcactgcgcgatgcggaagccgcgaaacagcagcgtctggcagaagaaaaacgcctggcggaagaacaggctgcagagcagcagcgtgcggaagaagaacagcgccgtgcgcaggagcaggcactgcgcgatgcggaagccgcgaaacagcagcgtatcgcggaagaaaaacggctggcggaagaacaggccgcagcacagcgccgtgcggaagaagaacagcgccgcgcggaagagcaggcactgcgtgacgcggaactcgcgaaacaacagcgtatcgcggaagaaaaacggctggccgaagagcaggccgcagaacagcagcgtttagctcaagagcagaaacagcgtgatgccgaagcggctgaacaggtgcgtctggccgaagaacagcgtcttgcgcaagaggaagaggcacgccgtctcgcggaagccgaagcggaagcacaggacgcggcactggttgaaaatgaatccccggcaccggcggatacgcaggaaagaccggcaaaagaagggttctttgcccgtctgaaacgcagcctggtacgcacccgtgagaatatcggttccggtttcttcgggatcttccgtggcaaaaagatcgatgacgatctgtttgaagagctggaagaacaattgctggtggctgatgtcggtgtggaaaccacccgtaagatcatcaccagtctgactcagcatgccagccgccgtgatctgaaagacgcggaagccttattcgtcaaactgcgcgaagaaatgggcgaaatcctggcaacagtcgataagccgctggaaattgaagataaaaagccgtatgtgatcctgatggtcggcgtcaacggtgtcggtaaaaccaccaccatcggtaaaatggcgcgtcagtatcaggctcagggtaaatcggtcatgctggctgccggagataccttccgtgcggcggcggtggaacagctccaggtctggggtgagcgcaacaatatcccggtggtggcacagcacaccggcgcggatccggcctcggtgatttttgatgccatccagtccgccaaagccaaaggggtggatgtgctgattgcggacaccgcagggcgtctgcagaacaaagcgcacctgatggaagaacttaagaaaatcgtgcgggtgatgaagaaacttgatgaagatgccccgcacgagattatgctgacattagatgccagtaccggacagaacgctgtcagccaggcgcgtctctttaatgaagcggtcggcctgaccgggctgactctgaccaaacttgacggaacggcgaaaggcggtgtgatctttgccattgcagaccagttcggtattcctatccggtatatcggagtgggtgaaggtattgaagatctgcgtcctttcaaagccggtgattttattgaggcactttttgcccgggaggattaa

SEQ ID NO: 274831 - DNA, 609 bp, Morganella morganii
atggttaaaaaagctcaaaccgcaccacaagggcagatccgcattatcgccggtctctggcgcggacgtaaactgccggttctgacacatgacggcctgcgcccgaccactgatcgcgtgcgcgaaaccctgtttaactggctgatgccggtgattaacggcgcgcgctgtcttgatgcgtttgcaggcagcggcgcactcggttttgaggcactttcccgctatgcctccgccgtgacatttacagaactcaaccgcgctgttgcggctcagatcagcgccaatgcccgtctgctcaaatgtgaacaggccactgtcattaatcagagcgctctgcagtttctggcacagccgggaacgccgtttgatgtggtgtttctcgacccgccgttccgtaaagggctgcttcaggaaaccgttgatttactggagcagaataactggctcagcccggaagcaatgatctacattgaagccgaggcggaatcagacacactggttgttccgggtaactgggtgtgccaccgggagaaggtggccggccaggttgcgtatcgtctttatctgcgtcagacgcagacgactgaacaggagtccgtatgttcctga

SEQ ID NO: 274832 - DNA, 288 bp, Morganella morganii
atgttcctgattaatattggccgcatactgatgctggccgtctggggttttctgattttcagcctggtgcatccgttcccgaaaccgctgaatatctttatgcatatcgccaccttttttatggtggtgatgcacgggctgctgatgtcgctgttcaatgccggtcagccgcaggataagaaactgacagccgccggtaaagtgcgtgtctttttattcggtgtgtttgaactgctcgccctgctgcgccgccagcaggcagaaccgaaagatcaggataaatcctga

SEQ ID NO: 274833 - DNA, 354 bp, Morganella morganii
atgaacaaattcggtttgttaggttttattgtcgccgctttgattattatcctggcgacccgccgcttctttgaacagcgcaaacaaaatgagataaacgaccactctgcggtagcgacatatcaggtcacagtgacagagaaaaaggattatccgtacccgaatatgcgttcccgtgagcgggatgtggttttcccggaaaccttccgttatgaggtgcatttcacgccgctgtcggggaaaactattatggtgtacatcaaagaggatgagtataaggagattgccctgcattcacgcggaacgctgtcaatgcaggggacgcggtttatccgttatgagccgctgcgctga

SEQ ID NO: 274834 - DNA, 633 bp, Morganella morganii
atgaattggccatttattgctgtacttttttccggctggctctatatcgacgccgcctaccggggaccaaactggcagcgctgggttttccgtcccgtcaccctgctgctgttgctgctgtgggcgtggagcggggattacgggctggatatctccgggtatctggtgtgtgtcgggctgttagtggccattgtctccgataccatccgcctggttgctgataataaaatcgacctgtcactgtataccagtgctgtgttttatctgctctatgccctgagtttcgccctgcttaataatttcaccttctatattccgctgatgattgccgtaccggtgattgccattgcggtactcgcactgctctggtacaaactcggcgatcataaagtaccggtgctgacagcgcttatcagtgcgctggtgatgggctggattgccggagagcagttcttcgggctgggtaccgattacaacttctccctgatgatcggggcattctgcctggtgctgaacctgatcctgtggctgattaaccgcttcctgtttacctttaaacttgccaaagcggtatattccaccttctatttcctcgggcatttcctgattgtccgcgccatcacgctgatgtaa

SEQ ID NO: 274835 - DNA, 2406 bp, Morganella morganii
atgcacccgaacaaagaacatcatgagcatactcataccagcagctgctgcggcagcaaatctgcctgcaccaccggcggaaagagtgagtcacaggctcatcagacacacgaccataccgcacacgatcacagtgagcatgaacatccggaacacgacgacgatgagtcccgtgcgcatggtcatgccccgcacgatcatgcgcattctgaacacgaccatgaccacgccggtcatgaacacgcacacggcagctgctgttcacacgatcacaccgccccggatgataccgcactgcctgaattaagcggcagccagcgttacaactggcaggtggaagggatggactgcccgagctgtgcgcgcaagattgaaactgccgtcctgaaaattgcggcggtcacccaggcaaaagtgatgtttgccaccgaaaagctggtggtggatgccgccggggatgtccgcgcggatgtgaccagtgctgttcagcaggctggatttgtgctctgggatctgaacggcggcagcgccgcaccgaagaaaaaagaagagcagagcctgctgaaacaggcaacaccgatgctgattctggcggtgctgattgccctcagctacgccctggagtttgtgaacccggagttcggcaaatacgcctttatcgcctcaacgctgatcgggctgttcccgatcgccaaaagctcgctgcgtcttatccgctccggcaccccgtttgcgattgaaacgctgatgacggtcgcggcagtcggcgccataattatcggcgccactgaagaagcggccatggttatcctgctgttcctgctgggcgaaatgctggaatcctatgcggcaggccgtgcacggcggggagtcagcgcgctgatggccctggtgccggaagatgcggtggtgattaaggacgggcagaaagtacccgtaccggttgcacagctgcgtcccggcgacgttattgaaatcgcacctggcggacgcctgccgacagatgccgaacttctcagtgagtttgcaagctttgacgaaagcgccctgaccggggaatccgtcccggttgaacgggcacagggtgaaaaagtcgccgcaggttcgctgtcagtggatcgcgcagtgcagatgaaagtggtctccgagcagggtcagaacgccatcgaccgtattctgacactgattgaggaagcggaagagcgccgtgcaccaatcgaacgctttatcgaccgtttcagccgttactatacgccgatgatcatgctgttctccgccctggtgattgtcattccgccgctgtttatgggccaggaatggtatccgtggatctaccgaggtctgacactgctgctgattggttgtccgtgcgcactggtaatctccaccccggctgcgattacctccgcgctggccgccgccacccgccgtggtgcgctgatcaaaggtggtgccgcactggagcagctgggtaccgtaaccactgtcgcgctggataaaaccggtacgctgacagagggtaaaccgcaggtgactgatattgttgccctgaataatcacagtgatgcggatgtgctgacgtttgcctccgccgtggaaagcgggtcacatcacccgttagccaaagcaattctggagcgcaccgaagctcaggggctgaccatcaccgaagcggaaaaccgcaaagcccatgccggtaaaggggttgaaggtgaactcagcggcgtgaccatcctggtcagcgcgccgggtaaactggctgacggactgctgactgatgccgctgcggcagacgtcacccggctggaaaatgaaggaaaaactgtcgtagctgtggttgcaggcaaccggctgaccggacttatcgccatgcaggataccctgcgcagtgatgccattgaagctatcggacaactgaaagccatgggtgtcagcgccgtgatgctgaccggggataacccgcgtgcggcggccgctatcgccggtaccatcggcatggatttccgtgccggactgatgcctgaagataaagtcaaagcggtgatggcgctgaataatgagcatcacaccatgatggtcggcgacggtatcaatgatgccccggcaatgaaagctgccagtatcggggttgccatgggcagcgggaccgatgtggcactggaaaccgctgatgccgcactgactcacaaccgcctgaccggcattgctgaagtgatcacgctgtcacgggccacccgtaagatcatccgcgagaacattactatcgcgctgggtctgaaagcggtgttcctggtcaccacactgatggggctgaccggcctgtgggttgcggttctggctgactccggtgcaaccgcgctggtgaccgccaacgccgtccgcctgctgcgggtcatgaaaaaataa

SEQ ID NO: 274836 - DNA, 840 bp, Morganella morganii
atgcttgaccgctttgatacctttctgctggcgcagaaacactcgtctctgaccggctggcgccggtttatccttgaattctggtttttcggtctgaaagaggcgcgggcgtgcctgtttgccgccttcttttttctcgccctgtttctggtgcctgccgccggtgtcgcggggatcccccgttatgattttctgctgatcctggcagttctgtttcaggccgcgatggtgtggaaaaagctggaaaccacggatgaactgaaagccatctgtattttccatgtggtcggttttgtcatggagctgtttaaaacctcttccgctatcggctcgtggagttatcctgatgacgcgtataccaaattatggaatgtgccgttattcaccgggtttatgtatgcggctgtcggcagttatgtgattcaggcgtggcgcttcctgaacgtccggattgaaaacttcccgccgtactggctggcgaccctgattgcgctggcgatttatgtgaatttctttgctcatcacttcaccggcgattaccgctggtatctcaccgcctttattctcgggctgtatgcgcggactatggtttattacacgccgtatgataaagagcgcaaaatgccgttgttactgagttttgtgctgatcggcttttttatctggctggcggaaaatttcggcacctttttcggtgtctggcagtatccgaaccagatcggggcgtgggcgaccgtgcatgccgggaaatgggcatcctggtcgctgctggtgattgtcaccttcacgattgtggcctatctcaaacacattaaagctacgattctggtggtgagataa

SEQ ID NO: 274837 - DNA, 258 bp, Morganella morganii
atgatgtctgatactttttcctgtgccgataaaacactcgacacactcgggctgcgctgcccggagccggtgatgctggtgcgtaaaaccatccgcgggatgaataccggtgaagttttgctggtggtagcggatgatcctgcaaccacgcgggacattcccgggttctgccgttttatggagcatgaactggtagctcaggaagctgaaaccgcgccgtaccgctatctgatccgcaaaaaagagagtgcgctgtaa

SEQ ID NO: 274838 - DNA, 1119 bp, Morganella morganii
atgatgaaaatatctgtgaaatccgttttgataccggcagtcatggcctctgtactggtcgtgccgcataccgctgatgcctgtacccggtttgtgtatcacggtgaaaatgatctgcatatgaccgcccggtcaatggactggtcaaaacccgccggaactaatttgtggatctttccgcgaggcatgcacagagaaagcgtccccggcaatcagggcatcgcatggacatcccgttacggcagtgtgattgcctccgccgatgatatggcgaccactgacggcctgaacgaaaaagggttatccgccaatcagctctggctgacggaatcggtctatccggatttcggcagcggggataaaatcatgcccgtttcaatatgggcgcaatatgtgctggataattttgccacagtcaaagaagccgttgaggaattaaaaaaagaaacttttgttatcgtcacagataatgagccgggaacagaccgcctggtgtcactgcatttatccgtttcagatgctgccggtgacagtgccgtgattgaatatattgacgggaaactggttattgatcatggcaatgacagtaacgtagtcaccaattccccgatctttaatgaacaactcgcactgggccgctactgggaagaagtggatggcagcaccatgctgccgggctcacggcgctccactgaccggtttgtccgcgcaaaattttacagtgagcatatcccggaaaatctcacccccgatgaaaccgtcgctgccgttctcagtgtcatccgccatacctccgtgccttaccggacagcacaaacccggaatgccaccgtcagcggcccggcggatgcccgctcttcaacccgctggcgcagcgtggcagatcaccggaacaagcgctattactttgatgcggtgatggcgcccggcctgatttgggtggatctcaataacattgatttctcaggaaacaccgggacggtcagaaaactggcgctggggaatgaccagcaacacagctttaccggcaatgtgaacagccatttccgtaaatctgaaccgtttgaatttatcggaatcggcaacagaacagagccacactattcaatcagtgaataa

SEQ ID NO: 274839 - DNA, 669 bp, Morganella morganii
atgtttgatttatctgcccgccagcggcgcactgcgcttatctggttatcactttttcatgttctgatcattacctccagtaactacctggtgcagttgccgatcaccattttcggcttccataccacctggggggctttcacgtttccgtttattttcctggcgaccgacctgaccgtccgtatctacggcgcaccgctggcacggcggattatcacctctgtgatgatcccggctctggcgatttcctatgtggtctctgccctgttctttcagggggaatgggccggttttgaggcattgtcgcacttcaacctgtttgtggcgcggattgccgccgccagctttatggcgtatgccctgggacagattctggatgtgaatgtctttaaccgcctgcgccagaaccgccgctggtatgtggcaccggctgccgcgatgtttgtcggtaacctgatcgataccctggctttcttctttatcgccttctggcgcagtaccgatccgtttatggcggcaaactgggtggaaatcgccctggtggattacagtttcaaagtaactatctgcatgctgttcttcctgcctgcttacggcgtgctgcttaatctgatcctgcgctctttttttgcgcaacgcgctgacggctccctgcccgcgcatcactga

SEQ ID NO: 274840 - DNA, 1104 bp, Morganella morganii
atgttaaaagtgatccaatccccggccaaatacattcagggtccggacgcgctttaccatgtgggtaaatacatcagaccattagcggaaaaaacgttggtgattgctgataaatttgtccgcgagctggtgggcgatattgtgaatgacagcctgagcgaatacgaagtcagcggtgtctttgaaaccttcggcggcgagtgtactcacgaggagatcgaccgtctgaccaaactggcgaaaaaccacaaatgccaggcggtactgggtgtgggcggcggtaaaacactggataccgccaaggccgtggcgcattttgccaaactgccggtgatcattgccccgactatcgcatcaacggatgcgccgaccagcgcactgtccgttatctataatgaactcggtgcgttcgacagctacctgttctatccgcagaacccgaacgtggtggtgatggataccaatatcatcgcacgcgcaccggcacgcctgctggttgccggaatgggtgatgctctggccacttactttgaggcacgtgcatgcagcgcagccggaaaagccactatggcaggcggcagtaccacactggcggcactggcactggcgaatctctgctttgatactctgctcagcgacggcatcaaagccaaactggcggtggaagccggagtcagcaccaaagcggtggaaaacatcattgaagccaacactctgctcagcgggctgggctttgaaagtgccggtcttgcggcagcacacgctatccacaacggctttaccgcgctggaagagtgccaccacatgtaccacggtgaaaaagtggcattcggcaccctcgtgcagttagtactggaaaatgccccggcggaagagctggaaaccgtactggaattctgtgcacaggtcggtctgccaatcaccctggaagaactgggtgtggacagcatcggtaccgagctggaagagaaagtgatggcggttgccgagctgagctgcgcggacaacgaaaccatctacaacatgccgtttgaagtcgattccgaccaggtctatgccgctattatggccgctgaccgcatgggacgcgactggctgtattaa

SEQ ID NO: 274841 - DNA, 669 bp, Morganella morganii
atgaacaacttcgcatcacattcagtaactaaatatattattgccgtctccgtggtattcctgctttctgcctgctcaagccgtttaccggatcacaccgaacaatctgattttctgagtgattatcagcgcctggccgaaacagaaacagcctccggtgaggtgattaaatcctggcgttctgacgatttcaccgcagaaagcccgaaaacaaagcttatctttacgccggttgtatttaagccactgaatgaaaataacaaaatgggtaaacagtttatgactgttctgctcaactacaccaatcagcagattaaaagtgagctggcaaaacggtatcagctgacggaaaccgccgcaccgggtgtgctgcgttttgagggcgtggttaccgccgttaaggtcaccaataaagatttcaaaccctacgaggtcttaccggtgatgctgattgtcgccggaacacagctggcgatcggcaaccgtgatgcggatacgtcaatgtattttgaatggaaaatcaccgattctgtatcgaaaaaaccatatcttgaagcgatccgtaaaaataaaggtgagcagatgagcaataaagatcagactatcaccctacaggaactgaaagcagcggttgatacgattgctgcggagatcctgcccgcagcataa

SEQ ID NO: 274842 - DNA, 1197 bp, Morganella morganii
atgagtacgggacaaacacaattcgagaattgtatcaaatgtacagtctgcacaacgtactgcccggtggcgaaggtaaatccggattatcccggcccgaaacaggcggggccggacggtgagcggctgcgcctgaaagacgccatgctgtatgatgatgcgctcaccctctgcaccaactgcaaacgctgcgaagtggcgtgcccgtcagatgtccgcatcggggatattatcgcccgtgccaaactgacctattccccgtcacggactaagatccgcgatgcaattctgagccacaccgatctgatgggatcactctcctcaccgtttgcgccggtggttaataccatcaccggcctgaaaccggtgcgtaaactgctggataccgctctgaaaattgatcaccgccgcgagctgccgaaatattctttcggtaccttccgccgctggtacaaaaaacagcaggaaaaacaggcaaaattcggcgaacaggtcgcgtacttccacggttgttatgtgaattataaccatccgcagctcggtaaagatgtgattaaggtctttaacagcatggggatcggcgtgcagctgctggaacgggaaaaatgctgtggtgtggcgctgatcgccaacggttttgcaaaacaggcaaaaaaacaggcggcggtgaatgtggaatccctcaccaaagctattgttgaacagaagatgccggtgattgcgacatcctccacctgtgcttttaccctgcgggatgaatatccgcatatcctggatgtggataccgcgccgctgcgcgataacatagagctggtgacccgctatctttaccggctgatgcaggacgggcgtaagccggtcctgcggcacacgcagctgaaagtcggttatcacacgccgtgccatatggaaaaaatgggctggacggcctattcccttgagcttatccgctcaattccgggggtggaactgatcgtgctggattcacaatgctgtggtatcgccggaacttacgggtttaaaaaggaaaactacgaaacatcacaggcgattggttccccgctgttccgccagatagaggagagcggtattgacctggtgatcagtgactgtgaaacctgcaaatggcagattgagatgtccaccagcaaaaaatgcgagcacccggtatccctgctggcgagggcgctggcataa

SEQ ID NO: 274843 - DNA, 1287 bp, Morganella morganii
atgaaatatgatgtggttattgcgggcggcggtcttgccggtctctcctgcggcgtgaagctggcagagagcggactgggctgcgctattatcagcgccggacagagcgcgatgcatttctcatcggcgtcactggatctgctctcggcattaccggacgggcagccggtcacggagccgctttcggcactggcggcgctggcacatcaggcgcctgctcatccctacagtgtgataggggaaagtgcggtgcgccgctgcgtgtcacaggcaatggcgctgttacagctggatactttaccgttacagggatcggcggagcgtaatcactggcgtctgactccggccggacaatggcggatgagctggctgacaccggatgtggtgccggttctgagcgaaaaaatggcagcagactggcagccggctgcggttatcagtattaccggttttcttgattttcaggcggaaatggccgctgccgcactgacccgtcagggatatccggcacaggcgtataccctgcatctgccgtgcctggataaattacgtaataacccgagtgagtttcgctctgtcaatattgcccgtgtgctggatttgccgcaaaaccggcaggagctggctgatgaactggcgcagagcgggatcactgaacaaaccctgattttaccggcctgtttcggggcggaaaacagtgacggaattgccttcttacaacagcaactgaataaaaccgtttatcagctgccgacccttccgccgtcactgctggggatccgcctgcatcaggcattactgcgccgtttccgccgggcgggcgggtttgtgatgccgggagacagtgtcatttctgtccgccgtgacggtgaacggatcacgcagctgtttacccgcaatcacggtgatattccggtgcaggctgagcagtttgtgctggcgaccggcagtttcttcagtaacggactggcgagcgatattgatcatatctatgaaccgctgctgaatctgaatctgactgaaacattgccgcgccgggaatggacatcggcggatctgtttgcccgtcagcgctatctggaggccggggtggcgacagatgcatatctgcatccggcggatgcgcacggcactatcactaacctgtatgctgccggggcggtactgggcgggtataacccgttacaggagggctgcggggcgggagtttctcttgtcactgcgatgtacgcagcggaacagattctggcgcagattggcgcggcggtaacggaggctcaggcatga

SEQ ID NO: 274844 - DNA, 1647 bp, Morganella morganii
atgtctgattcacctgtcaatgaagcggatgtcattatcatcggcggtggcgcaaccggtgccgggatggcgcgggactgtgcccggcgcggcctgcgtaccctgttgctggagcggtttgatatcgcgaccggcgcgaccggccgcaaccacggcctgctgcacagcggtgcccgatatgcggtgacggatccggaatccgcccgggaatgtatttcggaaaaccggattctgcggcgcattgcccgccactgtgtcgaggaaaccgacggcctgtttatcacactgccggaagatgagatggcataccaggccacgtttattgaagcctgccgcgcagcaggtattgatactcaggtgatgtccccgcaggaggcactgcgttttgaaccgtcggtaaacccggcgctgctgggggcggtgaaagtgccggacggtaccgtggatccgttccgcctgaccgccgccaatatgctggatgcgcgggagcacggtgcgcaggtgctgacttatcacgaagtcacggatgtactgcgtcagggcgatcaggtaaccggcgtgcaggtttatgatcatcagaatcaccgccgttatccgctgtatgcgccggtggtggttaatgcggcagggatctggagtcagcgtatcgccggttttgccggagtgcatatcagcatgctgcctgccaaaggatcactgctgatcctcgggcaccgcctcaaccagcgtgttattaaccgctgccgcagaccgggtgatgcggatatcctggtaccgggggataccatttccctgatcggtaccacttctgttcatattccttatgatgatatcgacaacatgattgtcacggcggatgaggtcgataccctgatccgcgagggctcacggctggctccggcgatggcgcaggcgcgtattctgcgggcgtacgcgggtgtccgtccgctggtggcggcagatgatgatccgaccgggcgcagtatcagccgggggattgtgctgctggatcatgagaaacgcgacggactgcgcggcttcctcacgatcaccggcggcaagctgatgacttaccggctgatggcggagtgggcgacagacgcggtgtgcgagaagctgggtataacggcgcactgttccacggcggaggagccgctgccgggttcggcgcattcggcggaacagacattgcgcaaagtgatctcccttcctgccccgttacgcggatcggcggtgtaccgtcacggcgatcgcgcagcagaattgccgcacaccacgcggctggataaaagcctggtctgtgagtgtgaagcggtcactgccggtgaggtgcgctatgccacagaaagcctgacggtgaataacctgctggatctgcgccgccgcacccgtgtcggcatgggcacctgccagggcgagctgtgcgcctgccgtgcggcggagctgctgactcagctgaaagtgaccaccgctgaaaaatccgaaaccgaactgatgcatttcctgaatgaacgctggaaaggtgtgcgtccggtcgcgtggggaaatgcgctgcgggagagtgaatttaccggctgggtgtatcagggattgtgcgggctggaaaacagcgggacagaagaacagggagagcagcatgaaatatga

SEQ ID NO: 274845 - DNA, 1803 bp, Morganella morganii
gtgcaaacctttaatgccgatatcgcaattatcggagcaggcggtgcagggctgcgggcggcgattgccgctgcggaagctaacccgaacctgaaaattgctctgatctcaaaagtttacccgatgcgcagtcacaccgtggccgcagaaggtggctctgcggctgtgacacaatcccatgattcctatgattatcatttcagtgatacggtgtccgggggcgactggttatgtgagcaggatgtggtggagtattttgtcgaacactgtccgacagaaatgacccagctggaactgtggggctgcccgtggagccgcaaagaagacggttccgtcaacgtgcgccgtttcggcggtatgaaaatcgagcggacctggtttgccgccgataaaaccggctttcatatgctgcacaccctgttccagacctctctgaaatacccgcagatccagcgttttgatgagcattttgtcctcgatatcattgtggatgaaggccatgtgcgcggcctggtggctctcaacatgatggaaggaacaaaagttcagatccgcgccaattccgtgattatggccaccggcggtgccggtcgtgtttaccgctataacaccaacggcgggattgttaccggtgacgggatgggaatggctttccgtcacggcgtgccgctgcgggatatggaattcgttcagtatcacccgaccggtctgccgggttccggtattctgatgaccgaaggctgccggggcgaaggcggtattctggtcaacaaagacggctaccgctatctgcaggattacggcatggggccggaaaccccgctcggccatccggaaaacaaatacatggaactcggcccgcgcgacaaagtctcccaggcgttctggcacgagtggcgcaaaggccggactatcaaaaccagccgcggtgatgtggtttatctggatctgcgtcatctcggcgagaaaaaactgctggagcgtctgccgtttatctgcgagcttgcgaaagcctatgtcggcgtggacccggtcaaagagccgatccctgtccgtccgaccgcgcactacaccatgggcggtatcgaaaccgaccagcgctgtgaaacccgcatcaaagggctgtttgctgtcggtgagtgttcctccgtcggtctgcacggcgctaaccgcctcggttccaactccctggcggaactggtggtcttcggtcgtctggccggggaagaagcggctaagcacgcacaggaaacacacgctgccaacagtaatgctatcgatgcccgcaccgctgacattgaaaacaatctgaaagcgctgatgaaccagaaaggctctgaaaactgggcaaaactgcgtgatgagatgggtgaggcaatggaagaaggttgtggtatctaccgcacaccggagctgatgcagaaaaccatcgataaactggctgagctgaaagagcgcttcagacgcgttgaaatcactgaccgctcctctgtcttcaataccgacctgctctacactattgagctgggctttggtctggatgtcgcggaatgtatggcgcactccgcctttaaccgtaaagaatcacgcggcgcacaccagcgtctggatgaaggctgtactgagcgcgacgatgtcaatttcctgaaacacaccctcgccttccacaatccggacggttcgccgcatctggaatacagtgatgtgaagataaccaaatccgccccggcaaaacgtgtctacggtggtgaagcggcggcggctgaacaggcggcaaaagagaaggaaaacgtcaatggctga

SEQ ID NO: 274846 - DNA, 735 bp, Morganella morganii
atggctgagatgaaaatgctgaaaatgtcagtgatgcgctataacccggaaacggataatgagccgcacgctgtcacgtatcaggtgccttacgatgagcagacgtcactgctggatgcgctgggctatatcaaagacaacctggcgccggatctctcctaccgctggtcctgccggatggctatctgcggctcctgcggcatgatggtcaataaggtgccgaagctcgcctgtaaaaccttcctgcgcgaatatccgcagggcatggacattgaagcactcggcaacttcccgatcgagcgtgacctggttgtggatatgacgcactttatcgagagcctggaagctatcaagccttatatcatcggcaatgaccgcaaaccgtccgaaggcccgaataaccagaccccgggacagatggcgaaataccatcagttttccggctgcattaactgcggtctgtgctacgcggcctgtccgcagtttggtctgaatccggaattcctcggtccgggtgtgctgacactggcgcagcgttataacaccgacagccgcgatcacggcaaaaaagagcggatgaaacaaatcaacggcgataacggcgtatggacctgtaccttcgtgggttactgctcggaagtctgtccgaaacatgtggacccggcagccgccattcagcagggtaaagccgccagtgcggaagattacattattgcccgtctgaaaccacaataa

SEQ ID NO: 274847 - DNA, 393 bp, Morganella morganii
atgacgaccaaacgtaagccttatgtgcgtgaaatgacaccgacatggtggaataaactcggtttttaccgtttttatatgctgcgggaaggcaccgcagtggtccagctctggttcagcctgctggttatgtacggcgtttactgtcttaagggcggcccggcggactgggcaggttatgtccacttcctgcagaatccggtggtggtactggttaatatcctgactctggccggtaccctgctgcacacggtgacctggttccagctggcaccgaaagccgtcaatattgttatcaaagacgaaaaaatgggaccggagccgattgtccgtctgctctgggtggtgaccctcattgttaacgccgtcattctggccgttgcgttactgtga

SEQ ID NO: 274848 - DNA, 357 bp, Morganella morganii
atgattaatccgaatccgaaacgctcacaggaaccggttttctggggattgtttggcgcaggcggcatgtggagtgccattgtttcaccggccgttattgtgctgctggcttttctggtcccgtttgctgtggcaccggatatgctcagttacagccgtatcctggccttctgtcagggctttatcggcaaggttttcctgctgctgatgattatcctgccgctgtggtgtgcgcttcaccgtatccaccactgcatgcatgacctgaaaattcatgtgcctgcgggacgctgggtcttttacggcctggcaaccatcctcagtgtgatggccgtgattggtgtcatcacgctgtaa

SEQ ID NO: 274849 - DNA, 273 bp, Morganella morganii
atgtgtttaggtattcccgggcaaatcgttgccgtgggtgactctgtaacagacaatgcgcaggtggaagtgtgtggtgtcagacgggatgtgaacatcgcgctggtttgtgaaggtgagccatcagaaatgctggggaaatgggtgctggttcatgtcggttttgccatgagcattatcgacgaacaggaagcccgcgatacgctggatgcattactggctatggaaagtgtcgaagaggatgtgtcgtattttttacgtggtaatgcgtag

SEQ ID NO: 274850 - DNA, 342 bp, Morganella morganii
atgcatgaggttacgttatgccagaatgcgcttgatattatcgagcagcaggcaaaacagagcggggcgcagcgcgtcaccgctgtctggcttgaactgagtgcggtatcctgtatcgaagaagatgccctgcatttctgctttgatatcgtctgccgtgattcactggcggaaggggctgaactgcatgtcaccaccgtcccggcacaggcctggtgccgggagtgtcagaaaccggtcagtgtggccgggtttaacaccgggtgtccgcactgcggcagccataacctgcaggtggacagtagtgatgccatgcaggtcagacaaattgaaattcagtag

SEQ ID NO: 274851 - DNA, 549 bp, Morganella morganii
atgaaccgtttcatcattgcagacccaaaaaagtgcattggctgtcacacatgtgaagtcgcttgtgttgtttcgcatcaagagcaggaaaccggtattgaaacagtggtgaaagatgaattctttccccgtattcatgtgatgaaagggtacactatcagtacggcggttgtctgccgtcagtgtgaagacgcaccgtgtgccaatgtctgcccgaacggcgctatcagccgtaaagatgattttgtgtatgtcgatcagaccaaatgtatcggctgcaaaacctgtgtgattgcctgtccttacggcaccatggaagtggtcagccgtcctgttgcacaacagaccaccgcgctgaacaccattccgcagtaccgcgcggaagcccacaagtgtgatttatgccatacccgtgcgggtggaccagcctgtgtggaggtgtgcccgactcatgcattaatggtggttgaccgtaataagatggatgagattgtcaaagaacgccgccgccgcgccgcatttgaaatgccggccgacctgatgtcctga

SEQ ID NO: 274852 - DNA, 1608 bp, Morganella morganii
gtggacaacactgacaagaccgaacacatacgccatgaacgtgaccagtaccggatattggtagatatcaccaactcagtgctttcccatctggagatggacggcctggttgctgaggtctcccgcgagatccaccggtttttcgggctgagccagataagcattgcattgtgtgataattacagttctgctgtatatctttgttattccagctattaccaggcccgcaaacccgcagaaaagacattatatcatctggatgaactgcatcctgatctggcacaggttctggacagtaaccagccgatgcgcctgacactcgacagtgccacagaggatccgctgtatcagcatgtctgtgcgcagggcatgacagaaaccctgctgctgccgctggcatttaaccataagccgctgggcgttctgatattatctcatgaaaataatcatatttttactgacgataactgtaatctgctcaagcagatagccgctcggtttgccattgcggtggataatgctgcggcctatgaagagatcacccgtctgaaagacagcctcaagcatgaaaacctgtggctgaacgaacagattcacaacaacgaaagtttcagtgaaatcattttccagagtgatgccatgcgcaacattctggagcaggtggatctggttgccgccagtgacagcaccgtgcttatcctcggcgaaaccggcaccgggaaggagctgatcgcccgcgccatccaccgtctgagtgaccgccatcaccgcagcatgatcaaaatgaactgcgcggccatcccgtccgggctgctggaaagcgacctgttcggccatgacaaaggcgccttcaccggcgcgaccaccactcatatcggccgctttgaaatggcggataaaagcaccctgttcctcgatgaaatcggcgatatgccgctggatctccagcccaaactgctgcgggtgttacaggagcgggaaattgagcgcattggcggtaataaggtgattccggtggatgtgcggctgattgccgccactaaccgcaacctgaaatccatgaccgatgagcgcgagttccgcgaagatctctactaccggctgaatgtgttccctatctggatcccgccgctgcgcgaacgtccggaggatattccgctgctggcgacctacttcacacagaagattgcccgccggatgaaccgcaatatcgactgtattccgcgtgatgccctggagcagctgagccgctatccgtggcccggcaacgtgcgtgaactggaaaatgtgattgaacgggcggtgatcctgacgcgcggaaatacccttaacattcagttacatgaactgaatatcccaaagcattcacgcctgaaaacggcgctggaaaccccgagctcactggaaaaacggatgcagacagctgcaccggagaatgatgacgaagagcgcgaccggattattgctgccctgaaggccaccaacggcgttgtcgccggtgcccggggtgccgcaacccgtctggggctgaaacggacaacattattatcccgtatgcagcggttaggtatttctgtacaggatatattcgaagaagataatcactga

SEQ ID NO: 274853 - DNA, 1686 bp, Morganella morganii
atgagtaactcaatcgttgagattgaggataccaaatgtatttttatcttcggttataatgccgcggattcacatcctatcgtcgcccgtcgtattgtgaaggcgaaagagaagggtgcacaaattattgtctgtgacccgcgctatattgaatcagcgcgtcttgctgacattcacttagcactgaaaaacggttcaaacattgcgctgattaatgcgttagcgcatgtgattattgcggaaaacctgcacgataaagccttcattgacggccataccgagcagtttgaggaataccgcaagctggttgagccgtacacaccggagtccgtggaagcgatcaccggtctgaaagctgaggatatccgcaaaacagcccgtatgtatgcgaaagctgaaaatgcggtcattctgtggggtatgggtgtgacgcagttctatcagggtgtggaaaccgtccgcgcactgaccagcctggcgttactgaccggcaacctgggtaaaccgcatgtcggtgtcggcccggtccgtggtcagaacaacgttcagggtgcctgtgatatgggcgcactgccgaacacactgccgggctatcagtatgtggaagacaaagccgcactggagaaatttgccaaattctggggcatcgaaaaaatgcctgccgaaaacggtattccgctgagtgaggttccgcactttatcgacgaaggcgtactgaaggcgcactacgtgatgggtgaggatccgcttcagactgaaccggatctggccactatccgccgcaccttcgataaactggagctgctgattgtccaggatatctttatgaccaaaaccgcgtcgattgctgacgtgattttccctgccacttcctggggggagcatgaaggtgtgtataccgcagcggatcgcgggttccagcgcttctataaagcggttgagccggtcggcgatgtgaaaccggactgggaaattatcagtctgatgtccactgccatgggttatccgatgcattacaacaacaccaaagagatctgggatgagttacgtgaactctgccctatctactatggtgcgacctacgaaaaaatggcggacctggcttatatccagtggccgtgccgcgatgtggcggacagcgatcagggtacagaatacctgtacgacggcggtatctttgatactccgaacggcaaaggtcagttctatacctgtgaatggcgtgcgccgatcgaccaggtcagtgatgactacccgatggtgctggccaccgtccgtgaagtggggcactactcctgccgctccatgaccggtaactgtaaagcactggcggcactggcggatgagccgggctatatccagatcaataccgcagatgctgctgcactggggattaaagatcaggaactggtctgggtggcatcccgtcagggtaaagttatcacccgcgcgaatgtcagtgagcgtcctaacaaaggggcggtttacatgacctatcagtggtggatcggtgcgtgtaacgagctggtggcggaaaacctcagcccgattaccaaaacaccggaatataaatactgtgctgtccgcgtcgaaccgattgcggatcagaaacaggctgagcattatgttgttcaggaatataccggtattaagcgccgtctgcgcgaagcagcggaagggtgttaa

SEQ ID NO: 274854 - DNA, 420 bp, Morganella morganii
atggaaaaagtcatcaccgtctgcccgtattgcgcctcaggctgtaaaattaacctgaaggtggagaacgggaagatcattggcgcggagggcgcgaatggtcacaccaatgaaggagagctctgcctgaaagggtattatggctgggacttcattcatgacaccaagattttaaccccccgcttaaagacccccatgatccgccgtcagcgtggtggcaaactggaaccggtctcctgggaagaggcgattgagtttgccagttcccgcctgttggctatcaaagagaagtatggcccgaaagcgattatgactaccggttcatcccgtggtccgggtaacgaagccaacttcgtgatgcaaaaatttgttcgtgcagcagtcggcagtaacaatattgactgctgcgcacgtgtctga

SEQ ID NO: 274855 - DNA, 912 bp, Morganella morganii
atgaaaattaatgatattttaatcgccctgctggtcgccgtgatctggggggtgaacttcgtggtaatcaaagtgggcgtcaccggcattccgccgctgtttctcggggcactgcgttttctgtttgtggcactgcccgccgtcttctttattccgcgcccgaaaatcgccctgagccgcctggttatttacggcctgaccatctgcttcggccagtttgcctttctgttcagtgcggtcaaagccgggatgccggccgggatcgcctctgtagtattgcagtcccaggtctttttcaccattgttctgggtggcctgattctgaaagagtcgctgaaaatcagccaggtgatcggcattattgtcgctgtagccggtttaaccgtgctggctaaaggcggggacagcggcagtctgaccgacattccgctgatggcactgatgatgaccctggccgggggcttctcctgggcctgcggtaatatctgcaaccgtatcattatgaaagagacaccggactgtaacgggatgtcactggtggcctggagtgcgctggtaccgattattccgtttatcctgatgtcgctgtggatggaaggtgcggacgcgattgtcagcagtatttcccatatcagcctgctgaccgtgggcgcgattatgtatctcgcttatctctccacgtttgtgggatataccttatggagccgtctgctgggccgctacgaaacctggcgtgtcacgccgtttgctctgctggtgccgtttgccgggattgccagcagtgcgctgctgctgggggaaaccatcaccatgatgcagttcgccggtctcggctttattatggcgggcctgattctgaccgtattcggcaaacgtctggtgacactgctgacacgcagaaaagcggtctga

SEQ ID NO: 274856 - DNA, 1176 bp, Morganella morganii
atgcttcatatttatcagcaattatccgtgaataaccgacagggagaacaatcacctccgccgttgccacccaaaacacagtatcaggggcggacgatggagttacaggcatcacaaagccgacctccggctccgttaccccggccggatcacacacgttcagatagtgtttcgttacgccagcatcacactacgccccgtttacataatcgccatgcaatgtatgaaacgtcagagcctgctaccggagcgctgctgaaagcaccggtgtttatggctccgccgttactacaggagcgggcacgaatgccgttaccgggggagggggcgcatcagtcactggcacaacggagagcaggtcctaaattcatgccgttcacggcggagatgaaaacagagcgggcaggcgatgtattcgggcaattgaaggcaaaaacagcagagcggcttgatcggaataattttattaccggaatgaatcatcagcgctacagggatatcgatacttgtgcaacaactcagttatttacaccggaaggtaaagggttgcctgcaaaccaaatgaaggttgacggggtgaacctggcggtgcgcagtcagtaccctaagccggaagaactccggaaccatctcagtatgcttgcagatcaaaagccgggggtattggttgtactttcttccgataatgatattgccggccggtctcttccggcgtatttccgtcaggatggccactatggcgatgtatcggtgaaatgcaaaattaatccgaaagcgcatattgcaacggccgggagtcttgaacttcgcaattaccggatagaaatcaccgcaaacggtaaaacaacaccgctatcggttatgcatgtcacaaactgggaagatcgtacaaccattgagccgccaacactgaagaaactggtttcagatatcaatcagaaaattgagcagaaggtcggacaggatcccaactacagtcctcagccgtttattcattgcagcgcagggattggccgtactggtgttgtcgccggcgcgattgaaatattgaagccgggtaataagaacactccggaggaaattgtattacagttgcgtgaaaccggctcttcaaacatggtgcagacttctgagcagtacaatacattgatcagtctgcataaagagcatcattaa

SEQ ID NO: 274857 - DNA, 396 bp, Morganella morganii
atgccggatttattatcttttcaccgtacagccatgatgctgctgcgccatatcgggcttgacgcccctcagcctgccaccgatcagcatacatttatgttaacaattgacagccggtattcattatctctggccgtcattgatgagacagactggtatctgtcagcaaataccggggaattaccacacattacgcaaaataatgaattgctgcggaaagtcctgaagctgaatacgttaacacagctttcggggcaaccggtgatttccctgaatgagaaaaatgagtgggtgatctggagtcgtctgtcactgaatggtacagaagatagtcatattattgagttatttgaatatattctgaaatccgcagattatttgtctgatcttcattaa

SEQ ID NO: 274858 - DNA, 933 bp, Morganella morganii
atgagaatcagtgacattccgggaaatcaggcctctgttaatatacctctgccaaaaatcgacggaagaaccataaatccgcttcagtttgaccggatggcggaaaggataaattatatacaaaataccacaatggaattcagactgaataaaaaagtgttcgtgacagacacccgtgaattcagtaaaaatttactttccgacatctgtaaattcagcatgccactgaaaaaaccggatattattaccgactccggttttatttcatgtgctgaaaaaagtattaataacggaataaaagaatggcgggcacaagaaaaaacaacctttgtttcagcctttattaaccggactattgatcagacatgcagggaaaaccatgtgaaaatcggtaaaactgaaaaagagaacctgtttaatgagatcaaagatacgtacttcagtaaaactgaactgaatgccggctgtgcacaatcgtcaattattcaggcactgctcaatgacaaatcactggcggaagatatcaataaacttgagatagaaaccgccgttcctgacgaaacagcggatataatgtcagtaaaaatgcagaatataataaaaaaatcaccggatcacccggtgaatattgaagcacggcaaaacctgcaaaaagagctggccgaatcaaaccgtcagtataaggccgcactgacaggtgaaagaaccgcaatacgagcagatatttataatcatattgcagaaaatatatttaatacttttttgtgtgataagttctacggcggaaattcaggggccgttgaatttaataagctcagggagactatcagtgaaatgaccctcagccgggtagtaccaatccgtgaaactgatcgtttcttttttccggaacactccctttcggtaacaacccggctgcctgacggaaattaa

SEQ ID NO: 274859 - DNA, 2103 bp, Morganella morganii
atgaaagcgttcaaacaacttgccggcgtgctgctcgcaattgtcggtgcctttgccctcgggtatatcgcactgaacagaggcgaacagatcaacgcgctctggatagtcgttgccgccgtctgtatttatctggtggcataccgctattacgggctgtatatcgcagagaaagtgctgaaagtcgatgcaacccgcatgactcccgcctttaaaaataatgacgggcttgattatgtaccgacagacaaaaaagtgctgttcggccaccactttgccgctatcgccggtgcaggcccgctggtcggcccggtacttgcggcacagatgggttatctgccgggcatgctctggctgctcgccggtgtggtgttagccggggcagtacaggactttatggtgctgtttgtttccacccgccgcaacggccgttccctcggggaactggtcaaagaggagatggggaatgtcgccggtgtcatcgcgctgatcgcctgttttatgattatggtgattatcctcgccgttctcgccatgatcgtggtgaaagccctgacccacagcccgtggggaacctacaccgtcgcctttaccatcccgctcgccttctttatggggatttacacccgctacatccgtccgggacgtgtcggggaagtctctgttatcggtctgattttcctggtgttcgccattatctccggcggctgggtagccgaaagtccgacctgggcaccgtattttgactatgacggcgtgcagctgacctggatgctggtcggttacggctttgtcgcggcggttctgccggtctggttactgctggcaccgcgtgattatctgtcgactttcctgaaaatcgggacaatcgtcggtctggcgatcggtatcctgattatgcgcccgatgctggaaatgccggcactgactaaatttgtcgacggcaccggcccggtctgggcgggggatctgttcccgttcctgtttatcactattgcctgtggtgcggtctccggcttccatgccctgattgcttccggtaccacgccgaaaatgctggctaacgaaaaccaggcctgctttatcggttacggcggtatgctgatggaatccttcgtggcgattatggcactggttgccgcctgtgtgatcgacccgggtgtgtacttcgccatgaacagtccgatggcaatgctggcaccggccggtaccaccgatgtggtcgcgtctgctgccagtgtggtcagcagctggggcttccagataaccccggaaaccttaaccaatatcgccaatgaagtgggcgaacaaagcattatctcccgcgcggggggcgcaccgacactcgccgtcggtatggcctatattctgcacggggcgctcggcggcctgatggatgtctccttctggtatcacttcgccatcctgtttgaagccctgtttatcctgacggccgtggatgccggtacgcgctccgcccgctttatgttacaggacttactgggtgtgatttcccctgcactgaaacggaccgattccctgcctgctaacctgatcgccaccgcgctgtgtgtgctggcgtggggttactttctgcatcagggtgtggtggatccgctcggtggtattaacaccctgtggccgctgttcggtatcgccaaccagatgctggccggtatggcactgatgctgtgcgcagtggtgctgttcaagatgaaacgccaggcttacgcctgggtggcactggtgccgatggcatggctgttaatctgtaccatgaccgcaggctgggaaaaagtgttcagcgaagatgcccgtgtcggtttcctggcggtagcgaataagttccaggcaatgattgacagcggtaacatcccgtcgcagtacagcgcgtcgcagctgtcacagctggtgtttaacaaccgtctcgatgccggtctgacactgttctttatggttgttgttgtggtgctggctgtcttttcactgaagaccgcactgaaagccctgaaatccgacaaaccgacggacaacgaaacaccgtacgaaccaatgccggaaaactatcttgatttagtggcaaacagcaaatctgcccactaa

SEQ ID NO: 274860 - DNA, 198 bp, Morganella morganii
atgtttgatactctcgcaaaagcaggacgttatctcggtcagaccgccaaaatgatgattggtgtgccggattacgataactatgtacaacacatgaagaacacccatcctgatcagacaccgatgacctatgaagagtttttccgcgatcgtcaggatgcccgttacggcagcaaaggcggcccgaaatgctgctga

SEQ ID NO: 274861 - DNA, 315 bp, Morganella morganii
atgaaaaaaatagctgttattatcccgtttgctttactgctgtccgcctgtgccaccaagcaatacccgcaggctgctgcgatatccgctgaggaatcgtcgttaatggattgccgtgatattaaaaaggaaattgccgccacccgcagtattgagcaggacattgagaaaaccggtgaatttgacggtaaaacgatattagggtttctgggggattttggtatcggaaacgggattgccaaaggggatgcccgcgaaaaaatctctgcccgtctggggcaactgatgcgtttacaggaaaataactgccgctga

SEQ ID NO: 274862 - DNA, 492 bp, Morganella morganii
atgagtgaaatgactgcaaaaaatgtgatgctggcggtcggtaacagcatgatgggggatgatgcagcaggaccaatgctgtttgatctgatggatacgaatccggttgacggctggatcgctgttaacggcggcagtgcaccggagaatgtggcgcaccaggtgcgggcactgaaaccggaacgtctgctgattgtggatgcggcggatatcggcctgaatcccggagagatccgcatcattgacccggatgatatcgccgacatgtttatcatgagcacgcataatctgccgctcaactttcttatcgatcagctgaaagaagatatcccggaggtgattttcctgggtattcagcctgatctggtcgggttttatatgccggtcaatgagaaggtcacccgtgctgtacagcaggtttatgatgcgctgccgggctgggaaggactgggcggatttacgttatttgaaggtgaagaagaggacgagtga

SEQ ID NO: 274863 - DNA, 435 bp, Morganella morganii
atgcctgaacagacacccgatcatgcaggtactgacggaaaagtgatcttctggtcgctgagacagaaatttgtcgacagtgacgatgatgtgccggaagaggctcagcaggtgatgtattactcactggcaatcggccaccacgttggcatgatcgattgtctgaatacggagctcatctgcccgctcagcggttatcagtcctgggtgaatgcgcttcccgaaggggaggcgcgccgcaaattgcaggggcttatcaccttcggtgaaatcaatatcgattccacgcataccaatatgctggcactggcactggatccgctgacgaaggataaaaatccggacttccgcgaatggagtgccacgcttatccgcctgctgggggaaattgagcgtgaaccggcaatttacctgatagtgaagcgccgcccatga

SEQ ID NO: 274864 - DNA, 783 bp, Morganella morganii
atgagtttgcctgaaattccggtgaaccatcatgtcagcgaaccgctgaagatggatgagcaggtggcgaaactgaaaagcacgctgctgaaagatatcaaacgttcagcgtatgtttaccgtgtggactgcggcggctgtaacggctgtgagattgagattttctccgcgattaccccggtctttgatgcggaacgtttcgggatcaaagtggtggcctcgccgcgtcacgcggatattctgctgtttaccggtgcggtaacccgcgctatgcggatgccggcactgcgggcgtatgaatccgcaccggatccgaaaatctgtatctcttacggtgcctgcggctgcggcggcggtatcttccatgacctgtactgtgtctggggcggcagtgagcacatcgtgccgattgatgtctggatcccgggctgcccgccgacaccggcagcaaccatctacggctttgctgtggctctgggtctgctgaaccagaaactgaaaggccaggatcatgtcgaggaagacaatgaacgcgttcagctgctgctgccgtctattccgctggcaacccgcgtgatgattgagcgtgaggcacgccgccaggccgggtattatcaggggcgcgaaatcagtgaccgcttcctgacactgctggaaaatgccacaccggagcaggtgaaaggcacaatacagacctggatggatgaagagcaggatccgcgtctgcgcgaaattgtgaaccgtctggtgaccgtattacaacaaggaggcattcatgcctga

SEQ ID NO: 274865 - DNA, 552 bp, Morganella morganii
atgtttaaactgtttaaaaccctccgcaatgcggggacagcaacaatcaaatacccgttcaaaccactggaagtggcgcacgggttccgtggtaagccggaatatgtgccggagcagtgcatcgcctgcggtgcctgtatttcagcctgtccggcaaacgccctgacgatggaaactgacctggaaagcggtgagcgccgctggcagttattcctcggccgctgcatttattgcgcacgctgcgaggaagtctgcccgaccagagctatccatctgactgaggagtttgaaacggcggtgatgaataaggcggatctctatatgaaagggacattccgcttacagcactgccgccagtgcggggaagccttcgcaccgaaaaaatccgtggaatatgccatggcgctgatggtggcgtcaggtgttgaagagagcggaattgaagcattgcggccgatgtatgaaacctgtccgtcctgtaagcagaaaaataacctgctgaacaatgaccgtcagaacttccgtctgcatattgagggagaaaaatcatga

SEQ ID NO: 274866 - DNA, 1734 bp, Morganella morganii
gtgagctatcagaattacacagatacccttcagggcgttcgtaaaggcgcgggctatctggcacaggtccgcgagaaatttccccatgcggtgctggaagaggagtggcagactgccaaccagctgaccatcaccatcaaaacagaaatgctgccggaagtggtggagtttctgtactacggctgcggcggctggctgccggtgctgtggggtaacgatgagcgtccgctgaacgggcagttcgcggtttactatgcactctctatggaagagggtgaaaaatgctgggtgaccgtgaaggcgtatgtcagcccgatcacccaggaattcccgtctgtcacaccgcgcgtacctgctgcggtgtggggcgagcgtgaaatccgcgatatgtacgggctgcgcccggtgggtctgcccgatgagcgccgtctggtgctgccggatgactggccggatgatctctatccgctgcgcaaagacaccatggattaccgtcagcgcccggcaccgaccaccgataccgaaacttacgagtttatcaacgacagcaaaaaagatgcgcgtgttgtgccaatcggcccgctgcacatcacgtctgatgaaccgggtcacttccgtctgtttgttgacggggagcggattgtcgatgcggactaccggatgttctatgtccaccgtggtatggaaaaactggcggaaacccgtatggggtataacgaagtcactttcctgtctgaccgcgtgtgcggcatctgcggctttacccacagcgtggcgtataccacttctgtggaaaacgccctggggatttatgtgccgcagcgtgcgcacactatccgcagcgtgctgctggaagtggaacgtctgcacagtcacctgctgaacatcggtctcgccagtcactttaccggctttgataccggctttatgcaattcttccgtgtgcgtgaaaaatccatgaccatggccgagctgctgaccggtgcccgtaaaacttacggtaccaacctgatcggcggtgtgcgccgtgacttcctcaaagagcagcgggtgaaaaccattcagctggtccgcgagatgcgcgcggatgtcacacaactggtggatatgctgctgagcacgccgaacatggaacagcgtaccgtcggtgtcggccgtctggatccgcaggttgcccgtgattacagtccggtcgggccgatgatccgcgccagcggctttaaacgtgacgttcgttttgatcatccgtttgccgactacggcaatctgccgaaaactctgtttaccatggatggctgtgatgtttactcccgtgtaatggtacgtgtgaaagaaaccctcgattcactcgctatgatcgaatacgcgctggataacatgccggaagggccgattctgaccgaaggctttacctatcagccgcacaaatttgcgctgggttacaccgaagcaccgcgcggggaagatatccactggagcatgctgggtgataaccagaaactgttccgctggcgctgccgtgcggcgacttacgccaactggccggtgctgcgctacatgctgcagggcaataccgtttccgatgcgccgctgattatcggcagccttgacccttgctactcctgtactgaccgcgtgacgctggtggatgtgaaaaaacgcaaagcgaaaaccgtggcgtacaaagagatcgagcaatacagcatcgatcgcaaacattcaccgctgaaataa

SEQ ID NO: 274867 - DNA, 1581 bp, Morganella morganii
atgagtcaaaccatgttgttaacgttattaatggcaacgccgctggtgatttcactgctggcatttgcctgccgcctggcgggcggcggggcgaaaggtgtggtcactctggtacataccatcggtatctccctgatgctcgtcttctcgctgtggatggtgtacaccatcagtgcggaaggtgatttgctgatggcgaaccgctggatccacctggacagcctggccggattattcctggcgatcctcgggattgtcggtttcctgaccggtctgtactctatcggttacatgaaccacgaagtgaatgatggtgaagtgagtgtggcaacactctgtaactattacggtttcttccacctgttcctgttcaccatgctgctggtgatcaccagtaacaacctgatcctgatgtgggcggcagtcgaagccaccacactcagctctgcgttcctggtgggtatctacggacagcgctcttccctggaagcggcgtggaaatacatcatcatctgtagtgtgggtgtggcattcggtctgttcggtaccatcctcgtgtatgcgaatgcggcgagtgtgatgccggatccggaactggctatcttctggaccgaagtgctgaaacataccgcgctgctggatccgaccctgatgcacctggcctttgtgtttgtgctgattggtttcggtaccaaaaccggtctgttcccgatgcacgcctggctgccggatgcgcacagtgaagcgccgagcccggtctccgcgctgctgtctgcggttctgctgaactgcgcactgctgattatcatccgttattacatcattatcacctcggctatcggcggggaattcactcagacactgctgctggtcttcgggctgctctctgtggcggtggcggcgttcttcatcctgatccagcgtgatatgaaacgtctgctggcgtactccagtgtggaaaacatggggctgattgccgtggcgctgggtatcggcggtccgctgggtgtgctggccgcgctgctgcacacactgaaccacagcctgggcaaaaccctgctgttctgcggttccggtaacgtgttactgaagtacggcacccgtgatatcacggtggttaaagggatgctgcgcaccatgccgtttacggcagttgtctttgcgggcggcgcgctggcactcggcggtatgccgccgtttaacgtgttcctcagtgagtttatgactgtggttgcgggtctggcagcggatcatttctggctgacactgctgcttttgatcctgctcactatcgtcctcggcgggttggttagaatggtatcgaaaaccctgttcggcgcacagcctgactgcgtgtcacgcggcgaggcagggatcctgacgacattgccgatggccatcctcattgtactgatgctggtgatgggcacccacattccgcagccggtcagccgtctgctcgaaaatgccgccactattgtcctgacggacagtgcattaccaggtacagaattaaccaccccggactaccgctggccgtggggtgttgatacaacatccacatcatcgcaggagaaataa

SEQ ID NO: 274868 - DNA, 651 bp, Morganella morganii
atgactggttccattattgtgaacaatctggcggggctgatgatgatcacctcgctgctggtcatcggggcgaagcgcccggtggcttcctgctggttctatgcacttcagtcgctggtgctggtggcgattttcgccacactgtcacagacactggatgcaccgcagctgggcatgtgggcgatcaccgccttcgcgaccaaagtggtgctggtgccgctgattatgggctatgccttccgcaaactgtctgatccgaccgccaacggcggcgtgataagcccggcctggctgatgctggctgcggcggtgattgtggtgctgtgctggtttgtggttgaaccggtgaaactgccgatggtggcggatctgaaaccggcactggcggtttccctggggcactttatgctgggcttactctgcatcgtgacacagcgcaacatcctgaaacaggcattcggttactgcctgatggaaaacggatcgcacctgacactggctctgctggcgtataaagcgccggagctggtggaaatcggtatcgcgacggacgccattttcgctgtgattatcatggcggtgctggcacgtaaaatctatcgcacgctcaacacactgaacgtggatcaactgaccgcgctgaaggggtga

SEQ ID NO: 274869 - DNA, 1443 bp, Morganella morganii
atgttagaaaatattgcactggcgaccctgctgattccgtttgccggggcgttgctggtcagtgtcctgccgacgcgcatggccccgtggctgagtaccttagtcgcgctgctggcctctctcggtacggcggcactgggctggctgtatctcgacggcggtaagatcgccaccactctggaactggttcaggccggtaatatcgcactgttcggctttaccgttgacggcgtgagcactctgattgcgttcgcggtggtgttcctcggcttcctgatttgtctgtactccaccggctacctgactgaaggtaaccgcgagcacgcccacgggccgacccgccgctattatgctttcctgctgatctttatcggtgcgatggcgggcgtggtactgtcatccacgattctggggcagttactgttctttgaaatcaccggtggctgttcatgggcgctgattggttactaccagacagaaaaagcccagcgttccgcaatgaaagcgctgctgatcacacacgttggttctctcggcctgtttatggcggcggcaaccctgtttatcagcaccggcacgtttgccctgagcgcgattaaccagctgaatgaagcacaaagcctgatcgtcttcggcgggatcctgtttgcggcatggggtaaatcagcccagctgccgttacaggcctggctgccggacgcgatggaagcgccgacaccggtgagtgcgtatctgcacgccgcgtctatggtgaaagtgggcgtttacatctttgcccgcagcatcatgtcctctgaccatgtgccggaaatcatcggctgggttggcgtggtgatggccgttatcacgctggtgtatggttttatgatgtatctgccgcagaaagatatgaaacgtctgctggcatggtcaaccatcacccagctggcgtatatcttcctggcgctgtcgctgtccatcttcggatccaaagaagcctttgacggcggtatcgcgtacatctttaaccatgcgtttgccaagagtttgttcttcctggtggccggtgcactcagctacagctgcgggacccgtatgctgccgcgtctgcgcggtctgtcaaaacgctatccgctgctgggggttggtttctgtgtggctgcgctggcgattgccggtgtgccgccgcttaacggcttcttcagtaaattcccgattttcgcggccggtttcgcgttatctgaacagttctggatcttcgcgccaatcatggtgctggtgctgattgaatccgttgccagctttgcctggctgctctactggttcggcaaagttgtgccgggcgagccgagcgaagacgtggcaaacggaactccggttccggcagcaatgcagtgggttatcggcctgctgattgtgatgtcgttctgttcaagtgttatcgccgtcatctggctcggttaa

SEQ ID NO: 274870 - DNA, 951 bp, Morganella morganii
atgtcgattcaggatacacctacattgatgacggggctcttcgcagtggttcaggcgattttcctgctgctgctgacgccgctgtttacaggcatctcccgtcagatccgcgcaaaaatgcactcccgtcaggggccgggcattatgcaggattaccgtgacattaccaaattactgaaacgccagtccgtggcaccgcgtgattccggatttattttccgggtgatgccgtatgtgctgctcggcagcatgctgctgctggcgatggcgctgccggttgttaccacaacgtcactgttcagcggggcaggcgacctcatcatcattttatatattttcgcgttgttccgctttttcttctccctgtccggtctggataccggcagcccgttcgccggtatcggtgccagccgtgagctgaccctcggcgtgctggtggagccgattctgttcctcggcctgctggtggttgcgctgattgccggttcgaccaatatcggcagcatcagtgccgtgatgagtcagggctggatatcaccgaccgccaccttcctggccatgctggcctgtggtttcgcgacctttatcgaaatgggcaaaatcccgttcgacgtcgcggaagccgagcaggaactgcaggaagggccgctgaccgagtactccggttccggtctggcgctggtgaaatgggggatcggtctgaaacaggtggttgtggcagtcctgtttctctcgattttcttcccgttcggcagtgcatccgttctgaccgcaggcagtctgctgctggcgctgggactgatgctggtaaaactgctggtgattttcgttctggcatcgctggtcgaaaacagtctggcccgtggtcgttttctgctgacgcatcatgtgacctggttaggattcggcgtggctgcgctcggattcgtgttctatctcaccggtctgtaa

SEQ ID NO: 274871 - DNA, 2016 bp, Morganella morganii
atgacatctcttgaattactcttatggtccgttgccctgtataccgccggtggttttatttcgctgctgtttaaacagcaggaaaaaatggcggtgtatgttgccgggatcacggcgattgccggcgggatcctcggtttattcagtgccgttccggtgctgatgagcggcgaaacactgacgtttttcgctcagggacctttcccgttcgcccattttgtcgtccgcctcgacagtctcgccgcctttatggtgatggtgatttcgctgctggtgaccgtcagtgctctgtattccctgaactatgtgcaggaatatctgggacgcggcgcgtggagcatgggtttcttcctgaacctgtttatcgcctccatggttgctctggtggtgatggataacgccttctggttcatcattctgtttgaaatgatgtcgctggcctcctggttcctggtgatcgcggatcaggatgacaaatccatccgtgccggtctgctctacttctttattgctcacgccggttctgtgctgatcatgatcgccttcttcctgatgtggcgcgaaagcggcagtctggatttcgattccttccgtcagctctcactgtctccggcgatggcgtcagtggtcttcctgctgggcttcttcggcttcggtgccaaagcgggtatgttaccgctgcacagctggctgccgcaggctcacccggctgcaccgtctcatgcttccgcactgatgtccggtgtgatggtgaaaatcggtatcttcgggattatcaaagtcggtatcgacctgctgggtgcaacccagggctggtggggtatcgtggtactgggcttcggcgcggtctcttctgttctcggcgttatgtatgcgctggcagagcacgatatcaaacgtctgctggcgtggcacaccgtggaaaacatcgggattatcctgatgggggtcggtgtggcaatggttggtatggcgaatgatatgccggtgctggcgacgattggtctgctcggcgcgatttatcacctgctcaatcatgcggtgtttaaaggtctgctgttcctcggcgccggtgcggtgatttaccgtatccacacccgtgatatggaaaaaatgggcggcctcgctaaactgatgccgctgaccgcaaccgcgttcttaatcggttgtatggcgatttccgcgttaccgccgctcaacggctttgtcagtgagtggtacacctatcagtcactgttctcaatgagccatgacggcacattcatcatgaaaatcagtggtccgatcgccattgtgatgctggcgattaccggtgcactggcggcgatgtgtttcgtgaaagtgtacggtgtcagcttctgcggcggtccgcgcagtgaagccgccactcatgcccgcgaagtaccgtggacaatgactgccgcaatgctgattctggctgtggtgtgtgtgctgctgggtgttggtgcgagtgtgattgcaccggtgctggcgaaagtggcgatgaccctgaccgcaggcacggatgtgacagtggcacagggcgcgatgctggtaccggattccgctgctcaggccatgatttcaccggccatgacattcttgttactgctggcactgccgctgatcccgttcatcatctatctggtcttcaaaggcaaacagatgaacttccgccgcaaaggcgatgcctgggcgtgtggttatgcctgggaacgcgatatgtccgtatctgccggtggctttacccagccgctgcgctcaatgtttgcaccgctgtaccgcatgcgcaaacagcttgatccgtcagcccgtctggctcacgccttagacgtgaccaaagccggagccggaaaagtcgagccattctgggatgaacgcattatttatccgctggtgcgcgggattaaccgtttcgccaaacgcattcagtgccttcagggcggggatttcagactttactgtctgtatgtcgtggccgcgctggttgttctgcttgttgtgattgcggcgtaa

SEQ ID NO: 274872 - DNA, 621 bp, Morganella morganii
atgaatcgctttgttattgccgacccgcatctttgtatcggatgtaatacctgtatggcggcctgttctgagacgcataaacagcagggattacaaacacatccgagattgaatgtggtgaaaatcggggaactgaccgcgccgatgctttgtcgtcagtgtgatgatgctccgtgtgcccgtgtgtgtccggtgaatgccattacacacgaaaatgacatgatcgtgctgaatgaaagcctgtgtatcggctgtaaactgtgcggtctggtctgtccgttcggggctattaccccgtcaggcagtaaacctgtcgatatgccggatttctttgagcagtatgtgccgaaagagatgctgctggatgtgccggacagcctgccgaccatgaacccgttcctggcatggaatgccggtatccgtaatatcgcggtgaaatgcgatttgtgtgatttcagtgaagaaggaccggcgtgtgtgaaagtctgcccgaccgatgccctccatctcgttgaagagaatcagctggaaaacgaaagtgcgaaacgccgtaccgcatctgtcgatgcgatgccgccggagttcgacattttcgtctcaggacaggagagcagaaaatga

SEQ ID NO: 274873 - DNA, 1674 bp, Morganella morganii
atgtacccgatgccaatacgtccgttatttaacattctcagaaatgaatttgttgtttctgctgttcttgccctgtttctgggcttttttctcaactacaccgtgtatttttcccgtgctcagaaccagttattactggccggagactatggttccctttatctgattgccgaaatttttgccaatgttctgttcagcttcttcttgttccggctcattgcccaaaccggattactgagttttaagattctgagcagctttattattctggtcagtatcgctgtcagttactacgtgatgttttatgacgtgattatcggttacggtattttagtctccaccctggcaacagacagcgttgaactgtcacaggaagctgtcggcagacatttttatctctggttctcactgctttccgttccggcgctgctccttatctggtccgcaaaaaaaacagacatacaaacagcatcacgccgccgggcacttgccctgtttacgtttattgttattccggttctgattttcggttatttaaaactggcggatgccaatcagaaaaaaattgaaatgaacggcagtattgatgtatcgagttatggcggagagctgagttactcctatttaccgaccaactggattgtgccgctggtgcagtatgcggtggtcaaatatgacgatacctttaatgaaattgacttattcgacccggccgataaatttacttacactccggcgccgcagaatgacgatttatatgtggttttcgtgataggcgaaaccgcccgctgggatcatatgcaattactcggttatgagcgggaaacaacgccattattatccgccgataaaaacgttatcgcctttaaaggtcagtcctgtgatacctccaccaaattatcgctgcgctgtatgtttgtgcgcgaaggcggcgtaaaagataacgaacagcggacagtcaccgaaaataatgttttctctgtgatgaaacagaacggtttttattccgagctgttttccatgcaaagcgaagtctggttctataaccggctcgacctggataattatctgatccgtgagatgatcaccgctcagaacagaacgccgggtaaggctatccgcgatgaattactgatggatgaagttgatgacatgctcgcccgtaaaaagcaggggcagaacctgattattttacataccaaaggttcccatcatctttattccaagcgttatccgccggaattccgcaaatatatgccggaatgcacagaggaaggaaccaaatgcagtatacaggaagagatcaatgcctatgataattcgatcttatacaccgatcattttctgcatgatctgacagaaaaattaaaagataaaaatgcgattgtcttttatacctctgaccatggtgaatccctgggcgaaaataacgggatgcgcctgcacggcacgccgcggcatattgccccgccggagcagttccgtgtgccgtttattgtctggatgtcagataactacatcaaaaataacccgtccctgtttgataacctgaaagaaaacagccggacgcggacatttttccatcatgaattattcgataccattctcggctgttccggtgtgacatcatccgacggcgggattaataataaaaataatctctgctatcggtga

SEQ ID NO: 274874 - DNA, 567 bp, Morganella morganii
atggctacttatagtaccaacgaatttcgccaaggtcttaaaattatgttagacggcgaaccttgcgtggttgttgaaagtgagtttgttaaaccgggtaaaggtcaggcattcgcccgtgtgcgtctgcgtaaactgatctccaacaaactgctggagaaaaccttcaaatcaacagactctgcggaaggcgctgatgtcatggatctgaacctgacttacctgtacaacgacggtgagttctggcacttcatgaacaacgaaactttcgagcagctggctgcggatgagaaagctatcggtgataacgccaaatggctgatcgaccaggcggaatgtatcgttaccctgtgggacggccgtcctatcgcggttaccccgccaaactttgttgagctggaaatcgtcgaaaccgatccgggcctgaaaggtgatactgccggtaccggcggtaaaccagcgaccctgagcaccggtgcagtggttaaagtacctctgttcgtgcagattggtgaagtgatcaaagttgacacccgttcaggtgaatacgtttcccgcgtgaaataa

SEQ ID NO: 274875 - DNA, 1029 bp, Morganella morganii
atggtcgatattgtaacccaaaaacaacccgcccgagaagtctggctgcatcaactcactgattctgtcactaacccaacagaactgctggaaatattaggtctggaacaggacgaaaactggcgtgccggtactgatgcccgccggttgtttgctctgcgtgtcccccgtccttttatcgccaaaatggaaaaaggcaatccgcgcgatccgttattacttcagaccatgacacacagggctgaatttgacctgaccccggggttctctgacgatccgctggatgaacaacacagtgttgttccgggactactgcataaatatcacaaccgggcattgctgttagtgaaaggcgggtgcgcggtcaactgccgctactgtttccgccgtcacttcccgtatgaggacaataaaggcaccagacataactggcagcaggcgctcgattatatcgctaaccatcctgaactcaatgaaatcattttctccggcggtgatccgctgatggcaaaagaccatgagctggactggctgctgacgcaactggaagcgattccccatattcagcgactgcgcattcacagccgtctgcctgtcgtgatccctgaacgcattacgccgggactgactgcgcgtttccgcgactcacggttacagataattttagtcacacatatcaatcacgcgaatgaaatcgacgatgcattgaaagaaaaaatgaatcagttgcgtgaaagccgtgtcaccctgctcaatcagagcgttctgctgcgtgatgtgaatgacagtgcagaggtgctggcacagctcagtaatgcgctgtttgacgccggtattctgccttattacctgcatgtgctggataaagtacagggtgcgggacattttctgatcagtgatgatgaagcacgccgcatcatgcatgatcttctgccgcgtatttccgggtatctggtgccgcgtctgaccagggaaatcggcggtgaaccgagtaaaacgccgatcgatctccgtctgcgtcagagctga

SEQ ID NO: 274876 - DNA, 783 bp, Morganella morganii
atgacggattttttaacctcaaaccagactgcgtgggataaacaggcggaacagcagcaggcgtggtcaacaccggtcagcgcagagctgattgcggctgccaaacaagggaactgggatgtacatctcactccgcagccgctgccgaaagcctggctgggggatgtgaaaggcaaacgcattctctgtctggcctctgccggtggtcagcaggccccggtactggctgccgccggtgcggatgtgacggtgtttgatttatcagataaacagcttgagcacgatcgtcaggttgcccggcgcgacgggctgacacttaaggcggtacagggagatatgcgggatctcagcgcatttgcggatggcacttttgactgcgtgttccatccgatttccaatctgtatatcccggatgtgaatccggtatggcgtgaatgccaccgcgtactgaaaaccagcggcacactattggccagtttctttaattcagtagtctttgtcggtgatcgtgatgtgaaataccgtgaagaaggcattatcagaccggcgtataaaatgccgttctctgaactgacagccttaacaccggagcaggtggcagagaagcaggcacggcaggaagcttttgtgtttggccattccctgacagatttgatcggcggacaactgaaagccggttttcatctgactgatttttatgaggactggcaaccgaacccgcgttttgttatcgataattatctgccgacatttattgccactgcggcagtgaagattggctga

SEQ ID NO: 274877 - DNA, 300 bp, Morganella morganii
atggcccacatgctttctgttttctttacccgccgcccgcgcttttcgcatctgaataaaaaaaccaccgtttatatcgacggtggtttttttgtatctgatacagacaatttcgctaaatcattcaatctgcagcaaggcggcaaagtgaggacatccggggagcatcagtatgtgacccgggccgctgagcgcagccaacgccgctatggacggaaggatgacgcgaaattacgggcacttaaagacctgacccgtcagcttgctatccaccgggatcaggctggacacaatcgctga

SEQ ID NO: 274878 - DNA, 348 bp, Morganella morganii
atgcggattaaaatgttacccggtgcgctggcactgttattactggcaggctgtacgaccacgaacgaactgagctccgccggatcacaggtccgcttttccgaagagcagccaccggcagaatgtcagaaattaggtgaagttaccggtgtacagagcaactggatgaccggcgtcggtaacgaaagcagctctatgcgcggtgcggcaaatgacctgcgtaacaaagccgcggcaatgggcggtaacgtgatttatggtctcggcagcccggctgagtcagcgattgtgtccagcctgatcccggtggatagcaagctgacgggtcaggtctttaagtgcccgtaa

SEQ ID NO: 274879 - DNA, 1371 bp, Morganella morganii
atgagagctttatatgattctaaaagtaaaaccatcgatgaccgcggcataaaagcgctgctgtcagatgaggccaaatacaatacctggctgatgtttgaatcagtgttagctcaggcacaggcagaactggggtttattccccggtctgctgccaatgaaattaaagaaaaggcggttattgagaatatcgattttgaagagatgagccgtatctatcagaaaatcggtcatggtttcgtaccgtttttaaaggtattagtgaatgcctgctctgaagagagtggtaaatatatccattacggaattaccacccagaatattcagcagagttcgcagctgtatatgatgaagacagtgcataataaatttatgctgctgttaagcgagatcctcgaaaatttatcgcgtctcgcagaaaaaaccaaacacatggtgatgccgggcagaacacacggccgtcacgccattcctatcacttacggctacaaagtggcagtgtggatcagcgattttattgattgcagccagcgcatgaaagagtgtgaaaagcgtgtgttcactatcatgatgggcggcgcggtcggggcatttaacaccatgccgggcatcgggctggaagtccagaagcgggttgctgaactgaccggcatgcatgcgatggaagtgccgtcccgcaacctgagcacccataaactggagtacatggcgaacctggcgctgatggcgaatatctgccacaaaatcggcgaggaagtttacagcaccacgctggaagagatcgcggaagtttccgagggctttaccaagggtaccgtgggcagcagcaccatgccgcacaaaattaacccgaaactggccaaaggcattatcgcgaactcccagaaactgtactcactgccgggtgtcggcatgtactccgctgtcagaccgtatgagggcgacagcagctcttatatgttatttgacgggctgatcgaagaagcactcgaactgaccaccgaagtgctgctgagaacagaagagctcaccagaaccatcgtgcctcatgaagagagaatgctgcacaacgtcatgagaaataaagggctggataacactgaatacgtgatgatgaaaatggcggaaaagctgggtaaggataaagctcactcattactgtatgaggaagcgatcaaaactgctgcggatggtgaggatttctacaccaatctgacgaaaaacgacaccattaccgccgccttcagcaatgaagaaatcaaagcaatgttagatccgcgtgcgtatattggtctgtctgtcgaaatcgccgaaaaagaagcgaaacgcggttcagatgccgctcagaaaattaaaaaagactatcagtaa

SEQ ID NO: 274880 - DNA, 1557 bp, Morganella morganii
atggctaaaagaaaattcggggagtcgatccagcgctttggccggacactgctcctgccaatcggggttctggctccgataggtatgattctggggatcagtggtgcattagtgcagacctacatgattgcccggttccctttcctcggaaatgaaacggttaacgcactgcttgtcagcatccgctctattgccggcgttatttttgacaacattccgctgctctttgctatgggggttgcctacgggatgagccagcgtgataaggggatagcggtctttgcctctgtggtggggtatttgtcgctgattatcaccatgaatatctggctggtactcaccggtaaactggctgatccggccattatgggacaggtggggcaaattaaggttctggggatccagaccttaaatatcagtgccgccggggggatcatcaccggtttaattgctgcctgggcaacggataagttctataaccttgaactgccgactgccttcgccttcttctccggtaaaaaatccgtttccatcatcatggtcggcctgatgattatggtcggcgcgacactgccgtttatctgggaagtgctggttcaggggctgatgaagctctctgctgtcttcctcagccctgtcggtccgttctttacggcgggcggtgagcgtctgtttattccgttcggcctgcaccacgtctggaacgtgctgttcagatttaccgaagcgggcggtacttatgtcatcgacgggcaaacctatgtcggtgttgttccggcgctgaccgaagtgttattcaaacagggaccgggaaccgaatactgggcgatgatgccaagtctgacgcgctttatggcgcaacagcaaatgctggtcacgctgttcctgttcccggcaatcgcattagctatctataaaacatcgaagaaagagaaccgcgcggaagtgaaatccatgctggtgacgatggtactgactgccatactcggtaacgttacggaaccgcttgaatttaccttcgtatttatcgcaccgctgctgtatttaatttatgccatcatcgtgggtattggtgcggtattgctgtcattcgcaggcgttgcgattggttatatccgcggaaccatcttcgatttcacgattttcggcctgctgtacgaacgcactaactggatattcctggtgcttatcggtaccggtctggcggtggtgacgttctttatcttccgctgggctatcctccggtttgatattaaaacgccgggccgtgaagaatccagcaatctgaaaaatacgttaattaaagaaaaacgttatggtgaaattgcggaaattcttatcagggcgttaggcggaaaacaaaatatccgtaacgttgataactgtattacccgtatgcgtatcgatatcgcagaagtgaataagattgataaagagttaatgtcggaatcaggatgtactgcattcttctttccatcggcaaaccacgtccatgttgtttacggaccgaaggttgaatttgtccgcaatgctgttgatgaagcaatgaagaaataa

SEQ ID NO: 274881 - DNA, 741 bp, Morganella morganii
atgctggattttctgaagaattacgacaacttaaccgtcagtgagaagaaagtattaaaatatcttacggaaaatattgccgatattccctggttaaatattaatgaattagtcgccaaaacgtttgtttccaaaacggtgattatcaatttatctcagaaattaggtttcagcgggtttaaagaacttaaatttcagattaacaatcatatcctctcacaaaataaagcagagaaaaaagcaccggcatcctataaaaagcagctcgagaataatattcataagaccttcacactgattaatgaagatcagatccgcgattgtgcaaaaacattgcacggttcacggaatatctttctggtggcacggggaaccagcaaggcggtcggttactatctggagcatttattattttcgctgggactgcactgcttttttattaatgattataacctttctgattcctttacccgccttgtcagcaaagatgacaccgtgatttttatctccctctccggcggaaccaaaaagatcattgaaaccgccaaaatcgtccagctgaaagatgcccatatcatcagtatgaccgccttccacacgaatgaactgaccacatacgcaaataacacactcttttgcttctctgacagttatgacaccaaacgggatgactcaaagtccagaacaggattttttatcctggtggatttattaattaatgagctggaaagtttactgtaa

SEQ ID NO: 274882 - DNA, 1647 bp, Morganella morganii
atggcagctaaagacgtaaaattcggtaacgacgcccgtgttaaaatgctccgtggtgtcaatgttctggcagacgcagtaaaagttactttaggtccgaaaggccgtaacgtggtgttagacaaatcattcggcgcaccggttatcactaaagatggtgtgtctgttgcgcgtgaaatcgagctggacgacaagttcgaaaacatgggtgcacagatggtgaaagaagttgcctccaaagcgaacgacgctgcgggcgacggtaccaccactgcaaccgtactggctcagtctatcatcactgaaggcctgaaagccgttgctgcgggcatgaacccgatggatctgaaacgcggtatcgataaagccgttgttgcagccgttgaagaactgaaaaaactgtctgcaccatgctctgacaccactgcaatcgcgcaggtagggactatctctgcaaactccgatgaaaccgtcggtaaactgattgcggaagcgatggataaagtcggcaaagaaggcgttatcactgtcgaagaaggcaccggcctggaagacgaactggatgttgttgaaggtatgcagttcgaccgcggttacctctccccgtatttcatcaacaaaccggaaaccggttctgttgaattagaaaacccgtacatcctgctggttgacaaaaaaatctccaacatccgtgaactgctgccggttctggaaggcgttgccaaagcaagcaaaccgctgatgatcatcgcggaagatgttgaaggtgaagcactggcaacactggtggttaacaccatgcgcggtatcgtgaaagtggctgcggtgaaagcaccgggcttcggcgaccgccgtaaagcgatgctgcaggatatcgcaaccctgaccaacggtactgttatctctgaagagatcggtatggagctggaaaaagcaactctggaagacctgggtcaggcaaaacgtattgttatcaacaaagataccaccactatcattgatggtgtgggtgacgaagagactatcgcagcacgcgttggtcagatccgtcagcagatcgaagattcaacctcagattacgaccgtgaaaaactgcaggagcgcgtagcgaaactggcaggcggtgttgctgttatcaaagtcggtgcggcaactgaagttgaaatgaaagaaaaacgcgcccgtgttgacgatgctctgcacgcaacccgcgcagccgttgaagaaggtgtggttgccggcggcggtactgcattagtccgcgttgcggctgctctgactgccctgaccggtgataacgaagatcagaacgtgggtatccgtgttgcgctgcgcgcaatggaagcacctatgcgtcagatcgttgaaaacgcaggtgaagaaccatctgttgttgttaacaccgtgaaaggcggcaaaggtaactacggttacaacgcagcaaccgaagaatacggcgacatgatcgcaatgggtatcctggatccgactaaagtaacccgttctgctctgcagttcgccggttctatcgcgggtctgatgatcaccactgaagcgatgatcactgaactgcctaaagacgacaaaatggatttaggtgcagctggtggtatgggcggcatgggcggtatgggcggcatgatgtaa

SEQ ID NO: 274883 - DNA, 294 bp, Morganella morganii
atgaaaattcgtcctttgcacgaccgtgttattgttaagcgtaaagaagttgaagcgaaatcagcgggcgggatcgtcctgaccggtacagcggcaggtaaatcgacccgtggtgaagtgctggcaacaggtaacggtcgcatcctggaaaacggcgaaatgaaaccactcgacgttaaagtcggtgatatcgtgattttcaatgatggttacggcgtaaaagctgaaaaaattgataatgaagaagtgctgattatgtctgaaagcgacatcctggcgattgtcgaagcataa

SEQ ID NO: 274884 - DNA, 507 bp, Morganella morganii
atgcgttggttaccccttatcctcatttgtctgctgatctatattgaggcggtcatttttgttcacgtggcatccgccatcggtgtgtttatgacactggtgctggtggtgctgacatcctgtctcggcgtatctctggtgcgcaatcagggaatgcgtaatctgagtctgattcagcagaaaattcaggcgggtgagagtcctgcggcagagatgatcaaaagcgtctctctggtgctggccgggatcctgctggtcctgccgggctttttcaccgatttcttagggttgctgctgttgctgccgccggtacagaaactgctggtgtcccgtgtgctgccgtttatccgcgtgtatcagccgcggacgaacccgttcgccggcaatgcggcaaaccgtgggaatgtgtacgaaggggagtttgagcgccgtggtgatacatcatcacagcggctcaaccagtcaccgacgtcgcacaacgatgataatccgcaggataaaccctga

SEQ ID NO: 274885 - DNA, 1425 bp, Morganella morganii
atgtcaaataattttcgtatcgaagaagacctgctgggtaaacgcgaagtaccggacgatgtgtattatggtgtccatacactgcgggctatcgaaaatttctatatcagcgaccgtacaatcaatgatgtcccggaatttatccgtggcatggtgatggtgaaaaaagccgctgccatggcgaataaagaactacacactattccgcgtgcgattgcggataccatcatcaaagcctgcgatgaagtcctgatccacggtaaatgtatggatcagttccctgtggatgttttccagggtggtgccggtacctcactgaatatgaacacaaacgaagtgctggcaaatatcggcctggaactgatgggccacaaaaaaggggaatatgagttcctcaacccgaatgatcacctgaacaaagcccagtccaccaacgacgcttacccgaccggcttccgtatcgccgtctataattcaattacccagctgattaaatccgttgagtatctgaaaggcgtatttgataccaaagcaaatgaattcaaagacatcctgaaaatgggtcgcacccagttacaggatgcggttccgatgacattaggccaggaatttcacgcctttgccatcctgatgaaagaagaagtcaaaaacctgcaccactctgcacaactggtgctggaagtgaacctgggtgccaccgcgattggtaccgggctgaacaccgcaccgggctatcagaaactggcggtggaaaaactggcggaagtgaccggtctgccgtgtgtgccggcagaagatctgatcgaagcaacctctgactgcggtgcttacgtgatgctgcacagtgcactgaaacgcctggctatgaagctctccaaaatctgtaatgacctgcgtctgctctcctccggtccgcgtgcgggtctcaaagagatcaatctgccggaaatgcaggcgggttcttctatcatgccggcaaaagtgaacccggtgattccggaagtggtaaaccaggcgtgtttcaaagtcatcggtaacgacgtctgcgtcaccatggccgccgaagcgggtcagttacagctgaacgtgatggaaccggctatcggccaggcgatgtttgaatctatttctctgctgagcaacgcctgccgcaacctgggtgagaaatgcgtttccggtattaccgccaacaaagaaatttgtgaagcgtatgtgttcaactctatcggtatcgtgacttacctgaacccgttcatcggtcaccataacggggatatcgtcggtaagatttgtgcggaaaccggcaagagtgtgcgcgaagtggttctggagcgcggtcttctgacagaagctgagctggatgatattttctcaattgagaacttaaagaatccggcctataaagcaaaacgctttgatgactaa

SEQ ID NO: 274886 - DNA, 1302 bp, Morganella morganii
atgctagccatcgaatttattatcgtactgctggccatttatctcggggcgcgcctcggagggataggtatcggttttgccggcggactgggggttctcgccctcgccgccatcggcgtgaaaccgggcagcatcccgttcgacgttatctccattataatggctgttatcgctgcaatctctgccatgcaggtcgcgggcgggctggattatctggttcagcagactgaaaaactgctgcgccgcaatccgcgctatatcaccatcctcgccccgatcgtcacctattttctgacactgtttgccggtaccggtaatatttcactggctaccctgccggtgatcaccgaagttgccaaagaacaggggattaaaccttcccgtccgctttccaccgctgttgtggccgcgcagatagggatcaccgcatcaccgatttcagcggcggtggtgtatatgtcatcggtcatggagccgatgggcgtcagttacctgcatctgctgatgatcctgctgccatccacctttgtcgcgatcatcctgatgtcctttattgtgtcctggctgtttgatgacagactcgccgatgacccggtctttaagaaacgccttgctgaaggcgtggtggaactgaaccgcagtgaaaaagccgccatcaaaccggcagccaaactgtctgttctcctgttcctgctcggtgtcctgtccgttgtggtctttgcggttgtcaacagtaagagtgtcgggctgttgtctgaaccgattatgtccaccaccaacgccattctgattatcatgctcagtgtcgcgacacttattaccctgatatgcaaggtagagacggatatcatcctgaactccagcacatttaaagccgggatgagcgcctgtatctgtatcctgggtgtggcgtggctgggcgatactttcgttcaggctaacctggagtggatcaaactgactgccggtgatttaatcacgcagcatccgtggctgctggcagttattttcttcttttgttctgccctgctctattcacaggcagccaccgccaaagcgctgatgccgatggcactggcgctgggtgtcacaccactgactgccattgcctctttctctgcggtttccggtctgtttatcctgccgacctacccgacactggtcgcggcggttcagatggatgacaccgggaccacccgtatcggcaaactggtcttcaaccacccgttctttatcccgggcaccattggtgtcgcactgtcggtctgcttcggcttcctgatcggcagtgtcgttctgtaa

SEQ ID NO: 274887 - DNA, 573 bp, Morganella morganii
gtgcaacgtgaagacgtcctcaatcaggcactgagtctgctggaaaaccacggccttctgatgtctgaagccaccctcaacgataacctggatattgatcccgaacgcctgcggattttctggccgacccgtaatgacctgctctacgactgcctgcgttaccacggtaatcagattgacatctggcagcgccgcgttctgctggatgagtctctgtcctgtgaagataaactgcttgcccgttacacggcactggcggaacgggtccgcgaaaaccgttttccggggtgtctgtttatcgcggccagcagcgcatttcctgatgcggatcaccctatccatcagttatcccgtcagcagaaacaaagtgcctttgcattcaccactgagctgctcagagagctggatattgatgattgtgatatggtggcccgtcagctggaactgattctggaaggatgcctgagcaaactgctgatatcccgcagtaccgatgatatcgccaccgcccggcggctggcagaagatgtgctgactatcgcccgctgccgtaaaaacggcgcactcagctga

SEQ ID NO: 274888 - DNA, 246 bp, Morganella morganii
atggaaaatatagtaccggataaatactacgatatcgctgatgagtacgcgctggaatcggaagagccggttgaagagcaggagtatgacggactggcgcactattttcagttactgatcacctgtctgacgaacaatgaagaaatcagtgaggaagcccagaaaaagatggcggctgaagccggtatcgataaacagcgtatcgatgatatcgctgaatttctgaaccgctggggtaatgattaa

SEQ ID NO: 274889 - DNA, 2667 bp, Morganella morganii
atgaaaaaatataaatctgtaaaaagattcgcattgccggtatctattatactggggtcgggattatattcacttcccggtatagcggatccctgtacatcggtgacagacggcgacggacaaaaacacctgacctgtacctcaaccatttattattacaattccggtgagcacggcggaacggcattatccgattatgcgagtgtgaccatcaacactacgccggaagcatcaatctcgccactccagggctgggcggtttacgggaacagcagcacctataatttcaatgagctgaatattgagaccagcggcgccaaatctgacggtatcgtgacaaaaaacggtgccagtaaaatcaatattgataagttaactatcaaaaccaccgggtcttccgctgatggtctgaacgtcggcaaagagagtaacggcacggtgattaccgtgggtgacgatgcctatattgatgcattcgggatgggggtgcgtgctaactcatcaaccaccggcaccaacgaaaacctgattactctcgggaaaaatgcggtcattatttcgcacgaggccggcagtaatctggagtttctgggacgcgaattaggcaccggttatgcggtttacgccgggaataccaactctgcggcaaccggggatgcccgtgtggtgattggtgataacagcaccattgtggcgaacggcggctctgcgcatgcggtttatgccaataaaggcggcattatcgaactgggttcaacgaatatccgcgccgaaggtacgacggcacacggtatttatgccgaagccggatcgaaaaaggtcggtggtgcaacagtcactgcgggcagtcaggtatatctcggcggtgataccaccattaatgtggtcagtgacggccggaaatttgccctgtatgccaaaggggcggattcacagatatcctcttctgatcgtctgtccggagacagcatccgcagtgtattcaccgttgacggtgatatgaaagcagagacaaaagggattattgatctgcagatggcggataacagccgttttaccggcagtaccaactcactggaatataacgcggcaggcgcaccaaatacgaccacaaacggcaccattaacctggatattgccggtgccaacagtatctggaatatgaccgctgattcagtgctgtcaaacctgatactaaccggtgcgacactccgttataactctccggacgatctgagcgatccggacgcctttgtaccgaaaacactgaccgtggctggtgattacaccggtaacggcggccacctgattatgaatacggtgctgaacggggatgattcaccgaccgataaactgctgatcaaaggtaattctgccggaaccacgacggtcggttttgtgaatatcggcgggcaggggacgctgaccactctcaacggcattgaagtcatcaccgttgacggtaattctgacggtaccttcactcaggacgggcggattgttgccggggcgtatgattattatctgggacgcggtaaaaacggcaatgagaaaaactggtatctgacatcagattacagcccggtgacaccggaaccagaaccagaaccggaaccagaaccagagccggaaccgaagccaaaaccagaaccggagccaaaaccggagccaaaaccggaatcggtagtccgcccggaagccgggggatatatcaataacctgtatatggcaaataacctgtttaatgtgcgtctgcatgatcgtctcggtgaaacccaatataccgatgtactgaccggtgagcgcaaagtcaccagtctgtggctgcggaatgtggccggacattcaaccgtgaaaagcggcgacgggcagttaaaaaccggaacaaaccgttatgtggtacaactgggcggggatatcgcacagtggtctgataatgatcttaaccgctatcatatcgggttaatggctggttacggccgcatcagcggcaagaccacaaaccatgtgacaaagaccagagccaaatctgacgcagatggttacagtgccgggatctacggtacttactacgcgaatgaagcggataaaaccggtctgtatattgacagctgggtgcagtataactggtttaaaaaccggattgacggggacggattaccggaagaaaaatataactctgacggcatcacactttccgccgaagccgggtacagtttccttatcaatgaaacacagggcagtgatggcagcaccaaccgctggtttattcagccgaaagcacaggtgacctatatgggtgtgaaaatggatacccacacagaaaggaacggtacccgcgtatcggcgaccggtgaagggaatattcagacccgtctcggggtgaaaatatatggtctgggacaggcgttgcaggataaagacaatgatcgtcacttccagccgtttgctgaaattaactggctgaataacagtaaaatgactggcgtatccatgaacggcgagcacgttggtcagtccggcacccgcaatatcggtgaaattaaagtgggggttgaaggacaactgacccgcaatgccgacatctggtttaacgtggcgcagcaggccggcagtgataattactcggatacacagggtatgttaggtctgaaataccgcttttaa

SEQ ID NO: 274890 - DNA, 339 bp, Morganella morganii
atggtgcagaaatatcaatgcatagattcagatttactcaataaaaatatcggggaggtgctgtacagatttcgtaagctgaaaaaaataagcggtgagaagttaggctttacacttgaaatcagtcagcaacaggtttcccgctatgagctgggtaaagggaatctgacggtcagcctgctgttccggatactcacagcactggatatctcactgatcgtctttctgaatgaactcagaaaacaatatgattcatcagatactgttcacaccttactggatatagataatttattgtttttaaataaaaacattaataagcccgattttttattgtaa

SEQ ID NO: 274891 - DNA, 933 bp, Morganella morganii
atgaatcaggatctcaacacgcaggatctgtctgcaccggcagccggtattgacccggtagtacaggtcatgggcggtaacagtgatatcgcactggatttggtggtaattattgataccagcggctcaatgtcagatgagtccgccgatctgagccgtgaaatagacgcagcgatagagaaagcggcagcccgctgtccgtctcagctgcgggcgactttcctgggcattcagggtacctggaccgggacaaagtttgataagtcgctaagtgattatctgatgggcaaaggcgctcccgccggaaatctgcaggcccgggaaccgtttccggaagctgacggccgtgaccacgcgggaaataaagaagatctgtgccgtgccgttattgatgccagtaaatattttgactggcgtcccggcgcgcggcgcgccatttttgtgctgggtgatgaaggcatggaaggcggcggcggaacactgaccagtgccgccatcgcgaaaaacagtgaggcgattggtgtcgcacaacttcacggcgtcaaagtttacacctatcagggaaccccggatgatcgtccggaaaaccttgaccgcttcccgtcgattaaggaaagagacaaagtgacaaaggagtatcagcggctggcagagaagaccggcgggcgctcttatatctacaccaccggtattgcgaacttcctgctggtattgcaggaaattctctgtgacagtctgactccgccggtgatcccggatagcggccattcacatgcggactgccgcgatgtgtgtgaacagctttcttcaattatttctaccgtcaataagctggcggatattatcaataaagccattgatgcctgttgcggcacagatgttcatcatcacaaagagactgccgccaaatgcagttgctccggtaaagtataa

SEQ ID NO: 274892 - DNA, 810 bp, Morganella morganii
atgacattgatctctgttgaacacctgagcaaaagctaccaaagccattcactgatgggagcgggaaagccgcgctgtattctcgatgacatttccctgaccctgaatgaaggggagacagttgctctgctcggacgcagcggctgcggaaaaagcacgctcgcgcgtcagatctgcgggctggaatatccggaaaaaggggatgttttttaccgcggaatgccggtgcgtaaactggataaaaaacagcggcggcagttccgttcggagatccagatggtttttcaggatccccccggggcggttgatccgcgttttaccctggagcagattattgccgaaccgctgaaattgctgacctcactggatgaaacacagcgcaaagcccggactgcggaactgctggatatggtggagctgccgctgtcagtgctcggcaaactgccgtcacagatcagcggcggacagttacagcgcatctgtattgcgcgggcactggccccggatccgcgtctgatcatcctggatgaagcggtatcaaacctggatattcatctgcaggcatctctgctgacactgctcggacagttacagaaaacgcaggggattgcgtatctgtttgtcacacatgatctgcggctggtcagccggtttgccgcacgcgtggtggttatggatgagggaaaaattgcagaaacatcgccgcagggatgtattgagcaactgcgccatccggcatcccaggcactgaaaaatgcagtattgccgccattcccgtcttcccaccggcgaaaaacggtatccgtctga

SEQ ID NO: 274893 - DNA, 795 bp, Morganella morganii
atgtcattaaatcattctgtactggaggtcagccatctttcggcggggtatctgcataataatcatgcccatttcctgatttctgatctgtcattttcattgcggcgcggcgaagtgctggcgctggtcggggcgagcggctccggcaaatccatgacctgctctgcgctgctggatgtgctgccgccgggcgtgcagaaaacacagggcactattctgctggacgggcagccggtcaccgggcaggctctgcgcggcagggaagtggcgtcgattatgcagaacccgcgcagtgcatttaaccctgtgcggaccatgcatcagcacattaccgaaacactgaaggccacccggcagccgctgcatgacattgataaacgcatccgtgatgtgctggcggaagttgaactcggggacagtgagcatatcctgaagctctatccgtttgagatgagcggcggcatgttacagcggatgatgatcgcgattgcgattctcagcgacgcgccgtttctgtttgccgatgagccgacgaccgatctggatctggtggtgcagatgaaaattctcgatttgctggatcatgtagtgtctgaccggcagaccgggcttttgctgatcacccatgatatgggtgtggtggcacgtcttgccgaccaggtggcggtgctgtcagacgggagcattgttgaaaccggcccggtagaggatattttttcccggccgcgctcgccggtgacccgcaatcttatttctgcacacctctcactgtatggtttggagctttccgcatga

SEQ ID NO: 274894 - DNA, 864 bp, Morganella morganii
atgagcgatatgatactgaaagccccttccgcctggcggacactgagccgcaatcttttgttgtggtttgcgctggccgtggtggcactgctggtgctggccatgattgccgggccgtggatctccccgcatgatccggatctggtggagttatcaaaccggcttcaggaaccggatagtcagtactggcttggtactgaccatctcggacgtgatattttttcccgtctgattgccggggcgcggatttctctcggcactgttgctatcacgctggtgattattatgacgctcggactggtgatcggcggcattgccgggtttaccggcggacggacggatcaaatcatcatgcggtttaccgatgtgttcctgacattcccgacactggtgctggcactgtttttaatcggcatcctcggtaccgggctgacaaacgtgattatcgcgatcgcattgtcacactgggcgtggtatgcgcggattgtccgcgggatcatcctctcgctgcgccaccgggaatttctgctggctgcacgtctgagcggagccggtaatgtgcggatctttttccggcatctgtttccggccaccatttcacagctgatcgtactggcgactctggatatcggccatatgatgctgcatgtctccgggttgtcattcctcgggctgggcgtggcggcacccaccgcagagtggggcgtgatgatcagtgatgcccgccagtttgtctggacatcaccgatgctgattttctggccgggtttaattttatttttcagtgtgatggcgtttaacatcctcggggatgctctgcgtgatcgtctggatccgacactgagggccgggacatgtcattaa

SEQ ID NO: 274895 - DNA, 945 bp, Morganella morganii
atgatgcgatttattttccggcgggtgctgctgctgatcccgatgctgctcggcacctcgctgtttatctttctgatcctgcgcctggggccgtctgaccccgcgctggattatctgcggctctccaaaattccgccgaccccgcaggcggtggaaagcgcccgtgagctccttggcctggataaaccggttatgacccagtattttcactggttgtctgacgcgctgcatctggattttggtatctcttatgccacacagaaaccggtgctgccggatctgctctatttcctgcccgccacgctgcaactggcggggctggcactggcgctgactattattctgtctgttcctatggggatgctggcggcgcgttaccgcgaaaaatggccggatcagctggtgcgggtgattgcgtttatcggggtttccatgccgaatttctggctggggttcctgctgatcctgctcttttcgattcacctcggctggctgccgccgatgggtaaaggggaagcaaaacacctgatcatgccggttattgctatctcgctgatgtcactggcgattaatgcccggttgctgcgggcaagcatgctcgaggtggccgggcagcgccatgtccgttatgcgcggctgcgcgggttatctgaaatgacggtggagcgctcacatattctgcgcaacgcctggctgccggtgatcacggctatcggtatgcatatcggggaactgctcggcggcgcgctgattatcgagagtattttcagctggccgggtgtggggcgctatgcggtctctgccattatgaaccgggattatccggtgattcagtgctttaccctgctgatggtggtgatttttgtcctctgtaacctgattgtggatattatttatgcgattgcggatccccgcatccgtctctctgcggagggtatcgaatga

SEQ ID NO: 274896 - DNA, 1575 bp, Morganella morganii
atgcgtaacgttgtccgttctttattattgtctgcggcactcgtggccggggcgttaaataccgcctttgctgatccgcatttaaattttgcctggccggtgaatgtggggccgctgaatccgcatcagtatgcgccgaatcagatggccggacaaaccatggtgtatgagccgctggtccgttatatgaatgacggaactgtaaagccctggctggcggaatcatggacggtatcggatgacggcaaaacctatattttcacattacgtgatgatgtgaaattctccaacggcgagaaatttgatgccgctgcggccaaagcaaactttgatgccattctggcaaaccgcgagcgtcacgcctggcttgaactggctaatcagatcacggcggttgaggatatcgcaccgaatcagttaaaaatcaccctgaaagatgcttattatcctattttacaggagctggcgctgccgcgtccgttccgttttattgcaccgtcacagtttaaagacggcggcaccaaagacggtattattaaaccgatcggcaccggcccgtgggtattaacggaatcccgtctgagcgaaaaagatgaatttgtccgcaacgaattgtactggggtaaaaagccggtgtatgaatccgtcacgtttaaagtgattccggatccgaatacccgcgccgtggcatttgaagccggtgaggtggatttattatatggcacagacggcattatttatccggacacctatcagcgctttaaaaatatgccgggctataccaccaaactctctgcaccgctggaatcactggtgctggctatcaataccaaaaccggcccgacccgtgatttagctgtacgtaaagccattaatcacgcggttgataaagataaaatgattgaaaaggtgctgtatggcacacaattaaaagcggacacccttttctcagaaaatgtgccgtatgcagacgccggtttaacaccgtatgcctataacgttgaagaagcgaaatccctgctggaaaacgccggctggaaagcgaaaaccgaaaacggtatccgtgagaaagatggcgagccgctggtggtggagctgaattttgtcggtaccgatgcggtggcgaagtcgatttctgaagtggttcaggccgatctgcgccgcgccgggattgatgtgaagctggtcggggaagaggaaagcagtatctattcgcgccagaaagacgggcgcttcggaatgattttcaacggcacatggggcgcgccgtttgacccgcatgcgtttgtcagttccatgcgcattccgtctcatgccgattatcaggcacaacaggggctggcagataaagcggaaatcgatgccaaaatcacacaggtgctgaccaccacggatgaaaaacagcgccgtgcgctgtatcacgacattctgacccgtctgcacgaagaagcggtttatctgccgctgacctacatcaccgccattgcagtggcaaaaccggaaattggcgatgtgccgttcagcacgatgtcgaatgaaatcccgtttgatcagctgacaccggctgcgaagtaa

SEQ ID NO: 274897 - DNA, 336 bp, Morganella morganii
atgtcattaccttcatgtccgaaatgtaattctgaatacacctatgaagacggtgcaatgtatgtgtgccctgaatgtgcccacgaatggaatgataccgaaccggcagcggaaagcgacgagctgatcgtcaaagacgcaaacggtaatttactggcggacggcgatgccgtgacagtcatcaaagatctgaaagtcaaaggcagctcatcgatgctgaaaatcggcacaaaagtcaaaggtatccgtttagtggaaggtgaccacaatattgattgtaaaatcgatggctttggtcagatgaaactgaaatctgagtttgtgaaaaagagctga

SEQ ID NO: 274898 - DNA, 357 bp, Morganella morganii
atgattttatttctgaaggtaattaatatgacagagattcaatcctgccgggatatggcgcgggtaaacagtgctgtcggtgaccggcttttctgcagacgaaaagcgctgggttattccgggcagcaggttgcagccggcctgggaataagtcagcagcaattatcccgttatgaacgtgggcaaagccggattaatgtggggatgctggtcagggcggcagatattttacagacaccggtcggctggttttttgccggatgtcaggacaattctttatatgaagaaagtctcagtattcagtcggatatttatacagcggcatcggtgacatcagaagcagaatatacctgctga

SEQ ID NO: 274899 - DNA, 648 bp, Morganella morganii
atgatgataatgatgaaaaataggtcatccgtttattctgtgataacgtctaaaaaagaatcaaacctgactataattaccagactgaatatttttatgaaagaacgaaaacacctgagtgaacaggaggttcattccttaatatcatcattacctgattcaattaaccatcttcgtaatcagtgtctgattgctgtttgtttcagtcacggattacgcgccagtgaactgaccggattaatgctcagtgatattaatatcaatgaaaaaactattcatattacccggctgaaacacggattaagcactaatcagcccttacagtcccttgaatatgaattactgacacagtggctggctcagcggcatgcgtctgaacattatgccgaaccctggcttttcctttcccgtaaaggcggccggttatcccgccagcagatattccggattatccgtgacagcggattgtccgccgacctgaatattgcggcacatccgcatatgctgcgccatgcctgcggttatgcgctggcagacagaggaacagatacccggttaattcaggattatctcggccaccgcaatattcagcacactgtgttatataccgccagtaatgtggcccggttccgcagtattaaattatga

SEQ ID NO: 274900 - DNA, 1659 bp, Morganella morganii
atgactttttcacgcggattgcagctgttttttattatctggatctgcgggtcactgttgtatatcccaaataccggtggctacgggctgaatttgccgcagaattgcttttcatgggcaatgatggggatactgatattatttgtcagtatctctgttatccggagaaagcagtgcctgattatcactccggcgttgtgctggttttctgccgggattgtgatactggcgttaccgctgttgtatacccgtcctgaatggcggctgaacggcgggttgtattgggccggtgcagccgcagggctgctgttttatctgtgttgtgcccgattgaaactgagcaaagatcacatccgctttctggtgctgttatggctgtcggcctgcatggtgcatgcgctgcttattttgctgcaactgactccggcgggcggatggataccctggccggtgctcagcaatcgcccgtacggtgtttttcagcaggttaatttgctggcaacctttctgtcctgtggtacagcgtttgctttgtttctctttttactcccggatcagcggcaaagcagtatcagccggtggataaccgtgtcggcactgtttattatgccgtgtgttctggtgctgattcagtcccggattggcgggctgagtgcggttatcactgcggtgattatgctgttatcagccggtacgcgcagaaggaaatatttggctgttatcctgctggtcactggtgtgcttgcgggctggtggcttaaaaactatacacagattggcgtgatatcacatctgaattcagataatgccaggctggaaatgctcagcagcgcatgggagatgctgaaacagcgcccgctgaccggctggggtgccggtggttttgaatatgtgtttcagatgttccgggtctggcagggaaaatccacggaaggtacaggagttgttattcacccgcacaatgaaattctgttttggggagcagaaggtggtgctgtggcattaaccggtctggctctgattatcaccggcggggggctgattatacagagagcgtggctggcgtttcgccgggaaaataatccgctgccgctgacattgtgtctgaccatattaccgttattgctgcatacccagaccgaatacccgtttggtttatcagcactgcattttgcactgtgtttattattactgtctcaggttgacagcattaccgctttaccggcgaaaatcatacgattaccatcatttttcagcatgataacggcaggagcaggcgcggggatactctgtgtgatggcaggcgcattgctgacgggaattattctgaccggtgctgaacggcggggaatgcaggatatccgggcattgtcatcactaccggaatttgtattgatgacgcaatatgagcgggtggagtttgatcgtcatgtacataaattaatgcagtttaatcagaccagagatccgcagttattagcagattaccgccgttgggctgaaaactatctgaagaaacatactgataaaaatgtgtatcactccctgattataattttgcagtttcagggcgagactgaagccggaaaatattatttatatcagggcgcaaaattatttccgcaggatgactttttttcccggggcagaaaatcataa

SEQ ID NO: 274901 - DNA, 945 bp, Morganella morganii
atgaataaattaatgctgcgcggggctgcactgttttttctgctggtggtagctcagggcgtttcagccaaagggtgggttggtgctgaaataccttgtgttccggggggatgggagttagaagaggcgtctatttgtgactggaagaatttcgtcggtgcctattacggtcaagggcaggttattgccatgagaacaaatactgataatcagggtgatgataaagcgtatgtgccggtttccggaaattttgaattaaaagtttattggtgttctcttccggaaaatatggatacctgcaagaaatccaacggaacattattgatttcaggcggggtggttagattagagtcaagtatttcactgagagatcaattaattattgcaggcaataaaacaacaaagtctccatcacaaggaggatattgtattacgctggaagatgttaataccgggtatgaatataaaggcaacatggggtatggcccggatggacggggaaaattttgtgcggatgctcatgaattacccgtggaaccaccaaaatgtactctgaatggcggtacggatttagatattcagctgggaaaattagaacgtacagatattgccgttaaatccggtacaacaaccccggtgacaaaagatatctccattaaatgtgatggtaatattgactataacgctactatgaaactggaattcaccccgatctccgtcagcaatgaacaggtggtcagcaccagcactacggggttgggtgttgctgtgttatataacggaaaaacggttcagcccggacaaacgtttcctctcagttatcagcccggcattcatactctgacgctgggatttgaggcggtgcgtgacccggcaattaacgccacggatttgaaaaccggtgactttacggcgaacgctattttggttttcacggagcagtaa

SEQ ID NO: 274902 - DNA, 510 bp, Morganella morganii
atgaaaaaaataataatagttatgttatccggttttttcttactgacggcatggtcagcgcaggccatctcggaacagaccggtgacaataaaatctttaatttcaccggtacactgagagcgctgtctgtctgcacggtaaataataatcagacgattacagcagattttaaaaatgtcggcattaataagctggacacgaaagtctacagcctgccgctcaattacacactggattgtcccggaatcaacccggcaaatacgctgcggatgatctttatgacatcccgcccgtcggtatctgatccgtcagcgattgaaagtgatgtcagcggtttgctggtacggattctgaaggacggacaaccgcttgagttaaataaatttttcaaaatcgatgatgttacgcagcggccaaagctggaagcacagctggtaaaagtgccgggcacggacttaacacagtctccgttccgggcgaccggcacgctggtggcggaatatttgtag

SEQ ID NO: 274903 - DNA, 591 bp, Morganella morganii
atgacattcataaaacggtttaaccggcaggctgcgcataccctattaccgggctggatgttattagcggtagtgagcctgacggtatttcccgcgcagggtaaaaccggtgatgaaaaccggctgaaaataaatatatccggtacggtgattgccaccgggcgctgcacattcagtaatcaatcatcaccggatattaatttcggggatattcgtttttcctccgtatccggtgtaaataatattaccggtagttatatcagaccgctggacagcggaatgacctgtaccggtgatacagcaggaaagacccgctttcgcctggactctgcgcagggcgataccgttgatgatgccggtcataaattgctgcctgtcagtgtcggcagcacaccggtaataaatgcaaatctggggattcgtctgctggttaacggaaaacagcaggatattaatactgattttaacgtggatattctgaatctgccaaagctgcaggccgaactggtgcaggtgcatcctgatgataatacatggataaacgggcaatccattacatcacaagctattttaaccatgacttttgattaa

SEQ ID NO: 274904 - DNA, 525 bp, Morganella morganii
gtgaagatatccattccgtgtatggctgtactgtgttccggtctgctgctgtgttcggcagcgcacagtacggatgttgaagtgaaaggacaattggtgtttgagccgtgcactttatcgcaggcaagtgaaaatatctcacttccgttcggaacgatagtaaaaaactacttttataccgcagaccggacaccgccggagccgttcagtattgagctggaagggtgtgataccactatcggtaaagaggcctttatcacgtttcgcggggctgaaagcagcgcgctgcctggattgctggtgccggataacggcacattaccgggattggcagtgggtattgaaaccccggaagggaagttactgccgctgaataaaaccagtccggcatatgccctgagtgacggcacaaccacactgaattttcaggggtatgtgcaggcagagccggatgcggttaaggataaaaccctgacgacaggtgtgctgtcagcgacagccacgtttgaaatctcatatccgtag

SEQ ID NO: 274905 - DNA, 759 bp, Morganella morganii
atgaagaatcaatacagccgttttacttcacggagccttccggtactgatgctggccggtattctggcggctccggctgcacaggcggcgattgcactggacagaacccgtgtcattttaaacggtagtgaacgggcggaaagtgttgaaatttctaatcagaataaagagttaccatatctggcgcaggcatggattgaagatgcgcagggtaacaagatcaaggatccgctggtggcactgccgccaatccagcgggtggaagccggtgagaaaagtcaggtaaaaattcagccgacagccgcgatgactctgttgtctcaggataaagagagtctgtattacttcaatttacgggaaattccgccgaaatcggataaacccaatacactgcagattgcattacagacccgcatcaaactgttttaccgcccggcaggcttagtggtggcgcagaatgcaaagccgtggcaggagagtattaccctgacacggcagggtgataaatacattgtgaataatccgacaccatactacgtcacgatttcatcagcatctgcggcatataaaggaaaagatatcagcggatttgaggcattcatggttgctccggacagcagtgaaaccctcggcggcagtgccgcttcactggggaatgcgccggtactgggttacatcaatgattacggcggccgcccgaaaatgattttttcctgccagagcaatacctgccgggtgagtgaagtgaaaccgggctga

SEQ ID NO: 274906 - DNA, 2607 bp, Morganella morganii
atgaaagccaatgtattttcgtcaggctgcggaaagtcgcgcccggcggcgcggttaaagccgctgacatttatgatcctgctctctctgttttctgcggtggttcaggcggaggacattacggagttcaatactgaggtattggatctgaatgagcgcggagatattgatttatcacagttttctcaggccggttatgtgatgccgggaacctattccctggcgctgaaaattaatagcagcatgcaggcggagcggcagatccgttttctggccccggataatgatccgcagggcagtatggcctgtattacgccggagatgagcgaagagctgggattaacctcatccgcaaaaggacagctgacctggtggcacaatggtgaatgcgctgatccggcatcactgccgggaatgactctgcgggcggattttgccgccggggcactgcgcgtcagtctgccgcaggcgtatctggaatataccgcggataactgggatcctccgtcacgctgggatgagggtattgccggttttatcctggattacaacctgaatacgcagctgacaaagcagcgcgaggccggacacagtaaccggcaggatttcagcggtaacggtaccaccggcctgaatgccggcgcctggcgtttgcgggcagactggcaggggcgctattcgcgcaccaatcatgaatctgaccaaagctgggactggaaccggttttacgcttaccgcgcgattgcaccactgcgggcaaaattaacgctgggggaaaactatctcacctccggtatgtttgacagcttccgctataccggcctggcgctggataccgatgacatgatgctgccgccgaatctgcgcggctatgcaccggaggtatccggggtggcgaaaaccaatgcgcgggtcactgtaaaacagcaggggcgggtgatctatgaaactacggtagcagcaggaccgtttcagatccgggatttaagtaacgcattgtccggtaagctggatgtggaagtcgcagagcaggatggttcggttcagacctttcaggttgatgcggcgagtgtgccttatctgaccagacccggactggtgcggtataaagtggcgctcggtaagccctcggaatatgaccaccgtgtcaaagggccggaatttatcagcagtgaattttcatggggtgtcagtaacggctggtctgtctatggcggcgggttattcgccggcaaatataacgccgtttcggccggtatcgggcgtgatttgctgatgttgggggcattatccgctgatattacccaatcacgcgcttctttgccgggcgggaaaaccaaaaaaggcgggtcataccggctgagttattccaaacggtttgatgctaccaacagccaggtgacatttgccggttaccgcttctctgagcgcgattttatgacaatgtcgcaatatctgagtgcccgttatcacaacgctgcggtgacaggtaacggcaaagagatgtacaccatgacattcagccagacactcagttcgctgaatacgaatgtgtatcttaattttaaccaccagacctactgggatcgcccggcaagtgataactggaatatttccacctctcattatttcgatatcgggcaggtgaaaaacatcagcctgaatttatcggcgtaccgtaaccgccatcagggcggccgtgatgacgggatgtatatcggcctgtctgtgccgtggggggaaagcggcagcataggttacagcgggcagttcagtaaaggacagaatagtcactcagcggattacagtgaccgcattaatgagcgggcgaactatcgtatcaccgccgggatgagcagtgatcaccgtgctattggtaacggctatctgaactatcgcggggataaagccgaagtgaccgcaactgccggatttgaaggtaaccgttacagtgcggccgggctgtctgtacgcggcggattgactgccacagcggaaggtgcggcactgcaccgcagcggtgtcatgggaggaacccgcatgctggtggataccggaggtgtggcggatgttcctgtccgcggcggtggcggagaaaccaccaccaatatcttcggtaaagcggttgtcagtgatgtcagcaactattaccgcagcagcgtcaatgtggatctgaacaaactgggtgaaaacgccgaagcgacccgttccgtagttcagggaacgctgacggaaggtgcaattggttaccgccgcttcggcgtcgtctccgggcagaaggcgatggcggtactcagcctgactgacggacatgttccgccgttcggggcagtggtgcagaacagggatcatatacagacagggatggtcagcgaggatggcatggtctggctctccggtattaatccggaagaaacaatgcaggtatcgtggggcggggaaacgcagtgtgaaatccattttccggccgtgatcccgcaggggaatctgctgctgccgtgtgtgtctgcaacagcacctgtaccggaaaaatcagtaaaaacagaaacaacatccaccccgctgatagtggcgggggcggagaataaaagagagagtaagaaatga

SEQ ID NO: 274907 - DNA, 516 bp, Morganella morganii
gtgaaggcgaagatactcagtaccggactgctggccgtctgtttgactgtcagtgcggcagggcatgaacagcagacaggccggatctggttacagggatttgttctggattcttcctgcaccatcaatatgcaggataagtatcaacggattgatataccacaggttgcggcaaccgagttatatcagcgtggctacagttcagcctttgcgtttgctgtccggctggaaaattgtctgctgtcagcggatggcaaaagcctggcgataacgtttaccggtccggtggacagcaacggattgtttgccatcagcggagaggcggaaggggtcgggattcagctcagtcagggagatggttcggtgattatgccgggaaaagcagtggcactcccggatataccacagacaaaaaatatcacactgaattaccggttacggctgattgcggatcgtaactcaataaaaacagggatatatcggtcaaccgtcaattttaacctggattatttgtga

SEQ ID NO: 274908 - DNA, 540 bp, Morganella morganii
atgagtatgaaaaaagtggttctcgcactggcagtttcttccgtaatggcaatgactgcgcaggcagccaatcagggcggcggcaaaatcaactttcacggtgaagtgattgatgcagcctgttctattgatgcaaacagcctgaaacaaactgttgagctgggcagcgtggctaaagtgcaactggcgaagggcggtaaatccacgccggttgattttaccattcaactgcataactgcgatatcaccagcggaaaaacagcaaccgtaagttttaacggtattgcaggggattcggcaaaaggtctggataaagcctttggtgtcagcggtccggcatccggttcaatgggtgtggttattactgatgccggcggtaatgttattgccccgggagatacatcaaatgcatttacactgaatgacggtgataacgaactgaatttcaaagcatatatgcagggagattcaaacgcatcgaaagccgttgcacctggtgctttcactgcaacagctgatttcgtgatggcttatcagtaa

SEQ ID NO: 274909 - DNA, 561 bp, Morganella morganii
atgaaggaaaacaaacgtaaacacctgatgcagtctgaggtggagaaaatgatggcagttgcggaaaacggccgtgatccggagaggaacacctgcctgctgtggatgtgttttgtccacggcttccgcgtcagtgaactggggcaactgagtttatcggacatggatgttgccgccgataatctctatataagacgacttaaaaacggcctttccaccacccatcccctgagccgtacagaaaaaaatctgcttacccgctggcttaactgccgctcccgttatccccgtgccgctgaaaaccactggctgtttttatcccgcaaaggcggacacctttcccgctcccgtatttaccggatcttaaaagagctgggagaaatggcggggctgccggtaccggttcatccgcatatgctgcgtcatgcctgcggctatgcgctggctgataaaggggcggatacccggttgattcaggattatctcggacaccgcaacattcagcatactgtgctgtataccgcagcaaattcggggcgttttcggggattgtgggactag

SEQ ID NO: 274910 - DNA, 360 bp, Morganella morganii
atgattacagaagatactgatttaaccgttaataaatctgtcggctaccggatcttccgcaagcggaaagagctgggctggtccggcagccgcctggcggatcacctcgggatcagccagcagcagttctcgcgctatgagcggggatgcagtcagatcaatgtcagcctgctggtcagggcggctgaagttttacagacaccggtcagctggtttttcgctgactgtccggaagcgcgttcataccgggagtgcttccggggaaaagcggatatttatacagcggaatctgttccggagtatggattgtccgcacccacccggtacaaaaggaaaccggatgaaggaaaacaaacgtaa

SEQ ID NO: 274911 - DNA, 819 bp, Morganella morganii
atgaacagatttgtgaaaataattgcggcggtcgcgctgctctggtccgcttcggcgggggcatcgattttctcttatatcacggaatcgtcagggaacccggcgaatgccgtttacacctacattatcgagcgctgggatccggaagacccttcggctcccaatccctgctacggctggtctgtctgctggatcaatatcaaccataaacacgatgttgacggttcaccgggctcttccaccaaatcgattgtccgtgtggaaaagctgagaacactggcggaagtgcgggatgcggttttgaacaatatttcgctgccatataacggcacggcgaagcatgtcggcccggcgctgaattccaatcaggagtgtgtggggctgttttatgaatctgaatcaggcggctggtcgaaaaacggacgcctgctgcccggctcactctgtggtatcgccccgccgccggtgggcgcctgtgaagtgaccagcggctctgtgatcctggattacggggatattgatgaagtcagtctgccggatgcggcacgtaataaaagcatcaccgtcacctgcaatctggatatggatatcctcgtgatcgcctccggctcagacagcggccgtgtcccgctgcggccggataacagcctgtacgcggatctttatctcaacggcaatccgggagagcagggggcacccattcatgtcccggccggtggtgcgactcaggtggatgtgaaatcggtgctgaaagtgaacgggcgggttgcgccgggcgctttcgaaggttccggatccatcattcttgttatgccgtaa

SEQ ID NO: 274912 - DNA, 546 bp, Morganella morganii
atgaatgaaacagtaaggcgcttttttatcagtacctgcggtgtgtttctgttatcactgccgggtgcggatgccggggctgtccctgacaacctgtattttcacggcacgctggtggatgagccctgcacgatacatccgggggatgaaaccgtggaactgccgttcggcaatatccccgataaaaacctgtacgcctatcagcggacacccccgaaggatttccggatccggctctcggagtgtgatacctccatcggcaagcgggtgacggtgatgtttgccggggatgaaaatccgtttatcagcggcgcgctggcgataagcccgggcagtcaggcggagggcatcgcagtcgggctggaaaatgcggacggcacggcgctggcggtcaatgaggtatcaccgcagatcacgctgaatgacggactgacactgctgaacttccgcgcctatgtacagggagagccggatgcgctggcaaacaaaaccattaaacgcgggccgttcagtgccattgcgacatttcatctcaattatgactga

SEQ ID NO: 274913 - DNA, 483 bp, Morganella morganii
atggcaaaacattaccggcggttactgatgctgctgctgtgtgccgcagcgggcagcgcggccgccccgaacatgacgctgtttggtacgttgctggtaccgcccgcctgcacgatcagtgacaacggtgtgatcgatgtgtttttcggtgacaacgtcggcgtgcataaagtggatggcgtcaattacaccagggcggtcaattacaccctggtgtgtgaggacaatatcaagggctgggatctgggattgtcggtcaccggcccggtcagcgggtttgatgatgcggctttacagaccaacatccccgacctggcgattcacctgacgcagaacggaaagcccttcacgctcaacaaacgcattgcggtatcaccggataacccgccggtgattcaggcggtgccggtaaaacggccgggcagcacactgccggaaggtgcatttgatgtgaccgccacactgctggcggaatatcagtag

SEQ ID NO: 274914 - DNA, 537 bp, Morganella morganii
atggatgagcggatcagaaaacagtgtttcctccggcggatactggcggttgtgctctgtatctcagcgggaagtgctgcggcactgccggagcgggtggccggtatccggggcgtgcccgggatcacctatgtcactatccgcggcaatgtgatcgcgccgccgccgtgtgtcattaacaacggcaataccattctggtggatttcggggaggttatgagcacccgcattgatggccagcgctacaaacagccggtcaattacacggcggagtgcacaaagatgccgactaatgccatgacgctggccatcaccggcaatactgccgggtttgatgccgggttattacagactgaaatcgccgggctgggggtgcgcatgctttatcaggggcggcagctcaatcccggtgaaaaagtgaaatttacttatccggtctttccggcgctggaagcggtgcctgtccgtgatatgacggcggtgctgaccggcggggatttctcggcggtggcaacactggaactggattatcagtaa

SEQ ID NO: 274915 - DNA, 759 bp, Morganella morganii
atgatgtcagttaaacaaacccgtctctctgttctggccgttgccgctgtattgctggcctcagcacagtcgcatgcggctatcgcgctggacagaacccgtgtcattttcaacggggcagagaaatctgtcagcctgaatgtcagcaatctgaataaagagctgccgtatttggcgcagggatggattgaggatcagaacggagaaaaaatttcgtcaccgctggtggttttgccgccggtgcagcgtattgagccgggtgataaaagtcaggtaaaaattcaggcattaccggcgatcgccgcactgccgcaggacagggaaagtgtcttctatttcaatctgcgggaaattccgccgcgcagcaaccggcagaatgtcctgcaaatcgccctgcagacccgcatcaaactgttttaccgcccggaagctatctatgcctcacaaacggatctgactaatccgtggcaggaaaaaattaccctgacgcgccgtggagatcattatgtcgtcaataacccgaccgcgtattacgtgacgattgtggatgccctcagcgggctgggcggcaaaagcctgaacgggttctccccgctgatggtggcaccgaaaagtcagggcacactcggcctgagtgcagccactctcggcagtgcgccggtgctgagttatatcaacgactacggcggccgcccgcagctgcagttcagttgcagcggcgcagagtgccgtgtgacaaaaacggctgccggtaactga

SEQ ID NO: 274916 - DNA, 2658 bp, Morganella morganii
atggtaattccgctgagtaccgtctcccgccggagactgacagtgctgatttcattaattctgaccggtatcccgcaggcagcttatccggataatcaggatgttgaatttaatactgatattcttgatgtaaatgacaaacagaatattgatctgtccgatttttcccgtgccggttatatcatgcccggcacctacgacttttttatccgggtgaataacagtgagttacctgacagttatccggtctcttatattgcgccgccggatgatccgaaaggcagtgccgcctgtttatccccggagctgatggcgcaggccggactgaaaccggagtgggcagagcgcctgcgctggtggaataacggcaaatgcctggataccgcgtcactgccgggcatgtcggtgtcaccgaaactggcggacagcgagcttatcctgacactgccgcaggcttatctggaatacactgccgctaactgggatccgccctcccgctgggatgaggggatttccggcgtgctgtttgattacaacgtgaatgccggtattaatgacccggcacacggcaaacagacacagcaggtcaccgggaacgggactgccggggcaaacctcggggtctggcgtgtccgcgccgattggcaggcgaatctccgccataccaccggttccggggatcgctccgaacataactggacatggagccagacctatctctaccgggcggttgcctcattacaggcaaaactgacgatgggggaaaccttctcgcgctcagatattttcgataacttccgctatatcggggtcaatctggctaccgatgacaacatgctgcctccgaatctgcgcgggtatgcaccggaagtgaccggtgtggcgaaaaccaatgccaaaattaccgtcagccagcaggggcgggtgatttatgaaaccctggtcgcgccgggaccgttccgtattcaggatattaatgatgcggtcagcggcaaactggatgtccgggtggaagagcaggatggctctgtgcagtcgtttcagatggataccgccagcattccttacctgacccgtccgggccgggtgcagtacaaactcgctgccgggcagccgtccgaaatcggccgtcacgggaaaggccccgtctttggtatgggggaattctcatgggggatcagtaacggctggtcattatatggcggctccctcgtggccggggactataatgccgtttctcttggtgttggtcgtgatttgatggccttcggggccatctcttttgatgccacccaatcttttgcccgtctgccgcaggaagacaaacagtatcgcggcggttcataccgcctgagttactccaaacggtttgaggagctggacagccaggtcaccttcgccggataccgtttctccgagcgcgactttatgagcatgaatcagtatctggatcgccgctacagcgataaccgcgcggataacaataaagagctgtacaccatcatgttcagcaagcagttcccggacatcgggctgagcacctatctgaactacagccaccagacttactggaaccggccggataacgacaactataacctgtcgctggcgaagtatatggatatcggcagttataagaatatcaatatcagcttatccgcttaccgcaataaatatcaggataagaatgatgacggggtgtatctcaatatcagcatgccactgggggatagggccacggtcagctacaacagcatgatcaaccgccacggtaattctcataacgtcagttattacgaccgtccggatgataacaacagttaccgcctcggcaccggtctgagcagcaacggcaaagcctccgttgacggctattacatgcactatgccgacagtgctctggtcactgccagtgccggacatattgacggggaatatacctccgcatcgctctcgcttcagggcggggtaacgatgacaccgcagggcggggcattccaccgcatcaatatgccgggcagcgcccgtctgctggtggataccggcggcgtggcggatgtgccggtcagaagcaccggggcactcagctataccaaccgcttcgggaaagccgttctgccggatatgaataattacttccgcaacagtgccgctatcgatatcaacaaactgccggaaaatgcggaagcacgccgctctgttcagcagctgacgctgacggaaggggctatcggctaccgtcagtttgatgtgctgtcaggacaaaaggccatggcgactatccgtctggcggacggcagcgagccgccgttcggcgcggtggtgacttctgcggataaccgcgagctggggatcgtcaatgacggcgggcaggtgtatctcagcggcattaacagcggggatattctgacgctgcggcgcggcagtgaggctgcatgccggatgacggtgccggagcttgcgccgggacaggcgctgtacaccctgttgctgacctgcggcgcagagccgcaatccgtcccggaaaaaccgcagccggttgcgctgccgtcttccccgccgccggctgaccgcccgcagcaggggaaatggctgaatatcacaggccgggcagacccggcaccttccacacgtaacgaaatgagtgattcattatga

SEQ ID NO: 274917 - DNA, 558 bp, Morganella morganii
atggtgagcagagtcatccctcagggagtgctgataacaatagtgtgtttttcctcttatacagcggcaggtgaaacgaaacaggatgcaaaaaccagtctgcgtttcggtgcggtacagatgcagggcacgatcctcgaaccggtttgcactatttccaccgccagccgtgagcaggcagtggcgctgaccgatgtttctgttccgcagttgcgtgatgaagggcagggacccgcagactacttctggatcaggctggcggaatgcaccgtgcagccggtgaaaggcggtgcggcggataatctccgtttccgggtcacgtttgagggggctgaacaggacggacgttttcagctgaccggctccggcaaaggggcttccttatcgatttcagaccgcaacgggaatgaggcggttcccggcaaacccttaccgcccgcagatattgatctcaataatatggcgctgcgatatcaggcgcgtctcgtgaaaaacagtgatgaacttcagtccggttattaccgggcaacagtgggtttcaagctggaatattattaa

SEQ ID NO: 274918 - DNA, 528 bp, Morganella morganii
atgactttgaataaattagcattagtgctgggctttggtatgtctgtggttgcaggtgcggcatctgctgctgatcagggacacggtactgttaaattcaccggttcaattattgacgcgccttgctctattacgcctgataccgaaaaccagactgttccgttaggccagatctccactgccgcactgaaagacggcggccgcagtaattcccgtgattttaaaatcgcattagagaattgcacaacagaaacctacaaaacggtacagaccactttcaccggttctgaggcggctgatattctggccggttccctgggtattgaggggattgccaaaaacgcggcggttgttattactgatgcgggcggcaaacagatcaaattaggtacaccaagcgcggcacaggctctgcgtgacggtaataacgacctgaacttcgcagcgtatttacagggttcttctgctgaagccgctgtcccgggggacttcaccgctatcgcgacattcgcactgacttatcagtaa

SEQ ID NO: 274919 - DNA, 564 bp, Morganella morganii
atggacaaacgtaagtttctgacccgttatgaagttgacgccatcctgaaagaagcccggaaaagccggtatgccgaacggaattactgcatgattttaatgtgctatctgcacggtttccgcgtcagtgaattatgtcatctgtcactttctgatattgatctggacagccgccttatttatgtccggcgtctgaagggcgggctttccaccacacaaccgcttattgatattgaatataatgcgctggtgtcgtggctgaatataagaaatacctggcgtaaccgggatttggaatgggtatttttatcgcagaaaagcggggctatttcccgtcagcaggttcataccttattaaagcagtacggcaaagccgccaatatatccgtcgcaccacatcctcatatgctgcgccatgcctgcggctattcccttgcggatctcggccgtgatacccgcctgattcaggattatctggggcaccggaatatttcccataccgttatttataccgccagtaattccaaacgttttcagcaaatctgggatcctctccgcggataa

SEQ ID NO: 274920 - DNA, 951 bp, Morganella morganii
gtgaagaaaaaaatcattcttgactgcgatcccggccatgatgatgccatcgcactattacttgcttacggtaatccgcagattgatctgctggcagtcaccacggtggtcggtaaccagacactggagaaagtgacacgcaatgcgctggcggttgcccgtattgccggaattaccggtattccttttgcggcgggctgcccgcgcccgctgatccgggagattgaaaccgcgccggatattcacggcgattcgggcctcgacggaccggtattaccggagccggtgctggcattagatccgcgccatgcggtacagctgatcattgataccattatggcgcatccgccgaaaaccattaccctggtaccgacagccggactgaccaatatcgcgctggccgcccggctggagccgcgtattattgaccgggtcaaagaggtggtactgatgggcggcggctatcacaccggcaactggagtgcagttgcggaattcaatatcaaaattgatcccgaagcggcacatattgtgtttaatgcaggctggccgctcaccatggtggggctggatctgacacaccaggcgctggcaaccccggaggttgtcagcaaaatcgcagctgtcggcacagcaccggcgcagtttgtgctcgaactgctggaattcttcggcaccatgtacaaaagcgctcagggatttgattacccgccggtacatgacccctgcgcggtcgcgtatgtgatcgatccgtccgtgatgaccacccgcaaagtaccgctggacgtggagctgaccggcacactgactctcggtatgaccgttgcggatttccgttcgccggctccggcggattgtctgacacaggtagcggtaaaactggatcacacccgcttctgggatctggtcactgatgccctgcgccggatcggggatatccgggtcgcataa

SEQ ID NO: 274921 - DNA, 1155 bp, Morganella morganii
atgaaaaagacattattagctgtattagtcccgctcgttgcattaagcggcgctgcaaacgcggcagagatttataacaaagacggtaataaactggatctgtacggtaaagtcgatgttcgtcatttattcagcgacaatgaccactatggcgacagccagaacggtgatgactcccgtttccgtatcggtctgaaaggtgaaactcagatcactgatcaattaaccggctttggtcgtttcgaaaacgaaatcaaaaccaacggtactgaaggcgacaacaaaaaccaggttcgtttagcttacgctggtctgaaatttgctgagttcggttcactggactatggccgtaactacggtgttatctatgacaccaacgcatggaccgatgtgctgccaatcttcggtaacgataccatgacccagaccgacgtctacatgaccggtcgtgctgcaaacctgctgacttaccgtaactctgatttcttcggttacgttgacggcctgagcttcgcattacagtatcagggtgcgaacgatgataactctatcgcaagccgtggtaccagcaatttcaatgaccctaccagctacgataaaacagctaacggtgacggcttcggtttctccaccgcgtatgacatcggctggggtgtgagtgttggtggtgcgtactcaagttctgcccgtccggacggtcagaaatataacaaagcaagcggtgctctgggtgatcgtgcagaagcatggaacgtcggtgctaaattcgatgctgacaacctgtacctggcagccgtttacggtgaaacccgtaacatgacttattacggtaacggtaacggcaactgggatatggctcagactgctaacaaaactcagaacatcgagttagtggctcagtatcagttcgatttcggtctgcgtccatccatcgcttacctgcagtctaaaggtaaaaacctgaatactccgtatggcagcgatgatcaggacctggtgaaatatgttgatttaggtgcttactactacttcaacaaaaatatgtctgctctgatcgactacaaaattaacctgttagacgaaaacgactttacccgtaagtctggtatcaataccgacaacgtactgggcttaggtttagtttaccagttctga

SEQ ID NO: 274922 - DNA, 1248 bp, Morganella morganii
atgcttgatgataactacgatatcttattaatagatgatgatacggatgtcctggaggcttactgtatgctgctggagcaggccggatatcgtgtttatgcctgtcatgacccgctggcggcaaaagagctggttcaccgcgactggtgcggtattgtgctcagtgacgtctgtatgccggggtgctccggtatcgatctgatggcattgttcctggaaaaagacaaatacctgccggtgctgctgatcaccggccacggtgatgtgccgatggcggtggaagccgtcaaacagggggcgtgggattttctgcagaaaccggtggatccggagcatctgctgaccctgacagaaaaagccctcgcagcccgcaaacagcgggtaacccagcgccgctggagctcagagcaactgacactgaatcttgccggtgagagtgaatggacagagcacgtccgccagcagttgcgcggactggcggaaacccatgctgcggtctttctgcacggtgaaccggggagcggccgtacctatctggcgcgctacctgcatcagataagcagcaataaacacgggccgctggtcatcaaaaccctgctcagtgatgaggatatcccgctggatgcctggctggatgaagtgacggacggcacactggtgatcaaaaatatcgatctgatgccgctcagccagcagcgctggctggtacagcatatccgtcaggagcagcggacattccgcctgatcgggatcgccgacacaccactgattatgctgaccaaacagcagaagattattgccgaactctattactgtttctccatgacacagattgcctgcctgccgctgtcccagcgcaaagccgatattgcaccgatattccgttattatctggaacaggcctgttcccgtctgaatcatccgctgccgaacctcgcggaaccgctggtgaaaaaactcacccggcggcactggccgggcaatgtcagtgaactggcgaacgcggcggagctgtatgcggtcgggattatgccgatgggtgataccgcgaacccgctgctgccgtccgtggcaccgactgcgctggaccagcgggtggagagctatgagcggcagattatcaccgaagccctgaatatccaccaggggcggattaacgatgtctcagagtatctgcaaatcccgcgtaaaaaactctatctgcggatgaaaaagtacgggctggataagcatcactaccggatatga

SEQ ID NO: 274923 - DNA, 2004 bp, Morganella morganii
gtgaagcagcgtattgcccgttatatcggccgtttcagtatcagtgcgatcctgcgcggcgcgtttgttatcggcacgctgatgacactgattgtcagctgcgtgagtttgtacgcctggcaggcgcagaaccggcagatccgctacgcgctgggggattattttccgcgtattcaggcgtcgtttctgatcgagggacaactgaacacgctggtggatgagctgaatgagttcctgaaagcgccggataccgcagcacgtctgcagctgcgtaatcagatcacgctgcatttgtcacagatcgaagcgatcaaccggaaactgagcggagaggatcaggcgcagatcaccgcgattgtgcagcaggggcaggcgcttttgcagcgtctcgataatgccctgtataccctgtttctggcgcgggagaatgtgaatacgctgtccgcacggattgcctggctgcatgatgacttcagtaccgaactcagctcgctgtcacaggatatcagctggcagcagggctctctgctggatcagacagagcaggatccgtcccgggcaattgccttacagggtagtctgcgcaaagtgcagggtgagttacagctgatttataccctggcacggctggaggggcagattatggacgatctgaccgggcgtctgcgggatgaacagaatgaaagtacggaaagcagcccggattcgcacagttatgtccgttacctctcctatctgaagtccggtgcggaatcaaacgaaacggcatcggatatgtatccgagcaccgtgacactgcgccagactattgatgaactgctggatatcggtctgtctgacagcaaaatgcccggcgtgctgaaagattaccgcgcggcgaaagcggaactggcggccgccacggcagaaaaagatcgcattctggagcggttccgcacacagctcgatgtgcagcttgataacagccacagccagttacagtctctgaatcaccatctgtccggcattatgagttacagcggcattatcattattattactgcgctgctggcgttattactggcggtgatctttaaccactattttatccgcacccggctggtcaggcgctttacggtgctgaatcaggcagttgcacggataggacacggtgatctgaccgcggagatcccggttgaggggcgcgatgaaatcggccgggtggccatgctgctgcgccagacactcggccagatcaaccggcagaaagcgcagctggaacaggaaattaccgacagaaaagccattgaggccaacctgcgggccacacaaaatgagctgatccagaccgcgaaactggccgtggtcgggcagaccatgaccaccctggcgcatgaaatcaatcagccgctgaatgcattatccatgcacgtttatatggcgaagcgggcactggcggcggaaggaaataccaatgccgtgaatgccctgaataaatccgcacagcttattgcccggatggacggcattatccgctctctgcgccagtttgcccggcggcgggatgacggcgcgacactgcagccgattgatttgcatcagagcattcaggatgcgtgggatatcctcgcattacagaacaaaatgcgcgatgtcaccctgcaccagccggattttctgccgcaggtgcagggggatgccatcggtatacagcaggtgctggtcaatatgctctccaatgcgctggatgcctcaccggcagcggctgaaattgtgattgattttacggagtccggtgatgagatttctctctttatcagtgataacggcagcggctggccgatggcgctggcggactcactgatgaaacctttcaccaccagtaaagaaatcggcctcgggatcggcctgtctgtcagcagctccattatgcagcaactggggggcagtctgcggatcgcatccacgctgacccgccacggatgtgtgatcctgagttttaaaaaggtaactgaatatgcttga

SEQ ID NO: 274924 - DNA, 1257 bp, Morganella morganii
atgtcacaacgccgaatccgccgctttgcggccagtatgataaccgccgccgcgctgatattcagtttgtcagccatggcgaaaccggatgaactggtgatcgccaccacgttttcaccggaagcaacagcccatattatcagcagctggcagcagcagcccggagctgtccgtatccgtaccattaaccgcaccagtgcggcactggagcgtctgctggatactcctgcactggaagatgtggatctggtggtgacatcctcgccgatgttattgcagcatctgcaggagcatgaccggctggcagagctcactgatctgccggatgtttcccggcgtctggtgccgctgcggctgcgcgataatgcggcagcggtggcattttccggttacggcattctggtgaataaacggcggatggcggaaaataatctgccggttccggcatcgtgggattccctgaccgacagccgctatcaggggttgctgctgatgagcagcccgtcacgctcggacacctatcatctgatggtcgaatcactgttacagcagcgcggctgggatgagggctgggcattgctgctcaatgtttccgggaatctggcgactatctcatcacgcagtttcggtgtggcggacaagatcaaagccggactgggcggtgccgcaccggtgattgataactacgcctggctgctgctgggcgatccggagctggcctttaattatctgccggattccgcgacatccccgacctttgttgcgataagccgccacagcctgaatcaggacaaagcccgcgcctttatccgctttcttctcagtgaacaggggcagaatgtgctggcggacagcagcaccggtaaatatccggtcacaccgctgccgcagggaaatccgcgtgagccggtgcagcgccgcctgctgaattccccgcatcagatggatgagaatctggtgctcaaacgccagcgcatggtacagcagctgtttgataccgcgatcactttccgtctgacggaatccatcgacgcctggcgtgcgctgtataccgccgaagcccgcgtgaaacgcccgctgccgtatatccgtgccctgctgattgccatgccggtctctgcgcaggagagtgccgacccggcctattactcacgttttgacgataaccgcaaagccgaggaagagtatatccgctggcagcagttcttccgcgagcaacagcgcaaagcgattgcggaactggagaaagtccggtga

SEQ ID NO: 274925 - DNA, 1404 bp, Morganella morganii
atgctgtcatttttaaagccggctatggcaaaaaataaagtagcacccggaaaagtgcccgccacttacaaacgttatcgtgttcaggcattgctcagcgtgttcctcggttacttagcgtattatattgtccgcaataactttacgctttccacaccgtatctgaaagaaaacctcgatctgaccacaacgcagatcggtatgttaaccagctgcatgctgatcacttacgggatcagtaaagggattatgagcagcctggcggataaagccagcccgaaagcctttatggcctttggtctgatcctctgtgccgttgttaacctcggtatgggcttcagcagcgcgttctggctgttcgtcggtttcgttgccctcaacggtctgttccagggcatgggcgtcggtccttcttttattactatcgccaaatggttcccgcgccgtgaacgcggccgtatcggggctttctggaatatctcccacaacgtcggcggcggtatcgttgcaccaatcgtgggtgcggctttcgcggttctcggtaccgagcactggcaggcggcaagctacgcggttccggcggttatcgccgtggtcttcgctgtgatcgtcctgctgctgggtaaaggttctccggaacaggaaggcttaccggcactggcagaaatgatgccggaagaaaaagtggtgttatctgacgcgcagaaagagcagtctccggaaaatatgtctgcatttcagattttctgcacctatgtgctgaaaaacaaaaacgcctggtatgtctcttttgttgacgtgttcgtgtacatggtgcgtttcgggatcatcagctggctgccgatttacctgctgaccgagaaaaacttcagcaaagatcagatgagtgtggccttcctgttcttcgaatgggcggcgattccgtccaccctgctggcaggctggctgacagacaaactgttcaaaggccgcagaatgccgctggcgatcgtctgtatgaccctgattttcttctgcctgatcggctactggcagagccagtccctggccgtcgtcaccttcttcgctgcagttgtcggttgcctgatttatgtgcctcagttcctggcatccgtgcagaccatggaaatcgtcccgagcttcgcggtcggttctgcggtaggtttacgcggtttcatgagctacatcctgggtgcaaccctggggaccaccctgttcggtttcattgttgaccgtatgggctggcacggcggtttctatctgctgttaggcggtatcgtctgctgcatcatcttctgtattctgtctcacttcggtgcgctggaactggaacgtaaccgtcagcaggcactgtcagaagagaaagaaacaaaaatcaaattagaacctgcttctgcaaactga

SEQ ID NO: 274926 - DNA, 5910 bp, Morganella morganii
atgccacgctataccaaccttggcaccattgctgttgaagcctttaacctcgtcaataatgatccgacagataaagatgtgattgccaacaccggtgtgactgcatccggcggttcactggtcaccaacgaaaagggcggcaaactgctgctggggcagaaagggatcggtaaaaatgaaggaaccgtgaccggcgtgcaggttaagggtgcttcatttatcaataacggcgatattctgatggggaaagacaatgtcagcctgtcaggcggccgtgaagacgatacctgggatatgcggattatgtcgaatgcggtggccgcactgctggatgaaaccgccaaagccggtaaaaaatatgcgattgaaaacaacggaaaaatcgatattaacaaaggtgtcagtaatgccgtcggcattaacgtggcatcaacaccgaaccgtaatgctgattcacagctgactgtcgttaacaacggtgaaattgacgtggcgggtaccaatactgttggtatgcgggtgtcaggcacgaaccgtgataaggatgttattgaaaacaacggcacgattaatgtctccggtgccggatctatcggcctgctggcgctgggcgacagcacgattactcaccacggacaggtgattgccaccaacaacggaaccaccaccggcggcatcaaaccggcgcgcaccaccggggtacgcgcggatgatgcgaaagtgattatcgacggcggaaccgttgagctgaaaggcaataacactgtcggggtctttgcccgtgtgggcggtgaaatcgaccttaacagcggccatgttatttttgataaaaactctgtcaaccagaccggttactggatcgccggacgtaaaggggcagatgaaaccttcagctcgcggatcaatttcggggcaagtgatgtagctctgatactggataataacgattccacgttatttcgtgttgaccagaaagcgcagttcctgggtgacagcagcaaaggcacaacttacacctttgatatcaacggcgaaaaaagccgtggtttctatattgcggataacggtaccgaagtacaaaccggcaatatgcaactgaatgtcaacgggaaagacgcgaccgggctgtatctggccaatggtgccggggcagacggtaaggttgtgctgaataaagagaccaccatcagtgttaccggcgaaggcggaaccatcgcggtgattgatggtaattattacgatattaacagtaatgcgatcaaaaaaggatcggctaaaaccacactgacctcaaaagcgcacctgaaatcaggtgaaacgggtggcaatatcgcgaaaaatgctatcggctataagctgatcaacggtggtgtgctcaatcacgacggtaatattgatttcagtaaagcggaaaacgccaccgggatccgtgtggaaaccgggacggtcaataacaccaccggtattaccgtgaatggtgtgggggtcgatatttacggcaaaaattccgtggtgaataacactgccggtaatatcaccgccaataatggtaccgccgcgatccgtctgaataaagacgcctcaatgactatcggcggcagcggtaagatcctcggtgaaaattcggcggatgcggtacgggcacattccggctcaaacgtgaaactggataaagccaatattgaagtcaccggcagcggcagtggtctgcatctgctgaataccgatgatgacagcggcgcgtttaaactgtccggcaccggcaccatcaatgtcagcggtgagaatgcctccggtctgaagctggaagcggataacggtaaaggcgggggaacgatggcgaaaagtaagctcgacacctccggcgccaacggcaccactatcaatgtgaaagataagggcggcaacggtattgtgaccaatacttccggtgatgttatcagcggaatgaatgtgaatatcgaatcagcggaaggggaatccgcactggtggtgcttggtgagaccaaaagcatcacacagagcggcatactgacatcagcatctgaccacagcgtggtggatctgactgcgctgaaaaatgcgttcagcttcaccaacagcggcaaaattactgcggcggatataaaaaacggcatcgcggttgatgcgggtcagaacagcaatatcagcttcggcaacagcgggactatcagcggaaaatccatactgggcaacggtaccaacaggattgatctgagcggtacaaccagtgagctgatcaccggtcacggcgacaataccgcgatgctgcacggcagcgcgaaaaccggaacattgtcggccggtaacggtaataacacgattgaaatgaaggatacggctcagactgacacactgatgacgggtcacgggaataataccatcactctgaacggtggtacgcaactgaaaaacggtatgaccggtaatggccgcaacaatgtgattctgcaaaatgtctctgccgtacagagcagtgcgctgttcggtaatctgacagcaggcggcgggcaggatacgctgacactgaaaggcaaaacaagccactatgtgttacaggacagcagcaaaatcagcggctttgaaaaactgaatattgaggaaggccgttttgaactgcgcaataccgatatcacgctgaatgaactgacggcagatgacggtatcaccgtgaaacagggtggtgagctgtttatcaatcagaataaagcccatacctttgcccatcagttgcagggggatggtctggtcaccacctcaacagcgggtcaggcgtttgattttaataataagagcgcggcttttgcgggggataacttcaccggcacgctgcgtgtgacaaacggcacatttgatatcgccggtgacaacacccgcgcactgcagaaatcccgtctggatatcggtgataaatctgttgcaacagtccgcgcaggcgtcggcacacagtcatttgatcgtctggcaatgagcggcgggacactggcctttaacgacaatatcaccggcagcagcaaggcggatggtcatatcagcgtgaactctctggagctggataacgcgaaaggtactgttcaggtgaaagcggacggttttgataatctgccaacgccgtcagcggataacaaagtgccgctgctggagcaggatgaaggggattctgtggtgcagctggtcaatgccggtaaagcctcggattacaccggcgggctgaatctgcagctgacggataaagacggtaatgtgatcccgtcaaatacgaagacagaacaggatctgcgccaggacggcaaagtggtggcgaaaggcacctatgattacggcttacagaccagtgcaaacgccggcggtaaagcagacggcctgtatgtggcttatcagctgactgaagtggatctgcagggtaaaggcagtgatgcactggtgctggcagcacagtccggaaaagccggatcggcggctaacctcggggcgaaaatcaccggacagggcgacctggcaattgatactgcaagtgaatacgtcacgctgtctaataacagcaatgattacaccggcagcacgtttgtccgtcacggcaaattacgggcagaagcggataatgtgttagggaatacgcagttactggatctggcatccggtactgcggttgaactgaccagcaccgccggtgccggtacagagcagaccgccgggaaactcacgtctgcggcaaacagcctggtggcgctgggtaacggcaaactgacggtgaaaaacggcggtgaggtaaacggttctctgagcggtactcaggcgggtcaactggtgatgaataatgacacactgactgtcaccggggcgaacagcgggatgcattccgcagtgactatcgatcagcctgcacaggtcactatccgtaatatcgcgggtctgggcgacagcctggtcgccgtggcgggtaccctgcgcacggaaggcgcacagggtctgctgcgtaatcagctgaccggcagcggcactaccgaaatcgcacagaaatcggatgctcagctgacagcggataacagcgggttcagcggacgtttcaccacggatgcagacagtacactgcgtgcctcacaggcagagcatatcggcagcgcggccattgaaaacgccggtacactggtgctgacgtacaatgacggtaaacagccgtgggatctgaccaacagtgtcaccgggacagggacactggtgaagcagggcgcgggtcgtatcacgctgacagataaatcggcgcagtacaccggtgcaacggagattcagaacggcacattacaggcggggagctatgattccgcgctggtgatgaacagccgtcaggtgaatatcggcactcagggaacatttgccggacagggcacactgaaaggcagcgtgaataacgccggtcagttctatgtcggtgaattggataagaaagatctgggacaggcaacggattaccgcgttgacggcaactttgtcaacaacggcggcagcatctggcttgcgagtcagaaagagactgaaagccgtctgaatgtcggcggggatttcactgcgaacggcggttcaatcacactgaatactgtgctgaacagaggtcacgaagacacaatgactgaccagctggtggttgacggtaatgtgtacaccgggaaaaacggcgcgaccacactgaatattaataatgttggtggcgaaggtgcagataccctgaaacagccggatgcgattaaagtggttcatgtcggcggaaaatccgataaaaatgcctttaaactgggcggaccggtcgctatcggggtatacgaatacctgttacacaaaggatataaagatgacagctggtatctcgactctttcgataccaatgtctatccgccggatgaaaacaaggaagatccgaaccgtaacgtgaacccggaaatcggcggacacatggctaaccgcacggcggcactgggcatgttctccatgaccctgcatgatcgtctgggcgagccgcattatgccgacagctttaaaggggatgaaaacgcctcttctgtctggctgcgtatcaccggggatcgtcagcgtcaggatgcggtcagccgttcactgcgtctgaaaggggatacctacaccacccaactgggcggcgatattatcaactggaacaatgatgcacaggacaccacgatccgcggcggtatcatgggcgcaatcggtaagtctgattacaccagcagtgccaaacggaccggtacaaaagccgatgcaaaaattgatcgtgcttacagcgtcggtttatacggcacctggtatcagaaccgcgaagatgaaaacaatgcttatgcggatgtctgggcacagtattcctggtttgataataaagtctccatggccggcagctcatcggattataagagccgcttagtcagtgcttctgctgaaaccggctacagcatggcggtgtacaaaccggatgcggataaacagtggctgttaacaccgcaggcacaggttatctttaattcgtatgattccgatgacagcagcagcggcaccggtctggtgatgaaaggcgggcgcagtaacagtgtggatacccgtctgggtgcccgtctgacctacgcaaaccagaaacagtcagataaatccgcgcagccgtttgttgaggtgaactggctgcacagtacagcgaagaatgatatgacctttaataaacactacaccttcagtgatgatcgtccggcgaaccggtttgaaatcaaggccggtgtggaagggcagatttcaccaaactggacagtctggggtaacgtttctcatcagatgggcgcggatgattactccggtgaccgtgcgatgatcggtgtgaaataccagtggaaataa

SEQ ID NO: 274927 - DNA, 1473 bp, Morganella morganii
atgaataaaatattcaaagtcgtaaaaaatcaacggacagggaattctgttgtcgcatctgaattcgcaaagggtgcaaagaaaggaaaaaaattggcgctgttatcactggcaatgctgatgggcagcgggctgagcgtgtctgcgctggcagctgatcctgcgggtcagtggttagaaactgagtatctccctgcacaatatgacagcacaactaaaacgtgggtaaataattcaaacgaaaaagaacaatcccgggttattaatgacggcagcgttaaagatcttaatttaaataacgaaaagacgaaattcaccaataatcttgattatcatgaaacctggttttcattacaggaattatgggcgaaaaatactgatgcaaataaggttatttcgattaccgaataccgtgatggtgtggcgcttccgggggatgcatccctgaatgcgattgaagactggcagattccggataacccgtctgcgatggaagaaattacctggaagaaggaagacggggaaactgccgtcatgcaggcctatgacaccgatgccttcaaaaaaaccatcgatccggatttgggtgtctatctgctggaaaaacagccggaattatccccgttctatcatctgacactggcagaggttaaagacggtacgctgaatatgacagcggctgataatgttgactgggatatcaattttatcaaagacagctcactgtttgtggctgccgcagacagcgggaaatccgcaactattgataccaccagtaaactgcatgtcacattcggtgaagcttacggcatgcatttatcctccggaaaatacacatacaccttccagccgcagaatgaactggttgagagtgtcactatcccgaaagagctgaacgggttcacatcgaaaggaaaaacgtatgctcttggtgacagttttgctatcggcgatgcacagggactggccgcctataacgcgttactgattgacgcggtaacacacaacgtattacccggggcgggatacaaggcgctgattgaagcgacggttgtcccgcgtccgcaggataaagattattttgatgtcaatatcgacctgaaaggtctggaagataaagatatccgtctgaatgacgctattaccgctgatatcggcagacgctccatttttgaggctgccggtgaaggcagtgtgctgaatattaaagacggtgcggatatccgtggcgaaacctcagcgaattcaggccgttatcgtgcttatcatatttttgcgcatgacggcgcaaaagtattccatgacgccacaacttctgtaccgaattacaaagggcagaatgcgttaatcgataacgcagaatttaccaacaccggcacgttactgctgggcgacggtaaaacccgtatctacggtgatcaggtcaccggtgaaaatgccacgctataccaaccttggcaccattgctgttga

SEQ ID NO: 274928 - DNA, 372 bp, Morganella morganii
atgacgatttttgacacactggctgagcgccatattcaggcggcgcttgaaagcggagaattacagggactggcaggagaaggtaagccgctcacactggatgatgacagccatgttccccctgaactgagggtgggctaccggttgctgaaaaatgcaggatatcttcccccggcattactggcccggcaggaggcggtttcactggcggaattattgtccgctctgccgccggacagcacagaatatgagcagacaaacaagcggttacggttgctgacattacagatgcagcaggcggggctcaatacggattttctgtatcaccgttatcatgacgccatacaacaggcactgaataaaaataaataa

SEQ ID NO: 274929 - DNA, 456 bp, Morganella morganii
atggatgaaaaacaactttatcattatgccatatggctgctgggacggcgggaatatgccggagcggaactggcccgcaaactgaaacggaaaattgctgaaaagcaggaaacctccccgacggaagcgcatgttctgccgcgggtgatggcgcggctgacagactctcagtatctggatgatacccgcagtatcgtactgttttttcaggccggtgtaagaaaactgcacggaccggtgcggatccgtcaggaattacgccggaaagggtttgacggtgaactgattgatgcggttttttccgcgcaggggaccgactggtttgagcaggcccgtgaggcaaaaatgaagaaattcggggagagtttaccggctgactataaagagaagcaaaaacagatgcgttacctgatgtaccgcggtttcacatctgatcagatttatgaactgtactga

SEQ ID NO: 274930 - DNA, 183 bp, Morganella morganii
atggcacaactgaccccggaagaaaaagtatatgttgatgacctcgcgatgcagcgggttgatgatatgaacagcgatgaatttctggttcgtcagctggatgacaaaatccacgggctggcatctcacctgaaagcctattttgaagaacgtctggctttccataaacagaacaaaaactga

SEQ ID NO: 274931 - DNA, 555 bp, Morganella morganii
atgaataaaaaattcgctcttgcagcgtctctttcccttatttttattgctaactctgcgtctgcggcaactaccgcatccggtggttcaatcaatttcaccggttttattactgatgccacctgcaccattaataacggtaatgcgaacatgtcggtattattagatccgattactgtcaatcagatcacacgttccggtgcaatcgaggaaggaaagaaagcattttctctcgagttatcagactgtaacgccagtgataaagataaaaaatcactgcatattaattttgcctccaccaatctgattgccaataacggtaattacctgatcaaccaggaaacggatgagaaaggtaatcataaaaatgtcgggattgcgttaacatcacagaaaagtgatgaagttattaatttaaacacaccatatgatacaaaaatcattgctgataatggtgttatgcagttttatgcaaaatattacaaagttggcagtgagccggctcagccgggtaaaatcagcaccatgctgacatataacctgtcttacttctga

SEQ ID NO: 274932 - DNA, 699 bp, Morganella morganii
atgaaaaaaatcatcttaacattgttgttattaacagtgacatttgtcagtccggcaaatgttattattaattccacccgtgttatttatccgcagggaagtaaagaggttccggtacaattatttaacaccggaacacagcaggcattagtccaggcatggattgatgacggcaaccccgattccacaccggaaacggcgaatgtcccgtttatcctgacaccgccggtggtgaaaatcgacggtaaaaatggtcagcaactgcgggtgaaaatgaccccggtacagcttccggctgacagagagtccctgttttatctgaatttactggatattccgccgctgccggaaaacagtgccgataaaaacatgatgcagattgctatccgctcccgcatcaaactgttttaccgcccttccggcctgacgctgagcgcggataaagcccacacccgtctgacattcacccgtgacggtcagcactatattctgaaaaatgattctccgtatcatattaatattctcggcctgaaagagacggcgaacagccgtgatctggcggaagaaggcacgatgattgcaccttactctcagtttacgctgccagccgcagccggattaccggccggaaatcactattcgctgacactgatcgacgatttcggtgccatcaatacctacccgctgtcactgaactga

SEQ ID NO: 274933 - DNA, 2493 bp, Morganella morganii
atgccgcgccctgtccgccgtttttccgcccttgtttcactgttgccggtgctgctcagcacaccggcagccggggccgggtttaataccaacttcctttacggcgattccgccaaagcggatttatcccgctttgatcgcgacgatatcctgcccgacggcgaatacaccgttgaaatcagtgtgaacggggaatggaagggacgatttccgctgcgtctgcaacagagcggacacacgattctgatcccgcaggatgatgtgccgaaactgggactgcgtgacagtacaccgccgccacaggcagatgaagacggttatatcgtgctgagcagtctggtgccgccggagagttataccctgaacaccggacagtttcagctggcactgaatgtgccgcaggcaatgctgaataccgtacttaaaggatatgtcgacccgtcgcggtgggatcagggcattaatgccgcgatggtcagttataacgctaactattatcacgccaccaataaacgtgacggcagtgataacgacaatgcttatctgaccctgagcagtggtctgaatctggctggctggcagttgcgggatcaatcctcagtgacttacagcagcggacagagcacacaatggaataacaacacccgttacctgcagcgtggttttccggcaatcaaatctgatttccgtgccggcgacagttacacctccaacgagctgttcgattctgtccgtttccggggcgcgaccctgaaaacggatatgcgtatgtatcccgatgcctggcagggcttttccccggtcgtgcgcggcgtggcacagaccaacgcactggtcagaatctatcaggattcacagcttatctggcagcagagcgtgccgcccggcccgtttgtggtcgattccctgctgccgaccggctccggcggagatttacaggtggaagtgaatgaagcagacgggcaaattaaccactttatggtgcccttctctgccgtaccgaatatgttaaaggaaggactctttaaatatgagctgaatgccggtgaagtccgtctgacggataccgcttaccacccggattttgtacagcttaatctccagtacggcattaataacacgctgaccggctacggcggtatgattgcggcggaaaattatcaggcgtttctgctcggcagtggatttaacctgccggtcggcgcgttatccgtggatatcacgcactccgatgcccgcttcgggcaggacatgccgcgttaccggggtgagagctacaaagtggcttacagccgttttattcatcagaccaataccaatttttcgctggcggcttaccgttattccaccagcggctatttcagcctgacagatgcggtacagtatcaggaactgcttaaccggcaggacattacaggcgatctctccccgcagtcacagagttaccgccagcgcagtacctttaatatcaatatcaaccagcggatcggtgcggattacggctcggtttatctcgccggtacactgcgtgattactggggcggtcagggcaacacccgtgaatatcagttgggttatgccaataactggcaggatattaattataccctcagcgcaggccggacccgttacagcaaagacagtaacaatcccgccggcagtaataataatgaagagacacggattaacctgacactctccgttccgctgaccctgtccggccacaaggtgtatctgaccgcaaacagcatgacggaagaaggccgctataagagcagcaatatcggcctgagcggcaccgccgggcagagtaacgcgctgagttataacgtgaatgccgcgcatcagcaatccggcggtaccaccttcagcaccagtgctgcctaccgggcggccccggcgacactgaacgcttcttacagtgaatccggccgttaccgccagctgggagccggagctaccggcagtgtagtggcctggtccggcggtattctcaccgcaaatcagccgggggaaacctttgctgtggtgaatgtaccgggcaccgccaatgctatcgtgaacaatgaccgcaatgtcaccaccaacacacagggacaggtgctggtgccgtatctgtccgcttaccgcaaaaacgcgctgatcctggatgcctcacaggcaccggaagatgctgcggaactgctgggcaatgtgcaggatatcgtgccttacgccggggcggtgacactcgtgaacttcagaacggatacccggcaggaattttatctgcatgccgtgcgccgggacggcagaccgctgccgttcggtacagaagtcactgacgggaacaataacagcatcggctatgtcgggcagaacagcctcctttatataagaagcgaaacgcggccggaacagatcaatgtccgcctgacagatacggacagcggctactgccgcatcacactcacgccggatccgcagagtgcgcctctgccctgtgcagaataa

SEQ ID NO: 274934 - DNA, 1068 bp, Morganella morganii
atgctcagaaaaacccatttttttgccggtctgctgatgctgatcactggttatgcgcaggcggagtgctacaacgacggcaacaaacaggcaccgccgctgacggctgatctgtcggaaaccttttaccgtcagacagagaccaccctctattttaatacccgctacagcggggaattcagctgtaacggctacagcagcagcgtctccaacgcctcttacctgcaaaaacgttccattgtggtcggttttcagaacggccgctatccggtcgagttccgggtaatcgatctccagcccggcagcacccaaaaattcgcttacagcaggaatccgtacccagcggaccgccttcaggcacgtttcaccctcagtgcacgggtgatgccgcagaactcacgcagtgatgtgacggtgcccggcagccagtaccgttttgacggcgcggtgatcgccgctgacaccactcgggtcggcatccttcagttctttgtccgtctcgggctggatatcctcacttatctgctgaccggacactggccggagcataatgaggatctgttcctgcagccgctggatgtcatttatcagccccgtgaaaccacctgtacctttgataatgcggatttattagtcgaactgccgcaggtggaccgggcacagctgctgcgtaatacaaccgccgggatgacacgtttccatctggatatctcctgccgggatcgcctgaacggccgcaccagccgtccggtaaaagcctatctggccagcaaccaggtctggctgcgggatatgaaaaccctcattgatacctcacagggcgcggcacagggggtggggatccgcgtcggccgttatgcggataccaatgacaacagtgcactggtgatcaacccgccgggacggcagccgcgtgcggattcctatctgtttgaatggggaaaggacaaatttattgaagtaaataacggctttaatctctgggcgtattactatgtctatgatgccgcccggctcagtgcaggccgtatcaataccacggcaatcctcaatttcgagtactactaa

SEQ ID NO: 274935 - DNA, 789 bp, Morganella morganii
atgccctctctttcgatgaggacaaatgcagtcttcgctttcttgattttactattctttaccggttcgggctttgcctcaaccagtaccacgacaagcttgccgtattcgcatcaaaacaagcagctgcaaaaaacgctgcctgatttgaagaaatacgcgtcaggtacaccccgtaagaaagcgtttttaaatgccattgtccctgcgattgacaaagtgaatcgcgaaatcatgaatgaccgcacttggttactggaacgccggaatgccaaacactggtcacagagtgatattgcaaagctcggaaagctttgccggagctatgatatgacatgcagctcgcctaagcgcaccaactggaacgcgctcctgagccgtgtcgatatcctgcccacccacttcgttgccacacaggcggcaaccgagtcaggctggggaacatcaaaactggctcagtccaacaataacctttttggtatgcgttgcggacggggctgtagtgccaaagccggacaggttcagggctactacgcgtacagcactattgaggatagtgtcactgcttacatgaagaatctgaatacgcatcgtgcttataattcactgcgttcagaaagggcaaaacagcgtctgggtgatgatgactcactgagcacaccggaacttatcagtcagctggaaggttattcgcagaagggagatgcttataaccgttacctccgccagatgtatgacagtaacaaaacactgatcacatcggcacagaaggtagcccaaaactcataa

SEQ ID NO: 274936 - DNA, 1419 bp, Morganella morganii
atgaatttcttttcatttgaatttcttgcctcctttactgccttttttctgatttactggctctgtcaaaaaaagacccgtttacagaatatccttttaattacggcgagttatctgtttgtcttctcatttcaggcaagcttcgcgtatgtgctggccggatataccctgtttatttatctgctgacgaatgtcctgggcagccgcctgtccgcccgtgcagtgtacagcctgctggcggcggggatcatcggctgttttacggtattcaaatattacggatttatgcaggaatctctccagagtgcgctgttgcaggccggtgtggaggttgaactgccggtgctttcggtgctggcaccgctggggttatccttctacgcgttccattctgtcagctatgtggtgtcggtctgccgcaaagagattgaaaaagccccctttttggatgtggtgctttatctctgcttcttcccgagcattgtcgccggtccgataaaccgcgccaaagcatttatgccgcaagtacaggcggcctcgcgggaaattattgattacaaaaaagccctgctgctgatcaccctggcgatggtgaaactgtttttattcagtgcttatctgtcagaaaactttgccaacccggtcttcagttcgccggtcaactacagcgccggtgagattctggtggcggtgtacgcctatgcctggaatatctattttaacttctccggttataccaacctggtgaccgggattgccatgctgcttggtttcagggtaccgctgaacttcagtgcgccgtatcttgccaccaacctcaaagagttctgggcgcgctggcacatcagtctgtcgacctttatccgcgattatatttatatcccgctcggcggtaaccgcaagggctggctgcggatgaacctcaatgcctttatcgcgatggtaatttcagggatctggcacggtgtcgggctgccgtttatcatctggggcgcactgcacggcctgggtattgtgctgatgaatatcaaacacaaactgctgccgccgcgcacagaacctgcggaaaccctgtggcagaaaaccggggtctggaccgcccggatttttaccttccatgtgctctgcctgacctggattttcttccgcagcgccacgctcagtgatgctgtcaccatgctgacgcaactgaccgctgacggctttattgcctctgtcatggccagtgcgccgctgattatcgccttctggctgctgctgtttatctatccgctgtgtgtcagcctgtatcaccgcgccggacactattaccagcggatctcatggatctggtatcctttaccgctcgcgctctttatgacgctggtctttattttctctccttcaggaatgccgggttttatctatgcgaatttttga

SEQ ID NO: 274937 - DNA, 1191 bp, Morganella morganii
atgcgaatttttgattttacagaaaatctcgagcgggcactgaaggtcgtctttattgtgctgaccgcaaccgtggcactggtctggctgaaccagaacccgctggcccgttactgggaacagacctaccaccagcctgcgccgtgggcgaacctggaggggcattacgcgtgggatctggggggttaccttcaggaaggcgtggtggcggccggagagaccctgtggacctatgcacagggcaaccatatcgttgaggaagcggaagaggctgtccccggcaataccgcgtttccggaggagtttcaggtcgggctgcattttatcaacggctaccgttatccggctgctgcactgtctgtgaccttccctgagctgctgaaccgggagcgtccggtgatcggtaattctgtgctgaaactgaacccggagcaggttgcggaacacattctgacgaaaaaaacaccgaaatcaattattgatctggaagccggtgataaagtcttcttcgtgggcgattccctcatgcagggcgttgcacctgtgttacaatcccgtctggccaaaacctacggcattgaaagtatcaacctcagcaaacagagtaccggcctgacgtatccgaagtttttcaactggccggaaactgtcaaaaccacgctggcagccaacccggatatccgcctgatggtggttttcctcggcccgaatgacccgtgggacatgccgccggaaggcggcgggcgctatctgcgctttatgtctccggaatgggaggcgcagtaccgtaaacggattcaggatattctgttaacggcccggatacaggatgtggacgtcatatggataggaccgccgaatatgcgcaaagacaagctgtcagatggtgtacactatctgagcgggatctatcagtcggaaattaacaatgccggtgaaatctggctgtccgcaaataccattttcaaatatcaggataagatctattcagattaccccggtgacggcagcagcactatcaagctgcgcagcggcgacggtattcactttacctacaaaggtcagaaagccatcgctgacacggtatttgatctgattaaatttaatgctgcgccggaggaaaccccggcggcgcaggaaaaaacagaaacacatgatgaaacaacaaaaacgcccgtcgtggcaccttaa

SEQ ID NO: 274938 - DNA, 1227 bp, Morganella morganii
atgatgaaacaacaaaaacgcccgtcgtggcaccttaaactggccggtgcgggagccctgtttgccgcagcgctctccctgctctcctgccagaatgatgctgataagccgtggatacagccgcagacaccaccgccggtatcgcgtaatgatctgaccaactacggcgatccgaacctcagccgcctggcacaccgcctgcgggatccgtccgcgcgtgtccatattgtccagattggcgattcccatacagcagcggattttttctccggcacgctgcgtgacaaattccaggcgcgttacggcaatgcagggatcggctttgtgccgccgagcattatcgccggacagcgcacggcaaactttgtcttcacagagccgaaaaaacagtggtcattcctgaccagccggaaagatgatgcaccaaacttcccgctgggcggttttgttatttcgccgctgacctcacacagcaccctgaccatgaaagagcgcaatccgtcctcttatcagtatgatatgcaggtgctgtaccagaccggctacccggcctccgttacggtacgcggcggcaaaggcggcacgctgaacctggcaccgtcctcagaatggcgtttttctgacagtgtgccggtaaccttcccggcagaaatcaccgcgaatgagcagagcccgctgaatatcggcggctggtttatcacccgcaaccatccgggcgtgatgctctcgtctgtcggtatcaacggcgcgacgattgccatgacgggaaaatggcagccgcagtgggtgaataccctggcacagaccgatccggaaatggtgatcctggcttacggtaccaatgaagcctttaatgacacgctggatttggatctctaccgtcagcagctgaccaatgtggtgcgcagtatccgcagcaacatgccggatgcggtgatcctgctggtcggcccgggcgacagtatcaagaacaaaaccgcgcctgactgccgctcacagcagcctgccaatctgcacaatgtcatgcggatccagcagtctgtggcgaaaagcgaaggtctgctctactgggactggcagcagttcatgggcggcgactgtgcaatcaacagctgggtactgcgtgacctggcacggccggacaaagtccatctctccggtccgggttatgaaaagagtgcaacagcactctataacgcgctggaatccctgctcagccagcagtaa

SEQ ID NO: 274939 - DNA, 1902 bp, Morganella morganii
atgccaagaagagagcgcctttattttccgggattaccacagctgattaaacttaacggacacaatcatgaaaaactctttcaggaagagaatgattacgcccgctttctgacctgtgtggacaggtctttagaatcatacaattgcgagcttcatgcctattcacttcaggcggatacggtattgttgctgctgacaccaaaatcaaaagaagatttaagccgctttatacagcacatcggacgccagtatgttccttactacaataataaatatcagcgtaccggagcattatgggatcggcgttataacagctgcctgattgaagcaaactcctattttcttttggtctctcaatatgttgataccttcacatccgaccagtcggaatataatgacaaacataacttaaattattccagttacggccataataccggggaatgcactattccgagaatgactgaacatcagtgttatttgcaattaggcaaaacaccggaagagcgcgggatccattatcagcattttttatataccactatcagtcagtctgttattgagcgtattcaaatttgtctgaatcagaattgtgtactgggcaccaatcagtattgccagaaactggaatttgaagtgaaccggacagtgcgcccgcatcagagcggacggccgcgcaaacattacagtaatgatgtggcggactggatctggctggaaaaccgcgcctcgaaactgctggcacgctactgctatcaggagatccgctttccggtgctggaatactgggatgaccatatgaagaatgccgcagcgttcgcggatgataaccataacggtcccaaactcaactgcagccacccggcactgctgcgcggtgagggtacgatgggctgtctgcgggtgattgcacagcaccagcgtttacagtcaaaaagcaaattatggtatatcggtgcgatgttccggaatgtggccgggcagaaacaggattttgaacaatatcaccagatcggtgtggaagcgttcggctacgataatattgatatcgagctggaacatattttaatgcagtatgactttttcagttcattacacctcacgccgtacattgaattaaaaataaataccgtcggcagtgaagaagaattcagccgttttcgccaggcactgagagaatattatcagccgtttctgccattctttgaggagccgtggctggttaaactgaaagagaaaccggagcagttattatccacaccgcacaagctgctggatatcgttaataaaaaagcgccccggctcagtgagtttctctctgaggcttccgccgcccgcttccgtcaattgcttgaatccctcaaccgcctgaaaattccgtacagtgtgacgccgggactgtatccggtgaataattactgccacaccctgtttgaatggcgcaccacgcatcctgacagtcatgatgagctgttatgccgcggcggccgttatgatgccagtgcgtcgcacctgctggataaacaggtggcggtcagtggttttgcgtttatgctcgacccgattattttcctgatccgcaaatgtcacaaacaactgctgcgtcagaacgcgaccgatgtggtgctgatcccggaaaacacccgtgccgcagggtatgcgctgatggtcggccgccgtctgcggacactgttcccgcagttcaccattaaaaatgactgctcggggatgcggatcagtacctgccgcaagaatgccgagcgcaacggcagccgctttatcattgtggtgccgtcagaggatgacaaagcgctggaactgactgataaagataacggaatgattcagtttgtgaatgagaatgccatgatcggcgtgctgggacacagcgtaaactgctga

SEQ ID NO: 274940 - DNA, 1362 bp, Morganella morganii
atgggaaacatgagtgccagttccgcccataaaatgggggtggtcgcgctgaccctggtaaccgcatcaaatatgatgggttccggtgtgttcatgctgccgactaacctcgcgggcgtcggttacatctccttatggggatggttatttacaatcattggtgttatcgcattagccttggttttcgccaaaaccagtcttatcacaccgcgtaacggcggtatcgtggcttacgccagcgatgctttcggtccgtttatcggtttccagaccactgtttgttactggatcagtgcctgggtcggtaacgtcgccctgctggttgccggtgtcggttacctcagctacttcttccctgaactgaaaaaccctgctatcggcagcgtcgttgctatcgcgattctgtggggcttcgtggtattagccagcttcggtgcccgtgtcgccggtcgtgcgcagtcattcactgcaagctgcatgctggttgttgttctgggtgtcggtgtgatcggctggttctggttcgatccgcagatgttctctcaggtttataacggtaccggtaaaagcgataccacagccattatcactgcggcatctatcgcactgtggggcttcctgggtgttgaatctgctgtggtttccagcggccaggtcgataaacctgaatacactgtaccgcgtgccaccgtgtatggtctgctgattgcgtcagtctgctacgtcggcagctgcaccgtgatcatgggtctggttccgcatgaagaactggttaactctgctgcgccgtttgcggatgctgcccgttacatgttcggtgaaactgccggtactgttgcctctatcctgagcatcatcgcctgcttcggttctatctccggctggttaatcctgcagtctgaaggtccgcgtgccggtgcaaaccagggtctgttccctaaattcttctccgatgtgaacaaaaatgacgttccgatgaaaagcctgattttcaccggtgtgctgatgagcctggtgctgttaatgaccgcgtcaccaaatctggccaaacagttcgaaatcgtcattctgatgtctgtcttcgcatccctgctgccatacatgtatgcactgatttctctgccaatcatcatggtttccaaaaaaatgaaccgcggcagcaccttcattttctataacgtcctggtggttatcggcattatctactgtgtctttgccctgttaggttccggttctgattctatgttctggggtctggtcatgatgtcaatcactatcccgctgttcagcttcgtggccgcaggccgtgcgaaaaaaggcaacgagattctgtacatcaacgacgaacaaaacaaagcgtga

SEQ ID NO: 274941 - DNA, 1137 bp, Morganella morganii
atgactctgtctatcaatgatcaaaacaaacttgatgcattctgggcttattgcgtaaaaaaccagtatttcaacatcggctatcctgaatcagcggatttcgattacaccaacctggaacgttttttacgtttctccatcaacaactgcggtgactggggcgaatattgcaactacctgctgaactctttcgatttcgagaaagaagtgatggagtatttcgcagacctgttcaaaattccgtttgaaaaaagctggggttatgtgaccaacggcggtactgaaggtaacatgttcggttgctacctgggccgtgaaatcttccctgacggtaccctgtactattcaaaagatactcactattccgttgcgaaaatcgttaaattactgcgtatcaaatctcaggttgttgaatctcagccaaacggcgaaatcgactatgacgatctgatgaaaaaaatcgctgacgataaagaagcgcatccgatcatcttcgctaacatcggtaccactgtccgcggtgctattgatgatatcgctgaaatccagaaacgcctgaaagcagccggtatcaaacgtgaagattactacctgcatgctgatgcggcactgagcggcatgatcctgccattcgttgatgatgcacaaccattcacgtttgctgacggtatcgactcaatcggtgtttccggccataaaatgattggttcaccaatcccttgcggtatcgttgttgcgaagaaagaaaacgtggatcgtatttctgttgaaatcgactacatctccgcacacgacaaaaccatcaccggttcacgtaacggtcacacaccactgatgctgtgggaagctatccgttcacattcagctgaggaatggaagcgccgcatcacccgcagtctggatatggctcagtacgctgttgaccgtatgcagaaagccggtatcaatgcatggcgcaacaagaactccatcactgttgtgttcccttgcccgtcagaacgcgtctggagagaacattgcctggcaacttccggcgacgtggctcacctgattaccaccgcgcaccatctggataccgcgcagatcgacaaactgatcgacgacgttatcgcggattttaacttacacgcggcataa

SEQ ID NO: 274942 - DNA, 1443 bp, Morganella morganii
atggttcccaatggtaaatccacccaccgcatgggcctgacagccctgatcattatgacggcttccaatatgatgggaagcggcgtgtttatgttaccctcctccctcgcgcatatcggctccatcgcgctgtggggcggactgctgaccttttgcggcgtgctggcactggcgctggtgttcgccaagaccggtgaaatctccccttgtaaaggcggtgtgattgccaatatcggccggacattcgggcagtatatcgggttacagacatcacttttttactggctttcgacctggataggcaactgtgccttactgatctccggtgtcggttatctctcttatttctttccgcagcttcacactccgctttacgccgctattaccgcaattattattctctgggctttcgttctgctgggtttgcagggcgcaaaagtcgtcggctatgcgcagatttttaccggcctttgtatgctcaccgttattctgagcatcagtattttcggctggaccagttttgattacacacgttatatcaccagttttaatgttactcagaccagtaacacagatgctatttttgccgctgccgcgatttcgctgtggggctatctggggatcgaatccgcatcggtttcatccgcccaggtgactaatccgcaccgcaatattccgctggcaaccattatcgggctggttattgccgccgcctgctatctcagttccaccaatgtcatgatggggatcctgccccacgaacagcttgttaactccaccgcgccgtttgcggataccgcccgctacctgtggggcgaacatgcgggacagattatctctgcgctcgccattattgcctgcttcggtgcattaccgggctggcagattttacagactgaagttccccgctctgcggcggaagaaggcacattcccgcgtttttttgcggatgtgaaccgccacggtgtgccgtataaagggctgatttgtaccgccgggatgatgagcgctgtgctgctgctcaccatctcaccaagcctggaacagcaattccgcaacatcattattcttgcggtgtccgccagtctgatcccgtatgcatttgctgtgatttccctgccgatcgccatgatcgcaaaaaaaatgcagtacgggcgcacctttattatttacgccactctgagcctgattggtctgggattcattatggtcgcgctgacaggcgccggaaccaaaccgctgttctggggcatggtgctgcagatgtttaccattccgctgtatctgttttttattatgcgccgcgaaaaaaacactactgatccccgtcccgggctcgccctgtcgtacatcccggggatctgcgccgagcagaccgctgagatggcgttatcggctgacaatgatgacagccggaatttctcacagagaaactgtatatag

SEQ ID NO: 274943 - DNA, 1272 bp, Morganella morganii
atggaaaagattcagtcaatcagagggatgagaagtgtgcttccggaagaaacaccggtctggcagtggctggaaaaccggatcaggaatatcacttcccgctacggctatcaggaggtcaggctgccgattctggaaccggttgccctgtttgagcgcgcggtcggtgaatccaccgatatcgtctcaaaagagatgtataacttcctcgataaaagcggcgagcacatcaccctgcgcccggaaggtaccagtggttgcgtccggaccgtgattgagaacaacatgtgctacaacaccacgcagcgcctgtggtatcagggcccgatgttccgttatgagcgtccgcagaaaggccgtctgcgtcagttcactcagttcggggtggaaaccttcggcatgccgggggcggatgtggatgcagagcttatctttatggtgaaagatatctttaaggcgctcggcgtggataaacacgtccgcctggagattaactccctcgggacaccggaagagcgctcagagcaccgtcagcagctggtgaattactttatgcagcacaaagcgctgctggatgaggacagcctgcgccgtctggaaaccaacccgctgcgtatcctggacagcaaaaacccggatatgcaggagatgattgaagcggcaccacgcctgctggacttcctcggtgaggaatcacaacagcactttgatgatctgcgccgtctgctggacagtgaaaacattgcttatgtggtcaacccgcgtctggtacgcgggctggattactacacccgtactgtatttgagtggatcacggaagaactgggttcacaggggacagtctgcggcggtggccgttacgatggtctggttgaattgttcagcggcaaacagttaccggcttccgggtttgctatcgggatcgaacggctgttactgctgatccagactctcggcctggataaagatattgtgaatcagccggatattgtggtgacttatgaagatccggcacagaatgtggaagcgctgttactggctaacacactgcgccatcagttgccgcaatataaaatcctcaatgatttcaccagtgccaaactgaagcgtcagcacagcaatgcgctgaaatccggctgccgttacatcgtgacgctcaaccgtgacggccaggtcggcctgtgggatctggcggcgaacaccaatgaaaccctcaccgcagacaccctcgccaatgcgtttctgaataaaaccatcactgcgatggcctga

SEQ ID NO: 274944 - DNA, 738 bp, Morganella morganii
gtggaacatgattttctcacttttttacagcacaggcttgatcagcaatcaaccgttccgttatatcttcagctgaaacaagggattgaagaagccatcacacaaaagcagctgacgcacggttgtgttctgccgtctgagcgccgtttatcgcagtcgctgggagtatcccgcgtgacggtggtgaaggcactggacttactgctgaaacaggggctggtggtgaagcatcacggcaaaggcacgcagattaatctgccggtgcagtacaacctgtccggcggcggtttttccgcgcaggcggccggcagcggtaaggtgtcaaaccgctggcttattcgtcagctggactctgtgccggattcactggccccggaactggaattatccgcaggtgatacgatggcggtgatcaaacgtgtccggctggtggatgatattccggtctcgctggaaaccatgtttatcccggaggcgtttctgccgcgtcctgatctgctggacggctctctgtatgcgcactggctggcgcaggggattgaaccggatgtgcaggagtatgcactctctatctgtcacccgacgtcagaagaggcaaagctgctttctattccgccgacttcctcactgatgaaaattatcctcagaagccgcgataagctgggcagagtgctggagtacggtacggctatctgccgcagtgatttttatcatttccactttacggtaaaagcctga

SEQ ID NO: 274945 - DNA, 966 bp, Morganella morganii
atgggcatgccgtcggaactctggccgaagagccgggtccgtcagcacttcggctggattaatactttcctgccgggccctgaggagaatattgccgccaacgagtttgttgccggggaatttaccgatgacaccagtcagtgtgttgccctgatggatgccattattgaggagcacggtgctgtcgtcccgcagacgatcgcccgtcacataatggcgtgggccacccggataaaggcgtttgaaaaaaatattctggggccgacatcaaaagctgcgctgaatgccatacaccagggaatacctttagatagaatagaggcaaatggtgtgaccaacggttccgcgatgcgtgtcgcgcccgtcggttgcctgatgccatcatataatacagatcgttttattgagcaggtcaggctctcctgtctgccgacccataaatccgatatcgccattgccggtgctgttgtgattgcgcgggccgtcagtctggctgtagagggcactgactggtctgcgataaaacaggctgtcataccgctggctgacactgttcagcgccggtttgagtccaccttcagcccgctgctgggacggagaattatgtacgccctcaatgtggtccgcgggcgcacggatgaagagcaggcactgacagatctctatgagatagtcggcgccggtatggataatattgaatctatcccgtgtgcgattgcactcgcggatttagccaacaccaatcccgtacgctgtgcggtactggctgcaaatctgggcggcgacacggacaccatcggtgccatggcgacggccatctgcggcgcaattcacggcattgatagttttgatgctgacagtatcgcattgataaatcatacaaataatatcgattttacgccgtatgcccgccatctggcacagttcagacaggagtatgccgcgacgaacaggatgatgtcatga

SEQ ID NO: 274946 - DNA, 1401 bp, Morganella morganii
atgagtcagcaatctgtaccttcagcgttgaacaaaaccgatccgaccatcgaagaactgggtatcggcctgatcccgccttcccggcagaccaaaaaacccgccgagctattctttgtctggtgtgccgccaatatcggcattctcggcgtggtctacggcgcgattattgtgtcgttcgggctttccttctttcagtcagttttagcggcagtggttggtgttgcctcctttattttagtggggatcaccagtatcgccggtaaaatcggccggaccaccacactcaccctttcccgcgccagctttggcaaaagcggcaatatcgcgccgacggctttctgctggtttaacctgatgggctgggaagcggtgaatatcatcaccggcaccctgaccctggcggcactgttcaccgccatcgggctgggcagcggacacctgatgaccgccatcgcactgatactgttcggcgggctgacggtgctggtcagtattctcgggcagaacaccgttttgctgatgcagaaatggatcacgcggattttcggggcaatgaccctgtttgtcgtgctctggctgctggcgaccgcagactggcaggcgctgatcagccgtccttccggtaactggatcaccggcttcctgcctgcggtgtccattatcgccgccggaaccgggatcagctgggcgattgccggggcagattacagccgcgaccagagcccgtcctcatcccacggccgtattttcggctctgtggtcggcggggctgcactgccgctgttacttctgatcctgaccggtattttgctgaccgcgcaactgcctgatctggcagcggaagagaacccgattgccgcaatcggcggactgctgccgtcctggatggcggtgccgtatctggctgctgcggtggccgggattgtcactatcgcggtactcagcctctattccgccagtctcaatcttctgagcatggggatcaaactcaaacagcgcaccgccgttgctcttgatggcgtgattgtgctggcgatcgcgatttatgttctgtttgtttccggtgatttcctcgggccgtttatttcattcctggtgttctgcggattgttcctcgcatcctgggcggcgatttttatcactgattactactgcaaacacaaaaccgccggttacgatgaagtttcgctctacggcgacaccggggttatctggccgaccttcctgtgctggctcggcggctcggttgccggactgctggtcaccaacaccggctttattaacggaccgtttgccaccggtgtgtttgaaaattccagtctggggctgtttgtctccttcctggtgagcatggcggcgtaccgcctgacactgatgatgaaaccggtacggggttaa

SEQ ID NO: 274947 - DNA, 957 bp, Morganella morganii
atggatgtaacgttactgacaccaaagcgcccggtcgtggttatcggcgcggctttcggcgatgtgatgctggaagtgaatgcactgccgcacagcggggatgatatcagcgccctgccgctcgggcagcagatcggcggctgcgcctttaatgtcgcccgtgcgctgagccgtctcggtattgcgccggtcaacggcattcccgccggaaacggcagttggggaaaacaggtcactgccgcgatggaaaaggaaaatctgccggttctgctgcgtcatccgacgcacgataacggctggtgtctggcgctggtggaagaaagcaaagaacgcacattcatcaccatcgaaggctgtgagcagcactggagtgacgcgctgctcgcacaaattccggtgccggacaatgccctgatttatgtctccggttacgagctggtcagtccggaaagtgcgccgctgcgcaactggctgctggcgcagagtgcggataaaaccctgtttgcggatttcggtccgcgtctgcgggacatagatccggactttattgaaaagctgctggcgaaaaagccgctgctgaccgtcaaccgtgatgagctggcgcagctcaatccgcagggcggaaaacagtctgagatacagacagacgatgcacaggcgtttgccgacagctatggtctgccgctgattgcccgctttgataaagaaggtgccgtggtgtgtcaaccgggacaacaacccgtcagaatcccggcgtacaaggtgccggtggccgataccattgccgccggagacagtcactgcgccggcgttctcgccggactggcctgcggacaaccactcacggatgccgtacggaccggtaatgcggtggcggccatagtggtcagccgcccgggctctgacggcgcccccacccgctctgaactgagtgagtttttacatcatcacctctga

SEQ ID NO: 274948 - DNA, 1062 bp, Morganella morganii
atgctgaatataatgaaaaaatggatgtttttacaaaaaaaacagcccgttgtctcccgggaggtaccggcggtttatccggtgccgtcagagcacgtgatgacgggaaatacggatgaacagcggcactttcacggtgaaattctgtgccgtcatttgctggatgggatcgcggcgatagagattatccgcaactccctgctggattccggcacccggcttgccggggagcagggcacactggatgaaatcgcgctgcataacagcgaaacacgccgctatatgcaggagctgtgcagtgtgctggatgatatcagtgagcacgcggataaggggcttgattacacgcaaaaactggtctctgtgctgggacagattaatcagaatattaataatatcgaacgcctggccaaccagactaacctgctggcggttaactcggcgattgaagcttctcatgtcggcagccggggtgccggtttttcggttatcgcccgggaaataaaacaattatccggtgaaattcaggacgaagccgtcaatatcactgcatttaccggcaaaataaagtcacacgccaatgcgatttatacggatgcggaagataatcagaagctggtgagcagcatccgcgctatcgctgttcaggcagaagatcgcttacagagtatgatcaccagctcctcgcggatggaggcgatcatccggtttgtggcggtgcagcaatttctcaataccgtcaaactggatcatgttatctggaaaggggatatctaccgccgcctgctggacggaaacacggatttatcggttaatgaccacacacagtgccgtctcggcaaatggtattacgcggacgaaggacagcggtttaccggccatgatgcctaccggaaactggaaaggccgcaccggctggtgcatctttccggacgcctggcgctggaagcccgggcgaagggctcgcttcatgatgaagaactgcatttaacggccatggaagatgccagccacgaagtgattgagaacatcgatgatctgctggcatcgatcagttactga

SEQ ID NO: 274949 - DNA, 1338 bp, Morganella morganii
atgacaacattaaccctggtgttaaccgccgccgggtcggtattactgctgctgttcctggtgatggtggcgcggctgcatgcgttcgtggcactgatgattgtggctatcggcgcggggctgttttccggcatgccgctggagcagatcactcagaccatgcagaacggcatgggcggcacgcttggtttcctggcgatagtggtcgcgctcggggcgatgttcggtaaaatcctgcatgaaaccggcgcactcgaccagatagccgtcaaactgctgaagtccttcggtgaaaaacgggcgcattacgcgctggggattgccgggcttatctgtgctctgccgctgttctttgatgtggcgattgtgctgctgatcggtgtggtcttcgccgttgcccgccgtaccggcggtaatgtggtacgccttgctatcccgctgtttgccggtgtggcggcggctgcctgcttcctgctgccgggaccgaccccgatgctgctggcagaccagatgaatgcagacttcggctggatgatcctgatcggcctgtgtgcggcgatcccgggtatgatcctggcaggacccctgttcggtaactttatcagtaaatttgtcaccctggagctgccggaagacctgactgaaccggctctcggacaacacaagatgccatcgtttggcctgagcctggcgctggtgctgttcccgctggtgctggtcggtctgaaaaccattgctgcgccgatggtggatccggattcaaaactgcacgcctggctggtgtttatcgggcacccgttcctggcgatcctgattgcctgtctggtggcaatttacggcctggcaatccgccgtggcatgagccgcaataaagtgatggaaatctgctctgccgctattcagccagccgggattatcctgctggtaaccggtgccggtggtgtgttcaaacaggtgctggtggattccggtgtgggtccggcgctgggtgaatccctgattggtgcggggctgccgattgctgctgcctgctttattctctctgccgccgttcgtgtgatccagggttctgcaaccgttgcctgtctgaccacagtcggtctggtgctgccggttatcggtgaactgggctattccggtgcacagctggcggctctgtctgtctgtatcgcgggcggctctattgtgctgagccacgtgaatgactctggtttctggctgttcgggaaatttaccggtgctaccgaagcacagaccctgaagacctggacactgatggaaaccatcctgggaaccaccggggccctcgtcggtatgctgttcttcgctttcctgtaa

SEQ ID NO: 274950 - DNA, 543 bp, Morganella morganii
atgagtgatagccaaaaaccacatcacgcctttgttttgatgggggtttccggctgcggaaaatccgctgtggctaacggggttgcgaccgggctgaatgcggcctttctggacggggattacctgcatccgcgtgccaatatcgaaaaaatggcggccgggcacccgctgaatgatgccgatcgcgaaccgtggctgaaagccatcaacgacgcgatttttgctatgcagcggaccaatgagctttcggtgattgtctgttcggcgctgaaaaaaagctaccgcgatatcctgcgctgccagaacaaaaacctgtcatttatctggctgaaaggggattttgagctgatcgaaagtcgcctgaaagcccgcaaagggcatttcttcaaaccggaaatgctgatcacacagttcgataccttagaagcaccggatactgccgcagagcaggatgtgcaggtgctggacattcagccgccgcttgaggatgtgattgcgggcgcggttcagattatcagacaggtttccggaggtcagtcatga

SEQ ID NO: 274951 - DNA, 996 bp, Morganella morganii
atgaagaaaaaacgcccttcgttacaggacgtggctgaccgcgttggtgtaaccaaaatgactatcagccgctttttgcgtaaccccgaacaggtttccgaaaaactgcgcggcacgattgcccgtaccctcgatgaactggggtatatcccgaaccgggtgccggatattttatccaatgccaccagccgggctatcggcgtgttgctgccctcgctgaccaaccaggtgtttgctgaagtgatccgtggtatcgaaaccgtgacggatgcggccggttatcagaccatgctggcgcactacggctatcaggcggagaaagaagaagatcgcctggtctccctgttgtcttacaatatcgacggcctgatcctggccgaacgcacccacaccccgcgcaccctgaaaatgctggccaccgccggtattccggtggttgagctgatggacagcgtctccccctgctatgattccgccgtcgggctggataaccggctcgcgtcacttgaaatgacgcaggccatgattgcacgcggctgccgccgtgtgatttacctcggcgcgcgtcatgacgaacggacattcatgcgtcttcagggttatgaacaggccatgcgggatgccgggcttgaaccgggcaatgtaatgacacaggaaagctcctcgtattcgctgggggcgagacaactgcaccaggtcagagccgattatccggatgctgacgggctgttctgtaccaacgatgaccttgctatcggggctatttttgagtgtcagcgtctcgggatccgcatcccgcaggatctggcggttgccgggttccacggccatgatgtcggtcgtgtgatgaccccgaaactggcgagtgtcctcacacctcgtgacctgatgggccgccgtgcggcagaagtgctgctggcacgtctgcgcggcgaactgccgcctcagcagatagtggatgtcggcttcgaattattaccgggagagagtatttaa

SEQ ID NO: 274952 - DNA, 1032 bp, Morganella morganii
atgacacttaaccgcctctgttccggatttcttttctgctgcgcactgctgttcactttcccggcattgtcagccgctgccgcgccggaaaccgcctctcaggtctttatttatggtcagcttccgccgccggaagccattcaccgtgtggtcagcagcggcccgccgactgatcagctgctgtttgcggtcgccccggaaaaactgccgggcttcgcctccctgtcagtaaaaaataacccgtattttgccccccgctggcgcgcgctgccggtcaccggacgtctctccggacgcggcagtaccctctccccggaaaccctgctggcgctggcgccggatatgattgctgacagcgggctgaccgatgaaacttaccgctctcaggccgcccgtttcagccgccagaccggtattccgtatattctgttgtccggcaatctgacacaaaccccggatctgctgcgtcaggccggtgcattgctgggggaagcagaacgcacggaacaacaggcacagctggcggagaaatggctgagggatgctgccgcttttgctgatcgccagatacacaaacgccgtttttatatggctcgcggcgcgaaaggcctgcaaaccggtctgcgtggttcgattcatagcgaagccccggaattactggggtttgagaatgtcgcggatgtcccggatatgcagggactggcggaagtctctttcgaacagttactgcagtggaacccggattttattatcgcccaggatgccgtgacgtatgatgccattatgcagggtgaggtctggcagagcctggatgcagtgaagaataaacaggtcttttactatgccgggctgccgttcggctggctcgacagcccgccggggctgaaccggcttttagggctgcgccgccttcaggcacagtttgagccggagagtaccgatctgaaagcagacaccggtttgtttttcagtctgttctatcactctccgctatcggaggcacagattaacagtctgttatccgcccgatga

SEQ ID NO: 274953 - DNA, 1014 bp, Morganella morganii
atgaccacctccgccaaaactctgttactgcttgtgctgctggtgctggtcaccggcattgctctgaatgttggtaagttctcactgactccgcagcaactgtgggatgtggtgcaggcgaaaatcaccggcaacagcggcgcggatgatccggcgctgagccgcgatatgacggtcttctggcaaatccgtctgccgcgcattgccgccgcactgattatcggcggcggactggcgatagccggggcggcgtatcagggcatgttccgtaacccgctggtttcaccggatatcctgggtgtttccgcaggtgccggggttggtgcgatcctcggaatttttgcaggtcaatcaatgctcactatccagctgttcgccttcaccggcgggctgtgtgtggttgccctggtctattctgtcgcccggctggcgcgtcagcatgatccggtactggcgctggtgctggtcgggatcgctgtcagcgccctgtgcggctccgccatttccctgatgaaaattctggccgatccctatacccaactgcccgccatgaccttctggctgctcggaggtctgtccgcgatttcaccggatgatattaaaaccaccgccccgctgattttcgccgggatggtgccgcttctgctgctgcgctggcgtatgaatctgctcagcctgagtgatgaggaagcccgcgcactcgggctgaatgtcaccgtgacacggctgatttttattgcctccgccaccctgatcaccgccagtgcggtctccgtcgcggggattatcggctggctcgggctgattgttccgcatatcacccgtttgttagtgggtgccaacttcagccaccagctgccggtgtcactgctgatcggcgccatcatgctgctgctgacagacacgctcgcgcgtactattgccccgattgaactaccgctcggcattctgacctctgcggtcggcgcacctttctttatttttctgctgttgcagacccggaggaacggatga

SEQ ID NO: 274954 - DNA, 774 bp, Morganella morganii
atgagcgatgtcctgaccacccgcggcctggccgtcggctacggagagaagttaatactcactgacataaatctgcaattacatcagggagaaattatctgtctgctcggtgccaacggctgcggcaaaaccacgctgatgaaaaccctgctcggcctgttaccaccaaaggccggggagatcagcattgataacacaccgctgcgtgactggagtgccgccgcactcgcccgccgcgttgcctatgtgcctcaggcgcacaatatgccgttttctttccgggtgacggatatggtcgcgctcggacgcagtgcccacctctccctgtttgccgccccgggacgcgctgaacggcagatggcagagcaggaactggatcatctggggatcgcccatctggcacaacgctcctattcctgcctgagcggcggggaaaaacagctggtactgattgcccgcgccctggtacaacagccggggctgctgattatggatgaaccagcggccagtctcgatttcggcaatcagataaaattacttaataaaatcgaacagttacgtgagagagggatcaccgtgctgatgtccacccaccacccgcagcatgcggcggccgtggcggacagtatcgtaatgctcagcaaagacagccccgcctgccaggacaaacctgccgcgctgctcacaccggaaaccctggcggcactctatcatgtgacaccagaacatattgctgcccacttcgcgcagccagcttataagggatgctcatga

SEQ ID NO: 274955 - DNA, 840 bp, Morganella morganii
atgactattgatgatatcgatttcacacaactctaccgcgaccatctcgcacaggccgaacgtacccgcaaagatccggaacactgggataaacgtgcggagaaaatggcacaaaactgtgcgaaccccgccgatccttacctgatccgctttaaagagattgtcgatactaccggcgcaaaaaccctgctggatgtcggctgcgggccgggctctgtcgcgttgcagttggcggacagctttgagcaggtcaccggtattgattacagcgaagggatgctgaaagtcgcgcgtcagcgggcacagactcagggctgttcacacgtcaccttccgccactgcgcctgggaagatgactggtcagctctgccgccgtgcgatatcgctgtggcctcccgctccacgctggtgatggatttacaggccgcgctgctgaaactgaaccgccatgcgcggctgcgggtttacaccacccacactgtcagcccgacatttgtcgatatccgcgtgatccgcgccatcggccgcacgccggtcacgctgccgacctatatttacgcggtgaatattctcaaccagctcggcattcatccggatgtggaatttatccgcagcccgaactgccagagccgcgacaatatgacctttgagcagtttgccgaaggtgtggtctggtcactgggacagcttgatgatcatgaaatgacgctgctgcgccgctattacgaccagcaggcggctgacggcctgccggtggtaccggtcacccgcgactgggccatggtttcctggagtgtggtaccggaatccgccctgctgctgccgggaggtcagaagtga

SEQ ID NO: 274956 - DNA, 846 bp, Morganella morganii
gtgatctactacagtgatgcctttctggacagcctcctgctggaggacattcattacggcgatctcaccacccgcgcactcggcatcggcacgcagaacggagaaatgcacttttcccgcaagcaggccggttatgtcagcgggctgatattgggtcagaaattactggaaaaactaggcttacagacacaattgcatgcgaacgacggcgatcatacggaagcaggcgatctgctgctgaccgcaaccggtcgtgcggaagcgctgcatcagggctggaagattgtccagaatgtgattgagtggagcagcggcgtgacacagatgacccgctgcatggtggatacccttcgtcagtatcagccggacgcacagctggcctgcacccgtaaaaatatccccggcaccaagctgctggcaaccgcagctgtactggccgggaaaggcattattcaccgtcagggctgcgcggaaactattctgctgtttgccaatcaccgccgtttcctggcagagccggaaaactggtgtgcggcgattgcagcactgcgccatgaggccccggaaaagaccattattgccgaggcggacaatccggatgaagcttatcaggcgctgaaaggccgcccggatgtgctgcagctggataaattcagccctgatgatatccgccgtctcgtcaaagacgcggcggtgctggctccgggctgcacactgtctgctgcaggcgggctgaatgcagagaccatcgggcagtatgcggataccggcgtgaagctgtttgtcacgtccgcgccgtattatgcgcccccggcagatattaaagtccggctatatccgcgctga

SEQ ID NO: 274957 - DNA, 1929 bp, Morganella morganii
atgaaacgaactctactctgctcagctattctgctggcaaccgcgcctgcggtacaggcagaaagcgcagatattctgaccgtctggggcagcccggtggcctccaatccggatgtcatcacacagccgcagatgcagtcgctgaacaaaaccaacgcggcgacagccatcagcaccatgccgggtgtggttctcgaaaaatccggcaaccgcaatgagctgacggtaaaagtccgtggttttgacagccgacaggtgccggtgttcttcgacgggatcccgacttatgtcccgtatgacggcaaccttgacctcggccgctttatgaccagcgaactggaaagtattgaggtgagcaaaggctatacctcgctgttacagggcccgaacctgatgggcggtgcaatcaacctcaccaccaccaccccgaaaaaaccgtttgaggccaatgtgtcattcagccagggcttcgcacgcggcgcggataatgcctataacaccagcgcccgtgtcggcgcacgcagcgacctcgggtttatccaggtcagcggcagccagtacaaacagcgtttcctcggcctgccgggctccgatgatgacaatgccctggctggcagcaacggccgccgtgcgcattccgcatccgatgataaacgcggcatggtgaaagtgggctggaccccgcgtgaaaccgaccagtatgtctttacctatctgaagcaggacggcagcaaagacagttcgccgtctgcggtgccgggcaaaggcaaatacagctggtgggaatggccggattacaacaaagagagctactatttcaacagcaccactcagctgacagacggcgtgaacctccagggccgcctgttccatgacaagtttgaaaataccctgctgatgtataaaaaagacggcaaagggtacgattacagctattacgatgatttcagcaacggcgcctctctccagttagggatcgatatgcgcgaaagcgatctgctgtcattctccgcacactggaaagatgacgttcaccgcgcacagaaacagcgtaacggggatattctgcgttacaaagatcgcacttattctgtcgctaccgaataccagtgggcagccacgtctgatctcgatttcatcggtgccatcggctatgactggcgcgaaagccgtcaggcggataaaggtgcggatgataatgatcagcacgcgtttaactgggaagtgatgtcaaaatacaccttcgccaaccaggacaacgtgcgggtctccgtgtctgaccgcagccgcttcccgacacagaaagagcgctataccactgaaaaaccaaaagacggctcgctgggtatcattaacccgaacctgaaagccgaacgcgcactgaccttcgatttaacctatgaagggaatatcaccgataaatggggctaccaggccagcatctatcacaaccgcgtggaagatgcgatcctcgcgcacacagtgattaaaaacggtgaccgctacttccagaaccagaacagtggccgtgtggattacaccgggctggatctgggcgtgaaaggcgaagtcagtgactggctgaaaaccgggatcaactacagctacatccacagtgatccgaaagatgttgatcatgcggaagggctgccgaagcataaaatgtatgcctgggtgaaagtcacaccgatagagccgctgtcgatcaccctgtccgaagagttccgtgcctggagctatcagtataacgacagtaatgagaaagtggccggttatgctcttaccggcctgcgcgtggattatgacttcggttacggcatttccgccaatgcctccgtcaataacctgtttgataaatcctacgagtacaccaacggctatatggaagaaggccgtaacttctggctgggcgtggaataccgctattaa

SEQ ID NO: 274958 - DNA, 1284 bp, Morganella morganii
atggcaaatcacatggcaaatcaatcccgcgtcagacggatgctgattctgtttctgctggcattcggtaccaccgcaatgtacagcctgccttacctgaagtcttcgttctatgatccgatgcagcaggcgctggggctgacacacattgagattggtaacctgctcagcctgtatggcctgattggtatgttttcctattttttcggcggctggtttgcggatcgtttttcactgcgcaacctgatcaccttctcgctgatcgcctccgggtcactgggattctggtttgcgaccttcccgtcgtataacacgatcctgctgatccacgttttgtggggcgtcacgacgatcctgacattcttcgccgcatcgatcaaagtggtgcggatgcagggtacggaaaaagagcaggggcggatcttcgggttttacgaaggattatccggcgtatccggcacactgatctcgttcaccggtctctatttcttcggcaaattcgctgaagcggcaatcggcttccgttacgtcgtctggctttactccggcgcttctgtgatctgcggcgtgctgctgttcttcctgatcgcgcaccgcagcagtaccactgacagcggcgaaccggaagaaaaaaccacattccgttcgctgatgagtgtggtgagcatgccgaaggcgtggctgatcgggctgattattttctccacctatgtggtgttctccagcctgacgtatctcagcccgtatctgtcacaggtgtatgtggtaccgattaccctggtgacggcgctgtcgattatccgcacctatgtgatcaaaatggtggcctctccggtggcggggatcgtgacggataaagtcggatcatctatcagcgtgatgtttgtcggttttattatcatggccgtgaactgtgctctgttcctcgtgatcccgaaaggtaatgcctttatgtggtttgcggtggtgaatatggtggtgctgagtgcgttactgtttgcattccgcggtatctattttgcctcagtcgcagaatcgaaaatcccgatgaaaaccaccggtgcggtggtgggttttgcctcctttatcggcttttccccggacgcgttctattattccgttgccggctactggctggataaatacggcgaaaccggctacagctatatctttatgctctcggtcgcctgtgcgctgctgggtgtggtggcaaccttcctgctgcgtcagatcaaccgccgggaagcggcgggcggcggaatgacactctccccgtcagtctga

SEQ ID NO: 274959 - DNA, 1158 bp, Morganella morganii
gtgcaaaaaaatactgattatgatttggaaaccaaactgatccaccagggtcattcaccggatccggccaccggcgcgctggccagtcctatctaccagactgccacatttgcggcgcattctgtggagcatttcgaagaactgtgccggacatggggctatgtctacagccgcgagtgcaacccgaacctgactgagctggaaagcaaactggcgatgctggaaggggcggacagcgcgattgtcagcgcatccggcatgggggcgattgcctcaaccctgctgtcactggtgaaaaccggcgatcatattgtcagtgcggacgggatcttctcccacacccgcctgctgatgacagaactgctggcaaaattcggcgtggaaatcacttttgttgatgccacggtcagtgacaacatccgcgctgccatgaaaccggcgacaaaactcgtgtatgtggaaagcccgcttaatccgtctctggagctggtggatatccgcgcggtggcagacattgcccatcagaacaaaagcctgctgattgttgacagcaccttctgtacgccgatcctgcaacgcccgctggagctgggtgcagatctggtggttcacagcctgaccaagtttatgaacggtcacggtgataccctgggcggcgcggttatcggctcccgtgagctgatcgaactgatcaaatggccgggattatgctgctttaccggcgcggcgctggcaccaaacaatgcctggatgattatgcgcggaatgaaaaccctcgatatgcgcatgaaaaaacactgtgaaaacggtctggcactggcggagttcctgacatctcagagcgaaatcgaagaagtacgctacccggcactgaagaaccatccgcattatgaactgtgtcagtcacagatgaacggcctcggcggcggtattgtctctttccgtctgaaagaggacattcacggcctgacccgcgaccaggtgagccgcaaatttgtgaactccctgaaactgaccaccattgccaccagtctgggtgaagagcacaccctggtccagatgaacggcgaaaacctgatccgtattgctgtcggacttgaatcagcaaaagacattattgcggatttccgccaggccctggatgcagttcacggctga

SEQ ID NO: 274960 - DNA, 858 bp, Morganella morganii
atggcgaaatatttttccatcggtgagatggcaaagctccataaaatcagcattcagacactgcgttattatgaccagttggggctgttccgcccggtgtatgtcgatcaggaaagtaactaccgctattacactatcgatcagttttctcagctggatattattaagtatctgaaatacctgggtatgccgctgaaagagatcaaacaccgcctggaagacagcgacacacaaattctcagcctgctgacccggaaaatttccgtggtggatgagaaaatccgcgagctggagctgattaaaaaagtcctctccaccaaaaaagagacactggaaaaagggattgataccgacagtatcggcaaaatcacccgccgttatattccgcgccgtcatattttatcgatgaattatgagcccggtctgagctttgaggagaccatggagttctcacggcggcagattgccaatatcctcgaggaaaacatttctattttctacggcggcgtcagtggcctggtttcccgcgaagaatttctggccacacagcaggtgcattacctgaacagttttgtgattgtcgagcgcgacctgtttaatccgcaggtgcaggacaaaattacagaaattcccgacggtgaatttatctgcctgatgtatcaggggccttacagcgaaaatacggcagcatttaaggcgctgacggattatgcggaatacaaacgcattccggtggatgacatgatgtatgaaatcccggtgattgacccgctttccaccaatgatcagcgccagttgctgacagaaatccagatcaaagtgaaacggcgtgaaattgatacccgctgcctggtgtaa

SEQ ID NO: 274961 - DNA, 1041 bp, Morganella morganii
gtgattaccgaagagtttctctccaataatgtgctcagcctgattgtgctggtgctgtgtctgctcggttccggcgggctgatgatttataaccgcaaacgggaaaaaggcgagcatgccacattagtgcatgtttcccagtttatcatgtgggcgctgggagtcattatcctcggcgatttcgccgagcagggaattgaccactttcagtggcgctttatcaccgcagatacggtcgggatgatctgcaccacactgattgtgctgatgctgatccgcaaattgttcctgatgataaaccgcctggccgccgcacagatcaaacgcggcagcgatatcacctcggcacatattgtttcccgcgttctgaaaatcctgattgtgattgtggtgttcctgttctacggcgaacacttcggcatgagcctgtccggcctgctgaccttcggcggtatcggcggcattgctatcggtatggcggggaaggatattctcagcaacctcttctccggcatcatgctctattttgaccgcccgtttaaaatcggtgactgggtcagttcgcctgaccggcagatagaagggacggtggtggaaatcggctggcgtatcaccaaaattattacctttgatcaccgcccgctctatattccgaactcgctgttctcctccatcagtgtggaaaatccggggcgcatgaccaaccggcggatcaaaaccaccatcgggctgcgctatgaagatgcggagaagatttcgcagattgtcagtgaaatacgcgctatgctgaaagccgaaagcagcattgaccagcaccagacattgctggtctattttgatgaatttggtgattccgccctcaatattatggtgtactgctttaccaaaaccacggtctgggcagagtggctggcagcacagcaggcggtgtatctgaagattattgagattgtacaccgcaacggtgcggactttgctttcccgagccggacactctatatggaacgcaacagtgtctcccgtgaaccgccgggagtgtga

SEQ ID NO: 274962 - DNA, 597 bp, Morganella morganii
atgaaacaactgattatcggattactgggtgtggtggtgctggtcggcgtactgctggtctccaattacaacagcatccagacacaggacgaagcggtgactgcctccgcctctgaaatgctcaaccaatacaaacgccgcgcggatctgatcccgaacctggtgaaaaccgtgcaggcttcctctgactttgaacgtcaggtcttacaggatgtggtgaatgcccgggcaaaagtcggacagatgaatatcagtgtcagtgatctgagtgacccggcgctgcttgctaaattccagcaggcgcagactgaactgggatcctcgctctcccgcctgcttgcagtatcagaacgttatccggatctgaaaagtaacgcactctacagcgacttaatggtacagctggaaggcagcgaaaaccggatcgccgttgcgcgcggccgctatatcgaaagtgtccgtgaatacaacaccactatccgtaaattcccggccgtgattattgcaaactacatgggatacaccggcaaacctaacttcagcgttgaaaatgaagcggaagtcacaacagttccggatgtgcaatttcaaaaataa

SEQ ID NO: 274963 - DNA, 804 bp, Morganella morganii
atgagaaaaattattgtatcggcactgctcgcctgcaccacattactggccgtgtcctgctcgcagaatgatgatgaaaaaccactgaaagtggcgattaacaccgggccggatcaggctatctgggaagaagtggtcaaagttgccaaagagaagcaggggctggatgttgatgttatcgccttcaatgactatgtcctgccgaatgaagcgctgcgcaacagtgatgtggatgccaatgcgttccagaccgtgccgtactatgaggcgcaaagcaaagaacgtggctatcagtttgaagttattggtaaaacctttatcttcccgatagcggcatactcaaagaaaatcaaatccgcagccgagctgccggatggcgcaacagtggctatctctaacgaagccactacgctcggccgcagcctgctgctgttacaggctcaggggctgattaaactgaaagacggcgtcggttatctgccgaccaccctggatatcattgaaaatccgaagaaactgaagtttgcggagatcgataccccgcaactgacacgcaccctggatgatccggatgtgtatctctccattatcaacaataatttctcatctcaggtcggattatccgccgcccgtgacggtctgtttatggaaggggctgattccccgtatgtgaacctgattgtggtcagagcagcagataaagataatgagaagctgaaaaaactggtcgcggcatttcagagtgatgaggtgctgaaaaaggccgatgaagtgtataaaggcgatgctgtccgggcctggtaa

SEQ ID NO: 274964 - DNA, 1275 bp, Morganella morganii
atgaaacttgaaacgctctctgtccatgccggttattcaccggatccgaccactaaatctgtcgcggttcctatctatcagaccacctcctacgcctttgatgacacgcagcacggcgcggatctgtttgatctgaaagtcccggggaatatctatacccgtatcatgaacccgaccaatgatgtgctggagcagcgtgtggcggctctggagggcggaattgccgggctggcggtggcatcgggcatggcggcgatcacctatgcgatccagaccctggccggagtcggcgacaatattatcagtgtctccaaactctatggcggcacgtataatttgtttgcgcataattttccgcgcatcgggatcgacgtccgttttgctgatcatgatgatttcgcacagctggaatcccttattgatgacaataccaaagccgttttctgcgaaaccatttccaacccggcggggcatatcgcggatattgaaaaactggcggaaatcgctcaccgtcacggtgttccgctgattgtggacaacaccgttgcctctccggcgctgtgccgcccgattgaattcggcgcggatattgtggtgcattcattgaccaaatatatcggcggacacggttcatcactgggcgggattgttatcgactccggaaaattcccgtggcagcagcatgcggatcgctttgcggtactgaataccccggatccttcctaccacggtgtgaactacagtgagcacttcggtgcggcggcatttatcgcccgctgccgcgtcgcgccactgcgtaataccggcgcagctctgtcgccgtttaacagcttcctgattctgcagggactggaaacactggcgctgcgcatggaacgtcataccgaaaatgccctgcgtgttgcgcaatacctgcaacaacatccgcaggttgcctgggtgaaatatgcgggtctggcggatagtccggaacatgcactggcgaagaaatacgtgcagggcacgccggcatcaattatgtctttcggtatcaaaggcggggcagaagcgggagcgaagtttatcgatgccctgaaactgattgtccgtctggtcaatatcggtgatgcgaaatccctggcctgccatccggccaccaccactcaccgtcagctgaatgaagccgaactggcccgtgccggggtatcacaggatatgatccgtttatccgtcggtatcgagcacattgatgacatcctggcggatatcagtgcggcactggacagtgcgaaataa

SEQ ID NO: 274965 - DNA, 768 bp, Morganella morganii
atgaatatttccggtcatatcgataatgtcaatgtgtcatcctcaggttacataccggaggatgcggttaccgtaaaagaaaaattgctgttaccggttaataaggttcatccggggatggttcggtcagttgctgataatcagtattttcagcaggaaacagcagccggtaaaacagcggaagagatagtctggccattttcacaacatgtgatacctgcactgctgacggattatgataataaacgtatgagtgctgtcattgaattatgtaatgtgctgttgcttgatgcgattaatcagcaggaacgacggaatacgttagaaaagcaggcagtgcagcaggcaacgctcttaaaagatctgaaatataaagaagccgactatcaggtagccgctgcggttgtcggcgctgttgtctcagtggcggttgctgtcgtcggcggcagtatggcaattaacggaattaatccggccaatccggggataatgacagcgaaaggcatagccgggcaggcaatatccggtttgtcacaatctctcggacagcttgcttcccagccgattgcggcaataggaacccggttgcagggagatgcggaagtggttcgtgtcaggaaagatatcctgctcaacgctatgtccgcccataataaagtatcagatgatcaaaaagcgtttcagaaaaaactgctggagatgatgaccagtgaatttgagaaccgtaagaatacaactcagaatctgattaataatatgaagatctga

SEQ ID NO: 274966 - DNA, 1719 bp, Morganella morganii
atggatgtatcaggcattaaaacaacaaaaataatcacttcggggactttgccgggagaggttgatgaagcaggaaaaaataatgttattggccaacaagatgcgatatttttttctgaaagaatcattgaagagctgagtgacagatatgacaaggaaaatagtaaaaaagaaaaaccgcagcttaaaggacatcaggcagtaaaacaacatgacgaaaaagcatcagcgaaaaagatgtcaattaatgaaatttttgcacggttctctgacgatcttattgaagagcagattaaaaattcaggtgtaaactcaggcattaatagtgattttttaaaaaatatatggtctcaaagtaaagaatgtgagttggataaaaatatagtcagttatttcaatatgctatctgaacggattgataaaatatcagactattactttgacgttattaataacaagagtaaggataatgataacatcaggttttttttcaccggagatgaaaatatcaccattagtgataaaaaagaatttttggtttttttctgtaaaaaactgggtatggatgctctccgggaaattatgacggagaataccggtgattgtaaggataaaacaaatttaatcaaaaaattacttgatgatattatcagcctgccaaaagcaaaagatcaggcgtgggtaattgatccccgggaattggcgctactaaaatcagagctgaatatattacaaaatacggctgaaacactggcttcagcgagagagtgtctgtctttggcacaatcgctggtcaattcgaataatcaaaatacgcttgagtataataattcactcgcggttctgatgggaaaactagctgatttgcgtgacaaaatagcacagcagaaactggaaaatgaccgggacttggcacaattacagcagttggcgttgcagaccaaaacagataaagatgccgcagatattgcagagaaaataaaaaaagcagagcggctgcaggccttgtttaaatggctggggcctttgctgattgccattatggcggtattaacagcattaaccggcgggttactggcaaaggcactggcagcggttatcgtggtaatgaccattatcagtgaagttgtaaaagcggccggcggccctgatattatggcaaaagtcatggagccggcgatgaaattgatagaggcagtgcagaaatttattaaagatattgccatggcgataggtaaagcgcagggaaaattaccggaagaactgaaaaagctggaaaaaaccatggaaattgtcgcaatggtgctggccgttgtggtcgtggcagcgttatttatggcgctggcatcagtggctggttcaattgcaggaaaagttatgggtaattttgcatcagaagcaatgcaggcggcaataaagagtgcttttgctcagatacaaacgatgctgattaatatcatgatgacatcaaccattatcaatggtgccagttctgttacaaatgcagtattacaggctgacgctgaacggttgcgggcagatatggatcttgatctggaatttctggacagaataacagaaatgatgaatcagataatggagactttttctgaatcacaaaaagaactcattgcattaaatgaaaaaatcagtaagcacggcagtgaatcttttcaacggatgaaatcaataatacagcagggacaattagctgtttaa

SEQ ID NO: 274967 - DNA, 1284 bp, Morganella morganii
atgaatataattgaacatcataatgtttcacctgtggcacaggatacacattctcagatttacgatatacgagagaagtctctgttagcggaagtgccaaatgatatcgaattgctttcatatttttatgatgaattaaataatataaatataatcttgtcaaacctggtgataacagaagaacaagcgctaaaagagttggataaatataataaattaataaaaagatccgaattttcagaactcatattatctcatgaaagtgagatttcgtataaaataaaagatatacaggagtctatagagtattactttataaaaaaagagatggtcacctttggttattttgttgacaaaatggatattgcatctaagtatggacatgatttaagtgttaaatgttaccgggatggatttagtcagtatacggagttttataaaacactatcaaaattattaagctcgtatggcgagtattctgccggtgtaatagatgacggtaaaaaaacaaagttcagacaaaatgcattttactatgatctgcatatggtattaatgaaattttatccggtgacaggtaacttaaaaaacgatgcgggaaaagattgcgcaatatataaagggcggtttgaaatagatacaaagaatggggtaaataactgttcaatttatgttgatggcgaactcattgattcgaatgttacttatggcgatgctataaagaaaatggaatatttcttttccgtaatgagaaagccggtatcaggcactggggtaattaaaaaaataaatacagaaacagaccgtgacggtaatctggtaaaaataaccggaatggttgacgttatggtaatgcccgaagcattatttagatggcttgatttttctatcaaaaaagaagattttgataaaataaattctttttttgatcagtcaatggataaattaaaaaattttaatcatattaatgatgactactcattggtatcttctttgtatgaggatgcattaaaaaaaaccagtgatttttttaaagaaaaattaagttcaagttattttaaaaaagcagaatccggaagaaatgaagaatggtcgttagatcagggtaaaattaattcatataatactattattgatgggattaagaaagaactgcaaatgactcttgatgaattttctcagcgatataactctatcaatagtaattacgataatatgctcagagtcattaccacaatgatcagtgaactgactcaggaattgaaaggttttttacggatttga

SEQ ID NO: 274968 - DNA, 468 bp, Morganella morganii
atggatgataatataaacaatgatattaaatcattgatagagaatattttttctcatcttgaaaacgggactatattaacaatattttcaccacaggaacccagtgattttagtggtgtatattcattagcctgtgattattatgataaggggttaattgaacaggctgaaaaaattttccggtcgttatgtttatatgattttaataatattaattatttactcgggctggcagccgtaaagcaggtacagaaacaatatcagaaagctatcaacctctattctctggctatcagtctgaatgaagatgatgcatcctgttatttttatattggccagtgctatttgttttccggggcgaaagaattggctgtatcgagtttcagacagtgtctctcaatggcatgcgatgaaaatgaaagagagaaatcattaaattacatctcaatgctggagaatgataaatga

SEQ ID NO: 274969 - DNA, 1050 bp, Morganella morganii
atggctgaaaaaaccgaaaaacccaccagtaaaaaactgaaggatgaatcaaaaaaagggaatacgttcaaatataaagaactgctctccacgaccggctatgtgacaggtattgcgtatctgctttatgttgctgactggtcagcattctcccgcttttatcagacggtattacgtaatgtgaatcacttgtcactctctgtctatatacagatgttgtcagagattttttttcagatggtattaccgctgattatgttatgtggtttgagtgtcagctttgtttctctgatgcagacccgttttgctgttgcgacggaagcgattaaatttgatttaaagaaaattgatcccattgccggattcaaacggatttttaccaaaaaatccctgaaaaatctggtaaaagcactgatttcactcattgtatatttatctgccggttatacctttatttctctgtataccggtgatatttatcagttaattacagcacctttctctgaggttagtgagagctttctctatttcaccggccgctatatctttatttttatcctgctgctgatgccactgctggtgattgattacatcgttgaatattttttcttttttaatgaaatgaaaatggaaaagcatgaagttaaacaagagtataaaaatagcgaaggtaatcaggagataaaatcagcccgcaaacagcagcaccgggaattactgaatgcggaaaccaaagcactgataaagaactcggatgtcgtggtggttaacccgacgcatattgccgttgctatctatcttgatccggaaaatggggttatgccgctgattaccgtgaaagagaaaggtgaatacgcactggctatccgccggtatgctgaaaaacataaagtaccggtggcccgggacatccgtctggcgcggacattattccggaaataccatgtctttgacaccattattgatgatgatctggataagtttctcgatctcttactatggctgaatgacgcagagcaggctgcacttgccgatagtgaaccgcactaa

SEQ ID NO: 274970 - DNA, 762 bp, Morganella morganii
gtgccgttattctcctggtttcatgacctgtttcagagcgcgctgttcagcagtgtgcggttatttgcggcgttcgcttttctgccgtttctgaatgataaatttattctcagccggagcacgcggggcattattgtttttcttatggcactgtgtctcagcggaaatgaacattacccggcggcagagttctctgtggtcagtctgctgagtgaaatcattaccggcacggtaatgggattggtttacagcacaccgttttttatttttgccgccttcggtgaatatattgataaccagcgcggagcgaatatcagtgataccgctgatccgacaacagggaccgatgcgtcaccgttttccacctttatgaatctgttttctgtctcgttttttttactcaataacggccttgtattactgatgacatccgttcaggacagtttccggttattaccgccgggcacattactgacggaaatacattatgtgccggtctttgactggctgacaaacagcctgtcactctctttgctgttttgtatgccggtactgattatcttatttatttctgaagtcagcctgggcattctggcgctgtacaattcacaactgaatccgttttccttatcactttcaataaaaagtattattgcctttctgctggcgctgctgctgtttcgcagcacaacaatgacggatgtgacagtgctgtttgatacttcccctctgactcactttttgagaggaaataatggctga

SEQ ID NO: 274971 - DNA, 267 bp, Morganella morganii
atggatgtgatttatgcggcagataaagggatttatctggtgattatgttatcgctgttgccggtgagtgtggcgaccgtcgtgggtctgacggtcggcctgctgcagactgtcacgcagatccaggagcagacactgcccttcgggctgaaattgattgccgtgtttgtctgtatcctgatgcagctcagctggctgggggattcgatgctcagttatgcccgcgaaatgttctcgctggcgctcagcgcgacagcggcaggttaa

SEQ ID NO: 274972 - DNA, 660 bp, Morganella morganii
atgactgacagtgctgtttcgatgatgctgatgctggctgcggcatccgttctgccctttattctggcggccggaacctgctacctcaaattctccattgtctttgtgatggtacgcaatgctctgggggttcagcaggtgccgtcaaatatggtactcaacgcgattgcgtttattctggcgatggtggtgatgtttccgctggtcagtaaaacctatgcttatgttaatgaaaatccggtggaattatctcagccggaatcactgtcgcgttttgcggatgaggggttacgggattaccgggactatctcttccgttatgccgataaacctctgctgtatttttttgcgcaaacagatattgatgaagataccgatccggaactgaataatgcccgggatattgcattttttcccttgctggcggcctatgcgctgggagaaatcaaatcagcctttctgatcagcttctatctctatctgccgtttattgtgattgatctcgtggtgtccagtgttttgctggcgctggggatgatgatgatgagcccggtcacgctctcggtgccgatcaaactgatcttatttattgcccttgatggctggtcgctgttatccaccagtctggtgtctcagtatctcgaacttatggacatataa

SEQ ID NO: 274973 - DNA, 858 bp, Morganella morganii
atgcattatgatacccatcagataatggactatctgagctgttatctgccggaaaaaaaagaaaataccaaacgagcgattaaatgtcatttaattaatactcaaaacatattggaggttttaattgatgttgaatcctttctttctgagctgattggtgaaaatacgatcccctgggaaatcgttcctgaaaattatcttattgacctgataaatgaaaataagaaagagattcggctgccgtttttttcagcagagagttattttcctgagttccggacggaaaatatcgctgttaatccaacccataaacttgctttccgtcagggaaatattgattttactctgattggcgcccggggccggtttgatattaatggcccgccactgacgccggatctttctgttccggtgaatgccgggatttatatcggctcaacccggacattcactggtgtgattcagcaaatcaatgaaggcgatatcctttttattacacaaaaccagcgatttctgagagcaggaggctattttcagatgacactgaaacaggagcaggacgacacggttatcaccggacgcggaattattccggaagtgccggttaccacagcggaaacggcagtttttgacagccgccgggttccggttcaggtggattttctgcagtaccgcagagtgtttccgttatcggaactgatggcgctgcaaccgggcgatacactgccgctgccggcggcggataatcacctgatcacgctggaaatcagcgggcagcgttttgcacagggggaactggtacgtatcggggaacaatacgccgtggaaattcatcatatctttcataagggtgaatga

SEQ ID NO: 274974 - DNA, 783 bp, Morganella morganii
atgaatattaatcgttgttgccgggaacctgagcaagattttccggaaggttatgttaatcagcaggtgactgattttttatccggaatgacaaaaaagaaaaaagaaaataaacatgtcagtgctatcccgggggttaattcactgttctgtccgtataatgacaaatgttattatggtgatatattaaattccggggtgatgatgaaaggtcataacaataatcaccggaaagttcatgatattatgctggtgtgtccggaaaagaataaaataaagaacagcatgttcaggaataatgttatcacggaaccttccggtgatatcatacacaatacgctatctgcggataaaccaaaaaacgttccggcagaggaggaagattattcaggtgctgatatctcagcagaagagaagataccggcaggcagtgcaacgattgagttaccggaaataccgttttttctgaaccatccgccgccggggataaagacggaagtaaaaaatcagccgttgcggcattgtgagcagggaaggggtacccgggaaaaaataccgctgatggtttaccatacggagaaaaatgcgttatctccggcgtacagcagagctgattattattgctcttaccatttcagacagaaatatcagccaccggaaccggttcatatttacagagataatccgggaatgtttaaattggaaacagattcagagtctctgaggcgacgtctgaaatcagcagtaaatataaatggaattgataatattgatataatataa

SEQ ID NO: 274975 - DNA, 399 bp, Morganella morganii
atgaaacaggcagattacttgaacagctcacacaatgaattacagcaactgatcgcgcatttcagtctgaaagagcgcagtgtccgggcggcactggcacagctgcaccagcgctaccggcaggaacaggaaaataaagataagctattgttgttaatcaaaggattagaacagcagatccttgagtttgaatgccgcggattattatcttacaccgcactgaatgaactcaggcgcaaacaggcaatctaccgtaaacagatcccggatgtccgtgccagagtggatgaatcatcccttcagctggcgcaaatctcggatgatattgctgagagtaataaaacaataaataatctgaaaaagaaacttattaagtttgaacaatataataaacaatga

SEQ ID NO: 274976 - DNA, 1293 bp, Morganella morganii
atgctgaatgcactgctcagtcagcgggcatttccggtgcatatccgcggatattacctggaagcgccgctgccggatgtctttatcggtgaaatttgtctgttatggcaggatcttacctgtcgcgtactgctcggccgggctcaggtggtgggctttaatgaacacaacacgctgctgagtctgatcggacaggccgccgggctgacactgacaacggttatcgcgccgacggggagtgccgtaacactgacattcacaccgcaaattccgggctcggcgattgatccgtccggtaataccctggcccgtctgagtgagataacagagccggataaccggagtatcatccgccccgtcagcggggaggcgccggatgtgctctcccggcagcgtatcacggagattttgccgaccggcgtgaaagccattgatgctctgctgacctgcggaaaaggccagcggctggggatttttgccggtgccgggtgtggtaaaaccgtgctgatgaatatgctgattgagcatgcacaagccgatatttttgtgatagccctgattggcgagcgtggccgggaagtgagcgaactgattgatgagctgcgcaacggcccgcaggcggcaaaatgtatcctggtctgctcgacatccgataaaccggcggttgaccgctgtaacgcggcgctggtggcaacctcactggcggaatattaccgtgatgaaggaaaagaggtgatcctctttgtcgattcgctgacccgttacggaagagcattgcgggatgtggcgctgagtgccggggaagtgcctgtccgcctgggatatccggcatcggtatttgagcagttaccggcactgctggagcgcccgggggcgacgaaaaccggtgtgatcacggctttctatactgttttacttgatagtgaaaatgagccggacggctttggcgatgaagtccgttccattctcgacggacatatttatctctcccggcggctggcgatgcagaatcactatccggcgattgatatcccggccagtatcagccgtgtcatgtcgcagattgtttcaccgcagcatctggcggctgccgggcgtttccggacactgctggcgaaacagaatgagctgaaactgctggtggagctgggggaatataaacccgggctgaatgcggagagtgataaagcggttgagctcactctgccgatgcgccattttttgtgtcagtcaccggcggaatccgttgcggcggatgaaacaggcagattacttgaacagctcacacaatga

SEQ ID NO: 274977 - DNA, 411 bp, Morganella morganii
atggatcttgcaacactggttacagaaggaatgaagcttatcggacgcggcgatttggtgccggagacagcggctttggataatcattcaacaatatcattatcgctgggggaacagcaggtcattcatattgcggtggttgatgaatatccggttatctggatgccgttgcagactgatttaccggcattgcggccggaggtaaaaggcggtttgctggatatcctgacagaagaacccgcccctctgttttatccgggctcaccggcgctgcggcagacagataacggcgcggagctggtcgggtgtttcagtcacaatgctgtcagcggcgcggaaccttttgtgcaggcgctggatcagtttgtccgcctcagtcagcagtgtcacacactgatcctcagaggctga

SEQ ID NO: 274978 - DNA, 2061 bp, Morganella morganii
atgctgacaacttttattaatgcgatcaaaagcaggccggagatcgcagtactgctgattatggtgatggtgatcgccatgctgatcattccgctgccgaaaatgctggtcgattttctgatcgggctgaacatcgttatttctatcctgatgttactgctctctttctatatcacccggattctggggtttacctctttcccggcacttttgctgatcaccacactgttccggctggcgctgtccatcagtaccagccgtctgatcctgctggatgcggatgccgggaatatcattcagtccttcggtgaatttgttatcggcgaaaatattgtggtcggatttgtgattttcgccattgtcacagtggtgcagtttattgtcatcaccaaaggatcggagcgcgtggcggaagtggcggcacgtttctccctcgacggtatgcccggcaagcagatgagtattgatgcggatctgaaatccggcctgattgataatgaagaagtgcgcaaacgccgtaaagaactggagcaggagagccagatgtacggtgcatttgacggcgcgatgaagtttatcaaaggggatgcaatcgccggaattgtcatcattttcgtgaattttgccggcggaattggtatcggtgttgcgcaaatgtcgatgccgttcagtgaggcgctggatacttatactctgctgaccatcggggatggcctggtggcgcagatcccggcgttgctgattgccatcagcgccgggtttattgtcacccgggtcagcggcaccaatcagaacttaggggccaatattgtcagggagctgttttctcatgactttaccctgatagtgaccgctgtcctggcgctgtgtatggggatgttaccgggatttccggccggtgttttcggcctgctgtccgccggactgatgttgttttacggtatgcgtctcagacagaacaggcagaaatcagggaccggaaaagccggcactgacaatcgctctgcagtggctgcatcgtccgcatcaccggcgggggattttgcgccgcgcggactgtcggcagaaaataatgaagccattccgttgattatcaccctccacacctgttatcaggctatgtttgaaaaacagaagatgacagcatggttgcaggaggaatttgccttccgtttcggtttctttttacccggtatcattatcaattacagccgtgagataccggaaaataaatcggtgatcttaattaatgagattcagtccggtgtgatttacagctatccggataaatacaaagtgacagaaataaatgatgcttttgagtcactgaatattgaaccggtcgtgattgagcctgaaggcggggaaaaaaccgtctggacggataaaaaacacgatgaggtatgccgggccgccgggatgggaacagaacccggtgttatggtatttttcaatgaattcagccggataatgacacaaaatattcaggaattgcttggtatccaggaaaccaaaacattgctggataatattgaaaataaatatccggagctgctgaaagagtgttaccgctatttatctgttcagcgtattgcggatgtctttcagcggcttatcgctgagcagatctctgtccgtaatatcaaaattatcctcggcgcactggtgcagtgggggcagaaagaaaaagatccgctggtactggttgagcatgtccgcagccaccttgcccgttacatctcagcgcattttgcctgtgatcaggttctgcgggcagtggtgctgtcaaacccgctggaggagatgatccgtcaggggatccgccagtccgccggaggtacttttatcaatctcgaaccggcgcagctggatcatttttatgatgcgatgtcagtggtgatgacgccgctgcggcaccggcgggatattgtttttctgacggcaatggatgtccgccgctttgtccggaaactgactgaaatgcactatccgggtattgccgtgctgtcattttctgaaattgttccgtcggcacaggtgtcggtgattgattctgtttaa

SEQ ID NO: 274979 - DNA, 1053 bp, Morganella morganii
atgataaatggtttacccggcgcaccggcgttcagtccgtctgcggcaccacagaaacaacagaataatgctgcagcagagcagcgcccggcggaaaaccagacggaaaaccatgccgagcagatgatggatgtgatggatgatatggccatggcactgtcgcagtttaaccggcggcagtacggaaaagaggatcacatcagccagttaccggcatcagagcagaaaaacagtgctgagggtgcggaaacaaaactgggccgggtcgttaagtggtttgctgcttccgggcgctcagttcgtgagtttctcgattatgtgcgcaatttgtttccggatcccagtgattatgtcatggcattgcgttccctgttgcgcaaactgccgttttctgcggaggaagccgccgaaattgatgcggaaattgagcagttactctacggagaatttgcacaggaaacccgtgcagggatcaatatcgcactaaaaatccgccagtatgcgccggtaacacaactggattgtgcgcaactgagaatggtataccgcagttatatcagctggaaattcgacatactgtatctgtggaaagtgtggctggagcagtaccggaaaagccgggtcagaagcctgctgtgttatgtccgtgactcgctggtgtgtgatatggcggcagcactgcccagttgcagccatcacagtgagttcggggaactgacaacccgtctgcataccctgaatcagctgatttccctgaatgatatgttttatcagaaaatttcctccctgaactgtacggaaccggtgctggcggatgagcagcggctgaaccagctgctgatttccgggctgggtgacccggaggcatttcagtcagaaacagaatcgttgctggcggcggcagaaaatgacaaaaacagaccatttattttacagcgcctgattgtgatttttggtgagataccggatgtcctttttctgcaggaagcaggcaaagagcaggtagtttcttttttgaaagcccttatgagcaaaattattaatatcttataa

SEQ ID NO: 274980 - DNA, 1626 bp, Morganella morganii
atgcggttaaaaaatagcaccgggggggtgttctgcctttttttctgcctgttttctttgccggtcatggcggaacaaacactgttatacgaaaaaaaaccaccgcaacaggcgcagtatgtggcgaaagaaacacggttggatcatttttttgatgcgctggcaggaaagctggatgtcatgattatttcgtctgatgcggtgaaaaagaagaagatctccggcacttttgatttatccgacccgcaggcggcgctgtcgcagatgctgaaaaccatggcgctggtgtcataccgggaaaaccgcacactctatatttacagcagcaatgaagttgaatcttccatgctgacgctgaatgcggtaacccgcaatgaactgacggcttttctgaaacaaaccgggctgtttgatgcgcaatacccgctgacatctgaccggcagcagcggattttgtatgtaatggctcccccgcgctatctggcactgatccgtgctgcggcggacgcactggaggcacagtacagtgtgcaggagcagggaattacgccggaagatgagcatattcagctggttaagctggaacatagttttgtgcaggaccgggaaattacctcacgggggaaaagcctgatactcccgggagtggcgtccgcattgcgggagttactggattccggacctgcggcaaaaaccggactggtaccgcaggacgctgaacaggacgatattcagccggctgaaactgtctggctgggcggagagcgggtgcggattgtgccgctgcagggggaaaacagcctgttgttaaaagggaaccgtaatgcactgcacttaatcaatcagctgatcaggcaactggatactgccaaaccgcaaatcgagttatcactgtggattattgatgtatcaaaaaatgaagctgatcaactggggatcaactggcaggcagattacggtacaggaaaaatgaaagtggcttttaatttcagtgagcttaatcagttcaccggtttttcttttttcagcaagatcagagcattgtccgcaaagggacaagccaatatggtgtcccgtccgattattctgactcaggataacaccccggcgatttttgataataacaccacattttacagcaagttacagggcgagagaacatcatctctggaaagcatcacttacggcacaaaggtgagtgtgacaccgcggattgccaatcagcggaaatccgtggagatgattattgagcttgaagacggcgcacagaaaaaggacgctgacggagcaggtggtgaagatgccctgccggtgattaaccgcacgaatatcagcacaatagccagggtcgcacagggaaatacactgctgattggcggctacacgcgggaaaatacccatcgccataacgataaaattccgctgctgggcgatatcccgctggcagggcggttgtttcagtttgaatcagtgaagacagaaaaaatggtccggctttttttgttgcagccccgtattctgcaacaggattttttcagcgacacagaaattaccggacatattccgtttaattataagaataaacaaggtattaagatgattcaaaaactgaagcaggactattga

SEQ ID NO: 274981 - DNA, 633 bp, Morganella morganii
atggaaaaggaaaggaagatatatatttataatgatatatataaagtgaatggatgcagagaaaatagtcaggctgactactgttttccgctatcgaaatgtataaaactgctggcatttatagattgccattatcatttatcccgggaagataataatgaagttgcggataacaaggtttgtcctgattatgagattatttttccggttcagggggatgcagacaatccggaataccggattgtctgtgaaatgctgaatgaaaatagtgtaataaaaacattttttaatacactgcgccactctgagcattactggctggtgaaacacctgatcagcgcagcggattgcaaaaacagtaatatcagggatatcagtcagcgttacgggttatccggcactcacttcagacgcctgtgccagcgctatatcggcaatcagagtaaataccagttacgtcactggcgcggcgtggcatcagtgctggatatcctggtaaaagagcattcactgacccggatcgcggcagataacggttactgctcggcatcgcatttctcaaatgaaatcaaaatattatttggtatgtctccccggaaaataaggaatttaaatcatgcggttaaaaaatag

SEQ ID NO: 274982 - DNA, 1032 bp, Morganella morganii
atgcaaaacctttatactctgataacaatttccgatgaggaatcaaaggaagaaataaccattccatccggaagatactgcatcaacagtacaattaatcatgacgacgacctgattaacctgaatctcacaggtgcagaatcactacctgaaaaaacagaagcagagctatatgaaaacaattatcacgtctcttttaaaacctgtgatggtgaattagtaatacaagaaatcaattataacgccccctttatttttcaggggaaagtccttttcgccataaaaaaacaacaggataaatggcgtaaaaacatcatgttatatgaaaaaacgacaaagcgcgctgtcccgcgctatcttctgtctgtaatacttctgttatttatcataccggtaaccggatttatgctctttcagtacgatagcaataaaaatgggaatccggctaatatagatagcaaaaatattataagtcagtacattaaagacaataattacatcattaacggaaatgacattcttattttatcctctgatgaaaaattaattaatatcatcagaaataaaatgcctggctataaaatccacataataaataaatcaaaattaaaaataaatgatggtgatatcattctgattaatgttcttcatcataaaaaagagattacatatatacaccgtgatgataaaaaaacgctattaaccatcccggatatattcagaaaagacattgccatacaacatttttcactcgatgatataatcaagttaataaataatagattcagtcatctattaatcagatactctgtaaaaaaatcaggtaacaacattataatttatggcgaaaaaaggagagataaggaaacagataatattataaagaatatcaacaccacgatattctcagcgccgggaaacacgctggtacagtacagggaaatgccataccgtgatacaccgccgggagtatatggctcagtaaattatattcacctgtctgatagtcatacacaattcacctctgactaa

SEQ ID NO: 274983 - DNA, 264 bp, Morganella morganii
atgcctgatatagcaaataaaaatgatgcaataacatttaccaccctgctaaaacaattcaaatcaccgattcatgaagataatgtgaaattgaatacgctgatgaataatttacagtctggcaataaagacacggccaatgcctacgatatggcaatactgcaggcctgttcctcatcgctgaatataaagtgctcggcactttcagcaatgatccgccagcataaagaaaacctctcaacaccaatcggcaatatgcgctga

SEQ ID NO: 274984 - DNA, 306 bp, Morganella morganii
atgtcatcatttaaccggattttacctgtcacaacgatcaccgggatcactgaattactggctgatctcaatgaccgtgagcagtcagctcatcagaatttgatattaccgggaaccgcaaaaaaagacctgcgccggaaaacacaagcactgagcacgggaaaaacagccccggccaccagtgatgtcatgatgatgctggaaaaccaggccgtaatggccaaatggcataccgagatcagtttttattcccgtatgctgcatctgaccctgaatgctgcagataccgtaattaagggtcagtga

SEQ ID NO: 274985 - DNA, 738 bp, Morganella morganii
atgcacaagataatatttatattaataataagcggaataagtcttctgctcggcggctgtaaagaaggtacgattctgtcatcgctgaatcagcgtcagtcgaatgaagtgctggctgcactgcataaacaccagattcaggcagtaaaagtcccgcagggaaaagggctgtttaccatttcagtaccggaagagcagagccgtcaggccattcatattttgcaggaatatcacctgcccagtaatgagcggattgagattgccgggatctttccgtcagattcactgattgcctccccgcagtcagaaaaagcccgcctgatttcggccattgaacaacggctggagcaatcgctgctctcatttgatgcggttaccggagcccgtgttcacctcagttatccgctgtccggcccgggaagcccccggaaaaaaccggaaacaccccgcgcctccgtgctgatctaccattccggtattgaagatgagacacaattcaccagggatattcagacatttgtgatgaatgcctttaacgggctgacggaagataccgtttcggtgcttctgtatcccgggaaaccggttattgaactgccgcctcagccggaagcagccgggctgtctccactttttctgctgtttccggcaggaataatgctggcagcagccggttatttccgccgcgcacaactacgggtatttctgatgcagcggaaggcaaaacagcatgaatag

SEQ ID NO: 274986 - DNA, 564 bp, Morganella morganii
atgaatagccggtttgatatacaaggcgcggtcacgcgggtgatgtaccagccggcggattatctgcacagcagccgcttattcagcggattgccgccggcagcgcaatcggcgtcttatcgcagaatgcagaacgcagctattatggatcactaccggctgccgcgagagagagattttgacctgctctccccgctgattatcccgctgatgcgccactggcagcagcttccggccgtcagccgctacctggatatgttcatccgccatgcttatggcctgccggataataccgtgccggatttatcacaacaggcatttttatctctgagccccgtactgcgactgccggagtggccgcaagcacacaaacagccggatattccggcagtcctgcccggccagattaccatgacacagttattatccggtttttctcctgcgctggcagcccgctttcagctgatgacggatgcatccttgtcaccggcagacatccggcttccgcatctgcccgattcacttttacctttggtattacattatgtgccgttcactgcctga

SEQ ID NO: 274987 - DNA, 600 bp, Morganella morganii
atgtgccgttcactgcctgattccctgctgtcacatatcagacacggtgtgctgattaaagatcgccatgtctctgccctctgccgcctcagtaacctgacccggcaggcaaaccagcacgcgacccgcctgataaaacaggcggaagatactgctgaacaacatcgaaaaaccggatttgatgccggtttccggcaggggctggcacaggcaatgccggaactgatgcgcgtggtgaatgagtataaatctgtcattcaccaaaacctcgccgttgcagtttccggtctggaaaaagagctgactgcattttttgatgatacaaaaatacgttttcagctgatgcatcagttgcttgaacagtttgccgcggagagtgaatgtgaattaatcctgccggctgagcttaaaaaagaaatgactgaatatccggatttcactgtaccggtttcttttcatttcagtcgtaacatcatattacgtaccggaaaaaaattactttatctgacaccggaaacgtttgcccgtgaaaaaataacacaaataaatgcccgtgttgttccggatagcccggcggatatctccggtgaatatttataa

SEQ ID NO: 274988 - DNA, 414 bp, Morganella morganii
atgagaacagaaatgacaaccggaaaggcggatattaactctgacgaaaataatgaaaaagctaaacgattgcatgactggcttatgactaattataataaaaaggaagatatttatcggggaatggggttagtaggtattgatggctacaataccggaaataatatacaagaaaaaataaagttattaattgctgttgaaaataagttaattaaaaatccggaatattctgatacggaaatgtgcaaatcagtaagccaggttggcgccgaagctgtgaactattatgccttttaccaacaataccttcttaagatggtgaatcaaaaacagctgggattagcaccggatgtactttccgctgattttgaccagaataataacaaagatgactggcttactgcgtttagctga

SEQ ID NO: 274989 - DNA, 315 bp, Morganella morganii
atggaaacttccgatttttatgcagtcttaggccacagaatccaatcaagacgtaaagaactcgggattgttacggttaaattagcgcaaaaactgaatatcagtcagcagcaatttaaccgttacgaacgcggtgtcagtaaaatcagtctgcatcatcttattgaattatctgaattattggatgcgccggtcgaatggttcctcagcggtaaagctgaagcatcagaacatccgcatgaaccgcatattcagatgcgttcaaatcagttcagagcagaaacagtattactgaacggcaaacaatttatttaa

SEQ ID NO: 274990 - DNA, 1044 bp, Morganella morganii
atgaaaaagtggtccttactgcttggtgccggcattctggcagcgggcttgagttcagcatcagcagatgacagtaaaacactctatttctataactggacggaatatgttccgccggggctattagagcagtttaccaaagagaccggaatcaaggtgatttactccacctatgaatccaacgaaagcatgtacaccaaactgaagacctataaagacggggcttatgacctggtggtgccttcaacctattttgtcgccaaaatgcgccacgaggggatgctgcagaagatcgataaatcaaagctgagtcactttgataatctggatccgaatctgctgcacaaaccgttcgatcctgaaaatgattattcgatcccgtatatctggggtgcaactgctatcggtattaacggtgacgagatagatccgtcatctgtgacctcctgggccgatctgtggaaaccagagtacaaaaacagcctgctgatgaccgatgatgcccgcgaagtattccagattgccctgagcaaactgggttattcagcaaataccaccgacccggctgaaattgagcaggcttataaagagctgcaaaaactgcgtccgaatattttagcgtttaactccgataacccggccaacccgtttatggaaggggaggtgaatgtcgggatgatctggaacggctctgcttatgtggcgcgtcagtccggcctgaatattgatgttgtctggcctgaggaaggcggtatcttctggatggacagcctggctatccctgctaatgcgaaaaacccggaaggcgcacataagctgattgatttcctgctgcgtccggaaattgcagcacaggttgcacagactatcgggtatccgaccccgaacctggcagcgaaaaaactgctcccggctgagattgtgaatgacaaatcactttatccggatgaggaaaccatccgcaaagggcagtggcaggatgatgtgggtgacgccagcgtgctctatgaaagctattatcagaagctgaaagccggtcgttag

SEQ ID NO: 274991 - DNA, 783 bp, Morganella morganii
atgataggacgcctgttacgcggtggttttatgaccatcatctatgcttatttatacatcccgattgtcattctgattgtgaactcctttaactcatcccgtttcgggatcaactggcaggggttcacgactgactggtacagcacactggtcaataatgacagcctgttgcaggcggcgggtcattcactgacgatggcgattctgtctgccacatttgccacggttatcggttcactaactgcggtggcactgtaccgctaccggttcaaaggaaagccctttgtcggcggtatgctgtttgtggtgatgatgtcaccggatatcgtgatggcaatctccctgctggtgctgtttatgatcctcggggtgtcgctcggtttctggtcactgctgttctcgcacattaccttctgcctgccgtttgtggtggtcactgtctattcgcggctgaaagattttgacgtgaaaatgctggaagcggcacgggatctgggggccggggaattcaccattctgcgcaagattattctcccgctggcgttaccggcggtgattgcgggctggctgctgagctttaccctgtcgatggatgacgtggtggtgtcctcatttgttaccgggccgagctatgaaattctgccgctgaaaatctactcgatggtaaaagtcggggtttcaccggaagtgaatgcgctggccacgattttaatggcactttcgctgtttatggtcatcatcagtcagcttgtgctgcgtgaccgctcacacaaacagcagtaa

SEQ ID NO: 274992 - DNA, 861 bp, Morganella morganii
atgaaaatgacgcgtaaaccattccagactatcgtgatcacggggattgtcgcctggttactgctgtttgttttcctgcccaatctgatgatcatcggtaccagtttcctgacacgcaatgacgcgaatctggtcgatatggtctttaccctcgacaattaccgccgcttatttgacccgatgtatgcacaggtgatgctgcactcgtttaatatggcggtgattgccacggtctgctgcctgctgatcggctatccttttgcggcgtttattgcaaggatgccgcagaagtaccggccgctgatgttattcctgctgatagttccgttctggacaaactcgcttatccgcatttacgggctgaaaatattcctcagcacgcgcggctatatgaatgagtttttattatggaccggacttatcgataaaccctttaagctgatgtatacctctgaagcggtggtgctcgggcttatctatattctgctgccatttatggtgatgccgctctattccagtattgaaaagctcgacaaatcttatctggaagcggcgcgggacctgggggcaaataaatgtcagaccttcttccgcattattctgccgctgaccatgccgggcattatcgccggttgtctgctggtactgttaccggcgatgggactgttctatgtggcggatctgatgggcggggcgaaaaacctgctgattgggaacgtgataaaaagccagttcctgaacatccgtgactggccgtttggcgcggcaaccagcattttcctgaccgcagcgatggggctgctgctgtatgtctattaccgtgcggcaaaaatgttaaataagaagggtgaactggaatga

SEQ ID NO: 274993 - DNA, 1116 bp, Morganella morganii
atgactgagacaacctctctgacaccacttgtcaccctgaaagggctgagcaaaagctttgatgacaagaacataattaagcatttcgacctcacaattaatcatggtgagttcgtcaccattctgggtccgtccgggtgcggtaaaaccacggttttacggttaatcgccgggcttgaggatgcggatgaaggcactattatgctcggcgaccaggatattacccatatccccgctgaacagcgccatatcaacactgttttccagagttatgccctgtttccgcacatgacggtctttgaaaacgtcgcgttcgggctgcgcatgcagaaaacccctgaaaatgaaatcacacagcgcgtggaagaagccctgaaaatggtgcagctggaagatttcgccgggcgcaaaccgggccacctttccggcggacaacagcagcgtgttgccattgcccgtgcggtggtgaataaaccggaagtgctgctgctggatgaatccctctccgcgctggattacaaactgcgcaaacagatgcagagtgaactgaaagcccttcagcgtcagctggggatcacgtttgtgtttgtcacccatgaccaggaagaggcgctgaccatgtctgaccgtatcattgtgatgcgtgacggcaggatcgagcaggacggcacaccgcgtgaaatctacgaagagccgaaaaacctgtttgtggcgcagtttatcggcgagataaatatctttgatgcggatgttctgcaccggatcgatgaacagcggatccgcgcaaatgtcgaggggcacgagtgtgatatttacaccatcctggatgtcacaccggggcagcgggttcatgtgctgctgcgtccggaggatctgcgcgttgaagagatccatgataatgagccgattgccgggcttatcggctatgtccgcgagcgcaactataaaggaatgacgctggactccgaagtggagatggaaaacggcaaacgggtgatggtcagtgagttctttaatgaggatgatccggatgtggatcactcgctgaatcagaaaatcgccgtgacatgggtcgaaagctgggaggtggtgctgggcgatgaaaatgacgcgtaa

SEQ ID NO: 274994 - DNA, 564 bp, Morganella morganii
atgtctttaattaataccccaatcaaacctttcaaaaacatggcattcaaaaacggtgaattcgttgaagtcaccgaaaaagacaccgaaggcaaatggagcattttcttcttttatcctgctgacttcacctttgtctgcccgactgagttaggcgacctggctgaccattacgacgaattccagaaaatgggcgtggacatctactctgtctccactgacacccatttcacccacaaagcatggcacagcagctcagaaactatcggcaaaatcaaatatgccatgatcggcgacccgaccggcgcactgacccgtaacttcgaaaacatgcgtgaactggaaggtctggctgaccgcggtacattcgttgttgacccgcagggtatcatccaggcgattgaaatcaccgctgaaggtatcggccgtgacgcatctgacctgctgcgtaaagtaaaagcggctcagtatgttgccagccatccgggtgaagtctgtcctgcaaaatggaaagaaggtgaagcgactctgtctccgtcactggacctggtcggtaaaatttaa

SEQ ID NO: 274995 - DNA, 1575 bp, Morganella morganii
atgctcgataacacaatgaaagcgcagcttaaagcgtatctcgaaaaattaacccgtccggttgagctggtatcaacccttgacgacagtgctaagtccggtgaaatcagaacattattacaggaaatcgctgagttatcgccgaagattactgttcgcgaagataacagcgcgtctgcacgcaagccgtcattcctgattgtaaatccgggacagactcagggtatccgttttgccggttccccgctgggtcatgaattcacctcactggtgttagcactgttacaagtcggcggtcatccgtcgaaagaagcacaggaattactggatcaggtgcgtaatctggaaggtgaattccattttgagacctattattcactttcatgccataactgcccggatgtggtgcaggcactgaacctgatggcggtgcttaatccggatatcacacacacggccattgacggcggtctgtttcagaatgagatcaccgaacgcaatatcatgggcgtgccggcggttttcctgaatggcaacgagttcggtcagggccgtatgacactggcggaaatcgtcaataaagtggacagcaacgccggtaaacgcgcagccgatgcgctgaatcagcaggcaccgtatgaagtgctgattgtcggcagcggccctgccggggcatccgctgccgtgtatgccgcccgtaaagggatccgtaccggacttatcggtgagcgtttcggcggccaggtgctggataccgtggatattgaaaactatatctccgtaccaaaaaccgaaggcgcgaaactggcggcggcactgaaagtgcatgtggaagattacactgcagatgtgattgataaccaaagcatcacagcgctgatcccggccacggaacaaggcggcctgcatcagttacagaccgcgtccggtgcaacgctgaaagcgcgcagtgtcattatcagtaccggtgcccgctggcgtaacatgggtgttccgggcgagcaggaataccgcaccaaaggggtgacttactgcccgcactgtgacggcccgctgttcaaaggaaaatctgtggcggtgatcggcggcggtaactccggcgcggaagcggctatcgacctggccggtgtggtggaacacgtcaccctgctggaatttgccccggaactgaaagccgatgcggtgttacagcagaaattacgcagcctggcaaacgtggatattattgtgaatgcccaaaccaccgaagtgctcggcgacggcagcaaagtaaccggcttacagtacaaagatcgcgtatccggtgaacttcacacactgacactggcggggattttcgttcagattggcctgctgccgaatacgcagtggctgaaaggaacactggatctgaacccgatgggtgagattgtggtcgatgcccgtaacgaaaccagcattaaaggggtgttcggtgccggtgactgtaccaccgttccgtacaaacaaattattatcgcggcaggcgaaggggccaaagcatcactcagtgcctttgattacctgatccgcaccagtaccagaaccgctgaatag

SEQ ID NO: 274996 - DNA, 402 bp, Morganella morganii
atgcgttttaaaacattaattctgatttcgggattactgaccacattgtccggctgtaccaccccatcacggcaaatgtcctctcagcccgcacaacctgaggtcgttccggtaaaactgctccctgctccggcacagaattccaccagcgacagctgtattgatgatatgtatctgctgcgtaaaacgaatgccaatgattaccgtgtattatccggaaaatacagtgaagtgatgaatgagtttaatttcctgcgggaaaatgaaagcatcatggacaatgatattaaagtttatatgaaaaacagcctgacgataaaactcggaaaggtatgcagtgatatcaaactgagcgcattccgctcaatcaagaaaaaatccagcctgaatgccggttcataa

SEQ ID NO: 274997 - DNA, 339 bp, Morganella morganii
atgaaaatatattcccggattttgatagtgctgctttttatcccgttactttgttctgcggggacgccgccgcaaaatgttgagctgctgagtatcaaagcaggacagggagagacaaatgctcagtttttattgggaacgttgtatctcaccgggcgttatggtgtgaacaaagatattgaaaagggaaagtattatttgcttattgcggccggaaaaggcgattcagatgcaaaacgttttttggcacttcagtattataatgaaaagaactattttgcatttcttaatctgctttccgggtattgcctggatattattgaacagaatcctgactga

SEQ ID NO: 274998 - DNA, 471 bp, Morganella morganii
atggcattattcagacaagacgataaaaaagataaagcagaaaccgtgaaagcggaaccggtaaaagcagagccggtaaaaaatgaacccgccggtaaaagtattactattgtgggaaccggctgtgaaataaccggcgatatgactcccggggggaatattgaaatatacggaaaagtaaaagggaatatcaatgccggtgcttttaaagtttccgttatggaaaaaggcgttattgaaggcgatgtgactgcggagcatgtttcaatcaatggtcttatgatgggcacctgctgtgctaaaaatacggaaattttacaaaagggcgaacttaatggcgtgtgccgcgctgaagcattttccattattaccggcgggcgttttaccggccagtccgaaccttataagagtaataaagtaaaccctgatatcgttgttgccggtaaagaaaagacaataaatcaaaaataa

SEQ ID NO: 274999 - DNA, 180 bp, Morganella morganii
atgatttttgatgatatgaaaactgatttggcaaatataatgaaaaaatttgttaaacaggattgtgatattaaatatcactatgacggtgataacgtcgtgttttatatcgatgaagagaatggtgtgcatatccagatcaatataaattgtatcagtgatgtgccggtataccagtaa

SEQ ID NO: 275000 - DNA, 525 bp, Morganella morganii
atgtttatgtcatataaaaaatttaatatgaaaaaaataagattatatctgctgttttccttaccatttatttttccggtttcagtcgcagtatcctctgcatcaaaaccggtggtcagacaatctgagccggtaatatcggaaacaatagagggtatcggggcagttgtcgccgtgtctccggatgatctcagaaaccgctttttatccggcagacggggcatgccgtttccgatggatctgaccacactgccggaaccagccggaaaactgccgcccggcagccggatcccgcacagtgatgtgttcagtacattaccggcggttccggtgcagcgcgatgaatccggtgatcagttttactcggatgagatcgccggtgcctggcaggcattcttcgataataacgggtacgatgtacaaaccggattcggcggtgacctggaaaaagatctgaaaaataatcaaaaaaataacttattaaataccagcagttatatggttatctatgatgaaaaaccatag

SEQ ID NO: 275001 - DNA, 309 bp, Morganella morganii
gtgattaaaaatattcatcctatttccagcgtaataggccaggctcttaaaaaaaaacgccgacagctcgggttatccggtattgaactttcaaaaatcttaagtatcagtcagcaacagatctcccgttatgaaagaggcgtgaattgttttaacctggatatgcttatgcgctattttgctgctcttcaaatgacaccaaacgatgttaataatttattttcggtattaggaagctattaccatcataaggtcggagagcatgaaggaagaatagaacaatcgtactataatgattacggaaaatga

SEQ ID NO: 275002 - DNA, 10032 bp, Morganella morganii
atgcctgttacttcgtattactcaaaaacaaaaagggtaacggcatatctgttgctctttttgcagttattttttccggtgtcgacggcaacattatctgttgcttacgcggcagaacaaaatgacgcattaattatgtcagagacatttgacggacttaatgcactgatggatacatccccggaaccgcctccgaatcctcagggcggaaaaaccatctccggcagttctttcagcggtgagggatttaccgttgaaatgccgtccggcagtgaatacggcgtgatgccggccggttcggacaacggttttatctccggtcagaacggcatgccgttcccgatgagtgtcagcacgctgccggatccggcgaaccctgcaccgcgcgataataccgtgcggacagatgatgttttcagtgccttgccgaccctcggtctgccggatacctctccggaagatgacgcggcaaagaatgaagcccgctgggcaggcaatgcttcacaggcggggcagatcctctccagtgaggatgccgttgacgcttctctcggctatgtgcgcggtatcggtgaaaatctgcttaatcagcaggtgaatgactggctgaaccaggtgggccatgcccgcattcagttcggcagcaataaaaccggcgacgccgatgtactggtaccgttaatcgataatccgaacagcctgttcttctcacagatcgggcttcgcgccaatgaagaacgtaccaccaccaacctcggtctgggctatcgtcagtatgaagacggctggatgtggggtgtgaacagcttttatgactacgatatcaccggcagtaactcgcgggtcggtgtcggcggcgagttatgggccaactacctgaagtttgcggccaacggctacttcagggtaacagactggcaccagtcaaaattgcatgaaatgcgcgattacgacgaacgcccggctaacgggtttgatatccgtgcggagggctatctgcctgattatccgcagttaggtgcatttgcaaaatatgaacagtacttcggcgacggcgtcagcctggccagtaccacctcttccggtgaactgaaaagtaacccgtcggtctccaccatcggcctcagttacaccccgttcccgctgatcacgtttaaaggtcagacatcccgtggtgattccaacgacagccagattggtatggagctttcctaccgtttcggcgtgccgctgtcacagcagctggataccgacaatgttgacctgatgcgcaacctggcgggtaaccgttacgacttcgtcgacagaaactacaacattgtgatgcagtaccgtaagcaggaactgctgcggattgccctgccgccgacactcaacggtgaagcggcacagacactgccggtaacggtcagtgtgctgaaagccaaatacggcctgaaatctctgcgctggtcagcgcctgaactgctggcaaacggcggtgaaatcaaacagaccgggctgaccacggcggatattactctgccggaatatatttttatggatcgtaacggcgggccgcagggctaccgtgtgacagctgtcggtgaagataacgagggtaacccgtccaacaccgcagaaatgtgggtgaatgttattccgtcagtggaaaccatcaccaaattgatcgtcacgccgaaccaatccttaatcgccaacaacagcgaccagtttaccgctgtggcgctgttacagaatgacaagggcgaagtactgccgaataaagcagtgaccttcagtgtttccggcctgaaaaatccggaaggtgtcaccatttatgatgcggacggcaacagcggccagacactgaccgtgatctccgggccggacggcacggcgaccgtgaaaatcatcagtaaatccgccggtaaaggattgctgaaagccaaaatgcgtaacggtaacagccgtaccgaagcgatcacctatattgcggatctcagtaccgcaaaaatcaaaacgcttgaattaaccaataacaaagcagtggctgacggccaggcgaaaaacatcgccgtggcaacagtgactgaccagttcgataacctggtggaaaacttcccgttaacagccagagcagataacggcgcaacagttattgatccgaaccagcagactgacagcaacggcctggtcactatccgcttcagcagtgaaacggccggggattccaaactggtggttgaaggaacaggcacctcgaagagtgtgactgcacagtttatcgcggatatcagtaccgcgaagatccagagtgcggtcgtgactcaggatggggcgaaagcagacggtaaagcgaaaaatgaggttctggtgactgtcacggacagccgcaataacccgttagccggtgcaccggtcaccatcaaagtgccgggaaccgcccgttatcagacccagccggtcagtggtctgacagacagccgcggtcagttgcgtgtcagtatcagcaataccaaagccggttctgataactataccttcagcattaacggcgatgatgcggtacgtgcactgaaatttgtggcggatgaaaccacggcaaccattacggacgccagcctggttatcgtcaccaataatcagaaagcagatggtgcggcagcaaacagtgtaagagcgactattgttgatgcttacaataacccggttccggggatcgcggtgcagtttgtcaccgatcacggcgcacttccgtctcagatgcagatcaatacggatgctgacggtaatgcactgtttgaactgacaaatacccgtgccggtaataccaaagtcaccgcacaggttaataccaaatccgcatcaaaaactgtgatgtttacagcggacagctcgacagcggaaattctggcatcgaacctgacgataaccgcagataacagcgcggcggatggctcatccgttaacagtgtgaaagcgattgtcaccgatgcacagggtaacgttgtgccgtatgtggccgttcttttcactgcggataatggtgcgtctccggcttcacaatcactgctgactaatgagcagggtgaggtaaccttcagcctgaccagtacccgtgcggtacaggttgcggttaaagcgaagattaacaccagtgaaccttctgtcactgtcacctttaaggcagacagtgcgaaccctgatgctcagaaatcctcgctgacagctgatccgatgacgatcgtggcagacgggcagacaacatcaacgctgcatttcatcttaaaagatcgtcaggggaacctgatcccgggccagactgtggtcttcggaactgcgctggcgggaacaacggtgagcggtactaccgaaaatccggatggtacttacaccgcgacactgaaaggtgttaaagccggggatgcgaaggtcagcatcacgctgaacggaaaagcgtttgcggttacaccggtcaccgtaaaactgacggcggataacggtaacctgagcggcgataaatcaaaactgactgctgttcctgacaccattgtggctgatggcaagacgtcttcaacgctgactctgagcctgaaagacgtgaacgataatgccgtgagcggacaggaggtcgtattcagcaccacgctggcagataccgtattcggtacggtaagagataatgcagacggtacttatactgccacgctgaaaggcactaaagccgggactgcaaaaatcaaagtcaccgtgaataatgctgtgctggccgtcactgaggtgagtgtaaaactgaccgcagacagcagcaaactggataaagataaatcgtccctgaccgctgtaccggacaccatcgtggcggacggtaacacgacatccgcaatcaccctgacgctgcgggatgtgaataacaacccggttgcggggcagactgcattgttcagtacaacgctgaaagacaccaccttcagtggcgtaacggataatcaggacggtacctatactgcgactctgaaaggaaccaaatccggtaatgcacaaatcagcgttacgctgaacggtaaggcttttgccgtcgcaccggtgacagtcagactgacagcggacagcagcaatctggataaggacaaatcttcactgaccgcagcgccgctgagtattgtggcaaacgacactgcgacctcatcactgacgctgaccctgaaagacgggaacgataacccggttccggggcagacggtgctgttcagtaccacactgggcggtactactttcagtggcgtgacggataaccgggatggtacttatactgcaaccctgaaagggaaaaccgccggtgatgcggcactgaaagtgaccgtgaacggcgctgtgctggcggttgcaccggtaacagtgaaactgacagcggacagcggcaacctggataaggataaatctgtcctggaagcatctccgctgaccatcgtggcaaacaacaccacgacttcagcgctgaaactgacactgaaagatgccaacggcaacctggtgtccggacagacagtattgttcagcaccacgcttggcggcactaccttcagtggcgtaacggataatcaggatggtacctatactgcgaccctgaaagggaaaacggccggggctgcggagatcaaagtgaccgttggcggtaatgcgctgaatgtggcaccggtcaccgtcaccctgacaccggacagcaccaatctggataaagataaatcctcgctgactgcagcaccgctgagtattgtggcggatgatgcctcagtatcggatctgaaactgatcctgaaagatgccaacggtaacctggttccgggacagaccgtgctgttcagcaccacgctcggcggcaccaccttcagcggcgtgacggataatcaggacggtacttataccgcaacgctgaaaggcagaactgccggtgatgcattactgaaagtcaccgtgaacggcacggagctggcggttgcaccggtaacagtgaaactgacagcggacagcggtaacctggataaggataaatctgtcctggaagcatctccgctgaccatcgtggcaaacaacaccacgacttcagcgctgaaactgacgctgaaagatgtcaacggtaacctggtgtccggacagacagtactgttcagtaccacgcttggcggtaccaccttcagtggcgtaacggacaatcaggacggtacctataccgcgaccctgaaagggaaaactgccggtgatgcagagattaaagtcactgtcggcggtaatccgctggatgtggcaccggtaacggttactctgacaccggacagcaccaatctggataaagacaaatcctcgctgacggcagtaccgctgagtattgtggcggataatgcctccgcatcggatctgaaactgatcctgaaagatgccaacggtaacctggttccgggacagaccgtgctgttcagcaccacgctcggcggcaccaccttcagtggcgtgacggataatcatgacggtacctataccgcgaccctgaaagggaaaacggccggtgatgcattactgaaagtcaccgtcaatggtgcggtgctggaagtggcaccggtgactgtcaccctgacagcggataacggcaacctggataaagataaatctgtcctggaagcggcgccgctgagtattgtggcgaatggtacggcggaatccactctgaagctgacgctgaaagacgtcaacggtaacctcgtttccggacagactgtgcagttcaccaccacactggcagataccaccttcagtggcgtgacggataatcaggacggcacctatagcgcgaccctgaaaggcactaaatccggtgctgcaccgctgacggttattgttaacggtaccggactggcagtggcaccggtaacggttactctgacaccggacagcgctaatccggataaagataagtcagtactgactgcgtctccgctgaccatcgtggcggacaatgccacaacgtcttcactgaaactgaccctgaaagatacttacggtaacctgattccgggacagactgtgctgttcagcactgatctggaaaatacgaccttcagtggcgtgacggataatcatgacggtacctataccgcaacactgaaagggaccaaatccggtacagcggcactgaaagtgactgtaaacggtacggaactggcagtggcaccggtgagcgtgaaactgatcggggataaggatcatcttgatgaggataaatcttcactgacagcggcaccgctgagcatcgtggcaaacaacaccgcgacctcgtcactgacgctgacactgaaagatgtgaataacaacccggtgatcggtcagactgtgctgttcagcactgacctggcagacaccaccttcactacggtgaaagataatcaggacggcacttataccgcaacactgaaagggaccaaagccggtgacgcattactgaaagtcactgtcaatggtgtagtactggaagtggcgccggtcactgtcaccctgacggcggacagcagtaatctggacaaggacaaatcctcactgacagcggcaccgctgactatcgtggcaaacaataccacgacctctgaggtgaaactgaccctgaaggatgccaacggtaacctggtttccggtcagaccgtgctgttcagtaccacactggctaacaccacattcggtacagtgaacgacaatcaggacggcacctataccgcaaccctgaaaggcaaaactgccggtgatgcagtgattaaagtcactgtgggcggtaatgcactggaagttgcgccggttacggtgaaactgacagcggacagctcaaacctggataaagataaatctgtcctggaagcagcgccgctgagtattgtggcggataacgcaacggaatccacggtgaaactgacactgaaagatgtcaacggtaacctggtctccggtcagaccgtgctgttcagtaccacactggccaacacgactttcggtacagtgaaagataatcaggacggcacctataccgcgaccctgaaaggtaaaactgccggggctgcggagattaaagtgacagtgggcggtaatgcgctggaagtgacaccagtcactgtcaccctgacaccggacagcagcaaactggataaggataaatcctcgctgaccgcagtaccgctgactatcgtggcggatggtgcaacagagtccgcgctgacactgacactgaaagacgtcaacggtaacctggttccgggacagaccgtgctgttcagtaccggcctggctgatactaccttcagtggcgtgacggataatcaggacggtacttataccgcgaccctgaaaggaaccaaatccgggaatgcgttactgaaagtgacggtgaacagtgctgaactggctgttgcaccagtgacagtgaaactgatcggcgaccaggataacctggacaaagataaatcagcactgacggctgatccgctgactatcgtggcaaacaataccacgacgtctctggtgaaactgaccctgaaggatatcaacgataaccctgtgaccgggcagacggtgctgttcagtaccacactggccaacaccacgttcggtacggtaaccgataatcaggacggcacctatacggcaaccctgcagggtaaaacagccggggccgctgttatcaaagtgactgtcggtggtaatgcgctggaggtggcaccggtaacggttaccctgacagcggacagcagcaaactggataaggataaatcctcgctgaccgcagtaccgctgactatcgtggcggatggtgctacagagtccgtgctgacactgacactgaaagatgtcaatgacaacccggttacaggacagaccgtgctgttcagtaccggtctggctgatacaactttcagtacggtgacggataacctggacggtacctatacagggactctgaaaggcactaaatccggtgatgcgttactgaaagtgactgtcaacgggactgtgctggaagtggcaccggtaacggtgaaactgactgcagacagcagtaatctggacaaggataaatcggcactgacagcagatccgctgactattgtggcaaacaacaccgcaacgtccgcgctgaaactgaccctgaaagatgccaacggtaacctggtttccggacagaccgtgctgttcagtactgagctggccaacaccacgtttggtacggtgacggataatcatgacggtacttatacggcaaccctgaaaggaaccaaagccggcgatgcgttactgaaagtgaccgtcaacgggactgtgctggaggtggctccggtcacggtgaaactgacagcggacagcagtaatctggacaaggataaatcctcactgacagcaacaccgctgactatcgtggcaaacaataccacgacctctgaggtgaagctgaccctgaaggatgcctatgacaacccggtttccggacagaccgtgctgttcagcaccacgctggccaacaccacgttcggtacggtgacggataatcatgacggtacctataccgcaaccctgaaaggtaaaactgccggtgatgcagagattaaagtcactgtgggcggtaatgcactggaagtggcaccggttacggtgaaactgacggcagacagcagtaatctggataaggataaatccgtgctgacagcaacaccgctgactatcgtggcaaataacacggcgacttcagcactgaagctgaccctgaaagatgccaacgataacccggttgccggacagaccgtgctgttcagtaccacgctcggtggtaccaccttcagtggcgtgacggataaccaggacggtacttataccgcgaccctgaaagggaaaaccgccggtgatgctccgctgacagtaaccgttaacggaactgaactgccggttgcgggtgtgaccgtcacgctgacaggtgatgccgcaacagcgactatcacgaatgtgaagctcaacggtgcgctggcacggaagattgccaacggtacggattcttttgaatttattgccgaagtccgtgacgcgaacggtaacccggtcagtggtgtgacgactaactggaccagtactgccggtagtgcagctgtattatctgcgacttcaaagcagacagatgcagcgggtaacgcgactgtcaaactgaccagtaccaaaacaccggtctatgacattgtggtcagtgccgcacagggaagtcaggctgcggttaatgctgataagaaagtctcctttgaagagctgttctcaacgtcagtgctggttattgacgcgattgcagccggagataagccggttaacggcgcacacgttaagatcttctcggaagacggatcagaactgctgtatgagacaacaacggatgcaaccggtaagtttaaggttgatctggttggcgggaagtacgcagttaagatcacggcgaataattacgacgactacgatgactttatggacgtgaagagcggcgcggataccaactttaagtttgcgttatctccggcgctgggcacagagttcggtcgtattattctgcagtggagtgaaaacccgagagatctggactcttacctgcttgttccgccagcatcaggcagcggcagcagaattaaggttaactatcagaacaaaacaccgtcaggtgcagatgcctcccttgataaggatcagacaacagctccgggtattgaaacgatcacgatgacgaagtcacataagggaacttatacctattatgtacagaacttcgccggtccgaatgctaaattgtcaactgcgaaggtgcaaatcttcctgaataaggatttgacactgaaaccgggaacatccagaacaatgagtttcagtgcaccggacttagtcgtcgatgccaaagcgcaatggattgtgtttgatatcattgttgacagtaataatgaggtgcaggtggttaccagaggaacagtagatgcaaatcaacctaattaa

SEQ ID NO: 275003 - DNA, 474 bp, Morganella morganii
atgatgattaacaaaaaagcactcgttgtagccgggctttcactggttatttctgcctgctcaacatcaccggcaaagaaaaacacggcagcagttaaaaacccgccggtaaaacagcaaacccgttctgcgacacctaatgtgaccggtaataacgcggcacaggcgtatgtgggaagtaaacaaatggcatctcaggggattgttattgcatctaccaataacgcctgtgtggacggatttaatttccttaaaggtgtaaaccaggctgaatttaatgatttctcatcaagctacggacgtattaatcagaactataccttcttaaacgtcaataaagagattatggataaagactcccgtgaagtgttatccatgacgctgaataaaaaactggacactttatgtaccaaagttcagtacgcaggtttcattggtgtgaaggataaaataaaagcactttctgacatttaa

SEQ ID NO: 275004 - DNA, 294 bp, Morganella morganii
atgtgtgataataatatatctctattgaaagaagttggttttttcttaaaaagaaggcgaaaaagtcagggattaacaggttcggaagtggctgagaaactgaatatcagtcagcagcagatatcccgctatgaacgcgggctgtcggtgctcagtccggatgtcatgctcaggtattgtgcggcgctgggaatgacggagcgtgagatcagcgaacttttctccattatcagcacccattatcagtctgttatttccggaccggaagatacagatgacactgataacccgtaa

SEQ ID NO: 275005 - DNA, 738 bp, Morganella morganii
atgattattgcagcacaccgcggttttgccgcccgtgcaccggaaaataccatggcggcattccggcaggcggcggagttcggctgtctgtggattgaaaccgatgttcagctcagcgctgacggcgtgccggtgctgatccacgatgaaacggtgaaccgcaccactaacggcagcgggaaagtgacggatctgaccttacgcgaactgcgggcactggatgccgggttatgggcgggggaggtgtaccggggcgaaaaaattccgctgctgaccgacctgctggtgctggcggaagaatccggactgcatctgaacctggaactgaaaaccgagctgacagacagcgaccacgcaattgcccagttgtgtgaagccaccgcagcggtacttgaaatgcagaatttcccggcagagcggattctgttttccggctttgatacccgcacactgcgccatatgcacaaacggatgccgcacatccggcgcggacagctctgggaaaaaattccgccgcagcctctgacactgcttcaggagattgacgcgttcagtgtgcattgtgactggctgtttctgcgggaagaaacggcgaaatcgctgagaaaggccggttatcaggtcttttgctatacaccgaattatccggagctggtcgcgcattatgcggactggggagtgggaatgctgataacggataaccctgcaatatacagggacgaaaatcgtttttcttaa

SEQ ID NO: 275006 - DNA, 702 bp, Morganella morganii
atgacgaacagaatactttcggccggagagattatactcagtgatccggatgaagccgctgacccggcctctcccgccacgatcctgctgatagacgatcacccgatgctgcgtaacggcgtcaggcagttaatcagtatggagccgtcactgaccgtggccggtgaagccgggaatggccgcgatggcattgcgctggcggaatcactcgatccggatctgattctgctggatctgaatatgccggaaatgaacggctttgaaaccctggatattctgcggcgcaaaccgctctccggccgggtggtggtgttcagtgtgtccaactaccgggaagacctgattacggcactgcgccgcggggcggacggctatctgctcaaagatatggaaccggaagaattgctggtggcactgcgtcaggcggccgccggtaaaatggtggtctccccggcactgaccgaagtgctggcaggcgcgctgcgtgaagtgcgcagtgatgatgagccggatatcaacagccttaccccgcgtgaacgcgatatactgaaactgattgctcaggggcagccgaataaaatgatcgcccgtaaactggatatcacggaaagtacggtaaaagtgcatgtgaaaaacctgatgaaaaagatgaaggtaaaatcacgggtggaagcagcggtatgggtgttgcagaacaaatag

SEQ ID NO: 275007 - DNA, 1743 bp, Morganella morganii
atgctgaaacacacatccattcttacccaaatcaccggttttatggtgctgcttaccgtgtttgcggtgatcggcatggggctgaccaatcagatcacggaaagtgtgcagggcaatgcgcacgcgattaataaatccggcacattgcggatgcagagttaccgtttcctgtctgagatccccctgaccgcgcattcacagcagtatcttgatgatttcgaatccgatttaaccctgcttgccgggatgaaagcagtgagtccggccaaaatacagcagcagtttctctctgtggaacagacctggcggcaaaagctgcgtccggcactggaagcggcaaaacagccggaagaggcccgtgcgctggtggctgcgtttgtcagtcagattgacagcctggtgtctgccattgaccaccagactgaatccaccatccggctggtggcggccattcagctggtctttatcgcgctgatgattttactgttgctgttgtcggcgcggcatttccgccgccggatcctccatccgtggcagcggctgctggcgcaggcggatgcgatggggcaggggaattttcagccgcgctttgcggattatgaccaccgcgacgaaatcaccatgatcggcaatactctcaaccgcacagcagaggagttgtccgcactctacggggagctggaatcgcgggtggcggtcaaaacacaggatttgcaggaaaaaaaccagatgctggccttcttatataagagcgggcagcggctgaataacaccaacgacctgaccacacaactgacagatattctgcgtgacctgcatcagatcataccggaaggtgcgctgtgcctgcggatttttgaggataataacgccacccgttttactgaaatcggtgactgcggctgcctgccgtcacagacacaggaacagctgacctggaatctgagcggaccgattaaccgttacggggtattaacgctcctgttaccggccggacagcagctgaacagcgagcagcagaatatgatgcagatgctgagcaaacaaattatttcggcctttgcgctggcttatcagcatgagcagcagcagcagctgattctgatggatgaacgctcagtgattgcccgcgaacttcacgattctatcgcgcagtcgttatcctgtctgaaaattcagataagctatctacagatgcattccgcgcagatcccggaaaattgtcagacactgctgaccgaaatgcgccaggaagtgaacggcgcttatcatcagctgcgtgagcttctgaccactttccgcctgaaactgactgagcccgggctgcttgcagcgttacagagcacgctggaggagtttgagcagcggatgggttaccgcatcggttttgattttcagctctccgggcgccaggtctccgcgcaccagaccattcatgtggtgcagattgtccgtgaggcgctgagcaacattctccagcatgccaatgcgtcgagggcgcaggtggtgtgccggtcagaagaccagatgatttatatcagcgtggaagataacggggaaggtatcccggaacatccggaaaaaaataaccattacgggttatccatcatgcgggaacgggcagccacactgcacggaacctgccggataaccacacgggaacagggcggcactcaggtgctgataagctttcccgcgaatacaactataagaataaatgaagacgattcaggagcaaggtaa

SEQ ID NO: 275008 - DNA, 1383 bp, Morganella morganii
atggctcagatctccgaaggcaaggcatcagcgggcgtcattaccgactggcgcccggaagatgaaaaattctgggcagagagcgggcaccgggttgcatcacgcaacctgtggatctccgttccctgcctgttactggcattctgtgtatggatgctgttcagcgccgctgccgtcaatctcccgaaagtcggctttaactttaccaccgatcagctgtttatgctgaccgcgctgccgtctgtttccggggcactcctgcgggttccttactcctttgtgattccgattttcggcggccgccgctggactgcgttcagtaccctgatcctgattgtgccgtgtgtgtggctcggattcgcggtgcagaacccgtcaacgccgtatgcggtgtttgtgattatcgccctgctgtgcggttttgccggggcaaactttgcctccagtatggggaatatcagtttcttcttcccgaaagcaaaacagggcggagcactgggtatcaacggcgggctgggtaacctcggcgtgagtgtgatgcagctggtcgcaccgtttattgtgacattcggtgtgttcagctttatgggcggcaccggcgtgacccagccggacggttctgagctgtggttacagaatgctgcgtggatctgggtgccgttcctgctgctgtttaccgctgcggcctggctggggatgaacgacctttctgccaacaaagcctcgttaaaagagcagttaccggttctgaaacgcaaacatctgtggatcctgagcttcctctatctctccacgttcggttcatttatcggattttccgccgggtttgccatgctgtcgaaaacccagttcccggatatcgttatcctgaaatttgccttcttcggcccgttactgggtgcgctggcccgtccgctgggcggcttcctttccgataaattcggcggtatccgcgtaacctttattaacttcgtggtgatggcggtatttgcattcctgctgttcttcacactgccgggcaaaaatgatgccggttcatttgccgccttcttcggcgtctttatggtgctgtttttcactgccggtctcggcagcggctctactttccagatgattgcggtagtgttccgcaaaatcaccactgagcgcgtgctggcacagggcggtaccgaaaaagaagctcagcatgaagctatcaccgaaagtgctgccgcactcggttttatctctgccatcggcgctatcggcgggttctttatcccgaatgcctttggtatttcactgacactgaccggctcgcctgccggtgcaatgaaagtgttcgttgtcttttatgtggtctgcattctgaccacatggctggtatacggccgtaaaaaataa

SEQ ID NO: 275009 - DNA, 3762 bp, Morganella morganii
atgagcaagtttttagacagattccgttattttaagcagcgcggggaaaccttctccggcaaccacggacaagagctgaacgtcaaccgcgactgggaagatggttaccgcagccgctggcagcatgacaaaattgtccgttccacccacggcgtgaactgtaccggttcatgcagctggaaaatttacgtgaaaaacgggctggtaacctgggagacgcagcagacggactacccgcgtacccgtcctgatctgcctgaccacgagccgcgcggctgtccgcgtggtgccagctattcctggtatctgtacagcgcaaaccgcgtgaagtatccgatggtgcgcaagcgcctgatcagactgtggcgtgaagccaaagctcagcacgcggacccggtcgatgcgtgggcatccattattaatgatgaggcaaaagccaaaagctacaaacaggcacgcggccgcggcgggtttgtccgctccgactggcaggaagtgaatgaaatgattgcggcagccaatattgtgactgccaaacagttcggccctgaccgtattatcggcttctcgccgatcccggcgatgtcgatggtctcctatgcttccggtgcccgttatctatccctgatcggcggtgcctgcctgagtttctatgactggtactgcgacttaccgccggcctccccgcaaacctggggtgagcagactgacgtgccggaatcagcagactggtataactcctcttatctgattgcctggggttccaacgtcccgcagacccgtaccccggatgcgcacttctttactgaagtccgctataaaggcaccaaaactgtcgcgatcacgcccgattatgctgaaatcgccaaactgtgtgaccagtggctgaacccgaaacagggcacagacagcgccgttgcactggcgatggggcatgtgatcctcaatgagttccacgcgaagcgtcaggcggaatacttcaccaattatgtccgcacttacagcgacatgccgatgctggtaatgctggatccgcgtgcggaaggcggctatgtgccgggccgtatgctgcgggcatctgatctggtggattctctcggcgagaaagaaaatgctgagtggaaaaccatcgctattgatgaaaacagtcagcaactggtggcaccacagggctctatcgggttccgctgggataaatcccgcaaatggaacctggagccgcgtgacggcaagagcggtgatgagatcactatgcagctgagcctgctggataagcacgatgaagttgctgatgtcgctttcccgtatttcggcggcattgaaaatgaattctttgaaggtgtggcactggatgaagtgctgatgcacaaactgccggtgaaagtggtacgtctggcagacggcagtgaagtccgtgtggcaagtgtcttcgatttgaccctcgccaactacggtatcgaccgcggtctgaacgatgtgaactgcgcggcggattacagcgaaatcaaggcctataccccggcctgggcagagaaagtgaccggcgtcagccagcatcatatctcccgcattgcccgtgagtttgccgataacgccgagaaaactcacggccgttcaatggtgattgtcggtgccggtatcaaccactggtatcacatggacatgacctaccgcggtatcatcaatatgctggtgttctgcggctgcgtcggccagagcggcggcggctggtcccactatgtaggccaggaaaaactgcgtccgcagaccggctggttaccgctggcgttcgggcttgactggtcacgtccgccgcgtcatatgaacagcacctcgttcttctataaccactcaagccaatggcgttatgaaactgttcagccgcaggagcttctctccccgctggcggataaatcccgcttcagcggcagcctgctggacttcaacatccgtgccgagcgcatgggctggctgccgtccgcaccgcagctgaacgtgaacccgctgactatcgcggcgagagcaaaagaagccggtcaggatccgcaggcttacaccgcagaagccctgaagaacggtgcaatccgctttgcggcggaacaaccggataatccgcagaacttcccgcgtaacctgtttatctggcgctccaacctgctcggctccgccggtaaaggtcatgagtatctgctgaaatacctgctcggtaccgaaaacggtctgctgggtaaagatctcggcgaacagggcagcgtgaaaccggaagaagcggaatgggtggataatgccccggaagggaaagttgatctggtggtgacactcgatttccgtatgtccagcacctgtctgttctcggatatcgtgctgccgaccgctacctggtatgaaaaagatgatatgaacacttcggatatgcatccgttcattcatccgctgactgccgctgttgacccggcctgggaatccaaaaccgactgggaaatctacaaagggatcgccaaatccttctctgaactctgcccgggccacctgggtaaagagacggatattgtcactctgccaatccagcatgactccgccgccgaaatggcgcagccgtttgatgtgaaggactggaaaaaaggcgaatgtgacctgatcccggggaaaaccgcaccgcacctgatggtggtggagcgcgattatccgaacacctatgcccgctttacctcgctgggaccgctgatggataaactcggtaacggcggcaaaggtatcagctggaatactcaggaagaagtcgatttcctgaaaaaacttaaccgcacccgcactgaaggcgcggcggaaggccgtccggcgattgaaaccgcgattgatgcggcagaagtcgtgctgtcactggcaccggaaaccaacggtcatgtggcggtgaaagcctgggatgcgctcggtaaagtgaccggccgcgaccatacgcatcttgccatccataaagaagatgaaaaaatccgcttccgcgacatcgtggcgcagccgcgcaaaatcatctccagcccgacctggtccggcctcgaagatgagcatgtctcttataacgcgggttacaccaacgttcacgagatgatcccgtggcgtaccctgagcggccgtcagcagttgtatcaggatcatgaatggatgcgtgcattcggtgaggcacttgtggtgtaccgtccaccggtggatacccgtgcggcacaaccgctgctgggcgcgaaaccaaacggctatccggagaaagccctgaacttcctgaccccgcaccagaaatggggtattcactccacctacagcgacaaccagctgatgctgaccctcggccgtggtggtccggtggtatggctgagtgaggacgatgcccgctcgctgggaattgaggataacgactggatcgaagccttcaacagcaacggcgcactgactgcccgtgcaattgtcagccagcgtatcccggacggcatgatctttatgtatcacgcccaggagcgtcagattaacctgccgggctcggaagtgaccggtatgcgaggcggtattcataactccgtcacccgtgtctgtccgaaaccgacccatatgatcggcggctacagccacctggcatacagctttaactattacggcactgtcggctccaaccgcgacgagtttgtggtggtccgcaaaatgaaaaatgtggactggctcgacggtgagcaggatggttatcaacagaccctgagcgggcaggagaaagcataa

SEQ ID NO: 275010 - DNA, 1557 bp, Morganella morganii
atgaagatacgttcccaagtcggcatggtattgaacctggataaatgtatcggttgccatacctgctctgtcacctgtaaaaacgtctggaccagccgcgaaggtgtggaatacgcgtggttcaacaacgtcgaaaccaaacccggtctgggctacccgcataactgggaagaccaggaaaaatggaaaggcggctggatcaaaaacatccgcggcaaactggtgccgcgtatgggtaacaaaatcagcctgctgtcaaaaatcttcgccaaccccgaccagccggagctggatgattattacgagccgttcacttacgactatgatcatctgaaaaatgccccggaaggcaatctgccgaccgcccgtccgcgctcactgatcaccggtcagcgcatgacaaaaatcgaaaacggcccgaactgggaagatgacctcggcggtgagttcagccgccgcagcgcagacaaaaacttcgccgacatgcagaaagagatgtacggccagtttgagcagacttttatgatgtatctgccgcgtctgtgtgaacactgtctgaacccggcctgtgtcgcgacctgtccgagcggcgctatctacaaacgtgcggaagacggcatcgtccttatcgatcaggacaaatgccgcggctggcgtatgtgcctgaccggttgtccgtacaaaaaaatctacttcaactggaagagcggcaaatccgagaaatgtattttctgctatccgcgtatcgaagccggtcagccgaccgtctgttcggaaacctgtgtgggccgtatccgttacctcggtgtactgctctatgatgcggatcgcattgaagaagcggccagcgcggataacgaaaaagatctgtatgagcgtcagctcgggatcttcctcgacccgaatgacccggaagtgatcagccaggcgcagaaagacggcattccgctgagtgtgattgacgcggcacagaaatcgccggtctacaaaatggcaatggagtggaaactcgcgctgccgctgcacccggaataccgcaccctgcctatggtctggtatgtgccgcctctgtcaccgattcagtctgtcagcgatgcgggtatgctgccgcacagcggcgtactgccggatgtggaaagtctgcgcatcccggttcagtatctcgccaacctgctgaccgccggggataccgcgccggtactgcgtgccctgaaacggatgctggccatgcgtcactacaaacgtgcggaaaccgtggataaaacccgcgatatcagtgcgttggaagaagtgggtctgacagaagcccaggcacaggaaatgtaccgctatctggctatcgcgaattatgaggatcgctttgtgatcccgtcctcacaccgcgaactggcccgtgaggcattccctgagcgtaacggctgcggattcagcttcggtgacggctgccacggcagcgataccaaatttaacctgtttaacagccgccgtatcgatgccattgatatcacgcagaaaacaccggcagatgcgccaatctcagagaggcattcatcatga

SEQ ID NO: 275011 - DNA, 735 bp, Morganella morganii
atgatcagcttaaaaattatcggctgcctgctggattacccgaatgaggagctctgggcacaccgcgacgaactgattgcagagattgaacaggcgcacgagctgcgcctgactcaggccgccgcactgatgtacttcgtcgctgaactgacctcagagccgctgctcgacagccaggctcgttacagtgaattgtttgatcgcggcagagccacctctctgctgctgtttgaacacgtttacggtgagtcacgcgatcgcggccaggcgatggtgtccctgctggagcagtatgagcaggccgggatcaccctcagcagccgcgaactgccggattacctgccggtttatctggaatatctctctgttatgccaccggaacaggcctgtcagggactgaaagacatcgcgccgatcctcgccctgctcggtgagcggctgcgtcagcgcgaaagtcattaccatgaactgttcagcctgctgctgaccatggcggacagcgacctgacactcagctcactgacccgtcaggtggacggtgaagcccgtgatgacaccccggctgcgctggatgcggtctgggaagaagaacaggtgacattcctggccgataaaggctgtgacaattctgttctgacacagcatgagcgtcgtttttcacagagtgtcgccccgaattacattcaggtgggtgacgcgccggttccccctgcggcgaaaggagtaactccatga

SEQ ID NO: 275012 - DNA, 678 bp, Morganella morganii
atgaatttcctgaatacgtttttctttgacatctatccgtatatcgcgggcgcggtgtttatcatcggcagctggctgcgttatgactacggacaatacacctggcgtgccggttccagtcagatgctggataaaaaagggatgcgtctggcttccaacctgttccacgtcgggatcctcggtatcttcttcgggcatttcgtcggcatgctgacgccgcactggatgtatgagccgtttatcactgtggcgcagaaacagatgctggcgatggtggcgggcggcacctgcggggtgatgacgctgatcggcggcggtctgctgctcaaacgccgtctgaccaacccgcgtgtccgtgcaacatcatctgcgggtgatatcctgattatcaccctgctggtgatccaggtaattctgggcctgggcaccattccgttctccgcgcagcacactgacggcagcgagatgatgaaactggtcggctgggcacagtctgtcgtgacatttcaggggggtgcatcagagcatctggaaggggttgcctttatcttccgcatgcacctggtgctgggtatgacactgttcctgatcttcccgttctgccgtctggtgcatatctggagtgcgccggttgaatacattacgcgccgctaccagttagtgcgcaaccgtcattaa

SEQ ID NO: 275013 - DNA, 2574 bp, Morganella morganii
atgcgtttggatcgtttcacgaataaattccagcaagcgctcgccgacgcccagtctcttgcagtcgggcacagcaatcagtttattgaacccgtgcatttactgtcagcatttctgcatcaggaaggcgggtcggtgcgtccgttactggcatctgccggggcggatattgcgcagcttaatcagaagattgatgacaccatcagtcgtttaccgcaggtggaaggttccgccggggatgtgcaaccctctcaggatttaatccgtcacctgaatatatgtgaccagattgcacaaaaacaaaatgatgcttatatcgcatccgaaatttttgttctggctgtattagagagcaacagctcattagcagatgtattaaaagcagccggaattaataaacaaacacttaagaaggctatagacactatgcgtggtggtgagaatgtgaatgaccagggcgcggaagatcaacgccaggccctgaagaaatatacgattgatttaactgagcgcgccgaatccggcaaactcgacccggttatcggccgtgatgaagaaatccgccggactatccaggtcttacagcgcagaaccaaaaacaacccggtactgatcggggaacccggggtgggtaaaaccgccatcgtggaaggactggcgcagcgtatcgtcaacggcgaagtgccggaaggactgaaaaataaacgcgtgctgtctctggatctcggtgcgctgctggccggtgccaaataccgcggtgatttcgaagagcgtctgaaagccgttctgaatgaattatccaaagaagaaggcagtgtcatcctctttattgatgagctgcataccatggtcggcgcaggtaaagcggatggcgcaatggacgccgggaatatgctgaaaccggcactggcccgtggtgaactgcactgtgtgggcgcaaccacactggatgagtaccgccagtatatagagaaagatgcggcattagagcgccgtttccagaaagtctatgtggcagagccgacagtggaagacaccattgcgatcctgcgtggtctgaaagagcgttatgagctgcatcaccatgtgcagataaccgatccggcgattgtcgcggcggcaacgttatcgcaccgctatatcacggatcgtatgttaccggataaagcgattgacctgattgatgaagcaggtgcaagtctgcgtatgcagatggattccaaaccggaatccctcgacagactggatcgccgtatcattcagttaaaactggaacagcaggcactgaaaaaagagtctgatgatgccagtaaaaaacggcttgatatgctggagcaggaattaaccgagaaagagcgcgagtatgcgtctctggaagaagagtggaaagcggagaaagcaacgctgtccggcacccagcacatcaaagcagaactggagcaggcaaaaacggcactggaacaggcacgccgtaccggtgatctgaccaaaatgtcagaattgcagtacggtaaaattccggagctggaaaaacagctggcagcagccaatgcggcagaagataaagagatgaaactgctgcgtaataaagtcactgatgtggaaatcgctgaaatcctggcgcgctggaccggtattccggtatcccgcatgctggaaggcgagcgcgaaaaactgctgcgtatggagcaggtgatgcacagccgtgtgatcggtcaggatgaagcggttgacgcggtagccaatgctatccgccgcagccgtgccgggttatcggatccgaaccgtccgattggttcgttcctgttcctcggaccgaccggggtgggtaaaaccgagctgtgtaaagcgctggctgatttcctgttcgacagcgatgacgcgatggtgcgtatcgatatgtccgagtttatggaaaaacactctgtggcacggcttatcggggcacctccgggatatgtcgggtatgaagagggcggttatctgaccgaagcggtccgccgtcgtccttattccgtcattctgctggatgaagtggaaaaagcgcatccggatgtcttcaacatcttattacaggtgctggatgacggacggctgactgacgggcaggggcgcactgtggacttccgtaacacggtcgtgattatgacctctaacctggggtctgaccggattcaggaacactttggtgaactgaattacgatgcaatgaaaggcgcggtcatggaagtggtttctcatcacttcagaccggaattcatcaaccgtattgatgaagtggtggtattccatccgctggcgaaagagcagatccacgcgattgcgaaaattcagctcaaacgtctgtacaaacgtctggaagagcacggctatcaggtcacgattactgacagtgcgctggataaactggcagaagccggattcgacccggtattcggggcgcgtccgctgaaacgggctattcagcaggagatcgaaaacccgatggcgcaggcgatgctgtccggcaaactgattccgggtaaaatgatcactctggatttaaccgatggtgtgatcaccgcgaaacagtaa

SEQ ID NO: 275014 - DNA, 747 bp, Morganella morganii
atgaccgcactgattaccccgcaatggccgctgcccgcaggcgtgaaagcctgcagttcattacgtacaggcggtgtcagtcagccgccgtttgacagcctcaatctggggctgcatacgggtgattccccggaggacgtcgcccgtaaccgggcgattctggctgaggcggccgggttcccggatacaccactgtggctgaatcaggtgcacggaacggatgttgccattctcggtgacaacacaccgcgcggcccgcaggccgatgcggtgtatacccgcaccccggggaaagtctgtgcgatcatgacggcggattgcctgccggtactgttctgttcccgtgacgggcgcgaagtggccggtgctcacgcaggctggcgcagtttatgcggcggcgtgctggaaaatacggtctcctgctttgcggccgcgccgtcagacattattgcctggctggggccggccatcggcccgcagaaatttgaggtcggcgcggaagtgcgggaggcgtttatggcgcacgccgcagaagcagccccggcatttattccgtatggtgataaatatctggcggatatttatcagctggcccgtcagcgtctggcagccgccggtgtgaatgctgtttccggcggcaccgaatgcaccgtgacagattctgcccgcttcttttcttaccgccgtgatgcccgtaccggacggatggcgtcatttatctggatcacccggccgcaaaagtcataa

SEQ ID NO: 275015 - DNA, 978 bp, Morganella morganii
atggctcaagaaatacaacttaccgcaactattaatgaatcacagctcggtcagcgtttagatcaggctttggcggaattgttccctgattattcacgatcacgtataaaagagtggatcttagatgacagggttcaggttaacggccgtcttgtcaacaaaccaaaagaaaaaatgctgggcggggaacagatcagtatcgatgcactgattgacgaggacatgcgttttgaaccgcaaaacctgccgctcaatatcgtttatgaagatgatgatatcctggtgattaataaaccgcgtgattttgtggtgcacccgggagcaggtaatccggacggtactgtcctgaacgcgctgctgtatcattatcctgatattgccgatgtgccgcgtgcgggtatcgttcaccgcctggataaagataccaccgggctgatggtggtggcgaaaactgtacctgcccagacccggctggtggaatcactgcaactgcgcgaaatcacccgtgaatatgaagcggtggctaatggtcgtatgacagcgggcggcaaagtggaagaacctatttcccgccatccgaccaaacgtactcatatggctgttaacccgatgggtaaaccggcggtgacacattaccgtgtgatggagcatttccgtgcccacacccgtctgcgtctgcgtctggaaaccggccgtactcaccagatccgtgtgcatatggcacatatcaatcatccgctggtgggggatcagctctacggcggtcgtccgcgcccgctgaaaggggcaagcgatgaattccgcgatgcactgcgtgaatttgaccgccaggctctgcatgccaccatgctgcgtctttatcatccgatcaccgggattcagatggagtggcacgcgccgattccggatgatatggtgaaactgattgaagttctcaaagctgatgcgcaagagcatcaggatgatatggactggtaa

SEQ ID NO: 275016 - DNA, 738 bp, Morganella morganii
gtgatgatacgtatgaaatatctcgtggccgccgccacgctaagcctcatgttgtccggctgttccggaaacaaggaaattctcccggatgcctcaccgtcagagctgtatactgtcggccaggaaaaattacaggacggtaactataaaggggccatcacgcagcttgagaccctcgataaccgttttcctttcggcccgtattcgcagcaggttcagctggatctgatttacgcctactataaagcaggtgatttacagatggcactggcctcaatcgaccgtttcatgcgtctgaacccgacacatccgaacatcgattacgtcctgtacatgcgcggtctgaccgctcaggcgctcgatgataacatgctgcagagtttctttggtatcgatcgtgcagaccgcgacccgcagaacgcgcgtgtggcattccaggatttcagccagttactgcgttattatccgaccagtatctatgcgacagactccgcaaaacgtctggtattcctcaaagatcgccttgcggcctttgaactggccgttgcgaaattctacacgaaacgcggggcatatgtcgcggtgattaatcgtgttgaattaatgctgcgtgattatccggacacactggcgacacgtcaggcgctgccgctgatggaaaatgcctataatgaactgggattaacggcggaagccggaaaagtggcacagctgattgccgccaacccgcgcgactga

SEQ ID NO: 275017 - DNA, 345 bp, Morganella morganii
atgaatgtgaatatcaccagtaagcaaatggagatcaccccggcaatccgggagcatgttgaaaaccgtctcgataagctgagtaagtggcaggttcctttaattaacccgcacattatcctcgcgaaagatccgcagggatttgtggttgatgccaccatcagcacaccgaatggaaatttagttgccagcgccaaacacgctgatatgtatgccgccatcaatgaattactggcgaaactggaacggcagctgaataaagcacagcacaaaggtgaagcgcgccgcgcagataacagtgttaaagaagccaaccttgtgtctgatgaagaatccgcagaataa

SEQ ID NO: 275018 - DNA, 1152 bp, Morganella morganii
atgaacgatcttttagctatacgggaacaaatcagccagctggatgcacaattgctggacctgctggcaaagcggcggcagctcgccgtggctgtcgcacagacaaaattacaggataaccgccccatccgcgataaaaaccgcgagcgtgagctgctggatgtactgataaacaaaggtaagccgcacggactggacggattttatatcacccgcctgttccagctgattattgaggattccgtcctgacccagcaggcgattctgcaaaaacacctgaatcagacaccggataacagcgcgcggatagccttcctgggcccgagaggatcttattcacatgtggccgcccgtcagtattccgcccgtcatttcgatcatatgaccgagttcagctgcagtaaattccgtgatatttttgagctggttgaaaacggtcaggccgattacgggatgctgccgctggaaaataccagttccggtgccatcaacgatgtctatgatttgctccagaccaccccgctttccattgtcggcgagttgcgcctgccggtgaatcactgcctgctgaccatcccgggcgcggatattgccgagatcaccaccctttacagccatccgcagccgtttgagcagtgcagccagtatctcagtcagttcccggatcgcaaaattgaatactgcgaaagtaccgcggcggcgatggaaaaagtcgcctccctcagccggacagatgttgcagctctcggcagcgaagccggcggcgcactgtacgggttacaggcgattgcacagaatcttgccaatcagcagaccaatatgacgcgctttattgtcattgcccgccagccgattgatgtgtcagagcaggtgccggcgaaaacgactctgctgatggcgaccgggcaacaggccggggcgctggtcgatgccctgattatcctgaaagagcatgacattgtgatgagcaaactggaatcccgccctattcacggtacaccatgggaagagatgttttatattgatgtgcatgctaatctgcgttcagtaccgatgcagcaggcgctcaaagcattacaggcaatcgcccgttcagtgaaggtgctcggcagttatccgggggaacatgtcccgcctgccttaatcggctga

SEQ ID NO: 275019 - DNA, 978 bp, Morganella morganii
atgagtgatattgcgggctggcagccgactgccccgatagccaatctattaaaacgcgcaaaaattgttaatgaaatcagacatttttttgcagacagaggtgtattagaagtcgaaacgccgaccatgagtcaggcgaccgtcaccgatgtccatctgcgcgcctttgaaactcagtttaccggccccggagccgcacagggaataacgctttatctgatgaccagcccggaataccacatgaaacggttactggcagctggcagcggccccatttatcagatgggccgcagttatcgtaacgaggaagccggacgctatcataatccggagttcaccatgctcgaatggtatcgtcctcattatgatatgtaccgtctgataaatgaggttgatgatttattacagcaaaccttagagtgtgaaagtgcagaatcgttatcctatcagcaggctttcctgcgctacctggatatcgatccgctgaccgccgagaaagacaaactgcgtgaagttgcggccaaactggatgtcagcaatattgccgatactgaggaagatcgcgataccattttgcagttgctgtttatggtgggtgtggagccgcatatcgggctggaaaaaccgacctttatttatcacttcccggcaagccaggcctcactggcggagatcagctctgaagatcaccgcgtggccgagcgctttgaggtgtattacaaaggggttgagctggcaaacggcttccgtgaactgactgatgccgcagagcagcgtcagcgctttgaacgggataaccgcaaacgggcaagtatgggcctgccggaacagccgattgatgaaaatctgctggcagcacttgagcacggtttcccggaatgtgccggtgtggcgctgggcattgaccgcctgattatgctcgctctgggtgcagagcggatcagtgatgtgatcgctttcccggtggatcgcgcataa

SEQ ID NO: 275020 - DNA, 735 bp, Morganella morganii
atgcatatatcatcagaaatcttatcagctaaatttcatgcgtttgaatcatctgtaaaatcagcagttaaaaacctgtttgcttcattacattctgtttctgatattaaaatgagcggtcataagccggcggcaggacacaaaaagctgcccggcagttttgtcgcgcgcaatttggcattagatgatgatctcaatccaagtaatcagactccccgctttcacggctatacgaataacttccgaaatacgggtgaggaagcacttcttcttcacggcagcaaaagcggaaagtttaccgttggcaatcttgcgcagccaataatagaaaatggcacatacacaaaggttggtaacagaccccgctgccggctggatgagtcacagtcacaaaatttaactgcgcgtgaatttgttgactatctgaaagaaaaatcaaaagaagacaataatattgaaattgacctgactaaaaattcaggaccaatacatttaatcagttgttacggaaaacaaaaagcagcgcaggatcttgccgatgtcacaggaagacctgttattgcctattcaaatcaggaagtggtttgcaaggatttaatgaccatccggcgcacagagtttaccgttgacagtaactttaaacataaatgggatccgcgaaaactcatcaccggcaatgagtaccataccgcaacaccgaaaacgttttacccgaaagaaaataccgtaaaataa

SEQ ID NO: 275021 - DNA, 1122 bp, Morganella morganii
atgtccggtgcattaacgcatttacgtgatcaaattgatgaagtggataaatcgctgctgtcactgctggcaaaacgccttcagttagtggcggaagtcggggaagtgaaaagtcagcacggcctgccggtctatgcgccggatcgcgaagccgcaatgctggcatcacggaggcaggaggcggaatcactcggggttccgccggatctgatagaggatgtgctgcgccgtatcatgcgggaatcctattcccgtgagaatgataaagggtttaaaaagctcaatgagcaggcccgcccgatagtgattgtcggcggtgacggcaaaatggggcagttattccggcggatgctgacactgtccggctacactgtgcgtattctcgacagcggcgactgggcggatgccccggaactgctggcagatgcgggcatggtgattgtcagtgtgcctatccacctgacagaacaggttattaaacaattaccgccgctgccggaagattgcatcctggcggatctcgcgtctgtcaaagcggggccgttacaggcaatgctggcagtacacaacggaccggtactcgggttgcacccgatgttcgggccggatgtcggcagttttgccaagcaggtggtggccttttgtgacgggcgtttccctgagcagtatcagtggttcctcgaacagattacggtctggggcgcgcatttacagggtattaaggcgcaggagcatgatcgcaatatgcgctacattcaggcgctgcgtcacttcactacctttgcttacgggcggtatctggcaaaagaaaatgtcgatctcgcgcagctgctgtcattgtcatcaccgatttaccggctggaactggtaatgattggtcgcctgtttgcccaggatccgcagctttatgcagatatcattatggcctcggaagataacctggatgtgatagaggattatcaccgtgagttcggtgaagccatgtcactgctggaaagccgggataaagcagagtttatttcgcagttctccgctgtcagtgactggttcggcgaacatgcgcagcgctttatgaaagagagccagggattactgcagcaggcgagcgacagccgccgctga

SEQ ID NO: 275022 - DNA, 1095 bp, Morganella morganii
atgatcatgcaaaaagacgcactcaataacgttcacatcagtgatgaaattgttttaatctcaccggaagaactgaaacaaaagtacccattgagtcgcaacgaccagcatgccatcgccggtgcacgtaagacgattgcggatattgttcatcaccgcgacccgcgtttactggttgtctgtggcccgtgttccgttcatgacacggatgcagcgctggaatatgcccgtcgtctgaaagaattatctgctgagttgagtgacagtctgtatatcgtgatgcgtgtctattttgaaaaaccgcggacaaccgtgggctggaaagggcttatcagtgatccgtttatggatggatctttcgagatggaaaaaggtctgcacattgcccgcaaactgatggtggatctggttcagctcggcctgccgctggcaggtgaagcgctggatccgaataacccgcagtacctcggggatctgttcagttggtctgccattggtgcgcgtaccaccgaatcacagacacaccgcgaaatggcgtccggtctgtccatgccggtcggttttaaaaacgggactgacggcagcctgagcactgccatcaacgccatgaaagctgcgtccatgccgcaccgttttatggggatcaaccagtccggtcaggtctgtctgttacagacacagggtaacccgaacggccatgtgatcctgcgcggcggaaaacgcccaaactacagtgcggaagatattacggaatgcgaggcacaaatgaagaaagccggtctcaccccctcactgatggtagactgcagtcacggcaactcggataaagatttccgtcgtcagccgctggtggtggatgccgtggcagaacaaatttgtgccggaaatacctcaattaccggtattatgctggaaagccatattaatgaaggcaatcagtcatcagaacaaccgcgcagtgccatgcagtacggcgtgtcagtgacagacgcctgcatcagttgggaaaccactgaagcagttctgcgtcagctgcatcagcagatctcaccggcgctggcagagcgtgtggttcagttacagcaggcaggataa

SEQ ID NO: 275023 - DNA, 354 bp, Morganella morganii
atgagcaacattattaaacaacttgaacaagagcagatgaaacaagacgtaccttcattccgtccgggtgacaccgtggaagttaaggtatgggtcgttgaaggttctaaaaaacgtctgcaggcattcgagggcgtggttatcgctatccgtaaccgcggtctgcactctgcattcactgttcgcaagatttctaacggcgaaggtgttgagcgtgtattccagactcactcacctgttgttgacagcatcagcgttaaacgccgtggtgccgttcgtcgtgctaaactgtactacctgcgtgagcgttcaggtaaggcagctcgtatcaaagagcgtttgaacgcaaaataa

SEQ ID NO: 275024 - DNA, 753 bp, Morganella morganii
atgtggattggggttatcagcctgtttcctgaaatgttcctctcaataaccgggcatggtgtaaccggacgggcagtaaaaaacggcctgatcagtgttgattgctggaacccgcgtgatttcacgtatgaccggcaccacactgtggacgatcggccctacgggggcggtcccggcatgctgatgatggtggagcctctgcgcaaagctatccatgcagcaaaagctgccgcaggtgacaatgcgaaagtgatttatctttcgccgcagggccgcaaactcgatcaacagggagtttgtgagctggccgccaacgagaagttaattctggtgtgcggccggtatgagggagtagatgaacgcgttatccagactgaaattgatgaagaatggtcagtcggggattacgtgctcagtggtggtgaattgccggcgatggtactgattgatgcggtatcgcgttttgtcccgggtgtcctcggacatcaggcatcagcaaaagaagattcctttgctgacggtttacttgatcacccgcactatacccgccctgaagtgttggatggcatgtgtgttccgccggttttactgtcgggcaaccatgcagaaattgatcgctggcgtatgaaacagtcactcggtcgcacctggctcagaagacctgaacttctggaaagcctagctctgactgacgagcaaaggatgttgctggctgaattccagcgggaatatcagtccggagcaacaagttaa

SEQ ID NO: 275025 - DNA, 549 bp, Morganella morganii
atgagcaagcacactaatccgcaagccccttctgatccgattgtactcggcaaactggggtcatcttacggtattaaagggtggctcagagtgttttcttccaccgaaaatactgaaagtatttttgattatcagccgtggtttatccagcgtaacggggtgtggcaacacatcgaaccggaagactggaaatctcacaatcaggatatgatcgtcaaactcaaaggggttgacgacagagatgcagcaaacgtactgactaacgcggaaatcgtggtggacagttcgcagttaccggaattagacggcgatgattactactggaaagacctgatgggctgccgtgtagtgaccaccggcggatatgatctcggcaccgtaaccgatttaatggaaaccgggtcgaatgatgttctggtgattaaagcaaatctgaaagatgccttcggcatgaaagagcggttagtgccgtttcttgacgggcaggttatcaggaaagttgatctcactgaaaaactgattgaagttgagtgggatcccggtttttaa

SEQ ID NO: 275026 - DNA, 249 bp, Morganella morganii
atggtaacaattcgtttagctcgtggcggcgcaaaaaagcgtccgttctaccaaatcgtcgtaaccgacagtcgtaatgcacgtgacggtcgtttcatcgaacgtattggtttcttcaaccctatcgctgccggtaaggctgaaactctgcgcttagatctggaccgtgttgaacactgggttggtctgggtgcaactgtctctgatcgtgttgctgtactgatcaaagacgcaaaaaaagcagcttaa

SEQ ID NO: 275027 - DNA, 1362 bp, Morganella morganii
atgtttgataatttaactgacagactttcgcgcaccttgcgcaatatcagtggtcgcggacgactgacggaagacaatattaaagaaacgctgcgcgaagtgcgcatggcgcttctggaagccgatgttgccctgccggtggtacgggatttcatcaaccgcgtcaaagagcgtgctgtcggccatgaggtgaataaaagcctgacgccggggcaggagttcgtcaaaatcgttcagggcgaactggttgcggcgatgggcgaggaaaataacgctctggatctctctgcccagccgccggctgtggtactgatggccggtctgcagggtgcgggtaaaaccaccagtgtggcgaaactcggtaaactgctgaaagaaaaacacaagaaaaaggtgctggtggtctctgcggacgtgtaccgtccggcggcgattaaacagttacagacactggcagagacagtgggaatcgaatttttcccgtctgatgtgtcagaaaaaccgattgatatcgctaaaaaagcgctgaaacatgcgcagctgcaattctttgatgtcctgctggtggataccgcgggccgtctgcatgtcgatgaaggcatgatgggcgaaatcaaagacctgcatgcggccattaacccggtggaaaccctgttcgtcgtggatgccatgaccggtcaggatgcggcaaacaccgccaaagcctttaacgaagccctgccgctgaccggtgtggtgctgactaaagtcgatggtgatgcgcgcggcggtgcggcgctttctatccgccatatcaccggtaaaccgattaagttcctgggtgtcggggaaaaaaccgatgcactggagccgttccatccggatcgcgttgcctcccgtattctgggcatgggcgatgtgctgtcactgattgaagagattgagagcaaagttgaccgcgatcaggcggaaaaactggcttccaagctgaaaaaaggtgacgggtttgacctcaacgacttcctggaacagcttaagcagatgcgcaatatgggcggtatggccgggatgctgaccaaactgccgggcatgtctcaggttccggacgcggtgaaatcgcagatggatgacagcgtgctgaccaaaatggaagcgatgatcaattccatgaccaaaaaagagcgcgtcaaaccggaaattatcaaaggttcccgcaaacgccgtatcgcggcgggttccgggactcaggtgcaggatgtcaaccggctgctcaagcagttcgatgacatgcagcgcatgatgaaaaagatgaagaaagggggcctcgcgaagatgatgcggggcatgaaaggtatgatgccgccgggtatgatggggcggtaa

SEQ ID NO: 275028 - DNA, 792 bp, Morganella morganii
atgcctgaaatctctgttgttgcaattagcgcatatctgttaagcctggtacttctgatgccgggcgtgctccgctatcagcgcggctaccggaaactggcgcttatcttcgccgttatcgccctggtgtgccacggcgtggcgattaaatcacagatttttcagggcgctggtcagaacctgacactgctgaacctcggctcggtggtgagcctgctggtctccgtcattatgacgattgtcgcatttcagggccgggcgtggttccttatcccgattgtttacagcttctcgatggtcaacctgattcttgccaccctgatgccgggcgagtttatcacccacttacaggccagtgtgccgctgtttgtgcatatcggactggcgctgctcagcttcgcgacactgattattgcggcgctgtatgccatgcagctcggctggatggatcatcagctgaaaaacaaacgtcttaagtttacgccggatatgccgccgttaatggttattgagcgtaaaatgtttcatatcacgcaggtcggcgtgattctgctgacactgactctcgccaccggcattgtgttcatggataacatttttgataaagataatattcataaatcattgctgtcgatggtcgcctggtgtgtctatatcgtgctgctgtgggggcactatcatgaaggctggcgcggcaaacgggttatctggtttaacttcgccggcgcctttattctcacactggcatttttcgggcaccgtctgtttcaggaactgatgctgtatgcataa

SEQ ID NO: 275029 - DNA, 1293 bp, Morganella morganii
gtggagcacgtctcaacaagtacgctgattattattcttattttattggtgataatttcagcgtacttttccgcatccgaaaccgggatgatgaccatcaaccgctaccggctgcgccatcaggtcaggcagggaaaccgggctgcccgccgtgtcgaaaaactgctggagaaaccggaacgcctgctgagcctcattcttatcggtaataacctggtcaatattgtcgcttccgcactggggacgattgtcggtatgcgcctgtacggcaacgccggtgtggctatcgccaccggggtactgacctttgtcatcctcgtgtttgccgaagtgatgccgaaaaccattgccgcactctatccgcagcaggtcgcctttccgagcagttttctgcttcgtccgctggcaaaaatctgtcttccgctggtctgggcatttaacgcgataaccctgattatgatgcgctgcatcggtatccgcggcaccgtgatccgcagcgatgcggtatcaaaagaagaactgaaaaccatcgttaatgagtccaaaggcaagctgtcccgccgcaaccaggacatgctgatctccatcctcgatctggataaagtcagtgtggatgaaattatggtgccgcacactgagatcatcgggattgatatcaatgatgaatggaaatccattctgcgccagcttacgcactcgccgcacggccggatagtgctctaccgcgactcgctggatgatgccatcggtatgctgcgtgtccgggaagcttaccggctgatgattgagaagcaggaattcaccaagcaaatgcttatcaaggccgctgataaagtctactttgtgccggacagcacaccgctgaacttacagctggttaatttccagcgcaataatgaaaaagtcggactggttgtcgatgagtacggtgacatccgggggcttatctccgtggaagatatcctggaagaaattgtcggtgattttaccacctcaatgtcaccgtcgctggccgaggaagtgacccgtcagcctgacggtacactgctgattgaaggctctgccaatatccgcgaaatcaataaagccctgaatctttccctgccggaagaaggtgcccgcaccattaacggccttctgctggaagagctcggtgatatcccgacactcaataccgttgtcgctgtcggtaactaccagtttgaagtggttgccatcggtgagaatgtgattaaaacggtaaaactgtcgccgctgaaaccggccggtgccgatatcgctgctgatatctga

SEQ ID NO: 275030 - DNA, 516 bp, Morganella morganii
atgcctttgctggatagttttttagttgaccacacacgcatggcggcacctgcggtacgcgtagcgaaaaccatgaccaccccgggtggcgataccatcactgttttcgatctgcggttttgtgttcctaatgaagagattctgccggaaagaggaacgcatacactggaacacctgtttgccggttttatgcgtaaccatttaaacggcaatggtgttgaaatcattgatatctcgccgatgggctgccgtaccgggttctatatgagcctgattggtgcgccgtcagagacccgtgttgcacaggcctggaaagacgctatggcggatatcctgactgtcaaagatcaggcgaagatccctgaactgaacctgtatcagtgcgggacgtataaaatgcattcactggaagaagcacatcagattgcaaaaaacatcattgagcgcgatgtccgcgtcaacaaaaatgatgaactgctgttatctgatgatgagctggaaaaactgcatccgtaa

SEQ ID NO: 275031 - DNA, 1560 bp, Morganella morganii
ttgatcccggatgtatccaaagcgctctcatggttagagacgcacccccggattttaaaaggcatcaaccgcggcattgagcgtgaaacactgcgtatcacgccggatggtgctctggcacgtaccggtcacccggaagggctgggaaaatcattaacccataagtggatcaccacggactttgccgagtcactgctggagtttattaccccggtggattcgcgcattgattacaccgtgaaatttctgcgtgatgtgcaccgctacactgcgcgtcatctgaacaatgaacggatgtggccgctgagcatgccatgcttcattgattctgaagagcatatcgaactggcgcagttcggcacatccaatgccggccgtttcaagacactgtaccgtgaaggacttaaaaaccgctatggtgcgctgatgcagaccatttccggtgtccactataacttctctctgccgatggaattctggcaggcgtggagcggtatcagcgatgcacagagcggcaaggataaaatctccgacggctacttccgcctgatccgcaactattaccgtttcggctgggtgatcccgtatctgttcggtgcttcgccggcaatctgcagctcgttcctgcgcggccgcaaaactaatctgccgtttgaaacgctgccgaaaggggcgttatacctgccgtatgccacgtcactgcgtttaagtgacctcggttataccaacaagtcacaaagtgatctgaacatcaccttcaaccatctggacacatatgttgccgggctgaagaatgccattcagatcccgtctgaagaatttgccgcactgggattaaccaaagacggaaaacaccttcagattaacgccaacgtcctgcagattgaaaacgagttctatgcccctatccggccgaagcgtgtgcagaaaggtgatgagtcaccgtctgacgccttacagcgcggcggggtggagtatatcgaagtccgtgccctggatatcaacccgttctctgccaccggtgtcgatgaaacacaaatccgtttcctcgacctgttccttatctggtgtgtgctggcggatgcgccggaaatgagcgcggatgagctggcgtgtgcccgccataactggaatcgtgtgattctggaagggcgtaaaccgggacaggaaatcggtatcggctgcggtcgtgaaaaacaacccttgcaaaaagtgggtcacgcactgtttaatgatctcctgcgtgttgccgatgtgttagatacctgctcaggcacacagtatcgcgaagtgtgcgaagcactgaaagcacagtttgatgacccggaactgacgttctcggggcggatgctggcgctgataaaagaagcgggtatcggaagttacgggctggccctggcagatcggtatcatgaagaactgactcacgagccgtatgaagtgatcagtgaagcagactttgctgaacaatggcagacttctgtcgataaacaaaaagcgatggaagagagtgatacgataagttttgatgagtatctggcgctgcacggcggtcgctga

SEQ ID NO: 275032 - DNA, 192 bp, Morganella morganii
atgcttattctgactcgtcgagttggtgaaacactcatgataggcgatgaggtaacagtgactgtactgggtgttaaaggaaaccaggtacgaattggtgtcaacgcccccaaagaggtttctgttcaccgtgaagaaatttaccagcggatccaggctgaaaaatctcaacccaataacaataactattaa

SEQ ID NO: 275033 - DNA, 2628 bp, Morganella morganii
atgagcaaaagcaccgctgagatccgtcaagcgtttctcgactttttccatacaaaaggacatcagattgtccagagcagttcgctggttccgaacaacgacccaacgctgctttttactaacgcagggatgaatcaattcaaagatgttttcctcggtctggataaacgtccttacacccgcgctaccacagcacagcgctgtgtccgtgccggcggtaagcataacgacctggaaaacgtcggctacactgcacgtcaccacactttcttcgaaatgctgggtaacttcagcttcggcgattacttcaagcatgatgccatcaatttcgcctgggaactgctgaccggcaaagaatggtttaacctgccaaaagagaaactgtgggttactgtttatgccacggatgatgaagcgtacaacatctggaaagatgaagtcggtgttccggctgagcgcattatccgcatcggtgataacaaaggtgcccaatacgcctctgacaacttctggcagatgggcgataccggcccttgcggtccgtgtactgagattttctttgatcacggtgaccacatctggggaggtcctccgggatcaccggaagaagacggcgaccgttacatcgagatctggaacatcgtctttatgcagttcaaccgtcagtctgacggcacattagagccgctgccgaaaccatccgttgataccggtatgggtctggagcgtattaccgctgttctgcagcatgtaaactctaactatgatatcgacctgttccgcaaactgattgctgatgtggcgaaagtgaccggtgctgacgatctgaccagcaaatcactgcgcgtgatcgccgaccacatccgttcctgtgccttcctgatttgcgacggtgttattccgtccaacgaaggccgcggttatgtgctgcgccgtatcatccgccgcgctgtccgtcatggctacatgctgggcgcgaaagacactttcttctacaaactggttgcaccgctgatcgacgtgatggactctgccggtgaagaactggcacgtcagcgcgtgatggttgagaaagtgctgaagtcagaagaagagcagtttgcccgtacgctggaacgcggcctgcaactgctggatgacgaattagcctcactgaccggggataccctgagcggtgaagcggcattccgtctttatgacacctatggtttcccgctggatctgaccgctgacgtctgccgcgagcgcaacctgaaggtggatgaagccggttttgaagcggcaatggaagaacagcgccgccgtgcccgtgaaaacagcggttttggtgcggactacaacagtctcatcaaagtggacaagcgcagtgacttctccggttatgaccacaatgaacaggcggcaaccattgttgcactgtacaaagaaggtcagcctgttactgaactgaatgccggtgatgaaggtctggtgatcctggataaaaccgcgttttatgcggaatccggcggccaggtcggtgataccggtgtgctgtcgaacaacgatgcgcagttcagcgttctggacacacagaaatacggtcaggctatcggccatgccggtcgtgtggacagcggcaaactgacggtgaaccacaaaatcaccgcgaaaatcgacgaagagcgccgtaatgccatccgtctgaaccactcggcaacgcatctgatgcatgccgcgctgcgtcaggttctgggtgagcatgtgtcacagaaaggctcactggtaaacgataaatacctgcgttttgacttctctcactttgaagccatgacaccggcacaaatccgtgaagtggaagccctggtcaacgccgaaatccgtaaaaatgagccggttgtgactgagctgatggatctggaagaggcgaaagccaaaggtgcgatggctctgttcggtgaaaaatacgatgaacgtgtccgtgtactgagcatgggcgacttctcaaccgagctgtgcggtggtactcacgcggcacgtaccggtgatatcggtctgttccgtattatcagtgaatccgccacagctgccggtatccgccgtattgaagcggtcaccggtgccggcgcactggaaagcgtgaatcagcagtctgacgcactctctgcggtggctcagctggtgaaaagtgatgaagccggtgtgagcgagaaagtcaaagctgcgctggataaaatccgtaccctggaaaaagagttacagcaactcaaagaacagcaggctgcgcaggaaagttcctccatgaccaaagatgccgtttcagtgaacggtgttaaactcctggtgaaacaattgactaacgctgaacctaaaatgttacgcacgatggttgatgatctaaaaaatcaattaagctctggaattattgtgctttcaactatcagtgatgataaagttagtctcattgcaggtgtaacaaaagatctgaccggcaaagtcaaagccggcgaattggttgcttttattgctgaacaaatcggcggtaaagggggcggtcgcccggatatggcccaagccggcgggacagataccgctgctttacctgctgctatggcaagcgttgaaagctgggtggcatctcacctgtag

SEQ ID NO: 275034 - DNA, 1071 bp, Morganella morganii
atggctattgatgagaacaaacagaaagcactggcagcagccttaggtcagatcgagaagcagttcggtaagggttcgatcatgcgtctgggtgaagaccgttccatggacgtggaaactatctcaaccggctctctggcactggacgttgcactgggtgctggtggtctgccgctgggacgtattgttgaaatctacgggcctgaatcttccggtaaaaccacgctgacattacaggttatcgcagctgcacagcgtcagggtcgtgtgtgtgcgtttatcgatgcggaacacgcactggatccggtttatgccaagaaactgggtgtggatattgataacctgctgtgctcccagccggacaccggcgagcaggcactggaaatctgtgatgctttaacccgctccggtgcggttgatgtcattattgttgactccgtggcagcattgacaccaaaggctgaaatcgaaggtgaaatcggtgactctcacatgggcctggcagcccgtatgatgagccaggcaatgcgtaagctggccggtaacctgaaaaactccaacacactgctgattttcatcaaccagatccgtatgaagattggtgtgatgttcggtaacccggaaaccaccaccggtggtaacgcactgaaattctatgcctctgtccgtctggatatccgccgtatcggggcggtgaaaaacggtgatgaagtggtcggcagcgaaacccgcgtgaaagtagtgaaaaataaagtggctgcgccgttcaaacaggctgaattccagatcatgtacggcgaaggtatcaacaccatgggcgaactgatcgacctgggtgtgaaacataagctggttgagaaagccggtgcatggtacagctacaacggtgaaaaaatcggtcagggtaaggcaaacgccacaatttacctgaaagaacatccggaaatggcggatgaactggataaaaaattacgtgagttattactgaatcacagtggtgaattcagtactgcagcagaaagtttcaacgaagaaagtgaaactgaagatgcgggtaacgaagagttttaa

SEQ ID NO: 275035 - DNA, 522 bp, Morganella morganii
atgcatgatgaacaggctctgacccggcgaagtacggaactgggatcttatctccttgaagccggtctgagtgtcacaacggcagaatcctgcaccggcgggtggattgccaaggtgatcacagatatcgccgggagttcggcgtattttcagcgcgggtttgtcacctacagtaatgatgccaaacacagtatgatcggcgtatcagaacagtcactgtccgcttttggtgcggtcagtgaggcagtggtccgggaaatggccgccggggcgctggacactgcgggtgcggacttagccgtctctgtcagcggcattgccgggccggatggcggcagtgatgaaaagccggtcgggacagtctggttcggctgggcgtggcgggaaaaaacaggaataaaaaccgcggcccgcagctggtgttttccgggcgatcgtaatgcggtgcgctgtcaggcggtgctgaaagggcttgacggattaattgcaattctgacgaaaaaatcacttgatactgtatga

SEQ ID NO: 275036 - DNA, 1206 bp, Morganella morganii
atgacagcatccgccccgttactgaacaaaggcatgaaagcggtactggtttcccagtttattacggcatttgcggataacgcgattctgttcgccatccttgcacagctcagcgcccggcactatccggagtggagccagccgatgctgcagatggtctttgtgctgacttttattgtgctggcaccgtttgtcggacagattgccgacagcttcccgaaagggcgggtgatgctgctgtcgaacgcctgtaagcttttcggcgcggtggtgatctgcttcggcgcggatccgttcctgggatacgggctgatcggggtcggggcagcggcctattccccggcaaaatacgggatcctcggtgaactgaccactggtgaacagctggtgaaagccaacgggctgattgaagcgtcgacgattgtggctattctgctggggtcggtaaccggcggcttcctgtctgattaccatattacaatggcactgattttatgtacggtgatgtacgcactggctgcagtgaccaatatctatattccgcggctgccgccggcgaaaaccggcctgagccgcaatccgcgcacgatggtggtcactttcttccgcgctgtggtatcactgtggaaaaaccaggaaagccgtttttccctgaccggtaccagtctgttctggggcgcgggcgtgacactgcggctgatgctggtattgtgggttccggcggcactgggcattaccggccagaccatgccgacactccttaatgcgatggttgctatcgggattgtggcaggcgccgggctggctgcccgctttatcaccctggaaaccgtgcgccgctgcatgccggccgggatcctgatcggggtgatggtcattattttcacctttcagacctcggtggtaccgaccaatatcacgctgattatgctcggcgtattcggcggcctgtttgtggtgccgctcaatgcgctgctgcaaaagcgcggtaaagagactgtcggggcggggaacgctatcgcggtacagaatatgggggaaaacggcgcgatgcttctgatgctggggctctactccctggccgtcaaagccggtgtgccggtggtggtgatcggtgcggcgttcggcagcctgtttgccattgcaatcggcggattatggctctgggatatccgccgcaaaaaacagatttcacaacaggagtga

SEQ ID NO: 275037 - DNA, 2154 bp, Morganella morganii
atgttgatgaatgtgttacgtgcactgctccgcggattattccgcattcgtgttacaggtgacctgagtaatcttaatcaaccgcgaagtgttatcaccccgaaccatgcctcttttatcgatggtgttctgctggggttattcctgccgacccggccggtgttcgcgatgtacaccaattatgccacgccatttttcatccgctgtttaaaacccattgccgatattattccggtggatccgcgtaatccgctggcattgcggcatctgatccgcgaagttgaaaaagggcgtcagatagtgatcttcccggaagggcgggtgacgatcactgattctctgatgaagatctacgacggcgctgcttttattgctgccaaaaccggcgcgaaagtgatcccggtgcggattgacggcgcggaactgacgtatttcagccggatgcggaaagtgatcaaaagtcactttttcccggccatcaccatttatgttctgccgccggagaccattccgatgccggaggcaccgcgtgccgcagagcgccgccgtctggcgggggaacatctgcgcgacattatgatggatgcacgcatgacgtgccgcccgtcactgacactgccgcaggcatttctcggcgcggtaaaacgttacggccgtttccagcggatcattgatgacatcaatttcagcgaggacagttatcaggggctgctgaaaaaatccctcggactgagctgcattatcagccactataccaaagagggagagcgcaccggcttcctgctgccgaatgccaccgtgatgggtgcggcgatcctcggcgcttccatgcgccgccgtatcccggcactgcttaactacacagcgggtgtcgccgggctgcggaatgccatgaaggcggcggggatcactaccatcatcacctcgcgccagtttctggaaaaaggcaaaatgacacatttgccggaacagctgacagaagccaactgggtctatctggaagaggcaaaagcatccgttaccctgaaagataaactgtgggtgatgcgtcacctggtcacgccgcaggcggcactgctgccgcagaagccggaagatgatgcgattattctctttacctccggctcggaagggacaccgaaaggtgtggtgcacagtcacgattctttgctggcaaacgttgagcagattaaaacggtggcggatttcacgccgaaagaccgttttatgtctgcactgccgctgtttcacgcctttggtctgactgccgggcttatcacgccgctgctgtgcggcagccggatcttcctctatccgagcccgctgcattaccgcatggtgccggagctgacgtatgaccagaactgtaccgtcattttcgggacatccaccttccttgccaactatgcccgttttgctcatccgtatgattttgcccgtgtccgctatgctgtggccggggcggagaagctggcggaaggcaccaaacaggtctggcaggataaattcggcctgcgcattctggaaggttacggggtgactgagtgtgcgccggtgatttccattaacgtgccgatggccgcccgtaccggtactgtcggacggctgatgccggggatggaagcgcggctgctgccggttgccgggattgaaaacggcgggttgctgcaggtgcgcggcccgaatgtgatgaaagggtatctgcgggtggaaaaaccggggcagattgaaccgccgtcagcggagaatatgcagggcgaggttcagatcggctggtatgataccggcgatatcgtcacacaggatgcggccgggtttatcactatccgcggacgggtcaaacgctttgccaaactggccggtgagatgatctcgctggaaagtgttgagcaactggcactgagtgtctcgccggacaaactgcatgctgtggtgacgaaaccggatgcaaaacgcggcgaagcactggtgatgtttaccactgacagtgaactggatcgcacacaactgctgacagaagcgaaagcgaaagggctgccggaactggcggttccgcgtgatatccgttatatcagacagctgccggtgctcggcagcggtaaaccggattttgtcacactgaaacaacaggcattacaggagccgcaggtatga

SEQ ID NO: 275038 - DNA, 534 bp, Morganella morganii
atgaatcatcaggatgaaaaaccgattatttatcttatcggcgcccgcggggctggcaaaaccacggtgggtaaaccactggcgcaggcattactgtacgattttattgacactgatgcctgtgtgacagaacagtgccggatgtctatctcccaactggtggaacaatcgggctggcgcagttttcgtgagctggaaagtgatgtgctgcgtcaggtcagtaaaccacaccgtctggtctccaccggcggcggtattgtgatggcaccggaaaaccgggcgtttatgcaatcctccggcaaagtggtatatctgcgcgccagtgccgaaaccctggcggaaaggctgtcacacacccctcaggcacatcagcgcccgagcctgaccggcaagtgcattgtggaggagatggcggaagtgctgagcaagcgcgagccgctctatctggaatgcgcggatatcgtggtggatgccacctgtccggtaccggaactcatcagtcagatctgcacccgtatccacgctgcagtatag

SEQ ID NO: 275039 - DNA, 1254 bp, Morganella morganii
atgttagaacaaatgggtaaagcggccaaagccgcctcctgggcactggctcagctttccggaaaacagaaaaatcaggctctgacccgcatcgccaatctgctggaacagaacagtgcgccgatccttgctgccaatgaacttgatattgccaaagcccgtgagcagggtacctcagaggcgatgcttgatcgcctgctgctgacgcaggcacgcctggaaagtattgctgcggacgtgcgtaaggtgtgtcagctggcggatccggtcggggaagtgatcgacggcggtgtgctggaaagtggtctgcgccttgagcgccgccgtgtgccgctcggtgtggtcggtgtgatttatgaagcacgcccgaatgtgacggtggatgttgcctcactgtgcctgaaaaccggtaatgcggtgatcctgcgcggcggtaaagagacacacaataccaatgtggcgatggtccgtgttattcagcaggcgctcagcgagtgcggtctgccgcaggcggctatccaggcgattgataacccggatcgtgcgctggtcaatgagctgctgaagatggatcgctatgtggatattcttattccgcgcggcggtgccggtctgcaccgcttatgtcgtgagcagtccacgattccggtgatcaccggcggtatcggcgtgtgtcatatttttgtcgatgagacggcggatctgcataaagcactgccggttatccgcaatgccaaagtgcagcgtccgagcgtctgtaatgcggtggaaacactgctggtgcatgaaaaagtggctgcggaattcctgcctctgctgagtgatcacatggcggcggataatgttactctgcatgcagatcctgctgcgctggcgctgctgaaaaacggcccggcgaagacggaagctgtaacagaagcacagctgtcagatgaatggctgtcacttgatctgaatgtggtgattgtgaaggatattgatggcgcgattgagcatatccgtcatttcggcactcagcactcagaatcgattctgacacaatccatgtctcaggctgattatttcgtctcaaatattgattcatcagcggtctatgttaacgccagcacccgtttcacggacggcggtcagttcggactgggcgcggaagttgcggtcagcacccagaaactgcatgcccgcggcccgatggggctggcggcactgactacctataagtggatcggggtcggtgatcacacgatccgttcataa

SEQ ID NO: 275040 - DNA, 1104 bp, Morganella morganii
atgaatagcagccaaacgctggttgtcaaactgggcacaagtgtgctgaccggcggatcacgacatttaaatcaggccagaattgttgaactggtccggcagtgtgcgcagcagtatgcaaaagggcaccgtattattattgtgacttccggggcgattgccgccgggcgtgagcacctcggttaccctgaactccccgccaccattgcgtccaaacagttgctggcggctgttggtcagagccgcctgatccagttatgggagcgcctgttctcgatttacggcatccatatcggccagatgctgctgacccgcgcggatatggaagatcgcgagcgtttcctgaatgcccgtgacaccctgaccgcactgctggataacggcattgtgccggtcatcaatgaaaatgatgcggtcgccacagcggaaattaaagtcggggataatgataacctctccgcactggcagcgatcctcggcggggcggataagctcctgctgctgactgatattgaagggctgtatactgcggatccgcgcagcaatccggatgccaccctgatttctgaggtgcatgatatcagtgatgaactgcgcagtgtcgcaggtgacagtgtctccgggctgggcaccggcggaatggccaccaagctccaggccgcgactgtcgcaggacgtgcggggattgatgtcattattgctgccggtgatcgcgccggggtgatttgtgatgtgattgatgatattccggtcggcacccggttcttcgggaaaaaagcgccgatggaagcgcgcaagcagtggatcttcggggcaccgcctgccggtgagattattgtggatgacggtgcggagaaagcactgaaagataagggcagttccctgctgccgagcgggatccgtactgtgaacggcaatttctcccgtggtgaggttgtccgcatccgcgcgctgaacgggcgggatctggcacacggtgtctgccggtataacagcgatgcgctgcgcctgattgccggacggcagtcacaggaaatcagcacaattttaggttatgaatacggcgccgtggctgtccaccgcgacgatatgattgtcagttaa

SEQ ID NO: 275041 - DNA, 402 bp, Morganella morganii
atgatggcactggtttcagattacacacgcggcaggttgctgcgatgtttcactgcattgggtccgtatatccgtgagccgcagtgtcaggagggtcactatttttttgactgtctggcagtgtgtgtgaatgcgggggtcgcgccggaaaaacgtgagttttttggctggtggctgacactgatcccgcaggaaaccgggtttgtctctgaataccataccggggtatttgataaaaaagggctctggcaggaaaaatccctgtctgacaaagagatccgtgatgcggtcagtaaaaccctgactgatttttatccccgcttacaggccgttcttgaggaactggatctgtccctgactccgtcaccggtatcaccgccccccggaaagcagccggattaa

SEQ ID NO: 275042 - DNA, 1248 bp, Morganella morganii
atgacacaacagaacctgtcagagaaactgtttaagccgaaaatcaagcaccctgagacatccgcactggtgaactttacccgttccgggataaaggaagtcaggggcagcgtcctgagcggatgtacccatccgggctggtatcgcatgattaaccgcttaatgtgggcctggcgggggatcccgccgctggaaaccgaagaggttctcagccggatcgcggcatctgatgccccccgcagtgatgatgcactgctggatacggtgatcggctaccgccgcggtaactgggcttatgaatggtctcagcaggcgatgttgtggcagcgcaaagcgctggaatttgaatccggcgaaaaagcctgtgaagcctggctgcttgccgcaaatctgtacagtattgcgggatatccccatttaaaaggggatgagctggcggatcaggctaccgttctggcaaatcaggcgtatgaaaactccgcccggtttgccgcatatgaactgaaaaaaattgaattcaaaatggagagcggcggaaacatctgcgcttttctgcacctcccgccggggaaaggcagtgcgtttccggtggtgatgatgtgcggcagtctggataatctgcaaagtgattactgccgctacttccgtgactatctggcaccgcagggcattgcactgctgacgctggatatgccgtcaatcggttactcctcaaaacagactttaggccaggaaagcagcctgatgcaccagcaggtgctggatcagctgcgcaatgtgccgtggattgaccacacccgtgtggcggtgatggggctgcgtttcggtgccaatgtggcgatgcgtatggcatacctgtccgcacatcagctgcggggggccgtgctgttcgggccggtggtgcatgatctgtttgtcagcccggagcggcaggataaaatccccggcatgtatatggatgtgctggccagccgtgcggcggcacgctgtactgaccttgataccgtccgcacccggctcggctgcttatctctgaaaaatcaggggctgctcggccgccgctgttcactgccggtgctgagcatgtgctggaaagaggatgtgttcagcccgaaaagtgaatcggagctgattgtccgctccagcgctgacggtaagctggtggaattcggccataccccggtttttgacactttccacaaatcgctggatgaggccacccgctggctcaccagaattttatcctga

SEQ ID NO: 275043 - DNA, 459 bp, Morganella morganii
atgagcgaaaaatacgtcgtaacgtgggatatgttgcaaatgcatgcccgtaaactggcacagcgtttaatgccaaccgaacaatggaaaggcatcatcgccgtaagccgcggtggtctggtgccgggtgccttactcgctcgtgaactgggtatccgtcatgtggatactgtctgcatttccagctatgatcatgaccatcagcgcgatatgaaagtcctgaaaaaagccgacggtgacggcgaaggatttattattgttgatgatctggtggacaccggcggtactgctcagatgatccgcgatatgtatccgaaagcgcatttcgtcactatttttgccaaaccggccggacgtccgctggttgacgattatgtggttgatatcccgcaggatacctggatcgaacagccgtgggatatgaccgtcagttttgttaaaccaatctgcgatcagtaa

SEQ ID NO: 275044 - DNA, 1461 bp, Morganella morganii
gtgtctgaactatcacaattatttccgcagccgctgtgggatatttttgccaaaatctgctctattcctcatccgtcctaccacgaagagcaactggctgcacatattattgaatgggcaaaagaaaaggaattccacgttgaacgcgacagcgtcggtaatatcctgatccgcaaaccggccagcaaaggcctggaaaaccgcaaagcggttgttctgcaggcgcacctggatatggtgccgcagaaaaataatgatacagcacacgatttcgaaaaagatccgattcaaccgtacatcgacggcgactgggtaaccgcgaaaggcaccacattaggtgcagataacggcatcggtatggcctccgcgctggcagtactggctgacgattcagtcaaacacgggccgctggaagttctgctgaccatgacagaagaagccgggatggacggcgcattcggtcttcagccgggctggttacaggctgatatcctgatcaacaccgactccgaagaagaaggtgaaatttacatgggttgtgcgggcggtattgacgtcaccacaacacttgcgctgagccgtgaagccgttccggccggttacagcatcttcaccctgaccctcaaaggtctcaaaggcggccactccggcggcgatattcatctgggcctcggcaatgccaacaaattactggcccgtttcctggccggtcacgccgcagaactcggcgcgcgtctggttgattttcagggcggcacactgcgcaacgcgattccgcgcgaaggccacatcacactggcagtaccggcagataaagccgcacagctgaaatcgctggcacagacctttgaagcgctgctcagagaagaattggcgcagaaagagaaaaacctggttgtcaccctggaagctgcaaccgctgctcagggcgctctgaccgctgatgtgcagtcccgctttatcaatatgctcaatgtcatgccgaacggcgtgatccgcatgagtgacgtggttccgggcgtggtcgaaacctcactgaacgtgggtgtggtgaaaatgagtgacgaccgtgtgcagattatctgtctggtacgttccctgattgaatccggcaaatcttctgtggtcagcatgctgacctcgctggcggcactgtccggtgcggatattgttgccgaaggcggctatccgggctggcagccggatgcagattctccggtcatgcatctggtcagcgaaacctatcagcaattgtttgacaaaaccccgaacatcatggtgatccacgccggtcttgagtgcggtttattcaaaaaaccgtatccggacatggacatggtctccatcggaccgaccatcaccggagctcactcccctgatgaacaagtgcatatcaagagtgtcgggcagtactggcagttactgaccgctatcttaaaagcgatccctgagaaagcgtaa

SEQ ID NO: 275045 - DNA, 1056 bp, Morganella morganii
atgcgtaaaatcattcatattgatatggattgcttttatgcggcgattgaaatgcgtgacgatccccgtctgcgcgatattccgctggctatcggcggcagttccgaccgtcgcggtgtgattgcgaccgccaattatccggcgcggcgcttcggggtgcacagcgcgatgtcaacggcaaaagcactgctgctgtgtccgcatctgaaagtcattccggggcggatggagttgtataaaaccacctcccgccacctgcatgcgattttcgcccgttatacttcactgattgagccgctgtcactggatgaagcttatcttgatgtgacagacagcccgcagtgccggggctcagccacactgatggcggaagagatccgcaaaaccatttataccgaactggggctgactgcatctgccggggtggcaccggtaaaattccttgccaaaatcgcgtcggacctgaataaacccgacgggcagtacattatcacgccggagcaggtgacggattttgtgctgtcactgccgctgcgtaaaattcccggtgtgggaaaggtgacagcaaagcgtctggctgacctcgggctggagacctgccgggatgtgcagaattatgatcagatatcgctgctgaaacagttcggaaagttcgggcagatcatctggcagcgcagtcacggtacggatgagcggccggtttgtccggacagggaacggaaatctgtcggtgtcgagcggacactggcggaagatatcgcctcgtgggatgagtgtcagacgattattgatgagctgtttccggagctggagcgccgtctgacaaaggtgtcaccggatctgcggatcgcccgtcagggcattaaactgaagtttgcggattttcagcagaccacacaggaacatgtccatcaggtgctggataaagcggatttactgaaaacggcggaactggcctgggatagccgccgggaagggcgcggcgtgcggctggtggggttgcatgtgacactgcgggatccgcagcttgagcggcagttgctgctcgggttctga

SEQ ID NO: 275046 - DNA, 852 bp, Morganella morganii
atgaaaaaaatactatcagcccttttcctgagtggcattgttatgacagcccatgcagcaccgcagattattgcccatcgcgccgccacggcggacgcccctgaaaataccctttatgccatcgataaggcgctgagtaacaaagccgatgccatctggatcacccttcagctgtcaaaagataaccaggtggtgttataccgcccgtctgatctgaaatctctgaccgacaaatcgggtccggtttccggttacaacgccgcagagctggcacaaaccgatgcagcccgggattataatcagaaaaataaaacccatatcaaagcctctgttccggcactggataccgtcctgagtcgttaccctgagacctttttctacctcgatatcaaatctccggatgcctcaccggcggtttttgcacaacagctggattcagtactgacccgtcataacgccaaaaaccgtgtccgcgtctattcaaccggtcaggattatctggctgccctgccgccgtcaatccccgtttttgaaagccgtgataccacccgtaatgcactggccggcagcctgatcacacacacctgtgacctggcggacaatccgcagccacgctggtatggctttgaactgcgccgtaacgtggatgtggttgaaaccttcacactgggtgaagcacgctctccggttgtgctgacctgggataaaaccgcaatggactgttttcgtaaaaataatcaaaaccatgttgttctgttcggtataaaaacccccgccgatttacaactggcgacagaattgggtgcagatggcgtgatggtcgattcgctgctcaatatgaaaataaaataa

SEQ ID NO: 275047 - DNA, 882 bp, Morganella morganii
gtgataagtaacctgttctttgatttaaattcacccccaaaatccctctttgtttttacgggattattttttctgttatttagtgtttattcttacgcagactgcaatttgtattcagatgagacacgcagcagtaactttattattctgggtgccggtatgatcaacggcccggtaaaatccgtcatcacaacagcacattccccggacaacaaaaacagcaatattatgattaacgggcactatgacctgacgccgtgcggtgaactgagttacttttcactggaagttaccgaacactacccggggttgcaaaaccggatgtattccgaaggtaagaagacggaacagggatataccttattattcacgtcacaactgcatggcagcggaaaagcacccgtcacgctgattcacgcccgaagccaccttttctataataatcagaagcaaatcatccgtgccgaatctgaaagcaacagtggcggcaatacccaaaaatcacatatggaaaccgattttttttatgaaaacggtttaatctcacatgcagtatctacaggggactccgcggacaccggcggtgaaatccgttacgactggcgtcaggatcggcagataaatgcgattatgtcccggagtagcgggcttcctcaactgaactatgagtttgcctataatgatgacggtcaggttatccggcagacacagacacaacatacgccgctgggccgggtaaaaaccatttatatctgccagcagacagatacttacggaaattgtgaaaaagcactctggcagagtatctctgaagggaatcaggccaataatattattgtgataaataccgctattgtgacatcagactatcgttattactga

SEQ ID NO: 275048 - DNA, 231 bp, Morganella morganii
atgatgataaaagtatttatcgcaacctttatcctgtttctggtcgcgtttctgggaatgtctcttgggtatattattaagcgcaagagtattcagggaagctgcggcgggctgagcagcattggtgtcgaaaaagtctgtgactgtcctgaaccgtgtgatgcccggaaaaaacggatggcacgtgaagctgcccgcgaagagaaactgaataaaaaccggattgtatag

SEQ ID NO: 275049 - DNA, 1038 bp, Morganella morganii
atggtaaaaataaaacgggctttcctgccgctggcactgatggcattgttactgagcgcgtgcggtgataacacaccggaaacacagcaggtaaccctgaacggcaaaacgatgggcacctattatgcgatcaaatatatcgctgacccgaaagacccgtcggcggaatcattgcagaaaggcattgatgtggtgctggaagaggtcaatgaccagatgtccacctaccggccggattctgaactcagccgttttaatcagagccgtgaggtgaatacgccgtttccggtctctgccgcgactgcaaaagtggttcgtgaggctatccgcattaatcagctgacagacggcgcactggacgtcaccgtcggtccgctggtcaatttatggggatttggtccggaaggacgggtgacccatgtgccgacagatcaggatattgaaacccgccgtcagtggaccgggattgataaactgaaggttgaaggcaataatctgattaagactgtgccggaactgtatgtggatctgtcctcgatcgccaaaggctacggagtggatgcggtggcagaatacctggaatcacagaatatccgtaattatatggtggatgtgggcggcgaagtccggacacagggtattaacggcaaaggcaaaccgtggcgtattgcgattgaaaaaccgtcgtcacaggggctgagccagtctgcacaggaaatcattgaaccggggaatgcctctgtggccacatccggggattaccggaattattttgaagaaaataatgtccgttattcacataccattgatccgaaaacagcacgtccgattaaccataatctggtatcgattacggtgattgctgataattgcatgagtgcggatggcttttctaccggactgaatgtgctcgggccagagcgtggcctcgaagtggcgaatgcgcaaaatatccctgtttttatgattgtcaaaacagggaagggatttgaagaacgctacagtgaggcatttaagccctatttgcagcaaaaataa

SEQ ID NO: 275050 - DNA, 1227 bp, Morganella morganii
atggatatcgttattttaggcgtggcaatgtttaccctgattgttctggcgctgaccgcgttgattttgtttgcaaaatcaaaactggtgaacacaggggacgttaagattgaaatcaacggcgatgcggagaaaagcttcgacgcaccggccggtgacaaattactgaatgtgctgtccggtcaggggatttttgtctcctcggcctgcggcggcggcggcacctgcggtcagtgccgcgtgaagatcaaagaaggcggcggtgatattctgccgacagaaatgtctcacattaataaacgcgaagcgcgtgaaggctgccgtctggcgtgccaggtgaatgtgaagcaggatctgaaaattgagctgccggaagagatcttcggggtgaaaaaatgggagtgcgaagttatctccaatgataacaaagcgactttcattaaagagctgaaactgaaaattcctgatggcgaaagtgtgccgttccgtgccggtggttatattcagattgaatgtccgccgcatgtggtccgctatgatgagtttgatgtgccgcaggaataccgcgaggactgggacaagttcaacctgttccgctatgtgtctgatgtgaaagagccgacagtgcgtgcttactctatggcgaactatccggaagagcacggcattatcatgctgaacgtgcgtatcgccacaccgcctccgcgtgtgccggatgcgcctccggggattatgtcctcttacatctggtcactgaaaccgggtgataaagtgacaatttccgggccgttcggggagttcttcgcgaaagataccgacgcggaaatgatctttatcggtggtggtgcggggatggcgccgatgcgttcgcatatcttcgatcagctcaagcgtctgcactccaaacgcaagatgtctttctggtatggtgcgcgttcaaaacgtgaaatgttctatgaggaagattttgaccagcttcaggctgagaatgaaaacttcacctggaacgtggcgctgtctgatgccctgccggaagataactgggacggatacacagggtttattcataatgttctctatgagcattacctgaaaaaccacccggcaccggaagattgtgagttctacatgtgcgggccgccgatgatgaacgccgccgtgatcaagatgctcaaagatctgggtgtggaagacgaaaatattatgctggatgacttcggcggctga

SEQ ID NO: 275051 - DNA, 597 bp, Morganella morganii
atggaacattatatcagtctctttgtgcgggctgtgtttattgaaaacatggcactggccttcttcctcgggatgtgtacgttcctggcggtgtcgaaaaacgtcaaaacggcgtttggtctcggcgtggcggttaccgtggtgctggggatttcggttccggcaaacaacctggtgtacaacctgctgctgcgcgacggcgcactgatggaaggtgtggatttaagcttcctgaacttcattacctttatcggggtcattgcggcgctggtacagattctggagatgattctggatcgctacttcccggcactgtataacgcgctggggatcttcctgccgttaatcaccgtaaactgtgcgattttcggtggtgtgtcctttatggcgcagcgagactacaactttacggagtctgtggtttacgggttcgcttccggtatcggctggctgctggcgattgtgctgatggccgctatccgcgagaagatgaaatactctgacgtaccggccggcctgaaagggctggggatcacattcgtgaccaccggactgatggctctgggctttatgtccttctccggcgtacagttataa

SEQ ID NO: 275052 - DNA, 630 bp, Morganella morganii
atggctgatagtaaagaaattaaacgcgttcttctcggaccgttattagataacaacccgattgccctccaggtactgggtgtgtgttcggcgctggcggtaaccaccaaactggaaaccgcactggttatgaccatcgcggtaaccctggtaacagcattctccagcatgtttatctcgatgatccgtaattttatcccgggcagtgtgcggattatcgttcagatggcaattatcgcctcgctggttattcttgttgaccagatcctgcgggcgtatgcctatggtatctccaagcagctttctgtgttcgtcggtctgatcattaccaactgtattgtgatgggacgtgcggaagcgtatgcgatgaaagcaccgccgattgagagttttatggatggtatcggtaacggtttaggttacggtgtgatcctgctgctggtgggcttcttccgagaactgatcggctccggtaagctctttggtgtgacggtgctggaaacggtacagaacggtggctggtatctgccgaacggcctgttcctgctggcaccaagtgcattctttatcatcgggatgcttatctgggggatccgcaccctgaaaccgtcacaagtcgaggaggattaa

SEQ ID NO: 275053 - DNA, 795 bp, Morganella morganii
gtggctaatgaaaaaacgaaaaacaaggacagtgtcgcaagaacgtttatcgttgtcttcgtcctttgccttgtgtgttcaatagtcgtggccggttctgctgtggggctgaagtccacgcagcagacacagattatgctggataagcagcgtaacattctggatgtggccgggttactgacgccatccatgccggcagacgaaatcgatgctgtctataaaaaattcatcagagcaaaaatggtgaatttaaaaaccggtcagatgagcgacagcaccggcaagtacgatctcaacgatgaactgcgcagtgatgagagcagtattgccctgtcaccggaagaagatctggcgaaaatccgccgccgtgccaacagcgcggaaatctatctggtacagaatgatcagggtgaaaccagcaagattgttctgccggtttacggctccggtctgtggtcggtgatgtatgcctttatcgcgattgatgtcgacggtatcacctccgaggggatcacttactaccagcacggtgaaacgccggggctgggcggtgaggtggataacccgcaatggcgtaaacagtggattggtaaaaagctgtttaatgaagaaggtatgccggctatcaaaatagtccgcagcggcgccactgacagcccgtacggcattgatggtttatccggtgcgacactgacctcaaacggtatccagcatatgtttgatttctggctgggcgacaacggttttggcccgttcctgaaaacagtacgcgaaggagcgttgaatcatggctga

SEQ ID NO: 275054 - DNA, 1239 bp, Morganella morganii
atgggtctgaaaaaatttctcgaaaaaattgagccgcattttgaaccgggcggcaaattacagagatggtatgcactgtacgaagcagccgccaccatcttctataccccggggacagttacccgcgggcattcacatgtccgtgactccatcgaccttaaacgtctgatgatcctggtctggttatccgttttccctgcgatgttctgggggatgtataacgtcggtaaccaggcaatgccggtactgctggatatgtacagcggtgcggagcttcagcaggtgattgccggtgactggcattatcgtctggcggagcttatcggggtgtccttcacacaggatgcgggctgggtcagcaaaatgctgttcggtgccgtctatttcctgccgatctacggggtgattttcatcgtcggcggcttctgggaagtcctgtttgcgatgatccgcgggcatgaaattaacgaaggtttctttatcacctccattctgctggctctgattgtaccgccgacgctgccgttatggcaggccgcactggctgtcaccttcggtgtggtggtcgcgaaggaaattttcggcggtacaggacgcaacttcctgaacccggcactggccggccgtgctttcctgttctttgcttatccggctcagatttccggtgataccgtctggactgccgctgacggcttctccggcgcaaccccgctgtcacagtgggcagtcggtggcgagcatcagctcgttaataccatgaccaaccagccgatttcctggatggatgcctttatcggtaacgtaccgggctcgattggtgaagtttccacgctgatgattctgatcggtggtgcagtcattctgtttgcccgtattgcgtctctgcgtattgtggccggtgtgatggtcgggatgatcgcaatgtccgccgtctttaatatgattggttcggacaccaacccgctgtttgctatgccgtggtactggcatctggtcctgggcggttttgccttcggtatgattttcatggcgacggacccggtttcagcctcatttaccgacaaaggtaaatgggcttacgggatcctgatcggggtgatgtgtgtcctgatccgtgtggcaaacccggcatatccggaagggatgatgctggctatcctgttcgctaacttattcgccccgttatttgattatctggtggttcaggcaaacattaaacggagaaaagcacgtggctaa

SEQ ID NO: 275055 - DNA, 1344 bp, Morganella morganii
atgattaaaattaaaaaaggactcgacctgccgatcgcaggagcacctgctcaagtcacagaagatggcccttcagtccgccacgcagcgctgctgggtgaggaatacatcgggatgcgtccgtcgatgctggttcaggaaggtgaatcagtgaaaaaaggacaggctctttttgaagacaaaaagaaccccggtgtgatttttaccagccccgcctgcggagtggtaaaagccatcaatcgtggtgagcgtcgtgtattacaatctgtggtgattgagatacagggagacgagcaattaacatttgacagttatgaccgccgggatctgccgtcactgacccgtgaacaggcagagaaaaacctggtggcctccgggttatggactgcgctgcggacacgtccgttcagtcataccccaaaattaggttccgtgcctgccgctatttttgtcactgccatggacaccaatccgttgtcagctgatccgctggtaattatccgtcaggaacaggtgtcgtttgatgacggcttacaggtactgagctgcctgacggaagggaaggtacatgtctgccacggtacagctgatttcgcaaaagttaccgataacaatcgtgtcagttatacgcagtttaccgggccgcatccggcaggccttgccggtacgcacatacacttcctggaaccggtcagcgcaacgaaaaccgtctggtctctgaattaccaggatgtcatcgccatcggtaaactgttcacgaccggctttttatataccgaccgtattgtggcgctcggtggtccgcaggtgaaaaatccgcgtctgctgaaaacccgcctcggcgcagatctgtatgaactgaccgaagggcagctgaaagccggtgaaaaccgcattatttccggttcggtcctgtggggcgtggccagtgatgatgctcatcactatctgggccgttttaccaatcaggtctctgttctggaagaaggccgggagaaagagctgttcggctggattatgccgggcacagacaaatacacggttacccgcaccacactgggtcatttctttaagaaaaaactgttctcattcaccacatcaatgaatggtggcgaacgttctatggtgccaatcggcagttatgaacgtgtgatgccgctcgacattatggcgacacattttctgcgcgatctgctggcgggcgatactgacagcgcacaggcgctgggtgcgctggagctggatgaggaagatctggggctgtgtacctatgtctgtcagagtaaatatgagtacggcccggtgctgcgtgacgtactgaccaggattgagcaggaaggataa

SEQ ID NO: 275056 - DNA, 729 bp, Morganella morganii
atgatgatcggcctgctgttttttgcggggcaatcatcagcaaacacggaaaaatccgcgtcattatggctcacagcgccggtgagtgatgtccggaacagccgggtatttatacagatatttaaagaagaaaaagagctggagctttataagcgggaaaataacggacgttttaaactggtaaaacgctacccggtttgtcagttttccggcggcctcggaccaaagcaactgaccggtgatttaaaaagcccggagggattttaccgcatcagtctgtcacagcttaacccgaacagtcggttttaccgagctatcaaccttggttttcccaatgaattcgaccgtgcgcacggctataccggggattatctgatggttcacggtgactgcaaatccgtcggctgctacgccatgacagatgcttatattgatgagatttaccgctatgtggaaagtgccctgctgagcggacagacggatctgaatatcgcgatttatcctttccggatgacgcctgagaacctgaaccgccaccggaactccgcacatctggcgttctggcagcagttacagcctgcttatcagtatttcgctgaaaatcagataccggcagtcgttgcggttgttaacggccgttatgtaaccgcagcacattcagctttaccggcaccggcagcggataccggtttgctgactcagaacacggactcatcccgttcgccgtaa

SEQ ID NO: 275057 - DNA, 777 bp, Morganella morganii
atgtgtgaattgctggggatgagtgcgaatgtcccgactgatattcatttcagtctcagtggcctgatcccgcgtggcggcgaaaccgggccgcataaagacgggtggggaattacgttttatgaaggaatgggctgccggacattcaaagacgcccgtgcctgctgcaactcccccgttgcccgttttgtccgtgactatcctgtcaaatccgaagcggtgatcgcccatatccgccaggcaaacagaggggtggtatcactggaaaatacccacccttttacccgcgaactgtgggggcggaactggacatatgcccataacgggcagctcagcggctatgagcatctgccgaccggtttttttaccccggtcggccagactgacagcgagcatgcattctgctggctgctgaatcagctgaaagaaaaatacccgcagccgccgcaggatctgcagacagtattccgtgaaattaaacggctggcggatgtgctgcggcagtttggtgtctttaatatgctgctgtcagacggcagctatgtgctggcgtactgttcaacgaatctgcactggatcacccgccgcgcacctttcggtaaggcgcggctggtggacagtgatgtggagattgatttctcacagcatacccggccggatgatgtggtgtctgtgattgccacgcagccgctgaccggcaatgaacagtggcagaaaatcgggcccggcgaagccgttctcttttattacggcgaacgggatgagtccgtgttctga

SEQ ID NO: 275058 - DNA, 579 bp, Morganella morganii
atgtaccaggaacttatccgcggtgaactgaccgaagcagcggcaaccctcgataactttttgaaagatgagaataatatcgatgctatccgccgggctgctgtcatgctggctgattcttttaaagcgggcggcaaagtgatgtcatgcggcaacggcggttcacactgtgatgcgatgcattttgcggaagaactgaccgggcgctaccgtgaaaaccgtccgggctatccggcgattgccatttcagatgtcagccacttatcctgcgtcagcaatgattttggctatgaatatgttttctcccgttttgtggaatctgtcggccgtgaaggggatgtgttactcggtatctccacatccggtaattcaggcaacattattaaagccattgaagcagcccgcgccaaaggcatgaaagtgatcacgctgaccggcaaagacggcggtaagatggcaggcagcgcggatattgaaatccgtgttccgcactttggttatgcggatcgcattcaggaaatccatattaaggttattcatattctgatcatgctgatcgaaaaagagatggtcaaataa

SEQ ID NO: 275059 - DNA, 2451 bp, Morganella morganii
atgttactaatcagcattattctgtttatcgccgtcaccgggttgctctcatttcaccgggtcagcctgaagtacagtgtaatgacactggaactgttcagtatcgtcatgaatatcttccgtttatggccgtttactgtcaccgttttactggtgctggttaccctgccgtttgttatcacccccgtccgtcaggcattgttcagcagccgtctgatgcagctgttccgcaaagtaatgccgccgatgtcacagacagaaaaagaagcaatcgatgcgggtaccacctggtgggaaggtgatttattccgcgggcagccggactggcagaaactgcacagctatcctgccccgcaactgacagcagaagaacaggctttcctcgacggcccggcagaagaagcctgccggatggccaatgattttgaaattacccacgaactggcggatctgccgcctgaattatggcaattcctgcgcgagcataaattcttcgccatgatcatccgcaaagaatacggcggcctggcgttctccgcctatgcccaggcgcgggtcctgcaaaaactcgccggggtttccggtattctggccattactgtcggcgtgcccaattcgctggggccgggcgagctattacagcactatggtactgatgaacagaaaaaacgctggctgccgggactggcctccggggaagagatcccctgctttgccctgaccagcccggaagccggttcagatgccggtgccattccggataccgggattatctgcaccggcgaatggcagggtgaacaggttctcggcatgcgcctgaactggaataaacgctatatcaccctggcaccggtcgccaccgtgctgggtctcgcctttaaactgtatgatccggataaactgctcggtgaaaaaacctcgctcgggatcacctgtgcactcatcccggtaaataccccgggggttgaaaccggcacccgtcatttcccgctcaacgtcccgttccagaacggcccgacacgcggtaaagatgtctttgtgccgctggattatattatcggcggcccggcaatggccggacagggctggcgcatgctggtggagtgtctgtcggtcgggcgtggtatcactctgccgtccaatgccaccggcgggctgaaaagtgcggccatggcaattggcgcttattcctacatccgtcgtcagttccggatgccgatcggcaaaatggaagggattgaggagccgctggcgcggattgccggaaatgcctatctgatggatgccgccgccacgctgatcaccaccggtattatgctgggagaaaaaccggcggttctgtccgcgattgtgaaataccactgtacccaccggggacagcgcgccattattgatgccatggatattgcggggggtaaaggtatctgcctcgggccgtccaacttcctggcccgcaactatcagggggcgcctatcgcgattactgtcgaaggtgccaatattctgacccgcagtatgattatcttcggtcagggcgctatccgctgtcacccgtacgtactgactgaaatggccgcagcggccgataatcagctgaatgactttgataacgcactgtttgctcatgtcggccatgtgttaaccgccgccacccgcagtttctggctcggattatcacgcgggcatttcagcccgtcaccgttccgggatgccacccgccgctattataagcacctcaaccggctgagtgccaacctggcactgttgtctgatatcgccatggcaacactcggcggcagtttaaaacgccgtgagcggatttccgccagactcggcgatatactcagccagctttacctggcatccgccaccttaaaacgctttgatgaagatggccgtccgcaggcagatttaccgctggtgcactgggcagtgcaggattgcctgtatgaagccgaaaaagccatggatgaactgctgaccaacttccctgaccgcagagtcgccgccctgctgcgcctgactgtcttcccgacgggccgccatcaccgtccgccgtcagacaaactggacagcaaactcgcccgtctgctgcaggaaccgtcagagacccgcgacagaatcggacgcgggcaatatctgacacctgagcccaacaacccgcacgggctgctcaatgccgccctcagtgatattctcgccgctgagccgctggtggatcgcctgagccgcatggctgaaaaacacattgatttcacccggctggataaactggcagatattgccctggaagacggaaaagtcacaccggaagaggctgatattctgcgtaaagcggaagccagccgtctacgctcgattaatgtggatgagtttgcaccggagattatcggcttaaaatcacacgctaattctcaccgttaccgcaaaggtgaaaatcccggcgcataa

SEQ ID NO: 275060 - DNA, 1098 bp, Morganella morganii
atggcaatatcagccttaaaacgtattttcagtgccggtgtattactgctgtttttcaattgtgccggggcaaaagaaatcaccgatctcgccgggaaccgggtcactattccggataaggtacagcggattgcggttgtgcctattccgtggatgtcgatgatttatgtggtggatggttcagatgcaaaaattgcggggatgcatccgtcagcaaaagaggcttaccgcaacagtattttaaaaacactggctcccggtattgagaaggtaaacagcacctttgtgaataaagatttcacgattaacggcgaagagctggtcaggttaaatccggatctggtgattatctgggattaccagaaagaagaaaaagagaaactggataaactcggcatcccggcagtggcaatcagatacggtgatttggatgatgtgaaaaacgggatcaggctgctgggcgatattctgggcaaagaaaagcgggccgcagatttactggctttttttgatcatcagattgagtcagtgaacacggtgacaagagactcaaccccggtgaccattcgcgagatgccgtacggaaagccgggcattttgtatgtcagagataaaaacctgacggtggccggaaagacctcggtaaacagcctgatgatcaaccgggccgggggtattaacctgacagatgatatgccggttaaaccaaactggatcacggtgtcggcagagcaggtgattaacctggatccggaaattattattctgagccagtttgattcattcgtgccggaagatgtgtaccggaatacggtcggctggcaggggacagaaacgatttcagccgtgaagaacaaacgtgtctataaagcgcctatcggtatttaccgctgggatgcaccggggatagaaacgccgctgatgatgaaatggattgaagcgcgggttaagcgtaaaccggcagatgatgcggcaatacagcaggatatccgtcagttctttaagcagttctttgataccgatctgacagacgcacaaatgcgggagatcctcagcctggatgccaatatgaccggcaacagcagcacaggacggtaa

SEQ ID NO: 275061 - DNA, 960 bp, Morganella morganii
atgaatttaatgcagccatttgtatcagagaaattaacacttaaaaataaattagtttatccgccggtcagaataaaacgtgccactgacggctacgcggattactttcatctggcgcattatatgtcttttgctgtcggccaggtcgggctgattattatggaagagtgcgcggttaccgctgacggccgcctgggcagtggtgccctgggtttatatgaggacgggcatgttgcgatgctggcgcagattgtggcaatgctgcaaaatgaaggcagtaaagtggcaattcagcttaatcatgcaggcagcaagtcacggctggaatccggcaatattattcaggatattaatgcattaacaacagaagatattacggcattgtttgactgttatacgcgcgcggcggcacgggcagataaagctggttttgatgccctggaaattatggcatcccatgagtttttaatttctcagtttattgaccggcggacaaatcagcgcagcgataaatatgccgatccggttattttcctgactgaattactgaccgcaatccgaaaatcctggccggaagataaagcgattattttacgtatcggcacccgttactgcgaagaagacagtatttcatttacacaaaaaattctgcgtaatattaatccgcttatcgatattgtacatatatctaatggcggcagtcagatgcacggaacaaacaaaggtgttgcttatcagctggaagataccaaaggggtaaaaaaaggctgtgaaaaaccggttattgttgtcgggggtattcgtgatcaccaactggccgatgatatattagaacatcagtatgcggatttaattgctgtcggccgcgggttattacgcaatcctaactggtacctggaatatttactgaaatatgatcgtaaattaattccccgtccgtatatccgggcatttcgctga

SEQ ID NO: 275062 - DNA, 1251 bp, Morganella morganii
atgaccatcgcaaccaaaacactccgcgccccgtttaccccggatgccctgcgcagcctggctcagcaatatggtaccccgctgtggctgtatgacagtgaggtgattgtcagccgcattgcccggctgaaccgctttgatgtgatccgttttgcgcagaaagccaattccaatattcatattctgcgcctgatgcatgagcatggtgtaaaagtggattcagtatctgcaggggaaatcgaacgggcactgaaagccggttaccgtccggatgagattgttttcaccgccgatatgatcacagaagaaacgctggatcgcgtgctggaactcggcattgcggtgaataccggctcggtggatatgctgcgccagattggtacccgccgtccgggacatccggtgtggctgcgcattaatccgggttttggtcacggtcacagccagaaaaccaataccggcggcgagaacagcaaacacgggatctggtttgcggatctcggtgaagcactggcggagatccgctattatcagctgacattaaccggcattcatatgcatatcggttccggtgtggattatgagcacctggcaacggtctgtgatgctatggctgaactggtgatcaccaataatctggatatccgcgcgatttctgccggcggcggattatcgaccccttaccgcgaaggggatgaaattattgatatagataattatttttcactctgggatgccgcccgggcacgcattgcccgccatctcggccgtgagatcaccctggaaattgaaccgggtcgttatctggtggcggaatccggtattctgctggcacaggtacgggcggtcaaaggtatggggagccgtcactatgtgctggtggacagtggttttaatgatctgatgcgtccggccatgtatggcagttatcatcatatttcggtgttaccggcagcgggagagctgcaaaacagtacggtgcgggaaacaattgtcgccgggccgttatgtgaatccggggatgtgtttacccagttggaaggcggaatggtggtgccgcgtgcattaccggaagccgctgtgaatgattttctggtctttcacgataccggggcatacggtgcatcgatgtcatcgaattacaacagccgtccgttattaccggaaatcttatttactgacggaaaggcaaaattgatccgccgccgtcagaccattgatgaactgatggcgctggaaattacggaataa

SEQ ID NO: 275063 - DNA, 915 bp, Morganella morganii
atggaacactactcctggcgtcacattgatattttccacgcggttatgacaacaaaaagcctgacggatgccgcgcaactgctgcatacctcacagccgactgtcagccgggagcttgcccgtttcgaaaaaatcctcgggttccgtgttttcgaccgcatcaaaggccgcctgcacccgacagaacaggggctgcgattatttgaggaagtggaacgatcgtattacgggctcgagcgcatcagccgggcagcggagagcatccgtcagtttcagcatgcccagctggcaatcacctgtctgcccgccttcgctcagtcattactgcccgcggtctgccgcacatttcatgcgcagtatccggatgtgaattttgaaatcgccccgcaggaatcaccgcttcttgaagagtggctctccgcccagcgttatgacctcggaatcaccgaacatcaactgacgccgcccggcactctgcaggaaactctgctcacgctcagtgaagtctgtgtgctgccggaatcacatccgctgtgcagcaaatcagtactgacccctgctgattttgcgcagcagaattttatcagcttatccgttgcagacagttaccggcagaaaatcgatgcattgttcagtgaaaaacagatcccgcgccggatgataatggaaacacacagtgccgcctcggtatgtgccatggtcagagaggggctggggatgtctgtcgttaacccgatgactgccatggattgcagcggaatttgtgtccgcccgttcagtgaggatattccgttcaccgtgagcctgatccgcccgctgcacaggccgcattctgtactgacagatatttttatcacccatctccgccagcatatgcaggccgttctgcggcagttaaagcgggttaccggttag

SEQ ID NO: 275064 - DNA, 927 bp, Morganella morganii
atggacaggatcactgccgctcaggtttttattgccattaccgaacagcgcagcatgagcaaagctgcggatatactgggaatgtcccgcgcgatggtcacgcgctatctggccgaaatggaaaactgggccggtgtgcggttgctgaaccggacaacccgcagtctgacgctgacctccgccggtgaagcggtgctgacgcaaagccgggaattgctgtcattggcaacggcgattgcccgtccggtggtgacggaagatgaggcggtcagcggcctggtgcggatcacctgcgcccagtcactggcgatggtggcactgtcgaaggcgcttgtgcagttccgggcccgctatccggctgttgctgtcgatgtgcaggtcacaaataaagcgatcagcctggtggaggagcgtattgatctggggatccgcattaccaacaatctcgaaccaaacctgatcgcaaagccgctttcccgttgtgattctgtggtctgtgcgtcaccggcctatctggaaaaacacgggtacccgccgtcacccgaagcactcagtgaactgacctgtctgacctataatttttacggccgcagtctgtggctgtttgaacgggatgaacaggtgatttctgtcccggtaagcggggcgctcagtgccaatgaatccacttttctgctggaagcaacgctgaacggggaaggtattgcattgcagccttactgttcggtgtatgaacatctgaaaaccgggcgcttggtgcgcttgtttccggaataccggctgcctgcgctcggcatttacggcatttataccagccgcgagcatatggcgcggccgctgcgcctgctgctggattttctggcagagtggtttacgcattcaccggactggctgccgtatctgctggatgaaaaaactaaccggtaa

SEQ ID NO: 275065 - DNA, 879 bp, Morganella morganii
atgacttctgcaatccgtacctcactggtattcagcgccctgatgggtgcctcttttgtcactgccgccgcaccgctgtcgctggaagtgtataaccccggcgaaaaaagtatcttcccggtttcctctgaaatcatcagcggcaaaaatgaggtggttctgattgatgcccagtttcagaaagatgatgctcaggtactggcggataaaatccgtgcgaccggtaaaacgctgaccaccatttatatcagccattctgacccggatttctatttcggtctggatgaactgaaaaaaaccttcccgcaggctaagattgtcgccactccgcagaccgtcgcactgattaaagagagcaaagacggcaaactggcttactggggacctgttctgaaagagaatgccccgcagagtatcattgtgccggagccgttagagggcaaccgcattatgctggaaggggaaagtattctgattgagggactgaacagcccggcgccggagcgcagttatgtatgggtgccgtcactgtccgcagtgatgggcggtgtgctggtttcagagaatatccatgtctggctggcagatacgcaaaccccggaatcccgtcagtactggcagcagtcgctgaaaagtatgcaggacaaacatcctgccactgtggtgcccggccattatatcggtaacagccatttttcaccggctgccattacctttaccgccgattatctgacccgtgcggaagccgctctgaaagagagtaaggactcacagcagatgatcagcacactgaaagccgcttacccggccctggcggatgaatcaagcctcgaactgagtgccaaagtgctcaaaggcgaaatgcgctggccgcagtaa

SEQ ID NO: 275066 - DNA, 612 bp, Morganella morganii
atgtcagtaaaaacgctgcactatatttatgatccgctctgcggctggtgttatggtatcgcgccgtttattcaggccgcacataagcagggcgtgacgatcgccctgcacggcggcggaatgatcaccggctcacagcgccgcccggcagatgacagcatgcgggagatgatccgcaatcacaatcagcgcatcactcagctgaccggacagccgtttaccgatgccttttacaccctgctgaaaaatcaggagtgggtgatggattccgtgccgccgattgccgccattctcagtgcacaggcgcagtccggtaaaggcattgacatgctggaagcctgccagaaagcctattatcaggacgggctgccgcttaaccgcgatactttgcgcagactggcggataaactgggtatcagcaatattcagtctgataatactgagcagcatattaacgagagccgtcagttatttgtgcataacccgaccggcggtttcccgaccctgctgctggaagaggacggcgcatttcagcatatcccgaaccaggctgtactcggtgcggaatcgcactgggaaaggctgatcccgttactgaaaacgactgcctga

SEQ ID NO: 275067 - DNA, 639 bp, Morganella morganii
atgattatctggggagtatttttgccgctgccgctgaaagccgggacggaatatattctgcgccattactatcagtatccgcagcggttgccgggcgggtggctgtatctgcactgcctgttatccggtgtgctgattgtgttctggtcagacggacagggcgtgtatgtcctgtttctgacactgctgtttttgtgtctggtgatgctgtttcatattgataacgcagtattttatctgccggataaactggtgttcccggtgctttgggccggattgttgtttcagaatgaggtccggctggtgacgctctcttccgcgttgtacggggtgatcggcggtttttttctgctctggtgtgtggcggaaggttatgcctggtgccggaaaaaaagcggactgggcggcggggatatcaaactgttttctgcctccggggcctgggtgggggcggaacagctggcgctgttgctgatgctggcctgtgtgtccgcgctggtggtgtccgggatgcaatatttacgttaccgctgttatcatcaccggcgatgcggcccgcgcattattgccttcgggccgcatttaattgcgggaatgattatggtgatggggctgatgtcaggcagtcgttttcagtaa

SEQ ID NO: 275068 - DNA, 732 bp, Morganella morganii
atgcggatcccgcgcatttatcaccccggcactttaacccccggcctggtgacagaactgacagatgacggcgccaaccatgttgcccgtgtgctccggatgaaaaccggctattccctgatcctgtttaacggcaccaaccggatttttaatgccgaaattacggatatcagcaaaaaaagtgtgtccgtccgtgtgacagatgagcaggacgacaaccgcgaatccccgctgtctatccacctcggacaggtgatgtcacgcggcgaaaaaatggaattcaccattcagaaatccgttgaactgggtgttcagattattacccccctgatctctgaacgctgtggtgttaaactggacggtgaacggctggagaaaaaacagcagcagtggcagaaaattgccatcgccgcctgcgagcagtgcggacgtaacatgattccggagatccgcccggtgcagaccctggaagcatggtgtgcagaaaatgatgatgctctgaaaataaatttacatccgcgcgcatcacaaagtatcaatactctgcccgcagaaaccgctaaagtgcgattgctgattggcccggaaggcgggctgtcagcagaggaaatcgcgatgaccgccggtcatcagtttaccgacatattattagggccgcgtgtattacgcacagaaaccaccgcgctcactgcaatcaccgcattgcaggtgcgtttcggcgatctgggttaa

SEQ ID NO: 275069 - DNA, 951 bp, Morganella morganii
atgatcaagctcggtattgtgatggatcctatcgattccatcaaaatcaagaaagacaccagtttcgcgatgctgctcgaagcacagcgccgtggttatgaaatccattatatggagatgaatgacctttatctgcatcagggcgttgcccgtgcccgtacccgtactctgacggtgaaagaagacccggccggctggtatcagttcggcagtgagcaggatatcgcgctgggcacactgaatgtcattctgatgcgcaaagatccgccgtttgatactgaattcatttacgccacctatatcctggaacgcgcggaaagtgccggttctctgatcgtcaacaaaccgcagagcctgcgcgactgtaacgaaaaactgttcaccgcctggtttgccgatctgaccccggacaccctggtcacccgcagtgcgcagcgtctgcgtgagttccacaaaaaacacggtgatgtgattttcaaaccgctcgacggcatgggtggtgcgtctattttccgtctgaaacaggatgaccctaacgtcggtgtgattatcgaaaccctgaccagtcacggccatactttctgcatggcgcaaaacttcctgcctgccatcaaagacggtgacaagcgtatcctggtggtggacggcgagccggttccttactgcctggcgcgcatcccggccaaaggcgaaacacgcggtaacctcgctgccggtggtcacggtgaagtgcgtccgctgagtgagagcgattgggccattgcccgcagcgtagcaccggtcctcaaagaaaaaggtctgatttttgtcggcctcgatgtaatcggcgaccgcctgactgaaatcaacgtaaccagcccgacctgtgcccgcgaaattgaagccgcacaaccggacgtttctgtcaccggcatgctgatggatgccattgaaaaacgtctcggccggtaa

SEQ ID NO: 275070 - DNA, 534 bp, Morganella morganii
atgccctcgctggatgatccgtattttgcgcgttcagttgtgtatctgtgtgaacacaatgaaaacggggcgatgggactggtgatcaataaaccgatcgaacagctgtctgtcggtaaaattctgcaaaagctgaaaatctccccggacatccgtgaagaaagccagtcgctggaaaaaccggttctggtcggcggccctgtttccgaagagcacggcttcgtcctgcactccggtgataaaaagtacgccgccagcacccgcctgaccgatgacctgtttctgaccacctcaaaagatgtgctggaaactctgggaaccgcagagcagccggagcactacctgatgacgctcggctactcaagctggacggccggtcagctggagcgggaaatcatggagaacagctggctggtggcggatgtcagtgagcgcctgctgttccgtacccctatgcccgaccgctggcgcgaagccgccgccggtatcggagtgaatatttacaccattgcacaacaggccggacacgcataa

SEQ ID NO: 275071 - DNA, 423 bp, Morganella morganii
atgagcagcaatactgtgattgcctttgatttcggcaccaaaagcattggtgtggctgtcggtcagaccatcaccggcaccgcccgcccgctggcggcactgaaagcccgtgagggaattcctgactgggagctgatcgccgccgtgttccgtgaatggcagccggattatgtggttgtcggcctgccgctcaatatggacggaacgccgcagctggtcactaatcaggcgaaaaaattcgccaaccgcctgcacgggcgtttcgggatccgcgctgaactccatgacgaacgcctcagcacagtggaagcccgcgccaatctgtttgcagacggcggctaccgcgccctcggcaaagacaaagtggattctgcctctgccgtgattatccttgaaagctggttcgaacagctttacggttga

SEQ ID NO: 275072 - DNA, 1023 bp, Morganella morganii
atgaatatggataatttaatcgcccttagtgtaaagcataatgcatccgatctgcacctttgtgttggtcaggtgccggtgttacgggtggatggagagcttttttcgcagacacactgtgcggcggtaaccgatgacgcactgcgcggctgggtaaagacgatcctcgaccaggcaaattaccacagattgatgacaaaagggcaggcggatcttgcgttgtttatccgcgatcaacctttgcgggtgaatatttttatggcggggggattgctgaacgccgcactgcggctgataagtccggtggttccctctctggaggatatcctggcgccgccggtgtttgccgggctgctgtcaaagacgcaaagcggcctgattctggtgaccggggcgaccggcagcggaaaatcaagcacgctggcagcaatgctcagctatatcaatcagcacttccggcggcatgtgattaccctggaagacccggtggagttccgtcaccgcagcaggcagtcgctgatccgccagcgggaaatcggccgtgattgtgaggattatcagcaggggctgacagccgcgctgagacaggatccggatgtgattatgctgggggaactgcgggatgaggcggctatccgccttgccctgacggcggcggaaaccgggcatctggtgctgagcacgcttcatacgcgcggagctattgctgcgattgagcggttgacggatgtattcagcggtgcggagaaaaaccgggtgtgcagccagctggcaggcagtctggtggcagtgctgagccagcatctggtggcaaaacagggcggagggcgctgtgcattgtttgatgtgctgatcaataccccggcggtggcgagtcttatccgtgataataaagcgtatcagattgcctctcaccagcagtcaggcgcacagtccgggatgatgacggaggagcaatgtctgcaatggcggcgtggcagaggggagatagccggggaggcgggcgcggtaccggcatggtaa

SEQ ID NO: 275073 - DNA, 699 bp, Morganella morganii
atgaaaccaataaaagacaatctgacagaaatcagagaacgtataaccgctgcggcgcaaaaatgcggtcgcgatccacacacagtgaccttgcttgccgtcagtaaaaccaaacctgtgagcgcgctcgaagaagcgatagctgccgggcaaacccgctttggtgaaaactacgtccaggaaggtgttgaaaaaattcagtatttctccgcgaatcaaaatctggaatggcactttatcggcccgctgcagtctaataaaagccgtctggttgcggaacattttgactggtgccacaccatcgaccggctgaaaatcgcacagcgcctgagtgaccagcgtccggcggacaaagcgccgctgaatgtgcttatccagatcaatatcagtgatgagaacagtaaatccggtatcacccttgcggaattaccggcgttggcagagcaggttgcggccctgccgaatgtctgtctgcgcgggctgatggcaattccggcaccggaaacggatcctgagcgccagtctgcggttttccgtcagatggaagccgctttccgtgaactgcaggggaattacccgcaggcggatacgttatcgatgggtatgaccgacgatatggacgccgctatcacctgtggttcgaccatggtacgtatcggtactgcaattttcggtgcgcgtaactattctgtatcctga

SEQ ID NO: 275074 - DNA, 549 bp, Morganella morganii
atgcaaacactgaattttgttgtcaccacgctcctgcatgcctatgccacgattttactgctgcgtgtctggatgcaatgggcgcgcgcggacttttataatccgtttgcccagtttgtcgtgaaagccacacagccggttgtccgtccgctgcgccgtattattccggctatcggcccgattgatacagcctctgtgctggtggcttatgttgccgtactgctgaaactgctttttccgtggtttctggccggttttcaggggcagctcggcgggctgatgctgttagtcgctttctttaaccttctttatcttgcaggtatgacggtattctgggtgatcctcgcccgcgcgctgctgagctggttcagccagggccgcaacccggtggattatgtgctgatgcagctgaccgagccgctgatgtcgccgttccgccgtatcattccgccgatgggcggcattgatttctctgcaatgattgtcatttttattttgtatgcactgggctatctctataacgatattgttcagtggatatttatgtaa

SEQ ID NO: 275075 - DNA, 597 bp, Morganella morganii
atgacccgcaaaattgttttagctaccggcaatgccggaaaagtccgcgaaatggcctcactgctggcggatgccggtatggatgtggtggcacagacagaactgggagtcggctccgttgaggaaaccggcctgacatttgttgaaaatgccattatcaaagcgcgtcacgcagcgaaagtaaccggtttaccggccattgcggatgactccgggatctccgtcgattacctcggtggtgcgccggggatctactccgcccgctatgccgggactgacggcaacgacggtgccaatatcgtaaaactgctggccgcccttgacggcgtaccggcggcgcagcgtcaggcgcacttcaactgtgtgctggtgtatatgcgtcacgaaaatgacccgacaccgatcatctgtcatggccgctgggccggtgtgattgcagagcaggcgcagggcgaaggcggtttcggttatgatcctgtcttctggctaccggaactgaacaaaaccgccgcacagctgcgtccggaagagaaacaggctatgtctcaccgcggcaaagcgctggcactgctgtcggaagccctgcgtaatgggtaa

SEQ ID NO: 275076 - DNA, 1131 bp, Morganella morganii
atgggtaagcttcccccgctcagtctgtatattcatattccgtggtgtgttcagaagtgcccttactgtgatttcaactctcacgcgctgaaaggtgaagtgccgcatgatgattatgtggcacatcttctggcggatctggatgccgatctgccgctggttgccggacgcgaaatccgcactgtctttatcggcggcggcacccccagcctgctgagtgcggaagcgatgcagacactgatggacggcgtacgtgcccgtatccctgtcgcagcggatgcggaagtgaccatggaagccaacccgggcactgtggaagccggtcgtttcagcggctaccagaaagccggtatcaaccgtatttctattggtgtgcaaagcttcggtgatgacaaactgatccgcctcgggcgcattcacgatgccggagaagccaaacgggctgcccggctcgcggcgacactcggactgcgcagttttaacctcgacctgatgcacgggctgccggagcagcatctcggcgaagcgctcagtgacctgcgccaggcgattgaactagccccaccgcacctgtcctggtatcagctgacgattgaaccgaacaccagtttcggctcccgcccgccggtgctgccggatgacgatcttctgtgggatattttctcacaaggccatcagctactgacacaggccggttatgtgcagtatgaaacttccgcgtatgcaaaaccgggatttcagtgtcagcataacctcaattactggcgtttcggggattacctcgggatcggctgtggtgcgcacggcaaaatttcgtttgctgacggacgcattctgcggacagtcaaaaccaaacatccgcgcggttatatggaagggcgctatcttgatcagcaaaatgaggtggcaacagaagaccggccgtttgagttctttatgaaccggttccgcctgctggaagcgatgccgcgccgggatttcaccgattacaccggactgccggaatccgtggttcgtccgcagattgaagcggcactgaatgccggtgagatttctgaaaccgcaacccactggcagataaccgaacacggcaagttattcctcaatacactgctggaacggtttttataa

SEQ ID NO: 275077 - DNA, 957 bp, Morganella morganii
atgaaaaagatcattccgttagtgttaattccgtttttaggctttgcctccgcttccgcgctggctgactccgcgccgaaatataccccgaatcatattgccgccgtggcggataaaagcccgctgctgaccatcgaacatcagtcgggctctgcgaaagtggcacaaaagccatcccgcgtggtgctgtttgactttggtgtgtacgacaccatgaataagctgggactggctgacaatgttgtcgcgctgccgctgggcaatctgccgtcatatctgaaaggtcaggtggacagcaaagtcgctgatgcaggcggaatgaaaacgccggacctggcaaaaattgcagaactgaagccggatctgattgtgatcaccggccgtcagggcaaatcatttgatgaactgaacaaaatcgcgccgacagtgaacctcggtaccggcggtgatgattatctggcagcggcagaggcgaatattactctgatcggtcagctttatgatattgagaagaagaccgcagaagagctggccgcgctgaataaaaccgttgctcaggctcaggaaaaagccgccaaatccggtaaaaaagtgctggtgatgctgcataatgacggaaaattattcccgaataaacagccggttgtctatcaggtggtgaaagcggccgctgttgatattcctgttgatccgaaagcagagaaagataagcgcccgctggtgacaccggaaatggtggcagagctgaatccggatgtgattctggtgattgaccgcagcgcggcgattggtgcagggcagtgggataaagcggcctttgaaaccgatggcgtgaaaaagaccaatgcctttaaaaatgacaaaattatcgtgttacagccggatctctggtatctctccggcggcgggctggatagtctgaaccgtcaggtgcaggccgtggaaagcgcgatgtaa

SEQ ID NO: 275078 - DNA, 729 bp, Morganella morganii
atgttacgtaaatggattgccgttctgagtctgggtgccgcgtcactggcatcggcggaagggtatcagtgcagtgtcaccccgcaggatgatttggttatcacaccgacctatgtgcaggtgatcgggaaaagcggggaaatgaagatctcccctgacgggcagatcacccgcgacggcaaatccctgacactcagcgccgcacaaagtgcggatgcaaaacgctaccagtcaggtgtgcgtcaggatgtgccgtggataaaacagcaggcggtgaaccggatcggtaaatcccgtcaggctgtggataaagtgctgatcaaagagatggggcaggacagcaaactgcgcggccatctgacaaccctggaagcggatctgaataaacaggttgatcggatcattgaaacccgtccggatggttatgccttccatcatcaggcgattaagcaggtggagcaggacggacgggcgcagatccagcagcgtctcggtggtatgctccaggatgctatcaatgaaatcggtcgcaaacagctgcttgccgggctgaccggtgacaaaagcgccgccggtgcggcactgagcgggctggacgggttacagaaatccttacagcaggccgtgcgtgaacaggaagatgattttaaacagttcagcaaacaggtgtgcggcaaagtcactaccctggaacagcagcgtattcagctgataaattcccttaagtaa

SEQ ID NO: 275079 - DNA, 987 bp, Morganella morganii
gtgcccttatctctctccggcctccggatttacggcgtgctgtattttggagtaacaaccttgaccacacactttagtaatgaactgctggacgatatcttacactgtgtccggccgctgattggctccggtaaagtggcggattatattccggcgctggcggaagtctcacctgacaggctggggatcgcggtgtgtaccgtggacggggagattttttccgccggtgatgcgtatcagcgcttctctgtgcagtccatttccaaagtgctgagtctgacactcgcgatgacgcgttataaggaatcggagatctggtcgcgggtcggcaaagagccgtccggtctgccgtttaactcactggtgctgctggagatggaaaagggtattccgcgcaatccctttataaatgccggggcaattattatcgcggatatgctgcagtcccgcctcagtgcgccgcgtcagcggatgctggagtttgtccgcaaactgaccggcagtcaggatatcacttatgatttgcaggtggcacgttctgaactggagcacggcagccgcaatgcggctattgctttcctgatgaaatccttcggcaattttgagaataatgtactgactgtactggagaactattttcactattgcgcactctcaatgaactgtgctgaactggcaacctgttttgcatatctggccaacggcggtgtgccgctgggcggcaacgagccggtgatcacgccgttacagtcacggcagataaatgccctgatgctgacctgcgggatgtatgacggctcgggggagtttgcttaccggataggcatgcccggtaaatccggggtcggcggcgggatcgtctgtgtggtgccgggcgagttttctgtggtggtctggtcaccggaactggatgattcagggaactctttggccggttgcgctgccttagaaatgttatctgcaaaaatcggacgctctattttctga

SEQ ID NO: 275080 - DNA, 327 bp, Morganella morganii
atggcaacacaacgtagtcgtcgattacggaaaaaaatgcgtatcgatgagttccgcgaacttggtttttccttcaaatgggacttcccggaaggcactgatgtcgacactatcgaccgcaccgttgaccagctggttgaggaagtgatcgagccgaacggcctggcgctggatgccagcggttacctgagctgggaagccatggtctgtttacagaaaatcggtgaatgtaccgatgagcaccgtaagctggtgggtgactggctgaaagccaaagggatgcagaacattcagatgtctgaactgttcgatatctggtgggactga

SEQ ID NO: 275081 - DNA, 720 bp, Morganella morganii
atgatcaacaatgtaatttcgccggaatttaatgaagacggcagagccctgcgccgtgtccgcagttttgtgcgccgtcagggacggctgaccaaacgtcaggaagatgccctgacagacctgtggccgtcagcgggggtggattttaccccggaactgctggattttaccgcgctgttcgggcgtgatgcgccggtcacactggagatcggtttcggcatgggcgcctctctggtggagatggcgaaacaaaatccggataaaaactatctgggcattgaagtgcatgctccgggtgtcggtgcctgtctggcggatgcgcaggaagccggggtgacgaacctgcgggtgatgtgccatgatgccatcgaagtgctggataaaatgatcccggataacagcctgcatatggtgcagctgttcttccctgatccgtggcataaggcccgccacaataaacggcgcattgttcagctgccgtttgcggaaaaagtgcggacaaaactgacgcagggcggtatcttccatatggcgacagactggcagccgtatgcggagcacatgcttgaggtcatgactcaggcaccgggttaccgcaatctgtcagcaacacaggattatgtaccgcgtccggatacccggccggtcacgaagtttgaaaaacgcggccatcgcttaggccatggcgtctgggatctgatgtttgagaggatgaaataa

SEQ ID NO: 275082 - DNA, 1038 bp, Morganella morganii
atggaagcacagcaattttcgcaatcggttctgacgtggtatcaccgctacggcagaaaaaatctgccctggcagcaggagaagaccccttaccatgtctggctctctgaagtgatgttacagcagacccaggtggcaacggttattccttattttaaccgttttattgaacggtttccggcagtcactgacctggctgccgcaccacttgatgaagtgctgcatttatggaccgggctcggctattacgcccgtgcccgcaatctgcacaaagcggcgcagactattgcttctgaattcggcggacagttcccggtcacgtttgaggacgtggttgccctgcccggtgtcgggcgttcaaccgcaggcgcgattctgtcactttctcagaatcagcatttcccgattctggatggtaatgtaaaacgggtgctggcgcgctgttatgccgtcagcggctggcccggtaaaaaagaggtggaaaaccgtctctgggcgatcgccgaagatgtgaccccggctgacggtgtgcagtattttaatcaggcaatgatggatctgggtgcgatggtctgcacacgcagcaaaccaaagtgcgagttatgcccgctgcagtccggctgcattgcctatgcagagcacaacccggcggcgtatcccggcaaaaaaccgaaacaatcaatcccggaaaaaacagcttactttcttatcattcagcatgataatgagatctggctggaaaagcgcccggcaaaagggatttggggcggattatacagttttccgcagtttgcaacggaagacgccatgcacgactggctggcacagcgccgtatcagtcactcacccttacagcagctgattgccttccgccacacattcagccattttcacctggatattgtgcccgttgccgcaaacgtcaccgatcgcacagcagtccatgacgacagcgacgggatttggtataacagccaaaatccgccggtgatcggcctggccgccccggtggaaaccttgcttaagcagatcgggtaa

SEQ ID NO: 275083 - DNA, 273 bp, Morganella morganii
atgagcagaacaattttttgcacttttcttcagcgtgaagctgacggccaggattttcagctctatccgggcgaattaggcaaacgtatttttaatgagatttccaaagaagcctggcagcagtggatgtccaaacagaccatgctgatcaacgagaaaaaactcagcaccatgaacccggatgatcgcaaactgctggaacaggagatggtcaaattcctgtttgaaggccacgatatccacattgaaggctacacaccgcctgaaaaataa

SEQ ID NO: 275084 - DNA, 1116 bp, Morganella morganii
atgttgtatctgaacccggatcacaccgtatttatacccatgaaaaaacttgctgcactgatcattattgcgccgctgctggcttcctgtaccggttcacaggaacagacggattaccgtcctgaatatgttaaggataccaacggatttgatattctgatgggtcagtttgcccataacattgaaaatatctggggtataaaagaagttctgatcgccggtccgaaagattatgtcaaatacaccgatcagtactacacccgctcccatatcaactttgatgccggtaccgtcaccattgagactctggcgggtgttgagccggaagcgcatctgcgtcaggcgattatcaataccctgctgatgggagaggatccgggctcggttgacctctattctgacgccaacgatgtcactatcagtaaagagcctttcctgttcggccaggtgcttgatcataccgggcagccgatccgctgggagtggcgcgccaccaaattcgcagattatctggtgaccaaccgcctgcagcgccgccagtccggctcacagatgatcacctatatcaccctgaaactggtgccgaaccatctggaccagcgtgctcacaaatacctgccgctggttcgtcaggcatcggccaaatacggtgtggaagagtctctgatccttgcgattatgcagacggagtccagctttaacccgtatgcggtcagccgctctgatgcactggggctgatgcagattatgccgaacaccgccggacgcgatgtgtttaaatctcagggccgctccggtgtaccgagccgcagctatctgtttgacccggcaagtaatatcgataccggtacggcatatctggcgattctgcagaatacctacctcggtgagatcagcaacccgacatcacggcgctatgcggtgatcactgcctacaacggcggtgcgggcagtgtgctgcgtgtcttccacagtgataagaaacaggccgcccgcattatcagcgggatggagccgggtaaagtgtatgaaaccctgacgacgaaacacccgtccggagaatcccgcaattacctgcgcaaagtaaacgacctgcagaaaggttaccgccgttaa

SEQ ID NO: 275085 - DNA, 654 bp, Morganella morganii
atgaaaaaactatcattagttttagttgatgaccatccaattgttctctccggattaaaggagacattatcacaatcatcaaatttatctgttatgggagcttttacccaagacgctgagctatttacatttttaaaaaaaaataatgttgatgttattgtgactgattatatgatgccaaataacacattattaagtgacggccaaaattatattcagtttttacgtcgtaaatatcctggtactgctttagttgtattaacaatgatttctaaccccatgatcatacagatgttgtatgacaacggtgtcagcgctgttgtttcaaaagaagctcctttgcaggatttgatgaaagcaataaaactggcagggcaaggccgggaatatcaccaacctgctgctgatttaactacaacattaaaaagccgcaatgccacaacccttgatgaacgggtaaaaacactatcaccccgtgaattagaggtgctgcgactatttgtacaggggaagcccattgttgaaattgcgaagctgttaaaccgaagcgataaaacgattagtttacaaaaaaatgcagcaatgcgtaaattgggggttgataataatcaggctttaatcagttattgcgtcactcaccatctgtttgattaa

SEQ ID NO: 275086 - DNA, 3210 bp, Morganella morganii
atggtcaattcctctccaactgcattttcacgaataacacgtaattcagggcgtacgaatagcatattaactgttgcgcttcctctcctgtttattctgattgcaactctggtttggagtgctgaacgaattattcaacaagaaacaaagcggttagaggtagatttcagaacacttaccggctatatctttgaacaagaaaagtttttaattgcattaaatcagcaaaatcaagacttatcagagttagtagaaagccggacttactcaataaattaccaatcgtttcccaaaaaatggccgctccaattactggagggtaaagaatcgcttgttgctatgccattcacattaggttgcaatgagagtttagagtgctccagggtgccaagtattttattttcacttggtgcatatttagctgatttttactctacattttggggagggtcatattatcctgctgcagcagtattctttattaatgaacatgaccatatcagcatcggcgttccttctgtgggttcagtcatgggtaatgaatcgatatcacctgagttattccatgcggtgacagacagtattcgcatcaacctcccttcaataaaaaaacagcttgatgaagcacaaaaaaaacatgagaaaaatactgttatttggataagacaatcaaactcaacgaataatcttataggcgttatttctgcaggtttcgacgtacatttgtgggaaaatgcacaattatcgccacaaaacatttatgcggcttcgttactgagccaaataagaatacgtgtttttgaaagaatgttaaacccgtcactaacacatcaattttggttaactcataatgagtttggtcagttgtcaggtgacacaaatataccatttgaaaccagtgaaggacttttttataccaaagatgggcttgttctgaaactggattctcaaaataaaaaatggagcggatattacagaattagttacgccgctttttttgaagataatctttggttacccattagtttaatcacagctctgttcttcagctttttttgtggctggggttaccaccgttggtaccaaagaaaaattcttcagccagctattcagtcccagcaaattatcttagataatgaatcttttaatcggacacttattgctataacgccgattggtctgtgtgttattgacagagaaactcggcagttgcgtttcgcaaatgaacttgcacaatactggcttaaaattacagaaccttcccggcctcaggactccggtgaataccgggaacttcttagccatgttattacccgggaaaaacacgtcaaaacaatacaaaaatcaggagataatgttctgtatatcacgagtacagagacgaattaccagcaacgttctgtaattttgtgtgcatttaccgatataacgatgcaggcagaaactgagaaacagctagctaatgccaaacggttagctgaagaagcaaaccgggctaaatcttcatttttagcaaccatgagtcatgaaataagaacaccactttatgggcttattggtacattagaattactatctaatacattgttatctcctcagcaagttaatttaattaaccgtatgtcgacaacatctcaattattaatgctattgattggagatattctcgatatcagtaaaatcgaagctaatcaggttaaaattcaaaatcaaccattttctcttttggaattaatacaacaaactgttcaactatatcaaggcttggcacaacaaaagaatttagtgcttttccagattatagatccggacatccactcaaacagagtcggagatgaggcaagattacagcagattattggaaacctattgagtaatgccattaaatttacacaaaaaggtactattattgtcgaattgaaaacaggcactaatgacaatatattgttgcgggttattgactccggggtcggtatcgatgctgagcaacagaaaaaattgtttgaacctttttaccaggcgcatccggaatctctcacatatggcggcactggtttaggattatttatttgctcaaatctggttaagctaatggggggactgataagcttgcaaagccagcccggtaaggggagctcttttcttatcacactacctcttaagtccggacaacaagacgatatatgggaagatctgacaggtacccacatttggctccaaaccattaatccattacttaccaaaaatcttactcaatggttaaaaaaatggggagctactgtttatttaacacaagatagcttaccagaggatacatcatcagttatcgcagttggtatattaatagaacatatttcactacctgaatactggaaggggaaaatatggttagcctctgaaagctattgcaaactatcagaactaaaccaaaagctatttttattaaaaaataacggggatctgacaacctcattaattaatccaattcccaggattcaagcacatactgatctgttttcattaaaagtattaattgctgaggataatatgattaaccaggttgttcttcaggaacagcttgaactacttggttgtcaggtctttacagccagtgatggtgaggaagctttagttatttgggataatgaaatcgttgatattattcttactgatgtcaatatgccataccgcaatggttatgaactcacaaaacaacttcgccttgaaggagaaacctgcccaatcatcggtataactgcaaatggcctgaaagaagaagaagaacgttgtttacaggcaggaatgaatgcctggcttgtcaagccaatagaattagaaactttagtacatgttttaagtcgctttttccccgtcagccagtcttttttttctgaagatgaattaattacccgcgttaatccactcaatagtaaagatagggaaaaaattatttcgcaatttagtattgatatacaagagctcaaccaggctataaacaaactggatatcgaaatagtaaaacaactttcgcatcggctgcgcggagcattagtcagcgcagaacaacaagagcttgccgataagcttctgcaatttgaaaagtcattaaattcagaaactgcaaactcaggcttaatcaaatttggtcagagtatttgcaatgatctgataacctgggtcaacaagcttaatcaaacagatggtgagtga

SEQ ID NO: 275087 - DNA, 984 bp, Morganella morganii
atgttctgtttaaaaaaaatatcttcatttattatattggggtttttacttttgagttttaatgtatcggcatcggtatctaattgccggacaaattcaggtccgggttacatacagcaagacctcacatttaatattaccagtagtaatagttcaatggcgaccggtacacaattagcatcagctacctcttcattagtttctttttcatgtgattttacaggaacagtagctgctcctaaccatgtatattttaaaaacacagtgccaccggagataaaaacacttttaattaatagtggtgtaactgtaacacaacaaaacgccattggtggcggtatagctgtgacaattacaaacccaagtgtacctaatattgatttaggttattggagccaacccgctaccggtgttacgacgactattgggataatgtataacttttctgtcaataaagggaataatgcattaaagtcgtttgacacaggttcttttttgttgggttatcatgaagattatcaggggcaatatcttggtgtattagtttatgctcatattgtcggtaatttaacattactttgtccaacccctgcggttaatttatcagtatcacaaggtggcagtatcgagtttaatacagtttcaccaaagcaaatgaatacaggagagtcaattagtcgtcctttttacttaatgatggctgttccccccgattgtgaaactggtttaaatgtatctgtccgttttgaaccaaataataatactattctgggtggaaaataccttgatatgggaaatggattacaaacaatgttacaaagtggctcaacagaaataaattacagccagaactatgcgattggcgaaatcttacctcaatcgccggtaagtgtcccttatactgcgatcttaaataaagtgccgggcagcactataagctcaggaccattttcaaaaacgatccgggttgtagtctcttactga

SEQ ID NO: 275088 - DNA, 723 bp, Morganella morganii
atgaaaaatttaaaattaataatgagtgtattacttttagtaagcacttacacatgtgcatcaatttctgtcgaccgtactcgcgttatttatgacgaaggtagtaagggcgttagtgtggttgttgaaaatacggataataaggacccgtttttagttcagtcctgggtggaagatgaaaaaggtaagaaaattactgatccgttagttgcattacctttattgcaacgtattgaacctaaccaaaagaaacaaatcaggattagcacatcaaaaattaaccaggctattgccggtaatgaagagtcattattttattttaatgtgcttggtatcccacctaaaagccaatctgaaaatgcagttgaaattgttattcagtctcgttttaagttgttttatcgtccaaaaggaattgttaaatatgcaggtaataactggcaaaaagaattaaaagttgaaaagataggtagtacattaaaactggtaaaccctactgattatcatattgtcgtgataaatatcaatgatagtaaaagtaaggttgctaattttgaagaagtgatcattaaacctaatagtaatatgaattattttttatctgataaacaaaaaaattcatctaaaatagttataacatatgttgatgattatggttccccgaaattattaaactactcatgcagtagtgcatcgtgtgtacttgacagagagaaagaataa

SEQ ID NO: 275089 - DNA, 2466 bp, Morganella morganii
atgaaaatgaacaattttaaaaaaaacatagtagctagtttaatagctggattatttttttattcaaactatgttaatgcagactcaattcaatttaatcaggatgctttgtctatttctggtgactcagatattgacttaagtgcttttgaacacaactcagttgcagaaggttcttatttttcaaatgtttctgtaaatggtaaaagagttaattttcttgataaaattgattttctgaataacaatgggaaagttcagccttgcattccacaaaaattagtggaaatcattggtttaaaagaaaaatttataaatgaaatccctacgtgggagaatggccgatgttatgatttatcatcacaggataaaaatatcacatcaggattcgatgatgaaaaacaagaactggtattatcaataccacaagcttattttttgtattctgatgataattgggttcctcccatgcagcgtgagatcggtattaatgcgttagtttttgactataatattattgaaaattactttaaatataaaaatactgaaagtgcaaataatctgagttcattcggcgctttaggtgccaatattgggcgatggaggctgcgcagtaattatcagttcctgaaagattttaacaacacaagtaatgataactttaagtgggtacaaacatatatctttactgatttaccaagtttatcagccaaactttttgcgggaaaatattatacagctaaccagttatttgattctgtccgctttaacgggattagtatttttacagatgaaaaaatgttacccgcatctttaaggggatatgctccgaatgtttcaggaatagcaacaagtaatgcaacggtcacaataactcagaatggacgaatattaaatcaggttaaagtcgcaccgggaccatttttgattgataacttaagttcctctttatcggggacattagatgttaaaataacagaagaagatggctctgtcagggagtaccaggtatcttcaacaagtattccattcttaacgcggccgggtatggtgcaatataaatttaatgcgggtcagttggatcctatgggatataagaatgttaaaaatgatttcatttcaactgaattttcgtggggggttttaaataacttatctgcatttggcggagtattttcaacatcagataatgaatatcatgcttataacgtaggtattgggttaaatatggaacgttttggtgcgatgtcatttgatattactcaatcaagaaataaattgaaagatgtttcctcgcatacaggagagagctatcgtattaattatgctaagcgtttttcaaattcaagccgtcttgatttaacaggatatcaattttctaatgaagggtttatgtccgttaataatttcattgacactaaagaaaatccatcaggaaaccattatcgtcaaaagaatgtatttacaacatcttttacccagcaaattcctgattggaatgctgatataagtctaagctattcaagagaaagttactggaatgaatctaaaagcaatgacaccttgaatttatcatttaacaaaacaatcagaaatgattatcttgataatgcggttctatctttttcaattggtgaaagtagctatacaaaaggaaaacgatctaaacaggcttacctttctttaagtcttcctttaggtaaagaacgagactccagattacaatatttttcttcttataatgatcgggataaaaaatatagtaataatataaattactatactaaaatgaatgaaactaatgccaatatcgggttgtcgagtaaagatttttttgagaatgtgacgattaatacatctttatatcgtgacactcaatatggtacggcccagttcactggtgcttatagtaacgattatcatacagcgagcgggtcattagatgggtctttaacattaacaagccatggtcctgtattacatcgcagagtttacgaaaaccaggcaagaatggttattgatacagataaagcaaaagatgtgtctatcaataaaaatgagtcaataaccaacaggtttggtttagctgcaatcagtaatgtaccaacctattataaatcaactcagtatgtggatctgaataacataccacaaaatgtcagtattgatgacagtgttattgaatcaacactaacagacggtgcggttggatattctaaactaaataccattatgggtgagaaagcattattaacaatcagttttcctgatggaaaaacaccaccatttggtgcgttagtctacgattctgatgaaaaagtattgggtatgattgctgaacaaggtgaagtttatttagcaggtattcaaccaaatcagaaattaattgttaaatggacagggaatcaatcctgccggattacgttagataatactaacgttcagaaaataacttgttataaatag

SEQ ID NO: 275090 - DNA, 534 bp, Morganella morganii
atgaaaaagacgcttttagcatcttcaattatcgcattaacatttacagctgtatcaacttcatttgctgccgatgttggaagcggtactattgaatttaatggtacagttaactcaggtgcctgcagtattgtaccatcatcaattaataaagaagttcagttaggttccattcctgctgtttctttaaaaacggcgggagcacagggtcctaatgttgattttactcttgaactcgctgactgtgtattagatccagcggcaagcggtacagattactctaaagtaacagttaaattcacaggccagatggatgccgcgggtgttttatgggcaaacagtggtacagcacagaatgtcggtattttattccaggatgggaatggcactaatttaaaaacaggtgatattattactcagaacttaaatgcgggttctaatacgattaatttatcagctcgtatgcaagcattaggtgtggcgacaggaggctcagtgaagtctacagtagcctacgtcctggattaccaataa

SEQ ID NO: 275091 - DNA, 291 bp, Morganella morganii
atgaccgtaaaataccctatagctaaagctataggggagaaaataaaaaaactaaggaaagaaaggggattaacaggatccgatttggccataatattaaaaataagccaacaacaagtttctcgttatgagaaaggaacaagtaggattgatattgataaactgatctgtatatcatcactatttaaggttgacataaactatttttttgatgagttatcagaggtctgttcgtcagatgttttttttactgaaaataaaaatataatttatgaacttaaagatgattaa

SEQ ID NO: 275092 - DNA, 2778 bp, Morganella morganii
atgacatttaataattcagtgctgattgcactgttttccgcttctttcagcgcttatgccacggaaccaccaccaccttatcaatcagaggttgaagtccctgatattaataccattctcagcagtgccaccgatggctggccgaccgcaaaagataagtgggataataaatatcagtcaattatcaccggcaaccaatatattaatggtcagacattaaccagaacctggttcccggaacaatttctttatgttgagaataattcttacagcctgaataacaccattgattccttccagaccacattccggagcggcagtgtcgctatcggaaatatagtcaaaggcggaattaccaatccgtccgacccttccaaagtctatcgcggctttatgtcgatgatggaagactccgtcgcgtataacactattgttgaagataacggcagcctcagcctgggaaatgacgccaaagcgtataacaccacagtgaatgccggcggcagaatggttgtcggtacacggggctatgcgcaggcaattctgatcgacggcggttatctggagcaatccgttaccagcacctcaaataccaaagatgtcattgtcgtgaatggcggccagcacattatctacggcggtacggcaaccaacagccatatcggcagcggcagctatcagatgagcagcggcaacacgatagataccgtgttgtatgacggtgcggttcagcagatttatgccgggaaagatggtgtgactgaccgcaataccatcgttaaccacggtgcattacagtttgtgacccacggtaatacagaagatacccgtgtttacggtacccagattattaccggtgttgacggggaatgggaaaacggcgagtggacatccgacggttctttccggattgatgatcagacagccaaaaatgccaccatttatgccggcggtgttcagcgtattcagaccggcgaagccattgatacccaagtttacggacagcagattgtcagcggcaaaaaaggcggctggaccggcggacaatgggttgagcaggacgcctggattggcaaagatcaggttgccaccggctcagtgatccaccagggcggtgagcagattgttgaatactatgccgatgcggttggtacactggttaacggcggtacacagctggtcaaagagtttggtcatattcaggatactaccattgagaacggaggttcatcctttattgcttacggcgcctactccaccggtgacctgaatgttaatgacggttcagtaacgatggaaggcggtagtcttcacagctggaccggagctctggacggcaaaggcgcttatgttacccgccttaatctgaccggtgacaatgcgtttatgtatcttaagcataatgacaccaccagcgaatccgaagcaacgattgaaacactggctaacaacggcaccgtggtattcggcagcagtgacggcagtgatgccggtaaatacagccgtttacagatttcagatctgaccggttccggtacctttgtgatgaacactaatattaacggcggtaccggtgatttcctgaatatcagcaacagtatcagcggtgagtttaatgtcagagtaatggattccggtcaggagctgaaaagccgcggcggtgtgaatcctcatcatctgatctttgccaacggcagtgacagcaacagctttgcgctggtgaacggcagtgttgacctgggtgcttataaatattacctggtacagggtgatgagcaggacagcgataactggtatttatcgccgaaagcaaatgaaccggcaccaaacccggatccggagccgggccctgatcctgatccgaaacctgaaatctctgaaagcgggaaaaacgctatcgctatggccaacgtgacgccaactatctggaacagcgaattatccacactgagaacccggctgggcgatcttcgtgataaccagacggcacaggatggtgtgtggggcaaatatatcggcagccgtaaccgcatctcaaccagtaatgtcggttacacccaggatatgaatgggctgatgctgggcggcgaccacgcgattgcgctggaaaacggccgcctgctggtcgggggaatgttctcctatacccattcagaactggatgcccgcaccagtgacggcaaggtggacagcttaggtcttggtgtctataccacctggatgcacaacagcggttactatgtggatggcgtgctgaaagccaaccatttcagaaccaaaaacagcgcacagtttaatgacggaaaaaccacggccaaagataacaccaacggcatcggtttctctgtggaaggcggtaaacacatcaccgcaggcagttactttatcgagccttatgtgctgggatcttacttccgcggcgaaaaaacagcctaccgtttcagcagcgatatgaaagtgaaagcggatgctgcagaatccgtgaaaggtgaaatcggtaccaccttcggtaagacgtttgtcactgaaagcggcggactgattaaaccttatgcccgcctggcggtcagccacgagttcaaaaagaacaatgatgtggtgattaacgacacggaatcattcagcaatgatatgtccggaaccgtcggtaagtacggcgtgggtctgacagcacagatgaataaccagtggtccgcctatgcagagttcaactatgccaaaggcagccatgtggaaaccccttacagcggcaacctgggtatccgttacagtttctga

SEQ ID NO: 275093 - DNA, 1254 bp, Morganella morganii
atggatataaaagtcagactgaaagcgatgctgttcctccagtatttcatctggggtgcgtggttaatcaccctcggttcgtatatgatggcaaccctcaaattcaccggtgccgatgtgggctggatctacagcaccaaagggctggctgcggtgattatgccgggcctggtcgggattattgccgataaatttattccggcgaaccggctttacggcctgtgtcacctgatttgtgccggtgcactcttttatgccgcaactgtcaccgatgtgaatgtattgttctgggtgatgctgctgaatgcaatggcctttatgccgaccattgccctgtcaaattccgtcagttacgcaagcctgcaaaaatataatctcgatccggttacacatttcccgtctgtccgggtgttcggtactgtcggttttatcgcggcgatgtgggcggtcagtctgatgaaattcgagctgagcaatatgcagctttatattgccgccggcgcatcattgctgctcgcactgtattcactgacattgccggcgattccggtggtaaaacagaccggcacaaccacctgggcacagcgttacggcctggatgcctttgtgctgtttaaacagccggtcatggcggtatttttcctgtttgccatgctgctcggcgcagtgctgcaaatcaccaatacattcggtaacccgttcctgcatgatttcggccgtatcgcggaatataaagacacgctggtggtacagtatccgtctgtgctgctttctgtctcacagatggctgaagtggtgtttatcctcgcgatcccgtatttccttaaacgttacggcatcaaaactgtcatgctgatcagtatgattgcgtggacattgcgttttggtctgtttgcctttggtgagccggtatcaatcggtttcttcttcctcgtgttgtcgatgattgtttatggttgtgcatttgatttcttcaatgtctccggttcgattttcattgaaaaaaccgtcagttccaaaatccgtgccagtgcgcaggggctgtttatgatgatggttaacggtgtgggagcctatgccggtgcgattgtcagcggtaaggttgtggatatgttcacggtggacggcgtgaaagactggcagtcaatctggctgatattcgcctcttacaccgtagtgctggcgattattttccagttcactttccgttatgaccaccgggctgaaaaagccgcagaaaaagcggtggtataa

SEQ ID NO: 275094 - DNA, 819 bp, Morganella morganii
atgcatctcaccgctgatatcgcagaaagcaaagcgttcgtcgaagcgcagatcactgttaaaccgactatcggtatcattttaggctccggtctgggaccgtttgccgataccctggagaatgctgtccgcattccgtacaacgatattccgcatttcgccagctcttccgctgtcggccatgccaatgagctggttatcggcacgctgggcggcaaaactgtggtggcgatgaaaggccgtttccactattacgaaggcgtgtcgctggatcaggttaccttcccggtgcgtctgatgaaagcgctgggtgtagaaaagctgatcatcaccaatgcctgtggtgcagtaaataccggttttgccccgggtgacctgatgctgatcacggaccacctcaatctgacagcaaataatccgctgatcgggccgaataacccggatctcggtgtgcgcttcctggatgtcagcgaagtgtacagcaaaaatctgcgcggtatcgccaaagcagtagccgcagagcagggcgtgaccatgcgcgaaggtgtctacgcctggtggaccggcccggtttatgaaacaccggcggaaatccggatgatccgcacactgggtgcggatgcggtggggatgtccaccgttccggaagcactggtggcgcgccatgccgggattgaaaccctgggaatttcctgcctgacgaatatggcgtgcggcattctcgaccagccgctgagccacgacgaagtgattgaaaccgctgagcgggtgaaaaacactttcctgaagctggttaccggtattatttcccgtttttaa

SEQ ID NO: 275095 - DNA, 1209 bp, Morganella morganii
atgacgttatccggcatactcagtgaattccggtcatccaaaaactccaaaacccggaaactgaaaaccctctggcagctgattctgaatgacgggccgatccgcgcggaaacgctgtcagaaaaagccaacatgaatggcgccacctgtgcgcggctgctggatgagctgagcaggctgggtcttatcagcgcggcagaactgggacaatccaccggcggacgcaaaccgattctctacagtgtcaatccggacagagggcggctcgccgggattgaaatcagcaatatctattccacgattgtgctgcaaaacctgaagctggatgtgctggcgacctgcaaaatcaaagccgccggacaggaaacgccgcaggtgctgctggatcggctgctcacccggctgttatcgctgctggaggagcatcacctcagtacggatgatctgctcggtatcggcattgcggcggattacaccctgccacccggcagtgaccgccgcgccatgaatgattatctgatcccgttactgcgtgagatggcggaaagccgcaccgggtgtcaggtgactatcggcagcggggtgaattttgccgcgctggcagaataccggctgcgccataaagagagccgccgcctgtttttcaccacctgtgacgcggagatccgcagcagtaccattctcagcgagcctgtccgctttatgccgccgagttcggaaaatgcgttcgggcatatgacgctcgatctccacggccgcacctgtgaatgcggctcatttggttgtcttaatcagtacagttcactggaagctattcgcaaaacagtgattcagcatctgcggcgcggcaaagcgtccgttatcacctcgctggtcagtgatgagcaggagattgattaccatgtgatttttaaagcccttgagctggccgatccaatctgtaccgatgcactcgaagaggctgcttattattacggtctggcaatcgccaataccatcctctccttccagccggatgtggtggtctgcggcgggactctgaccccgaaacacactttctttgccactgtgcagaaaaccgtggcacaaaaactggccggattcccgcaaattaatacccggataatgcctgcgtttgattcctatgaggtggtttctcagggagccggcgcgatggtgctggagagcctgctcagtgatacgccctga

SEQ ID NO: 275096 - DNA, 402 bp, Morganella morganii
atgtttaaaaaaatcgccctcaccctgatgctgctggccggcagtatgatgctgaccgcctgcggcagtgattccccgcaggatgttgttaaacagttctacagtgctgttgagaaaaaagatgcggataaagcttatgatttgctcgccatcccggaaaaagataaacaaaaaaatgagatggaaatcaaaggcaaagtacagatgattgtcggtgatatggcgcgccgcattgaaggcaacggcggcgtggaaagcacagaagtgaaatccgtcgatattgatgaaagcaaaaaacgcgcaaccgtgattctgacggttaatttcaaagacggcaaacagaaagatgagcgtttcctgctgacaaaggatgaaggtgactggaaaattatcctgcgctga

SEQ ID NO: 275097 - DNA, 564 bp, Morganella morganii
atgagacacacactccgcgccgggcttctgctcccggcgctgctgacagccgcactgccgttgcgggcggcagtaccgccgcccggcattcagagcggcgacctggttttccgtgacggcggcgaagccatcagtgacattgtcagaagtatcgataacagcggtttcagccatgtcggcgttgttgatatcacgcctgaagggacttatgttatccacgccaccccgcaggagcacccggacggtatcagcggcgtgaaccgcgatccccttgatttctttattgaacacgccaaagacggacaagtagcctggtatgccgtacaggcggacagcgaaaatcaccaccgcgcccgtgataatgcccttgcgcggctcggcacgcctttcagcatcaacccgcaggacggactgtactgcacgcaactggcagcagacgcctggcaggcaaccgggatcaccatcatcaccggaaaaacccgtctgagtttaccgctggcggaagaaccgttaatcttaccggaaaatattacccgctcgccgcaactgcgccgtattcagtaa

SEQ ID NO: 275098 - DNA, 918 bp, Morganella morganii
atggagttaatttttctgggcaccggtgccggtgttccgtcaaacaaccgcaacgtcagcagcctggtgctggatctcaaatcattacagcgcggcctgtggatgtttgactgcggcgaaggcactcagcatcagatcctgaaaagtccggtcaaaatcccgaaactggaaaaaatctttatcacccacctgcacggcgaccatattttcggcctgcccggtgtgttatgcagccgctccatgggcggatgtgaggaaccacttactctctttggcccgcagggactggcgcagtttgttgaaactgcactgacactcagcggctcgtatctgaccttcccgctggagatcattgagatagatgaggaaggggtgatttacgatgacggacaactgaaagtcagcgcttactcactcgagcatccggtgatcagctacggttaccggattgaagaacatgacaaacccggcgcgctggatgcacaacgcctgaaagccgaaggcgtaccgggcggcccgtggatgcagaccctgaaacagggcggcaaagtgacactggacgatggccgggtaatttgcggagcggattacctcggcgagccgcagcgcggacgtcatctggtgattttcggtgataccgcaccgtgcgaaaatgcgctgaaactggcacagaatgcagatgtgattgtgctggaagccacacttgacggcagcatgaccgaaaaagccaacagccgcggacactcttctactgtgcaaacagctaccctggcgcgggatgccggcgttggtacgctgatcgccacccatttcagcgggcgctacagtgaagaagattgtgagcgcttacttcacgagtgtcaggcgattttcccagccacggtgtttgcctttgaccacatggtgtacccgctttaa

SEQ ID NO: 275099 - DNA, 924 bp, Morganella morganii
atgctgcccgcccacgagtacgccaatgatctgattttatttgcgctgattgtggattgcggctctttcagtaaagcggcggaaatggccggtgtcaccggctccgtgctcagcaaacgggtaggccggctggaaaaagccctcggtgcccgtctcctgtaccgcaccacccgcagcctgtctgtcacggaaaacggccgcgtgttgtatcagcatgccaaatcccttaccggccaggttcacagcgcattacaggcagtcagtgccaacagtgatgagctgaccggtcttatccgtatgtcagtacccactatctccggagagctggttctcagcgacagcgtggcggaattctgtgaaaaatacccgaatgtgaaagtagaaatgcatctggaaaaccggtttgttgacctggtgaatgaacggattgatctggctatccgcaccggcatgatgagtgactccagtctgatagcccgtccgctgattgattctcactgggtgatcctcgcctccccccgctatctggaaaaacatcccgcgccgcagaatccggaagatttactgacacacaactgcctcacttacacctatcagcaaagtggtacctcaaactggctgatgcgccgcccggataccggtgaaatctatgaattgcaggtgagcggcaatatcgccttcaataatgcccgcgccatccgcaaagcactgctcagcggccacggtatcgctatggtgccgcgctgtatggtgcatgaggatctggaggccgggttgctgacggaagtcctgccgggttacagcggcaaaaaactcggcgtgtatgccgtgtatccgtacacccgccatctgccggtcaaaatccgcctgctgatcgatcatattcagcagtcatatcaggcaatccgtccctatttcggctga

SEQ ID NO: 275100 - DNA, 1581 bp, Morganella morganii
atggctatttttttcagtcttgcaccgatcgtgatgttaatctggatgatgacaaaacgccgcagtatcccttcttacgtcgcattacccttcacggccgccgtggtgttctgtatccagctgttctggtttaaaacggatctcacactactgagtgccaatattgtcaccgcctttatttctgtgctgacaccgatcaccatcattgccggggcaattatgctcaataagctgatgcaggtgagcggcgcagaaaacgtagtgcgcagctggctggaaaatatcagtcccaatcctgtggcacagctgatgattatcggctgggcattcgcctttactattgagggcgcaagcgggttcggtactccggccgctatcgccgccccaatcctggtcggtctcggcttcccggctatgcgtgtcgctctgctgaccctggtgatgaactccgtaccggtttcgttcggcgctgtcggtacaccgacctggtttggttttgccaacctcgggctgaatgaagagagtgtttatcagataagccactactccgccctgatccactttgtggctgcatttgtgatcccgctgctggcgctgcgttttattgtcagctggcaggagatccgtcgtaatatcgtgtttattctgatcagcgtgctcgcctgtaccgtgccgtatctgctgctggctcaggtcaactatgagttcccggcactgctcggcggggcaattggcctcgggatttctgtcgtgaccgcccgtgccggtatcggcctgacccgcactgaacaaaaaacagagaaaaaagtgatcccgttcgggcaggttatcaaagcgatgaccccgaccctgctgctgatcggcattctgattgtcacccgcatccaccagctcggcctgaaagggctgctcaacagcactaacgtgatttgggaagggactctcggcttccttggccatatcacgctgagtgatgcactgattgtccgcctgagcaatgtgttcggcaccccggcggcggcagattataaaaccctgtatgttccggcgctgatcccgttcttcctggtcgtgtttatcggtattttcctgttccgcctgaaacggactcaggtaaaaaccatgtttgtgcagaccgcacaacagaccaacaaaccgtttattgccctgtttggtgcgctgattatggtaaacctgatgatgcagggcggtgaaaatgcgccggtttacattatcggccgctcactggcgggagccaccggcgagagctggatctacttcgcctcttacctcggcgcactcggctcgttcttctccggctccaataccgtgtccaacctgaccttcggcgggatccagcaatccattgcccagaccaccggtctgaatgtcaatttaaccctcgcgctccagtctgtcggcggtgccatggggaacatggtgtgtctgaataatattatcgctgtctgcaccatcctcggtattaccaacgccgaaggctcaattatcaaaaagacagtagttccgatgtttgtctacggcgtgattgccgccgtgatggcactgatactgaccctgtaa

SEQ ID NO: 275101 - DNA, 1143 bp, Morganella morganii
atgattatttccgcttcaacagactaccgggcggctgccgaatccagactgccacccttcctgtttcactatattgacggcggggcgtatgccgagcataccctgaagcgcaatacggcggatctggcggatatcgccctgcgtcagcgggtgctgcgcgatatgtcgtctctcagtctggaaactgaactgttcggggaaaaactggcgatgccggttgccctggcgccggtcgggctgaccggcatgtacgcgcggcgcggtgaagtgcaggcggcaaaagcggcagccaataaaggcgtaccttttaccctgtccaccgtctccgtgtgtccgattgaggaagtcgctccggcgattgagcgcccgatgtggttccagctctatgtgctgcgcgatcgcggttttatgaaaaatgcccttgagcgcgccaaagccgccggggtcaaaaccctggtctttaccgtcgatatgccggtgccgggagcgcgttaccgtgatgcccattccgggatgagcggcccgaatgccgccatgcgccgtgtgttacaggcgatggttcacccgcgctgggcgctggatgtcggcgtgctgggcaaaccgcatgatctgggtaacatctcggtctatcgcggcgcaccgaccaaactggaagattatatcggctggctgggggcaaacttcgatccgtctatttcctggaaagacctcgaatggatccgcgagttctgggaaggtccgatgattatcaaaggtatcctggatccggaagatgcgaaagatgcggtgcgtttcggcgcggacggtattgtggtctccaaccatggcggccgccagctcgacggtgtgctctccaccgcccgcgctctgcctgctattgccgacgcggtgaaatcagatatcactattctgagtgattccgggatccgcaacgggctggatgtggtacggatgctggcgctgggggcggattcagtcctgctcggccgtgcctttgtttacgcgctcgcggcacagggacaggcgggggtcgaaaacctgctggatttgattgataaagagatgcgcgtggcaatgacactgaccggcgcaaaaaccatccgcgatatcacccgcgactcgctggttaatctgcccggctga

SEQ ID NO: 275102 - DNA, 1575 bp, Morganella morganii
atgaaaaaaattgtcatactgggcagtagtggcgggaacctgtacaacctcggtggtgcagatcctgaaaaacttctgagcgaaatctacacacaatgtcagtccgccggtgtttctgttgctgcggtgcagtttattgcagcacaggcgtcgatggatgttgccaaaccctctaccgccgccgcggtctacaccctgacagaagcagatgccgtgcctgcggtgacattctccggcacccttgcagaagtcaatgacgccgtgcgcggcagtgatgaacagattgcccggctgatagaacagggcgatatcgacggcatcattattatgagcggtgatccgcacaacgccaaccgcctggctcttcaggctgcggcggaaaagaaagtgccgatcgccggtaccggcggcacctcgatggcccatatcgccgccgccggtgccaatgtgattgccacctcgggtaccaccggcaccaccagcagaacccgggctatctcgtttatctcttccctgtgcaaacactgggggattaaattccgtccggtactgggcagtgcaggcagcaccggcgggccgtccgacaagagtctgcttaagcggatgaatatccgcggcattatgatcccggctctgcccggctttattgccatggcgattgtgctggcgctgagccacatcccgggactggaaagcctggatgcgatcttccagctgctgctcaaagggctgccggtgattgtggcggtgattgctgccaaacaggtttccgaactggatgaggtttcgattgtttccggggttgtcgccggggtgctctcggtcgagggtggtctgatcggcgggatcgcaggcgggatcatggcgggtatttttgtccgttacctgtttgccctgtgcatcagctggaaattcccgatgaccaccgtcaacatcgtggcgggcgggatttccggtctggccgccggtcttatcatgttttatttcctcagtccgctggcgctgctggccggtaactacatcaaactggcgctggaaagcaccctcgccttcagtccggttctggcgggactgctggccggtctggttatctggcctgcgatcctcggcggtgtgtatcacgccgtgatcctgccgctggtgctgcttgagatggaaaaaaccggtgtcagcttcctcggcgcggtggatatggtcgggctggtgatggtggccgccggtattaacctggcaaacgttattgccccgcgtgaacgcagtgaggccgcggtcgccgccccgggactgcttatcaatctgggattcggtacctttgtggaatcggcgtatcccttcatgtttgccaacaaaatcgtgttcggcggtgccattctttccgccgggatcggcggcatgatgctcggcatgtttaatgtcaaaggggtggcgtatgtcccggcgtttgcctctccgttcttatccagtaacgcactttacatggcgctgaccatgaccgtgattctggttttaacctgcgccataactgtcattgccaaccgtttcagtgccgtgacaaccgcgaaagccgcaggctga

SEQ ID NO: 275103 - DNA, 843 bp, Morganella morganii
atgtttataggtgatatgaataaaaaacgtgaacaggccatggcgaaagtcagaaatgctattgcgctgcacaacgggcagactctgctcagcacaggtatcaccggtgatgacgcgcgactggcgaaagcagtgtgtgatgccggggtcaaaatgctggagccgaaccatccggcgctggcgctggcacgcggacacagaggcgtaaataacatgcacgctgccgagcagatccgccatgaaatctccaccacacagatggcggaagccgtcaacggtatccgcaatgtgatcccggatgatgtctttattacggtcgggatcgccggcggattcaccgaaaccatcccggtgccggtgacggaagaggatattttacagatcgcccgcgccggggctgacggcctgcacacccataaatccacttttgaggatctggcggatattgtcagtcttgcgcaccgcttcggcctgaccgtagatgcttatatcggccacccggacgatctgcataccttcggcatcccggcggaaaccccggaagaagtcgcggaagtggcgaagaaaatggaagccatcggcgtggatatgatcggcctgatgaccggtatgagctacgagggcgtggctgccggtgaaattccggaacagattaaagcccggctgaaagcgctggtcggcgcggtcagtgtcccgacactggcggaaggcggtattaacgtcgccaatgccaaagcgtttaaagaaaccggtgtgaatattttagtggtcggcaccgcgatcgataacgtggtatgtcaggcggccgcacaggtcacccagtcctttattcatcacaactga

SEQ ID NO: 275104 - DNA, 810 bp, Morganella morganii
atgaccacactggctatcgatctcgacggcacgcttttacatccggataaccgtatttcagagggcaaccgccgggcactgctggcactgccgccggaaacggatattgtgatctgctctgcccgcccgctgcgggcgattttgtctctgacggacagcgccgggctgcttccggtgctccgcgctatcggcgcctgtaacggcgcggtgatttatgactgccgcacacaatccgttctcagccgggcaaccctctctccggccgtgttatccgcactgcaaaacatgctcaccaccggctggcatgctttcggtgaggatgctctgctctgtccgccggggaaaatatcagaatacacaattcatgaagctgaattattcggcctgccaatacagacactcgcggcagacgatattttcagccggacagatatcattaaaatcaccctgtgcggggaagcggaagccctgcggcaacgggctgaaaaccttcgcccgcagttaccggcaaaggtcagcgcattctttaccgaccagcactattttgaactggttccggcatccgtgagcaaaggcagtaccctgcaaatactggcggagcgcggtattctgcggccgggaaccatcatggccatcggggatcaggaaaacgatctctctttatttgccgcatcggatctgcgcgtggcaatgggcaatgccgtaccggcactgaagcaggccgccgggtatattacggctgactgccgggaggatggcgttgctgccgcacttcatcattacagagcggcattccgcaacgacacataa

SEQ ID NO: 275105 - DNA, 756 bp, Morganella morganii
atgaatccgataaaaagaaaggaatacatcctcgatctgctgaatcagcagggggaagtcagtgtgcaggatcttgctgatacactgaatgtcacctctgagacgatccgccgtgacctctccattctggagaaagaaggcgagatcatcaaaattcacggcggggcgatgaagaaaaagagtgtcagcgaaggcagttttgaacagcggctggaactgaaccgtgaggaaaaaatgaccctcgcgcgctatgctgccgggctgatttccgagcacgacacactgtatatcgattcctgttcgacaacgctcctgttttccgcgcagttaccggcaattgcatttaccgttttcaccaattccgcccttattgcggataaaatcgcctcacagaacccgctggcaaaagtgtatgtgctgggtggtgaatacaaccatgaattccgggccaatctcggtgcgaaaaccctgcatgaaattgatcatatttatgcggactttgcgtttgtcggcgcaggcggtgtacgtgatgaaggcattctggtcaaaagtgttgaagaaggcatgattgcacggaaaatgctggaaaaaagtaagcagaaaattattctggccgactccagcaaattcggccagcaggggattttaaaaatcgcggagattgccgttatcgataaaattatctgtgacgataaatggcagaaagcgcacgaattccgtgaaaaatatccggaaaaagtcattatcgtgccgtaa

SEQ ID NO: 275106 - DNA, 678 bp, Morganella morganii
atgacatattatcttctggttatcgttaaatttatcatcggctttgttattgtgttaacgcacatgaatatctccgggaaaacccaattatcacaaatgacaccggttgattttattggaaactttgtactgggcggcattatcggcggtgttatttatagtgataccattccgctgacgcaatatattattattctgctgatgggggtgagttttatcagcataatcaattgggtcagcaaacatatcagtgtactgcgcgcggtgactatcggtaacccgatcccgattattaaaaacggggtatttatcatggatagcattcatgagaagcgcaataagatcgatattctgaatatcacctcccgaatgcatgcacaggggatctattcataccgcgatgtgtattatgcgcagatagagccggacggccagctgacggtgatttgtgaccagtcacagatgccgtcagtcatcgtgatgaaagacggcgtaccgcgtaaatatgaactggaacagattggtcatgatgagccgtggctggcagaccgcctgaaacagcagggaattgacgaccctgagtctgttttcctggcggaattttataacggcagcctcaatgtggtgatgaaggacgggcggatgaccggccatcacagcgagccgtcacagccgtaa

SEQ ID NO: 275107 - DNA, 510 bp, Morganella morganii
atgaaaaaagcattattaagttcactcatccttgcgggggtatttgcgctggccaccgggtgtgacgacagcagcaaaacagaccctgctacgcagaaagcacaggaaggtgccgcgcagattaaggaagccgcagagcagaaagcggatgagataaagcaggatgccaaagaggcagcggataaaacagagcagaaagccgctgaactgaaacagaatgcaacagaagccgcaggtgatgccaaagaaaaagccggtgcggtgatggctgacgccaaagagaaagcagccgaaatccgtgacagtgccgatgccaaagcggatgagctgaaaaaagaggctgatgccctgctggccgatgccaaagataaaggcgaagacgccaaaaaagccgcggaagaaaaagccgcagagctgaaacagaaagcggatgaagccaaagccgccgctgataaaaaaattgatgagctgaaacaggatgtcagcggaaaacccgcagatgctcagtaa

SEQ ID NO: 275108 - DNA, 2001 bp, Morganella morganii
atgagtcatcaggacactgaacaatccgcaaaaaaaatgaagattaatccgccggttttttatatttcggccctggttattctcctgattgtcggctttgccgccctgtttccccagacggcggacatacaccttaaagcccttcagaccagcctgtttaaaaatgccagctggttctatatcctcgccgtcgccctgattttactgagcgtcacctttatggggctgtcccgtttcggtgatattaaactcggcccggaccacgcccgtccggcatacagttatatttcctggtttgccatgctgttctccgcaggaatggggatcgggctgatgttcttcggtgtcgccgaaccggtgatgcactatctttccccgcctgtcggcacaccggaaacggttgaagcggcaaaagaggccatgcgcctgaccttcttccactgggggttacacgcctgggctatttacgcggttgtggcgctgatccttgcgtttttcagctaccgccacggcctgccgctgacactgcgttccgcactttacccgattatcggcgaccgtatttacggcgcggccggtcatgcggtggatatttttgctgtggtcggtacggtattcggggtcgcgacctccctcggttttggcgtgttacaggtgaatgccgggctgaatcatctgttcggcctgccgcagacagaaaccgtacaggtggtgctgattgtggtgatcacctcactggcaacattatcagtggtatccggtctggataaaggcatccgttttctgtcagagctgaacctcggcctggcggttctgctgctgattatggtcggtgtgttaggcccgaccgtgctgctgctgaaatccttcgttgagaacaccggcggttatctttctgaaatcgtcagtaatacctttaatctctttgcttatgagccgaagtcagacgactggctgggtggctggaccctgctttactggggctggtggctgtcatggtcaccgtttgtcgggatgtttatcgcgcggatttcacgcgggcgcaccatccgtgaatttgtcttcggcgtgttgtttgtcccggcgggctttaccctgctgtggatgaccttcttcggtaataccgccatcgatctgatcaaaaatcagggcgcaaccgcactcgccacggtcgtgaaagaggatgtgtcactggcgctgttccagttcctcgagtatttcccgttctccacggcgctctctttctttgccatgctgatggtcattgtcttctttgtgacttctgctgactccggcgcgatggtcgtggacaccctggcctccggcggggatgcccacacgccggtctggcagcggatcttctgggccgcgctgatgggcgtggtggctatcaccctgctgctggccgggggattatccgccctgcagacagtaactatcgccagcgccctgccgtttgcggttgtgttgctgttctcgatttacgggctgatcaaagccctgcggattgatgtgcacaagcgtgacagccagcagctggcgaccattgcgccgaccgccagccgcaacccgatcccgtggcagcgtcgtctgcgtaatatcggctattttccgaaacgttcgctggtcaaacgctttattgatgaagtggtgtctgaggcgatggacatggtgtctcaggagctggaaaaacagagcacaccgagccatatcgaccgcagccgcgacgaccggatcacttttgaggtcgatctgggggatgatatgaactttatctatgaaacccggctgcgctattacaatcagccgtcctttgccctctccggaatgaccgacgaggaaaaagatgaggaacaccgctattaccgcgcggaaatccatctgaaagagggcggacaggattatgacattatgggctggaacaaggagcagatcattcatgacatccttgaccagtatgaaaaacatattcacttcctgcatctgctcggcaagaagtaa

SEQ ID NO: 275109 - DNA, 432 bp, Morganella morganii
atgcatgaatcattacttatcgcccttttgcaggcccgtgaagtggtcctcggctattttcgcccgaccctgaaagcacaccaactgacggagcagcagtggcggatcattcgcatactggctaagaccccgtcgcttgattttcatcttctggcacagaaaagctgtattctgcgtcccagcctgaccggtattctgacgcggatggaaaaagcgggcattatccaccgcctcaagcccctcagtgatcagcgcaaactctatctttctctgactgacgaaggcacggcgctgtatcaccgtgtgcaggcggaagtggagaccggctatcaggcgctggaattacagttcacgccggagaaggtacgccagctctatgcattgctggatgacctggttgcactgccgcagcgcgacagcgacgaagaataa

SEQ ID NO: 275110 - DNA, 1473 bp, Morganella morganii
atgttcacctcatcgttaaccgatccttccttttccctgctgcgcaccggcggctatattaatggtcagtggaccgatgcacaggataaggccacgtttgatgtgaccaacccggccaccggcggactgatcacccgcgtcagcgacctcggcgcacacgaaacccggcttgccattgccgccgctgaaaatgccctgccgggctggcgcgccctgaccgccaaagcccgtgcgcagatcctgcgccgctggttttatcttgtcatggagaatcaggaggaactggcacagctcctgagtctggagcagggcaaaccgctggcggaatcacgcggggaaatcgcctacggtgccagctttattgaatggtttgccgaagaaggcaagcgcgtgtacggcgaaaccattccggccacacagagcggacagcggatcgccaccatacgccagccgatcggggtggtcggtgctatcacaccgtggaacttcccgaacgctatgatcacccgcaaagccgctcccgcactggcggcaggctgtaccatggtgctgaaaccggcagcggaaaccccgctttccgctctggcgctggcagaactcgcggaacaggccggtattccggccggagtgttcaatgttgtcaccgggcttgatgcggcggctatcggcggcgaactgaccaccagcccggtcgtgcgcaagatctcctttaccggctccacccgtgtcggcaagctgctgatggcacagagtgcggagacggttaaaaagctttctctcgaactgggcggtaacgcaccgtttattgtgtttgatgatgccgatctcgatgcggcggttgccggtgccatggccgccaaattccgtaacagcgggcaaacctgtgtctgcgccaaccgtatctatgtgcaggatggtgtgtatgatgcctttgccgagaaactggcggaggctgtcagtgccctgcatgtcgcgccgtacaccgacgaaaaagcacaacagggaccgctgattaatgaggctgctatccgtaaagtcagtgagcatatcgccgatgcggtcagcaaaggtgcgactgttgtcagcggcgggaaaccggcggcacagggcggattattttttgagccgaccgttctgaccggtgtgacttcagacatgctggtgacccgagaggagacgttcggcccgctggcaccgctggtgcggttccgcgatgaggaagaggccatccgcgcggcaaataacagcgagttcggtcttgccgcttatttctattcccgcgatatcggccgggtctaccgcgtggcggaagccctggaggccggaatggtcggtattaatgaaggcattatttccacggaagtggcgccgttcggcggtatcaagcaatccggcctcggccgtgaaggctcccgccacggtattgatgactatctggaaatcaaatacctctgcttcggcgggatccgttaa

SEQ ID NO: 275111 - DNA, 525 bp, Morganella morganii
atgtctttggataattcacagcgtctgttgttccgcgacgcaatggcgacactctccgctgccgtcaatatcgtcaccaccgacggcgacgccgggcgcggcgggctgaccgccaccgcggtctgctctgtcacggatacaccgccgaccctgctggtgtgcatcaaccgcagcagtgcgctcagtgaagtgttcagaaccaacggacgtttgtgtgtcaatgtgctcacccataaacaccaggcactggcgtgtgattttgccgggatgaccggcctgagtatggacgcgcgttttgccggtgatcactggcagccgggagcgctgggacaaccttgtctgcacggctcactggcctgtctggaaggcgtggtgacgcaggtacaggaaatcggcacacacaatatctttatggcagaaatccgcaatattgatgtccgcgacgaaggtcacggcctgatttacttccgccgcgattttcgcactgtcgaaaccggtgatatccctgctgctgcagttgcctga

SEQ ID NO: 275112 - DNA, 1470 bp, Morganella morganii
atgagtaaacccgcgcaggttggtttgtttaaccagcccaagccattcttcatgatttttatcgtggagctgtgggaacgcttcggctattacggtgtgcaaggcatcctggccgtctacttcgttcagaaactgggattcagtcaggaacaggcatttattaccttcggggcattcgccgcgctggtatacggtctgatctctatcggtggttacgtcggtgaccacgtcctcgggaccaaacggaccatcatcttaggggccatcgtgatggctgtcggttattttatgaccggcctgtctatcatgcacccggacctgatcttctacgcactgggtaccattgctgtcggtaacggcttattcaaagccaacccggccagtctgctggcaaaatgctatccgccgaaagacccgcgtctggacggggcattcaccctgttctatatgtcgatcaacatcggctctctgatttccctggcactggctccggttatcgccgacaaatacagctataccgtcacctataatatctgtggtatcggcctgctgatcgccctggcggtcttcctgttctgccagaaaatggtgcgtaatatcggttccgagccggatcacaaaccaatgaaattcggcagcctgctggtagtcatcgccggtagtgtggcaaccgtcttcctgtgtgcatggttactgcacaacgtggttgttgccaactatgtgttactcggcgtcaccgccgtggttatcttcttcttcttccgtgaagccttcaaactgaaaggcgtggaacggaacaagatgtatgtggcgtttgttctgatgctggaagcggttatcttctatgtgctgtatgcccagatgccgacttcactgaacttcttcgctatctataacgtacatcacaccattatgggtattgatgtgcatccggtcagcttccaggcactgaacccgttctggatcatcgtgctgagcccggttctggcttacttctacagcaagatgggcgcacgcggcaaagacttctccatgccgggtaaattcaccatcggtatgttctgctgctccgccggtttcctgacagctgcggcttccggtatgtggtttgccgatgcgtccggtctgacatcaccgtggtttatcgtcctggtttacttcttccaggccgtcggcgagctgatgatcagtgcgctgggtctggcaatggtggctgcattcgttccgcagtacctgatgggctttattctcgggatgtggttcctgactcaggcgatggcaacactgctgggcggttacgtggcaacctttaccgctccgccggaaggcgtgactgatccgcttcagactctcgttatctacactgatgtgttcggtaaaatcggtattgcaacggcagttgccggcctgattatgtgggctatcgtaccgaaactgaacaaaatcatgaaagaagaaaaaacagcctga

SEQ ID NO: 275113 - DNA, 1764 bp, Morganella morganii
atgataaccccatggcgaacacctgttcttctgctctctctgctgctttccccgcaattgtatgccgcttccgaacccgctgctgaagcccgcaacgggatggtggtctcttcccagcatctggcgtcacaggccggggctgatattctgaaagccggcggtaacgcggtggatgctgcagtggctgtcggctacgctcaggcggtggtgaatccctgctgcggtaatatcggcggcggcggctttatgaccctgcatctggcagacggaaaaaatattttcatcaatttccgcgaaacagccccggcgtccgcttctgcggatatgtatctcgataaagacggcaatctgatcaaagatgcaagcctgtacggctacctcgccgccggggtgcctggaacggtcaaagggctggattatgccctggaaaaatacggtaccatgaaacgggagcaggtgatggcaccggcgatcaaactggcgcgtgacggttttatcctgacccgcgcggataccgatgtgctggacaccaccaccgcccgctttaagcaggatccggaagcagcacggattttccttaaacctgacggctccgcattccagcccggcgaccgcctgattcagaccgatctggccaataccctggagcgcatcgccaaagaaggccctcccgctttttatgaaggtgacatcccgcaaatcgtggaaaaagcctctcaggccggtggcggtaagctgaccgccaaagatttcgcggattacaccatttctgaggttgcgccgatcacctgtacctatcgcggttatgagtttatatccgccccgccgccgagctccggcggtgtgactatctgccagaccctgaatattctggaaggttatgatctgaaagcaatgggctttaactcggcggattatatccacactctgacagaggcaatgcgccattcgtatatggatcgcaacaccttcctcggtgacccggcgtttgtgaaaaatccgaccgaaaaactgaccagcaaagcctatgcagaagagctgcgcaaagaaatcattccgggcaaagccacaccttccgctcaggtgcagccgggtacaggtccgcatgaaaaaccggaaaccacacactattccgtggtggataacaaaggcaatgcggtttccaccacctataccatcaatggccgtttcggtgcggtggtgatcccgccgggtaccggcttcttcctcaatgatgaaatggatgatttcaccaccaaaatcggtgagaagaatatgtacggcctggttcagggggagcgcaacgcgattgccccgggcaaacgtccgctttcttccatgagcccgaccattgtcaccaaagacggtaagattttcctggtgctcggttcgccgggaggctcacggatcatctctatcaccttacaaaccgcactgaatattatcgatcacggtatggcaccgcaggaggccgtgaatgcaccgcgtatccaccatcagtggctgccggatgaggtgtattacgagcagcgcggtgtgtcaaaagactcactgaatttgctggataaaatgggttataagatggttgagcagacaccgtggggggccgcagagctgattatggtggggttaccgggtgccgccggggtcagtgcggattcttccggcaatgatgccgccgtgtccggtaaggtgcgtgaaggctatctgtacggtgccaacgatgtgcgccgtccggccggggaggcagcaggagtcgagtaa

SEQ ID NO: 275114 - DNA, 576 bp, Morganella morganii
atggcagtttctcttacaaaaggcggtaacgtctccctgaccaaagaagccccgtcaatgagcgtggcgatggttggtctcggctgggatgcgcgtgtgactgatggtcaggattttgacctcgatgcatctgtatttatggtgggtgacgacggaaaagtattatccgacagccatttcatcttctttaataacaaaaccagcccgtgcggcgcggtggaacaccagggcgacaaccgcaccggtgaaggcgacggtgatgatgagcaggttaaaatcagcctgaacacccttccggcggatgtgaaaaaactggtcttctccgtcacgatttatgatgcggaagcacgtaaacagaacttcggtatggtcagcaacagcttcatccgtatctgtaacaatgataacggcagtgaaattgcccgtttcgacctgtctgaagatgcatcaacagaaaccgcgatggtcttcggtgagttgtaccgtcacggtacagagtggaaattcaaagccgtcggccagggcttcgccggtggtctgtctgcattagcatctcagcacggtgttaatatttaa

SEQ ID NO: 275115 - DNA, 579 bp, Morganella morganii
atgagcgtttctctttctaaaggtggtaacgtgtcgctgagcaaaacagccccttcaatgaaaaacgtcctgattggcttaggctgggatgttcgttccacagatggtcaggatttcgaccttgatgcctctgcctttctgctgaccgccgccggtaaagtgcgtggcgatgcagactttattttctataacaacctgcgttcatctgacggttcagtcacccataccggcgacaaccgcaccggccagggcgatggtgatgatgaatctctgatcatcaaactggatatgattccggcggagatcgacaaaatcgtcttcgtggtcactatccatgacgcgcagacccgccgtcagagtttcggccaggtatccggcgcatttatccgcctggtcaatgatgataccaatactgaaatcgcccgttatgacctgaccgaagatgcctctaccgaaaccgcgatgctgttcggtgaactctaccgtcacggtgctgagtggaaattccgtgccgtcggccagggctatgccggtggtctgtcatcagtctgtgcacagtacggtatcaacgcgtcctga

SEQ ID NO: 275116 - DNA, 1035 bp, Morganella morganii
atggaatcaacacatatcggttttccgatggaaacagtcaccgttttcgtcgtcctcgcaatcggtgcgatttttattgatttgtttatgcaccggggcgataagccggtttcactgaaaaatgcggcaatctggtctgttttctgggttgctgtggcaatgggttttgccgggtttctctatatccaccacggttcggaagttgcgagcctgttcgtcaccggttatgcgcttgagaaagtgctgtctgtcgacaacctgtttgtgatgatggcgattttctcctggttctcggttccggatcgtttccgccaccgtgtgctgtactggggcattatcggggctatcgttttccgcgggattttcgtggcgataggtaccggtctgctgagcctggggccgtatgtggaagtgatttttgccctgatcgtcgcctggaccgcggtcatgatgctgcgtaaccgcgaagagaaggaagagattgaggattactcgcagcatattgcttaccggatggtgaaaaaactgttcccgatctggccgaaactgagcggacacgccttcctgctgacccagaaagaagtggatgccgagctggcaaaaccggagaacaaggacgtcactatcgggcgcggtaaaaaagccgctctgtatgccacaccgctgatgctgtgtgtggccgtggtggaactgtccgatgtgatgtttgcgtttgactccgtaccggcgattatcgcagtgagccgtgagccgctgattgtttacagcgccatgatgttcgcgatcctcggcctgcgtactctgtattttgtcctggaagcactgaagcagtatctggttcacctggaaaaagcggttattgcgttactgttctttatcgcggtgaaactgggtctgaatgcaacagacagcctctggggtcacggattacatatttcggccaccagcagcctgttcgtggtgctcggggtcctggcactgggtattatcgccagctttgttttcccggaaaaaacggaaagtgcggataagtaa

SEQ ID NO: 275117 - DNA, 456 bp, Morganella morganii
atgagtatacttaacagggtcaaaagtgcgtttaattcaggccgcgaagagctgacaaaacaggtcagccgtttcagaaaccgtaagtttatggaaggtacaatcgctgtctgtgcccgtattgcggtttccagtgacggggtcagtgcggaagaaaaacagaaaatgatcggttttctgaaatcctctgaagaactgaaagtatttgaaaccgaagaagtcattacatttttcaacaaactggtcaccagtttcgatttcgacatggaaatcggcaaaggtgaaaccatgaaatatatcctggcgctgaaggatcagccggaagcagcgcagttagcggtgcgtgtcgggattgcagtcgcgaagagtgacggtaacttcgatcaggatgagcagaaagcagcaaaagagatcgccgctgccctggggtttgacccggcagaattcggtctctga

SEQ ID NO: 275118 - DNA, 1164 bp, Morganella morganii
atgaacatgacgcccggggcgaatgcgcccgtaccgctgaaaacactgcgggtgacggtgctgtccggtgcggcggcggatgcctctgcgttccgtctgtatgctgacggcaaagtgcagggcgatccggatatggtcttctacggccagccgcagaatgatgacaacaccatcagctggcagcagaacggcaacaataccgtctttacggtggatgtcagccgtctgcgtcaggatgtgcagaaagttgcgtttgtggtcacctgtgacggcggacagactgttgccggtctgcgcagccttgaagttcaggttgaggcggagcgtgaaaaactgctcagcggcattgtggacaccgccggtcgtcaggaagctgcactgatcctcggtgaactgtaccgccgcaataatgagtggaaattccgctttgttgcccagggcttcaacggcggactgaaaccactggcggaacacttcggggtggatgtggcggcagaatccgcaccggcaccagcgcctgtaccaaaaccggcagaaagcaaaatcagtttaagcaagatatcgctgagcaaagaaaagccgtcaatcagcctgagcaagcgggataacttcggtgaaatccgcattaatctgaactggcaccgtgatgttcagagcagcaactccgggggctttctcagcaatgtgttcggtggcggtaacaaaggtattgacctggatctgggcgcattcgttgagttacagaatggtcagaaatcggtgattcaggcgctgggtaatgcatttggtgattaccggcgtgaaccctttattcagctgcagggcgatgatcgcaccggcgcggtttcagaaggtgagtggctgcatatcaacggcggcgagtggaaacacatccgtcagatcctcatctacgcctttatttatcagggcgtgccgagctgggataaaacagatggcgtggtgacggtctttgtaccggaacagccgccggtggaaacccggctgacagaaggggacgaccgccgcaccatgtgcgcgattgcccgcctggtcaatgagaacggggcgataaaagtcgaacgtcttaaccgtttctttaaaaatcaaagcgatatggatgaagcattcgggtggggtttccgctggaaagccggctcgaaataa

SEQ ID NO: 275119 - DNA, 588 bp, Morganella morganii
atggtttcattgacgaagaatcagacggtatctctcagcaaggcatctgccgcattaaatcagctgcatttcggtctcggctgggatccggttcagaaaaagaaaggttttctcggttcgctgttcggcggcggtaacgactccattgatctggatgccagctgcatcctgctggataaagacggccgtattctcgacaccatctggttccgcaaactgaaatcagactgtaaatcggtgatccatgaaggggataacctgaccggtgagggtgacggcgatgatgaagtgatccgcgtggatctgaaccgtctgccgcagaataccgaatatctggcctttacggtgaacagcttccgtggtcagacatttaacgatgtggaaaatgccttctgccgtgtactggatcagagcggtaaagagctggtgcgttatcagctgaatgaacagggctcacacaccggtatcgtgatcgcctccctgtgccgcagcggcggtgagtggaactttaccgcgcacggtgctgcatgccgcggccgcacgattgacgacatgtcttctgacattgtcagtacggtggtgcgctga

SEQ ID NO: 275120 - DNA, 1059 bp, Morganella morganii
atggcgcatgcgatctggctgacggaagggctctcttcccagcgtgatttgatccggaatatcaggctgttcgcgcagacattacaggttgatctcacgatttttgcctctcaccggcagccccgtcatgagatcctgtcagaagcagatttttcactgactgaaccggctgatgaaaatgagcggctggcgtttatcctgtctgttacggagaaatacggtattccggtaatccacgccgggcggaataccccgtggtttgaaacacacagaaacactatcacggcttccggcacccggctgataaccggcgtcgcctctctgtccgattacaccgtggcggatgataaagtccgctttgctgctgaaatggcatcacacggcctgccggttgtgccttctgtgcagattacctctgcggcgcaattgcgtgatgcactctctcattccccgtttccggggctgccgctgtgtattaaaccggttcagggcatttacggtgccggtttctggcagtttgatgacaatgcacagccgatggccatgttcacaaaccctgaacggcggatcaccacaccgcagcagtatttgtccgcccttgaaagcgctgacaaatgccccgcgcaggtactgatgccttatttgcccggcccggagtattccgtggatattctggcggataacggtgaggtgctggctgctgttgcacggcgcaaagaaggctccctgcaataccttgaacatgacggtgccacctttgagctggcctgcgcctgtgcgcgggtgatgaaagccgacggactggtgaatgtgcagacccgccatgaccatcacgggcagccgctgctgctggaaatcaatatgcggccgtccggtggtatcggttataccgtgctgggcggcgtgaatctgccgggcctgtttgccctgtacagtaccgggctgctcagtgcggatgaggtcagagaatataaccgcactgcattccgtccggcaattgtccgcccgctgaccgaagccgtcagctacccgtcttccctgaacaatgcaatacactga

SEQ ID NO: 275121 - DNA, 1143 bp, Morganella morganii
atgcccggtttttcccgtcccggtcaccaccggttcaccctgacaaccggcacgctggaagtccgcagcgacgccagcccggaaaccctgaacgccctgttcggaatagcggagcggcgtaacccgaaacgggcgtttctgtttgtcagcaaagtgctgggccgccatatcccggtcgagccggaaatcatgcgcggtgtttactgccgcctcagtgagcagtttccgcaggatctgccgcagccgctgctggttatcggtatggcggaaaccgcagtcggtctgggagctggtgtatacagcgaaatccgccgtcagtacccggaatccctgtatctttcttccacccgccatccggcggatggcgaactgctgtgtgaatttaaagagaatcacagccacgccacggatcatttgctctatttcccggccgatccgcagttgaaaacccggctgcaacaggcaaaaaccctggtgctggcagatgatgaagccaccaccggcaatacgtttaccaatttgctgactgcattgcatgaaagcggtcagctgcctgatctacaacaggttgtgactgtcacactgacggactggcgtgaggatccggccactgttcagcacgggctgccgttgcagcatgtctctctgatcagcggcagctggcgctgggaagctgatccggatgcggccctgccggagatgccggatgtgaatgtcagcgctgcgggagccgtgccaatccgccgtccgctgacacgggtccggcttggtctgcatgatccgcataccggttttggcagtacggtgacggcagcacccggtgagcggatcctggtgctcggctccggggaatttgtctggcagccgttcctgctggccgaacggctggcagaggccggagcggatgtaaaattcagcgccctgacccgctccccgatagcccccggcggtgccattgaatccgttatttccttcactgataactacgggctggggatccccaattatctctacaatgtggcacatcagtcatttgaccgtattctgttgtgcacagaaacggatccggcggcctttgatccgcagttattacaggcactggcccgctgtgcgccgctgacggaggtgatttatgacgactaa

SEQ ID NO: 275122 - DNA, 786 bp, Morganella morganii
atgacgactaaaccggtgatcctgaccgatctggatgacaccctgttccagacaaagcgcaaaatgacgcaagagcaggcacttacgccgttccgcgccggtgcggttgatcgcacattgcagccgcgcagttttatgacggaagaacaggcgatgctgacagactggctgctggcgcatgccgatctcattccggttacagcacgcggtacggaagaactccgccgcgtcactattcctttcagttcttatgcgatcaccacacacggcgcggtgatcctgcaaccggacggctcgccggaacccggctggcagtctgaaatgctgggcgccctcgccccttaccgtgaacgactgctgtcacttcagcagttttgtactgagcggatggcagagcgcggtattgatgcatgggcacgtattaattatgagtacggtgatgtaccggtctatctggtgatgaaacacactgacagtacccgcacagcggaactgtatgccgttgccgcagagattgaacaacagtttccggcggacgggttttacattcaccgcaacggcaacaatatcgcctggctgccggatccggtggaaaaaggccatgctgttacgcacctgctggcgttattacgggcagagcgcggcacctttccggttatcggcctcggcgacagcctgagtgattaccgctttatgaaacactgtacctggttcgggatgccgtcccgcagtcagtttgcggaggcagtcgccgcccggattttcagtgaggtatccgatgtataa

SEQ ID NO: 275123 - DNA, 1080 bp, Morganella morganii
atgtataatttcccaccgttctcaggcagttatctgccggatgatgtgcagtttctgctccggccggtcaccattgatatgaccccggtggaactgaaagagcagctgattcagtccggacagaaacactattccgatatgctcagccaggagccggctcccacggactggcatcttgatctgtttaaccgcgcactggaaaaaggcgcaccacgtctggcgcgggatgtaagcgccctcgcccgcacactgggtgactattttgcagatcagccggttgtgctgatcagcctggtccgcgccggtgtgccgttaggggtgatgctgcatcagacgctgcgtgatgcgggaaaaatctcacaccattacggcatcagtattatccgcgatcgcggtattgatacggcggcgctggagtggatcgaacaccatcacggcaccgccggtattgtgtttgttgacggctggacaggtaaaggcgccatcaccggtgaactgatccgctccctgaaagacagacccggctacccggccgatccgcgcctggtggtgctggccgatcctgccggatgcgcctggctttccgctgctgatgatgactggctgatcccctccgggattatgggggcgccggtttccgggctgatctcccgctctgtctggtcagataccggtccgcacggctgtgtgcattgtgagcacttacaaccttatgagtgcagccggacactcaccgatactgttgccgcgctgcgccgtcaggaaaccgcggctccggctgcggccttcccggagccggacaccaaaacagcactgcggaaaaaaagccgagcggtgatcactgcactggctgaacgctgtggtgtcaccgatctgaacagaataaaacccggtattgccgaagccacccgtgctgttctgcgccgggtgccggatcacgtctttgtgcgcgactgcacagagccggatgtggaactgctgctttatctcgcccgtcagaaagggatcactatcacggaagccggcgatgccctcgggcagtaccgcgccgtcactattatcaggaaggtatcaccatga

SEQ ID NO: 275124 - DNA, 948 bp, Morganella morganii
atgacccgacgtctctccccgtggaatttaggggcttcactctatatgcccgccacccgcaccgatatcacggatgcgattatcagtaataaaatcagcgggttgcgctcactgattatctgtctggaagatgcggtcagtgaggcggatatcccgcaggcactggagaatttacagggcatcctggccgcgctgacagcggaaaaacagcgtgccggtaaccagaactggccgctggtctttatccgcccgcgtcacccggaaatgggattgtggctgcgggagtactgcgatctcagtgccgttgacgggctggtgctgccgaaattcacacaaaagacgctgccggtctggtggcaggtggtgaaaaacatcccgctgtgtatgatgccgaccctggaaacagaagaagtctgtgatgtggtgcagatgcgggaactggctcaggtacttaaatcccatccctgccatgacaaaatcatcgcgctgcgtatcggcggcaatgacctgatgaatgtgatctccctgcgccgcccgcgccatctcaccctgtatgacggcccgatgggttatgtgattaaaatgctggtctctgtgtttgccccgcatgattttgccatgaccgcaccggtctgtgagcatattgatgatcacgatgtcatgacgcgggaactggcgctggatattgcccacgggctggtgggcaaaacggcgatccacccgaatcaggtagcggtgattgagcaggcgctgcgggtctccgccgatgaacacgccgatgcactgcggatcctcaactccacacaggcggtattcaagtcacagggggctatgtgtgaaccggcgacacaccgtcgctgggcatccgctattctggcccgtgcccgggtgtacgggatcgcacagcgcaaaacagacgaacagtcgtttaaaacacaaaacgggtga

SEQ ID NO: 275125 - DNA, 483 bp, Morganella morganii
atgcaattaagcacacgacaggttcgtttattcaccctggcaaccctgctcggtaccggaaaaccggttccgtcagatgaaatcctggcgacactacgctgctcagaagcaactctgacccgtactttcaaagagttgcgtgatacctggtcggcggaaatccgctaccgcaaagcctcacatacctatgaaatgactgactccggcacactggatcgcaaaacactgaaaaagatgagcgaagagctggaaaaccataacggtcagaaatcggtgtattacagcgggaaagtgtcactggataaagagaagaagaaggcaatttcgctgtcactgaccggtacaaccgtccggaaaatagcgcatttatctatgctctccggtaaaacccgcagtgacgccgtagagatgctggtcaatcttcatatcgatgagttaattgaatcgataatccggcgtaatgaaagccagcagaaaaaataa

SEQ ID NO: 275126 - DNA, 1077 bp, Morganella morganii
atgtctaaagtttttgattttgtaaaacccggtgtcgtcactggcgatgatgttcagaaaatctttgcggtagccaaagagaataattttgcactgccagcggtaaactgcgtcgggacagactcgatcaacgccgtattggaagcggcggccaaagtccgtgcgcctgttattgttcagttctcaaacggcggtgccgcatttatcgccggtaaaggtttcaaaggcgaaggccagcagtccgctgttctgggggccatctccggtgcgcatcatgtgcatcagatggcggaacattacggcgtgccggtcattctgcacactgaccactgcgcgaagaaattactgccgtggttagacggcctgctggatgccggtgaaaaacactttgccacaaccggtaaaccactgttctcttctcacatgatcgacctgtcagaagagtcactggaagaaaacattgagatttgcagcaaatacctgacccgtatggcgaaaatcggtatgaccctggaaatcgaactgggttgcaccggtggtgaggaagacggcgtggataactcccacctcgataactccgcgctgtacacccagccggaagacgtggcgtatgcctatgaaaaactgaatgccatcagcccgcgtttcactatcgcggcatcattcggtaacgtgcacggcgtttacaagccgggtaacgtgcagttaacgccgaaaattctgcgtaactctcaggactacgtctctgagaaatataacctgccgcacaacagcctgaatttcgttttccacggcggttccggctctactgcggaagaaatcaaagaagcagtgggttacggtgtggtgaaaatgaatatcgataccgatactcagtgggcaacctgggaaggtatcctgcactactaccagaaaaatgaaggttatctgcaggggcagctgggcaacccggaaggcgaagacaagccgaacaaaaaatactatgacccgcgtgcatggttacgtgccggtcagcagacaatgatcgaacgtctggaaaaagcattcaaagaactgaactgcgttaacgttctgtaa

SEQ ID NO: 275127 - DNA, 1164 bp, Morganella morganii
atgtccgtaattaagatgaccgatctggatctggcgggtaaacgtatttttatccgtgctgacctgaacgttcctgtcaaagatggcaaagttacctctgatgcacgtatccgtgcctcgctcccgacaatcgaagccgcactgaaacagggtgccaaagtcatggtgacctctcacctcggccgtccggttgaaggggaatacaacgaagagttttcactgaaaccggttgttgattatctggcagataaactgagctgcccggtgcgcctggaaaaagattatctcaacggtctggaactgaatgccggtgagctggtggtactggaaaacgtccgctttaacaaaggcgagaaaaaagacgacgaaaccctgtcaaaacagtatgcatcactgtgtgatattttcgtgatggatgcattcgggactgcacaccgcgcccaggcatcgactcacggcgtggcaaaatttgcccctgttgcctgtgccggtccgctgttatgggcggaactggatgcactcggcaaagcactggataacccggcgcgtccgatggtggcgattgtcggcggttccaaagtgtccaccaaactgaccgtactggactctctgtccaaaatcgcggatcagatcattgtcggcggtggtatcgccaacacctttatcgcggcagaagggcacaatgtcggccgttcactgtatgaagatgacctgattccggaagcgaaaaaattactcagcagctgtgatatcccggtaccggttgatgtccgcgtggcgactgagttctcagaaaccgcagaagcggtgctgaaatcagccaatgacatcaaagatgacgagcaggtactggatatcggtgatgaatccgcactgcacctggctgaaatcctgaaaaatgccaaaaccattctgtggaatggcccggtcggcgtgtttgagttcccgaacttccgtaaagggactgaaatcgtggctaacgccattgctgacagtgacgcattctctatcgcaggcggcggtgataccctggctgctatcgatttattcggcattgctgacaaaatctcttacatctctaccggcggcggcgcattcctggaattcgtcgaaggcaaaaaactgcctgccgttgtcatgctcgaagaacgtgcaaaacagtaa

SEQ ID NO: 275128 - DNA, 1023 bp, Morganella morganii
atgacaataaaaattgcaatcaacgggtttgggcgaatcgggcggagtgtgctgcgggcgttgtatgaaaccgggcgtaacacgcagattaccgttgttgctattaatgagctggcggattccgaaggtattgcacacttacttcaatatgacacaagccacggacgcttttttaaaccggtacagctgaaagaaaaaaatgtactgaaagtcggtgatgacactatccgcatcctgcatgaagcggatattcaccagctgccctgggcggaactcggtgtggatgtggtgctggactgcagcggcgtgtacggctcccgtgatgacgggctggcacatatcgccggcggcgcgaaaaaagtgctgttttcccatcccggcggtaacgacctggatgccaccattgtctacggcgttaaccatgacacactgacggcgcaggataaaattgtatcgaatgcgtcctgtaccaccaactgcatcattccggtgataaaattactggatgagggattcggcatcgagtccggtacagtgaccaccattcacgcggcgatgaatgaccagccggtgattgatgcatatcacagtgatttgcggcgcacgcgggcggccgggcactccatcattccggtggataccaaactggctgcggggatccggcggattttcccgaaatttgaagatcattttgaggcgatttcagtccgggtgcctacaattaatgtgacggcgattgatttgagcgtcaccgtaaaaagtaatgtcaccacgcaggatgtaaaccgccttctgcaaaacgcagcgacgggggcatttcgtggtatagtggactacacagagttaccgttagtctcggcggattttaaccatgatccgcacagtgctatcgttgacggcactcagacccgcgtcagcggacagcatctgataaaaatgctggtctggtgcgataacgaatggggctttgcgaaccgtatgctggataccactctggcaatggctgaggctggttttcactga

SEQ ID NO: 275129 - DNA, 144 bp, Morganella morganii
atgaaaaaagatcgcaagacagtcagaggagcagatataaaaaaagcgcattcggtcaaaaaaaccggaatgcgctttcagaatctgtatcagcagattatttcagcagagcttttgcctgagaaaccacgttttcaacagtga

SEQ ID NO: 275130 - DNA, 1995 bp, Morganella morganii
atgacctctcgtaaaactcttgctaatgcgattcgtttcctgagcatggacgcggtgcaaaaggcaaattccggacaccccggcgcaccaatgggcatggctgatatcgcggaagtactgtggcgcgactatctgaagcacaacccggccaatccgcactggagtgatcgtgaccgctttgtgctgtcaaacggccacggctcaatgctgatttacagcctgctgcacctcaccggctatgatgtatcaatggatgacttaaaagccttccgtcagctgcattccaaaaccccgggtcaccctgaatacggctacacaccgggagtggaaaccaccaccggtccgttaggccagggtatcgcaaacgcagtcggttttgctgttgcggaacagacactggcggcgcagttcaaccgtccgggtcacgatattgttgatcatcacacctacgtctttatgggcgacggctgtatgatggaagggatctcccacgaggcctgttctctggccggtaccctgaaactgggtaaactggttgccttctatgatgacaacggcatttccattgacggtaatgttcagggctggttcactgacgataccgccaaacgctttgaagcttacggctggcacgtcgtgcgcggcattgacggtcacaaccctgaccagatcaaagcagctgttgaagaagccaaagcggttactgacaaaccatccctgctgatgtgcaaaaccgttatcggcttcggttcaccgaagaaagccggtactgcagatgcgcacggttctccgttaggtgatgcggaaatcgccgctacccgcgaagcactgaactggccgtatgcgccgttcgaaatcccgcaggaaatctatgctgagtgggatgcgaagaaagccggtgctgccgctgaatctgagtgggatgtgaaatttgctcactacgaaaaagctttccctgaactggcccgtgaataccgccgccgtgtaaatggtgagctgcctgcacagtgggaagcggatgcaaacgccttcattcagaacctccaggataacccggccagcattgccagccgtaaagcatcacaaaatgcactggaagcgttcggtaaagtactgcctgagtttatgggcggttccgctgacctggctccgagtaacctgaccatgtggtccggctcagcgccaatcaatgaagacaaagcgggtaactacattcactacggcgtgcgcgagttcggcatgtcagccatcatgaacggtattgccctgcacggcggtttcattccttacggcgcgaccttcctgatgttcgttgaatatgcccgtaatgcggtgcgtatggcggctctgatgaagatccgcagcatcttcgtttacactcacgactctatcggtctgggtgaagacggtccgactcaccagccggttgagcaaatcgccagcctgcgcgtgacaccaaacatgagcacatggcgtccgtgtgaccaggtggaatcagcggtagcctggaaatacgcgattgagcgtaaaaatggcccgacatccctgatcttctcccgtcagaatctggcacagcagccgcgtaccgcgcagcagctggcagatatcgaaaaaggggcgtatatcctgaaagattgcgctggtcagccggaagtgatcctgattgccaccggttctgaagtggaactggccgtgaaagcatacgagcagctgacagccgaaggccgtaaagcgcgcgtggtttccatgccgtccaccgatgcattcgacaaacaggacgcggcttaccgtgaatctgttctgccgtcagccgtgaccgcacgagttgctgttgaagcgggtattgcggattactggttcaaatataccggtatgcagggtgccatcgtcggtatgcattcattcggtgaatctgcgccagccggtcagctgttcagtgaatttggtttcactgttgaaaacgtggtttctcaggcaaaagctctgctgaaataa

SEQ ID NO: 275131 - DNA, 1338 bp, Morganella morganii
atgaaaacaaacaccgggagtgatgaagtcaatgaaatgatgccgatgcggaaactgtttccgtatgctgttcagcatatttttgccatgtttaccggcaccattgccgtgccgatagtgatttcccaggttctgaaactatcgcaggaagataccaccctgctgattgccgccgcgatttttgtctccggcgtggggacacttatccagtcactgagtatcaccaaatacgtcggcgtcagtctgccgctgatcctcggcacttcgtttgtggcgatgccgccggtttttattatcgcctcgcggttcggcggggggcttgaatcgctgccttatgtcttcggcggaaccctggtctccggggtgctgctgttcttcctcgcgccgctgtacggaaaaatcgctttcttattcaaaccgatagtcatcggctgttatcttataatgctcggtgtttccctgctgccggtttcgttttccggcattgtcggctatccgggggatgcctcctacggcgacccggccggtatttttctcggtgtgctgactatcgcggtaattgtgctgttaaaccgcttcggtaaaggcgcgttgcgggaaatgtcgattctgatcggcctgatcgtggccactttggtcgcggtggtgatggatatggtcaatttcggccctgtgagcagtgccgggtggttttcgtttgttcgtcccgcccattacggcattcagtttgatctgaccgccattattctgatgttcctcggcacctttatggccactctggattctgtcggtactttctccactgtcggccgcctgtgtaaccgctctatggaaggtaatgccctgaactctccgatgcgcggggaaggggtggcggtgaccatttccgggctgtttaactgtacgccgctgacctcttttattaacaatgcgggggtgattattatttccggtgtgcgcagccgttatgtaaccgcgtgcagcggcgtgatcctgattatcctcagcattattcccaaattctccgcaattgcgaccatgatccccgcttcggttttcggtggtgcgaccctggtgatttttgcctttattacggtggcggggatagacacactgacaaaatctgtcgatatgaccaaaatgggcaatatgatggtggtcgggatttcagtcagtgtcgggctgatgtttaacggtcagggggaagccctttctcagctgccggaaatgctgcggattattctttcccagggcgtgatagtgacctttgttctggctatcgtgctgaatcttttattcaattttgacagtgtcgtcggtaaaaaagcgaaacagtaa

SEQ ID NO: 275132 - DNA, 735 bp, Morganella morganii
atgagcactgatattacacgacaaattgttctcgataccgaaaccaccggtatgaacaaactgggtgcccactacgaggggcacaatattattgagatcggtgcggttgaagtgatcaaccggcgcctgaccggccgtaacttccatctctatatccggcctgaccggctggtggacccggaagcctttggtgtgcacgggatcagcgatgaattcctgatggataaaccggtttttgccgacattgcggatgaatttattgaatttatccgtggcgcagagctggttattcataacgcacccttcgatatcggctttatggattatgaattccgcaagctgaaccgggggatcccgccgacagcggaattctgtaccattacagacagcttaacgctcgccagacagctgtttccgggtaagcgtaataacctcgatgccttatgtgaccgctatcagatagataactcaaaacgtctgctgcacggcgcgttactcgatgccgagattttgtcggatgtttatctggcaatgaccggcggccagacatcactggctttttcagcggataatgagagcagcggcgaagagaacgttcagactattcagcgcgttacccgcccgcagagcggtctgcgtgtggtgtatgccacggatgaggaaattgccgcgcacgaggcgcgtctggatctggcggagaaaaaaggggcgaacccgtgcatctggcggagctga

SEQ ID NO: 275133 - DNA, 471 bp, Morganella morganii
atgagtgacaaggtagaaattttcaccgacggctcctgcctcggaaatccgggccccggcggctacggcgcactactgcgttataaaggccatgaaaaagcactcagtgagggcttttttcttaccaccaataaccggatggagctgctggccgctattgtggcgctggaaaccctgaaacgtccgtgtaatatcgtgctgaccaccgacagccagtatgtccgtcagggcatcacacagtggatccataactggaagcggcgcggctggcgcaaagcggataaatccccggtggtgaatgtcgatttgtggcagcgcctggatgccgccatcacccgccatcagattgactggcagtgggtgaaaggtcatgcagggcacccggaaaacgaacgctgtgatgaactcgcccgggcagcggcagaatctccgtcacaggacgataccggttatcagccggcaacggaataa

SEQ ID NO: 275134 - DNA, 732 bp, Morganella morganii
atgttttctgcacgagcgacaaaaactctgacgatgccggactcgtggtgcgatattccctgcgggcgccgcttccggcaatcgctggaagcacagctggcgccctggtggccgaaaatgtttggttttcatctgattaagatcggcacgctgagctgtgaaattgacagcagcagctgcatgatcccgcatcaggtgaatgtggcaccgcagggtaacaccttacaggtattcggggaggcggcgcaattgccgtttctggacaaatccgcggatgtctgtgtgctggcacataatctgggctacagcagtgatccgcaccggttgctgcgcgaggctgaccgtgtcctgattgaggacggctggctgattatcagcggatttaacccgctgagcctgctgggggcacgcaaactgatcccgtggcgtctgaaccgggagccgcagtgcagccggatgttttcacagttccgtatgctcgactggctcagtctgcttaattacgaaattatgtatcaccggcttaccacgccgatcccctggtgtgatccggcaagtttcggcaaccggcatgcgcgtattttcggctgtctgggggtgattgtggcccgtaaacgtacggtgccgctgacgttcacaccgcagaagctgcgcctgctgcggccgaaactgaacaatgtggtgggcgcgacacgccagcagacgccgccgcgctgtctgaaacggcgctga

SEQ ID NO: 275135 - DNA, 756 bp, Morganella morganii
atggagcttatcagaatttccgcgttatcagataactacatttggctattacgggataatgcgcacacctgtgtcatcgttgaccccggcgtcagtgagccggtactgaatacactgcgggagcggggactgaccccttcagccatcctgctgacacaccaccatgcagatcacaccggcggcacggcggagattgtgtcacattatcccggcctgccggtttacggtcccgccgaaaccctgccgaaaggcgcaaatcactgcgtgcaggataatgacactatcacctgcggcgggctgacatttcaggtcatggcagtgccggggcatacactcggtcatgtggcttattattgcgaaccttatctgttttgcggcgatacgctcttctccggtggctgcggccgtatttttgagggcacaccggcacagatgttccgttcggtcagccgccttgcggcgctgccggatgagacgctggtctgctgcgcacatgaatatacacagtctaacctcgcctttgcgcgcgctgtctggccggaaaaccgtgatattcaggcatatcagcaatatattgcagaattacgtcagaatcatgaagctacgctgcccgtcacactgaaaacagaaaggaaaattaatgtttttcttaactgtgataatattgatctgcaacataatttatcagtaagtaaacatacggcgacagctgaggaaacttttacgtctttacgcgcaaaaaaagatcaattttag

SEQ ID NO: 275136 - DNA, 1398 bp, Morganella morganii
atgaaaatcaaagccacacttcttgccgccgcaattttgctggcggggtgtcagactgcgccgcagaaaaccactcagaaacctcattatccttccggtaacggctttttactgactgctcagcagatggacacggcaaaaatgtcctctgtcagccccgaagatgacatctggggttatatccgcgatgagatgaaaatgaacatcccggacaacgaccgtatccgggctgaagaagcctcttacctcgccaaaaagagctatctccacgatgtgacactgcgcgcagaaccttacatgtactggatcatcggtaaaatcgatgaacgtaacatgccgatggaactggttctgctgcccatagtggagagtgcttttaatccgcatgccacctcaccggctcaggctgccgggttatggcagattatcccgagtaccggcaaagcaagcgggctgaaccaaaaccagtgggtcgatgatcgccgtgatgtggctgcatccaccactgccgcgctggatttactggagcgcctgaatactatgttcggcggagactgggcactgaccctggccgcgtataacagcggtgaaggccgcgtgctgcgcgcgatggaagcaaatgccgccgccggaaaaccaacagattactggtcattatccctgccgaaagaaaccatggattatgtgccgcgtatttttgccctgagcaatgttatccgcaacagtgaccgtaacggtgtgaatttaccggtaccggatgcagagcgcgccctggcacgggtgaatatcggtcagcagatttccctggatgtcgcggcacagttgctggatatgccggtttccagactgaaagattacaacccgagcctgaaacgcggtgtaacctcaccggccggtcctcactatctgatgctgccgaaaaccaaagtcgaccagctgatgagcgcattatctgatgacgcggtacttaatgatatccgcacagcggtcgcgagaaacaatcagcgtactgaacagctgagttcaccggcaggccgtgcgcaggccgcgaagtacaaagtgaaaagtggcgattcattctacgccattgccaaccgccataagatgaccgtcgccgagctgaaaaagctgaacggactgaaaagcgccgcggttctgaaaccgggacagacattgcaggtaaaaggcagcccggtggtgaaaccatctaaagccgcaaccaaaaatgctatgcgtctggcgaagtataaagtgcgtcagggtgattcttactacagtattgcgcagcgccatggtgtgacactgaaagagctgatgtcctggaacagtaaagtcaaaatgaaggacttgcatccgggtattgagttaacggtttatgttgccaataaacgcggctga

SEQ ID NO: 275137 - DNA, 1386 bp, Morganella morganii
atggacgcttcagaaacgctcacccaatccaccgggctgggttcttttaatacaaagggactcatcatactggctctggacatcgtggtgctgatactgctgctgaaatacctgccctacagcgacaaagaaaatgccgggctggcgctgatggtgttcgtcgctgttttatggctgactgaggcgattcatgtcacgctgaccgcgttactgatcccgattctggccgtttttctcggattactgggcgcaggtaaggcattacagtcttttgccagtccgaccattttcctgttcttcggtggctttgcgctggcgacggcgctgcatattcaggggctggatcgtctgattgccaaccgcctgctgctgattgcccgcggtcgtttatgggcggcagtgattctgctgttcagtgtgaccggtgcgctgtccatgtggatcagtaacactgctaccgccgcgatgatgttaccgctggtgctgggtattctggggaacctcgatatccgtcacgaccgtaacacgttcgtatttatgctgctgggcgtggcgtacagcgccagtatcggcggcctgggaacgatggtcggcagcccgccgaacattattgccgcaaaccagctgggaatggacttcttcacctggatgaaatacggcattccgatggtgctgatcctgatgccgattatgttcggtattatgtacctgatgttacgtccgaagctcggtgcccgctttgaaattgaagtggagcaggttcagtggacaccaaaacgtctgctgacactggcgattttcggtctgactgttatctgctggatcggcagtgcaccgctgagtgatctgctgggtaaaattaaagatttcgataccattatcgctctgagtgccgcggcgctgattggtattaccggggtagccagttggtcacagattcagaacaacaccgagtggggcgttctgttcctgtttggtggtggtctgacactgagtatgatcctgaaagattccggtgccagtgaagtgatggcggactggatgaaaacctcctttggtaacagcagctggctggtgattattatcgctgtcaccacctttattattgtgctgacggagttcaccagtaacaccgcgagtgccgcactgctggtacctatctttgccggtgtggcggaaggtctgggaatgccggtaatggcgctgaccatgattatcggtatcggtgcatcctgtgcctttatgctaccggtggcgacaccgccgaatgcgatagtgttcgggaccgggtttatcaaacagtctgagatggtgcgggtcggtggtgtgctgaatatcgcctgtattatcgttatctcggccttcgcctggttgttctgggtataa

SEQ ID NO: 275138 - DNA, 1299 bp, Morganella morganii
atgtccaaaatcgttaaagtgatcggccgtgaaatcatcgactcccgcggtaaccctactgtagaagctgaagtacacctggaaggcggttttgtgggtatggcggcagctccgtcaggcgcatctaccggttcccgtgaagcgctggaactgcgtgacggtgataaatcacgtttcctgggtaaaggtgttctgaaggcagtcggcgcggtaaatggtccgatcgcacaggcgctgctgggtcaggatgccaaagatcaggcaaaagttgaccagatcatgatcgacctggatggcactgaaaacaaatccaacttcggtgcaaacgcgattctggctgtgtctctggcaaacgccaaagccgctgccgcatcaaaaggtttacctctgtacgcacacatcgcagaactgaacggcaccccgggcaaatactctatgccgctgccgatgatgaacatcctgaacggtggtgagcacgctgataacaacgtggacatccaggaattcatgatccagcctgtcggcgcgccatctctgaaagaagctgtccgcatgggttctgaaatcttccatcacctggcaaaagtgctgaaagcgaaaggcatgaacaccgctgtgggtgatgaaggtggttatgcaccaaacctgggctctaacgcagaagcgctggctgatatcaaagaagctgttaaagcagcaggctacgagttaggcaaagacgttaccctggcgatggactgtgcagcatctgagttttacaacaaagaaaccggtatgtatgaactgaaaggcgaaggtcgtacctttacctctcaggaattcactcactacctggaagagctgaccaaagagtatccgatcgtttctatcgaagatggtctggacgaatctgactgggatggcttcgcgtatcagactaaagtcatgggcgataaaatccagctggtcggtgatgacctgtttgtgaccaataccaagatcctgaaagaaggtatcgaaaaaggtatcgttaactccattctgattaaattcaaccagatcggttcactgaccgaaacactggctgctatcaaaatggcgaaagacgccggttacactgccgttatctctcaccgttccggtgaaaccgaagatgccacgattgccgacctggctgtcggtaccgcagcaggccagatcaaaaccggttctatgagccgttctgaccgtgttgccaagtacaaccagctgatccgtatcgaagaagcgctgggcgaacgtgctccgttccacggccgcaaagagatcaaaggtcagtaa

SEQ ID NO: 275139 - DNA, 1638 bp, Morganella morganii
atgaaaactaattatatttttgtgaccggcggggtcgtatcctctctgggtaaaggcattgccgcagcctctttagcggctatactcgaagcccgtggactcaatgtcaccatgatgaaactggatccgtacatcaacgtcgatccgggaaccatgagcccgacccaacacggggaagttttcgtcaccaacgacggcgctgaaactgatctcgacttaggtcactacgagcgcttcatccgcaccaaaatgacccgccgcaataacttcaccaccggacgtgtttactctgaagttctgcgcaaagagcgccgcggcgactatctcggtgccactattcaggttatcccgcacatcaccaacgaaatcaaagaccgtatcatccgtggcggtgaaggtcatgacgtggtgctggtggaagtcggcgggactgtcggtgatatcgaatcactgccgttcctggaagctatccgtcagatggcggcggaagtcggccgtgaacacaccttatatctacatttgactttagttccgtatctggcggcggccggtgaagtaaaaaccaagccgactcagcactcagtgaaagaattattatccatcggtattcagccggatgtgctgatttgccgttcagacagagtgattcctgctaacgaacgcgccaaaatcgcgcttttctgtaacgttcctgaaaaagcagtgatcagtctgaaagacgtagattccatttataaaatccccggcctcttgaaatcccagggattagatgattatatctgtaaacgattcagcattaatgctcctgaggcagatctctccgaatgggagcaggtgatttatgaggaagccaatccgtcaggtgaagtcaccatcgggatggtcggcaaatatgttgaactgccggatgcctataaatccgttatcgaagcactgaaacacggcggcctgaaaaaccgcgtcactgtgaacatcaaactgattgattctcaggatgtggaaacccgcggtacagaactgttacagggtctggatgcgattctggtgccgggcggcttcggttcccgtggtgtggaaggcaagattatgactgcccgctatgcccgcgagaacaacattccgtatctgggcatttgcctggggatgcaggtggcactgattgactttgcccgtaatctggctggtatggatgacgcgaactccacggaatttgatgctgattgtaagtacccggtcgttgcgcttatcactgaatggcgcgatgaagacggcaatattgaagtccgcagcgaagagagcgatctcggcggtacaatgcgtgtcggcggtcagttatgccacctgacgaacaattccctggttcgccggttgtacggcaaagatgcgattactgaacgtcaccgtcatcgttatgaagtgaacaacatgttactgaagcgtcttgaagatgcgggtctgctggttgcgggccgttcagtggataacaaactggtggaaatcatcgagaacccgaaccatccgtggtttgtggcctgtcagttccatccggagttcacctctaccccgcgtgatggtcatccgctgtttgcaggttttgtcaaggcagcctctgataaccagaaaggtctgctaaaataa

SEQ ID NO: 275140 - DNA, 789 bp, Morganella morganii
atgtctgtatcagttgagcgcctgctggcgatcatgtcgcagttacgcgacccggaaaacggctgtccgtgggacaaagcgcaaacttatgccactatcgccccttacaccctggaagagacctatgaggttctggacgcgattgagcgggcagattttgacgatctgaaaggtgagttaggtgacttattatttcaggtggtgttttacgcgcagatggcgaaagaagaggggcgttttgattttgaggatatcgctgccgctgtcagtgacaaactgacccgccgccacccgcatatttttgaccgtgagcaggggatcggcgcggaagcggccatttccggctgggagcagcgaaaaagtgctgaacgtgctgaaaaatcacaatattccctgttggatgatatcccggcaacactgcccgccctgatgcgtgcctataaaattcagaaacgctgtgcgtctgccgggtttgactgggatacactcccgccggtgctcggtaaggtgtacgaggaactggatgaggtgatggaggaagtgaatcagccgcaggtgaatgatgagcgcgtggctgaagagctgggtgatttgctgtttgcggtggtgaatttttcccgtcatctgggacataaaccggaaatggtgttacaaaaagcctgccgtaagtttgagaaccgttttcgtcaggtggagagcgatattgctgcccgcggactgaccatggaatcagcaacacttgatgaaatggagaaaagttggcaggatgttaaatcccgtgaggggtaa

SEQ ID NO: 275141 - DNA, 2235 bp, Morganella morganii
atggtcgcggtaagaagtgcgcatttaacaccggccggtgagtttgacccggcacactggattaacagcctcgggctgcataacccggtgacgggtgaaaaactggaagaggtctggcattactgtcatcagaaggttgatggacatcaggatgcggcgctgttgctcgggcgcggtattgagatggtggagattttatccaccctcagtatggatctcgacagtctgcgcgcagcgttgctttttccgctggccgaagcggagatcctcggagaggaagagataagcgaagcctttggtcccgctatctggctgctggtcaaaggtgtgatggatatggatgctatccgtcagctcaaagccactcataatgacgaaaccagttcggtgcaggtggataacatccgccgtatgctgctctccatggtggaagatttccgctgcgtggttatcaagctggcggagcggatagcccatctgcgcgaagtgaaagatgccggtgaggacgagcgcgttctggccgccaaagagtgtttcaatatttatgccccgctggcgaaccgcctcgggatcgggcaactgaaatgggagctggaggattactgcttccgttatctgcacccggatgactacaaacgcattgccagcctgctgcatgagcgccgtcttgaccgcgaagagtatattgataactttgtcacgaccctgcgcaacgacatgaaagaagagggcattcaggccgagatctacggacggccgaagcatatctacagtatctggcgcaagatgcagaaaaaatcgctctcctttgatgagctgtttgatgtccgcgctgtgcggattgtggtggagcgtcttcaggactgctacgccgcgctcgggattgttcacacccatttccgtcatctgccggatgagtttgatgactatgtggcgaacccgaaaccgaacggctatcagtcgattcataccgtggtgctgggtccggcgggcaaaaccctggaaattcagatccgcacccggcagatgcatgaggatgcggaactcggcgttgctgcgcactggaaatacaaagaaggtactgcgggcggcgggaaaaccggcagttacgaaaaccgtatcgcctggctgcgtaaactgatcgcgtggcaggaagagatggccgattccggcgaaatgctggatgaagtgcgcagtcaggtgtttgatgaccgcgtttacgtctttaccccgaaaggggatgtggtggatttaccggccggctccacgccgctcgatttcgcctaccatatccacagtgatgtgggtcaccgctgcatcggtgcaaaaatcggcggccgtattgtgccgttcagttatcagttgcagatgggcgatcagattgaagtgatcacccagaaacagccgaacccgagccgtgactggctgaacccgaatctggggtatgtcaccaccagccggggccgcgccaagatccataactggttccgtaaacaggatcgcgataaaaatattatcgccgggcggcagatgctggacaacgaactggccgcgcaggatatcagcctgaaagaggcggaaaaactgctgattgcccgttataacgttcactcgctggatgaagtgctggccggtattggtgtgggtgatatccgcattaaccagttgtcgaattacctgcaaagcaaactgaacaagccgacagcggaagaagccgaccgcgaggctctgaaaactctggaaaaaaccccgccggccaaaccggcaccggctcaccagagcagcggccgtattgtggttgagggcgtcggtaacctgatgcatcacatcgcccgctgctgccagccgattccgggggatgatatcgtcggctttatcaccaaaggccgggggatttccatccaccgtgcggattgcgaacagctggcggaattgcaggaacaggcacctgagcgtctggtggaagcggtctggagtgcgagttactccagcggctattccctggtggtgcgggtggtggcgaatgaccgcagcggcctgctgcgcgatatcaccaccattctggccaacgagaaagtcaatgttctcggagtgcgcagccacagtgatgtgaaacagcagattgccaccattgatatggatatggaaatctacaatatccagactctcagccgtgtactggcaaaactgaaccagctgccggatgtgattgaggcaaaacgtcacactcagtaa

SEQ ID NO: 275142 - DNA, 1383 bp, Morganella morganii
atgggaaaatcaccggcctcacagacaacgttttttatcattatggcgcaattttattctcagccccgtcagaccccgcggcagtcccggactgtcactgtcaccgctgactctctcgatgccctcgggcagggcattgcccgccttcagggaaaaactgtttttatcccggatctgatgccgggtgagtccgcacaggtcaggctgacggaagaaaagcgtcactatgccaaaggcagtgtggtgaaacgcctgtctgatagcccggcgcgccgcaaaccggtctgccgtcatttcgggcagtgcggcggctgccagcagcagcacattccggttgctatgcagcgggaaaccaaagcggcgtatctcgcgtatctgctgacccgcgaaacgggtgaggcgtgcggtgaggttcctgttctgagcggagaagagtacggctaccgccgccgggcgcggctggcgctggtgtattccccgaaaacaaaacagctgaccatgggattccgtcaggcgcagagcaaatcaaccgttgctgtcacacagtgtccggtgctggttccgcgtctggaggcattactggtacccttacagcgctgtctgtcgtctctggccgccgcaccggaactcggtcacgcggaactggcagataccgaaagcggtccgctgctggtgctgcgtcatctggcaccgctcagcgatgcggatttgtccgcactgacagcgttttgtgctgaacacaataccgcgctttatctgcagggcagtgccggtgcaccgcctgtggcagtttgtgcgccgtatcctccgcattacgcggtagccgggttaaaattacagttcagcccgcaggattttatccaggtgaacggtgcactgaatgagctgatggtggcgcaggcgctgaactggttggagctgacaaaacacgatcgcgtgttagatctcttctgcgggatgggcaattttacgctgccggtggcggaacgcgccggtgaggttgtcggggtggaaggcgtggacgcgctggtccgcacggcacgggagaatgctcgtctcaataatctggcgaatgccgcattttatcacgcggatttgtcgcaggatattaccggagagccgtgggcggcttccgggtttaacaaagtattactggatccggctcgtgccggggcggctgagattatgccgcatattgttgcgctttcccctgagcgcatcgtttatgtttcctgcaatcccacaacacttgcaagggatagtcaggttctgcatggtgccgggtatcaccggaatgctgtccgtatgctggatatgtttccgcaaaccggccatttggagtcgatggtgcttttcacaaagacaccaccggtcagtcagtag

SEQ ID NO: 275143 - DNA, 1122 bp, Morganella morganii
atgcaaaaagagtatcgggtcgggattgaatttgaatattggctgacacagtaccggaataaaagtgccgccggtattaaatcctttgacaatattaccctgtcagagctggcacctgcactgaataaccgcccggggatggatgatgcctcgctgcataagggtgatgcgggtattaaagccggttactggtatgttgagggcgatgagcggttttcaccggaaggcaaactcattgcccaggttatcaaagggatagaaatccgcacgccaccggcaaagtcggtgacagcggcactggattccctgcagatcattgaagcgcaactgagtgaacgcctgaaagcgtgcgggctggggctggcaatcagtgcttatcatccggtttcgccgcgctatcagtttaatccgccgctgaatgcatgggaaaaagcgttccgtgaggagcacgctgctttccgccacgccgatctggtaatgcagacctgcggtccggatatcaatatttccgtgccggaaatgagtgacgcccgtgtcgtgcatgcggttgaaaaactgacgttcttcgcaccgtatctggtggcgctttcgctgaacggcccgctggaaaacgggcagttatggggcggcttatcgcgccgtaccgcactgcgcagttgtcaccgtccggcctgtaaagggttcctgaccaactcggcggtgtatccgcatgactttatttatccggcacgtaacgagggtgagcacggacggattgaattcaaagcgttcgatgcggttccggaccctgcgctgatgggcgcattctgtgcgtggatcctcgggctggtgctggatgataccatttcctttaattacggcgtacagccggacgcccgctttaatgcgattgcctgcgaaccgtttgctgacctgaccgtttccacggtggttgagacactgcttatcgccgcccggcgcgcactggagcagcatggtctgctgaatgaagcggcgcggctgcagttactcagtggacgtctggcaaacagaatgaccccggcggatgaaatgatcacccgtttcctggtcagcggggagttaatgcatttcggcggattgtggccggagcaggatgcataa

SEQ ID NO: 275144 - DNA, 1512 bp, Morganella morganii
gtgccggttattgattttaaaaagaagctgaattttcaccgccagtttggtgcttctgcggagggatccgcacaagagtttttggtgaatcaggcatttgaaagcgatcgtggccgtattatcaattctgccgctgtccgtcgtctgcaacagaaaacccaggtgtttccgctggagcagaattccgccgtccgcagccgtctcacacactccctggaagtgcagcaggtcgggcgctatatcgccaaaacgatcctcagtcagctgaaacaatcacaaaagctggaagaatacggcctggatgagcgtacggatgcctttgaaagtgtggttgaaatggcgtgtctgatgcatgacatcggcaacccgccgttcgggcatttcggggaggcggcgattcagaaatggttcagtaatctgctgggcgagccgcagaccggagatgaggataactgtcagattgccgcactgcgcctgaccggctcaccgcaggcgaaccatctgcgctgtcagctgcgtcgtgatttgtgcctgtttgagggcaatgcccagggaatgcggatggcacaccatctgctgaaactgaatctgacatttgcccagataggcagtgtgctgaaatatacccgtcctgcctggcagttagagccggtgccggaggagttcgattatctcaccaaaaaaccgggctattactggtctgaaaataccctgattcagcggctgcgtgatgaattacagctcggcgagttttgccgttttccgctcagttatattatggaagcggcggatgatatctcgtattgcattgcggatctggatgatgcggtggagaaaggtattctgaccccggataccctggtgacctatctgcgccaggagtggcaggcgctggaaggctctgcggattccgcgctgttccgcgataccgttgagcaggcgtatcagtcgcttacccgcagtcagcaccgcagcccgcaggatcagttttttatgtatctgcgggtttatatcaccaataaactggtgccgtacactgcgcagcgctttattgataatctgcccgccgtgtttgcgggtacttataatcaggcgctgctggaagataaaagtgaagagcaccgtctgctgaaaaccctgaaacgggtcgcgtttaaatatgtgtttacccatcacgaagtggaagagctggaattacagggattccggatcatcaacggtctgctggatttctaccggccgctgttaatgatgccgcaggcggatttcgccgatctggtccgtgaaaactttcacaaacactattttatcgaaacgcggctgttacataagctgtcacgcaagcagcgggcggcttacggggaagctgttgccgcactggcagataaaccgcaggaagagcagaccatcctggaattttattaccgcgcccggctgattcaggattatatcagcggtatgaccgaccattacgcttacgaagaattccggcgtttctccgtttgtcagtaa

SEQ ID NO: 275145 - DNA, 702 bp, Morganella morganii
atgaaagtcggtatcataggtgcgatggagcaggaagtaaccctgctgcgtgatcagattaccaacatgcagaccctccgccacggcggctgcgaaatctataccggtcagattaacggtgttgatgttgcactgctcaaatccggtatcggcaaagtcgccgcagcgatcggtaccactctgctgctggagctgtgcaaaccggacgtggtgattaataccggttctgccggtggcctcgccccgcatctgaatgtcggcgatattgttgtctcctcggaagtccgttatcacgatgcggatgtgactgccttcggttatgaaccgggccagatggcacaatgcccgccggcctttattgctgatgccggtcttatcgcactgactgaaaaatgcattcagactctcggcctgaacgccgtgcgcggcctgatttgcagcggtgatgcctttatcaacggcgcagagccgctggcgcgtatccgtaccaccttcccgtcagtaatagcagtggaaatggaatgtgcggctgtcggccacgtctgccatcagtatcaggtaccgtttgtggtggtccgcgctatctctgacgtggcagataaagcctcgcacctcagctttgatgagtttctgccgctggcagcaaagcaatcatctctgatggtagcggaaatcctcgccaatattgattcactgaaatga

SEQ ID NO: 275146 - DNA, 807 bp, Morganella morganii
atgataaaatcgtcattgcacctcgccgggttgctgcttttgctggccacctgcggggcacaggccgcggcacagagagtgatcgcgctctctccgtcactggcggagatagcgtatgccgccggtctgggggataacctggtcggcgtcagtgctaacgcggattacccgccggaagcgaaaaacattgaacaggtatccagctggcagggactgaaccttgagcgcattattgccctgaaaccggatctgatcatggcctggcgcggcggcaacccgcagcgcccgctgagccagctggagcatctcggcatcaaagtcgagtatttcgatccgcgcaatcttgatgaaattgcggatgatctggatcgcctcgcgccttacagcccgcaaccggcactggcggaaaaagcggctgccgatatgcgccacgggattgacgccctgaaaacccgctacggcgataaaccggagaaactgatttttctccagtttggtcagaacccgattttcaccgcgtccggcaccaccctgcaaagtgaagtggtgaccctgtgccggggtaaaaacgtgtttgccgacagcccggtgccctggccgcaggtcaaccgtgagcaggtactgacccgcagaccggacatgatccttatctccggggataaccgcgaagtggagaatgtaaagcgcttctggtctccgcagcttgatgtgccggtgattacgattaatgccgactggttccagcgcggcacgccccggctgttaaaagctgcggaagaattatgtgagaaaataaataacacctga

SEQ ID NO: 275147 - DNA, 969 bp, Morganella morganii
atgattaaatatctcaaaggtgatttactgagatctgatgctcagtcactggtaaatgccgttaattgtcagggcgttatgggaaaaggaattgcctatcagttcagactggattatccggtaaatgcgcgcgcctatgaagctttatgtaaagaaaataaaataggtgccggccagttatcagtgactgatgaacacggccgtaaaattattaatttcccgacccggaataaatgggattcaccttccggttatgaatttatcgaaagtggtctgcgtgaactgaaagccctgattaaaaaacaggggctgaaatccgtggcaattccggcactcggctgcggcagcggcgggctggagtggcgtcaggtggataatctgatccagacgcacctcggtgaattaagtgatacagaaataatgatctatccgccggtcaaatatattgatgacagcatcagcccgcatcatgtgctggtctggtggattgataactgtctgctgatcccgtcacgctacaatctttatattgccctgtatattctgcaacgcctgaacggcatgaatctgtttaatttcagcgacaccatcagtaccctctattccgatgatgttgatcgctatgttaatgatctgcgcgaccggattgctcattacggtcttgattttaataccgtgatcgacgtgcagattaaactgaaccgcgaacatccggaaaacccgctgccggtctttgatcactatcttaaccgggtaatggggtcgctcaatccgctgacctacagtgaccagtctctgctgccggcgatgatgattgacggattactgcagggtaaggcgatcaaagagatcaccactattctgcgtgatcgctatcaggcacgggatattgattttgtgctgttccgggcgaaaaacagcggtctgctgaaagacaatatcttaggggatgtgattctgatccgctga

SEQ ID NO: 275148 - DNA, 855 bp, Morganella morganii
atgcatgaactgcctcttgttatattcaccttatttatgcaggcttcggtcggctgcctggtgatcacgctgctttgttatttccgtctgttcggctgcacggatgcccgcaccgggatgaaatgggtgcgtgttccgctggttgcttctttcctgctgggctgtgtcggcttactcggctccctgttccatatggggaatccgttccatatgttttacaccatgctgcacgtctcgacctcgtggatgagccgtgaagtctgggcgaccgccatttatatggcgctgctgttcttcagtgtcgcgctgctgctgttaaaacagaaggtgaacggctttctgctgctgttaagtgcggcggcggggctggtgtatatgtatgcgatgtccgcactgtatgcgaataccctgtttaacctgtggggcgggctgtttacctatgccggattcttcggcacggtgctgctgaccggcgggatgatcgctggtctgctgctggtgacagcgctgggctttgcccgtgaggatgtgctgattcagcgtgtggtgaaaatttccctcgctgccggtgtggccggactgttgctgatgctgctgggcgcattgtcactgctcggcaatatcggtgagccaatttacgccgggatgacaccgcgagccatgccggaagggctgctgaacctgaatatcatccgcgtggtgctgatcgggctggggatgttctttgccggtcgcctgctgtgccagaaaaatgcacaggtcactaacggcacactgctgatggcactggcggccatctgtgtatttgccggtgaagcggttggtcgtgtggtgttcttctcactcggcgcgtaa

SEQ ID NO: 275149 - DNA, 543 bp, Morganella morganii
atggataaccaagttggattttatataaatgtcgccgcctgcatcgggtgcaaaacctgtgttgtggcgtgcaaggataagaacgatctcgaggtcgggcgtaatttccgccgtgtgtatgatatcgaggccggggaatatccgcgcccgcgccgctggcatctctccattgcctgtaaccattgtgatgatccgcagtgcgtcagccattgtccgacaaccgcaatgcataagcgggaagaggacggggtggtgctggtggatcatgataagtgtgtgggctgccgctactgtacctgggcctgtccgtatgaagcgccgcagtttgatccggcgatcggtatgatgaccaaatgtgatacctgtctggatctgcgggagcagggcggtaatccgatgtgtgtggattcctgtccgatgcgcgccattgagtttggtctgatcagtgaactgcgcaaaaaatacggcaccaatgccgatatcggcggtctgccgaactcatccattacccggccgaacctggttgtcggcaccaaaggataa

SEQ ID NO: 275150 - DNA, 2580 bp, Morganella morganii
atgtcagacagacagaaaaccggcgtaacccgccgttcatttctgaaatggacgtcggcggcatccgccatggcggcactgccgttaagcagacaacttcacgcggccaccccggcaccggcacaggccacctctgcggcagcgcctgccgccaaagggcagtggaaacctgtcgcctgctggcataactgcggcgggcgctgtgttaacaaagcactggtggccgatggtgtggtggtcagacaaaaaactgatgatgtggtggcggattcccctgacttcccgcagcagcgcgggtgtctgcgcgggcgttcccagcgtaaacaggtgttcggggccgatcgcctgaaatacccgatgaaacgcaaaaactgggcaccgggcggcggggacaaaacgctgcgcggacgtgaccagtgggtgcgtatcagctgggacgaagcactggatattgtagcctctgaaaccaaacgtatcaccggacaatacggcaatgaatctctgtgggtcaccggcggtaacggcacggattttcagagtgtgttctccgccgccgggggttttaccggcgactggggcaccacctcctggggcgcatggtttgaaaccccggctcatcttgggctgctggagggattctacaccttcggcaccaatgaccgttttgatatgcgcaactcacagctgattgtgatgtggggcgcgaacccggcgtggtccagcccgggcagtccgacttataactattatcaggcgaaaaaagccggggcgcgttttatcagtatcgacccgagctataccgccaccgcagaactgatggatgcggactggtatccgatcaacccgggtacagaccacgcgctggcactggggattatgcatgcgctgctggagatggacagcccggagaatccgctgatcgattgggaattcctgcgccgctgcaccgtcggttttgatgagagcaatatgccgtcaggggcggatccgaagaaaaactttaaggattatctgctcggcacctacaccggcaaaccgaccacgccggaatgggcggcggatatctgtggtatttctgcatcggacatccgctcgctcgcgcgtcaaatcggcggcacacagcgtgtggcgctgttaaccggctgggcaccggcgcgtattcataacggagagggatgggttcaggcattctcaacactcgggtttatgaccgggcatatgggccgtccgggccgcatgaccggcgcgtgctgtcactatgccgccgggaacaacggtacccgtctggtgatggccggtgcgaacggcttaccggcagtgaaaaacccggttactctgaaaatcaaccacaacgaactgaaccgtgccctgctggagaaaaaattccgtcagcgcggcgtgggggatgtggatgccaatattcagatgattttccatccgtttaacgccaccttacagacccgcgccaacattatgcagggaatcgaggcttaccgcagtggcgtggaatttatcgcaaccgcagcctatgtcccgcatacctgtgcgaaatattccgatgtgatcctgccggtgacaaccgagtgggagcgcgagggaaccattcttaacccgagtaaccgtgaagtaatcattgctgcggtgaatgtgactcagccgctgtatgaagcgaaaagcgaccagtggatcgccaaagagctgggtaaacgtctgggtgtcaatgtggatgagatcttcccgatctccgaaaaacagcagttcttcaataaactcaacggtgcaaccatcattactgaggatggtgttaccaaagcaccgctgtttaccatcactcaggccgatattgatgagtggcaggtgaccggcacaccacaggaagggcgcatcacgctgaatgaattcctgaccaaagggaagtatcaggtagaacgcaccccggatgataattacggctatatcgcgtatgaggactttatccgcgatccggcggcgaatccgcgcccgacaccgagcggtaagtttgaaatctactgcgaaaccctggtggagaaagcgaaagagtgcggctggaccgaattaccaccgatcgccgaatacatcccgtcagcgagcggctatgaagccagctttaaagatttcagcaaaaaagagaaaggggattatccgttccaggtttataacccgcactatctgcgccgttcacacagtaccctggataacgtgccgtggctgcgcgagcagtggccgagcccgatctacattaatgcctccgatgccagacgtctggatattaaacagggcgaaaccgtccttgtgaccagcccgcagggcaaaattctgcgtccggcactggtgacccagacgatgaaaccgggtgtggttgcactgccgcacggcagctggaccaatgtggatgaaaccaccgggattgatatggccggggcggataacaccctgaccattcaggtaccgaccgggctgggtacctccgggtggaacacgatgctgtgtaatatcgaaaaatggcacggtgagcaattaactgacgatgcgcgtctgccgcagcggattatcggataa

SEQ ID NO: 275151 - DNA, 687 bp, Morganella morganii
gtgaacagtgataaccgggatccggattatctgtatgcgcgtcagtttgcttatgacgtcctgcgccgtctgctgacggacgaaccgacagcggaactgctggtttatctgcgtgatgaggggctgtcactgtttccggcagatgatgcactccctgccatgcagagtgcgctcgatgccatgcaggatgatctgaacacccgcatgcttaaacgcggtgccgccgattttgaggcactgcactgggatttcacacgcctgtttatcgggccggaatcgccgcctgcaccgccgtgggagtcggtttatgtctcccgcgacaaactgctgtttcaggaaagtaccctgaatgtgaaaaccttttaccagcagaacggttttcatatgccggaaaaggagtatgaggcggcggatcatatcggctatgagcttgatttcctctggaaactgagtgaacaggcgtcacaggagcttgaccgggaacaggcaatgtgtgagcgcatcactgcgccgctggctgtttcctctgactttatgcaggcacatctgctggcgtttatcacgccgttctgtcgtgaactgaataatcacgcggagaccgcgttttatcgtcagctcagcacacttctggaagtctttgtccggagtgattataaaaaaatcaatgaattaataaacttacaataa

SEQ ID NO: 275152 - DNA, 1350 bp, Morganella morganii
atgatttacccgctgacagaacagaccccggttttacagcataatgcggcgttgcagcggtatgtccggcgctatgccgatattgaaaaacagacacagcaggctatcgcgcagtacggattgtcttttgaatcgccgtaccggcgtcaggccgaaacggatgcgctgcgtcgtgaggtgaaagcgctgggcgcggtatttgccaacaacggcaaaagcatccacagccgctggctgtcatccgcctgtgtgcagtgccgcaccggcgagggcagttacaccacgtttttatccctgaaatgtcaccgtgattgctatttctgcttcaatccgaatcaggaaaattacgatggttttcagcatgagatgcgggatgccattggtgaggtgaatgcgatagctgaagaggggtatccgctcacccatattgccctgaccggtggtgagccgctgctgtttcgtcaggagagcatccgcttttttgaaacggtacaggcgaaactgcccggcgttcatacccggctgtataccgccggtgatccgctggatcgtaataccgcgctggcactggcgaaagccggtctgaaagaggtgcgtttcagtatcaaaattgatgatccgccggagaaaattgaaaaggttctcagccggatagcactggcgcgggagattttcccggatgtgatggtggaaatgccggtgatcccgggcagtgaagagcagatgtatgatctgctgctgaaactggatgctatcggcgtggacggcatcaatctgctggaattctgtttcccgctgaccaacagcccggcctatcaggaacggagctttgccctgaaaaatcccccttatgaagtctattacaactactggtatgccggtggtctggcggtggcagacagtgagctggcttgtctgcgggtgctgaaatttgccctcggaaatcagctttccgttggtgtgcattactgctcgctggaaaacaaacacaccggccaggtgtatcagagcaatgcgtttctcagtgcggagccgtattacctgttttcttcccgtgattactttttcaaaagcgccaaggtgttcggtgaggactgtgctgccgttgcggcagcgttgcgtaaggcgggtgtcccgttccgtgaggatctcctgcacggttttttacaattcagtcctgaatcgattatgcgcctgacagacacccctgaactgcctgttctgctgacatcccacattgcggaagccgatgagcagggcaatcccctgattaaagaagtgcgggtggaattcaccacgcccgctgaattttcgcccgacgatatccacggaggtatgtgtgaacagtga

SEQ ID NO: 275153 - DNA, 345 bp, Morganella morganii
atgagcgatgattcagcaatgcctctgcaatttactgatgcggcagctaaaaaagtaaaaatcttaatcgcggatgaagaaaatccgaacctgcgtctgcgtgtgtatatcaccggcggcggttgcagcggtttccagtatggcttcacgtttgatgatgccatcaatgacggcgacatgaccatcgaaaaagaaggcgtggcgctggtggttgatccgatgagcctgcaatatctggtcggcggttgtgtggattataccgaagggctggaaggttcgcggtttatcgtcaccaacccgaatgccaaaacaacctgtggctgtggttcttctttcagtatctga

SEQ ID NO: 275154 - DNA, 1281 bp, Morganella morganii
atgagccgttctgaaaatctctatactgaagcacaacattttatcccgggtggtgtgaactcaccggttcgtgcctttaacggtgtcggtggtacgccgctgtttatcgagcgcgccaacggggcctatatttatgatgtcgacggcaaagcctatatcgattatgtcggctcctggggaccgatggtgctggggcataatcacccggccatccgcaccgccgtcatcaaagcggtggaaaaagggctgagtttcggtgctccgactgccgatgaagtggaaatggcgaaatttgtcaccgaactggtgccgtccatggatatggtgcgcatggtgaactccggtaccgaagccaccatgagtgcgattcgtctggcacgcggttataccgcccgcgataaaatcatcaaatttgaaggctgctaccacggacacgcagactgcctgctggtgaaagccggttccggcgcactgaccatcggccagccgaactcaccgggtgtgccggcagattttgccagacacacactgacctgcacctacaatgacctgagctctgtccgcgaggcgtttgaaaaacatccgcacgatatcgcctgtatcattgtcgagccggtcgccgggaatatgaactgtataccgccgtcagcggatttcctgccgggcctgcgcgccctgtgtgatgagttcggtgcgttgctgattatcgatgaagtgatgaccggtttccgcgtcgcgctgggtggtgctcaggcgcattatgatgttgagccggatctgacctgtctgggtaaaattatcggcggcgggatgccggtgggcgccttcggcggccgtggtgaaatcatggaaaaacttgccccgaccggcccggtttatcaggcaggaacgctgtccggtaacccgatcgcgatggcggcgggtcttgcctgcttacatgaaatcgctcagccgggtgtgcatcagcgcctgaccgaactgacggatatgctggcagacggtctgtgcgagaaagcccgtgaagcgggtattccgtttgtggttaaccatgtcggcgggatgttcggcctgttctttaccgatgcaccggcggtcacctgctatcaggatgtgatgaactgcgacgttgagcgctttaagaagttcttccacctgatgctgcaacagggtatttacctggcgccatccgcctttgaggccggatttatgtctgtcgcgcacagcgacgaagatatccgcaaaaccattgatgcggccgcttacgctttctcagagctgtaa

SEQ ID NO: 275155 - DNA, 450 bp, Morganella morganii
atgaaactgaaatatttatcgccgctgctgttatcactggtcagtgcgccgttgtttgccgcaccggatattgtcagtgaatgcagcaaacccggccgctcggttgaccgggaaatgcagatagtgatggagcatacgcttcacattgatatgaaacagattgatgaaagcaaaaccagaacagaaattctgtctgctcaaccggccggggaactgctgatttctcagcttgcacaggaaacctatgattctctgacagataaatccaaaagctcaccggaatcctataaaaaactgttttctgttaatccgccgtataacctggttttgcggatcacgtatgtgaataaagataataagaagaatatctttatcgcctccggactggctgacaaagatgagtgctcggtgcactttaacggctggctgacagagcagcgggaattctga

SEQ ID NO: 275156 - DNA, 366 bp, Morganella morganii
atggcatggaaatacgatgttgcaacacgggcattctcactgaacggcgtgcatcagttttatgcggaatacgctggtgcacaagggtacaaaaatgattctgcttatgagtgcagagcaaatcagggaccactgccgcgcggaacatacaccatcagcgctccttttacccacagcactgccggagcttataccctgagattaaccccggcagccggtaatgatatgtgcgggcgggcaggcttcctgatccacggggacagtgtccgtaatccgggaactgcatccaccggctgtattgtgctggcaaaatcccacagaaaagaaatcgcggacagtggtgatacggaactgattgtcgaatga

SEQ ID NO: 275157 - DNA, 714 bp, Morganella morganii
gtgcgttgtgagcggggtgtttgccgtgaagtggtggtaacggctgtatttgtcggtgcgctcggtgtcagttttctctggctgtggaagacaggaaaattctctttcctgttatacggcggggcaatggtgatcgggctggcggatattttttgtatgacatcgatttaccgctatacatcgattctgacctggaatgacatcaacacctatctgatgttttacggcacaacactgacactcggtgccgtcctgtttgtgctggtggtgatccggaaagccggacaccgggccgggattacactgcccgcagacgtactgtccttatcacagctgtggctgctgtggggagtgatggcggtaagtctgatcgggcgcctgctgtatcagccgttttatgcgcattacctgacgcgtacgcaactgacacataaatcaatcacctttccgctgtcaccgattgaggcgtatgacagtgttgccgggctgcggattggtgtctgggcagcggcggtaattggtgtggcactctgcggtatctctctggtgcgggtacagaaaaaagcacgcagcggtttaccggtctgcgcctctttctccggaggcgtgtttttttatctgctgtattacgtatttctttctgagccggattcccggttaaccgcatgtcactgtcaatttatctttatggtgttattattcttattattttaa

SEQ ID NO: 275158 - DNA, 642 bp, Morganella morganii
atgagcaaattcattgtttatccggcagtcagtgacaaacagttaggtttctatattgattccgcccgctgctccggttgtaaggcgtgtcaggtggcgtgcaaggacaaaaataatcttgatgccggccgccgcttccgccgtgtgtatgaaatgaccggcggcggctacagccgcaataaaaacggcgcgctgattaataacgtgttcgcctatacgttctccatctcctgtaaccactgcaaagatccgatttgcgtgcgcaactgcccgacaaccgcaatgcataaacgcgaaggggacggcattgtgatggtcaataccgataaatgtgtcggctgtggtgcctgtgcgtggtcgtgtccgtgcggtgcaccacagatgaatccggagacgaaacagatgtcgaaatgcgatttctgtattgatcttcatcagaaaggtgaacagccggtatgtgtcagcacctgtccgctcggggcgattcagttcgggccaattgaggaactgcgggcgaaatacggttcactcgattacgtgacaggtttgccggatccgtccatcacgcacccgaatctggtgaccaatccgcatcagggcgcgaattttgatgacatgaacagtgagagaaaagaaaaatga

SEQ ID NO: 275159 - DNA, 1923 bp, Morganella morganii
atgagtcatcaatccggccacgataatgaaaagtccggcgctcccggcgaaataagccgccgcctgtttaacctgaccggcggctttctggaaaactatcattccgtcagtaacggcaacaccattgcggccacgccctatacctacggcacggcggccagcggcagcacgctcgatactctggaaaatacgccgctggtgatcctgtggggacataacccgaacgaaacgattttcgggcacagtaaccactatttccagaagatgaaaaagaacggcaccaaatttatcgttgtcgatccgcgctattccgataccgcctcttcgctggcggagcagtggatcccgctgctgccgaccaccgacaacgcgatgatggatgcaatgatgtatgtcatcgtgacagaaaatctgcacgatcaggcatttattgataaatacaccctgggtttcagtgaagatcagatgccggaaggcgtggcggataatgaatcgctggtggcgtatctgaccggtcagaaagacggcatggccaaaaccccggaatgggcggagaaaatcaccaaagtcccggcggacaccatccgtcagctggcgcgtgaatatgccacaaccaaaccggcggtactgatgcagggctgggggccgcagcgtcatatctgcggtgagcgcagtgcgcgcggggccacgctgctggcaacgattaccggtaatgtcggtgtgcgcggcggctgggcagcgggttacggcatggcacagaatccggaactgcgtaaaaccatcgccggaccgaagctgtttaataacccggtcaaagccaaaatcaacatcaccaattgggtgcaggcgtgcgaaaacaaaaacctggtcacgccggataacggactgaaaaatgcagacaaactcggcaccgaaatcaaaatgattttttcgatggcgggtaactacatgaccaaccagaacaccgatattcttcatgccgcaggcgtgctggaggatgaatcgaaagtcgaatttatcgtctgcagtgacctctatctcaccccgagtgcgaaatatgccgacctgctgctgccggaaaccagttttctggaacgctggaatctcggcggcacctggagttacggcgattatctgctcctgtccgaaaaagccattgggccggagtttgaacggcgcactgactatgactggctgtgcgaagtggcagagaaactgggtgtccgtgatgctttcaccgaaggccatgaaacagatcgcgactggatagagtttctcgtcaatgacgcggcacagaagcgcccggaagataacatcccggcgtttgctgagctgctggtcaaacgccgccatttattaacgcatcgtccgcatacacagaacgttgcgtttgagcagaatattcaggatccggaaaacaacccgtttcctaccccgtccggcaaaatcgagattttctccaaacgcctgtatgacatgcacaatccggagatcccggcactgtctcattatgttccggcaacagaagggccggaagacaatctgaccgcgaaatacccgttacagctgatcacctggaaagggcgcaaccgcgcgaactccacccagtttgccaacccgtggttacaggaagtgcagcgccaggagctgtggatcaacccggcggatgcggctgatcgcggcatcagtgacggtgaaaaagtgaaagtgtataacgatcgcggtatcaccatgatcccggtgaaaatcacaccgcgcattatgccgggtgtggtggcattacaggccggcgcctggtggcagccggacagcaacggcattgatcagggcggatgtgccaacgtgctcacctcgtcacgcagtaccgcgctcacccacggcaacgcacaccagacactattagttgaggtggaaaaagcatga

SEQ ID NO: 275160 - DNA, 786 bp, Morganella morganii
atgagaaatattccgttaaaaagcgtggataatatcgcgcgggatgtcattgcgctcggcaccgattatctgcccgataccctgctggaataccacgcccaccgccgggcacagtttttatatccggccaccgggctgattgaagtcagtaccgcagacggtgagtgggtgatcccgccgtcctgtggtgtgtggatcccggaacaggtcgcccatgaaacccggatgctgaatgtcagcacgcgcagtctgtatatcgaaccggcagcaaagccgcgtcacgccgtcagttgtgaagtggtgagtgtctccccgctgctgcgccagctgctgctggaggcggtggatatcccggcggaatatgatattcaggggcgtgacggtgtgctgatgcagctgctcctctgcgagctggcgcgtatgcccccgcttccgtttttcgcgccgatcccgcgtgatgagaagctcggtcatctgtgccgtgagtttatgcgcaaaccggttatcacctcacagccgggggagtgggcggaacagctgcacaaaagcgagcgctctttcagccgttttttccgcacccagaccgggatgtcattttcagaatggcggcagcaggcgtgtcttctgaactcgctgtctcacattctgtccggaaaatcgattaccgaagtggcgtatgagctgggttacaacagtgcgggggcattctcaattatgtttaaaaaacagatggggcaatccccttcccattttaaaaatgatgattcggatatccgccatttttaa

SEQ ID NO: 275161 - DNA, 588 bp, Morganella morganii
atgaatttcagccgcagacagttctttaaggtttgtgccggcggtctcgccggaacaactgccgccgctttaggctttatgccgtcagtagcaatgtctaatgtccgggaatacaaattactccgttcaaaagagacccgtaacacctgtacctactgctccgtcggatgcggattactgatttacagcatgggtgatggtgccatgaatgccaaatcagcgattttccacgtcgagggtgacccagatcacccggtcaaccgcggggcgttatgcccgaaaggtgccggtctgctcgattatattcacagtgaaagccgtctgcgttatccgcagtaccgcgcgccgggctcggataaatggcagcgcatcagctgggatgacgcttttgagcgtatcgcccgtctgatgaaagccgaccgtgatgccaacttcattgagaaaaacagcgaaggcaccacggtaaaccgctggctgaccaccgggatgctctgcgcctctgccgccagcaacgaaaccgggatgttaacccagaagtttacccgttccctcgggatgctggcagtcgataaccaggcgcgtgtctga

SEQ ID NO: 275162 - DNA, 2412 bp, Morganella morganii
atgaccaaccactgggttgatatcaaaaacgccaacgtcgttgtggtgatgggcgggaatgctgcggaagcacatcctgtcggtttccgctgggcgatggaagcgaaaaacaacaatgatgccacactgatcgttatcgatccgcgctttacgcggaccgcatccgtggcagatcactacatccctatccgttccgggaccgacattacgttcctttccggcgtgatcctgtacctgatggaaaacggaaaattccacgacgagtatgtgcgccattacaccaatgcgccgttactggtccgtgaggattatacattcaaagacggtttattcagcggctacgatgctgaaaaacgccgttacgacaaaaccacctggaattaccagttcggtgaagacggctatgcgctgcgtgacgacaccctgcaaaatccgcagtgtgtgtggaataagctgaaagaacacgtcagccgttatacgccggagatggtggaaaaaatctgcggcacaccgcaggcggatttcctcaaagtctgtgagattctggcctccaccagcccggccaaccgtgcggcaaccttcctgtatgccctcggctggacgcagcataccgtcggtgcacagaacatccgtaccatggcaatgatccagctgctgctcggcaacatgggtgtggcaggcggcggcgtgaacgccctgcgcggtcactccaacattcagggtctgacagacctgggtctgctctccaccagcctgccgggttatctgactctgccgtctgagaaacagaccgatatcgacagctatctgaaagccaatacgccgaaagccacgctgccgggccaggtcaactactggagtaactatccgaagttcttcgtcagcctgatgaaatctttctacggcgatgaagcaaccaaagagaaccagtggggctatgactggctgccgaaatgggatcaggcttatgacgtgctgaagtatttcgacatgatgaacaaaggcgaaatcaacggctatatctgtcagggctttaacccggtcgcgtccttcccggacaaaaacaaagtggtcagttgcctgagcaaactgaaatacctggtcaccgttgatccgctgagcactgaaaccgcaagtttctggcagaaccacggcgatatgaatgatgtggatccggcatccattcagaccgaagtattccgtctgccgtcgacctgtttcgcggaagaagacggctcgattgccaactccggccgctggttacagtggcactggaaagcagcggatgccccgggggaagcccgtaccgatggtcagatccttgccggtattctgtggaaaatgcgcgaactgtatcagcaggaaggcggtcagggtgttgaccagctgatgaaaatgtcctgggattacaagcagccgttcaatccggaatccgatgaagtcgccaaagagaacaacggcgtggcccttgaagatctgtatgacgccaacggtaatttacaggccaaaaaaggcgagctgctcagctcctttgcgctgctgcgtgatgacggttcaactgcgtcctcctgctggatctacaccggctgctggacggaacagggtaaccagatggcaaaacgggataacagtgacccgtccggcatcggtaacaccctcggctgggcatgggcatggccgctgaaccgccgtgttatttataaccgcgcctcagccgatccgcagggtaaaccgtgggataagaaccgcgtgcttatcgagtggaacggcaagaagtgggtcggtaacgatatccctgacttcaacgcctctgcgccggaagccggtaccgggccgtttatcatgcagccggaaggtttaggccgtctgtttgccatcgataaaatggcggaaggaccgttcccggaacactatgagccgtttgaaacgccgattggtactaacccgctgcatccggaggtgatatccaacccggccgcccgtatctttgaggacgataaaaaccgtctgggcagtcacacggaattcccgtatgtgggcacaacctatcgcctgacagagcatttccatacctggaccaaacatgcgcggctcaatgctatcgcacaaccggaacagtttgtggaaatcagtgaaaccctgggcgcagccaaagggatacgcagcggcgataaagtaaaagtcagcagtaaacgcggctttatccgcgcggttgcggtagtgacaccgcgccttcagacactgatggtggacggtaaaccggtcgaaacggtcgggctcccgatccactggggttttgaaggtgctgcccaaaaaggctttatcaccaacacactgacgccgggagtcggtgacgccaactcgcaaacgcctgaattcaaagcgttcttagtcaatatcgagaaggcgtaa

SEQ ID NO: 275163 - DNA, 891 bp, Morganella morganii
atgtccatgcaatctcaagacattatcaaacgttctgcgaccaacagcataacgccgcctcctcaggcccgtgacgacaagtttgaagtcgccaagctgatcgatgtgtccacctgtatcggctgtaaagcctgtcaggtggcctgttccgaatggaatgacatccgtgatgaggtcgggttctgtaccggggtttatgataacccgactgatctcagcgccaaatcctggactgtcatgcggttcagcgagaccaaagagaacggcaaactggagtggctgatccgcaaggacggctgcatgcactgttcggatccgggctgcctgaaagcctgcccgtctgccggtgcgattattcagtacgccaacggtatcgttgattttcagtcagagcactgcatcggctgcggctactgtattgcgggttgcccgttcaatattccgcgtctgaatccgaaagataaccgggtgtacaaatgcacactctgtgttgaccgggtcagcgtgggccaggagcctgcctgtgtgaaaacctgtccgaccggtgctatccatttcggtaccaaaaaagacatgctggaagtggcggatgagcgcgtacagaagctgaaaaaacgcggctttgccaacgccggggtctacaatccggacggtgtcggcggtacacacgtgatgtatgtgctgcagcacgcggataatccggagctctatcacgggctgccgaaagatccgcagattgatacaccgattgatctctggaaaggggtactgaaaccgctgtcggctatcgggtttatcgccacctttgccggactggtattccactatgtggggatcggcccgaacaaagagacggacgatgaggaagaggaggaaactcaccatgagtaa

SEQ ID NO: 275164 - DNA, 657 bp, Morganella morganii
atgagtaagaaaagcaaaatgatcgtccgcacgaaatttattgatcgtgcctgtcactggacagtggtgatctgctttttcctggtctccttatccggtattgcgctgttcttcccgacactccagtggctgacggaaactttcgggacaccggcaatggggcgtattctgcacccgttctttggtgtgctgattttcgtcgtgctgatgtttatgtttttccgcttcgttaagcacaacatcccggacagagaagatctgccgtggattaaaaacattatcgaagtgctgaaaggcaacgaacaccatgtggcgcgtgtcggtaaatacaacgccggacagaaaatgatgttctggagcattatgagcatgatctttgtgctgctggccaccgggatcatcatctggcgtccgtactttgcgcactacttcccgatgtggatgatccgctggagtctgctgatccacgcaacggcggctatcgtcctgatccacgccatcctgatccatatgtatatggctttctgggtgaaaggatcgatcaaaggtatggtggaaggtaaagtcagccgccgctgggcgaagaaacatcacccgcgctggtatgaagaagtggaagccgaagaagctgctgaggaagcgaagcagaagaagtaa

SEQ ID NO: 275165 - DNA, 321 bp, Morganella morganii
atgaaacaggctattgtttcacatcccggtacaatcgtagccaatatactgactgacctgggtgtgggagttcgtcagtttgccggaaatatcggggtaacaccggcaacggtttcccggttcttatcggggaaaacagccctgactccggcgctggcaatccggatagcagccgcattaggcagcaacccggcattctggctgcgcttacaggcaaattatgatttgcaccgcctggaaaaggaaatcgatatttcggggatcacgctgtacggtgcttctgaagaagatggtttttgtaatacatcggcggataaatga

SEQ ID NO: 275166 - DNA, 2508 bp, Morganella morganii
atgtctgattttgatcgtgaacccaccggccgcaggggcagcaaggcttctgccggtaaaaaaagagggcgctcagaccgccgtcgccgccgggatgaggattatgacgatgatattgaatacgatgatgaattcggggatgacgaaccggatgatgatgattatgacgatgaagaggatagtccgcgcatgagtaaaaaagggcgcaaaaacaagccgcccaaacggcgctggcgctggttctggttcctggtcaaactcggcattgtgatggctatcctgctggggatttacggcgtttatctggccggaaaaatcagtgaccgcctggacggtaaagtctgggatctgcctgcggcggtttacggacgcactgtaaacctcgaaccgggtatggattacagcctgaatgagatggtgaaactgcttgaaggtatgcagtaccgcaaagtcaccaaaatcacccgcgccggtgaattttccgtgaccggtaatactattcagatgctgcgccgcccgtttgatttcccggacagtaaagaaggtcagattaacgcccggctgactttcggcagcagcggactggaaaaaattgaaaacgtggataacggtcgtgaattcggtttcttccgcctcgatccgaaactgatcactatgctgcaatccgcaaatggtgagcagcgcctgttcctggcccgcagcggcttcccggatgagctggttaaagccctgctggtgaccgaagaccgcaatttctatgagcatgacggtatcagcatcacctccatcgggcgtgcccttctggcaaacctgacggcgggacgtgcggttcagggcggcagtaccctgacacagcaactggtgaaaaacctgttcttatccaatgagcggacactggtgcgtaaagcgaatgaagcctatatggcgctcattatggattaccgctacgacaaagaccgaattctggaactgtatctcaacgaagtgtatctgggacagagcggggatgagcaaattcgcggcttcccgctggcgagcctctattacttcggccgtccggtggatgagctgagtctcgaccaggtggcactgctggtggggatggtaaaaggtgcgtcggtctataacccgtggcgtaacccgaaaaatgcccttgagcgccgtaacgtggtgctgaaactcctgcaaacccagggcggtgtgatcgatcaggaaatgtatgacgtcctgagtgcacgtccgctgggtgtgaaagagaaaagcggcgtgatcaccccgcagcctgcatttatgcagctggttcgtcaggaactgcgcgagaagctcggcgataaagtggatgatctgtccggcgtgaaaatcttcaccacactggatccggtttcccaggatgcggctgaaaatgccgttgaggaaggcgtgaaagccatccgtgcagagcgtaaaaaaccggagctggaaggggcgatggtggtggttgaccgcatcagcggagaagtccgcgcgatggtcggcggctcccagccgcagtttgccggatttaaccgcgctatggcggcggagcgctctatcggctcactggcaaaaccgatgacttatctcaccgcgcttggtattccggacacttatcgtctgaatacctggctggacgatcagccgctgaccattaatgtgccgggcggcggcggtacctggtcaccgcgtaacgacagcaaaaccttcagtggccgtgtgatgctggtggatgcgctggcgcgctctatcaacgtaccgaccgttaacctcggtatggcggtcggcctggatgcggtggcggatacctttgtccgtctcggcgcgccggctaaaaatatccagaaagtcccggcaatgctgctcggcgcggtaaacctgacaccattgcaggtctctcagctgttccagaccatcggcagcggcggtaaccgcgcgacactgtctgcgctgcgctcggtgattgcggaagacggcacagttatttatcagagcttcccgcaggcacagcgcgctgtggccccgcaggcggcctatatgacgctgtacgggatgcaacaggtggtggaacgcggtaccgcggcccgccgtctgggatcgaaattcggtaaatatcatctggccgggaaaaccgggaccaccaacctgatgcgcgacagctggtttgtcggtatcgacggcaaagaagtcaccgtttcctggatggggctggatgacaacagcccgtccggcctgtacggcggctccggcgccctggtgctctatggccgctatctggacaatcagccgccgctggcgctgaacctcacaccaccggaagatatcgcagagatgtcggtcaatgcggacggcaattttgtctgcaacggcgtggggatcacccggacattaccggtctggacaacggacgcacaggcactgtgcggacagcaggccccggctcagcagcagagcgaagaagcccccggctggctgaaagagatgttcgaacagtaa

SEQ ID NO: 275167 - DNA, 2451 bp, Morganella morganii
gtgacatattcccccgtttgtaacatttatccggcactcagtacggcactgaaaagtgctccgcaggtgttgttacaggctccgaccggcagcgggaaatccactattctgccgttgctgatgctgaaagacgcttctgtcaccggacggattatcatgctggagccccgccgtatcgcggcccgcagcgtggcgcaccggctggcatcgcagctcggggagcgtccgggggaaaccgtgggttaccggatgcgcggtgaaacccgggtcagtgcagctacccggtttgaggttgttacagagggaattctggtcagaatgttacagcaggatccggaattatccgaagtaagcatcattattctggatgaattccacgaacggaatttacaggccgatctcgcccttgcgctgttgctggatgtccagtcctcactgcgtgatgatttgcgtctgctggtgatgtccgcgaccttagataatgaacaactactgtccctgctgccgcaggcggaggtgatcacggcggaggggcgcgctttcccggtggagaggcggtatcagccgctcagtgcgcatcagccttttatcagtgaggtaacccgggcggtgttacagctgtatcagcaggaggaaggctctgtgctggtgtttctgccgggacaggcggaaatctgccggttacaggaacaactgaccggtaaaacggatgcggatacccttatctgcccgctgtacggcgcactttccctgaaagaacagcagcaggcgattgaaccgccgccacccggtatgcgcaaaatcgtgctggcgaccaatattgccgaaaccagcctgacgattgaaggcgtgactctggtggtggacagctgtctggagaaaaccgcgcagtttgatccgcgcagcggactgacccgcctggtgcgcagccgcatcagccgctcatcgatgacacagcgtgccggtcgcgccggacgtctggcgccggggatctgtctgcatttgtgcggacaggcggaagcagaacgcgctgcggctcacagtgagcctgaaatctgtcacagtgacctggccgggctggtgctgaacctggcgcagtggggctgccgtgaggtctcacagcttgcctggcttgatactccgcctgttgtggcggtacaggtggcgaaaaaactactgacagaaatgggctgtcttctgcctgacggcggattggccgccaaaggtgaggcaatggccgcctccgggacagagccgcgcctctcagcgttgtggctttatacccttaatgaagaaccggcatatatatactatgccgcccggctgattgccgcgctggaagagccttcccgcgtgggtaacggcaatctgctgcatgatctgacacacccgtccgcccggtgggataaacgggtgcaccagctgttgcaggccgccggtctgccggtcagaaaaccgtcacatgacccggacagcggctggctgtgccgcaccttattacagggctttccggacagaatcgccggtaaccgcgggcgctccggtgcgtttctgctggcaaacggcaccggtgcggttacggatgaaagtagtccgctcggcaatgaatccgggcttatcgccccgctgatcctgcaaaatgagcagcaggccaatgcgcggatcctgaaagcggtgccgtttgaattatcacagctgacagaaatggcaccgcacctgctgaaaacagaaaaccgcctgacccgtgatgaaaacaaaggcagctggcaggcgtggcagtcggtcacctgcgggcagctgattattgagcggaaaccgctggcggcaccgtctgatgaggttgtccgcgatgcgctgctcagttggatccgcgaacagggtttatccgttctgccgctgaatgaagcctgtgagcagttgcttatccgccagcagctggcaaacgagctgtttccggaacagccgctgccggcggcggataatgatacactgctcgccgggctggaatcctggctgtcgccgtatctgaccggtgtgcgcaatcagcagcaactggcaaagctggatttatacggcgcgctgcgtcagcggatggactggtctcagcagcaatggcttgatgcacaattcccgcgtcattttgaagtacccaccggcacccggatccctgtagaatatgcggcggataaaccgccggtgatggcagtccgcattcaggagatgtatggtgtgcgtgaaacgccggtggtggcgcagggacggctgccggtgacggtcagtctgttatcccccgcacaccgaccgatacaggttactgccgacctgaaagccttctggggcgggagctaccgggaggtgcagaaagagatgaaagggcgctatcccaaacatttctggccggacgatccggcaaatgcacagccgacaaagcgtgtaaaaaagtttatgtaa

SEQ ID NO: 275168 - DNA, 711 bp, Morganella morganii
atggaatttcatcccccgttacaggcgggcacactggtgcagcgttacaaacgttttctggcggatattatcacgcaggacgagcgcaccatcaccattcattgtgccaataccggcgcgatgacaggctgtgccacgccgggtgataccgtctggtattccgaatccgccaatgcaaagcgcaagtatccgcacagctgggaactgacgcagacacaggccggacatctgatttgtgtgaatacgatgcaggcgaaccgggtggtagctgaggcgattgcgcagaaccggatcccggaacttgccgggtaccagacgctggcacaggaagtaagatacggaagtgaaaacagccgggttgattttttactgacggatccgcagaaaaagccctgctatgttgaggtgaaatccgtcacgctgctggaaaacggacacggttattttcccgacaccgtaactttacgtggacaaaaacacttacgtgagttacaagcaattgctgaagcgggaaatcgtgctgttctgttttttgctgtactgcattcagggattgaggccgtatcggacgcagcgcacattgataaaaaatattcatcacttttgcagcaggcatcacagtccggaactgaagtaatttgttacagaatgcggatgacaccggatggcatcactgccggagaaaagataccctttgtattcatggggtga

SEQ ID NO: 275169 - DNA, 456 bp, Morganella morganii
atgcaagaagggcaaaaacgtaaaacctcgtccctgagcattcttgccattgccggcgtggagccgtatcacgagaaggcaggcgaagaatacatgaacgaagcccagttggcccatttcaagctgatacttgaagcatggcgcaaccaactcagggatgaagtaaaccgcactgtcacgcacatgcaggatgaagcagctaacttcccggacccggttgaccgtgccgctcaggaagaagaattcagcctggaactgcgcaaccgtgaccgcgaacgcaaactgatcaaaaagatcgaaaaaaccctcaaaaaggttgaggacgacgattttggtttttgtgagtcctgcggggttgaaatcggtatccgccgtttagaggcgcgtccgaccgcagatttatgtatcgactgtaagacgctggctgaaatccgcgaaaagcagatggcgggctga

SEQ ID NO: 275170 - DNA, 915 bp, Morganella morganii
atgccactacagatgacggaatattctgccggctcagcgcccggttataccggccgcttcgcaccctcaccttccggtgcgcttcatttcggctctctggtgaccgcactggggagttatcttcaggcccgtcacctcggcggacgctggcttctccgtattgatgatatcgacccgccccgtgaagtaccgggtgctgcggatgccattctgcgtattcttgaccattacggcctgcactgggacggcgatgtgctgtatcagtcgcgccgccatgatgcttaccgtgacgtgattgaacagctgaaagccaccgggctgtgctattactgcacctgcacacggcatgatgtacatgacagcggcggccattaccccggcacctgccgtcagcgcggcctgccgccggataacgccgcgctgcggcttatcaggacgcatccggtgtaccattttaccgatggcctgcggggcgatgtgtttacggataacgccacagcagaggaagatatcattatcttccgcaaagataagctctttgcctataacctggtggtggtgctcgatgatgattatcagggtgtgacagaggtggtcagaggcgcggatttactgtatcccacctcacatcagctctcattataccgccagctcaggctgccggagccgcattatctgcatttgccgttgatgctgggcccggcggcgcgtaaactctccaagcaaaatcatgccaccccggtgccgctcagtgatccgcgcccgctgttatggcaggcgttgcaggtactccggcagccgctgccggaaacggatccgctgtcgctttccctgactgaactgctggcatacagtgtgcggaactgggatattgctgccgtaccgcgtgatgatgtggtgacggacagggaataa

SEQ ID NO: 275171 - DNA, 1356 bp, Morganella morganii
atggataacagcgggacagtcagcgcaacggtaattccccgcaacagtcattctatttcccgtcaggacatcagcgagaatgcgctgaaggttctgtaccgcctgaataaatcaggttttgacgcctatctggtcggcggcggtgtccgtgatctgctgctggagcgcaaacccaaagatttcgatatcgcgaccaatgccacgccggacgaagtgagaaaactgttccgcaactgccgtctggtcggccgccgtttccgtctggctcacattatgttcggcccggatattatcgaagtcgcgaccttccgtggtccgcatgacaataacgaaccagctgatgacggcaaagcccgctctcagcagggcaaaaacggcatgctgctgcgcgataatattttcggcaccattgaagaagatgccgtccgccgcgatttcaccattaacagcctttattacagcgtggctgattttaccgtccgtgattatgtcggcggactggcagatttacagcagcgcattatccgtctgatcggcgatccggaaacccgttaccgggaagacccggtgcgtatgctgcgcgccatccgttttgccgccaaactggatatgaccatcgaaccggagaccgccgcgcctatccgcacgctgagcacactgctgcgtgatatcccgcctgcgcgtcttttcgaggaagtactcaagttattacaggccggtgacggacaccgtacgtttgaattattacgtgaatacgatctgctggatatgctgttcccgctggttgccgggccgctgaaagagaacccggacaccccgctgtcccgtatcgtggatcaggtactgaagaataccgactaccgtattcataacgatcagcgcgtcaatccggccttcctgtttgccgtgatgctgtggtatccgctgtgcgaacatgcggaaaaactggctcaggagagcgggctggcctattacgaagccttcgcgattgccattaatgacatcctggatgaacagtgccgcgcgattgctattccgaaacgcctgaccaccactatgcgtgatatctggcagttacagttacgtctgccgcgccgtcagggcaaacgcgcgatccgtctgatggaaaatcagaaattccgcgccgcctttgacctgctcgaactgcgtgcgaatgtggaaggccgtcatgagttacaggaactggctcactggtgggcagatttccagcaggcgaatgccccgcagcagcgctctatggtgactgaactgggcagtgatccggtcaaacgccgtccgcgcccgcgccgccgccatccgcgtgcccgtcagggtaacggaaacagtgaatcatga

SEQ ID NO: 275172 - DNA, 501 bp, Morganella morganii
atgattccggtctatattgcgatcggcagtaatcttgccgatccgcttgaccaggtcaaccgggcgattgccgcgctgagtgctgtcccgcaaagccgcctggtgcgccactccgctttttaccgcaccgcgccgatgggccccgccggacagcctgattatcttaatgcggctgttttgctggaaactgacctgacaccgcaccagctgctcgatgccacccaggctatcgaactggctcacggccgtgtccgtaaggatgagcgctggggtccccgcacattagacttagatatcatgctgtttggtgatatggtcatcagtgatgcgcggctgaccgtgccgcattacggcctgaaagtgcgtgaatttatgctgtacccgctcgctgaaatcgcccccgggctgattctgccggacggcgagccacttgcggcggttgttgcccgcaccccggaaaacgggcttggcctctggtcatcatcagagccggtacgctga

SEQ ID NO: 275173 - DNA, 888 bp, Morganella morganii
atgcggattattgaaactgcgctgatcctgcgcaaagagattgcccgtctgcggactgacggcaaacgtgttgcgtttatcccgacaatgggaaacctgcatgacggccacctggcactgataaaagaagcccgtaaccaggcggatattgtcgtggtgtctgtctttgtgaatccgctccagttcccccgcgaagatgatttgcagcgctacccgcgcactctccaggcagactgcgaaaaactgagcaaagcgcaggtggatctggtgtatgccccggcggtcagtgatgtctatccgcacgggttggctcaccagactcaggtggttgtaccgccgctgctcagtcagtgtgatgagccgcatcagcgcacccgtctgcgcggtatcgccaccgtgatgtgcaagctgttcaatctggtacaaccggatatcgttttcttcggtaccaacgaccatccgcgtttcctgactatccgccgtctgatccgtgacctgaattatgatatcgcactggccaccattccgaccgtccgggaaaaaaccgggctggcactcagctcctgcaataccctgctgaataaagaggaaaaagaggcggcaccgcatctgtatcaggttatgcagaccctcgcggatatgatccgtgaacgcccgagtgccattgccgaaagtctggataatgcccgtgatgatttaagccgtgccggattccgcgatatcagcctggaaatctgtgatgccgatgacctggaagctgtgcgcgtcaacagcgagaaggccgtgattctggcctccgcctggctgggaaatatccgcctgatcgactgcctgcatgttaacatgccgaacccggcggtcagtgagacggtctctccgtcactgtaa

SEQ ID NO: 275174 - DNA, 1344 bp, Morganella morganii
atgcattctgcaaaacgcctttttacggcactgctgtgtctgttgtccgccggtgtgcaggcggtgaccttgtctgaactcggtcagtccgcgctgaacaatgatctgtcattccgtgctgcgggtaaggcttatgaggcggaacaggcagaggctgccgccgggaaatcacacctgctgccgtccgccgggctgagttatcagaacacgccgtataatcggctgacacagcgggcaccggtggtcggtaagcggggttacagcagccattccctcaacctggtggtgacacagccgctgtttgattacacagcataccatcagtaccggagcgcacagatacgcggtactgccgcagagagccgcttgcagatacagcaggcagagcttatcaaccggctggtctctgcgtatctgaacctggcctgtgctctggaactacagaaaacagaccggctccggctggcactgaataccgctcagctggcggctgcacagcgccttttgcagctcggggagggcactgtgacagagattgaatccgcccgtgcccgtctgcggcaacgtcaggcgcagctcgcggaaacagaagcggaaagcctgaatgcgctgctgatattgtctgatcttaccggtctgccgcagctgcggatgcaggatcttccggcactgaaagcgggggatttccggttaccacacctgaatgacggtgattatgcggctcaggaacagcagatgcaggccgtgcatccggaaatcaaagcggcacagcaggaaacctcactggcaaaagcggcggcagaggtacagcgcggggcgtttatgccgtcggcacagctctttgccgcctggtcagatacccgatcggacagcaatgatactgtcggtcagcgttaccgtaatctcagtgccgggatccatctttcagttccgctgttcagcggcggaaaagatctggcggggatgcgcaaggtgtctgctcagattcagcaggcgcagtttgaacaggatgcactggtacagacactccggcgtgacctggcacgtcagtatcaggtgttccgccacagtagtatacagctggcggcgctggagcaggccgctgcggcagcgcagttacaggtaacggcggcggaaaagggatatgcggcagggcagaacagtcagccggaggtggcacatgcccgtgaccagtattatcaggcggagcaggagctgacaaaagcccgctatgacgggcttctggcctggttccggctgcgtcattacagcagcacgccggaagccgggcttttcaggcagattgaggactattttacagtgacggagagaccgtctcactga

SEQ ID NO: 275175 - DNA, 1308 bp, Morganella morganii
atgatcactaaatggttgtccgggacgccggaggtaaaaacggataccggcgggtatcagcgggcggggaaatacgtggttgcttccggtcttgccggttttctgttgtgggcgggattcgccccgctggatcagggagttgccgcatcgggaacggttgtgatcgccggtaatatcaagcaggtgcagtctccggcggatggcgtgatttctgcgatttatgtgcagaacggtcagagggcggaaaaagatcaggtactggtacggctgcgcccggtgcagtctcaggctcaggcggtgtcgctggcagagcagctcgacagcacattgctgatccaacggcggctggaggcagagctgcgcggtgaagcggcatttaccccggcggcggatgatgtcttttatgcgccgcccgcgtatggccgggtacagttacaggcacagaatgcactgcttacagaccggcggcttgaactggagagcgagattcaggcccgccgggtcacggttgacggcctgacacagcggcttatcactctgcgggagattgcccgcagtactgcgcaacaggcggacagcctgacggcacaggcggtaaacctgaaatcgctggcggatgagggatatctgccgcgccaccgttatcaggaaatccggcgggaaagtgcggcactgcgcaatcaggcgggtgacgccaggctacagataagccgtgcggaggaagaaaaatccgcacagacagagcagatcacacagagacaggcggcttttcacggcgggatccgcgaggagttatcacgtttgtcagttcagcgcagtgagctgaaaaaacaacagattatcgaaaacgagcggctggaacagcatgtcattaccgcgccggtgaccggtactgttatggatgtgtccgtgtttaccgcaggcggtgtggtgaaagccggggaaaaactgatgtcggtggtgccggaacaacagacactgattattgaaggtaaattatcaccgcagtggatagataaagtcacccccggtcagtctgcggatctgctgtttaccgcattcaatcagaacctgaccccaaaactgcgcggcgaactgacgatgatttccgccgatcgtctgataaatccggcaaacggggagccttattatcagattcagatcgctgtgccggaaacggcggcggctcaggtgatcaaacccggtatgcctgctgagatttttatccgcaccggtgaacggtcactgctcagttatctgtttaagcctgtaactgaccggctctttttcgcgctgaccgaggagtga

SEQ ID NO: 275176 - DNA, 1707 bp, Morganella morganii
atgctttccgggaaaaccagaaatgacattacggcatttattgccgcccgcaagtccctgtttacctcactggcattattcagcgggctgattaatctgctgatgctggtgccgtctgtgtatatgttgcaggtgtacgaccgcgttttgccttccggcaatgaaatgacactgctgatgctgacgctgataatggccggattactggtactgaccggcgctctcgattatctgcgcaatatgctggtgatccgcatgagtaaccagttcgatctggctctgaacagccgggtttatgatgcggcgtttcaggcaaagctgcaccgcacgccggggcagctgccgttacaggcacagaccgatctgatgatcctgcgccgttttatcaccggcaacggtatttttgcttttctcgatctgccctggttcccgctttatctgctggtgatcgccttgtttaatccgtggctgggattgtttgcctgtggcggtgccgtcgtgctgatcgcgcttgcgttgctcaatgaacggctttccgggccgccgctgaccgctgcaaaccgctcttctgccgccgcacagggcatgcagggcagccattttgcccatactgaacccgcagaggcgatgggaatgcagctgtatctgcgtcagcgctggctgaaccggcactgcgacagcctgaaggaacagacccgggccagtgattattcagcaaaaataatgacaaccaccaaaaccgtgcgcctgatcctgcaatccctgatgctggggctgggcggctggctggcgctggataataccatctcgccgggcatgatgattgccgggtcgattctgctgggacgcgcgctgtcgccggtcgaacaggtcacaggtgtatggaaaagcgccaaagagagcaggctggcgtatcagcggcttactgcgttgctggcggctcacccgcaaccaccgcagaaactggcattgccggttccgcaggggcatctgtcggtttcagtgatgcaggcgggttatcccggctgtgacacgccgctgttgcacaatctgcatttcagtctcgcaccgggagaggtgctgggaattatcggcccgtcaggtgccgggaaatcggcgctggcaaaattgctcgccgggttgtggcctgcaacacggggggctgtccggctggacggggctgatctctgtcagcaggacaaggcggtgtccggtaaatatatcggctatcttccccaggaaattgcgctttttcccggcacaatcgccgctaatatcacccgttttgacccggatgcggatccggaaaatatcatccgtgcggcgcaactggcacaggtacatgaattgatcctgcaactgccgcagggctatgaaacgctgaccggggctgacggtaccggcctttccggcggtcagcggcagcggatcgccctggcgcgggcactgtacggctcaccggcactgatcattctggatgagcccaatgccgcgctggatgatgccgggctcagtgcgctgctatctgccatgaataccctgaaaaaacagggaaaaaccattgtgcttattactcaccataaaccgctgctgtccgtgacggacaagctgttgctgctcgccggcggccggatgcagctttttggcccgtcggagaaggtcattgaaacgcttaataatcaggctggtaaaaataatgatcactaa

SEQ ID NO: 275177 - DNA, 345 bp, Morganella morganii
atgcaaatatcccggccattattgttttcgttgttgctatctgggcagagcgcggcaatcagccaaaaaattcccgctgcagaagcgcttcaggggccctggcagtttacggaggacgggcagacgctgccggtcggactcacggcggttcccgacagcacaacagacgggtttcagctgcatttcacggcacagccgcagataacggcctggcgtccggcgccggacggcattgcgtttcttaccgcagacggcaccacacgttatttcttttccgctgaagcccccggccgttatcgcgcggaaatctggcatgaaaatggcgcctgtcttctgaaagagtaa

SEQ ID NO: 275178 - DNA, 1455 bp, Morganella morganii
atgggtatcgctgcatacggcagggaagacggatggtcgtttatcgatgatgtgttaagcagtccggggcggggtaacggacgctggattaataataaaatttcatatgatgcctttgaggccggagatcacattgccagatccaacaccggctggaatggcgttggtgtgaccgggcagcccgcggaagtaacctattcattcccgacatgggaggggatgtattataacggcgcaggaaacaccggcctgaagggttttaataacgatcagaaagatcaggcccgtttatcactgcagtcatgggctgacgtggcaaacattacctttactgaagtggatgcaggccggggagatatctacaccaatatcacctttggttatatcaatgataaatacacacaggcatacgcctggctgccgcacaccaaagattattttggcgatgtggtgaccgactcacggggttttgatgtctccggtcagtcctggtacagttcagaacccggggcgctgaatgtgaaaccggtgaccggaaactatggccgtctgacatttactcatgaaatcggtcataccctcgggctgaaccatccgggtaactataacgccggtcaggggcgtccttcttataaagatgcggattacgctgaagatacccgccagtacagtgtgatgagttactggagtgaaaaaatcaccggtgcggaccacaaaggttactacgcttccgcgccgctgctggatgacattatggcgattcagaaactgtatggtgccaattataacatccacactgatgatactgtgtacgggtttgattccaataccgggcgcgattattactccgcccaaaatgccacagataaacttattttcaccgtctgggacggcggcggaaatgacacactgaatttctcccgttataagcaggatcagaaaatttcgctgcgggaaggtgatttttcggatgtcggcggtctgaccgggaatgtgtcaatcgcacacaacgtgaagattgaaaatgcgtttggtgggcgcggaaatgatgtgatcatcggcaacgatgagaacaatatcctgatgggtaacggcgggaatgatgtgctgtacggtggcgccgggcaggatcagctctggggcggcaccgggagcgatatctttgtgttctcggctgtgtcggattcgctgtatgaccggcctgaccatatccgtgatttctcaaccgggctggaccgtattgatttacagggactgaatcagaacagcgccggggaaaaattcatttatttcaccgatgaatttaccggtgcggccggggaagcgatgctccgctatgatgacggactgaacctgacagagttgctgattaatgtcagcggaaatcagtaccagcctgattttaaagtggatatcaccggtatggtgaatgttcacactgattttatcgtttaa

SEQ ID NO: 275179 - DNA, 771 bp, Morganella morganii
atgatgtcgctgtactgggtggcgctgaaaacaatctggcgcaaagaaatcacccgttttatgcggatttggatccagacgctgatcccgccggtgatcaccatgtcactctattttattattttcggtaatcttatcggtaaccggatcggtgaaatgggcggtgtcggttacatgcagtttatcgtgcccggcctgattatgatgtcagtgattacgaactcctatgccaacgtatcctcttcttttttcggggcaaaattccagaaaagtattgaggaactgctggtggcgccggtgccgacccacgtcattatcgccgggtttgtcggcggtggtgtggcgcgcggtgtgctggtcgggatcctggtcacattagtatctctgttctttgtgccgttacagatccactcctggtttatgatcattgccacgctgctgatgacttccattctgttctcgctggcggggctgcttaatgcgctgtttgcgaaaagctttgatgatatcagcattatcccgacgttcgtcctgacgccgctgacctacctgggcggggtgttttactctctgacgctgttaccggcgttctggcaggcggtgtcgaaactgaacccgattgtctatatgatcagcggcttccgttatggtttcctcggtatcagtgatgtctctctgaccactaccctcggggtactgagcctgtttattgcggtgttttatctgctcacctggcgcctgattgagaaagggcgcggtctgagaacctga

SEQ ID NO: 275180 - DNA, 927 bp, Morganella morganii
atgacctatgcactggaaatatcacaattaaccaagcagtatgcgggaggcgtgcaggctttacggggaattgacctgaaagtcagtgccggcgatttctacgccctgctgggtccgaacggcgcgggaaaatccaccaccattgggatcatcagttcactggtgaataaaaccggcggcaaagtctccgtgttcggttatgacatcgataccgatctggttctggccaaacgtcagctcggcctggtaccgcaggagtttaacttcaacccgtttgagaccgtactgcagattgtcttacagcaggctggctattacggggtgccacacaaactggcgcaggagcgggcgaaaacctacttaacgcagctggatttgtgggagaaacgtgatgagcgcgcgatgcgtctgtccggcgggatgaagcgccgcctgatgattgcccgcgcactgatgcatcagccgaaactgctgatcctcgacgaaccgaccgccggggtggatatcgaactgcgccgctccatgtgggggttcctcaagaccctgaatgcacagggcaccacgatcattctcaccacgcactatctcgaggaagcggaaatgctgtgccgcaatatcgggattatccagcacggcgaactggtggaaaacaccagtatgaaagcgctgctcggtaagctggaatcggaaacctttatcctcgatctgggctcaaaaaacccgctgccgcagcttgagggctacacgttccggctgactgatacctcaacgctggaggtggatgtccgccgtgaacaggggctgaacggcgtttttgcccagctgaatgcgcagggcattgatgtgttaagcatgcgcaacaaagcgaaccggctggaggaattatttgtgcatctggtgaatcatgatttggaggctgcaaaatga

SEQ ID NO: 275181 - DNA, 660 bp, Morganella morganii
atgatgaaaaaaatcgaagaactgtttgccaataacaaacagtggtccgaatctgtaaacgaaaaagatccggaatttttcaaagagttagcacaggctcaaaagccgcgttttctctggatcggctgctccgacagccgtgttcccgccgaaaaactgatcgaagcagcaccgggcgatctgtttgttcaccgtaatgtggcaaaccttgtcatccataccgacctgaactgcctgtccgtcatccagtatgccgtggatgtgctccaggttgaacatattatcgtctgcggtcactacaactgcggcggtattcaggccgcaattgagggcaccgagctggggcttatcaacaactggttactgcatatccgtgatatctggtatcagcacagctccctgctgggcgaactcgcgccacaggaccgcatcaaccgtctgtgtgaactgaacgtggtggaacaggtgtataacctgggtcactccaccattatgcaggcagcgtggaaacgcggccagcgtgtgatgatccacggctggatctacgggattaacaacggcctgctgcatgatctggatatcagctctgacagccgcgagaaaatggaactggcttaccgtcaggccgtggccaaactttcaaatatgccgtcgtcctga

SEQ ID NO: 275182 - DNA, 285 bp, Morganella morganii
atgagtaaaaaatccattccgtgggcagaagcccgcgaaaacattttatccgacccggaagtgaacgcaatttatgaagcggaactgcgggcggaacggatccgggaacaattactgtcgtggcgctgttctgccgggctgaccagctcacaggtcgcggcccgtctgggaatcactccggcggcagtctcacgcacagagcgcaatgcggaaaaagcgactgtcgaaacattagcccgctacgcagcagcatgcggtgtaaaaaacccgaaaattattttgtaa

SEQ ID NO: 275183 - DNA, 540 bp, Morganella morganii
atgaagaaacacaccttagatacaatgatctccgaagctgagattcagcagcgcgttgccgatctcggcagcgaaatttccgcacactatcgtcacagcaacaaagagctggtcttagtcgggttactgaaaggatcttttatttttatggccgatctgtgccgtaaaattgatgttccgcatgaagtcgattttatgacggtatccagttacggcagcggcacctcgtccacccgtgatgtgaaaattgtcaaagacctggacgaagatatccgcggcaaagacgtgctgatcgtggaagatatcattgattccggaaatacactgcaccgtgtgcgcgacattctgtctctgcgcggcccgaactccgtggctatctgcaccctgctggataaaccgtcccgccgtgaggtggatgtgccggttgactgggtcggttacgcaatcgaagacaaatttgtggtcggctacggcatcgactacgctcagagctaccgccacctgccgtatatcggccatgtgacactgctggaagagtaa

SEQ ID NO: 275184 - DNA, 1605 bp, Morganella morganii
atgcaacgacgcgattttttgaaatatagcgcattcttaggtgctgccacgatgctgccggcatggagccggtttgcctttgcggcacaggaacgcccggctctcggtattccgcccctgttaacggcggataatgcacaaaaaatcaccctgaatattcagcaggggaaaatggcgtttattcccggcaaaaccacccaaacctggggatataacggtgatttactgggcccggcactgaaactgcggcgcggtaaaccggtgacggtggatatcgtcaataaactgccgaaagcgaccactgttcactggcacggcctggagatcagcggcgagcaggatggcgggccgcaggccattatcgccccgggcggcacccgcacggtcagtttcacgccggatcagccggaagccacctgctggttccacccgcacacccatggtaaaaccggccatcaggtcgcgatgggactggccgggctggtgctgattgaggatgacaataccgcctcaaccggtctgccgggggagtggggaacggatgatatcccggtggtactgcaggataaacgcctgaccgcagacggtgaaattgattatcagctggatgtgatgtcagcggcggtcggctggtttggtgacaccatgcttaccaacggtgcggtttacccgcagcatatggccccgcgcggctggttgcgtctgcggctgctcaacggctgtaacgcccgcagtctgaggatggctgccggtgacgggcgcccgctgtatgtggtcggcagtgacggcggtttgctggccgaaccggtaaaagtgcaggagctgccgatgctgccgggggaacggtttgaagtgctggtggatacatcagacggaaaaatgtttgatattgtcaccttgccggttcgtcagatggggatgaccctggcaccgtttgatgctccgctgccggtgctgtctgtccgtccgactctcgatgctgcgcgcggcaaactgccggatgtgctggcagccatgcctgccctgatcgacacctcccgtctgccggtacgtgagttccgtctgatgatggatatgcgcctcgacatgcagggcatgatgatgctgaccgacaaatacggcccgcaggcgatggccgggatgggcatgcacggcggtatgggcggccatatgagcggcggacatatgggcggaatgaataataatggtatggggcgcggcatgcgcggcggccactgcggctccggtgaggttgatctgatgaatgccaacagcatcaacggcatcccgttctccatgaccgaaagtgcttttgatgtgaaacagggacaggcggagcgctggattatttccggtgtcggcgacatgatgctgcacccgttccatatccacggcacccgtttccgtattctcagcgagggcggacgtacacctgcggcacaccggcagggctggaaagatatggtgcggatcgaaggtaatgtcagcgaagtgctggtgaaattcgaccatcctgccaccaatgcgcatccgtttatggcgcactgtcacctgctggaacatgaagataccggtatgatgaccggctttactgtcacggcctga

SEQ ID NO: 275185 - DNA, 345 bp, Morganella morganii
atgaaaatattcattcacgctttattcagctgtgccctgctgctttccctgcccgcgaaagcgctgacgccgtcacaggctgaagacctcgccggactgactgcggtttttatttatctgaaaaatgattgcggctacggggatttaccgaatgcccgcatcgaaaaagcgatcttactgtttgccaaaagtaaccgctgggatatgagcaattatgatacccggcagatggcggaaatgaataaagataactatttcgacatcaaacatataaagctgccggaaaactacaaatgcaccgcactggcccgtgattcactgccgttgcttgcctatgtgaaataa

SEQ ID NO: 275186 - DNA, 630 bp, Morganella morganii
atgataaaaatagcgctcatcgatgaccatgtagttgtgcgatccggtttcgcccagctcctgacactggagccggatattaccatcgccggacaatatgccagtgcggcggaagcctggcccgcactgacccgtccggatattgatgtggtgatcatggatatttccatgccggatgaaaacggattacagctgctcgcccgtctgcgggagcgaaaaacctccttccgtaccatcattctcagtatttatgatacccctgcctttgtgcaaagcgcgctggacgccggtgccagtgcgtatctcaccaaacgctgcggcccggaagagctggttcaggcggtgcgttccgtgcatcagggcggctgctatctgtgtgcggatgccatgcgcgcgctgcgccagtcaccgccggagaaccgggcgctggaagagctgaccccgcgtgagcgcgaggtgtttgatctgctggtggcggggatgagtgtgcgggcgattgcggataaactcgaactcagccataaaactgtccatgtccaccgcgccaatgtgctgggcaaactgcagtgtgacagcacgatcgatctggttcattttgccctggcgcatcaccttatcgcggggcaataa

SEQ ID NO: 275187 - DNA, 1548 bp, Morganella morganii
atgaggcgcggcgcccgtctgctgttacagtcagtatttctgctgttcacctattccctgacctggattggtctgtggatcatcggtttttatctcagtcagaacagtgtgctgtcagcgttttttctgccggaaggattgcggctggcgctgatgatcctgctgtggcggcgcttctggccgaccctgctgctgggggagctgctgctgaatatctggctggcacaggaacagctgctgtcacagccggtgatcctgctgtcgccgctgctgagtcttatcaccgcttttattatccagaccacctggtggcgctacacgctttactggcagcgcctgttattgctgatcgccggtgtcggtatcaacagcctgctgcataccctggtgttcagtctgctgacgccgctgagtgtgacccagattttcctcaccacgctgaccggcggtattctgctgacaccgtttgtctatctgatctatgaatatctccatgaacagcatttccgcctgatcctggattacggcacgccggatccgcagctgcgcacgtcgctgctgatgtggtgttttctgttctgcctggccgggctcagcgcccagctcttttttaccccggaaattgagcgcctgctggtgctgctggtgtttatccccaatgtctttatggcctaccgctacggctggcagggcggcgtgctctctgccctgctcggcagtctgatcatcacctttgcccgccagtttaacggcgcatttgccgatttacaggaattgcagatgtttatgagcacccaggcgctgattggtatcggcctcgggattgccatcagccgtcagcagcagttgtcgcgtaatctgcagcgctaccgcgaacggctggagcaggaattacaggcacggcgggatctaatgcagcagctggtgcatacggaagaggatgtcaaaaaagcgattgcccgcgagctgcatgatgaaatcggccagaacatcacggcgattcagatccagtcgatgctggtcagaaaaactgcgccggatccgcaaagcagccgtgcggcggcacaaatcaatgaactggcacagaaaattcatcagtccacccgccagctgctgcgggaactgcgtccgccggtgctgagtgaaatgtctcttgaaaatgcgctgcgccatctgattacggaatttgcgttcggggaaaacggcattcagtgcgagtttcattatgaactgaaacagccgccggaaaatgaaactgtgctgttcacgctttaccggcttgtgcaggaattgttaaataacatcagtaagcatgccggcgccacccatatcctcatcatactgagacagcaacgtgacacgatacagctccatgtctctgataacggcatcggtatcccggagagcaaacgccgcggcggctttggtctgcgcggtattgaggaacgggtcagggcactcggcggtgactggacactgaccaccaccggcgggacccggattattgttaacctgcccacattttctgatgaaaatcacgaaaactaa

SEQ ID NO: 275188 - DNA, 1329 bp, Morganella morganii
atggccggaaaacagaccaaaactatggataaaacctatcgattctggcgcaacaaactgatgttatcgatgataatcggttacgccacgttttatctgacccgcaagagctttaactttgtgatgccggtgatgcagacagaactgcatctcgataaaagcgatatcggcctgatagcgaccgcgttttacctgagttacggcatctcaaaatttgtatcggggattttccacgatatcaccggttaccgctggtttatgggcgccggattgtttatgaccggcgtgctgaatattgtctttgcctggtgtttgtcgtttcctgctctgctgattgtctggacactgaacggttttttccagggctggggctggccgccatgcgcgcgcatcctgacacactggtattcgcgcaatgaacgcggcttctggtggggattgtggaatatctccatcaacctcggcggcattaccctgccgctgctgaccgcctggctggcgacccgttacagctggcagaccgccctgatagtgccgggtattatcgggatggtgaccggcctgtggctgtgcagccgcttacacggcacgccgcaggaagagggattaccgagtgtcgggcaatggcggcatgacccgtcagaactgcgtcaggagcagttatccccgccgctgccgatgcgtgtgatcctgaaagatacaattttatgtaaccggatgatctggttactcggtttctcctacattctcgtttatctcatccggatggcgatcaatgactggggaaacctgtggttatccgaaacacacggcagcaatctgctcagtgccaatgccacattgtcactgtttgaactgggcggtttgctgggtgcggtctgtgcgggctgggggtcggatattttattccgtggtcagcgcgccccgatgattctgctgttttccctcggcctgtttattgctgtcagcgccctgtggttaataccaattcatcactacggactgctggcggcgtgtttcttcagtaccggcttttttgtattcgggccgcaaatgttaatcggactggcggcgacagaatattgccataaaaaagccgccggtacggtaacgggttaccttggtctttacgcctacttaggggcggcaatggccgggtggccgctcgcgcaggtcatggcacattacggctggcagggcatgtttaccctgctgaccagtgccgcggcactgacgggattactgctgatgccgctgctgatagctaatgtcagcaagcgggaacatctggcaggctctgtttcactctccgatgacagaaccctataa

SEQ ID NO: 275189 - DNA, 1032 bp, Morganella morganii
atgaaactcaagaccctctctgctctcgctgccgccggtttatcactggctgctgttaccacatccgctaatgccgccggtcgtctggtggtttactgcagcgcgaccaacgctatgtgtgaagctgaaacacaggctttcgccaaaaaatacgatgtgaaaaccacgtttgtccgtaacggttccggcagcaccctggccaaaattgaagcggaaaaacgcaacccgcaggctgatgtctggtacggcggtacattagatccgcattcacaggcgggtgagatggatctgctggaagcgtacaaatccccgaatttagatcagatcatgccgcagttccgtgatccggccaaacgcaaaggcaactactcttctgcggtttatgtcggcatcttaggtttcggtgtgaacaaagatcgtctgaaagaaaaaggcctgccaatcccggcctgctggaaagatctgaccaggccggaatacaaaggcgaaatccagattgctgacccgcagagctccggtacggcttacaccgcgctggcgacatttgaccagctgtggggcaccgatcaggcattcgattacctgaaaaaactcaacagcaatatctcccagtacaccaaatccggtattgccccggcgcgtaacgccgcccgtggtgaatccgctatcggtatcggcttcctgcacgactattccctggaagtggaaaacggcgcaccgctggagttaatttccccgtgtgaaggcaccggttatgaaatcggcggtatcagtatcctgaaaaacgcccgtaacatggacaacgccaaactgttcgttgacttcgtgctctccaaagaagcccaggaaatcagctggaaagagggtaaatcttaccagatcctgaccaataccacggctgaatcctcaccaatgtcactgaaactctctgatctgaaactgatcaactacgatatggataaatacggcgatgctgaaacccgtaagaatctgatcaacaagtgggtcaccgaagtcaaaatgagtaagtaa

SEQ ID NO: 275190 - DNA, 2079 bp, Morganella morganii
atgtctgaaaccctgactctgccttcaaaacagggacgggattccatcttcttatggctgctgatcgcgtggctgggctttgccctgctgccgtcctggagcctggattatggtttaaccgactccacatcagatgaaattcttgccgcttacggctggcacgggctgaatgtcagctggctctggtatctgctgccgtcagtgctgtttttccgctcactgacacccgcttcccgcgaccagcgcggacgccactataccgatattgccatcgccgttctgacggcagtggtggcggttgtcagcgccgtatgggaagggaaaggtctcggctattccgccattgtgctgtttatctcgctcggcatgattatgaccctcgccctcaaacgcctggaatggctgggcggcgaccagtttgttatcggctcactgattgcggtggtcggactgattgcgctgtttattgtattcccgagtgtcgcgatttttatcccgatgttcaccgataataacggggatttcgcgccgttcgcgtttgtatcgattctcacacagtcccatattgtgcaggtcatctggaactccgtgatgctctcactggcagtcggggcgggctgtaccttcttcggtctgattctggcaatttataccagccgtatcgcaaaacgttcggcaattatcggccgtgtgttctccatcctgccgattgtcaccccgccgtttattgtcggcctgggtgtcaccctgatgatgggacgttccggttatgtgaccgaattcctcgccacttatgcggggctggaaaacaccaactggctgtacggctttaccggaatctggctggcccaggtgctcgcctttacgccgatgtcctttatgatcctcgacggtgccatcaaaaccattcatccgtcgctggaagaagcgtcttacaccctgcgcgccaaccgtttccagacattcttcaacgtctttatgccgctgctgaaaccggcgctggctaacgccttcctgattgtgattgtgcagtcactggctgacttcagtaacccgctggtcctcggcggtaactttgacgtgctcgctacccagatctatttctatatcaccggctcccagctcgattatcaggccgccagtaccctcggtgcttccctgctggttttctcgctgctggtattctgtgtgcagtatatgtggatcggcaaacgctcttatgtcacggtgtccggtaaatcttaccggggggatgtacagccgctgcctgccgcactggttgcgtttgtcaccaccttcctcgccatctgggttgtcttcaacctggtgctgtacggcagcatcttctacggcagctttaccgtgaactggggcgtggattacaccttaaccctggataactttatcaagctgttcggtcagggcatgaatgacggcgcatggccttcactgctcgataccctgctctacgccgggatcgccgcaccaatcaccgccgtgctcggcctgctgatcgcctacattgtggtgcgccaggaattccgcggcaaaaagaccatcgaatttaccacgatgctctgcttcgcggtgccgggaaccgtggcgggtgtgtcttacatccttgcctttaacgattctccgttctatttaaccgggacggcggcaatcgtgattatctccatgacgatgcgaaatgtgccggtcgggatccgcgccggtatcgccggtctggggcaaatcgacaaatccctggacgaggcatcactcagcctgcgtgccggttcgatgcggacaatcttccacatcctgctgccgctgctgcgtccggcgattctgtcagcactgatttacagctttgtccgcgccatcaccacggtcagtgccattgtgttcctcgtgacaccggacacccgtgtggcaaccgcctatattctgaaccgcgtggaagacggcgagtacggcgtggccattgcctatggctcaatcctgatcgtcgtcatgctggcgattattttcctgttcgactttttgattggcgaagcccgtgtttcacgttccaaagccaaaaatgcacagtaa

SEQ ID NO: 275191 - DNA, 1050 bp, Morganella morganii
atgacacaacaaagttttgttgaattaaaaaatgtgactaaacgctttggcaccaacacggtcatcgacgatttaagtctttctattccggcgggcagtatggtcaccctgctcggcccgtccggctgcggcaaaaccactgtactgcgtctggtggccgggctggaaaagccgaccgaaggtaagatgttcattgacggcgaagatgtcacagaccgttccatccagcagcgtgatatctgtatggtgttccagtcttacgcgctgttcccgcatatgtccctcggcgataacgtcggttacgggctgaaaatgctgggccgcccgaaagcggaagtaaaagagcgggtggaggaagcactggagctggtggatctggcggggttcgcggatcgctttgtcgatcagatctccggtggtcagcagcagcgtgttgcactggcccgcgccctgatcctcaagccgaaagtgctgttatttgatgagccgctgagtaacctcgatgccaacctgcgccgcagcatgcgggaaaaaatccgtgaattgcagcagcagtttaatatcacctccctgtatgtgacccacgaccagagcgaggcctttgcggtctcggatatggtgctggtgatgaacaaagggaaaattatgcagctgggatcaccgcaggagctgtatcgtcagcctgcctcgaagtttatggcgagctttatgggtgatgccaacatcttcccggccacactgaccggtgatgccgttgagattttcagctaccgtctgccgcgtccgccgcagttcgtcacggacaaaagcagtgttactgtcggtgtgcgtccggaagccattaccctgagtttgcagggtgatgagagccagcgctgcaccgtgtctcatgtggcctatatggggccgcagtatgaagtgaccgtcgactggcacggccagtccatgctgctgcagattaacgccacacaattgcagccgtctgtcggcgacagtctgttcctgctaatccacccttacggcatgtttattctgccggaagagcagtaa

SEQ ID NO: 275192 - DNA, 1617 bp, Morganella morganii
atgacagaaaaagcacaggatccttcaagacgatcttttttgaaaaatgccggtctcggcacaatggggctggcggctggtgcgctcggcagctattcggcattagcgggcggtaataccgtgctgacaggggcagatgacaaaaataaaagctatatcaaaacagataagcgtaagaagctgatttataacggctatcttatcactatggatgagcagtacggtgatattgaagacggtgcggtgctggttgacggcgataaaatcgtcgatgtcggcccggtgtccaaatttgccggagttgatgcggaactgattgatgcggacggcggtattatcctgccggggattatcgacagccaccgtcatacctggatgtcactgctgcgcgggatctccgcggatatgtcactggccggtttcctcggctctactttctacggcatcggttcagtcatggagccggaagatatccgcatggcggcactggtgggatcggttgaggcactgaatgccggggtaaccaccattcttgactgctgtgactgtgttaactcaccggatcatgcgccggcggcgattgaatccctgcgtgcctccgggatccgcagtatctatgcttatggtatgcaggcctatgattataaaggcagtaaccgcttccgcagccatcagcagcgcctggatgtgatgaaaaatattcatcagcaatattatggttccggtaataaaaccctgaaccagatgggcgtgctgctgagtgatttcggtaccattccgtttgcgcataccgcgaaagagattgagctggccaatgacctgggtatctttgtggcatctcataccggtgcggcagaaaaatccattctgctgaaagggttacatgagctgaaacacaataatctgctgaaacccggccatctccacattcactgtactgcgctggataacagcgagtggaaaatcctgaaagagactggtggtaaagtctctatcgcgccggaaactgaaatgcagatggggatggggcgtccgccgttccgcgccagtattgaccacggttttaaacccggcctgagcagcgatattgtctgtgtcggttccggcgacctgttctcgcagatgcgtctgggtcttcagttccagcgttgcatggacagcgaagcagaagcaaaccgcaccggtaaaaccactaccaaaattggcctgagcgtacgtgacgcgctgacctgggcgacacacggcagtgcggaagcgatggggatggagaaagaaatcggctcgattaccaaaggtaaaaaagcggatattattatcgtttcccagaaagaagcgtttgtgccgtccagttatccggcgggttcagtggtgctgcaaaccaccgcgtccggtgtggatacggtgattatcaacggcgatgtgaaaaaacgctttggtcagctgacacagcagaataccgataaaatccgttctgatgcgacagaagcactgcgccgtattcagaaagcagcgaaaaaactgccgaagcagacagcggaggaagtggcggcattctttgatactgctcaggagcaggcgcgtgagaatttctcagccggttaccgctataaaaaataa

SEQ ID NO: 275193 - DNA, 483 bp, Morganella morganii
atgcgcctgtctcattcatttctaagaggaaccgttgtactgctgctgtgcgggatattaagcggctgcggggtgttttatggtgccatgtgcggcggtatggctatatttacgccgtcagaatcggtgaccaaaatcccggtaccggatgcggtggccggtcaactgtatgatcaaacaattgaaatcgtccggcacgcagggatgatcccgttttatgtcagtgagaaaccggactggatgacggtcacactgatgtcaaaaaatgaggccggggaatggataccgcttatcaccgaagaggagtggcagacacgggtgatgaaagccgatcagcgcccgctgatcgctgcccgtttgcagggaacaccggcggtgcgcgggaaagtcagggtaaatatcaaagggatgtcttaccgcaacatgtgcggaaactcagacccggtctattctgtgcggctggccgtgaaaaaagcggagtaa

SEQ ID NO: 275194 - DNA, 1029 bp, Morganella morganii
atgaatattatcaaaattgcagcagggatttcggcctgttttgctgccggattattgctggcatacctgaacgtgccgatggcactgatgttcggccccatcattctgattattattgtgcaccgtttcaatgtttcgctcactattcctaagggaacattaacctttgttcagatggtgctcggaacatccgtcgggctgatgtttacccgtgtcgatctcagtcagtttgaccatcttctgctgattatgctcactatggtatcgtgcctggcggtgcagtttaccgtcagtttcctctggtttcgcaaacgggtggggtggtctgttcaggaatctctgctgggggcggtgccgggggcaatggcggcgattctggccctgatggatcacaccggtacaccgccgcagaaggtggtgatttctcatactatccgcctgattattctgattatgctggcgggcgtggtggtcggcagtgatcatcctgtcccgccgcccgcggatattccgccgcagagtctggtgtccgtgctgtggctgctggtgattgcggtgtgcgggtatctgtccggcaaagcgctggaaaaaatcaatgtcccggcaccgtttatgctgacatcactgggcacggcgattgcggtacagagcatggtgagtacttacattgttttcccgctgccgctgaatgatatcagtatgacgctgatcggcatgtatatcgggagctattttgttctgtttccgctgaggtcactgctgcgcaatatggtgacgtccgctcaggtggtgctgatcaatattgtgctgactgcactgattgcattcggggcgtctcacctgaccggtttttccttcccgatgctgctgctctcctgggcgcccggcagcatggaagccatgacattcgccgcaattgcgatggggatagatgcgggttttgtcatgcttaaccatattctccgcatgctgattatccagagggtgccgtcagtggtgctgtatattcaggaacggcggagtaagtaa

SEQ ID NO: 275195 - DNA, 648 bp, Morganella morganii
atggcctgtactgatgatggggcaccttactccggcacgcgtaagcggacatttaatctgctggttaataccgcgctggcactgtttgaacagggcgcgataccgtcagtctctgagctggcagcggaagctggtgtatcacgggcaacggcttaccgctattttccgacacaaagtgatttgatcgccgccaccgtggatgcgagcctcggcccgattctgacctggcgctccgacagcccggaaacccgcgaccggatggagcaattgctggctttcgcttatccgcagatgttccgccatgaaggtgcactgcgtgcggcattgtatgtgtcgttgcagcagtgggcgcaggatcgctcggcctcggccaaatcacagactaatgatgagaaaaaactggtcagagggcaccgcaaggcgattctggctaatgtcaccgagccgctgaaggcgcatgtcgatcaggaaacactggataaagtgatccgtgcattttcgctggtgtacggctcggaagtgttcctggtgatgaaagatatctggaagatgaatgacggcgaagtcatcgatattacccaatggatggcaaaagccattctgaatcaggccatggcggacagccgggcacaggatgaacagccgtaa

SEQ ID NO: 275196 - DNA, 1215 bp, Morganella morganii
atgaacagcaataaaggcgctgtctatatcgccacaacgctcgataccaaaagtgatgagattttttatgtcagtgagctgatccagcgcaccggcctggctgtaaagactgtggatttaaccacaaaacccggtcagctgacccgggaagcggatgtctgcgcccgcgacgtcgccgcctgtcaccctgacggcgaaagcgcggttttctgcagcgaccgcggccgtgctatcgcggcaatggctgttgcctttgaacgtttccttgcaaaacaaaatgatattgcagcacttctcggtttgggcggatccggtggaacggcactgattacaccagcaatgcaatccctgcctgtcggcatccctaaactcatggtttccaccatggcctccggtgatatttccggctatatcggcgcaagcgatattgccatgctctactctgtcactgatgtctccggcctgaaccgaatttcacgtaaagttctccgtaatgcggctaatcagattgccggggcggtttatttctgtcaggaagagcaggttactgataaacccgccattgccctgactatgttcggcgtcaccacaccgtgtatccagcaaatcagcaaagaactggaagcggattacgattgtctggtctttcatgcgaccggcagcggcggtaaagcgatggaaaaactggcggatgaccatctgttcgacagtatccttgacctgaccaccacggaagtgtgtgactatcttttcggcggcgttctggcctgtgatgaagaccgtttcggcgccattgcccgttcgcagacgccgtatatcggctcctgcggcgcactggatatggtcaatttcggccgcccgtccaccgtaccggaaaaatacgccgatcgtcagttctatcaccacaacgcccaggtcaccctgatgcgtaccaccccggaagaaaatgcacagatggggcgctggattgcggaaaaactcaaccagtgtcacggcgatgtcatttttatcattccggaaggcggtttctccgccctcgatgctgaaggtatgccgttctggtcgccggatgcggaccgcgcctttattgaggcgttcgaaactcattataaacaaacagaaaaacgtattttacgcaaatgcccgtatcacattaatgactcggaatttacccgttttgtcattaatcaacaccagcaattacgggcgaaataa

SEQ ID NO: 275197 - DNA, 828 bp, Morganella morganii
atgccactttcccgtgacgcattactgaaaaaattcaatgacatgatttcacgcggcgagccgattatcggcggcggtgccggtaccggtctgtcagcaaaatgtgaggaagccggcggtatcgatctcatcgttatctataactccggccgttaccgcatggcaggacgcggctcactggccggtctgctggcttacggtaatgccaacgaaatcgtcatggatatggcaaaagaagtgctgccggtcgtgaaacatacgccggttctggcgggtgtcaacggcacggatccgttctgtcagtttgataaattcctggacgatatcaaagccaccggattttccggcgtgcagaacttcccgacagtcggcctgatcgacggtaaattccgcgccaatctggaagaaaccggcatgggttatgcgctggaagtggagatgatccgcaaggcacatgaaaaagatctgctgactacgccgtatgtcttcagccgtgaagatgccattgccatgaccgaagccggtgcggatatcctcgtgccgcatatgggtctgaccaccggcggtaatatcggggcagaaaccgccaccacgctggatgattgtgttgaaatgatcaatgactgggcgaaagcagccaaagctgtccgtccggacattattgtattgtgtcacggcggccctatcgcgaccccggaagatgcacaatacattttagatcgctgcccggactgccacggtttttacggggccagttccatggagcgtttaccgacagaagtggcattaaaagccaccacagaagcgtttaaaaatataacaagataa

SEQ ID NO: 275198 - DNA, 1245 bp, Morganella morganii
atggctactgttcctgcgtcctctgtttcgccgtccgtattcggcggagcaatgattatcggcggaactatcattggtgcggggatgttttccctgccggtggtaatgtccggtgcatggtttttctggtcgattgcagcactggtattcacctggttttgtatgctgcactcaggattaatgatcctcgaagctaacctgaattaccggattggttccagttttgacacgatcacccgcgatctgctgggaaacggctggaatattattaacggcctgaccattgcgttcgtcctgtatattctgacttatgcctatatttccgccagcggatcggtgctgagccacacctttgcacaggcggggatcacgcttccggcacggctgggcggatttctgtttgccctggcggtcgcctttattgtctggctgagtaccaaagcggtcagccggatgacgacgattgtgctcggtgccaaaatcctgacattctttatgacattcggcggcctgctgtggaatgtgaaaccggcggtattactgaacgtggcacagccggacgcttcttatctgccttatgtattgtttaccctgccgttttgtctggcctctttcgggttccacggtaatgtgccgagcctgatgaaatattacggcaaagaacccggcaaaatccgccgctgtctgacaatcggcacactgatggcgctggtgctctatatcatctggatgctcggcacgatggggaatattccgcgtccggactttattccgattgcggagaagggcggcaatattgatgtgctggttcaggcgctgagcggcgtgctgcacagccggggactggagctgctgctgattgtgttctcaaactttgcggtggccagttcgttcctcggggtgacgctggggctgtttgattatctggcggatttattcaaatttgatgacagtaaaattggccgcctgaaaaccgccggtgtcacctttatcccgccgatgctgggcggattgatctatccgaacggctttatttacgccatcggttttgccggtctggcggcgacggtctgggcggcgattgtcccggctctgctggcccgcgcatcccgtaaacgcttcggcagcccgcagttccgggtctggggtggtgagcctatgatctggctgatcctgggcttcgggatactgaacgcggtggtacatattttgtcgagtttcagcctgttgccggtttaccggtaa

SEQ ID NO: 275199 - DNA, 1398 bp, Morganella morganii
atgaaacgtattccagaaccgttccgtattaaaatggttgaaaatatccgtatgacaacccgtaatgagcgggaagttgccctgaaagaagccggatataacccgtttttattaccgggcgatgtggtctttattgacctgctgaccgattccggtaccggtgcaatgagtgaccgccagtgggccgggctgatgatgggggatgaggcgtatgccggttcccgtaactattatcatctctgtgatcaggtgaaaaaactgattggctacccgttcactatcccgacacaccaggggcgcggtgccgagcaaatcctgttcccgtcactgatcgcccgccgccgtaaagccggggcggataaaccggtctttatttctaacttccactttgataccactgccgcccatgtggagttaaacggcgcgaaagcgatcaacgtggtcacaccgaaagcctttgatacaacaacctattatgactggaaaggggattttgatttagatctgctcaatgcggcaatcgcagagcacggcgcaaaaaatgtagcggcgattgttaccaccgtgacctgtaacagctccggcggtcagccgatatcactggcaaatatgaaagccgtgtatgacattgccaaaaagcatgatatcccggtggtaattgactcggcacgcttctgtgaaaacgcctggtttatcaaacagcgcgaaaaagggtatgcggataaatcggtgaaagagatcgtcaaagaaatgtataaatacggcgatatgctgacaatgtcggcgaaaaaggactcactggtgaatatcggcggtctgtgctgtttccgtgatgacgaagatctgtttaacgaagtgcgcacccgctgtgtgccgatggaaggctttgtcacctacggtggtctcgccggacgtgatatggaggcgctggctatcgggctggaagaggggatggatgaggattatctccgctaccgaatcactcaggtggaatatctgggtgagcgcctgcgcgaagcagggatcccgatccagtatccggtcggcggccacgcggtctttgtcgatgcgaagaaaatgctgccgcatatcccgggcgatcagttcccggcacatgccctcaataatgagctgttcctggaatccggcatccgcggggtggaaatcggctcactgctgctggggcgtgacccggaaaccggtattcagaagccgtcaccgatggagctgctgcgcctgacaattccgcgccgtgtctataccaatgaccatatggattatatcgcggatgcctttatccggctgaaagagaaagcggcggatatcaaagggctgacattcacctatgaaccaccggttctgcgtcactttgtcgcccgcctgaaacctgtcatgtaa

SEQ ID NO: 275200 - DNA, 960 bp, Morganella morganii
atgtttcctttcataaataagtatgatttccttatcagactaatcaatgatgacagagagaattccgtgaaaaaaatacgagccgccgtcgttggttacggcaatatcggacagtatgcgattgaggcgctggaagctgccgctgattttgagattgcagggattgtgcgccgcaacccgtctgctgctgatacagattccgtgtatccggtggtggcggatatccgtgaactgggcaaggtggatgtggcactgctgtgctcgccgacccgcgccatccgtgcggttgcttcagagatcctcgcgctggggattaataccgtggacagttttgatgttcacagtgaaattgtcgcgctgaaagagcaccttgacccgattgcccgcaccggtgagtgtacggcgatcatctccgcagggtgggatccggggtcggattccattatccgcacgctgatgcaggcaatggcgccgaaagggctgacgtacaccaacttcgggccggggatgagcatggggcacagtgttgccgccaaagcgattcccggtgtgaaggatgcactttccatgacaatcccgctgggcaccggtgttcaccgccgtatggtctatgttgagctggagccggggcatgatattgataccgtgaccgccgcgctgaaagccgacagctattttgcctctgatgagacgcacgtccgtcaggtggacagtgtggacgccctgaaagatgtgggacacggtgtttccatgacgcacaaaggcgtgtccggtaagacccataaccagctgtttgaatacagcatgcgcatcaataacccggcactgacctcccagttcatggtgtcttcggcacgggcggcctgccgtcagcagccgggtgcatacagtgtgatcgaaatcccgccggtaaacttcctggccggggatatcaacagctggatcagcaaactggtgtag

SEQ ID NO: 275201 - DNA, 1347 bp, Morganella morganii
atgcatcagtctgatgtgacagagcgcgggctcttttccttaagctggccgatttttatcgacctgttattacacttttccaccttcctgattaatacctggatggtcagccatgtgtcgtcaaaatatctggcggcaatggcggtcggcaaccaggcgtttgacctgtttatcactattttcaactttatcagtgtcgggtgcagtgtggtgatcgcccagtatatcggagcgggcagacgggataaggccagtcaggctattcatatttccatcgcgtttaacctgctgctgggattattgtccgccgggtttaccattattttcggctataaaattctggaactgatgaatacgccggaacatctgatggaagatgcctttaattatctgcatattctggggatctgtttaattccggaagcagtgaccatcatcctggcggcctgtctgcgggtttacggcagagccaaaccggcgatgtatgtcacgctggtcgccaacgtggtgactgtcgtcggtaactgcattgtgctgtacggcctgttcggtctgccgcagtacgggctggtcggtgtcgcctggtccacggtggcagggcgtctgattgccgtggcgctgctgtgcggcctgctcttttacggtctgcggattaaatttgtgccgcgcatgctgtttcactggtccaaaaatatgctgaagcagatcctgcatgtcggtctgccgtctgccggggaaaacctggtctggatgctgcattatatggtcgctatcgcctttatcggactgatgggcgagaccgcactggcggcgcagaccatctacttccagttatcactgtttattatgttgttcggaataaccatcagtatcgggaatgaaatcctggtcgggcatctggtcggggcaaaacgttttgaggatgcctatcagcgcggcatgaaaagcctgaaaaccggctttttcagcaccatcccgattgtctttctgttctggctgttccgcgaccacctcgcttacgggctgagtgacgatcaggcggtgataaaactgctgctgccgctgttcctgctgtcagtcttcctcgaaccgggccggaccctgaatattgtgatggtgaacgccctgcgtgccgccggcgacgcccgtttcccgctctgtaccgccctgttctttatgtggtgtgtggcgctgccggtcggctatgtgctggggatcaaacttgagatggggatactggggatctggattggttttctgtgtgatgagtggctgcgcgggctcgtcaacacctggcgctggcgttcgaaaaaatggcagtcaaaacggctggatattgagggctga

SEQ ID NO: 275202 - DNA, 1308 bp, Morganella morganii
atggcaacacatcacacccctgctcaatggaacaattttgtcgcggcactgcgtcagtcagtcaaaccggcgacaggctgcaccgagccgatttctctggcactggccgccgcgaaagccgccgcctgcctcagcggtgcaccgactaaaatccgctgctatgtttccccgaacctgatgaaaaacggccttggcgtgactgttccgggaacaggtatgaccggcctgccggtcgctgcggcactcggcgctatcggcggacagccggatgccggcctgaatgtcctgtgcggggtgactgcggacgatatcgccgccgggaaagcatttcttgcctccggtgcggtgtctgtggaaatcaaagagccgtgcagccaggtactttactctgaagccaccgtatacagcggtgacgagcaggccaccgtcactatctgcggcgatcatacccatgtgacggaaatcagccacaacggcacgattatttatcaggatgatgcggtcacacatcagagcggcagcgataacccgttcgcggatgcctgcgcccgtgatatttatgattttgccactcaggcaccggtttcgatgatcaattttatgcgtcaggccgctgatctgaatgatgccctggcccgcgaaggtatgtccaacccgtacggattacaaatcggccgttcgctggaaaaacagcgtgagcgcggattgctgtcaaaagacctgctgtccgacattatgatccgcacctcatcagcctcggatgcccgtatgggcggcgcacagctgcctgccatgagcaactccggctccggtaaccaggggatcgccgctacccagccggtggtggtggtcgcggaatatttacaggcggatgaagaacagcttatccgtgccctgacattgtcccacctgatggcgatttatattcacagccagttcccgccgctttccgccctgtgtgcggccacgaccgcctcaatgggggcggcagccggtatcgcatggttatttgaagggaaatatgagccggtggcgatggctatcagcagcatgatcggggatatcaccggtattatctgtgacggtgcctccaacagctgcgcgatgaaagtctccagcggtgtcagtgcagcctataaagcggtgctgatggcgatgaatcagcagtgtgtcggcggtaacgacggcatcgtctgtaccgatgtggataaatccattgctaacctctgtgcgcttgccagcctgtccatgcagcacaccgacgtgcagattattgaaatcatggcaaacaaggcaaaatcagcctga

SEQ ID NO: 275203 - DNA, 960 bp, Morganella morganii
atgcaacctatctccgtgactatcctgaccggtttcctgggtgccggtaaaaccacactgctgcgccatattctccacgaggagcacgggcagaaaattgctgtgattgaaaatgaattcggcgaggtgccgatcgatgatgaaattatcggtgaccgcgccacgcagataaaaaccctgagcaacgggtgtatctgctgcagccgctcaagtgagctggaagatgcgctgctcgacctgtgtgaaaacctggacagcggcaaaatcgattttgaccgcctggtgattgaatgcaccggtatggctgatcccggcccgattacacagaccttcttctccaatgaaaaattgtgtgagcgctatgtgctggacggcattatcacgctggtggatgcagtacatgcacagcagcagctggatcagttcactatcgcccaggcgcagattggttacgcggatcgcattctgctgaccaaaacggacgttgagccggataatgaggcgctgctcgcccggttacagcggattaatgccaaagcgccggtgtataaggtgattaacggcgatatcgacatgaatctgctgtttaatgtcggcggttttatgctggatgataatgtggaggtcagcaagccgctgttccgctttgcaccgaaacagcagaatgacattcagtctctggtgatcaccatggataaaccggtggaaatcagtgccatttcccgcgcgatggagacccttctgctcagctatgccgataatatgctgcgttacaaagggttactctggattaaagatgagccgcgccgcctgttattccagggcgttcagcgtctttacagtgcggattttgaccgcgaatggcgtgaggatgatgtaaaacagagtgtgctgatttttatcggcatgcaactgccggagcaggaaatccgtaatgcgtttgccacgctgacggcatga

SEQ ID NO: 275204 - DNA, 2151 bp, Morganella morganii
atgaactctaatcgcttatttaagcacattccctggtttatcctggggattataggtgctttctgtctcggcgttgtcgcattacgccgcggcgagcatgtcagtgcattatggatcattgttgcatcggtatcagtctatctggtggcgtaccgctactacagcctgtatatcgcaacaaaggttatgaaactggatccgacccggtcaacaccggcggtgattaataatgatggtctgaactatgttccgactaaccgtaacgttctgttcggtcaccactttgccgcgatcgccggtgcgggtccgttagtcgggccggtacttgccgcgcagatggggtatctgccgggcacactctggctgctggccggtgtggtgctggcgggggcggtacaggactttatggtgctgtttatctcctcgcgccgtaacggtgcctctctgggtgagattgttaaagaagagatgggaaccgtgccgggcactatcgcgctcttcggctgcttcctgattatgatcatcatcctcgccgtgctggcactgattgtggtgaaagcgctggcagaaagtccgtggggggtgttcaccgtcgtatccactgtgccgattgccctgtttatggggatctacatgcgctatctccggccgggacgtgtcggtgaagtgtctgtcatcggtattgtgctgctggtagcggctatctggttcggtggtgtgattgcacatgacccgtactggggtcctgcgctgacctttaaagataccactatcacttatgcactgatcggctatgcgtttgtttccgctctgctgccggtgtggctgattctggctccgcgtgactatctggcaaccttcctgaaaatcggtgttatcgtcggtctggctgtgggtatcgttatcctcaacccggatctgaaaatgccggccatgacacagttcgttgacggaaccggtccggtctggaaaggtgctctgttcccgttcctgtttattactattgcctgtggtgcggtttccggcttccacgccctgattgcttccggtaccacaccgaaactgctggcctgtgaaaccgatgcccgttatatcggttacggcgctatgctgatggaatcctttgtggcgattatggcgctggttgcagcctccattatcgaaccgggtctctattttgcgatgaacaccccgcctgcggcgctgggtatcaccatgccggatctgcataacctcggtaccgcagatgcaccgatgatcatggcacagctgaaagatgtgaccgctcaggcggccgcgacggtcagttcctggggctttgtgatttcgccggaagagattttacagaccgccaaagatatcggtgagccgtctgttctgaaccgtgcgggtggtgcaccgacactggcggtaggtatcgcgcatgtgttccacaaaatcattcctgcggcggatatgggcttctggtatcacttcgggatcctgtttgaagcactgtttattctgactgcactggatgcgggtacccgttccggccgctttatgctccaggatctgctgggtaacttcgttccgttcctgaagaaaactgactcctttattgccggtgtgatcggtactgccggttgcgtgggtctgtggggttatctgctgtatcagggcgtggtcgatccgctgggcggcgttaagagcctgtggccgctgttcggtatctccaaccagatgctggcggctgttgccctggttctgtccaccgtcgttctgattaagatgaagcgcagcaaatatatctgggtaaccactattcctgcggtatggctgctgatttgtaccacatgggcgctgggtctgaaactgttcagtgacaacccgcaactggaaggcttcttctggctggcgaatgagtacaaacgccgtattgctgaaggtgtcgcgttaacgcctgagcaggtcgccaatatgcagcacatcgtggtgaacaactacaccaacgccggtctgagtattatcttcctggttgttgtgtacagcatcatcttctacggcatccgtactgcgatgaaagcgagcaaaaacccggaacgtactgacaacgaaacaccgtatatcccggttccggaagagggaattaaagtctcctcctcacactga

SEQ ID NO: 275205 - DNA, 516 bp, Morganella morganii
atgactaaaaaacccggcacacctcccggcaatttccgtgcttatactgataagcagacacaacgcaacatgctgtttcagcgggttctccgcctgctgaccttcagtgtggttttcctcgccgggtttatgatttatcagacctggcagacacaacagaatgatgtctatgctgacgggcagataaccggttatctgcggacagaaatgcgtgatacccgctcagggcagcaactggtcggctggccggtggtgaaattcgtgacagcggataataaaatcgtgacctttacctcaacagatcagttactgtgtcagtcacagtgtgaaaacggtccggtgggtgtttattatcagaaggataatccgggcaaagcacagatagcggacttcggtgcccgctatggtgaaatgattgtctggggagtggtcgcctttattctgctggtgacctatattctgcacagctggcgcctgcggattctggcccgccgccgttatggcgcggcatcataa

SEQ ID NO: 275206 - DNA, 522 bp, Morganella morganii
atgagatgcagaataccgggaatcgtatttgtgatgttgctgccgctgaccgcatttgccggtacggatgtgcaggcagaaaaagcccgtgaatggatacgggcccgcgcggatgaaccgtcagtggcggataactgcttcaggccggataatccctttgagctctgtctgtaccgggataaagacactttcggcagccatttcgtcgaccgtaatctgcaggagccgtatcagccgtactatttcgacagtgcgccggatgaaccggaagacgggcgttaccgtatccgctccggcaataaaatcggttatgcggacagtgtcaccgggcgggtggtgatccccgctatttatgactgcacgtacggtttcgctaacggtaccgccgaagtcggcgtggggtgtgaagaggaaaccgacggcgaacactcctggtggatcggcggtcactggttccgtatttcaccttacggccttatcaccggattcggccggacaccaccgccggacagccgcttatga

SEQ ID NO: 275207 - DNA, 1179 bp, Morganella morganii
atgacaacattaggtacggcattacgcccgggtgccacaaaggtgatgctgctgggcgcaggtgaattaggtaaagaagtggcgattgagtgccagcggctcggcattgaagtgattgccgttgatcgttatgacaatgcaccggctatgcatattgcgcaccgccgttatgtgatcaatatgctggacggtgcggagctggaagccgtgatccggaaagagcagcctgaccatattgtgccggaaattgaagcgattgcgacagacacattataccggctggagcaggagggctttcatgtcgtgccctgtgccaatgcggtaaaactgaccatgaaccgcgaagggatccgccgcctggctgcggaagagctggggctgatgacatcagaataccgctttgcggatgacgaggcgtcttttatccgtgccgccggtgagattggatttccctgcattatcaagccggtgatgagttcatcgggtaaagggcagagcattatccgcgatgagaacacattgcacgatgcctggctggcctctcaggaagcaggacgtgccggaaaagggcgggtgattgttgagcggatgattgattttgattatgaaatcacgctgctgactgtccgtgcggcagatggtgtgcatttctgtgcgccggtcggacaccgtcaggagcgcggggattaccgtgaatcctggcagccgcaggccatgccggatgctgttctggcacgggcacaacaggtggcggagactatcgttaacgggctgggcggctatggcctgttcggtgttgagctgtttgtccgtggtgaggatattatttttaatgaagtttctccgcgtcctcacgataccgggctggtcaccctgatttcacagaatatctctgaatttgccctgcacgtgcgggcgtttctcggattaccggccggagagatagtgcagtaccgtccggctgcctcagccgtgatcctgccgtcactgcgcagcggtgatgtccgttacagcgggctggagcacgctctgaccgggactgtgcaactgcgtctgtttgccaaaccggagattgacggctcccggcgcatgggcgttgccctggcgctggcaccttctgttcaggaagcggtggacgcggcaaaacaggctgcggcatcagtagtcgtcaccggctga

SEQ ID NO: 275208 - DNA, 909 bp, Morganella morganii
atgtttttacgatccggcgcgatgctggcgattttttcttattttctctgggggatcacaccgcttttttaccgcctgctgccgggggtgcagccgctggagttattatcccagcgcatcctctggtcaattccgctgttattatttgtccgtttctttttaaaaaaccgtacccgggtaaaagcggtatgggctgataaacgctcgctgctgctttgtctgctcagtaccagtgtgatggcaatatcctggtgcacctttacctattcaatgacccatgatttggtgctggaagccagcatgggatatttcatcacccccttgttttctattttactgggtgtcatcttcctgcatgaacgcctgaaaccggcagagaaaaccgcgctgatttttgtctgtgccggggtgggttatcagctttatcagtacggcagcctgccgaaactggcgctgatgatgggctctgcgtttgcactgtacggctttatccgcaaatttatccgttatgacctgacgacctcactgctgattgagagtctctggctgctgccggtggctattgtgttgtatttctggcttgaaaacagcggagcgggcacattcagcactgcagatacctttacccgaatctgttttatactgaccgcgcctgtcacgctgctgccgctgctgttcttcacggctgcggtgcgttccaccacactgaccactatcgggctggcacagtatctcgagccgaccattcagttcctgctggcggtattcctctttaatgagcattttgatgctgtcaaaggcgtcagtttctcattgatctggctgggattgctgttctgtatcctgtctcttatccgccattaccggaaaaatacagcaaaagccggtctgggcataaaaccccgctga

SEQ ID NO: 275209 - DNA, 999 bp, Morganella morganii
atggcatcactgaaagatgttgcccggctggcatcagtctcactgatgactgtgtcaagggcaataaataatccggaattgctgaagcctgagacgttgagacaggttcagcatgctattgatgttctgaattatgtaccggatttatcagcccggaaaatcagaggtaaaaatacaaatctgtcgtgcatgggggtattagcaattgataccgcctcagccccgttttctgttgaaatactgctggctattgagcagtgtgcaggaaaatatggctgggaccactttgttgttaatatttcatccggagatgacccggttccggctgtccgccagattttatcccgccgtcctgacggtattattattaccagtgcagaattgcgtgagataaacattcctgagttactccgtgacagaaacctggtattaacgaactgctatgatcccggaaatacagcgttaccgtcttatattccggatgattaccacgctcagtatgatgcaacagaatatcttattcagcgggggtatcgtcgtccgctttgtatctggccgccggcggagtgcctttcatccggtctgcgccgtgatgcggttcagaatgcgtggctgaatgcgggattgtcagccggtcagctgaatcagcacaacatcacattatctgatatttattaccgggacgttgtgacactgatagatcaatacattgacggtaattcaccgttatttgactgtattatctgcggtaatgatcagatagcctttgttgtgtatcaggttttattaacccgcggtatttctgttccggagcaggccggtattctcggctgtgaaaatatgaccggtaccggagaacttttttatcccccgctgaccactatccgctctccgtatcgcctgctgggtgaaacagcggcactgcatcttattgaagtacgggtttcgtcagggcggacttatatcccttgccggatgctcagcagaaagtcactctga

SEQ ID NO: 275210 - DNA, 630 bp, Morganella morganii
atggatgccgttattcatttaattaactgtactgatttaccaggcaacaatatcaacttcatgcttgatgatatgaattatgaagtaaaatcttattcatctgagcaggcttttctgaaatattatgttaatacgccaaaagagcatgcccgtgaatgtattattctggaagtgggagaatcatctgctgaagcattctatcttatcgatgaactcaaacgcctgaaaagcattattcctgtgattgttatcaccgcttatccgtcttttgagacctgccgtcgtgcatttaaagcgggtattctggaattcttcaagaaaccgattaattcagagctgttagttaatgcgattcatgacgcatttaatcaatatgaaaatagcctcactaagtaccatagatatcaacgctttaaagataaattcagcaagttatctgcccgtgagaaagaggtcatggatatgattctggaaggaaataccagtaaagaagctgcacaaaaattatcattgtcgccgcgcactgttgaagtacaccgttctaatatgtataccaagctgcgtattaaatcattaccacagctggtgcaggaatatgatttttataaaaactattcagattcaatctga

SEQ ID NO: 275211 - DNA, 4554 bp, Morganella morganii
atgagactgaacatcaggttgtgtattactgtcgcattgtttgcggcagtgcaaccggcaactgcatctgaatttaatcaggttattgaagattttgatcgttatattcagactgaaaaagcatcaggtaattttccggtatcagtacagcaacctgaccggtctcccgcaaaacgggttacaccgccggtaaatacggcgggtcaggccactcagtcacagcgtcagggcacacgtaaagctgcccgcacaggaaagcgcactgtttcgtccgcgcaggaaagccggacacaaactgctgccgtacagaaaactgacacaacaaccccggggatctccgtaccggcacaatgcgaaaatattgtggtcagggaaccggttgttgtgaccaatcctgttccggtcggatacccgcagtggtctccggcttatctggtccgtgacagccagaaatggggcgggaatcaccggggatttgtgttctcacctgtcccttcccgtatgacctcctcactgactcttacaccggaagccttgtttgccatcccgggtgaacctttccgttcaatgacgtatttctctgatctgccgctgacggttgcccgtgtgctgaaaccggaaacctggtttacgccgtctgatccgcagaaacagctgcgcctcacccgcctgaaattacaggatgtgaagcgtgaactcgcgtcactgaacgaaaagtaccggaatgttcagcataattatgaacaggcgctcgcggatattgcgaaaaaagagacagaactcagcaatctggctctggcaaataatgagttacaggccgcggcaaaaggcaacagcgccaaactgaccgccgagctggaacagaaccgcaaaacgattgattcactcaatcagcagataagtgaaaacctggcgcgttttggtcaggcggaaggtcaggtcacggctatgacagccgaaaaagcctccctggaaaaacagattgcggcactgaataaagaaaaagtgctggcagataaaaatctcgcgctgctggaaagcaaaaatgccgatatggcaaaaatcacgcagaagctgacggagctggaaaaacagctggctcagcgggatgcggaaaaacagcagctgaatgacaaaatcctcgcgctgaccggtgaaaacagcaagcagagtgacgcactgaaaaaagatctgacagtgctggcggcagaaaaagcggcactggaaaagcaaattaccggactgaagtccgataatgctcaggcggaaaaaaatctcgccctgttgcaggataaaaatgccggtatggcaaaagtcacgcagaagctgacggagctggaaaaacagctggctcagcgggatgcggaaaaacagcagctgaatgacaaaatcctcgcgctgaccggtgaaaacagcaagcagagtgacgcactgaaaaaagatctgacagtgctggcggcagaaaaagcggcactggaaaagcaaattaccggactgaagtccgataatgctcaggcggaaaaaaatctcgccctgttgcaggataaaaatgccggtatggcaaaagtcacgcagaagctgacggagctggaaaaacagctggctcagcgggatgcggaaaaacagcagctgaatgacaaaatcctcgcactgaccggtgaatacagcaaacagagtgacgcgctgaaaaaagatctgacagcgctggcggcagaaaaagcggcactggaaaaacaggtagcagggctgaaatccgataatgctcaggcagagaaaaatctcgcgctgttgcaggataaaaatgccgatatggcaaaagtcacgcagaagctgacggagctggaaaagcaattgcaggctcaggatgcggaaaaacagcgcctgacagcaaaattgcaatctcaggaaaccgaaaacggtaaacagtcagccgatctggaaaaaaggatcaccgcgctgacagcggataaatcggcgcttgaaaaacaggttgcacagctgaattcagagaagagccgggctgacgagaacctcgcgctgctcggtaataaaaatgccgacctcgcaaaacttacgcaacagctgacggcaacagaaagtaagctgaaacaaagtgataccgaaaaactggcactgaccgcacaactggcggagcagggcagtaaaagtgcgaaacagagcgcagagctgaaaaaatctctcgacggactgacggcagaaaaagcagcactggaaaaacagatcactgcactgaccgcagacaaaagcagcgcctcagccaaaaataccgaactgctgaatgcgaaaacagcggaaatgcagaaaaccaccgcacaggttgctgagctggaaaaacagctgaaagcaagtacggcggaaaaacagcgtatcgcgcttgaattactgcagaaaaccaccgataaccagcagcagaatgtgcagctgcaaaaagaactgaccgcactggccgctgataaagcggcgctgaccgggcaaatcacccggctgaccgaagagcaggcacaggctgaaaaaagtatcgcacaactgagcagtaaaaatgcagatatgacaaaaatggttcagcaactgaatacgctggaacagcaactgaaacagagtgatacagaaaaacaggcactggcggcacagattgcggccggtaatgctgacagtgacaaacagagtgcacagctgaaaaaagagctcgccgctctggcagcggataaaaccgcgctggaaaaacagattacacagctgacggcagagaaagcgcagtcagagaaaaatgcggcgctgctgaatgacaaaaacgccgatctggcgaaagtcacccgcgacctgagcgatactgagcagaagctgaaaaacgccgaaacagaaaaacagaagcttgccgaacagctggccggtcagaataaagacgcggcagcacagagtgacaagctgaaaaaagaactcagcactctggctgcggataaaactgcgctggaaaaacagattacacagctgacggcagataaagcacagtcagagaaaaatgcggcgctgctgaatgacaaaaatgccgatctggcgaaagtcacccgcagcctgaccgatactgagcagaagctgaaaaacgccgaaacagaaaaacagaagcttgccgaacagctggccggtcagaataaagacgcggcagcacagagtgacaagctgaaaaaagaactcagcactctggctgcggataaaactgcgctggaaaaacagattacacagctgacggcagataaagcacagtcagagaaaaatgcggcgctgctgaatgacaaaaatgccgatctggcgaaagtcacccgcagcctgaccgatactgagcagaagctgaaaaacgccgaaacagaaaaacagaagcttgccgaacagctggccggtcagaataaagacgcggcagcacagagtgacaagcttaaaaaagaactcagtactctggccgccgataaaaccgcgctggaaaaacagattacagagctgaacgccaaaaatagcgataacgcaaaaatggcggctcagttgcagacactggaaaaagaattacagcagcgtgaggctgataaacttaagctgactgctcagttacagagccgtgaggcggataatacccgccagagcgataatctgaaaaaagaggtggctgcgctgaccgtggataaagccacactggaacaaaaaattgcgcagctgacggcggataagcaattgctgtcggcaaaagtatccggtgcagataaagagagcagtactgttcaggcggataatgctgagctgaataaaaaattagcggcagaacagcagcgggctgctcagctggataaagccttaaaagagaaaacacagcagattgaagcactggcaaaatctgatgcggaattaattaagctgaatactcagcttgataaccagaaaaagcagctggcagataaagatgcagaacttgccaaagcggcggctaagctgaaagaaaatgctgatctcacggcaaaatataccgcattgcagaaagaaatggataagcaaaaggcggttgtcagtgcacagcggactgaaaataccacgctgaatacgcaaattgcgaaagcagaagaaaaaaataaagccgtgacggcttatactttccagcaggttggtgagctgaataaacggaaaaaccaggagctgatcgcccgcctggagcgccagaattattccaaaatgacgccggacgtttattaccgtatcaccaaacagggacagaaatataaagcgctgaaaggaaaaacagtcacatttgcgatgcatgagaaactaactgacggtaaagtaaccgtgtcatatccggtaaatgcaccggcggttattccgttcaatgaattaccgggtgacctggctaaattcgtttcacttgccggcgcaggcggtgcggttgatgtgtatatcaaaccggaaggcggttatggtgttgccggtatcgaagggcagataccaccgaactcaatgtctatgatcaaactgaacgtgctgaaaatagaataa

SEQ ID NO: 275212 - DNA, 462 bp, Morganella morganii
atgttatccaagacagcactgaacaaaatggcggggatactcctgttgggaggcgttgtaaccctgtccggctgttcattaacgacaccctctgcgccgaagcctgcggcacaaccggttcagccggcggagcaggagccggtgagaacgactgcacctttgccaagacctgaattgcagcaaccctccggacagatttcgcctgagctgagtatgtgtgttaaagaactcgactcgctcaaaactatctctccgaaagattacagtcagatggtcgccggtttcagcgaaatcagccagatcaacagactgtatcgtcagctcgaaagaaccgccagcccggatacgcttaaattactgaagatgtcgattgaagcgaaaaccaaagtgatgtgtgcacaggttcgttattattctgttctgtctattgagaataccctggagaaggttaacgggttatga

SEQ ID NO: 275213 - DNA, 2307 bp, Morganella morganii
atgtctgaagcagtcggaaaacgcgcgctgggtacgccttacctgcgcgttgatgccctgagcaaaacatcagggcgggctcgctacacggatgatctgccgatgccgggtatgcactacgccaaatatgtccgcagtaccattgcccacgggatggtaacatccgttgatgcgtcacaggcgctcgccatgccgggggtggtcgcggtattcacctgtaacgatgtgccgcagatcccgttcgccaccgccggtcacgcctggtctctggaaccggccaaacgcgacgtggcagaccgcctgctgctgaaccgccatgtgcgccaccacggcgacggtgtggcgattgtggttgcccgtgacgaactgaccgccgaaaaagcggcggcactcgtcagcgtcacttatgacgaactgccggtgatcacctcaccggaagcggcactggccgcagatgccccgcaaatccacagctgcggtaacctgctgaaacgtaccgctatcaatgcggaaagcgccagagcgacagtcagtcagtcgccgttccagttccgcggccattttgataccccggtggtccagcactgccatatggaaggtgtcacctgctacgcctggcaggaagcggataataagatttccgtggtgtcgagtactcaaatcccgcacattgtccgccgtgtgataggccaggcgctggatatgccgtggtcgcatatccgggtgattaagccgtatatcggcggcggtttcggtaataaacaggacgtgctggaagagccgatggccgcctggctgaccctgaaactcggtggtattccggtgaaagtggaactgagccgcgaagagtgtttctttgcctcgcgtacccgtcacgccttccatattgatgcggagatggggctgaccgccgacggcacgctgaacggctatcatcttgatgttctgtccaataccggcggttatgcctctcacggacactccattgcggctgcgggcgggaacaaaatcccgtacctgtatccgcgctgcgattacggttattccgccgccaccgtctataccaactacccgtcagcgggcgcaatgcgcggctacggagcaccacaggtcacattcgctcttgaatgcctgatggatgatgccgccgcacagctgaatatcgacccggtggatatccgtctgcgcaatgcggcgcggtccggtgactgtaacccggtcaataagaaaacgatttacagtgcggggctgattgagtgcctgaaacgcggcaaagagctgttcggctgggatgaacgcaaagcagaggcgctggcaacacgcggggatatccgccgtggcgtcggtgtggcctgtttcagctattcatccaatacctatccggtcggcgtggaaatcgccagtgcccgtctgctgatgaaccaggacggtaatatcaatgtgcaggtcggcgcaacagaaatcggacagggctcagataccgtgttctcacagatggtagccgaaaccctcggcgtgccggtcagtaccattcagatgatctccacccaggatacggatatcaccccgtttgacccgggcgcgttcgcgtcacggcagagttatgtcaccgcaccggcgctgaaagaagcggcgttgtcactgcggcagaaaatcctcgaacacgcctcgctgatgacacatcaggccgcatttaatatgaccattctcgacggcaatgtggtgcttgaggcgcagccggacgtggttgtcaccaccgtcgcggaagtggcaatgcacagtttttatcatcaggaaatcggcggccagctctctgctgaatcctctcacaaaacacagaccaacccgccggccttcggctgtacttttgtcgatgtcaccgtggatattccgatgtgtcaggtgaccattaaccggatcatcaatatgcacgattccggccggatcctgaacccgcagctggcggaaggccaggtccacggcgggatggggatggggatcggctgggcgttgtttgaagagatgctgatcaacgaaaaatccggggttgttcataacccgaatcttctcgactacaaaatgcctaccatggttgacctgccggatctggagtgcgggtttgtcgaaacctacgagccgcagtccgcttacggccataagtccctgggtgagccgccgattattgcaccggctgccgctatccgtaatgccgtgcgtatggcgacgggtatttctgtcaatactatcccgctgacaccaaaacggctgtaccgggaatttgttaatgccgggcttatcagggggtaa

SEQ ID NO: 275214 - DNA, 879 bp, Morganella morganii
atgtatgattttgaaacttatcaccgtgcggagagtgtcgcacatgccgtctcactgctgacggcagatccgcaggccagattgctggcgggcggaacggatgtgctgatccagcttcatcacctcaatgaacgcttccgccgtattgtggatatccatgatttaccggaactgcgcgggatcagctgtgatgatacgggacatatccgtatcggctccgcgaccaccttctccgaactgattgacagcccggtgatcaacaagtgcctgcccgcactgagtgaagcggctgccaccattgccggaccgcagatccgcaacgttgccacttacggcggcaatatctgtaacggcgccaccagcggtgactccgcctgtccgtccctggtttatcaggcagagctggagatagccaccccggacggcatccgccgcagaccactgcgcggcttccataccggtccgggtaaagtggcctttgaaccgggcgaactgctgatcgcattccatttctcaccggagaattaccgcggcaaaggctcagccgcttataaatacgctatgcgcggcgcgatggatatcgccaccattaactgcgcggcactgtgtgatatcagagaaggacgttttgaggaactgcgcctcgccttcggggttgccgcaccgacaccggtccgctgtgaacacgcggaagcggctgcgatcggaaaaccggtcaccgcagacaccctgaaagccgtcagtcaggcgattgaacaggatgtggcaccgcgcacgtcatggcgggcagagaaagagttccgtttacacctgatccgcgtcctgagcgagcgggtgatccgcgcggcggctgaacgtccgggagaaaaaatcgcatga

SEQ ID NO: 275215 - DNA, 480 bp, Morganella morganii
atgaatatcaaagaatggaaaaccatcagctgcacactcaacggacaggtacgggagctgaccgtgtcaccggcggcacggctgtccgatgtcctgcgtgagcaggggcttatcagtgtcaaacacggctgttctgtcggcgagtgcggtgcctgcacagtacttatcgacggtatcgcggtggatacctgcctctatctggcagtctgggcggacggcaaacagatccgtaccgccgaaggtgagatgaagcacggtaaaccgtctgcggtacagcaggcttatgcggacagcggcgcggtacagtgcgggttctgcaccccgggcctgattatgatgaccaccgccctgctggaaaaacacaaagggcagacccttaccatccgtcagatccgccacggcctggccggtaacctgtgccgctgcaccggttatcagatggttgccaatgccgcggataaactccagcgtaatcagtaa

SEQ ID NO: 275216 - DNA, 372 bp, Morganella morganii
atggatactgtcagaaagacgcgttacgagtcgtatgcttatgaggcctgtccggttgaggcaacactggaaatgatgggcgggaagggcaagggaatgatcctttaccatctgataagcggcatcaaacgctttaacgagctgaaacggctgctgatatttattaccccgcgtatgctgacaaaacagttacgggagcttgagatagcggggcttgtccaccgcaaggtctatgcggaggtgccgccgaaagtggaatacagcctgacggacgccgggcagtcgctggtaccgatcttactgatgctgaaaagctggggggaagaacatgccctgccggtacttttgcagcaacagacaccgcaaccctga

SEQ ID NO: 275217 - DNA, 654 bp, Morganella morganii
atgaccatcactcaggctgtaatgcagcgttattcaaccaaatcctttgatccggcgaaaaaaatcagtgatgaggtgatgaacagcatcaaaacattgctgcgctatagcccgtccagcgtcaatatccagccgtggcattttattattgcggccagtgaggaagggaaaaaccggatcgccaaatccacccgcccgggctttgaatttaataccgcaaaaatcaccgatgcctctcatgttgtgctgctgtgcgcaaaaacagatgtggatgaagcctatatgaacagcgtgctggagcaggaagacaaagacggccgttacgccacgccggaacacaaagcgatgaataacggcggccggactttctttgttaatctccataaagaaacactcggtgatctgccgcactgggcggcaaaacaggttttcctgaacatggggacattactgctgggtgcgtccgcgctgggtgtggatgctgttccgatggaaggaatggattttaataccctggatacggaatttggtttatccgccaaaggactggcaccggtagccgttgtgtcgctcggttaccgcaaagaagatgattttaacgccgcgctgccgaaatcccgtctgccggaagcgcagatcataaccgttatctga

SEQ ID NO: 275218 - DNA, 1851 bp, Morganella morganii
atgatcactgaaaaatcaccatctgtgctgatgcagatacagccgacgattgttcacttcagcaaaatgctcgccagtgtgttacagcttgatgttgaaatcgttgatgacaaactgacaaggattgccggaacagggctgtttaaccagcacctcggacatcgtctgaccaataattcccagctgctccgctatgtgctggataccaaaaaagaaaagatagtcacgcactcctgttttgatccgctctgcctcaattgcgcggataaagataactgtaaggagaaagcgtttatcggtacaccgatcatcttccaggatcgctgtatcggtgttatcagcctggtggccgtcacctctgaacagcaggagcggatccgggataacatccatgacttctcggattatgtgcagcatatttccaatatttttgtggctaagctgctggatgaacaggaaggccgtaatgccgcgcagaaggtattactgagcctgatagagtttatggatcagggcgttctgatcctggatgaggcaaaccacctgaaatttgccaatccgcatgctctgaagatcctcaatgtcccgcatgaaaagatttccggcaaaactattgccatccgtccgctgacttatttcaagagtctgaaccgcgggcatttacagcatattgtctcctgggaaggggagagcaatattattatcgggcagcttcatgtggttaacggctgtcagatgttcctgatggcgttccatcagtctcatgcggcgattgatatgaatgaagtgcgccgtgatgaaaacggattgctgattgaacacctggtcggggaatccgaacctatccgtcagctgaaacacctgatttcccgcgtggcaccgagcccgtcgagtattctcgtcaccggcgagagcggtaccggtaaagaagtggtggcgcgggctatccataagctgagtaaccgcagtgaaaagccgtttatcgccatcaactgtgcggcgataccggagcagttactggaaagtgaattattcggttatgtgaaaggcgcgttcaccggcgcatccgccaacggaaaacagggcctgattcaggcggcggataaaggcacgctgttcctggatgaaatcggcgatatgccgctgattgttcaggctaaattattacgtgcgatagaatcacgcgaagtgcagccgattggctcaagccggaccatcccggtcgatatccggattgtgtccgcaaccaaccagaatctggaacagtttgtcagtgaaggcaaattccgcgaagatctctattaccgcctcaatgttatcccgattgccctgccgccgctgcgtgagcgtcacggcgatgtggagctgctggtgcaccatttcctcaatgtgcataccaggcgtctcggtctggtgtatccgggcatttcggatgaggtgatggcggtcattaatgcatggccgtggccgggcaacctgcgtgagctgagtaacctggtggaatatctggtcaacgtggtgccgccgggtgaggtgattgatatctcactgctgccgccgaacttcgccagacatgcggcgcagatgataagcggcactgccgcaccggttcagaataccggggatattcaccgcagcgaaattaccattccggtcagaagtgtacctgcggcagcagcggatgaggatccggcactgcacggggaaaccatgctggaagagatggaaaaacagatgatccgcgaagcactgcagcgctatgacaacaaacgtcaggcggcagaggagctggggatcggcattgccactctgtaccggaagattaagaagtacgagttatccgccgggtag

SEQ ID NO: 275219 - DNA, 1188 bp, Morganella morganii
atgaaaaacgttaatgaattattgaaagatatcgccagactgaaatctaatcttcatcaaaaggattttttgcttacctgggaacagagtcaggatgaactgacgatggtgcttgatattgcagccgcactgaaagggctgcgtgccgataacatcgcaaccaacgtattcacaaatggccttggcatctctgttttccgtgacaattccacccgtacccgtttctcttatgcttctgcactgaatatgctcggcctggcccagcaggacctcgacgaaggtaagtctcagattgctcacggcgaaaccgtacgtgaaacggccaacatgatttcattctgtgcggatgccatcggtatccgtgacgatatgtacctcggtgccggtaacgcctatatgcgtgaagtgggtgcagcactggatgaaggttttgaggaaggcgttctgccgcagcgtcctgcgctggttaacctgcagtgtgatatcgaccacccgacacagtctatggctgacctggcctggttacgtgagcatttcggttcactggaaaacctgaaaggcaaaaaaattgccatgacctgggcgtattcaccaagctacggtaaaccgctgtctgtaccgcagggcatcatcggtctgatgacccgctacggcatggacgtgacactggcgcatccggaaggttatgacctgatccctgacgttatcgatgtggcgaaaaataacgccagacaatccggcggcagctttaagcaggttacatcgatggaagaagcgttcaaagatgcggatatcgtgtatccgaaatcctgggcaccttacaaagtcatggaacagcgtaccgaactgctgcgtgccaatgaccatgacggcctgaaagcccttgagcagcgctgcctggctcagaacgccaaccacaaagactggcattgtactgaagagatgatgaagctgaccaaagacggcgaagcgctgtacatgcactgtctgcctgcggatatcaccggtgtttcctgtaaggaaggggaagtggaagaggcggtattcgagaaataccgtatcgccacttacaaagaagccagctggaagccgtatatcatctccgccatgattctggcccgcaaattcccgcagcctgccctggttcttgagcaactgctgaaaaacgcacgtaaacgtattttataa

SEQ ID NO: 275220 - DNA, 1203 bp, Morganella morganii
atgtctgtcttctcactgaagttagatatttcagataaccgttatttcaacggtaaacactccccgcttttttcccgtgaagaagcacataaagcgctgaagtttcatgagaaaattacgggttaccatccgacaccactgtatgacatgaaagatctcgccgctctgttcggcgtgcgtaatatcctggttaaagatgagtcacagcgttttgatctgaatgcattcaaaattctgggcggctcttatgctatcgcccacctgttgtgcgaaaagtacaacatggatattaacgatttctctttcgagaaacttaaaagcaccctgactgaaaaaatgacgttcgccaccaccactgacggcaaccacggccgcggtgtggcctgggcggcacgcgcactcggtcagaaagcggtggtgtacatgccgaaaggctccgcacaggaacgtgtgaatcacattaccggcctcggggcggagtgtatcgtcacagatatgaactacgacgataccgtccgtctcaccatggaaaatgccggaaaacacggctggatcgtggttcaggataccgcctgcgaaggctacaccaaaatcccgacctggattatgcagggctacaccacgctggctgccgaagccgttgcccagatgaaagagatgaaaattcagcgtccgacccacgtgctgttacaggccggtgtgggtgcgatggccggcggtgtgctgggctatctggttgatgagttcggggcaaaagatctgcattccattattgtcgagccggatctggctgactgtctctaccgttccagcctgaaaggcgaaatcgtcaatgtcggcggcgatatggccaccatcatggcgggtctggcctgcggcgagccgaaccctatcggctgggatctgatgcgtaactgcgcgacacagtttatctcctgtgaagatgcggtggctgccctcggcatgcgtgtcctcggtaacccgtacggcaaagacagccgcgtgatttccggtgaatccggcgcggtcggtctcggcgtgctggcggcagttaactatcatccggaacgtgcggaactgatggaaagactcggcctgaacagtgattccgtcatcctcgtgatcaacaccgaaggtgacacagataccaaacattaccgtgaagttgtctgggaaggtaaaaacccggcgcagaaatattaa

SEQ ID NO: 275221 - DNA, 1218 bp, Morganella morganii
atggctaagcaaatcccgtttgatgaaattgtcaaaaaagctgaacactataaaaaagatatgacccgttttctgcgcgacatggtggcaattcccagcgaaagctgcgacgaaaaacgcgtgattcaccgcatcaaagaagagatggaaaaagtcggctttgataaagtggatatcgacccgatgggtaacattctgggttatatcggtcacggtccgcacctgattgccatggatgcgcacatcgataccgtgggtatcggtaacatcaaaaactgggaattcgacccgtacgaaggtatggaaaacgacgaaataatcggcggacgcggtacctctgaccaggaaggcggcatggcctctatggtctatgcaggtaaaatcatcaaagatttaggtctggaagatcagtacactctgctggtgaccgggactgttcaggaagaagactgtgacggtctgtgctggcagtacatcatcgagcaggacaaaatcagaccggaattcgtggtcagtaccgaaccgactgactgccagatttaccgcggccagcgcggccgtatggaaatccgcattgatgttccggggatcagctgccacggctccgcaccggagcgcggtgataacgcaatcttcaaaatgggtccgattctgggcgaactgcaggagctgtcaaaacgtctggccactgacgatttcctcggccagggtacactgactgtttctgaaattttctacacctcaccaagccgctgtgctgttgctgacagctgcgcagtctctatcgaccgccgtctgacctggggcgaaacctgggaaggcgcactggaagaaatccgcgcgttaccagctgtcaaagcagcgaaaggcgtggtctctatgtacacctatgagcgtgcctcctggaccggtctggtctatccgacagagtgctacttcccgacctggaaagtagaagaagatcacttcaccgtgaagacactggatcgcgcttaccgcggccttttcaacaaagagccggttgttgataagtggactttctccaccaacggtgtttctatcatgggtcgtcacggcattccggttatcggttttggtccgggcaaagagcctgaagctcacgcaccaaacgaaaaaacctggaaagatcacctggttacctgtgcggcaatgtatgcggccattccgttaagctacatggctgaactgaaaaaataa

SEQ ID NO: 275222 - DNA, 1392 bp, Morganella morganii
atgcgcacactgattatcaacggcaccgttgtcaatgcggacggacaataccggcaggatgttctgattgaaaacggcctgatctcacaggttgcaccggacattgcaccggagacagatgaccgcattattgatgcacagggatgttatgtttttccgggtggtattgatgttcacacccattttaatattgatgtcggccttgcccgcagctgtgatgatttttacaccggcacgcgtgcggcagcctgtggcggtaccaccaccattatcgatcatatgggatttggtccggcgggttgttcactgcaccaccagcttgagaattatcaccgctacgccaaaggacgcgccattatcgattacagttttcacggcgtgatccagcatatcaacgacgatattttaaatgaaattccgctgatggtggcggacgggatcagcagcttcaaactctatctgacctatcagtacaagctggatgatccggatattttacgtgccctgcaacagcttaaccacgccggggcgctgaccaccgtgcatccggaaaatgatgcggtgatagcgcagcgcaaagcggagtttgtgaagaaaggacaaacctcaccgattttccatgccctgagccgccctgcggaatgtgaggcggaagcgataggccggatgattaatctggcgcatatctgcggcaatgcgccgctctatatcgttcacctttccaacggattgggcctcgattacctgaagatggcgaaaacccgccgccagccggtctggatagaaacctgtccgcagtatctgttccttgatgagcgctgttatgagcgcgatgacggcctgaaatttattctcagcccgccgctgcgtaaccgccgggaggttgatgccctgtggccgggtattgatgacggcgcgattgatgtggtcgccaccgatcactgcaccttcccgtatcagcagcgtctggcgctgtccggcgggaatttcacccgctgtccgaacggcctgccgggtgttgagaaccgtatgttactgctgttttctgcaggcgtgatgcagggacggatttcaccggaacactttgtttccctcaccagtgcgatgccggcaaaactgtttggtatctggccggagaaaggcgtgatccgcccgggcgcagacggtgatatcaccattatcgacccggcgcaggaaaccactatccgccatgcggatctgcatgataacgcggactacagcccgtacgaaggcatgacggtacagggcgcaatccgctgcacactgtcgcgcggtgatattgtttaccgtgacggcgaatttactgctgaacccggccgcggccgtttcctgaaacgccgtccgtttaaggctccgcaccggtgttattaa

SEQ ID NO: 275223 - DNA, 933 bp, Morganella morganii
atgaaaaaaacaatcgtattagcactgggcggcaacgcactgggaaatgatcttccgggacagatggctgccgtcaaaaccacctctgtcgtgattgccgacctgattgctcagggataccgcgttgtggtcacacacggtaacggcccgcaggtggggatgataaccggcgcatttgaggctgccagcaaaaccgaagccaaatcaccggttctgccgatgtcagtctgtgtggcactgagccagggatatatcggttacgatttgcagaacgcactgcgtgaagagctgctgaaccggggcatcaataagccggttgccaccatcgtgacacaggtggaagtggatgcggcggatccgtcatttaaaaacccggccaaacctatcggcgcgttctacagcaaagaagaagcggaagccctgagcaggaaagggtttgagatgcgcgaagatgcgggccgtggttaccgccgcgtggtctcatcaccgaaaccggttgatattattgaaaaagaaaccgtcaaagccatgctggatgctgatcagctggtgatcactgtcggcggcggcggtattcctgtgatccgtgacggtaacacactgcacggtgccaatgcggttatcgacaaagactgggcgagcgccaaactggcggagatgatcgatgcggatatgctgattatcctgactgccgtggaaaaaattgccatcaacttcggcaaaccaaacgagcagtggctggataaactgacgtctgcggatgcgcagcgttatatcgatgagaaacattttgcaccgggctccatgttaccgaaagtggaagccgcgctctccttcagccgcagcaaaaaaggccgcaaggcactgattactctgctgaataaagccaaagacggtattgagggtaaaaccggtactgttatcggcgattaa

SEQ ID NO: 275224 - DNA, 1629 bp, Morganella morganii
atggcattaacctttggcgttaaaagtaccctgctgatcgccggtatggcggtaacagccgcggcggcgggcaaaccgaatgtgattgttcaggatgtaaaacttaacaaagccacgattttcctgcgcggggcagagctgagcaacagcgcaacgctgaatctgcctgccggtgacagtgatgtgatcctgaccaatgtggccggaaatattaatcccggcagcttatccgttatgctgaataatgatgatgtcatcattcagtccgtcaatctgcgcagcgaaattgaaaaaccggcgtattcagacgaaatcaatgccatgaaggcgcagattgaggagcaggatctggcgattcagcagctgaatatgcagacggaagtgaataacgagcagctgggtctgctgcgtgatcaggatttcttcggcaccggcggtgcgccgctgacacaggagcaatccgtgcagaagctggattttatccgcactcagatggcaaaaatctatgcggaacagctggaatattcccggcaaatcaaagaaaaaaccgaggcactggcactgctgaaagcgcagtatgaagagaaagtcacacagtttaaggagcgccgcacacagctggtgctgaatgtgtccgcgaaaaaagcggtgacagcggaactggatatcgactatatcacgccggatgcggcctgggcgccgtcctatgatatccgcagcgccggtatggataagccggtgacgctgacctacaaagcggatgtgatccagaacaccggtattgactgggatcaggtggatctggtgctgtcatccgccgacccggtacagagtattgccccgccgcaactttatccgcagtatctgtcactgatcaatgagtatgcggtgatgggtgaaatggcgcctgccccggtggctatgatggcggaggacaagaaggagtacagccgcaaccgctcagcgaaacaagcccctgccggcgggatctcgtcgtttgttaccgcagagagtaacggtatcagcctgacataccgcattgataaaccgtactccctgccgtccgttgcggagtcgcgctcactgacgatcaaacagatggcgctggacggaaaataccgttatatcacacggcctaagatggacgaacatgtgtatttacaggcggttgtggaaaacgcaccggcgctgaatctgctcagcggtaaggcgaatatctattttgataaccgttatatcgggcagacttatatcgattccggcctgataactaatgagctggaactgccgttcggcatgaataaagatattcaggtcagccgtaaagtggacagtaagctgacaaaacagccgggtattctgggctctgcggttgaacagagcgaaggttatatgattaccctgtcatctttcgccaaagcgccgctggtggtaacggtttttgatcagattccggtcagtcaggataccaatatcctggtgaaagacgttaaaaccggagaagggaccgttaataaacagaccggtgaggtggaatggaaagtggaactgaagccgcagcaggtaatggaactgccgctgagttacacactgaaatatccgaaagaaaaacccatcagcggtttataa

SEQ ID NO: 275225 - DNA, 1230 bp, Morganella morganii
atgacgacactccggacacacacggcagcacctgccacttcacgtaacaagttgttatggatagccgggatgggctggacatttgacgccatggatgtcgggctgctggcatttctgctggccgccttacaggcagactggggactgagtgccgcacagctcggctggatcggcagccttaatgccgccgggatggcagtcggtgcctttgttttcggtctgatggcagaccggaaaggccgcaaaccggtgtttattctcactctgctgctgttcagtctggggtccggactgaccgctgtcgccggttcgctggccgtggtgctggtactacgctttttcatcggtatgggactgggcggagagctgccggtagcctccacgctggtcagtgagagcgtggcccctcacgaacgcggccgtgtggttgtgctgctggaaagcttctgggccttgggctggctgattgcggcactgattgcctattatgttatccctgattacggctggcgcacggcgatgctgctcagcgccctgcctgcgctgtatgccctgtggctgcgggcaaagctgccggagccggtatcccgctataccgcgcaggagcgcccgaaactcaccattgcgcaatcgatggcactgatctggtcgccgcagtaccgccgtgccaccctgatgctgtggatcctgtggttctgtgtcgtgttttcctattacggcatttttctctggctgccgggcgtggcgatcctcaagggattcagtctgataaaaagctttcagtatgtgctgatcatgacactcgcccagttgcccggctatttcagtgccgcctggcttatcgagcgttacggccgcaaattcgtgctggtcacctatctcgccggaacagcaatcagtgcttacgggttcagttgcgcggaaaccgccacggcactggtcatttcgggcatgctgctctcattctttaatctcggcgcctggggcgcgctctacgcctacacgccggagcagtatccggacagtgtccgcgccaccggtgccggtaccgccaccgcaatcggtcggataggcgggatcctcggccctcttctggccggttacctgattcagtatcaatttgctgtcagcacgattttcctgatcttcagtgccgcggtggttatcgccattctctccgtcattttccttggcgcggaaacccgtaaccgcgaactcagtactatttaa

SEQ ID NO: 275226 - DNA, 552 bp, Morganella morganii
atgaatcaatacgataaaatcagtaaatttctgagttatgtcctgcggcaccagccggactccgtcgggatccgcctcgacaatgaaggctggacagatatcaccgtgctcctgcgtcaggccgctgctcacggcacaccgtttgaccgtgaaacgctgggaaaggtggtggaaaccaacgacaaaaagcggtttacgatctcatccgacggcatgtatatccgcgcggcacaggggcattccgccgggcaggtggcgatcgattacccgccgcagacaccgccggatattctgtatcacggcacggctatccggtttatcagtgatatctgtgaactggggctgattgccggatcacggcactatgtacacctcagcgcggatgaagataccgcactggctgtcggtgcccgtcacggcaaaccggtggtgctcaccattgccgccggggagatgcataaaaccggttatccgttctatctggcggataacggcgtctggctgacgccgcatgtaccgattaaatacctgtcgcagaaaaaacccggctga

SEQ ID NO: 275227 - DNA, 831 bp, Morganella morganii
atggaacggattgaacatcacgcctgtttcggcggcagccaggaagtctggcgtcaccattctgcggtgaccggtacgccgatgaccttttccgtgtttctgccgccgcaggcaaaaacagagaaatgtccggtgctgtactggctttccgggctgacctgcaacgagcagaattttatcaccaaagccggggcgcagcgttatgcggcggagcacggtctggtgattgtcgcgccggataccagtccgcgcggcagtcaggtggcggatgataaagagtacgatctcggccagggcgccgggttttatgtcaatgccacacaggagccgtggaaagcgcattatcagatgtatgactatattctgaatgagctgcacacgctgataaccgggcatttcggtacatcggaaaaacgcggtatctgcgggcactcgatgggcgggcacggcgcactggtgctggcgctgcgtaatccggatgcatttctcagcgtgtcggcattcgcgccgattgtgtcactgtcacaggtgccgtggggcgaaaaagccttctctgcctatctgggagaggataaagcggcgtgggagcagtatgatgcggtgaaactgattgaatccggccaccgggtgacggatgtgctggttgatcaggggcttgccgataccttcttcagtaaacagctgaaaaccgggttactgaaatccgcctgtgaaacacacaatatcccgcacactatccgtgtgcatgccggttatgatcacagctattacttcattgcgagttttatcgcggatcatatcgcgtggcatgcagcacgtcttaacgcataa

SEQ ID NO: 275228 - DNA, 1110 bp, Morganella morganii
atgaaatcacgcgcagcagtcgccttcgggccgggtttaccccttgaaattgttgaaattgatgtggcaccgccgaagaaaggtgaagtgctggtgaaaatcagtcacaccggggtatgccataccgatgcctacacgctttccggtgatgacccggaaggtctgttcccggtggtgctcggccatgaaggtgccggggtggtggttgaggttggcgagggcgtgaccagtgtgaaaccgggcgaccatgtgatcccgctgtacacagccgagtgtggtgagtgtgatttctgtacctccggtaaaaccaacctctgtgttgcagtccgagaaacacagggtaaaggcgtgatgccggacggcaccagccgtttttcgtataacggtcagccgctctatcactatatgggctgctcgacattcagcgaatataccgttgtggcggaagtctcactggcgaaaatcaatccgcaggccaatgcggagcaggtttgtctgctcggctgcggcgtgaccaccgggatcggcgcggtacacaataccgcgaaggtacaggaaggggattctgtggcggtattcggcctcggcggtatcgggctggccgtggtgcagggcgcacgtcaggcaaaagcggggcgcatctttgctattgataccaatccgtccaagtttgagctggcaaaacagttcggcgccacagactgcattaaccccaatgattatgacaaaccgatccagcaggtgctggtcgaaatgaccaaatggggtgtggatcatacctttgaatgtatcggcaatgtcaatgtgatgcgctcggcgctggaaagtgcgcaccgcggctgggggcagtcggtaattatcggggtggcgggtgccggaaaagagatttcaacccgtccgttccagctggtcaccggccgggtctggaaaggcacggcgttcggcggcgtgaaagggcgtacccagttgccgggaatggtggaagatgccatgagcggtaaaattgagctggcaccgttcgtcacccacaccatggaactggataaaatcaatgaagcttttgatttgatgcacgacggtaaatccatccgcaccgtcattcattactga

SEQ ID NO: 275229 - DNA, 186 bp, Morganella morganii
gtggccaccaccacggaagccgcaaccgcgccggtggcaccggacgaaaacctgccgccgttattgcgggtagcgctgcaaattatggacagtgatgatggagagcaggcctttctgcacggcctggagagtctgattcggggatttgaggtgcagcttaccaactcaggacagagccagcgataa

SEQ ID NO: 275230 - DNA, 1212 bp, Morganella morganii
atggaaaaattatctgaattatatgattttattaccgcgagcgccgttttatcagcggtgattctggtggttattctgctggtcacctggtttctcgggcggcttatatttctgcgcgtggcaaaacgtttgttgtcgttatttactaacctgactgacgacagcatgatccacagtattgccaagaaaagtgcctctgtcgtggctgtcacgctggtactgtacattaataagatgctgccgaccttttcggcagaaatgaatattctgtttaataccgtatgcagcgcattcctgattattaatctggcttcactggttaatgacgggctggatatctttatcctgcgccataccgggcgttcatcgtaccgtaacagctcgataaaggggtatattgaaattgccaaaatcggggtgtggattgtttcctttatcctgattattgcgttaatgacctcgcagtcgccgctgattattatttccggtttcggtgctgttgcagctgttctgatgtttgtctttcagcacaccttattatcctttgtggccaatattctggtctccaacggtaaggtgctgaaactgtatgactggatagaattgcccggcagtaatatcagcggtgaagtgattgatattgcactgcataccattactgtccgcaactgggataatacgatctcacggatcccgacaaaagatttcctgaccgaaaaatacaccaactggcagccgatgttctcttccggcggccgccgtattaaacgcagtttttatattgatcagtcctcagtatcgtttgctgatgaaacgttattaacggagctacggaatcaggagtcatttcgtcagtcactggatgaaatactggcggaaaataccggttatgatgacgtaaaagagtggatggccgcaaaaggggtcactaatttacagctgttccgcaaatatcttcttaactggataaaattgcgcggtgatgtgcgggcggatatgtatctggtgatcagaaccatgtcgccgacaccggagggattgccggttgaaatatactgttttacccgctccaccacctgggttgattatgaggaaactcagtcgcagatatttgaatatgtgaatgcgtcggcaaaatatttccggctggatatttaccagcaaccgtccggccatgatctggcgaatctgcgttacagagcaggacggtga

SEQ ID NO: 275231 - DNA, 345 bp, Morganella morganii
atgaaaagaatcgccgtggcgctcattattttatcagcggcaggatgtgccgatgagaatatttatcctgtctatacgccggattccctgaaaatgcatgcacaggctgcgattaaccgcgattttcaggtgggggatatatcagatctcaccatcagcaatattaaagaaaatccgccgtccgttaccggtaagcggaatattgattttacggtatcctctgccgcatcaggccgggtttatcactgtatccgctctgattattctgtccgccgcttcggcacccgtgatctgaatccggaatcaccggggcatatggtctgtgagccgcagaaaaaatcctga

SEQ ID NO: 275232 - DNA, 270 bp, Morganella morganii
atgaaaatcggcaaatacacggtttatgccccgtttctggcgggatgtgatgaatcagatctgtatcagcagttgcgcagtgttgaccgtatctggttatttgaccggatagccccttctgacgagaataatgagatggcagagcttatgatgggcacgatttttccggatcggtgtttccgcaaaaagcacaacagaattcacaggagcagaaatgaaaagaatcgccgtggcgctcattattttatcagcggcaggatgtgccgatga

SEQ ID NO: 275233 - DNA, 1359 bp, Morganella morganii
atgctgaatacaccgcaactcagtctggctgaaatcaataataccgtgccggttgccggggcaaaatccggttttctgcgcaagctgtttgccttttccggcccgggtgcactggtggcggtgggatatatggatcccggaaactggatcacctcgattcagggcggtgcgctgtacagttatctgctgctgtcggtgattttgctgtccagcctgattgcgatgctgttacaggcaatgtgcgcaaaactcgggatcgtcaccggccaggatctggcgcaggctacccgggcacgggtcgggccgaagctggcggcgctgttgtggatcaccacggaactggcgattatggcgaccgagattgcggaggtgatcggcagtgcggtggcactgaacctgctgttcggcattccgctgatggccggtgtgctgctgacagtactggatgtatttctgctgctggtgctgatgaaactcggtttccgcaaaatcgaagcttttgtgtttgtcctgatcttaacgattttcctgatttttgcctacgaggtgatgctgtcggacccggacatgggtgcagtattgcgcggctttattccgtcggagaaaatcttcaccgccacactggccgggcaggattccgccctgctgatcgggctggggattgtcggtgccaccgtgatgccgcacaacctctatcttcactcttctattgtgcagagccgccagtatgaccgccgcagtgaagccgggctgcgcgaggcgatccgctttgcgactattgattccaatatccagctcgggttttcatttattatcaactgtctgctgctggtgctgggtgcggcgctgtttttcggtaacgacccgtctgacctcgggcgtttcacccagctgtatgacgcgctgcagaatccgggtatcgtcggcggtatcgccagtgccacactctccgcactgttcgcggtggcgctgctcgcctccgggcagaacgccacaatcaccggtacactgaccgggcagattgtgatggaaggctttattcatctgcaactgccggtgtggctgcgccgggtgatcacccgtggcctggcggtgatcccggtgattatctgtatttacctgtggggggatcgcgaggatgtggtggaaagtctgctgatttacacccaggtgtttctgagtatcgccctgccgttctcaatgatcccgctgctgctgatgacctcgagcaaaaaaatcatgggggtgtttgtgaactcgcggctgacgatcatactcggaacggtgtccgctgtggtgctggtgatccttaatttacaattgatccgggaagtggccgggatgctgttccgtgcctga

SEQ ID NO: 275234 - DNA, 1617 bp, Morganella morganii
atgaaaatttttaccgaagcagcgaagttggttgagaagaattgcccgtttgccatggcagaaattattgaatgctcaggcagtactccccgccacagtgcgcaaatgctggtgctgggagacggaagaaccatcggtaccatcggcggcggcatggtggagcgtaaagtgattgaagaggcgatcgacgcactgcatgaagggcgctcccgtatgttccacggccggatggcccgcaacgggcagcatgctgtcggctctgactgcggcggcgcgatgtcggtgtatatcgcggttcatggtgtgcgcccgcgtctgatcctgctcggcggtggtcacgtcaaccgtgccattgcacagctggcggcttttctgaatatcgatattcatgtggcggatgtatatgccggcaatctggagccggatctgttcccgccgtcaacccgcctgtggcacgcaccttcatttaccgatgcggtgaatcagctggatccgcagccggaagattatgtgattatcgccactaacagccaggatctcgaatctctcaactgccttatcgacaagccgttaaaatacctcggattactcggcagccgccgcaaagtacagacattcactaaacaattaagcgaatccggtgtatctgatgcacagctctcccggcttcatgcgccggttggctatgatatcggcgcggaaacgccccatgaaatcgcggtcagtattctggccgagctgctgcaggttatgaatgatgccccgggcggggcaatgaaacagaacccggcagaagcccgcagagcaaaacgcgtggtgatccgcggcgcgggcgacctggcaaccggcgtggcattacgcctgtatcacagcggttttgaagtggtgatgctggatgtctgcaaaccgactgtgatccgctgtacagtctctttcgcccaggcgctctatgacggcgaaagctgcgtggaaggagtctgtgcccgctatgctcatgatattgatgaagtaaaccgctacctgaaagaaggtgctattccggtgctggcggacgaacacggcgaactgttaccggcgctgcacccggatgtggtggtggatgccattatcgccaaacgcaatgttgccggtacccaccgcaagatggcaccctgcaccattgccctcggaccgggttttgaggccggcgtggactgtgatgcggtgattgaaacccagcgcggtcatcacctcggacgggtgatcacccatggcagcgcggcaccgaataccggtattccgggcaatatcaacggcaaaaccaccgaacgcgtgttacgcgcaccgcacagcggcatgatgacgcgccatgtgaatatcggcgatctggtacacgaaggggatgttattgcccgtatcggtgacacagaaattctctcgccgatggacggcatggtacgcggtctgcttaatgaagggctgtgtgttccggaagggtttaaaatcgctgacgttgacccgcgcggcgcactggcggacttccgttcggtttctgacaaagcccgcgctatcggcggcggggtactggaggccatcatgacacggctgaataagatggacagcgcaccgaagtgctga

SEQ ID NO: 275235 - DNA, 816 bp, Morganella morganii
atgacgatgacaacggccctcaatacacagatccctgtccgaagttgcgccactatacctgaaccgctgcgccggttatgtgatacacatccgggcggccatgcaatggtgatcagtattgtcggggcaggcggcaaaaccagctgtctgttctggctggcacaggctttttctcaattagggaaaaaggtgatgatcaccaccaccacccatatgtttctgccccgcgaagggtttccggtcattctcgcctgtcatccgatccgcctgcctgatgcggtcacaaacagaggctcatttgcctgttataccggctggaacccgcagagtaataaggttcgcggcttttcctcagccgatattaacgccctggcggaacaaaatgccgttgatgttattttagccgaagctgacggagctcgcggttttggcataaaagcgccggctgagcatgaaccttgcatacctgattacagtgattgtgttattgctgtgacggatggccggcttctgggggcccccgtcgggcctgacaatgttcaccggtggtcacatttctctgccgttaccggcttaaacagcggtgatacgctggatttgggggcgataagccgcctgatccggcatccgcaggggatgtggaaatcagcaccaccggacgcattacggatctggctgataaaccgcttttctcaaaatgagaatttttcgccggatatactggcagactggatccgcggcactcccctgaacgcagtatggttcggtgccgtcagggaagatcccgcaattacacatatattgcagcgacaataa

SEQ ID NO: 275236 - DNA, 639 bp, Morganella morganii
atgccgtctcacccgacctcagccgataccgctttatcttatttatcagtccgggagccgctttgcccgcaggaaacggactgcataatgacggcggccgggctctcctcacggatgggtgagtggaaaatgatgctgccgtggggcagcggcggtgccactctgctggatgccagtctgtcgaatgcactgcgcttttgtcaccgggtcctgctggtgaccggctttcgcggcgcggaactggctgcgcgttatcagtccgtaaaacgcattcagattctgcataatccggactatgaaaccgggctgctctcctcgcagcgcctggccgcacaggcggtgaccagcgaatactgttttctcacccacggtgatgtgccatttctcacgcctgagatctggcagaccctgtggacggaacgcggtgataccgcactccttccctgttacaagcaagttccgggccaccccgtgctgctttcccgtacatgtctgctcgccgcactgtcacaaccggcgggcaacaccatgaaaaaacggctgctggccggcccccacgctttcctcaatatgcagagtgatgcggttattaccgacatcgataccccggaggcttatcagcaacattatcgcgggtaa

SEQ ID NO: 275237 - DNA, 3111 bp, Morganella morganii
atgggagatataatgcgtcccgtcccgttcggcgaacttctgaaccggatctttgaagaatataaggcgagccgttccatttttggtatcaatgaacggcagttttaccgcagagaacatcagcatcctctgatgtctgtcttcggtgaaacctgcgagacgccgatcggccctgcggccggtccccatactcagcttgctcagaatattgtggtttcctggctgaccggcggccgttttatcgaggtgaaaaccgttcagatcctcgatgaacttgagctcgaaaagccgtgtatcgatgctcaggacgaatgtttcaacaccgaatggtccaccgaatttaccctgccgaaagcccacgacgaatacctcaaagcctggtttgcccttcatttattagaagcgatttttgacccgcgcaccaaaggcgaggcgaaatccttcatctttaatatgagtgtcggttataacctggaagggattaaacagccgcgcatgcagcagtacatccacgccatgatggattcctcacagctgccggtcttcgcgaaataccgtgaggaaatgaaagcctttatttcccgtccgggcttcctgaaagagctgggtctggaggatcgcaaagcggatctgctggccatggctgaccgcgtgccgggggatttatccaaaggcgtgaccctctccaccatgcacggctgcccgccggatgagattgaggctatctgccgctacatgctggaagagaaacacatcaatacctatgtgaagctgaacccgacactgctcggcttcccgcgtgtccgtgaaattctcgacacctgcggctttgattacatcgggctgagtgaggaatcgttctctcatgacctgaaactggatcgtgccctggaaatgttacagcgcctgatggacctggcgaaggaagtggatcgcggtttcggggtcaagctgaccaacaccctcggtaccatcaataataaagggcgtctgccgggcggtgagatgtatatgtcaggccgcgccctgttcccgctctccatcaacgtagccgcgctgctctcccgtcattttgacggcaaactgccgatttcttactccggcggagccagcaagttcaatatccgcgatatttttgaatccggtatccgccctatcactatggcaactgacctgctgaaaccgggcggttatatgcgccagaccgagtgtctgcgtgagctggatgagtcagatgcgtggggcatgacgcagattgatacgggtaaactgaatgcactggcagaacgcgccgtcagcatggaatatacccagaaacactggaaatcagaccaggaaatcgacgcgggcggcccgctgccgctgaccgactgttatgtcgcaccgtgtgtgaccgcctgtgccatcaaacaggatattcctgaatatatccgcctgctgggcgaaggccgctatgcggatgcactggaactgatttaccagcgcaacgccctgcctgccatcaccggtcatatctgtgatcaccagtgccagtataactgtacccgcctggattacgaaagtgcgctgaatatccgcgaactgaaaaaagtggcggtggaaaaaggctggaaagagtacaaagcccgctggcacaaaccggccggttccggtgataaaaacccggtcgcggtgattggtgccggtcctgccggtctggctgccgggtatttcctcgcccgtgccggtcatccggtgaccgtgtttgagaaagaagccaatgccggtggtgtggtggcgaatatcatcccgcacttccgtatcccgcgtgaaactattgagcacgatattcagttcgtcgccgaccacggcgtgaaatttgagtacggctgtgacccgcgtctgaccgtcgataaactgctggagcagggtttcacctatgtgctggtcgcgatagggacagataaaaacagcggcgtgaaactcgccggtgataaccgcaacgtctataaatccctgccgttcctgcatgattacaacaacaatgcgccgctgaaaatgggcaaacatgttgccgttatcggtgccggtaacaccgccatggactgcgcccgtgccgccaaacggattgccggtgtggaagatgtgacggttatctaccgccgctctcaggcggaaatgcctgcctggccggaagagtatgaagaagcggttgaagatgatgtgaaattcatgttcctgcacaatccggagcagttcaatgctgacggcaccctgctggtccgcaccatgaaactgggtgaaccggatgagtcaggccgccgccgtccggtggcgacagaagagactgtctccctgaaaatcgacagcgtgatcaccgctatcggcgagcagcaggactgcgaagtactgtcacaaatcggcgtgccgatgggtgaggacggctggccggcagtgtaccgcaacagcggtgaaaccacccgtgccaatgtgttcctgattggtgatgtccagagcggcccgtcctctatcgtggcggctatcggtgatgcgggtcgtgcgacggatgccattctggagcgcgaaaatatcctctctcactacagcgacaaatactggctcaatgtcgatccgcaggatatcactgaccgcaaaggcgctatcgctgtgcagatggtggacagcgacgatcgcgaggcgttcgtgaaacaggaagcagagcgctgcctggaatgtaactacatctgtgcgaaatgtgtggatgtgtgcccgaaccgcgccaacatttctgtggcgattccgggcttccgtaaccgttatcagaccctgcacctggatgcgatgtgtaacgagtgcggcaactgtgcccagttctgtccgtggcagggcaagccgtacaaagacaaagtcactatcttcagtctgccggaagacttcgaaaacagcaccaacccgggcttcctggctgacggcagcacctttactgtccgcctcgatggcaaagtcagcaaattacaattgggtgctgacggggaattcagtcagattcctcaggaactggaagagatgtgccgcatcatgagccatgtccataaacactatcgttatctgttaggccgggtggagaaataa

SEQ ID NO: 275238 - DNA, 1326 bp, Morganella morganii
atgctgattctgaaaaacgccaccatcactgagttcgaaccggcggggatccgcgaagggatcgatatcgccattgagggtgacaaaattgcggctgtgggtaacgggcttcattcccgttacccgggcgcggaagtcagagagatgaaaggcaaactggtgatgccggggatcgtctgctcccataaccatttctattccggcctgtcacgcggcatcatggcgaatatcgcgccgagcccggattttatctccaccctgaaaaacctgtggtggcggctcgaccgcgcgctggatgaggaatcgctttattacagcggccttatctgctctctcgaagcgattaagagcggctgtacctcggtgattgaccatcacgcctcaccaaactatatcgccggctccctgaaaaccctgcgcgacggtttcctgaaagcaggcctgcgcggcatgacctgctacgaaaccactgaccgtaacggcggcctgaaagagctggaagccggagtggaagagaatatcgcctttgcggaacttatcgacagcgaacgcaaaagcgataaatcccgctatctggtggaagcacacatcggggcacacgcaccgtttaccgtggcggatgaaggtctgaaaatgctgcgcgaggcgattaagaaaaccggacgcggcctgcatatccatgcagcggaagacagttatgacgtctctttcagccatgacaaatacggcaaggacctgctgatccgcctgggtgagtttgatctgattgatgaaaaaaccctgatcgctcacggcctgtatctttcttccgcagatattgagctgctgaataaaaaagatggcttcctcgtccacaacgcccgttccaatatgaacaaccatgtcggctacaaccaccgcctgggtgactacaacaacgtggtactcggcacagacggtatcggctccgatatgttagaagaaatgaagtttgccttctttaaacaccgcgatgcaggcggttctatgtggccggatagcttcacccgcttcctgtggaacggtaaccgcttactggcacgcaacttcggcaaacaattcggccgcgtggaaaccgggtatcaggctgacctgactatctgtgattacacaccaccgactccgttcacgggggataacctgccgggccatctggccttcggcttaggctccaacagtgtgaacagcgtgatggtggatggtgtgatggtgtatgaaaaccgtcagttcccgttcgatatcgaaccgctctttgcagaagcacgcaaagccgcgaaaaagatgtgggcccggatggacgcactgtaa

SEQ ID NO: 275239 - DNA, 774 bp, Morganella morganii
atgatcgaacaatttttccgccctgccaccttaacgcaggcaactgagctgaaacaacgctttcaggaaaatgctgtctggtttgcaggcggcagtaaactgaatgcggtaccgaccaaaactgaccgcactgtcgctatctcactgtcactgctgccgctgaaatccatcgagtggcaggacggtattctgcgtatcggcgcggttgtcacgctggaagcgctgcgggaaagcccgctgatcccgcgtgcgctgtatgacgcactcggttttgtctattcacgccatatccgtaaccaggccaccatcggcggggagatcgccgcctgtcagcgcgagcatgcgctgctgccggtgctgctggtgctggatgctcaggtgcagcttgccagcaatgatgtgatcccgctggaaagctatctcgccgcaccggatgaccgcctgatcacgcatctgattttacaggatccattccgccgctgcgccacccgtactgtccgcgaaaccgctgacggctgggctgtggtcactgccgctgtcgcactgaccggtaataatgagcagcggatcgccgttgacggtgtcggttgcggtatcagccgtctgccgcaggttgaggcgaaaaatctcagcggggaagcgctggagaaagccgtcagtcaggccgtgaatccgaaagcggatttactgggcagtgaagaatataaacgctatatcaccggaattttagtttcagacctgctgacagactgccggcaaatgggggaggaataa

SEQ ID NO: 275240 - DNA, 2871 bp, Morganella morganii
atgaacgtccattttatacttaacggcaccccgcattcacccgattgcattccgggcgaaaacgtccgcaacattctgttcagcctgggtatgcactctgtgcgtaacagtgatgacggctatggcttcgcaggctctgacgccattttattcaacggccgtattgtcaacgcatcactgctgatcgctgcccagctggaaggcgcagtgattgaaaccgccgaatccctcggcaaatggaatgaactgagtgatgttcagcaggcgatggtcgatgtgggtgtgatccagtccggttataacgacccggcggcggccctgatcctgactgatcttattaaacgtataccggagccggatcgcgaccagattgatgatgccctttccggtctgttcagccgtgacgccggttatcagcaattctatgaagtcattgatctgctggtaaaacgccgcaaagatccgcactacaaagcggataacgccccggccttccgcgatgacctgaccgttgtcgggaaagttacaccgaaaaccgatgcggccgtgatggtgcaggcaaaaccgtgctatgtggaagaccgcattccggccaatacctgtgttatcaagatgctgcgcagcccgcacgctcacgccctgatcacccgcctggatgtcagtaaagcggaagcgctgccgggcgtggtacatgttatcacccacaaaaactgtccggatgtgtattacaccccgggcggacagagtgcgccggagccatctccgcttgaccgccgcatgttcggtaaaaaactccgtcacgtcggtgaccgagtggccgctgtggtggcagaaaacgaagctatcgcactgaaagcattatcgttaatcgaagtcgaatatgaagtgctgaaaccggttatgtctatcgatgaagccaaagctgacggcgcaccgctggtgcatgatgagccggtgatttatgttaacggcgcgccggctgacctggcagagcagaataagaacgcggcagatcgcggcgagcatttacagattaacttcccgatcggcgcgaaaccgtgcaaaaacattgctgcgggtgttcacggccatatcggggatctggataaaggctttgcggaagcggataccgttatcgagcgcacctatgaatcccgccaggttcagcagtgcccgaccgaaccgcatatctgctatacctacatgaacggcgaccgtctggtgatccacgcctccactcaggtaccgtggcacttacgccgccaggtggcgcgtattctcggcctgaaacagaacaaagtgcatgtaatcaaagagcgtgtcggcggcggcttcggctccaaacaggatatcctgctggaagaagtctgcgcgtgggcaacttatgtcaccggccgtccggtctcattccgctacacccgtgaagaagaatttatcgcgaacaccagccgccatgtggcgaaagtgaaaatcaaactgggcgcgaaaaaagacggaaaaatcaccgccatcaatatggaattcctggcgaacaccggtccttacggtaaccactcactgacggtaccgagtaacggtccggcgctgtcactgccgctctatccgtgtgataacgtcgatttccgggtgaccacttactactccaacatctgtccgaccggcgcttatcagggttacggggcaccgaaaggtaacttcgccctgaccatgatcctggctgaactggcaaaagaactgaatatcgacctgctggatctgattgaaaccaaccgcgtgcatgaaggtcaggaactgaagatcctcggcgctatcggggaagggaaaatgccgacctcggtaccgactgccgccagctgcgccctcggcccgatcctgaaaaaaggccgcgaacttatcaactgggattccccgcgtaagcaggacggcgactggaaaaccggacgcggcgtggccatcatcatgcagaaatcagggattccggatatcgaccaggcaaactgtatggtcaaactggaatctgacggcacctttatcgtccactccggtggtgcggatatcggtaccggcctcgataccgtggtcaaaaaactgaccgccgaagtgctgtgctgctgcccggatgatgtccatgttatctcaggggatactgaccacgcgctgttcgataaaggagcttatgcctcctccggcacctgcttctccggtaatgcggcgaaaatggcggcagagaatctgcgtaaaaaaatcctgttccacggtgccgcgcaaatcggtgaaccggtggaagatgtcaccctggcggcaccgggtgtggtacgcggtaagaaaggcgaaatcacgttcggggatctggcacatgcagccgaaggcggtacagggtttggtgtgctggtggcaaacgccagttatatcacaccggactttgccttcccgtacggagcaaactttgctgaagtggccgtgaacacccgtaccggtgaaattcgcctggataaattctacgcactgctcgactgcggtacgccggtgaacccggatctggccttaggtcagatttacggtgcctccatgcgtgccatcggccacagtatgtcagaagagatccgctacgatgccaaaggtgtgccgctgacccgcgacctgaaaacttacggcgcaccgaagatcggcgatatcccgcgtgatttccgtgccttcctggtgccgagtgatgaccaggtcggcccgtatggtgcgaaatccatctcggaaatcgcggttaacggtgcagcaccggctatcgccaccgcaattcatgatgcctgcggtgtctggctgcgtgaatggcacttcacgccggaaaaaatcctgcgcggtctgagcaaaatataa

SEQ ID NO: 275241 - DNA, 1317 bp, Morganella morganii
atgtcgtctgaacataccgtcaaagcggtacgcgggaagttcctggatatcacccgcgtagtgacctcgatggacgatctgcccgatgcagtccgcctgattgatgacggcctgatgctaatccggcacggaaaaatagagtggttcggacagtgggaagacgggaagcatctgatcccggaaaccgtccgtgtccgcgattacaccgggaaactggtggtgccgggctttattgatacccacgttcactatccgcagagcgagatgatcggtgctcacggcgagcagttactcgaatggctcaaccgccatgtgttcccgactgaaaagctgtatcaggatattgattacgcccgtgaaatgtcagcgttttttatcaaacaactgctgcgtaacggcaccacgaccgcactggtcttcagtactgttcacccggaatcggtcaatgccctgtttgatgcggcgagccagctcaatatgcgcctcatcaccggtaaagtgatgatggacagaaacgcgccggactacctcaccgacacaccggaaagcagctacgaagagtgtaaggcgctgatcgaacgctggcataaaaaagggcgtctgctctatgccatcaccccgcgttttgcgccgacctccagcccggaacagctggcggtgtgtcagcggctgcgcgaggagtatccggacacctgggttcacactcaccttgatgaaaacaaagcagaaattgagtgggtaaaagaactctatccggacagcaaaaactacctggatgtctatcaccactacggactgaccggcgaacgcagcgtatttgcgcactgtatccaccttgaggaagaggagtgggactgcctgcacgataccggctcagcggtggcattttgtccgacatcaaacctttatctcggcagcggcctgtttaatctgaaaaaggcgctggcgaaaaaagtgaaagtcgggattggtactgatgtcggtgccggaacgaccttcaatatgctgcagacactgagtgaagcttacaaagtgatgcagttgcagaaaacctgtttaaccgcctttgaagcgttttatctcgccaccctcggcggcgcgcattcattaggactggatagctgtatcggtaactttgccgccggcaaagaagcggattttgtggtacttgaaccgaccgcgaccccgctccagcaattgcgttatgacaactcacgcacgctggcggagaaactgtttgtgatgattgcgcttggtgatgaccgcacgatttaccggacttacatcgatggacgcctggtctatgaacggacctga

SEQ ID NO: 275242 - DNA, 1368 bp, Morganella morganii
atgtctgataatacaacaccggataactccggggcggcagcaaaaggcgcactggacgcgtactttaaaatctccgcccgcggcagcagcgtcaaacgggagattctggccggggtcaccaccttcctcgccatggtctattctgtcatcgtcgtcccttccatgctcggcaaagccgggttcccgccgggtgccatctttgttgccacctgtctggtcgccagtatcggctccatcatgatggggctgtgggcaaacctgccgatggctatcggctgtgctatctcactcaccgcctttaccgcattcagcctggtgctcgggcagcaaatcagtattccggttgcgctgggtgccgtcttcctgatgggtgtgatttttaccctgatttccgttaccggggtgcgaaactggatcctgcgaaatctgccgatggggatagcccacggcaccgggattggtatcggcctgttcctgctgctgattgccgccaacggcgtcggcctggttatcaagaacccgctggaaggtctgccggtggcaatgggggcatttacctccttcccggtcgccatgtcgctgatcgggctggcggtgattgtcagtctggaaaaaatgcacgtcccgggcgggatcctgctggtgattatcgggatttcggttatcggcctgattgttgatccgaacgtcacctatcaggggctgatcgccatgccgtcactgagtggcgcggacggtaaatctctgatattcagtatggatattatgggtgccctgcaaaccgccgttctgccgagtgtgctggcactggtaatgacagcggtgtttgatgccaccggcaccatccgtgccgtcgccggacaggccaacctgctggataaagacaatcagattatcaacggcggcaaagccctgaccgtggactccgtcagctccattatctccggtgcagtaggtgcttctccggctgcggtatatattgaatccgctgcggggactgccgcaggcggtaaaaccgggctgactgccgtgaccgtcggcgtgctgttcctgctgatcctgttcttctcaccgctctcttacctgatcccggggtatgcaaccgcaccggcactgatgtatgtcggcctgctgatgctgagtaatgtggcaaaactggatttcgacgactctgtcgatgccatgtccgggctggtgtgtgcggtctttatcgtactgacctgtaatatcgtcaccggtattatgctgggctatgtcaccctggtgattggccgtctggtggcaaaagagtggcgcaaactcaacaccggcacggtgattattgccatcgtgttagtcgcgttctatgcgggtggctgggctatctga

SEQ ID NO: 275243 - DNA, 927 bp, Morganella morganii
atgagccgccgggatgaggtacggtttgtcctggtcacacagaaaacccggctgcaggagctgattgcccgtttcaatacctggccgcaggcgaagttttacctggagcataacggcatctccgtgagtgattatctcgcggagcatgatcgctaccaggcgcagctgacagaggcgaaacgtattttgctgcaggcaggacaggtacagattccggatcgcacgctgctgccggggtatcagttttctgaccgcgatattgtggtgattatcggccgcgacgggctggtggcgaataccctgaaatacctggacggccagccggtgattgcggttaacccggacccggaacgctgggacggtatactgctgccttttgaactgccgcagctggcctctgtggtgacgcggacactgaacctggatatgtcgtcgaaagtcctgagttttgcacaggcggtcaccaatgacggacaaaaaatgctggcggtcaatgatctgtttatcgggccgaaaagtcacacatcggcccgctatattctcagtcacggcgggcaggcggaagcgcagtcctcctccggggtgattatctcaacagggctcggttcgacggggtggttacagtcggttctggccggtgcgctgggcgtgaccggcggcagttcacatccgctgcgtgccgggatcggctgggatgaaaagcgcctgcagttcagtgtgcgggagcctttcccggggcggacatccggaacctcactggttttcggggcggtcgataatacgatgacactacagcttgaatcacagatgccggaaaacggggttattttttctgacgggatagagtccgattttctgcatttcaatgcaggatgtattgtcacaatcggtattgcggatatacagggaaggctgatgtatgaataa

SEQ ID NO: 275244 - DNA, 1023 bp, Morganella morganii
atgtttaatttaaaattcttcaaagcagacccgtccacatttgttatccgttccgtgaacggtcatgtcaaaagtcagggacaagggctgagcttctggtacaacagtgcgaccacatcgatcgccgccctgccgttaagtgcgcaggaaaccccgtttattttcaacttccagacagcggatttccagagcctccgtgttcagggacaactttcctttcaggtcagcgcgccggaaaaaacggccggggtgcttaactttgtgctcaaccgggacggaaaaacctacgcgaccgacgacccgatgaaactgaatgaccggattgtccgtgcggcacaaaccattatccaggcggagatccagtccacaccgctgcgccgtgcattattgctcagccagtcgctggtggcactggtgcagtcacgtctggcacagcaggcggcgcttgaggcgctggggatcaccattctggatttctctgtcaccgcgattaccccgacaccggaaacggcccgtgcacttgaggcggaagcccgggaatccctgctgaaagaggcggatgatgcgatttatgcgcggcgcaaatcctccgttgaacaggagcgcacgatcaaagaagctgagctggagaccgatctctctgtgcagaaaaaagagcagcagatagaggaatcccggctggaaaacgaacgcacactgctgcgtgagcaggcggcaatggcacaggagcggctggcggcggagattggtgaggagcagcagcgtcagacactggtttctctcagtgcggataatcagcgcgttcagtccgatgcggatgcgtatgcgattgaaaccaaaatgaaagcgtaccgtgagttgccggtggagaatctcaaagccctggcactgagccggatggcaccggagcaactgatggcgatggcctttgaatctctggcacagaatgccggaaaaattggtgagctgaatatcgcgccggatatgttcagtcagatgatgaaaaaagggagcaaagcatga

SEQ ID NO: 275245 - DNA, 723 bp, Morganella morganii
atggatgaacaaacttacctcgccggttatcagcgccgtgactttttgtcgcccctggtgaccgttgatgctgtgcttttcacttatcacaatgaaaccctgcatgtgctgctggccgaacgcgcggaacatccggagaaaggcaaatggggattgcccggtggttttgtggatgaggcacaggataagactctggaagataccgtactgcggaaactgcgggaaaaaaccggtgtggcaccaccatacattgagcagttatgtacggtcggcaatgaccagcgggacaaacgcggctggtcagtcaccgtctgctataccgcactgattgccatgcaggcgtgtgaaaagcagattaatacagtgaattcagtcagatggataccgctggatgaagcagagaatatgacactggcgtttgatcaccagttacttatccgtcaggccagagcacggctgcgccagaaatcgctctattccgtcgtgccgggattcgccctgccggaaacctttaccctgccggaattacagcacgttcatgaaattctgattggtcagccgattcagaaaaaatcgttccgccgccgtctcgaacaggctgatttgctgattgataccggtgaaaagcgagctgaacgtggtcgcccggcggcactgtaccgcctgaaaccggcgtcggctgattaccgttttatccgtaatctggagacagacgaagaataa

SEQ ID NO: 275246 - DNA, 909 bp, Morganella morganii
atgaagattgtccggtatgctgtcagtgtggtcctgttgctgctgtctgcaggggctgcggcaggaaataaatgtgatccgctgtgggataaaaccgcgccgccgcagcatatcattgccatgaatcagcatgccgctgatatggtactggcgctggatgccgggccgcagatgctgggcgtgagttatattgatgattcagcggaggcactgaaatcagggcgctatcacggtattccggttttttcggccaaataccccgcgacagagaaactgatcgcctccggggcagattttgtcgtggccgggttttcctctgcctttatggcctcgatgggcgggcaggatgatctgcaacgtgccggtatcggcagctatctgatggcatttgcctgtgaacgtcaggcatacagcggatttgacagtattaaaattgatttgcagcgcctggggcgggtcctcgggcgggaaaaagaggcggatgccgccgttacccgtatcgatgccacgctggcacaggtaaaatccctgccgccgctgccccggaaaccggttattttttacctcgacagccagagtgacaccctgatgtcacagggaaagaaggggtttatgaccgaagttatcaccctggccgggggcgaaaatgtgtttatcgacatgccaatggcaggtattcacgtctctccggaaacactgctggataaacagccggactatattattctcgccgatgcggtctggtcaccggcagaaaagaaaaaagcctggctggcaaatcatccggcgctatcccatctcgatgcggtcaaaaacagacgttacattgttattccgttcagcggcgtttaccccaatgtaaaaagcccggatgtgttgctgacgatagcggaagccgtcaggaagtaa

SEQ ID NO: 275247 - DNA, 720 bp, Morganella morganii
atgggaaagaatgtcacactgtatctgaacacgttgcagaatgaggcgtgcttatctgcggatttctggctgtcactcagtgagaagggctttcccggtgataccgcctgctgtgcggacagcggggtggtattgcatcagctgaaagaaacggtcacaccggagacccgctgtatcctgctgatggtgctgacagacccggcgcaatccgctgaaaaactgatgtctctgacctcagcgctggagcaggaaatagcagcgcattaccagcagttacgggtattccgcagtttgtgtgtacttaccggggcggacgcggcggcagatgccaaacaggccggtgaggtgatgacggaactggaaaagcagtcgaacagccgtgagccgaaagccgaatccaacccgaactgggaaaaaacaccgccgtaccgctatcaccttttcttctgcatggggccgcgctgtgtttgtcgcggtgccaaatcactactgatgcagctgcgccatcagcttgcggcacgtaacctgtttgaaaacgaaaacggcgtgctgctgacccgttctcactgtcagtatccctgcaatcaggggccgctggtgacggtctatccggataatttatggtaccggctgaccacgccggaagagatccatctgtttgtttctgaacagatagaacagggaagagtagtgccgtcgttgctggcggagcataaataa

SEQ ID NO: 275248 - DNA, 1965 bp, Morganella morganii
atgaaatcagttaagtttgcattggcgccattatccgccatggtgctgttatcgttctgtgcacacgccggaacacagggaaataatgacgacacgattattgtccgatcttccaccattgaatccaccaccgttaatgaactggccgactacgggaataaactacaggttattacccgtgaggaaattcagcgttcagggccgtcatccgatttaaaccaggtattacagcaatatgtgccgggattatatgtctctctgggacaaggggcttacggctacggtaaatattcctttatgggcggccgcccggatgacaccttaattctgattgatggtgttcgtctgaacaaccgcctgttcggcgggatctatctcgatactctgccgctgattgccatcgaccgcatcgaagtgctgcagggggcgcagagtctctctttcggtacccaggcgatcagcggtgtgattaacattgtcaccaaaaaaccgacctcagaggtactgtccggtgaattcagtgtcggcgcggatacggacaaaggccgctacggagagggctacgtcgagaaagcgtttgataacaatatcggcaaaaccggtctgatggcgtgggtaacccgcagtaaatcagatggttaccagccatatcgcgacagtgattacaacggcacgatcggacagaaaaagcgtggttatgacgtgacatctgttggtgtccaggttacccagactattgcggataccgcacaattgcagggattctaccagtacacacaggccgatctggatatggtctccccgaaccaccaccgccaggcaatgaacaaacgtgaccatcatctggctacagtttcctttgagcatttcctgacgcaggacaccagctactcaatccgtgcacatcttaatgactggaatacccgttatgaccgcagccgctatctggcggacggctccgtggatatccagaatgacgattcttactggggattccgggactacggcgttcaggcacagatcaaatcttacctgttcggggataatgagtttgtcgtcgggacagataaccagtggtacaaaggtaaagatgaggtcatgaagatcgaaacggataccgcgaaagccaatgccctgtatttacaggtgcggccggatatccctgtcttaccggagctgaaaccaagtctcggcgtacgttatgaacgctttgaaggcggccaggatgcgactgtctggatggcaagcaccaaatatgaagtgaatgaaaagctcaatttacgcggccaggtgggaacagcatttaaactgccgaacgctgagcagttatatgtcaaagatgaaagtaagcaaaccatcggtgatgccaacctgaaagcggaaaccagtaaaaacatcgaagccggttttgactacctgacgaagtgggaaaacggtggtgcatggcagttcggtgcaacggcctacgcccgtgaaatcaatgatctgatcacgacagtgaaagtcggtaaatacgataaatgggttaacggtgacggtgaaatccgtaccaaaggcgtggtactggcgaccaaactgaactttgatgagtcctggtatgtctccggggatatcacccgtaactggctggataccaaaaacggcgcgacactcaacgatattccggagctttttacccgaggccgcatcggttatgacgccccggcaaaacagtggggtgcggaactggctgcccgctatgtgggtgaactgaaatcaggcaatgatacctacggccattacaccgtgtttgatgccagcgcgtatctgtatgtggatcatgcgcagcagcataagctcacgctgctggtggaaaacctgtttgatcgcgattacccggcgggtctgaccagcaacggcccggaaaaagtggacaacctcggtcgtccgttaaccgctgaactgcgttacacctaccgtttctga

SEQ ID NO: 275249 - DNA, 1044 bp, Morganella morganii
atgagaaaccgcaacaagattctgctgtccgcgttgatatctctctttatgaccccggcgtttgcacttccctctgtgacggttctggcaaccggcggcactattgccgggggtggggaatcgtcggtttcgtccggttatcaggccggaaaagtgggcgtcgatgccctgattgatgctgtgccggaagtcaaagcactggcagatctcagtggtgagcagattgtgaatatcggctcacaggatatgaatgacaaggtgtggctgacgctggcaaaagaaatcaaccggacctgtgataaaacggacggatttatcatcactcacggcaccgatacgctggaggagacagcgtactttcttgacctgacagtatcgtgccataaaccggttgtgctggtgggggcaatgcgtccgtccacggcactgggcgcggacggcccgctgaatctctataatgcagtagttttggcaacggataagtcggcggccgatcgcggcgttctgatggtgatgaatgacaaggtgatcagcgggcgggatgtggtcaaaatgaataccacggaagttcaggcgtttgaagcggtgaatgccggggataccggatttatccataacagcaaagtgacctactatcagccagcgccgccacggcaggccggagcggtgtttgatatcagtaaactcagcgaactgccgaaagtcggtattgtatataattatgccaatgcttcagatgcgccggtaaaagctctgcgggaagagggaagcgccgggattgtcagtgccggcgtgggtaacggcaatatgtataaaggcgtttttgatgcattagccgccgcaggcaaagagggcgtggtggttgtccgtgccagccgggtgccgaccggttatacaacacgtaacgcagaagtggatgatgacgcatacggctttgtggcttccggcagactgaacccgcaaaaagccagagtattgctgcaactggctcttacgcagaccactgatccgcagaaaattcagtcattcttcgaaaagtattaa

SEQ ID NO: 275250 - DNA, 1035 bp, Morganella morganii
atgatgaaaaaaatcacaccagatttacatcaccttaatgatgaagtgccgcatgaccgcgatctcagccctatcgtgatcgagcagaattttacacagcgttatacgcatgatgcctatgatcaggcatgtgctattaccgcctggcagcagctgtatgatcagctgacgcccggccggtttgaaggggaactgaccgaaaccctgtttgacgggcttcaggtgttccacgaatacactaatctgtctctgcgccagtcctgtatggtctggccgaatgccttctggtttggcattcccggggagcagcagaataccggttatatcggcaatcagatgctttgccggcagaaaatcgccgtgcgtccgggcggaaaagaatttgaactgagcacgccggatgattatcacattcaggggctggtgatttctcacgatatcctgaaaaagcactctgtggtgctgcaaaacccggagcggctgatgaatctgctcagcgaaaacccggctgtgggtgtgaaccccttcaaaaaagaggcgatctggcagtatatccgccatgccctctggcactccaaaattgagcaggaacgcaaccacaccgtcagccgtgtcctgagccacaacctgctgacagcattcctcggattgctggaagatgccagcaccgtggccgatgaacactacaccaaccgtgtgaactacctgaaactggtctccaaagcccgtgaatatctgtttgagaacgccaccgaaccggtgaccgtgctggaattgtgtaatgagctgtatgtcagccgccgcacgctgcaaaatgccttccagcaggtactgggcatcggcccgaatgcctatctgaaaaccatccggctgaatgcggtgcgccgtgaactggtcagcccgtattcaaaacagactaccgtcaaagacgcggcaatgcagtggggattctggcacctggggcagttcgccactgactaccagcgcctgtttaatgagaaaccgtcggagacactgagccgccgtctgatgtga

SEQ ID NO: 275251 - DNA, 555 bp, Morganella morganii
atgcacagtgcaattgcgatggtggaactgtccagtatcgccaaagggatggaagtcaccgattttatgctcaaaagtgcggaagtcaccctgctgatgggcaaaaccgtgtgtcccggcaaatatgtggtgatggtcggcggtgatgttgccgccgcacagcaggcaatgcgctgcggtgtggaaaaaggcggcgctcaggtagtggatgagtttctgctcagtaatatccacccggatgtgctcccggctatcggtggtgtgacggatgtgaatgcccgcgaagccgtcggggtggtggaaacctttagtgtcgcaacctgcattgaggcggcggattttgctgttaaagcagccggcgtcacgttaatccgtcttcatatggcgtatggtatcgggggtaaatgttactttgtgatgagcggcgatgttgcagacgtcgaaaccgccaaaaaagccgcatcacaggtcgccgcagataaaggtgcgctggtttacagcatggtcgtaccgaatcctcatcccgatttctggcagcaattggtcgctggttaa

SEQ ID NO: 275252 - DNA, 1353 bp, Morganella morganii
atgagtaatctgatgccgggtctgcatgagtgcgggcccgaaatcattcgtcagcgtgtgcaggatgcaggggttgtcggcgcgggcggggcggggttcccgacccacgtcaaactggcggcacaggcggaaatctatctggtgaatgcggctgaatgtgagccgcttttgcaggtggatcagcagctggctgtccgtgaggcggatgcgatgatccgcggtttgctgtatgcgatgcgggccaccggcgcgaaagagggcattatcgctatcaaaggcaagcatcaggcggccattgatatcctgaatgcccgcgtgccggattctgtccgtctgcatatcctgccggatgtttatccggccggtgatgaagtgatcaccatctggctggcgaccggccgccgggtcccgcctgcggcactgccgctgtctgtcggcgtggtggtcagcaatgtgcagacgctgatcaatgtcgcgtatgctgttgaacaggaacaggccgtgatacaccgtgtcctgacggtgaacggcgcggttcatcatcctgttaccgtttccgttccggtcggcaccacactgcgtgaagtgctggcgctggcaggcggatccaccatcagcaacccggcgtatatcaacggcgggccgatgatgggcaaattacagacatcccttgatgatgctgtgaccaaaaccaccggcggcttattagtcctgccggatgaccatattttaattcagcgccggactcgttcagagcgcacggtgatcaaccaggcgcgtaccgtatgtgaacagtgcggcatgtgtaccgagctctgcccgcgtcacatgatcggccacgaactgccgccgcacctgattgtccgcgcggtgggttatgagcagatctccgcgccgtcagctgttgttgcggcactgacctgctcggagtgtgcgatttgtgaagcctggtcctgcccggtggaaatttcaccgatgcgcctgaatcagatgctgaaagtgaagctgcgcgaagaagggatccgctatgaaggtgaactgcgcccggaagatccgatggctcagcaccgcatgctgccggtcaagcgcctcgtccgccgtctggaactgacggaatacatgcacaaagcgccgatgactgatgagatctacgcgccgcagcaggtgattatcccgttacgccagcatatcggtgccccggcggtaccggttgtcagcgaaggggataacgtcacggcgggcatgctgatcgccgctgtcccggaaaaagcactgggtgcgccggttcacgccagtatcagcggtgtggttcgccatattgacagcacggctgtcacgatagagaaggaataa

SEQ ID NO: 275253 - DNA, 561 bp, Morganella morganii
atgatcgattcactgggattacttgaggtatacggcctggtgtccggcattgatgcggcggatgcgatgctgaagtcggcaaatgtccgcatccttaactatgaaatggtgatcccggggatggtgacgcttgttgttgagggcgatctggcggcgtgccgtgcggcggtggatgcgggcattgcagccgcaaaccgtaccggtaaagtgatcggccacaaggtcatcggtcgtccggatggtgataccgagtggctggtcaccggtttcagcggtataccggtgaaggtaaaaccgcagtctccggcaccggtaccggtgtctgaaccggctccggcagcgacggcagtgtctgccgccgccccggatgcggatgctatgatgatctttgccgctgaagccagacaccgccacggcgtgactgccggagaagcggccatgcatttcagctgtctgatagaggacagccgcgatgtgctggaagacctgtttaaacagggcaaactgcgcaaacgcggcagccgctaccgggtaaaacaggagggaaaccgcgatgagtaa

SEQ ID NO: 275254 - DNA, 660 bp, Morganella morganii
atgcctgcattagatcttatccggccgagcgtgacagcgatgcgtcttatcgctaatgcacacgaagatttctgccgtgaactgaaattaccgaaacacatccgcagcctcggccttatcaccgcagactccgacgatgttgcttacattgccgctgacgaagccaccaaacaagctctggtggaagtggtttacggacgttccctgtatgcaggggcgtcaaactcaccatcaccgacctccggtgaagtgatgattatcctcggtggcccgaacccggcggaagtccgcgcgggtctggatgccatggtcgccaatatcgaatccggcgcggcattccagtgggcgaatgacaaagaagataccgcattcctggcgcatctggtctcccgtaccggctcttacctgtctgatggtgacaaagttaaacacggtgacccgattgcctatctggtggcaccgccgctggaagcgaccttcgggattgatgccgcactgaaagccgctgatgtgcagctggccacttatgtgccgcctccgtcagaaaccaactactcagcagccttcctgaccggcagccaggcagcatgtaaagcagcatgtgatgcctttaccgaagccgttctggatatcgcgcgcaaccctattcagcgcgcctga

SEQ ID NO: 275255 - DNA, 894 bp, Morganella morganii
atggatcaaaaacaaattaatgacatcgtacgcagcgtgatggctcagatgggacacacgggcgaaaacgtacaggcggttgccgcggcaacacaggctgtactgaatcagggtaatacgtctgttgagtccgttgagtgggatctcggttcaccggaagcaaaacagtggatcggcgtgcagaacccgcaccgtgcagaagtgttacaggaactgcgtaacagcaccggttcccgtgtctgctccggccgtgccggtgtgcgtccgcgcacccagagcctgctgcgcttcctggctgaccactcgcgctccaaagataccgtactgaaagaagtcccggcggaatgggtgaaaaaacagaacctgctggagttacagtctgaaatcacagacaaaaaccagtatctgacccgtccggatatgggccgtattctgaataaagaatccatcgaactgctgaaaaccaagtgtgtgcaggcgccggatgtgcaggtcattatctctgatggtctgtccaccgatgctatcaccgcaaactacgacgaaattctgccgccgctgatgaaaggtctggagcagtccggtctgaaagtgggcacgccgttctttgtccgttacggccgcgtgaaaattgaagaccaggccggtgaagtgctcggcgcgaaagtggttatcctgctggtgggcgaacgtccggggctgggtcagtctgaaagcctctcctgctacgcggtgtactcaccgacagtggcgggtacagtggaagcagaccgtacctgtatctcgaacattcaccgcgcagggacaccgccggtggaagccgccgctgttatcgtcgatttagccaaacgcatgctggagcagaaagcgtccggtatcaacatgaaccgttaa

SEQ ID NO: 275256 - DNA, 1362 bp, Morganella morganii
atgaaattgaaaaccacgctgtttggtcagacctaccagttccgggacgtgaaagacgttctcgcgaaagctaacgaactccgctccggggacatcctggcgggtgtcgcggcaagtaacgcccaggaacgtgtggcagcaaaacaagtgctgtctgaactgactatcgcggatgtccgcaacaaccctgtcgttccgtatgaagaagactgcgtaacccgtctgatccaggacgatatcaacgaaaccgaatacaaccgggtcaaaaactggactatcggtgagctgcgtgagcatgtcctgagcgacaccacctctctcgataacatcaatctgctgcgcaaaggcctgacctcagaagtcatcgccggggtggcaaaaatctgctccaacgcagaccttatttacggcgcgaagaaaattcctgtcgtgaaacgcgcgaataacaccatgggtctgccgggccatttcagcggccgcttacagccgaacgatacccgtgacgaagtgcagagtatcgtggcacagatttatgaaggtctctcttacggctgcggtgatgcggttatcggtgtcaacccggtaacggacgatgtggataacctcagccgcgtgctggatgctgtctacggcatcatcgataaatatgatatcccgactcagggttgtgtgctggcacacgtcaccacacagatggaagccatcaaacgcggtgcgccgggcggcctgattttccagagcatctgcggcagtgaaaaaggtctgcgtgagttcggtgttgagctggaaatgctggacgaagcccgccacgtcggtgcgcagtacaaccgtatcgccggtcctaactgcctgtactttgaaacaggacagggctccgcactgtcagcgggcgctcactacggtgctgaccaggtgaccatggaagcccgtaactacggcctggcgcgtcactatgatccgttcatggtgaacaccgttgtcggctttatcggaccggaatatctctataacgaccgccagattatccgcgccggtcttgaagatcacttcatgggcaaactgagcggtatctccatgggctgtgactgctgttacaccaaccatgcggatgcggatcagaacctcaacgaaaacctgatgatcctgctggcctctgcgggctgtaacttcatcatcggtatgccgctgggtgatgacatcatgctcaactaccagaccactgcgttccatgacatcgcaactatccgtcagttactcggcctgcgccctgcgccggaattcgaagcctggctggaaaaaatgggtctgatggaaaacgggcgtcttaccaatcgtgccggcgatccgtcactgttcttctga

SEQ ID NO: 275257 - DNA, 1419 bp, Morganella morganii
atgaaaaccctcgaactcttaagtgtcggtattgacgtgggcaccaccacaacacaggtgattttctcccgtctcgctctggtaaaccgcgcggcggtgtcacaggtgccgcgttatgagtttgtggatcgcaaaattatctggcagagcccggttctgttcacgccggtggataaagacggccacctgcgtgaggaagagctgctggcgctggtgctggatcagtacgccgccgccgggatggacccggcgacgatcgactccggtgccatcatcattaccggtgaaaccgccaaaacccgcaatgcgcgtccggcagtggtggcgttatcccagaaactcggggatttcgtggtcgccactgccgggccgcatctggaatcggtgattgccggtttcggatccggtgcccagacactctctgagcagaaaatggcgcgggtactgaacattgatatcggcggcggcacagcaaactacgtgctgttcgaagccggtcatgtgatcagctcagcctgtctgaacgtcggcggccgtctgttcgaaacagacagcagcggacgcgtcacttatgtacatgcgccgggccgtcttatcgcccgtgattgttttggtgagcagactgatccgatgtccctgacaacggcacagctgaataccattgccgatcgcatgagtgagttgctgtatgaagtgatcagcggcaacctcaccccgctcgggcgtgagctgctgatgacggacggcctgcctgcggaaagcagtttctatgcggtcacgctgtccggcggtgtcggggagtgttacagcaatccggaaagcggcaatgatttccgtttcggcgatatcgggccgctgctggcgcaggcgattcaccgcaatgcggatttcagcgcgttaccgatgcagacaccggcacagactgtccgtgccacggtgatcggcgccggtgcgcatacgctgtctctgtccggcagcaccatctggctggacagcatcacgctgccggtccgcaatattccggtggtacatccggcgctgggccgcgcggatgatgaagatctggtgaatacctggagccgtgccctgacgcagatggatcttaatccgcagcaggatctgtacgcgctggccttaccggaatcactgccgactaactacgcctcggtacaaagctgtattgatgccctggaacgctttaccaaaacatacccgaacaccatgccgctgctggtgattgcgggacaggatttcggtaaggcactgggcatgctgctgcgtccgctgatgaacggccgcgaactggctgttatcgacgaagttatcacgcacacaggcgactatatcgacatcggcacgccgttattcagcggctctgtcgtccctgttactgttaaatcactcgcatttccttcctga

SEQ ID NO: 275258 - DNA, 1266 bp, Morganella morganii
atgggcattaatgaaatcatcatgtacatcatgatgagttttatgctgatagcagccgtggatcgtatcttcagccagttcggtggctcagaggcaatcctcggtaaaatcggcctgggtaaagtcgggaaaggcattgccggttccggtgaacagttcgaagaaggctttatggcaatgggtgcactgggtctggcaatggtcggtatgaccgcgctggcaccggtgatcgccatgctgctcgggccggtgattattcctgtgtatgaaatgctgggtgcaaacccgtcagtgtttgcgggcagtattctggctatcgatatgggcggcttcttcctcgcgaaagagctggcaggcggtgatgtggcagcgtggttatattccggcgtactgctggcatccatgatgggtgcgaccatggtgttctccatccctgttgctctgggcattatcgagaagaaagatcgccgtttcctggcactcggtgtgctggcgggtatcgtgaccattccggtcggctgtattgccggtggtctggtggcgaaattctccggtgtggaaattgacggtcaggtcgtggacttcagcatgaccatgctgctggtcaatatgatcccggtgattatcgtggcggcgctggtgtgtctcggcctgaaattcattcctgagaaaatgatcaacggcttccagatcttcgccaaaatccttgttgccatcatcactatcggcctggctgccgctgtggcgcagttcactgtgggctggaacctgattcctggcctggatccgattttcatggcggaaggtgatgtgccgggcaaagtgatgcgtgccattgaagttatcggttctatctctgcggtgctgttaggggcgtacccgatggtgctgctgctgacccgctggtttgaaaaatcctttatgaagatcggcagcctgctgaaaatcaacaacatggccgcaggcggtatgatcgcgactctcgcgaacaacatcccgatgttcggcatgatgaagaaaatggatacccgcggcaaaatcatcaactgtgcgttctccgtgtccgcagccttcgcactgggtgaccacctgggctttgtggccgccaacatggcaccgatgatcttcccgatgattgcagggaaaattatcggcggtatcactgcgattttcgttgccatcatgatgatgccgaaaaatattgagcaggaagatgccgctgcggccgctgaagctgctgctgaaagcgtcgcggaggagaaataa

SEQ ID NO: 275259 - DNA, 1203 bp, Morganella morganii
atgccggataatcgtttacccgcggctgaggttcagtccgctatctatcaggcgcttgatttggtgaatgcccgtcaggtgcgtgagttttctgtcccgccgaccacattaatcggcccgggcgccgttggccgcagcggggatgttcttgcggagcgcggaattaagcacgtttttattatggtcgacggcatgctgttacaggccggcctgaccgatgtgctggagcgcaatctgagccgcagcggcattgcgtatgaaatctggccgtgcccgccgggcgagccgatggataaagatgtgttccgtaccgttgagcatctgctgagcgtgcagtgcgacggcattatcgccctcggcggcgggtcggtgctggatgcggcgaaagcagtggcagtgctggctgccaatccggatctgccgctggcggatatgatgccgggtgcggcgctcaatccgcgtctgccgtttatcgccatcccgaccactgccggtaccggctctgaagcaaccaatgtttccgtgattattactgcggaaaaccatatcaaactggtgctggcacacagccagttactgcctgatctcgccattattgatgcctgtctgacactcggtgttccgccgcatgtgacagcaatgaccggtatcgatgccttaacacatgcgattgaagcgtatgtggcgagcaacgtcacgccgctgacacaggcgctggcactgcgggcgatctccatgatcagccacgcgctgccgatcgctgtcggtcaggggcatgacatcaaagcccgtgaggacatgatgctggcttcctatatggccgggatggcgttctccaatgccggtctggggctgtgccatgcgatggcgcatcagattggcgcggcatacaacattccgcacggcaaggcgaacgccgtcatgctgccgcaggtaatgcgttttaaccgcctggtctgcaaacaggcgtacagcgaaattggtcatgcgctgactcagcggccgatgaccgacatggaggccattgaggccgtggaacaactgatcagtgacgtggaactcgcacagacgctgccatccctgggcggaaaacgtgaggatttcgatggttttgccaaagcggcattgcaggatatctgcatcaaaaccaatccgcgcgcggtcacagcggctcagataacggcgatttacgagtcagcctga

SEQ ID NO: 275260 - DNA, 846 bp, Morganella morganii
atggttcaacgcaatcaggaatggctggcatcgcgcttacagcgggcggcggaaatctgtaatcagccgcaggcgggtgatcacaaagatgcgccgttgtggctggggatcgatctcggtacctgtgatgtggtgtccatggtggtgaatgcggaaggtcagccggtcgcggtgtgcctggactgggcagatgtggtgcgcgacggtgtggtctgggatttcttcggtgcggtaaaaatcgttaataaacatctggatgtgctggaaaaacagttcggtttccggtttgaggtggcgacaacgtcattcccgccgggaacagatccgcgtatctccgtgaatgtgctggagtctgccggtctggtggtcgccagagtgctggatgaaccgtctgcggtcgctgacatgatggggctggataaagccgctgttgtggatatcggcggcggtaccaccgggattgcgattgtgcagaagggcgaagtgacccgctccggcgacgaagccaccggcggccatcatatttccctgactctggcgggcaaccagcgcattgaactggaagatgccgagcagatgaagcgtgagcgcggtgaaagcatctggccggttattcgtccggtatacgaaaaaatgacggatatcgtcgacgatcatattcgcggtgaggatgtgaccgaactgtggctggcgggcggctcctgtatgcagcccggcgtgcagccgctgtttcaggcgcgtttcccgcatcttaccgtggtactgccacagcattctatttttatgacgccgctggcgattgccgtctgcggtgtgtctcagggagaaaaccgtcatgccggataa

SEQ ID NO: 275261 - DNA, 1437 bp, Morganella morganii
atggatcagaaagaaattgagaatgtggtaaaagcggttctggccagcatgagtgcgggcactcaaccggcggctgcatcagcggcaccacagcaggcggcagcctcacagaataacggtttcggggtgtttgaatccctggatgatgccgttcttgccgccaaagaagcacagaaatcattaaaaactgttgaaatgcgtaatctctgcatcggcgcaatccgccgtgcggcaacagaacatgcccgcgaactggcggttctggctgttgaagagaccggcatgggccgcgtggaagataaactcgcgaagaacttagcacaggcaaacggcaccccgggtgttgagtgtctgcgtcctgaagtgttaaccggcgaccacggtttaaccttaatcgaaaatgcggcatggggtgttatcgcctctgtcacaccatccactaacccggcggcgacggcaatcaacaatgccatcagcatgatcgccgggggtaacagtgtgattttcgcgccgcatccggccgcgaaaaaagtctcacagcgcactattacgattctgaacgaagccattgttgccgcaggcggcccgaacaacctgctggtgactgtcgccaaaccggatatcgaaaccgcacagcgtttattcaaatatccggggatcggccttctggttgtgaccgggggggatgcggtggtcgaatccgcccgcaaacacaccaacaagcgtctgatcgcggccggtgccggtaacccgccggtggtggtggatgaaactgccgatatcgaacgcgcggcgaaagccattgttcacggtgcatcattcgataacaacatcatttgtgcggatgaaaaagtgctgatcgcggttgactgcattgcagacaaactgatcaccgaaatgcagcgtaatcacgcggtattactgacccgcgaacagagcgagaagctgatcccggttctgctgaagaatgttgatgaaaccggccacggcactgtcagccgcgactgggtcggccgtgatgcagcgaaaattgctgcggctatcggtatgactgtcccggcggatacccgtctgctgatcgcggaaaccgactgcaaacatccgtttgccgtcaccgaactgatgatgccggttctgccgatcatccgcgtgaaagatgtggatcaggcgattgacctggcggtgaaactggaaggcggctgtcaccataccgcagcgatgcactccaataacatcagcaacctgaaccgcatggcgaatgccatcgacaccagtattttcgtgaaaaacggaccgtgtattgccggtctgggactgggcggcgaaggctggacaaccatgacgatcaccacaccgaccggtgaaggtgtgacttgtgcacggacgttcgtccgtctgcgccgctgcaccatggtggattcattccgcatcgtgtaa

SEQ ID NO: 275262 - DNA, 288 bp, Morganella morganii
atgaaactggctgtcgttatcggacaaatcgtgtgcaccgtgcgtcatcccggactggaatccgacaaattactgctggtggaaatgattgaccgccaggggcgtcctaacggtgaggtggccgtcgcaaccgacagtatcggtgcgggtaatggtgaatgggtgctgatcgtcagcggaagttcggcgcggcgtgctcagagcaaagaagcgtcaccggtcgatctcagcatcatcggcattgtggatgaggccgttatggaaagtcaggtgatttttcataaataa

SEQ ID NO: 275263 - DNA, 294 bp, Morganella morganii
atggaagcattaggactgatcgaaactaagggtctggttgcattaatcgaagcatccgatgcgatggtcaaagcagcacgcgttaaattagtcggtgttaaacaaatcggcggtggtctggtaacagccatggtgcgcggtgatgttgcagcatgtaaagcagcgactgacgcaggtgcggcagcagctcagcgtatcggtgaactggtctctgtacacgttattcctcgtccgcatggcgatctggaagaagtgtttcctatcaaaatgtccggcgataaatcaatcgattaa

SEQ ID NO: 275264 - DNA, 1023 bp, Morganella morganii
atgctcattgaacgatgccgtcagcaggcaaaactgaacccgccgcgggtggttctgccggatgcgctggatgagcgcgtgatccacgccgcccgttatctgaagcaaaatggtctggcggagcccgttctgctggcaaacccgtttgcgctgcgtgatttctcgctgcgtaccggagtcattatggacggcctgagcaccattgatccggacagtgcggatgagtggcgcgcagagtttgcggatgccatcaccgcgcgcctcggcgaaaaagccccggaagatgcggatgaggccatgcgccagccgctgtggttcggtgccgccatggttgccgccggaaaagcggatttatgtgtggcggggaatatctcgtcaactgccgctgttctgcgggccgggctgaaagtgatcggcctgaagccgggcgtgaaaacattatcatctattttcatcatgttgccgccgggaacggaaggcaatgtgctgggtttcgctgattgcagtgtcgtacctcaacccacttctgcacagctggcggatattgcgctgagcagtgcggaaactttcacggcaatcaccggtgaaaccgcgcgtgtggcgatgttgtctttttcgacagcaggcagcgcgaaacatcctaatgtggcgatggtgcagcaggcagtggaaatcattcatgcacgtgccccgcagttacaggcggatggtgaactgcagttcgacgcggcatttgtgccgggcgtcgctgcgcaaaaagcccccaacagtgagttaaaggggcgggcaaatgtcatggtctttccgtcactggaagcaggcaatatcggttacaagattgcccagcgtctcggcggttaccgggcactcggcccgctgattcagggattaaatgcaccggtacatgatttgtcacgcggctgtaatgcccgcgacattattgaactggtgctggtagcacaaacacagttagctcaggccggacaacctgtccgccgcactgaagcagaaagcgttatttaa

SEQ ID NO: 275265 - DNA, 846 bp, Morganella morganii
atgacctttatcactgaagactggctgcgggataactttacgctgagcgaaggcagtgaaattcatctgcctgctgacagccggatgacaccatccgcccgtgagctgatcgaaagccgccgtttacaggtgaaatttcaggataaacaaggtcgtctgtttgtggaaacgccggatgaatccggtaaaaccgaaacggctgtccctgacctgaaagcggtacacgggttaaccagtaaggataaagcggatgtcgcggcctgcgaattatgccatcagccggtggcgaaaaagccggacacgctgacacaccttaacggccacaccatggtggcgaaaaatgatccgcgcctggcgttccgcgccgcgctggatgccaccatcgccgaagccgtctggttacagactgaatttgcacagacgccgctgaaaggctggctggcggatatccgctctgtgctcggcaatattatgcgcgccgatgcactcaatgaaccgctcggtgagcagagtattgcggatctgaacgcggatgagctgcacaagctgtctcataatccgctgaaatacctgggtcatgaccatatcgttccggatgtgagtcacggccgtgatgcggcggcgctgaatctgttgcggaccaaagtccgtgaaacggaagtcagtgcggcacgtatttatatcgattgttattttcaggtcatccgccctgacattatgcaggcgcttaaccgcctctccagtgcggtgtatgtcctgatggtgatggtggtacgcgaaggcggcgtaatgaccacacaggctctgaaacaggctctgatgcaagggggaacacatgctcattga

SEQ ID NO: 275266 - DNA, 765 bp, Morganella morganii
atgaagaaactaataacggccaatgacatccgggaagcacacgcagcgggcaaaacccgtctggatgtggtgctgaaagagagtattgtcacgccggaagcccatgttgtggctgaacaattgggctttgtgatttgtgaggtggatgccgcacagaacagcgcaccggccgccgcaccgctggccgcaaccgccggaacagaacccaatatttcatccgcagagcgtcagaaaatccgcgagtgcattatcgcgcagctgcctgacggcaatgtcaccgaaaccctgattgcacagctggtcgataaagtggtgcaggagcgtatcgcgcagattaaagcgaaagtggcggcattcaaaccggcggaagagaacactgataccccgaatacccagagctaccgcagtgtcaccggcaaaggcggcattaaagtggtcgacagcagctcggttaagttcggtaatttcgatggtgcgggtccgcaccgtgtcgggattgcggatctgatcaccgcccaggacaacagcagcatggctgccgggtttatgcagtgggaaaacgcattcttcccgtggacgctgaattacgacgaagtggatctggttctggaaggcgagctgcatgtgcgccatcagggcgaaaccatgatcgcgaaagccggggatgtgatgtttatcccgaaaggctccgcgattgagttcggcacaccatccactgtccgcttcctgtatgtggcctggccggctaactggcaggattgctga

SEQ ID NO: 275267 - DNA, 447 bp, Morganella morganii
atgaaacgaattgtgtttgtgggtgatgtgggtgcaggaaaaacgacattattcaatgcgttgcagggggattttgatcttgcgcgtaaaacacaggcgattgagttcaatgatgagggcagtgttgatacaccgggtgaatatttcagccatccccgtctctaccacgcgctgattaatacgctggcagattgtgatgtgctggtttatgttcacgcggcaaataacccggagtgccggatccctgccggattacttgatatctatccccgtatgcgccgctttgcggttatcagcaaagccgatgcaccggatgcggatgtgcccgccgtgcgcgagctgctctccacgcgggggtttgaggaaccggtacttgccatcaacagccttgatcctgatgacgtcctgaaagtgaaacagtttttggccacagccgacagccaataa

SEQ ID NO: 275268 - DNA, 336 bp, Morganella morganii
atggaaaaggaacgtatcatccaggaattcgttcccggtaaacaggtcacgctggcgcacctgattgcgcatccgggcagtgatctggcgaaaaaaatcggggttcccggtgcagaagccatcggcattatgacgctgacacccggcgaaaccgcaatgattgcgggtgatcttgccacaaaggctgctggtgtggatatcggctttcttgaccgtttcaccggtgctctcgtgatttacggctctgtcggcgcagtggaagaagcattgatccagactgttcgcgggttaagccagctcctcaattatgccgtttgtgatatcacccgcagttga

SEQ ID NO: 275269 - DNA, 336 bp, Morganella morganii
ttgattttatttgccggacacacccgctggtacagtataaaaaagattaatatccgcgagctggcaaattacccggccgtgatgtacgtacagaataacagtgattttctcagtgaaatgttttttatggaagaggcgattgtgattgaggacccggaccgggttatctatacccatgaccgaggatcgatgaataatatattatcaaatacaaacagttacacaatagggataggatgtcttatcaaggatatcatcccggaagaagaggtcctgtttatcagtctgctcaagcagtcgccggataaaaactttattcgtgacacacagaaataa

SEQ ID NO: 275270 - DNA, 711 bp, Morganella morganii
atgaaaacaacacaaactgcagctgatcttgccagagagaaacttgatgccatgctgaccgccggcattatcacgcccggtgacaagctgcccgcagaacgtccgctgacagaacaactcggtatcaaccggatgtcactgcgccaggcactgctcagcctggaaaatgacggaaaaatcttccgcaaaaaccgcagcggatggttcgctgccctgccggtcttcaattacaacccgaaatccccggcaagttttaatcaggcggcaaaagcacagggacgggtaccgtcatgggaatacaccgacaagctgacagtcactgatgcccctgcggagattaccggtaaattcggccttgcggccggtgatgcggtgtatctcattacaggatggggggcactggacgggcataaagtgttctggcaccagacctatattaacccggctgccggtccggattttaccgcaaaactggataaccactctttcgcggcaatctgggaagaaaaatataatatcaccaccacgactgccggactggcattcaaaccagcccggatgccggaaacagccagtaaggccatcggctgtaccgcgaattcccccggtatccgggtggaaaaataccgctgtgatgcggaacataatatcgttcaaatcgacattgagtactggcggtttgaatctgtttatttttttgttgagctttag

SEQ ID NO: 275271 - DNA, 2541 bp, Morganella morganii
atgagcaacgtcaagttagcaatcatcggtaacggtatggtcggccaccgctttaccgaagagcttaccgataaagcggacaccggacagttcgatatcaccgtattctgtgaagagccgcgtgtcgcttatgaccgcgtgcatctctcctcctatttttctcatcatacggcggaagaattatccctggttaaacccggtttctatgaaaaacacaatatttcggtattaatcaatgagcgggtgattaccgttaaccgtcaggaaaaggtgctgcataccaataccggccgcactgtgcattatgacaaactggtgattgcgaccggctcttatccgtggatcccgccgatcaaaggcagtgatacccgcgactgttttgtttaccggacgattgaagatctcaatgccattgaagcctgcgcccgccgcagccgtaaaggtgtggtgatcggcggcggtctgctgggactggaagccgccggagcgctgaaaaatctgggtattgaaacccatgtcattgagttttcgccggtcctgatggcggaacagcttgatacgctcggcggtgaacagctgaagcaaaaaattgaacgaatgggtgtcacggtacataccggcaaaaacactacagaaattactgcatccggcagcggagagagccgcaaagtgctgcactttgccgacggttcgtcactggagaccgattttgttgtcttctccaccgggatccgcccgcgtgaccggcttgcccgccagtgcggactggccgtagcggagcgcggcggtctggtgattaacgaccagtgtcagacatctgacccggatgtgtatgctatcggggaatgcgcgtcatggcacggcagaacttacggactggtggcaccgggctacaaaatggcacaggtggcggcggatcatctgctggggcaggagaatcagtttaccggcgcggatatgagcgcaaaactgaaattgctgggtgtggatgtcggtggtatcggcaatacacatgcaacagacgacggctgccacagttatatttatctcgatgaagccaacgaggtctataagcggctgattgtcagcgacgataataaatatctgctgggtgccgtgctggtcggggataccgaagattacggcaatctgctgcaactggcactgaaccgtatcgaactgccggaaaatccggatgttctgatcctcccggcacacgccggcagcaaaccggcaatcggcgtcgaatccctgccggacagtgcacaaatctgttcctgttttgatgtcaccaaaggagacattattcaggccattcataacggttgccagacggttgcggacatcaaagcggaaaccaaagccggtaccggctgcggcgggtgtgttccgctgatcactcaggtgctgaatgccgaactgaccaacctgggtattgaggtgaatcatcacctctgtgagcattttgcctattcacgccaggagctgtatcacctgatccgcgtggaaaaaatcactacctttgatgagctgctgggtcgctacggccagggttacggctgtgaagtgtgcaaacccactatcggttccctgctcgcctcttgccggaatgactatattctgcgcgacgatctggtgccgttacaggataccaacgataatttcctcgctaatatgcagaaggacggcacctactcggtgatccctcgctcaccgggcggcgaaatcaccccggaaggtctgctggctattggtgcggttgcgcaggaatatcatctgtataccaaaattaccggctcacagcgtattgcgatgttcggggcgcaaaagcaggatttaccggctatctgggaaaaactgatcgccgccggatttgaaaccgggcacgcctacgccaaagcactgcggatggcgaaaacctgtgtcggcacggcatggtgccggttcggggtcggtgacagcactgcgctgggtgttgagctcgagcaccgttataaaggtatccgcactccgcataaaatgaaattcggcatctcgggctgcacccgcgagtgctccgaggcgcaggggaaagatatcgggattatcgccaccgacaaaggctggaacctgtatgtctgcggaaacggcggcatgaaacctcgccacggcgatctgctgatggcagacctcgataaagagaccctgatacgctacatcgaccgctttatgatgttttacatccgcaccgccgacaaactcagccggacatcgacctggctggaaagcctcgagggcgggattgattacctgcgggatgtgattgtcagcgacaaactggggctcaatgcacaactggaacaggaactggcgcagttacgcgaaaaagtaacctgcgagtggcaggaaacggtgaacaacccgcatgcccgcaaacgcttcagtcacttcgttaacagcccgctgccggatccgaatgtgcaaatggtaagtgagcgcttacaacatcgtccggcccgcccggaagagcggattgctgtcactctgatcggggaggaataa

SEQ ID NO: 275272 - DNA, 336 bp, Morganella morganii
atgagtcaatggattacggtttgtcaggtcagtgatatcaccccgggaaccggcgtgtgtgcgctggtaaagggtgaacaggtggcgctgttccgtccttatccggacgagcgcatttttgccctgagtaatatcgatccctttgcgaaggccagcgtgttgtcgcgcggcttaattgcagagcatgacggcgcactgtggattgtcagcccgctgaaaaaacagcgcttccggctgacggacgggttatgtgcggaagacgccgcatattccgtcgcttcctttgccgttaaagtgaccgatggcacagtgagtgtttcagccgtgccgcagtaa

SEQ ID NO: 275273 - DNA, 1296 bp, Morganella morganii
atgaaatcgaagagtttaaccacttggatagtcattggtcttattgtcggtgtgattgtcggcttcagctttaatgaaatggcatctgctgaatttaataaggtctatgcaaaagatatctccattattaccgatatcttcttacgtctgattaaaatgattatcgctccattgattatatcaacactggttgttggtatcgcgaaaatgggtgatgcgaaaacgttaggtcgtgttttctccaaaacactattcttatttatctgcgcatcctttatctcaatcctgttaggtctggttattgttaacctgttccagccgggcgcaggtattaacttcgttgcggatactgccggtgcggttcagggtattgtggaacctgttcctttctccttcaaaacctttattgctcatgcgattccgaccagtatcgttgatgcaatggcgcgtaacgaaattctgcagatcgttgtattctcaatctttatgggtatcagtctctccgctatcggtgagaaaggcctgccgattgtgaatgtgctggaatccctcgtcagcctgatgctgaaattaaccggttacgtcatgctgttcgcaccactgacagtgtttgccgctatctccggtatgattgcagagcgtggtctgggtgttctggtcagcgccggtatcttcatgggtgaattctactttacactggcgatgctgtgggtgattctgattggtctggctgcggtggttgtcggccgctgtatcttccgtctgaccaaaggtatcactgaacctgcactgctggcattcaccacatcaagttctgaagcggcattcccgggtacgctggaaaaactggaagagttcggtgtttccaacaagatcgccagtttcgtactgccaatcggttactcctttaacctcgtcggttcaatggcttactgttcattcgcggttatctttatcgctcaggcatgtaatatcaccctgtctatgggtgagcaggttactatgctgctgattctgatgctgacatcgaaagggatggccggtgtaccgcgtgcgtctctggtggttatcgcggcgacactgaaccagttcaacattccggaagcgggtctgattctgctgatgggtgtggatccgttcctcgacatgggccgctctgccactaacgtaatgagtaacgccatcggtgccgctatcgtcggccgctgggaaggtgagcactacggtgaaggctgccgcggaaaaccaaaggcagttattgaacctccggtagcacaggccacaacgtcagcctga

SEQ ID NO: 275274 - DNA, 318 bp, Morganella morganii
atgaaaaagtcaattttagaattagccaaagttgtgcgttctaaaaactccggtccgtatgaaattgtgatggatattttattcaaggataaagaaacttataccgcggtaaaaaattcaaaacaatttaataaagacttagtcgctggtctgtattgtgtgaaacctgactttatcgataatattgtctggtttgacccggcgaatgctgtgaaaattgtaatgccgagacatattgtttctggtgctgtcggagataccgatgtttatggtgcccagcaacatgcgcctttattaaaaatggaatttgatatttaa

SEQ ID NO: 275275 - DNA, 1374 bp, Morganella morganii
atgtccaggacatttaaaatcctgtcccctactgccatcctggggtacggatttccggaagagagttttatgaaggcgatggaagaatcgccggatcttatcgccgtcgacgccgggtcttctgacccgggtcctcactacctcggttccggtaaagcctttaccgaccgtgccggggtaaaacgcgacctgcgttatatgctgaaagccggtgtaaaaaacaatattccggttgtcatcggtactgccggtggttcaggtgcacagcctcatctggaatggtgccgtgaaatcattctggaactggcaaaggaagaaggtctgtcattcaagatggccctgatccctgcggatgttgagaagaaaacggttcacgaagcgctggatgcaggcaaaatcacgccgctggcgttcgtgcctgaactgacgcatgaagtgatcgacgaaagtacctatatcgttgctcagatgggtgtcgagccattccaggaagcactggcagccggtgctcaggttgttctggccggccgttcatatgacccttgctgcttcgcggctctgccgattatgaaagggttcgacgaaggtctggcactgcactgcggtaagattctggagtgtgcggcaatcgcagccaccccgggttccggatccgactgtgcaatgggtattatcgacgaaaccggtttcaccctgaaagcattcaacccgatccgtaagtttacggacacctcagcagcggctcacaccctgtatgagaaatccaacccgtacgtattaccgggaccgggcggtgtgctggatctgaaagagtgtaagtttgaagatctgggtaacgggcaggttcgtgtaaccggttcacgccatgtatcaacaccgtataccgttaaactggaagctgcacgtccggtcggttaccgcaccatcactatcgccggtacgcatgaccctatcatgatcgccggtatggataagattctggtggaagtgcgtaaaagtgttgagaaaaacctcagcatcgaccctgataccgtgaagatgaatttccatctgtacggtaaaaacggtgtgatgggtgacgcagaacctgaaactgtgaccaagagttatgagctgggtattttactggatgttgttgctcctacccaggagcaggcagacagtatctgttccctggcacgttccactatgctgcactacgggtatgatggccgtatcgccaccgcgggcaacttagccttcccgttctctccgtcggatatccgtgccggtaaagtgtatgagttctccatctatcatctgatggaatacaccccggatattaaattcacattccgtatggagaatgtaacacctgaaggagtggcgaaatga

SEQ ID NO: 275276 - DNA, 1242 bp, Morganella morganii
atgaaaattaaacaggcattgttcacggcgggtaactcatccttctattttgacgaccagcaggctatcaaagacggcgcaggtcacgacggtttcgtttacaccggtaagccggtcactccgggctttaccgcagtgcgtcaggcaggtgagtgtgtgtcagtccagttaatcctggaaaacggttcagtggcaatgggtgactgtgctgcggttcagtactccggtgcgggtggtcgtgacccgttattcctggcggaaaacttcattccgttcctggaaaaacacatcaaaccgctgctggaaggccgtgatgtcagtgaattccgcaacaacgctaagttcttcgatgaactgaaagtggaaggcaaacaactgcataccgctatccgttatggtctgtcccaggctctgctggacgccaccgcgctggcaagcaaccgtctgaaagctgaagttgtgtgcgacgagtggcatctgccggttgtggctgagccaatccctctgttcggtcagagtggtgatgaccgctacaacgcagtggacaaaatgatccttaaacacgttgacgttctgccgcacggccttatcaacaacgtggatgaaaaactgggccgtcagggtgaaaaactgcgcgcttatgttgagtggctggccaagcgtatcgttgaattacgtacagaagacacttacaaaccgtctctgcacatcgacgtttacggcaccatcggtttaattttcgataaagatccgattcgttgcgcagagtacatcgcaagtctgcaggagcaggccggtgatctggaactgtacatcgaaggtccggttgacgcaggtaacaaaccagaccagatccgcctgatgaaaggcattatggatcacctgaaaaaactgggttccaaagtcaaaatcgttgctgacgaatggtgtaacacctgtcaggacatcatcgacttcacggatgccggctgctgtgacatggttcagatcaaaacccctgacctgggttctgttcacaacatcgctgacgcggtgctgtactgccagaaacacggtatggaagcataccagggcggtacctgtaacgaaaccgacgtcagtgcgcgtacctgtgtgcatatcgcgattgcgacacgtccgatgcgtatgctgatcaagccgggtatgggcttcgatgaaggtatgaacattgttcataacgaaatgaaccgcacactggctgtactgaaagcaaaagcataa

SEQ ID NO: 275277 - DNA, 1446 bp, Morganella morganii
atggaactgaagaataaaaaaattgcaatcgacgacttcatggccgagcgcaaagacgtattaaagacctgggtgacagggaaagacgtggaaaactttgaagatggcgtcaaatatcagtcgactatctctgaagataaaaattttgccaaaaaattattcgaagctgaccgcgacggcatcacattaagccagccgcgtgcaggtgttgctttaatcgaagagcacatcgagctgctgaaaaaactgcagaaagagtgtgacctgctgccgaccactatcgatgcgtatacccgtctgaaccgttatgaagaagcggcagtcggtattcagaaatctgttgaagccggtacctctaaactgaacggcctgccggtggttaaccacggtgttgcagcctgccgtcacatcactgaatccctggataaaccactgcagatccgtcacgggactccggatgcacgtctgctgtgtgaaatctccatggcgagtggtttcaccagttacgaaggcggcggtatctcctataacatcccttacgcaaaacgcgtcaccctggaaaaatctatccgtgactggcagtactgcgaccgcgtaatcggtttatatgaagaaaacggtatccgtatcaaccgcgaaccattcggtccgttaaccggtacgctgatcccgccattcatttcccacactgtggcaatcatcgaaggtctggtggcgctggagcagggcgttaaatccatcactgtcggttacggccaggtcggtaacttggtgcaggatatcgcggcaatccgctccctgcgtgaactgtctcatgaatacttccgcgcttacggctacgaagattatgagctgagtaccgtattccaccagtggatgggcggtttccctgaagatgaatcccgtgcggcagcagttatctcctggggtgcggcggttgccggtatgtccggtgcaaccaaagtaatcaccaagtctccgcatgaagcattcggtatcccgactgcggaagcgaactgccagggtctgcgtgcctccaaccagatgctgaacatggtccgcgaccagaaattcccgccgtgcaaagacgtggatctggaagtggaactgattaaacgcgaagtccgcgcagtgatgaagaaagtccttgaactgggtaacggcgacattgccgtcggtactgtccgcgcattcgaagccggtgttctggatattccgttcgctcctgcgatgtgtaactccggcaagatgatgcctatccgcgacaacaacggtgcaatccgtgtgttcgacgcaggcgcggttccgctgccggatgacgttctgtccatgcaccatgatttcgttgctgagcgtgcccgcgaagagggtcgtgaagcttcattccagatgattattgatgatattaacgcagtatctcacagtaaattagtaggaagaccataa

SEQ ID NO: 275278 - DNA, 1392 bp, Morganella morganii
atgatcaacgtctcgatagatatcggttcaacctggacaaaaggtgccgtgttcgacgtgggaagtgatgatcatattgaattaaagaattatgccctgacccccacgacgattgatcatctggcagacggatttttcactgtactgaataaaatcctcaatgtgtccgatgcgcgtcctttactggaagccgggaaagttaacattaactattcctcttccgccaaaggcgggttagcggtagcggcactgggtctggttccgacaattacccttgagtcagcaaaagtcactgctcactcagcgggcgcaaaagtgtctcagcactttgcgtacaagctcaaccggactgatatccgcaaactcgaacagacacccccggatattttcctgttcaccggcgggacggatggcggtgacgtcggatacggattacaaaacgcgaaaatgctggcggaatccgatctgaactgctccatcatttatgcgggtaaccgtgatattcaggacgatattgctgagatcctcggccataaagaactgactgtcgttaacaacattttaccgagtctggatagtccgaacccgtttgatgcgcgtaaagctatctgtgacatttttctgaaaaagattgtgaagggcaagggactggacgtcattgttgaacagaccggtgaagagccgcgtccgacaccattctctgtctttgagttagtacagcaaatccgtgacaacgttcccggctgggaagagtttgtgctgatggatatgggtggcgcaacgacggatatttattcgtcctgcaacaacagcttactgccggataccattttacacgggattccggagccgaaagtgaaacggactgtggaaggtgaccttggcatgcgtgtatcggcggtgatcgccggtgaggcaggccgcgagttagccgaagcgcagtttgtgaatcatccggagcagctggatgccttttaccgctacacccgttatgtcaatgagcaccctgattatctgcctcagacggacgaagaacgtgtttatgaccatctgttagccggtatttgtgtcgcactgggaactgaacgccatgcgggcacaaaacagcaggtgactacctgtgcaggtacggtggatttacagattggccgtgatttatcacgggtcagcaaaatcatcggtaccggcggctggttgtcgcggacagctgattttgacattaaacagtatatgcggtaccgcaaattcgataacaaaggccgtcagattctgctgccggacgaatttgagtactaccgggattcacaagggttatttcctctgttagccaacgtcgcctgccggtatccgaaagcagcagctcagaccggcgtgcagattttgaccagatag

SEQ ID NO: 275279 - DNA, 441 bp, Morganella morganii
atgcagaagcctaccattgttattggtgtaattggtgccgattgccatgccgtcggtaacaaagttttagatcgcgtgttttcccagcataattttaatgtgattaacctgggtgtcatggtcagccaggacgaatatatcgacgccgctattgaaaccggcgcacaggcaatcgttgtttcctctatttacggtcacggcgaagtggactgtttaggtatgcgtgagcgctgcatcgaacgtggtctgggcgaaattctgctgtatgtcggcggtaacctggttatcggtaaacaggaaccggctgaaatcgagaaaaaattcagcgacatgggctttaaccgcgtgttcttcccgagcacagacctggaatacgtctgcgatatcatgcaaaaagatatcgaaaaaagcccggcccgcaaagaaggaatgaccgcgtaa

SEQ ID NO: 275280 - DNA, 657 bp, Morganella morganii
atgctgcgttatccgctgttttgtgatttacagggaaagacctgtctggtcgtggggggcggggaagttgccgcccataaatgccggacactgttacaggccggggcgcatgtcaccgtcattgcacgctggttccacggcgacctcaccgctctggcgggaaacccgcatctgacgctgacagaagcggactttgatgctgtactgtggccgcagggctgctggctggcttttgccgcgacggattcaccggaggtgaatcagcaggtactggaacaggccaatgcccgccactgcttctgtaacgtcactgatgcgccggaaagtgcctcatttatctccccggccaccattgatgtcccgccggttcaggtcgcgctgacctgcggcggaaacccggtctatacacagtttctgaaacaccgtgttatgcaggcgattccggcggatgctcctgtgaaactgcgtgccgccgcacggctgcgtgagcaggtaaaagccaccaatgcttcccgcgatgccaaacggctgttctggcagaaattttttaccgacaccgctctggaacaactcctgccgctggaagacgaggaactgctgactgactacctcaattacctgctggctcagtttaccgaagagcacggaacccgctga

SEQ ID NO: 275281 - DNA, 861 bp, Morganella morganii
atggctgaggcacattgtccggcatcctgcggagaattgttgcagggatggatcctcgggggcgaaaaactggtttcctgccccatcaactggtacagctatgtctcggtggaagagggtgttccgctgggactggaacggccacgcatgcggcagatgcttgagcaggtgctgaaacatctggatattgtgccggaagccaccggcatgctgcggatcgaatatgaatccaccatccccgtcggtaaagggctggcgagcagcacggcggatattgccgctaccgcccaggcgaccgcgcgtttttacggccacgaattgtcaccggaaaccctcgcagaactgtgtgtggcggttgaaccgacagacagcactctcttttcctccctgacactgtttgaccaccagacggcacagacgcaaatatcactcggttggtcgccggatctgaaattgctgctgctggaaagtcctgaagtggtactgacagaagatttccacaaacgcgaccgccgggccacactgctggcgcgggaacctctgctggctcaggcctggaaattgttgaccaccgcctgtgaacagcaggatccgcagcgcctgggcgaagcggccactctgagtgcgatcgccagccaggatctgctgcccaaacccggcttcagcgagctgcatgcccttgcagataaaggaaagatttacggtctgaatgtcgcccacagcggcagcgtcgccgggcttatctatgatgataccctgcacgataaagattttatttatgactggatccagcggcatcagctggacagattctaccctcaggtgcatgaggtgagcatggcccgtggcggggtccgctaa

SEQ ID NO: 275282 - DNA, 1071 bp, Morganella morganii
atgagcgaacacggtggtaatgtggtagaggtggctgagctcctcggcatctcacccgcatctatcttcgatttcagtgccaatattaacccgctggggccgcccgagagggttaaagccatcatccgcgataacctgtcagttattgaacgctacccggatattgaataccgctatctgcatgccgcactggccaaaggcgccggctgtgagctgggtcaggtcattgccggtaacggggagacggaactgatttacgcgctggtgcgccatctcaatccccacagtgcattactgttaacccccggatttgccgaataccgcagagcactggaacagcagggctgcgatatcattgaacacccgctgacggaagagaatgatttccagccggatgaatccctgctggcggatattgaagcccgccgtccggactgtgtgtttatcgccacaccgaataacccgaccggcctgatgccggataccgcgctgttatataaactggtgtctctgtgcgaatcccgccatattcatctgattgtcgatgaagcgtttattgattttatgccggaaggatcaccgctgacagcgcgtctgccggaaacccgctacctttatctgctgcggtcgctgacaaaattctttgccattcccggtctgcgcctcggctatctgttgtgcggtgacagccacatcatcagtaatctgaaagcctggcgtgagccgtggactattaatggcctggccgcgctggtgggggaggtgctgctggatgatgaagcatacatccgcaaaacacaggagtttattgctgcccagcgggaatacctgtgcaatgaactacggcagtttccgctgctgaaaatccggcagccggcagcaaactatatctttatccgctgcctgaacggcgtggagctccagtccgctctgctgaaatataagctgctgatccgccgctgtcagaactacccggggctggatggctcttattaccggatcgcggtccgcagtcaggcggaaaatcgccatcttatcggcgcattaaaacaggtatttcaacatggctga

SEQ ID NO: 275283 - DNA, 786 bp, Morganella morganii
atgagcaaaggtaaagtatggctggtcggagccggacccggagatgcatcattaattaccgtaaagggacttcactgtatacgtcatgccgaagtgctggtgcatgaccgtcttgtcaatcctgagctgatcgcctgtgcaccggcggactgcaaaatcatcaatgtcggtaaaacaccgaatcaccatccggtgccgcaggaagaaatcaatgccatcctggtgaaatatgctgcagaaggcaaaaatgtggtgcgcctgaaaggcggggatccgtatgtgttcggccgcggcggcgaagaagcggaatctctggccgaaaacggcctcgatttcgaggttatcccgggcatcagttcctccatcggcgggctggcgtatgcggggatcccggtgactcaccgcgatcacgcatcaagcttccatgtggtcaccggccatatgtgtcaggggaatgagccgcagaactggaatgcactcgctgcccttaacggcacactggtgattctgatggggatgacacgtctggccgaaatcagtcagctcctgatcgacggcggaaaatcaccggataccccggctgccgtggtcatgtatgccagccagcagcgccagcaggtggttactgccaccctcgccaccttaccggaagaggctgcacgtcataaattgcatccgccggcactgatcgtcgtcggtaatgtggtgaatctgcaccagattctggcatttgccgccacacaaattgatattacgcaggaagccccattagaagctgcgtcatag

SEQ ID NO: 275284 - DNA, 1386 bp, Morganella morganii
atgaataaggcacaaaaacaggtcttcgtaatcgcgggcaccagcagcggctgcggaaaaaccaccatcaccctcgggatcatgcgggcactcagtgcacgcggattacgtgtccagccctgcaaagtcggccctgattacctcgacagcagctggcataccgccgtcaccggcgtgccttcccgtaacctggatgcctttatgctgccggagtccgttctgaccccgcagttccgtcattatatgcaggacaaagacgccggtgtgattgagggcgtgatgggcctgtatgacggcttcggtactgatccccactattgcagcactgccgcgatggcaaaacagctgaactgcccggtgattatgctggtcgacggcaaagcggtttccacctcaattgccgccacggtgatgggatttcagcattttgatccgtcactgaatatcgccggggtgctgattaaccgggttaacagtgacagccattttcagcttctgaaacacgcgattgaacattactgccatgtgccggtgatcggctacgttccggtgatgagtgatattgaactcccttcccgtcacctgggactgatcccgccgcaggagcaggcacagcagactgaacgctggcagcgcctggccgatcagatagaaaaaactgttgatgtggataagctgctttccctgacacactggcaggcaccggcagacagcataccaatacagctcgccacaccgggtgccgggcgcgggctgactgtcgccgtggcggatgatgccgcctttaacttctactatcctgataatctcgatttactgcgtcagagcggcgctgagattgtcacattcagcccgctcaatgacagcaccctgccggatccgtgccatatgatttacatcggcggcggttatccggaagtctatgctgaaaaactttcatctaacaccgcaatgcgggacgcactgctggcagcacatcagcgcggtattcctgtttatgcggagtgcggcggattgatgtatctcggtgaaaccctgacagacagcaacggcaacaccttcccgatgaccggcatcattgccggacacagcaccatgggtaaccgtctgaaacgctttggttactgcgaaggtaccgcactgacagacaccacgctggtttgtgccggtgaacgcctgcgcggccacgagtttcattattctgattttgagactgatctgccgcctgcttttgagtttatcaaagagcgcgacggcgaaatcctcaaacgctggcgcggcggttatcaggtcggaaatacctttgccggatatctgcatgtgcattttgcccggcgtccggggttattggatcactggtttgccctggcacggagtgtgttatga

SEQ ID NO: 275285 - DNA, 960 bp, Morganella morganii
atgacgttgctcagctggctggccgctttcctgctcgactggcgcctcggtgacccggagcactggccacacccgatccgctggattggcaacgccatccgcaagaccgaaggcatgatccgccgccgctgtcagagcggtgcggcactgcgccgtggcggagccgtgctgtggattgtgatcgtcggcggcacctgggcggttagttacggcgtgctggcactggcgttttatctggaaaccagtctcggctggctcgtcactgtctggatgacctacaccgtccttgccacccgctgtttgcaggatgcggcaatgcgggtgtatgacgcactgaaagcagatgatctggctgagagccgtgaaaaattatcatggatcgtcgggcgtgatacccgggagctgacaccgccgcaaatcacccgcgcggtaaccgaaacggttgcggaaaacaccacagacggcgtgatagccccgctgttcttcttattactgggtggtgcgccgctggcgatggcctataaagcggtgaatacccttgactcgatggtcggctataaaaatgaaaagtacggcgatatcgggatgttttccgcccgtgcggatgatgtcgccaactatatcccggcgcgtctgagctggctgctgttcaccttcgccgcctttgttctgaaataccgttaccgtgaggctttccgcaccgggttacgtgatcacgccaatcaccgcagcccgaacagcggctggtccgaagcgaccgtcgccggcgcactcggtgtacagctgggcgggccgaatacctatttcgggcagctggtggataaaccgtggatcggcgacaacacccacgacatcaatgcagacgatattctcagcaccatccggctgatgtgggttgcctcctccgccgcactggcgctgttcgccgtcattcatcttctggcacagtggattttgtaa

SEQ ID NO: 275286 - DNA, 630 bp, Morganella morganii
atgagttacatacagcagccgcaggaaatcgaaaaaaacagttttctgatcattgatgacattatccgcgaaacacggccggaataccgtttcgtcagtgatgatcacgcggcaattatcaaacgcgctatccataccactgccgattttgactggctggatatcctgcatttttctgacggtgtgattgaaatcctccgtgacggcattatgcgcggctgcactatttataccgataccaccatggcgctgtccgggatcaacaaaacccgcctggcgaaatacggctcagagtgccgctgctatgtcagcgacccgcgtgtggtcgctgccgccaaagagcagcagatgacccgctctatggccgccgtggatatcgccatgcaggagccgggtgagaaaatttttgtcttcggcaatgccccgaccgctctgttccgcgtgctggaacacacagaaaaaccggtggctgttgttggtgtgccggtcggttttgtcggcgcggcagaatccaaagatgcgctggcggaaagttcactgccgtgtatcgccgcgctcggccgcaaaggcggcagtaacgtggccgccgcgattataaacgccatcctttaccggatgccggaggcgtaa

SEQ ID NO: 275287 - DNA, 1158 bp, Morganella morganii
atgacgcaggaaaacaccacagtacctgacgataacggcaccggcgtcgtctggcacaaaggcaaagcactgcgcaaggggtataccaccggctcctgtgccaccgctgccgccaaagtggcggcgctgatggtgttgcgtcaggaagtgattcagcaggtttcgattgtcacgccgtcaggggtgacactgaacctgaatgtggaagatccgctgatctgcgggcaatccgccaccgctgccatccgtaaagatggtggcgacgatattgatgccacccacggcatgctgattttcgcccgtgtcgcggttaatgacagcggcattatcaccctggacggcggcgaaggtgtcggccgggtgacgaaggtcggcgttggtctgcctatcggtgacgcggcgatcaacaaaaccccgcgtcagactattgaagcggcggtccgcgaagtcatcggcccgaaccggggggcggatatcaccatttttgccccggaaggggaagagcgggcgaagaaaacctataacggccgtctcggtattctcggcggaatttccgttatcggcaccagcggcattgtcacgccgatgtcggaagagagctggaaacgctccctctccatcgagctggaaatgaaacgcgcccagggcatgacccgcgttttcctggtgccgggtaaccacggcgaacggtttgtcagcgaacagctcgggctggacggcacgtatgtcgtcactatgagtaactttgtcggctatatgctgcaggaagccacacgactgaagtttgagcaggtggtgatcctcgggcacttcggcaaactggtcaaaatcgcggcaggcattttccacacccacagccatattgcggatgcgcggatggaaaccctgatcgccaatctcgccctaatcggcgccccgctctctttattacaggaagtggacggctgcaccaccaccgaagcggcgattgaactgattaacgcacaaggctggcaggcggtctatccgcggatcgcggaaaaaatctgtgaccggattaatcagatgctgcgtttctccgatgagccgccgcactgtgatgccattctgttctcgtttgataatcaggtgctggggaccaaccggccgctcagcgccataacggagggattccgatga

SEQ ID NO: 275288 - DNA, 612 bp, Morganella morganii
atgatttatgtgacaggcgtgggccccggctcagaagcgtatctgacccggcgggcagcggatgtgatttccggggcggatattttaatcggcggtcagcgccatctggatgaatttgccgggctgaccaccgaaacccgtgtcattgatgcggatatcagcggcctgatgcactggatagcagagcgtcttgatcgccgcattgtcattctggcttccggtgatccgatgtttttcggcatcggcaaacgcatcagcgaaaccttcgcgccggagcaggttcagatagtgccgggcatcagctccgtacaatacctgtgttcccgggcgggaatggatatgaatgatatttatctcaccagcagccacaaccgcagccccgattttgactggctgctggcacatgagcgtatcggtatggtgaccgacagtaagatcggcccgaaagaaatcgccgccgaaatccttcagcgcggccagacccggcggatgatcatcggagaaaacctctccggccggaatgagcggatcaccattctcaatgcagaagaggtcagcggtgattacaacatgaatgtggtgttaattgataagcggggcagcgtggcctga

SEQ ID NO: 275289 - DNA, 570 bp, Morganella morganii
atgaaagacgaactgtttttacgcgggcagcagatcccgatgaccaaagagccggtgagagcgctcgccctgtcacggctggatttacagggtgcacagcgcctgattgatgtgggtgcgggcaccggcagtgtttcaattgaagcggcactcagccacccggcgcttgagattattgccatcgagaaaaaaccggaagccattgcgcttatcaaagagaactgccgtcacttccgctgcccgcagatccgcgtgattgacgcgtatgcaccggtggaactggctgaaaaagcagatgccgtgtttgtcggcggtaccggcggaaatctcacggagattatcgactggtctctcgatcatctgcacagcgatggcaccctggtaatgacctttatcctgctggataacctgacacaagccattgcgcacctgaaacagtgtgcggtgagcgaactggactgctgtgaattacaggccggaaatatgaccgcgctcggacacagttattattttaaaccgaataatcctacctatcttatttcctgccgtaaggaggcgcgttgtggctga

SEQ ID NO: 275290 - DNA, 780 bp, Morganella morganii
gtggctgaacagtttgaccgtcagaaagtctggtttgtcggagccggtcccggggatatcagtcttatcaccctgaaaggctaccgtattttacaacaggctgacatcgtcatttatgccggttcgcttatcaatactgatctgctggactactgcaaagacggcgtcgaaagctacgacagcgccgccatgaccctcgacgacatcatcaccgtgatggttgacggcgtgaaaagccacaaactggtggtgcgtctgcaaaccggcgacctctccctgtacggctctatccgtgaacagggcgaagtgctgtcagaacataatatcggtttcagtgcgatcccgggcgtcagttcattcctcggcgccgcagccgagctgggtgtggaatacaccgtaccggaagtgtcccagagcctgattatcacccgtatcgaagggcgcacaccgatgccgccgaaagagagtctgcgcagctttgccgctcaccagacctcaatggcgattttcctgtcagttcaggatatcaaaggcgtggtggagcaactgaccgaaggcggttatccggaaaccaccccggttgccgtggtatataaggcgacctggccggattgtcaggtgctgcgcagcacactggcggaaatcaccgtcgccgtgcgcgaagcaaaaatccgcaaaaccgcactgattctggtcggtccgttcctcggcgacgagtatcactattcaaaactgtatgatgcaggcttcagccatgagtaccgcaaagcctcgcggtaa

SEQ ID NO: 275291 - DNA, 1068 bp, Morganella morganii
atgagtaccgcaaagcctcgcggtaagcgcattgcgctgttttgcctgacaccgggcggcaaagcgctggcggaaaaaatccgcccgttgctgccggtgacctgttacaccagtgaaaaactggtgtcggacggctttgaaccgttccgtgacggctttgccgccaccttacagcaggcatttgcagagaatgacgctctgattgtcatcggcgcaaccggcattaccgtgcgggtactggcaccggtgattcaggacaaaatgagtgaccctgccgtgatcgtgatggatgagaaaggacagcatgtgatcagtctgctctccggccatctcggcggtgccaatgagctggccacctggctggcgggccggatcggcggacaggcggtgatcaccaccgcaaccgatgtcaatcaggtcaccagttttgatctgctggcgcaggagatgaatgccacgttcaccgatttccgcgccaccgtcaaaaccctgaaccagatgatggtcagcggggatcgtatcggcatctggtggcatcctgatatggcggcggagcaggataaatatgccttaccggggcttatcccggtggcggatctgcgcactctgccggaactggatgcgctggtgtgtgtcagttaccgccgcgaggaagttatgctgccggtgccggtgtataaactgatcccgcgccggattattgccggtatgggctgccgcagagataccggggcagacgaggttcagcagctgtttgctgaacagctggctgagaacaatctgctgccggaagccgtccgcgctatcggcagtattaccctgaaagcacaggagcccgccctgctggcgctcgctgcccgctatcaggtgccgtttaccgtattcagtgctgaggagcttgcccctgtggcggcacagttccccgaatcagaatttgttaaaaaaaccacgggtgtcgggagtgtatcccggccggtcgcctggctgatgagcaaaggctgtctgatagggcaaacctgtaagacccgggggatcaccattacgttaggagcagaaacagtatgttaa

SEQ ID NO: 275292 - DNA, 726 bp, Morganella morganii
atgttaaccgttataggcattggccccggcagtgaagccatgatgaccgaagaagccgtcaccgcactgaaagaagcggaagtggtcgtcgggtataaaacctatacccatctggtgaaacctctggtgggcgacaaagaagtgatcaaaaccggcatgcgcaaagagatcgaacgctgccatctggccattgagcttgcacaggaagggaaaaacgtcgcgatggtgtgcagcggtgacgccgggatttacggcatggccgggcttatcctcgaaatcgtcaccaaagagaagcgcgatattcaggtgcgtgtggtaccgggtattaccgccagtatcgccgccgcgtctctgctcggtgcgccactgatgcacgacttctgccacatcagcctgagcgacctgctcacgccgtgggaggtgattgagaaacgcatcaaagccgccgccgaagccgattttgttatctgtttctataatccgcgcagcctgggccgcgaaggtcatctggcccgtgcctttgaactgatggcaccgttcaaagccgccaccaccccaatcggcgtggtaaaagctgctgcccgtaagaaagaagagaaatggatcaccaccttcggtgagatggaatatgaccgtgtcgatatgaccagcctggtgattgtcggtaataaatccacctatatcagtgatgacctgatgatcacaccacggggatacaaactgtga

SEQ ID NO: 275293 - DNA, 789 bp, Morganella morganii
gtgaatgacggcagactgctgattttcggcgggaccagtgatgcccgtctgctctgtgagcgcctggatgcacagggagtccgttaccggctctcggtcgccaccgccgcaggccgtcagcaggcagccggattacagggtgagatccgggaaggccggatggatgcacaggcgatggcggaatactgccgctgtcacgggatccgcctgctggcggatctctcgcatccttacgccgccgtgctcagcgacactattttgcaagtacagcgtgagctgggtattccgctggtgcgttataaccgcccgagtgatattgacgcggttgataacccgctgatttacaaaacggactccattgacaatgcctgtgagattgccatgacactcggtcagcggattttgctgacaaccggcagcaaacagttggcggattatattgcccgtctgccgggaaaaaccgtgctggcgcgggtactgccgacacaggaggtgctggcgcagtgcgaatcttacgggatgaccattgaccagatttttgccctcaaagggccgttttcggcggagtttaatgaagcgttttaccgctactgcggtgcggatgtggtgatcaccaaagagtccggcacacagggcggattcagtgagaaagtcgccccctgtctggcactgggaattccctgcattgtcgtggtacgcccgcagacccgggtgtccggtgatgtgactgaattgcaggatctttgcggggtagagcagtatctgacatcccgtttttctgtctgttga

SEQ ID NO: 275294 - DNA, 783 bp, Morganella morganii
atgaaaaaagcgttattagtgattagtttcggcaccagttacgcggaaacccgtgaaaaaaatatcgaaagctgtgaaaagcagcttgcggcagcgttccccggccgtgattttttccgcgccttcacctccggcatgattatccgcaaattaaaagagcgcgataacctgcatatcaataaccctgaagaggcattacgccatctgcacgagcagggttatgaggatgtggctatccagtcactgcatgtgattaacggggacgaatacgaaaagattgtcggccaggttgaaaaataccgtccgtttttccgctatctgcgcgtgggcaaaccgctgctgagcagttttgaggattattccctcctgattgatgccctgcactctcagatgccggaactgaaagaagatgagcgcgtggtctttatgggtcacggtgccactcaccatgccttctccgcttatgcctgcctggatcacatgatgaccggcagcggcttcccggcacgtgtcggcgcggtggaaagctatccggaaatcgacctgattattaaaggcctgaaagcagaaaatgtccgcaaagtgcatctgatgccgctgatgctggtcgccggtgaccatgccatcaatgatatggcctccgatgaggaagactcctggaaaacacagctggaacaggccggaatcgaggctaccgcatggttacagggcatgggtgagaacaatatgatccgtcagatgtttgtcgaacacctggcgcagacaatggataacggggagtaa

SEQ ID NO: 275295 - DNA, 726 bp, Morganella morganii
atgagtcagcaaacagaaaaaccacagggcagactttacgctatcggcaccggtcccggtgccagtgaccttatcacggtacgcggcgcacggattatcagcgagctggatatcctgtatgccccggccggtaagaaagatgccccgagcctggcacataccattgtcgccccgtatatcaccggtaacaccacggtgaaaacctatcacttcctgatgaaagcacctcaggaagcgaaagaagcagtctgggatgatgtcgcgaaagcgattcaggaggatgtggctgacggtaaaaaagtcggctttatcacccttggggattccatgctgttcagtacctgggtttccctgctggagcgtatcggcaatcagccatggctggaagtgattccgggcgtgacctcgtttgcggctatcgcgtcacgggccgttgtcccgctggcaatggaaaaccagagccttgctgtcatgtcgtgtaccgcatctcccgaagagctggagcatgcgatcacgcatcatgaatgcattgttttaatgaaagtctatggtcgtttacaacaggtacgcgatctgctccgccgccatgatttgtttgatcatgccatcctgatggccgatgccacactggaaactgaacagtgctggcggcgcctggatgagatcgacgacgaacagacactgccttatttctcaacggtattaattaataaaacccggaaataa

SEQ ID NO: 275296 - DNA, 735 bp, Morganella morganii
atgcaacagaaactcacgcagttctcgttaaccggtgccgccgtcactattctgctgatgattgcaccccaggaagcctttgccatgcatatcatggaaggctttttaccgccgatgtgggcgattgcctggtggctgattttcctgccgttcctcggcgcggggattgtccgcctaaaagcgattgttcaggaagatgccaaccagaaagttctgctggcactgtgcggcgcctttatctttgtgctttccgcgctgaagatcccatcggtgaccggcagctgctctcaccctaccggggtggcgctggcggtgatcctgttcggaccatccgtggtggccgtgctcggctccatcgtgctgctgttccaggcattgctgctggcacacggcggcctgaccaccctcggtgccaacggcatgtcgatggcggttatcggaccgattgtcggttatctggtctggcgtttcaccatcaaactgggctggcgtaaggatgtctgcgtcttccttgtcgcggtgatagcggatttaaccacctattttgtcacctcggtgcagctcggtgttgctttcccggatccgcagatggggatgggtgcggcgatcctgaaattcatgggtatcttctgtctgacccaggtaccgattgcgattgcggaaggtctgctgacggtactggtctatgatcagctggtgaaacgtaacctggtgggtaacgaggtgcgggcatga

SEQ ID NO: 275297 - DNA, 279 bp, Morganella morganii
atgaaaaagacactgattttactgtttctgactgttgcgatttttatcatcccgttctttatcgatcatggcggtgaatacggcggttcagacgatcaggcagagcagcagatcctggccatcgcgccggattatgaaccctggtttgagtctctgtacgaaccggccagtggtgaaatcgaaagtctgctgtttacattacagggctgtctgggcactgcagtgattttctacgtgctcggttactaccgcagcggccggaaaaatgcaaagccttga

SEQ ID NO: 275298 - DNA, 678 bp, Morganella morganii
atgcaaagccttgatgcgctgagttatcaaagccgctggcgtcagcgtgacccggggatgaagtttgtcttctgggtcgtgatgatggttctggccatgagcctgccgccggcaggccaggcggctttattgctgtgtattgcggcgtttacctgctggttactgcgggtatcgccgctccgctatcttaaatggctgctgatcccgttcagttttctggcggtgggtctggtggccattattatctcatttgcccgcacaccggacactctgctgtggggcattcagattggtcagtactgggttggccttgatcccgccggtctgacaactgccaatcagaccttctggcgcagcatggcggctctcgctgccaccttctggtttatgctcaatatgccgtttgagcagctgattaaactgatgaaacgcggccacctgccgctggtgctgatcgagcagatcctgctgacctggcgctttatctttatctttctggaagaagccgccaccatttatcacgcacaatccctgcgcttcggctaccgcaacctgcgcaccggctaccgctcactggcgatgctggtcaccatgctgttttcccgcgtgatgatgcgctatcagcaaatgtccgtcgcactgaatgtgaagctctatcggggagatttccatctatga

SEQ ID NO: 275299 - DNA, 849 bp, Morganella morganii
atgaatcatcatccgcaattatcggtcagcggtctcacattccgctatcaggacgataatatcctgaaaaacctgacgatggatttcggcgcacaccaggtcaccgggattatcggtgccaacggctgcggaaaatccaccctgtttatgaacctgtccggtattctgaaaccacaggacggtcaggtgaactggcggggtaatccgctgaaatacgacaaaaaatccctgctggaattgcgtcagcatgtggtgaccgtttttcaggatccggatatgcagattttctataccgatgtggacagtgatatcgctttcgccctgcgtaatctcggcgtggaagaggatgaaatcaaacgccgcactgatgaggcactgcgtctggtggatgcgctcgccttccgagacaaaccggtgcagcatctgagcttcggccagaaaaaacgcgtggcgatcgccggggcgctggtgatgcagtcagattatctgctgctcgatgaaccgacggccgggctggatcctgccggacgtcagcagatgatcgacctgctggcccgtattgccgccgccggtaaacacattgtgatttccagccatgacattgatctgatttatcaggtctgtgatggtatttacgtgatgtcgcacggcgaagtgtgcggccacggcacgccggagtccgttttcctgcaaaaagagatgatcaccgccgccgggctggaacagccgtggctggtcaaactccactgcgaaaccggactgccgctgtgcaaaactgaacaggcgctgtttgcacaattgcagcagcagacaactcccgccgccggaacacacgaggtaatagcatga

SEQ ID NO: 275300 - DNA, 1536 bp, Morganella morganii
atgacattttcactgatgatccagggtactgcttccgatgtcggaaaaagtgtattagttgccggattctgccggattttttctcaggacggctatcactgcgcgccgttcaaatcacagaatatggcactgaactcggggatcacccgtgacggcaaagagatgggccgggcgcagatctttcaggcggaagctgccggtaccgaaccggatgtgcgcatgaacccggttctgctcaaaccgacctctgaccgcaaatcccaggttatcctgatggggaaagtcgcgcagaatatggatgcggcggagtatcacctctacaaaccacagctgaaaaccatgatccgcgatgtttacaatgacctggcttctgagcacgacatcattgtgctggaaggtgcgggcagcccggcggagatcaatctgcgcgacggcgacattgtgaatatgggcatggcggagatgatagacgcaccggtgatcctggtggcggatatcgatcgcggtggtgtgttcgcctcgatttacggcacactcgccctgctgacagacgacgaacgcgccagggtgatcggtgtgatcatcaataaattccgcggtgatgtcgccctgctgatgccgggcattaaacaaatcgaagatctgaccaacgttccggtgctcggcgtgctgccgtggttggatgtggatctggaagatgaggacggcgtggcgttacaggtcggcaaatatgacggcaaaacggaggaagtgctggatattgtggtggttcagctgccgcacattgccaacttcaccgatttcaatgcccttgccgcccagccggatgtccgtctgcgttatgaatcagacccgctgctggtcggtgaaccggatctgctgattatcccgggcagtaaaaataccctcggtgacctgctgtggctgcgtcagaaaggaatggataaagccattctcacccgccatgcacagggtacaccggttgccgggatctgcggcggctatcagatcctcggtaaacatatttatgatgatgtcgaatccggattatctgatctgccgggactggggctgctcgatatcaccacccgcttttcaccggaaaaaaataccacccaaaccgccggaaccgtgtgcggcgcactgccggggatctggtctgcctgtcagggtgaaccgatcagcggctatgagatccacatgggtgtatccgaaaccggtgcggatgccatcccgtttgcgcagatgcatgagaaaaaccgcgagccgtgcaaccatgctgacggcgcggtcagcccggatggcagtgtgatgggctcttatctgcacggcatttttgaccgcaacaatttcacccgtccgctgctcaatcagctgcggaaaaagaaagggctggagccgctgccggaaagcacgtttgactatacgctgcataaagaacagcagtttaatattctggcgcagcagatgcgggaacacctcaatattgatgaaatctgccgtctgatgcgtgcacacaaggagaaaacagcatga

SEQ ID NO: 275301 - DNA, 546 bp, Morganella morganii
atgattttaattaccggcggcgcccgcagcggtaaaagcagttttgctgaagaactggtggataaccgctgtcacagtgcgctctatatcgccacctcagtggtgacggatgatgaaatggccgcccgcgtggcacgccataaggccgatcgcccgcagcactggcgtacgtgggaaggttttaaaaacattgcccgtgctatccgttatgaacgcaaaccgggcgagggagtgatgctggaatgtatcactacgctgattgccaatctgctttatgatgcctcgggcggcgcggatccggacacgctcgattacgcgcagctggagatcggtatcaacagcgaaatcgatcatattattgatgcctgcaaagagagtgagtgcccggtgtatatcgtcaccaacgaactgggcatgagcatcacaccggaaaaccggctggcgcgtcattttgtcgatatcgccggacgtattaatcagaaactcgcccgtcaggccgaacaggtctggctggtggtctccgggatcggagttcagatcaaatga

SEQ ID NO: 275302 - DNA, 768 bp, Morganella morganii
atgaacctgaaatacctgtgggcgacactccagtttattacccgcattccggtgccgcagcgctggagtgaaggcacggagtttcagcagtacggccgcggtgttccgttttttccggtggtcggactgattgccgggatcattgcggtgctgctgacggtgtggattgcgcaggcggctcacagtccgctgatcgccgcgctgggctatgtgctggcactgatcctgatcaccggcggttttcacctcgatggtctggcagatacctgtgacggtattttctccgcccgcaaacgcgaaagaatgctggagatcatgcgcgacagccgcatcggtacgcatggctgtctggcactgatttttgccctgatggcaaaatccgctgccgcgtatgagcttctcgcctcctcttccctttccctgaccgccgctgccggattgctgatttgcgctccggtcgcaggccgcacctgtatgtcactggtaatgtacaaccagcgctacgcccgcgaaggggaaggcatgggcaatatttatatcggccgtatcactctgcgccagtttgtcatcaccctcgccaccggcgcggtgattgtcacagtagcgggcggaatgaaagccctcggcgcactgattatcaccgcctttattatttacgggctggggcgttatttccgccatcacctcggcggacaaaccggagacacactcggtgccgctgaagagtgcggggaaattatcttcctgctcgcactgttctgggtgtaa

SEQ ID NO: 275303 - DNA, 687 bp, Morganella morganii
gtgccgctgaagagtgcggggaaattatcttcctgctcgcactgttctgggtgtaagcagatgagtatcagccgctttattcttgtccgccacggggaaaccgccgggaacaaagacggtttgttctacggcagcaccgatttaccgctgacggaacacggccaccgccaggcagccagcgtggctgcttatctgcgtgatattcagatagatactatactgatcagtgaattgcagcgggcaaaacagacggcggaatacatccgcgccccggaaattcatcactatcactgcgacccgcgcctcaatgaaatgcacttcggcgagtgggaaatgcagcattacagtgaaattgccgcccgttacccggcagactgggagacctggatgaatgactggctgcatgccgcaccgaccggcggcgagccgttcccgcagtttgcggcgagggttcaggcggtggcggatgaactgcgccgggaagcatcagaaaccccggcaacccggctgattgtcgcccataagggcgtgctcgggcttatcatcacccgctggttcggcctgcccgcagaggccatgtggcagttcccctgtgaacaggacagttacagtgtggcggaatgccgcgacggatttatgacgttagctgtgtttaacgggcgatcacgctttacgcctgttgtttga

SEQ ID NO: 275304 - DNA, 1062 bp, Morganella morganii
atgacaacactgaaagacctgatccgtgcgatcccgcctctggatcacgcggccatgcaggcggcagagcagcatatcaacggattggccaagccgccgcgcagtctcggccgcctggaagatctggcggtacatcttgccggaatgccggggattgaccatccggataatctgccgaaagaaattattgtgatgtgtgcggatcacggcgtatttgcagaaggtgtcgccgtcaccccgcaggaagtcaccgctatccaggcccgcaatatccagaaacagctgaccggtgtctgcgcggttgcccgcagcaacggcaccagcgtactgccggtggatatcggcattgactgcgatcctatcgatgacatgatttccctgaaactggcacgcggctgcggcaatatcgccaaaggcccggcaatgtcttacgccgatgcggagcatctgctggtcgccagtgctgagctggtaaaacagcgggttgccgccgggatccgcgttgtcggcaccggagaactggggatcgccaataccaccccggcgtctgcgatgatcagcgtcctgtgcgggcttgatccgcatgataccgtcggcatcggtgccaatctgccgctggatcgcgtctcacacaaagaagcgatcgtcagacaggctatcgcgctgaacaagccggatcctgctgatgctattgatgtgctcgccaaagtcggcgggtatgatctgaccgggatgaccggtgtgattctgggtgccgcagcctgcggcattcctgtcgtgctcgacggctttttatcttacgcctgcgccatcgcggcctgccgtctggcccctgctgtccgggactatctgatcccgtcccacttttccgccgagaaaggcgcgggtatcgcgcttgagcagctcggtctgaaacctttcttatatttggatctccggctgggtgaaggcagcggcgcggcattagccatgtccgttattaatgccgcatgcagcatgtattgtcatatggggcatcaggccgggagtggtttcactctgccgccatcccccacccggtaa

SEQ ID NO: 275305 - DNA, 912 bp, Morganella morganii
atgcgaaagaagatcccgaaaacggatttactgatcaccttcgaagctgttgcgcagtatgagagctacacccgggcagcggaagagttatcactgacccagagcgcggttttccgtcagatagccgcgctggaagaatttctgaatgtgtcgctgtttcatcacgtccgcaaacgtattttcctcagtgatgccggaaagcattacctcgggctggtgcatgacacgctggataagctggaaaaagacacccaggatattatgtcctggcagtcatcacagcagctgtttgagctggcggtaacaccgaccttcagcacacactggctgatcccgaacctgcagagcttccgtgagaaacatccggaaatcgcattaagtatcagcgcattaaccacaccggcggactttaccagcctgaaatacgatgcggcaatcatgcgtgaggatttctgtaatccgtggccggattttgaatatctgtttgaggaagagctggtaccggtctgcagccgcatgctatggcgggatgacagtatcaaactcaccaccagccaggtgctggaagagtttactctgctgcatcagaccacccgcctcgatgcctggagtgactggttccagctctcgggcattcacaacccgaaaacccgggtcggtccgcgctttgatctgctttcgatgctgatctccgccatccgctcaaatctcggtgtggcgctgctgccgcgttttgccatccagaaagatctggaaaacggcgatctggtgatcccgtgcgacctgccgatgagcaccggcaaccgctttgttctcacctataaagaggacaagaaaggatcactcaacctgcggaaattcagtgactggatccacgagaaatcgcgggaaaaagaactgattctgtcttaa

SEQ ID NO: 275306 - DNA, 753 bp, Morganella morganii
atgaaattaaagacgatctcagcccttgcggtatccgctgttgttctggccggttgccagaatatgaattatgacaccctggcgcagtccggcggccagttatttcaggccgcaaccctgactgatgcggatatggtgaaactgactgacggcgcctgcaaagagatggacgccaaaaataacattgcaccggcctccggcaaatacgcggcacgcatggataaaatcgccaaatcattaggttccgatgtgaacggcacaaaagtgaattacaaggtctatatgaccaatgaaccgaatgcctgggcgatggcgaacggttgtgtccgtgtttacagcggtctgatggatatcatgaatgataatgaaatcgaaggtgtcctggggcatgaattaggacacgtcggcctgggtcacacccgtaaagcaatgcaggttgcctatgctgcggtggcggcaaaaaccgcggcgggttcagcgggcggtctggcgtctgaactgagtaattctcagtttgctgatatgggtatcaaactggttaatgcgcagttctcacagcgtcaggaaacggaagcggacaattattcctatgatctgctgaaaaaacgcggcatttcaacggaaggtctggccaccgggtttgaaaagcttgcgaaaatggataaagggcagaacagcatatttgattctcacccgccgaccgcagagcgcgcagagaatatccgcaaccggatcgcggcagataaacagtaa

SEQ ID NO: 275307 - DNA, 591 bp, Morganella morganii
atgagcgacgaacgttatcaacaacggcaacagaaactgaaagagcatgtcgacgggcgcgttgccgcggctcagaagaccggcggggtcctgatggtcttcaccggtaacgggaaagggaaatccactgcggcctttggtaccgcgacacgcgccgccggacacggtatgaaagtgggcgtggtgcagtttatcaaaggccagtgggaatgcggcgagcgcaatgtgctggaaaaactgggggttgagttccatatcatggccacaggttttacctggaacacgcaggacaaagaaggtgataccaaagcggcacaggaagtatggcagttcggcaaagcgatgttacaggatccgtcctatgacctcgtggtgctggatgaactgacttacatggtgcgctacggctatatcgacctggatgagattatcagttacctgaaaaatcgccctgaaaaccagagcgtgattattaccggccggggatgccaccgcgatatcactgatctggcagacaccgtcagtgagctgcgtccggttaaacacgcgtttgacagtggtattcaggcacagaaaggtatcgactggtaa

SEQ ID NO: 275308 - DNA, 1659 bp, Morganella morganii
atgacaaataaaacttttgagtatcaggagccattcccgttatcggaagataaaacggactattatctgctgagcagggagcacgtttccacggcgacatttgaaggccgtgagatgcttaaggttgaacctgaagcgctgacgctgattgctcagcaggccgtgcatgatgcctcctatttcctccgtccggcacatcagaaacaggttgcacagattttaagcgaccctgaagccagcgaaaacgacaaatatgttgcgctgcaactgctgcgcaatgcggaaatctctgccaaaggggttctgccgaactgtcaggataccggcaccgcgactatcgtggcgaaaaaaggccagcaggtatggaccggcgtcaacgatgcggaatgcttatcccgtggtatttacaacacattccagcgtgaaaacctgcgttattcacagaacgcggcgctggatatgtacacggaagtgaataccggcaccaacttaccggcacagattgatatcctggccaccgaaggcgcggaatatcacttcctgtttatcaacaaaggcggcggctctgccaataaaaccgcgctgtatcaggaaaccaaggccattctggaacatgatcgcctgaaagcattcctgatcgacaaaatgaagtatctcggtaccactgcctgcccgccgtaccatattgcattctgtatcggcggcacctcaccggaaatgaacctgaaaacggtgaaactggcttccaccaaatattatgacaatctgccggataccggtaatgagctgggacgcgccttccgcgatcgtgagctggagcaggagctgctggaagccacccgtgagtttggtttcggtgcccagttcggcggtaaatatttcgcccatgatatccgtgtgatccgtctgccgcgtcacggcggttcctgcccgattggtctggcactgtcctgttcgtctgaccgtaacatcaaaggcaagatcaccaaagacgggatctggctggagaaactggaatacaatccggcaagttacattccggaatccatgcgtaaagagaatgaaagcgacatggtcagtatcgatctgaaccggccgatggcggaaatccttaaagagctgagcaagtatccggtctccacccgcgtctctctcagcggcccgctcatcattgcccgtgatatcgcgcatatgaaactgaaagagcgtctggacagcggacagggattaccgcagtatttcaaagatcatatggtgtactatgcgggtccggcgaaaaaaccggaagacctggtctccggctctctcggcccgaccaccggtaaccggatggatccgtatgtggacttgttccagtcgcagggcggcagtatgctgatgctggcaaaaggaaaccgcagtcaggcggtgaccgattcctgtaaagcacacggcggcttctatctgggcagtatcggcggttctgcggcgattctggctcaggaatatgtgaagagcctggatattctggaataccctgaactgggtatggaagcagtctggaaaatggaagtggaagggctcccggcctttatcctggtggatgacaaagggaataacttcttcgaacaggttcagacgaaaaaatgtgagaaatgcgtggcaggccagcctgcctga

SEQ ID NO: 275309 - DNA, 1299 bp, Morganella morganii
atgaagtcaagaagtttaacgacctggattgtggctgcgttatttatcggggtgattgtcggctttgcgctgaacaaactggccacacccgggtttaatcagcaatattctgctgatatctcagtggtgacagatattttcctgcgactcattaaaatgattatcgcgccgctgatcctctccacactggtggtgggtattgcaaaaatgggggatgcgcggacacttggccgggttttctccaaaacgttgtttttatttgtctgcgcttcctttatttccatcacactcgggctggtgattgttaacctgcttaaaccgggggcgggaattaactttgtggcaccggcggatacggtggtggacaatgtggcgaccgccgcgttttcggtgaaaaactttatcgcccatctgatcccgaccagtatcgttgatgctatggcccgcaatgagattttgcagattgttgttttctctatttttatggggatagcgctttccgctatcggtgagaaaggaaagccgattctgacactgctggagtccgtggtcagcctgatgctgaaactgaccggctatgtcatgctgttcgccccgctgacggtttttgccgccatttccggtatgatcgccgagcgcgggctggtggtgctgctggaagccggtatttttatgggtgaattctacctgacgctggcaacattatggctggtgttaatcggtctggcagttctgatcgtcggacgttgtattctgcggctgaccaaagggatcgccgaaccggcactgctggcatttaccacgtccagctctgaagcggctttcccgggcacgctgaagcagctcgagcagttcggggtctccaataaaatcgccagctttgtgctgccgattggttactcctttaacctcgtcggctctatggcgtactgttcttttgcggttatctttatcgcccaggcctgtaatattgagatttccatgggggatcagattacgatgctgctgatcctgatgctgacatccaaaggtatggccggtgtgccgcgtgcttcgctggtggtgattgccgccacactgacgcagtttaatatcccggaagccgggctaattttgctgatgggagtcgatccgttcctggatatgggccgctccgcaaccaacgtgatgagtaatgcgatgggcgcggcgattgtcgggcgctgggaaggcgagcattacggggaaggttgtcacggaaaaccgccggtaacggttgttgagatggcagaaccggagccgctgaaaaaagcaggctga

SEQ ID NO: 275310 - DNA, 894 bp, Morganella morganii
atgaaaaccgcaataaaactaagtgtattaggttctgccgtattattaatggccgcctgtgacagtctggatccggacagcacgaaaaatgaattctggtacagcaacccgactgacaccacactgacctttaaagtggatgacaaagaatacaccaccgaaccgggtaccgccgcgaaactgaaattatcaccgggtatgcacagcattgagaatgcgaaaggtgagaaacagaattttatggtgtatgacaataacagcggcggcattattaacccggataatcacgtctattatatgttgtctgaagtctatgcggtggaagggcagagcgatcgctttaaaccggctctgtatgatgtcaccattaacggccatgatttacagatgccggtgcgcagcagcaatgccaccctgattgaccacaatctgtttaattgcagttaccctgtcggtacagcgttcccggaagagattaccaccagtaaccgccagtctgtcggcaatattaaaaccaaatgttttgataaggcagaactggtcgcctatatcgcatcggattacggtgagaaattacaaccggttgcgccgggtgatgagctgaaagattccgtcaatatgactttcgattacaccattccggagccgcagtttaaagatgcggaaacacagaaacaggcgctgaaattaaccggcctgctgaagcagattaatgaatctgataatccggacattcacgacaagctgaataaagagatccaccagaccaccatggatctggtatccgcgtctgccgggtccgcatcatccaatacggtggcggaaaatgaatattacaacacatttatcacgcagaccggcaatttccgcgccttcggggttctgccgaaataa

SEQ ID NO: 275311 - DNA, 651 bp, Morganella morganii
atgatgattttttttgctgtggcgctcgctcactttatcgctctgataagccccgggcctgattttttgctgattataaaaagtaccctgcgtaacagcagacgggtggcatttggtgttgtctccggtattgccactgccaatgcactgtatattgtactctgcctggccggtgcaggcgctatcctcgcccagtctgtcacgctgatgattctgattaaactgttcggcggaatattcctgctctttatcgcatggcaggcattacgggcaaaaaaatctgattaccgttttctgatggcacaagcagccgaagataaaaatacacacccgcagagtacgtttaaaaaagaatttctggtcggtttatcctccggcctgttaaatcccaagaatttattattctatttaagtctgtttactgttgtgctggaaagtcaggataattccgcactatttaaaaccggtattgcactctggatggtgatggccgtattaatctgggacagcctgattatgtatcttctgacccggcccgcagtacgtcagcaatttaaccgctgtgccttctggattgataaaaccgccggtattattctcggtctggtcggactgaaaattattcatatgacatttaaaagtacgccttaa

SEQ ID NO: 275312 - DNA, 942 bp, Morganella morganii
gtgactgctgttttacgccattgttttaccgccctgctgattatttttatttcattgcagacagctgctgccgggaaaaatatccccgctgaaataaacggccttaacggcacactgacactgccggaaaacagcacgccgaaaggtgtcatcctgtttattgccggttccggcccggtggatcgtgacggtaacagcccgggcagtcagaccgataatctgcggatgctgggcgatgccctgagtgatgccggttatatcacactgcggaccgacaaagccggaacaggtgccggtgcggcaaccgttaacccggcagatatcacctttgccggttatctgcgggattatcaggcgtggttcggttttctgcaaaagcgctatccggacaccccggtgtatctgctcggccacagtgaaggggcgttatttgccaccctgatggcgcaacagcataaaccggcggggattattctggtttcgcctgcgggatataccatcgatattatcctgaaaaaacaaatgcgtgctcagccattccccccggaggcgctgacctatatcaacgatgtgattgaccggctgaaagcagagaaaaccacggaaaatgtgccgccgtctctcaatattctgttcgccccggaattacagcgctattttatggtgtggatgcagtatgacccggcagaagagctggcaaaagtgaccgttccgggactgattattcagggaggtcatgactgtcaaatccctccggaaaacggcgaacggcatatccgtaccgcaccggataatcagtatgcggagatagcaaccatgaatcacgttctgaaagcgacccctgctgactgtgcggcggccatcggcagttacaataacccggcgctgccgctgcacccggaactggttcctgctattacccagtttttatccgcccgctga

SEQ ID NO: 275313 - DNA, 597 bp, Morganella morganii
atgaacacactgaccaggcaacaggaaaattcagcacggacgcggcaggcattactgatttcggcacacggactttttattgaaaaaggctatcagtccgtttcgattgatgaaattgcccgtgatgcacgggtcacaaaaggggcgttttatcaccactttaaaagtaaaagtgacctgctgctgcattgctatgaaatacaattacagaaaatcagtacggtcctcggtaatattgaacctctggcggataaatgggaagagctgcggcttgttgtccgctgttttatgaattacctggaacagcattaccgggaactgattccggttcaggaagtgatgccggtcgccgggtggtatgaatttgaggatattaaccggcgctatatcagcagcagggtggataatattatcagtcagctgaaagcagagcagacaatcaaagaatatgattcttatctgttatgcagtctgatccacggttttatgatgcatattaccctgaatattcaaagtctcgcggaattccccggctttaaagatgatttcaccgagatttataataatttcctgcagacactgaaaaaaataccctga

SEQ ID NO: 275314 - DNA, 939 bp, Morganella morganii
atgcttaaacatgataacactgtcacggaatccgttgattccgtaccggtcaccgataaagaacaggatgacaatgccttttatctcagcgtgataaaagacattattttgtggattgagcataatctggataagtcactgcagctggatgtggtggctgaacgttccggctataccaaatggtattttcagcggatttttaaacggtttaccgatatgacgctggcaggctatatccgccgccgccgtctgacaaaagccgccaccgaattacggctgaccacacaaaacatcggtgatatcgcgctgaagtatcagtttgattcccagcaatcttttgcccggcgttttaaggcagtctttaatatgaccccgacagaataccgccgtaatcccaactgggacctgacgacgctgcaaccgccggtacagctggaaatgccgccgctgccgcagccggacattattatgctggacgatatccctgttatggaaaaaggctatcactatcagtcaccgctggatgaaatcggccatctgcatgaagaaatccgcagcacattctggcgggattttatccgtctggtatcaccggatcttccgtactgctatgtccgcaccgcctatgacagcacggcggataaaccagagtccattgctatcggctatcatatcggggtggatgatccggcctttattgtgcaggaaaacgaattaacaccggcggtgatcaactgcgggaaatatgcaaaattccattttgacggcttattccgtgattaccgggatttcaccttcaatgtgtatttatacgcgttaccgcagctcggattatgccgccgtccggggctggatatcgaaaaatatacccgtactgaagcgataacggataatccgcctgagcatctgtgcgtggattattatattccggtgctttag

SEQ ID NO: 275315 - DNA, 1473 bp, Morganella morganii
atgaataaactgactccgctgaaacctgttccttccttaattgctgttcttattacctgtattatctggtttgctgttccggtacctgatggcgttgatccgaatgcctggcatctgctcgcactgtttgtcggcacaattgccgcgattatcggtaaagcgatgcctatcggtgcggtttccatggtggcgattgcccttgtcgccctgaccggcgtgaccaatcccggctccgcaaaagccgcgctcggtgatgccctgagcggcttttccaatgagcttatctggcttatcggggtttctattatggtctccctcagcctgaataaaaccgggctcggggcacgtatcgggtattattttatttccctgttcggcaagaaaacactgggtatcgcttattccctggcgatcgccgaaaccgtactggcgccggttacccccagcaataccgcacgcggcggcgggatcatccacccgattatgcgttctatcgctgacagtttcggttcaaaagccgatgacggcaccagcggtaaaatcggccgctatctggcgctggtgaattacaataccaatcctatcacgtccgcgatgtttatcaccgccaccgcacctaacccgctgattgtcaccctgattgtacaggaggccggcaaaggggcggagctgagctggtctatgtgggcagtggcggcgtttttaccggcgttgatctcactgatcaccatgccgctggtgatctattttctctataaaccggagatcaccgccaccccggatgccccggagtttgcccgtgagcggatccgcgaactcggcccggtatctctgccggaaaaaatcacactcggggtctttatcctgctgctggcactgtgggccggtgtgcccggctggctgttcggcagtgaatataatgtgaacccgaccaccgccgcctttatcggccttgccgccctgttgtgcagcggtgtgctgagctgggatgatgtgctgaaaaataaaggagcgtgggataccgtcgtctggttcgccgcgctggtgatgatggcatcattcctcggcaaactcgggctgataaaatgggtctccctgacggtcggcggcggtattgaccatctcgggatcggctggacaggcgggatgctgttgctggtgctgttttatgtctattcccactacttttttgccagcaccaccgcgcatatcaccgccatgttcgcggcgttttatgccgccggactggcactcggcgcaccgccgatgctgctcgggctgaccctggcgttttcctcctcgctgatgatgtcactgactcattacggcaccggcaccgccccgattattttcggttcgggttacaccaccctcggggaatggtggaaaaccggtctggtaatgagcatcgtcaacctggttatctggattatcgccggcagcctatggtggaaactcctcggatactggtaa

SEQ ID NO: 275316 - DNA, 480 bp, Morganella morganii
atgaccacagaagcacccgtttttttactcgccccgcctcagcgtgatgaagcggattatctgacccgcctgtgcctgcgctcaaaacagcactggggatacgatgaaacctttatggcggcctgccgggatgaactgaccattacctccgctgattttgaccgctccgggctgatgaccgcacgagtcaacggtaaaattgccggtgttgtgcagctgaccatcaaccgccaggaagagaacggaaagctctccaaactctttgtgcatccggattatctgcatcaggggataggcagcgcactgtaccagtgggcggtttcctccgcccggacacagtgtatcagcgccctcctggtggatgctgatcccaacgcggaagcattttatatccgccagggggctatccgcatcggggaaacgccgtcggaatccctgcccggccgggttctcccgctgttactgatttcgctgcactga

SEQ ID NO: 275317 - DNA, 1152 bp, Morganella morganii
atgcgggtatttatcagcgcaattgtcatgatggtgctgttatccggctgtcagagccggatggccgatgtgccggttatccgcgccgatctttctccgcagaccacggaagcggcagctcaggcatttccggttgcagataaggtgagtgcgcctgacgggctgcgcccctgctgcgcattcggctatgatttgcaggcaaaactggggccggttccggtgccgttttacaccatcggtaatgtgctgaccgccgctgatttgggggagcatgtctacaatgacagcttctggtttggcgcggcggaagttatcggcctgagtaatgaaaacctcggactcatctattcccgccacggcggatttattgatatcgcccatgtgcgggatactgctgattacacttattacctgttcacacaaatctatccgcatcttggtaatgcccggatgctgatactgtcggatgaactgttttcccgccgtattcagttccgccattttatcccgccgcaggatccggcagagcgctataccctgagtgtgtatctggccgcgcggctcgcgtttcgcctggcggcatggcatgaaattgcccagtggtatggttatcattcagttcccggttttccggaagaaatttcggcatttaccccggaagatctctattccaatctgctgggggcgcgccttgccatcacattgctgttacaggggcacggcgggtcagtggctgattttaaccggggaatggagggtattcttccgcaggcgctggcacaactggatgcacagcccgcagccgttacccggcagatgtttgacagtattgacgggctctggtgggataagcggcagcgggtgccggagaagtttctggtgctgcgccgggattacagtgtgagtgatgaccggctgccgtcacagccagagcaggaaaccgccgccggggcgcggctggcactacctcagtactaccggggctggtctctggcggatttggcgtcatttgaactgtggcggacaaacaatcccggaaatctgccggtgacggcactgccgtttaccgaaaaggattttccggcactgacagcacatgcggcggctgaggataaaaaaacagcgccggtgtcagtgcagcgaaatcagtaa

SEQ ID NO: 275318 - DNA, 1143 bp, Morganella morganii
atgatatttcgttattgtgctgccggtctggcatttaccggtctggtggcagttcacacagcaaaggccggttatttgccctcacgggaacaaattgatgatgcactatccggactgggcagtaataatcagtttgaccgcagtaaaatcatcgactggggggtattacccgggccgttttatacccctgaactggaagccggtatcggggtggctctggtcggcatgtatcaggcggatagtgatcctgacagtaaaatatccaccttatccctcagtggttttgcctcctcaaccggggctttcgggctgaatctgaataattacacgtatctggataatgataactggcgtttttatctcagcggcacaatcaataatgtaccgacggattactggggaaaagggtatcaggccgggcgcatcaaagatcatttcggtgagtataagtcacagcaactgcggctgacgccgtcactgctgcgccgggtggcagataatacctatctcgggttaggctgggatttcagtacactgaatgttgcctcgccggataagccgttcagccgctatatggatgagcatgattatgaccggcatgcggtcagttccggagtcagtgccaccttcagttatgacagccgggatttcctgccgaatgcccgtcaggggcaggcactggatctgcgttatacctggtatgcgccgtcactcggcagtgatacgcggtttaataccacagaaattcagtacaactattattatccgctggatgataaaacggtgctggcgtttgataattacgcacgctttgcgtccggagatgtgccgtgggatcagtattcccggctgggtaacgggcggcagatgcgcggctattatgacggccgctatcaggataatcatgtctttgcctcacaggtggagtaccggcgcaagctgaactggcggcacggtattgtgctctgggccggcggcgggacgatgagtgagagtgcgcgtcatctcggcgggggacattggctgccgaacgtcggtgtgggatatcgttttgaattcaaaccacggatgaatgtgcggctcgattttggtgtcgggaaacagagcagcggcttttatttccaggtcggggaagcattctga

SEQ ID NO: 275319 - DNA, 996 bp, Morganella morganii
atgttacgcccgatacttcatactctgattattaccggctcactgagcctgagcgctttttcttatgctgacggcccgactctgtcgttaagtgtcagccagtccggcggctctgcacaaaatgacgatggctctcctgatgccacccgtccttctgaatccaaatcccgtattctgcctatctggggcgatgaagcccgcgcccggggttatgatcttcccgagccgtttggtgtcggttataactacatgaatctgcggcaggatattgttgtggataagattggttttattatgccgaaaaaccccgcgacggcgagtgcattatccgtcgatgccggtcatacccgggaaaaaagtgaaacccatatgctgaaagtggattcctggatttttccgtttatgaatgtgtacggtttatacggaaaaaccaaagggaaatctcacactattctgaatggcggagcctttgacctcgggtttacaaaactgccgctggaattcctggaaggacagccgttcgatttggatttcgaaggtaaaacttatggtgccggtatgacactggccggcggatataaccagtttttcggaacagttgatcttaactacactaaaaccaatctggatatcctcgacggggatattaaagcactggtaatttctccgcgtgtcggttatgaatttgtattttcgccattaattgccggtcagggaaataccaaattacaggtctggacaggggcaatgtatcaggatattactcagcgttttaaaggggatatcagcggactgagtttaccgggacaattccaggattttgtgaatgcgctggatgatccgggaatgaaatttgatgttgaacagcatcttgctcataaatggagcaacctggtcggtgcccggttagaagtgacccgtaatttcaatataatctcagaggtgggctttaataaccgtaacagtttctttatttccggagaattccgtttttaa

SEQ ID NO: 275320 - DNA, 453 bp, Morganella morganii
atggctcgtaaaataaaattatcaatggttgataaaggtgagttaggtcatattcatccgcagacagttatctataatgttggcaataaaatctttcttctggcggaagatgaaagcggaaattacctgatcaaacctgtctataaaaacggtacactgggcgaaactatcctcagtaaaaactttggtcgttattatgatattgttcaggcagcgtatgatgatgttactgctaccacttatatttgtatggttgacttagccggaaaaaatatggaagtttattcaaccacaacactcggactggtcagtacatttgaatttgaatatgctatcgatgatcgtaaaaactttaacttcttctttatcgaaggacgcctgtattattaccatggtggtgaagacgcaaatggtaaatataccgtaatgtctgttaaagtgaccgaagaataa

SEQ ID NO: 275321 - DNA, 2562 bp, Morganella morganii
atgactgacaaccaaaacttcgactcccatacacccatgatgcagcagtacttccggctcaaggcacagcatccggatattctgatgttttaccggatgggtgacttctatgaactgttctttgatgatgccaaacgggcagcacagttactggatatttcactgaccaaacgcggccagaccgccggtcagccgatcccgatggccggtgtgccgcatcatgcggttgagggatacctggcaaaactggttcagctcggggaatccgttgccatctgtgagcaaatcggcgatccggccaccagcaaaggcccggtggagcgcaaagtgatccgtatcgtcacgcccggaacggtcagtgatgaagcgctgttacaggagcgtcaggataacctgctcgccgctgtctggcaggatgcgcgcgggtttggttacgccactctggatatcacatccggccgtttccgtatcctccagttagaggataaagacgcgatggccgctgaattacagcgtacccgcccggcagaactgctctatccggaagatatggcggatttcgccattattcagaatcagaaagggctgcgacgccgcccgttatgggaatttgaactcgaaacggcccgtcagcagctgacattgcagttcggcacccgggatttgcacggcttcggcgtggaaaatgctccgctggccttacaggccgccggatgtcttctgcaatatgtcaaagatacccagcgcacctcgctgccgcatatccgcagtgtgaccctggagaatctgcaggaaaatgtgattctggatgcggccacgcgccgcaatctggaaattacccagaacctcagcggcggcaccgaaaatactctgtcgtccgtactggatctgtgtgtaaccccgatgggcagccggatgctcaagcgctggctgcactccccgctgcgtgacagatccgtgctcgccaaccgccagcaggcgattgccgcgctgatggaaatcagcccggatttacagccggttctgcgtcagattggcgatctggaacgggtactggcacgcctggcactgcgcaccgcccgtccgcgtgacctggcgcggatgcgccatgctttttcacagtatccggatattcaggcacagctgagtgcggtatctgatccgtatattcagacactgcaacagcgtattggtcagtttgatgaattacaggctctgctggagcgggccgttgttgaagcgccgccggtactggtgcgtgacggcggtgtgattgccccgggctacaatgaagaactggatgagtggcgagccctggcggacggcgccagtgattatctcgacaaactggaaatccgcgagcgggaaaaactcggcatcgatacactgaaagtcgggtttaatggtgtccacggttactatattcaggtcagccgcggacagagccatctggtgccgatccattacgtccgccgccagacgctgaaaaacgccgagcgctacatcatcccggaactaaaagagtatgaagataaggttctgacctccaagagcaaagcgctggcgattgaaaaagccctttatgatgagctgtttgatttattgctcccgcacctggaagccctgcagctcagctcggacactcttgcggagctggatgtgctcaccaacctggccgagcgcgcggaaaccctcaattacacctgcccgcaactgacggataaagtcggtattcagatcaccggcggtcgccatcctgttgtcgagcatgtgctgacagagccgtttatcgccaacccgctgacaatgtcaccacagcgccgcctgctaatcatcaccggcccgaacatgggcggtaaaagtacctatatgcgccagacggcgcttatcgcgctgctcgcgtatatcggcagttttgtgccggcagaaaaagcagttatcggcccggtggatcggattttcacccgcgtcggagcatcggatgatctggcttccggccgctccacctttatggtggaaatgaccgaaaccgccaatatcctgcataacgccacagagcagagcctggtactgatggatgaaatcgggcgcggcacatccacctatgatggtttatctctggcctgggcctgtgcggaaagcctggcaaaccgaatcaaagcactgacactgttcgccacccactatttcgagctgaccacgctgccggaaaaactggaaggcgtggccaatatccatctggatgcagttgaacacggcgacaccattgcctttatgcacagcgtgcaggatggcgcagccagtaaaagttacggccttgcggtcgcactgctcgccggggtaccgcgtgatgtgattaaacgcgcgaaacagaagttgcgcgagctggaatcgctctcactgaatgcgacggcaagccatgtggaaacaccgcaaatgaatctgctggatgcgccggaggagctgtctccggcactggatacgctggcgggaattaacccggattcactgacaccgcgtcaggcactggactggctctaccgcctgaaagagatgctctga

SEQ ID NO: 275322 - DNA, 993 bp, Morganella morganii
atgagccgtaatccactgaacgctaacgagttatacgacgaagattttgccgccgggcaggatgaagatgaagagctgtttgatgagaaacagctggcagaggagagcgaatctgacgatcccggcccggacattgagttcgtgcagagtgtcagccagcgtgtcctggatgctactcagctttatcttggtgagataggcttttcaccgctgctcagcgcagaagaagaagtcttttttgcacggcgcgccctgcggggtgatactgcagcgcgccagcgtatgattgaaagtaacctccgtctggtggttaaaatctcccgccgctacagtaatcgcgggctggcgctgcttgatctgatcgaagaggggaacctcgggctgatccgcgcggtggagaaatttgatccggagaaaggcttccgtttttctacctatgcaacatggtggatccgtcagactattgaacgggctatcatgaaccagacccgcaccatccgtctccctatccatattgtcaaagaactgaatgtctatctgcgcaccgcccgtgagctggcacaaaagctggatcatgagccgacagcggaagaaattgccgaacagctggataaaccggtggatgatgtcagccgtatgctgcgtctgaatgagcgcatcacttcagtggatgtcccggtgggtgcggattcagataaagcactgctggatattctgtctgacgaaaatgatgtcacaccggaaaaccggttgcaggataacaacatgcagcagagcattgtgaaatggctgtatgagctgaatccgaagcagcgggaggtgctggcgcgtcgttttggtttgctcggctatgaggcggaaacactggaagatgtcggacgtgaaattggtttaacccgcgaacgtgtgcggcagattcaggtggaaggtttacgccgcctgaaagatatcctgcacaaccacggattgtgtgagaattcgctgtttaactga

SEQ ID NO: 275323 - DNA, 1122 bp, Morganella morganii
atgaactcaagaaaccctatgaaaacaatacgatgggttgcaattgggtcactgatgagcacggttctggccggatgctcaacgccgtatcatgccgcaccaatcagcagtgtggacgaaagcagcagtgcaccggtaatgacagcaggcaatgataacaacagtacatctgtgtccacaccgatgccggtacgtcctcagctcagttccgccaataacacacagccggtcagccggagtgtgcagcagccgcgctctgccaatgtgcagaccagcagcgatggccggattcagtacaaccgtaattatgatgcgatcccgaaaggcagttacagcggaaatacctatacggttcagcgcggtgatacattattttacatcgcttatatctccggatctgacttccgcgaactggcatcacagaacaatattcctgagccgtacagcctgaacgaagggcaggtgattcggttaagcaacggcggcggcaacaatgttgcaccggtcagcagcggcactcaggtcgcaacaaataggaatactccgcaaaacggggtggttgattctcaaccaactaatgcgtattctgaatcttcaggcgctaaaccggccggcggtaagatgctctcatctcaggtcaccgcacaggcaaaagcgaataacggcactgccgccgccacagcggcaacaaccgcagccgttaccgctccggcaacaacaaccagcgcgcctgtcgccgtaaatagtggttcctttaaatggggctggccagcggaaggcaaagtcatttccaactacacaggacctaccagcggtaaccggggtattgatatcggtggtacacgtggacagcctgtttttgcttcagcgccgggtaaagtggtgtataccggtaatgcgttacgcggctacggtaatctggtcatcatcaagcacaatgatgatttcctgacagcctacgcgcataacgattccatcctggttaaagatcagcaggacgtcgcagctggtcagaaaattgccacgatgggcagcagcggaaccacatctgtaagattacactttgaaattcgttacaagggaaaatcagtcaacccgctgcagtacttaccgcagcgataa

SEQ ID NO: 275324 - DNA, 627 bp, Morganella morganii
atgatccgccgggtggtacaggatctgattacacagttacgtcaggccgggatccgcgatgaacgtctgttacaggcgatggcggctgtcccgcgggagaattttgtcgatgaggcgctgacacacaaagcttacgacaataccgcgctgccgattggctacgggcagaccatctcccagccgtttatggtggctaagatgacagaactgctggatccggctccgcaggcgcatgtgctggaaatcggcaccggctccggctatcagacggcgatcctcgcacaccttgcggcgcatgtttactctgttgagcgggttaagggactgcagtggcatgccaaacgccgctttaaacagcttgatctgcataatatttccacccgtcacggtgacggctgggaaggctggccgtcccgtggtccgtttgacggcattattgtcaccgccgccgccagtgatatcccgccggcgctgctcagtcagctggcggataacggccggatggtgataccggtgggggaacagcagcagatgctcaaactgatccgccgccggggcaatgattttcatacccaatcgatcggaacagtccggtttgttcccctgattcacggcgaactgggataa

SEQ ID NO: 275325 - DNA, 762 bp, Morganella morganii
gtgctgcgaattctggtgagtaatgatgacggcgtcagtgcgccggggatccggacattgtctgaggcgctgcggcgtacttaccatgtgcaggtggttgcacctgatcgcaaccgcagcggggcatccaacgcgctgacactcgatcgtccgctgcgcacggtagtgcatgagaacggcgatattgcgctggtggaaggcacgccgacggattgtgtctatatcggtgctaatctgctgatgcgcccgcgcccggaaattgtggtttccgggattaactgcggcccgaacctcggggatgatgtgatctactccggtacggttgctgcggcaatggaaggacgtcacctgggattaccggcgattgcggtctccctgaacggcgaaacccattatgatacagcagcggaaattacctgccgtctgctgaccatgctgcagcaagtgccgttacgagccggtaatattctgaacgtgaatgtgccggatgttccgctcagtgagatcaaaggaatgaaagtgacccgctgcggaacgcgccgggcaccggatgtggtctacacacagatggatccgaaaggaaatccgctgtactggctcggccctccgggggaaaaactggacaccgggccggataccgatttcgcggcggtggatgcaggttatgtctctgtcacgccgctgcatgttgatctgaccgcctacagcgtgcaggaaaaattagaagactggttacaaaaagcaggggtgatacaggaatga

SEQ ID NO: 275326 - DNA, 396 bp, Morganella morganii
atggctatctgtaaacgaatcacagctaccctgttcaccgcactgactgccggactgcttctggtatcagaggcattcgcgctgtcacctcaggaagagaccagagtggaaaacctgctgaccgctgtcgggaagcaggaacagctgatttttatccgcaacggcagtgagcataatgccgccgacgcggaatcacatctgcgcctgaaattaagcaaaacgaaaaaacgtctgagcaccgcagaacagtttgtggataaagtggcatccggctcctccatcagcggtaagccgtatcaggtaaaactgccgggcaaagatccggtagatgccaaagtgtatctgactgaattgctggcggaaacagacaaagccgccgcagcaaaacctgaataa

SEQ ID NO: 275327 - DNA, 1047 bp, Morganella morganii
atgagtctcccggtcagttatttccacggtaaaccggcagccaccggggtgctgaaagcacagccggaagattttctggtgcaggaagatttggggtttgaacctgacggtgacggcgagcatgtgatggtccgtatccgcaaaaccggctgtaacacgcggtttgtggcggaagaactggccaaatttgcgaaaatcgctgcccgtgctgtcagctacgccgggctgaaagatcgccatgcggtcaccgaacaatggttctgcctgcagatgccgggaaaagaaacaccggatttcacacagatgtcgcttgaaggctgcgaagttctggcggttaaccgccagaagcgcaaattgcggatcggcgcactgaaaggtaatcagtttactattgtgctgcgccggatcagcgatcgcgctgcaacagaacagcgtctgcagcagattgcacagtccggggtgccgaattatttcggtgagcagcgtttcggacgcaacggtcagaatctgcatttcgcacagcgctgggctgacggcgaaatcagtgtgaaagagcgcagcaaacgcggtttttatctctccgctgcccgcagtgcgatgtttaatgcggtggcagatgcccgcctgacacagcagcttcaggcaaccgcattgcagggtgatgcggtacagctcgccgggcgcggcagctggtttgcggttcaggcagatgaactggcggatgtgcagcagcgtctggataaccgtgaactgcgcattacagcgccgttaccgggtaagggcgatttgggctctcaggatgcggcactgacctttgaaacaaagcaactggcaccgtggcactctctgtggcagctggcggcaaaagagggggcggataatgcccgccgtgcgctgatgctgtatccggagcatttcacatctgaatggatggatgatgaaaccgtccgtttatccttcttcctgccggccggcagttttgccaccagtgttatccgcgaaattattgagctggaagcggatcaggccgcggaattcagtgaataa

SEQ ID NO: 275328 - DNA, 483 bp, Morganella morganii
atgatgagaatcggacacggttttgatgttcatgccttcggcggcgaaggcccgattgtgattgcgggcgtccgcattccttacgaacagggattactggcgcattccgacggtgatgtcgccctgcatgcggccaccgatgcattgctgggtgcggcggcgctgggggatatcggcaaattattccctgatactgatccggcctataaaggcgcggacagccgtgtgctgctgcgtgaggcattccgccgtattcaggaaaaaggctacagactgggcaacctggatgtcaccattatcgcccaggcaccgaaaatgctgccgcatatcccgcagatgcgggtgaatctggcagaagatttgcagtgtcatatggatgatatcaatgtgaaagccactaccaccgagaaactcggtttcaccggccgaaaagaagggatcgcctgtgaggcggtggcgctgcttgtgaaggctgaagcatga

SEQ ID NO: 275329 - DNA, 777 bp, Morganella morganii
atgaccggcgcacaaccggcaccggacttatccggtatttctgatgatgctccggtcacggcgctgatcccggccgccggaatcggtacccgcatgcagtgcgaatgccccaagcaatacctgatcattgccggaaaaaccattctggaacataccctcgctattctgctggaacacccgcgcatcacacaggtagtcgtggcgctgcatccgcaggatacggttttcagtacattaccggtcgcgcggcatccccgtatccgcactgtcaccggcggtggtgagcgggcatattctgtcctggccggtctcgattatctcgctgatcatactccggaaaacagctgggtgctggtacatgacgctgcgcgtccctgtctgcagctgacggatctgaaccggctgctggccgtgatgtcagacacgcaaaccggtaaccgcgtgcagggggcgattctggcctcaccggtgcgcgacaccatgaagcggggtgtggcatctgccggatataccggtattgatcacactgttgagcgcacacagttgtggcacgccctgaccccgcaatttttcccgcttcatctgctgcgcacctgtctgcagcaggcactgtctcagcaggcggtgatcactgatgaagcttccgcgctggagttttgcggctatcagccgttgctggtgcccggccgcgcggacaatattaaagtcacacagccggaagatctcgcacttgccgggttctacctgtccaataacaataaggaacagacaacatga

SEQ ID NO: 275330 - DNA, 315 bp, Morganella morganii
atgggcaaactgacgctattacttttagttattctgggctggctgcaatattcattgtggttagggaaaaacggtattcacgactatgtacaggtcagtgaagatgttgctgcatcagaacaggtaaatgcgaagctcaaagcccgtaacgaacagctgtttgctgagatcggcgatctgaacgacgggcttgaggccatcgaagagcgcggacgcagtgaattaggaatgatcaagcccggcgaaagcttttaccgggtcctgtccgaaaaacggacacagcagaatgtgcagtcacaaagtcgcagtaactaa

SEQ ID NO: 275331 - DNA, 1779 bp, Morganella morganii
atgatatcgccgaccacaacttctccgctctccgcgcctgactggcagcacctgcaacccttacttgacagactgacaccgcaacagctgaattggttatcggcctggtgccgggaacgggcggcggcaacgccgtctgcggcggaacgggaaccggcggatattttgctgatcgccgcgtcccagaccggtaacgcccggcgtgtggcggaatccctgcgggatcagttgttcagtgcacagcgggcggtgcgtctggtgaatgccggtgacctctcactgactgaatttccggaatcaccgctggtggtgcttatctgtgccaccaccggagatggtgatgcgccggaagaagccctgccgctgtttcatttccttcattctgtgcaggcaccttcgctgacaaaaatccgttacgcggtgctggcgctgggtaaccgggcgtatccgcagttttgtcaggcaggaaagaattttgataaccgcctgcatgccctcggggcgcagcggatcctggcgcgtgcggaagcagacagtgattatcaggccactgcagataactggatctctcagttgctccctgagttgctgaccctgacaccaccggcagatgaagagcggctcagccgtctcactcacaatacggtggtgcagattgattcacagccgcatcagcgtgataaaccacagtctgcggttctgcgccgcgcggtacgcctgaccgcaccggaatcggaaaagcatgtctgtcagattgtgctggatatccgcggcaccgggttacattatcagaccggtgatgcgctgggtgtgtatccggaaaacagcccggagctggtcagtgagctgctgggactgctctggtttgacggtactgagcgtgtcacgctgaaaggaaaatcgtattctctgcgtgacgccctgatgacgcagtgtgagctgaccatcaacagcgcaccggttgtggcggcttacgcccgcctcagtaacgcgccggaactgctggatatgattgcggatccgcagcagctgatatcgtacgcacagcgcagacccgtggcggatatggttcgtgagtttgccgtgcagacctccgcacaggcctgggtggattgcctgccgccgctgatgccgcgtttatactccatttcctcgtcgccgctggtctcaccggatgaagtgcatctgaccgccggggtggtggagttccggactgacgggcgcacccgctacggtgcggcaacccgttacctgacgcatcagttacagcccggggatacggtggcctgttttgtggaacacaatgaccacttccgcctgccggatgatccggaaaaaccggtgattatgatagggccgggtaccggcattgcgccgttccgtgcttttcttcagcagcgtgcggctcagcaatccggcggaaaaaactggctgattaccggtaatccgcatgaaaatagcgattttctgtatgaggcagagctgacagattttgtgcgtcagggcgtgctgacggagctgacaaccgcctggtcgcgggatcagccgcaaaagatttatgtgcaggataagctgtctgaaatgcgggaaaccgtctggcgctggctggagcagggtgcgtacgtttatgtgtgcggggatgctttccggatggcaaaagacacggatgccgcattactggatattatccgcagtgaaggggcgatgtccgcagaagaggcacaggtttttctgaacggattacggacagcaaaacgttatcagcgggatgtttactga

SEQ ID NO: 275332 - DNA, 363 bp, Morganella morganii
atgagcaccacgatttttaaagagttccagttcgaagccgcccaccgcctgccgcatgtcccggaaggccataaatgcgggcgtctgcacgggcattcctttcttgtccgtctggagctgagtggtgaggtggatgcgcataccggctggctgatcgattttgctgaggtcaaacaggtatttaaaccaatttatgaccgtctggatcatcactatctcaatgagatcccggggctggaaaacccgaccagtgaagtactggcggagtggatctggcagcagaccaaaccgctgctgccgatactgagtgccgtgctggtcaaagagacctgtaccgcaggctgtatttaccgcggtgaataa

SEQ ID NO: 275333 - DNA, 672 bp, Morganella morganii
atgcaataccctattaacgaaatctttcagacattgcagggcgaaggggtttttaccggcgttccggcgatttttgtccgcttacagcgctgtccggtcgggtgcagctggtgtgataccaaacatacctgggaacagttaccggaaaaagcctgttcagcagaagacatgatgaataaaacagaggaggacgagcgctgggcctctctggatgcagacagcattattatgcagtttgaggcgaaaggttatacagcccggcacgtggtgattaccggcggtgaaccgtgtttatatgatttgcggccgctgacggaggtgctggaagcacggggttatcagtgccagattgaaaccagcggcacacaaccggtgcagtgcagtgagaaaacctgggttaccgtatccccgaaagtgaatatgcgcggcggttatgatgtgctgacaccttcactgctgcgggctgatgaggtgaaacacccggtcgggcggcagcgggatattgacgaactggatttactgctggcgaaactgccgggggataaacagccggtggtggcgttgcagccgatcagtcagaaaccggctgccactgctctctgtattgagacctgcatcgcgcgtaactggcgtttctcgatgcagactcataaatatcttaatattgcctga

SEQ ID NO: 275334 - DNA, 1362 bp, Morganella morganii
atgaaagaaaataatacggcgctacgacgggggcttacagggcggcacatccgctttatggctctcggatcggcgataggcaccggcctgttttacggctcggcggcctctattgagcaggcgggtcctgctgttctgctggcctaccttatcgggggtgcagcagtctttatggtgatgcgtgcgctgggcgaaatggcagtccaccatccggtaccgggttcattttcacaatatgccagccattatatggggccgctcgccgggttcctcaccggctggaactatgtttttgagatgctgattgtctgtctcgcggacgtcaccgccttcggcttctatatgaagctctggttcccggatgtcgatcagtggatctgggtgctggggattgtgtgtttcattggtgcgctgaatttatgtcacgtgaagatattcggggagatggagttctggctctcgattgtcaaagtgaccgcgattatcgccatgattgtcggcggtgccgcaattatgctgttcggcttcggccaggaaaccgcacatcctaccggtatcagtaacttatgggaattcggcggctttatgccgaacggaataagcggggtaatagcctcactggccattgtgatgtttgccttcggcggcattgaagtgatcggtatcactgccagtgaagcacaaaacccggaaaaaaccattccgaaagcgatcaacgcagtaccgctgcgtattctgctgttctatgtgctgacactgtttatcctgatgtgtatcttcccgtggaaccagatcggccataacggcagcccgtttgtgcagattttcgagaaactgaatatctcctacgcggctaatattctgaacctggtggtgatcaccgcagccgtttctgccattaacagtgatatcttcggcgcaggccggatgatgtacggcatggcgcaggaaggtcaggcaccgaaatcctttatgaagctaaccaaaaacggtgtgccgtggatgacagttctggtgatgagtgcggttctgctggtcggcgtggtgcttaactacctgatcccggaaaaaatcttcatcattatcgcctctatcgcaaccttcgcgaccgtctgggtctggctgatgattctgttatctcaggtagcaatgcgccgtaagatgaagccggaagaggtcaaaaccctgaaattccctgtaccgatgtggccgattgcgcccgctctgaccatcgcctttatggtctttgtgattgcactgctgggttacttcccggatacacgtgtggcactgatggtggggattgcctgggtggtaatcctgactgtcggatattttgccggtgtgaaaaaacgggtataa

SEQ ID NO: 275335 - DNA, 396 bp, Morganella morganii
atgtctgcaacagaacagatgaatgaacagactgctgcgccgcagcctgaattgtccgcacaaaccgcggaaaaactggcggtattaatgcagctgaaccgctttgataatgtgattgatctgctgtctctggtttcggatctggttgatattatcggcaaaaatgaggtcaacaaactggcggataatgcggaatcgggcatcgcgttattgtgggaaagcgggctggcgctgaacaaggccaaaatggaaatgatgtacagtgatgaaaagtacaatttccgcaatacctataagttactgaaagatcaggacacgctcaaaggcatcaatatggtgctcagaacgttacagcttatgggctcccgtattcagcgtatcgacagcgaatcctga

SEQ ID NO: 275336 - DNA, 1188 bp, Morganella morganii
atgcagcgtattgttattgttggcggcggcgccggcggcacgatggtcgcaaatattctgaccagaaagctgttaaatgatatttatcagaagaaagtagaagttgtccttatttcagatagtgaatggcactattataaacctgcgtttatgtatgtggcttttaatctgtatctgaaagaggaattacgaaagtcacaacgctctctgcttcgccccgaaattcagtttattcacgaccgtgtcgagcattttgattttgcatcacagacgctgcagggaaagagtggcaccaaatacggatatgactacctggtgatcgccaccggctgtcagccgagaccggatcggatctccggaatgaaagaagctgccgatcatttctatcagtatcaacccgctcgccagttggctgaaaagctggcaaaattcgaaaaaggccggatttttattacggtttctttcccgaataccccgaatgttcctcaccagtgtggtatcgcaccgatggaaaccacgctgatgctggatgattatttccgtcagcgtcgtgtccgccaggatatcgaaatcgtttatacctatccgacagtatctcagttattacgtaactgcctgtttatgcagaaagatgtctgtgaagtcctgccggcggtctttcaggagcgtaatattcaggctcagcgcggttttaccctggagcgtgtctgccctgaaaagaaaattgcatattccaaagaaggggaagagcagccgtttgatttgctgataggtacgccgccgatttctgcggtggaatcggtacgcaataccggattatccgacggcgacccggaagagggctggctgccgacagatccggaaacgttgcaggtgtacggactgaaaaacgtgtatgtcctcggggatacggtggatctgcctatcagtaaagcggccggcagctgccataaccagtcaactgtcgtggtggataatattatcggcgagatgcgtttcggctataccaccgccatttatgacgggcgggttcaggcagtcgcccagatggggctgaatgcagggatgccgcttcagtatgattataagcatgatgtgttaccgacaccggcgacaaaactgggcggcctgctgcgtaccggttttaaccgcgggctgtactggtcaaccgttcgcggcctggtataa

SEQ ID NO: 275337 - DNA, 708 bp, Morganella morganii
atgctgggtaacggattaccggttggtttaccattatccgcaccggaacaaactatccgcgttgtggtctggaatatctataagcaacagcgtcctgactggcgcaaaacccttgatcgcattttgcatgacactcagttggtgctgcttcaggaagcacagccttctcctgaactggtcagcctggccggaaaacaccagcttgttgctgatcaggttcccgcgctgcattttcagcagcatccttccggtgtaatgacactggcaacctctcatccaatctattgctgcccgttacagcagaaagagcccttattgcgtctgcccaaatctgcattagttaccgtgtacccgttgccggatggccgtcagctgatggtgattaacgtccatgctattaatttcagttttggtgtggatgtttaccggcgccagctgaatacggtcggctctcagatccgttgtcatatcgggccggttatcctcggcggtgattttaacgcctggagcaggcagcgtatgaatgccctgaaacgttttgcccgtgcgcagggcctgaaagaagtgctttttccggatgatatccggactaaagcatttggtcacccgctggattacctgttttatcgcggattcaaactgattttatcggacgttatgcagacagatgcatctgaccaccatcctttgattgcagaatttcaataa

SEQ ID NO: 275338 - DNA, 444 bp, Morganella morganii
atgcataaagttattcttgtacctatagacctaaatcataactatttgaccgacaaggtcatttctgaaatcaatgaattctcagtaaataaaaatacacacttttatttcttgactgtcatttcccccgccgaaaaatataatgagtatggtgttggatacccgatgatcactgaagatacaaaattcgaagatgaaacatctaagaccattgaaaaagaactaaaagaagttgtaagtaaattcggtatccccgataaccaggtatccctgctcgttaagattggtagtgctgccgacatcataatcgacgtatctcaacagattaaagctgaccttattattattggctcccgcaatccaggctttaaaacacatatccttggttcaactgcttcatcgttagcacattacgcaaaaacatccgtatttatagtaagataa

SEQ ID NO: 275339 - DNA, 405 bp, Morganella morganii
atgaatgacgaacaattcaaagtatgcgttgacataatcagggcatgtcgcgatctggattcgttcaccaatcacgaggctgggctgcgcacaggaaactcgacagagttcattaagtggtttaccaacaaaatgctgtatatcggatgtttgcgaaaggttggtacaacgaggcataaccgccatgtgagtccgttatttgctatatcgccggatgctgtcaccaggctgtatcgctacgtttgtgatttccgtggtgagttaatgccgggtggtgagcagagtgagagaaagcgaatcgaattttgcggaaaggtggtcagcaaagcatacattgagccgggtttcggacagtcgattataaccaggatggacgcaatgctgcgggaagtgcgctgtttataa

SEQ ID NO: 275340 - DNA, 198 bp, Morganella morganii
atgaaagaaccgcacatacaccgacttctcaccaatgacgaagccgataatctctgcatttactacaggcgtaagggatataacccggtgaagtcactgaatatcaatcctcagtatttcgacgtcaccgtgtatctgccggtagtcagatatctgaaaccaacaccacaggcaatgattaacaggatgtggcgatga

SEQ ID NO: 275341 - DNA, 339 bp, Morganella morganii
atgtctgaagtctataaggcaataagtgccgtagccaaggaattggctgagacaggcatcaaaaaagggagccggaattcacaacaggggtttatgttcaggggtatcgacgctgtatacaacgcacttgccccggcgctggttaagcatggcctgattatccttcctcgcattatggagcgttctgtcacggagcgacagacacaaaaaggcggtaccttattttatgtcgtggtgaaggctgagtttgatttcattgccacggaagacggcagcaaacaggatgaatgtaagcgcctcaccggcatcaggatcaacgaacttaagcaggcggcataa

SEQ ID NO: 275342 - DNA, 429 bp, Morganella morganii
atggcaattaacgtgattactgtcagcagcaatcccggaaaggattgtgagcaacgatggactccggcagggaaagccgttgcatcgttcagtctgccggttaggcagggatatggcgagcacgaaaagacatcgtgggttatctgcaaaatgttcggcgcgaaagctgagaaattgccagagcacctgaaaaaaggaacgaaggtgacggttattggcgagtttgtcatggaggaatggactgatcagaatggcagtaaacggtctgcaccagtgattatcgtgaatcaactggatttcggcggcaatcaggcaggaggccagaagccgcagacgcaacaaatcgatgctgtttttggtgaggatatcccaaatatgtcccacccgaccctgatcgtggttagtgagcacaaaagaaaaacccgctaa

SEQ ID NO: 275343 - DNA, 2715 bp, Morganella morganii
atgtacagacagtcacataccaagccttatgcgatacccggcttttatgcatcatttgtttcgttattagtcttatctctctttttatacggatataactattacgatgcctggctgggaagcaaaaaaggcgccctctacagtttcagcagccggatagaacatcaggttgaaacgtaccgctatcagtccgctgagctgttccggctcgccaataccacggacacagagaaacggcctgagctcgttccgccgcataaaatcctgaatgatatttactggattgacagccgtgtgccggttgtggatgccatcctgttcggccagaccaatgatgagacctacgccatcgcacggcgtttttcggattatctgaccattctgtggggcggtgagaatcagtttaattctgtgtattacctcaacggactggataacagtctgctgctggtgacatcccattctgccctgcgtccggagctgcgctaccgcgaaagcccgctgacattgggtgccgatgaaaaacgggcggaaatgctggcggactccacggcgctggatgagcgggaaaccctctcctcttttaccaagatgccgtcagaatcaacctattactatacctaccgcgcaatgtttaataacccgggtcagctgaccagcgtggtggcgtttgatttaccagtcaataacctggtgccggataatctggatttgtccaatctgtcactgatcccggccgaaacccacaccctcagcaatcgtccgaatgcagtgcagatcagtattaacggcctgtcactgaaactcagttaccgtctgcgtgaaatgccgtatcaggtggtttatcagctctcactgctgtctctggccgaagagatgctggcagccaatatctggctgttaatttctgtcttcctgttcagcatgctctctgtcggtggccttgtttatatccgcaagcgattcatttccccgctcaatacactggtccgccaggccagaaacagcgaagcgataaccaatgaaattgtggcgcaactgcctatcgggctggcgatttatgattttgccgccaataaacggctggtcagtaataccatcgccagccagctgctgaccctcagcgacctgaacaaaacccgcgacatggcccgcgagcatcagggccggatccagaccactattgataacgtggtttatgaagtcagtatgaatccggtccgtaatatgaatgatacttatcttattctgttccgggatgtggatcaggaggcgctgactgcgcgccgtctgcaattgtctgatcgtgagtataagaaaagcatcaaagcccgtcagtctgtgctgtcaaatatccgttcagagctggtggtgccggtcaaacagctcggtaatgacctgcatacgctggcaccgtacgtgactgatcctgccggtggcctgctgatggataaagtggtgacggaatccggttatctgtgtgagtggatcgaaaatattattctgctggctgatctggaaagtgatgactggaaaccgaccaatgatgaattcctgttgtcacaaaccgtcgaggatatcgttaaacaattctcacgtcggataaatgacaaaggcattccgctttatttccataacagtattaataagcagctgaattacattggtgacggccctattatcagtaagatatttttattattactgaattacgccgtcagtaatttaaaatacggaaaattggttattcgccttaagaatatatttaaaaatgaacataataatatcagattggaaataatcgccagcggctccggtctgccgcaatctgatctcgttaatctgcacgatccgtttatgtttcaggtcgcggagacggaaggtcgtccgaactcggggctggcattctatttgtgtgatttattatgtaaaaaactcagcggagagctgaaaatagacagtaaaccggacatcggtacacactacactgttgagttgccgctgcctgccaccgagatgatcggtgagccgtcagaggtgctggaagatacgctgtttaagatcaatatcattaatccgagtattcgggaaataattaacgcaattataattgaaaacggcggaattttatttgataaaaatcgcgcattattgcaagatgaatatgacatcctggtaactgactttgataagaaagcgagaaagccaatactctttttacgaaatgacattattgaacacagaatgattacgccttccctggtggagtgtaattataatttcaatgatgaaattctgaatgctattacgctgcttatcgaacaaagcttaacttcggatgagtttgatgatagattcttacccgggaatccgggtattaatacagcagcgctttccgtcggggaagttgttgcgttatataaaaatcagctggcacaaagtacgtataaagatttgtttgccaccacagtccctcctgatataagtaagatgtacacggaagcagaattaagtgaattgcagccactggcgctgacagtacatcgggtcaaaggggtctttgctgtgctcgactttgattatctgaaatcacgctgtgaagatatagaacgctgtatcgctgacaaaaacaaaatgaaggtggatgaaggtatccgggaaattgatgccattgtcactgaattgctgcagcaaggtaaccaagagtatgaataa

SEQ ID NO: 275344 - DNA, 693 bp, Morganella morganii
atgccattgtcactgaattgctgcagcaaggtaaccaagagtatgaataacctgaatgttattatcgctgatgaccatcctattgttctgttcgggataaaaaagtccctggaacagctggaaacggttaatgttgttggtgaatttgaagattccacttcactcatcaataacttagcacgcctggatgcggatgttctgatcactgacctttccatgccgggagataaatatggtgatggcatcacgcttatcaagtatatcaagcgccattatcctgacctggcgattattgtgctgaccatgaacaataatccggcgatcctcagtgccgtactggacctcgatatcgaagggatcgtactgaagcagggtgcgccagctgatctgccgaaagcactggcctctttgcagaaaggaaagaaattcacccctgacagcgtttccaaactgctggaaaaagtgaatgccaacgggtacggcgataagcgcctgtctccgaaagagagtgaggttctgcgtctgtttgccgaagggcatctggtcactgagattgcgcgtaaactgaaccgcagtatcaaaactatcagcagccagaaaaaatccgccatgctgaaactgggtgtggataacgatatcgctctgctgaattacctttcgtctgtcactatcgacagccacagagacgagtaa

SEQ ID NO: 275345 - DNA, 2847 bp, Morganella morganii
ttgagatacttttcatctttccagacatcactgaaaatttcgcgttacctgttccggatcgtcggtgtgatgttatgggggctgggggcgctggtgacggtattctatttactgaatatctataacgggatgcgcaatgatatccgccagcaatattattccgattacgatgccttattagcctatttccggcaatccaccgatatgacccgcgatatccgttatatgaatgaacggtttgtcgaaaataaagaagtacggccgggagagcccgcagaccggaccaccgacggcttttttattgattaccgggcactgaataccaaaggcgactgcgcggccttccgcaccggcagcggcccgtatattattgcattcaaagatctcctgacgtactggcagaacaatatcgccgcaccgatggggctgaatcaggtctttctggtcggttcaaaaaccctgtgtatggtgtcatttccgatccgcaacctttccaccagcagcgaaacgctgcgcagaatggtcaatgattactctcagaactatttccgcctgaaaagtcaggggaaagagcgcactatttactgggcggcgccgggcagtaatcagggaatggccagcctgtttgtgatgatgccgctgtattatgacgggcgttttctggcactgatgggcattgagcgtaatctgcagctggaaaactttaaccgcctgcgtgatttcccggccaatatggtgattattaatgagcaggatgatgtcgtgctctcttatccggaagaaattaacacacagaaaaataaagaccgttatctggtagacgataattatttcggctatgacgacgaattcacccaactggtctttaaacgcaggctcacgccgtccctgctgagtgtggtatataccacgccgctgagctcaatctatgaaaaactgaaatttcagatccttaacggggcgattcttaatctgatctccgccattattatcgggttgtttacctggctgctggaacggcggatatttatgccggccgaaaacagcgcaatgcgtctggaggagcacgagcagttcaaccataaaattgtggcctccgcaccggtcgggatttgcattctgcgcacactcgacggtacggcactgctgagtaatgagctggctcataattactggcgtatgctttcgtttgaggatcgcaaccgtatcggcctgctgataaaagataaacggcagggaatggaagatatggtgacccgtaacggcggccaccttcaggtcagttttgtgcattcccgttaccagaacgaggaagtggcgatttgtgtgctggtggatatcagcgcacgtgtgcagctggaaagctcgttacaggatgcggcacaggcggcagagcaggctaaccagtcgaaatccatgttccttgccacggtcagtcatgagctgcgcacgccgctgtacggtattatcggtaacctggagctgttacagtccatggcacattcgcgggatgcccagcgcctgctcggcacgatgaataactcctcctcattattgctgaaaattatcagtgatattctcgacttctccaaaattgaatccaaacagctgaaaattgagccgagagagtttaacttccgcgaacatattcattttgtggtggcaaactacctgccgctggtggcgaaaaaacacctttcactgtactgctttattgaaaaagatgtgccggagctggtctgtaatgatccggtgcggatgcagcaggtgatcgccaacctgtttaataatgcgattaaatacacgcatgtcgggatggtgtgcattcatgtctatgtctgcggcgaatatctgcatgtggatattcaggataccggcggcggtatcagtgaggacgagctgcgccagttattcgacccgttctatcagattatgccgaacacggacagcccgtcgcagggtaccgggctggggctgcctatctgtgaaaagctgatttcactgatggacggcgacatgatggtggaatcacagaaagaggtcggcagtctgttcgggatccgcttcccgtgctataccgcctatccgtccggtcatcatgcggatattgtgccgctgactgtaccgctggtctttgagttccgcaacggcgtgctggcggattatatgcagcgttactggcaggatattgccccggcagcggttccgttgtctgaatgccctgatattgcctgtgcagtggtgatcacggacgtggtgaccccggcgatgaaacaggcgcgtctgctgattgaactggatgccggttatactgacaaaccggtgccgctgggcggcaatcactggcggcataatacccatcagctcgacgggctgtttgattttgtctctgaccgcctgaataatcgtcgtcaggaagcggatgacctgccgccgccgctgctgccggacagtcagcaggccgcgcatgtccggatcctgattgtggatgaccatccgattaaccgccatctgctgtcagatcagctgcatctgttcggcttccacaccgcaacggcggatgacgggctggatgcactcgacttcctcgaaacccatgaggtggatattattctgtcagacgtcaatatgccgaatatgaacggttatgacctgacccgcacactgagagagaaggggatgacactaccggttatcgggatcaccgccaacgcgctggcggaagagcgcgagcgctgtctggcttccggcatgaacgattgtctctccaaaccggtctcgatgcaggcgttgcgcaccatgatgcagcactacatcccgcaggtcacgccgcccggggctgaataa

SEQ ID NO: 275346 - DNA, 2616 bp, Morganella morganii
atgagcgacaatgccaaagaaatcttgcccgttaacatcgaagaggagctgaaaagctcgtatctggattacgccatgtccgttattgtcggacgcgcgctccccgatgtcagggatggtctgaaaccggttcatcgccgcgtattattcgcgatgaaagaactgggtaatgactggaacaaagcctataaaaaatctgcccgtgtggtcggggatgtgatcggtaaatatcacccccatggtgacagtgctgtgtatgaaacgattgtccgcctggctcagccgttctcaatgcgctatatgctggtggatggtcagggtaactttggttcaatcgacggtgattccgcagcggcaatgcgttatacggaagtccgtatggcgaaaattgcccatgaactgttagccgacatcgacaaagaaaccgtggattttgtaccgaactatgacggtaccgaaatgatcccggatgtgatgccgacccgcatcccgaacctgctggtgaatggttcatccggtattgctgtcgggatggcaaccaatattccgccgcataacctgggtgaagtcattgacggctgccttgcctatattgatgatgaagatatcagcatcgaaggtctgatggagcacatcccggggccggacttcccgactgcggcgattatcaacggccgccgcggtattctcgatgcttaccgcaccggacgcggcaaaattcatatccgtgcccgcgctgaagtggaaacggatgaaaaaaccggccgcgaaaccattatcgttaatgaaattccgtatcaggtgaacaaagcccgcctgattgagaaaatcgccgagctggttaaagagaaacgtctggaaggtatcagcgcactgcgtgatgaatccgataaagacggtatgcgcattgtgattgaagtcaaacgcgatgcggtcggtgaagtagtactgaacaacctttatctgctgacacagatgcagaccacgtttggtatcaatatggttgccctgcatcagggacagccgaagatcctcaatctgaaagaaattctcagtgcgtttgtgcgccaccgccgtgaagtggtgacccgccggacaatctacgaattacgtaaagcccgtgaacgcgcccatatcctcgaaggtctggcgattgcactggccaatatcgacccgattatcgagcttatccgccgtgcgccgacgcctgcggaagcaaaagccgggttactggcacaggcatgggaactgggtacggttgccgccatgctggccggtgccggtgatgatgccgcacgtccggaaggcctggatgagcagttcggtatccgcgatggtctgtatcatctgaccgaagttcaggctcaggcgattctggatctgcgtctgcagaaactgaccggtctggagcatgaaaaactgctcgacgaataccgcgagttactggaactgattgccggtctgctgcatatcctgcaaagccctgagcgtctgatggaagtcatccgtgaagagctggtggcagtgaaagagcagttcaacgataagcgccgtactgatatcacagaaaacacagcggatatcaacatcgaagatctgatcagtcaggaagacgtggtggtgacactgtcccatcagggctatgtgaagtatcagccgctgaccgactatgaagcccagcgccgcggcgggaaaggtaaatctgccgcccgtatcaaagaagaagactttatcgaacgtctgctggtggcaaacacccacgacaccattctctgcttctccaacaaagggaagctgtactggctgaaagtgtatcagttaccggaagccagccgtggtgcgcgcggtcgtccgattatcaacatattaccgctggaccaggaacagaacgagcgtatcactgctattctgccggtccgtgaatatgaagaaggtaagtttgtctttatggcgaccgccagtggtaccgtgaagaaaacatccctgcaggacttcagccgtccgcgtaacgccggtattatcgccgtcaacctcaatgagggtgatgagctgattggcgttgacctgactgacggcagcaacgaagtgatgctgttctctgctgacggtaaagtcgtccgctttgcggaagatgctgtccgtgccatggggcgtaccgccaccggtgtgcgcggtatccgtctgggtgacgatgacgcggtcgtgtcactgattattccgcgcggtgaaggtgaaattctgacggtcaccgaaaacggctacggcaagcggactgcggaagcggagtatccgaccaaatcccgcgccactcagggggttatctccattaaagtgagtgagcgtaacgggaaagtcgtgggtgcaatccaggtcggtgcggatgatcagattatgatgatcaccgatgccggtactctggtccgcacccgcgtctctgaagtcagtatcgtgggccgtaatacccagggtgtgacgctgatccgtaccggagaagaagagaaagtggtcggtctgcagcgtgttgcggagccggaagaggatgaaaatgatttctctgaagacggtgaagtgacggatgcggcatctgatgataatgcagaagagaataacgattaa

SEQ ID NO: 275347 - DNA, 726 bp, Morganella morganii
atgaatgacacagcttccccgctgacagccaatgtcgatcctgcggaaattaaaaagtttgaggatgttgcctcacgctggtgggatcttgagggtgaatttaaaccgctgcaccggatcaatccgctgcgtctggcttatattcagcagcgggttaacggtgtgttcgggaagaaagtgctggatgtcggctgcggtggcggaattctggcagaaagtatggcgcgggaaggtgcggatgtcaccgggctggatatgggcgcggagccgcttcaggttgcgcgtctgcatgcactggaaagcggcacagatatcacctatgtgcaggaaacagtggaacagcacgcagaaaaacatgcgcaacagtatgatgtggtgacctgcatggagatgcttgagcatgtgccggatccggcgtctgtagtgcgttcctgtgcccgtctggtcaaaccggggggcgatgtggtgttctccaccattaaccgcaacaagaaagcctggtttatggctgttatcgcagcagaatatattctgaagatggtaccgcccggtacgcacgatgcgaaaaaatttatccgtccggcagagctgattgactggctgaataataccggtctgcgcgagcagcacatgattggcttacattacaacccgttaagcgataaattctggctggcacccaatgtggatgtaaattatatgttgcatacccgttttattttatag

SEQ ID NO: 275348 - DNA, 2295 bp, Morganella morganii
atgaaccagaatctgcttgttaccaaacgtgatggtcacaaagaacgtatcgatttagacaaaatccaccgcgtcattacctgggccgctgaaggtctgaataatgtctctgtctcccaggtcgagttacgttcccagattcagttctacgacgggatccgtaccgcggatattcatgaaaccatgattaaggccgccgccgacctgatttccgctgaaacaccggattatcagtatctgtctgcccgcctggctatttttaaccttcgcaaaaaagcctacggccagtttgagccgccggcgttatatgcccatgtacagaaaatggtggctgccggtaaatatgacgaaaatctgttaaccgattacaccgaagctgaatttgaccagatgaatgagttcatcgatcactggcgtgatatgaatttctcttacgccgccgtcaaacagctggaagggaaatatctggttcagaaccgtgttaccggcgaagtgtatgaaagtgcacagttcctgtatatcctggttgcggcctgtctgttctcgcattatccgaaagagacccgtctggattatatccgccggttctatgacgccacgtcaaccttcaagatttccctgccgacgccgattatgtccggtgtccgcaccccgacccgccagttcagctcctgtgtgctgatcgagtgcggcgacagcctggactccatcaacgcgacctccggtgcgattgtcaaatatgtgtcccagcgtgccggtatcggtatcaacgcgggtcgcatccgtgcgctcggcagcccgatccgcggcggtgaggcattccacaccggttgtatcccgttctacaaacatttccagaccgccgtgaaatcctgttctcagggcggcgtgcgcggtggtgcggcgacgctgttctaccctatctggcatctggaagtggaaagcctgctggtactgaaaaacaaccgtggcgttgagggcaaccgtgtccgccacctcgattacggcgtccagatcaacaaactgatgtatgaacgtctgatcaaaggccaggatatcaccctgttcagcccgtccgatgtaccggggttatatgacgcgttcttcgccgatcaggatgcgttcgagcgtctttatgagcagtatgagaaagatccgtctatccgcaaacagacgctgaaagcggtggaactgttctccctgatgatgcaggaacgtgcctcgaccggccgtatctatattcagaacgtggatcactgcaacactcacagcccgtttgatccgtttatcgcgccggtgcgccagtccaacctgtgtctggaaatcgccctgccgaccaaaccgcttaacgatatgaatgatccgaacggggaaatcgcgctgtgtacgctgtccgcgtttaacctgggtgccattgagaacctcgatgagctggaagaactggctatcctggcagtacgtgccctggatgccctgctcgattaccaggattatccgattgaagcggcacgcaaaggctcaatgggccgccgtaccctgggtatcggggtgattaacttcgcttactacctggcgaaacacggtgtgcgctattccgacggcagcgccaataacctgactcaccgcacctttgaagctattcagtattacctgctgaaagcctccaatgagctggcaaaagagtacggagcatgcccgtggtttaacgaaaccacctattcacagggcattctgccgatcgatacttacaagaaaaccctggatcagctgaccaacgagccgctgcattatgactgggaaggcctgcgcgaagagatcaaaaaacacggtctgcgtaactccaccctgtctgccctgatgccgtcagagacatcctcgcagatctccaatgccaccaacggcattgagccgccacgcggttatatcagtgttaaagcctcgaaagacggtattctgcgccaggtcgtgccggagtatgagcgcctgaaatccgcgtatgaactgttatggcagatgccgggtaacgagggctatctccagctggtggggattatgcagaagtttgtcgatcaggcgatttcgtccaacaccaactatgatccgacccggttcccgagcggcaaagtaccgatgaaccagttactgaaagatttgctgctggcctataaatacggtgtgaaaacactttattaccacaatacccgcgatggtgcggaggatacccaggaagaccttcctgaggaagtggtcatcgccgacgatgatggttgtgaaggcggcgcgtgtaaaatttaa

SEQ ID NO: 275349 - DNA, 1131 bp, Morganella morganii
atgtcttatacaacattttcgcaggtacataatgatcagctgaaagaaccgatgttcttcggccagccggtaaacgtcgcccgttacgatcagcagaagtacccgatttttgaatcactgattgaaaaacagctctccttcttctggcgtccggaagaagtggacgtatcccgcgatcgcatcgactacaatgccctgccggatcacgaaaagcatattttcatcagcaacctgaaataccagaccctgctggattccatccagggccgcagcccgaacgtggcgctgctgccgctgatctccattccggagctggaaacctgggtggaaacctggtctttctcggaaaccattcactcgcgttcttacacgcatattatccgtaatatcgtgaatgacccgtcggtggtattcgatgatatcgtggcaaacgaagagatcatcaaacgtgcggaagatatttccggctattatgatgatcttatccgtatgaccaatgaatatcatatgttcggtgaaggaacgcataccgcaaacggtaaaacctttactgttaccctgcgcgccctgaaacgccagctgtatctgtgcctgatgagcgtcaacgcgctggaagcgatccgtttctatgtcagtttcgcctgctctttcgcctttgccgagcgcgaactgatggaaggtaatgcgaaaatcatcaaactgatcgcccgtgatgaagcgctgcacctgaccggcacccagcatatgcttaacctgctgcgcagcggccaggatgacccggaaatggcggaaatcgccaaagagtgcgagcaggattgctacgacctgtttgtccgtgcggcggagcaggaaaaagagtgggcagattacctgttctgcaacggctcaatgatcggtctgaacaaagatatcctgtgtcagtatgtggaatatatcaccaatatccgcatgcaggcggtgggtctgccgctgccgttcaaagtccgctcgaacccgattccgtggatcaacgcctggctggtatctgataacgtccaggtggcaccacaggaagtggaagtcagctcctatctggtcggtcagattgactctgaagtcaacactgacgaactgagtaacttcgaactctga

SEQ ID NO: 275350 - DNA, 267 bp, Morganella morganii
atgccccgctataaaatcaccctgcatggcaacatgcagggtattcagctgcattatgtcagtgaagaacacaacaacctgctcaatacactcgaacaatccgtcccggtggaataccagtgccgtgaaggctattgcggtgcctgccgtgtccgcctcaaacgcggtaaagtcggttaccggcagcggccggtggcgtttattaatgacggtgaaattcttccctgcagttgctacccgctgagtgacatcgacatcgaactgtaa

SEQ ID NO: 275351 - DNA, 1206 bp, Morganella morganii
gtgaaaaatcgtacactcggcagtgttctgattgttgcgggaacaacgatcggtgccggtatgctggcaatgcccctggcggctgcggggatcgggtttccggtcattgcggttattctgatcggcctgtgggctatcatgagctacaccgccttactgatggttgaagtgtatcagtacagctcaccggataccggcttaggcagcgtcgcccgtcaatacctcggattaccgggtcagctcctgaccggcttcagtatgttattgctgatgtatgccctgaccactgcctatatcggcggtgccggggaaatgatctccgccagcctgcaaaactggtggcaaatatctgttacaccgggtaccgcgaccattatcttcaccctcgtcggcggcctggtggtgtgtgtcgggactcactcggttgattttatcaaccgtatcctgttcaccggtaaaattatcttcctgatcatcatgctcgccgtcatgatgccgcatgtgaatatgaccaaccttgtcagcatgccaattcagaacggactggtgctttccgctatcccgctggtgtttacctcttttggtttccacggcagtgtacccagcctggtgaattacatgaacggcgacagcaaaaagctgcgctttattttcctcaccggcagtgccattccgctggtggcgtatctgctgtggcaggttgcgaccctcggcgcgatcccgtccgatactttctttggtattctggcgcagaaatccggccttgacggcttactgacggcactcagtgagactgtggccaacaaatacgtggatatcgcggtcagcctgtttatggatctggcactggctacctcattcctgggtgtggcgctggggttatttgattacctggcagacctgttccgccgcaaaaattccgccttcggccgtacacaaaccgggattctgacctttgccctgccgctgatttgcgccctgtactacaaaagctttaccggtgctctggcgtatgccgcaatggcgctctccttcctggcgctgattctgccgtcattattagcgtggaaagtacggcagaacccgaaagcaggtgcttaccgtgttgcaggcggaaacggtgtgctgatctttatcttcctgttcggcctgctggtgatctctatcgagttcatcaaaagcgccggttacctgccgaatatctga

SEQ ID NO: 275352 - DNA, 1182 bp, Morganella morganii
atgtcagaacatgcacgccgccctttgcggacagaaacccggctgacacagagcggccgtaaccccgcatcacagcacggatttgtgaataccccggtataccgcggctcgacggtggtcttcccgacgtatgatgccctgatcaaccgccgggcggaatttcattacggtactgacggaacaccgacgatcgcggcactggaaaatgcctggagtgaactgaccggtgcggcgggtacggtgttatccccgtccgggctgggggcggtgacactggcgctgctgaccaccctgaaaagcggcgatcatctgctgatgacagattccgtttatcacccgacccggcagttatgcggcggtttgctggcgaagatgggcattaccaccacctattatgatccgctgatcggcgcggggattgaatcgctgatccgcccggaaacaacggtgattttccttgagtcccccggctcccagacatttgaggtgcaggatgttccggcgatcaccgccgtggcgaaacgccatcatgtgacaaccgttattgataacacctgggcgaccccgctttttttccgcgctcatgaacacggctgtgatatctccctggaagccggtaccaaataccccggaggtcattcggatgtgctgatggggctgatttccgccaatgcacagtggtggccggaactgcgcaaaacctatgaccagatggcgatgctgcccggtgctgaggattgcttccttgtgctgcgcggtctgcgtacactgcatatccgcctgaaagaagcacagcaccgggcgctgaaagtcgctgagtggctgcaatcccgtccggagatcagcaaagtactgcatccggccttcccggaatgtccggggcatgagatctggaagcgggatttcaccggctcttccggtctgttctcggtggttctgaatgcgaaatacaccacagacgacctggcggcgatgctcgacgggctggatattttcgcgatgggctattcctgggggggatttgagagcctgatagtgccgtttgactgcagccgttaccggacggtcactgactggcagccgggcggcctgacagtgcgcctgcaaatcggactggaagacacggaggatttgattgcggatttgaacgccggatttgaacggctgaatgccgcacactga

SEQ ID NO: 275353 - DNA, 672 bp, Morganella morganii
atggaatcagaagaaatcagggaccgacgtccgattaaagcccggcagacccgctgggcgacctcagccgcccgtctgctgcaacagcgcggtgcaaccccgaacggtatatctgttgccagttcagtctgtgcattacttgccgctgctgccttttacggtgccctgaactgtgaaataacggcacttcgtatcatcctgtttttgctggccgcactgatagtacagggacggcttatctgtaatctgcttgacggtatggtggcggtcgaaggcggcctgcgcagccctgttggtgccgtatttaacgatttgccggatcgcgtttcggacagcctgatcctcatcggtgccggttacggactggccggttttatcgcttatgccccgcagctcggctgggcggcggcgctgatggcagtgatgaccgcctatgtccgggtactcggcggcagttgtgagcagccgcagaaattttccggcccgatggccaaacagcaccggatggcgctgctgaccgcaggggccgttgccgcctgttttctcccgctgtatcaggctcagtggctgtttcttatcatactgtgggtgattaccctcggcgcactctggaccaccgtgcgccgtacccgcatactgatggctgatttacgtaaggataataaaggatga

SEQ ID NO: 275354 - DNA, 678 bp, Morganella morganii
atgacccgtaaaacgttttcgccggatcaaaaaattgtcccggcgctgctggtgtcggtatgccggtttctgaccgggatccgcgcaaagcagaacgccccgctgccggaaggtaaaccctgtatttattatgctaaccactccagtcaccttgacggactggtgatctggtcctgcctgaccagtgcggcgcgaaaacgcgttcacccggtggcggcgcaggattactgggataaaaccgggttccgccgttatattgccaaacgtatttttggtgcggtgctgatcgcacgcggtaaaaaaatcgaaccggcaacagaggatgaactacagaagaccacaccggcggagaatccgctggatgtgatgcagaatgttctcgataccggagattccctgattttgttcccggaaggcacacgcggcgacggtgaaaagattcaggatttcaaagccgggctctggcatttatcccgcaataacccggatgcggtgctggtgccggtctatctggaaaacctcaaccgcgttctaccgaaaggctcacggctgattgtgccgattatctgcaccgccacattcggtgctccggttgaaccggccggggaagaagagagcaaagcagactttttagtacggacccgccaggcgttagaggcaatacatcatgaaagataa

SEQ ID NO: 275355 - DNA, 927 bp, Morganella morganii
atgaaagataatgaattattctggatcttcagcgggctgttcgggttcctggcggtggcaacggttatcggcctgatcctgaagcatgttaagggaaacacctctgttatcagtaacctgaatgcccgtatccgtgcctggtggctgatgtgtattatcgccgcggtggctatcagcatcgggcccatcggctctgtggtactgtttgcctttatgtccctgctggcactgcgtgagcttatcacgctgacgccgacacaccgcgccgaccacggtgccctgttctggtgcttctttatcatcctgccggtgcagtatgtgctggtcggtgttcagtggtataacctgctggcggtctttatccccgtctatgcgttcctgtttatcccgacccgcatggtgctttccggcgacacccgccacttcctggagcgcatggcaaaaatccagtggagtgtgatgattgcggtttactgcctcagttatgcccccgcgttgctggtactgccgattccggatttcacggataatatcaacctgctgctgtttctgatgatcgtggttcagatttctgacgtgctgcaatatgtgttcggtaaactgttcggcaaacgcccgattgtgccgaaactcagcccgaacaaaaccgtcgaaggatttatcggcgggatcctcagtgccagctgtgtcggtatggcactgtggtgggccacaccgttcagcccgtgggcggcattcctgctctcactgatgatttgtctggccggtttcgcgggcgggttgtgtatgtccgccatcaagcgggacagcgggatcaaggatttcggtgccatgattgaaggccacggcggcatgatggacagactggattccctctgcttcgcggccccggtcttcttccatgtgctgaaatatttttatacctga

SEQ ID NO: 275356 - DNA, 585 bp, Morganella morganii
atgactcaggaaattctgctgatccgccacggtgaaccggcgccggacaaaaaaacaccgctggccctgcgcgaccttcgtgcctggctggcggagtatgatgcgggcgggattatcccgccggccgctccgccgttatccctgtcttcagaagagttatcccgttatttcccggtagccagcccgctgttccgtaccactgcatcactggacgttctcgggatcacaccccgcgccattgttgacgagctgcatgaggcggtacttcccctgttctctcctgcactgctgatgccggtaaaactgccgccgatgtggtgggtaacggcgttccgtctgctgtggctggcgggtggcggaaaatccgttccctctgtggcacaggtgcgcggacgggcacaatgcgccgcgcaaatcctctccggctatgcgcaggaacatggcgcggtaatggtcatggcgcaccggattatcaatcacgccctgcgccccgcactggaacaatccggctggcggatgacagaaaaaacacataacaactactggggaatgatgcggttcacccgtgacgcaccacaccgctaa

SEQ ID NO: 275357 - DNA, 768 bp, Morganella morganii
atgtttaaaaaattagtctttgcaggctgtttatcattattagcattcaccggggtaagccaggccaaagagacctatgtggtcggtgcaggcggtacctatcgtccgtttgaatttgaaaacagtgagaaacaacttgaagggtttgatatcgatattatcaaagcggttgctgccgccgaggattttgatgtcaaattaatcaacacgccgtgggaaggtattttcgccacactgtccgccggggatcgcgatattttaatttccggtattaccatcaccgataaacgcaaacaaatggtggatttctccgccccgtatttcccggcagaacaggcgattgtggtgaatgaaaattcaccgatcagcgcattatctgaactgagtaaatataatgtcggtgtggtgaactccagcaccggggatattgtggtctctgatgtgctcggtaagaccagcactgccatcaaacgctttgataatactccgctgctgttacaggaattatatgaagacggcgtggatgcggcggtcggcgatgtcggtgtcgtgaagttttatattaaaacccatccggataagaaatttaaactgatttacgacaatcattttgaaaaacagtatttcggcattgcggtcgccaaaggtaatacggaattacaggaaaaaattaaccgtggtctggcaaaaattattgccgacggtacttacgccaaaatctatcagaaatggttcgataacgacgtaccttccctgcccgcgcagtaa

SEQ ID NO: 275358 - DNA, 765 bp, Morganella morganii
atgtcagctttccgctgggaaattatagaagaatacgctccgttatttatggacggggcgctgatgacaataaaatgtacgattatctgcgtcatcctggggaccctctggggactgacgctcggcctcggccggacagcccgtgccgaacgcggcccggcaaaatggctgctgctgttctttgtgcagtatccggtacggttttatgtcagtgcattccgtggtacgccgctgtttgtacagatcatggtggttcactttgcactggtgccgctgtttatcaacccgcgtgacggtctgatggtcaccagcggtattattacctctgacacagccagaatgctgcgatctgagtacggcgcatttctctcctgtattgttgccatcacactcaatgccggggcttatgtttccgagattttccgcgccgggattcagtccgtcgatcgcggtcagacagaagcctcccgcgcactgggcatgagctggggaaaaaccatgcgcaaagtgatcctgccgcaggctttccgccgtattctgccgccgctgggtaacaatgcgatcgcgattgtcaaagattcctccctggcctccgctatcggccttgctgacctggcatatgccgcgcggaccgtatccggcgcatatgctacttactgggagccatacctggtcatctccgttatttactggatgctgacattcctgctggcgcagctggttcaatacaccgaaagaaggttgagcagaagtgattcacgttaa

SEQ ID NO: 275359 - DNA, 723 bp, Morganella morganii
gtgattcacgttaataatttacagaaaaaattcggcaatacccatgtactgcgcggcatcagctgcgatatccgtccgcaggaagttgtctgtgtgatagggccgtccggctccggaaaaagcacctttctgcgctgcctgaatgccctggaacgcccggattccggtgagattgtggtaaacggcaccgatgtgtgtgatccgaaaacagatctgaacaaaatgcgcgaacataccggtatggtattccagcgcttcaatctgtttccgcatatgacggtgctggataacattaccatggcgccgctgatggtgtccggactgaaaaaagccgatgctctgcttaaagcggagcggttactggaaaaagtcggtctgccggacaaaattgatgcctggccggagagtttatccggcggtcagcagcagcgcgtagctattgcccgtgccctggcgatggatccgacggtgctgctgtttgatgaaccgacttccgcgctcgacccggagctggtcggtgaagtactgaatgtgatgaaagccctggctcatgaaggcatgacaatggtgattgtgacccatgagatgaattttgcccgtgaagtggcagaccgtgtcttttttatcgatcaggggattattcaggagtccggcacaccggagcagatatttaatcatcctcagaacccgcgtaccgccgcgtttctcagccgcgtgctgtag

SEQ ID NO: 275360 - DNA, 1767 bp, Morganella morganii
atgaacagtgagaaaaataagcgcacctgcacgcgcagccgtgaagaaatgacaacactcctcgccgtggcccgcagtgaggcaccggcggattatcgtattgataatgtccggattctggatctgattaacggtggtgaatttccgggcccggtggtgataagcggaaatgccatcgccggtgtcggtacggtgtataaggatgcaccggcgcatcaggttatcgacggtaaaaatgcggtggtcgtacccggatttattgacgcacatctgcatattgaatccagcatgatgaccccggtcacctttgagagtgccacgctgccgctgggagtcacgaccattgtgtgtgatccgcatgaaatcgtgaacgtcatgggggaagaggggattgagtggtttctgcgctgcgcggaacaggcacagcagaatcagtttgttcaggtgagttcctgtgtgccggcattaccgggcagtgatgtgaacggcgcagatttcccgctggcagagatgctgaaatacaaggatcatccccatgtgccgggactggcggagatgatgaatttcccggcggtgattgccggtgaggcggaaacgcttgataaactggatgcattccgcggtatgacgctggatggtcactgcccgatggtcaccgggaaagacctcaacggctatattgccggggggattgaaaactgccacgaatcgcaccgttatgaggaagggctggaaaaactggcgctgggaatggcgctgatgatccgcgaagggtcggcggcacggaatctggatgcgctggcaccgcttatcacggcgatgagcagcccgcagtgtctgttatgcactgatgaccgcaatccctgggaaatcattcacgaggggcatatgaatgcgctggtgtatcgtctgattaaccagcatcagattccggtacatattgcttaccgtgttgccagctggtccgcggcccggcatttcgggctgaaaaacctcgggctggtggcgccggggaaacaggcggacctggttctgctgcgggatgagaaaacggtcgatattcaggcggttatgtgcggcggccgctgggtggataaagcggcgctgctgcgtgagcgggaggctaaacaggcagcatcacgtccgccaatgcagaatactgtccgccgtcaggccgtgacagcgcagtctcttgcttttgtgccggttgccggtcatgaataccgcgcgatcagtgtgatcccgaatgagctgatcacctgtgagcagcgggtcagctgggacggactccgctatgaccgtgataatatctgctcgcttgcggtgattgagcgctatggccgccagacaccaccggcaaccgcattgctgcacaatttcggtctgacgcgcggggccctggcgtcaacggtcagccacgacagccataatattgttgtcgccggtattgatccgatggatatggcgctggcggtgaatcagctgattgccggtggcggcgggatgtgtgtggttgcggacggccgggtgctgagccatgcgacactgccgattgccgggctgatgagtgataaaacggcggatgaaatcgccgctgaaattgagtcgctgaaagcggcctgccgcgactgcggggtgatgctggatgagccgtttattcagatggcattcctgtcgctgccggtgatcccgacactgaaactcaccagtctcgggttatatgatgtgaataaatttgtttttacacacagtgaattaacggcataa

SEQ ID NO: 275361 - DNA, 1335 bp, Morganella morganii
atggatagtcaaacaccggaaaccatccgggaaacaggtgtactgggacgtttattccgtttacaggcacacggtaccacggcacgaaccgaagttatcgccggtataaccacctttcttactatggtgtatatcatttttgttaacccgcaaatcctcggcgctgccgggatggatacacaggctgtcttcgtcaccacctgtctgattgcggcattcggctgtattctgatgggttgtctggcaaatctgccggtcgcactggcaccggcaatggggctgaacgccttttttgctttcggtgtggtcagcgccatgggttactcctggcaaatagggatgggggctatcttctggggtgcactcggcatgctgctgctgacggtcttccgcatccgctactggatgatagccaatatcccgctgagtctgcgggtggggatcaccagtggtatcgggctgtttatcgctatgatggggctgaaaaatatcggcctggttgtggcgaatccggccacgctggtttccatgggagatctgacctcccattccgtctggctcggcgcactgggcttttttattatcaccattctggcctcccgccgtattcacgcagcggtgctgatctccattgtggtcaccacgctgattggctgggggctgggggatgtcacctacaacggtgttttctccatgccgccggatgttaccagcgtgctgggcaaagtggatgtggccggtgcctttaatatcgggctgtcagggattattttctcgtttatgctggttaacctgtttgactcatcaggtacccttatcggggtaaccgataaagccgggctggcagataaagacggtaaattcccgaatatgcagaaagccttgtatgtggatagtgtcagctccgtgatcggcggctttatcggcacatcatctgtcaccgcgtatattgaaagtacctcgggggtttctgtcggcggccggacagggctgaccgccgtggtggtcgggatcctgttcctgctggtgattttcctctccccgctggccggaatggtgcctgcctatgcggtcgccggtgcgttgatttatgtcggggtgctgatgacgtcgagcctggcacgggtaaactggaatgacctgactgatgcagtaccggcctttatcaccgcgattatgatgccgttcagtttctccatcacagacggtattgcgcttggttttatctcttactctgtgatgaagctggggaccgggcgctggaaagagctgaatccgtgtgtgattctggttgccctgctgtttgtgctgaagtttgtgtttgtcgaccactga

SEQ ID NO: 275362 - DNA, 414 bp, Morganella morganii
atgtggaatatacacccgacacgcagccgctatgcattactggctcagtatctgtcgccgctggatgccaggattgaagccggattgctggaatccgaagggattgaggtgatgctgctggatgaaaatattgtctggaataaccagatgtatgctcaggctgtcggcggtgtgaagctgctggttaatcaggacgagttaaccagagcacaggagattctggcggattatcatcacggagatttcggaattaatgaggaaggggaaccggcggcagcggatccggaaccggtgactgaaaacagtacagaagattatgtcaatatagggtttgtgtttcttatttttctgacgctcggcctcgctattccgtttaaagcgctgcatcatcgttttaaagagaaagcaaaataa

SEQ ID NO: 275363 - DNA, 1533 bp, Morganella morganii
atgaaaaaatataaatatccggtaatcatgatagcactcataattatgagctatcttgtaaatacattcatttacaagcgtgattctactgcacctcatttagccacattagctttgtttttgtgcacatttatcctgttaaacaatacaaaatggtactcagtcattaccggatttatcatcacgctgatattctcgcttgaagtagcctactttgctgaatttcatgaaaaaatatctaccggtgttatcgattcaggaatggaaacaaacagttccgaagcttctgctatgctcgggcattatattttttcaattttactgcccgccatagccgtcagcctgctgattaccatttttttcaggaaaaaaacactggtattaccccgctggtttaaaatatcaccacttatcgtctgtgtatttttactgatttcactggtcagagaagcaattgctgatcaccggatcctgatgctttcgttccgggaagatccttatgaaccgggcaggtatctgcgggataagtttccggtggttgccggtaaccttttatatattgccggtgccgctgtcagtaatgaccggtatgctgaagagtatactgaccggaaactgaacaatgcagttatcgccggtaataaaccagaaaataaagttatcgtttttgttatcggtgaatcatcttcaccttcacggtatcatatctacggatatcccggcgaaaccacacccgaaatggaaagaatatttaccggttcaggttcctgtgttactgaaaaagttcattcatccgccccgattacccggaattcaatttcattgtcactatcattttatacccctgaaagtgaagaaaatttattccgggaaaagtcaattattgaaatggcgcaggatcagggatacaagacctactggctgggtgcgcagcctgtatttggcgttcacggatctaaatatggttttatcgccaacaaaagtgatgttattacagttgacgaagataatgatatggcattgccgggtctattgaaaaaagcactgtcagagccggaagaatataaatttattattgttcatttactgggcagtcataaaccttacgctaattatacagaaacagaaaaaaaccagttcagtgatgactatgaccggacaatccgctataccgaccgggtcatggggcatctttatgatgaaatcactgcggcggcagatgactataccctgatatatacatccgatcatggtgaattaatcggtaaaggccatggttttactacaggatctgagcaatttatgatcccgttcctgtataaatctgccaattcgtcttttgattgtcagtttattgaaaaataccggaatcaggatggctggctgagcgggctgatgaataaatatatattatctgaactactcggatattcattaaatcagaaagttgttgaatctgaaaaaaacaatgaccggattctttccgcagaggattattccgttccctttcatttctatcttgaagaaaattaa

SEQ ID NO: 275364 - DNA, 549 bp, Morganella morganii
atgaagaattggatatttctggcccggatgctgagttttccgtttacatcctatgcttatacaaatacagaacttgccccgaaagatcaggctatgtcgtatgttattaaatactccggcagcaaaacggatgaggggaaggaaaaagcgctggatcagtttgataccctgatccgtcagtacccagatgatattgcactgcgcgagctctacagcgatttactgatcgtggacagccgctatgaaaaagcgatcacacaactgaaaatcgtttatcagaataccggtgttccgtcgctgaaactgatggagtgcatgttaaccgaacgcattaaattgcctcataatatgtgttaccgggatgtcatttctgtatttgagcaaagtaatgtccgggattttaattatcttctggcactgtatctgggtgaatcccctgactttgagagacacaaagcccgctggctggaaacacacacattatcagaagagcagaaaaaggttattgctctgcaaccgcgtatgctggtcaatgcctattatccttaa

SEQ ID NO: 275365 - DNA, 294 bp, Morganella morganii
atgccgtttttacataaaagaatgtacctgacagcaggtgatacggtggtggtggattgcggtcgtccgtgcaatgttttaatgatgaccaaaatgaattttaatcagtaccgcaaaggcatgccgttccggacacatggcggcagtggtttcttccatgagcttccggccagaatggtggtatcgtttgatgcggactggaatattaccctggatattgaggaaggggcactgacggttgagcattccattaccatcgagccgcgcgctgataaggcgattgccaaaaaataa

SEQ ID NO: 275366 - DNA, 627 bp, Morganella morganii
atggacaaaaaaacacagggaacgacgatgaattaccagattgttcctttttggatctattcaggaagagttgccttttttatattacttgcggtgcttaccggtttttggggcatgaatgcgtttctgctttatttgttatttcacggaattgtctggcaactggtggtttctctccgtttacatacattaaaagagaagggactggtttcccgcagccatgatatcagccactggatagtgtatgtttacagcataccggtgaaagaagagcgggcgattttaaaaaatccgtgttttgcacttgaacaaaatatgaaggattttttcttccgcctgctgttactgaaaggtatcactcaactgggttttattgcgctgttactggttcagtatatccggacagatgcggatattttcagcctgaccacactgtttgcgggattatccgccgttattatagccgtcatgctttaccggaccggtctgcttatccgtgcattatcagctaatgcgttttatacggaaaaactgcagtcagaaagtggttctttctggtatcagctctgttttatttcacatggctcagtgaaaacggcagggctggataaattactggcaatataa

SEQ ID NO: 275367 - DNA, 1398 bp, Morganella morganii
atggacgaaaaaacgcctgccacgccgccacgcggcgaactcaaacgcagtttaaccaaccggcatattcagctgatttccatcagcggggcaatcggcaccgggttatttatgggctccggtaaaacgatttcactggcaggcccttcggtattatttgtctatatgatcatcgggtttgtcttattctttgtcatgcgggcaatgggcgaaatcctgctgtcaaacctgaattataaatcgttcagtgattttgccggtgacctgattggcccgtgggccggtttttttgtcggctggacgtactggttctgctgggtaataaccggtattgccgatgtggtggctattaccggctatatcatgcactgggcaccggattttccgcgctgggtcagctcgctgctctgtattttgctgttactgtccctgaacctggcaacagtgaaattattcggcgaaatggaattctggttttccatgataaaaattgtcgcgattgtggcactggttattatcggcggcattcttatcggcacacattttgtttcaccggaaggacatgaggcggcgttatccaatatctggtccgacggaggtatgttcccgaaagggataatcggattctttgccgggttccagatagccatttttgcctttgtcggtatcgagctggtgggtactgccgcagcggaaacccgtgacccggtgaaatccctgccgcgggccattaatgccattccgttccggattattgcattttatgtgctggcgctgattattattatgtctgtcacgccgtggcgcttcattccggcagataaaagcccgttcgtggaactgtttgttatgatcggcgttccggcggcagcgagtctggtgaactttgtggtgctgacagccgcagcgtcctctgcaaacagcggtgtgttctccaccagccggatgctgttcgggttagccaaacaaggcagcgcaccaaaacaattctgccgtctgtcaaaacaggcagtaccggccaccggactgattttcacctgcatctgtttgtctgtcggggtgattctgctctactttatccctgatgtgatgcatgtgtttaccctggtaacaacagtatccgctatcctgtttatgtttatctggagcatgatcctgtacagctacattatgttccgccgccgtcgtcctgagctgcatgctgcatcagtctataaagtgccgttcggcagttggatcccgtgggtgtgtctgtccttctttgcctttgtgattgtgctgctgacactggagaccgatacccgccaggcgctgcttgccacgccgttatggttcatcctgctggcagtcggttaccggaatgtcagaaagcaccgccttgcacaggcacaaaagtaa

SEQ ID NO: 275368 - DNA, 1494 bp, Morganella morganii
atgacaatgacgctgaccacgccgctgattgtgacatttattgtctatatcgccgggatgctgttcatcggctatatggcctatcgctccaccaataacttcgacgactatattctcggcggccgccggatgggcagttttgtgactgcattatccgccggtgcatccgacatgagcggctggctgctgatgggattaccgggtgtggttttcttctccggtatttccgaatcctggattgctatcggtctgtgtatcggtgcctggcttaactggcggattgttgccggtcgtctgcgccttcagacggaagtcaaccatgcgctgacgctgccggattacttcacgcagcgttttgaggataaaagccgtgttctgcggattgtctccgcagccgtgatcctgattttcttcactatttactgtgcttccggcatcgtggccggtggtctgctgtttgaaagcaccttcggtatcagttatgaaaaagctatgtggctcggtgcaggggcaactattgcctataccttcctcggcgggttcctggcggtaagctggacagataccgtgcaggcgacactgatgattttcgccctgatcctgacaccggttatggtgattgtgtctgtcggcgggtttgatacagcgctggcaattatcgaagcgaaaagccctgcgtatgtggatatgttccgcgggctggatattgtcgcgattatctccctgctgggctggggactgggctatttcgggcagccgcatatcctggcgcgttttatggcggcggattctcatcacaccatccgcagtgcacgccgtatcagtatgacctggatgatcctctgccttgcgggaaccatttgtgtcggtttcttcggtattgccttcttccagcaaaacccggaactggcgggctcggtgactgaaaaccgtgagcggattttcatgagcctgacctctatcttatttaatccgtggattgccggtattctgctctctgccatcctggcagcggtcatgagtaccctgagctgtcagttgctggtcagtgccagtgccctgacggaagatatctacaaaccgtttttccgtaagaatgcctcacagaaagagatggtgctggtcgggcgcattatggtgctggtgattgcggcgatcgctatctacattgcgatggataaaaacaacaaagtgctggggctggtcagtaacgcatgggccgggttcggcgcagcattcgggccggttatcctgttctctgttatctggaagcggatgacccgtaacggcgcactggcggggatgtttaccggcgcggtgacggttcttatctggatagaatataagtggtttaatttatatgaaattattccgggctttattctggccggtattgcgattgtggtggtcagcctggcaggccgtgaaccggacaaatcagttcagggacgtttcactgaggcggaagaccgttacctcggacggactgagtaa

SEQ ID NO: 275369 - DNA, 3975 bp, Morganella morganii
atggtgagtaccacaatgggcgtcagactggatgatgaaacccgtgagcggatcaaagccgcagcgcaaaaaattgatcgcacgccgcactggctgatcagacaggctatttttgattacctgactcagctcgattctctgccggacggcacactgcctgctgccggagcaccttccgcacaggaagatgaaacagtaccggctgagccgccggtcagctgccagccgtttctggaatttgccggtgatatcctgccgcaatccgtgacccgcgcagctatcacatccgcgtaccgtattccggagccggaagcggtcgctatgctgctgccgcaggcgcaactatccccggatgccgcacaggccacgcataaactggcttacggtctggcagaaaagctgcgtaatcagaaaaacagcagcggacgcgccggactggtacagggactgcttcaggaattctccctctcctcccaggaggggatcgcgctgatgtgcctggcagaagcactgcttcgtattcctgataaagccacccgtgatgtgctgatccgcgataaaatcagccacggtgactggaattctcacctcggccagagcaaatccatgtttgtcaatgccgccacctgggggctgctgttcaccggtaagctggttgccacgcataatgaagcgggactgagccgctcactgaaccgtatcctcggcaaaagcggtgaaccgctggtgcgcaaaggtgtggatatggcaatgcgcctgatgggcgagcagtttgttaccggtgaaaccatcgcccgtgcgctggcaaacgcccgtaaaaatgaagccaaaggcttccgctattcttacgatatgctgggcgaggccgcactgacggccgcagatgcacaggcctatctggtctcttatcagcaggctatccacgccatcggcaaagcctccgccggacgcggtatttatgaagggccgggcatctccatcaaactgtctgccctgcacccgcgctacagccgagcgcagtatgaccgcgtgatgtccgaactttatccgatcctgcgtgacctggtggtgatggcgcgtcagtacgatatcggaatcaatattgatgcggaagaagctgaccgcctggaaatctccctcgatttactggaaaaactctgttttgacccgcaactggcgggctggaacggcattggttttgttatccaggcctatcagaaacgctgcccggtggtggtggattatctgattgacctggcatcgcgcagtcagcgccgtctgatgatccgtctggtaaaaggtgcttactgggacagcgaagtcaaacgcgcccaggtcgacgggctggaaggctatccggtgtatacccgcaaagtttatacggatatctcttacctcgcctgtgcccgtaaactgctgtcagtgccaaatctgatttatccgcagtttgccacccacaacgcccacaccttatccgctatctaccaactggcgggcaataactattatcccggtcagtatgagttccagtgtctgcacggcatgggtgaaccgctgtatgagcaggtggtcggcaaagtggcggacggcaaactgaaccggccgtgccgcgtgtatgcaccggttggtacccatgaaaccctgctggcttatctggtccgccgcctgctggaaaacggcgcgaatacctcctttgtcaaccggatcgccgacggcactattccgctggagatgctggtggaagacccggttgcggcagttcaggcaatggccgccaaagaaggcgctgtcggcctgccgcatccgaaaatcccgctgccgcgcaatctgtacggcaatacgcgggtcaatgccgccggtctggatctgagtaacgagcaccgtctggcgtcgctgtcgagtgccctgctcagccacgccggggataatctgctcagtgaaccactgaccggcggaacatttacaccgtccgcaccggcagagccgcaaccggtcagaaacccggcgaatcatcatgatattgtcggccacgttcgtccggccacagaagatgaagtggatcatgcccttgccaccgcctccggtgcagcggagatctggttcgccaccccggcacaggaacgggcagacatccttatccgcgccgcacagctgatggaagatcagttgcagccgctgctcgggatcctggtgcgggaagccggtaagacctttaccaacgcgattgccgaagtccgtgaagccgttgattttctcaattattacgcctctcaggtgaaaactcactttgccggtgatacgcaccgtccgctgggaccggtggtctgtatcagcccgtggaacttcccgctggcaattttcaccggtcaggtagccgctgccctcgccgccggaaacccggtgctggcaaaaccggcggaacagactccgctggtggcagctgttgccgtttcactgctccatgacgccggtgttccgcgtgaagtgctgcaactgctgccgggtgacggcgaaacagtcggtaaccagctggtgtgtgatccgcgtgttcagggcgtgatgtttaccggctccaccgcggtcgcgaagattttacagcgcaatctggccgcccgtctcagtactgaaggccgggtgatcccgctgatcgccgaaaccggtggcctgaatgcgatggtcgtggattcctccgccctgacagaacaggtggtcaccgatgtggtcagttccgcctttgacagtgcgggtcaacgctgttcagcgctgcgtctgctctgcatccaggaggatgtggctgatcgcaccatagagatgctgaaaggcgcgatggcggaatgccgtctcggcaacccggacatactggcaaccgatatcggcccggtgattgatgaagaggcacataacggcatccgccagcatattcagcagatgcgcggtaaaggcagaccggtgtatcagtccgccttcggaatggaaaccggttcaccggcgattcttaacggcacctttatcccgccgacgctgattgaactggatgatgtttctgaactgacgcgggaaattttcggtccggtgctgcatgtggtccgttaccagcgcgataccctgccggaactgacggagaaaattaatgccgccggttacgggctgacattcggtatccatacccgtatcgatgaaactatcgcacaactgacgcagcagattgaagccgggaatatttatgttaaccgcaacattgtcggtgcagtggtcggtgttcagccgttcggcggcgaagggctttccggtaccggtccgaaggcaggcggcccgctctatctccaccgcctgctggcggaacagcctgatgattcagtggtcagccttctggcagaacaggatgatctcaatccgccggatgtcactctgcggacacagttactggcaccgtttgatactttcctcacctggctggaggcgcagcgccgccacgatgtgctgacagcggttatccgttacggcgagttatcacaggccggtacctgccgtctgctgccgggaccgaccggggagcgcaacagttattatctgctgccgcgcggaaccattctcggcctgaatgattcggagcaggatgctctgctgcaactgggtgccacactggcagcgggctgccgtcagctctggcctgcggcggaacatacccgttcactgtataacgctttgccggacaacgtccgtgcgcaaatcacactgacagaagagtggtcagcggatggtgtgatctttaacggtgtgattttccacggtgacagtgatcgcctgcaggcagtaaaccgggatgtggctgcacgcggtggtgagattgtgccggttgccgggctcagtcacggtgatacacaaatcccgctgatgctgttactgcatgagcgtgcggttagtgtgaataccgctgcggcgggcggaaacgccagtctgatgactatcggctga

SEQ ID NO: 275370 - DNA, 513 bp, Morganella morganii
atgtctgtttcaaaacaaaagaaacggcccgtaagccgttacattaaagacttcaaacacagtcagactcactgcagtcattgtcacaaaaccctcgaccgcatctccctggttttcaacggtcagctgatcaataaagaagctatttctgaaatgacagatatgatcgatgacaccacctggatgggattgcaggacaaatttgtggcactctgccgtttctgcagcgagatctactgcaacagtgcaaccgattatttcgatatcatggcattcaaacagtatctgtttgaagaaacggaaatgagccacagcaccgtgcgcgaatatgttgtccgtctgcgccgtctcgatgaactgctgtcctccaaagccttcccggccaccacagaattctccactgaaattatccaggctcagctgagtgaagatttatctgactccgccctgagcaactacaacatcgcactgcgcaagtacgaacagtatcttgactggcagggtaaacactga

SEQ ID NO: 275371 - DNA, 723 bp, Morganella morganii
gtgagtgatttgtataccgccgaaggtgttatcaacaaaaatagcctgtgggagcgttattatccccttatccggcacgaagccctgaagttgcaggtgagattaccggcaagcgttgatattgacgacttaattcaggccgggggtatcggcttactgcatgcagtggagcgttttgacgccatgcagggtgccacctttgcaacctatgcggtacaacggatccgcggggcaatgctggatgaattgcggggaagagattgggccccccgcagtgtgcgccgtcaggcgcgggaaataaccaaagccgtgcgcgcgctcgaacagtctctggggcgtgcagccacagagcaggaaatcgctgattcgttacagatggatatcgcagaataccgtcaggtcttaaccgataccaataacagccagctgttttcttacgatgagtggcacgaaatccacggtgagagctgcgaacccgtccgtgatgatgatgacgggggcaacccgctcggtttgttggtagacgagagtttgcgtcaccaggtggttgaggcgataaaacaactgcctgaacgtgaaaaactggttctgactctttactatcaggaagagctgaacctcaaggagataggcgcagtgctggaagtgggggaatcccgcgtcagccagttacacagccaggcaatcaaaaggctgcgggcgcgcttaaaatccatgaagtaa

SEQ ID NO: 275372 - DNA, 1131 bp, Morganella morganii
atggcacaggttatcaatactaacgttctgtctctggttactcagaacaatttaaaccgttcacagggcgtattaggcactgcaattgagcgtctgtcttcaggctcccgcatcaacagcgcaaaagatgatgctgcaggccaggcaatcgccaaccgtttcactgctaacgttaaaggcctgactcaggcttcccgtaacgcgaacgacggtatctctatcgcacagaccgctgaaggtgctgttaacgaaatcaacgacaacatccagcgtatccgtgaactgactgttcaggcgaaaaacggtactaactcacagagcgatatcggttctatccaggaagaagtgaacgagcgcctgtcagaaatcaaacgtatttctgaacaaactcagttcaacggcattaaagtgctggagcagggcactaaaatgaacttccaggttggtgcaaacgacggcgagaccattgaactggatatgcagaaaattgatctggataaactgggtctgaaagatttcaaattagaacagttcactaccgttaaagataccgcaactgcaaccgctgacctgaaaaaagaaaccaagctgcagaacggtgcagctgaagcagatacaaccatcaaagttgtaaaagaagatggtactgcttctacagctgagattttcaaagatgctaaatctgatgcgtattacgcaaaagatggtggcaaattctacaaagtggatgtttctttcaaaactgaagagaaaaacccgggtacaccagcagatggcctgaaaactgaagctacactgaaagtcagttctgaggctctggaaaacgttaaaacagaaactgaagcaaaagatctgaattctgcaaccactaaaaaactggacgacgcactgaaaactgtagatacctaccgttcaaaactgggtgcattccagaaccgtatgcagtctaccatcaacaacctgaacaactctgttaacaacctgagcgcagcacgcagccgtatccaggacgcagacttcgcaacagaagtgtctaacatgagccgtggtcagatcctgcagcaggcgggtaccgctgttctggcacaggcaaaccaggttcctcagggtgttctgagcctgttacgttaa

SEQ ID NO: 275373 - DNA, 1149 bp, Morganella morganii
atggcacaagttattaataccaatattctatcactggttacccagaataatttaaatcgttctcagggcgtgttaggaaccgccattgaacgtctttcttccggtgcccgtattaacagtgcaaaggatgatgctgccggtcaggcgattgctaaccgctttactgcaaacgtgagaggcctgactcaggcatcccgtaacgtcagcgatggtatttcactggcgcaggtaacggaaggtgctatcaatgaaatcaacgataacatccagcgtattcgtgaactgggtgtgcaggcaaaaaacagcactaactcagcaagcgatatcaactctataaaagaagaagttgatcagcgcctggcagagattgaccgtatttcagaacaaacacagttcaacggcatcaaagttttatccggcgataaaaaaatgagtttccaggttggtaccaatgatggtgaaacaattgatattgacctgaagaaagttgaccgcgaggcgctgggtctgaaagatatggacttttctacgctgagtaccgtgtatcgtcaggaaggtgctgccaggaaagctggtgattttaaagatgatactggtactatcgcagccaaaaaaatggtattcacgggtgtcaaatgggcaggtacggcaccaacagaagtaaaagaagcaaaagatgagaatggtaaggctattaaagatacttatctggtgacgggtaagattgatgatggtaaaggcggcacgaaagatgtgacctatgaagcaaccgtgaaagtagaaaaagattccggtggtacggattatcaggcaactgttaatgtagacaccagccatgaaatccaggtactggctgcgggtacgaaacctccggcagatgaaatcctgaagacgctggatgatgcactgaccaaagtagatactcagcgcagtcagttgggggcattccagaaccgtatgcagtctaccatcaacaacctgaacaactctgttaacaacctgagcgctgcacgcagccgtattcaggatgcggatttcgcgactgaagtgtctaatatgagccgtggtcagatcctgcagcaggcaggtacagctgtgctggcacaggcaaaccaggtaccgcagtcagtactgagcttactgcgttaa

SEQ ID NO: 275374 - DNA, 1455 bp, Morganella morganii
atggcaggcatagcaacattaggaatcggtgcgggaatggatctcaatgcacagctggagatgctggaaaaagcagaaatgcgccgtctggaaccattaacagcccagaaaacggcatgcgatgctcagattagtgcttttggtaagttacaatcagcattagagaaattaaaaactgccgcagaagatctgaaaaaatatggtgacatcagcaccactaaagtcagtgaagacaataaatactttggtgccacaaccaacggtaaagcccagcccggtctgtatgatatcagcatcgatcaactggcaaaaacgcagacgttatccggcagcggtgtccctgacggcaaatcggccatgggtgacaccggtattggtgaacgcactatttcgttcagttttggtgacggtagtgattctgaaaagaatttcagtataaaactgagtggtgataagacatctcctattgaaattgctgatgccattaaccgtgccgacaaaggtatcagtgccagtgtgattaaaggcaaagatggtcagtttcatctggttctggtcagtaaaaaccagggaacagactccgcaattaatatttcagttaccggtgatgatacactgaataatgcaatcggcggaaaatcagtcaaagacagcagtggcaaagtcacatttatacctgctgttgccggtaatatggaacaaaccacagcaccacaaaacgcattattcagcgtaaacggtattgcccaggaatcgcaatccaacgaagttaaagatgcattttttggtctgacactgacattaaaaaaagtcactgaaaaagacagctccggtaacccgattactgagccattggttgtatcctctgatattgaaccggccaagaaaaaaatccaggcatgggttgatgcgtataacgaatatcagaaactgtgcaaagatctgaccaaatatactcagacagaaagcggtaaagaagctgataaaaataacggaccattaattggtgactcaactctgcggggtattcagaatacaattcgcgggcaaataagaacaccaaacggtgatggccagataaataccatgagcaagctgggtatccggcaaaaagctgacggtacgctggaagtcgacaacaaggtactggaaaaagcgctgaaagaaaatggttccagcgtaaaagagttttttgccggtgacggaaaagagaccggttttgccaccgaaaactttaattatctgaaaaagacattagacagccgtgaaggtacgattcataacgctaccgacggattggaaaaaaagaaaaaaggtatcgataaacgcatcgaacaaaccaccaaacagattgaaaacacgatggatctgtatcgccgtcagttccagaatctggacaaaatgatgaactccctgagtggcaccacacaagcactcggcagaatgttaggttaa

SEQ ID NO: 275375 - DNA, 399 bp, Morganella morganii
atgtatcagcgcaaggcaaatcaggcttatcagcaagttaatcttgaaagtgaaattaccaatgcctcgccttatcagttgatccggattttgtttaacggggcgctcagcgcccttcgccgcagcgaaatctttatggagcaaaatgatattgccgccaaaggtaaggaactgtcgaaagcgattaatattattgataatggtctgaaacaggctctggattatgatgccggcggtgagctggcgcataatctggcctccctgtatgactatatgattatgcggttactcaacgcaaatatcgaaaataacgtggcctacgtaaaagaggtctatcaactgctctccgatctcgcggcaacatggcaacaaatcggggcaaatgtggatgaaagataa

SEQ ID NO: 275376 - DNA, 390 bp, Morganella morganii
atgaaagataatcaggtgagtattcaaacgaccatcaatttacacgatatatatcaacatgtactgacactgagtgaagaactcgttaccctggccagaaacagtgaatgggatgatttgattgcccgtgaaactgattatgtttgtgcagttgaacacctgacacagttatctcatgaactggaaaaagaacagccggtgaccggcgaactggtggaaatattgcaggctatcattgagaatgaacgggtaacaaaaatctatttgcaggatcacctcaactttctgagtaaagaaataaaacagcttgaccaacaacgcgtgattaataaaagttacgggcaattcagtgacccggattattcaattcatgttaaaccagtgaaataa

SEQ ID NO: 275377 - DNA, 399 bp, Morganella morganii
atgaatatggtgattcttatttttgttggcggggcattcggtgcaatctgccgtgaattactgatgcttggtgtgccgtctctgcatgacggatttccgcttgatattctggcggctaatattattgcctcattcctgctgggaataacggcggcgttattacagcgcaaccggattaatcagtatgtcaatgcgctggtggcgaccggtattatgggcggattgtccacattcagcagctttgtgtacggaacctttgaaataatgtcatccccggcgttactgggtaccggaataacgtatcttctggtcagtgtgatcggcggatttgcagctgttatggcggggttatatctgggaaattgtgtgaaacccggtgtaaaaaataccgctgaatag

SEQ ID NO: 275378 - DNA, 381 bp, Morganella morganii
atgacagcaattgatattttctgggtcggtatcggtggcggcagcggttcattactgcgctggtgggtcggtaaactgacaggcgaacgttatcacggccattttccgctgggcacctttattattaatatctcgggtgcttttattatcggcttcttaagcacgttattcgtgattgactggcatgaccgcttcggttcattcctgcatgcggctgttctgaccggtattctcggcggttacaccactttcagcagtatgcagctggatgcggcaaaactggtgaattcaaaacagcggatgctggctttcggttatttgcttatctctgttgtggcgggtctggctgctgccgcactgggtgtctggctggtggcatga

SEQ ID NO: 275379 - DNA, 354 bp, Morganella morganii
atgaagagatataaaacagtagtgacaagcgtgataatactggccggtttttatttccgtgtgtggttgtatacagcaaccgggatcacactggtgcaacggataaataataacccgggggaaccgctggtttctgctgaattttgggattcgttatacctggccggtaaattcctggtagtcattttgctgctggtattgtcgggtgatctgatccgtatttaccgtaatatccggcggtacccggtaataactgcaccacggacccgtttttatctgacggttaccgcactggcaggtggtgtggctattttcctgctgaccgtcagttattggtattcgttcactgtatag

SEQ ID NO: 275380 - DNA, 504 bp, Morganella morganii
atgaaatcagcctatgttattgctccgctcttcttattaatggcaggatgcagtcagaatgcacggacagatcaggccgcagagaacaccaaaacattatatattgattctgaactggccgattgcgtgggtgttgcgccgatgacatgcatgaaaataaaagaatcccctgatgcagagtgggaatttttctatcagaacatcgacggatttacttatgaaccgggataccagtaccgggtgtccgttaaaacaacagatgtgccgaatccgcctgcggatgcacccaatatccgttatcagttaatttccgtactgaataaagatcctgtcccggcgaaagacgcaaaaattggtatggcaaacccggcatccgtttattgtgaacaatccggcggtaaaacagaaaccgttaaagcggcatccggctggaccggttactgtaatttaccgggtggtgagcgggttgaggaatggacgtattaccgcaaaaaccataaataa

SEQ ID NO: 275381 - DNA, 333 bp, Morganella morganii
atgcgtaaaattctgtctgtgtctgctgtcgccttagtttccgcattactggcaagccctgcatttgcggccaaaacggatacctataactgtgacgggcaaaaaattaaagttgctttcccggatgccaaaacagcagtaatggtatacagcgatgaaattattgttctgaaagaagcggttgctgccagcggtgcccgttatgtcggcgaaaatttccagctttggtcaaacggaaaaaatgaactgaagctggccagcatttcagaggatgatacagtgaaaggtaaagttgccgaagataaaggccgtacctgtaaattagttaaataa

SEQ ID NO: 275382 - DNA, 594 bp, Morganella morganii
atgaaaatattctcatctctccggcagtttatgcgtatttatcagtctccggcagtattgatattgcatttcattatcattatctcggttattcttcagattgtgatcagcaactggatgtctgtttcggtaaccggtgttattcccgcaagcggctatcgcttattttttacctggctgcatattattaccggtctttcattctgggtttccggtaccctgcttattgctctctgttttcatcagcggggagtaaagcgctattatccgtgggctttcggctgtttttcacagatagcggcagactgccgtgccctgctgcacgggaaattaccggaatcctctcccggaggtctggcaaccagcgttcaggggctgggtctcggtgcactggtactggtcgtgctatcaggtacagcctggcttatattatgggtggcggggtcagcttatgccggtgaaatacgtaacctgcacaaaacgctgacgggactgattgaagcctatattattggtcatggtgcaatggggttattgcattttatagtctggctgcggaaaaaatcagtttatgataataatcaaacccgttga

SEQ ID NO: 275383 - DNA, 288 bp, Morganella morganii
atgaaaaaaatccttcccgttctgatcgctgtttcaatgctggcagggtgtaaagtggatgttgaaaccacggtaaatacggatgatctggtctctcatgaacacaaactggtcgccggtaatatcaatgtggaagtaccggcctgtaatgatttcgaagattcacggaaagaatcaaaaagtcttatcagaattaaagagcagatgccggctgtcttctccggggcttattattttacagcggtgccgaggatacattatctccggatagaacatcaacgggtttga

SEQ ID NO: 275384 - DNA, 312 bp, Morganella morganii
atgacaattcaggcaattgagggagtcgtctcccagctgaatgtaacagcagcacaggcagcaagccagacgaaaccggtcgttgatgcaccggggtttggtgatcatctgatctcagcagtgaatgagatcaatgccacccgcgttaattcagcaaaaaaggtggaagatttcactctcggcaaagcagatatttcccttaatgatgtgatggtggacatgcagaaagcgagcctgagcctgcaaatgggcattcaggtacgcaataaactggtggctgcttatcaggaaattatgtcaatgccggtgtaa

SEQ ID NO: 275385 - DNA, 1707 bp, Morganella morganii
atgtttatgagtgccgcaccacaagacaccggagataccaaaaagggattcgccctgattattgaccgtattaaggctgatccgaaggttccgctgatggtcgccggcgcggctgcaatcgccgttattgttgcgctgttcctctggatgcgcagcccggattaccgcgttctgctcagtaatctgagtgccaaagacggcggcgatattgtcagtcagctgacacagatgaatatgccttaccagctcgcggataacggcagtgccattctggtacctgctgataaagtgcatgagctgcgtctgaaactggcacaggccggtctgccgaaaggcgggaataccggttttgaactgctggacaaagaacagttcggtatcagtcagttcagtgagcaggtgaactatcagcgcgccctcgaaggggaactgtcacgcactatcgaatcactcagcccggtgcagaccgcacgggtacatctggcgatcccgaaaccgaccctgtttgtccgcgagcagaaatcaccgacagcctccgtcaccgtcggattgctgccgggccgcgcactggatgaaggccagatcagcgcgattgtgcatatggtctccggcagtgtgtcaggattaacctcctccagcgttattattgttgaccagaccggacgtctgctgacaaacaatgataacagccagcagtctgtcagcacgtcacagatgcgtctgacccgggaaaccgaagcacgtctcaaacaacgtattgaagacctgcttaccccgctggtcggccgtgccaacgtgcaggcacaggtaaccgctcaggtggattattccaaagtcgaacagaccgccgaagaatataaaccaaatcagcagccggattccgccgctgtccgctcgcgccagagcagccagagtcagcagaacagcaacggcggtccgggcggcgtaccgggtgcattatccaatcagccggtcagtgccccttccgcccctgttgaaacagcaaaagcggatacaaaagataacaaaaatgcatctcctgccgataataaaagtaacagcaacattaattcgcagagtgatgaaaccacaaactacgaagtggatcgcaaaatcagtcatacccagcgccagattggcgtgattgaccgtctctctgttgcggtgattattaactggttgccgcagaagaaagaagacggcaccgaagaaatgcagccgctgccgccggagatgatcaaagagattgaatcgctgacccgtgaagcgatggggtattccgtcagccgcggtgacagcctgagcatcaccaactcccgctttaccgatgaaggtcagctgaccgaagagccgtcgctcttcacaagcccggtcatcattgcgcaggcactggattacggcaagatcctgctgctgttactggtgggctggctgttgtggcgcaaaggtatcagaccgcagtggcagcgctaccgcaaagcacagcaggcggaagcggaagcccgtatgtttaaggcgactcagatgaagaccccgctcgtggctgatgatgttatcagtgacgatatggacgagaaaacccgccgccgcctgacccgtcagcgtgtcagcgccgaaattcagagtcagcgtatccgtgagatggcggataaagaccctcaggttgtggcaatggttatcagtcagtggttaggaaaagcacaatga

SEQ ID NO: 275386 - DNA, 993 bp, Morganella morganii
atgaatttaagcggaacagaaaagagcgccgtcatgctgatgacgctcggtgaggaccaggccgccgaggtctttaaacacctgaacaataaagaagttcagcagctgagtatggcggtctccaacatgcgtcaggtctccaatgccgagctggcggaagtcctgacggagtttgaggaagcggcaattcagtatgcggcgctgaacatcaataccaatgattatctgcgttccgtgctggtcaaggcgctgggtgaagaccgcgccgccagcctgctggaagatatcttcgagaaacacgaaagtgcgtccgggatcgaaagcctcaactatatggagccgcagactgtggccgatattatccgcgacgaacatccgcagattatcgccaccatcctggtgcatttaaaacgcaacctggctgccgatgtgctcgagttgttcgacgaacgccagcgcaacgacatcatgctgcgtatcgccacctttggtggtgtgcagccggcagcactggcggaactgaccgaagtcctcaacaatctgctggacggccagaacctcaagcgcagcaaaatgggtggcgtgagaaccgcagccgagatcatcaacctgatgaagagtcagcaggaagaaggtgttatcggggcaatgcgcgattacgacggcgaactggcacagcggattatcgacgaaatgttcctgttcgagaaccttatcgaagtggacaaccgcagtatccagcgcatccttcaggatgtctccaacgactcgctggttattgcactgaaaggctgcaacgaagagctgcgcgaacatttcctgcgcaatatgtccacccgtgcggctgagattgtccgtgatgatctggaatcccgttcaccggtgcgtatgtcgcaggttgagaatgaacagaaatctattctgctgattgtccgccgtctgatggaaaccggcgaaattgtgattggtggtggtgacgatgtctatgtctga

SEQ ID NO: 275387 - DNA, 738 bp, Morganella morganii
atgtctatgtctgataaggaaaacaccggcctgccgtggaagcgctggcagccgcgggagctgaatcagtgggatctgaattcctctgtgctccctgccctgtccggtgagccggagccggaaaagcctaaaataccctgcctggagccgaaagaggtgctcgagcagatcaatctgctggataacctgaaagaagaagcacagcgcagcggttttcagtccggtcatgagcaggggcagaaagccggttatgacgccggatttgctcagggtctgcaggacggcgctgaacagggccgtcagcaggtactggcagaacagcagccggtcacagaagagtggcagaaactgttatccgagttcagttactctctcgacagttttgacagcgtggtaaccaccaaactgctgcagattgccctgaccgccgcccgccgggtgctcggtcagcctgcggtctgtgacggcaccgcactgctcgaagagatcagccgtctgcttcagcagaaaccgctgtttgccggtcagccggagctgcgggtcaacccggtacatgttgagatgatcgaacagcatatcggtacccagctcagtcttaacggctggcgtctggtgccggatccgcaactgcatgcgggcggatgccgtgtggtggcggatgacggcgaaatcgatatgagtgtcgccacccgctggcaggagctgtgccggttatacgcaccggagaccttgttatga

SEQ ID NO: 275388 - DNA, 1365 bp, Morganella morganii
atgaccgcgcggattggccgctggataggcgcactggaagattttgaatcccggatgtccggcgtggcgatgacccgccattacgggcgtctgaccaaaatcaccgggctggtgatggaagccgagggcatcaaaatgccgctcggtgccacctgtttcatcgaacgcgtgatcaacggaaacaccgaagaagttatctgtgaagtggtcggttttaacggaccacgtatgctactgatgccgctggcagagctggaaggtatcgcgccgggtgcccgcgtgtatgcgcaatccaccggaagcggcgggcagaccagccgccagctgccgctgggtgatgagctgctcggccggatcctggatgcctccggcaacccgctggacggcaaagggccgctggaaaccaaaatccgtgctccgctgattacgccgccgatcaacccgctggaacgatcacctattaacagtgtgctggatgtcggtgtccgcgctatcaacgcccttctgaccgtcggacgtggtcagcgtatggggctgtttgccggttccggcgtcgggaaaagtgtgctgctcggcatgatggcgcgtttcacacaggcggacattattgtggtcgggctgattggtgagcgcggccgcgaagtaaaagattttattgagaacatcctcggcgcggaaggacttcagcgcgcggtggttatcgcggcaccggcggacgtttccccgctgctgcggatgcagggtgcctcttatgccacgcggatcgcggaatattaccgtgacctgggtcgcaatgtgctgttaattatggattcactgacccgttacagtatggcacagcgtgaaattgcgctcgccatcggagaaccgccggcgacaaaaggctatcctccgtcggtgttcgcaaaattaccggcgctggtcgaacgggcaggcaacggcaaaaacggcggctctgtcaccgcgttttacactgtactgaccgaaggggatgaccagcaggatccgatcgctgactccgcacgggccatccttgacggccatatcgtgctttcgcgttccctggcggaatccggacactaccctgctatcgatatcgaagcctccatcagccgtgccatgaccgaactgattgagaaaagccattaccggaaaattcagcgtttcaaacagctgacctccgcttaccagcgcaaccgcgatctgattaatgtcggtgcctacgcggcgggcagtgatccgatgctggatgaggccattcagctgttcccgtatatggcgaagtttctgcagcaggatatcgatgagcgctgtgactacccggctgcctgtgagcagctcagtcaggtgataccggacgcataa

SEQ ID NO: 275389 - DNA, 444 bp, Morganella morganii
atgtcaaatacgcatgcactcaccacgttgttaaatttagctgaagaggccgccgaagaggcggctaaagtactggcgcaggttcgtcagacccacatacagatgagtcagcagctgaccatgctggaaaattatcaggccgattaccggcagaagctgaatcagacactgcataccgggatggctgccgataagtggcagaactatcagcagtttctggtcaccctcgaactgaccattgaacagcagcagggtcagctgaacctgtgggagcagcgcgtcagtgatgccaaccgccactggcaggaaaaacaacagcgcgtcaatgccttcgataccctgatccgccgtgcggatcatgcaaaaaatcaacgacaaaaccggctggagcaaaagcagatggatgaatttgcccagcgcgcgactttatggagaacccgttaa

SEQ ID NO: 275390 - DNA, 1368 bp, Morganella morganii
atggatgtcaacgccggtaccaaagcagtcagttctgctgacaacgcattgaataaacaggaatcaccgcgtgcggaagatgcacaggcaaccgccctgccgtttcaggccgtgatggatgcacagcagccgcgcccggaaaaaccggcacaggctgtacatgcggtaaaacagacccgcaatgacactgctgcacataagcagggcaaagagggtaaagcggcttccgcacaggaaaagcaaaccggtgccgacaccatggcacaactgaatttctcccgccgccttgccggggatgctgccgcacctgagctggatgcaaaattgctgaccagcggggatgatgcacctgcattaccgcaaacagaaggtgaaacggacaatgccctgctcgcggcactgaaagagcgcctgagcggacgggacagccgcgcggcggagaaaccggccgcagacacaaagctgcagattgatgacagcggaaaaaacgtcgcaaaaaccacagaactgccggaagacgtactggctaaaaccggcgataaaccgctgatcacggatgaaaataacgacgcacgcaccctgtttacggatgacaaatcaaaaccgcgtgtggatcagccgcgtttttcactgaccgatgcacaaaaaccggacccgaaagcactgccggaagattttttaccgctgaacaagaaatccgctgacacttccgtgccgttatcgctggcgtccgccactgataccaccggtgcggataacagcaaaagcgcattcagtatcaaaacagaaagcagcgcctttcagactgtcaccgcaccgggcagccatactgccgtccagagcccggtactgatgccggcggcggctcagagtaccgccgcgcagaccaatgccccggtggctcagccgtccatgcagctgaccgcgcagctcggcagtgaactgtggcagcagcaggtcagccagaatatgatctatttctcccgtcagggattacagcaggcacagctgcgtctgcatccggaagagctgggctccctgaatatccatcttaaaattgaggataatcaggcggtgatgcactttgtctccccgcacagccacgtccgcgcggcgatggaatccatgatgccggtgctgcgcaacgcccttcaggagagcgggatccatctggcgcaaagctccgtcggacaggagtatcacggtaatcagcagggttccggtgatgatcgtcacaacggcggcagcgctgatggtattacttctgccggaagtatcagcggcgtgaatgtcagcacagatacccttgtccgcccggcggcacttcatgacgcccgcgcccgcggcgggatcgataccttcgcctga

SEQ ID NO: 275391 - DNA, 486 bp, Morganella morganii
atgtcgtcttcacgcaatgcctcaaaaggttccaataccgggttactggttattttcgccctgattgccctcgcaggagcaggtttcgggggttacagctggtggtcttctcaccaggagagcaccaccgccggtaccgcagacgagaaacgggccaatatgcctgagcctatctttatgggcattgaaccgtttaccgtgaatcttcccggtatgaataacggccgtgatcgtgtgctgtatattgatatgacactgcgtctggccaacgagcgttcccgcaaacagctccatgagtatctgccggaagtccgcagccgcctgttacttctgctctcacagcagtccccgcagacactcggaacccatgacggcaaacttcagctgatgaaggcagttaaaaccaccttagccccgaccgtggtacagggacagccggatcaggaaatttcggatgtgttattcaccacctttattctccggtaa

SEQ ID NO: 275392 - DNA, 1014 bp, Morganella morganii
atgagcgataatattttatctcaggcagagatagacgcgctgctcaatggtgactcgccgtcagagccgcagcctgccgacacagcactcaataaaagtaaggacaaagtccgtccttatgacccgaatacccagcgccgcgttatccgcgagcgcatgcagtccctggaaattattaacgagcgttttgcccgtcagttccggatgggattgttcaacatgctgcgccgcagtcctgatatcactgtcggtggtatcaaaattgaaccttatcatgaatttgcccgtaacctgccggtgccgaccaacctgaaccttgtgcatatgccgccgctgcgcggaaccgcactgttcacctttgaaccggcactggtctatatcgctgtcgataacctgttcggcggtgacggccgttttccggtccgctccgaaggccgggagttcaccaacaccgaacagcgcattatccaccgtatgctgaaactggcactgaacgcttaccgcgatgcctggaagccgattgctgaagtggatgtggaatatgtgcgctctgaaatgcaggtgaaattcaccaatatcaccacctcccccaacgatatcgtggtcaccacctccttcctggtggagatcggtaataccgtgggtgagctgagcatctgtattccgattgccatgattgaacctatccgcgagcggctgattaacccgccgatggagcacggtcaccaggaaaatgaagcctgggtatccagtctggtgacacaggtgaaacattccgagctggaactggtcgcgaattttgctgaaatcccgctgcggatttcaaaattactgcaactgcagaaaggggatgtgatcccggtggagaaaccggatcgcctgattgtcagtgtggacggcgtaccggtactgaccagccagtacggcacccgggacggccagtatgcattgcgtgtggaacatttgattaatcctgtattaaacactctggacgaggaaaaaaccaatgagtga

SEQ ID NO: 275393 - DNA, 411 bp, Morganella morganii
atgagtgaggcgaacaacactcctgatatgaacccggaacacgatggcgagtctctgtgggcagaggcaatggaacaacaaaaaaaaacagaaaccgggaacagccaggcgtttgataatctcgacagccagaatccgctgaatcagctgtctgatatcaatctgattatggatatccctgtccgtctctctgtggaactgggccggacaaaaatgaccatcaagaagctgctgagtttatcccagggctctgtggtggcactggacggactggccggtgagccgctggatatcctgatcaacggttatctgattgcccagggggaagtggtggtggtctccgacaattacggtatccgcataacggatattatcaccccgtctgaacgtatgcgccgcctgagccgctga

SEQ ID NO: 275394 - DNA, 468 bp, Morganella morganii
atgacaccgaccgcatccggcacccccgttttaccggccgcagagaaaacggcagataatgccgttttttcttccgtcgctctgccgccgcccgccgccggttctcaggcgattaacagcacggacagcctgattcaggtgtccggcgcactcagcggaattattctgctgatcctgggactgacctggtttgtccgcaaattcggctttaccgcaaaactggccggcaaaaatccgctgctgaatatcagaagcacctgttctctgggaaacaaagaacggctggtggtggcggagattcagggtgaatggctggttctgggtgtgaccgcgcagtcggttaatctgctgcatcgctgtccggctgacccggcagcggtaactgatgccccttccgcctttcaggcactgctgaaaaccaaacgtgccgcaaataaagatgcggtaccggctgacgaaccacgctga

SEQ ID NO: 275395 - DNA, 741 bp, Morganella morganii
atgatgtcattgctcaaacgcgccattcccgcactcgctctgtttctgctggttccgcaggcgcaggcttcactgccgggcgtcgtcagtcatgtgctgccggacggcggccagagctggtctctgccggttcagaccctgctgtttctgacactgctgggctttatccctgcactgctgctgatgaccaccagttttacccgcatcattattgtgctgggtttattacgcaacgcactcggaacaccatccgcaccgccgaaccaggttctgctgggactggccctgtttctgacgtttttcgtgatgtcaccggtgttcgataaagtctacgaggatgcttaccgtccgttcagtgaagacaaaatcagcctggaaacagcactggatcgcggcaccgcaccgctgcgcacatttatgctcggccagacacgcgaaaacgacctggcgctgtttgcccgtatcgccaaagtgggtgagattcaggaagccaaagatgtgccgatgcgcattctgatcccggcctttatcaccagtgagctgaaaaccgccttccagattggtttcacgctgtttattccgttcctgattattgacctcgtggttgccagtgtactgatggcactcgggatgatgatggtaccgcccgccacggtttcgctgccctttaagctgatgctttttgtgctggtggatggctggcagttactgctcggttcgttatcacaaagctttttttag

SEQ ID NO: 275396 - DNA, 270 bp, Morganella morganii
atgacaccggaatccgtaatggcgatgggcaccgaagccatgaaaatcgccctgatgctggcagccccgctgctgctggctgccctggccgccggtctgctgataagcctgttacaggctgccactcaggtgaatgagatgaccctgtcattcattccgaaaattctgtctgttatcagtgtgattgtgattgccggtccgtggatgctcaatctgctcactgactatatgcgcgcactgttaaccaatctgccgtttatcatcggctga

SEQ ID NO: 275397 - DNA, 786 bp, Morganella morganii
atgttaagtatcaccagtgaaacactgacgctgtggctgagccagggattttacccgtttatccgggtgctggctttactgggtacggcaccgtttttcaatgaaaaacaatcaatcagcaaggttcgggtgatgctggcctttttcacggttctgattgtgtccccgcaactgccggtggtaaatatcccgctgttttccgcccccggtttgtgggtgattttacaacaggtggtgataggtgtggcgatgggactgaccatgcagatggcgtttgccgctgtccgtcatgcaggggaagtgatcggcctgcagatgggcttatccttcgctaccttctttgacccgagcggcgggccgaatatgccgattctggcacgtatcctgaaccttatcaccctgctgctgtttctcgcatttgacggacacctgtggcttatccatattgtgataagctcgtttgacctcattccggtgcaggtcaccccgctcaaccgtgaaggattccgcatgctggtacagtcggccaatcatatctttctcaacgggttaatgctggcgctgccgtttatcactctgttcctgattcttaacctcgcattggggattctgaaccggatgacgccgcagctttctgtgtttgtggtgggttttccgctgacactgaccgtcggcatcagcatgctgggcctgatcatctccgtcctgccgggctttaccgagcgggtcattcatcaggcgtttgagcagctctcactgatttttaacctgtttgcctctccgtaa

SEQ ID NO: 275398 - DNA, 738 bp, Morganella morganii
atgaaaccacaacagcggactgccatcattaccgatgcagaaagttgtctggggaaagcgttagtcagaacactgcttgatgaacattacaatgttatcggcatattcagcagcgatgaacacatgcagagttttttgcaggaactggataataaaaccgcatttttacccgttaccggtgaaagtcattgtaccgattttgccgcgcagctgatacagcagggtattattcgcttcgggaatatcgatattattattcataattccggtgcttttctcagcaaaacttatgaaaaaacgacaccggatgatttcatgcatttaataaacagcaatatttatagtttatttaatctgagtcaattggcgattaaaaacatgttgaaaaatcacggtggtaaaattatcgtggtaacctcctgtattgccctgcaaccgtcgcagaaaataccggctgcactgagtgtcctggcaaaggaaggcgtgcacggactggtcagagcactggcgctggagtatgcaaagaaaaatatccgcgttaatgcggtagcaccggggtatattgagtccccgctgaatacagaactcaatcaggattttattaatttagtctcaccggcggataaagtcggaaccattaatgatattatagaaagtattcgttttctgctgaaatctgactatattaacggcactgtcatgccggtggacggaggttattcagcaggaaattggtaa

SEQ ID NO: 275399 - DNA, 954 bp, Morganella morganii
atgccgcgccattttgatgatctgatgctgggcacgctggaactgttctgccgtgccgccgaactgcaaagcttttcacaggcggcacaggtgctgaatatttctccggcagcggtcagcaaaaccattgcgaggctggaacagaagctgggcagtccgctgtttgtcaggaccacccgccatgtgcggctgacagaagcgggagaacaatatctcagctattgcaggacagcactggacgcgatgtatgatgcagagaatgccctgcaggacatgaaaaccattccggccgggaaaatccgggtttgcctgcccaatgattacgcctatctgaaagtgtttccgctgatgccgaaattccgccgccgttatccgcagattgaggtcgattttcatctccgcttccgtattccgcgccaggaaagcacggattgcgatgtagtgatgaccagctggctgaattatttacccgactggattgccaccccggttgatttcgctatgttccggatttatgcctcaccggattatctgaaaaaggcaccgccgctgaataccccggaagatctccgccatcacaactgtctgcagatgcatttgcaggaacagaccagaccactgcgctggccgctggttatcaataatgaagttgtgcatctcagtacactgggtgacatggcattttatgaggatgtgatggccgcatactatatggcggtagccggtaacggcgtcgcaatgatgcatgactttattgcccgcagcgccgtggctaacgggcaattggttccggtgctggaaccctggaccaccgtatcccatatttatcatattgcctgcccggctgaagcacgcaaatccccgcgtctccgtgcattcattgattttctgacagaagaactgcagccggccggtgcatttccggaacattcggtgatagtccctgtccgctga

SEQ ID NO: 275400 - DNA, 948 bp, Morganella morganii
atgcgatttagtactaatttaatgttcagtcagcgtgtcacggacatgaacagtgcaacagcccgctggatggaagccggcagcaaactggcttccggaaaacgtgtcagcaaaccgtcagatgatccgcaggcatccgctcaggcagtgcgtgtcagccagtctgaaaaccgcaatcagcagtatgcaagcacccgcagctttgccaaaaccggtatgacactgcagatgagcattctgacacagatgaatgaggtttccacccaaatagataccactattatccaggcatccaatcagggctcactcagtgataatgaccgttcgtcactggcagaacagttacagggactgaaagatcagctggtgtctctgggtaataccactgacggtaacggccgctatatttttggtggttatgagtcagacaaaccaccctttgaagtggatgcggcgaccggcgatgtgatttacaaaggcggcgataaatccatcactcaaaatgtgggcagtgatcgtgaaatgaccagctattttgccggttcagaggtattcgccaccacaacaaacgccaaaggcgaaaaagtggcggatatgttctcggcgattaataaaggtctggaagcactgaaaattcctcagcagaatgcctcacaggctgatttggacagagcaaaagccgggatggatgaagcaaaccgcggtatcaaagccggtatggacaaaatctccaatattgaagccaaacagggtttacagttacaggaaattgatagtctggattttctgtcacagacccgccggatccagaatgaaagccgtctgagcggtttgcttgataccgactggaccagtacagtatcggattatcaaaaagaaatggcgctgttccaggcctcgcaggatatttttaaagatctcaacagtatgtcgctgtttggtcgttaa

SEQ ID NO: 275401 - DNA, 1641 bp, Morganella morganii
atgctgaataatgtaatgaataacgcattaagcggaattaacgcggcccagggcgggctgagtgttatttccaacaacctggcaaacgccggagtgggttattatcaccgccagaatgcggtgttcggggaaaacccgggaacgatgacatctaacggttatttcggcaacggtacctattttagtcaggtgcgccgcgaattcgatgagttcgttaacatgcagtataacaatgcccgttcccgcagtggtgactatgaagcgtacatgaaaaacgcttccggagtcgatgatctgttgtccaacagtaccgatgatctttccggcatgctgggtggttttttcacagcgctggacgaagccgccagtgattcaagtgataaatcactggttgatgtttttctcggtaaagcaaaggcgatggtcagccagtttaaagaagccgaccgccgtctgcgtgaaatggacaatgatgttaaccatcagattgacaataaaatcaatgatattaatacctactcggaaaaaatcgccaaactgaatgaacaaatcagtaatgcccgggctgttaacggtgcggagccgaatgatttgctggatgtgcgtgaccgtctggtcagtgaactgaattcactggtcggtgtaaaagtcattgagcaaaacggtaacttcaatgtctcttttgctaacggactgccgctggtgaccggcggacgcgccaaccgtctggaagcggtggcatccagcaaagatgacagtcggctgagtgttggttttgtcgattcagccggcaatgtcagggaaatcaaagatgaccagatccgcggtggtgaactgagtggcgttctgcgttcacgccgggaaattattgacccggcaagacaaaaactgaatcagatggcgctggtgtttgcggaaaaattcaatgagatacaccgcaaaggttatgatgccaatggtcagaccggtaaagactttttctctgtcggcggcggcagtgttgtcagtaatactcataataaaggcggggctgattttgatatcagttacagtgatgtcagcaaagtcaccggtaataattatgatatcagttttgacggtacaaactggaacgtgaccaaattaccggaaggtactgcggtgaatgcgaactttgatgccgcttccggaacattaagctttgatggcctggacatcaaaatcggcaacaacactgcgcaggccggagacaaattcctgctcaagccggtcgatgacgttattggtggtatggatactctcatcacaaatgcggcggattttgctgcggcagacagcaccggtggtgccagcaacaatgaaaacatcaaagagctggtgaaattacaggatcagaaactggtcggtggtacatccaccttgtcggatttttacgcatcactcgtcaacgatgtgggcagcaaagccagtcaggcacagattgattccgaagttcagaacaaactgaccaccagtttttatgagcaggaacaggctatttccggcgtcaacaccaatgaagaaagtgtgcagattcaaaagatgaagcaattctttaatgcgaatgccaaagtactgtcaaccgttgatgaattattcgacgtactgatgcgtgcgttctga

SEQ ID NO: 275402 - DNA, 978 bp, Morganella morganii
atgagcgacatacagttgatgcagagtgcggcctacgatgtacagtcgctgggcagcctgaaacagcagctgaatgaaaaaccgcaggaggggctgcgtcaggtgacgcagcaactggaagcgacctttgttcagatgatgctcaaaagcatgcgcgccgcactgccgcaggacggattgttctccagcgaccagacccggatgctcaccagtatgtatgaccagcagatagcccagaacctgtcagaaaaagggctgggcttcggcgatatgatgtttaagcagctttctgcggataatgaaccggatctgccgctgcgttcttcgatgatgccgctggatgatgccacagtgattcagtccatgccgcagcaggcaatggcgcagctgatgcggaaattcagttctgcgggggatgcactgagttcaccgctgaaaaaagtgcgtgaactgggtcttaacagtcagaatttcattgcaaaactgacagaaccggcgaaagcagcatcacagaaaagtggggtgcatcatctgctgattctggcacaggcggcgctggaaagcggctggggaaagcgggaaattctgaccgcagacggcaaaaccagtcacaacctgtttggtatcaaagccgggaaaggctgggaagggccggttaccaatatcatgaccaccgaggttatcaacggcaagaccattaaaatgcgcgataacttccgtgtttacggttcctatgaagaggcaattgccgattacacccgtctgctgaccgaaaatccgcgttatcacggtgtgaaacaggcggccagtccggagcaggcggcacagcgtctgcacaaggccggatatgccaccgacccgggctattccgacaagctgattgtcctcattaatcaaatccgcggcactcccgcaggcgcaccggtggcttcccgcgccgtacaggcgtacaccctcgatttgagtgatattttctga

SEQ ID NO: 275403 - DNA, 1107 bp, Morganella morganii
atgaaaaaagtactgaccggcctgctgattgcggttttaggtgtggcggctcttcccgcacacagtgagcggattaaggatctgaccaccgtacagggcgtgcgtgagaatgcgctgattggttacgggctgattgtcggcctcgacggtaccggtgaccagaccatgcagacgccgtttaccacgcagagtctgaataacatgctgtcacagatggggattaccgtaccgccgggcaccaatatgcagctgaaaaacgtggcggcggtgatggtcactgccaaaatgccgccgtttgcccgttccggccaggcgatcgacgtggtcgtttcctcaatgggtaacgccaaaagtctgcgcggcggcacactgctgatgaccccgcttaaaggcgtggatggtcaggtgtatgcgctggcacagggcaatatcctggtcggcggtgccggtgtcagtgccggcggcagcagtgtcaaagtgaaccagctggccggcgggcgtatcagcggcggggcgacgattgagcgtgaactgccgggcggcttcggtcagagcggcgtgattaatctccagctgaatgaagacagttttgcgctggcgcaggatatcagtgacgcggtgaaccgcatgaacggtttcggtaccgcaacgccgctggattcccgcacggtacagttacgggtgccgcagagcagcagtgatcaggtgcgcttcctggcgcgggtgcaggatctgaatatccgtccgccgcagaatgaagccaaagttatcctgaactcccgcaccggctctgtcgtgattaaccggaccgtcacgctcgacagttgcgcggttgcgcacggcagcctcgcggtgacggttgagcgccagacacaggtcagtcagccggatacgccgtttgccggcgggcagaccgtcgtaacgcgtaacaccaatgtcgggatccgtgagcaggacggcacactgaaaaaagtgaatgccggggcgaatctcaatcaggttattcaggcactcaatacattaggggccacaccgaccgacctgatgtcgattttacaggcgatggaaagtgccggttgtctgcgggcgaaactggagatcatctga

SEQ ID NO: 275404 - DNA, 750 bp, Morganella morganii
atgactgaaagcggcattgttccacggcagcaggattgcgcaagttctcctgccacttctgtttgcgggcgcggactggtgacagcggcagtgcttgccgtatcactcagcggctgtgcttacatcaaacccaaaccgctggtggatacccataccaccgcgctgccggtcgcaccgactgccccggccgcgaacggtgctatttttcagagtgcacagcctgcctactacggctaccagccgctgtttgaggacagacgtccgcgtaataccggcgatatcctcaccatcaatctgcaggaaaacgtcagcgccagcaaaaactcctccgccaatgccaaccgtgccggaaaaaccggctttcttgcgtccattttgcccggctttatgcagggctggctcggcggcagcaacacggagctggacgtaaaaggtaacagcgaatttaccggcaaaggtggtgccaatgcccagaatacctttaagggcaccattacggttacggtggatcagttgctggcgaacggtaacctgcatgtggtgggtgaaaaacggatcgccattaaccagggcacggaatctatccgcttctccggtgtggtcaacccgcgcactatcggagcggataacagtgtcagctccactcaggtggcggatgcccgtattgaatatgtcggcgacggctatatcaacgaatcgcagaatatgggctggttacagcgcttcttcctgaatgtgtcaccgtactga

SEQ ID NO: 275405 - DNA, 783 bp, Morganella morganii
atgatccgttcattatggattgccaaaaccgggcttgaagcccagcagacgaacctggatgttatttccaacaacctggccaacgtcagcaccaacggttttaaacgccagcgtgcggtgtttgaagatctgctttatcagaacatccgccagccgggtgctatgagttccgagcagacctctctgccgactggtctccagttgggtaccggtgtgcgtccggttgcaaccacccgtattcatgcccagggtgcgctgaacaaaaccggcacctcgaccgatatcgccatcagcggacagggttttatccatgtccagatgccggacggttctgatgcctatacccgagacggttcactgcatccggatcagaacggtcagctggtgacctcatccggttatcagattgtcccggccattatgatccctgaaggggcgcagaagatggaaatcggccgtgacggtacggtttctgtcaccatgtacggtgaaagccagccgcagcagatcggccagattaccctgaccaccttcatcaatgatgcaggtctggagagcatcggcgaaaacctgtatatggaaaccgccagttccggtgctccgacagaaagtgcccctgaaaccaacggcgcaggccgtctgtatcagggcatggtggaaacctctaacgttaacgtggcggaagaactggtcaatatgatccagacgcagcgcgcgtatgagatcaacagtaaggccgtttccgcctctgaccagatgttacagcgtctgacacaactgtaa

SEQ ID NO: 275406 - DNA, 756 bp, Morganella morganii
atggatcacgtcatttatacagcaatgggcggcgctaaacacgcgctggaaaatcaggccattgtctcgaacaacattgccaacgtctcgacatccgggtttaaggctcagttatccgccatgcgggccgtgccggtaaacggtgatacagagcagacccggacactggtggtctcttcgacccccggggcggacatgactcaggggccgctgaactacaccggccgtcagatggatgtcgcgctgaatgaaggtcatttcctggcggtggcactgccgggcggggaagaagcctatacccgtaacggcagcattcagatttcagcggacggtcagctgatgctgggtgaacaccttctgcagggtgacgggggcgcgattgatgtgccgccgcacgcggaactgaccatcggcggtgacggtacgattacggcgctgatcccgaccgatccgccgaccatgctcggacagataggccgcctgaaagtggtggaagcgaaaccgcaggatgtgctgcgcggcgaagacgggctgtttcatctcactgccgctgcgcgtaacgctaacggcaatgagctgccggtgagtgagcgcggcaaagtggcatccggtgttctggagggcagtaacgtcaatccggcacaggcgatggtggaaatgatcgccaatgcgcgtcatttcgaaatgcagatgaaagtggttcacagcgcggatgagaatgcccagcgggccaatcagctgcttgcggtgagttaa

SEQ ID NO: 275407 - DNA, 1212 bp, Morganella morganii
atgtctttttcacaagcagtcagcggtctgaatgccgcatcatccggtcttgattcgatcggtaataacattgccaactctgcaaccaacggctttaaaggtgctcatgcttcatttgcggatatgtttgccggttccggtgtcggtctcggggtgaatgttgcgtcggtatcccagaactttaaagatggttctattacccgtacagaccgtgccactgatgtggcgatttccggaaatggttttttccgtctgctggatggtaacggtgatgtggtttacagccgtgacggtgaattccaccgtgataagagcggcaatctggtcaataaccagggcatgattgtgactggtttcccggccggtattgatgctaacggcaatgttgtgattcagaccggtggcgtgccaacgggtattaatatcccgacggacatgatggatgccaaagcatcgtcgaaaggtgatttaactatgaatctgaactcgaatgatgaaaaaattaccgcggcgtttgatccggataacccggacacctacaacttcagcaccaccatgaccacctatgacagccagggtaatcctcatgaagtcacggtttactttgttaaaactgacgataataaatggagtgttaaagccaaagacagcagtgataaaaccgcagcggttcaggatctgggtaacatggaatttgacggtaacggtaaactcacaggaacggctgattttcagtttacctatcaaggtttaaatggcgccaatggcggcacgattgacctgagctttaacaaaacccgtcagcagaaagtcacagaatcatccgtcagcaaaatcgatatcgacggctatcagtccggtgaatacaccagctttaaaatcgaagatgacggcaccattaccgccaactattccaaccagcagaagcggacggtcggtaagatcgcactctcgtcttttgccaataataatggtctggcaccccagggcggtaacgtctggaaagctactaatgcttcaggtaatccgatggacggcgttccgggaaccggacagttcggtaacctgaccggcggcgcggtggaagcctccaacgtggatatgagccaggaactgatcaacatgattgtgatgcagcgtaactatcagtccaactcgcagaccatcaaaacgcaggatcagatgctgcagacgctggttaacttacgttaa

SEQ ID NO: 275408 - DNA, 840 bp, Morganella morganii
atggggattaatgcagcaaccaatgatccgaccaataacgacattgatgcacagaaaaaaccgcagaaaagtcagagtgatgatatgcgggatacctttttgcagatgattgttacgcagatgcagaatcaggacccgaccaaaccgatggataacacggatctgaccagtcagctggcacagattgcctctctggaaagtatgaataacctgaatgacaaaattacggttatttcacagcaaatccagggaacacaggcacttcaggcagcgcagttagtcgggaaaaatattctgacagatggcaatgaactggttctggcacctgtcagtaccggtgtgaagctgattgatgataccgactttgcggtggttggtaatgatactgacaacagcatctccggatatgccgaagacgggaaagatgaagataaagatgaagaaaaggatcccggcgacggtttagctaccggttatatgtcgacgccgtttggtttctttaatgaaatgccggccgacaaaattgaaattacgattcgtgattctaataagggcgtcgtcaggaatattactatcgaaaaagaaagtaaggcggatgtttatgatctgcgctgggatggccgtaaggacgatggtgagcttgtgaaagatacgaaaggtaaatatacctttgaagtgaaagcatccaataaaggggagactcttgaggacaaaattattcacaagttaagaatggttcatgtgaacggggtgacgacaaacctcggagcaccggcactggatgtcggaataggtaatagtattttattaagtgatgtttttaaagtttaccctaactaa

SEQ ID NO: 275409 - DNA, 405 bp, Morganella morganii
atggcactactgagtatttttgatatttccgcctccgcactgaccgcgcagtcccagcgtctgaacgtcagcgccagtaacatggcgaacgccgaaagtgtggcagggccggacggcgaaccgtaccgcgcgaaacaggtggtatttcagaccgcgccgcaggggcgctatgacatcggcggcgtgaaagtcagccagttgattgaagacccggctccgccgcgtctggagtacaaacccggccatccgctggcggatgaaaagggctatgtgcggatgccgaatgtggacactgtgggtgaaatgatcaacaccatttccgcctcccgcagttaccaggcaaacctggaagtgatgaacacagccaaagtgctgttgcagaaaaccttaaccctcggacagtaa

SEQ ID NO: 275410 - DNA, 417 bp, Morganella morganii
atgcttgataagttaaatgccacgtttgcatttcagcagcaggctctttcgctgcgggaaacgcgtcagacaatcctggcatccaatattgccaatgcggataccccggggtatcaggcacgggatatcgatttcagccgtcagctgaaacaggcgatgagtaacggcacggtgaagcacggcggtctggcgatggcagtgaccgcgaaagggcatatcagcggacacggtgccgcgacaccgtcagcggttgatctgaaataccgggtgccgtatcagacatcgatggacggcaataccgtggatatggatgttgaacgcagtcagtttgctgataatacactgaaatatcaggctgacctgacctttattaacagccgtgtgaaaagcatgctggctgtcttacagcaagggtaa

SEQ ID NO: 275411 - DNA, 657 bp, Morganella morganii
atgacgccccgctaccgcaccctgtttatcagcggattactggtgttttccgcctccgcccgggccgggttaccggaagatatcaatcgttacttccggcaactgcacccaaaacccatgcaggtctctgtcgaaataaaaaccccgatcgaccgctggcccgcctgtaaagacccggtactgcaactgcctgcgggcggacgtaacaccggcaatgtctcactgccggtgttatgcggtaaaaaacgcacttttatgcagctgacagtcaatgtcaccggtcagtattacgtggcaacccgtcagattcagcgcggtgagactgttcagcttgtggatatcggcacaaaacgcggtttacttcacaaattgcctgcgggcgcggttaccgataaaatagccctccgcggtgccattgccctgcgcaatattgatgccgggcagacctatgtcgcgtccatgacccgcaaaccctgggcaataaaagccggacaaagcgtttttgtcatggcggatggtgataatttctcggtaaaatatgaaggccgtgccattaataatgccgccgccggcaccactatccgggtccggctggtgaatggtcaggtggtcagcggtgaagcccttgaaaacggcagcgtgaaagtatcactgtag

SEQ ID NO: 275412 - DNA, 321 bp, Morganella morganii
atggcaattgagcaaacatccgcgatttcagcactgacaaaagtgattaaccgcgacccgaaagagctgaccgcgccggtgcgcgataaaaaagttcaggccgaagagactgtccgcgaaagcgcattttcgccgagtgaacttcagaaacagctgcttgcgccgggtaaaaacgacattaatactgcacgggtggcagaaattaaacaggcgctgaaagacggcacattacggatggatgccggtaaaatcgctgacggtctgctgcgcgatgcgcatgagtgcatgttatccatggacagtgctgataaaaatgactga

SEQ ID NO: 275413 - DNA, 441 bp, Morganella morganii
atgactgatcaacttctgccgctgctggatcaacaactctctcatttacagtcactgcatcaggtgatgaaaaatgaagagttgttactcggctacccgcgtgttccgcagtctccgtttcaggaagccacggaacaaaaacggtttctggttgccgctatcggccataatgaaacccgccgccagacacttgagcaggaaaccgggctctgtgcaccttatgacaataatgaaaccatgcacactgtctggaatgcgattaaagaccttactctgatgctgaaagagatgaattaccgcaatcatcagatgctgaaactgcatatgcagtttaatcaggagcggctggattttatgaaaaaacataataaccaggcgacttacggcgctgacggccaggaatcccgcacaccggcactcggtaaaaaaatctctgtctga

SEQ ID NO: 275414 - DNA, 2097 bp, Morganella morganii
atggctaatctggctgcacttttgagattaccgaaaacgatgcagggagcacaatggcagttacttgccgggccggtcctcatcctgatgatcctgtcaatgatggtactgccgctgccggcatttgtgctggatttgctgtttacctttaatatcgcgctgtccattatggtgctgctggtggcgatgttcacccggcgtaccctcgattttgccgcgttcccgactatcctgctgttctccaccttactgcgtctgtcactgaacgtggcatccacccgtatcatcctgatggacggccacaccggtcctgcggcagcgggccgggtggttgaggcgttcgggcacttcctggtcggcggtaactttgccatcgggattgtggtctttatcatcctggtgttaatcaactttatggttatcaccaaaggtgcgggacgtatcgccgaagtcggtgcgcgctttgtgctcgacggtatgccgggcaagcagatggcgattgatgcggacttaaacgccgggatcatcaatgatgaagaagccaaacgccgccgtgcggaagtaacccaggagtccgatttctacggttcaatggatggggccagtaagtttgtccgcggtgatgccatcgccgggattatgatcatggtgattaacgtgatcggtggcctgattgtcggtgtggctcagcaccatatgccgctgggcgatgcagccagcacctataccctgctgaccatcggtgacggtctggtggcgcagatcccggcactgattatctcaaccgcagccggtgtgattgtgacccgcgttgcaacagatgaagatgccggtgagcagatggtcacccagctgttcaacaacccgcgtgtgatgtggctgagtgccggggttctgggtctgctggggcttatcccgggcatgccgaactttgtgttcctgctgttcaccgtggcactggcatctctcggctggtatctggtgaagaaaagtaaagaaccggtcaaagagacggaaaataatgagcaggagcagcacttccgtgaggcgaataaagtcacggaagcgacctgggatgatgtggtggcggaagatcttctggcgatggaagtcggttaccggcttatcccgctggtggataatgaccagcagggcgaactgctcgggcggatccgcggactgcgcaaaaaatttgctcaggaagtcggctatctgccgccggtggtgcatatttgtgacaacctcgagctggcaccgactgcttaccggatcctgatcaagggggcggaagtcgggcgcggcgaggctcagccgggccgctggctggcgattgacccgggcaatgcggcaggctctctggaaggggatgccacacaggaaccggcatttggtttaccggcggtgtggattgatgatgatctgcgtgagcaggcacagattcagggttacaccgtggtttcagccagtacggcggtggcgacacactttaatcagattttgcttgaatacgccagtgacctgttcggccgtcaggaagcacagatgctgtatgaccgcgtgaagaaagagatgccgaagctggcggatgacctgatcccggataccttatcactgaccattttccaccgcgtgctgcaaaacctgctgaccgaaaatgtcatgatccgcgatatgcgcaccattattgaaaccttggcagagcaggttggtgagaacggcgagcagaaagataccgatgttctgacatctcaggtgcggatagcactgggccgcgctatcactcagcagtggttcggggcatcaggggaaattcaggtgattggtctggatgcggggctggaacagattctgttgcaggcagcgaaaagcggcggcggtctggagccgaacctggcacagaatatcgaaatgcaggcgatgagtgcggtacagcaccaggaagctatgggggcaccgacagtattgctggtcaatcactcactgcgtctgatcttatcccgcttcctgcgccgcagtctgccgcagatggcggtgatgtccaaccttgaactgaatgaccgccgtcagatacggatgacctccatgatcggcggctga

SEQ ID NO: 275415 - DNA, 1152 bp, Morganella morganii
gtgtctgatgaaagtgatgtggaaaaaacagaagaacccaccccccataaaaaacagaaagccaaagaagacgggcagattgtccgctccaaagaactcagctcactgatgatgatgctggccggtatcagcctgctgtggttaagcggcggccatctggcgggacaactgcgtgatatttttcgtcagggatttctctttgataacttttatctgcagaatccggggctgatgctgcgttttctcggaaaagtcattggtgaagcgttattcgcgatgctgccggttgtcggcggactggcgctggtcggtatttcggcgtcggcactggtcggcggactggcgtttaacaccaaatccatcaagtttgatctgacaaaactgagcccgctgaagggctttaaacgtattttttccatgaatgcgctggccgaattattcaaggcgattcttaaatccctgctgattggcctgggcgcatggatttttttatggcaggcgtggccgtccttactgcatctggcgatggaatccccgtcaacggcaatggccaatgcgatgcagaaagtgatttttgccggttaccttatcatcttcatgctgatcccgatggtggcgtttgatgtgttctggcagttccgttcgcacctgaaaaagctgcggatgagccgccaggaaatcaaggatgaatttaagcagcaggagggtgacccgcagataaaggccaaaatccgtcagcagcagcgcgcgatggcgcgtaaccgcatgatggctgatgtgccgcaggcggatgtgattgtgaccaacccgacgcactacgccgttgccctgaaatatgacgagaaaaaaatgaccgcaccgagagtactggccaaaggtgccggggtgctggcacagcggatcaaagagataggtgcggagaaccgcattttgctgctggaggcaccaccgctggcgcgggcactttaccgccatgctgaggtggggcagtcaattccggtggcactgtattccgccgtggcggaagtgctggcatgggtgtttcagctgcgccgctggcgtcgtgaaggcggcctgaaaccgaaaaaaccgaagaatttaccggtgccaaaggcacttgattttgttggagaaaatacccgaaatggctaa

SEQ ID NO: 275416 - DNA, 324 bp, Morganella morganii
atgaaaaaaacaattttagcctgctctctgggtttaatggctctggctctgacagcatgttccggcgaagaaaaatcagcatcatccgttccgggtgcaactgaaacctgtaacaaatactttgctgaagtcgatgatttagtgaagaaagcaactgaaaaagccggtgacaacgaagcggttaaagcacagttagaaccaatgctgaaacagtttgacgacgcgaaaaaacaaatcgcaacactgccgaaagagcagcaggacgcagcatgcaaagcaggcagcgacgcaatggctcagattaagcaggcaatgggtatctga

SEQ ID NO: 275417 - DNA, 639 bp, Morganella morganii
atgacggaaaataaatcaacggacagaaacaaaaacagtgatgatgatttaaaactgatcatcacccgggtcggttttttaacgaggatgttaagagaaagcatgcgtgaactgggattagaaaagggcgtgcagcaggcggtcgcgacaattccggacggaaaagacagactgcgctacatcgctcagatgactgcacaggcggcggaaaaaacacttaacggtatcgacactatcaagccgttgcaggtaaaaatgcacgaggacgcgctggatttgcaggcgcgctggcaatcctgtccgtcagcggaggtcgatccggccctgcaggaatccaccatggcgtttatccgccgggtgattgacggcagtgcggtgaccaaaagtgagttactggaaattatgatggcacaggatttccaggatctgaccggtcaggtcgtgaaaaaaatgatggaagtggtggaagaaacagagaaacagctgctgtttctgctgatggaaaacacccctgcggaaatccgtgcaaaacatccggtcgacagtctgaaaaacggaccgcagattgatccgaaaggaaccaatgtgatggcatcacagtcacaggttgatgatctgcttgatgagcttggtttctga

SEQ ID NO: 275418 - DNA, 393 bp, Morganella morganii
atggccgctaaagatttgaattttctggtagttgatgatttttccaccatgcgccgtatcgtgcgtaacctcttaaaagagttgggctacaacaaaattgaagaggcggaagacggtgtggatgcactggagaaaatccgtgcaggtcagattgatttcgtggtggcagactggaacatgccgaacatggacgggctggagctgctgaaaaccatccgcgcggatgatgcactcaaacatatcccggtcatgatggtgaccgccgaagcgaaaaaagaaaatattattgccgccgctcaggccggtgccagcggttatgttgtcaagccgttcactgccgcgatcctcgaggaaaaactgaataaagtcttcgaaaaaatgggtctgaactga

SEQ ID NO: 275419 - DNA, 1068 bp, Morganella morganii
atgaaaaaaataaaagtactttgcgttgatgactcggcgctgatgcgccagttaatgcgtgaaattattaacagccatccggatatgaccgtggtggacgtagctccggatccgtatgttgcgcgtgatctgattaaacagcatgaaccggatgtggtgacgctggatgtggaaatgccgcggatggacggcatcgattttctggaaaaactgatgcgcctgcacccggtaccggtggtgatggtctccacactgacctccaaaggctcggaagtgacgctgaaagccctggaacttggtgcggtggattttgtcaccaaaccgcagatcgggatccgcgaaaccatgatgagttaccgtgaccttatcggtgaaaaaatccgtgccgcggcgatgtcaaaaatcacgcagggtaaccgtttccgccgtcaggaaaaagtgacggcagcaccggcggttatcagcaaaccgctgtcatcgtatgtctgccataaccgcctgattgcggtgggcgcatcgaccggcggaacggaagctatccgtcagttcctggagatgctgccaccggagtgtccgccggtggtgatcacccagcatatgccggccggtttcacccgctcatttgccgagcgcctgaacaagctctgtgcgctgacggtaaaagaggcggaacacggagatgtgctgcgcaaagggcatgcttatattgcccctggcgatgcgcatatgctgattgcggataaaggccagggttaccaggtggtgcttcagcagacaccgccggtcaaccgtcaccgcccgtctgtggatgtgctgtttgactcagtggccgaatgtgccgcccgcaaatgcatcgcggtcctgctgaccggtatgggtatggacggtgcgcgcggtatgctgaatctgcggcagaagggcgcggtcacgtatgcccaggatgagcgcagctgcgtggtcttcggtatgccgagagcggcgattgaactgaatgcggtcgatgaaattcaggatctcgtcaaaattgcccccagtgtgctgggcagacttgctgccgtttccgcctga

SEQ ID NO: 275420 - DNA, 864 bp, Morganella morganii
atgctttttgcgccacagatagaaccactcacagatgatgagtttggtcgggtgtgccggtttattcataaaaagtcaggcatcgtccttagcatgaataaaaagaatatggtctacaaccgcctgttaaagcggctcagagactgcaatatgagcacattcgccgaatacctgcgtttgctggaacgggagccgctgcacccggaatggcaggcatttattaacgcaatgaccaccaatctgaccgcatttttccgggagccgcatcactttcagacactgactgactttatccgtccccgccgtaaccagccgatcactatctggtgcgcggctgcctcgacaggggaagaaccgtattcgatcgccatgacactcagtgatgttctcggtgcgaacgccatgaatgccaaagtgatcgccagtgatatcgataccgaagttctggagaaggcccgtaagggcgtctaccgtatcgaagagctgaaaagcctcaacgcccttcagcgtcagcgctattttatgaagggggtcggggaatatgaaggctatgcccgggtgaaaccggcgctcggccggatgattgatttccgttatctgaatctgacggacaacgactggcagtttcaggggcagttcgatgccatattttgtcgtaatgtcatgatttatttcgataaggatatgcagaaacaactactggaacgttttgttccgctactgaagcctgacgggctgctgtttatcgggcactcggagaacttatcacagttatcttcgcgttatgtcatcagaggacagaccgtgtacagcattcaggcggccgggagaagtgatgaaaaaaataaaagtactttgcgttga

SEQ ID NO: 275421 - DNA, 1575 bp, Morganella morganii
atgtttggtaagagaatacggatttctgtcagtttatatctgttgcttattttcttttgcggcatgcagatagtgtccagcggattatcgctggggattgtttcatctgaattatcgtcactggaacgggtcgatctcggctcaaaaaaacgggcattactggtgtcttcttatgaagatctgatgcaggcccgtaacctgcttacccaggttgttgttcatattaaagtcggctctgaagagagcgatatccgccaggtcaaagctgcgtttgatttgctgctggataaagcggcggaggattacagcaacttcaaatcccagcccgtcctcagtgagaaagaggattttgccggtattgaagaacagtatcagtcttaccttggtgtgattaaagaactgcgcggttacattgataacgccaatatccctgcctatgtggaacacccgacccagatgtatcaggacagaatgggggccgtggtgaatgattatctggcgttgctggatgaagagagccgcagtgcgattgagtccggcacgttctataaccggatggcgtggattatgttcttcggcgttaccgccaccattctgctgatttccggtctggctcatttctggatgcgttacaaagtgattaatccgctcaccagtatgagcgagcactttatgcaggtcgcacagggcaaactgaaccagaagatagaagtgaccacccgtgatgaaatcggtgtggtattcggtcagcttaagctgatgcaggaatcgctggcagaatctgtctcaaacgttcgcctgaatacagaccagatgtataccggaattcgcgagattgccctgggtaataataatttatcatcacggacagagcagcaggctgcctccctggaggaaaccgccgccagtatggaagagctgaccgcaacggtgaaacagaacgccgataatgcccgtcaggccagtgaacttgcggtgacggcatcaaaaaccgcgagccgtggtggtcagatcacggacagtgtgatcgaaaccatgacctcgattgccaacagttcgcagaagatcagcgccattatcagcgtgatcgacggtattgctttccagaccaacatcctggcactgaacgccgccgtggaagccgcccgtgccggtgagcagggacgcggattctccgtggtcgccggtgaggtgcgtgcgctggcacaacgcagtgcggatgccgcgaaagagattaaatccctgattgatgagtcagttgaccgcgtcggccagggaacgcaactggtggacagcgccggtaaaacaatggaagaactggtcactgcggtgaaccaggtgacggaactgatgagcgaaatcgcgtctgcctccaacgagcagagccgtggtatcgagcaggtggcaaccgccgtcagccagatggatctggtgacccagcagaacgccgcactggttgagcagtcaacaggtgcaacagccgcactggaagatcaggcgaataacctggtcgacacggtcgctttctttgagctgccggataacaggggcactcagtccggctttgccggctga

SEQ ID NO: 275422 - DNA, 1686 bp, Morganella morganii
atgtatagcagaattaaaattgtatcagggcttttatccgttattcttatatttgtactgttgcagctggcatccagcgggctgatgttcagcaaactgggtgaaaaccgcgacagtatccactttttggattcactccagagtcagagacaggttctgacccagagctgggttaacctgatccaggcccgtgccaatttaaaccgggcggcaaacggctttttgctcagagagtacacctttaaagacgatgccaccccggatgagctgatcaaacaggccacccgtcagttagcggatgcagacgctgcgtatgcccgctatatgaaaatgatggagggcaccagttacgacaaggcgaagtttgaaaagctgctctccacctatgaaacctaccgtaatgcactgacccggctgatgtcctatgtccgggaagatcagctggaacagttctacacctatgccacatccggttatcagatgaagttcgaagagcagtttaattcgtatttcgacagtatttctgcggcgttccggggtgaagtacagaatgcggaagataacttcagtgaatccctgtatatgctgattgtgctggctattattctcgcgctgatcagtcttatcagttaccgctatgtacagcgcggcattattcaccctctcaatggtctggttgatcgcatcaaaatctttgctgccggtgacctgactccgacagttgcggtgaacggtaaaaatgaaatcgctgatctgggccgcggtgtgcagcacatgcagcaggagctgattaatacggtgcgcggtgtgcgcgacggcagcgaaaacatctatcagggtaccagcgaaatcgccgccggtaacaatgatctgtctgcccgtacccaggagcaggttgcctgtctggaacagaccgctgccagtatggaagagctgaccgcaacggtgaaacagaataccgaatacgcccatcaggccagtgaatttgccggtcaggcttctgatattgcccgtgaaggcggcaaagtggtgtccaacgtggtgaataccatgctgaatatcgctgacagttcacagaaaatttccgatatcactgccgttatcgacagcattgcgttccagaccaatatcctggccctgaatgcggcagttgaagctgcccgtgccggtgaacacggccgtggtttcgcggtggtggcggatgaagtccgtaacctggcgcagcgcagcgcagatgcggcaaaagagatcaaaatcctcatcgaagactcggtatcccgtaccggaaccggtgcccgtcaggcagaagatgccggtgaaaccatgactaaaatcgtggaatccgttacccgtgtcaccgatatcatggcgcacattgccacggcatccgatgagcagagcaaaggtatttcacaggtcagtattgcagttgctgaaatggacaaagtgacgcagcagaacgcctcactggttgagcagtctgcggtggcggcaaatgtgctggaagaacaggtggcgaaactgtcacagctgatagccattttccgcttaccggccttgaagcacagggacgataaacacactgaaccggcggcaagaacgatttccaatgtcgtgaaaaccccggatctcagcaaaatatcatcgaagaatcatcaagatgatgacaattgggaaactttttaa

SEQ ID NO: 275423 - DNA, 498 bp, Morganella morganii
atgtcgatgatggatgaagatttaaacaaactcgatgaagagaaaaacggcgaaggatacctgatttttaccctgggcgaagaagagtacggcattgagatcctgaaagtacaggaaatccgtggttatgagcaggtcacccgtattgcgaataccccggattttatcaagggtgtcactaacttacgcggtgtgattatcccgattatcgatctgcgtgtgaagttctcccatcagaacgtcacttacaacgacaacaccgtagtgattgtggtcaatctgaaagatcgcgtggtggggattgtggtggacggcgtgtctgacgtgctggtgctcaaagatgagcagattgccccggcgccggatttcgcggtcaccttatcaaccaaatatctgaccggcctgggcaccatcggtgaccggatgctgatcctggtggatatcgaaaagctgctttccagcgaggaaatggcactcatcgacagcatggctgaataa

SEQ ID NO: 275424 - DNA, 2073 bp, Morganella morganii
atggatataaccgagttttatcaaacgttcttcgatgaagccgacgagctgctccgggatatggaacagcacctgctggagcttgatccccgggatccggacagtgaacagctcaatgctatcttccgcagtgcacactccattaaaggtggtgcggcaacattcggattcacgctgttgcagaaaaccacgcacaccctggaaaacctgcttgataaagcccgccatgatgagctgacgctgacgccggatatcattgatgtcttccttgataccaaagatgtgatgggctcgcagctggatgcttataagagcgatacacagccggatgaagcgagtttctaccgcatctgcgaagtgctggggcatgtggagcagagtgtggcggacgccgctgttgtcacggaaaccgctgcgccggaaccggtcagtgaaaccgcagaaattaccgccggctcagaagagagcagcacagtaccggaaaccggtttttcacatcatttcacgtttacgctcagtaagttaaaggagagcgaagtcgctctgctggccgatgagctgtcactgttcggcacggtatacaaaaccgaacagggcaccgataccctgaaagtctggctgggcaccaataccgcgattgatgacatcagcggcgtgctctgctttgtggtggatgattctcagattgcgtatgaggaaacaccggcagcggaattaaccgccatgctggccgcagacaatattccggcagaggcggaagaagaaactgtcagcgccccggctgccgtaccggcaccggcagcagtatcgtcatctgctccggcggcgcgcaaagcaccggctgcggcggcaaaaaataaaggtgacagcggcagcatccgtgtggcggtggagaaagtggatcaactgatcaacctggtcggtgagctggtgattatccagtcaatgctgacccagcacagccagcaggtggatcaggcagaatatgcggagctgctcagttcgattgtccagctggaacgcaactcgcgggcgctgcaggaatccgtcatgtctatccgcatgatgccgatggattatgtcttcagccgcttcccgcgcatggtgcgcgatatcgcctcaaaactgaataagaaaattgagctgaaagtggagggcagctccactgaactcgataagagcctgattgagcggattatcgatccgctgacccacctggtacgcaacagcctcgaccacggtattgagaaaccggatgtccgcgcggcaaacggcaaaccggaagccgggacactgaccctggcggcggaacatcagagcggcaatatctgcattgaagtgcgggatgacggtgccggtctgaaccgggagcggatcctggccaaggcccgccagcagggcatggatgtgcacgacaacatgaccaacgatgaaatcgcgatgctgattatggcaccgggtttctccaccgccgaagtgatcactgatgtgtccggccgcggtgtgggtatggatgtggtgaaacggaatattcaggacatgggcggccgtattcagattggtttcaccgaggggcgcggcacagtgacccgcattctgctgccgctgaccctggctatccttgacggcatgtccgtcaaagtggcggacgatgtctttattgtgccgctcagcgccattatcagcacactccagccgcgtcaggaagacatttaccgccttgccggtgaggaaaaaatgctgctggtgcgcggcgaatatctgccgctggtggaaatgcatcaggtcttcggtatcgaagaagcggagcgtgatctggcgaaaagtatcgccctgattgttcagaacgccggtaaccgttacgccctgctggttgacagactgatcggacagcagcaggtggtggtgaaaaatgttgaaagtaattaccgcaaaattccggggatctctgccgccaccattatgggcgacggttctgtcgcactgattattgatgtggcggaactgcagcggatgaacaacgaaattttgtgcaaaaagaaaatgaacacgtcacacgtcgtgatgcaataa

SEQ ID NO: 275425 - DNA, 1002 bp, Morganella morganii
atgaaaccgggcaatacgcatgttatccgcgtcaaaaagcggggtggtcacgggcacggcggcggacacggcgggtcatggaagattgcttacgctgactttatgaccgccatgatggcgttcttcctggtgatgtggctgatttctatctccagcccgcaggagctgactcagattgcggaatacttccgcacgccgctgaaaacagcgatcaacccgggaacaaaaaccggggatgccactaacccgattccgggcggcggcaaagacatcatttataaagacggtgacacactgccggacccggacagtatgcaggacgagcagggacaggatgaagccggtcgttttgagaaactgaaacaggacctggagcaggcgattctcaaagacccgcgtctgaatgaactgaagccgcatctgctgattgataccaccgatgacgggctgcggatccagattgtcgacagtgccaaccgcccgatgtttatggtcggctccactcatgttgagccgtatatgcgggacattctgcgggctatcgcaccgatcctcaatgacgtgccgaaccgtatcagtatttccggtcacacggatgacctgccgtatgccaacggcggtaattacagcaactgggaactgtctgccgaacgcgccaatgcctcgcgccgtgaactggtgcgcggtggtatggccgagaacaaaattctgcgggtggtcgggatggcatcttccatccatctggataaaaaggacggacttgcgccggtgaaccgccgtatcagcatcatcgttctgaatgagtcggagatggcaaatattctccatgaatatgaaggggctgttcccattaccgatttacagcagctgaagcagttaccagcgccgcatacagagacaccggctccgccggagatcccgccggaaagggtgccggaaccggcgacaccggagcagacaccgccgcagaacagcgctgcggcggcggatacaacacaataa

SEQ ID NO: 275426 - DNA, 888 bp, Morganella morganii
gtgttaatactcatcggatacatcattgttacgggcacggtcatcggcggctatctgatggttggcggccatatgggcgcactttatcaacccgctgaatttgttattattttaggtgccggttttggtgcatttgtcgtcggtaacagcggaaaatccattgttgccctgggtaaagtcctgccgcgtctgttccggcgctcctcctacaacaaagcgatgtcaatggatctgatggcgctgttgttccagttactcaataaatcccgccagcaggggctgcttgctctggaaaaagatatcgaaaatccgcaggaaagcgatattttttcccagtacccgcgcattctcaaagatccggctgcactgatgttcctggtggattatctgcgtctgatgatcaccagtaacctgcaaagtcacgaaattgaagccctgatggatgaagaactggaaaccttccgtcaggagagcgaagtgccggcttccggcctgaatatggtcggggattccatgccggcattcggtattgttgccgccgttctcggggtggttaatgcgctgggttctgctgaccgtccggccggtgagctgggggcgctgattgcgcatgcgatggtcgggacattcctcggtattctcgttgcgtatggttttattttgccgctggcgtcactgatccgcctgcgcagcggtgaacagctgaaaatgctggaatgtatcaaagtcactttcctttcatccttacagggttatccgccgcaaatcgcggttgaattcggacgtaaagtcctgttcagcgccgaccgtccgtcctttaccgagctggaagacaaagtccgtgaagtaaaagtcagccaccgtaccgaagcacaggacggggagtag

SEQ ID NO: 275427 - DNA, 582 bp, Morganella morganii
atggccgaaaaaagtatcatcaaagaggctcaggatatccgtctcgcgatggaattaatctctctgggtgctcgtcttcagatgttggaaagcgaaacgcaaatcagccgcggacgcctgatccgcctctacaaagagttgcgcggatgtccgcccccgaaaggcatgctgccgttttccaccgactggtttatgacgtgggaacaaaatattcacgcctccatgttttataacgcctacgagtttctgatgaacagcggacagtgcaccggtgttgatgtgatagtaaaggcttaccggctgtacctggagcagtgtcctccggcgcccggtgaagagccgctgctggcactgacccgcgcctggacactggtgcgttttgtggagagcggaatgcttcagcgctcggtctgcagttgctgcagcgggtcatttgtcacctacgcgcacatccctgaaaacagttttacctgcagtttgtgccagccgccgtcacgggcaataaaaaaacgtaaactttccgcgcttcccgccgatattacgctatatcgagaggatggcattgccaaagcggtaatgtga

SEQ ID NO: 275428 - DNA, 354 bp, Morganella morganii
atgagccagacgactgattttctgaagcatatttatgatattaacctctcatacctgctgttagctcaaaaacttattgctcaggaaaaagcttctgccatgttccgcttaggcattaacgatgcaatggcaactacgttagcaaaccttacgctctctcaattggtcaaattagcggaaaccaaccagctaatctgtcagttcagatttgaaagcagcgaaaccattgaaaaactcacacgcgattcccgcgtggatgaattacaacaggttcataccggaattttactgtcaacccgtctgctgcaaacgcacggcgcggctggcactgactcacacgcaagaaaaagataa

SEQ ID NO: 275429 - DNA, 696 bp, Morganella morganii
atgtttgcaattccttatttactcaatttactggcggcgctggcactcggcgccctgattggtgcggagcgccagtggcgtcagaggatggcaggcctgcgcaccaatgcgctggtggctgtaggtgccgctgtatttatcttaagttcggtgaccacatcaccggacagcccgggacggatagccgcacaggtggtttccggcatcggttttctcggggccggcgttattatgcgtgaaggtatgaatatccgcgggctgaataccgccgcgacattatggtgctcagccggtataggtgtgctgtgcgggctgggagaatttggcccggcagtgacggcggcactggttatcttatgtgccaatattttgctgcgggaagccgcgcagcgcatcaatgcccggccggtcattcacgccacggacctggtgcaggactataaaatccgtgccgtttgtcatgaaaaagatgaaattctggtcagaaccgtgatccttcaggcgctgaatggttcacatgtccggctgcattcactcagcagtgcagatacaaccggcggaaaactggaggtttgtgcggaagtgcgtgccacaccggcagagcagaaggagatagaaggcattgtttgccgggtcagtctggagagaagtgtcagtgcggttaactggatgattgcctctgaactgccggtctga

SEQ ID NO: 275430 - DNA, 174 bp, Morganella morganii
atggcgggcagcacctttcctgcggtactgcacttttttattgatacagatgatctgccggttcccggtcgtatcactgctacaggtatgcagtatgtttattgtttctcacgcactctttcctcctggttactgagcagaattttcagtcatttttattttttctgctgttaa

SEQ ID NO: 275431 - DNA, 195 bp, Morganella morganii
atgcagattgacgacacagtttatgtcaaaaccgatgcggatgagccgcgtgaaggccggatattgctgatagaaccgttcagtgaaggtgtgatgtatctggtggcgttaccggaatatccggaggggatttggttttttaatgaaaaagagggcggggatggtgtattcatcacgccgaaaaataatttctga

SEQ ID NO: 275432 - DNA, 213 bp, Morganella morganii
atgtctgacaaaatgaaaggtcaagttaagtggttcaacgaatctaaaggctttggtttcatcactccagctgatggcagcaaagatgttttcgttcacttctctgccattcagggcgcaggtttcaaaaccctgggcgaaggccaacaagtagaattcaccatcgagaatggtgctaaaggcccggctgcagctaacgtaactccgctgtaa

SEQ ID NO: 275433 - DNA, 510 bp, Morganella morganii
atggatgtcgtcagaacacttatcaccggcgctcttgataatatcaaccagcgtgagaagcgggacggaaaaccccgtctcagcagtcattttatccgcacctatccttatttatgtctggcgatggtggtgtcctatcttgttctgggtgttcttatttattatgcaccctacttcggcttttactggctgctcggtttcagtgccctgttcctggtaatggctgcggttctgctgtttgaagtcagaccggtttaccgctttacggatatcggcgtgctggatctgcgggtgtgctataacggcgaatggtttgtcagtgaagttgtgcccccggaaaccctggcggcgttacttgaccacccgcaggtcagtgatgcactgaaacaggagatccgccatatgacagaaacaaaaggtaccgtgtcattttatgatctgcatctgatggcgtacccggaagcgcatccggaaaaaccgcgctcccactggatgaaaggtgcggcttaa

SEQ ID NO: 275434 - DNA, 303 bp, Morganella morganii
atgggaaagtcactcagacaactgctggctgaggaaaagccggaagtcgcggctgctgcacgggttcaggcggatgagatcctgctgaatatccatctggcggagctgcgggagaaagtgaagaaaacacaggtggaaatggcgcaggcactgggaataaaacagccgacagtcgcagggatggaaaaaccggggcgtgatgtcaaattatccacgctgagacgctatgtggatgccatcggcggaaaactgaatattgatgttgaactgccggacggcacgcattatatgttccgggtctga

SEQ ID NO: 275435 - DNA, 354 bp, Morganella morganii
gtgtggaagatagtcacaacagataattttacagtgtggtttgctgagcaggatgacggagatcgcgcagcaatactggcagcgatgctggtattggagaagcggggacccggcttaccaaggccgtatgcggatactgtaaaaggttcccggtatacgaatatgaaagagcttcgtatacagagcaggggacaaccgatacgggcattttttgcattcgaccctgagagaagaggcgttttgctgtgcgcggggtataaaaccggcaaagaaaaacgtttttatatgcagatgatcccgcaggctgaccgtgagtatacagaatggctgaacaggccggaaaacaggagttaa

SEQ ID NO: 275436 - DNA, 1053 bp, Morganella morganii
atgactcatcctgttacttccctgaaaatccgccgccctgacgactggcatatccatttccgtgatggtgcgatgctcggcactgttgtgcctttcaccagtgaatttttcgggcgcgccattgtgatgcctaacctggttccgccggtcaccaccaccgatgccgccattgcgtaccgcgaacgcattctggccgccgtaccgcaggggcacagtttcaccccgctgatgacctgctatctgaccgataacgcagacccggctgagattgaacgcggtttccgcgaaggtgtgtttaccgcctgtaaactgtatccggcgaatgcgaccaccaactccgcacatggcgtgtcagatatccgcaatatttatccggtgctggagatgatgtcccgcaatggtatgccgctgctggtacacggtgaagtgacacacgccgatattgatattttcgaccgcgaagcccgttttattgatgatgtgatgatcccgctgcgccgtgatttcccggcactgaaagtggtgttcgagcatatcaccaccaaagaagctgctcagtatgtgctggacggggatgataatgtcgccgccacactgacaccgcagcatctgatgtttaaccgcaaccatatgctggtcggcggtgtgcgtccgcatctgttctgtctgccgatcctgaaacgtaatgtgcatcaggaagcactgcgtcaggcagttgcaggcggctgcaaacggttcttcctcggcacggacagcgccccgcatgcccgtcaccgcaaagagtcctcctgcggctgtgccggggtgttcaatgccccgactgcgctggccgcctatgccacggtatttgaggagctgaacgcgctggagcactttgaggcattctgttcactgaacggccctgcgttttatggtctgccggtcaatgacggctttatcgaattaacccgtcaggaagtcatcaccccggaaaccattaacggtacagaggatattttagtgcctttcctggccggaactgatgcccgctgggatgttaaaatctgtcgttaa

SEQ ID NO: 275437 - DNA, 258 bp, Morganella morganii
atgaacgataaaaaagccgtgatccagactcatccggttatcggatgggatatcagtaccgtcgacagttacgacgccatgatgctgcgcctgcattatctgcaggatcagtcccagtctcccgaacatgcagaagtggataaaactatgtggctgacgactgatgtcgcccgccagttgattgacatacttcaggccggtatcgataaaattgaatccggtgaatattataatcagtcagacaatatcagacactga

SEQ ID NO: 275438 - DNA, 3090 bp, Morganella morganii
gtgtacaacatggctaagtcaacaagacgtcagtggttaaaagcaggtttggcgatcggcggactggcagcgttcggttacagttaccgcgatgtggcgaaacgcgccgtcgacgggctgatgaacggtacttccggtaaagtgactctgcaccgcattaacggtaactcgctgatcccggaagggaatgccctgaaaggctggcaggcggaaaacgcacaggcggtatcgatgacccagtgcttcggctgctggacccagtgcgggatccgtgcccgtgttgaccgcgaaaccaatcaggtgatccgcattgccggtaacccgtatcatccgctctctcacgaccaccatatcgcctataacacgccgctggcggaagccctgaaaaatatgggcggtgaaagcggcctggaaggacgttccaccgcctgtgcccgtggcgcaacactgatggaagggctgcacagcccgctgcgtattctggagccgatgaaacgcgccggtaaacgcggcgaaggcaaatggcagcgcatcagttttgaacagctgattaaagaagtgacggaaggcggtgatctgttcggcgaaggtcatgtggacgggctgcgtgctatccgcgacctcgatacgctgattgacccggcacagcctgctctcggcccggtggcaaaccagttactggtgaccaacgccggggatgacgggcgtgatacctttatccgccgttttgcccagaatgccttcggcagcaaaaacttcggtgcgcacggctcgtactgcggactggcctaccgcgccggttccggtgcgctgatgaacgatctggataaaaacgcccacgtcaaaccggactgggattatgtgaagtttgccctcttcctcggcacctctccggcacagtccggtaacccgttcaaacgccaggggcgtcagctggctaatgcacggatccgcgacagctttaactatgcagtggtttctccggcactgccgctgaccaccacacttgccaatgatcacggacactggatcccaatcacaccgggtaccgattccgcgctggtcatggggatgatccgctggatgattgagaataaccgctataacgcggagtatctcgccgttccgggggaagcctccatgaagcgtgtcggtgagagcagccggacaaacgccacgcatctcgtgatcactgatgatacacatccgctggccggtcagcatctgacagccgaagccctgagcggacaaacatccgaagagcctgtgtatatggtgctgacagagcagggtgagctggttccggcggacaattgtgaccgtgcggtacttgaagtcagtcaaccggtcacgctggcagacggcaccacggtgaatctgaagagcagtttcctgctgctgaaagagtccgcacaacgttttaccccggcagaatacagcgcccgctgcggtgtgccggaagaaacgattgccgcactggcgaaaacactgacctcatacggccgtcaggcggcggtcatttcgcacggcgggatgatgtccggtaacggattctataacgcctgggcggtgatcatgctcaatgcgctgatcggtaacatgaacctgaaaggcggtgtgtctgtcggcggcggcaagtttaacggtgccaatgacgggccgtgctacaaaatggacagcttcccgggcaaagtgaagccgaaaggcatgaacctggcgcgcagtaagtcggtctatgaaaaatccgatgaatacaaaaacaaggtttctgccggtcagaacccgtatccggccaaagcaccgtggtatccgctggcagccggtcagctgaccgagcagctcggctctgcactggaagggtatccgcacaagctgaaagcctggatcaccaatatgaccaacccgctgtacggtattgcggggatccgtcaggtgatggaagagaaactgaaagacccggcgcatctgccgctgattatcggtatcgatgcctttatgaatgaaaccaccgcgctggcagattacattgtgccggatacccacaactttgaaagctggggattcagtgcgccgtggtccggtgtgcagaccaaagccaccaccgcccgctggccggttgttgcgccgcgtgtggcaaaaacagcggatggtcagccggtagcgatggaatccttctgtattgcagtggcaaaagccctgaatctgccgggattcggtgataatgctatcgcggataatgacggtaacacttatccgctgaatacggcggaggattactatctgcgtgtggctgccaatactgcctttatgggtgaaaaaccggggccggaagccaaagaggcagatatccgtctgtccggggtggatcgcattatgcctgtcatgcagcaggtactgaaagcagaggaaatcagccgtgttgcttatctcttcagccgcggcggccgttttgcgccgtatgaaaaaggctgggacggggataaaaccgggccgcagtggaaacagccgctgcagatctggaacgcggaagtggcacagaaccgtcatgccatcaccggcgagcgtttcagcgggtgtccggcctattatccgccgcgcctgtctgacggcagcgatattgaccgcgtctatccggcggaaagctggccgctgaaactgatgtcctttaaatcccatgtgatgagcagttcaaccaccatgattgagcgtctgcaccatgtgaaaccgtcaaacctggtggcgatcaacccggcggacggcgagaagttcggtgtgcagcacggggatctggtacgtatcaccacgccgggcggcagtgtcgaagcgcagatcagcctgctgaccggtgtgatgccgggtgtggtggcgattgaacacggttacggacatcacgaaatgggtgcgcgtcagcactatcttgacggcgaagcgctggcgatggataaacgcatcgcatccggcattaatatcaacgacctcggctttgctgacccgacccgtcaggtggctaacacctggctggactgggtaaccggagcgtctgtgcggcagggactgccggcgaaagtggaacggatttccgcagcctga

SEQ ID NO: 275439 - DNA, 1065 bp, Morganella morganii
atgactgaacaaacaatgttaattcaggaagtgctggcccggccgcaggaaatcacctggctgccgtgggcggtgcaatacttctttatgatagggatcgccgcctgtgcagccctgtacgcctgctggcagcgctggcggggagacaaacgggatgcccgcctcgagatgctcgcggtctttatcagcatcaccctcgggatcgccgcgccgatggcactgacagcggatctgcatcagaccgcccgtgtctggcatttctatgcttatccgacgccgtggtcgtggatgccgtggggtgctctgttcctgcctgtatttaccggctgtatcggtctctatttcctggcgctggtggcggacaaaatctggcacaagcaattcaaactgacccgctgggtggcactcggcagtgctgcatttgccatcggactgctgctgtataccggccgtgaggtgtctgtggtgcgtgcgcatccgatctggttcagttactggatcccggtgctgctctttttcagtgcattacaggcactacctgccctgatgctgctgggtgcccgccgtgagccgcaatatcaggtgcaactggcgcgcttgcaggtggtttcgttactgctgctggcggtatgcatgggcttctggatcgccggtgacaccatttccggtgccgctatccgcgcacagttccgtttcggcacaaccgggtggactctggcgatgggtgaaatagttctgtggattgccctgatagtgctggccgtccgtctgctgacccggcgcggctcagtagcgtatatcaccgttcatacgctgctgacactgttcctgacctggtcgttgcgctggctgctgctgatgcaggtacagactctgccgaaatacaatgtcatgcacaatccgtacagcctgccgatgggcacggatggtattcaggccattatcggcacaattggtttatggatagctctggtgattatattccgtgaaggtatccgctgggttaataacaaagtacagaatcaacagaaagtcgcgcaggacgggggtgtacaacatggctaa

SEQ ID NO: 275440 - DNA, 738 bp, Morganella morganii
atggatcttggcaaacgaaaatttctgcaaaacctgggcgtcctgacagcaggtacggccctggttccgatggcggaggcaggcctgcatttttcgccgacccgccgtgaaggcgacccgtcaaagcgctacggtatgctgattgatttacgccgctgtgtcggctgtcagtcctgtaccgtcagctgttctgttgaaaaccagagcccgcaggggcagttccgcaccagtgtcagccagtatcagattcagatccgcaatgaagaggcgaccactaacgtgcttctgccgcgtctgtgcaaccattgtgataacccgccgtgtgtgccggtatgtccggtgcaggccactttccagcgcgaagacggtattgtggtggtggataacacccgttgtgtcggctgtgcctattgtgtgcaggcctgtccgtacgatgcccgctttattaaccacagcacacagaccgcagataaatgcaccttctgtgcccaccgtctggaagcggggctgttaccggcctgtgtggaatcctgtgtcggcggcgcacgtattatcggtgacctgaaagatccgtccggcaccatcagcaaaatgctcagagagcatgaagccgcgattaaagtgctgaaaccggaaaatggcacactgccgcaggtgttctatctgggactggatgaggttttcgttcatccgctggaaaaccgcggacagcccgcattatggcaggagatccactga

SEQ ID NO: 275441 - DNA, 1749 bp, Morganella morganii
atggccgcacgcacatgtttgctgaccgcactgttatttttcacctctttttcatttgccgcacagtggactatcggtgtgctggcactgcggggggatgcgccgacacgtcattactgggagccgctgacagagcagctcaaccgcgccctgcccggcgaacacttcaccctgctgccgctgacactggatcagatgcgggaagcgctgcacaataacgagattcagtttgtcctcaccaatccggcgcagtttatccagctggacagcaactttcccctgcgctggctggtctccctgcgttcggcttatgagccggataacgccacccgcaatgtgatcggcagtgtgctgctggtgcgcaaagagagcccttatcagaccccggcggatctgaccggtaaaaaagtcggggcggtcgcgccggatgccttcggcggctatttattaggctataaagcattgcgtgatgcgggtatcgacccgccgcgtgattaccatcttcagttctcgggttttccggccgatgccctgctttatctgctgcgggataaggcgatttccggtgcgattgtcccggcctgcctgattgaatccatggataaagagggactcattcaccaggatgatttccggccgctgatccggcatgacagcaccattccctgctggaccagcagcgaattatacccgaactggtcatttgcggcgggcagcggtgtgccggacgaactggcggatgaagtcacccgggtgctgcttaacagccacggcgaaaaaaccatgcgctggggtgcgccgtcatccacccgccaggtggaaaatctgctgagggaggtcaatcagcacccgcagcagcgtcagttctggcaggaaattatcagctggagccggaaaaacagctggctgttaggctcggttgctctggtttttctgcttctcggtatcaatcatgtgtggattgctttccgggtacgccgccgcacccgccagctggaagccgctcattcacagttacagcgccagcagcaggatctggaaaaagcccggcaactgagtgtgctcggggagatggcctccggttttgcacatgagctgaatcagccgctatccgctatccgtcattacgcccggggctcgcaaatccggctggagcgggaagatcccgcgcatcccctgctgccggtcatgtcgcagattgacagccaggccgaacgcggtgccagtattatccgcaacctgcggctgtgggcagggaacagcccgtcctctccggaaggcgcgcctgtgccgcagaatgtggcggcggtaccggaactggtctggaaactgctgcgggttgcggaacgatatccttctgcggttttatataacacggtcgcccatgatgccgtattacatttaccgccggcactgctggatcaggtgctttccaacctgttcagtaacagtttgcaggccggggcggactgcatccgtgtgatgcatcaccacacccccggcggacagattctggtggtgcaggataacggcggcgggatggatgaaacgcagctgacacaaccttttgccccgttccgctccaccaggtccgaaggactcgggctcgggctggtgatctgccagcgcctgatgcgcagccagggtggtgatattcatatggaaaattgttccggcccggacgaacagcccggcttatgtgttacccttatcttcagtgaaccgacaaaggaatccccatgcccgtga
